United States Patent Application Publication US 2017/0009304 A1 - sequence listing, part 6

SEQ ID NO: 107561 - DNA, 100 bp, Homo sapiens
ggatgcacaagttccaaggttacgtttcagaccctttagatcctacaagatcagtgattgtgatccgctccctggtagcagatggtgtagcagaaagaag

SEQ ID NO: 107562 - DNA, 100 bp, Homo sapiens
acctctaacacagtggaaaggaaccgttctggatcaggacatttattcagaacagctggggatcaaccgtttaacctgtccacagtgtcgagtgccttcc

SEQ ID NO: 107563 - DNA, 100 bp, Homo sapiens
ggatttgttaaggattccaagtaactcttatttggtggctgcagtccgagaagggatgtcctggattgttcctgtgccgctgctgtccctcctcacagca

SEQ ID NO: 107564 - DNA, 83 bp, Homo sapiens
ccttcatccgtcacatcgccctgctgggctttgagaagcgcttcgtacccagccagcactatctctttgagtccagatgttga

SEQ ID NO: 107565 - DNA, 100 bp, Homo sapiens
gcactggaggaagcacaccctgtcctatgtggacgttggcactgggaagaactgggcacctccgggctgtgaaaagttagggaagtgtctgacacctcca

SEQ ID NO: 107566 - DNA, 82 bp, Homo sapiens
ctgcaccccaccttgatccagcggacttacggctaggtggaaaatttgcagccagaaataaaaactattgccaggcatctta

SEQ ID NO: 107567 - DNA, 95 bp, Homo sapiens
cgctgaccccgtggtgatgggcaagaccaaagccgaacagttttactgtggcgacactgaagggaaaaaggctacaaccagatcctcatagttcc

SEQ ID NO: 107568 - DNA, 78 bp, Homo sapiens
ggaaaagcaacgtggggcattccagggtaaaatccagtacaaggaatatatcattgaaggatttgaaaacatgccagc

SEQ ID NO: 107569 - DNA, 76 bp, Homo sapiens
caaagatgaagaaacagaagatgtcttagcttctaatgggtgaaatcaaatacattgcccatctcgctgcagtcta

SEQ ID NO: 107570 - DNA, 100 bp, Homo sapiens
ggctgcctataatcaagtaaaaacaatagctcaaggaaacctttccaacacagatgtccaagctgccaagaacagattatggcctttgcaagcaaatgag

SEQ ID NO: 107571 - DNA, 100 bp, Homo sapiens
agagctgggttctattttccctcctcaaactgactttgcagccacggagaggagtcttaccgccagataatgaagatgcgaccgaaagacttgaaaaaac

SEQ ID NO: 107572 - DNA, 82 bp, Homo sapiens
ctgggtgttcgacagctacagcctgacaggggagctggtgactgccctcatgtgtgatttgcggcggccagcggcaggtggg

SEQ ID NO: 107573 - DNA, 75 bp, Homo sapiens
aaaacagccaccttcagtatctcagtcctccagtgtttggatattcagccgttggacataccagatggtcgaaga

SEQ ID NO: 107574 - DNA, 75 bp, Homo sapiens
gttggggtgtgagaggttttctcgctctaggtggagccgccaccaaaatgcagattttcgtgaaaacccttacgg

SEQ ID NO: 107575 - DNA, 75 bp, Homo sapiens
atctggaagcggatcgcgtggagtgacggtcacaccgcggcggtatctcattcagttgctaaacttatattagtt

SEQ ID NO: 107576 - DNA, 101 bp, Homo sapiens
gggctgaggaaccatgtctccatccccgaccgccctcttctgtcttgatcttctggtgaccccacttctcgctgctcatgccgctgggactggggcggcgg

SEQ ID NO: 107577 - DNA, 82 bp, Homo sapiens
cgcagctgcgggtccgggattcccagccatggcagattcctccgggcagcagggagtgtggccatctggggccgtgtggtat

SEQ ID NO: 107578 - DNA, 84 bp, Homo sapiens
cgccatgtcgggttattcgagtgaccgagaccgcggccgggaccgagggctgacccagctggatgttgacagccacctggccca

SEQ ID NO: 107579 - DNA, 98 bp, Homo sapiens
agaggcttgcccgatcctcggccatgtcactgctctgcgtgcgcgcatgcagccagtaaagatcccagagaagttcgagaagctagagatcataagga

SEQ ID NO: 107580 - DNA, 114 bp, Homo sapiens
tacattgacaagaaatgccccttcactggtaatgtgtccattcgagggcggatcctctctggctgaagaactgaaactggccacccagctgaccggaccggtcatgcccgtccg

SEQ ID NO: 107581 - DNA, 74 bp, Homo sapiens
tactatgtgaagatacaagacacaaatgtaacttctgaggacaaaaagcctgatctagttgaatctgaagatgt

SEQ ID NO: 107582 - DNA, 82 bp, Homo sapiens
agcagcgccgtcccgtccgacagccaggcccgggagaaccttcaaatgtttatctggtgtgactgtattatgccctcagaga

SEQ ID NO: 107583 - DNA, 73 bp, Homo sapiens
taagcactattattcatgaggcaaatgaggaacagggcaatagtatgatgaagtggtccaaaggcaaagttcg

SEQ ID NO: 107584 - DNA, 100 bp, Homo sapiens
ataaaactccagcgagatccgggccgtgaacgaaagcagtgacggaggagcttgtaccaccggatggtcgtctgcgaatgaatgaccagctgattgcagt

SEQ ID NO: 107585 - DNA, 75 bp, Homo sapiens
aagcccactgacgctccaccgaaaggcatcagaaccaatgtggtgaccatgcccactgcccacccaagaatagcc

SEQ ID NO: 107586 - DNA, 90 bp, Homo sapiens
gcaaaagagaggttctctcccctcactaccaatctgatcaaggagaaggcagagcccccccaggctatgaatgccctgatgcggttgaac

SEQ ID NO: 107587 - DNA, 83 bp, Homo sapiens
cgcacattaccattaaccagtacctgcagcagacctgcaaatccaagagacacatctttggaagataagagagcttcttcaag

SEQ ID NO: 107588 - DNA, 96 bp, Homo sapiens
ccatgtgtgccacctgtgccatccaaactgcacctacgggaaatctactttcttcaatgtgttaaccaatagtcaggcttcagcagaaaacttccc

SEQ ID NO: 107589 - DNA, 75 bp, Homo sapiens
cagtcattttactgtcaagacatttcttcggcattctgcaacagggaggcttgtggatcagaatctgaacaaaat

SEQ ID NO: 107590 - DNA, 98 bp, Homo sapiens
tgggacatttcatgagtcattcaagcaacatttctaagctctgaaatcacatgaagctgtggatggagagtcacctgatagtcccagaaacccgtccc

SEQ ID NO: 107591 - DNA, 80 bp, Homo sapiens
gattccaagtaactcttatttgagaaaatattctctttggaatgggaaatcctctgcttgacatctctgctgtagtggac

SEQ ID NO: 107592 - DNA, 80 bp, Homo sapiens
caggaatgggacctcgagtcactgtggtatccagtagaaaaagcactctccagtgttcatctgtggaactggatggttcc

SEQ ID NO: 107593 - DNA, 101 bp, Homo sapiens
ttagctcagcaattcttaccttgtccaggggcaagttcatcctactctcgagtctaatgatgatgctcttcagtatgttgaagaattaattttgcaattat

SEQ ID NO: 107594 - DNA, 74 bp, Homo sapiens
tttgccagacattactacttcctaggcagaatgcttggaaagattaaggtcaccgttgcaggcctggctggaaa

SEQ ID NO: 107595 - DNA, 101 bp, Homo sapiens
aagaggctgatccaagcaattttgccaacttcagtgctcctgctcaggaagaactcagagaagatccagattttgaaattaaggaaggagaaggacttgaa

SEQ ID NO: 107596 - DNA, 100 bp, Homo sapiens
gttcagtcaggacgtctacctgtccaccattgtgaccgagaaacaaatcattgtggaccccttgagcttcagcgaggagcgctttaggccttccctggag

SEQ ID NO: 107597 - DNA, 83 bp, Homo sapiens
gaatttgagaaggaaaacgtagttcccagctacttttatataatgtccttttggaataaatcatgggattgagcttcattcag

SEQ ID NO: 107598 - DNA, 100 bp, Homo sapiens
gcgtcttgttgccgctggggcgcgcagcacgccggggcccgcgagctggctgcgctctactcgccagttgacattcgtgaaattaaggagatccgcccag

SEQ ID NO: 107599 - DNA, 100 bp, Homo sapiens
ataaattgcagaagttacttattcttttaagaggtctgcctggttctgggaaaacaacattgtctcggcaccaccttccatggtcaataatgaacaacgc

SEQ ID NO: 107600 - DNA, 90 bp, Homo sapiens
atttgacacagtggatctctgtgccacatgggagaatcagcacttcttgaaggagactcctggaagcaaccagatcattccgtcaccttc

SEQ ID NO: 107601 - DNA, 82 bp, Homo sapiens
cccagatcggccagtccgagcgtgccggacacagccaggctgaccccgcactacatctacccaccagccatcgtgcagccca

SEQ ID NO: 107602 - DNA, 51 bp, Homo sapiens
cccccggagccgcgagcacccaaggtcaaaaggctgagtttcaaattctgg

SEQ ID NO: 107603 - DNA, 98 bp, Homo sapiens
gaaaacttgctgcggttgctcaaggtgtcatggagaaactccagctgggcccagagattctgcagcgggaaaatccaaggcttatttatgccaggctg

SEQ ID NO: 107604 - DNA, 50 bp, Homo sapiens
cactgctacaggactctactatggaggtacatctccgttcatggatgcat

SEQ ID NO: 107605 - DNA, 74 bp, Homo sapiens
gctattggaaagatctcggaaaatggcatttattaatacagcaaaagaaatttatgaaaaaattcaagaaggag

SEQ ID NO: 107606 - DNA, 90 bp, Homo sapiens
gaaggatgcacaagttccaaggttacgtttcaaaaagaggcacagttagatgaagaaggacagtttcttgtcagaataatatatgatgac

SEQ ID NO: 107607 - DNA, 95 bp, Homo sapiens
agcaaagtgaacacaacgtgtgccaaggtcacgcaatatttaaactcacgtatctaagcaatcacgactataaacacctctactttgaatcggac

SEQ ID NO: 107608 - DNA, 74 bp, Homo sapiens
tgcaatcatgggtcaccaagagaggctgagagaccaggtattgactttgccactcgtaaaatagccaagttgct

SEQ ID NO: 107609 - DNA, 75 bp, Homo sapiens
tggaggtggaggagtccaactcagaggacgaggcctccttcaagtccgaggctttatcctgtggataaacgcaga

SEQ ID NO: 107610 - DNA, 100 bp, Homo sapiens
atactgctgtatctatgctataaggttacacaaaacttccttttaaatggtttgactacctcagggaaactggctccattgcagcaccagtaaaactatt

SEQ ID NO: 107611 - DNA, 97 bp, Homo sapiens
gattcgcagtggtcgcttcttctccttggagaatgagatcctgactgaacaggaggagctcctggccatggagcagtttctgcgccggcagattgcc

SEQ ID NO: 107612 - DNA, 75 bp, Homo sapiens
catttgaggttgagggaaaccaccgaaacacaagagtaagaccttttaagatctaaattgaactcaacattttac

SEQ ID NO: 107613 - DNA, 75 bp, Homo sapiens
cttgggcaaaatatatgccatgaaagtcctaaggaaggcagccaacatgcctgactctgagctattcgagctcat

SEQ ID NO: 107614 - DNA, 100 bp, Homo sapiens
cactgaagacatgctccggggcatctttgagccctttggtaaaatggccgccctgctcccccaatgaaaggccagcttcgaagaaaagctgaaagggaga

SEQ ID NO: 107615 - DNA, 100 bp, Homo sapiens
caaaaacttattccgacattcagagttgtttcctccatttgctaaaggaatagtgtttggacatctgtgttaaggcttatctagcccttcgtcatcacac

SEQ ID NO: 107616 - DNA, 101 bp, Homo sapiens
aggctcgcctcgactccaaatggttgaaaacagatatacaggctgaagccgacgtagcttctctgaacagacgcatccagctggttgaggaagagttggat

SEQ ID NO: 107617 - DNA, 83 bp, Homo sapiens
gggtcactcttgccggccggcttcgctgcgggtttgcactgcccgggtgacttaagagattaaaattaatttggttgctgttg

SEQ ID NO: 107618 - DNA, 100 bp, Homo sapiens
cgcccctggcccggcgcgcccgtccccggcagcgacaatgagaagggtcatgtctcccacccacaaattaaccaaaggctaaagggcctaagtgaccgtt

SEQ ID NO: 107619 - DNA, 87 bp, Homo sapiens
ccagcttctgctgtccttctttgtggagagcaaggtgtgtgatgagattaagagcaagcttgcctccctgaaggacgttcccagccg

SEQ ID NO: 107620 - DNA, 97 bp, Homo sapiens
gacaatatatgcagccaacaaggcgtcaccttaaggtaaaaatgcatttgcaaagggagaaaatgaaggccaaacagaagcaggctccagcttctgc

SEQ ID NO: 107621 - DNA, 75 bp, Homo sapiens
tgctatggaagctgaaatactgaaagaaattcgagaagctgcaaatgccagcccatgggacgtgcatgtgcacag

SEQ ID NO: 107622 - DNA, 75 bp, Homo sapiens
tgatatccttctcaaccttgtgggatgtgaaaactctgttactgaagattttcagctgaactctcatctctcaac

SEQ ID NO: 107623 - DNA, 80 bp, Homo sapiens
aggagtcatcggacgccagaatctggattctgcatgtttgtactgagtctggtcaagaagcattatcgactgcagttcta

SEQ ID NO: 107624 - DNA, 75 bp, Homo sapiens
aagccctggaccaaaacgctggagaacaaacactcgccctctaccaggtgaattctccactttaccaatacttac

SEQ ID NO: 107625 - DNA, 90 bp, Homo sapiens
ggacattgtggcaatcatcctgaatgaatttagagccaaactgtccaaggctttggcagtatgatctcgtgaaaccttgagagaaactga

SEQ ID NO: 107626 - DNA, 100 bp, Homo sapiens
tctgtgaggtcgaaacaggataaaattttgggtggagagattcaaccagttagcgtgaaagttggagataaagttcttctcccagaatatggaggcacca

SEQ ID NO: 107627 - DNA, 98 bp, Homo sapiens
aatcttcgacaagagctagaagataattccaatcatcttacaaaactggaaactgaggcatctaatatgaagggacgcgcatgaaatttggtgccgtg

SEQ ID NO: 107628 - DNA, 100 bp, Homo sapiens
ctccagggaaagcacagcctgcatgtgtcattacagcaagcagaagacttcatcctcccagacactacagagaaccattccccttgcaatatgtatatcc

SEQ ID NO: 107629 - DNA, 90 bp, Homo sapiens
gctctacccagtcccaggacgtggcgcgggtctccagtgcttcagtcaaaccggcacgatgtccaggcaccagaaccagaacaccatcca

SEQ ID NO: 107630 - DNA, 51 bp, Homo sapiens
ggatgctggattctaaaatttgaatgactaaaaacagcccttgtagaaaga

SEQ ID NO: 107631 - DNA, 83 bp, Homo sapiens
ccgggcaatcctgggggagcaaaggcctctactacgtggacagtgaagggaaccggatttcaggggccaccttctctgtaggt

SEQ ID NO: 107632 - DNA, 95 bp, Homo sapiens
tttgtcatctgcggactggacacggagaccgggctggagccggacgagctgtcgggttgaaactgatttctcaactccaacaccaagaaggaaaa

SEQ ID NO: 107633 - DNA, 98 bp, Homo sapiens
ccgggacccctactgtgcttggagcggctccagctgcaagcacgtcagcctctaccagcctcagctggccaccaggatgaagcctgctgggagcgtga

SEQ ID NO: 107634 - DNA, 101 bp, Homo sapiens
agaacctgcgggccatctaccagtgcttcgtgtggagcggcacggctgaggcccgcaagcgcaagaaaactgattgggaggtagctattaaaagtattaat

SEQ ID NO: 107635 - DNA, 90 bp, Homo sapiens
tttaaccccaaaatcagtgattctacatctcaagctcatattttgaagtgtttacggtctattatcctcccagtccacaacgctgaaccg

SEQ ID NO: 107636 - DNA, 101 bp, Homo sapiens
ggttccatcatggcgtcaatgcaggccgaatacatcaagcaatggtaacatctttaaatgaagataatgaaagtgtaactgttgaatggatagaaaatgga

SEQ ID NO: 107637 - DNA, 96 bp, Homo sapiens
tcggatttgggggcttcctcactcgtggctttccgaaggctgctggcaaaagatgtgattgaagagcatggtccttcagaaaaggcaataaacggc

SEQ ID NO: 107638 - DNA, 82 bp, Homo sapiens
gcagagccctgcctaaggtccagggctcgatctggccctaaccacagagtcaccttgaggccgagacgcatccagagctttc

SEQ ID NO: 107639 - DNA, 74 bp, Homo sapiens
gcaagctgcaccttgcatgagggacaaagctacacagcttgaaagatctaaccatgtgagccggacagaagtca

SEQ ID NO: 107640 - DNA, 100 bp, Homo sapiens
gttgagatgctagatcaaccactacccacgggtcagcgggtcacagaaagtcgagagagccaaatgacgattgaggagaggaagcagctcatcactgtga

SEQ ID NO: 107641 - DNA, 82 bp, Homo sapiens
gctttcgcatttgggaccctgcagggttttttattggcacctcagtctcaacattttcttttcggattcatgaggaaagaga

SEQ ID NO: 107642 - DNA, 86 bp, Homo sapiens
cgacgtcatcatgctgaccaccaatcagatccgtaagagacaagaggagcagcagcggcaccgcccctcaccctggagggtcctgt

SEQ ID NO: 107643 - DNA, 100 bp, Homo sapiens
tgcgcgcctgatgggtcgaggcggacgcgcggctgcgtcagtcattgaagtcaacaagagagacatagtcttcctggtggatggctcatctgcactggga

SEQ ID NO: 107644 - DNA, 83 bp, Homo sapiens
ggacaatggtcaccgtctcttcaggctgagcagtccaaagtcctgagcgccgtggaggaccgcatggacgagctgggtgctgg

SEQ ID NO: 107645 - DNA, 100 bp, Homo sapiens
gcaattacggccccgaggtgtgggaagacatcaagagacagtgtttcacaaaatgattttccttctgaagctcccatctccttgaatctttctcataaca

SEQ ID NO: 107646 - DNA, 75 bp, Homo sapiens
aacggagataaattcccggaaccgcgattcggcgtgtcaggaaataaacatgatgatggtacgcaaagtgattca

SEQ ID NO: 107647 - DNA, 74 bp, Homo sapiens
cttcgcctcgcctcgggacccgcggtccccgctcttgctgtgtatgggtttcgacagaccatgatgaaattgag

SEQ ID NO: 107648 - DNA, 96 bp, Homo sapiens
gaaaaagaggatacctctgcgatcccgggtcatctccagatgctagggttatgggtgcatgctattatgatgctaatcagtctatgtatgtgtttg

SEQ ID NO: 107649 - DNA, 75 bp, Homo sapiens
cccgggcgtggccgtgatacagttcgccgtcggggagcaccgagcccagagcctacaaatacatttggcaagtac

SEQ ID NO: 107650 - DNA, 90 bp, Homo sapiens
agctccgagaaattatgggtacccctgaatatgtggggtgatgactgtgccagctaccgccatctacttcactgcctatgaccaactgaa

SEQ ID NO: 107651 - DNA, 100 bp, Homo sapiens
gagcgccgctgcctcgcctcggtcgcctgcgaggccgctggccaggcctgagcctctgccaccatggccattgtgcagactctgccagtgccactggagc

SEQ ID NO: 107652 - DNA, 100 bp, Homo sapiens
gggggattctcgacctgctaacagaactggaccttttcggtagagttggctttgtgggacacagctgggcaggaagattatgatcgcctgaggcccctct

SEQ ID NO: 107653 - DNA, 144 bp, Homo sapiens
ggcaaggaggttggcttcttcatcatccgggccagccagagctccccaggggacttctccatctctgtcagagagacaagagagacacctccaacttcgacaaagagttcaccagacagcctgtggaactgacccccactgata

SEQ ID NO: 107654 - DNA, 75 bp, Homo sapiens
accctcacggagctgggcgacgagctgaccctgggagacatcgacgagcggagaacagccttgggagtcatcttt

SEQ ID NO: 107655 - DNA, 100 bp, Homo sapiens
caagacctaaaaaaccccaacaacagctcccttaggatggctttagatgacaagctctaccagagagacttagaagttgcactagctttatcagtgaagg

SEQ ID NO: 107656 - DNA, 83 bp, Homo sapiens
caccgagagggcgcctggaatgaagacggaagaaagtgccgggaagaaagaaaaccccgtccggaccatccgcaaaaagtaag

SEQ ID NO: 107657 - DNA, 100 bp, Homo sapiens
ctcaggttacttcttcctcaacaccagcaccgcagatgttgtcaaggtggcctaccaggaggccaggggtgtcgccatgcttatcacacagactttcagc

SEQ ID NO: 107658 - DNA, 100 bp, Homo sapiens
taggatttgcagctccaggaagcgagatgtcgaagccgccacccaaaccagtcaaaccagatgtggcaccatttattgagtttctgaaggccatacaaga

SEQ ID NO: 107659 - DNA, 75 bp, Homo sapiens
atggcaacatcaggtgactgtcccagaagtgaatcgcagcactggcctgtgtttgtggaggtgaaagaccttttg

SEQ ID NO: 107660 - DNA, 48 bp, Homo sapiens
ccagttttttaagaagggacaaaagatttgtgacccagaaggaaatct

SEQ ID NO: 107661 - DNA, 100 bp, Homo sapiens
ccgacggccctcagtctacctgcctacccgcgagtacccgtctgaacagaaccccttcgtcaaggtgtacctgctgcaggatgggaggaagatgagcaaa

SEQ ID NO: 107662 - DNA, 74 bp, Homo sapiens
cggaggctcgccgacgaccttggactcaatgatctttgaggatgtggctgtgaactttacccaggaggagtggg

SEQ ID NO: 107663 - DNA, 98 bp, Homo sapiens
aagaatatgcgatacattgccagtgagatttcaatggaaaaagtgaaggtaaagcgttatgtgtccggaaaaaggccagactatgcccctatggagtc

SEQ ID NO: 107664 - DNA, 75 bp, Homo sapiens
agatgctaatttgggaaaaagctccaggattctgacagggatgttgcgaagacctggaatggccaaatatcaagg

SEQ ID NO: 107665 - DNA, 75 bp, Homo sapiens
acatgatgaacagcgtcctggaaaacttcaccatcctccagggaatgactctactaatgatggggtcagcagatg

SEQ ID NO: 107666 - DNA, 101 bp, Homo sapiens
ccaaagcgccctccactgaaggagttctttgtggatgattttgaggaattgttggaaggtcactacaggaaaagatatcttcattaaagtgcaacagcaca

SEQ ID NO: 107667 - DNA, 51 bp, Homo sapiens
agttaccatgctggtgtagcagtcctttcccataacctgtgcacggtgctg

SEQ ID NO: 107668 - DNA, 97 bp, Homo sapiens
tgaacctggtgttttagaggataccttggtcccagagtcatcatgaagtattggatgaacgaatatacctcatccattggaattggagtttttcatt

SEQ ID NO: 107669 - DNA, 75 bp, Homo sapiens
gacagagtgatgggaaacgcgtgagccaggccgagagggcccaatgtaaaggctgttgctactgctgtggaacag

SEQ ID NO: 107670 - DNA, 75 bp, Homo sapiens
tgcggctttcgccgcgctattgcttgccaggacagaagttgttatttatgttgttgagcgttcgccaaatggtac

SEQ ID NO: 107671 - DNA, 75 bp, Homo sapiens
ggactacaggctcatgctaccacacctggctggatctccagaactgttctctggaggaccctggtccaaactttc

SEQ ID NO: 107672 - DNA, 50 bp, Homo sapiens
tgcagctccgcctcctccgccgcgcaggcttccccaaatataaatgacca

SEQ ID NO: 107673 - DNA, 74 bp, Homo sapiens
gaaccctggtcaccgtctcctcaggcttccaggcctttgaggtccaactggtgctgaggcaggccctccccaac

SEQ ID NO: 107674 - DNA, 75 bp, Homo sapiens
agttgtatcgacatcagtggagaacctcaggttcgattttcatttgagcagccagatggtagagcgcagatgccc

SEQ ID NO: 107675 - DNA, 50 bp, Homo sapiens
gtgcgccgctctccagcccgcttgaacggaagaatttttaactttgacca

SEQ ID NO: 107676 - DNA, 100 bp, Homo sapiens
aaagaaccctcaattgatgaaagctctctgatccttctgacttaccaaggaatgccttcagaatttttaccattcttgtggaatttttatgtattgagca

SEQ ID NO: 107677 - DNA, 101 bp, Homo sapiens
gggaacagccatgcaaaggcaggggaggaagccacctcgagtgtttgggaaatgggaagtaatgacagctggcacctgaactaagtacttttataggcaac

SEQ ID NO: 107678 - DNA, 75 bp, Homo sapiens
ctttcacaggcccgggagcggcgcggatgacgaagatgatcctgcagaagctgaaaaggagggaaatgaaatgga

SEQ ID NO: 107679 - DNA, 100 bp, Homo sapiens
aagcactctgggtcaaaggtcaacattctaccactggaaaagatctggtagttgggtttgttgcagtgcccaaggttgaagcaatgaataaaagactggg

SEQ ID NO: 107680 - DNA, 90 bp, Homo sapiens
gatccgctgctgctgaggagaggagcgtcaacagcagcaccatggtggtctcacgtgtgaaacatggctacagattggctgggaagtatt

SEQ ID NO: 107681 - DNA, 75 bp, Homo sapiens
ctctggaagtgcaggatgacaatgcttctgtgcttgacgtctatttattccagaccccctgagccacagaaagct

SEQ ID NO: 107682 - DNA, 98 bp, Homo sapiens
ggacccggaagtggctttgggtcacgaggcttcacggaggaggtgggttgcctgtggctggagaaaggaatgtgctcatcaccagtgccctcccttac

SEQ ID NO: 107683 - DNA, 98 bp, Homo sapiens
gtgaacaacctgaacgtcaccgaggagaagtaccaggaggcgttggccaaggagctggtgatgctgctggagtggtggtcgggcacggaatgcaccat

SEQ ID NO: 107684 - DNA, 75 bp, Homo sapiens
cggacggcgacgcagcccgcggcagaaggatgagacctgcacgcagtggctcacagcagcacgatttgtgacagc

SEQ ID NO: 107685 - DNA, 97 bp, Homo sapiens
agagtttggccacagtgttcagttccagtggctatcaagaagatggctgtgccacccacgtatgccgatcttggcaaatctgccagggatgtcttca

SEQ ID NO: 107686 - DNA, 100 bp, Homo sapiens
gatgcctggaatcggctggctgaagaagtgctaccagatgatcgaccggaggttgataacactgatgctgaggggaggctcatactggctgatgcgctct

SEQ ID NO: 107687 - DNA, 98 bp, Homo sapiens
tttgctcctccctgcaactaactccattcttaattggtgacaatggaatggactctgatatggaagaggaagcagatgatggttctaagatgggatct

SEQ ID NO: 107688 - DNA, 100 bp, Homo sapiens
atccaccaaggatagccaatcggaccaaaaattcactcactttgcaatggaagctcagatcatcctgcacttgaaaaatgaagttttaccaccatcaaaa

SEQ ID NO: 107689 - DNA, 100 bp, Homo sapiens
ggtcgcagcagcgtgtcgcctccggggggcgtagcaagattctggaacttttcaaagcctgactctcttcttgaaacagtggagcatcatacagagttta

SEQ ID NO: 107690 - DNA, 75 bp, Homo sapiens
catcactccaatcttccagccgcctggctccctgccttggtgggcctttggagtgacgctgtgggaactcatgac

SEQ ID NO: 107691 - DNA, 90 bp, Homo sapiens
cagcacctgggtttggtgaagccaggcacttatcccgaggtgcctcctgagaagcattcctcctcttcctcctcctcttccagcagtgat

SEQ ID NO: 107692 - DNA, 83 bp, Homo sapiens
tgggaatcgtgcagggattcttcgacaatgcagatcttcgtgaagactctgactggtaagaccatcaccctcgaggttgagcc

SEQ ID NO: 107693 - DNA, 81 bp, Homo sapiens
cgcccgggaggaaggaacgaggcaaggagctaaagcagcgtgcgttcagccctgggccgagccgctgccgctcatggattt

SEQ ID NO: 107694 - DNA, 83 bp, Homo sapiens
agccttgggcctcgcgccggctatggccgtgccctggggctgagccctcaggtgcgcgcggagccatggttatcatgtcggag

SEQ ID NO: 107695 - DNA, 100 bp, Homo sapiens
caacaatgagatcgtggacaagatcatgggcaaaggacagatccaggttcgagaacttgtcttggacaattgcaaatcaaatgatggaaaaattgagggc

SEQ ID NO: 107696 - DNA, 100 bp, Homo sapiens
ccgagatgtacacgaagacaggagtcaatggagattctcgatacttcctgtggccactccagggcttccgttacaagatgaggtctgtgtatgctcactt

SEQ ID NO: 107697 - DNA, 100 bp, Homo sapiens
tccatccacatctccactgatggcctcagcctctccgtgcctgccacgcgccagtccacgctgcgtcgccggagcaagccggagcggaaggaacgcatca

SEQ ID NO: 107698 - DNA, 74 bp, Homo sapiens
ggacagtgcaaggaaagaaagaagcctgcggtgaaagtgacactgagggactcagaagaagatccttgacattg

SEQ ID NO: 107699 - DNA, 100 bp, Homo sapiens
tgcctcatcccaggttgccttggaaaatgccaacgccgtgtctgaagtggatgaggatcgcagtacggaacctgaccgattgcaggtgtttcacaagaga

SEQ ID NO: 107700 - DNA, 74 bp, Homo sapiens
cgccggatcccgaagacgagggcctggaggaaacagatggcccactgcgtgaccttggttcagctgtccatttc

SEQ ID NO: 107701 - DNA, 76 bp, Homo sapiens
gtcaggaacgtggccgacgacaccagggctggtgaattaccatatctccgtcaagtgcagtaaccagttcaagttg

SEQ ID NO: 107702 - DNA, 50 bp, Homo sapiens
cagggaacttggtggagaaaattgagatggccatcctgcggttcccttac

SEQ ID NO: 107703 - DNA, 100 bp, Homo sapiens
ggaggctgccggctggagggaggttcggagcgcggccgggcgcgcggcgccgccacaagttgcgctgctcgcgacgagatcttttgcgggtgattcatgt

SEQ ID NO: 107704 - DNA, 75 bp, Homo sapiens
tgaaatgtggggttaacttggagcaccgtgatatgatgctgagatgaatcgtcacctgtgtgtttggctttttag

SEQ ID NO: 107705 - DNA, 83 bp, Homo sapiens
ctcggagcgcggtccctgtattggtctcctgctcctagagcactgtgacttctgccgtgttcaccgtgggagacaacgtggtt

SEQ ID NO: 107706 - DNA, 100 bp, Homo sapiens
tatatcagagaatgagttaatctcctcagaaatcactaaatactactctgaggggcttagaaattaacagggattttttatcaagcagaaatgcatcgaa

SEQ ID NO: 107707 - DNA, 113 bp, Homo sapiens
ctgtggttcctgcatgaagacagtggctggcggtgcctggacgtacaaggatgggcgtgttttgggcgtgctagaggtgtcacgctccattggggacgggcagtacaagcgct

SEQ ID NO: 107708 - DNA, 75 bp, Homo sapiens
ccagcactggactcatggaggctgagcatttattcagcccaagtatattcacaacttgctaaaagcagttgagat

SEQ ID NO: 107709 - DNA, 74 bp, Homo sapiens
cagtttttcaccctcacgctgatgaacttgtacttcacgcaggtactccaaagattcaggtttactcacgtcat

SEQ ID NO: 107710 - DNA, 50 bp, Homo sapiens
ttgtacattcgcaccaatgcttcaggaaaactcaatgtgagtagtgacac

SEQ ID NO: 107711 - DNA, 98 bp, Homo sapiens
ttcatccttgtttaatgactttggtgccctcaacatctctcagagacgaaaggcagctggctaagagtcttgggcaggctggtgaaattgagcctgaa

SEQ ID NO: 107712 - DNA, 90 bp, Homo sapiens
cttcaggatttacacagacgtggggcgatgcttgtgaccctgcagctcctcaaagttggtcaaagaaaaagtgatgtatgaaaaagaggc

SEQ ID NO: 107713 - DNA, 100 bp, Homo sapiens
cggcggaggacgaggaagagttgtggcgaggcagatcctgccccgtggccgcggccgtctcgtaggggtattattgaagctcgttttgtttatgtctttg

SEQ ID NO: 107714 - DNA, 75 bp, Homo sapiens
gcagtgtctacccagctttatgaaccagatcgactccaagaactcaagggcctgaaagaagaagtgtggaaattg

SEQ ID NO: 107715 - DNA, 98 bp, Homo sapiens
ggtgcagagagcggacttccgcgacgcggtggatttggcagctaattcactcttaaacaagttaatccatcaatccttagtagaatccagtcaccgtg

SEQ ID NO: 107716 - DNA, 82 bp, Homo sapiens
gcaccctgagctgaggggataggcttcagccaccctcgaccctgaactggaataattagtgggccgaattcattttgttttc

SEQ ID NO: 107717 - DNA, 83 bp, Homo sapiens
ccgcccgcaactccgccgcccaccatggcttccgaggagctgtacgagagactgtgcagttgatccaacttgtgttttgtgca

SEQ ID NO: 107718 - DNA, 51 bp, Homo sapiens
cagcaatgggacgctgaaaaatgacaatggcgggatgtaccacggggacct

SEQ ID NO: 107719 - DNA, 92 bp, Homo sapiens
cgtccgtacgctgcgcactggacccgctctgctctcgggttgcactgctgtgatccatcctcatctcctaaagatgcatcctgacttatctc

SEQ ID NO: 107720 - DNA, 82 bp, Homo sapiens
gcggcctcagggttcaggcaatgcaaataaggtggagttttgatgaaacagtgactcatttcatctatcaagggcggccaaa

SEQ ID NO: 107721 - DNA, 74 bp, Homo sapiens
ttcttgtttgtggatcgctgtgatcgtcacttgggaaatcgtgatgagaaccagagtataaaccaccaaatggc

SEQ ID NO: 107722 - DNA, 75 bp, Homo sapiens
cgcagccccccaatgcggccgcgagaagcagcgggggggcaggcgatcgaagtgagaaggcaaccaaagtgcagg

SEQ ID NO: 107723 - DNA, 75 bp, Homo sapiens
gcatcatcaaggacttcaccaagcagctcctgacccctgaggattaccagcgatttctagacctgggcatctcca

SEQ ID NO: 107724 - DNA, 80 bp, Homo sapiens
gtctcttacgtctgcggaagtgcagctgcctcagttcttagcgcaggattggtacctggaatggatcccctcttgggtga

SEQ ID NO: 107725 - DNA, 50 bp, Homo sapiens
gcgagattataagaagcttgggttcattcttattgcaggagtgaccagga

SEQ ID NO: 107726 - DNA, 100 bp, Homo sapiens
gcggcgtccccgcggccccagcccaggacacaggttgaacatcacggcggagaacgactgccggcggctgcactgctccctgagagacttgagctccctg

SEQ ID NO: 107727 - DNA, 96 bp, Homo sapiens
ggagactataattaaatgcgatatggtacccaaactggattatcccagctgatgaagaacacgggtgtgatccttgccaatgacgccaatgctgag

SEQ ID NO: 107728 - DNA, 89 bp, Homo sapiens
tgcaattgaccgtgaagttgaagctgttgatagtggttgctatcggctggtggactatttggaagggatccggaagaattttgatgagg

SEQ ID NO: 107729 - DNA, 80 bp, Homo sapiens
cagccttgggcctcgcgccggctatggccgtgccctggggctgagccctcaggtgtcccgacccaggctaagcttgagca

SEQ ID NO: 107730 - DNA, 100 bp, Homo sapiens
ggaatggctaaagctacagcaaagcagtcatggttatagctgtagtgaaaaattatccaaagctcagttgacaagttatgatgtgattgctcaagcccaa

SEQ ID NO: 107731 - DNA, 100 bp, Homo sapiens
ggatcctgctggtgggagaacaatagcctaacatggcagaccagagacagcgctcactgtctacctctggggagtcattgtaccacgtccttgggttgga

SEQ ID NO: 107732 - DNA, 100 bp, Homo sapiens
gagggactcacagctgatgacctgctgctcgtgctgatctcagggaaacagtactgggagtaccagttccagcaccagcccagtcaggaggagtgtgaag

SEQ ID NO: 107733 - DNA, 97 bp, Homo sapiens
aatcgctgaagatgttgatggagaagctctaagtacactcgtcttgaatagatttacattacctggtgaaatagacattgacagtatctcctatgaa

SEQ ID NO: 107734 - DNA, 100 bp, Homo sapiens
aaccggcctgggttactcagtttgtgcagaagaaagaagagagggacctggtggaccgactgaagctaccagccctgcttcgtcctccggagcccctgcc

SEQ ID NO: 107735 - DNA, 108 bp, Homo sapiens
tcgtctcttacgtctgcggaagtgcagctgcctcagttcttagcgcaggcacctgaatggacagaagaggacctcagccaactgacaagaagtatggttaagttccca

SEQ ID NO: 107736 - DNA, 100 bp, Homo sapiens
gagagcccagcccctggtggaggcggcttggcggagattcggagccgtcagcagtaccaaatatgccccaacagcggcaagaccagcatcatcagagtgc

SEQ ID NO: 107737 - DNA, 100 bp, Homo sapiens
attgaccccactccctattactggtatacggatcagaagacttgcactatctgccagatgctgcttcctaaccagtgcagttatgcatcacaccagagaa

SEQ ID NO: 107738 - DNA, 100 bp, Homo sapiens
gttggagtgcgttcggtgtgccgtgggtccgcgctgcttccacccaacttcctgttaggtgccaagtcctgccctgccaacttcttggcagctgccgacg

SEQ ID NO: 107739 - DNA, 82 bp, Homo sapiens
agagttgagcctgtgggacacttcgggagctctttgttcaatgcctagccacctattcctacagacacggcagtggaaagga

SEQ ID NO: 107740 - DNA, 83 bp, Homo sapiens
gttacagctgctcatgaaccacttggcaaacacctggctgcagtggaagaaagaaagatcaagtccctggtagctctcttggt

SEQ ID NO: 107741 - DNA, 98 bp, Homo sapiens
ggagacgtcggttgagcggcggcgaacatgcgcttttgacacattggagaacaggccgcccgcctgaagaaactacaagagcaagagaaacaacagaa

SEQ ID NO: 107742 - DNA, 100 bp, Homo sapiens
ccatgaacggatggatgtgatgcctgctagccaaaaggtttttcaacacatgtcctggtaatgaacaacttaatatagaaaatccttcatttacatcaac

SEQ ID NO: 107743 - DNA, 75 bp, Homo sapiens
gaggaggcgcaggagactgaccgcaacggcaggccgcagcaatggcgctgagttcctctgctggagttcatcctg

SEQ ID NO: 107744 - DNA, 97 bp, Homo sapiens
ggcgctggagagggggcgctgagctgttggggtcatcttccacgatgttgctgtgctgacggataagctcttccccatcgtggaggccatgcagaag

SEQ ID NO: 107745 - DNA, 83 bp, Homo sapiens
ctcagttggaagcagccgatccagcctgcggagcctgtggggcagaacccctgaacagtgcccaagtgttgtctctttgttgt

SEQ ID NO: 107746 - DNA, 101 bp, Homo sapiens
ttgcttcttatttagcactcacaggcatttatgtttgaatcatctttaagtctggcggtcacaaagtggggactcaaggcctccaggtgtttggatgagaa

SEQ ID NO: 107747 - DNA, 50 bp, Homo sapiens
ggtggagccaccagcctctccctggttttgagcaaaattttggactgtga

SEQ ID NO: 107748 - DNA, 100 bp, Homo sapiens
aagctcctcgacaccatggtggacacttttcttcagaagctggtcgccgccggcagctccagaacctgggtatcaacccagcaaacattggcttcagtac

SEQ ID NO: 107749 - DNA, 100 bp, Homo sapiens
cgaaatgaaagtttcatgaaattagctgcagtagggacctggatgggggactttgtcacagcttggatggcagtttggtggttatgccaaggaagcagac

SEQ ID NO: 107750 - DNA, 114 bp, Homo sapiens
gccaaccgcaaccattgacgccatgtcgggttattcgagtgaccgagaccgcggccgggaccgaggatataacacgtgggaaccggaggagaacatcctggaccccaggctgct

SEQ ID NO: 107751 - DNA, 75 bp, Homo sapiens
ttaaccggtgtaggagaagaaatccgcagaagcttattaaagttaagttcttctcaccactaaatccaatacgag

SEQ ID NO: 107752 - DNA, 101 bp, Homo sapiens
atttaaaatcaaaatggataaactctgtggtgctgttggatcagatgatgaagaacgagagcttcaaatggatcctgcagactatggaaagcaacatttca

SEQ ID NO: 107753 - DNA, 49 bp, Homo sapiens
aaaaagaattaggaaggtccttcagaaaggcctaaagaatgtatttgac

SEQ ID NO: 107754 - DNA, 98 bp, Homo sapiens
cgcgccgcgccgctccgggagccgggcccggggtcccgccaccaccgcgcgcggggcctgatcaagatccggggggaccggtgctggcgagacctcac

SEQ ID NO: 107755 - DNA, 83 bp, Homo sapiens
gagtggcctgggccggagcaggcgaggtggccggagccgtgtggaccaggaggagcgctcgggctacattgagagacctcagc

SEQ ID NO: 107756 - DNA, 75 bp, Homo sapiens
tgtggcttccttcgttattggagccaggcctacaccccagtgcttaaacagccttcccagcccacagcagcaggg

SEQ ID NO: 107757 - DNA, 104 bp, Homo sapiens
cgcatatcctgggtagcctctaggaagcgctagacacattggctgagaaaccctggcccccagcatgagaagcggactctgtttggcgacatggtgtgcttctt

SEQ ID NO: 107758 - DNA, 97 bp, Homo sapiens
tgtgggctggtgtgtggaactgggtcatcacactgaaacggtgttcaaccgggttttgccagggcctattgcaccagagagcagcaagaagcgggcc

SEQ ID NO: 107759 - DNA, 75 bp, Homo sapiens
tgaacaggccaaagccagactacagctggttcttgaagctgctgaatcttgtggaagaagaatgaagttgctgat

SEQ ID NO: 107760 - DNA, 75 bp, Homo sapiens
ttttttttttttttaggtaccagcatcaagatgatttatggtaataaggttctgtacagagtaatgagatgtgtg

SEQ ID NO: 107761 - DNA, 98 bp, Homo sapiens
ggaagatggtaagggatactggagtgactggagtgaagaagcaagtgggatcacctatgaagatagatggccaggccatgttatgggatctcaacgaa

SEQ ID NO: 107762 - DNA, 98 bp, Homo sapiens
aagaatacctcggcaaattccgacgtcttgaagacttccgagtagattgttctaagaacggaagcatctgggctggatggaatttagcatcaagcaga

SEQ ID NO: 107763 - DNA, 100 bp, Homo sapiens
ccagcctcgaccccgcacggacagcgaggcccgaaaatctcttgtactacagtcaagatgaggagtccaaaataatgatcagtgactttggattgtcaaa

SEQ ID NO: 107764 - DNA, 100 bp, Homo sapiens
agggaggagaagatcatgtctcaggtgccagcaaggtcaacctcgtgaagatcgcgtccacggcctccagcccacgggacacggcgctggctgccgttat

SEQ ID NO: 107765 - DNA, 98 bp, Homo sapiens
cgggccgtgcagagcagcacctccatcaggtacaacctcgaggagctctaccaggttcccgtgtcagtggctatgatgacacctcaagttatcactcc

SEQ ID NO: 107766 - DNA, 83 bp, Homo sapiens
ctggtggctccgcggattataacaggatttcttacaatctccagctacaacctgcttagcttgctactcagtacgtgaattag

SEQ ID NO: 107767 - DNA, 75 bp, Homo sapiens
cttcgagttcaaagagaccctcggaacagcagttcagagccccagttgcagacgacttgtcctgccaccaccatg

SEQ ID NO: 107768 - DNA, 90 bp, Homo sapiens
cgagctaagccttatcatctgtcaacatcatcagtttttcgattagcttaggaatacacttcgctttcttttgggaaatgtggctgattt

SEQ ID NO: 107769 - DNA, 80 bp, Homo sapiens
catccccgaggaggaagacgaatcgttaaacatctgaaagggtcagtgttgttacagatcttataacagtcggtttaaag

SEQ ID NO: 107770 - DNA, 100 bp, Homo sapiens
ggcgtgagtgcagggaagtggagtatttgctgggccgggtaccatggacgtgggcgaacttctgagctaccaggagaataaaggcagccccgttgatgac

SEQ ID NO: 107771 - DNA, 98 bp, Homo sapiens
tatggctgcagaagcagaagcgtcccgcgaggcccgcgccaaggagcttgcagagctagaaagtgccctccaagagcagcatgaggtgaatgcatctt

SEQ ID NO: 107772 - DNA, 83 bp, Homo sapiens
ttgtggcattgatgaagatcatgacattgtagtacagtatccaagtggcaatagctcgaattacatctttacaagaggaggtg

SEQ ID NO: 107773 - DNA, 50 bp, Homo sapiens
aggaggacaacagctacaaccgggggctgaccggttccctgatgtgttac

SEQ ID NO: 107774 - DNA, 90 bp, Homo sapiens
tacaatgtggctgtcggcagagctggtagagtgatgaatcaccaacaccagcagcagatggcccccagtaccctgagccagcagaaccac

SEQ ID NO: 107775 - DNA, 101 bp, Homo sapiens
agctggagacagagctgagggagcaagaggtgtcggaggtctcatctttgaactactgccggagcttctgccaggaacgtcaaggtcgtgggaaataaaag

SEQ ID NO: 107776 - DNA, 83 bp, Homo sapiens
atgggttatatttggaaccttcgggcaaacaggattccacagtgtcctctggaaaatggtgcctttcctgaagactatcttct

SEQ ID NO: 107777 - DNA, 51 bp, Homo sapiens
gtttcaaatcctgctctactcacagcgacacattcagctaacgtattttag

SEQ ID NO: 107778 - DNA, 98 bp, Homo sapiens
ttactttaaaaatcgccaaaaattacttggagcaaagggcagtcggcggagcttcgccaaggctggcgcagtcggtgaatctggattgggaaagtcga

SEQ ID NO: 107779 - DNA, 100 bp, Homo sapiens
gggtcactgcgacgttcacagaggaacactgccggggcccaaccacaagacgactcaataggaggaagggaaatgaggcaagttatcctttggaaatgtg

SEQ ID NO: 107780 - DNA, 82 bp, Homo sapiens
aggaggagagcccacaggtgctaaagagagcagtaccctgatggagtcccttgcagtgcctccggagccagcgtggtggcca

SEQ ID NO: 107781 - DNA, 95 bp, Homo sapiens
cagtatcccagtgcattcccatcctcgctcccacctgtcagccttctaccccatgagaaagaccagggatttgtcttggctgttactatgacacg

SEQ ID NO: 107782 - DNA, 90 bp, Homo sapiens
acacctgcggcctcactgggacccccaggaggtgaccctgcagcttgatgttgttggggacagtgctgtggacgaatttgaaaagcaaag

SEQ ID NO: 107783 - DNA, 75 bp, Homo sapiens
atcaagcacatccttgctaatttcaaaaactaccagccagatgacgtgtactactgtggaataaagtacatcaaa

SEQ ID NO: 107784 - DNA, 74 bp, Homo sapiens
ggagggccccctgagctagatacagccagcagttccgaagttgtcacaacttggacaaaagtaacacagaagaa

SEQ ID NO: 107785 - DNA, 51 bp, Homo sapiens
gtaggaagccggagacagcagggtgacaggatagtaatgatgacactgaag

SEQ ID NO: 107786 - DNA, 100 bp, Homo sapiens
tgacattgccagtcaagcacacttgcacctaaagcatttgagcattatgaaagatgagccagaagaggctgagttaattttgcatgacgctcttcgtctc

SEQ ID NO: 107787 - DNA, 100 bp, Homo sapiens
gaatccgttgtaacatctgtaatagggtgtttccacgggagaaatcgctccaggctcacaaaaggactcatacagctatcagttgagggatttgcagttg

SEQ ID NO: 107788 - DNA, 50 bp, Homo sapiens
cgcgagatccggccagggtcagaggaatcttccacttgactcagatcaag

SEQ ID NO: 107789 - DNA, 74 bp, Homo sapiens
tgccaacaacggctcttctcaaatggagtcgggtggtacagttttgagtaccaactggtctgatgtaggtaaaa

SEQ ID NO: 107790 - DNA, 50 bp, Homo sapiens
ggcgcggggaccgctgtgctctcggtgaagggctggatgcacagtgggag

SEQ ID NO: 107791 - DNA, 50 bp, Homo sapiens
cgccgacgtcgaccagcagagactgctccatgttcatgcatgtcttttaa

SEQ ID NO: 107792 - DNA, 83 bp, Homo sapiens
cggagataaattcccggaaccgcgattcggcgtgtcagcccaggatccggttgtggccgtggctgaggatggccgggagaagc

SEQ ID NO: 107793 - DNA, 75 bp, Homo sapiens
gtcaggccaagccttctgcctgtgatgagaattttcctgacactctcaactgtgcagaagtaaaaatctttcccc

SEQ ID NO: 107794 - DNA, 82 bp, Homo sapiens
aaaatcctggatctgtatgctttgagcaaggaaaaggggaagatagtgatgtactcagtataaatgcagatgcttatgacag

SEQ ID NO: 107795 - DNA, 75 bp, Homo sapiens
cctgcagtacctgcagaaggtctctggagacatcttcagcagcttcggaaccaaaaagaagcttcccagagccgg

SEQ ID NO: 107796 - DNA, 90 bp, Homo sapiens
ctttgactggttgggccggagcctcacagctgtattcatgtggctgacaaagatgttcttcctcttccccgacccacatttcaagcggac

SEQ ID NO: 107797 - DNA, 98 bp, Homo sapiens
ctggagcagatcctggttgactgcagagacaccttgaagtatggggttcgcacaggtgtgggaaatgctactgcctgtgtcttacatgatgttatcta

SEQ ID NO: 107798 - DNA, 90 bp, Homo sapiens
gaaggggaagaggcccaccctggagtaaccctcactggagaatccagagtctctggaatctgttctgcgccacccggcagataatcgcac

SEQ ID NO: 107799 - DNA, 75 bp, Homo sapiens
atttggcccagctcatgaattcgagcggctctcataaagatctggctggcaagttctttgcagatgtagttccag

SEQ ID NO: 107800 - DNA, 74 bp, Homo sapiens
agcagtgtttcaggaattttcacattccagaagaggcgtccttctttgcacggaactgcttcacaagattaaag

SEQ ID NO: 107801 - DNA, 75 bp, Homo sapiens
gctagggcacggaccgcctaggccgagagaagagcaagttagtaccttgtaccaaaacatcaaccttgtggagcc

SEQ ID NO: 107802 - DNA, 100 bp, Homo sapiens
tgtagaaattcaaaccctagtgaataaagccaagagagaccttggagtaattcgtcgacaggacaatataaggcttcaagattgctcagcactatgtgaa

SEQ ID NO: 107803 - DNA, 75 bp, Homo sapiens
cgccgcagccggggcccccgccgccgccggagcggtgcatacattcagagggccacactggtgtgaatactgtgc

SEQ ID NO: 107804 - DNA, 90 bp, Homo sapiens
cctgcctcggcagctgccccaaaaagagcgtcagggtgtccgcaatgttgccagtgtctgtctgcagattggctacccaactgttgcatc

SEQ ID NO: 107805 - DNA, 75 bp, Homo sapiens
gcagccgccgccgcagcgcgaacatggacgccgtcaacgccttcaaccaggagacagtaaggattgtatcctgga

SEQ ID NO: 107806 - DNA, 83 bp, Homo sapiens
tcctgatgcttattgtaacttggctcattgcctgcagaaatcgagctatagcagattatcttcgttcaaatggctatgaagag

SEQ ID NO: 107807 - DNA, 100 bp, Homo sapiens
cagagacggcggaaacccgttcgccgagcccagcgagcttgacaacccctttcagaataatccagaatggctactctgatctatgttgataaggaaaatg

SEQ ID NO: 107808 - DNA, 75 bp, Homo sapiens
cgccaataatatggagacactaatcgaatgtcaatcagagtgggaatttcagattggaccttgtgaaggaatcag

SEQ ID NO: 107809 - DNA, 82 bp, Homo sapiens
ccgaagcaaaagtccattcagaaaagacaagagccctgtgagatcctcctactactaccacccttcagcctacaattcagtg

SEQ ID NO: 107810 - DNA, 100 bp, Homo sapiens
ccgctttccgggagactggagtcgaaggccgtgagagcaacaagatatggatttggatatagaatttgatgtacaccttggaatagctcatacccgttgg

SEQ ID NO: 107811 - DNA, 50 bp, Homo sapiens
gtgggaacgcttattcaacggcaaaagaaatgcactcggtgatggaaaga

SEQ ID NO: 107812 - DNA, 83 bp, Homo sapiens
ggaaagcaggaggaggtggcggcggcgggaagatgctcttgtcaggatggtgaagctgttcatcggaaacctgccccgggagg

SEQ ID NO: 107813 - DNA, 101 bp, Homo sapiens
gaaagagaaagccaagatccactaccggaagaagaaacagctcatgcctggcagcaggtgcaacagcagctggatggtggcccagccggtgagggcgggcc

SEQ ID NO: 107814 - DNA, 75 bp, Homo sapiens
gcagcggcagcggcaagcacctgaaagccctgtgtaaggaatgtgtagtagaacgttgtcgcatattgcgtctga

SEQ ID NO: 107815 - DNA, 98 bp, Homo sapiens
aaacattgaagttaaagtatgcagagcaaaatgggaagccacatttttatgataagctcattgttgaatcgtttgaggaagcaccccttcatgttatg

SEQ ID NO: 107816 - DNA, 74 bp, Homo sapiens
gggcatggtgaatgaggatggcactgctgctcctggaacacctggagtgcctggtgtccaggcacgagaggtca

SEQ ID NO: 107817 - DNA, 127 bp, Homo sapiens
cgtggagcgcgagcaggagcgcgtcaagtcggcgggggcctggatcatccacccgtacagcgacttcagctccaccgggggacggctacgtgcaggcggacgcccggggccccccggaccacgagga

SEQ ID NO: 107818 - DNA, 74 bp, Homo sapiens
cttctttactggaagattcgtcagtgacttttcctgtggtaataataggcaaggtcttagacctattcctgaag

SEQ ID NO: 107819 - DNA, 80 bp, Homo sapiens
tgaacaactcgggcgccgacgagatcgggattttttatcaagcagaaatgcatcgaacaacgagaatcaagatcactgag

SEQ ID NO: 107820 - DNA, 100 bp, Homo sapiens
ttaccatgtcagtgcacagaattccgatgaagttaaattccgtcaagatttaatgaatattgcgggcacaacattatcctcaaaacttcttactcatcac

SEQ ID NO: 107821 - DNA, 75 bp, Homo sapiens
tgtttggaaagacccaggagaagccgcccaaagaactgggccatgaaatgacaagcattggactgctacttggtg

SEQ ID NO: 107822 - DNA, 100 bp, Homo sapiens
tgaagaatcacgttattgaagacatcaagggaaaatggggtgaggaagattttgaagacaatcgtcacttatacagctacaagtgtattcatcagagttt

SEQ ID NO: 107823 - DNA, 98 bp, Homo sapiens
gtccatcatagtcaactgcgtggaagagaaggtccagagccaaacccgtcactgaccccccagcccaggcgcccagccactccccaccgctaccatgg

SEQ ID NO: 107824 - DNA, 83 bp, Homo sapiens
ggaacacaaccaagcaatcatcaagcacctcctcgaatccacattcatctcaatggaaggatcctgccttaagtcaacttatt

SEQ ID NO: 107825 - DNA, 75 bp, Homo sapiens
gctctggtcatactaaagaacacatctggaaggatgacatgacttccttttacaacactcctcccctgggaaaaa

SEQ ID NO: 107826 - DNA, 88 bp, Homo sapiens
gaggcagagcctaagagaactatggcaacatcaggtgactgtcccagaagtgaatcgcagaagaacgcctgtgccatgctgaaggacg

SEQ ID NO: 107827 - DNA, 90 bp, Homo sapiens
tcaaactcctccccacgacactctgaagcagcgacggcacagcgggaagaatggtgacaaacagcatgtttggtgcttcaagaaagaagt

SEQ ID NO: 107828 - DNA, 76 bp, Homo sapiens
ctgagtatcacttcttcaggcagtgctgtaagctgttcaacaattcctccaagtgacaaagacctcgatgatgcct

SEQ ID NO: 107829 - DNA, 99 bp, Homo sapiens
acaaggatggcgaggtccctccggaggaggtctctctgctcagactaatcctgcttgtatggaacttcccgccctggcgctaactcctcgtgctgtggt

SEQ ID NO: 107830 - DNA, 82 bp, Homo sapiens
ttggtgcaggcatccccatgccgaagttcagatggaatcctctacatgggattttatgcgacaagcaggtgaagtaacctat

SEQ ID NO: 107831 - DNA, 100 bp, Homo sapiens
tctacctccatcaggaccccagatgtctgacagccctgtgtgacaccaagataagtaacgagcttctggaagaggtgaagaaggaattgcagaaagtgaa

SEQ ID NO: 107832 - DNA, 90 bp, Homo sapiens
gtcatgaagaaggagccagcagagtcgtctttcagatactctccattgcataatgtgaagttaccagaagcagatgacatccagtacccg

SEQ ID NO: 107833 - DNA, 100 bp, Homo sapiens
aagacagtcctcgtcagcactgactttcagctatggaatcgatgaggaaattgaggcacagagattaactaatctgaaccagataatgccataagtagta

SEQ ID NO: 107834 - DNA, 101 bp, Homo sapiens
aaatacccctttgaattaattatggctccttggaatggatggctttggccaaccagttggcattcttggacgccctgccacagcatatggattccgccctg

SEQ ID NO: 107835 - DNA, 75 bp, Homo sapiens
ggtcacacaactggatctggacgggccaaaggagctttcgaggagagaacgcaggtgaaccaggatgtgagccgg

SEQ ID NO: 107836 - DNA, 100 bp, Homo sapiens
gcagattatatttctagggacaaacctatcacatttactcagtccctgcactaggtcagacaatcccctttggggtacaggaaacaaagcaggaggagtt

SEQ ID NO: 107837 - DNA, 98 bp, Homo sapiens
agcatcccagccgtgctcacgatccagacatttaatgtggatgcaccatgccagaccgtggaagatttaacgaatggggttgtgatggcccaggttct

SEQ ID NO: 107838 - DNA, 100 bp, Homo sapiens
agaaaaggaggaagaggaagatgatggagatttgcctgtgataaacattgacgatcttgaggatgaccctgtggtgaacggggagaggtctggctgtgcg

SEQ ID NO: 107839 - DNA, 88 bp, Homo sapiens
ggataatcactaaattctgccgaaaggactgaggaacggtgcctggaaaagcacttcttcacttcgtttggggcccgggataggacat

SEQ ID NO: 107840 - DNA, 100 bp, Homo sapiens
ttcctaggtgagattaaggttcctgtgaacgtattaagaactgattcctctcatcaagcctggttgaaactgatttctcaactccaacaccaagaaggaa

SEQ ID NO: 107841 - DNA, 75 bp, Homo sapiens
cggagccaaacagtgtcactcccaccacccaccagggcccctggtgtcgtgaaaactacccctaaaagccaaaat

SEQ ID NO: 107842 - DNA, 75 bp, Homo sapiens
gtttgattacacagatgatcccgaggctattggatgttgtcactgtgccatcaggtgaacttcgtcatgtggaag

SEQ ID NO: 107843 - DNA, 75 bp, Homo sapiens
ctttccggatcaatccagatggcagccagtcagtggtggagctctctgatgtaaaggatggagtaaatcaagcag

SEQ ID NO: 107844 - DNA, 98 bp, Homo sapiens
atatctcaaaaggtgatctggacaaaggaacaggtatctcagcatttgatgagcttgttgaagcataccaagagcaggccaaaggacttctggatggc

SEQ ID NO: 107845 - DNA, 101 bp, Homo sapiens
ctgctttcatggagttcacagaagagtcgaggagggcagctgcaatgactctccgcacggtattattgtcattgcaagcactattggcagctgcagagcca

SEQ ID NO: 107846 - DNA, 100 bp, Homo sapiens
gttcctccaggagaagttagcttcagagttctttgtggatggacttgattctgatgagagactttattacaactaccacctgctatggtagaagagggtg

SEQ ID NO: 107847 - DNA, 82 bp, Homo sapiens
tggagagccgtgatatgttccagttgcacatttcctgcaaggactccaaagtggtgagctttcagagtccactgctgaatcc

SEQ ID NO: 107848 - DNA, 75 bp, Homo sapiens
caggacctcagctcacagtgcatcaccgaccaccacaagtgcatactacagttgaatttctgaatgaaaagctgg

SEQ ID NO: 107849 - DNA, 95 bp, Homo sapiens
cctttaaatgcagcatctgcgatgtgaggaaaggcacctccaccaggtataagcagtttagccaaattttgaagaacattggagaaaatgaaggt

SEQ ID NO: 107850 - DNA, 90 bp, Homo sapiens
gcgtaagttaactgttaatggatttgtggaacctcataagaatatggaggtgatggattcttacagaagcagagattgatgctcaccttg

SEQ ID NO: 107851 - DNA, 99 bp, Homo sapiens
cgccgcacaagatcgccggagtcatattatcgacgtagttaaagcccactagcctaaagccgggcggactgcgtcatcagtgagttctgcctcagtcag

SEQ ID NO: 107852 - DNA, 82 bp, Homo sapiens
ccgcaagtcccccccggagaaaaagttgaagcgttatagtatctgactgtcttctctcagatgattgcatttcatgatccag

SEQ ID NO: 107853 - DNA, 75 bp, Homo sapiens
tctgtgcttgttatgagctaggtaacctaggggatgccattgaaaagttatttcctgatgccattagactgagat

SEQ ID NO: 107854 - DNA, 52 bp, Homo sapiens
ggcgaggcttccgcccggcacagggggctgaaggtgatgtggccgccctcaa

SEQ ID NO: 107855 - DNA, 100 bp, Homo sapiens
gcgttgcctggctccacgccctgctgggtcctacctgtcagagccccaaggtgaccatggaggaagaagatgagtctcgagggaagacagaggagtcggg

SEQ ID NO: 107856 - DNA, 83 bp, Homo sapiens
agcgactcttctgacctccgcgcgacgtacccgccgccgccgttggctggaggtgaccatggaggaagaagatgagtctcgag

SEQ ID NO: 107857 - DNA, 100 bp, Homo sapiens
acaaggtgttgatgccgccggacgggaccagttactctccacaagaaaattcacacaaccacagtgctcttcatagttcaaattcacattcttctaatcc

SEQ ID NO: 107858 - DNA, 50 bp, Homo sapiens
gcgagtggggacagcttcttcctagcggatagcaggctccaagctctctc

SEQ ID NO: 107859 - DNA, 82 bp, Homo sapiens
agaagggcatcgtgcgtgccaagcggcgaggttgctccgactgtgtgttccaggagtggtggctctgaggtgtgaccctgcc

SEQ ID NO: 107860 - DNA, 75 bp, Homo sapiens
atcgacgatctccatatttcattgcaagatggaatggggcgagtccttgctcaagatgtatatgcaaaagacaat

SEQ ID NO: 107861 - DNA, 95 bp, Homo sapiens
gtgcatccttggcagaaagtgaggaggaaaacacccccattataaatttgcgcctcattttggtaagcggaaaaacaaaagagttcctgttttct

SEQ ID NO: 107862 - DNA, 100 bp, Homo sapiens
tggagggctgctaaaggaagagaactgctgttccacctccgcctcctccctgcagtgtggcttcttagggatcaacgagcaagggctgtatcgaattgtg

SEQ ID NO: 107863 - DNA, 83 bp, Homo sapiens
cgcgggccggccccgcggggagcgcccccggcgcgatgcccttcaggaaaggtcaaaatgcagatcttcgtgaaaacccttac

SEQ ID NO: 107864 - DNA, 90 bp, Homo sapiens
gagagggattacagaaaggagaacaccttatttcaggaattcaaaatgtcctcagcctcttttgtgcagtcctcacagaaaataaggttc

SEQ ID NO: 107865 - DNA, 75 bp, Homo sapiens
tgacagtggtcatggccgtgtgctccctgcctctcacggcaaatcctgatcctaactgttgtcttggagtatttg

SEQ ID NO: 107866 - DNA, 90 bp, Homo sapiens
gacaaaggtggcccagaattttccagtgccctgaaaaatagtatgagggtgctggttgatgctcgagagaagcttcatattccctgggga

SEQ ID NO: 107867 - DNA, 122 bp, Homo sapiens
atctgtgacgtcctgcaggaacccgaacagttccccctggtgcagggagtggccatatgtaagaagaagcttgggaagctgccacctcagtatgccctggagctcctgacggtctatgcttg

SEQ ID NO: 107868 - DNA, 100 bp, Homo sapiens
cttggatagacttatacctcagacatgggatgtagagctggaaagatctgcagaatcctgggctgaaagttgcttgtgggaacatggacctgcaagcttg

SEQ ID NO: 107869 - DNA, 83 bp, Homo sapiens
ggacaaagcaagtccagatcagaatgcttcaacccacacacctcagtcttcagttaaggtttgggccccatggtatccctgtg

SEQ ID NO: 107870 - DNA, 83 bp, Homo sapiens
aaaagacagtcctcgtcagcactgactttcagctatggaatcgatcatggaagggaagtggttgctgtgtatgttactggtgc

SEQ ID NO: 107871 - DNA, 91 bp, Homo sapiens
gtcagacgcagccgtagacaccagctccgaaatcaccaccaagaaaccaaggtgtatgttggtaacctgggaactggcgctggcaaaggag

SEQ ID NO: 107872 - DNA, 98 bp, Homo sapiens
acgagacgaagacggaaccggagccggttgcgggcagtggacgcggttctgccgagagccggtattagaaaactactcggatgctccaatgacaccaa

SEQ ID NO: 107873 - DNA, 83 bp, Homo sapiens
ctgttgtctaccaagtgcagtttaaatagtcagattgaagttatcatggatcgaagactcatgcaagatgataatcgtggcct

SEQ ID NO: 107874 - DNA, 88 bp, Homo sapiens
cagtagcttggatccttgtgggcatgatccataatcggtttcaagccatcccaacatcctgcgtctctacaactatttttatgaccgg

SEQ ID NO: 107875 - DNA, 75 bp, Homo sapiens
ataaaaaaagaaattagtgaaggagatgaagtagagcttgcccaacagaaggtggaaaaaatcactgaaagtaaa

SEQ ID NO: 107876 - DNA, 100 bp, Homo sapiens
tctccttgaatccactcgccagcccgccgccctctgccgccgcaccctgcacacccgcccctctcctgtgccagtgagaaggcaaccaaagtgcaggaca

SEQ ID NO: 107877 - DNA, 75 bp, Homo sapiens
gaactcttctcaaagaggaccctgcttactggaccttgcagatgcttcgggagaacctggaggaggaggccatca

SEQ ID NO: 107878 - DNA, 83 bp, Homo sapiens
tccgccgccactgtgacttgcagtcatcatccattaccacaaaattagtgtactaatggtcacttgatgtgcgctggctgttt

SEQ ID NO: 107879 - DNA, 75 bp, Homo sapiens
ctggtcatggacacagtccctgaaaagctacggagccgagatggctctgagtacctgatccagcacgactcggag

SEQ ID NO: 107880 - DNA, 75 bp, Homo sapiens
ggaggacaaggagcttgggcggcacactgatttatgtcagtacatggacaagcaccctggggggctgcatccaga

SEQ ID NO: 107881 - DNA, 49 bp, Homo sapiens
ttctggtgtagaaaagattatcaaggttttgcgtccattcctccttcgt

SEQ ID NO: 107882 - DNA, 74 bp, Homo sapiens
ttgctacctcttgggtgaactctagcaattacaagatgcctcctatgtggacccacttggccctcaaatagaac

SEQ ID NO: 107883 - DNA, 100 bp, Homo sapiens
gcagcatgcatctgatgctctctctccagtccttgctgaagagactttccgttacatgagtcatcctgtacagttctacagcatgaataggcctgcctct

SEQ ID NO: 107884 - DNA, 102 bp, Homo sapiens
atggcctccccctctaacggctattcatacaccatgcaaaacagaaccttccaaatttccttttccaactaaggttgtggcagcactgcctgaaggtatgag

SEQ ID NO: 107885 - DNA, 83 bp, Homo sapiens
actccctgcagaggctcttcctcatcatctcagccacgaagtacagccggagcaaattgtggctactaatttgccccctgaag

SEQ ID NO: 107886 - DNA, 96 bp, Homo sapiens
tgatgatggaaatgaagtataataccaagaaagccccacttggtggttcagaatctggggagccttatattccaggtgtctttttcagacagtttc

SEQ ID NO: 107887 - DNA, 75 bp, Homo sapiens
ggaagacaaaaattttcctgaggcttgccgaactaaagcaagaatgtcttgctcgtggtttggagaccaagggaa

SEQ ID NO: 107888 - DNA, 96 bp, Homo sapiens
cgggcggctccgcagtgaccggactcgggggaggcattgatcaatatgacagagatagcatcataaatgactttaagaatgggacctgcaaacttc

SEQ ID NO: 107889 - DNA, 75 bp, Homo sapiens
gggagacgtgctggacacactggaggcgctggggtccacattggccaactgtattcaactgacaagctgatcatt

SEQ ID NO: 107890 - DNA, 74 bp, Homo sapiens
ttcctcctactcaccatcagcctcctggttatggtacaggtggcagggcccagccccgaaccagacaagggacc

SEQ ID NO: 107891 - DNA, 75 bp, Homo sapiens
gagatgaggaggcgtcgcgcgcgcctgtagctcgcgggcctcgcaggcagcggaggaggagaaagagatggacct

SEQ ID NO: 107892 - DNA, 74 bp, Homo sapiens
cggggcccacctctctaagcctatggaaaagcttctggattcttctgcacagtcagtatcctcgggagttcgtg

SEQ ID NO: 107893 - DNA, 75 bp, Homo sapiens
cgacggggccggcggcggggcagctgccaggaacgagggtagcaggcgtgccgccgccagacggattactggcag

SEQ ID NO: 107894 - DNA, 90 bp, Homo sapiens
ctttgttcggggctgtccaaaggacgctagctgttgcacctgttcctccctgcgcgtaagggaaggtggccatccagaaggaggacttgc

SEQ ID NO: 107895 - DNA, 53 bp, Homo sapiens
gaggcaccaaggacctccaagacagagcctgccaggcagcatcactaaagcag

SEQ ID NO: 107896 - DNA, 83 bp, Homo sapiens
aggtgcagctggtactaaaccaattgatcggtataacgtcaaaaatcctgtttgtcagaagctttgcatcgtccctatggttg

SEQ ID NO: 107897 - DNA, 82 bp, Homo sapiens
aacatcctctttaacccagttcccaccctcacagtcagttggaatcgaagcctcttaaaatggcagatgacttggacttcga

SEQ ID NO: 107898 - DNA, 98 bp, Homo sapiens
tgcgtgaccccgacggctgcttctggtccaagccttatgcatttgatcgggtgttccagtcaagcacatctcaagagcaagtgtataatgactgtgca

SEQ ID NO: 107899 - DNA, 75 bp, Homo sapiens
cccatcatcatcttgaatttagtgaaggccaaatttgagtttcatcatggtgactatgaaaaacagtttctgcat

SEQ ID NO: 107900 - DNA, 50 bp, Homo sapiens
tggatcctaagtcctgacctttcatgagagccacctgagctgaagattcc

SEQ ID NO: 107901 - DNA, 100 bp, Homo sapiens
cagccctccatcttgcagcccagaagattgttaaaggaaatgggctggcaggaagacagtgaaaatgatgaaacatgtgctcccttaactgaggatgaaa

SEQ ID NO: 107902 - DNA, 100 bp, Homo sapiens
gaagttctaaccctcctgctcgatctcagagctcagacacagagcagcagtcccctacaagtacgtagagaaatcgacactcttaatgaacgtttagctg

SEQ ID NO: 107903 - DNA, 90 bp, Homo sapiens
gtcagaggtgggcggctttgaccgagaggctgctggagctcgtgtttggacgcacatgcaagaaagcacttcagccaagcagaagggagc

SEQ ID NO: 107904 - DNA, 100 bp, Homo sapiens
ctcaaatagtgatgaagctgtaatcaataaaaaacttcccaaagaactcctgttacgagccaacacagatctatagatttcttcgaactcggaatctcat

SEQ ID NO: 107905 - DNA, 90 bp, Homo sapiens
tgagaagagcagaaccatgagccgttcaggctcattccgggatgggtttgaagaaggatttacttcatttgggtcactaggtcacggggg

SEQ ID NO: 107906 - DNA, 96 bp, Homo sapiens
ggcatccccccagatgaaatggatgagttcggtctctgcaagatacgtggttgcagtaggattggagtgtggaaagatttgcttatatacctggaa

SEQ ID NO: 107907 - DNA, 90 bp, Homo sapiens
caaaattggacgtcgctctttgtctcgttccatttctcagtcatctactgacagctacagctcaggtcctggtgttcctatggtgacggt

SEQ ID NO: 107908 - DNA, 78 bp, Homo sapiens
agagattgaaatgttccttagaaaggagcagcaggttcaaaccttgtactactcagctgatcacaagctgcttgatgg

SEQ ID NO: 107909 - DNA, 90 bp, Homo sapiens
cccaggcaccttctccatgcattgcaaggatcaagcgtgctttccttatcgaggagcagaaaatcgttgtgaaagtgttgaaggcacaag

SEQ ID NO: 107910 - DNA, 74 bp, Homo sapiens
tcagtgcccacataaaaatactagattacagttgctcccaggttgaatttttaggagaagaaggaactggcttg

SEQ ID NO: 107911 - DNA, 75 bp, Homo sapiens
ctatccgtttaaaccccctaaggcagttcaattaacctccagaagatggctgaacctgcaggaataccagagcaa

SEQ ID NO: 107912 - DNA, 74 bp, Homo sapiens
ggcggaggcagcggagccctgggccatcgtcgggaacatgccctgtgtgccgccgtcatttcccacctgcggtt

SEQ ID NO: 107913 - DNA, 101 bp, Homo sapiens
atgactggagggtcagcctggaagaccacagcagccaagatgcttcctgaaacttggagagtggcagctgaatctacagggcatcaatgagagcacaatcc

SEQ ID NO: 107914 - DNA, 50 bp, Homo sapiens
ctgtgaaataccagagtcaggcccggaagctccagggcccacaacggcag

SEQ ID NO: 107915 - DNA, 100 bp, Homo sapiens
gccgggaccctcctgtgggcccaggggttcagccgtctgtatatctccccagatacctgaaactgaccacctgagtacgttttcccattgctgagctgtt

SEQ ID NO: 107916 - DNA, 83 bp, Homo sapiens
gctaaagcagcgtgcgttcagccctggggcaacatgagtgagaatgaggaagaggaaatttctcagcaagaaggcagtgggga

SEQ ID NO: 107917 - DNA, 100 bp, Homo sapiens
ccgaaggaaaaggaggaattcgccgtgcccgagaatagctccgtccagcaggcaattccagggccacacagatggagccagctgtattgacatttctaat

SEQ ID NO: 107918 - DNA, 90 bp, Homo sapiens
aagttcctggatgaggcccaaagcaagaaaattactaaagaggagtttgccaatgaatttctggtactccaaagattcaggtttactcac

SEQ ID NO: 107919 - DNA, 50 bp, Homo sapiens
aaccgcctcacccagcgcatcatccccagttttgacgaagtatattatgg

SEQ ID NO: 107920 - DNA, 50 bp, Homo sapiens
tgatggggacgtgccgcccctttgcggttttagagaacaacttgtaatgg

SEQ ID NO: 107921 - DNA, 100 bp, Homo sapiens
caagggactgtgtccaccctcaggtggccatggtgcccggccctgcctcatagcaggctgccatgtcgcgggaggcgggctcatgccgcgtgggcacagg

SEQ ID NO: 107922 - DNA, 75 bp, Homo sapiens
cagaaacaacattggagttttgccggaggacatggatttgattgacatactttggaggcaagatatagatcttgg

SEQ ID NO: 107923 - DNA, 90 bp, Homo sapiens
aaagaagtgagggtaccagctactgccttgtgtgtcttcggaatgggtactgttcaaaaaggaatgccccacaagtgttaccatggcaaa

SEQ ID NO: 107924 - DNA, 50 bp, Homo sapiens
cttatgctgaagcacttcgagaggtgtagtattgagtcctgtttgagcta

SEQ ID NO: 107925 - DNA, 100 bp, Homo sapiens
cggcagtggtggcagcgggagacaaatggaaacctccacagggcacctttcacagccagcaggcattggaatatggcaccaaactcgttggaggaaccac

SEQ ID NO: 107926 - DNA, 82 bp, Homo sapiens
gccgaggcaccgaggcactcagaggaggttgggacagcgtcttcgctgctgctggatagtcgtgttttcggggatcgaggat

SEQ ID NO: 107927 - DNA, 100 bp, Homo sapiens
caagaagcagccagaaccatcacctgcattggttccatccttgactgttactacagaaaaagtaccttaacatggggaatcttcttaaagttttgacatg

SEQ ID NO: 107928 - DNA, 100 bp, Homo sapiens
atttctctagctattgccttattttttctcatggatgttcttcttcgagtatttgtagaagggaatctggaaactgttcttcaggaagaaacccattagt

SEQ ID NO: 107929 - DNA, 98 bp, Homo sapiens
gacatacatgaagttcgtattggctggtcactaactacaagtggaatgttacttggtgaagaagatccatgagaatgagaagcgcctggaggcaggag

SEQ ID NO: 107930 - DNA, 80 bp, Homo sapiens
ccaagaaggaagtcatcatgggccggcctggaacagtcgtggagcagagagggcttcttttcaaattcgtttatgagctc

SEQ ID NO: 107931 - DNA, 90 bp, Homo sapiens
ccgggaagggcgagactggagcagagccgctgggcgccggagccgaggcgagcgccgcgcgcaccactgtgtcctgaatgacagctcatc

SEQ ID NO: 107932 - DNA, 144 bp, Homo sapiens
ccaaggactgcgtcatgatgttcacctatgtggagctccccagtgggaagtccaacctgaccgtcctcagggagccaggaactaagcgtcttgtagaaggaactattaatccaggagaaacctgtttaatcattgaagatgttg

SEQ ID NO: 107933 - DNA, 100 bp, Homo sapiens
aggaccccggtacatctgaaagccgggaaatgatgaggacggggacttggttgccttttccagtgacgaggaattgacaatggccatgtcctacgtgaag

SEQ ID NO: 107934 - DNA, 100 bp, Homo sapiens
ccccctgccacctcagatatttaatggcgaccgatactgtggaaaacatgtggaattcattcaaaatacatgagagctatgtatcctaccaaaaccttcc

SEQ ID NO: 107935 - DNA, 83 bp, Homo sapiens
tatctgtcttcggtggactccttcggcagtccacccaccgccgccgcctcccaggtttctacgataaagacagttcagggtgg

SEQ ID NO: 107936 - DNA, 100 bp, Homo sapiens
aagagaactactcctttttacctttggttcacaacatcatcaaatggactgcaggatcctcctgtctgtcgagcccacggaccaaggctgctaccccctg

SEQ ID NO: 107937 - DNA, 75 bp, Homo sapiens
cgcaagcctggtggcaaatctgtccccagctggtcatcaaaagctctctaagagacggagtttcaccatgttggt

SEQ ID NO: 107938 - DNA, 76 bp, Homo sapiens
ggcgctgctgctcgggctgctcttggagcacatcaggtccacccatctggccgggcagtaccttcttcaagagaaa

SEQ ID NO: 107939 - DNA, 89 bp, Homo sapiens
cgagcacagagcctcgcctttgccgatccgccgcccgtccacacccgccgccaggttctgggccggagaaggggcgacgttcgggcacc

SEQ ID NO: 107940 - DNA, 75 bp, Homo sapiens
ggcgcgcagctcgcgggtctttggacaccaccggtcctgagtccgcgctgtcggaaaaggtaacagaagatggaa

SEQ ID NO: 107941 - DNA, 102 bp, Homo sapiens
gaagagagaaggaggaaaagaagcagttcctgatgttacaaatgaacaaggatctcccagggtctcttgcaacgtgtgagctgcctcttgccaagagtgagt

SEQ ID NO: 107942 - DNA, 82 bp, Homo sapiens
tttggatgccgagagcgagtatctgcttatgttcctgaggaagaattgaaggcagcagaaatagatgaagagcacgtggagg

SEQ ID NO: 107943 - DNA, 100 bp, Homo sapiens
gggccggctgcatgccgcctcctatctgcccgccgctcgcgccgggcccgtggccggatgcagacagacatgctgaactatctggaagtccactgaaaag

SEQ ID NO: 107944 - DNA, 100 bp, Homo sapiens
gcttctggaacggcagcctctcccccagcatggtctgcctggcggccgactccaaggaccaggctccctgcaagacaaatttacatgtattggagaccag

SEQ ID NO: 107945 - DNA, 95 bp, Homo sapiens
ggcaactgctggtttgtggcagcctgctcgtcacttgcctcccgggagtcgctgtggcaaaaggctaagatggtggccgaggcagaggcaacagt

SEQ ID NO: 107946 - DNA, 83 bp, Homo sapiens
gaattgtcagtgagcggagtctgaggtcgctgtggactgcccactgaaatacctcagggactttttcagcgtgatgctccagt

SEQ ID NO: 107947 - DNA, 75 bp, Homo sapiens
caagatcctgggcaataccttcggcatgtgtgtgctgcaggcccagatgaaggactgcatgcgcgagctggatga

SEQ ID NO: 107948 - DNA, 49 bp, Homo sapiens
tacaggactgcggacaagggctggcagggttattttggagctgttggag

SEQ ID NO: 107949 - DNA, 100 bp, Homo sapiens
gatggccaagattgaggacaagaatgaggtcctggatgtggtgggaccagccctcaccttccgcatccggcacaatgagcagaacctgtctttggctgat

SEQ ID NO: 107950 - DNA, 51 bp, Homo sapiens
ctcctcaccaccgaaagccaggaactgaggctcttgcagccaatgccggaa

SEQ ID NO: 107951 - DNA, 75 bp, Homo sapiens
ctgggttcgttttattcagcggcagtggtgctttcccgaatctcagaatgccacaaatcttcctattttcaagct

SEQ ID NO: 107952 - DNA, 82 bp, Homo sapiens
gctgacgctgctgctgcccggcctcgggggagtgcatccgccccaacccttttccccctcgtctcctgtgagaattccccgt

SEQ ID NO: 107953 - DNA, 75 bp, Homo sapiens
ttcctttctcaccactgccattgaatatcctccgaatcctaaatctagagctccaaggatgctggtcattaagaa

SEQ ID NO: 107954 - DNA, 83 bp, Homo sapiens
tctccgaccagtctgggggcgctggcggcctgcgcagccacctcaagggcagcagctcatcccagctccagtcgtggactgtc

SEQ ID NO: 107955 - DNA, 83 bp, Homo sapiens
aatctcactgctgcagacacaccagtgaaactgaaattgcattcttctgtgaagaagattataagaactacaaagctaatccc

SEQ ID NO: 107956 - DNA, 98 bp, Homo sapiens
gagaagcgcatgagccgcagctcagatttgcttgtaaatgcatcacgaagaggcagcccagaatgaagaaagcaagcaggagtgttggctcagtgcct

SEQ ID NO: 107957 - DNA, 73 bp, Homo sapiens
cagaaacagaggactaattttggcagttctaaatttgaatttgagaagagcttaaagcagcgcctgggtaaga

SEQ ID NO: 107958 - DNA, 100 bp, Homo sapiens
gaagaagggaaggcgcgagtgaggaaaggaggtactgtagggtgttttgaatgctgtatcaaatgcctggggggcattccctatgcctctctgattgcca

SEQ ID NO: 107959 - DNA, 95 bp, Homo sapiens
aggagtacagtggggaggagaaaacgtggatgtggtggcacaactctttacagacaactttgactaccaaactcgagatgactttgtgcgaggtc

SEQ ID NO: 107960 - DNA, 75 bp, Homo sapiens
cttcattacctgataactacctatctgaaagccccttcacagatgtagtcactacaaatcttaaattgcgaaatc

SEQ ID NO: 107961 - DNA, 100 bp, Homo sapiens
gcttatggcggcgctggagagggggcgctgagctgttgggggctctagatcgggtgtgagtggtggctctcgaagcctcaacatgtcaagaagagactca

SEQ ID NO: 107962 - DNA, 89 bp, Homo sapiens
tctgcggggccgtggcgctcggctgcgcgctgctcctcgccctcaagttcacctgcagggagagaagtcttttttcctccagccaggag

SEQ ID NO: 107963 - DNA, 97 bp, Homo sapiens
caccggtgtcacgtcctgaacatgagcctcctcctctccttctacctgctggggttgcttgtcagtagcgggcaagacgtgtgccaccactattgtg

SEQ ID NO: 107964 - DNA, 88 bp, Homo sapiens
catgctggttgtcttccttgtgtctacacgcaagatccataccaccatgagtggctaccagatcccacttccatcttcccagatccca

SEQ ID NO: 107965 - DNA, 100 bp, Homo sapiens
cctctggtgcgaaattccggatttccttgggtcttccggtaggagctgtaatcaattgtgctgacaacacagctcttggtgctggacaggcatctttgtt

SEQ ID NO: 107966 - DNA, 74 bp, Homo sapiens
gcattgtgttgctgcagattgccaaaaatttttgaagagattcggaaaattgaggataatgaatttcattacca

SEQ ID NO: 107967 - DNA, 99 bp, Homo sapiens
ggctagagccggagtggggcgagccgcggaacccggccgggagccgcgcgaggcgtcaatcctgcagaacctcgatttgcggggccagtccatcttcag

SEQ ID NO: 107968 - DNA, 96 bp, Homo sapiens
tgcgcgggacggctctgtaggaaggaacttggttccccctccctcagcttccgccccaaaagggatcgcttacacctgagacgaactacagaacag

SEQ ID NO: 107969 - DNA, 100 bp, Homo sapiens
tccaggagtcagggatcgtgaaggacgccagcatcatacaccggctgttcgaggccttgactgtaggccttccggagcagtactacagcctcacctggtt

SEQ ID NO: 107970 - DNA, 50 bp, Homo sapiens
actgtcccacggccaccgaagagttcctctgtgacgagggtgcaggtatc

SEQ ID NO: 107971 - DNA, 50 bp, Homo sapiens
aggaccaccaaaaataactttggctggtggccactatgaacagcctcgcc

SEQ ID NO: 107972 - DNA, 75 bp, Homo sapiens
atcctcggattctctacttctgctgcagtgtgtgaagaaaccctgaaggtcgggcctcaagtaggtctctttcta

SEQ ID NO: 107973 - DNA, 98 bp, Homo sapiens
cttcatagtccttgcgtctctctgaagggaaaaggccgaggcatcagcgtgtgaagaccgcaaagacgatcccgagtacagttgtgaacagcattgct

SEQ ID NO: 107974 - DNA, 71 bp, Homo sapiens
tccctgctctggatcatcgaactgaatggctatgagggcctcgtggagggaggtgagaacatcaagcaggc

SEQ ID NO: 107975 - DNA, 71 bp, Homo sapiens
tctgagcacagcatcatcaaggacttcaccaagcaggcctccaagcagcatcgtcttaaacgctaccacag

SEQ ID NO: 107976 - DNA, 75 bp, Homo sapiens
ccgggaaaatgactgcatgttcccctcaagggcagcagagaagaaagtggtgaaaattacatctgaaataccaca

SEQ ID NO: 107977 - DNA, 75 bp, Homo sapiens
ctgccacctgcctttgacctttttgaagcctttgcaaaaggcacacgtgtttcacgttgacaggtttgcttggga

SEQ ID NO: 107978 - DNA, 82 bp, Homo sapiens
cgtccttctccactttcgccagcccgtgccgcgagcgcggcctgcaggaggtgtggaaacaggaagagaactagaactggaa

SEQ ID NO: 107979 - DNA, 100 bp, Homo sapiens
tttggctttgcagacagcacagtcttacaggctcagatcaccatgaaagtaatccaaggcttgtacagtggggtcaccacagtggaactagatactttgg

SEQ ID NO: 107980 - DNA, 100 bp, Homo sapiens
cagacttctcgtgggcagcctcccctcggaactcgggcatcatggcctcagttctgggaggtgatcagtgatgaacatggcatcgaccccaccggcacct

SEQ ID NO: 107981 - DNA, 100 bp, Homo sapiens
agaacaactcttcttcatagttacgttatactgcccctgcattgttggtattgaaaagttcgaaatttgagcaacccagccaagaagttcaagattgaag

SEQ ID NO: 107982 - DNA, 74 bp, Homo sapiens
cgtggattcagcgcgatgcccaaatccaagcgcgacaagaaaggaatgtttacccttgcggaagttgcatcact

SEQ ID NO: 107983 - DNA, 100 bp, Homo sapiens
gaacttaatacagcaagaaagaccatcaagtttaccagactcagcccaaaaccatgtttgcccaagttgaatctgatgatgaggaagcaaagaatgagcc

SEQ ID NO: 107984 - DNA, 83 bp, Homo sapiens
acaagcccgtggaacaattcatcttaccagaggtgcccaccagctgacctctcctccttctcagtcagagtctctgctggcca

SEQ ID NO: 107985 - DNA, 75 bp, Homo sapiens
gtggtttctgtggcaggttttaaaccagcagaatattccacaggtactgaacgacacctgggtctccttcccttc

SEQ ID NO: 107986 - DNA, 100 bp, Homo sapiens
cgccaggctctctggaggccaggagatggcacgcgctcatcaagaagctgaatcagctgcgcgcaagcgagcctggcctggctcagctgctggtggatca

SEQ ID NO: 107987 - DNA, 100 bp, Homo sapiens
acccaagcccagggctgtgaacgtggctttcctcgagtaagacggcggcgagatcaggaagatgccctgaaccaaagataccctgagaacaaggaaaaaa

SEQ ID NO: 107988 - DNA, 98 bp, Homo sapiens
gctgattggaacatgcaaaggtcatcaatgcagcctcaagtcagttgccttttctaagtttgagaaagtgatggaatggggagaagatattaaagcag

SEQ ID NO: 107989 - DNA, 100 bp, Homo sapiens
gagaaaaatggcacctgtcaagatattgatgatgttaagaagttcaaaccgggttacctggaagctactcttaattggtttagattatataaggtaccag

SEQ ID NO: 107990 - DNA, 89 bp, Homo sapiens
gccgccagtgtttccgtcagtacgcgaaggatatcggtttcattaagatggaccacacatccccgacctacatgcttgctaacttaacc

SEQ ID NO: 107991 - DNA, 100 bp, Homo sapiens
gctgtttcttgggactgcgaagctatacaggctgaagaaggtagataatgactataatgcccttcgagaaagactcagcaccttgcctgataaattgtct

SEQ ID NO: 107992 - DNA, 100 bp, Homo sapiens
acctccagcccttaaagacacagctgaaatcctggaaaccatgcctttcccctaaaagtgttcgatcctttggtacagaagacagaccgacagatcgtcc

SEQ ID NO: 107993 - DNA, 90 bp, Homo sapiens
ggagaattataggaacctggtctccctgggaattgaagccattttttatgaaggaagttggcagtcactttgatgattttgtgaccaatc

SEQ ID NO: 107994 - DNA, 97 bp, Homo sapiens
gcactatgcccagtatgatgccgacgatgacgaggcatgtaatgaatttactacacatgtgatgaaccttctccgagaacagagtagaacacgtccc

SEQ ID NO: 107995 - DNA, 50 bp, Homo sapiens
ggaaaacatccagtgtggtggaaatggactcacaccacccggcaagaact

SEQ ID NO: 107996 - DNA, 96 bp, Homo sapiens
catgaagctaccggccagggttttctttactctggggtcccggctgccctgtggcctcgctcctcggaggatgtaggtgcaaaaaactacagacat

SEQ ID NO: 107997 - DNA, 75 bp, Homo sapiens
gtcacctgaagcctcttgtcccttcattgtcatctgcttttgagtcctaccctggtccaagcctggaaagtgaag

SEQ ID NO: 107998 - DNA, 100 bp, Homo sapiens
gttaagtcccccaaagatgagatttacctgtgagatgtttcatcccaacaaacctgcacttgttgccaagtcttccatcttactagatgtgaaaccttgg

SEQ ID NO: 107999 - DNA, 100 bp, Homo sapiens
cgccgagtcgcgcggaggcggaggcttggggtttggccgtaagctgtgtctcctgggaactgtgctggtcaacgcggtgtcgggcgtgctcatggccttc

SEQ ID NO: 108000 - DNA, 83 bp, Homo sapiens
ccgaggcgggcggcggccagctgggctccacagcccaggttggtgtggatgactacagctcagagtctgatgtgattattata

SEQ ID NO: 108001 - DNA, 100 bp, Homo sapiens
ggtcaggctcgccgccgagctgattggtgctgaagacatggacggcttccaggcagacacggaggaggaggaagaggaggagggcgactgtatgatcgtg

SEQ ID NO: 108002 - DNA, 51 bp, Homo sapiens
cagaaattgaaaggcttcaaagctagcagtgccatctgggattgacagctc

SEQ ID NO: 108003 - DNA, 75 bp, Homo sapiens
ccattggagctcatcagactgaccgtgtcttacatcagttcagagagcgaatgacaacagagctgctcaaggcgg

SEQ ID NO: 108004 - DNA, 146 bp, Homo sapiens
ttggctcactgcagcctcaacttcttgtcctcaagtgatcctcccaccttagcctcctaagtagctgggaccacaggctccttgccagaggcctccactcactccagacccctatagcccgtcgctgtcagctgtcaacaaaggat

SEQ ID NO: 108005 - DNA, 83 bp, Homo sapiens
gtgccgcttcggccgaaggcccgagcgcccgaggcgtctgggatggtgtgggaccgggtccctgtgcgttttattgcgacctg

SEQ ID NO: 108006 - DNA, 100 bp, Homo sapiens
aacatgcatgaagccgaagagtggtaccgctccaaggtccttgaatgggcaagagggcacatgaagtacggcgtcctccacattcacggcctctacacgg

SEQ ID NO: 108007 - DNA, 100 bp, Homo sapiens
cctggcatatctgggcgccaagccgcggagcctccagacggggggcagatggcctgtcggagccagagggcatctctctgaagcgggtcgctgtggtgga

SEQ ID NO: 108008 - DNA, 75 bp, Homo sapiens
gcgttttcctcgcagtgctccgcttgtggggagactgtcatgcctgctccttccaactcctcagaacctccactc

SEQ ID NO: 108009 - DNA, 109 bp, Homo sapiens
gatcaacctggagctctacgcctcctacgtttacctgtccatggccatcaccatcgaggctgagccaagagctgatggcagccgccggaccacccgctatgacatcgac

SEQ ID NO: 108010 - DNA, 82 bp, Homo sapiens
caaagaagactcttgtcacactaattgccaacaacaatggtcctcgatgggcttcctggaatattggtgtgtttatttgcat

SEQ ID NO: 108011 - DNA, 96 bp, Homo sapiens
cagctgcacagagacggctgatagagagctattacctaaattctgcttggtcagaatcgtgatggcattgtgttcagcactgatgactattttcac

SEQ ID NO: 108012 - DNA, 98 bp, Homo sapiens
tctacgagctgtttctcatctttatactcttccaggaaagatgaatgggagggctgattttcgagagccgaatgcagaggttccaagaccaattcccc

SEQ ID NO: 108013 - DNA, 96 bp, Homo sapiens
gaagttccaagtctattacctggggaatgtacctgttgctaaacctgttggaatagccaggtctggctgggtcggcacaacctgtttgagcctgaa

SEQ ID NO: 108014 - DNA, 141 bp, Homo sapiens
ccgccgtgctggatgccgtgatctccagcgccggcctcctcagtgcgaagaagctgcagccgcacctggccaaggatgatcatgacgcagtcctgaggtttaatggggcacccacagccaacttccaacaagatgtgggca

SEQ ID NO: 108015 - DNA, 75 bp, Homo sapiens
ggtgagcctcttccacgacccgccaggctccataaaaatacagactcaccagttcctgctttgatgtgacatgtg

SEQ ID NO: 108016 - DNA, 99 bp, Homo sapiens
tgaagaaagacgtgcggatcctgctggtgggagaacccaagaaggatcaagaaggtggagaagaaaagaaatctgtgcaaaagaaaaaagtaaaagagt

SEQ ID NO: 108017 - DNA, 98 bp, Homo sapiens
cttgtgagcggtacctccccgactgtgacaacctggcaccggcagccacagtgtgcatcccctcggcaattgtgagcttcaccgtctccaggaggaac

SEQ ID NO: 108018 - DNA, 98 bp, Homo sapiens
cttcaggctggagggcattttcccagcggcgctgctgcccctgttgctgaccatgacaaaagctcagtatgagcagacgctggcagagctgcatcgct

SEQ ID NO: 108019 - DNA, 96 bp, Homo sapiens
cggctgcgtcgcccgaggcgaggaggagcgctggcgggtcgataaagacaggagtggagtgatatcagacaccgagcttcagcaagctctctccaa

SEQ ID NO: 108020 - DNA, 100 bp, Homo sapiens
gccgagagccagagagatgtcggatttcgacagtaacccgtttgccgacccggatctcaacaatcccttcaagccttatgtttgatcatcggccaaggtc

SEQ ID NO: 108021 - DNA, 101 bp, Homo sapiens
cctgaagcaaaagtccaggaggaagagcatgaccttgttgacgatgacatcaccactggattaaagcaaggagagccaatcatgactggcaaaacacagac

SEQ ID NO: 108022 - DNA, 75 bp, Homo sapiens
cggacacataacaagcagcagtgaggacaccaaagatataagtatacagttaagctcagcccagtctcgttgtac

SEQ ID NO: 108023 - DNA, 116 bp, Homo sapiens
aacgaggccaagcggagggtgcgcgagctctaccgcgcctggtatcgggaggtgccgaacactggtatcctgtggtctgaggccatcttcctcgaggcaaggccccagaggaggac

SEQ ID NO: 108024 - DNA, 96 bp, Homo sapiens
cacagatgatacctttgatccagaacttgcagcaacaataggtgtcatggagaaactccagctgggcccagagattctgcagcgggaaaatccaag

SEQ ID NO: 108025 - DNA, 100 bp, Homo sapiens
gcccgtctcgtgggcgccgcagcctcccggggccctacggccgcccgccaccaggaatgaaagggttttggaggcaatgacagaaagagctgagatggat

SEQ ID NO: 108026 - DNA, 82 bp, Homo sapiens
ttggactgagtcctgcaggacacaggtgtctgcagcagcaccctcaggacagcctgcccacagccagcgtcatcctctgttt

SEQ ID NO: 108027 - DNA, 90 bp, Homo sapiens
ggcctggcgacccattcaggcacttatggccatttcagccagtcctcagaatggttggaatgaccctccagctttgaacagagtacccaa

SEQ ID NO: 108028 - DNA, 96 bp, Homo sapiens
tggagtcgagtctagaattcacacagagccacctaggatggtgccatgacaatggtgtgaactacaagattggagagaagtgggaccgtcagggag

SEQ ID NO: 108029 - DNA, 87 bp, Homo sapiens
gccgagcacgcgggtctgtcatcatgtcgcgttacgggcggtacggaggaggttagagcagccagcgggtacagaatggattttgga

SEQ ID NO: 108030 - DNA, 83 bp, Homo sapiens
gtgctgcgttcacaggtgtttctgcggcagaacatgaaaggctcccggagcagcgctgactcctccaggaaacactgaggcag

SEQ ID NO: 108031 - DNA, 100 bp, Homo sapiens
cccaggtgctggtggagcacaatgtcacgcacacctacgctgccccagggtacctgctcttccgagacttctgcctgaaccacctggaggaggccaggcc

SEQ ID NO: 108032 - DNA, 100 bp, Homo sapiens
aacctgggatggttgtgagggaagggacaagaagatactgccctgtgattcgcctttgccagtctcatctcgtgtctgctttgttaagttccatgatcca

SEQ ID NO: 108033 - DNA, 75 bp, Homo sapiens
gagcactaatatttaagaaagaagatgttaactttcagggttcagaggaagaaggagaaggggaagaagaggagg

SEQ ID NO: 108034 - DNA, 88 bp, Homo sapiens
gaatttcctcaactgtataataatagtgtggtctgttctttcttgccagaagttatctacaaggtactgtttgatactcaggctccat

SEQ ID NO: 108035 - DNA, 90 bp, Homo sapiens
tgcaggctgagcgcgcgcagggcttccgccgactggaggagctgtctgctgctcggaccaccagcactgctgcccccagggctacacgtg

SEQ ID NO: 108036 - DNA, 100 bp, Homo sapiens
ggtagacaagggcgtggtccccctggcagggacaaatggcgagactaccacccaaggcccctcgggaggcattggcacagaccgtgctcgcagaagtgcc

SEQ ID NO: 108037 - DNA, 90 bp, Homo sapiens
ctgctctgaagctcaccaaaaccatccaggattttttatcaagcagaaatgcatcgaacaacgagaatcaagatcactgagctaaatccc

SEQ ID NO: 108038 - DNA, 129 bp, Homo sapiens
ctcagaggaggtgtcctggatttcctggttctgtgggctccgtggcaatgaattcttctgtgaacctccatcgatgcttctcctgccctctgtgccccttccacgggctgggacatgccttggattctg

SEQ ID NO: 108039 - DNA, 75 bp, Homo sapiens
aagtgctgaaaaatgctcatctctcacacagacttttgatggacaggaggaggctgatccgatagagtaatacct

SEQ ID NO: 108040 - DNA, 96 bp, Homo sapiens
tcctattccactggattgggaaagaccatggcagtttgctgaatggtgcttagagtatggagaacatggatgcagaacaccagacacccctttctc

SEQ ID NO: 108041 - DNA, 100 bp, Homo sapiens
tcttcttgttttcagaccagaagggacaccttttgaagatggtatctgatgtgtagccatgcagaagacctacgtgcaaaagcagaatgggaaggcaaag

SEQ ID NO: 108042 - DNA, 83 bp, Homo sapiens
aacattagaggaggcttttcattatatttttaatgtgcaactagcctgtgagattcaggaatcactagatttgatctacttgg

SEQ ID NO: 108043 - DNA, 96 bp, Homo sapiens
gaattgacctgatcgtgtttgtggttaatcttcacagcaaatacagtcttccctgggttctgcctccgcctcgcccttccagccgcacgtgcctta

SEQ ID NO: 108044 - DNA, 100 bp, Homo sapiens
gggccggaaggtggagatccggagggcctcgggcaaagaagccctgcagaacatcaacgaccagaacaaaatccagtctcatagcagaggagaatataat

SEQ ID NO: 108045 - DNA, 95 bp, Homo sapiens
tgtctaccaagtgcagtttaaatagtctacaggtccaactgctgccactggcagtaatcgaagacttcagcagacacaaaatcaagtagatgagg

SEQ ID NO: 108046 - DNA, 96 bp, Homo sapiens
gcagcttccaggatcctgagatccggagcagccggggtcggagcggactgaacattcttcacgatctgaaaggaaaagaagagattctttcgggat

SEQ ID NO: 108047 - DNA, 90 bp, Homo sapiens
tctggaagttataacgctacacgaagaactaagaatattattagcacaagagcaccatactttgaggttaattggccttggtcctcacag

SEQ ID NO: 108048 - DNA, 83 bp, Homo sapiens
cagagagggaagagattcagccagcacactcctcgcgagcaaggttccaagaccaaagattaaattaagagaaggtaaagctg

SEQ ID NO: 108049 - DNA, 50 bp, Homo sapiens
agcctttggggcaccacagagatgcgggttcatcgttgggtcaattatga

SEQ ID NO: 108050 - DNA, 76 bp, Homo sapiens
tgatatctcaaaaggtgatctggacaaaggaacaggtatctcagcttgaagagaaactcactgctgagaaattgat

SEQ ID NO: 108051 - DNA, 101 bp, Homo sapiens
agatttgacctgtgcaaggacctcagcagcttggacacagcccactgcagaggtttctgttgcagcagacggtgcccagaaagagggtaaaaataagtcag

SEQ ID NO: 108052 - DNA, 50 bp, Homo sapiens
attttacactgggtttaccaacaggtcaaaatgcagatcttcgtgaaaac

SEQ ID NO: 108053 - DNA, 90 bp, Homo sapiens
gccgcgaggaggcgcgggaggtgttcgagaacgaccccgagacggttttaaaatcaaagatgggaaaatcggagaaaattgcccttcccc

SEQ ID NO: 108054 - DNA, 100 bp, Homo sapiens
ttttactttatgtgagaaaatctacaatttcttcgagacactcatataaagaaaactctactggaccgatggaaacacaattaacatggcaaatatggat

SEQ ID NO: 108055 - DNA, 100 bp, Homo sapiens
ttccggagaatactgacctggtgactttgggttcacagaaggctccttattggatgggctgtactggaagatgcagcccagcaaccagactgaagctgac

SEQ ID NO: 108056 - DNA, 95 bp, Homo sapiens
aggcgattcggtgaagcgattcctgcaggcgttggttcccctctttgacctgattagtgggatggtttggccatgaactcagcaccagatttaag

SEQ ID NO: 108057 - DNA, 100 bp, Homo sapiens
ctcaagtgaagcaaaagccttccatgattacgaagatattttcgattcagataaagaagttcctatcgaatccacttttgttcgcatcaaagaaactcct

SEQ ID NO: 108058 - DNA, 100 bp, Homo sapiens
gcagtgggggcgtaaaggctggcagcctccccgggtgcctccgcgatatgagggaaggcaccattggagatatggctatcctgggtataacagaaagttt

SEQ ID NO: 108059 - DNA, 100 bp, Homo sapiens
gaacatggagaacccccagcttggagcgcaagaattcctcagagagagaagactgtaataatggcgaaccccctaggaagataataccagagaagaattc

SEQ ID NO: 108060 - DNA, 101 bp, Homo sapiens
tttggggggcgcctgtgctgtccatgggaagagcatgcattgtgggttactggaggaacccgacatggattccacagaaactctgtgaaggcatatttaaa

SEQ ID NO: 108061 - DNA, 75 bp, Homo sapiens
gacagattcgcagtggtcgcttcttctccttgatgctgctgcagattgctgatgattttatcgagagtgtggtga

SEQ ID NO: 108062 - DNA, 75 bp, Homo sapiens
gacggattcatttagagctgcggaacaggacgccctctgataaataggaaggttgttgattactcacagtttcag

SEQ ID NO: 108063 - DNA, 75 bp, Homo sapiens
ccaaccaatgagtcgaaggtctcgtagagcttccttattgctggatttgtgcgactcggtgaaggatgatgcccg

SEQ ID NO: 108064 - DNA, 98 bp, Homo sapiens
aaagttaatgccaagaagcagccgccagttgggatcaaatgtgagcctatggatcaagaaactgcttggaaactccctgctgaaactggaaggtgatg

SEQ ID NO: 108065 - DNA, 114 bp, Homo sapiens
catggcggatggccccaggtgtaagcgcagaaagcaggcgaacccgcggcgcaataacgggggatatgagactttctactcggaatatcctgagtgttgcgtggatgtaaaacc

SEQ ID NO: 108066 - DNA, 97 bp, Homo sapiens
ttggcccactaaatatggattgctgtttgaacgaagcgcttcttcacatgaagtacctccaggttcacccagattctctcgggcctagccgtccttg

SEQ ID NO: 108067 - DNA, 87 bp, Homo sapiens
atcgcatcctatggctcaaagaaagatgattatgttaaagctgaagctcaacaaagatatagtgatctctgtgggcatttataatct

SEQ ID NO: 108068 - DNA, 86 bp, Homo sapiens
aaatgcatcattgaagccgtgagctcagcctgccaggttaaacccatccagagtaatggctgcggccttacccaggaccctggggg

SEQ ID NO: 108069 - DNA, 101 bp, Homo sapiens
cctcgggctgcgggagccgggctaggacgccgagcggtgactccccgccgctcccgggggccgtgacgaaaacaacagttttgttggcatgtgaagctcca

SEQ ID NO: 108070 - DNA, 83 bp, Homo sapiens
tgtgttcatcatggacagctgtgatgagttgataccagagtatctcaaatgagtccctggaacgccagatgcgtgaaatggaa

SEQ ID NO: 108071 - DNA, 100 bp, Homo sapiens
attgatttcccttcacattaaagaagatttgtgcaggcagtgaaatcaactgtgcagaccatcactgttggaggagtgagcacatcacagtttaagacaa

SEQ ID NO: 108072 - DNA, 98 bp, Homo sapiens
ttcggatgatgccttcaatactacctttatttccaccatagaattcaaagaagctttttcactatttgacaaagatggtgatggaactataacaacaa

SEQ ID NO: 108073 - DNA, 75 bp, Homo sapiens
gaaacgactgtcccgctgctgctggggtacctggatggtactggtgaggtttgtccaatggcggcggcagcggca

SEQ ID NO: 108074 - DNA, 82 bp, Homo sapiens
gcccccgaggcgagcgcgagcgaggggcagaaccccttcgagctggccttctccctagaccagcccgaccacggagactctg

SEQ ID NO: 108075 - DNA, 96 bp, Homo sapiens
gggagaaaccacattagcttcagggtgtatgaaatatgaaggatctgattttcagtgcaaaggacagagggtctcacggatggccccgctgccagg

SEQ ID NO: 108076 - DNA, 100 bp, Homo sapiens
tgcgtggaggaggcgccccgcgcagctggctggcggagcatgagcgccccagcagtggccggtgtccagctgcctactttctgcccggatctctggctcc

SEQ ID NO: 108077 - DNA, 87 bp, Homo sapiens
aggagggagccgtggaggtccaggtatgactgattttcccaaaatattttgtgaaacttctcagaagttggtgagtgtggaagcctt

SEQ ID NO: 108078 - DNA, 50 bp, Homo sapiens
ctctcacggcacctcccaccatgaaggcagcagtgaggatgccagagttc

SEQ ID NO: 108079 - DNA, 75 bp, Homo sapiens
tgccaacagtgtatgctcgaaatcctggatactgcagggacagcattgctaccatttatgttcgttataagcaag

SEQ ID NO: 108080 - DNA, 90 bp, Homo sapiens
atgctggcttgatcgtcaagtccttcaagcagttcgcactacagcgggagcaggagctggagctcgcaacgccctggtggtctccttcgc

SEQ ID NO: 108081 - DNA, 87 bp, Homo sapiens
ccatcaccgcgccttcagcttctctctgccccgccctggcaggcgaggctccaggcctccaggtgctaactttgagtacatcatcgc

SEQ ID NO: 108082 - DNA, 100 bp, Homo sapiens
cccagtgctcctgggatgtttataactggagctctattaccaggttttaaacttcgccatgatcgtgtcttctgcactcatgatatggaaaggcttgatc

SEQ ID NO: 108083 - DNA, 100 bp, Homo sapiens
acaagatttcgtcataagaccgcgaccagacaggcggcgccatcttcgaacttagacttccggaaggactttggcgaggtcagtcaagaacaatacccaa

SEQ ID NO: 108084 - DNA, 100 bp, Homo sapiens
caaaaattagaacctcttcgccaaagccttaatttatctgaaagtgtgtcaggaagctgtctgggaagccttcaggactttttgggatcgacttcctggg

SEQ ID NO: 108085 - DNA, 90 bp, Homo sapiens
atacagacattgagctcctccctgtgaactcagcattgctgcagctcgtgggtgctcaggactcagaattcatgattgaagaaatgcagg

SEQ ID NO: 108086 - DNA, 75 bp, Homo sapiens
cagccaagttccccaacggctccccgtcgtcctggtgctgcagcgttggctagagatttactacatccgtccttg

SEQ ID NO: 108087 - DNA, 74 bp, Homo sapiens
gccaagggaccaaggtggaaatcaaacgcgtgcaatggaattgagttttgccctggtaaatgggaataatatcc

SEQ ID NO: 108088 - DNA, 98 bp, Homo sapiens
acccatggtttccagtgcagcgcggagtgggcgatgccagcgtgccaggttgggtggcccagaccccttggactatgttagcatgtacaggaatgtgg

SEQ ID NO: 108089 - DNA, 146 bp, Homo sapiens
cagctttgttgagagcgacatgtttgtggaacacagatgtgcagattttggaatggctgctgataagaataaggaaaacgagttgtactaatgaaaaaatttcctctggatggagagaagatgggcagagaagcatcattatttat

SEQ ID NO: 108090 - DNA, 125 bp, Homo sapiens
ctggagtggaggaaggaggttgagctgctctcagatgtggcctactttggcctcaccacacttgcaggctaccaagcagtttctcgaagagattaacaagtggacagttcagtacaatgtttccc

SEQ ID NO: 108091 - DNA, 50 bp, Homo sapiens
gaaagggtcttcgctggcggccgacagagtgggaagctttggagctgacg

SEQ ID NO: 108092 - DNA, 71 bp, Homo sapiens
gcggagagtgtgcggctccaggtgggctcacgcggactacaaagctgatgaagacccagcattattccagt

SEQ ID NO: 108093 - DNA, 100 bp, Homo sapiens
tacaaaagacaaggaagatgagctgtcctttcaggaaggagccattatttatgtcatcaagaagaatgacgatgttactacatgatcatgctgtggagca

SEQ ID NO: 108094 - DNA, 99 bp, Homo sapiens
caggtgcgcaaggtgaaatgttcactgttaaagagagtttgaattgatgcatgttgatgagtttattgatgaactattgcacagtgagagagtctgtga

SEQ ID NO: 108095 - DNA, 88 bp, Homo sapiens
ttggtggaaatatgaattctgctatggcaaacatgtacatcaataccatgagaacactcgtgaaactgctcaggccatcaagggtatg

SEQ ID NO: 108096 - DNA, 83 bp, Homo sapiens
tccggaaggactttggcgaggacaatgcagatcttcgtgaagactctgactggtaagaccatcaccctcgaggttgagcccag

SEQ ID NO: 108097 - DNA, 100 bp, Homo sapiens
cgcaagcatgcccaccactgccacaaacgccgcaccaggtcttgtagcagcgcctcctcgaaatgcactcggtgatggaaagagagccactattctgaag

SEQ ID NO: 108098 - DNA, 74 bp, Homo sapiens
gagtgcatcaagtgccacatcaacgtgtatccacacaagcagacttctgcgctgacccaggggctggagcgaat

SEQ ID NO: 108099 - DNA, 106 bp, Homo sapiens
ttcttatttagccggagtgagaagcaagaaggccctggacacagcaatatctctgggctttcacagggctgtttaacgacccccaactccccatccatgcactcac

SEQ ID NO: 108100 - DNA, 83 bp, Homo sapiens
ctgagctccaggccgtgcgcatgtttgctgactacctcgcccacgagagtcggaggtttaaacggaacctgcagcgtttccag

SEQ ID NO: 108101 - DNA, 82 bp, Homo sapiens
aagctgcacatccagatgaatgatgtcatcaccgtcatcgagggaaggattttttatcaagcagaaatgcatcgaacaacga

SEQ ID NO: 108102 - DNA, 100 bp, Homo sapiens
ggccaaaggacagttagaagacagtaggtgggtgtttgtgtgggaaaagggctaccaggaaactgactccgtggtcagctccgttacgaccaaggtcaag

SEQ ID NO: 108103 - DNA, 75 bp, Homo sapiens
atattgcaaaactcttgatggaagaaggcagcaaagcagatgtccaatatcagatggaaatgatgcggagccttc

SEQ ID NO: 108104 - DNA, 100 bp, Homo sapiens
tgagcctcctgcaacacctgcggcctcactgggacccccaggaggtgaccctgcaggacagaatctggatagtatgcttcatggcactgggatgaaatca

SEQ ID NO: 108105 - DNA, 75 bp, Homo sapiens
ggaaatgctgttgctggattgcaaccccgagattgcaaaggtcgactgcaaggaagtactagacatcatttgtaa

SEQ ID NO: 108106 - DNA, 75 bp, Homo sapiens
taggaggaggtgatgtacttatggctaaagaattacctccaaagccattgtcaagaccacagcagtcatctgcac

SEQ ID NO: 108107 - DNA, 111 bp, Homo sapiens
aaacatactggctgttgtggtgacaatgacccaattgatgtgtgtgaaattggaagcaaggactgtacaagaaatctggaaaacttgtattcttaggtttggataatgcag

SEQ ID NO: 108108 - DNA, 50 bp, Homo sapiens
aaaaaagtgaatcagcagccaaatacatctggctcttgctgattgaattc

SEQ ID NO: 108109 - DNA, 82 bp, Homo sapiens
ccgccctttgcgcttggatccacttccccatctgtaacgaggtgttgagacgaggctggcgcccatgcggctctacacgctc

SEQ ID NO: 108110 - DNA, 75 bp, Homo sapiens
tatttacccagaagtagtccatatggaacgaatgcaggaatttgggaactgagctgtgcaagtgctgaagaagga

SEQ ID NO: 108111 - DNA, 101 bp, Homo sapiens
cagctcttccaggactttgagccagtccagaccctgctgctgtcttcaaagaaggtaagaatgattgatgttggctgatattggagtgctcattcacatga

SEQ ID NO: 108112 - DNA, 82 bp, Homo sapiens
cttcggtggactccttcggcagtccacccaccgccgccgcctcccaggttgggcccgaaggcatcctgcagaacggggctgt

SEQ ID NO: 108113 - DNA, 100 bp, Homo sapiens
atgtggcccaactctaagtgcccacttctgaaggatgacctcgttttgatggacagtctgcgaaacttgtatctgttttaaagaaggcacttgaaattac

SEQ ID NO: 108114 - DNA, 101 bp, Homo sapiens
catcaacatcaacacctccacctccaagttctatctttaatctcatgaagtacgacagctacagccgcttcttaaagtctgacttgtttttaaaacacaag

SEQ ID NO: 108115 - DNA, 100 bp, Homo sapiens
cgcggtccccgccagcgccccatcctgagccggaggaggaagccaagaatctggtgagcgaagccatcgcagctggcatcttcaacgacctgggctccgg

SEQ ID NO: 108116 - DNA, 81 bp, Homo sapiens
caagataatcaactttatcaaatttgatacaggagctgatgctacacacatggatggtgatcagattgttgtggaaataca

SEQ ID NO: 108117 - DNA, 76 bp, Homo sapiens
ttccgcgcgggactccggggcgccacgggggccatgtaagcaggtttccacttcaagcgtgacccttttgcctgtg

SEQ ID NO: 108118 - DNA, 82 bp, Homo sapiens
cgcgacttcattgatgcacccattccagtggtgtaacggacacctgctccacttcaccttttgccatgagtaaaagctccct

SEQ ID NO: 108119 - DNA, 96 bp, Homo sapiens
tattcagatcttcatgtgtctcttctaagctgaataaagctgttttggaactgtcaggtacctcaaagcccacagcaccacaagttattgttccag

SEQ ID NO: 108120 - DNA, 74 bp, Homo sapiens
cggaggaagtgaggcttttcccttctgctgttgacaagacccggattggtagtgggcagcagtcagtgacaggt

SEQ ID NO: 108121 - DNA, 82 bp, Homo sapiens
ttacccctttaaaaatcttcccactgcatcaaaatgggccctcagattttgcatttcagaagatggacacaaagaagaagga

SEQ ID NO: 108122 - DNA, 82 bp, Homo sapiens
ctccagcagccctccacccaggagtacgtgctgcatgtctacgctcccctcccacccggtcactccgtccagcaagcacgca

SEQ ID NO: 108123 - DNA, 100 bp, Homo sapiens
cggagatcagcagtctgtgacatttggaaccaagtctagagtgggaatgggtggcatggaagccaaggacttggcagatgaacttgctcttgttgatgtc

SEQ ID NO: 108124 - DNA, 75 bp, Homo sapiens
gaacgtggcttatgagtacctttgtcatttggaagaagcgaagagaatcctcactatggatgggctcattgagga

SEQ ID NO: 108125 - DNA, 100 bp, Homo sapiens
ccgggcaggagccgcgagccagctgcgcgaaggtacatgtcccagagcaagcacacggaggcccgggagctcatgtactcgggagccctgctcttcttca

SEQ ID NO: 108126 - DNA, 75 bp, Homo sapiens
agttccctgcaacccgtgcttatgcagatagttactattatgaagatggaggaaggatctgagtctctccctgcg

SEQ ID NO: 108127 - DNA, 98 bp, Homo sapiens
ttttatgaccaaaactgtgccttgtggaaatgaacttcacaagttcctcatctgggacactgctggtcaggaacggattcccaaatgctggaaaatcc

SEQ ID NO: 108128 - DNA, 96 bp, Homo sapiens
atcacttacctgatgcagaatcagatgaagatgaagattttaaagagcagactagacttctcaaggactcagaattcatgattgaagaaatgcagg

SEQ ID NO: 108129 - DNA, 75 bp, Homo sapiens
aagactgagaaatggatggaacgaatacacctcaatgtctctggctttcatgagaaggacaagaagccatattgc

SEQ ID NO: 108130 - DNA, 50 bp, Homo sapiens
gacatatcgttggacccagaattgaggcatccgcatgctggacggcgatg

SEQ ID NO: 108131 - DNA, 98 bp, Homo sapiens
gaggacgaggagtgcggccgggtccgggacttcgtcgccaagctggccaacaacacgcaccaggtgtatactcttgatgtaccagatgcattctatta

SEQ ID NO: 108132 - DNA, 88 bp, Homo sapiens
cagcacctcctcgccagcagccgtccggagccagccaacgagcgaaatgcttcggttacccacagtctttcgccagatgagaccggtg

SEQ ID NO: 108133 - DNA, 101 bp, Homo sapiens
agcagaacgtgtagccgcgtcccctccagtccgctccgggcagggtcctcactgagcagcgagtcgtcccccgtgtcctctccggccaccaaccacagctc

SEQ ID NO: 108134 - DNA, 100 bp, Homo sapiens
cgggaatgaagcgggcgctgggcaggcgaagctggtccgttacatttgtaagcagaggcagtgcaagctgagcgtggctcccggtgagaggaccccagag

SEQ ID NO: 108135 - DNA, 75 bp, Homo sapiens
aagattgttctaaaggaatttatgcattagcagccaagctagcctttatgggaagcgcagaagtcagaaagagga

SEQ ID NO: 108136 - DNA, 50 bp, Homo sapiens
caaaatggctgtcctccttggtaaaaacctgtctccagagaagattttcc

SEQ ID NO: 108137 - DNA, 75 bp, Homo sapiens
ctgggacgtaaggatgacgcaaaagttcacaagatgttccttgaccatactgtgtactaatggtcacttgatgtg

SEQ ID NO: 108138 - DNA, 90 bp, Homo sapiens
ggaggccaagaccgctgtgtggaggtagccgcagcgccagcaccagaattaaacaaccaccatgtcgagcaaaaaggcaaagaccaagac

SEQ ID NO: 108139 - DNA, 97 bp, Homo sapiens
ctgggacaatatttcagacggagcaaaggtgtcatggagaaactccagctgggcccagagattctgcagcgggaaaatccaaggcttatttatgcca

SEQ ID NO: 108140 - DNA, 74 bp, Homo sapiens
acaacatcaaggctctcttccgcaagggcaaggtatacttgtcactcatccccatcatcagcggtgtcctgctg

SEQ ID NO: 108141 - DNA, 98 bp, Homo sapiens
aacgagcggcggcggcggcagcgggtcttgggtcctccgagagcagcagcgtgagttcttcatgcctgggctggttgatacacacatccatgcctctc

SEQ ID NO: 108142 - DNA, 87 bp, Homo sapiens
ctttagtgatgtggtggtaagatgtatggtgaggggaagtggcttcgaaacattgactattaccgtttagatggttccactactgca

SEQ ID NO: 108143 - DNA, 90 bp, Homo sapiens
agcctcttctgtttccaatggggcttggaagcgtttgtgtctgctgccaagaagctaccacgagaagatgtgtatgatgttgtggaaggg

SEQ ID NO: 108144 - DNA, 75 bp, Homo sapiens
caaagaattgtgtgtttagtccttgacaaatctggaagcatggcgagcttagaaaccaagatagccaagtggaac

SEQ ID NO: 108145 - DNA, 83 bp, Homo sapiens
cgacaagccgctggcagccgcggatctcaccgccgctcaggcgcgagcttcggcctcggctctgtaccatgaagaagggcccc

SEQ ID NO: 108146 - DNA, 88 bp, Homo sapiens
ccctctcagcacctgggcggacggtgtcttctctttagggatggtgaggttggaaaaaggctcctgtaaccctcctccaggatgaacc

SEQ ID NO: 108147 - DNA, 75 bp, Homo sapiens
ctgtcctgcatgatgtagaaatggtctttgatgcgaagttactcagacccttctcaggtgcagccagagagacac

SEQ ID NO: 108148 - DNA, 82 bp, Homo sapiens
agtcacctgaaagccaggaaatggtccgcgggagagctgtggggcttggtgagtgtttcgtggcctctcgggttggtcagca

SEQ ID NO: 108149 - DNA, 74 bp, Homo sapiens
ccacagcatcctccagcacctcagaaccaggaagacagcgcttccagcaacccgtttgcactccccaactctgt

SEQ ID NO: 108150 - DNA, 75 bp, Homo sapiens
cccgagtctgcggaagtggtgacccgtgggacgcggctgagacagctgtgttggggtggaagaggaggaggcgcc

SEQ ID NO: 108151 - DNA, 100 bp, Homo sapiens
atgtttgaacactacaacatccctgccttcttcctttgcaaaactgcagttttgacagcaaccagctcatgtttggaaaaggaatcttccactgaaacat

SEQ ID NO: 108152 - DNA, 140 bp, Homo sapiens
cttgtgagaaatccaattcagctttttgtgctgccagcaagaaatgatcagtagcaccagtgtttatgcagtctctggtcccagcccaccccatggcccctcccagtcccagcaccaccagcagtaataacaacagtagc

SEQ ID NO: 108153 - DNA, 98 bp, Homo sapiens
cgtctccagcgagcggcgcggagctggacgccgcgatcgtggggcccgcgaggcgggcagccggggcgtccagtttttggagccgtgagggatacagc

SEQ ID NO: 108154 - DNA, 100 bp, Homo sapiens
tgtgttgtgccaatggtggagaagaaaacttcggagaccccatccttggtggtccccttggaagaccgtgtggtatctgtgggagaaacagtggccctcc

SEQ ID NO: 108155 - DNA, 75 bp, Homo sapiens
tgattaactcattcaaggttacccagttgtccacaagaatcggaatgtcagttaatgctattcgcaagcagagta

SEQ ID NO: 108156 - DNA, 80 bp, Homo sapiens
aataaaaaagaattcagctcctttacctggtgaacagcctttacaattgtttgtgcactgccagtgaaagatgtagaaga

SEQ ID NO: 108157 - DNA, 100 bp, Homo sapiens
gtcgcctcttcctttttcgacgcctccgccgccgcctgaggaggcgagctagccgggagttacaccgccaccgccagcctcaaggaataggttctcctag

SEQ ID NO: 108158 - DNA, 98 bp, Homo sapiens
gagaaacaggcgccgcgggctccgcgcccggccggacccgggcccgagatcattgagaagcagccaggccacattcggagcagggttttcagggaggt

SEQ ID NO: 108159 - DNA, 100 bp, Homo sapiens
ggatgatttgaagatattagcctaacaagatggaagcaggtttaaaattttacataagaagttacctttttcaggtgctatgcttacatttgaaaagatt

SEQ ID NO: 108160 - DNA, 100 bp, Homo sapiens
ggtcgtgcgacccaagcccctgcattcctgtacggatcatgattctggaaggaggtggtgtaatgaatctcaaccccggcaacaacctccttcaccagcc

SEQ ID NO: 108161 - DNA, 87 bp, Homo sapiens
cctcggcactaggcagcggaggagcccgaccgacccggtgtagagttcggtgctcgaatgataactattgatgggaaacagataaaa

SEQ ID NO: 108162 - DNA, 76 bp, Homo sapiens
gcctggaagaactcgtcatgctctttgtagcgtggtgcttctgttgctcacaggcttctccagggaaagtgaccga

SEQ ID NO: 108163 - DNA, 101 bp, Homo sapiens
ggcatcctgagtgctttgtgtgccggatgtaccccagagctggccctcctgcctctgtcatggcctcatcagtttcctggggttcttgctgctgttggtca

SEQ ID NO: 108164 - DNA, 51 bp, Homo sapiens
cttaaataagggcacacctagtcagggcttattggatctgaagagtaggtt

SEQ ID NO: 108165 - DNA, 80 bp, Homo sapiens
gggtgagaccctcacttcatccgatggggccactgaggtgcaaagagtttaacttatcccaagtcacacagtttggaaga

SEQ ID NO: 108166 - DNA, 101 bp, Homo sapiens
tttgtgttcaccaaggaggacctcactgagatcagggacatgttgctggccaataagatatggtccggaaaaagaacccccctctgagaaacgttgcaagt

SEQ ID NO: 108167 - DNA, 139 bp, Homo sapiens
gacagcacggccgaggctgcccagaggcgcctcctccacaccccccgccgcagcagcaccggcgacaggtcatgaatgaaaaacttcagcactgcatggaactaacagatctaatgcggaatcacctgaatgagaagag

SEQ ID NO: 108168 - DNA, 96 bp, Homo sapiens
aaacgggccgcgaaccgcagtatcatgctggccaagaagatcatcattaaggacggaggcacgactcagaaccgtgctgcatactatcctcctagc

SEQ ID NO: 108169 - DNA, 73 bp, Homo sapiens
gcggcggctctgctgcctctggtcacagccttctgccggaaacccaaacctgcctcagtggatgccaacacca

SEQ ID NO: 108170 - DNA, 75 bp, Homo sapiens
atcccaccaaagggggctgctgaccgagagagctcactcagccaggagtgtacctcacagccttctaggatctcc

SEQ ID NO: 108171 - DNA, 83 bp, Homo sapiens
cttcggcagtccacccaccgccgccgcctcccaggctctgaagggctccaagaagctggtgctgtctgtgtactcagcagggc

SEQ ID NO: 108172 - DNA, 100 bp, Homo sapiens
acaaatgcagaagtaagaggatttatagatcagaatctcagtccaacaaaagtgcgacttcatgatagcatatcagaagagggctttcactacttggtgt

SEQ ID NO: 108173 - DNA, 82 bp, Homo sapiens
ggcgctcgggggccgaactggccctggactacctctgcagctgagcgggctttggacaccatgaactttgatgtgattaagg

SEQ ID NO: 108174 - DNA, 101 bp, Homo sapiens
tttgaaaaccttgtggaagagacaagccattttgtgcgcaccacttttgtgtccaggcataagaaatttgacggtgtatgcaacagcgttattgcaacagg

SEQ ID NO: 108175 - DNA, 75 bp, Homo sapiens
gggctggcggccaggatggttcttagcagcccctgtcaaagggaacaggaagcagtccacggagggtgacgccct

SEQ ID NO: 108176 - DNA, 127 bp, Homo sapiens
caccaccatctccatcacccaccaacaacaccacaataatccacagccaaggattttctgccgtctcttggcaaaaatggcaaataatgatgctgttctgaagagactggagcagaagggtgcagag

SEQ ID NO: 108177 - DNA, 75 bp, Homo sapiens
cggacagtacctcttctgcaggtactggaaacccacaggcacacccaagaattgtcttagaagaaagaaggcaag

SEQ ID NO: 108178 - DNA, 50 bp, Homo sapiens
cgcagatccggcagctttccgaaagggaatgatgattgatgaagcagatg

SEQ ID NO: 108179 - DNA, 82 bp, Homo sapiens
gaaaacatgaccgctgagcccatgagagatgctgcaatttgtcagtaatcaagtgggagagttccctgacttgttttcagaa

SEQ ID NO: 108180 - DNA, 75 bp, Homo sapiens
gcagaaaaagaggctcttcctcctcctcccgcgacgaaatggtgtcaacctccaacaacaaagatggacaagcct

SEQ ID NO: 108181 - DNA, 50 bp, Homo sapiens
gtactggagagaaatcctacaagtgtgggaggagtctgctactagtctta

SEQ ID NO: 108182 - DNA, 75 bp, Homo sapiens
agaaaatcgacttggactcagatggctttctcactgaaagtcatgtactctggaggcaaactgcttctgagcctc

SEQ ID NO: 108183 - DNA, 82 bp, Homo sapiens
ccgtgtgcctggacctgcccaaggcctccgtgtaccagatttggagcaagaggtggtggtggccttcccccgaagaaatttg

SEQ ID NO: 108184 - DNA, 100 bp, Homo sapiens
atgccaatatgtttgagaggctggctgaggaggagaacaaggatctgttcagcaagtctgaccctttcatggaaatctataagaccaacgaggaccaaag

SEQ ID NO: 108185 - DNA, 100 bp, Homo sapiens
accccagcccccaaccttcccaggtgtgttccagagaacaagccttcagacatttgctatattgacgctgagctgtcaggggactcaggcttatgaggag

SEQ ID NO: 108186 - DNA, 80 bp, Homo sapiens
ggaggaggaagaagaaggtgatggtgagctttccatggaggagctattgcagcagtatgcaggagcctatgccccaggct

SEQ ID NO: 108187 - DNA, 100 bp, Homo sapiens
tacctgaagaagaggaggaggaggaagaagcagctggagtggttgttgaggaagaacttttccaccagcaggtgctgggtaggccaggtttcagcatcgc

SEQ ID NO: 108188 - DNA, 83 bp, Homo sapiens
gatgacgaacccaacctggtgcccggcccgcaggttggtaacaaggaagatgctgagaaggaagtagctatttctaccttctc

SEQ ID NO: 108189 - DNA, 76 bp, Homo sapiens
acgtgctgcatatttcaggtgttatcataagcctctacaaccccacgtcagagtgtgggattctgttactctatcc

SEQ ID NO: 108190 - DNA, 100 bp, Homo sapiens
gctactcctggcagtgcgtcaatcagagcgtcctgtgcggtgcagatgaaggattttcggttttcttacaagtttaaaatggcctgcaaggaggacgtgt

SEQ ID NO: 108191 - DNA, 100 bp, Homo sapiens
gtcctttccggctagtgcctaatgtcagaatccacatggatgggcacaccgttccggaaggcaaaagccttgtatgcctgcaaagctgaacatgactcag

SEQ ID NO: 108192 - DNA, 75 bp, Homo sapiens
caggaaggagcccaggagcagagggtcatcctctcgaaggtgttcgatgaagtcattgaagtgaatctaatcgat

SEQ ID NO: 108193 - DNA, 82 bp, Homo sapiens
attaactgaagtggagcttctggcatttacatcagtataatgggtctctcccaaatggcgatagaggaaggaggaaaagtag

SEQ ID NO: 108194 - DNA, 100 bp, Homo sapiens
gcaagaccaaaatttgaacaggttaatctgttggattctaatgcagttcatcacatcattcatgattttcagctgggctcaaaatgcagagaactcaaag

SEQ ID NO: 108195 - DNA, 90 bp, Homo sapiens
ctaatcaggctgcagattattttggtgatgctttcaaacagtgtcaatacaaagatactctccccaagtacactgcagttccagacctct

SEQ ID NO: 108196 - DNA, 82 bp, Homo sapiens
ggcgggcggtgagcgcccatatgggggttctggagagcggggtgtgggtgcagggctcgcggcctggcaagaatgtacagct

SEQ ID NO: 108197 - DNA, 100 bp, Homo sapiens
ctcggctgcgctgggcgggccccagattgaaaaggaagatcaggccaaccccaaagaagaagtgaccaaggaggagtttaaactgaatgaacaacctcgg

SEQ ID NO: 108198 - DNA, 100 bp, Homo sapiens
cttcattggccacctacagaaacaaaatgtcaacaaattgatgggtatggcctcacaagtcttggtctacccaccatatgtttatcaaactcagtcaagt

SEQ ID NO: 108199 - DNA, 100 bp, Homo sapiens
aaagcacctccacacgctgatatttaatgctgcacgggaccttctcatcaatgaacaccgggatcaatatggaaattatgtaatccaacatgtactggag

SEQ ID NO: 108200 - DNA, 98 bp, Homo sapiens
ccacgacggtgacacgcttccctggattggacccagtggcttattggctcaggaacgcaagctttgccgagatctagtccatagcaacaaaaaggaac

SEQ ID NO: 108201 - DNA, 100 bp, Homo sapiens
catggatgtcgacaggctttccatgtaacatggtacaggtttgcagattccgccagcagcacagcaagctctacagatgagtggctctttggcatttggt

SEQ ID NO: 108202 - DNA, 131 bp, Homo sapiens
ccttgtttggggaaggattccgtgcctttgtgacagaccgggacaaagtgacagccacggaaatggtgttcacactggccctgaatcaagggaacaccagttttcacatgctggcagaagcaatggccggg

SEQ ID NO: 108203 - DNA, 75 bp, Homo sapiens
tttcatcataagaccaaggatgaatacttgatcaacaggaaaatggctttgtaaagaagtttgaacctaaatctg

SEQ ID NO: 108204 - DNA, 97 bp, Homo sapiens
cttggaggcttcaaagagacaatcaagataggatccgaggttcagacccctgggcatactccttccttaagatgggatgagacaccaggtcgtgcaa

SEQ ID NO: 108205 - DNA, 97 bp, Homo sapiens
tctctgctgcaccgacctcgacgtcttgcctgtgtcccacttgttcgcggcctatagagtttatgtggccgaggcagacaagtggaattaggccttg

SEQ ID NO: 108206 - DNA, 100 bp, Homo sapiens
agagtctgtgcagtggcacctgcgcgaagctggccaaagcctgcccagacggctcacctgtgcgggatggaacaaaaggagtcgttcacgcctactgagg

SEQ ID NO: 108207 - DNA, 95 bp, Homo sapiens
cggttgctaagacttggcgaagcgctgcgctcgcgcccggatccctcagcctaagttcgaggcccaggcgcctccatcagcgccgcctgcgcccc

SEQ ID NO: 108208 - DNA, 100 bp, Homo sapiens
aacccacatgtgggagaggtctctgtccttagttctgggagtcccaggcttcaggagactcctcaggactgcagcctacgaggacaagcagaaactcaag

SEQ ID NO: 108209 - DNA, 82 bp, Homo sapiens
acggccagctcggctgctggagtgtctggtaaaagtacacctgtaagccagcttggttccgcagactttcccgaggcccccg

SEQ ID NO: 108210 - DNA, 100 bp, Homo sapiens
gggagctgcaggaaccagactgggggcgagctgagcacctgtagtcaatcacacgcagggtcatctagtagcaggcacccaaatcaggcaactcccaaga

SEQ ID NO: 108211 - DNA, 100 bp, Homo sapiens
aaccacatcttcctcaactttgtgcccacggttatcatggacccatcaaaggtttacacagtaaacaatgtgaatgtgatcaccaaaatacgcacagaac

SEQ ID NO: 108212 - DNA, 83 bp, Homo sapiens
cgcaactggtcttggtagcggaggcacccgaatgctgcccgggtgaggaaatctggcattttttaaagtttgcgccccacaaa

SEQ ID NO: 108213 - DNA, 101 bp, Homo sapiens
tctctaagctgaagaagaagcagcttcagcccaggaggagggatacgtttccacgataacttcggctttgatgacctagtacgagatttcaatagcatctt

SEQ ID NO: 108214 - DNA, 97 bp, Homo sapiens
cgcggacctcgccccgggacagcgaggagctgagggaccctgtggagccgccaccaaaatgcagattttcgtgaaaacccttacggggaagaccatc

SEQ ID NO: 108215 - DNA, 90 bp, Homo sapiens
aattttgagccatttcgaatcacttaaaggagtggacattgctagcaatgagctcccaaagccatccagcgggctgacgcacgaggcaca

SEQ ID NO: 108216 - DNA, 75 bp, Homo sapiens
ccaatttcctgtatatcggaatcatcaccatctgtgtatgtgtgattgagggccctcctcaggacctgtctgttc

SEQ ID NO: 108217 - DNA, 100 bp, Homo sapiens
ctgctcctgctggccgcctggacggctcgggcgctggagaccgagacatgggtgcccggcaccgcgcccgagcccactccattcagatcatgaaggtgga

SEQ ID NO: 108218 - DNA, 83 bp, Homo sapiens
ggaacgatggtagaggaccaccggtcaaattcttaccagacgctgaccggaaaggagattgagattgacattgaacctacaga

SEQ ID NO: 108219 - DNA, 96 bp, Homo sapiens
gaagaataagcacaagagaaagaaggttaagctggctgtcctgaaatattataaggaggaggagaacggggctgaggaggaagaagaagaaactgc

SEQ ID NO: 108220 - DNA, 82 bp, Homo sapiens
gttcccccaaatgtctgactctgactctcggactgagaaacgcaaggaccaggaatcaccttcaagcctatgtcgtgaggct

SEQ ID NO: 108221 - DNA, 75 bp, Homo sapiens
ttgcagccactcgagacatcacttctgttcgaagtcctgacggccacgctggatctggaggacgtccggagctac

SEQ ID NO: 108222 - DNA, 80 bp, Homo sapiens
aatgaatggtgctatacttgaattttctaaggtgtcattagataatgttaattcaagactctcgaagagaagcttcagtg

SEQ ID NO: 108223 - DNA, 100 bp, Homo sapiens
gctgctggctgcgctctgcccggcgagtcgggctctggaggaaaagaaaggtgtatgcaacagcgttattgcaacaggctaacgaaaacagacaaaattc

SEQ ID NO: 108224 - DNA, 100 bp, Homo sapiens
aacccaacctagtgggtgtaatacatcatgaactgcaggcccgacggccatggaggctgaagagacgatggaatgccttcaggagttccctgaacatcat

SEQ ID NO: 108225 - DNA, 98 bp, Homo sapiens
gaagctttacatcgtgaacctgcagcggatagaagggacccaagtgctctcaggaattcagtggtttggacgctccatccatggggtgaaggaccttg

SEQ ID NO: 108226 - DNA, 101 bp, Homo sapiens
tcgccagcagccgtccggagccagccaacgagcgtctgtgaatttctggtacgtgctggtgatgaatgatgagcacacagagaggcgatatctgctgtttt

SEQ ID NO: 108227 - DNA, 75 bp, Homo sapiens
ccggagctgggcgcggattcgccgaggcaccgaggcactcagaggaggtctctaattaacagaagatggcaaagc

SEQ ID NO: 108228 - DNA, 75 bp, Homo sapiens
cgtgatctgcccatcttgttactccctagcagtgtggtaaggtgagatcggactggaactgttcggctgcgacca

SEQ ID NO: 108229 - DNA, 102 bp, Homo sapiens
cacgaaaaaacttccagaacatctgggagaatatttaatggaaaatcgcttggttaaaacctgacacttttaacagggtggtcgtcctggacaaagtcacag

SEQ ID NO: 108230 - DNA, 100 bp, Homo sapiens
ggagagcgaagtcaaggccctgtgcgctaaggccaggttgcactccaggacttgcagacgaactccaagattggggcactcctgccttactttgtttatg

SEQ ID NO: 108231 - DNA, 100 bp, Homo sapiens
gggaacttcaaacagttcaacatcttctgtcatatgctggagtcagccctcactcagagactaaggtgtcagtatgttcttcaagctgctctgctcctgg

SEQ ID NO: 108232 - DNA, 82 bp, Homo sapiens
gcctcggccgccatggtcttcagcggcttgggcactgtttaaaggaaagttccgagaaggcatcgacaagccggaccctccc

SEQ ID NO: 108233 - DNA, 98 bp, Homo sapiens
cgagtcctagcgcctggcctgcgcgccgctgcccgcgccacagatgggtttgtggaggctacagaaggtttgggggatgatgctcttggcaagggaca

SEQ ID NO: 108234 - DNA, 127 bp, Homo sapiens
gacggttgctaattagcctgcaacaaagagttccttgctcatctaaaagaggcaatcaccgttcagagagattggaacaattatcaggtcattaggatgctgtcctacggaaggagagctgcatgat

SEQ ID NO: 108235 - DNA, 49 bp, Homo sapiens
gcagacagaaatttcaccaagccgcagggtttggacagaggagccaaag

SEQ ID NO: 108236 - DNA, 74 bp, Homo sapiens
acgcagcggagatgcctctttttgccaccaatcccttcgatcaggatgttgagcatgcaagcggcaagatgtcc

SEQ ID NO: 108237 - DNA, 87 bp, Homo sapiens
ctggaggagccttctcaagaacagagctggtatgaatatgagcccagtctctcgactaaaaaaaacttgggccaaagtgaagactgc

SEQ ID NO: 108238 - DNA, 75 bp, Homo sapiens
aaaggcccaaagagacagctcactgtgttatagttttgccgctggactcttccctcccttcccccaccccatcag

SEQ ID NO: 108239 - DNA, 90 bp, Homo sapiens
tccgggccgcgaagtcgcagcgccagacccaaggcccccgagtgagcgcgggcgccgaggttcccaacaaggctacgcagaagaaccccc

SEQ ID NO: 108240 - DNA, 96 bp, Homo sapiens
cgcaaactgggcgtctgttccggcgccggacccctatttgcaaaggtttgcaatggtctggagcagccaaggaagcagcagcgctctgatctcaat

SEQ ID NO: 108241 - DNA, 98 bp, Homo sapiens
gagcagtcaactcaaatgcaagtccaagaggaggaggaggcggaggtccaagcggaaaggtctgaatttcctgctgctgttcacaaagatgcttttta

SEQ ID NO: 108242 - DNA, 90 bp, Homo sapiens
atagtggaaagaaaccatgtgctgaaatgtttgacgacactgatggtttggatgtgatcttcgtggtggaaagctaaattttaaaaccac

SEQ ID NO: 108243 - DNA, 49 bp, Homo sapiens
cctccccagccacgtggaactgtgacattcccagaacctggaggccagg

SEQ ID NO: 108244 - DNA, 83 bp, Homo sapiens
gaagaacttcacaatcaagaaatgcagaaacgtaaagaaatgcaattgagacacacgatagtaaggagcatttagcaatgatg

SEQ ID NO: 108245 - DNA, 97 bp, Homo sapiens
ctgttgttggaggaacactttccaggtcagaatggcggcagtggagcatcgtcattcttcaggattgccctactggccctacctcacagctgaaact

SEQ ID NO: 108246 - DNA, 82 bp, Homo sapiens
agaaaataaaggagctgctgtctggaattggcaacatctctgagaggtgtgtgatggatgatgacaatgaagtaagggaccg

SEQ ID NO: 108247 - DNA, 74 bp, Homo sapiens
ggagaagcagctggccaagaaggagcagtccaaggagctgcagatgcagcagcagcggaaccgcttaggcagtg

SEQ ID NO: 108248 - DNA, 75 bp, Homo sapiens
cattgccttaagactggacaagatcatccactggccctggcttgagaatgaagtttctagattagaagacataat

SEQ ID NO: 108249 - DNA, 117 bp, Homo sapiens
tgatgtgatgctggagaccttgacacttatatcctccctgggtgtcatggagaaactccagctgggcccagagattctgcagcgggaaaatccaaggcttatttatgccaggctgag

SEQ ID NO: 108250 - DNA, 98 bp, Homo sapiens
catgacttccgttggactgatggcagcacactggttattaatgctgcactggctttagcagcaaaaccacagagtaaactggcccaagagaacatgga

SEQ ID NO: 108251 - DNA, 96 bp, Homo sapiens
atcggtgggtttatctcaaggcctgagtagccggtaacaaacgagggttcccgggattggaccgacgcagccatgatgtgccgtttgggggtgcta

SEQ ID NO: 108252 - DNA, 87 bp, Homo sapiens
caaagctactctcactcagatgctaaatgttatctttgcacgcatggaaaaccaagcaatgccacctgggacagcaagaccaggttc

SEQ ID NO: 108253 - DNA, 87 bp, Homo sapiens
acagcacataaagattacagtgacaagaaaaacattgtttgaggattcctttcaacagcgtctgagagaagaaatggaagaaatcac

SEQ ID NO: 108254 - DNA, 98 bp, Homo sapiens
ggaccgaaacctagccccggacgagaagcgcagcaacgtgcggtgggaccacgagagcatcatgtttcaggcatatggagacaaacagggaccactgc

SEQ ID NO: 108255 - DNA, 100 bp, Homo sapiens
gccagagtcacacacggtcctaagagctgggcaccaggaagcgaaggctgatgaaggatttgggggcagagcacttggcaggtcatgaaggggtccaact

SEQ ID NO: 108256 - DNA, 150 bp, Homo sapiens
gcgatagagatggatatggtcgtgatcgtgactattcagatcatccaagtggaggttcctacagagattcatatgagagttatggagcatccccccggtccttcagaatccaaacacgctttccgtcctaccaacgcagccaccgccacc

SEQ ID NO: 108257 - DNA, 96 bp, Homo sapiens
aatgtgccgggttccgatttcagcatcggggcagacaccgccctgaacactatcaccgacaccaagctccacgaagatctctgtgagaagaggacg

SEQ ID NO: 108258 - DNA, 100 bp, Homo sapiens
gtcaatgagtctcgggcagttatcaccaggccttggacaagattcgctatgagagcctgacagacccttcgaagttggacagtggtaaagagctgaaaat

SEQ ID NO: 108259 - DNA, 101 bp, Homo sapiens
aatagctgaagtttttcatgtcccagaagatcaaggatctggattttgcataactggtaaaatagaagctggttatatccaaactggtgaccgactactgg

SEQ ID NO: 108260 - DNA, 102 bp, Homo sapiens
tgcagagacctgaaattctgccatcctgaactcaagagtggcttgaccactatgctatcatcaagtttccgctgaccactgagtctgccatgaagaagatag

SEQ ID NO: 108261 - DNA, 75 bp, Homo sapiens
gagaagatggcggtctccacagaaatctccaaattggacatccagagcagcattcttgttctgtctacgtcttga

SEQ ID NO: 108262 - DNA, 100 bp, Homo sapiens
aagaaaaggagtcagggatggctcttacacagggaggagctgtgcagtgagaagcaaagcaggaaacaagcctattacaaatcaacttggattaaccttt

SEQ ID NO: 108263 - DNA, 89 bp, Homo sapiens
gtcaacaaccgcttcgagctggtggtgaaggcatttgtggtcctggcctcgcagttcctgtcccatgacccagaacagctcaccaagga

SEQ ID NO: 108264 - DNA, 98 bp, Homo sapiens
gcccctccacagacccagggcatttggtggacacttttgcttgcagttaggtcaagtggaggacaactacacctttgcccaacctgggattcaaatga

SEQ ID NO: 108265 - DNA, 50 bp, Homo sapiens
tggctgtgctgcgcggcccccgcgcatggagacatggaaatttacactac

SEQ ID NO: 108266 - DNA, 82 bp, Homo sapiens
ttggaagcagccgatccagcctgcggagcctgtggggcaggctctgaagggctccaagaagctggtgctgtctgtgtactca

SEQ ID NO: 108267 - DNA, 100 bp, Homo sapiens
gatgggctggcttactgaaggacatgattcagactgtcccggacccagcagctcatatcaagaaccaattcaggcattggaaaccctaattgttgatctc

SEQ ID NO: 108268 - DNA, 97 bp, Homo sapiens
ggaagaagtgtctgacgtggaaggaagatgtggacaaggcagtgaaggccgcccgggccgccttccagctgggctcaccttggcgccgcatggacgc

SEQ ID NO: 108269 - DNA, 83 bp, Homo sapiens
acctccgagcgcaaggacagcgcgaggtccgcgcagcccagcgcagccatcaaacggggattcagcgtccgatcctttggaac

SEQ ID NO: 108270 - DNA, 50 bp, Homo sapiens
ctgacatttggagcacggcatgcatgcatctactacaagccttagtgggt

SEQ ID NO: 108271 - DNA, 101 bp, Homo sapiens
gtttatacttacaacaaggaagggactttaatcactgaccatcccaatatacaggtggttgctgtatatggaactttatctgatttgctttctgtggccag

SEQ ID NO: 108272 - DNA, 90 bp, Homo sapiens
tccagcagcaactactgcactaccagaccaccaagcagaacctctgccattttgcagactttgatcacagtgaaacgttccatgggaact

SEQ ID NO: 108273 - DNA, 75 bp, Homo sapiens
gaaatgagaatgaagagagctcagtctatacgagatactccagccaaaaatgcacaaaagtcaaatcagaatgga

SEQ ID NO: 108274 - DNA, 100 bp, Homo sapiens
taatgccaggtgttcctcctctgatgccaggaatgccaccagttatgccaggcatgccacctgggagaaaagcctttcagctgtagctggaaaggttgtg

SEQ ID NO: 108275 - DNA, 108 bp, Homo sapiens
ctggagccgtagcgtcggtgctggaagacgaggccacagacacttctgatagtgaaggaagagtgacccagtcccagccatgaccactcctgagaaactctactccaa

SEQ ID NO: 108276 - DNA, 74 bp, Homo sapiens
gtttcaagcagtattaagagtaaatgaccaggatatgaaatgatttcaaatcctctagcacaggagattggtga

SEQ ID NO: 108277 - DNA, 89 bp, Homo sapiens
tgctcttacgtatttgtgtgacttgactcttcaaacacaaaggaactgtggctgcaccatctgtcttcatcttcccgccatctgatgag

SEQ ID NO: 108278 - DNA, 75 bp, Homo sapiens
accgccatggcaggcatcaaagctctaagcgaaagacatgaggcctcagcctgaaatgaggttgttttgaggtca

SEQ ID NO: 108279 - DNA, 98 bp, Homo sapiens
agaagctgctggacgctgcctacaagggcgtgccctactcccagcggcccaaggccgcggacatggacctggttcaatctcatccctcccagcagctc

SEQ ID NO: 108280 - DNA, 80 bp, Homo sapiens
gcacatcagcgaccgggagaacatagacgccaccaaagtccttggcactgtcaaatggttcaacgtcagaaatggatatg

SEQ ID NO: 108281 - DNA, 105 bp, Homo sapiens
ttgcaagaaacctcaggacttgagtaacagcaacatgaccaagatcactccatggatgaaatgacagctgtggtgaaaattgaaaaaggagttggtggcaataat

SEQ ID NO: 108282 - DNA, 82 bp, Homo sapiens
cgggagactagcttggccacaggagacaacgttgaggtacagacagatgagctttgatccaaaccttctccacaacaatgga

SEQ ID NO: 108283 - DNA, 98 bp, Homo sapiens
tcacagcatgcaacccaaagcgctaattcacagggacctgaaaccaccaaaaaaataatgttgagtttccatgaagaacaggaagtactgccagaaac

SEQ ID NO: 108284 - DNA, 104 bp, Homo sapiens
caccgcagatgttgtcaaggtggcctaccaggaggccaggggtgtcgccatggatgttgcagcagctgtcaacaacatggtatggctgagcatctttgtttttt

SEQ ID NO: 108285 - DNA, 98 bp, Homo sapiens
ggggagagttatgaggacccaccccaggcctccggtgtggctgtctctgatggtgtcatcaaggtgttcaacgacatgaaggtgcgtaagtcttcaac

SEQ ID NO: 108286 - DNA, 98 bp, Homo sapiens
tggaacctcactgaaaattggtattgttggattgccaaatgttggttttttgtagcatcagatccaacagttaaaacagatcgactgtggcacgacaa

SEQ ID NO: 108287 - DNA, 50 bp, Homo sapiens
cacattttaaagctttacatagtgagaaagatcagtctaaagaaaaggag

SEQ ID NO: 108288 - DNA, 90 bp, Homo sapiens
catccagatttctttggacagcaccccgtagaaagggtgggatatgagcctcttcctccaacaataggacgaaatatttttgggcggcaa

SEQ ID NO: 108289 - DNA, 114 bp, Homo sapiens
ccgaagcggctcaggaaggcagctgtcactgagcccctggaacagagcgagagtatcacaatgcagatcttcgtgaagactctgactggtaagaccatcaccctcgaggttgag

SEQ ID NO: 108290 - DNA, 83 bp, Homo sapiens
cgttcatcacctagaaagccttttggagcagaaggaaaaagagaacagtatgttgagagagcctcctgacaaggtgatccggg

SEQ ID NO: 108291 - DNA, 75 bp, Homo sapiens
cgagaatgaggaggacaacagctacaaccggggctgctggagccagttctgcttctcggcaaggagcgatttgct

SEQ ID NO: 108292 - DNA, 137 bp, Homo sapiens
tcccgtattctcagagtaaaagttgtttctggaattgatctcgccaaaaaggacatctttggagccaggtgtgggccatgtttgaggattgccccagcattcagttctatgagtaataaatatccacaggctgtttt

SEQ ID NO: 108293 - DNA, 100 bp, Homo sapiens
gcttgtggcacaaggggagatggctttggaagaatttttgaagcaggtggagaaggaacgtgataaagaagtaagcgatgatgaggctgaagaaaaggaa

SEQ ID NO: 108294 - DNA, 80 bp, Homo sapiens
aaagcaagctgaagacatcaagaagatcttcgagttcaaagagaccctcggaacgttgcacactgggccacagaggatcc

SEQ ID NO: 108295 - DNA, 83 bp, Homo sapiens
aatgttaatgaaactaatgattcacccactccaaattcaagaggagaaagtgcaggccatgccacttcctctcaggagcctag

SEQ ID NO: 108296 - DNA, 75 bp, Homo sapiens
gactggaccaagatcgagcccagcgtcaacttcctcaagtcgcccaaagaacatccagtcatggataaaaatgag

SEQ ID NO: 108297 - DNA, 100 bp, Homo sapiens
gccaacggcacaactgtccacgtgggcattcacccaagcaaggtctacatgttcaagtgcgtgtggcggtgctacagattgatcaagtgcatgaactcgg

SEQ ID NO: 108298 - DNA, 83 bp, Homo sapiens
ggctgagctaaaatggctgaggagagagtcgcgacggaccaagaatcgccttcagccctgtctggtgcatccttggcagaaag

SEQ ID NO: 108299 - DNA, 83 bp, Homo sapiens
gccccaggcccgggttgtggtgctggttactctggaagaagtcaactcccaaatagccctagaatacggccaggcaatgacgg

SEQ ID NO: 108300 - DNA, 100 bp, Homo sapiens
gcctgctaacatggataagcatgccctgaaaaagtatcgtcgagaagcctatcatcgatggagtgaaggtacctgagcgcaggaaccatggtcttcattg

SEQ ID NO: 108301 - DNA, 101 bp, Homo sapiens
gctgctgctgctgctgctgcgcctgggccagacagccgctcaggaagcaatcttgcatgcgtctggaaatggcacaaccaaggactactgcatgctttata

SEQ ID NO: 108302 - DNA, 75 bp, Homo sapiens
gaaatattcgagtggcaactgcaagtgtcctgccatacttcgtagctacaaaactggctaaaatccggaagccaa

SEQ ID NO: 108303 - DNA, 95 bp, Homo sapiens
gaacggatgatttatctggtgacagaatatgctagtggaggggaaatatttggtgaagctcgtgtgtggagtgccacggtacaatcagacgacag

SEQ ID NO: 108304 - DNA, 83 bp, Homo sapiens
cggggcgcttcgccccgggccccccagcatgaagaccccggcggacacaggatcatccagcagctcgtcaacggcatcatcac

SEQ ID NO: 108305 - DNA, 104 bp, Homo sapiens
tggcccctcctaaggcagaggcccaggagaatggagaccacagggaagtcaaagaattatttccgcgatgcctggaacatcttcgactttgtgactgttctggg

SEQ ID NO: 108306 - DNA, 100 bp, Homo sapiens
acagaaatggaatcctttgcagctacagctgacttcaggtgatggaactgtactggaacaatgggagaagctggtagcttataggaagccaagatgacca

SEQ ID NO: 108307 - DNA, 74 bp, Homo sapiens
tggccacagcatctttgtctagccccagtgcagaaaagcacttggttctgcttcgagatggaaggacacttata

SEQ ID NO: 108308 - DNA, 96 bp, Homo sapiens
ggacactgaagccacccaggtgtaccccaagctgtacttgtcacctcgaattgagcagaaattagaaatatcttctggaaagctggccagatttgc

SEQ ID NO: 108309 - DNA, 74 bp, Homo sapiens
aagaattttccaaatgaatttgcaaaacttactgtagaaatcatgagtggaggatctcaagtccacattttttg

SEQ ID NO: 108310 - DNA, 74 bp, Homo sapiens
cgctgctggcacttcaggctctggccaacagagattttgagaaacacattgaaggatctgttaacacttgatat

SEQ ID NO: 108311 - DNA, 90 bp, Homo sapiens
tcgaactgtctcaccacttccctgcagctcccgtatactgcaacatccagatggcacagttttgaaacagttacaaccacctccaagggg

SEQ ID NO: 108312 - DNA, 100 bp, Homo sapiens
gtggagctccttttcctccacctaccttcccgagtgctttacaaggccaagtacggtccaatgtggatgtcctacttagggcctcagatgcacgtgaacc

SEQ ID NO: 108313 - DNA, 104 bp, Homo sapiens
ttttgaaatcgacacacaaagaatagagttgagcctgtgggacacttcgggtactccaaagattcaggtttactcacgtcatccagcagagaatggaaagtcaa

SEQ ID NO: 108314 - DNA, 100 bp, Homo sapiens
gcgtataccaggcatccagccccgatgagtcaattcagatttggaaaactaaaaagcagcaaaaaagggaggaaattttcaagttaaaggaaaaggcaga

SEQ ID NO: 108315 - DNA, 74 bp, Homo sapiens
gagaacggaaaactcccaacttcctggtaagtaaggaggtctctgtaccatggctcgtacaaagcagactgccc

SEQ ID NO: 108316 - DNA, 83 bp, Homo sapiens
cacagtgttaacaatgcatccacagaggagttgatccctgaattttattatctccctgagatgtttgtcaacttcaataatta

SEQ ID NO: 108317 - DNA, 100 bp, Homo sapiens
gccgtgactacacacgcccagacctgccttccggggacagccagccctcgctggaccagaccatggccgcggccttcgctcaaaagccaaaagtctctga

SEQ ID NO: 108318 - DNA, 50 bp, Homo sapiens
gctcatcgagggacgcccggcccaagtgctcctgagtattggtgttccat

SEQ ID NO: 108319 - DNA, 76 bp, Homo sapiens
gccaccaagatgagcagggcccttgcggagttccgcgtccgaggtgtgaaggtggacgacatccttggagaaggca

SEQ ID NO: 108320 - DNA, 98 bp, Homo sapiens
caagatacgccaatgcgctcaaaggcaaaaagggtacatcaggaacgtctctatcaagaatacaatttcagcaaggctgagggccatctgaaacagat

SEQ ID NO: 108321 - DNA, 83 bp, Homo sapiens
agcagctccgtccacaacgccgcttcggggctcctagggcttaaaagacaaccttcttgcttctgggacatccagcctgacag

SEQ ID NO: 108322 - DNA, 78 bp, Homo sapiens
ttcctgtacagcctgcagaactcgcagcttatgatgccattcttgaaagaaatgttgcaatcaagaagctaagccgac

SEQ ID NO: 108323 - DNA, 75 bp, Homo sapiens
gtggttaatcttttacaagaaaccaaacaagcctttgaaagatgtcataggggtcaacatatttcactggcacct

SEQ ID NO: 108324 - DNA, 100 bp, Homo sapiens
gtatacatgcatcgattctacatgattcagtccttcacacagttccctggaaattttccaacatggctagatccatcagaaactgaagccgtggagaacg

SEQ ID NO: 108325 - DNA, 100 bp, Homo sapiens
cctggtccccaaggtgtcaaaggtgaacgtggcagtcctggtggacctggtgctgacggccaacctggtgctaaaggcgaacctggtgatgctggtgcta

SEQ ID NO: 108326 - DNA, 100 bp, Homo sapiens
taaaggccaagatccaggataaggaaggtttggcatggattttaaagaaatagaattaattggctcaggtggatttggccaagttttcaaagcaaaacac

SEQ ID NO: 108327 - DNA, 75 bp, Homo sapiens
atgaatccttctagagacgtccacgggtcaaggccaacctgtcagaggtgcttgtgtccagtgtcctgggggtca

SEQ ID NO: 108328 - DNA, 100 bp, Homo sapiens
gagacccccccctcggctcggcgccttctgcgtctcccggctggtggggaagcctctgcgccgccggcaccatgaggtatgatctcgtgaaatcttgaga

SEQ ID NO: 108329 - DNA, 100 bp, Homo sapiens
ctgcttagcccttcccggaggacacctgtgctggagaatctggtaaaagcaccattgtgaagcagatgaggatcctgcatgttaatgggtttaatggaga

SEQ ID NO: 108330 - DNA, 74 bp, Homo sapiens
tacccctgctgacatttggagcacggcatgcatggtgctgtcccacaacctgtacacggtcctgcacatccccc

SEQ ID NO: 108331 - DNA, 82 bp, Homo sapiens
gcaaactccgcttccgattgggctaccacgccattccgagtatgagaaactcaatgagatatgttgtcatcttccctgtttt

SEQ ID NO: 108332 - DNA, 90 bp, Homo sapiens
gagtggagatgcttctgtggaagatgatgcttttatcaagagtgtcaatccatatctacaaggacagagactggataatgttgttgcaaa

SEQ ID NO: 108333 - DNA, 100 bp, Homo sapiens
gctgctcaaagagctcgagagacacatggagggcatttgcacgccaaaggcaaagaagaaaaaatgtccaaatcattaaagaactacattactattaagg

SEQ ID NO: 108334 - DNA, 100 bp, Homo sapiens
gccctcagcatcccttctacaacagggctgctggtgttacatttctaaagcacaggcctccctcttatgttcctctgccagcctttccattgcgtatgag

SEQ ID NO: 108335 - DNA, 82 bp, Homo sapiens
gccgccggagccgcgaggccaaatgctgtgggccctgagggaaaggatcacagaggcgctgagccgggatggctacgtgtac

SEQ ID NO: 108336 - DNA, 51 bp, Homo sapiens
gagtcggaccagcttttcaaacaatacagggtttcaccatgttgcccaggc

SEQ ID NO: 108337 - DNA, 83 bp, Homo sapiens
gacctgtcctttcagcttctttctcacacgcagatgaacactggacttcagaaattgtatggcagactcctgacatgttagtg

SEQ ID NO: 108338 - DNA, 101 bp, Homo sapiens
cggcggtgagatcgtcagcgctgactccatgcaggagctccccagtgtcctcctccttcatcagctggctaaacaagaaggtgcatggaccatacttccgt

SEQ ID NO: 108339 - DNA, 75 bp, Homo sapiens
caagtccccagggaatgccacagcatcctccagcacctcagggtggccatcagctcgaggagacttgagcccctc

SEQ ID NO: 108340 - DNA, 101 bp, Homo sapiens
cggacgcgtcatcgagtgtgacgtggtgaaagtgatcaacaaatacaagcgcagacgatttcagaaaaccaagaacctgctgacaggagagacagaagcgg

SEQ ID NO: 108341 - DNA, 100 bp, Homo sapiens
gaatgagaaccctacttgcctaaatgaggaatgtctttcctaccatctaaaatacgaaggtttctggctgggtttcagattatcttgaagtaatcaagga

SEQ ID NO: 108342 - DNA, 100 bp, Homo sapiens
tggaccaagatcgagcccagcgtcaacttcctcaagtcgcccaaaggctccccacaggtgcaggaagccgccgcccagccatggacggggaggagcagca

SEQ ID NO: 108343 - DNA, 75 bp, Homo sapiens
gattcagcctctactaaagttgtcatccgtggagcaggaaaccaggatgttcttgagtcgaagaacagcaccatc

SEQ ID NO: 108344 - DNA, 76 bp, Homo sapiens
ggataacccggtggtgcagctgggcctgaccaacccgaaaacattgctagtgaaaatgcctcgtgtaaaagcagct

SEQ ID NO: 108345 - DNA, 83 bp, Homo sapiens
ctggcagcatgtatatcttttgtggagataagtaattaacatttcgaaacaggaaatgaaaggatttatatttttaaaagcta

SEQ ID NO: 108346 - DNA, 129 bp, Homo sapiens
gccgggcctaggagcgactctcggtcgtgcagcggcggcgagcgctcgcgagcggctgcgggacgcgaggtttccggcagtcctgcgttaactgcggccgggaggctatgagcgagtgcaccggctgcc

SEQ ID NO: 108347 - DNA, 76 bp, Homo sapiens
gtgctggccgccggttgcaagcagatactggtgcctttttatctccatctcgaagtgcaagagtccagtttcatct

SEQ ID NO: 108348 - DNA, 98 bp, Homo sapiens
tggtcgcttccggagggactgcaaaagctctcagggatgctggtctggcagtcaggtgcactggtggaccaaggtgtctttgaggagctagcacgaga

SEQ ID NO: 108349 - DNA, 100 bp, Homo sapiens
ccaactgaacttcatcgctcctgacaagcatgaggcttagcgcagatatgaatgctgatgtggtatgtcacactctggagttttgtaaacagaacactgg

SEQ ID NO: 108350 - DNA, 75 bp, Homo sapiens
aaactctgtagcctgttggattctgaagattataatacctgtgaggtggatgaagctgtagcagttctacaggct

SEQ ID NO: 108351 - DNA, 75 bp, Homo sapiens
gcctagcgcaatgaggcgggcagcactgcgtgccggtggtggtgtgcacattgagccccggtatagacagttccc

SEQ ID NO: 108352 - DNA, 100 bp, Homo sapiens
gcaacttacgggaggacggggaaaaagcggccaaagaagtgaagctgctgctactcgcatgcagcagattggaataaatatgatgaccgattgatgaaag

SEQ ID NO: 108353 - DNA, 82 bp, Homo sapiens
cactcctgagtttgagccctatgagcagtggaacctaggttgctggatttgtgcgactcggtgaaggatgatgcccggaggg

SEQ ID NO: 108354 - DNA, 99 bp, Homo sapiens
gcagacatattccttgagagcatttgagaaaccccctcaggtacagacccaggctcttcgagactttgagaaggaatggtctggaacacggacctggtg

SEQ ID NO: 108355 - DNA, 98 bp, Homo sapiens
tcctgcaggccttgaggggacttatcagctacttagaggctggagtcctgcccagtgccctaaaccccaaggagcttgaagaaatccgcaaatgtggg

SEQ ID NO: 108356 - DNA, 75 bp, Homo sapiens
aggagctgtgctgtaggtttctcaggaatatgatgaagaatgggctaagaaaattcagagtgaaaagtttcgctg

SEQ ID NO: 108357 - DNA, 73 bp, Homo sapiens
tccggggatttctgctcacctggagaagggatggaaatacttcaacaagcagccaaaggattacctgatatgg

SEQ ID NO: 108358 - DNA, 98 bp, Homo sapiens
cagcatgttcagataaatctgaatggaagagtgagagagtgtccttgtggtccatcattgatccggtttggagggaaagcaaaagagtattcaccaag

SEQ ID NO: 108359 - DNA, 101 bp, Homo sapiens
tgcctcaccaagcatgtgctccgggaaaaccaggattatgtccctggagagcggaacggcagtgatgcaggagctgcgtccaccaccgcccgggccgaggg

SEQ ID NO: 108360 - DNA, 74 bp, Homo sapiens
cagctttcgaagacgggatactgctcagcaaggtgctggagaatctggtaaaagcaccattgtgaagcagatga

SEQ ID NO: 108361 - DNA, 75 bp, Homo sapiens
cggaaggctccctcggtcgcgagtatctccgtttcctggatgtgaactcacagctacttggaaggctgagatgtg

SEQ ID NO: 108362 - DNA, 100 bp, Homo sapiens
gtgaactcattttatctgccacgacccagaagacccaacatgagtgaagtttcctgcaagaaacgggacgactatttggaatggccagagtattttatgg

SEQ ID NO: 108363 - DNA, 98 bp, Homo sapiens
aatctcagtagggacaacaggcaggagaattatgggagcgcatttccccagggatcaaaatggtttcaatcccagaatactatgaaggcaagaacgtc

SEQ ID NO: 108364 - DNA, 98 bp, Homo sapiens
gtcatgagcgacagcggcgagcagaactacggcgagcggggaaatcctcattgacgattcaatttgttgaaggccaatttgtggactcctacgatcca

SEQ ID NO: 108365 - DNA, 98 bp, Homo sapiens
actcgacaacatgtcacccgcgctccaagacctgtcgcaacccgctttccaaggaatcccttcaatctgtggatgtcctccgagaggaagtgagtgag

SEQ ID NO: 108366 - DNA, 75 bp, Homo sapiens
gtgaaagcattgatggaatgtgctttagaagttaaaaaggatgttttgagcagtgacattataattctgacaata

SEQ ID NO: 108367 - DNA, 75 bp, Homo sapiens
tggagggatgcttgtatggtctccatatcacagtatcccagatgccaaatgtcagaatggcggcagtggagcatc

SEQ ID NO: 108368 - DNA, 90 bp, Homo sapiens
agaaaagctgcctctgcaaatcgactgtctggctgcctgggatgatgatgtgcctgcagatatggttgcagaagaatcaggtcctggtgc

SEQ ID NO: 108369 - DNA, 50 bp, Homo sapiens
tcctgtgcaccctcttcatcaggtctctaattaacagaagatggcaaagc

SEQ ID NO: 108370 - DNA, 100 bp, Homo sapiens
gggcctgaggcactgcagaaagtgggcctgagcctcgaggatgacggtgctgcaggaacccgtccagcggatgtgatgctggtacaacccagagtagaat

SEQ ID NO: 108371 - DNA, 80 bp, Homo sapiens
aagaacgagctgcgcggactcctcggcggcgcccgctcttccggcaaagacatgggaaagcggaaccaccaaaaggagtg

SEQ ID NO: 108372 - DNA, 75 bp, Homo sapiens
ccagaagaaatcaacctgctcaccggggagtctgatacacagcctgaacagaaacagatggtggcccagcaggaa

SEQ ID NO: 108373 - DNA, 75 bp, Homo sapiens
tttgatgtgcagaccgcccagatcttcttcaccaaaaatgggaagcgggaaacccagcgtttgctggcagaacca

SEQ ID NO: 108374 - DNA, 100 bp, Homo sapiens
caacaatgagatcgtggacaagatcatgggcaaaggacagatccagggttgagtaaggagccaaataccttgcgggccccccgtgtccgcacagccttca

SEQ ID NO: 108375 - DNA, 80 bp, Homo sapiens
tggagcctcagttggaagcagccgatccagcctgcggagcctgtggggcaggctccactttgaggctctgatgaacattc

SEQ ID NO: 108376 - DNA, 50 bp, Homo sapiens
aaatgccagctcttctcagaaagaaaagacaacaatatgcacaggttttg

SEQ ID NO: 108377 - DNA, 90 bp, Homo sapiens
gcacagggcctcgcctcactatggcagcagcacggcacagcacgctcgacttcatgctcggcgccaaagaggtctcttcattattgatga

SEQ ID NO: 108378 - DNA, 74 bp, Homo sapiens
tcgacaaaagaaccattgaaaaatttgagaaggaggctgctgagagaatcagatatcaccaaggagagaattca

SEQ ID NO: 108379 - DNA, 104 bp, Homo sapiens
gaagctgcccttcaccgcgggcgccaatggggagcagaaggactcggacacagtaagactttgaccccgacgcaggcttcagtgattgccgcggatcagaagcc

SEQ ID NO: 108380 - DNA, 100 bp, Homo sapiens
ccgagatgagcagaacctgctgcagcagaagaggaagcaggagctggccaacagctcggatgcgaccctcccagaccggccgctctcccctcctctcacg

SEQ ID NO: 108381 - DNA, 75 bp, Homo sapiens
tataattaacagttcaacatcaataaaggatgcaactgtgaaagttccttttcttaagaaatgcaaggaagcagg

SEQ ID NO: 108382 - DNA, 75 bp, Homo sapiens
gacctggcctacagacgacaagagtatcagcaatgtctcaggctgtgcagacaaacggaactcaaccattaagca

SEQ ID NO: 108383 - DNA, 116 bp, Homo sapiens
tcttggcatttggctttgcctttctggacacagaagtatttgtgacaggtgtctgagggttctgtggtccagttttcatcagcaaacttctccttgacagcagaaacagaagaaag

SEQ ID NO: 108384 - DNA, 82 bp, Homo sapiens
tcccgcccgccttccgccgtctcttcgagttcttcgtgctgctcaaggatgatcggctgaatgtaacagaggaactaacgtc

SEQ ID NO: 108385 - DNA, 51 bp, Homo sapiens
gacttggtaatggcgacgggtttggtcacaaacatgtcagacaaaagtgaa

SEQ ID NO: 108386 - DNA, 50 bp, Homo sapiens
gtcaaagttcatgtggatcgtctacaggactgctctgcatttggcctgtg

SEQ ID NO: 108387 - DNA, 100 bp, Homo sapiens
ggaggatgacggagctgcagtcggcactgctactgcgaagacagctggcagatgaaggatttgggggcagagcacttggcaggtcatgaaggggtccaac

SEQ ID NO: 108388 - DNA, 99 bp, Homo sapiens
aactgaggcctggagaggttaaagagacccgttcagagtcctacagtggcagggagatgcacttatttacatggaaccagagaaacaagtgatgtccag

SEQ ID NO: 108389 - DNA, 83 bp, Homo sapiens
cacctcctttccaactgggcaaaccccgcttccagcagcaaattgtggctactaatttgccccctgaagatcaagatggctct

SEQ ID NO: 108390 - DNA, 75 bp, Homo sapiens
cctggacccggacccaaagtgccatgtctttaatgttgattcttcaccacactgaaaccattaggaaaaatcctt

SEQ ID NO: 108391 - DNA, 50 bp, Homo sapiens
ttgtggcctttacccggaggtttaaccagtgccaccatggcaactgcacc

SEQ ID NO: 108392 - DNA, 90 bp, Homo sapiens
gccaggacactgagatttggagagccttggatcaactgtgcagttctcttgtgatgaagattatgtcctacagggcgcaaagagcatcac

SEQ ID NO: 108393 - DNA, 100 bp, Homo sapiens
aaggagtctagcagtgagcagtacgtgcctgatgtgttttataagaatctgaaagcggctgatactgaccccacagccccgccttatgattctctgctcg

SEQ ID NO: 108394 - DNA, 90 bp, Homo sapiens
atcaaagccacaagacactgctgataaggatgaataatccagaatggctactctgatctatgttgataaggaaaatggagaaccaggcac

SEQ ID NO: 108395 - DNA, 80 bp, Homo sapiens
tgctccccctcgtgcagcaacccccacacccagcaccagccgcggcgagtcctttgcacatgttggcaacacacgcatcc

SEQ ID NO: 108396 - DNA, 100 bp, Homo sapiens
accactacaagtaaaatgcgaattccacattctcatgcatttattgatctgactgaagattttacagcaggtgaccctggcagcaaccccaacaaacgcc

SEQ ID NO: 108397 - DNA, 50 bp, Homo sapiens
cttttccctctccctttccctaagatgggacctgcaaaggataaactggt

SEQ ID NO: 108398 - DNA, 100 bp, Homo sapiens
aattattctcagaaagccaaactgactgtaaatgggtacagccaaagaccggagctttggagagatgaagtttaaacagtgtcctacagagaacatggct

SEQ ID NO: 108399 - DNA, 75 bp, Homo sapiens
aaacaaaattgccagaaaatctttcctctaaagtcaaactggacctgggaggaaggcaaggtgctcatctttgat

SEQ ID NO: 108400 - DNA, 100 bp, Homo sapiens
ggcctctggctgctgctgctggcccggccggcctcgtgcgccccaggagaatgccgtgaatggagaacacctgtggctggagaccaacgtctcgggagac

SEQ ID NO: 108401 - DNA, 49 bp, Homo sapiens
tttcgccttcttcctgcccgagctggtattggtttgccttaaaaagggg

SEQ ID NO: 108402 - DNA, 75 bp, Homo sapiens
ggcggcccagctctctctgacacagtttgtgaagtgtggatatgcaggctctaactttccagaacacatcttccc

SEQ ID NO: 108403 - DNA, 100 bp, Homo sapiens
accaggccctcaagtccctgatggcctcagaggaggagaagttggctcaggagggccgtgctccggtggaatgcccatctctgggcccagtgccccatcg

SEQ ID NO: 108404 - DNA, 83 bp, Homo sapiens
acaagctggaatgcatccaagagaatccctcaacatgctggcatgtcgggccccaggcctgtggtgctgagcgggccttcggg

SEQ ID NO: 108405 - DNA, 100 bp, Homo sapiens
cacacctagactgatgcttattagtcatcaccgttattcctactaacgtcctgtgtcactgagaagaaaaagtcagcactttttgaagtgtctgaggtta

SEQ ID NO: 108406 - DNA, 131 bp, Homo sapiens
ggcggtggcgctcaagtaccagcagcaccaggagtccctctccgcccagttacaagttgaggctaagacgtctgaagccaggccctttaatgattctactcatgctgagcccttgaatgattctactcaca

SEQ ID NO: 108407 - DNA, 100 bp, Homo sapiens
tggatcctgaataccgtgtgagaaaattcttggccctcttaagagaagaaggagcagacacctgtgcatagcagatcatcttcacctattcctctgactc

SEQ ID NO: 108408 - DNA, 83 bp, Homo sapiens
gggcatctcctacattagcgtctacgaccaccaaggctgctttgaatgctgcatcaagtgtctgggaggagtcccctacgcct

SEQ ID NO: 108409 - DNA, 101 bp, Homo sapiens
aagggacctcgaatgtgggaccccagcccctctccagctcgaaatccagttggaattgatcacaccttttcagttgtacttcaatcctgaattaatcttta

SEQ ID NO: 108410 - DNA, 49 bp, Homo sapiens
ttggaacattttattatgcagccttgaatgttacctggaatgtcagaga

SEQ ID NO: 108411 - DNA, 107 bp, Homo sapiens
tgcctgaccagaaaggaactcccaagcgactgcaggcagaagctgagacggctaaggtggtattaaagataatcaaacattatcaagaagaaggacaaggaactgaa

SEQ ID NO: 108412 - DNA, 75 bp, Homo sapiens
cggcgagcgcgagcggcgcgagaaacctcgaagcggaggatccctgtgtcccagccgggcatggccgacccccac

SEQ ID NO: 108413 - DNA, 75 bp, Homo sapiens
tgagaagtgaggagcccctccgcccggcagctgccccgtctgagaaaatgccacccagaggatgtttgaaattga

SEQ ID NO: 108414 - DNA, 100 bp, Homo sapiens
cgggagggcgccgcggggcagccgccgctcctccggggtgtcatggagaaactccagctgggcccagagattctgcagcgggaaaatccaaggcttattt

SEQ ID NO: 108415 - DNA, 100 bp, Homo sapiens
tagctactttgtaaggcctgatctgggccccaagatgtacaacgcctatgcaattcttggccacgcagttgattatgcaaacatccgagtctgggatcag

SEQ ID NO: 108416 - DNA, 100 bp, Homo sapiens
gctgaagctgtgcaccgaggtccgtgtggccaacgagctcaacgccaggcgccgctcctttacaggttaaatggaagctgatcggcgttcacatggaatc

SEQ ID NO: 108417 - DNA, 82 bp, Homo sapiens
cgcgcgcgcctgtagctcgcgggcctcgcagggtagatacaacaagaattgaatactccattcctttaagagaaaactgggc

SEQ ID NO: 108418 - DNA, 75 bp, Homo sapiens
agagtggagtatctggtgaaatggagaggctggtcgcccaaacctgcctgaccagtgcacgcccaacccctgcga

SEQ ID NO: 108419 - DNA, 82 bp, Homo sapiens
agcttcccagtaaaaatgatgaaaaagaatatccacacagaagaattgatatcaggtgccagatgtgacatccagatgaccc

SEQ ID NO: 108420 - DNA, 75 bp, Homo sapiens
cctcatccagcaggcggtgacccgctaccggaaggccatcgccaaggacatggatttgattgacatactttggag

SEQ ID NO: 108421 - DNA, 83 bp, Homo sapiens
ttcacctgtgagcaggccttgcagcacccatggttatggaaacaaaggacatgctttacatcgtcactgaatttgctaaaaat

SEQ ID NO: 108422 - DNA, 90 bp, Homo sapiens
gtttgaagtcaacattcgatttattggaggcctacttgcagcatattacctatcaggagaggagcaacatggccaatctttcctaagctg

SEQ ID NO: 108423 - DNA, 50 bp, Homo sapiens
aaaccgccaagaaccaaacctgatactgtggatggtagggaagaaaagtc

SEQ ID NO: 108424 - DNA, 75 bp, Homo sapiens
gcggagcagtggtcggagatgtggcgaccgctgacagcagccatggcgagcggcagtggagacagcgtcacccgt

SEQ ID NO: 108425 - DNA, 96 bp, Homo sapiens
gagatgctgagcgaagactgtaaggagaaccctgcccagtccacaggctcatgtctggggccccgggggagtgagggcagcaaagaagaacagaca

SEQ ID NO: 108426 - DNA, 111 bp, Homo sapiens
agggcggcggcggcggctgcggtcgaagaaggggacgccgacaaggaacaaaccctatctgttttatttcaacattgtgaaatgtgccagccccctggttctgctggaatt

SEQ ID NO: 108427 - DNA, 90 bp, Homo sapiens
gaggaagatagtcttgggacccttgcatggtgtttcaaagggtggtgaagaactaaggtgcagagcattgtagaccaaggagccatggat

SEQ ID NO: 108428 - DNA, 97 bp, Homo sapiens
tccgaggtgcctttctccaaaagggccatcactgtgcatgtccccatgccctcagcaggagtcgtggacatccccattgtggagaaggaggcgcaag

SEQ ID NO: 108429 - DNA, 100 bp, Homo sapiens
caggggaagttacacgaggttggtcatgaaagagattccttgcagagacagctcaacacggcacttccacagtctgcgggccaggcatcgacatccgcaa

SEQ ID NO: 108430 - DNA, 101 bp, Homo sapiens
caactttgccatcctcatgcaggtggtcccgctggagctaagggagaacattgagcaattcttcaccaaatttgtagatgaggggaaagccactgttcggt

SEQ ID NO: 108431 - DNA, 100 bp, Homo sapiens
ctcgggtcgtggagccaggagcgacgtcaccgccatggcaggcatcaaaggtaagaatgattgatgttggctgatattggagtgctcattcacatgaagt

SEQ ID NO: 108432 - DNA, 100 bp, Homo sapiens
cgccatgacaaaagggtttacttggggttcgaccttgaaactacaagagtgaatctgaaagttagttcaaaaagtcaaacgggttcacagcagccaagag

SEQ ID NO: 108433 - DNA, 100 bp, Homo sapiens
gagcagagccgctgggcgccggagccgaggcgagcgccgcgcgcaccactgacttaattcagtgcacaaatgagatgaatgtgaacatcccacagttggc

SEQ ID NO: 108434 - DNA, 98 bp, Homo sapiens
ggggctgcgtgagcgagcagaggcttaaggtcttcagcggggcgctccaggaggcactcacaggaatactcccccagttgcaagaggcgcaggaccgt

SEQ ID NO: 108435 - DNA, 100 bp, Homo sapiens
gacggaaatgtgtcatcgaaagccagttaattggccttggtcctcacagctccaaaaagaaacaggatctcgataagctctatgagctgaagtccaaagc

SEQ ID NO: 108436 - DNA, 82 bp, Homo sapiens
gctgaaggccctacgggagaaaaccgggcgcaaggtgagaagccctaccactgcaactgggacggctgcggctggaagtttg

SEQ ID NO: 108437 - DNA, 100 bp, Homo sapiens
aatatacaagacccagatgagcccattttagaatttagcttagaacatatgcagtaatgtcacctcaaaagagagttaagaacgtccaggcacaaaacag

SEQ ID NO: 108438 - DNA, 75 bp, Homo sapiens
cagattcgcagtggtcgcttcttctccttgatgctcctgctgtgggctgggatcatgtgtctgcctctgactgca

SEQ ID NO: 108439 - DNA, 83 bp, Homo sapiens
cctgggttgatatatcttccaacactgccgggaagatgctgagccagggaggcggcccttccagcagccatgagggaaggaca

SEQ ID NO: 108440 - DNA, 83 bp, Homo sapiens
gttccgtgaactcagtactgatgcccagtggggcattcgtcttggtaaacttggtgtcagtcaccacgaacaggggcactcgg

SEQ ID NO: 108441 - DNA, 82 bp, Homo sapiens
tgctatcagtgcccgctttgttcagctgcagcatggagagatagataaacggggcagcacgctgaggaaacgcaagatgtac

SEQ ID NO: 108442 - DNA, 51 bp, Homo sapiens
cgaatacttgatgtggcccaggacttgaagtgattgacataaaactggaaa

SEQ ID NO: 108443 - DNA, 97 bp, Homo sapiens
ctcaagaagaacttcatccaagagctatcaaaccctcctggggcttgcccatagatgctgttcagtgggatatctgcaatctgccattgagaactgg

SEQ ID NO: 108444 - DNA, 50 bp, Homo sapiens
cctccaaagtagctgagactacagactgccactctccgcccctacctgag

SEQ ID NO: 108445 - DNA, 75 bp, Homo sapiens
ctttggtggagtctttagatgcactgttggcttgcgagacaaatatggccctgggaggagcggggacactgagga

SEQ ID NO: 108446 - DNA, 101 bp, Homo sapiens
cttcagcgtcccggcgccgtcgcgccactcctccgagtactaggttttgacaagcttgcatcatgcgtgagtataagctagtcgttcttggctcaggaggc

SEQ ID NO: 108447 - DNA, 74 bp, Homo sapiens
ctggttgccggggcaggggcggaggcggaggcagaggtggaggcgctttgaaagaatgatatggaacctagcaa

SEQ ID NO: 108448 - DNA, 102 bp, Homo sapiens
acagacattagcaacggaagccccgggcctcatcccaggctgggatggaaattctatgatgctgatgattatcacccggaggaaaatcgaaggaagatggga

SEQ ID NO: 108449 - DNA, 82 bp, Homo sapiens
tgccgcgagcgcggcctgcaggagcacttctccaccgacccagtggccgcctccatcatgaagatctacacgttcaacaaag

SEQ ID NO: 108450 - DNA, 85 bp, Homo sapiens
aattggactaaattaccagaatgcaggggttcttaaagatgtgggattgaaaaaagaagatattgcaatgtgggaagtaaatgaa

SEQ ID NO: 108451 - DNA, 97 bp, Homo sapiens
ttttttgtcttcattcactttcccccctcagtttctgaaatgattctccagaatttctcctcataaaaaagatgccatggacaatattaccaggcag

SEQ ID NO: 108452 - DNA, 100 bp, Homo sapiens
cgcgtgctcccaacgtcgccccggtttgacgcacacggcaccaaactggggattcccgaagtcttccgttttctgagaatgtgagtgctgttcaaaaatt

SEQ ID NO: 108453 - DNA, 100 bp, Homo sapiens
atgagatgggggaggagctgggcagactcagaaccgtgctgcatactatcctcctagccaaattgctcaactaagaccaagtcctcgctggactgctcag

SEQ ID NO: 108454 - DNA, 100 bp, Homo sapiens
ccaaaaccagtcatgaccactagacccacagctgttaaagcaacagattgagtttgtgacgggcaccaaaaaaggcaccacgaccaacgccacgtccacc

SEQ ID NO: 108455 - DNA, 100 bp, Homo sapiens
gcagaataattgcagaaaatcttcaaagctgggatctagcaattgggaggcagcagacttgggtaatgaagagagaaaacaaaagttcttgagacttatg

SEQ ID NO: 108456 - DNA, 89 bp, Homo sapiens
cagaaacccaggaaatcgagactcatgactcccagagaggatggcatctagaaggtgctggagaatctggtaaaagcaccattgtgaag

SEQ ID NO: 108457 - DNA, 75 bp, Homo sapiens
cctcctttgacagggacatcagtggagccttctcagacccacaggaactgtggctgcaccatctgtcttcatctt

SEQ ID NO: 108458 - DNA, 50 bp, Homo sapiens
aggagccttctcaagaacagagagtgaagacagcccaagttgaattttcc

SEQ ID NO: 108459 - DNA, 100 bp, Homo sapiens
caagcctggaagaactcgtcatgctctttgtagcgtggtgcttctgttgctcacagagataattgacgaccttgccaacctagtggagaacacagatgaa

SEQ ID NO: 108460 - DNA, 90 bp, Homo sapiens
ggaccatgtgatgcacctgctccagagtcaacaaacactcgggtcctatacttcagcatcttttcaatgttctgtctcattggactagct

SEQ ID NO: 108461 - DNA, 82 bp, Homo sapiens
cgcacatactggtgaagccaagcaacagtttccttttcattcagaaactaatctggattcactccctctggttgatacccac

SEQ ID NO: 108462 - DNA, 74 bp, Homo sapiens
ccacaggccctgggggatgcaccctccacgtccgtcagcctgacgacagatgtgaagttcatttccaatccgcc

SEQ ID NO: 108463 - DNA, 75 bp, Homo sapiens
gaggctgtaggctccttcaacccgtggctgatagctgaaaggttgaaggtcgaggagctggaaggcgagcggagt

SEQ ID NO: 108464 - DNA, 76 bp, Homo sapiens
caacagtatagtttgggttcgccagttggaattgaaggagtgtgaggaagaggctgtctgtgtcattatgtgtgcg

SEQ ID NO: 108465 - DNA, 76 bp, Homo sapiens
agcagccgcgcctgcagaccggcctcgcggagcccgcgcgccgagccccacagtcatcctttttgaacttccatga

SEQ ID NO: 108466 - DNA, 75 bp, Homo sapiens
ccggcagccgggacggtcggggacgcctggtcaaaatgcagatcttcgtgaaaacccttaccggcaagaccatca

SEQ ID NO: 108467 - DNA, 98 bp, Homo sapiens
tggtctggccacaacagcagcatggcagttgaattcctgcatgaactgaatgttccatttttcaaagttggatctggagacactaataattttcctta

SEQ ID NO: 108468 - DNA, 75 bp, Homo sapiens
gcccacagtgggggtgtgcaaacccgagagaactgggactcatctgatgatgtgagaagagttcagaggagggag

SEQ ID NO: 108469 - DNA, 100 bp, Homo sapiens
ggttgatgaagctaatttattgacttggcaagggcttattgttcctaccaagatcactccatggatgaaatgacagctgtggtgaaaattgaaaaaggag

SEQ ID NO: 108470 - DNA, 83 bp, Homo sapiens
ttcccttttttgacatcgcgcactatctagtgtcagtgatggcggtgaaacgtcagccggtggagtacgacaaggagttctcc

SEQ ID NO: 108471 - DNA, 98 bp, Homo sapiens
ggcgggaggagctagggctggagcctctccagcctcccgcgaaggttcaggaagatttgactgaagagaaaaaaagggaactggagcataatgctgaa

SEQ ID NO: 108472 - DNA, 78 bp, Homo sapiens
aagaatccgtaacaaaaacaactaactactctacagtcctgataaacctgtgagtgtgaaaataagttttgaagatga

SEQ ID NO: 108473 - DNA, 100 bp, Homo sapiens
agataacattggtgtcgctgtggtattagaggtccacaaagaactatttggagcagtttttcagaagaagtgaagtcaagatgaagaaccatttgctttt

SEQ ID NO: 108474 - DNA, 83 bp, Homo sapiens
cggcggcagcggctgcggagaaggcgagcgaagcaaacggggattcagcgtccgatcctttggaacagggactcacgtgaagc

SEQ ID NO: 108475 - DNA, 83 bp, Homo sapiens
gttgaagtcttggcctcggaggatgcagcctttggactcaaggttattggagtgatgagtaaagaatacataccaaagggcac

SEQ ID NO: 108476 - DNA, 75 bp, Homo sapiens
acaacatggagactggaagatgcaaaagcggcgccaggaaattgaacaaaaacttgaagttcaggcagaagaaga

SEQ ID NO: 108477 - DNA, 98 bp, Homo sapiens
agtcgttcctgggcaagctgggcggcaccctggccaggaagcggagggcgcgcgagggcctcatgcattgtgcgtcagcagcaatgtttatggtgaaa

SEQ ID NO: 108478 - DNA, 99 bp, Homo sapiens
attgggagaaatccccactcctccaagaaccaacccccaaattggctgggacagggactgttgacatttagggatgtggccatagaattctctctggag

SEQ ID NO: 108479 - DNA, 106 bp, Homo sapiens
aggagtcggagggcgaggaggacgagacggcggcggagtcggaggaggagccggactccagttgagtcagcagatactggagttatttgaaacatgtcagcagcaa

SEQ ID NO: 108480 - DNA, 74 bp, Homo sapiens
tatgaatatgggattttcaatcagaagatccgagatggatggcaggaatggaagttggatacactttgtgactt

SEQ ID NO: 108481 - DNA, 100 bp, Homo sapiens
ccgcgacctaatcaaaaagaaatgctttctctacgagcattcttgttgatgttcattaagcaattagtgatgaagactttgctaccaggacttgctggcc

SEQ ID NO: 108482 - DNA, 51 bp, Homo sapiens
atgatcatgatacagttgataaaattgttgcaaaccagtccagctacgggg

SEQ ID NO: 108483 - DNA, 76 bp, Homo sapiens
aggaactggcataggtgcactcagcaacggtatcattgcccagtgcctaagatcttttatgttcagctcactgtag

SEQ ID NO: 108484 - DNA, 75 bp, Homo sapiens
caggacttcaccaagggaccctgaggctcgtgagcagaaattgccatggagcattttgtgaagaaggtggaggca

SEQ ID NO: 108485 - DNA, 50 bp, Homo sapiens
ccagcactttgggaggccgaggatggtaggatgctctttgactacctggc

SEQ ID NO: 108486 - DNA, 100 bp, Homo sapiens
tttatgtgctatgtgcccagcccggtgctggcttccgtgggagacacagaatgaactctggaagcccagccagggacaatgcaccttcacagagattctg

SEQ ID NO: 108487 - DNA, 90 bp, Homo sapiens
cactttttaccttggggacctcagccccacaccagtgagaagcatcagcaccgtgaacttgtctgagaatagcagtgttgtcatcccccc

SEQ ID NO: 108488 - DNA, 98 bp, Homo sapiens
cacggagctgggcgacgagctgaccctgggagacatcgacgccggctcagttcggggaagctgcaggagttcggcgtgggtgatggcagcaagctgac

SEQ ID NO: 108489 - DNA, 100 bp, Homo sapiens
tgaagaaaattgcacgtaatcacccaaatgccaaagacgagttgtactgctgtcacaggaaatggacgctggattacaagcatggcagctcaggcagcag

SEQ ID NO: 108490 - DNA, 100 bp, Homo sapiens
tatacatacttcttttctgcctcagaagaagtggttcctgaggtatctggccaggaacagtcttcacggggacaaagaattttatctattccaatttggc

SEQ ID NO: 108491 - DNA, 74 bp, Homo sapiens
atactttgaagtagaagaagctgatgatgttttactgtgcctggctaactatagtcgagggggtgatggtccta

SEQ ID NO: 108492 - DNA, 75 bp, Homo sapiens
aaaactggagagcttcatcaaaaatagtgatagctttgataatttaatggatcgagaagtggcgttgcttgctga

SEQ ID NO: 108493 - DNA, 98 bp, Homo sapiens
ggcaagatcatcagagagatcttccctgacatcaaagctcgaaggcttggtggccggggccagtccaatcatagcaaccaagagtcaagagagtgatt

SEQ ID NO: 108494 - DNA, 75 bp, Homo sapiens
tgcagccaccgcggcccccgcgggctcatccaaaatacttgagttgtattgcaatcagctgttttttcctagctg

SEQ ID NO: 108495 - DNA, 50 bp, Homo sapiens
gaaacgtcaggaatttactacacagttggaatcgaagcctcttaaaatgg

SEQ ID NO: 108496 - DNA, 100 bp, Homo sapiens
atgcgaacagaatcctgcgaaggaatgcttctagtcacaacagacacccttggccatgactttcatgtcttccaaattctgactcatccttggtcctcat

SEQ ID NO: 108497 - DNA, 82 bp, Homo sapiens
ctgggtcctgcatttggccaccaagacctgggaacaagtcaaatcagaccaaacattgtctggcttgcactgtaaaactagt

SEQ ID NO: 108498 - DNA, 100 bp, Homo sapiens
catggatggaaggatgccttccaatggatgtcttcccgtgtctccccgaacaccctatgggatgccatatcttggtcctcatcaccgggggcatcgtggc

SEQ ID NO: 108499 - DNA, 74 bp, Homo sapiens
ggctgcggaccctgccattccggaggagacgaaaaccactattgctctgttgtatgatgaagagtccgaaaatg

SEQ ID NO: 108500 - DNA, 50 bp, Homo sapiens
ggagcagacagactcacctccaaccgtcacgagaagagaatgccttctag

SEQ ID NO: 108501 - DNA, 100 bp, Homo sapiens
tttcccaacacctgtaaaatgagggaggagctaggagaactatcagagcagttttacaaatatgcagtacaagaatttatcatggcatccagcattgacc

SEQ ID NO: 108502 - DNA, 75 bp, Homo sapiens
gaagtctcagcggtattctggtgcttatggtgcctcaggaagcagacagtatgagcatgaccagtggagaaggta

SEQ ID NO: 108503 - DNA, 90 bp, Homo sapiens
ctttggcaagtggacattttactggctcaagtgacttaagagattaaaattaatttggttgctgttggttctgaacaaataatgagttct

SEQ ID NO: 108504 - DNA, 84 bp, Homo sapiens
acgcccacgagttcctcatcgcggccctggacgtgctccaccgacactgcaaagctgctccaagccaggctgaaggaggagaag

SEQ ID NO: 108505 - DNA, 75 bp, Homo sapiens
caggagaaactaagttgctgaacgggtttatttcaatctacagaggacccagccacacctacaaggtccagagac

SEQ ID NO: 108506 - DNA, 100 bp, Homo sapiens
tgcggagttcataatgaataacacaggagaatggataaggcaaaacggaggctgggcttgagtttgaagaaacagaagaacctgattttactgcattatg

SEQ ID NO: 108507 - DNA, 100 bp, Homo sapiens
aggaggtgtgacatcatcatcatctctggccggaaagaaaagtgtgaggctgccaaggaagctctggagacagtgaccgtgaaggaggaccaggtgatgc

SEQ ID NO: 108508 - DNA, 101 bp, Homo sapiens
acagccacagtcaagatgttgccaacattcgtaaggtccattcctgatggctctgagagacaagagagacacctccaacttcgacaaagagttcaccagac

SEQ ID NO: 108509 - DNA, 75 bp, Homo sapiens
ggggcgtgaactgtcagatgaagaagtgccacccacacagaatatgcctatgggtcctggagggatgaatcagag

SEQ ID NO: 108510 - DNA, 100 bp, Homo sapiens
ggcaggacgaggtgtcggcgcgggagcagcacttccacagccaagtgcgggagtccacgttccaagaaactatgatcctgctttacatccttttgaggtc

SEQ ID NO: 108511 - DNA, 75 bp, Homo sapiens
ccagctgctagtcagcctcctgtctccagagtcaacccacaaggctgcctctaagaatcaaacttcactcttggg

SEQ ID NO: 108512 - DNA, 101 bp, Homo sapiens
catggcataaggaactctatcccaggaatacagctttgcattagatcctgtttgaccaaactcagagatcaattaaggcacagcttcagaactttgttaaa

SEQ ID NO: 108513 - DNA, 98 bp, Homo sapiens
ggagttcttctggaaattgaggacctgcaagtgaatcacaaagtggaagatgctttctacaaaggtgaactcaggctgaatgaggaaaaattatggaa

SEQ ID NO: 108514 - DNA, 100 bp, Homo sapiens
cccggagcaagcggagctcccccaagagccggaaagtctcaggaggaggtctgcgatttgctccatgccgcacccttccaaaacatcttgcctagagtct

SEQ ID NO: 108515 - DNA, 83 bp, Homo sapiens
atagcagaagcagcagcagcaactcctgatttaggggcaatcgatggagctgacacgtttctcccagcacaaagttgggagtg

SEQ ID NO: 108516 - DNA, 83 bp, Homo sapiens
cttcaacaagaggacccaggagaaattcgccctcaaacttccccgggcgctgcctggacaggcctgcctgcgtgctgggacat

SEQ ID NO: 108517 - DNA, 100 bp, Homo sapiens
acaatttctacagcagagaccttgagggatatctttcttcactcctcttcacttcttcatggtggacttgctttgtgaagagacagttcatgaacaagag

SEQ ID NO: 108518 - DNA, 82 bp, Homo sapiens
ctcacaatgaggctccctgctcagctcctggggctgctaatgctctgggtctctggttttaaaatcaaagatgggaaaatcg

SEQ ID NO: 108519 - DNA, 74 bp, Homo sapiens
ccacgtgcagacatctacaaccttcgatctcctgacgagtccggtgtctaaaagactatggagaatttgaagtt

SEQ ID NO: 108520 - DNA, 82 bp, Homo sapiens
agccgatccagcctgcggagcctgtggggcaggtaatcattaccaaatgaggaggaaaggacgatgtcatcgaggctctgca

SEQ ID NO: 108521 - DNA, 100 bp, Homo sapiens
ctgctgttgtctctccctgcagccttgccacgatcctgttgtcactcggttcccgattctggtccccggcccccagcagcgcctgcccccttcccaccgg

SEQ ID NO: 108522 - DNA, 98 bp, Homo sapiens
ttcatttataaatctgtcaaatgttctacttggtgaaaggtttttgactaaaggccagaatgcattggtagagctacagacacaaagaccaatagctc

SEQ ID NO: 108523 - DNA, 100 bp, Homo sapiens
atttcagtcagcctcagaggttgacttctacattgataagcaatctgcacatcgtgctgccacacgaggcttcattcgttatggctggcgctggggttgg

SEQ ID NO: 108524 - DNA, 50 bp, Homo sapiens
gaggcgccgcgcacagtcaagaagaacttcatggaggaacacggagtgac

SEQ ID NO: 108525 - DNA, 50 bp, Homo sapiens
aaaaagacctgtggctattaagatagggagaggaatcaaatgagtctgca

SEQ ID NO: 108526 - DNA, 95 bp, Homo sapiens
tggacccccagagccgcgcggcgccgcagcaggtgaatggaagagaatccgaagaagaaaatctcaataaatctgaaataagtcaagtgtttgag

SEQ ID NO: 108527 - DNA, 83 bp, Homo sapiens
ctagaaactcgctctaaagacggaaccgccacagcactcaagcaacatgagtgagaatgaggaagaggaaatttctcagcaag

SEQ ID NO: 108528 - DNA, 98 bp, Homo sapiens
tatgaccctatggaagcagaagaagctgaggatgaagaagatgtgacagacatcacacctccagtgcaatccctgttcctaagagacaaagctccata

SEQ ID NO: 108529 - DNA, 100 bp, Homo sapiens
atgagacaccgctatcacagctgctgcaatcgcttgggagagctcctgggccacccctcctttcaggtcaaggtaatcttcagcaagtactgcaactcca

SEQ ID NO: 108530 - DNA, 98 bp, Homo sapiens
atgctgcagcgggaaagagaacagagagtcctggggacaggacgcagagggctctacgtgtttgcacctggctgccaagaaaggccactacgaagtgg

SEQ ID NO: 108531 - DNA, 83 bp, Homo sapiens
ccacactcttcagcgaccacgcaggcactttcccggtccccagacctgcctagagctggaacgttacctccagagcgagccct

SEQ ID NO: 108532 - DNA, 75 bp, Homo sapiens
cactgttctctgggacaatgcttttgcagagcctgtagctttgcagtttggggagggctgttttccatgattgac

SEQ ID NO: 108533 - DNA, 101 bp, Homo sapiens
cccccgcccctccagtgcatatcagtatcatggagggacattactatgatccacgtggatgaatatcattcagtgcatcagaagctcagtgctgatatggc

SEQ ID NO: 108534 - DNA, 100 bp, Homo sapiens
cggcagtttccgtgggtctgtgaagaggtcggcggcccctgcgggcgccagtcagcttccttcaaaatgtctactgttcacgaaatcctgtgcaagctca

SEQ ID NO: 108535 - DNA, 95 bp, Homo sapiens
caagaacatcacagtgagagaggaggagatccttgtttacttggagaagacctgtgactggcttccgaaaccgaacatgtctgcttcatgcaagg

SEQ ID NO: 108536 - DNA, 82 bp, Homo sapiens
gttcatggccccgcgatgaagtcgagatctcaaatactgcatgtagagcgcatgaagtacaggacaataaagcttcctacac

SEQ ID NO: 108537 - DNA, 75 bp, Homo sapiens
atcaaatatgagaaagctaggccatctgaataactttactaaggtaaccaaggagcagtgaacagcagctactac

SEQ ID NO: 108538 - DNA, 90 bp, Homo sapiens
cgggaagcggcgatcctgccaccgggaggtgtggaagagccgggtaggtaaagaaggcgtataggcagaaggccctctcctgccacccag

SEQ ID NO: 108539 - DNA, 100 bp, Homo sapiens
cgggacaaatggacctccgtgaaggcgtccgtcctgcgcatcgcatggagacctttggcgacttggcctttggcgacatcttcctccacctgctcacggg

SEQ ID NO: 108540 - DNA, 80 bp, Homo sapiens
agagaatgtatgaagaacagtcacaggacagaggcttcgtgacggagttatcagagacattgagaggcaaattcggaaaa

SEQ ID NO: 108541 - DNA, 89 bp, Homo sapiens
gcgggcggccggcgctgcccggaggcgggcaccaggatcatctacgaccgaaagttcctgctggagtgcaagaactcacccattgcccg

SEQ ID NO: 108542 - DNA, 87 bp, Homo sapiens
tccgatctcttcttgatctgtttcttgatatggaagcagctacagggcaggaggttaaaaatctgtaagagcctgattttagaattc

SEQ ID NO: 108543 - DNA, 82 bp, Homo sapiens
ggagcccagcctcgttgcggccatcgccctgccggaccgcgcctcaggctcccccagaaagtcctacctccatctccgtggg

SEQ ID NO: 108544 - DNA, 80 bp, Homo sapiens
ctcttacgtctgcggaagtgcagctgcctcagttcttagcgcagccacccacacagaatatgcctatgggtcctggaggg

SEQ ID NO: 108545 - DNA, 50 bp, Homo sapiens
cgcgaccacagctatgcgaccgaaggatgggccaaagagaaccaaagatt

SEQ ID NO: 108546 - DNA, 100 bp, Homo sapiens
agccatgcaaaggcaggggaggaagccacctcgaggtgacagagctgaatgaacctctctccaatgaagatcgaaatctcctctctgtggcctacaagaa

SEQ ID NO: 108547 - DNA, 74 bp, Homo sapiens
tttgatcttggctcccacaagagagttggctgtgcagatccagaaggtcctgcatctccagtatggaatgtatg

SEQ ID NO: 108548 - DNA, 100 bp, Homo sapiens
aggctacctcaggggccgtccccaggacactgtccggatcttccctccctgggtcctgctgcgtgtccgcatgctgtactacctaagacaagaagtgata

SEQ ID NO: 108549 - DNA, 82 bp, Homo sapiens
gctaaagacgggccattttccagacctcatccagcgctgataaagcagtttgtgtccgacgtggcctggggggagctggact

SEQ ID NO: 108550 - DNA, 90 bp, Homo sapiens
aatcacataccccagttgcaagctaagggcccagtcccttctttcagtgaacttatggaagacccaggcacccccctgcctccagacccc

SEQ ID NO: 108551 - DNA, 82 bp, Homo sapiens
gagagagatgcttaaaaatcaccagttactttaatgactgtgtaaatgagtatggaagattatgatttcctgttcaaaattg

SEQ ID NO: 108552 - DNA, 100 bp, Homo sapiens
gtgctttctctgggcttgacaaactgaggcgactgataaacgtcttgtacccggaggtggagcaacagaaattgaattagccaaacagatcacatcatat

SEQ ID NO: 108553 - DNA, 102 bp, Homo sapiens
ctccttcgtgtcgtacgtacgccctgagggaactgctcgcagaaagaagaaggtggttcatagaacagccacagcagatgacaaaaaacttcagttctcctt

SEQ ID NO: 108554 - DNA, 100 bp, Homo sapiens
agcaacttgcccagctatgagagacagagccaggatttgaaaccagttttgtgcaccgagggcggcctgagcctctggatcttcacttgggcatgttcct

SEQ ID NO: 108555 - DNA, 100 bp, Homo sapiens
cgatcgcctcgcgccggctgctctttccggatgccatggacaatattaccaggcagaaccaattctacgatacccaagtcatcaaacaagaaaacgagtc

SEQ ID NO: 108556 - DNA, 100 bp, Homo sapiens
gaccagtttcagttcgccgatgggaaacccggagaccaaatccttggagttccatctggaatatgacaaattagaagaacggcctcacctgccatccacc

SEQ ID NO: 108557 - DNA, 76 bp, Homo sapiens
ccacaaaaccaagcgaggccaggccgctctggaccgtctcaaggtatttgagtacagcatcccagacaaacagtat

SEQ ID NO: 108558 - DNA, 101 bp, Homo sapiens
tagctttttctataaatgcttgacaagaaaggaaaataatttaacagaagataatccaaatctttcaatgaggagaaacctgtgcaaatgatgtttaagca

SEQ ID NO: 108559 - DNA, 83 bp, Homo sapiens
taatcaggcaattatgtcttctaaaaatattgcacagactgggacagggagaaattacttgaagcttggatgtccaacccgga

SEQ ID NO: 108560 - DNA, 50 bp, Homo sapiens
gttattgttcagcctttttctaaacctgctcattggtgggcagtattact

SEQ ID NO: 108561 - DNA, 83 bp, Homo sapiens
gaaagatctaccttctggaagctactactacgtggtgcttggaaagacaagaagctccgccacgcccgcagtggggcccccgc

SEQ ID NO: 108562 - DNA, 100 bp, Homo sapiens
atggacaggcttggccactccaacaatgtatgtccctgggaagctgcatgatgtggaacacgtgctcatcgatgtgggaactgggtactatgtagagaag

SEQ ID NO: 108563 - DNA, 74 bp, Homo sapiens
attctgggcttccacacaactccagtgctaactcaacagttattttaccaagaaaatggtttgcacgactttga

SEQ ID NO: 108564 - DNA, 98 bp, Homo sapiens
ggcggagcaggaggatgggcggccttatgatgggaaatggagtaaaacaatggtgggatttgggcctgaggatgatcattttgtcgcagaactgactt

SEQ ID NO: 108565 - DNA, 84 bp, Homo sapiens
ccaacagccaccaccaccaccagatgatgccatggacaatattaccaggcagaaccaattctacgatacccaagtcatcaaaca

SEQ ID NO: 108566 - DNA, 71 bp, Homo sapiens
ccttcctggtggcctcccagacagtgcaaaggacccacgcagccacccagcctcagcactcatctgcgcag

SEQ ID NO: 108567 - DNA, 80 bp, Homo sapiens
ctccggatctcactcccgggagggcccggagaaaacccaagttgggaggctgtggccaggccagctgggctcggggagcg

SEQ ID NO: 108568 - DNA, 100 bp, Homo sapiens
ctaaacaggaaaaatggcagagaagcatgagcagtgtcacagaagacaatacttacagatcatcagtatttggagaggacaccactatgtgccattttga

SEQ ID NO: 108569 - DNA, 75 bp, Homo sapiens
gatgtgagcgagaaagccgttgcctccagcaccacttctaatggtgaatcagctcccggccgactttaggattct

SEQ ID NO: 108570 - DNA, 75 bp, Homo sapiens
gctgagaggggctgcggccggagcgggcggctgagacaaaggcgacggcatttggctttatgtcccgagttgccc

SEQ ID NO: 108571 - DNA, 74 bp, Homo sapiens
cggaatctgggtgcagttcctgcagtaccccactctacgatcagaccttgtgccggagccgactactggagatg

SEQ ID NO: 108572 - DNA, 100 bp, Homo sapiens
aaaccagtggccacagcatctttgtctagccccagtgcagacgagttatttcctttgaggagggaggaattgagttacttcaggcccggatggatccacc

SEQ ID NO: 108573 - DNA, 100 bp, Homo sapiens
cgcagctggcagatattatcatagttgctgcagaatgtgtgtaagaactgcagcggaaccttctgtgatgcctgttcaacaaatgaactgcctcttcctt

SEQ ID NO: 108574 - DNA, 76 bp, Homo sapiens
ctctgttccaaatgctttgctggtatattcgaattgttgggactcacaacacagtgaacaagatttttcacattgt

SEQ ID NO: 108575 - DNA, 100 bp, Homo sapiens
ttgcctgtgaggtctgcagcaagatgttctaccgcaaggacgtcatgctggaccaccagcgccggcacctggaaggactcagaattcatgattgaagaaa

SEQ ID NO: 108576 - DNA, 50 bp, Homo sapiens
acgccccctatcctatccgcaaacagttttgacacaagggcgcatatctt

SEQ ID NO: 108577 - DNA, 82 bp, Homo sapiens
ccgctaccgccgtggcttcatccacaatggcatcatggcagtggcagtgccttggtgaggctgctccaggagggcacctgca

SEQ ID NO: 108578 - DNA, 74 bp, Homo sapiens
cgctgtgtcgagggcgatccccccaaagcagcgtcccgtgctaaagcggaagatccatccaaaagctatgtgaa

SEQ ID NO: 108579 - DNA, 100 bp, Homo sapiens
cgaccatctggacaatatctcgcccatggcaagctggatccctgtggattactttgccagatgacgtgtactactgtggaataaagtacatcaaagatga

SEQ ID NO: 108580 - DNA, 100 bp, Homo sapiens
aagtgggagcactggaagtacgggcagttgcagtgttggagctaaactaaaccaggtggacaggtgaaatgtcagtatatctctgctgtggataaagtta

SEQ ID NO: 108581 - DNA, 83 bp, Homo sapiens
ccagaacgcagatcagaggtagtcggacctttcccgctggcgcgcagcctcagctagtgtgtcccggcatggatatccggaac

SEQ ID NO: 108582 - DNA, 100 bp, Homo sapiens
tttctagtcagcctcaccaagtagaacaaacagagcttcagcaagaacagcttcaaacagcaacagccaactcagtttataaatccagaaacacctggct

SEQ ID NO: 108583 - DNA, 89 bp, Homo sapiens
cggcggccgtggaaggcgacccggcggctgtggaggccacgctcagctcgccaggcggcgcaggaatggcgatcagtccacgaagcgat

SEQ ID NO: 108584 - DNA, 82 bp, Homo sapiens
ttcaatacacctcccacctgtcctcaggcatatcaaagggggaaatttgcagtggtgagaaaatgtataaagaaagattctg

SEQ ID NO: 108585 - DNA, 141 bp, Homo sapiens
gcccacccagatgccagtagtgcccgccccacccgcatgctctttgtcactccccggcggcagcacgaaagtaccatttgctcgataatgtggaaaataagatgaaaggcacctgtgtagagggcaccatacccaaattat

SEQ ID NO: 108586 - DNA, 75 bp, Homo sapiens
cttcttaatggaaaggatcctgattcctcttcaaaggctgcagccacaggtccgcacggaaaaccaggagctcca

SEQ ID NO: 108587 - DNA, 103 bp, Homo sapiens
ctgcaaaccacccaagtctgcaatcttaccagggaggccaagcgaccacccaaagaagacatatgaagatccatgagaaggaccctaacagtgccacagccac

SEQ ID NO: 108588 - DNA, 75 bp, Homo sapiens
tctgaagagctatggtgaaacaccactgaagcattgccaagactctaaaatagagctcaagcttgagaagagaga

SEQ ID NO: 108589 - DNA, 95 bp, Homo sapiens
atgccattaccagttcctacagctccactcgaggcatctcacagtgccggtggtggtgtgcacattgagccccggtatagacagttcccccagct

SEQ ID NO: 108590 - DNA, 95 bp, Homo sapiens
ctgacacaaataaggatgatcccaaagccaaggagaagttctcccagctggcagaagcctatgaggcgatcattgaggaggctgaaattcgatgg

SEQ ID NO: 108591 - DNA, 75 bp, Homo sapiens
acatgaagaccaatttttacgtctagatttccatgcccatggaagttgactaatctccttcagaatcaagcagtg

SEQ ID NO: 108592 - DNA, 75 bp, Homo sapiens
agcctgagcgacgtgccccaggcggagatctcggagccccccaagatgaacccagtggtggagccactgtcctgg

SEQ ID NO: 108593 - DNA, 51 bp, Homo sapiens
tttattggtgaaaaagaattccagtatggtggtgatattacccgaaaaatg

SEQ ID NO: 108594 - DNA, 83 bp, Homo sapiens
ggacgaggagctgcgggaggagatccacaagcttccccgggcgctgcctggacaggcctgcctgcgtgctgggacatgtctgg

SEQ ID NO: 108595 - DNA, 75 bp, Homo sapiens
gtgaactctgtccagttttcaaaccacacagtctctgctttctatccgtcaagatgataaagtcgtgtgcccgag

SEQ ID NO: 108596 - DNA, 87 bp, Homo sapiens
acggtcagtctgggggtgagcagcaaagaaatcctggatccaccaccgctgctgttcaccctctcccacccatcctgacccagaccc

SEQ ID NO: 108597 - DNA, 90 bp, Homo sapiens
aaagttttgcctgagcaagtttggattaaagtgggagatcaggatcctcatgaccagccaaagagaagaagaattaggaagcataaatca

SEQ ID NO: 108598 - DNA, 76 bp, Homo sapiens
attgtactggcctgctgctggcccgcaggtctccctttcctggtgatgatgaagaggaagtttttgacagtattgt

SEQ ID NO: 108599 - DNA, 51 bp, Homo sapiens
ggggcatggagtgcaccctggggcaggatgatcacggacgtgcagctcgcc

SEQ ID NO: 108600 - DNA, 75 bp, Homo sapiens
ggcgagaggatgaacaacaagttcgacgccggtcacctttgtcccggtgtccaaggtgagcgggcaggcagaggt

SEQ ID NO: 108601 - DNA, 74 bp, Homo sapiens
gaagcgcggggcggccgggagggggcagtcctcgccggcgagttcagccaagagtgagccatggagctacgtgt

SEQ ID NO: 108602 - DNA, 89 bp, Homo sapiens
aagacctattatgagaggcttccatatcgatgttacagtggtttatcaaaatgggttacctgtgatatctgtgaggctaccatcccggc

SEQ ID NO: 108603 - DNA, 75 bp, Homo sapiens
cacttacctcacctctgcgccaggctgcggatgaggatgacaaggggatgagaggctgttggaagctgcttggga

SEQ ID NO: 108604 - DNA, 50 bp, Homo sapiens
gttacttccaagtcatcaccagaaagcggatctgaaaagaacaattgctg

SEQ ID NO: 108605 - DNA, 80 bp, Homo sapiens
acgctcccagccctgaagagaaactgcaccttatcacccggaacctgcagggacacggccaacacggtgaaggaaaagtt

SEQ ID NO: 108606 - DNA, 82 bp, Homo sapiens
taagattcaacaaactatttttgaatgaagatgtctgtaaaacgtgtattgttcgttacctggagaccagcaagtattgtcc

SEQ ID NO: 108607 - DNA, 51 bp, Homo sapiens
tgccccgaggaccggcccctcatcgtgcagcaaaccagtccagctacgggg

SEQ ID NO: 108608 - DNA, 75 bp, Homo sapiens
cagattatatcgcatcctatggctcaaagaaagatgattattgatcaccagcagcttgcaaaacttatccaggag

SEQ ID NO: 108609 - DNA, 74 bp, Homo sapiens
cagcttttacctgatttcaccgaagcgcatttggtcacctcctctgctgacaagctctctactgatgatctgaa

SEQ ID NO: 108610 - DNA, 90 bp, Homo sapiens
gagctcaaagtgtgccttctcggggaccttttttctatcagtgcttatgtttatgctcagaaaccacaaatggacattcacagtttcgaa

SEQ ID NO: 108611 - DNA, 95 bp, Homo sapiens
accaacggcaaaaatctcaagaaagaggtgggcaagatcctgtgcactgactgcgggcacagcctttgcagcgagcagggcagcagtgctgagac

SEQ ID NO: 108612 - DNA, 98 bp, Homo sapiens
ctgaagaaggctctgtgcaatcctcacattcaagctgataggctgcgctaccggaatgtcatccagcgagtgattagctcaaaacactggaatttcaa

SEQ ID NO: 108613 - DNA, 75 bp, Homo sapiens
cgtagctgagctgcagctgaatcacacagcagctgcagctactggaggttctgttctcaatgttgctgccctgtt

SEQ ID NO: 108614 - DNA, 75 bp, Homo sapiens
tttaaactgcacataccatatgctggagagacattaaagtaaatgaagctgttgtcatttctggaaggaaactgg

SEQ ID NO: 108615 - DNA, 101 bp, Homo sapiens
caacgcttgttatgttttcatcacttctctccagaagttgaccagatataccatctggcatctccagcctcccctccaaactacatgtataatcctatcaa

SEQ ID NO: 108616 - DNA, 100 bp, Homo sapiens
agaagggctccctcgtgaagaacctgaaggacacactagatacgtttgaaatggtttctgaagatgaagatgggaaattgggatttaaagtaaattacca

SEQ ID NO: 108617 - DNA, 99 bp, Homo sapiens
tttgttgattaactggacaaattcagatgccatggacaatattaccaggcagaaccaattctacgatacccaagtcatcaaacaagaaaacgagtcagg

SEQ ID NO: 108618 - DNA, 100 bp, Homo sapiens
ctgtgcgacgtgcacttcctggtgggcaaggggctcagctcgcagcgcatccccgcgcacagttactccacaggatccgctgaacataggatgttgccac

SEQ ID NO: 108619 - DNA, 98 bp, Homo sapiens
tttatggaactcagcaacatcacatacaggccaaagggaaaggacagtcccaaaccagagtgaatattaatgctgccttggttgaggatataatcaac

SEQ ID NO: 108620 - DNA, 100 bp, Homo sapiens
gctacatactcatcatggggctcctgtacaaggtgaaatgacaatggatgctctgttggctcgattgaaacttctgaatccagatgaccttagagaagaa

SEQ ID NO: 108621 - DNA, 74 bp, Homo sapiens
atcatgtcacactgcagtggagacttcacagagaatgcagttgtcttgacttcaggtctgtctgttctgttggc

SEQ ID NO: 108622 - DNA, 100 bp, Homo sapiens
ggacagcacggccgaggctgcccagaggcgcctcctccacaccccccgccgcagcagcaccggcgacagatcaatgtccgagttaccaccatggatgcag

SEQ ID NO: 108623 - DNA, 74 bp, Homo sapiens
cgggaggaaggaacgaggcaaggagctaaagcagcgtgcgttcagccctggggatgatgacctggaagaaggtg

SEQ ID NO: 108624 - DNA, 83 bp, Homo sapiens
gactttctccttcaagtacttggcagatcactctcttagcagcctcattacgtcccagacaactacaagaggaatggaggacg

SEQ ID NO: 108625 - DNA, 98 bp, Homo sapiens
gtcggcggctgatttagaaggaggttcaggctacggtgagccgaagacggaatcagtccccaatgcctggaaattcctcattggattactgtgtttta

SEQ ID NO: 108626 - DNA, 100 bp, Homo sapiens
ggctacaccccggagccaggagggtggtggtgcccacccgcgtggggcagggctatgtatacgaggccgcccagccggagcaggacgagtacgacatccc

SEQ ID NO: 108627 - DNA, 98 bp, Homo sapiens
gatgtgtctgatgctgttaatgtgatggtgtatgttgggattcccatcggggagggtgctcatgatgaaggtacacatttaatgaggatgagggggag

SEQ ID NO: 108628 - DNA, 83 bp, Homo sapiens
ggaagaccgcgcgcagggcctgcagcgggagctggacggcgagcgcgagcggcgcgagaaaactgtgtcagggaaaagggagg

SEQ ID NO: 108629 - DNA, 88 bp, Homo sapiens
tactttgaaggttttttattaatcaagcggtcaggataccggcccccttacccaggaatggaacaacctccacaccatccttactatc

SEQ ID NO: 108630 - DNA, 100 bp, Homo sapiens
cgaagtcttttgcttagtgtcaatgcccgaggactcttggagtttgagcatcagagggcccctagggtctcaagaagcacgacgaagacggtgggaccac

SEQ ID NO: 108631 - DNA, 100 bp, Homo sapiens
gctgtgctgacttttttatccgtggagagcgactcagggacaaaatggttatcttgacgaatcagattacaacccatctgagtggagccctggcttctca

SEQ ID NO: 108632 - DNA, 90 bp, Homo sapiens
ctggggggctgcccctctgactggatccagttcctcaacaaggtcgccccacggctgaattctcggtgataaaggcgcccactggaccct

SEQ ID NO: 108633 - DNA, 75 bp, Homo sapiens
ttgtctgccacgagtgcacattctgaaaacagtatgtccgtggttcagaccctgtattaaagcttttggacgaca

SEQ ID NO: 108634 - DNA, 90 bp, Homo sapiens
ctggagagtgactgtagagcctcaggttgcccccaagtttcctggcagtgtgtgatactgaggaggtgagcttgtttctggagctgtgct

SEQ ID NO: 108635 - DNA, 100 bp, Homo sapiens
cacgggttcaactgcgcagaatctaccaacttcgccaccctgcggtggattgactacggcaaagtggccactcagctggcccccaagaggaccctttcca

SEQ ID NO: 108636 - DNA, 50 bp, Homo sapiens
cgggcgccaggaccggccgaacgcagagccttgaaaagatcttttgaggt

SEQ ID NO: 108637 - DNA, 98 bp, Homo sapiens
gagaaggtgttgttgccggagctgagaccgggcggccacagtccgcagggatgaacctcgagttgctggcagtgcctgatttgagatggggtcccagg

SEQ ID NO: 108638 - DNA, 100 bp, Homo sapiens
agtggagatgcttctgtggaagatgatgcttttatcaagacaaagaaacagccttggtataatagcacgttagcatcaagacgaaaacgacttactgctc

SEQ ID NO: 108639 - DNA, 50 bp, Homo sapiens
cagcgaccgggagaacatagacgatggactcaccctgtcacccaggttgg

SEQ ID NO: 108640 - DNA, 100 bp, Homo sapiens
cggagaaacaggcgccgcgggctccgcgcccggccggacccgggcccgaggtcctcagccctcgctctcgctggcggagcagcacctggagtcgcccgtg

SEQ ID NO: 108641 - DNA, 82 bp, Homo sapiens
ggacaaagagcccctcatcgagctcttcgtcaagtgttctaagaacggaagcatctgggctggatggaatttagcatcaagc

SEQ ID NO: 108642 - DNA, 100 bp, Homo sapiens
gtgtctttgacctgctaggcatacctctgtaccatggctggcttgttgatccacaggacatggtctgctatacagctcagactctcgtccgaatcctctc

SEQ ID NO: 108643 - DNA, 99 bp, Homo sapiens
aaactgcggcccttgtctgcaaacagtggtatcgacttatcaaaggtatagtcctagtagctataaatccctatgaacagctgcctatttatggagaag

SEQ ID NO: 108644 - DNA, 107 bp, Homo sapiens
atttggagtgtgcgtgcgcgccgagcggttttaaaatcaaagatgggaaaatcggagaaaattgcccttccccatggccagcttgttcatggtatacacttgtatga

SEQ ID NO: 108645 - DNA, 99 bp, Homo sapiens
atacattcccagaaagaggggcaagaaccccatgaaagctgtgggactggcctgttcctcatcctccccatggaacggaagatgagtttgctgaagcag

SEQ ID NO: 108646 - DNA, 83 bp, Homo sapiens
cttggactgagtcctgcaggacacaggttacctagggtatgaattaatacagacttggaaactctgaaagaacttagaatcag

SEQ ID NO: 108647 - DNA, 100 bp, Homo sapiens
cgaagatcgccaagactcacgaaggtgcctgagatcatcagctccatccgtcaggcggggaagatcgcccggcaggaggagctgcactgcccgtccgagt

SEQ ID NO: 108648 - DNA, 83 bp, Homo sapiens
ccgcgaggcaggagagaggaggaggagtgcggcgcggcggccccgggaccaaggagatgcagtgcaagctgtttgtctttgac

SEQ ID NO: 108649 - DNA, 75 bp, Homo sapiens
caggttgggaggagcggccgaagggtgcaaatagctatgggcaacttggcctcggccataaggaagatgtgctgt

SEQ ID NO: 108650 - DNA, 48 bp, Homo sapiens
ggccgaggcggccagatcacctgagatacgtaggtaacctttccagag

SEQ ID NO: 108651 - DNA, 100 bp, Homo sapiens
actggagacaatgaaaatcttgtcagggacagtatggaaattaccagcagtgaaaaagtacttacattccagtagccagtatctattagcagccatattg

SEQ ID NO: 108652 - DNA, 98 bp, Homo sapiens
tcccgcattagctctagcaatgaggttcactggatacagctggatactgggcttcttggacacttaatgattgttggcaagaaatgtgctgctgatct

SEQ ID NO: 108653 - DNA, 100 bp, Homo sapiens
ctgactacgaagtgctatccgtgcgagaacagctattccacgagaggatccgcgagtgtattttcctctgtgacgagggtgcaggtatctctggggacta

SEQ ID NO: 108654 - DNA, 100 bp, Homo sapiens
atgagtggggtcatttccagatattaggtcacagcagaagcagccaaaatggatccccagtgggacatgccacccccgttttaggagaacttgtatttgg

SEQ ID NO: 108655 - DNA, 51 bp, Homo sapiens
gctgtgctgagggtggcggccggatagacagattacatcaatgccagtttc

SEQ ID NO: 108656 - DNA, 75 bp, Homo sapiens
gctcttccgcagtgattgaagctttgataaatgaaatcttcctaagtatagacggagtcttgctctgctgcccag

SEQ ID NO: 108657 - DNA, 91 bp, Homo sapiens
agcggagacctcgctgcgctcatggcgtcgcccggtgagttattctccccacctcagaagtaccagcttttggtgtatcatgcagattctc

SEQ ID NO: 108658 - DNA, 90 bp, Homo sapiens
gcctcaaacgtggagatcaactcctctctgttaatggagtgacccctgtaaaagagcccaacagtgaaaatgtagatatcagcagtggag

SEQ ID NO: 108659 - DNA, 75 bp, Homo sapiens
cagagctatcaatgttcttctggaaggaaacccagacacggtggagcagttctggaggttttatagccacatggt

SEQ ID NO: 108660 - DNA, 100 bp, Homo sapiens
gccagcgccagctgcagccccggctgcccactcgcctcacctgagcctggtatttaggtcagttaacgtccataccaggatacctgaatccctccagtag

SEQ ID NO: 108661 - DNA, 74 bp, Homo sapiens
ggaggaacgctcactgtcagcgcctggaaacttgctcacccgcggcgagtcctttgcacatgttggcaacacac

SEQ ID NO: 108662 - DNA, 100 bp, Homo sapiens
atctacaaggttccttccactgaagcagaagccctggcatctatactctgggaccgagtgcactgaagacgataggaagttcagcatcagtgaaacgaaa

SEQ ID NO: 108663 - DNA, 122 bp, Homo sapiens
cagacagaggggagcacagagaaagagaatgatgaagagaaaggcccggagactgatcacttcatttccccttctgcgtttggagaaatcctctacaataacttcctctttgacattccaaa

SEQ ID NO: 108664 - DNA, 100 bp, Homo sapiens
aatccatgtttctggacgcggatttttggcctcatactctgttatagataaacaaggattactacagcatcccatttcccacacccactactccgctgac

SEQ ID NO: 108665 - DNA, 75 bp, Homo sapiens
gccggggccgggacgccatgtccatggaggaccccttctttgtggtgaaaggaaacgcttcgttaagggactcag

SEQ ID NO: 108666 - DNA, 85 bp, Homo sapiens
ccgtaggatgatgtttcctccgccagctctggttgaagaagtgtattttgcgcagaaggaacgtgatgaagctgttatgtctaga

SEQ ID NO: 108667 - DNA, 100 bp, Homo sapiens
ggaaaattacccggtatcgttagagatggctcccgcaaagaagggtggcgagaagaaaaagggccgttctgccatcaacgaagtggtaacccgagaatac

SEQ ID NO: 108668 - DNA, 75 bp, Homo sapiens
gcagcagttcgtgaagtctgtgaggagcgagtaaccagctcataaatcacatcgaacagtttttggatactaatg

SEQ ID NO: 108669 - DNA, 51 bp, Homo sapiens
gcagctgcaagcgccccatcgtagattcattcagctgaaactggagcgtgc

SEQ ID NO: 108670 - DNA, 95 bp, Homo sapiens
cagaatgaagaaagtcagggggactgcaaaggccaatgttggtgctggcaaaaagggtggttctcttcccaaagtggaagccaaattcatcaatt

SEQ ID NO: 108671 - DNA, 141 bp, Homo sapiens
ggtccgcggccggcaggaccatgctgctgaaagagtaccggatctgcatgccgctcaccgtagacgaggtttggtgcacctcgatttggaggaagtagggcagggcccttatctggaaagaagtttggaaaccctggggag

SEQ ID NO: 108672 - DNA, 90 bp, Homo sapiens
gtttaataatgatagaatgaagaccacaataaaagagacctctacttagctcagcaattcttaccttgaagagcctaaaaggcggcaaca

SEQ ID NO: 108673 - DNA, 75 bp, Homo sapiens
cgactgccgcctttttaccctgtggcctttcccatccaggcgtccagagggtgcgcgcggagccatggttatcat

SEQ ID NO: 108674 - DNA, 97 bp, Homo sapiens
ggaagatggcggccggcgaaaggagctggtgcctgtgcaagttgttgagcccctagtccaattcctgacccttcagtagcaactgttgccacagggg

SEQ ID NO: 108675 - DNA, 82 bp, Homo sapiens
ctggggactacgacgtccctcaaaccttgcttctaggagataaaaagggggatatgagactttctactcggaatatcctgag

SEQ ID NO: 108676 - DNA, 100 bp, Homo sapiens
cttcttcgtgctcagggcctgggagatattattgatagtgctacaaagtacacagataaagacaatggagggatgcttgtatggtctccatatcacagta

SEQ ID NO: 108677 - DNA, 99 bp, Homo sapiens
taggaaaccggtaccaggcagacatcaccgacttgttaaaagaaggatggtgccatgacaatggtgtgaactacaagattggagagaagtgggaccgtc

SEQ ID NO: 108678 - DNA, 83 bp, Homo sapiens
actcagatggttattaatacgttttagcgaacatccatgatagcagtcttctgtaaatcgaacttttcaagaattctctgaag

SEQ ID NO: 108679 - DNA, 90 bp, Homo sapiens
aaatgttgtggtcaagtgcctcacccctttctacaaggagggcaagtttgcttccaagattggaggtggacacaaaggaagaggcagcca

SEQ ID NO: 108680 - DNA, 100 bp, Homo sapiens
atgaaaaatctattgaaccatccctggatcatgcaagattacaactatcctgttgagtggcaaagcaagaatccttactgccaaatctgtcgaaagggag

SEQ ID NO: 108681 - DNA, 100 bp, Homo sapiens
atttcctgataatgtgttaaatctcgatggacatcagaataatggtgcacagctaaagcagttcattcaggcatcctctggtatcacgattccaaaaccc

SEQ ID NO: 108682 - DNA, 75 bp, Homo sapiens
tgacatgcaagaacagggtccaggtgatgttctgcaccctgaacacccacaaagtggacatggacaagctcctgg

SEQ ID NO: 108683 - DNA, 100 bp, Homo sapiens
ctgtgtactttccatttgccttcctggccccagcatgagaccagatgtaagctctcctccatccagctcctcaacagcaacaacaggaccacctcccaaa

SEQ ID NO: 108684 - DNA, 100 bp, Homo sapiens
cggagcgtgccctcgccgctgcaagagtgagccatggagctacgtgtggggaacaagtaccgcctgggacggaagatcgggagcgggtccttcggagata

SEQ ID NO: 108685 - DNA, 111 bp, Homo sapiens
gtcagttccttgtggagccggagctgggcgcggattcgccgaggcaccgaggcactcagaggagcatcccagccatcactcttccacctgctccttagagaagggaagatg

SEQ ID NO: 108686 - DNA, 100 bp, Homo sapiens
gctgccagcaaagagattgaggaggtttttcttcccccagtccctcagctgctgctgctgctcaggaggtcagatctgccactgatggtaataccagcac

SEQ ID NO: 108687 - DNA, 75 bp, Homo sapiens
ctgcagctggaagaggagctgttccagtgtacaaggcggatgtggcacgcctggtggccaggccagaccccacag

SEQ ID NO: 108688 - DNA, 100 bp, Homo sapiens
tcccctcctctcacggcacctcccaccatgaagccagcctggacccccttgcaaaggagccaggacccccagggagtagagacgaccgactggaggtgag

SEQ ID NO: 108689 - DNA, 108 bp, Homo sapiens
cggtcatggagggagcaggagctggatccggcttccggaagggtccggccccgccccctcccatccgggttcgagttcaagttcaggatcatctcttcctcatccctg

SEQ ID NO: 108690 - DNA, 87 bp, Homo sapiens
ggagccgcgcgcctttgtgcgcgcgccgagatgttcctcctgctgatcaagagaagctttttatccagaagttacgtcagtgttgcg

SEQ ID NO: 108691 - DNA, 51 bp, Homo sapiens
gtcgcttgcccctagtctagacacgaaatcatgaccaccccaggaaaagag

SEQ ID NO: 108692 - DNA, 82 bp, Homo sapiens
acaagacttcatcacctctttgtacatcttctgcaattactcggatcagttcttaagagcagccccggtaactggaggaatg

SEQ ID NO: 108693 - DNA, 75 bp, Homo sapiens
gaaaatacaaggagctggacatcgagcctgagggaggggaaaggcgcaggcttcggaaccaaaaagaagcttccc

SEQ ID NO: 108694 - DNA, 74 bp, Homo sapiens
agaaacaccaacaggatacattgaaagggaacctcagaacctgttctggatccacagcaaatccaagcatttga

SEQ ID NO: 108695 - DNA, 83 bp, Homo sapiens
gtcacccgcgtgctaatggtggaaacccacaacggcaacggacagccaagacgtagatccatccaagacttgactgtaactgg

SEQ ID NO: 108696 - DNA, 74 bp, Homo sapiens
atggccgtgggcatctcctacattagcgtctacgaccaccaagtacgagctcaactggaggcagtcctgtgcgg

SEQ ID NO: 108697 - DNA, 88 bp, Homo sapiens
gttgaccagatggatttgtttggggacatgtctacacctcctgacctaaatagtccaacagtgagcccgtggtagcagcagaagcagg

SEQ ID NO: 108698 - DNA, 100 bp, Homo sapiens
ccccgatggctctgtgcaacggagactccaagatcttgatgtggaagaaatggaggactcagaaccaaggatttccaagtgatttcttccaaagcacagg

SEQ ID NO: 108699 - DNA, 100 bp, Homo sapiens
cgaccacttggctttggatgaaatcaagaagcggaaccagggaaaatgtgtagagggcatggtggagatcttcgacatgctgctggctacatcatctcgg

SEQ ID NO: 108700 - DNA, 75 bp, Homo sapiens
ctgggcaggggtaccttcgggaatctgtggacccaagtggagagattgtggaactggcgaaaggtgcatgtccct

SEQ ID NO: 108701 - DNA, 75 bp, Homo sapiens
caggagcaggagcgggagcgggatccccagcaggagcaggagcgggagcgggtcgcaatggaagaagagatcgcc

SEQ ID NO: 108702 - DNA, 100 bp, Homo sapiens
aacacagagccaccctggaaagcttatagtgatttaggatactacattatcaataaactgcaccatgtggacgagtcggtggggagcaagacgagaaggg

SEQ ID NO: 108703 - DNA, 75 bp, Homo sapiens
ttgggcctcgcgccggctatggccgtgccctggggctgagccctcagtgcctatgattacacaataccacctatg

SEQ ID NO: 108704 - DNA, 100 bp, Homo sapiens
gacagaggcaccccggacagagacgtgaagcactgaatgaaacccagcgtttgctggcagaaccagttcctggcatcaaagccgaaccagatgagagcaa

SEQ ID NO: 108705 - DNA, 82 bp, Homo sapiens
ggagttggcattagtgttcttgtctcctacggtagtgtgcagcttatgcaaacgagagggtcatctaaagaaggactgtcct

SEQ ID NO: 108706 - DNA, 100 bp, Homo sapiens
gcggaggcggaggcagaggtggaggcgctttgaaaggtaagtaaggaggtctctgtaccatggctcgtacaaagcagactgcccgcaaatcgaccggtgg

SEQ ID NO: 108707 - DNA, 87 bp, Homo sapiens
aaggatcatgtctgcgagccaggattcccggctgaccccgcactacatctacccaccagccatcgtgcagcccagcgtggtgatccc

SEQ ID NO: 108708 - DNA, 95 bp, Homo sapiens
gctctgaggggacccgcatcaagaaaatctccatcgaagggaacatcgtttcagccttttatgctgagtgttttaacaagaagatacaattcaat

SEQ ID NO: 108709 - DNA, 75 bp, Homo sapiens
tgggaaagatctaccttctggaagctactactacgtggtgcttggaaagctggagtcacatcagaagccgcgcag

SEQ ID NO: 108710 - DNA, 98 bp, Homo sapiens
cagcctgctaggggctgaattctgactcagccatttactaactgtgtgaccttagctacgtgtctctctgtgataatgaaaagacaggttgcaaagcc

SEQ ID NO: 108711 - DNA, 49 bp, Homo sapiens
cagctttgtcacttttgaagcgctggagccgcggcccatggagcccgcc

SEQ ID NO: 108712 - DNA, 101 bp, Homo sapiens
ctccgtggtgacagcctctgggtcctcggtcggtacagtctctgcacctcgcgccccagcaggacatgggtgtggaggcaaagaaccatgaagtacacaac

SEQ ID NO: 108713 - DNA, 100 bp, Homo sapiens
acgtctgagactttctccttcaagtacttggcagatcactctcttagcaggttcctcatgccatgcacctgctgtcacccagcatgcaccctattttaag

SEQ ID NO: 108714 - DNA, 82 bp, Homo sapiens
agagaggcccgcccaccagttcgcccgtccccctgccccgttcacaatacctgatgcctgcacctgctgaccccacagccag

SEQ ID NO: 108715 - DNA, 100 bp, Homo sapiens
ggtctcggccctggtctcagccctatccagatgtccgaggcagatggaccacccgctgagcgtcagaaatgggtgggaggatacccttgacaaatactgt

SEQ ID NO: 108716 - DNA, 80 bp, Homo sapiens
aagatgactgtacaaaggataataaactagttgagaagcagaacccagctgaaggactgttctaggtctcgttccagatc

SEQ ID NO: 108717 - DNA, 89 bp, Homo sapiens
ggacgtctggggcaaagggaccacggtcaccgtctcctcagatggactcaccctgtcacccaggttggactgcactggcctcaacctcc

SEQ ID NO: 108718 - DNA, 97 bp, Homo sapiens
gaccgaattcagaaggatatcgacgtcgtgatccagaagtccagagctgaggactgcctgtttgcagttttgagtatccgaggagcccaggaggagg

SEQ ID NO: 108719 - DNA, 75 bp, Homo sapiens
gcctgcccccggaggtgcccacgcagctgcctggacaagttatgaagacagtatggagtttccagaccatagtag

SEQ ID NO: 108720 - DNA, 100 bp, Homo sapiens
ttggtgagcagcgctctggggctcgccttgtatctcaacaccctgagtgcggatttctgctatgatgacagtctgaagatgatgagaaactgaaaaagag

SEQ ID NO: 108721 - DNA, 75 bp, Homo sapiens
aaagcaataccaggatagctgttgtttcagagaaagggtgcagagcctccagctccaccatgagctgcacgccgc

SEQ ID NO: 108722 - DNA, 98 bp, Homo sapiens
cgcgctgcgcagccgacgcgggaatgaagcgggcgctgggcagcttctaaccgaaaatcttcagttggcgtaaaaaagaatagcaagagcagaacgtt

SEQ ID NO: 108723 - DNA, 100 bp, Homo sapiens
cccgggccatgtcggtgggcgagctctacagccagggggcagctggcattttatgctatgtgggagcctatgtcttcatcacttatgatgactatgacca

SEQ ID NO: 108724 - DNA, 74 bp, Homo sapiens
tctggctcaagcccaggctttggtcaccagtgagctggagaagttccagtttcttaaacaattaggtctacatc

SEQ ID NO: 108725 - DNA, 75 bp, Homo sapiens
ctgcgtcccgccaccggccgcttctgtcctcggaacgccgcgatggctgcgcagggagagccccaggtccagttc

SEQ ID NO: 108726 - DNA, 100 bp, Homo sapiens
tgggctggaataaacttttgaaacactaatgtagagccaggtgagaatttcaaggattatcgacttcatattgcacattaaagttacaaattaaagtggc

SEQ ID NO: 108727 - DNA, 119 bp, Homo sapiens
ggccatgagtccttctactggcagctgccggagacataccagggagacaaggcagcctggcatcctcgctacaacctcattgttgtgggccgatacccagatcctaatttcaaaagttg

SEQ ID NO: 108728 - DNA, 119 bp, Homo sapiens
agtgcctatgccttccaaacgcaggtccctggtcgtgcagacctcgatggacgcctacacccctccagcattgtcttcagtgttaagaaatgtggactcctgtgaggtgctggaggttt

SEQ ID NO: 108729 - DNA, 75 bp, Homo sapiens
ccttcaacactgtagcagagatcactgggagcaaatatccagaacaggctttcaccactttcctctgtctgtacg

SEQ ID NO: 108730 - DNA, 75 bp, Homo sapiens
gagaaaggtccctccacactcctggaactgtacacctattggaacccttaaggaaacaaatggaagactgctgcg

SEQ ID NO: 108731 - DNA, 100 bp, Homo sapiens
atttgggacctgcgccaggttagagggaaagccagcttcctctactcgctgccgcacaggcatcctgtcaacgcaggcgcagatcaggcctctataaccg

SEQ ID NO: 108732 - DNA, 100 bp, Homo sapiens
ggatggcgtcccccgggggcccgtactgcacatcgtggtggtcggatttcaccacaagaagggctgccaggtatctcttgggtcacagattgatttacag

SEQ ID NO: 108733 - DNA, 100 bp, Homo sapiens
ggagctctacgcctcctacgtttacctgtccatggaacgtactaatgtggccaacttccctggccactcgggccccatcactagcatcgccttctctgag

SEQ ID NO: 108734 - DNA, 100 bp, Homo sapiens
cacagggcaaggcggcggacggctgcgtcgcccgaggcgaggaggagcgctggcggaaaatgactcaggcactttggacacggtaggcgctgtggttgtg

SEQ ID NO: 108735 - DNA, 75 bp, Homo sapiens
gcgacgcccttgtcctcgccaaaatgatggtagaaatcctattccattatgcagatcgagctctgaaaaagtgcc

SEQ ID NO: 108736 - DNA, 75 bp, Homo sapiens
cgccctgctgggctttgagaagcgcttcgtacccagccagcactatgtgaaggagtacctcctggcaactatggg

SEQ ID NO: 108737 - DNA, 75 bp, Homo sapiens
accgccgaggactccagcacaccgaggcagggagagcaacaagccccggccctcagagctcagccggatgagcgc

SEQ ID NO: 108738 - DNA, 100 bp, Homo sapiens
tccagtctgcagctcccagcgtgatcgacgcagaagacaggtgatttctgcatttccgactgaggtgtgccagaagtcaggcgagatctccctcctgaag

SEQ ID NO: 108739 - DNA, 100 bp, Homo sapiens
ctacagccaaacatgcaggactctagtaacccgcgaaatgatgggatagcgttgcaaatccttaaaagagtcttaacggcacagttggcgggcagctccc

SEQ ID NO: 108740 - DNA, 99 bp, Homo sapiens
agtggatgctgcaaacagtgctgcccagcaatatcagagaaaaagatgtgtcatggcaatgctgagaaggaggatcagggatgagaagaccaacgttag

SEQ ID NO: 108741 - DNA, 75 bp, Homo sapiens
ggttgctgacagaactaaagtctcctgcaatactatactggcaattgctggagaagattttgcaattgttgcttc

SEQ ID NO: 108742 - DNA, 97 bp, Homo sapiens
tgcccttgaaatcgccaagcgagaacaaaatccagtctcatagcagaggagaatataatgtttacagcaccttccagagccatgaaccagagtttga

SEQ ID NO: 108743 - DNA, 50 bp, Homo sapiens
ccagggcaagcactctgacagtgtttaactgaactgaatgacagtccagt

SEQ ID NO: 108744 - DNA, 100 bp, Homo sapiens
ctgctcttgtgacgttgtggagatggggagcgtcctggggctgtgctccatggcgagctggaccctgactgcacctgccccatttgctgatgaaaccaac

SEQ ID NO: 108745 - DNA, 48 bp, Homo sapiens
tcaactacaccagccagcccgaccagggactttcagttaccttgatga

SEQ ID NO: 108746 - DNA, 90 bp, Homo sapiens
taaggattccaagtaactcttatttggtttcaggcacagaactgtatatccaataatagtgaaatggatcccactaattatgacagaaat

SEQ ID NO: 108747 - DNA, 75 bp, Homo sapiens
gaagggacaccgagggaccaaagggcggtgtgtgtaactggtgtgtgcaccgtttcgaccatcactgtgtttggg

SEQ ID NO: 108748 - DNA, 109 bp, Homo sapiens
cgcgggcagcagacggcagacggtgcccggcgcccacgggctggtgagcttgttgctcattggagtggctgcttggggcaagggcctgggtctggtgtccagcatccac

SEQ ID NO: 108749 - DNA, 98 bp, Homo sapiens
agtcatcaccctcagctttggctactacacaactataatgtaactgcaaactccaagctggtcattatcacggctggggcacgtcagcaagagggaga

SEQ ID NO: 108750 - DNA, 50 bp, Homo sapiens
ctagtgtctagaaggcactaaggctggctgtcttcatgtggctgatgacc

SEQ ID NO: 108751 - DNA, 98 bp, Homo sapiens
gaggaatgcaacttcaaggtcaagatggtggacgagcttaagagagactggggcagcacctactccgtgtcagtggtggagaccgactacgaccagta

SEQ ID NO: 108752 - DNA, 75 bp, Homo sapiens
ccggtctctcggacaccattttctgccgctggacgcaaggggtcttgctcctcagaacaaaccagaattgcagaa

SEQ ID NO: 108753 - DNA, 100 bp, Homo sapiens
gccgggacttggccgagcggatcctaataaggggaaaatggtcagttcaccgggacctggaggcccagattgcgatcgtgacggagaaccaggccctgca

SEQ ID NO: 108754 - DNA, 75 bp, Homo sapiens
cagacccgtagctaagacgccaggatttcctggaagcagagaaatgggaggacatgtatgcccaggactctatag

SEQ ID NO: 108755 - DNA, 50 bp, Homo sapiens
agaagctgctgaatgccttttttggtatttttggagttaatggagtcaga

SEQ ID NO: 108756 - DNA, 100 bp, Homo sapiens
gacccctctgctcgcggccgcgcctttgaggtagtaagcattaataatgtctttcatctttgagtggatctacaatggcttcagcagtgtgctccagttc

SEQ ID NO: 108757 - DNA, 58 bp, Homo sapiens
ttcaatccgctctactggaatgtgggggagtcggtgaagtacttcctggacaacttgg

SEQ ID NO: 108758 - DNA, 101 bp, Homo sapiens
tcttccgctttcttaaggtctggaatttatcatggcatccagcattgaccactacaagtaaaatgcgaattccacattctcatgcatttattgatctgact

SEQ ID NO: 108759 - DNA, 80 bp, Homo sapiens
gtggagatatggcgcaactgcggcgcgaaccacgtgaatgttgagggggcgacacacaagcaggtggtggacctgattcg

SEQ ID NO: 108760 - DNA, 78 bp, Homo sapiens
ttggagaacagcacgtccccgctgagtgaatcagacacaagtttggcagaaggaagtgtcagctgcttagatgaaagt

SEQ ID NO: 108761 - DNA, 83 bp, Homo sapiens
cttcatcaaaaatagtgatagctttgataaatctgacaggatggcatctgatgactttgacatagtgattgaggccatgctgg

SEQ ID NO: 108762 - DNA, 50 bp, Homo sapiens
tcgggtatgaagatcgggcggattgaaacctctgcgccatgagagccaag

SEQ ID NO: 108763 - DNA, 78 bp, Homo sapiens
gacagaaggggagtacagctctctggaacatgagggtccctctctgtcctgctcgatgacctgcaggacctgagtgaa

SEQ ID NO: 108764 - DNA, 100 bp, Homo sapiens
agagtctggagtttatctggagtgaggtggccggttcttggtgggatctgagcagcaaatggagctgctcctggtgaacaagctcaagtggaacctggcc

SEQ ID NO: 108765 - DNA, 50 bp, Homo sapiens
acgttctcataccagcctgaagtgtgtttcctgtaacaaatcgttcaaga

SEQ ID NO: 108766 - DNA, 75 bp, Homo sapiens
tcgagggacatcctttccggaaagactttcctctatctggctatgttgagtgcagtgctggagttcgtgggtgac

SEQ ID NO: 108767 - DNA, 78 bp, Homo sapiens
cgtggctgtggagaaggcgctccggggcgaagcagggcactgtgtttagtcttgagtcagaggaggaggaataccctg

SEQ ID NO: 108768 - DNA, 100 bp, Homo sapiens
gccgccaccactgcgtcgggctggtgcagccccgggccaggccgcggccggggcaggagcgcaggtgtggcaggtgtttccagtgccatggaccacacct

SEQ ID NO: 108769 - DNA, 98 bp, Homo sapiens
catgacaggcagttttgagttcccagaggaagagtggagtcagatctcagagatggccaaagatgttgtgaggaaattatggtgacaagctgaacatg

SEQ ID NO: 108770 - DNA, 74 bp, Homo sapiens
tcatttctactggacttcatgcttagatacatgtataacaagcccccggtccctgagaagcggccccctgaaat

SEQ ID NO: 108771 - DNA, 101 bp, Homo sapiens
agaaagcagttaacagtgccaccggtgttccaactgtttaaagttgattttgaactggagtcattttctgaaaggaaagaagaggagaaggaagaattgat

SEQ ID NO: 108772 - DNA, 90 bp, Homo sapiens
cggtcggactcccgcggcgggaggagcctgttcccctgaggtacttcgtactggatttcgaggctggcatcctgcagtattttgtgaatg

SEQ ID NO: 108773 - DNA, 76 bp, Homo sapiens
gaacactatattaaacatcccctacagaacaggtacttgaactggcaggaaatgcatcaaaagacttaaaggtaaa

SEQ ID NO: 108774 - DNA, 95 bp, Homo sapiens
caggctgaaggtttagcgggtgccggaacagatgttgttattgtaaagaatggaagaagaatatgtggaacaggaggttgtttagccagcgcacc

SEQ ID NO: 108775 - DNA, 100 bp, Homo sapiens
tggagccctggccaccagcgggtacagcagggaagaactggaaactcagagaaagaaactgcccttccatctacaaaagctgagtttacttctcctcctt

SEQ ID NO: 108776 - DNA, 100 bp, Homo sapiens
cagagattcatatgagagttatgggtgaagttgaacaaattgctatgatgaaaccaaaaggccagactgaacacgatgagggtatgcttgaatatttaga

SEQ ID NO: 108777 - DNA, 100 bp, Homo sapiens
cggacccgcagcagctgcagctctcgccgctgaaggggctcagcttggtcgacaaggagaacacgggtaaccaggagccgacaacaactcctgacgcaat

SEQ ID NO: 108778 - DNA, 100 bp, Homo sapiens
gctgcagagccgagcgaatcccgagcccgggcagcagacagattacatcaatgccagtttcatggatggctacaagcagaagaatgcttacattggcaca

SEQ ID NO: 108779 - DNA, 98 bp, Homo sapiens
ttaatgctgtgaactacatctcaacagtactagcagattgggctgacaatgttaacaaagaactttgagtctggcaaggcttataagacaacatgggg

SEQ ID NO: 108780 - DNA, 100 bp, Homo sapiens
ctcaccatacaggaacagggcagacgttagcgtgagtgatcactctcaatcccgggcctcttctgaagagctgaaagctgcctaccggaggctctgtatg

SEQ ID NO: 108781 - DNA, 100 bp, Homo sapiens
tacaaaggccaaacagagaatgtggttcagctcatcaacaagggcgccagggtagcggttaccaaggttaaacccatccagagtaatggctgcggcctta

SEQ ID NO: 108782 - DNA, 50 bp, Homo sapiens
agaggaggtgcttatcccccgagcctgggttactaggtgtctttcagaag

SEQ ID NO: 108783 - DNA, 90 bp, Homo sapiens
ctaaccatgaagacttgaacttaatacagcaagaaagaccatcaagtttaccagagcattgggctcaggatctgaacaaagtccgtgagc

SEQ ID NO: 108784 - DNA, 82 bp, Homo sapiens
aggagtctccaaagtcaacgttctctcctgctccacgcaaaagctggcaggctgacagaggcggcctcaggacggaccttct

SEQ ID NO: 108785 - DNA, 100 bp, Homo sapiens
gagtgatgtggaggaaaacaacttcgagggcagactggtcacctgacttttgaatgccgcaattttctccgagtagaccctaaaagggacatagttttgg

SEQ ID NO: 108786 - DNA, 100 bp, Homo sapiens
cagcacgtggacgctgactcggaagtgcaggaggcaagtgaggcctatctggttggcctttttgaagacaccaacctgtgtgctatccatgccaaacgtg

SEQ ID NO: 108787 - DNA, 74 bp, Homo sapiens
cttggagctgcacaatggcacatacaccacccatgcccaggaacgtctggtcctaaccagtgagcactggttag

SEQ ID NO: 108788 - DNA, 100 bp, Homo sapiens
atcctctaccagccgcaactgcgagggctggaggaccatggccaacctggagcgcaccttcatcgccatcaagccggacggcgtgcagcgcggcctggtg

SEQ ID NO: 108789 - DNA, 98 bp, Homo sapiens
aagggctacgccagcggcgtcgagaggaccatcctgggtgctggccctgtgctggaggtgtatgtgctcaagaggccttatgtggatgagttcctgag

SEQ ID NO: 108790 - DNA, 50 bp, Homo sapiens
gtgcatgacactcctggaaaacaggttacgagaagtttctgagaagctga

SEQ ID NO: 108791 - DNA, 139 bp, Homo sapiens
cactgagaagtgtatatcaagccacaatttccatcaaaaagtgattaagcagagaatggagaagaaggttgattccaggaattgaatgatctggcacgggaccctccagcacagtgttcagcaggtcctgttggagatg

SEQ ID NO: 108792 - DNA, 98 bp, Homo sapiens
ggcgtcgtcggatgttgtgttgcccgccaccatgagctacacagtgccggtggtggtgtgcacattgagccccggtatagacagttcccccagctgac

SEQ ID NO: 108793 - DNA, 100 bp, Homo sapiens
tgttccagcacgccgtgccccaggagggcaagccaatcaccaaccagaagagctcaggctgactgtgctgtcctgattgttgctgctggtgttggtgaat

SEQ ID NO: 108794 - DNA, 100 bp, Homo sapiens
cgcggacagtgatgaaagactggacggcattgctctaccaccaacagattctctcgggcctagccgtccttggaacccgatattcgggctgggcggttcc

SEQ ID NO: 108795 - DNA, 100 bp, Homo sapiens
agttcctgtagcaccttcacagtccaggcaaggcaagccaaattagagctgagagttgctgtagcaaaagtggaagagttaactaatgtgactgaagatc

SEQ ID NO: 108796 - DNA, 80 bp, Homo sapiens
ctccggggaggtcacctgacgaggagggcagctgcaatgactctccgcacggtattattgtcattgcaagcactattggc

SEQ ID NO: 108797 - DNA, 108 bp, Homo sapiens
gctgcagcccccgacgccacctccgctgctgctgctgctcttcccgctgctgctcttctccaggctctgtgaactctcttgatagagcccaagcagccaagaataaag

SEQ ID NO: 108798 - DNA, 97 bp, Homo sapiens
ctcagctttatgtcctacgacgaaattagccagctccgcctgccagactgttgatctcctcatgcaagagtcaggatgtcgtttagaacatccttct

SEQ ID NO: 108799 - DNA, 96 bp, Homo sapiens
gaaaaagaaaaggcgacgtattaaggttcaagaagattcatccagtgaaaacaagtgctaaggaaattcctgaagatgtagatatggaagaagaaa

SEQ ID NO: 108800 - DNA, 50 bp, Homo sapiens
tgcaccctctgactgccagcaccttacagtttccaggagactgacaaggc

SEQ ID NO: 108801 - DNA, 80 bp, Homo sapiens
tggaatgtcattatcagacacaatggatatccagctacatcttcagtgacccttgtagatgtgagtgccttgaggccaaa

SEQ ID NO: 108802 - DNA, 100 bp, Homo sapiens
gcagctgactttgtcttctccgcacgactgttacagaggtctccagagccttctctctcctggacctagatgtgaaggctggtggaggctgtgtaatgac

SEQ ID NO: 108803 - DNA, 98 bp, Homo sapiens
gccgggagttacaccgccaccgccaggaatctggaaactgttcttcaggaagaaacccattagtttggaactggagaattcctttgcatcagatacta

SEQ ID NO: 108804 - DNA, 100 bp, Homo sapiens
actccatcgtgggactcagcagccttggtgctcaggtgccagatgcaaaggagagaagatgactgaggaggaggtggagaccgttctggcaggacacgag

SEQ ID NO: 108805 - DNA, 100 bp, Homo sapiens
ccgacttggtcatctgtaagaccaggaggaattcggtcttccagcaggggatgaaagaaaggtctggacatctatctcatcattggcatatgtggaggag

SEQ ID NO: 108806 - DNA, 82 bp, Homo sapiens
gtgctggcgagacgggggtgatgcccacccgggcgagaaagtaccatggggcgcaagttggaccctacgaaggagaagcggg

SEQ ID NO: 108807 - DNA, 100 bp, Homo sapiens
cgtggacgtgcacgagttgcgccaggggctggccaggctgggcgggggcaacccagaccccggcgcccaacagcagatagatctggatggacatctgcat

SEQ ID NO: 108808 - DNA, 99 bp, Homo sapiens
ttaacctttggactatgtttcaagctgctcaaaaactgggaggatatgaaacaatccaatggatttgaacagaagcgctttgccaggcttgccagcaag

SEQ ID NO: 108809 - DNA, 75 bp, Homo sapiens
tgttagccaaaatgaagacctgtgttgatacctataccaaccgtttaagtgtttgctttcacaaccaaagttctg

SEQ ID NO: 108810 - DNA, 75 bp, Homo sapiens
ttggaatttgtgcaatgtttagccaacccaaattaccttaattgtagttacttttggtgacgctgtccagttccc

SEQ ID NO: 108811 - DNA, 100 bp, Homo sapiens
aagaaggagcttgggcagcttcacaacaggtatatgactgatgggatgttacttcgtgaagctatgaatgatcccctcctggagcgttatggtgtaataa

SEQ ID NO: 108812 - DNA, 75 bp, Homo sapiens
gcttgctccctacgatgagaactggttctacacgcgagctggattccatatggctctcatatcattccattccat

SEQ ID NO: 108813 - DNA, 101 bp, Homo sapiens
cggcgtccccggcgcgaagaggctggactcggattcgttgcctgaggcatgaaagaattactgatgtccttgatcaaaaaaattatgtggaagaacttaac

SEQ ID NO: 108814 - DNA, 75 bp, Homo sapiens
tcgcttcacggcgccgagccgcggtccgatttctttcaagatggcttgaaaacagctgataagttgaaacagtac

SEQ ID NO: 108815 - DNA, 100 bp, Homo sapiens
ttatatagagatgtgatgttggagaactacagaaacctcgtctccctgggtccaatgatgcatcagcagcctccttctcagcaatacaatatgccacagg

SEQ ID NO: 108816 - DNA, 100 bp, Homo sapiens
cggaggcgactagcggcggcgggagcggcgccgagaggccgtgcgggacgcgggcgccaggaccggccgaacgcagaggattctccttttacaaatgcag

SEQ ID NO: 108817 - DNA, 51 bp, Homo sapiens
cggccgcgctgagggccccgactcagactgtgccctgtccacggtgcctcc

SEQ ID NO: 108818 - DNA, 99 bp, Homo sapiens
agcgtccagcaactccagcctgtccggctcgtcggtgtcctccgtgtaatgttcaagctcagaaatgccttatgtggatcgtcagaatcgcatttgtgg

SEQ ID NO: 108819 - DNA, 82 bp, Homo sapiens
ggacgaggatgaggaggagggggacgagcagcagcggctcctcaacacccctcgaaggtatatttgcttacttaaactacca

SEQ ID NO: 108820 - DNA, 112 bp, Homo sapiens
ccaacatggcggaacgcaggagacacaagaagcggatccagaaatctcctttacagacaataggtgaagaacaaacccagaatccctacactgaactgctagtactgaaggc

SEQ ID NO: 108821 - DNA, 97 bp, Homo sapiens
cgccggcagtgctggggccgcgccacttccgcaaacaggtgcagaccagaatccgtagaagctagccctgtggtagttgagaaatccaacagttatc

SEQ ID NO: 108822 - DNA, 90 bp, Homo sapiens
gggatgatggcgaaatggggggaaatttcttaaatccttttcagagtgagagtgttggtcaaagaaaaagtgatgtatgaaaaagaggca

SEQ ID NO: 108823 - DNA, 50 bp, Homo sapiens
ggggtctccagactgtttttgctgaacagatgggtaaggatggcaggggt

SEQ ID NO: 108824 - DNA, 100 bp, Homo sapiens
tgcctgaggagagctctgaggaggattcactcaggagttgttgacctcctgtactggagagacattaagaagactggagtggtgtttggtgccagcctat

SEQ ID NO: 108825 - DNA, 75 bp, Homo sapiens
gtcaagagtgagatcatccccatgttctccaacctggcctctgacgagcaggtcctggtgcttgatggtcgaggc

SEQ ID NO: 108826 - DNA, 100 bp, Homo sapiens
ggacaaggacgatcaacgcactttcagggatgtggtcagccccttggatagatcccagcccccagcctcaatcccttggcctgaaaaggaagagcgaatg

SEQ ID NO: 108827 - DNA, 96 bp, Homo sapiens
gcaggtcaactatgaggtggatcggagatttcattctatccagaagttaaaggagagattgctcgtaaagatgaaaagctgctgtcgtttctaaaa

SEQ ID NO: 108828 - DNA, 87 bp, Homo sapiens
tgttttataaactgcctggccgaatcagccttttcacgctcaagattggagctggagtgagccttccaggaattttggctgccaaat

SEQ ID NO: 108829 - DNA, 51 bp, Homo sapiens
catgtggggggtaaaccactcgttcacaagattcctttgcagttcaccctt

SEQ ID NO: 108830 - DNA, 100 bp, Homo sapiens
atgagtacagtgaggaattagagaagttgggcattctcatcaaagctcgtaacttcctcgttttccagggtttgccaggacctccaggcgagaagggtga

SEQ ID NO: 108831 - DNA, 74 bp, Homo sapiens
tttcctgttccattttgtgcctcctggacacctcaggaaaaattgatgggacacttgggtgttgtattgtatga

SEQ ID NO: 108832 - DNA, 75 bp, Homo sapiens
agcattccagccatttttcttcactggagcatttccatttaatatgcaaggacgctgccaaggtctgcagagaat

SEQ ID NO: 108833 - DNA, 100 bp, Homo sapiens
cgcctccaggatgcgctgagccctacaacacccccagcggccgccggctcccccacgagaacgtgcgcatcgaccccagtagcctgtccttcaacatgtg

SEQ ID NO: 108834 - DNA, 103 bp, Homo sapiens
gcctgaatggcgggaagtgtgaagcggccaatggcacggaggcctgcgtgtacatgtcccagagcaagcacacggaggcccgggagctcatgtactcgggagc

SEQ ID NO: 108835 - DNA, 50 bp, Homo sapiens
ctggagcacgcagacccgcttttaaaggttaaaaagatcaagtggcatga

SEQ ID NO: 108836 - DNA, 106 bp, Homo sapiens
caagttcaaggccaagttcctgacagcctggaacaacgtcaagtacgcctgtgggccaaagctgaccaactcccccaccgtcatcgtcatggtgggcctccccgcc

SEQ ID NO: 108837 - DNA, 100 bp, Homo sapiens
cagtcatgtgcctggaccttgcagcttcctggatgaagtgccccttggacagggtggattccataatgaatttggtatccacgttgattcaagatcagcc

SEQ ID NO: 108838 - DNA, 76 bp, Homo sapiens
gaaaatagtgaattcattcttcaagaagagtccagaggtgtccttctaaagctggtagaggtttcacgagtcatca

SEQ ID NO: 108839 - DNA, 83 bp, Homo sapiens
ggggcgcttcgccccgggccccccagcatgaagaccccggcggacacaggtgaccctggcaaagatgagagtgcacatttcgt

SEQ ID NO: 108840 - DNA, 155 bp, Homo sapiens
cagattcgctcttcaagttggagcaaggagaacccccagggatagcagaaggagcagcccacagtcaaatctgtccagtccacaggtcctggctaccctgggaagagacaagaagtaaatgaagaaagaggaagattccaggacctagatatgat

SEQ ID NO: 108841 - DNA, 98 bp, Homo sapiens
tccagaggaggtttccaacctggacccctgaccagtacctgagaggtagctacagcaagctgggtagcaggcagatccaaaggatatcatgaagtttc

SEQ ID NO: 108842 - DNA, 75 bp, Homo sapiens
gctgtaaccacctcacagattccagcttcggaacaagagaccctgagatttaccgcattgtttctcagaagcaaa

SEQ ID NO: 108843 - DNA, 100 bp, Homo sapiens
tgaaaaccaagtcttgtagtggagtgaaggagtctcgctctgtcgccaggctggagtgcagcgacacgatttcggctcactgcaaacttcgcttcccgag

SEQ ID NO: 108844 - DNA, 90 bp, Homo sapiens
cccggacctctggagtgcccccagcccagagcccggctgtctgcggacctggtttcagcgctggtgggactgcagccggaggtcagccca

SEQ ID NO: 108845 - DNA, 100 bp, Homo sapiens
cccagacagaggggagcacagagaaagagaatgatgaagagaaaggcccggagactgaagagttacaggccaacctggacctgatccaaacctacagaat

SEQ ID NO: 108846 - DNA, 51 bp, Homo sapiens
atgcattggaaataatagcgctggtttgtggatgcacttagatgtttgcaa

SEQ ID NO: 108847 - DNA, 82 bp, Homo sapiens
ctcatttcgcctctggttcttgccaatcctgaatctgcaacaactttcaagaacccagtgacttgattgtaaaaatttacag

SEQ ID NO: 108848 - DNA, 75 bp, Homo sapiens
cgggtaaacccagtgactgctctgaccctgcttgagaagatgaaggtttaaggctcagaaaggtagcacattcgg

SEQ ID NO: 108849 - DNA, 98 bp, Homo sapiens
cagagacattacatcaggaagatactgcagagatattctactccatctcattcattgtacagtacaaaattggacagctgtacatgatcagcaaacac

SEQ ID NO: 108850 - DNA, 96 bp, Homo sapiens
gtgcggacagcattgggagcggccgagccatcccaattaaacaggttcgagaacttgtcttggacaattgcaaatcaaatgatggaaaaattgagg

SEQ ID NO: 108851 - DNA, 74 bp, Homo sapiens
gaagattcttccaaggaaccagtgcgaagtgctgtggagcatccgagtgtgccagagtctccagaattcgtcag

SEQ ID NO: 108852 - DNA, 100 bp, Homo sapiens
tgccgcactgtccgggaggagatgggcgatgagagcgaggagttcctgcaggttcagaaaagaagcatgagaaattatcatcttccgttcgtgctgtccg

SEQ ID NO: 108853 - DNA, 100 bp, Homo sapiens
ccaggatccgcgcactcctggtgggtcagagtggagagagaatgaaggtcaccgtgtccaaagggggcgaccgggacagtgacgacgacagcgtcctcga

SEQ ID NO: 108854 - DNA, 104 bp, Homo sapiens
gagatctttctcagccagcctattcttttggaattggaagcaccgctgaaaatttgtggtgatgtggaaacagctgtaaaatttgcaactcagcttattgacct

SEQ ID NO: 108855 - DNA, 98 bp, Homo sapiens
atcagataagcttgacattacagccaagatggtgctgtcccagagacaacgagatgaacttggagtggcagggtcccagccagtgagtgagaagcagt

SEQ ID NO: 108856 - DNA, 98 bp, Homo sapiens
agcgccggtccaacctgttcaccgttcctctatgacttctaccactacttctacatggtgaccaacgcactcttctacgtcagctccaccatcaaccc

SEQ ID NO: 108857 - DNA, 98 bp, Homo sapiens
tcaggatatgggtttgctattgggaacatggcagcctttgatatgaatgaccctgaagcagtagtatccccagggttaatgcgagatgatacaatata

SEQ ID NO: 108858 - DNA, 50 bp, Homo sapiens
gaagtttctaggaaaggccggacaccagatctgagtgggacatacttttg

SEQ ID NO: 108859 - DNA, 100 bp, Homo sapiens
ggacatttggaccgatcttttacatgttccacaagaagtgcagcttataatccaagctattactcagtatcgtgaagagcgcttccgactgacgagcgag

SEQ ID NO: 108860 - DNA, 100 bp, Homo sapiens
attgattattcctcgcccacatctgtgccaggtgctggagaatctggtaaaagcaccattgtgaagcagatgaggatcctgcatgttaatgggtttaatg

SEQ ID NO: 108861 - DNA, 100 bp, Homo sapiens
cgacaagccgctggcagccgcggatctcaccgccgctcaggggacccagacatggagctgcgggaagaagcctggtctccggggccgctggattctgagg

SEQ ID NO: 108862 - DNA, 50 bp, Homo sapiens
acaatcagtgatgaagatgaatcgggagctgagcacataacgacttacac

SEQ ID NO: 108863 - DNA, 75 bp, Homo sapiens
gccgtctacccgtggccgctgccggtctacgactcctcctattttgaggacttctccaacatctccatcttctcc

SEQ ID NO: 108864 - DNA, 90 bp, Homo sapiens
catttattactttgaagtgaagattgtcagcaaaggaagagatggtgaacgagataattgggagagacatgtcccagatttctgtttccc

SEQ ID NO: 108865 - DNA, 100 bp, Homo sapiens
gctcagccctgaagaaaagggaaaacttgctgcggttgctcaaggtgaggaagaggatggagatgaagatgaggaagctgagtcagctacgggcaagcgg

SEQ ID NO: 108866 - DNA, 83 bp, Homo sapiens
gctaataatgcaattactgagagacaacttgacagactgcttcaccagtttttctactggctccttctttgaactggatggac

SEQ ID NO: 108867 - DNA, 101 bp, Homo sapiens
ggccgagcgcgcccaggacatcggcatctggttccacatcctggcgggcctcacgcacctggcggtcatcagcaacagtgtgaacatggctacgcctcttc

SEQ ID NO: 108868 - DNA, 90 bp, Homo sapiens
tcgccagcagccgtccggagccagccaacgagcggaagaatcctgtaagtacaatcccaagtattctgttgctaatgacaccggctttgt

SEQ ID NO: 108869 - DNA, 82 bp, Homo sapiens
ccacaagacatttcctgctcggaaccttgtttactaattgttgtggcagcactgcctgaaggtatgagaccagattctaatc

SEQ ID NO: 108870 - DNA, 98 bp, Homo sapiens
ctggccttggcggcggctcctcaggagagctggggcgcccacgagaggatccctcacccggtggtttggctttgaatgacagcaagaactctgtcttt

SEQ ID NO: 108871 - DNA, 100 bp, Homo sapiens
aatttggagtgtgcgtgcgcgccgagcgcccgtgttcctggccttccgaatcatgcccggggcaggtaaacctcatgcccatgtgcacaagtgttgtgtc

SEQ ID NO: 108872 - DNA, 101 bp, Homo sapiens
cttctgctctccggggaaagccaggagtcagggctaaaggtcaaccagccagcctcttttgcagtcagcctgaacggggccaagggggcgatcgatgccaa

SEQ ID NO: 108873 - DNA, 82 bp, Homo sapiens
aatcttcaatgagtaaacatattcctaaagccaaacttggccctgctggcaacaaagtcatcagtccctctgaagacaggaa

SEQ ID NO: 108874 - DNA, 97 bp, Homo sapiens
gaggagacttgtcacatgcatcaggaccagagctatagcaggcctttttatgagactaacctggcctctccactaaaggatgtgtgactttctgggg

SEQ ID NO: 108875 - DNA, 83 bp, Homo sapiens
gaagaaagtaaagttggaagttaagggagacaaagttgaaaacaaagtgctggtgttcctgcatgaagccaccgtgcgcctga

SEQ ID NO: 108876 - DNA, 83 bp, Homo sapiens
gacacggggcaggctgagttcctcttgctcacagagctctgtaaagaacctaaaggcagacccagaagagctttttacaaaac

SEQ ID NO: 108877 - DNA, 100 bp, Homo sapiens
aggggaagacccaaaggcagcaaaaacaagagtccctctaaagcagctcaaaaggggaaaaaagttgttccatgtagacatgactggcatcagactggag

SEQ ID NO: 108878 - DNA, 82 bp, Homo sapiens
cacgtggactccctttaatccagtgactgtcaggtcgatcatatgtcagcccaaggccaaccccactgtcactctgttcccg

SEQ ID NO: 108879 - DNA, 75 bp, Homo sapiens
cattattaccatatggcccatggaaaagattttgcatctagaggaattgaaaagccggggccatccagtcttggc

SEQ ID NO: 108880 - DNA, 90 bp, Homo sapiens
gggaatttcaggtcatgtgcacagattaatggctggatccatggcagatcatggaagggaagtggttgctgtgtatgttactggtgcttg

SEQ ID NO: 108881 - DNA, 100 bp, Homo sapiens
tggagatctgcctgaagctggtgggctgcaaatccaagaaggggctgtcctcgtcctccagctgttatctggaagatcccagtttctgacctgtagcata

SEQ ID NO: 108882 - DNA, 88 bp, Homo sapiens
atcatcaaaattgttccagaactgcagtgaactctttaaaacacagaaccaggctttagcaaagatggatatattggtgactgagaca

SEQ ID NO: 108883 - DNA, 101 bp, Homo sapiens
ggaatcgcaaggctcttccctgaccattttctactgtccctgcgcgaggtgtggccgacgacgatgccctcgctgaggagcgcatgcggagaggccagaac

SEQ ID NO: 108884 - DNA, 100 bp, Homo sapiens
agagagagagaaagaggaggggaggaggaggaggattcagggaataggagctggggagcccttctgcgccacagagttgtctgctggttctcagcttgaa

SEQ ID NO: 108885 - DNA, 75 bp, Homo sapiens
tcaccctgaaaacatccagctcccaccggggtccttttggtgtgaaccatggggtggaacttcactcagatgtga

SEQ ID NO: 108886 - DNA, 51 bp, Homo sapiens
gtgacaacatgctggagccaagtgctaacatgccgtggttcaagggctgga

SEQ ID NO: 108887 - DNA, 75 bp, Homo sapiens
gaatctggtccttaaggatatgtcagatggtgaccaagaatatggcccaggtgaccaaagccctggacaaggccc

SEQ ID NO: 108888 - DNA, 90 bp, Homo sapiens
aaacataagaatttcatctgctgaaaataaaaggtgacttagattctaccacatttggtaccataccaccacaccctccacctcccccac

SEQ ID NO: 108889 - DNA, 100 bp, Homo sapiens
gaggaattggcatcatggggtcatgagtatgtcaggcactacaaatactgtggcagcatataatttaacttggaaatcaactaatttcaagacaattttg

SEQ ID NO: 108890 - DNA, 89 bp, Homo sapiens
gcagttgtccagagaacaaacctctggtcctttagatctgttgccacctactgtgggaactttgggtctccctctgtcacccaggctgg

SEQ ID NO: 108891 - DNA, 100 bp, Homo sapiens
agggagccgccccccgaaaccccagacatcaaccagctgccgccgtccatcctgctcaaggttcttcacacacccccattcggcgtagtacccagagagc

SEQ ID NO: 108892 - DNA, 82 bp, Homo sapiens
agaagggcgactgagtactcaacatattgactgtatttgggctgcagcacaggttatcctgaatacatgtctaacaattttc

SEQ ID NO: 108893 - DNA, 74 bp, Homo sapiens
cgggatcccagcctcaggcctgcacggacggtgttggttgggagcagtctgaatgccagaatggataaccgttt

SEQ ID NO: 108894 - DNA, 82 bp, Homo sapiens
tgtgtgtccagaacgtgccatggagacgcttaacggaaaatatatgcagatgatgaacattcttaagccaattgcctttgat

SEQ ID NO: 108895 - DNA, 83 bp, Homo sapiens
cggcccccagcagagcccgcctgcccggctgtctccggcaagaatatgcagccaccacgtctcggcgcagttctggttcatct

SEQ ID NO: 108896 - DNA, 51 bp, Homo sapiens
tggcagttagcacactggtggaagacttcattagaggggtggtagactcgg

SEQ ID NO: 108897 - DNA, 83 bp, Homo sapiens
cctggacgacttgtcggcgccgccgcaccaccgcagcatccccaacggcctgcacgggagtgcatccgccccaacccttttcc

SEQ ID NO: 108898 - DNA, 124 bp, Homo sapiens
ctctgagaagcactatggtcgtgagagtcgtcagtgccctattccttcacatgtaattcagaaattagggacagttgtttttaagggaaatgaatagaaacaatccactttgaagaagccatgg

SEQ ID NO: 108899 - DNA, 100 bp, Homo sapiens
tgagcagagagctgtgaaatatctttggcttgcagccaacaatgggggatttcagtcataatcggttgtctaactggaacatcagcttggaatcacaaac

SEQ ID NO: 108900 - DNA, 100 bp, Homo sapiens
gcagtctttccagaatcaaaagcagacctcattttgattgtagtagcagtggagtatacgccatccgagaagctgccaccaacaacctcatgaaactagt

SEQ ID NO: 108901 - DNA, 75 bp, Homo sapiens
gcaatatctctgggctttcacaggaggatagtgaatgatacctacagaacggatctttgcctactgtatcctcct

SEQ ID NO: 108902 - DNA, 98 bp, Homo sapiens
gagtatttggctccagaaataattctcagcaagaaaacaagcatcgttgtgggtccaaggagacattttccgatccaaactgaaaaatcgaccatcca

SEQ ID NO: 108903 - DNA, 74 bp, Homo sapiens
gaccccgaactccaggacagcatccaggcctcattggacagcattcgagaacgtgcgcatcgaccccagtagcc

SEQ ID NO: 108904 - DNA, 100 bp, Homo sapiens
gcgcggcgagcgccgatcccggggcgcctgcgcgggtggctttgcgggcgctcgcggctgaaggggatgctaagggagataaagcaaaggtgaaggacga

SEQ ID NO: 108905 - DNA, 98 bp, Homo sapiens
gaagatgaccttaacacagtagcagctggaaccatgacaggcatgttgtataaatgtacagatttgcttgtaaatgcatcacgaagaggcagcccaga

SEQ ID NO: 108906 - DNA, 101 bp, Homo sapiens
cagccgtagacaccagctccgaaatcaccaccaagactgtgccctgtccacggtgcctcctgcatgtcctgctgccctgagctgtcccgagctaggtgaca

SEQ ID NO: 108907 - DNA, 76 bp, Homo sapiens
tcaaggaggccttccagctgtttgaccgaacaggaggaaaagctttcggactgctgaaggcccagcaggaagagag

SEQ ID NO: 108908 - DNA, 75 bp, Homo sapiens
gaagatgcctcgaactaaacaaattcatcccagaaatctaagagatcagtgtactgttacccggacatacctatt

SEQ ID NO: 108909 - DNA, 75 bp, Homo sapiens
gagggccccgacgatagcgaggtcacctttgcattgcactcagcccgagggcaacatccttcgagaccggttcaa

SEQ ID NO: 108910 - DNA, 90 bp, Homo sapiens
gatataatggaacaatatttgcatatggacaaacatcctctgggaagacacacacaatggagactgtggatattcataaggagaaagtgg

SEQ ID NO: 108911 - DNA, 96 bp, Homo sapiens
aagactgtctgccgagttctcacgtgcccatcagtgacagcaagtccattcagaagtgacctcagaccagattgtggagcatctggaggaactgga

SEQ ID NO: 108912 - DNA, 75 bp, Homo sapiens
gaacaacaaggtgttgatgccgccggacggatgatgactttgagttcactggcagccacctgacagtaaggaatg

SEQ ID NO: 108913 - DNA, 75 bp, Homo sapiens
cctaacttctactgacgaagcttggaagttgcagaaggaattggcctggattaggagtcttagagtacctggaat

SEQ ID NO: 108914 - DNA, 87 bp, Homo sapiens
agcagccgatccagcctgcggagcctgtggggcagacatgaagagtatttctggagaagaatcatcccatggagtgattatgacaag

SEQ ID NO: 108915 - DNA, 74 bp, Homo sapiens
ggccaccctggggctcctcatggcccggctccttagcacctctccagaacatgttcttcaagtatacatggaat

SEQ ID NO: 108916 - DNA, 74 bp, Homo sapiens
tgaaattgccggcaagagggagttaaggacattccaggcagaggcaaggaactcattatacaatgacaaatgga

SEQ ID NO: 108917 - DNA, 83 bp, Homo sapiens
tttcaaacgtttttatcttaataactcagtaatggaatatcaccccaggataataatggccgggaagaagatccacatgaagg

SEQ ID NO: 108918 - DNA, 75 bp, Homo sapiens
agttcattgttcggtcgaggacattattttcacagtggtatggtcaggaaaaagactacaatgtactagtcatgg

SEQ ID NO: 108919 - DNA, 75 bp, Homo sapiens
caccaaagtgggaaacattgaaatcaaggactatacaggctccaacccaagttccagtggttgtgtctcctagga

SEQ ID NO: 108920 - DNA, 101 bp, Homo sapiens
gaacgaccaagagggtgttcgactgctagagccgagcgaagcgttttggcccgaaccgcgacttcaacaaaaaataagagaagaaaggaatattttctagc

SEQ ID NO: 108921 - DNA, 100 bp, Homo sapiens
atgcccccgtggccaccgcctccagcttgccaccaaagacctgcgactttgctcagcgtttgcctcagcatggagggcggggccgcggcagccaccccca

SEQ ID NO: 108922 - DNA, 82 bp, Homo sapiens
attttctgtaattgctgacccaagaggaaacactctaggacggggaacgacaattacagctcaaaaaagatggtccaagaag

SEQ ID NO: 108923 - DNA, 100 bp, Homo sapiens
accagagccatccttcgggagaggatatgtagcgaggaggaacgcgctaaggcaaagcacctgaggatgttaagcaagtttttggacagaccacaattca

SEQ ID NO: 108924 - DNA, 100 bp, Homo sapiens
caaagcggggacccagaccctggagcctcagttggaagcagccgatccagcctgcggagcctgtggggcagacaacagcccagacccttggacctgagga

SEQ ID NO: 108925 - DNA, 75 bp, Homo sapiens
agcccgggaccgtttaaaaaactgcactctggcccccagaagcttctccacattgcccaggagctcctgcacacc

SEQ ID NO: 108926 - DNA, 75 bp, Homo sapiens
gtgcgctgccccacggttcggtaccacacgaaggtgcgcgccggccgcttccaccctcagcggatgataatctca

SEQ ID NO: 108927 - DNA, 75 bp, Homo sapiens
tccatccggcgctcagctgggcttgaggtgtttcccattaaacactaccaggacaaaatcaggccttacatccag

SEQ ID NO: 108928 - DNA, 75 bp, Homo sapiens
taaaactgatggctactaaaaagcagagcatttctggagatcatgaatcagacagataaaaatcaacaagaaatc

SEQ ID NO: 108929 - DNA, 100 bp, Homo sapiens
gagacagccaacaaaatattcatggttcttgaggggtttaacagtaatgtttgaaataatgaaaacatatggccacacttatgagaaacactggtggcag

SEQ ID NO: 108930 - DNA, 51 bp, Homo sapiens
gaaaagaatgaacactgtccttcaaaacgactggtcattgttggtgaaagc

SEQ ID NO: 108931 - DNA, 75 bp, Homo sapiens
accgcatgtgatcactctgggactcgtggggctgcagcaccggaccatggccaacctggagcgcaccttcatcgc

SEQ ID NO: 108932 - DNA, 95 bp, Homo sapiens
gtttttcctttctccgcagctctgctcccctagcaacgctcgccacacccttgttttgagatcctctctaagaatccagcaactatcacaagaat

SEQ ID NO: 108933 - DNA, 98 bp, Homo sapiens
gcggatctggaggagcagttgtctgatgaagagaaggatttccactggacaaagcggttgcctatgcaaaactcaggaatccatttgtaatcaatgac

SEQ ID NO: 108934 - DNA, 82 bp, Homo sapiens
gaggctacatggcatgctgcggatctggtggctggacccagagctgacctatggctgcgccaagcccttcgtcttcacccag

SEQ ID NO: 108935 - DNA, 82 bp, Homo sapiens
taaaaatcaacaagaaatcccatcataccttaatgatgaaccaccagaagaacattactactggatggaaatccattccgag

SEQ ID NO: 108936 - DNA, 75 bp, Homo sapiens
cggacgaggagctgcgggaggagatccacaaggacgacctgcacatcatggactccctagagctgcccaccggag

SEQ ID NO: 108937 - DNA, 100 bp, Homo sapiens
gtcaaagtgaccaaacttctcgaccgagaaacggtctcggcgcggaagatggccggcggcgtggacggccccatcgggatcccgttccccgaccacagca

SEQ ID NO: 108938 - DNA, 88 bp, Homo sapiens
agctcataaagactgcccagtcactgcactacagaaaaagactcaaggctatttaggagatgttcggaatgacatttatgtcaccctg

SEQ ID NO: 108939 - DNA, 75 bp, Homo sapiens
ccggggctttcgacatgccccccaggtaatcctcccacttcttaaaagtgatctttatgaagtgattcagtccac

SEQ ID NO: 108940 - DNA, 82 bp, Homo sapiens
tgcgtgaggtcaacctgcgcccccagatgtcccagaggttttgtcagctatgattagtgtgctgttggtgtatatacttatg

SEQ ID NO: 108941 - DNA, 100 bp, Homo sapiens
ccagggagctacgtctgtgtgtgtcctgacggcttcgaagaaacggaagatgcctgtgtgccgccggcagaggctggtgtgagttcttgatacgaatgaa

SEQ ID NO: 108942 - DNA, 83 bp, Homo sapiens
tggggtcaggcatagacctgaccaaggattgtctcaaagcttgccaggagcagattgaggcggtgctcctcaatagcctgcag

SEQ ID NO: 108943 - DNA, 51 bp, Homo sapiens
gggcatgatccataatcggtttcaaggcgcgcggagtctggggcggaggcg

SEQ ID NO: 108944 - DNA, 100 bp, Homo sapiens
gccgctccgagtggaggcgactgggggctgaagagcgcgccgccctctcgtcccactttccagcctgaagcaggacattctaaatgaaaagactgaattg

SEQ ID NO: 108945 - DNA, 83 bp, Homo sapiens
cgacgatcctctagagcactgtgtgtctccccggacgcgagcccgctcccctgagtgtcgtgaaaactacccctaaaagccaa

SEQ ID NO: 108946 - DNA, 100 bp, Homo sapiens
cgggcttccagtggggggagagcccctggcaggcacttcctggccctgcggggtgccctgtctctggctggagctgatgagccgtggtgtgatgcttgcc

SEQ ID NO: 108947 - DNA, 90 bp, Homo sapiens
gggcaagaagggcttcactgacccctcggtggagatctgagcctcaggatgcaggcacagatagatcattatctaggacttgcaaataag

SEQ ID NO: 108948 - DNA, 100 bp, Homo sapiens
ggcttcagcgcagtatattactgcaggtcacgagaagagaatgccttctagatgcaaaatcacctccaaaccagaccacttttcttgacttgcctgtttt

SEQ ID NO: 108949 - DNA, 76 bp, Homo sapiens
caacaatctgatgaaaagtcaatacaaaactaccatccttttgcagtttaaggaagaaatctctaaacgttttaaa

SEQ ID NO: 108950 - DNA, 75 bp, Homo sapiens
atgatgccaccagtgccctggatgcaaacagccagttacaggttctgtttggattctgcaaagcagactcgtcag

SEQ ID NO: 108951 - DNA, 75 bp, Homo sapiens
cagacacggtggctactctgcctcggggacgaaagcaggggccacctacagatgctcctgcagtggacacagcag

SEQ ID NO: 108952 - DNA, 82 bp, Homo sapiens
gcgagagtgggcgagaacgtccactgcgggccggcgaaagctgcaggagcattggtttgaaaaggccctacgagacaagaag

SEQ ID NO: 108953 - DNA, 100 bp, Homo sapiens
tggctgtgctgcgcggcccccgcgcatggtgtcatggagaaactccagctgggcccagagattctgcagcgggaaaatccaaggcttatttatgccaggc

SEQ ID NO: 108954 - DNA, 83 bp, Homo sapiens
ccgctcgtcagactccagcagccaagatggtgaagcagatcgagagcaagggtttggaaatcccttgtctccaggttgctggg

SEQ ID NO: 108955 - DNA, 75 bp, Homo sapiens
ggacggtgtggggcggtcccggccccgcaggagcatcagatccatgctgctgctgactcggagccccacagcttg

SEQ ID NO: 108956 - DNA, 74 bp, Homo sapiens
cccctctgaagcctcctcgccgccgtttctgagaaggtgatctgtgaaaatggttcgctattcacttgacccgg

SEQ ID NO: 108957 - DNA, 100 bp, Homo sapiens
aaaatcttttgtgaaagtgtataactacaatcacctaatgcccacaagattccaacatgccatgggaggagtacctgcctgggcagagactactaagcgg

SEQ ID NO: 108958 - DNA, 100 bp, Homo sapiens
gctacaaggatggggtggtgaccatcggctgtgtgggttacctgtgcatgacagatgagtggttctctgagtatgtctacgaagtggtggtggacaggaa

SEQ ID NO: 108959 - DNA, 50 bp, Homo sapiens
ggcagctgagacggccttggccgggctgttgataatcaggtgtatgtggc

SEQ ID NO: 108960 - DNA, 75 bp, Homo sapiens
tgggtggagcgggccgacctgcccgcggctgacgaccatcccaatctggcaaaacaagccacatggggctgctcg

SEQ ID NO: 108961 - DNA, 100 bp, Homo sapiens
cgaaagctaggtccggattgcacgtggagggccgcccgaagggcactctcggacattaacccgcattctgtgtggagccccctggagctgagatcaggat

SEQ ID NO: 108962 - DNA, 75 bp, Homo sapiens
cctttatgaaccagtgtatcccaaaatgcccataatgctacgtagttcaaactgtgttcttacaggaaaaacgcc

SEQ ID NO: 108963 - DNA, 100 bp, Homo sapiens
ctagagtttaactggcacccagtgctcatggtcaccggcttcgtcttcatccagggcatcggtgcttttgaagatgatgatatcacgcacgttgaaggaa

SEQ ID NO: 108964 - DNA, 85 bp, Homo sapiens
cgggtgcacccagtttccaccatgattaagtagagacggtatttcaccatgttagccaggatggtcttgatctcctgacctcgtg

SEQ ID NO: 108965 - DNA, 99 bp, Homo sapiens
ctcagcaaatggatagcagaacatcgtcttctaaagcctcactatccagcatttatgacattaacagagaacaggactatgtcaagaattctgagggta

SEQ ID NO: 108966 - DNA, 100 bp, Homo sapiens
ctcacagtttgctctgctcttccaacaccagtggaagatgatcacatcccagcattgagaactgatgtgccttcacaggaaacttggcccgtgtgtttcc

SEQ ID NO: 108967 - DNA, 89 bp, Homo sapiens
taataacaccaggacaaagttaagggatcactactcaagcataagggacttaagtcacaacagattatctttcatcaaggcaagttcca

SEQ ID NO: 108968 - DNA, 75 bp, Homo sapiens
agtttattggagcgcagactgatggcgcaaagggagaaaagccttacagatgctcatgggaagggtgtgagtggc

SEQ ID NO: 108969 - DNA, 100 bp, Homo sapiens
acaaggaccagaagaaactgcaccggaaatgtgcctaccaggatggcacatttcctagaggcagaatcctacaacttccactccaagtgagaaggagatt

SEQ ID NO: 108970 - DNA, 80 bp, Homo sapiens
agccgcttggggcccgcacggaccctctacttcagtgtggacactgccagcggctgcagccgacttggaatgacctggga

SEQ ID NO: 108971 - DNA, 98 bp, Homo sapiens
ctttgttgctgctgcacattaggttgcagtatgtggccagttatttgcctcagtaaaagactcttcacagatggaatcacaaataaacttattggctg

SEQ ID NO: 108972 - DNA, 100 bp, Homo sapiens
caggaatttatggtcgcctttttgaatgagcatgctacaagtgaaaactgatgagaaactgaatgtgtctgatgagaatacagcaagttgccctttgagc

SEQ ID NO: 108973 - DNA, 90 bp, Homo sapiens
gagatgggcagacggattcatttagagctgcggaacaggacgccctctgatggccctggttaatggtggagccagcctggtgtgtggcag

SEQ ID NO: 108974 - DNA, 83 bp, Homo sapiens
ctcggccccgccagcagcactgtggaggccgtcctcgaacccagcgggtgccgcttctccacccgaggcttccacctccaacg

SEQ ID NO: 108975 - DNA, 100 bp, Homo sapiens
caagtaaatgagttggtggctttgatcccacacagtgatcagagattgcgccctcagcgaacatgccatggacaatattaccaggcagaaccaattctac

SEQ ID NO: 108976 - DNA, 75 bp, Homo sapiens
cgagtaatgtcaagctaccgttggccaagacagtttcaaaatggaaacgtcctaggcctacttacaagcctccag

SEQ ID NO: 108977 - DNA, 75 bp, Homo sapiens
aaccagcaacaatggatgcagtcattccagcaccaacaggatccaaaattctgcttggtcagaatcgtgatggca

SEQ ID NO: 108978 - DNA, 51 bp, Homo sapiens
caagtccttcgaggcaccaataaaatacctgttaccctccaaatcttctgt

SEQ ID NO: 108979 - DNA, 146 bp, Homo sapiens
ttcttgtggatattatggctaataacacaacaagtttagggagtccatggccagaaaacttttgggcttagaccatgctcagcctccaagcagccttgtcatcgacaaagaatctgaagtttacaagatgcttcaggagaaacagg

SEQ ID NO: 108980 - DNA, 75 bp, Homo sapiens
agaggatggtcagtgtgccccaggtgaaggccagtgctctcaaggatttgtacacacagatatgacgaaagactt

SEQ ID NO: 108981 - DNA, 76 bp, Homo sapiens
tttggatcggcatctagtctttccgcttcttgaatttctctctgtaaaggagtattggtaaaggttttcaaggtgt

SEQ ID NO: 108982 - DNA, 100 bp, Homo sapiens
gtccccggcgcggccagccggtggcagatgtacagtgggagaaatcacagatgccctgaaaaaggtatttggtgaacataaagcgaatgatcgaatggtg

SEQ ID NO: 108983 - DNA, 99 bp, Homo sapiens
acattaacagacaagacacttttcagaaagacaggttgcagtgttattgatggatactcagggaacctttgatagtcagtcaactttgagagattcagc

SEQ ID NO: 108984 - DNA, 75 bp, Homo sapiens
aaaatctccccggtgactttcaggccgcggagctggtgacccagaactgcgaggcttatgaggcccacatgaggg

SEQ ID NO: 108985 - DNA, 97 bp, Homo sapiens
caacagcaccacctgctccagcatataaagtggacattcttacgtatgttacctggaaactaagtggattacccaaacaccgcgtgattggaagtgg

SEQ ID NO: 108986 - DNA, 98 bp, Homo sapiens
cagcatatcatgaaatcctccccacttatgtttgtaaatgtgagtggaagccatgaggccaaaggcagttgtattgggtgtccgcaatgttgccagtg

SEQ ID NO: 108987 - DNA, 99 bp, Homo sapiens
ctggcaggaggtttttgatgataaagcaaagagctctcagcatggcggctcctctacgtcacttgcgtccaccaaagtctgcagctcgatggatgagaa

SEQ ID NO: 108988 - DNA, 98 bp, Homo sapiens
tttttcggatcatgtctggtggctccgcggattataacaggaatagaaggacagtctgtggaagtttccaatattgtggacatccgaaaagtatataa

SEQ ID NO: 108989 - DNA, 87 bp, Homo sapiens
aagatgggggatttctacgacccggagcacccgacccctgagtcaaaatgcagatcttcgtgaaaacccttaccggcaagaccatca

SEQ ID NO: 108990 - DNA, 100 bp, Homo sapiens
gttcgagatctcgtgggtcgaaatcaaggttgaatcatgtagctgctggtctcgtttcaccaagtctgaaatcggatacctctagtaaagaaatagagga

SEQ ID NO: 108991 - DNA, 100 bp, Homo sapiens
atctgccagctctagccgggcaggagtggccctgccttttgagaagtctcagctcactttgaaagcttcctgatttctcccgattccttccttctccctg

SEQ ID NO: 108992 - DNA, 76 bp, Homo sapiens
gttttctgagcgagccttgaaagagataaaagcggaagtttgccacacgcacatacccccggcctcatgagtacct

SEQ ID NO: 108993 - DNA, 98 bp, Homo sapiens
tgagctcctgctttgcacagctttgccacaaagcccagtctgtgtctcaaatcaaccacaagctggaggttccttttttgccaggagattcagacctt

SEQ ID NO: 108994 - DNA, 75 bp, Homo sapiens
ctcttgtgccctagcaccccgagaaccgtcagtttgagccagatgatgccatgaagtacaccattgtggtgtcgg

SEQ ID NO: 108995 - DNA, 75 bp, Homo sapiens
gctccaagtacaacgaagccaccggcgtgtgccccgacggcgacgatttgtcccgctggctggaagcctggcagt

SEQ ID NO: 108996 - DNA, 74 bp, Homo sapiens
tcgagaccgggcccttcctcgaggcggtgtcccacctgccgcccttcttcgacacgatgaggcgagtggtacga

SEQ ID NO: 108997 - DNA, 75 bp, Homo sapiens
caccgcggagccctgcaggcgttacagaatgtctgaaggggacagtgtgggagaatccgtccatgggaaaccttc

SEQ ID NO: 108998 - DNA, 81 bp, Homo sapiens
gacttttctcagatgttggatatttgcttggaaaaacgtgtgggtacgaccttggagagcttgtttcatatccatatccca

SEQ ID NO: 108999 - DNA, 75 bp, Homo sapiens
tcagttggaagcagccgatccagcctgcggagcctgtggggcaggcctctctgctgatggtggtgccaagcgcca

SEQ ID NO: 109000 - DNA, 75 bp, Homo sapiens
agagttttgctgaacaccgaagtgggctggttccgcaacaaatcaaagggtgaccatcgggatgaggaggaagag

SEQ ID NO: 109001 - DNA, 75 bp, Homo sapiens
catctatcagcaggctccgggctgaagattgcttctcttctctcctccaaggatgtgaccgcgtgcctgccagaa

SEQ ID NO: 109002 - DNA, 80 bp, Homo sapiens
atccactgttgctactgaaaggccctggtacctgacagtgtaaagaaggagctcctacaaagaataagaacattccttgc

SEQ ID NO: 109003 - DNA, 123 bp, Homo sapiens
ggcctttcccgctgcttcctctacccctgtatttcgctgggctctctaaatggattcagctccaggtagtgggcagcagtcagtgacaggtgtaacctctgtggatgacagcaacagttactg

SEQ ID NO: 109004 - DNA, 88 bp, Homo sapiens
tgcttcatctgcccggcgctgatctacaagaaaatccacaagaacgcactttcctcccaggctcttgtcaggatggtgaagctgttca

SEQ ID NO: 109005 - DNA, 75 bp, Homo sapiens
aattcctttggctaccggaagaaaagggaggagaagtttacacaattctgtggtgttcttggtcacacatttatg

SEQ ID NO: 109006 - DNA, 50 bp, Homo sapiens
cccttctctcccctccactttctcccggaagtcacctgcaccggtgcccg

SEQ ID NO: 109007 - DNA, 82 bp, Homo sapiens
tacctcctggctgccgtgaataggcagcctaaaggagaagataagcgaggacctcagggccacactgaacgccttcctgtac

SEQ ID NO: 109008 - DNA, 86 bp, Homo sapiens
ttttcagcagcaatttgccctcagaggtgcaaatgtcaattgtcaagccttggacaaagctacacccttgttcattgctgctcaag

SEQ ID NO: 109009 - DNA, 95 bp, Homo sapiens
ttatcctgtgacctgcaggtactgggagatccatagggaggacggcggaacatctggaggctgggaaatggaagctgcagtaaaggaagatgaag

SEQ ID NO: 109010 - DNA, 100 bp, Homo sapiens
gacacttgtcatctgtgtactgtgtaacttttgatcgaactggcagacggatatttacttctccagagaatacagagggcaaagatggatccaaagtaac

SEQ ID NO: 109011 - DNA, 88 bp, Homo sapiens
cagataaaatcgaggccaggaagagagctaaaaataagcaacttggccacgaagaagtggcaccctgtgctgcgcacactaaagaacc

SEQ ID NO: 109012 - DNA, 75 bp, Homo sapiens
ctacgaagcctatgtcaagtgtcaagataaagtgagtcagctgtacatgagtaattccctcctggtcccagacag

SEQ ID NO: 109013 - DNA, 88 bp, Homo sapiens
aagcgcctgaggaccggcaacatggtgcggtcggggaataaggtcaaaatgcagatcttcgtgaaaacccttaccggcaagaccatca

SEQ ID NO: 109014 - DNA, 82 bp, Homo sapiens
cgaccgccccgcgtcatgcggctcctcggctggtgtactatactggcaattgctggagaagattttgcaattgttgcttctg

SEQ ID NO: 109015 - DNA, 89 bp, Homo sapiens
tcgctgctgcaaccccaagatgtcggagacacggtggaaacgcttatggtgcaggagaactccccagcccagcaggcgggcctggagcc

SEQ ID NO: 109016 - DNA, 74 bp, Homo sapiens
tcctgggtagctgggattacagtatttagcatttacgtgtggcttaatcagaggtggcttatcaaacttgggaa

SEQ ID NO: 109017 - DNA, 90 bp, Homo sapiens
gctcatatgacattaacagacaagacacttttcagaaagacaggatatggaatattatcttgtaaaatggaaaggatggccagattctac

SEQ ID NO: 109018 - DNA, 101 bp, Homo sapiens
caagaagctactggacctcgttcagcagtcatgtaactataagcagcttcggaaaggagccaatgaggtgtctttggtgcaacactaacaaggcttgtctg

SEQ ID NO: 109019 - DNA, 83 bp, Homo sapiens
ttatagctctgtatgagaaggacaacacctacttaggaactgtggctgcaccatctgtcttcatcttcccgccatctgatgag

SEQ ID NO: 109020 - DNA, 100 bp, Homo sapiens
taacaacctgctaccccatgccatcaacctgcgtgaggtcaacctgcgcccccagatgtcccagccagagactgctgctactttgaaacgtacgatagag

SEQ ID NO: 109021 - DNA, 50 bp, Homo sapiens
gctgctgtcttcaggaccattgcaaggtttttcgttggaatatacgttgc

SEQ ID NO: 109022 - DNA, 50 bp, Homo sapiens
ccttgatccagcggacttacgggctggagtgcagtggcgtgatctcggct

SEQ ID NO: 109023 - DNA, 100 bp, Homo sapiens
ctaggcctcgctcagggcggctgccccgggacccgcaggttcgatacaagaggctgttttcctagcgtggcttgctgcctttggtaagaacatgtcgtcc

SEQ ID NO: 109024 - DNA, 76 bp, Homo sapiens
attcacctctgtgaggaacaggcctctgaagacctggtggaaaagatgccatggacaatattaccaggcagaacca

SEQ ID NO: 109025 - DNA, 100 bp, Homo sapiens
agataaggatggagatggaagaatatcctttgaagaattctgtgctgatttgccagaaactgttccttacttaaaaatttttacagttggacatcaagtg

SEQ ID NO: 109026 - DNA, 96 bp, Homo sapiens
cggaaggcgcgggcaggagcctggcgaggatgcaccttcccctgccttggaaaggtccatctgggaagcgggatttgggttgatgaggagaaatgg

SEQ ID NO: 109027 - DNA, 74 bp, Homo sapiens
ccaagagctgacggaccacatggggatgaccggaggtggctggcaggaccaagtaggtggcctaatgcctggca

SEQ ID NO: 109028 - DNA, 98 bp, Homo sapiens
gcgctgttgctccacaaggcccagatcctggcgctggcagtgaatatggaggtgagaccataccaggacctgcatttaatccagcaagtcatccagct

SEQ ID NO: 109029 - DNA, 100 bp, Homo sapiens
ggacccgtactcgtcccgctacgcgcgggtggagccttttgccagcttgaccgaggccgtgcggagctcagttccccgactgctcatcaaccgggacttg

SEQ ID NO: 109030 - DNA, 95 bp, Homo sapiens
cttcattcccatcggcattggcatttttgtcacctccaacaacatccgcgagatcgagggcgaactttctgaccaagtatacaactacccagagg

SEQ ID NO: 109031 - DNA, 98 bp, Homo sapiens
tcctgtccatcgtgtgcctgatgatcacgcagctggctggcttcagtggaccactattcaaggatgcttggttgttgcacatgcattctggtccttgg

SEQ ID NO: 109032 - DNA, 82 bp, Homo sapiens
gaggttcgagcgctgttctcgctccggagccgctgcacatttcgcaaccatgtccaagggacctgcagttggtattgatctt

SEQ ID NO: 109033 - DNA, 89 bp, Homo sapiens
gtcagcgtgaagcgtgatctgctcttccaagccctgggccgcacctacagaaagaaattgagccttttctgccacctctgaagcctgat

SEQ ID NO: 109034 - DNA, 75 bp, Homo sapiens
cggaaatgaggaggagatggtggaggaggctgaaggtcaaaatgcagatcttcgtgaaaacccttaccggcaaga

SEQ ID NO: 109035 - DNA, 100 bp, Homo sapiens
gtccggagtaacttggccaggctggccccgagcggaactggagaaagctgagggtgtttcagtcacctccagtaacacgggcgtgccagatatctcgggt

SEQ ID NO: 109036 - DNA, 100 bp, Homo sapiens
gcagccgtgcgacaggatttggcccagctcatgaattcgagcggctctcataaagatctggctggcaagtactataagatctccgtggtgctcatgtgct

SEQ ID NO: 109037 - DNA, 83 bp, Homo sapiens
atgtgtacataactcccgcaggatctcagggcctgccgccccattatgatgatgtcgagttggcactggaaccagactctccc

SEQ ID NO: 109038 - DNA, 100 bp, Homo sapiens
taccacaagcatctgaagagagttttcctgatagatctcaacagtaagagcccgagcccagcacattgtgccctgtactatatctcagctgctttctgcc

SEQ ID NO: 109039 - DNA, 100 bp, Homo sapiens
agaacgaagaagctttcagactacgtggggaagaatgaaaaaaccaaaattatcgccaagattcagcaaaggtgtgctctgaacaagccgagacggggcc

SEQ ID NO: 109040 - DNA, 100 bp, Homo sapiens
aatgcagattcttttccgacatctcagaagaaactatgttccaacttcctgtcaacaatcttggcagtttaagaaaagcccggaaaactgtgaaaaaaat

SEQ ID NO: 109041 - DNA, 75 bp, Homo sapiens
cagaaacagaaacgattgtggaaacagatcaatgtccgagttaccaccatggatgcagagctggagtttgcaatc

SEQ ID NO: 109042 - DNA, 97 bp, Homo sapiens
cgcggtttcctgtacctgccttgggatccggagggaggaagctgggacacccgggagtcaggaaatgattcttctgctgatcgacattgagcagtcc

SEQ ID NO: 109043 - DNA, 82 bp, Homo sapiens
gtccggcttcggagcgggagtgttcgttgtgccagcgactaaaaagaggtcttgccccagaagctgcgggcacatccacgcc

SEQ ID NO: 109044 - DNA, 80 bp, Homo sapiens
gatttgttaaggattccaagtaactcttatttgccatgctgtgacctacaagcaaactaaatagccaacatttctgaacc

SEQ ID NO: 109045 - DNA, 100 bp, Homo sapiens
cttaagggacaaggtagaagaaaattcagtgagatctccaagaaaatcacctcgtttaatggcacaaggcatcattcttaacaaagaagttaaatattgg

SEQ ID NO: 109046 - DNA, 101 bp, Homo sapiens
atgccaatctctgcttgaaaggagaagacttggattctcaggttctctccataaatgaagaagggctaaggcgatgcgaagagaatacaaaagtctttggt

SEQ ID NO: 109047 - DNA, 98 bp, Homo sapiens
tgggctacgcgcacgggctcggccgccgcccctgccgatctctggaaacatggctacagaacatgttaatggaaatggtactgaagagcccatggata

SEQ ID NO: 109048 - DNA, 74 bp, Homo sapiens
ctctcctctctttgcagagccatacaaagtttctgttctctggggaggcagtaaggggccgtggagctggcctc

SEQ ID NO: 109049 - DNA, 100 bp, Homo sapiens
atgaacaagtgctggttctctttgaacagatgctggctgagactcgggctgagtttgcggagaggtcagtaactaaattggagaaaagcattgatgactt

SEQ ID NO: 109050 - DNA, 73 bp, Homo sapiens
tcttacgtctgcggaagtgcagctgcctcagttcttagcgcagtgtgcgtgaaggaaaattggagcatacact

SEQ ID NO: 109051 - DNA, 102 bp, Homo sapiens
ggatgagccagaacttccccaacgggggtgccatggacacccactttgccaacatgcgctccctcatccagagcccacaggcggttttgtgagctgcttccc

SEQ ID NO: 109052 - DNA, 80 bp, Homo sapiens
agaacactgctctggatgatgcagaagaggagtcctttaggaaggtcagaatggcggcagcggagcatcgtcattcttca

SEQ ID NO: 109053 - DNA, 100 bp, Homo sapiens
ctgacagtgcttatagcctttactaagaaagaggctggactgggatcagatgggaagcggaagctcatcatgaccagaaactgtttccctacagagagca

SEQ ID NO: 109054 - DNA, 100 bp, Homo sapiens
gtgggatttcgttttgcctccggttggggctgctgtttctcttcgccgacggaccaagctacaggaccctctggttttatttgaatccgagtctctgaga

SEQ ID NO: 109055 - DNA, 75 bp, Homo sapiens
aaacgaccttcggacccgccttttcagccgtcaccaccatcacaaaagagccacaatggagagtcacctagacac

SEQ ID NO: 109056 - DNA, 89 bp, Homo sapiens
agaaggggcgttggacagaactgggagcactggacattctgcagatgctggttatgatgtgtggctgggcaacagcagaggaaacacct

SEQ ID NO: 109057 - DNA, 50 bp, Homo sapiens
gcaaacagggaaactgaggaccagagaggcccgacggccatggaggctga

SEQ ID NO: 109058 - DNA, 153 bp, Homo sapiens
ctctcctttccagtcggagacctctgccgcaaacatgctccgccagatcatcggtcaggccaagaagcatccgagccccgtctggtaaacttgtccagattgaatatgctttggctgctgtagctggaggagccccgtccgtgggaattaaag

SEQ ID NO: 109059 - DNA, 74 bp, Homo sapiens
ctcctgagtggctgggactacagggaacgggctgttgaggaagaagacgctggtcccagggccgccaggttcga

SEQ ID NO: 109060 - DNA, 99 bp, Homo sapiens
gttccccttctactacatgctgaagctaatagatgatgtattggacttcacctcgtgttctgaccagatgggcaaaccaacatcagctgatctgaagct

SEQ ID NO: 109061 - DNA, 88 bp, Homo sapiens
cttcgggctgcctccccctccccttgtcccctgccccttgccctgcttctgcagaagcttcgcttttttgcaaatgcattcactttga

SEQ ID NO: 109062 - DNA, 75 bp, Homo sapiens
ggcaagagggagttaaggacattccaggcagaggcaagatcctgtttgaccaaactcagagatcaattaaggcac

SEQ ID NO: 109063 - DNA, 100 bp, Homo sapiens
ccgggtccccgcgttcacagccccagcgcaggtctctctcctcctgggcgagccgttcttcactaccagcctgctgccgtggcacaacctctacttctgg

SEQ ID NO: 109064 - DNA, 83 bp, Homo sapiens
cttcaagagaaatggagcccttctccaagttcaaggagcagggacaagttacaggaatgttctccaagcagcaatccaaaaga

SEQ ID NO: 109065 - DNA, 80 bp, Homo sapiens
aaggcgttcaagcgaaaacatgaccgctgagcccatgagctactgcttcttgggatacctttctcatgctatggaatttc

SEQ ID NO: 109066 - DNA, 82 bp, Homo sapiens
caacggcaggggcaggcctagtttgactctgacagtcctcccactaaggctttatcctgtggataaacgcagagtgaacgag

SEQ ID NO: 109067 - DNA, 75 bp, Homo sapiens
gcacaacaggagctacgaggagttgagaatctggacgaggctagagaacagaaagaaaagagtcctccagaccag

SEQ ID NO: 109068 - DNA, 50 bp, Homo sapiens
ccggaatggagaaggaagaggagtcgtaaacaaatccgagctatgctggg

SEQ ID NO: 109069 - DNA, 51 bp, Homo sapiens
cttaattgttttgcgagatgtgggtttaccgacaagactgtgaaactttcg

SEQ ID NO: 109070 - DNA, 76 bp, Homo sapiens
catcatctacttcacaggaattgccatttgaacctagaaagattgtacaatgaatggtgattctcgtgctgcggtg

SEQ ID NO: 109071 - DNA, 121 bp, Homo sapiens
gagacatggacgaagccttcaaatccatcaagctcatcaaaagtattctaccttgtaaatactgttatttgtatatactgtaaatgatgacatcggtgggcactaaccgagcccggggaaa

SEQ ID NO: 109072 - DNA, 100 bp, Homo sapiens
gaatactccttccttcctccccacccattcctttaaatccggagggggaaaaaatcccaaggtctgcaaagagcttggggcttccttggtcgcacccacc

SEQ ID NO: 109073 - DNA, 80 bp, Homo sapiens
ggagcctcagttggaagcagccgatccagcctgcggagcctgtggggcaggagggaacctgtatgacaaaatccttcgtc

SEQ ID NO: 109074 - DNA, 96 bp, Homo sapiens
cattgcagctgcatgttcaagaagtggccggagagttctgcatgttgattcttaatcagctgtgttcagcgaatacttatgaacagaaggctccag

SEQ ID NO: 109075 - DNA, 150 bp, Homo sapiens
gttcaaggcaagaccgaattcagaaggatatcgacgtcgtgatccagaagtccagagctgaggactgcctgtttgcagatgccatggacaatattaccaggcagaaccaattctacgatacccaagtcatcaaacaagaaaacgagtcag

SEQ ID NO: 109076 - DNA, 100 bp, Homo sapiens
tggaagtaaccccttccgggagcctagatcctgtgctttactctgaagactcaatcgcatggaagagagcaaagccttatttaaaaccatcatcacctac

SEQ ID NO: 109077 - DNA, 100 bp, Homo sapiens
gcctgaggcccctctcctacccagataccgatgttatactgatgtgtttttccatcgacagccctgatagtttagagtcattaccagctccagctgtgcc

SEQ ID NO: 109078 - DNA, 119 bp, Homo sapiens
tggtgcagctcaacgagctgctggaggacgagggccagctgacggagatggtgcagaagatggaggagcttcctgcctgacacagctcacttcaagaagtgcacaatgtcagaacgtgg

SEQ ID NO: 109079 - DNA, 96 bp, Homo sapiens
atcgtctccagcagctggagcacctccgggagctggcgtcactcctggaagggaatgaccagtgcacagccagagaacaacacatcacacacagga

SEQ ID NO: 109080 - DNA, 100 bp, Homo sapiens
ttggtttcgggatctcggtgctgcagacggcgagacctcctgcacaggacttgcaccttcgagatcccctgtgtttacccagctggaggatgatgaacag

SEQ ID NO: 109081 - DNA, 100 bp, Homo sapiens
tgggaaaggaatgagaagacagaagtcagagacaagaagaggctaacatgactgataccactataatttagtatccatttcactgggcttggcttcctca

SEQ ID NO: 109082 - DNA, 83 bp, Homo sapiens
cagaccctggagcctcagttggaagcagccgatccagcctgcggagcctgtggggcagtcacttatataagaagaaccttgat

SEQ ID NO: 109083 - DNA, 50 bp, Homo sapiens
tgaagactaaagcatctgtcagaaaaccttgttgtcctcctggtgcgaag

SEQ ID NO: 109084 - DNA, 101 bp, Homo sapiens
cgcgaacgagcgacggcggaacccgtgggcctgtggactgcagcctcggcggtcagcagatgcctgctctgtgcctgtatctgagatcatcgccgttgagg

SEQ ID NO: 109085 - DNA, 80 bp, Homo sapiens
cccagaagcagaacttgaaggttaaaccactagcccatttcacaggttattgaagacaatggtgttcgaagagttgtcgt

SEQ ID NO: 109086 - DNA, 100 bp, Homo sapiens
ggcacgtcaaccccttcctcccgtatatcagggtaataattcttgaagatgaacttgaaaagcttgtttgtactaaagaaacacaagaactagtgtcaga

SEQ ID NO: 109087 - DNA, 112 bp, Homo sapiens
ggcgcttggtggccactggcggccgaggtagaggcagtggcgcttgagttggtcgggggcagcggcagcaacaatggtgtggttggtgaatatggcagaaggagacccggaa

SEQ ID NO: 109088 - DNA, 74 bp, Homo sapiens
ttgggggcagcctgcagaggctgcgtgtggaaccatcagagaatctacaatccctgatggagaagaatcagtcc

SEQ ID NO: 109089 - DNA, 136 bp, Homo sapiens
cgcgtcactgtcgggtcggcgagccacgggggccgccgcagcaccatggcgaccaccgtcagcactcagcgcgggccggtactccaaagattcaggtttactcacgtcatccagcagagaatggaaagtcaaattt

SEQ ID NO: 109090 - DNA, 74 bp, Homo sapiens
gcgtttccacttcagagatctggtttcctatcctgggagcaggagagtgtgcctatttgaatgacaaaggtgcc

SEQ ID NO: 109091 - DNA, 100 bp, Homo sapiens
aacttggttccccctccctcagcttccgccccaaaagcatttaaatcaaacggtattgagatggattgggttatgaaacataatggtccaaatgacgcta

SEQ ID NO: 109092 - DNA, 75 bp, Homo sapiens
attctacatctcaagctcatattttgaagtgtttacggatattaacctggctgcagagccaaaagtgaaccgagg

SEQ ID NO: 109093 - DNA, 97 bp, Homo sapiens
aggaggacgccggcgtcttctgctcaggcccctagcagtcttcttgatgctttggaacaacatttagcttccttggaaggaaagaaaatcaaagatt

SEQ ID NO: 109094 - DNA, 96 bp, Homo sapiens
acaggagtgatgctgtgttcttcactgcatgatttcaaaagatattgatgatgttaagaagttcaaaccgggttacctggaagctactcttaattg

SEQ ID NO: 109095 - DNA, 78 bp, Homo sapiens
tcgcctggttgttagtggatcatcagataataccattaggctctggaatgggcactctccttatcagcaagatccgag

SEQ ID NO: 109096 - DNA, 82 bp, Homo sapiens
gcggggctgaggcggccgcggggcccgagcgcagaggagcaggagcggcttcgcttggagcaggagcgagagcaggaacaga

SEQ ID NO: 109097 - DNA, 74 bp, Homo sapiens
taacttctactgacgaagcttggaagttgcagaaggaattgtcttagaagaaagaaggcaagccaccattttac

SEQ ID NO: 109098 - DNA, 100 bp, Homo sapiens
ggaggccgagccgggatctcaggtcctcgggggcggcggccacgccaaggacggatgatgtgatgccagccacttactgtgaaattgatttagataaaga

SEQ ID NO: 109099 - DNA, 75 bp, Homo sapiens
gtggatcctacatgtgccatagggaaaatcatcagcgtgttagcattttctttgactatgcaagatgtagcaaga

SEQ ID NO: 109100 - DNA, 74 bp, Homo sapiens
cgaactcgggttctgacaagatggccgggctgccccgcaggatcatcaagatccttcctgggcatcagtaaata

SEQ ID NO: 109101 - DNA, 80 bp, Homo sapiens
gccgtcgccccgccgcgccgcgctccaaccgcctcctcctcctcagtaacgcgggtcctgagcctttgcctccaaaaggt

SEQ ID NO: 109102 - DNA, 100 bp, Homo sapiens
cccgatcccagtatctatgcctatgataactttggcgtgctgggcctggacctctggcaggagtttgacttacaaggaatctggagtagatatcgcagct

SEQ ID NO: 109103 - DNA, 74 bp, Homo sapiens
agtagacacaatgattgttcaggcaatttgaactgtggctgcaccatctgtcttcatcttcccgccatctgatg

SEQ ID NO: 109104 - DNA, 90 bp, Homo sapiens
ttgctcttagaacaccacgaacaccagcttcccaggacagaattctgcaggtcatgcaagacaagataatctgccttccgaaaagagtgc

SEQ ID NO: 109105 - DNA, 90 bp, Homo sapiens
cgcgcgcgctcgcgcaccacgcgccccgcgcggcccgcccggatcgtggcctctcgagagcaagaccgagacatgggtgcccggcaccgc

SEQ ID NO: 109106 - DNA, 98 bp, Homo sapiens
gggggactatgtggtggacttggacacgtcccagctctctctgggcatctggaaaggaccccagagagatgcccaggcagcccgagaattcattctga

SEQ ID NO: 109107 - DNA, 100 bp, Homo sapiens
ccacggaccacagctcactttccccaaggaccagcttgacgaggcctggactggtgacctgtcttcactgaccagcagccctggagccctccccagcctg

SEQ ID NO: 109108 - DNA, 100 bp, Homo sapiens
gggaggacgaggtggacgtgggcgtggtgggcgcccaaaccgtggcagcaggaccgacaagggtaagatgatggcatgcaaacactgcagtgacattttc

SEQ ID NO: 109109 - DNA, 99 bp, Homo sapiens
gagccaggcaccatggacagcgtgcggtctgggccttttgggcagcttttccggcctgacaacttcatctttgtgaagcgtgacattcaggaaaacgat

SEQ ID NO: 109110 - DNA, 82 bp, Homo sapiens
ggaagagcagacccggaggctgcagaaagacatgaagaagagcaccgacgcagacctgggaagccaaattggcagagaatgc

SEQ ID NO: 109111 - DNA, 99 bp, Homo sapiens
caacttgatacagagacaagtacaactcaatcagaaactattcagacagcggcttctctgttggcctctcagtctctagtgatccctgaaaagttccag

SEQ ID NO: 109112 - DNA, 75 bp, Homo sapiens
ggccttcgaccccacctccataccccgcggcatccctctggacgcaggaaatggctaattctgtctacctggtta

SEQ ID NO: 109113 - DNA, 51 bp, Homo sapiens
gaagccacccgggagtttgaggaggttgtgcacttttcaggattagaagag

SEQ ID NO: 109114 - DNA, 100 bp, Homo sapiens
ttgaacttaatacagcaagaaagaccatcaagtttaccacatttttgaaacgttggggttgttggagtggttggattttccctggaattgagtgagaaat

SEQ ID NO: 109115 - DNA, 100 bp, Homo sapiens
tcagtgaacagacacgggtgaatgctgctaaaaacaagactggggctgctcccatcattgatgtggtgcgatcgggagtaactattcccagtcagaggcg

SEQ ID NO: 109116 - DNA, 51 bp, Homo sapiens
cagttttgacagtaattcttttgggccggaagcaaaatgtggattcagcaa

SEQ ID NO: 109117 - DNA, 82 bp, Homo sapiens
tgggaaagataaccttctcaacgcctggaggacgccttatggagccagcatattccagcaaaatgatgcttcaacacccagg

SEQ ID NO: 109118 - DNA, 75 bp, Homo sapiens
gacatcctgggatattctttgttgagagggttattcaaatgctcagaagactattcttctgcaggtggatcagaa

SEQ ID NO: 109119 - DNA, 98 bp, Homo sapiens
acccgggcccctctccgctttcggccggcctcgggcaccgggcttctggaggcctccggtgtggctgtctctgatggtgtcatcaaggtgttcaacga

SEQ ID NO: 109120 - DNA, 74 bp, Homo sapiens
cacttgctgtcctacagtttgtcttctccttcttggcactggcaatccaggagtggctgaaggagggcccaccc

SEQ ID NO: 109121 - DNA, 98 bp, Homo sapiens
ctcgaagaacagctgtggaaagaagttgcaaaacactggactactggtgcctggatgatctgtaccgggagatggtgagatgctatgtggaaatcgtt

SEQ ID NO: 109122 - DNA, 87 bp, Homo sapiens
tgtctctgccctcctggcgggcccggcggctctcactatccagaggtattgtggccagtattttggttttcttatgttttggagtca

SEQ ID NO: 109123 - DNA, 83 bp, Homo sapiens
ccgtcattagcgtgaaaaccacaagcaggtccaaagagagatcgtgagatggagaataaagaaactctcaaagggttgcacaa

SEQ ID NO: 109124 - DNA, 82 bp, Homo sapiens
ctggtttctcttcagcgttcacctctctgcgcccaaacggatctgaagcggggagaggtggtgagagatgacccctgttgag

SEQ ID NO: 109125 - DNA, 100 bp, Homo sapiens
gaccgaattcagaaggatatcgacgtcgtgatccagaagtccagagctgaggactgcctgtttgcagtgtcaaatcaacagtgccttgacatctttccac

SEQ ID NO: 109126 - DNA, 51 bp, Homo sapiens
ccagaggcgagccctggtggaggaagagctggtggagctgtctaaggctca

SEQ ID NO: 109127 - DNA, 100 bp, Homo sapiens
tcttttctacagaaggttaaaagcatcttgactcctgaagcatcatggcagaacaggatgtggaaaacgatcttttggattacgatgaagaggaagagcc

SEQ ID NO: 109128 - DNA, 75 bp, Homo sapiens
tctgttgcagctgggtttgctgttgctaggggttcatatccagctttcagagtggcaccgtgcaatttttcttcc

SEQ ID NO: 109129 - DNA, 75 bp, Homo sapiens
tcagaatcgaatctcttctccctccccttcttgtacgccctgcatgtatacaatgaagtgatgagtgttggccag

SEQ ID NO: 109130 - DNA, 75 bp, Homo sapiens
gtgccctccgcccgatgcccacagccccacgccaggtgctggggagtcagggaagagcaccatcgtcaagcagat

SEQ ID NO: 109131 - DNA, 75 bp, Homo sapiens
aaagattttcagcacatagatgaagctggaaaagaccaaggcaagccgattttttcagttgatattcaccctgac

SEQ ID NO: 109132 - DNA, 82 bp, Homo sapiens
tacacgagtaatgtcaagctaccgttggccaagacagtttcaaaatggaaacgttccaggagagactcaaggtgacagttac

SEQ ID NO: 109133 - DNA, 75 bp, Homo sapiens
ggggtatggagaggaaggaagaggttaaaccttctctcgatgaagcttttgtcatccaagaacagaatgttgcac

SEQ ID NO: 109134 - DNA, 100 bp, Homo sapiens
gtcatgagcacactgcgagagctcggccaaacctgggcaaatttagatcacatggttgcaaagacagttgcacagaggctcaacacagatccaatgttgc

SEQ ID NO: 109135 - DNA, 100 bp, Homo sapiens
ttctgcgggatcttcaaccacctcgagcggctgctggacgaagggtgttgaaagcagcaggggcctagaagacattaaaccgataccacagaaatacaaa

SEQ ID NO: 109136 - DNA, 130 bp, Homo sapiens
gggaacccggaggcccaacgtggtgctgctcctcacggacgaccaggacgaagtgctcggcggcatgttcctctgtgacgagggtgcaggtatctctggggactacatcgatcgcgtggacgagcccttg

SEQ ID NO: 109137 - DNA, 101 bp, Homo sapiens
cgtggaccccaaacagctggtcaccaacgcctgcctcataaagggcatgccgccgatgactcaggcgccccgcattatgcaccacatgccgggccagccgc

SEQ ID NO: 109138 - DNA, 83 bp, Homo sapiens
gctgactacctcgcccacgagagtcggaggttttaaaatcaaagatgggaaaatcggagaaaattgcccttccccatggccag

SEQ ID NO: 109139 - DNA, 82 bp, Homo sapiens
gtgctgggctggtcccccttgatgaaacgactacaaagtgccatgacagaaggtggtgtggttctacgggaacctcagagaa

SEQ ID NO: 109140 - DNA, 75 bp, Homo sapiens
gctgccatctcctatgaagaatggaatgaccctcctgctgtggacatatttgacagtgattggtacacttctcga

SEQ ID NO: 109141 - DNA, 80 bp, Homo sapiens
gcctttaccccgttggagcccctgctttccactggtttgcctgcaatgagatttcattctctacatttaaaggacatcct

SEQ ID NO: 109142 - DNA, 74 bp, Homo sapiens
agactggcaacaagaagatggtaccgtgcatcgcacctatttaagagtgcagtcattggagaaatcgatgaaga

SEQ ID NO: 109143 - DNA, 75 bp, Homo sapiens
tgctcaagatctcagagaaggaggaggtgaccacgcgcgagcctaagttcgaggcccaggcgcctccatcagcgc

SEQ ID NO: 109144 - DNA, 98 bp, Homo sapiens
aagaaggcactatttgctcaggaaatggaatcttcagtttagatcttggaggcatatcaactgtggttctaaatggctatgatgtagtaaaggaatgc

SEQ ID NO: 109145 - DNA, 76 bp, Homo sapiens
gcaggaaaagatctctctacttctcctaagcacccggggggccagcgggtcatcgggcactacgctggagaagatg

SEQ ID NO: 109146 - DNA, 98 bp, Homo sapiens
gctgcagatggacagttgcacacactaggagatctcctcaaagaagtttgtccttctgctattgatcctgaaggcatgcccaagagaatcgtaaatgc

SEQ ID NO: 109147 - DNA, 101 bp, Homo sapiens
cagctgagtattggagccaggagcctgccatgagggtcttactgaagtaacacaaagcttaaaaatggaaaatgaagagtttaagaagaggttcagtgatg

SEQ ID NO: 109148 - DNA, 75 bp, Homo sapiens
tcaagtggccctcagggcatccccgttttcggacattctgagcatgtgagacctgaggactgcaaacagctataa

SEQ ID NO: 109149 - DNA, 98 bp, Homo sapiens
aatcttccaagtctaatagacctaaagccacagtcttcaagagcccacggacaccacctcaacgacgcaggaggagggagacgcactgatgacatcgg

SEQ ID NO: 109150 - DNA, 100 bp, Homo sapiens
accaataaggaaaatatggaaacaggaacaggactgactccagtgatgacgcaggccttaaggagaaagtttcagtaaaatgtttatcggtggactgagc

SEQ ID NO: 109151 - DNA, 97 bp, Homo sapiens
gcgccggcgggctaggctgcgcggtgcggaccccggcgcgcggtccgggttgctggggcggcgcgtgaaccaggaattaaagcagtgaacataacaa

SEQ ID NO: 109152 - DNA, 50 bp, Homo sapiens
ctgcggttggtgccattcgctacaaaggcgcattctacattctaaagggg

SEQ ID NO: 109153 - DNA, 100 bp, Homo sapiens
ctgatctcaacgactgcgtctccatcaaccgggccgtgccccagatgcccaccgggatggagaaggaggaggaatcggaagatgagaagtttttgtctga

SEQ ID NO: 109154 - DNA, 75 bp, Homo sapiens
ggagcgcctcgtcgacatgagtgatgtggaggaaaacaacttcgagggcagagtatgatctcgtgaaaccttgag

SEQ ID NO: 109155 - DNA, 99 bp, Homo sapiens
gttgataactcgcatgtttaaacaaactgctattgccaaggaggccagatgctccagtgcctgatggcgaaagtgagaaaactgtagaagaaagttcag

SEQ ID NO: 109156 - DNA, 100 bp, Homo sapiens
ccatttctgcagcaccaatgccttcagactgtggatgtaatccctgttcattactacttaatacctccaccaacaaagactaagaatggcagcaaagata

SEQ ID NO: 109157 - DNA, 75 bp, Homo sapiens
cggcaccaccatgctcgccctggaggctgcacatggtgggtacgggcacctcgctggcgctctcctccctcctgt

SEQ ID NO: 109158 - DNA, 75 bp, Homo sapiens
ctgcaagtcaccatggacgctgaaggactctagtatgggattcctttctacctacaatacctcgcccactggcca

SEQ ID NO: 109159 - DNA, 100 bp, Homo sapiens
ctttggacagcccccggaatttctctccaaatgcacctgctcacttttcttttgttcctgcccgtagctcttgggacccaaccaccatgctgtgaagcag

SEQ ID NO: 109160 - DNA, 75 bp, Homo sapiens
cagcattttcggcaaccgctgctggcagttttgccaggtgtttgttaccttgtttaacttacatgtgtagagctg

SEQ ID NO: 109161 - DNA, 82 bp, Homo sapiens
gaaacaagaaaatggactccctggctgctggagagttgaatgccagccaccagccatgggtctctaattaacagaagatggc

SEQ ID NO: 109162 - DNA, 100 bp, Homo sapiens
tcatgttgctttttgatggccatggcataaggaactctatcccaggaatacagctttgcattaggattttgaatgtggaaatgacgtggaactgtctttt

SEQ ID NO: 109163 - DNA, 100 bp, Homo sapiens
aatcaaagggccgggagcgatgttgattgcttatgcgtcaactgcagatggatattcagcagatctgcccctcccactacccatcagggtagaggatgaa

SEQ ID NO: 109164 - DNA, 83 bp, Homo sapiens
gaaaaataccacgacaaaaccaccctaattggccggtcgactgaaagccccattgattttgtagtaactgacacggttcctgg

SEQ ID NO: 109165 - DNA, 50 bp, Homo sapiens
cagcacttaagcaaacgggaattctcgcacctgatggccaaaagaaagga

SEQ ID NO: 109166 - DNA, 100 bp, Homo sapiens
gtcgtggtgatggaggcccccctggttaccgtaatttctatgatcgatacaggggagactatgatcgattttacgggcgagattatgagtacaacagata

SEQ ID NO: 109167 - DNA, 50 bp, Homo sapiens
gatacatgagacagcagccaaacccccagcatcccagccatcactcttcc

SEQ ID NO: 109168 - DNA, 82 bp, Homo sapiens
cctgctcctgcaggccctgcagaccctgtggtccacgcgggagcggaagcaggctcacagaacatttcctgcctgttgctca

SEQ ID NO: 109169 - DNA, 100 bp, Homo sapiens
ctggattccatgtagagacccctggaggagatccaggctacctggtatgagaaactgcacgagtgggaggatgcccttgtggcctatgacaagaaaatgg

SEQ ID NO: 109170 - DNA, 74 bp, Homo sapiens
cgctggagattgctgcaaacttgcaattaccagctctggctgggtcgccacaacttgtttgacgacgaaaacac

SEQ ID NO: 109171 - DNA, 82 bp, Homo sapiens
gcaacaacgatgccggatacaggagggacgtgcaccagatccgcctcacggacacgctgggcaggctctcgcacatcctgga

SEQ ID NO: 109172 - DNA, 83 bp, Homo sapiens
gatcccgccccgcccggagccccggcccccacaggttttaaaatcaaagatgggaaaatcggagaaaattgcccttccccatg

SEQ ID NO: 109173 - DNA, 99 bp, Homo sapiens
ttgatgaaggcgtggatagcctgaaggcagccattcaggatccactagttcctggactatgggaactgatgactcgcccaatgtcacagatgatgcagc

SEQ ID NO: 109174 - DNA, 108 bp, Homo sapiens
tcgctggtctacctgctcttcctgctgctgctgccctggttccccggccccacccgatgcggcctccaaggaaggagtcaagactgagaacaacgatcatattaattt

SEQ ID NO: 109175 - DNA, 100 bp, Homo sapiens
ctccacgggtttccacattcaggagaatgaagaaagccattacgagctccaagccaggtctggaacatgactgtctccatgacatcagataatagtatgc

SEQ ID NO: 109176 - DNA, 100 bp, Homo sapiens
caaaatattcatggttcttgagtactgttgcccagaaatggttgaataccagaagaaaggaaagtccctggattcagaacccagtgtcccatcagcagca

SEQ ID NO: 109177 - DNA, 100 bp, Homo sapiens
aagcagtgaaggagtgcagaggcatcacctgaaagaaagaagatgtactcccgcaagacgaagcccttctccttctacctggacatcaagtggctggcca

SEQ ID NO: 109178 - DNA, 83 bp, Homo sapiens
cctggatgggcactcaccctaagggtagggctctacttcactgggcctgtgatcgaggacataaggaactagtcacagtgttg

SEQ ID NO: 109179 - DNA, 83 bp, Homo sapiens
cagggaccaggctgagactcggggcgccagtccgggcaggggcagcgggagccggccggagagaaaaggaacagttccgtaag

SEQ ID NO: 109180 - DNA, 74 bp, Homo sapiens
aaacaaatgcaagtattacatccagcagccagaatgctccgccgcatgcaagagatgattgcaaggatgcaggc

SEQ ID NO: 109181 - DNA, 73 bp, Homo sapiens
gcagttctgcaccactggcatggatggcggcatgagtatctgggatgtgaagtttgacaagtatgcgcccaag

SEQ ID NO: 109182 - DNA, 75 bp, Homo sapiens
acagtgcactccgggccgcagttactcttcagggatgtgctggtactccaaagattcaggtttactcacgtcatc

SEQ ID NO: 109183 - DNA, 136 bp, Homo sapiens
ggaagagctgatgagaatgctggcggaggacgagctccgggatgctgtactccttgtctttgcaaacaaacagggcgtgatggtgggcatgggtcagaaggattcctatgtgggcgacgaggcccagagcaagaga

SEQ ID NO: 109184 - DNA, 89 bp, Homo sapiens
gcgtccgggacgcggagcccggagctggggcgacgaggcgattgcgggggcctgggctaggtttatggctacaaatgatttgatgacgg

SEQ ID NO: 109185 - DNA, 75 bp, Homo sapiens
aactgatgaagccaactgccttcaaaagacccctttcgtcacccaccctgggtatgacactggaaatggtattca

SEQ ID NO: 109186 - DNA, 82 bp, Homo sapiens
tgcagcgcaaccacgagacggccttccaagccctgggcgctgcctatggcacagccaagagcggtaccggcattgcggccat

SEQ ID NO: 109187 - DNA, 96 bp, Homo sapiens
tccaccattgccgagggctctcacccaaatgattgtgctcatggacgatgccatggactgcttgatgtctttttcagatttcctctttgccttcca

SEQ ID NO: 109188 - DNA, 76 bp, Homo sapiens
atgcgtttgagatctactgtgagcagtcacccgcagggccaaggtggctcccgctgagaggatgagcaagttctta

SEQ ID NO: 109189 - DNA, 75 bp, Homo sapiens
cagatttacaaactggccaagaagggccttactccttcacagatcgaaactaattctgaagcaagcccttatagt

SEQ ID NO: 109190 - DNA, 100 bp, Homo sapiens
ttcagcaaactatgtacaagttacagtcatagcagtacccgagatggaagacgcgacaggtatagatgatgattattctccaccgtctaagagaccaaag

SEQ ID NO: 109191 - DNA, 83 bp, Homo sapiens
ctcggcgcgactcgcttctttcggttctacctgggagaatccaccgccatccgccaccatgatgtcgtgatctcaacagcttg

SEQ ID NO: 109192 - DNA, 83 bp, Homo sapiens
cccccggggcaagagcaggagcccggcaccccccgccgacaaggaggcgtgagtgcatctccatccacgttggccaggctggt

SEQ ID NO: 109193 - DNA, 143 bp, Homo sapiens
gcacccccggcccgggcccggcaggtgggcgaggagggcgggcgcagtcgggctctgcaggagcgcgcggagggctctggctgacatcttaagacaacagggaccaatccccatagcacactgtgaaagagaaactatctcgg

SEQ ID NO: 109194 - DNA, 100 bp, Homo sapiens
tctcaatgtcaccacctcacgccctgttccagatgctgtgggccctgagggaaaggatcacagaggcgctgagccgggatggctacgtgtacaagtacga

SEQ ID NO: 109195 - DNA, 100 bp, Homo sapiens
gagctctgcatcaatgcgccggccataggtatccgcccccagatcatgaacggccccctgcacccccgccccctggtggcgctgctggacggccgcgact

SEQ ID NO: 109196 - DNA, 73 bp, Homo sapiens
ggcttttactaaaaatggacgcctggcaaccaatgccggtggtggtgtgcacattgagccccggtatagacag

SEQ ID NO: 109197 - DNA, 101 bp, Homo sapiens
gggtcctcagcagtaccacctgttgatggagtttgcactgtagcaaattgcgttggaaaagaactagctccacatgtcaagaagcatggaagcaaacttgt

SEQ ID NO: 109198 - DNA, 89 bp, Homo sapiens
actccagaggcagtgatagaacacccagacgcaggcctatgagagctacaagaagaaggactacacccaggtggactacttaatcaacg

SEQ ID NO: 109199 - DNA, 100 bp, Homo sapiens
aagagcagcattggaaactctgtttacgttattatcaacacaggaccagttgctgatagtccaactccaccgccaccacctccaccagatgacattccca

SEQ ID NO: 109200 - DNA, 100 bp, Homo sapiens
accagagcttgtgtagcgtcagatccttgagtgataaaggagtagagctcaggaatcttgcttttaagaaaattccccagaaatcctcccatgctgtttg

SEQ ID NO: 109201 - DNA, 83 bp, Homo sapiens
attgttgggagcgctgttttcgtgatcttcagaccccaggttctttggtgacttaagagattaaaattaatttggttgctgtt

SEQ ID NO: 109202 - DNA, 100 bp, Homo sapiens
gctttgtggtgcacaagcggtgccatgaatttgtcacattctcctgccctggcgctgacaagggtccagcctccgatgcttgcattgatgacaatgttga

SEQ ID NO: 109203 - DNA, 110 bp, Homo sapiens
ccatggcagctccagcctctgcctcccagaaactcagcttgtgctgcattgcacctgtcctcgcggccaaggtgctcagaggcgtcgaggtgactgtgggccacgagcag

SEQ ID NO: 109204 - DNA, 96 bp, Homo sapiens
ctttgtgctgctacctctccagcagtgaaactccatgatgaaaccctaacgtatctcaatcaagattataagaagaccagtctagcaccttatgtg

SEQ ID NO: 109205 - DNA, 82 bp, Homo sapiens
aactgcggaagcaacttaaagtgaaggtcaaccgcctttttgaggcccaagcttcctaaccaagcgaagccggcaggtctgt

SEQ ID NO: 109206 - DNA, 105 bp, Homo sapiens
tgaaaatttcttccaaggttgatgcatctctctcagaggatgataatgaagataattcaaatgatgggacccagccatccaaaaggaggcgaatgggctcaggag

SEQ ID NO: 109207 - DNA, 100 bp, Homo sapiens
gcgaggagccgggcgcttagaacagaggcttgcacaggtggaggcatacagaaagttagccaaggaatatcatcctgataagaatccaaatgcaggagac

SEQ ID NO: 109208 - DNA, 100 bp, Homo sapiens
cacagtccttctgcagtccctcgtccagccacccccagggctgccagaggaacccgaccagaacctgtccagccctgaggaggtgttccactctggccac

SEQ ID NO: 109209 - DNA, 75 bp, Homo sapiens
ggccacctgggacggtacttctgggcctcttctgcctacattacttccacagagtcaagggtccagagaaggagg

SEQ ID NO: 109210 - DNA, 100 bp, Homo sapiens
ctctcccacaggcattatctgcctcatcagtgttttcggaacccatcacaacccagctgtgtggccggaccctgaggtctacgaccccttccgctttgac

SEQ ID NO: 109211 - DNA, 100 bp, Homo sapiens
tacgagtgcaacatctgcaaggtccgcttcaccagcaaacgtcactgctgcctccactcccacccaacttgggcgatgtgaccgatttgagttcgaatgc

SEQ ID NO: 109212 - DNA, 99 bp, Homo sapiens
gaaaaagatctcgatacttgaggaaccttcaaaggcacttcgtggggtcacaggtaatttggcccagacaagagctaggataacagtggcctcaagttc

SEQ ID NO: 109213 - DNA, 75 bp, Homo sapiens
taaaagtggtgatgaacttcaggatgaggaaaaccagtagattcccagacatcgcgaagtgaatctgaaattgtg

SEQ ID NO: 109214 - DNA, 100 bp, Homo sapiens
ccgggatctcaggtcctcgggggcggcggccacgccaaggacggatttatcagcaagactgttgaacgcataactgcccaagatgcctgtccctccccct

SEQ ID NO: 109215 - DNA, 100 bp, Homo sapiens
cgaagctctagaaatgaatgtttccatctcttcagagatgaaccaggcagtagcagaatcccatggtagccaggtgggtgaaggggagcgaggacgttct

SEQ ID NO: 109216 - DNA, 73 bp, Homo sapiens
ggagatggtggaggaggctgaagtgaagtgtatccggagcaccccggaatattttgctgaaaggctcttcaag

SEQ ID NO: 109217 - DNA, 50 bp, Homo sapiens
tgggttttacatcaccggtctgggcagtttgcctgcaatgagatttcatt

SEQ ID NO: 109218 - DNA, 82 bp, Homo sapiens
atgtttgcgatgactttgatctttgctacggatgctatgcagcgaagaaatactcctacggcattccttctgcagcacttga

SEQ ID NO: 109219 - DNA, 100 bp, Homo sapiens
tgttcctgagcttgagatgctaggaagacttggcgcttcagcatggaagggatctcaaatgtcattcagaatggcctccgccacacctttggaaattcag

SEQ ID NO: 109220 - DNA, 82 bp, Homo sapiens
atctgggacatcagccagccaggcagcaagagccccatctcccagctggactgcctgtttcccagcgaggtggtcattcaga

SEQ ID NO: 109221 - DNA, 95 bp, Homo sapiens
tacctggaacttcatcatcatctacttcacaggaattgccatttggaagtttaattagcattgacagcacctgtacagagatgggcaattttgac

SEQ ID NO: 109222 - DNA, 83 bp, Homo sapiens
ctacaaacataggatgttttggcgagagatgtattcagtggaggaagctggaacagggtctgttccacaaaaaagacagtgcc

SEQ ID NO: 109223 - DNA, 100 bp, Homo sapiens
gcgttgtcgatgccgctgaatgggctgaaggaggaggacaaagagcccctcatcgagctcttcgtcaaggtgctggagaatctggtaaaagcaccattgt

SEQ ID NO: 109224 - DNA, 100 bp, Homo sapiens
gaaaaactggatgttggtagaaaaagcaagagtttgttatatagcagtcattcaacatttattcaaccaaaaatactaagtcagctctatacaaactaat

SEQ ID NO: 109225 - DNA, 100 bp, Homo sapiens
cggtgagggagacagaactgtccagcgtcacgctcagcacttgccgaggaattagcactgggaatttgctcctaacagtgttcattatttattaactctg

SEQ ID NO: 109226 - DNA, 80 bp, Homo sapiens
ggagcctcagttggaagcagccgatccagcctgcggagcctgtggggcagatatggatcagaaactttcgaagttggtag

SEQ ID NO: 109227 - DNA, 98 bp, Homo sapiens
tagtagaaaaagttcttgggacaaacttcatttgttgctgttgctgatgcaaagaagtctctagaactcaatccaaataattccactgctatgctgag

SEQ ID NO: 109228 - DNA, 74 bp, Homo sapiens
gctggaggtggacgccatcgtcaacgccggactgtagaagcggccaggaagaaaaccaccccctcttaaggttg

SEQ ID NO: 109229 - DNA, 51 bp, Homo sapiens
catcgacatcagtgaagaagatcagatttgaaggccatatagagatctgcc

SEQ ID NO: 109230 - DNA, 80 bp, Homo sapiens
cattttggcattgacatttaattttagggtcctttatatagaagggagagtagatccaaaattaacgggacaggctctta

SEQ ID NO: 109231 - DNA, 96 bp, Homo sapiens
tcttcacccatggacatctttgacatgttctttggtggtggtggacggatggctagagagagaagagcatggtggggagttatatttcagtgacgt

SEQ ID NO: 109232 - DNA, 75 bp, Homo sapiens
gagctttgcgggaaagcagcggaattgtgagcatatcagcatcaagtaccactggtgtggcaatgcacacttcaa

SEQ ID NO: 109233 - DNA, 80 bp, Homo sapiens
gggaaaatggcggtgtctacagtgttctcgacttcgtcgctggcaacagcattattgagaaaagcccttacagaagagtg

SEQ ID NO: 109234 - DNA, 82 bp, Homo sapiens
ctttcatgcagtgacatgttgataaaaaatgatgcggagctggagtttgttcagatcatcatcatcgtggtggtgatgatgg

SEQ ID NO: 109235 - DNA, 100 bp, Homo sapiens
tgaaagcaaacagaaatttgtgctcaaaacccccaaggttgggataattcttcactattccacccttgccacagtactatgggtaggagtgacagctcga

SEQ ID NO: 109236 - DNA, 75 bp, Homo sapiens
atcaacaacatcaatgacttcctgaaaggatgtgcaaccctccaagtggaagtgattgcatactcggaacatcgt

SEQ ID NO: 109237 - DNA, 75 bp, Homo sapiens
gcaacttcaacgcctgggttgcggggagctacggtaacgatcagtggctgcaggaactagtcagccggaagctga

SEQ ID NO: 109238 - DNA, 75 bp, Homo sapiens
ctgacccctgaaggaaacaaagatgtggaagatgtgaaatttgtcatcaattatgactaccctaactcctcagag

SEQ ID NO: 109239 - DNA, 100 bp, Homo sapiens
gtcgctctgtgacctgctggcattgaatgatttatagctaagactccaggacacccctgaagccgagaaatggacatccataaaaattcatcagagagca

SEQ ID NO: 109240 - DNA, 90 bp, Homo sapiens
gggtggtgctcacgccgcccatgaagatggtcctagcagaagatgtgactcagactgcctctgggtggggctggctggcccacagatcct

SEQ ID NO: 109241 - DNA, 97 bp, Homo sapiens
tggttggaaaacccaagatatttatcattcagctctacgtggccacggaggccatcctcattgcactggttggggccacgccatcctaccactggga

SEQ ID NO: 109242 - DNA, 51 bp, Homo sapiens
gcggaggcggccgctgctcgagcttatcacacagactttcagccaccacaa

SEQ ID NO: 109243 - DNA, 85 bp, Homo sapiens
aacgagggttcccgggattggaccgacgcagccatggttggcgtgcagtggtgtgatctcagctcattgcaacctctgcctcccg

SEQ ID NO: 109244 - DNA, 77 bp, Homo sapiens
aactcggagggaccctggcccggaggaagaaagccaaggagggtattcgccaactacagctcatcctattcaaggtg

SEQ ID NO: 109245 - DNA, 109 bp, Homo sapiens
ctcattattataggctccctcctgctgtcaggctacatcagcaaaggggtgctaagagatgccgtttgcaggcctcatctctgcttgagaatcgggggctccaggcact

SEQ ID NO: 109246 - DNA, 74 bp, Homo sapiens
gcggcagcttcaccgccgagtcctccagggaccatatgatgtggtggttctaccaggaggtaatctgggcgcac

SEQ ID NO: 109247 - DNA, 100 bp, Homo sapiens
gcaaaatgcacaagtactggctggatacctgctccgagatgtacctgtgtcagtgccattgaagtggttgtggagcatggcctggctactccagaaggcc

SEQ ID NO: 109248 - DNA, 100 bp, Homo sapiens
cttcacaatggtgattattgattttttgattggagtcccatcaccaaagcttcaagttcccagtgtgttcaaggttgttcggaatcctataattgaaaaa

SEQ ID NO: 109249 - DNA, 75 bp, Homo sapiens
aagtccttaacacaagccacagatggcactctgattcggcttgcaaaaaagggagactcatgcatctgtatgccg

SEQ ID NO: 109250 - DNA, 90 bp, Homo sapiens
gcgggggtggaggacatcgacatccaggcgaactcggcctatcgctaccctccgaagtccgatgtcaagccctccaacatcctagtcaac

SEQ ID NO: 109251 - DNA, 100 bp, Homo sapiens
gatggaagttgagcaagagcagcggcgcagaaaggtggaggccgggaggacgaaggtgacgcggcgcacggcgcggatggtggccgagtggcagtgtgtg

SEQ ID NO: 109252 - DNA, 82 bp, Homo sapiens
aagtcggcggaaagtttggctgcgcgggttcccccgaagttcagacctgcctagagctggaacgttacctccagagcgagcc

SEQ ID NO: 109253 - DNA, 50 bp, Homo sapiens
ccatgaggccaaaggcagttgtattggatactatttttgagacaacaaat

SEQ ID NO: 109254 - DNA, 50 bp, Homo sapiens
cctctcagcaccctcaccgtctactgtcccatccatgggggggcggaagc

SEQ ID NO: 109255 - DNA, 116 bp, Homo sapiens
ggagaccccgaggaacccagcagggtcaccatttgcagcgcaacatggcagcaaagggttaccttccagttcaacatttaccttggaagaggggaccatctacttgaccgctgagc

SEQ ID NO: 109256 - DNA, 100 bp, Homo sapiens
aaacgcttctgtttggtgtctggaccctgctggccttgatcctttgcccagacacctagctcccctgtttgacaaccctaagttggataaggagctgcgg

SEQ ID NO: 109257 - DNA, 100 bp, Homo sapiens
cctaaggctggagaccgggtccacaaagacgagtgcgccttctccttcgacacgccgtggcaggccatctccctgacggtcatcgagaaggtccagattg

SEQ ID NO: 109258 - DNA, 100 bp, Homo sapiens
agcaacagaagtttatcaaggctgtcacacatcaagttaaatttggtcaacaaaatccacgtcagtgagctggaagaatctctacttgtgctgcctttct

SEQ ID NO: 109259 - DNA, 100 bp, Homo sapiens
tgaactgaatcagcctgctgaacttttacctcagttttctagcattgaatatgtagttctgcaaatgacatcttcatttctcagtatacaatgggacaga

SEQ ID NO: 109260 - DNA, 100 bp, Homo sapiens
aaaacatgtactacagccagtcttctatgtttccacatcggtcagaaaaagatcttagcagtgtctgcaaaaacgaatcttttcctacaacctgttaact

SEQ ID NO: 109261 - DNA, 98 bp, Homo sapiens
cgctccctagcaccttctccagtcgacactctcgcgcccggagaaaaggcgacggcggattgacagaagtatgattggagagcccacaaactttgtgc

SEQ ID NO: 109262 - DNA, 75 bp, Homo sapiens
ggaggaaattgtgatctgcgatcgagcctcggtcaaggagcaaaccagtccagctacgggggcccagccagccag

SEQ ID NO: 109263 - DNA, 83 bp, Homo sapiens
gaaaatcacagaggtaaagcatcatttcatcacatcctgtcaaggccctgccaaggtaaccctgctggggtcagttatcttca

SEQ ID NO: 109264 - DNA, 76 bp, Homo sapiens
cttccaaggagctgggactacaggtgtctttacatttggcaatctccgtcctacagagggctggaaaagccctgcg

SEQ ID NO: 109265 - DNA, 100 bp, Homo sapiens
agggaccattcttcaaagagtagacactctggctgctccctgacagcatacttccacaggctgcactcgaggagatccacaaattctcaggaacctacac

SEQ ID NO: 109266 - DNA, 77 bp, Homo sapiens
ggcaaatcaggctgacctcgacacagagtggaatctgtttatagaaaaaaccgggaagatcctgacggagttcctcc

SEQ ID NO: 109267 - DNA, 100 bp, Homo sapiens
aacggcgctgatgagtctgtttgggatcccgctgtggtacttctcgcagtccccgcgcgtggtcatccaggtcgcctgcgaggccgctggccaggcctga

SEQ ID NO: 109268 - DNA, 100 bp, Homo sapiens
cgcaatctcagtctctctcacgttcccagagcatggatatcgatggtgtctcatgtgagaaaagggcatttgtttacctgagcaatctgctgtatcccgt

SEQ ID NO: 109269 - DNA, 75 bp, Homo sapiens
ggagagaatgtatgaagaacagtcacaggacaggttgtttttgagcacgttcactctcgcagtgtcagctggggc

SEQ ID NO: 109270 - DNA, 90 bp, Homo sapiens
gctgatttcagactcagaagccgacgttcgagaggaagattcttacctctttgatctcgacaataaggtggagattctggacgcaaagac

SEQ ID NO: 109271 - DNA, 99 bp, Homo sapiens
ggggagcctcagcggtctgcgcctggcagcaggattggctaaaagatgtgtgtgaaaagaataagtggagtcacaagaattcccctatcatctggagag

SEQ ID NO: 109272 - DNA, 74 bp, Homo sapiens
cgtgtcctggcctcagctgggaggaatattgctgcccggctggaacagcttgagaactatgacttcaccaaatt

SEQ ID NO: 109273 - DNA, 75 bp, Homo sapiens
ccatttgatgatgataatgtaatggctttatacaagaagattatggcttgcacagaaatctggaggcagtatcac

SEQ ID NO: 109274 - DNA, 80 bp, Homo sapiens
gattgtggcattgagagaagctttgagcttgacacaactctcatagactttactgacatgaagtgccaacgaggggatct

SEQ ID NO: 109275 - DNA, 51 bp, Homo sapiens
gttcacggctccatcgctgttagaggatttgacagctaaggatattgaaga

SEQ ID NO: 109276 - DNA, 82 bp, Homo sapiens
tggagttgtgaacgccgcggactccggagccgcacaaaccagggctcgccatgaagccaggaaatggccaaggaggaccctg

SEQ ID NO: 109277 - DNA, 50 bp, Homo sapiens
caggaatcactaccaagcttctgaccaatgttggctcaattaagaaacat

SEQ ID NO: 109278 - DNA, 75 bp, Homo sapiens
aagatagaagggaaggacactgatgactggctgtgcgtggattttggtagttgatgtcacttggcgatattcctg

SEQ ID NO: 109279 - DNA, 75 bp, Homo sapiens
atattctactccatctcattcattgtacagatataccagtatattcagagtcgcttttatcggtctccagaggtg

SEQ ID NO: 109280 - DNA, 82 bp, Homo sapiens
acctttccaacacagatgtccaagctgccaagctccagcaggaggaaatggtgcagaaaatgttgctgctgatcagcctgct

SEQ ID NO: 109281 - DNA, 75 bp, Homo sapiens
atactatccgtttgttcaggaaccaccagtgacagaaacactatgtggctgccgtgtaagagtggaactgtcgaa

SEQ ID NO: 109282 - DNA, 100 bp, Homo sapiens
ataaagtctggtctcctctggtgacggaggaagggaagcgtcatccatacaagatgaatttagcctctgaaccccagacaactcgagagatgatcgctcg

SEQ ID NO: 109283 - DNA, 75 bp, Homo sapiens
gaagaactgagaatgttaagctttcagcagatgacgtggcgaacaaatagaccccccaaaccccccaccgagctg

SEQ ID NO: 109284 - DNA, 83 bp, Homo sapiens
acataaagacagggctccatgcagtggaccgatgggcctctacagactgggtggagagattcaaccagttagcgtgaaagttg

SEQ ID NO: 109285 - DNA, 100 bp, Homo sapiens
cggctatggaggagaccgaggtgggggctacggaggagaccgaggtggctatggaggcaaaatgggaggaaggcacgtgggaaaaagcgccagataggct

SEQ ID NO: 109286 - DNA, 98 bp, Homo sapiens
cccagctgtacctggaagctgagcagcagcttgccgctctagaaggtagacatagctgacattgagaatgaagagaaccgctactgtctattcatgga

SEQ ID NO: 109287 - DNA, 100 bp, Homo sapiens
accaacagcttccaagatagtaacagctcctcaagagttactgatctatgaaatggcagagaatggaaaaaattgtgaccagagacgtgtagcaatgaac

SEQ ID NO: 109288 - DNA, 100 bp, Homo sapiens
ccagcaatcacagaagccgacaaggcgttcaagcgaaaacatgaccgctgagcccatgagcggggatctgatgagcttctttcttctggcatcattaacg

SEQ ID NO: 109289 - DNA, 100 bp, Homo sapiens
agtgacagcaagtccattcagaaaaacgatactggagtatttgtgtcagacattgtcaaaggaggaattgcagatgccgatggaagactgatgcagggag

SEQ ID NO: 109290 - DNA, 100 bp, Homo sapiens
gtgggagtgggccggggtaatgtcacccagcacgtgcaaggacacaggaacctctccacggtcgaatcaaatattcggaacaggtgtatgatgcctgtat

SEQ ID NO: 109291 - DNA, 75 bp, Homo sapiens
tctccggtacaggttgaggctactaagcatgttggcagataaattgaacatgactccagaagaagctgaaaggtg

SEQ ID NO: 109292 - DNA, 74 bp, Homo sapiens
ggagctgcagggctttttggctgccgagcaggacatccgagagacccccagaggagcccaccacctggaccggg

SEQ ID NO: 109293 - DNA, 88 bp, Homo sapiens
acccagacagcgagcacattcttgctacctccagtcaagacaattctgtgaagattgatgaactcccagagggcgctgtgaagcctcc

SEQ ID NO: 109294 - DNA, 142 bp, Homo sapiens
gaaaggggacagacgtaaacgtgttcaataccatccttaccaccagaagctatccacaacttcgcagaggattcaactggaagctttgtgctgcctttccggcaagtcatgtatgctccatatcccaccacacacatagatg

SEQ ID NO: 109295 - DNA, 50 bp, Homo sapiens
gaccgcgctgggtcggaagtgagcaggttctgtttggattctgcaaagca

SEQ ID NO: 109296 - DNA, 88 bp, Homo sapiens
atgtcatccagcgagtgattagatctattaatgagatgaagcggttggaagaaatgtcaaatatgtttcagagctctggagtccagca

SEQ ID NO: 109297 - DNA, 86 bp, Homo sapiens
gaatccaggagttcattgaactcatccggcagaataagagactggacgctgtgagggcagctggtggaatttttgaagaaaatgga

SEQ ID NO: 109298 - DNA, 100 bp, Homo sapiens
tttaccaaaagagaggcaccgctggaacactaatgagccacccaggctactttgggaaagttggtatgaagcattaccacttaaagaggaaccagagctt

SEQ ID NO: 109299 - DNA, 100 bp, Homo sapiens
ttcaaaaacagtggacagctctgattcgtagcacgcttgcttgcatcctggaatattctcaaccagatgatagtatttctgctgcaagtacttctgatgt

SEQ ID NO: 109300 - DNA, 139 bp, Homo sapiens
ggagaaaacggaatctaatcaggaggttgctaacccagaacactatattaaacatcccctacagaacagagtcactcaagggaaaggattaatgccagatggtaccagcagatttacttgcaaaggaaagacaattttg

SEQ ID NO: 109301 - DNA, 75 bp, Homo sapiens
ctcacatgaagaccaatttttacgtctagatttccatgcccatggaagacaattccaagctcgagtgtctcggca

SEQ ID NO: 109302 - DNA, 75 bp, Homo sapiens
ggcgattccatctctgaagcaacaaggggaatggggtcaaaatgagcagaataacaagcctttgtattcatttga

SEQ ID NO: 109303 - DNA, 100 bp, Homo sapiens
gggagctactctcaggctgcagattagtagcaaggaagtttgtaggagcagcaaattatcgggagaagattcatagtactttgactccatgtgggacttt

SEQ ID NO: 109304 - DNA, 101 bp, Homo sapiens
tggagaagctggccaagaagcaagtggctatcatagaaaaggaggttaagaatagacccaccagcatttcgtgggatggtcttgattcagggaagctctac

SEQ ID NO: 109305 - DNA, 83 bp, Homo sapiens
gctgaggcggcgcggcagcggagggacggcagtctcgcgcggatgcctaaatcaaaggaacttgtttcttcaagctcttctgg

SEQ ID NO: 109306 - DNA, 97 bp, Homo sapiens
cgacgttgaccgcacactggatgaatggaagcgtgactctgacatcattagaagcatgccagaacagactggtgaaaagtaaaccttttcacctaca

SEQ ID NO: 109307 - DNA, 103 bp, Homo sapiens
aggttgccgacgccatcaggctcaacgaggaactcaaagtggatgaggaaattgtcgccgtgatcctgaaggcgctgacctacgacgagaagcggggtgcctg

SEQ ID NO: 109308 - DNA, 80 bp, Homo sapiens
tattaatctcagggaactggatgtcagcaagaatggtgatgatgaacagtctacacagatggctgcaagttgggaagatg

SEQ ID NO: 109309 - DNA, 51 bp, Homo sapiens
gacgcgaccgcggcgcgagtcaccatggttgttcctggtcattgagtacgt

SEQ ID NO: 109310 - DNA, 80 bp, Homo sapiens
gacgaacgtgttgtgcctgctgaggatggccggaggctcgccgacgaccttgggccaccgggacccaaaggtgatcaggg

SEQ ID NO: 109311 - DNA, 100 bp, Homo sapiens
gcgttgaaagccttgaagtacttgtttagattcatcatccaatcccgagtgctctacttgaggacaccattgagatcactggaacttttaaacaccgcaa

SEQ ID NO: 109312 - DNA, 75 bp, Homo sapiens
gagacccagcaagccttctaccaggtcagcagaattacctgattctaggacaaaggaaattgaagccattcatgc

SEQ ID NO: 109313 - DNA, 83 bp, Homo sapiens
aaagggctttcatccacacaccaaggagcccaggctgttcagtgctctcgaacagtgtggcctgatgaaactatgggaccctt

SEQ ID NO: 109314 - DNA, 90 bp, Homo sapiens
gacaccgtccttaccatgaagaagctgcccatcacctatgctaagtgctatttatggaggtacctatatgctgaataaacccattgaaga

SEQ ID NO: 109315 - DNA, 50 bp, Homo sapiens
cgaggactccagcacaccgagggcacagcgtcaccttcgtcccctccgga

SEQ ID NO: 109316 - DNA, 100 bp, Homo sapiens
gcagttagaaagggaacagctggaatgggagagagagcgcagaatatcaagtgctgtcagagcaccataacatggtgtgggaagtgaagacaaatcagat

SEQ ID NO: 109317 - DNA, 50 bp, Homo sapiens
ggaatgaatagaattggaggaggttcagaaacagcatatttagaaaacag

SEQ ID NO: 109318 - DNA, 100 bp, Homo sapiens
cctgaagtgcgggcgcagctggcggagctggagctggagctctcggagggcttgggcactgtttaaaggaaagttccgagaaggcatcgacaagccggac

SEQ ID NO: 109319 - DNA, 50 bp, Homo sapiens
cgagcttttcctccaggcctttgagagctttttcttctggggtggatctt

SEQ ID NO: 109320 - DNA, 98 bp, Homo sapiens
gactatcagccactaatgaagttgggaactcagaccgtaccttgcaacaagaggctaagaatattgtacacaaagattcttgatgttcttgaggaaat

SEQ ID NO: 109321 - DNA, 100 bp, Homo sapiens
acctctaacacagtggaaaggaaccgttctggatcaggtagctttggatatgttaaatcctcatgttactttgcctgttttttacccacatcttaagcat

SEQ ID NO: 109322 - DNA, 83 bp, Homo sapiens
ctggatttggtactggagtgatgagtttggttcttggcaggaatatggaagacagtaggtaaccagttaggggccttggtaca

SEQ ID NO: 109323 - DNA, 100 bp, Homo sapiens
gaagctcctcacagagtatgtgtcaggcccaaatattgagaaatcagtgaaggatttgcaacgctgcaccgtttctctaactagatatcgcgtcatgatt

SEQ ID NO: 109324 - DNA, 100 bp, Homo sapiens
gagctgggcaggagaggcctgttgctgccgtctcgactcgtggatgcgtgagtgcatctccatccacgttggccaggctggtgtccagattggcaatgcc

SEQ ID NO: 109325 - DNA, 125 bp, Homo sapiens
cttggatggaccttgcactctagaagggacaatggacttctggctttggccactttacttcctgccagcaaagccttctagacaagctcagtggaatctgaagggcccaccccatggaggaatgc

SEQ ID NO: 109326 - DNA, 95 bp, Homo sapiens
gcaatatgccttcatccactggaagttactggggagtaggttgcatctttgttgaaatgatccaaggagttgctgcttttccaggaatgaaagac

SEQ ID NO: 109327 - DNA, 98 bp, Homo sapiens
agagcttgtgaaactgagggaatagaacaagaggaaagtatggggaaggagccaagcaggagacgttcacctttgccttaactttggtcttcattcaa

SEQ ID NO: 109328 - DNA, 82 bp, Homo sapiens
cgggttattcgagtgaccgagaccgcggccgggaccgaggccagatgaaaactcgctggatttttcctcctgtatgttacgg

SEQ ID NO: 109329 - DNA, 90 bp, Homo sapiens
ggcgccgcctgactgtggggtgttcgttccgcacccgctcccggcgcctgccggagaggccaggtgcagcagtaccgcgtcgccatgact

SEQ ID NO: 109330 - DNA, 100 bp, Homo sapiens
aaaaattggtcagaagatgatctacaattactaattaaagctgtgaatctgttccctgctggaacaaattcaagggaagagcctaggttccaggtgcctt

SEQ ID NO: 109331 - DNA, 100 bp, Homo sapiens
attaaatagtagtgaaactgcagaccttttgaaagagaaagatgagcagatccgagggttaatggaagaagtgatgtttatccatgcatcgttgagactt

SEQ ID NO: 109332 - DNA, 90 bp, Homo sapiens
accagtcccccagttcagtagactggagcccagagcctgcttacttgtcaggtctgccatcatggatgttctcgcagaagcaaatggcac

SEQ ID NO: 109333 - DNA, 90 bp, Homo sapiens
caaagagcccctcatcgagctcttcgtcaagcgccctcacaaagccaatgctgaggagatgaccaagtaccacagcgatgactacattaa

SEQ ID NO: 109334 - DNA, 75 bp, Homo sapiens
ggaggagtctcagagctgtcagaaagggttattggggctgtgccatcggcaaagccaggcaagctgcaaagacgg

SEQ ID NO: 109335 - DNA, 90 bp, Homo sapiens
gcagatcatcctggaggaccagaactgcaagctggccaagagaatgaacagccttccctcgtttggtttgacagaggaaagttttatttg

SEQ ID NO: 109336 - DNA, 98 bp, Homo sapiens
agaggatctggtgtaccaggcgaagctggccgagcaggctgagcgatacgacggtggctttgcagatcgctcctccatgtaccagtgagaagcattat

SEQ ID NO: 109337 - DNA, 98 bp, Homo sapiens
ccgagagcgtgaccgagagcgcgaatatcgtcatcgttagaaggtttttctatatgagtggagaagacagctgttaccagggaggtcatacaacattt

SEQ ID NO: 109338 - DNA, 116 bp, Homo sapiens
agttccttgtggagccggagctgggcgcggattcgccgaggcaccgaggcactcagaggagccctgggcgctgcctatggcacagccaagagcggtaccggcattgcggccatgtc

SEQ ID NO: 109339 - DNA, 83 bp, Homo sapiens
cccggaagctggtggaacagctacgcatagaagccgggattgagcgcatcaaggagcatcagatccatgctgctgctgactcg

SEQ ID NO: 109340 - DNA, 101 bp, Homo sapiens
ctgggtcttctacttcttcatacagtggctatgaagtgtttctaagacctcagagaaatttggaatctatagacccgcagtttacaatccggaggaaaatg

SEQ ID NO: 109341 - DNA, 97 bp, Homo sapiens
gggtcggttcctgctattccggcgcctccactccgtcccccgcgggtctgctctgtgtgccatggacggccggctcagttcggggaagctgcaggag

SEQ ID NO: 109342 - DNA, 75 bp, Homo sapiens
gtggtggagaacgtagtacctttcggggacattggacactactctaggaccgggaaacccagcgtttgctggcag

SEQ ID NO: 109343 - DNA, 100 bp, Homo sapiens
gaatggcaagttaaacatacagtcgcctctgacaagccaggtgcccagtcccctggaaggcagtgaaggggacggagacactgactgaggcgatgggagc

SEQ ID NO: 109344 - DNA, 100 bp, Homo sapiens
gcccgtgtcggagaccccgcgccggaccctgaggcagcgagtcaacgtggaggtaccaggccaccatgctcagtctcaagctgccccaacttcttcaagt

SEQ ID NO: 109345 - DNA, 95 bp, Homo sapiens
tttcagcagttgttaaattctcaacagctcacaccatcaccaggagactaaagtccatcaaaaacatccagaaaattaccaagtctatgaaaatg

SEQ ID NO: 109346 - DNA, 82 bp, Homo sapiens
ctttggatcagacttttgtgttgcagttcgggcttgggcactgtttaaaggaaagttccgagaaggcatcgacaagccggac

SEQ ID NO: 109347 - DNA, 100 bp, Homo sapiens
cgggactagtggaccagctggtgaaggcagacagcgagtggcgacgatgggctgcgaagctgcacccaggtggcaggctgcctggtgtccctgtccatgc

SEQ ID NO: 109348 - DNA, 90 bp, Homo sapiens
tacaaaggcatatgctgacacacagtggagacaaacctttcaagattcctcacctattcctacctcttggccttcaatgtgtggcttctg

SEQ ID NO: 109349 - DNA, 82 bp, Homo sapiens
gcggctcggggtgctctactggaaggacagctgcccagcctccaggcccactgatggacccgttaacgaaggtgccttgtgg

SEQ ID NO: 109350 - DNA, 100 bp, Homo sapiens
gaagtacttcaccaactgcaagcagtggtaccaaaggaaaatctgtggcaaatcaacgtctacttccccagcaggacagcatcattctcctatatcttct

SEQ ID NO: 109351 - DNA, 96 bp, Homo sapiens
cctgtacctgccttgggatccggagggaggaagctgggacacccgggagtcaggaaatgagtcccctttacttggtaaatcacggcgagagtggac

SEQ ID NO: 109352 - DNA, 100 bp, Homo sapiens
ggcaaacagtgagtggggttcagcgtagactctggaccaggagaggcccgcggtgaccgaggcctgggccccggccacagacccctttgcttctgttttt

SEQ ID NO: 109353 - DNA, 75 bp, Homo sapiens
gaggacatctgggggccacaaatgctccttctcctggagacgcaactcaaggggctgacattcaccctacgccct

SEQ ID NO: 109354 - DNA, 101 bp, Homo sapiens
ccgagatgccgggggagcggggccttccacaccccctccgtgggtgtgtggaggagacatcacagctttcccagatcgggaggaaaaatatggaatgtgtt

SEQ ID NO: 109355 - DNA, 100 bp, Homo sapiens
gaagaatttaatggatatctagtctactagatgactgggcaagtaagggaactctggtggaagaaatcaattgcaaaggtacttctttagaaaatctcat

SEQ ID NO: 109356 - DNA, 73 bp, Homo sapiens
cgcgctggcggtgtggacgcggaactcagcggagaaacgcgattgaggtgaaaaggagaacagcttgaagaca

SEQ ID NO: 109357 - DNA, 100 bp, Homo sapiens
catcaatttgaaaggcttgaaatacatcagcgagagtccaggattcatccctttgctgtggtggcttttgagtgctgtttttgcagcagtgttgcactgg

SEQ ID NO: 109358 - DNA, 98 bp, Homo sapiens
tggtgatggtggcagccatagcatgggagtggttttttggcaaaatccccagagccaaggcagaagaaatgcttagcaaacagcggcacgatggggcc

SEQ ID NO: 109359 - DNA, 99 bp, Homo sapiens
agggagacctcggtgggcagaaaggaaccgggttgtcttgggccgggcagggcggaatggcattgtgcccatcgtggagcctgagatcctccctgatgg

SEQ ID NO: 109360 - DNA, 75 bp, Homo sapiens
gaggggtctgaagactgaaagagtcgaatggtttgttggcagtttggaagaactgaagtaattgataatacttta

SEQ ID NO: 109361 - DNA, 100 bp, Homo sapiens
ggtatacagagtggagattcaaaacctaacatatgctgtcaaattatttaaacagcaagaaggacctcaccagatgctgcccctcaatcttggatttcct

SEQ ID NO: 109362 - DNA, 83 bp, Homo sapiens
ctttgcagaaacttcataaatatatgcaggagcagacgcctccgcctagacctgaagcctaccccatccccactcagacgtac

SEQ ID NO: 109363 - DNA, 100 bp, Homo sapiens
catcttcgcggtagctgggaccgccgttcagttggttgaatctggcgatgtggaacccatggatatggagggctgactatatacaccatgttttttcctg

SEQ ID NO: 109364 - DNA, 100 bp, Homo sapiens
gacagaggcagacacagaaggccgacaccctgcacctggctttatcctgtggataaacgcagagtgaacgagtttggggagtcctacgaggagaaggcca

SEQ ID NO: 109365 - DNA, 101 bp, Homo sapiens
atcctgatatggctctttgccgaaatgctagagaaatggtgtcaaatcagacactgagcttgttcttcacggttctgcaagatgtcccagtaagagatctg

SEQ ID NO: 109366 - DNA, 145 bp, Homo sapiens
gaaatggattggagtgaaccggagaccccgaaaacggaagcgcagggagaaggaagaggtgtttgaaaagttggagtcattcgttgcccagtttgcagccaagaatgtgcagagagacacatcatagataacttttttgtgaagg

SEQ ID NO: 109367 - DNA, 78 bp, Homo sapiens
gagtgatgggtcaggggaatctgcccagccacctgaggacagccgaaggagtaaaggtgctgcaatgatgttagctgt

SEQ ID NO: 109368 - DNA, 83 bp, Homo sapiens
cgaacttttgacacggctttggaaacgacgtcatgtgttaggtgtatgtggaatttgatgatcttgaatgggataaacgagag

SEQ ID NO: 109369 - DNA, 100 bp, Homo sapiens
caggagtgctgccagaaatttgaacaactttccgaatctgcaaaagaagagcaggttgttgccctggatgcccaaaatattgtagctgtttcatgtggag

SEQ ID NO: 109370 - DNA, 83 bp, Homo sapiens
ggccaagatggcggtgctgtcaggtgagaagccctaccactgcaactgggacggctgcggctggaagtttgcgcgctcagacg

SEQ ID NO: 109371 - DNA, 50 bp, Homo sapiens
ctcctgcagatgtctttttcagggagcttccaattacttatccatctgca

SEQ ID NO: 109372 - DNA, 125 bp, Homo sapiens
ttcaagctctccagcttactctgcaagttctccccggacggcaagtacctggcaagaggaggaacgacgtagaagagaggaagagatgatgattcgtcaacgtgagatggaagaacaaatgaggc

SEQ ID NO: 109373 - DNA, 97 bp, Homo sapiens
aaaagtatgttgtaccttgtgacagaatatgccaaaaatggagaaatttttggtttgatgacaaatacaccttgaagctgaccttcatcagtgggag

SEQ ID NO: 109374 - DNA, 100 bp, Homo sapiens
ctgcctcatgaaaacaattgcagtgatgagaaccagttactaatggcatacatcacacatttcaggacccagatgatgtggtaccagttggccaaagaag

SEQ ID NO: 109375 - DNA, 75 bp, Homo sapiens
gttcttccttgaagaaatacagcttggtgaagagttactagctcaagagctagagccggtgcaggccacgcagaa

SEQ ID NO: 109376 - DNA, 100 bp, Homo sapiens
aggccgccattgtcggctactgcgacgccaaatacgtctgggcagccacggccgggggcgtctttcagagcattacggctgctgatactttggctgtgag

SEQ ID NO: 109377 - DNA, 90 bp, Homo sapiens
tcaatgccagaatggtgtttgaaaagggtgtccgcaatgttgccagtgtctgtctgcagattggctacccaactgttgcatcagtacccc

SEQ ID NO: 109378 - DNA, 51 bp, Homo sapiens
ggtgaatttccatgtcaacatagtcctgcctcaagcagcctgccaccctgc

SEQ ID NO: 109379 - DNA, 82 bp, Homo sapiens
ctgacagatgccagcgtagctgaatccagtaccaaaaacgtcaacaacagttttacggagcgtgaggatcatccccggagag

SEQ ID NO: 109380 - DNA, 100 bp, Homo sapiens
atgcgtggctgaaagagctggggctccgcgaggaaaacgagggcgtgtataatggaagctggggaggccggggagagaaagtgctaggtggcgacagtgc

SEQ ID NO: 109381 - DNA, 90 bp, Homo sapiens
acttgcaagaaagcagccccagagtttcaggatctgaagctgagggaattctactgtgagggaaacccactgttcctgcagcagccagtg

SEQ ID NO: 109382 - DNA, 90 bp, Homo sapiens
gtccagaaagcggcttatcgaacagagccgggagttcaagaagaacactccagagcgccagcagccctgtggtggcgacgacgatggacc

SEQ ID NO: 109383 - DNA, 100 bp, Homo sapiens
accaatccatttacagcaaaattcagggcttcaaatataatgccatcttcaaggaaagaccacagcaagattctttcattcgtctcctcctagcctgggg

SEQ ID NO: 109384 - DNA, 51 bp, Homo sapiens
ttgcgcaacgccaacctcaggcgagatgtcctgccattgactctaccagag

SEQ ID NO: 109385 - DNA, 95 bp, Homo sapiens
ttgggcgaccaggaggtgccggtggccgcgctcggacccggcttcatccctccacccctcatcttcggggctggcatcgactccacctgcctgtt

SEQ ID NO: 109386 - DNA, 100 bp, Homo sapiens
tgaatacttttactactgtgacaacattaacgggaatgggtactgttcaaaaaggaatgccccacaagtgttaccatggcaaaactggaagagtctacaa

SEQ ID NO: 109387 - DNA, 88 bp, Homo sapiens
acgtctgggcagccacggccgggggcgtctttcagagcattacgacaaagaaccggcgctgcaaactgctgcccctggtgatggctgc

SEQ ID NO: 109388 - DNA, 100 bp, Homo sapiens
gtaactttaattccaggagatggtattggcccagaaatttcagctgcagttatgaagatttttgatgctgccaaaagtctcgctctgttgcccgggctgg

SEQ ID NO: 109389 - DNA, 100 bp, Homo sapiens
gaaattgacagcccttgaacggagaatagagtacattgaagctcggcccaagttcctctctaaagcagaacgagaggctgaagctctaaagcgacggcag

SEQ ID NO: 109390 - DNA, 75 bp, Homo sapiens
agatcatgttcgaatatgggaagttttaaagacagaggaggagatacaactcgtcaacgaatcaaattcagtgat

SEQ ID NO: 109391 - DNA, 82 bp, Homo sapiens
ccaaagaaacaagccgtggaataggtgtatcaagtaatggtgcaaagcctgaaggtctaaaattcccaggactccacagctt

SEQ ID NO: 109392 - DNA, 75 bp, Homo sapiens
gtctgtaatgaatgtggaaatcgatggaaggtcttgttcagcgttgcgtaatcatccagaaagatgacaatggat

SEQ ID NO: 109393 - DNA, 101 bp, Homo sapiens
gtaccgggggtgacagctccgggaccggccgaaaggcgaggaaccgacaatgcagatcttcgtgaagactctgactggtaagaccatcaccctcgaggttg

SEQ ID NO: 109394 - DNA, 100 bp, Homo sapiens
agtctgtatctttagtaaggatgggaccttgtttgcctggggcaatggagaaaagtggttggttctagctattgccatggtacgtttttatatggaaaaa

SEQ ID NO: 109395 - DNA, 75 bp, Homo sapiens
aaacaacctggcccatgagatgatagctgtggaaggattttgtgaaaatggaaaattatgaggcattggtaggct

SEQ ID NO: 109396 - DNA, 83 bp, Homo sapiens
ggagcaggacaaggccatcctggagcaggccgggctctcgccatgggtcactgtcgcctctgccacgggaagttttcctcgag

SEQ ID NO: 109397 - DNA, 100 bp, Homo sapiens
gaagagggaatcccatcaaagtcagccgtgtggggtctgcaatgactgaaatcgccaagagattgaatacgatttgtgcacaagtcatcccatttctgtc

SEQ ID NO: 109398 - DNA, 90 bp, Homo sapiens
tccccgccacccgtgatcgtgcgccgaggcccgcgaggggtcgccgcccaggcagcgcccggttaccacatggccaagctgatcatcaag

SEQ ID NO: 109399 - DNA, 98 bp, Homo sapiens
ttgcgacggaaatgtgtcatcgaaagccaggctatggaggctatgatgattacaatggctataatgatggctatggatttgggtcagatagatttgga

SEQ ID NO: 109400 - DNA, 74 bp, Homo sapiens
tttgaccacaacaagggccggattctcacccagcactcacctttgccctgggtactcttcttgtatgtgtttcc

SEQ ID NO: 109401 - DNA, 100 bp, Homo sapiens
agccttcctgggatacaaggctggcatgactcacatcgtgcgggaagtcgacaggccgggatccagtgttatgtctggctgtagctgttggtcacgtgaa

SEQ ID NO: 109402 - DNA, 100 bp, Homo sapiens
cctatcttgacacagccaagatgatgacttcatcaggcagatactgtgagggctacaagcttctaaataagcacaaagcttcctgaaatgactcatgttc

SEQ ID NO: 109403 - DNA, 75 bp, Homo sapiens
caagtggccatggggagcctcagcggtctgcgcctggcagcagatgctggctatgagtttgacatctgcttcacc

SEQ ID NO: 109404 - DNA, 98 bp, Homo sapiens
cgtgacatccgaggtgcctttctccaaaagatccagaatataagaagtttttagaaacctactgtgtggaggaagagaagaccagtgccaaccctgag

SEQ ID NO: 109405 - DNA, 100 bp, Homo sapiens
gcacggccatcgccggctcggtggaggcggtggccagggtttcatcaccttaaatggttttgaaccaatgaaggtgtattcccttaaaaagacggacagc

SEQ ID NO: 109406 - DNA, 100 bp, Homo sapiens
cagcaaaggaacagcccggcttattgaacacatcagaatccacacagctggcgctacgtacatctttgggaaaagtggtgggcttatcctctacacctgg

SEQ ID NO: 109407 - DNA, 75 bp, Homo sapiens
ctatcctcatggatcaactgataagttgccttatgtcaccatgggaaagaaccggaggctgaagcaggccaaaga

SEQ ID NO: 109408 - DNA, 100 bp, Homo sapiens
acctgggccacagcgccatctacaacatgtgccacctcatggaggacagccaaggccacctttgatgccatttctaagacctacagctacctgacccccg

SEQ ID NO: 109409 - DNA, 100 bp, Homo sapiens
gttttaactacagacccagtctctgccaagacactgcccatctctaagataagaacctggaaaggggactctgttggccattggaaattgcagaataatg

SEQ ID NO: 109410 - DNA, 82 bp, Homo sapiens
cagcccttccagatacagctaccagccttatgccagcctggaccatcttggaggcagtgtaggatcatggaagaactttgaa

SEQ ID NO: 109411 - DNA, 88 bp, Homo sapiens
ccgggagtaggagactcagaatcgaatctcttctccctccccttcttggttttgtagtgcatccctgagcatgagcacagaatgaagc

SEQ ID NO: 109412 - DNA, 75 bp, Homo sapiens
tgcagttcctagcgaggaggcgccgccgccattgccgctctctcgagacagggaagaacgattggcagcactcac

SEQ ID NO: 109413 - DNA, 50 bp, Homo sapiens
ccggagcagccggggtcggagcggctttgtgacaacaaactgtgctctgc

SEQ ID NO: 109414 - DNA, 82 bp, Homo sapiens
gagacacagtgtcagaattacaaggagggagccatggatttgctgcgggagctgaaggccatgcctatcacgctgcacctgc

SEQ ID NO: 109415 - DNA, 99 bp, Homo sapiens
ctccgccacgcagccggccaccgccgagacccagcacatcgccgaccaggcaagtgaaccggagcaaacgacttccgatccagtctgcgctgttgcggc

SEQ ID NO: 109416 - DNA, 82 bp, Homo sapiens
gtgaactctgtccagttttcaaaccacacaggcgtccgagctgggccacagcctgaacgagaacgtcctcaagcctgcgcag

SEQ ID NO: 109417 - DNA, 101 bp, Homo sapiens
aaaaaggaagcagatccagaagatggaaaacctgtgatggataaagtcaaggagaggagagccagagaagtgacagggaagctacaggttacaacagattt

SEQ ID NO: 109418 - DNA, 75 bp, Homo sapiens
gaaaataaagaaaacgaacgcccttcggccggatcgaagttgtgtgacttcattgagacacattacctgaatgag

SEQ ID NO: 109419 - DNA, 90 bp, Homo sapiens
tggagcccacctgctttgagaagagcaatgacattgggggcctgtggaaattttcatcaagtccatcatctccagaaccagctagtcttc

SEQ ID NO: 109420 - DNA, 50 bp, Homo sapiens
tacttgagcaacttgattcctggttcttatgagtgcatcaatactggggg

SEQ ID NO: 109421 - DNA, 96 bp, Homo sapiens
tccggtccgtgcctccaagatgaaaaggcaacagatggctccctgcaaagtgaggattggacgttgaatatggagatctgtgacatcatcaatgag

SEQ ID NO: 109422 - DNA, 99 bp, Homo sapiens
cagagcctcagtttgtgcaggacaccgacatggaacagggactcactggggccaccccacgtcatgctgcagcgccgcagagatcatggctgtcctctt

SEQ ID NO: 109423 - DNA, 100 bp, Homo sapiens
cggctacatcttttcgtcgcttgccggctgtctgatgaagagcagcgagaatggcgcgagcatccacaatgggtaccccagcctcggtggtcagtgagcc

SEQ ID NO: 109424 - DNA, 74 bp, Homo sapiens
cacagcagaaggactccttcgaaatggaagaggtacatcaggaacgtctctatcaagaatacaatttcagcaag

SEQ ID NO: 109425 - DNA, 95 bp, Homo sapiens
acatagcatggtgccagacacataacagcttctcccgttggcaacggttacatcaagcctccggttccacctgcttctggcacgcacagggagaa

SEQ ID NO: 109426 - DNA, 98 bp, Homo sapiens
ggaactcgggcatcatggcctcaggtgtctgtgacctttgaggatgtggctgtgacattcacccaggaggagtggggacagttggatgcagcccagag

SEQ ID NO: 109427 - DNA, 100 bp, Homo sapiens
ttggagttggagacaggcacctggataaccttttgctaacaaaaacagcctactttggggataaaggattatttggtcttctggatttggaggcaatcag

SEQ ID NO: 109428 - DNA, 100 bp, Homo sapiens
agcagaacagcctccgcggctccggggagaaggacatggatttgattgacatactttggaggcaagatatagatcttggagtaagtcgagaagtatttga

SEQ ID NO: 109429 - DNA, 80 bp, Homo sapiens
gccagatgtacatcaaggcctccggcagctatgcaggtgccaagtcctgccctgccaacttcttggcagctgccgacgac

SEQ ID NO: 109430 - DNA, 90 bp, Homo sapiens
aagctcggggccgagcgggaggcagccgtggccgaggtggctgcctctttgatgagccgtatagcacatgtggatatagtcaatctgaag

SEQ ID NO: 109431 - DNA, 83 bp, Homo sapiens
agatgaagagcatgatctagaagaggatgagagtggcactcgacgaaaaggagtattatgatgacacattcccctccatgaag

SEQ ID NO: 109432 - DNA, 100 bp, Homo sapiens
cctctgttgacctatgatctgcagggagacgcacagccaggacatcctggaacctgggaaagggtaaacgcaaagcactgaagttgaattttgcaaatcc

SEQ ID NO: 109433 - DNA, 75 bp, Homo sapiens
ggttctgcaccatcttcaggtcctactccaggggcgctcaggtggacatcgagcagctggatccccgcggccgga

SEQ ID NO: 109434 - DNA, 75 bp, Homo sapiens
catgcaagcgagggacctgggactgctcacagccagtggatgattcaacagccacacaaagcagcaacatttttt

SEQ ID NO: 109435 - DNA, 98 bp, Homo sapiens
ggaagggaaagtccctaaaaatcacgagttcaggcgtctgagacttggtgggaacggaccttcctcttagcctacaacacagcagtcccctcaggatg

SEQ ID NO: 109436 - DNA, 75 bp, Homo sapiens
tggagggggcttccccggaatggagggctccgggcccaagtttgaggaggttttcctttggaatatggataaata

SEQ ID NO: 109437 - DNA, 83 bp, Homo sapiens
cgccgcggcactgatccccacagatcatggaagggaagtggttgctgtgtatgttactggtgcttggaactgctattgttgag

SEQ ID NO: 109438 - DNA, 102 bp, Homo sapiens
cagttttgaaatcgacacacaaagaatagagttgagcctgtgggacacttcggagtaatcaagtcagaggattatatgacttttatctgcctagagaagaac

SEQ ID NO: 109439 - DNA, 98 bp, Homo sapiens
tcctttggcttctgtggggacaactgtggagcatgaccccgcccatggtgaacgcctactactcgcccaccaagaatgagattgtgtttccggccggg

SEQ ID NO: 109440 - DNA, 87 bp, Homo sapiens
cgccgctccctagcaccttctccagtcgacactctcgcgcccggagcaaatccagtttgctgatgacatgcaggagttcaccaaatt

SEQ ID NO: 109441 - DNA, 75 bp, Homo sapiens
gagtttgttagctcgtcgttcacttcaggcccaacttcagtttgatgaaggccggaacaactttgaaggggaggt

SEQ ID NO: 109442 - DNA, 75 bp, Homo sapiens
cgggcgtggacggtgtggggcggtcccggccccgcaggccgacgcctccccccagggtcagctgcgggctcccag

SEQ ID NO: 109443 - DNA, 100 bp, Homo sapiens
gattcatcagattttgcattggatattcgcatgcctggggttacacctaaacagaattttccagttcatatgaagaggtgatctctcaaataaatacgtc

SEQ ID NO: 109444 - DNA, 100 bp, Homo sapiens
gaccagaaggtgtatgagatccaggacatctatgagaacagcatcaaagctaagccagaagatttatcacattttcatcatcagctacaggattagaaag

SEQ ID NO: 109445 - DNA, 74 bp, Homo sapiens
attttcccaatttttgctatactcctgttctggggacagtttggtattaaaaaggtgtgctctgaacaagccga

SEQ ID NO: 109446 - DNA, 83 bp, Homo sapiens
gccgggccctgccagggagcaagtctgcatcgcagaggccagggttgcacactgggccacagaggatccagcaaggatgaaga

SEQ ID NO: 109447 - DNA, 100 bp, Homo sapiens
gccattgatgcaagcctgacctccttccagttttacagcaaaggtggaagaagagcccgaagaagaacctgaagagacagcagaagacacaacagaagac

SEQ ID NO: 109448 - DNA, 82 bp, Homo sapiens
gtattgctgtgggtgctgggacttcccgtccgcggcgtggagggcataatcaccagcaacacccgggacaataatacggggg

SEQ ID NO: 109449 - DNA, 82 bp, Homo sapiens
tccctgaaccactccactgcctttaaccctcagcctcagagtcagatgcagggttgtttgcattcgctccacttggaatgct

SEQ ID NO: 109450 - DNA, 83 bp, Homo sapiens
agagccaaggaataaacatgcaatgaacccaaaaggttagagaaatagaggaagttgtcgtgtagttgtcatgtattcagtcc

SEQ ID NO: 109451 - DNA, 100 bp, Homo sapiens
gagcgcggaaatctggaaccgggatggcgacgtctacactgagtcggaggcgaaggctgtattcatcaccaaagaaaaaacttacaccaatgcagaaatc

SEQ ID NO: 109452 - DNA, 75 bp, Homo sapiens
gagactcgtggggctggatgggaatcgtagtcttcctaggagttggtaaatgttgtccagactcagagtttaaga

SEQ ID NO: 109453 - DNA, 75 bp, Homo sapiens
ggcgattaccggtctcaccatggagcggaaaggtctcacaagaatcttttcttatctaagttgcaacatggaacc

SEQ ID NO: 109454 - DNA, 111 bp, Homo sapiens
ggggagaggaccatgtgagtgggctccggagcctcagcgccgcgcaggtcagaagacatgtcttcatctacatggcatctttccttacctctatgtgccatacgatggtta

SEQ ID NO: 109455 - DNA, 75 bp, Homo sapiens
gacggctcacctgtgcgggatggaacaaaaggctatgtccaaactgggtcttcggcaggttacaggagttactag

SEQ ID NO: 109456 - DNA, 87 bp, Homo sapiens
cacttccccggggtgtaataatgttaactgagatgttcctcctgctgatcaagagaagctttttatccagaagttacgtcagtgttg

SEQ ID NO: 109457 - DNA, 110 bp, Homo sapiens
ccagaccctggagcctcagttggaagcagccgatccagcctgcggagcctgtggggcagtgaacagagtatctgtcaggcaagagctgctgtgatggtttatgatgatgc

SEQ ID NO: 109458 - DNA, 74 bp, Homo sapiens
gctgatggcccctacctggtgatcgtggaacagcctaagcagggagaaaaaagggcatcatccccattccgaag

SEQ ID NO: 109459 - DNA, 75 bp, Homo sapiens
gatactggttatatggagacaaaattcttgatgattcctttatagaagtcaccaggagactaaagtccatcaaaa

SEQ ID NO: 109460 - DNA, 82 bp, Homo sapiens
gacatggcccggaggcagcagaaggaaagaatacccacctcatgtccaaaaagttgaaattaatcctgtaaggttaagtcgg

SEQ ID NO: 109461 - DNA, 98 bp, Homo sapiens
ggcctggagctcccagggccgagggcagcaggatgggtgtggaagcagtgatggcacttttggaggggaccccagataccccagcctgtgtagtgagc

SEQ ID NO: 109462 - DNA, 100 bp, Homo sapiens
atcacgggttcaactgcgcagaatctaccaacttcgccaccctgcggtggattgactacggcaaagtggccactcagttcctgggcttcccgatggactc

SEQ ID NO: 109463 - DNA, 100 bp, Homo sapiens
ccggagcccagcagctgtgggagccccgagaacgcctccagcggggatgacacagaagtttggaaattttagcattcaggtgccaggaatgcagatggga

SEQ ID NO: 109464 - DNA, 98 bp, Homo sapiens
tactacctggtgcagggcctgattgaggactgccagctggcgctgcagaccattgtgatgaatgactgtattatccgaggggatctggcaaatgtaag

SEQ ID NO: 109465 - DNA, 75 bp, Homo sapiens
cagctttttgtgctgccagcaagaaatgatcagtagcaccagtgtttatgaaacgggtatgcaggagattagaag

SEQ ID NO: 109466 - DNA, 75 bp, Homo sapiens
accgaggcgcctcgctggggcggggaccttgccttgcccgggttaaaagaagatggatgcacagtgttcagccaa

SEQ ID NO: 109467 - DNA, 83 bp, Homo sapiens
ctcaacccagaggaatcgttactctttcagactcacttttccccttcgtctttctctccctttctgtctttctgtgtctcctc

SEQ ID NO: 109468 - DNA, 100 bp, Homo sapiens
cgcgttcttgagtcgggaaatggccgctgtgtggttgcaacggagataaattcccggaaccgcgattcggcgtgtcaggatttggagttccatggagtga

SEQ ID NO: 109469 - DNA, 90 bp, Homo sapiens
tgcaaccaccattagaattgacttgtgatcagttcacctttgaatttatgaatgccagaattccagaaaagttcagttcgaatcaagaac

SEQ ID NO: 109470 - DNA, 50 bp, Homo sapiens
agatcatgggcaaaggacagatccaggtgccctacgagacgctgaacaaa

SEQ ID NO: 109471 - DNA, 100 bp, Homo sapiens
ctgcggggccggcaggggtgtcctccacagggcgacggcggcaggagctcgggaaccgggactgcgagcgggcacagccaaaattggtcagaaaggggag

SEQ ID NO: 109472 - DNA, 100 bp, Homo sapiens
gcaagttatcctttggaaatgtgctcacactgttttagctaaagaagatactgaggcagctattcaatcaatattatacaaagaaaattctgtaattaag

SEQ ID NO: 109473 - DNA, 75 bp, Homo sapiens
aggggtccttctactcctaaagcatatatcattacagactatatgggcatccgaaatgaaagtttcatgaaatta

SEQ ID NO: 109474 - DNA, 90 bp, Homo sapiens
ttatcttgtcaaactcaagtctctgcatggcaatgaccaacgcgtgttccgtttagagtttgtctcaaaccaagaattcaccgaaagtga

SEQ ID NO: 109475 - DNA, 83 bp, Homo sapiens
acacggaaggaagccggccccctgcctgcccgcgcctagaccccattcactcctgtccaaatatgacccccagaaggaggcag

SEQ ID NO: 109476 - DNA, 99 bp, Homo sapiens
ctgtgccagccgcggtgcgccttctccacgctgggccgggtgttgcgcctggcctacagcgaggctggtcacaatttgaagaactctgtgctgaacttc

SEQ ID NO: 109477 - DNA, 100 bp, Homo sapiens
ggagatatggcgcaactgcggcgcgttgtaaatgtcttaaaatccttattgtcaaatcttgatgaagtaaagaaggaaagagagggtctggagaatgact

SEQ ID NO: 109478 - DNA, 73 bp, Homo sapiens
acgaccacatttgtcatgatgacagtgacaaggtgttacttgattgggcaagacaatcattggttgcatttta

SEQ ID NO: 109479 - DNA, 74 bp, Homo sapiens
ggcgacaagcaacaacaatcatagctggtgaccaagaatatggcccaggtgaccaaagccctggacaaggccct

SEQ ID NO: 109480 - DNA, 83 bp, Homo sapiens
agctatcgccgctgactgtgcccctgtggaaggaggagccttcacgtaaatgggtccagtcatgcctcccagtaagaagccag

SEQ ID NO: 109481 - DNA, 100 bp, Homo sapiens
ttggttaaaacctgacacttttaacaggattgtcagctgacctctgtcctgtgtgcccagtggccccaggtgacgtgtcttcaagaagaggctgagctgc

SEQ ID NO: 109482 - DNA, 83 bp, Homo sapiens
gggaggtgaccaaggaggagtacaaggacatcctgcgcaaggccgtgcagaaggtgaccaggcattgatgcacccccaggaag

SEQ ID NO: 109483 - DNA, 50 bp, Homo sapiens
agaagatgaagagtcagatgatgctgatgaattctgcttggtcagaatcg

SEQ ID NO: 109484 - DNA, 82 bp, Homo sapiens
ctcacctttaactctccttatgctgggtgaaaacaaagacaaatttacatgtattggagaccagaccagaagcccttctgaa

SEQ ID NO: 109485 - DNA, 100 bp, Homo sapiens
acctcaccagagtcgcctctgctggtctcttactgtgctgctctgtcagagatgggcaagtctcctctgagcctccggcctccataagacccaaaacaga

SEQ ID NO: 109486 - DNA, 100 bp, Homo sapiens
accggcacacagccgcgcagctgggcgagaagctgctccggcctagcctggcggagctccacgacgagctggaaaaggataaaagaatcagagtgtctca

SEQ ID NO: 109487 - DNA, 50 bp, Homo sapiens
gcgcccgaggtctggaaggcgcagggattcgataaacaagtggatgtgtc

SEQ ID NO: 109488 - DNA, 83 bp, Homo sapiens
atctgagctcagacctgccaatttaccagagataattgataacaccctgtaacagctgacactggatgtgtgtgagaagtggg

SEQ ID NO: 109489 - DNA, 85 bp, Homo sapiens
ctgacagctctgcggctcgggccctgagatggagcagctatcagatgaagaaattgatcatggtgctgaagaagacagtgacaag

SEQ ID NO: 109490 - DNA, 82 bp, Homo sapiens
caggccacgagccaggtggagagcaagtgctttgcaagatatcaccttgtcacagcagaccccctccacttggaaggacacg

SEQ ID NO: 109491 - DNA, 50 bp, Homo sapiens
tttcagatgtgattcatctagaggagatgttaaagtaacccatcttgcag

SEQ ID NO: 109492 - DNA, 100 bp, Homo sapiens
aaacagaatcagctgttccctgcgaaaggtagcagaaggtcaagaaatttgtgtgattgaagccatgaaaatgcagaatagtatgacagctgggaaaact

SEQ ID NO: 109493 - DNA, 96 bp, Homo sapiens
cagacagacgtggccgtctatggggtggctgttccagacgcatcttctctccagactgccgatcccagaaagccaggtgatcaccattaaccccga

SEQ ID NO: 109494 - DNA, 100 bp, Homo sapiens
gggacgtgatgctggacaacttcagcagtgtggctgctctgggcagcgtctatcccagactaccggggccctaatggagtgtggacactgcttcagaaag

SEQ ID NO: 109495 - DNA, 90 bp, Homo sapiens
gaaatatttaggcctgaaggaattctcagtcaaagaggaacgagcatccggcacccttgtgcatgtaccctacaatgactgccaggcttg

SEQ ID NO: 109496 - DNA, 139 bp, Homo sapiens
acagcagcagcgccaacatcacctacgccagtcgcaagcggcggaagccggtgcagaaaacattacatgcagcaaactggaggtcaagcacatctattcttttggatgacagtggaaggataccgggttaccgcccaac

SEQ ID NO: 109497 - DNA, 123 bp, Homo sapiens
cgtgcaagaggaactggagcgagctccccgacgaggagcgcggcgagatctacgtgccagaacatccagtcatggataaaaatgagctggttcagaaggccaaactggccgagcaggctgagc

SEQ ID NO: 109498 - DNA, 100 bp, Homo sapiens
caacaccaggactacagtaaggctgaaatcattgaagtgcttggagtgcagaactgaaagaggttgctccttgagggcaggacagttcttatggctttat

SEQ ID NO: 109499 - DNA, 74 bp, Homo sapiens
ttttatggtactggagagacctttgtttttacattctgtccggagtttgaggtgatgccttcagtgaagaggcc

SEQ ID NO: 109500 - DNA, 117 bp, Homo sapiens
aggaagcctaagacagaagattttcttacctttctctgccttcgagctgaactagatgcagagcacgcccagaaggtcctggaaatggagcacacccagcaaatgaagctgaaggag

SEQ ID NO: 109501 - DNA, 100 bp, Homo sapiens
tgtctttgtgtcctgagatcaaatggcacttcattggccacctacagaaacaaaatgtcaacaaattgatggctgtgaagagggataccaaggaaagttc

SEQ ID NO: 109502 - DNA, 75 bp, Homo sapiens
gcatcagtacttgtgacgggttgagatcctgtctacctttcatgaccaactacagttttcattgcaacgtctgcc

SEQ ID NO: 109503 - DNA, 74 bp, Homo sapiens
ttggatatgaaactggaagacatcctggttgctccttgagggcaggacagttcttatggctttatccgttgcgt

SEQ ID NO: 109504 - DNA, 100 bp, Homo sapiens
tttgaccttctgccatgattgtgaggcctccccagccacgtgaaactgaagccagttgagggaagttctccatgaatgtacgtcacaatgatgatgaccg

SEQ ID NO: 109505 - DNA, 100 bp, Homo sapiens
caagattggagacctcggtctggcaaccctgaagcgggcttcttttgccaagagtgtgataggtagttgatgtcacttggcgatattcctgcaaacatga

SEQ ID NO: 109506 - DNA, 50 bp, Homo sapiens
ggtcttcccaggcgtcgcggagagcagattgtaaaccatggctgtgtgga

SEQ ID NO: 109507 - DNA, 75 bp, Homo sapiens
taagaacaccatggagaccatagactggaagccgcctaaggacgacaagaagaagaaggacgctggaaagtcggc

SEQ ID NO: 109508 - DNA, 95 bp, Homo sapiens
ctgggagctgaggaaccagatatcttgaaaagctgccagaaagcaccagtggcagttcgcagcctccaggacttggctcgcatcgccatccgggg

SEQ ID NO: 109509 - DNA, 75 bp, Homo sapiens
ttgagctgaacgtcttgcaacagtggccgcacgcatagatcttctggtgaccccacttctcgctgctcatgccgc

SEQ ID NO: 109510 - DNA, 82 bp, Homo sapiens
acgcggacatcgtctcctgtgtggcgatggtcttcctgctggggctcatgtttgagattacagtacctatagccaagctgca

SEQ ID NO: 109511 - DNA, 74 bp, Homo sapiens
ttgtggtttatctaaaaaccaaaggtcccttcaccgatgttgtcaccaccaacctaaagcttggcaacccgaca

SEQ ID NO: 109512 - DNA, 100 bp, Homo sapiens
aagagtttcaagatgcaggtgaacagttgacgaaggatcagagattggtgtattcgggcagactgcttcccgatcatctgcagctgaaagacattctcag

SEQ ID NO: 109513 - DNA, 76 bp, Homo sapiens
gtgggtgctgtcaaccaccaccaagtcctgctgttctttatatttgtcaggatacgaatcaggttctcttcaagtg

SEQ ID NO: 109514 - DNA, 75 bp, Homo sapiens
cagatgtgcaacaaagtgcgatggggagagaccattctaacacaggtaccgtccagacagtgcctctgagaaagg

SEQ ID NO: 109515 - DNA, 82 bp, Homo sapiens
gaagaatatggagagagccctttgcaggatgcagaagaagccaaaaacattctgggtgatcatggagctcagcttggtctcc

SEQ ID NO: 109516 - DNA, 82 bp, Homo sapiens
gggaacgattgggctgagcagaggacgacatgttgcttttcgtggagacagaagcattaaaatgcgtggctcaggctagcaa

SEQ ID NO: 109517 - DNA, 82 bp, Homo sapiens
cccaacatccaggctgtactgctccccaagaagactgagagtcaccacaaggccaaggtattgcctaagtgtaatcttgaac

SEQ ID NO: 109518 - DNA, 75 bp, Homo sapiens
ataacacactcagcatcactaaagatccaggtccagagagcatcgcagacatcgatctcgctccatgtcacgtga

SEQ ID NO: 109519 - DNA, 96 bp, Homo sapiens
ccgccagagaagatgcggctgctcccggaatggttcctcttgctctttggcccgtggctccttaggaagtgtcaggggaagctgatggagaatcga

SEQ ID NO: 109520 - DNA, 100 bp, Homo sapiens
tggcactgctcctgctggccgcctggacggctcgggcgctggaggtgcagagcattgtagaccaaggagccatggataggagaagtatgggtgaaacaga

SEQ ID NO: 109521 - DNA, 75 bp, Homo sapiens
ccagaacttgcagcaacaataggtattcaggaaggaacacaatgtaccaaatgtaaaaataactgggcactgaag

SEQ ID NO: 109522 - DNA, 100 bp, Homo sapiens
atggaagatgaccagaggactagacctgaagtttcaaaggtagtgggcagcagtcagtgacaggtgtaacctctgtggatgacagcaacagttactggag

SEQ ID NO: 109523 - DNA, 102 bp, Homo sapiens
cagaactacgccgtaatggcactttgccttggttacgccctgattctaaaactcaacttaatcagagggcttgttttggaccacggagcacggcatcctgat

SEQ ID NO: 109524 - DNA, 82 bp, Homo sapiens
ttcgcggctctaacggggctttctacaagttcctgcggatggtggatgcctgtgccagcttcctcactgaagccttgaaccc

SEQ ID NO: 109525 - DNA, 98 bp, Homo sapiens
ctgggattcacaccaggaaagaacgccacgaagaaggaatgcaacctctgtcagtagtctgtctgaatctttaccagttcaatgcacagatggcagtg

SEQ ID NO: 109526 - DNA, 74 bp, Homo sapiens
tggacaggcagagtgctgatgtgaaaaataccacgacaaaaccaccctagggccgttgacatttagggatgtgg

SEQ ID NO: 109527 - DNA, 100 bp, Homo sapiens
gagcagtggattcccagtgtccccacgagctgtgtggtccatgatgagcaaagtgtgggatgctgtctcaggagatgaattgatgaccctggctcataaa

SEQ ID NO: 109528 - DNA, 101 bp, Homo sapiens
ctccaaagaaattcctcaaacagaatttcacacagggtattccatggagaatgaggtatccacaagtgaaaatccacaactctgaagagaaactaccaaga

SEQ ID NO: 109529 - DNA, 82 bp, Homo sapiens
cctggacaacagacctctgtttggggagacgtccgccaagttctgtcaggccaagcagaaggcagccttgctggagctgctg

SEQ ID NO: 109530 - DNA, 90 bp, Homo sapiens
aggtggatggagaagcagctgggggccttggctgtaaggacccctaaggcgatgaaatctacattgctccttcaggagtgcaaaaggaac

SEQ ID NO: 109531 - DNA, 88 bp, Homo sapiens
ggcaatgtaaacttccagccatcaagcccaagactgaatttcaattggaaagtgaagtcactgcttttgctgtcttggatcaagacca

SEQ ID NO: 109532 - DNA, 74 bp, Homo sapiens
cgacaccttcgtgcgcaggagttgggacgaattcaggcagctcaaggtactgaggacaaatcagttctctgtga

SEQ ID NO: 109533 - DNA, 83 bp, Homo sapiens
cccgaacgggttgcttcccccgctgcgaggcttcaacggaccacaccaaaatgccatctcaaatggaacacgccatggaaacc

SEQ ID NO: 109534 - DNA, 50 bp, Homo sapiens
caccgttccacagccttctctcaggtggtgaaaactattggcttgaggga

SEQ ID NO: 109535 - DNA, 73 bp, Homo sapiens
ggtgcagcttcaagcttaggaccacccaccatgcctatccagtgcgtaagagacgagttgaaggagatcacca

SEQ ID NO: 109536 - DNA, 76 bp, Homo sapiens
atgtggagttcggaggaaaagggctcaggttgaaatcacaaagattagacacctttttagataggtgttcttcagc

SEQ ID NO: 109537 - DNA, 77 bp, Homo sapiens
gaaaaccagaacattgatgatcagcaccaaaatctcaggagaaatccaaggactcagtggcctttgaagatgtggct

SEQ ID NO: 109538 - DNA, 98 bp, Homo sapiens
taaaaatcaacaccaggactacagtaaggctgaaatcattgaagtgcttggagtgcagaactgaaagaggaacagatggagtcggataactgttcagg

SEQ ID NO: 109539 - DNA, 100 bp, Homo sapiens
ctcccagctctactccttctctgcctctcagaatgccgggacattctgcttcctgtcatcaccaaagagctgaaggagctgctggagcagaaggatgaca

SEQ ID NO: 109540 - DNA, 82 bp, Homo sapiens
cgggaccctcgcgcgcgaccgccgaatcgctcctgcagcagaggcgacgttgtggacgtttaccagcgggagttcctggcgc

SEQ ID NO: 109541 - DNA, 82 bp, Homo sapiens
ctgtagggtatggtccagctgtgccgcaccgaggcgagcaggagcagggaacagggcaacaggtttgtctatgctggctcta

SEQ ID NO: 109542 - DNA, 100 bp, Homo sapiens
catcactgtccctccgcagaatacaaagaccatatttgaagatgttagtggttttggtgcctggcatcgaagatggtgtgttctttctggaaactgtata

SEQ ID NO: 109543 - DNA, 75 bp, Homo sapiens
ctgccccaataatgacaagtgtttggacaatctctgtgcaaaagatacagatattgtggatgaagccatctatta

SEQ ID NO: 109544 - DNA, 96 bp, Homo sapiens
tggtgaaggtccggggcttgccctggtcttgctcggccgatgaagtgcagaggtttttttctggtggaggtcctgattgccataagcagcctcacg

SEQ ID NO: 109545 - DNA, 80 bp, Homo sapiens
cccaggactgcgcccccgggagcgggcgcccagagctcttgaatgtcgtctctcaactagccaaacggaatctgcgactg

SEQ ID NO: 109546 - DNA, 76 bp, Homo sapiens
agatgtgagcgagaaagccgttgcctccagcaccacttctaatggtggatggaagcatgcctaggggaagatctgc

SEQ ID NO: 109547 - DNA, 86 bp, Homo sapiens
agatgccagctcaccagatgagtttcaccgtgacctaagccacatccttgggatacctcagaggtgtcaccaccagagaaggatga

SEQ ID NO: 109548 - DNA, 90 bp, Homo sapiens
attacccctctggcaagaagcgtgcggggaccgatggcgtttgcctcagcatggagggcggggccgcggcagccacccccacagcactgc

SEQ ID NO: 109549 - DNA, 90 bp, Homo sapiens
gagaaagtcctagagtggctgtttatttcccaagagcagccaaaaatcaccaagtcctgggaatctgaagctttattcctcaaggcaatt

SEQ ID NO: 109550 - DNA, 75 bp, Homo sapiens
gccggcgcgggagggctgtgtgatggcctcggagcgcccggagccggaggtggctattatcatggaaaactaatt

SEQ ID NO: 109551 - DNA, 100 bp, Homo sapiens
atggaagaaatgatgatggaaatgaagtataataccaagaaagccccacttgccagatgacgtgtactactgtggaataaagtacatcaaagatgatgtc

SEQ ID NO: 109552 - DNA, 100 bp, Homo sapiens
gaccgtctgctgggctccaagtcacctgagaggcgaggtgagctgagatctgtatctgtggacctgaatgttgatccctcgcttcagattgacatacctg

SEQ ID NO: 109553 - DNA, 98 bp, Homo sapiens
attactatggtgtagtcactggcccttctgcttcaaaaatatgcaattttcatggagtgataatgaaaggagcagcagccgcattaatatcccagaga

SEQ ID NO: 109554 - DNA, 50 bp, Homo sapiens
gcggaggatacagttctggaaaacaaggcctgctttcttccccgggcgat

SEQ ID NO: 109555 - DNA, 97 bp, Homo sapiens
tgagcgccaagaccggctgaaggaaagaccacagcaagattctttcattcgtctcctcctagcctgggggaccaggctcgaactgaccctggacatc

SEQ ID NO: 109556 - DNA, 75 bp, Homo sapiens
tatgattggctctttagctgaaatacttctgaaggatgacacagcaagaaggccctcaccagatgctgagcagat

SEQ ID NO: 109557 - DNA, 101 bp, Homo sapiens
ccgagagccgcggggagaaggccatcacccaggtcagcaagggcacctgcgagcaagagagaagcaaggccacagccgtggccctgggcagtttcccggca

SEQ ID NO: 109558 - DNA, 100 bp, Homo sapiens
cccaactaccaccaagtcctctccatctgatcccatgaccacctccagagctaatcaggtagcaacacaagtcggaatagaatggaacctgtcccctgtt

SEQ ID NO: 109559 - DNA, 100 bp, Homo sapiens
tggggaatttaagatgccaaagcagctcattcacatacagctaggtgatttcaaatcggagaagtccaacggggagctaagtgaatctcctggagctgga

SEQ ID NO: 109560 - DNA, 75 bp, Homo sapiens
tgagatccatctgcaccacggtgctggatggcttaaattccttggtccttgatttagattttcctgctttgagga

SEQ ID NO: 109561 - DNA, 87 bp, Homo sapiens
acgtctggggcaaagggaccacggtcaccgtctcctcagtgcagagcagagcgggcggaggaccccgggcgcgggcgcggacggcac

SEQ ID NO: 109562 - DNA, 151 bp, Homo sapiens
tctacgacagacagggccagcccgtggagatcgagaggacagcgtttgtggggttcgtggagaaggaaaaaattctgtttctggcgtctgcatacgcaagtccccaactcgctgaggagagctgttcagctatggctgctgtcacacatta

SEQ ID NO: 109563 - DNA, 101 bp, Homo sapiens
cccaaatttgaacctcttgttcgagacatcaacctacagcagcctggcatcctcgctacaacctcattgttgtgggccgatacccagatcctaatttcaaa

SEQ ID NO: 109564 - DNA, 101 bp, Homo sapiens
ctctttaaaaattccgccgaaaaagagaagacgctttacccgactctttgggccgttatctcacgtgctggagaatctggtaaaagcaccattgtgaagca

SEQ ID NO: 109565 - DNA, 100 bp, Homo sapiens
cacgacacccatgttgtcatggcttaacatcaggaaccataaatccatggctaaccttgacaaatacactgaaacattcaagatgggtagcaacagtacc

SEQ ID NO: 109566 - DNA, 98 bp, Homo sapiens
agagacgctaatctcacagctcttgcagctattggaccaaggaagaagagaccactagaatctggaattgagacaacagaaaccagtggtaggactct

SEQ ID NO: 109567 - DNA, 100 bp, Homo sapiens
aggaagcatgcgaaatctacgccagagcagcaaacatgttcaaaatggccaaaaactggagtgcggagcgtgctttggacaccatgaattttgatgttat

SEQ ID NO: 109568 - DNA, 88 bp, Homo sapiens
ggtgcagacagctgtgactatgaagggggtgaccctggcagcaaccccaacaaacgccagaggcagccccctctcctgggagatcacc

SEQ ID NO: 109569 - DNA, 101 bp, Homo sapiens
acaaaggaaattcccgatgagatcagcattctccttctcggtgtggcgcacttcaaggggatgctgagaacttgctggagtcacagccactgggatccttt

SEQ ID NO: 109570 - DNA, 96 bp, Homo sapiens
ggaagaccgcgcgcagggcctgcagcgggagctggacggcgagcgcgagcggcgcgagaaactggtactcctggttaatcaacagcttcgtcaacg

SEQ ID NO: 109571 - DNA, 96 bp, Homo sapiens
ttgacccagcagggactccaaggggtggagctgggaacattcctcataaagcgagtcgtcaaggagttgcagagtgtgaacatggctacgcctctt

SEQ ID NO: 109572 - DNA, 97 bp, Homo sapiens
aagccttcaagatgaaccgcaaggagagaagttcttatgactcctccatgtctccaggaattactgaaccttcaacatgcctactataaactaaaca

SEQ ID NO: 109573 - DNA, 82 bp, Homo sapiens
cagtggtcatcgatgggagcaacgtggccatgaggctccctggcattgggcagtgttacagtgcactcttctgaacctgaag

SEQ ID NO: 109574 - DNA, 100 bp, Homo sapiens
tgcctttgggactctgaaggctgaagaacctgcacttgttgccaagtcttccatcttactagatgtgaaaccttgggatgatgagacagatatggcgaaa

SEQ ID NO: 109575 - DNA, 75 bp, Homo sapiens
gaggagaagttctgatccccttggtggaacctaacttcttgtggaacaagtgttgccagctcagaaggcagtgag

SEQ ID NO: 109576 - DNA, 75 bp, Homo sapiens
ctctcagcgggacaatgctgacccaggcggtctatgcttgcttggtgcttatgctgacagtgatgacgatgacaa

SEQ ID NO: 109577 - DNA, 98 bp, Homo sapiens
ctaggttctgcggcacgggatggcggaggcgcctcctgtctcaggtgatggaaccagccctggaaggcacaggcaaagaggggaagaaagcatcctcc

SEQ ID NO: 109578 - DNA, 83 bp, Homo sapiens
ctccgatggcggcaccaagaggcccgggctgcgggcgctgaagaagatgggaaggtgctcgggtcttcggggcactgggtccc

SEQ ID NO: 109579 - DNA, 100 bp, Homo sapiens
gctagggttagcagagcagccggtaacgttgctggaccgggacgcacgctcagctgaggaggacccccaaaggtgttgaaaagtctcctctagagctttg

SEQ ID NO: 109580 - DNA, 95 bp, Homo sapiens
gcgggtggaggttcgagcgctgttctcgctccggagccgctgcacatttcgtcttggctacttatgattcagcagacagaacaacttagtaggat

SEQ ID NO: 109581 - DNA, 105 bp, Homo sapiens
cggggaacgactgcggcgcgctgctggacgaagagctctcctccttcttcctcaactatctcgctgacacgcaggctgaaggggatgctaagggagataaagcaa

SEQ ID NO: 109582 - DNA, 75 bp, Homo sapiens
aaagagaagacgctttacccgactctttgggccgttatctcacgctggagcattggatttgctaaaggagcttaa

SEQ ID NO: 109583 - DNA, 101 bp, Homo sapiens
caactgtatgatagaagctatataaagtcaagtgtccattttctttcaactatatttgagcatacccagtggtctgcaagaagaatctggacagtaccact

SEQ ID NO: 109584 - DNA, 75 bp, Homo sapiens
tcgccaaactcttcattttctctgccatcaaaccttcttctggaccaaagcaatgtggatatcactaccttccgc

SEQ ID NO: 109585 - DNA, 74 bp, Homo sapiens
ttcgcccctcgcgtccggagtccccgtggccagctccttcccgaactcacaaatcctgacgagctcctgtctta

SEQ ID NO: 109586 - DNA, 100 bp, Homo sapiens
ctactctcaatcgaagagatatgcctagaagtgaatttgtcataacctaatgatcccagcaagataatgtcctgtcttctaagatgtgcatcaagcctgg

SEQ ID NO: 109587 - DNA, 100 bp, Homo sapiens
cctctggaggactaggccctctgggctttgctcccgggttgctgggtgaggctgcaaggtttagcacagggcaagtgtccagagaatggctgggatgaaa

SEQ ID NO: 109588 - DNA, 100 bp, Homo sapiens
ttccagtaccagtacattaggaaacatgctagaattacctggaacttcatcatcatctacttcacaggaattgccatttatataaagacctgatgccaca

SEQ ID NO: 109589 - DNA, 75 bp, Homo sapiens
actccttcggcagtccacccaccgccgccgcctcccaggtcccctgcctgtgcccttcaccaatggggagataca

SEQ ID NO: 109590 - DNA, 50 bp, Homo sapiens
gcatgtggtcgtcattcactgcagggttttcttgtcttgacaagatgctt

SEQ ID NO: 109591 - DNA, 100 bp, Homo sapiens
acatatgatcttctgtcagtcatttgccatcatggaactgcaagtaattctactctgctactcaagtagtggtcactatgattctgtgtactcaaaacaa

SEQ ID NO: 109592 - DNA, 50 bp, Homo sapiens
aacatgaatgtagtgacaagctggcccagccttcaacaattggatccatg

SEQ ID NO: 109593 - DNA, 98 bp, Homo sapiens
tgttggacaacaaaaaatgaaaacttagattgcaacagtgattcacaggtgtttccctctttgaatcttagtgaaatcagtgggattcctttggatga

SEQ ID NO: 109594 - DNA, 82 bp, Homo sapiens
ttagctgtgctcgcgctactctctctttctggcctggaggctatccagcgggaaaagattaccttgaggttgtgttcaacag

SEQ ID NO: 109595 - DNA, 75 bp, Homo sapiens
tcaggatctgcagccatttcttgtcaaaacaagtgaaaccaatccgtaatctaaatggacattcaattgggcaat

SEQ ID NO: 109596 - DNA, 100 bp, Homo sapiens
ctgagcttcaaaaggggggacatcctcaaggcctggcatgcgtgggcagtgatgaacttcgaagctgtgctacactacaaacatcagaaccaagcccgcg

SEQ ID NO: 109597 - DNA, 100 bp, Homo sapiens
gatggtgggccccaacttccgcgtcggcaagaagatcggctgcggcaacttcggggagctccgcctagcctcgatgacttacgagccctcaaggggaagc

SEQ ID NO: 109598 - DNA, 50 bp, Homo sapiens
gctactacaatcagagcgaggccgactgcgaatgctacggtcactccaac

SEQ ID NO: 109599 - DNA, 100 bp, Homo sapiens
ccagtacctagaaggctgctaaaggaagttgaatgacagggcctcggtcctttatgttgcacaccgatgctccagaattgtgagggagccatactctaca

SEQ ID NO: 109600 - DNA, 100 bp, Homo sapiens
gcagggctctaggaaacatatgttacgatagccggccgcgatgggcctcttggaacattggtgtgttcatctgcattcgatgtgctggaatccacaggaa

SEQ ID NO: 109601 - DNA, 83 bp, Homo sapiens
cttcatagttacgttatactgcccctgcattgttggtattgaaagtataattgaaatcctcaaaggaatgcaagaattgggag

SEQ ID NO: 109602 - DNA, 89 bp, Homo sapiens
gtctaatggaggcgcaggcagaaggaccccttacagcggcatttctcattgcaattgtggtaccagatgttgagacattatgttcctgg

SEQ ID NO: 109603 - DNA, 74 bp, Homo sapiens
aaggattatgaagagcatgacaaggtgccccctgataagtgccgatgtgccgtgggcagcatcctgagtgaagg

SEQ ID NO: 109604 - DNA, 75 bp, Homo sapiens
caacatcctcctggccaccgactcctacaaggtccagctgggagctccccgacctccaggagggcaagatccaag

SEQ ID NO: 109605 - DNA, 50 bp, Homo sapiens
tgttaatcccttttattgatgaggaggatgctgaggtgaccaaagctttt

SEQ ID NO: 109606 - DNA, 111 bp, Homo sapiens
caccatcctgggttgacaattctacacaaggaggatcaaagttctgatcgtaccagtctttcttcagtgggagcccaggattctgaatctacctctttaacagatgaagat

SEQ ID NO: 109607 - DNA, 50 bp, Homo sapiens
gcagttgaaggagtataacacagatatccttggaacagaagatcttattg

SEQ ID NO: 109608 - DNA, 100 bp, Homo sapiens
gccttagagggcaacgagggcaggagctcgccctggcggtccccatgcagacaagaggtcagtactcctgcatttgtaccaacgaaaactcacgtgctgc

SEQ ID NO: 109609 - DNA, 99 bp, Homo sapiens
cgaggacatctgggctgcgtgctgtgttgtcacaaagattgaggagagcaccacagtggtcaccacacagtctgctgaggttggagctgctgagacgac

SEQ ID NO: 109610 - DNA, 75 bp, Homo sapiens
gagacggagctatcggcgccgcggcaagagccagatggactcaccctgtcacccaggttggactgcactggcctc

SEQ ID NO: 109611 - DNA, 101 bp, Homo sapiens
tatgtgggcaacctcatcaccaagacttggtcaggtactttcagggcctgggccccccaccgaagttccaggtaacactgaatttctgggaagagagccat

SEQ ID NO: 109612 - DNA, 100 bp, Homo sapiens
gcgagagcagctcctcctggaaaaagcaagctgaagacatcaagaagatcttcgagttcaaagagaccctcggaacgtacatgtcccagagcaagcacac

SEQ ID NO: 109613 - DNA, 83 bp, Homo sapiens
ctgcacgtcttcaccttcggcagccggctgtacgcacacaccatcgcaggagccttcacgtaaatgggtccagtcatgcctcc

SEQ ID NO: 109614 - DNA, 108 bp, Homo sapiens
agcttttgttaattatcttaaatacttgctttactggaaagacccagaatatgccaagtatctaaagtgaccaagaatatggcccaggtgaccaaagccctggacaag

SEQ ID NO: 109615 - DNA, 96 bp, Homo sapiens
tcttactcgtgttccctgccactgtcttgttccgaggcggccccagaggttttcaaatggaacattttgatgcatcacttagtacctatttcaagg

SEQ ID NO: 109616 - DNA, 100 bp, Homo sapiens
caggggaaggaactttgggtcctgaatcttctgggagctgaggaaccagatatcttgaaaagctgccagaaagtgttgacctaaccaatgaagaaacaac

SEQ ID NO: 109617 - DNA, 101 bp, Homo sapiens
agcggcaggagagtccggccgcgacaggacgaacccttaggagaaatcttgagagtggacagcaattgtgaagatcgccagagagttctgtgtttcatcac

SEQ ID NO: 109618 - DNA, 100 bp, Homo sapiens
cgggaaggagcgccctggcggagaagactcgaacggctcccacagccgggcgttgggggaaaggatgggatcgagcggtccctgggcgtgcagagggtct

SEQ ID NO: 109619 - DNA, 83 bp, Homo sapiens
cctgattgtaggtggtgtccagctccagactgtggccaaaactggacaagccaaggcatctgtagccaaagtaaacaaatcta

SEQ ID NO: 109620 - DNA, 75 bp, Homo sapiens
caccagagtggttcgggaacaggatgcagacattgtcctcaacgaccagcgacattcaaggagggaaagcagccc

SEQ ID NO: 109621 - DNA, 75 bp, Homo sapiens
cttgacattacagccaagatggtgctgtcccagagacaacgagatgaactgccctgtctctgcccctggtggtca

SEQ ID NO: 109622 - DNA, 82 bp, Homo sapiens
gccggaccgcgcctcaggctcccccagggggaaatttgcagtggtgagaaaatgtataaagaaagattctgggaaagaattt

SEQ ID NO: 109623 - DNA, 75 bp, Homo sapiens
ccatcaaatccgtgtcggagtccttacagatccagacatttaatgtggatgcaccatgccagaccgtggaagatt

SEQ ID NO: 109624 - DNA, 98 bp, Homo sapiens
tcgctccgtggccttagctgtgctcgcgctactctctctttctggcctggaggctatccagcatctatccatactaatggaaatgtaactggaactga

SEQ ID NO: 109625 - DNA, 100 bp, Homo sapiens
cctcggccagcaagttcacaagcatccctgcctcgttttggtacaccattgtcaccatgaccacactggggcactacaagggcccccagggatggagaag

SEQ ID NO: 109626 - DNA, 75 bp, Homo sapiens
caaggagacgctcctggcactgcaggaacaagtggtgatgaacttggacagcaggcttctgatcttccctttata

SEQ ID NO: 109627 - DNA, 74 bp, Homo sapiens
cagccagttagtcagaatcccagtacaaacactcagcctcttcagcaaggatctagtttgaagcactaagaaga

SEQ ID NO: 109628 - DNA, 82 bp, Homo sapiens
caggaatatcgagagcgtcatgaacccgagctatagagaaaggagatgagacttcccaagtaagaagcggaagaggagccgc

SEQ ID NO: 109629 - DNA, 83 bp, Homo sapiens
cggagcccaggaggtggtgaaggacatcttggaagatgtagtcacatctgccattaaaggattacctcacagacctcatcacc

SEQ ID NO: 109630 - DNA, 96 bp, Homo sapiens
ggcccgcgagccaggccggcgcttctcctcctgatgcttttgcagaccgcggtcctgcaggggcgcttgctgcctaaacctattcgtcccgggcaa

SEQ ID NO: 109631 - DNA, 75 bp, Homo sapiens
ttttcacatgggaaaagccaacctggccctgaagaactacagtgtgataattcagcattggcgtatttgcttgtc

SEQ ID NO: 109632 - DNA, 98 bp, Homo sapiens
ctgccccgcgcccgccgccgcagcgcttggcgtccgtcggtctccgtccgtcggtccggggaccatgtcgcctgaagaatggacgtatctagtggttc

SEQ ID NO: 109633 - DNA, 129 bp, Homo sapiens
ctctgctgtgggcgctgctggcgctctggctgtgctgcgcgacccccgcgcatgacaatgcagatcttcgtgaagactctgactggtaagaccatcaccctcgaggttgagcccagtgacaccatcgag

SEQ ID NO: 109634 - DNA, 100 bp, Homo sapiens
ccagatggaattcctcattgttattgtggaaagacagatgaagcatgtgatgaaagttctagaaaaacatgaaattcagccctatgaaatcgcactggta

SEQ ID NO: 109635 - DNA, 75 bp, Homo sapiens
ttctactctgcagaaaaggaagatgttgctgggcacccagcacaactatcttgctcaggtcacgtctaatatctg

SEQ ID NO: 109636 - DNA, 75 bp, Homo sapiens
tgagaactggttctacacgcgagctggtcatccagaaatttatcctttagtattaaccaccaagacccaagaaat

SEQ ID NO: 109637 - DNA, 98 bp, Homo sapiens
actcactggagccctgatctaggctcaaaccatcctcccacctcagcctcccaagtagctgggactaagcctccacctcctggatgccctcccaatgc

SEQ ID NO: 109638 - DNA, 51 bp, Homo sapiens
gaacattatttgaagcaatgccagaggagagaagatgactgaggaggaggt

SEQ ID NO: 109639 - DNA, 88 bp, Homo sapiens
gaaaatgtcaactttttgggtcagacagaggtcccatgatgtgaaaaatggaggtgaacttactcatcccacccatagccccggccag

SEQ ID NO: 109640 - DNA, 100 bp, Homo sapiens
cttgaaggaggctgcaaatgttgtggtcaagtgcctcacccctttctacaaggagggcaagtttgcttccaaggtcctggatggtcgccggcccacaggg

SEQ ID NO: 109641 - DNA, 82 bp, Homo sapiens
gccgcagtggatggctggaggtgcagggccaggaggaacatgagggtttccaggcctgaggtgcccgccctggccccaggag

SEQ ID NO: 109642 - DNA, 74 bp, Homo sapiens
caagaacctggagcccgtatcctggagctccctcaaccccaatctgaccagtgcacaggacttcagggcttcct

SEQ ID NO: 109643 - DNA, 74 bp, Homo sapiens
gaaaaggaggaattcgccgtgcccgagaatagctccgtccagcaggtcatcgacatcctgagggggaaggccac

SEQ ID NO: 109644 - DNA, 100 bp, Homo sapiens
ctaacctcgtgagaaaagctttacgtctcattcaagaaaccgaagtgatttccagaggatttacactgtctctggggaacaagactcatggaggaaagca

SEQ ID NO: 109645 - DNA, 100 bp, Homo sapiens
cgtctgcaaagtgtccccggcaagaagtctgaattggagaagcctagaggcaggaaaaaaacgcccgtcacagaacaggaggagaaattaggtatggatg

SEQ ID NO: 109646 - DNA, 74 bp, Homo sapiens
agcctcggggtccggaaccagacgatgagacagagttgcgaccgcgcggcagatcttcctctgatggcgctgcc

SEQ ID NO: 109647 - DNA, 98 bp, Homo sapiens
gatcgctcaggcgctgcacaggatgagcagcaccagcagtaagagggctccgaccacggcaacccagaggctgaagcaggactaccttcgcattaaga

SEQ ID NO: 109648 - DNA, 98 bp, Homo sapiens
cggagtggggaagacctgcgtcctttttcgtttttcggatgatgccttcaatactacctttatttccaccatagaaatggtggagtcaatgaagaaag

SEQ ID NO: 109649 - DNA, 75 bp, Homo sapiens
gacagcacctagtcgtggccggaggagtctcagagctgtcagaaagatgaggcctgcctgtgttaatacacctag

SEQ ID NO: 109650 - DNA, 101 bp, Homo sapiens
ctggtggcgttttggtgtcttcgtttgttatggccgctgctgtcgctatggagacagcctgaaggacttcctgcccaaggagtatgtgaagcagaagggag

SEQ ID NO: 109651 - DNA, 101 bp, Homo sapiens
ggctcggcggcgggcggcagcatgtcggtggcggggctgaagaagcagttctacaaggcgagccagagttgcatgctgagaatttgaaaaatgaagatgat

SEQ ID NO: 109652 - DNA, 100 bp, Homo sapiens
ggcgacagcggaggcagagaggaaggcggttctgagagcttcagagagcgatggaaagcgaagagtgtcttccaaagtgttcttcactctttttgccctg

SEQ ID NO: 109653 - DNA, 75 bp, Homo sapiens
agccctgcccttcgccagaggcgagtatatagttcccatggtgcacggtgctacgccagccactgtgtccgcagc

SEQ ID NO: 109654 - DNA, 50 bp, Homo sapiens
ctgatatctgtgccagagaatggatgggagcaaagtgtttacggcatcgt

SEQ ID NO: 109655 - DNA, 75 bp, Homo sapiens
ccagtgccactcgtgagtggacagaacaggaaaccctgcttctcctggaggtggacccaagtggagagattgtgg

SEQ ID NO: 109656 - DNA, 95 bp, Homo sapiens
cacattaaggaagaaccactttctgaggaagaaccatgtaccagcacagcaattgctatctccaagaaggagaagcttctctcgcagccggagca

SEQ ID NO: 109657 - DNA, 82 bp, Homo sapiens
gcgcgggagttcgaggccctgcggagctgcttcgccgctgcgcaggtcaatggccagcaaggaggggggtccgagccggcgg

SEQ ID NO: 109658 - DNA, 50 bp, Homo sapiens
ggccttccagctgtttgaccgaacagagggagcactatgtctgcggaagt

SEQ ID NO: 109659 - DNA, 50 bp, Homo sapiens
attccaagtaactcttatttggtgcgcttcccttcccacttcagctctga

SEQ ID NO: 109660 - DNA, 75 bp, Homo sapiens
agaaggattccgggagcacagttccgccgaaaggacagaataacgggctcccagattcacaagccccaccaagag

SEQ ID NO: 109661 - DNA, 75 bp, Homo sapiens
ggaacttggctaggctggccccgagcggaaccagagaatgctgaggcctaggcgaggacttctaccgcgaggcca

SEQ ID NO: 109662 - DNA, 100 bp, Homo sapiens
ttcagcagcatgaagaagtactgccaagtcatccgtgtcattgcccacacccaggtcttcatggaacagatcggaatattccggaacattgcccagcact

SEQ ID NO: 109663 - DNA, 73 bp, Homo sapiens
cctacccatccgccaggagccctcttccttcagctggagaagaagcaggcgctccctccattccagccacaga

SEQ ID NO: 109664 - DNA, 82 bp, Homo sapiens
agcagcaagcacagagtatgaccaccactattaagctttggaatacgctaagaccatccccaaacccaaaccatcaaatctg

SEQ ID NO: 109665 - DNA, 75 bp, Homo sapiens
tggtgcaatgaccattgtgtccccaggaaccacagctgctcagaaggccagctgcattgttgtggaattcacaac

SEQ ID NO: 109666 - DNA, 83 bp, Homo sapiens
tctgaaacagacagataaagttccaagtaaaacggtagctgctaaaaagggtagttgatgtcacttggcgatattcctgcaaa

SEQ ID NO: 109667 - DNA, 73 bp, Homo sapiens
ggcggtggaggagccggagcataatgggggcagtacccaaaggaaacgctacgaaagaatacatggagagctt

SEQ ID NO: 109668 - DNA, 90 bp, Homo sapiens
ggaagtccggcatgcaccaaatgggaggcctttctttattgaccacaacactaaaaccaccacctggattccagatgacctgaggaagag

SEQ ID NO: 109669 - DNA, 100 bp, Homo sapiens
caacttctttggcaagtggacattttactggctcaagatctagtgaaaagccatttgatgtatgcggtcagagaagaagtggaggtcctcaaagagcaaa

SEQ ID NO: 109670 - DNA, 75 bp, Homo sapiens
aagaaaccagccgaacttcagggtttccaccgttcgttcaagtatccatttgaggccctcttccgcagccagcac

SEQ ID NO: 109671 - DNA, 51 bp, Homo sapiens
cagggcttcctggcccgaaaggagagccttgcacacacccagaagctatgt

SEQ ID NO: 109672 - DNA, 151 bp, Homo sapiens
ctagtccagaagctggcaaaagaaaactatcagtttttgcagacggacaaaaaagaacaggagaagtctgaacacaccccaagactgcttctgagacagaaacagatatctgtgctgaatgggagataaagaccatcactagtgctctgaa

SEQ ID NO: 109673 - DNA, 100 bp, Homo sapiens
gcagggcgttggctatgtgcccatcacaggctttatcctgtggataaacgcagagtgaacgagtttggggagtcctacgaggagaaggccacgcgggcgc

SEQ ID NO: 109674 - DNA, 100 bp, Homo sapiens
ggagcctcccctgcagcgactcggaagattcgaggcggcgggggacaagtcggcgccccagagcggacgaggccctcgggaccaaggatcacgtcatgac

SEQ ID NO: 109675 - DNA, 51 bp, Homo sapiens
ttcgcagtggtcgcttcttctccttggtggactacatcatgcagccgcccg

SEQ ID NO: 109676 - DNA, 75 bp, Homo sapiens
agctacttcctgcctgccatgccccagacatttgtcttcaccgacagcccagacaaaggcctccaggagagactg

SEQ ID NO: 109677 - DNA, 83 bp, Homo sapiens
gaacagacaagcaggttgtcttgaccctctttcccagctgcccgctcctcagcacccgaagattcgcctgtacaacgcagagc

SEQ ID NO: 109678 - DNA, 74 bp, Homo sapiens
ggacagcacctcatcccctggatgggggaccacaagatcctcatcgacaggaggaggcctcggtggtaccagaa

SEQ ID NO: 109679 - DNA, 90 bp, Homo sapiens
cttactctctcagatgacttcgtctcccaccgactgcctgtttaaggtctatgcctctcagcgaatgagagctggcaaaggcaaaatgag

SEQ ID NO: 109680 - DNA, 75 bp, Homo sapiens
ctgatagcaagttcatctgcatggaatgtaaaactggtaaagaatctcatttggacacattgagtcgggcacaac

SEQ ID NO: 109681 - DNA, 82 bp, Homo sapiens
cggccggcgggcgtgcatcatccacggggtgctgcagatcctgttccagcgtcgagggcgaggcccccagcagtgagactgg

SEQ ID NO: 109682 - DNA, 100 bp, Homo sapiens
ctgccctcggcgggcggcgacggcggcaaatctaagaaatttgtcacgagaagagaatgccttctagatgcaaaatcacctccaaaccagaccacttttc

SEQ ID NO: 109683 - DNA, 90 bp, Homo sapiens
agttatttgcctcagtaaaagaccaataggagctctgaacccaaaaagagcagcattcttcgctgagcgttatgaatcatgggaagatga

SEQ ID NO: 109684 - DNA, 100 bp, Homo sapiens
ggcgattcgtgttcgtgagggccttttctggtcaaaatgcagatcttcgtgaaaacccttaccggcaagaccatcacccttgaggtggagcccagtgaca

SEQ ID NO: 109685 - DNA, 51 bp, Homo sapiens
ctggcgcagggcacggtgggcgcctacctgataaccttaagtaattcctgg

SEQ ID NO: 109686 - DNA, 75 bp, Homo sapiens
atgacccaagcatttctttttctggaatgtcattatcagacacaatggtggaatgcatccttgggacatctttgc

SEQ ID NO: 109687 - DNA, 83 bp, Homo sapiens
cgacaagccgctggcagccgcggatctcaccgccgctcaggcagtggccggtgtccagctgcctactttctgcccggatctct

SEQ ID NO: 109688 - DNA, 75 bp, Homo sapiens
gcgggcctcccgtttctggctccgggctgagcttcctggagaagaggaagtgggcaagatatggtgagcatcctc

SEQ ID NO: 109689 - DNA, 50 bp, Homo sapiens
ctgcttgtcaggagcagattttgagctcacaacccagtgaggaacctgag

SEQ ID NO: 109690 - DNA, 128 bp, Homo sapiens
ggagagaatgaggccacttggtagtggtcaagccctggggaccaagccttccatggaggggttcttggcactgcctccttacctgtgaggaatgcaaaataaagcatggattaagtgagaagggagac

SEQ ID NO: 109691 - DNA, 100 bp, Homo sapiens
agctggggctccgcgaggaaaacgagggcgtgtataatggaagctggggaggccggggagagatgatgaaactgaggcacaaactgcttaatgaacttgt

SEQ ID NO: 109692 - DNA, 100 bp, Homo sapiens
accggatcctgaggaggcagctgcggtggcagctgctgagttctcggtgaaggtactccaaagattcaggtttactcacgtcatccagcagagaatggaa

SEQ ID NO: 109693 - DNA, 100 bp, Homo sapiens
gccttagaagccactgacagcccccagggcaggtgagccctgcatctggaataaggttcaaaactggtcaaatcaatggtgatttgctgatataccatgt

SEQ ID NO: 109694 - DNA, 75 bp, Homo sapiens
tatgtgttgctaatacccatctttactggcatcctaaaggtgaccaagaatatggcccaggtgaccaaagccctg

SEQ ID NO: 109695 - DNA, 75 bp, Homo sapiens
cgctcgctgggagagaggtacctctccttttccctctccctttccctaagatcaagaagttggtatatgtttacc

SEQ ID NO: 109696 - DNA, 75 bp, Homo sapiens
cgggtgatttctgcatttccaactgagtctgaaccaatcagagtccttgtgactggagcagctggtcaaattgca

SEQ ID NO: 109697 - DNA, 82 bp, Homo sapiens
ctctgataatagctgggtgcttgctggctccgagacaatgcagatcttcgtgaagactctgactggtaagaccatcaccctc

SEQ ID NO: 109698 - DNA, 96 bp, Homo sapiens
ggacaatgagaacagctctgcgcggctttttgagcggtcccgcatcaaggctctggcagttcacagacattgggaccttcgagacagtgtggcaag

SEQ ID NO: 109699 - DNA, 144 bp, Homo sapiens
ccaggggctacgacccttgggatctgccctccgctcagctcgagcttccctcgtggccgacggaacaatgaagaaagtgactgagaccgaagatgatagtgatagtgacagcgatgatgatgaagatgatgttcatgtcactat

SEQ ID NO: 109700 - DNA, 100 bp, Homo sapiens
tccctgcatatctgaagcggctcccagtccctgaaagcattaccgggttcgctaggctcacagacaggtgctctagttcacagctataggggaacaggtg

SEQ ID NO: 109701 - DNA, 75 bp, Homo sapiens
caggatggatcaccaccagccggggactgggcgctaccaggtgagaatggggagaaggaacccccgacaacacta

SEQ ID NO: 109702 - DNA, 82 bp, Homo sapiens
tttctgaggttcttcactcgcgactgacggagctgcggtggcgtctccacacgagaggaggttcagatgagcccctgctgac

SEQ ID NO: 109703 - DNA, 88 bp, Homo sapiens
aacttgctgctgatgaagatgatgacgatgatgatgaagaggatgatgatgaagaagactttagaagacagctttccatcgacactag

SEQ ID NO: 109704 - DNA, 83 bp, Homo sapiens
aagggaatcgcaaggctcttccctgaccattttctactgtccctgcgcgaggttgatgataattagaagcatgctttccactg

SEQ ID NO: 109705 - DNA, 75 bp, Homo sapiens
ttgaagtgcgaggaacatgatgagcaccagcgaaagcagccagtctgagatattgacactacagaaaaaactgac

SEQ ID NO: 109706 - DNA, 90 bp, Homo sapiens
acgtctgcggaagtgcagctgcctcagttcttagcgcagaggcgtagaggctccggtgttttttgtgccaattgcctgaccacaaagacc

SEQ ID NO: 109707 - DNA, 83 bp, Homo sapiens
cttgccttcctgttctccaagaccagatataacacgtgggaaccggaggagaacatcctggaccccaggctgctgatcgcctt

SEQ ID NO: 109708 - DNA, 100 bp, Homo sapiens
aggaagggccccgagatgccacgactattcttggacttgggaccccctcaggggaacagcgagcagatcaaagtgaacagcagagaatttcaaaggacct

SEQ ID NO: 109709 - DNA, 50 bp, Homo sapiens
cttcaaatttcttataaagagagcctctatcagacccgtttcagaagtta

SEQ ID NO: 109710 - DNA, 100 bp, Homo sapiens
cccgcaagggcggagggggcccgaaggacttcggcgcgggactcaagtacaactcccggcacgagagcaaatcatggaggaagataaaaaacatggtgca

SEQ ID NO: 109711 - DNA, 74 bp, Homo sapiens
agagaattctgggcttccacacaactccagtgctaactcaacaggatactgtcatgaagcagacacatgctgac

SEQ ID NO: 109712 - DNA, 51 bp, Homo sapiens
tcgcagtggtcgcttcttctccttgatcccaccaaatattttggttgtgag

SEQ ID NO: 109713 - DNA, 75 bp, Homo sapiens
gtgtgtggcagcaaggagcccgcagagagcccccctccatgcgcctgaaggcccgacccagcagccctggctttt

SEQ ID NO: 109714 - DNA, 75 bp, Homo sapiens
tgcgtgttcgcgggtgtgtgctgcgttcacaggtgtttctgcggcagagtttatgtggccgaggcagacaagtgg

SEQ ID NO: 109715 - DNA, 101 bp, Homo sapiens
cccgggaggaaggaacgaggcaaggagctaaagcagcgtgcgttcagccctggggcctatatgaacccaatagcaatggcgagatcaaggggtccaatcca

SEQ ID NO: 109716 - DNA, 86 bp, Homo sapiens
cggatgccctgcagtacctgcagaaggtctctggagacatcttcagcagtgtcaacagcatctccaccctggagcctgtgagccgg

SEQ ID NO: 109717 - DNA, 51 bp, Homo sapiens
tgcaaatatgagagattctgcagaagttacagaaaccccagaaccagcgat

SEQ ID NO: 109718 - DNA, 96 bp, Homo sapiens
agtgatggtttaaggcaaagggaagttcttcggaacctttcttcccctggatgggaaaacatctcaagatggaatctgcctgtgtttcaattcacg

SEQ ID NO: 109719 - DNA, 75 bp, Homo sapiens
tagaaactgggttggaagtcagagctgcacaaagggaaagggtctgttggagtttgctggaggtccactccagac

SEQ ID NO: 109720 - DNA, 96 bp, Homo sapiens
aaagctgcttgaatgtctgccgaaatgttcaagtttaccaaaagagaggcaccgctggaacactaatgaggctggttggaaggaaaatcatgcaac

SEQ ID NO: 109721 - DNA, 90 bp, Homo sapiens
tgatcatcctgctgggcttcgtccagatcgggaaggatcactccaagaactgaggcccctgtcagcagtgtcagtaatagtttggagaat

SEQ ID NO: 109722 - DNA, 101 bp, Homo sapiens
catggcatgatccaagagtgcccagacacaagtgagatcagagcctagcaacatgcagtttttcttgatgaagatggatgaccgaacctctgctgctgaaa

SEQ ID NO: 109723 - DNA, 98 bp, Homo sapiens
aagagcaacctcacacggtgtgggctgaatgaagagctgccagatcccacagatgaaaggttgtatcaaagttcttaaggaccaacctcctaatagtg

SEQ ID NO: 109724 - DNA, 75 bp, Homo sapiens
caggaagtccaagccacaatgatcctgccaagaatcctccaggacaatgccatccttcatattcctccaaccaaa

SEQ ID NO: 109725 - DNA, 98 bp, Homo sapiens
gtgcagtattttagctgttctccaagatatggaatatttgctcccccatccagggtgcaaagctattgacctgaaaagtggttctggaaaagtgtacc

SEQ ID NO: 109726 - DNA, 74 bp, Homo sapiens
ttctggggtcctgctctcagaggctgccaaaatcctgacaatatctacactggccctgtatgatgagattcgtc

SEQ ID NO: 109727 - DNA, 98 bp, Homo sapiens
cggcctcgaacatcgtcagcccccaggaggccttgccgggccggaaggaacagacccctgtagcgggtatcattgcccagtgcctaagatcttttatg

SEQ ID NO: 109728 - DNA, 82 bp, Homo sapiens
acaacatggaggccgtgaagaccttcaatagcgaggttttcaaatggaacattttgatgcatcacttagtacctatttcaag

SEQ ID NO: 109729 - DNA, 100 bp, Homo sapiens
atctcgtgctcaccggtttctcccacatcgacctggacagtttattctgcgttgtagcagcatttggctgtttctactactgaatgaatctttgaaaagc

SEQ ID NO: 109730 - DNA, 100 bp, Homo sapiens
ttttactcagagtttgaaggttgtgaccaaaagaggctccgtctggctcttgctgattgaattcctttggtgcagtttagcatgttcctctgtgttctgc

SEQ ID NO: 109731 - DNA, 90 bp, Homo sapiens
gctggatgtagacggtgaaagttgtacaagtgttgagaagttgatgacgcctgagatgttttcagaaatcctctgtgacgatctggattt

SEQ ID NO: 109732 - DNA, 75 bp, Homo sapiens
gtcaaatgttgggacttgggaatcccagcttttcagatccatttacagaagatgctccttcccaatcagaaaaca

SEQ ID NO: 109733 - DNA, 75 bp, Homo sapiens
gcggcggcggctgcggtcgaagaaggggacgccgacaaggacatgatccacatcgcggacaccaaggtcgccagg

SEQ ID NO: 109734 - DNA, 101 bp, Homo sapiens
aagggctgaaccaactcagaatgcattgccattttcacataggagtcttttagtcctgctatacagctgcaccttgtacatcaagctccatgtaatgttcc

SEQ ID NO: 109735 - DNA, 100 bp, Homo sapiens
atggcttcagacctgtcaaggccccaggaacattccacatgttttcagatgcttcaagtgttgtgaacagagacttgtttggattatgcatttctcagct

SEQ ID NO: 109736 - DNA, 74 bp, Homo sapiens
agaccttcgcctcgccccgccggttcctcaccctcggggagcaacatggataaacaggggtcacatgacgacag

SEQ ID NO: 109737 - DNA, 90 bp, Homo sapiens
ctcctcgccagcagccgtccggagccagccaacgagcgggcgaactttctgaccaagtatacaactacccagagggcctaggagaagtgc

SEQ ID NO: 109738 - DNA, 131 bp, Homo sapiens
gaaaatggcggacgggaaggcgggagacgagaagcctgaaaagtcgcagcgagctggagccgccggagtgatcagaatcatccagataatcaacagctgaagaatgaacaagaagaaagtatcaaagaaag

SEQ ID NO: 109739 - DNA, 90 bp, Homo sapiens
agaaaaggaagtaatccctagtgtcagcagattcagcggtactggtgtataatagaaaacatcggttgtgaagagaaagccaaaaagaat

SEQ ID NO: 109740 - DNA, 100 bp, Homo sapiens
ggttgtacaggcccacgccagacacgacgtctggcaggaacctcggcctcagagatggccttggtggtattggcatggggttaggaccaggagggcaacc

SEQ ID NO: 109741 - DNA, 109 bp, Homo sapiens
ggcggacaaaacgccaggcggatctcagaaggccagttcaaagaactgtcaagtaatccacctctggctaccatccttattcctcctcatgctcggattcaagcagctg

SEQ ID NO: 109742 - DNA, 98 bp, Homo sapiens
ttacttgttggggccctcttgataaaaagagatgtggggggattctcgacctgctaacagaactggaccttttcgttgattatggaagattcccacaa

SEQ ID NO: 109743 - DNA, 100 bp, Homo sapiens
gggagggagccgcaggcgcagacccacccgccatgaagccccccgcaggcaaaatacatatctcagtgcattgatgagatcaagcaggagctgaagcagg

SEQ ID NO: 109744 - DNA, 100 bp, Homo sapiens
ggggggattctcgacctgctaacagaactggaccttttcgagtatggtgtttgcgaaaacttgcggaagctggagatcacaggcgtgtcttgtcgggacg

SEQ ID NO: 109745 - DNA, 88 bp, Homo sapiens
gccgtggcgccatgggtgttgtccgcagccgcaggtagctacagcaagctgggtagcaggcagatccaaaggatatcatgaagtttcc

SEQ ID NO: 109746 - DNA, 73 bp, Homo sapiens
tcggaggcgttcagctgcttcaagatgaagaagccgatcctactgcagggccatgagcggtccattacgcaga

SEQ ID NO: 109747 - DNA, 71 bp, Homo sapiens
gatggggcaggatggctgcgttgacacgtcttatttaatccacatcatagttgttgacctcctgtactgga

SEQ ID NO: 109748 - DNA, 88 bp, Homo sapiens
tttccatatgtgaccatggatataaaatcacaggtgggtcggaagcagttcatgaggtttgagtgggcaaactacgcagctgaggccc

SEQ ID NO: 109749 - DNA, 103 bp, Homo sapiens
agattcgcagtggtcgcttcttctccttgatcgccacatcacagaatcgtatctatctcacagctgacaaccttgtgctgaacctacaggatgaaagtttcac

SEQ ID NO: 109750 - DNA, 100 bp, Homo sapiens
acacagtgctgctggagttttatgctccatggaggagactgcaagcatcgggatgcccaggccccaaggaggccctcttcctgcagatccgagaaggact

SEQ ID NO: 109751 - DNA, 90 bp, Homo sapiens
agcgcccggagcaagcggagctcccccaagagccggaaagatcaggatcctcatgaccagccaaagagaagaagaattaggaagcataaa

SEQ ID NO: 109752 - DNA, 75 bp, Homo sapiens
ggaaagactcagggagcaggaaatggagcgattggttgcacgttttcaaaaaatacctaatggtgaaaatgagac

SEQ ID NO: 109753 - DNA, 83 bp, Homo sapiens
tagaccaagggctgatcacgcggcaccacctcaagaagcgggcgtgaagtcccgcttggcttttgggaagcccctggtggagc

SEQ ID NO: 109754 - DNA, 75 bp, Homo sapiens
gaaggaccagcatgggaatcctatactctgaggtctgaggaaaaaaaacctgtcccctggtgcggtggaatcgga

SEQ ID NO: 109755 - DNA, 88 bp, Homo sapiens
ggcattgacatttaattttagggtcctttatatagaagggagagtaggtactctgtggatatccccttggacaaaactgtcgtcaata

SEQ ID NO: 109756 - DNA, 100 bp, Homo sapiens
tccccagtgagggtgtacaaatacccctttgaattaattatggctggttgagaatgcttgcaccaagcttgtccaggcagctcagatgcttcagtcagac

SEQ ID NO: 109757 - DNA, 82 bp, Homo sapiens
ctgcctctgtcactcctggtgaccagcattcaagattactctcgtggctttggtggccggtacggggtggagaaggataaat

SEQ ID NO: 109758 - DNA, 82 bp, Homo sapiens
tgaaggagttccaccaggccgggaagcccatcgggaactctgcgaccttcaagtcgtttgaggaccgagttgggaccataaa

SEQ ID NO: 109759 - DNA, 100 bp, Homo sapiens
tgcaccttctcttactgctggcctgtttgcttgcctaaactggacttgaagcaatttaaactactggagatctgccattttataatatcacaattggaaa

SEQ ID NO: 109760 - DNA, 120 bp, Homo sapiens
gcgatggcttcagacagcatatttgagtcatttccttcgtacccacagtgcttcatgagagatcaatgcaatgtcccggaatggcttccatttgccaggcctaccaacctaactgatgac

SEQ ID NO: 109761 - DNA, 88 bp, Homo sapiens
gtacggcttagaggacttccctttggatgtagcaaggaagaaattgttcagttcttctcagattctacttcaaagaaatcctgccacc

SEQ ID NO: 109762 - DNA, 82 bp, Homo sapiens
gccggagccggtgccgcagctgcgatggccgtggccgtggggagaccgtctaccggaacatgaacattttgcagtactgccc

SEQ ID NO: 109763 - DNA, 74 bp, Homo sapiens
ccgcgtccgccgattcctcctccttggtcgccgcgtccttggctggcgtttacagatgtagagctaaaacgact

SEQ ID NO: 109764 - DNA, 107 bp, Homo sapiens
cagtgatccagatgtgggatcttcgatttgcttcctctccacttcgtgtcctggaaaaccatgccaggaaaatgtttataggaggccttagctgggacactacaaag

SEQ ID NO: 109765 - DNA, 82 bp, Homo sapiens
cgctcacctgcgctgtgatgcctgcagagctgtggcttaccagggagccggcacagatgaaaaggctcttattgaaatcctg

SEQ ID NO: 109766 - DNA, 90 bp, Homo sapiens
cggtgtgttctatgccgggggctttgccattgtgtattacctcattcaaagcagctgacacacaagagttcaggaccaaactgcacaaag

SEQ ID NO: 109767 - DNA, 76 bp, Homo sapiens
ttcctgaaatacatccaggaaagacatggagattctcttaaaaagaagcgtaaaagatgtgttgttttcaatcaag

SEQ ID NO: 109768 - DNA, 100 bp, Homo sapiens
ggtgcgccaacgtgagaggaaacccgtgcgcggctgcgctttcctgtccccaagccgttctagacgcggccgattccacgactcttctttgcgggagaac

SEQ ID NO: 109769 - DNA, 100 bp, Homo sapiens
gatgcactcatggttacccaggatgttttaaaaaaactagaaatgtgttcagaaattaaaggtccacagaaggagggtttggaaatcccttgtctccagg

SEQ ID NO: 109770 - DNA, 51 bp, Homo sapiens
ctcagccatggacgcgtccctggagaaggtattctgcctttgactgcaact

SEQ ID NO: 109771 - DNA, 75 bp, Homo sapiens
caagactggggctgctcccatcattgatgtggtgcgatcgagcctgatccagggatgtctggatggccggatggc

SEQ ID NO: 109772 - DNA, 82 bp, Homo sapiens
cccttctcccgctggacgacatagtgagggtggtgacccatgacgactgcatccctgagtgattcgcctttgccagtctcat

SEQ ID NO: 109773 - DNA, 100 bp, Homo sapiens
gcagcccccgaaggccctatcaggacatggagtatgaaagacggggttgagcattcatgatggtacctggaagtcagcaatttatggttttggagatcag

SEQ ID NO: 109774 - DNA, 100 bp, Homo sapiens
cccgactcccttctggaccaagacgactcctacggttgacgccgctgtcaccccagaggagcgccacctgtccaagatgcagcagaacggctacgaaaat

SEQ ID NO: 109775 - DNA, 100 bp, Homo sapiens
atgtgtgactccctggccaagatccccaaacgggaagaaatgttggctatttggcgatgagaggtggtgaacagtgaccatactggtatacaacactatg

SEQ ID NO: 109776 - DNA, 75 bp, Homo sapiens
ccacctgatagccctgcctctagtccctgttccccaccactgaaggagaaggcattggagcgggttgcagctggc

SEQ ID NO: 109777 - DNA, 96 bp, Homo sapiens
ggcgacctgcaggcagcaccggaggcccaggtctccgtgcagcccaacttccagcaggacaaggtatccacggaggtccgggccatcattgcctgg

SEQ ID NO: 109778 - DNA, 75 bp, Homo sapiens
caggtgttcaagagctagatgaagggtacaggcatccttcacctgctattgttgcaagaacagtcagaattttac

SEQ ID NO: 109779 - DNA, 100 bp, Homo sapiens
cgggcgtctccgccggctactgccgcttcagttctcccggtgtggccacgagtcgggaaggaggaagaggagcgaaggcggcgtgaagaggaagaaagag

SEQ ID NO: 109780 - DNA, 75 bp, Homo sapiens
ttcgtcctggttgccttttctcattctgtggggaccagcctgtgtgagcccccctccatgcgcctgaaggcccga

SEQ ID NO: 109781 - DNA, 100 bp, Homo sapiens
aacttctactgacgaagcttggaagttgcagaaggtgcaacccagtttatgcctgaccccaagctcatggatcacgggcagtcccacccagaagatatag

SEQ ID NO: 109782 - DNA, 75 bp, Homo sapiens
cggtccccaccgtgcagcggggcatcatcaagatgggttacacatcattttggaatgactgtatatcatctggat

SEQ ID NO: 109783 - DNA, 100 bp, Homo sapiens
tctgaccatttctcatgaacagaaacacctaggaagggagaactgtgaggagctggtttcacctgaggacctgctggagtggctgcggcctttctgtgct

SEQ ID NO: 109784 - DNA, 100 bp, Homo sapiens
caggccaagagggatccttcacccgtgtctggtatggcctcacaagtcttggtctacccaccatatgtttatcaaactcagtcaagtgccttttgtagtg

SEQ ID NO: 109785 - DNA, 51 bp, Homo sapiens
ttgccgagggctctcacccaaatgctgcagttcatggagctcgtttcaaag

SEQ ID NO: 109786 - DNA, 82 bp, Homo sapiens
agagggaatttgatgaagtttttacaaagaaaatgattgagtctatatgcagcagcttttttatgagaattacgagcagaac

SEQ ID NO: 109787 - DNA, 111 bp, Homo sapiens
gtgtcagtggcgcaccatctgaaaacaacatcatgcagtggaatgcagttatatttggggttttcagagaaagatgctgatgaggtgaaaggaatttttgtagataccaac

SEQ ID NO: 109788 - DNA, 100 bp, Homo sapiens
agagcttagaagcaaagttaagagactcatcagattctgagctgctgcgggatattttgcagaagatttggagcaagaggtggtggtggccttcccccga

SEQ ID NO: 109789 - DNA, 98 bp, Homo sapiens
ggagaagctgtgtagtgtggagcagtgctgccgtggtcaacgccattggcctgtacatgcgccaccttggggtgcggaccaagagtggagacaagaag

SEQ ID NO: 109790 - DNA, 100 bp, Homo sapiens
gcaggatacccgccgagggtagggtcgcgctcgcccgggcggcagatccgtgcactggagaaggcgaggtcaagtgcccaactgcagaccaactacccct

SEQ ID NO: 109791 - DNA, 100 bp, Homo sapiens
gcgagctggaggacgccactgagacggccgatgccatgaaccgcgaagtcagctccctaaagaacaagctcaggctttatttcaggctggagaacttaaa

SEQ ID NO: 109792 - DNA, 75 bp, Homo sapiens
ggatgctggaccgcaactgtgacacaggagcctttgagctcatctataagcagagacggggtttcgccatgttgg

SEQ ID NO: 109793 - DNA, 50 bp, Homo sapiens
gcgaggtcaagctgctgctgctcggtgtggaatatcaaacaaatgattaa

SEQ ID NO: 109794 - DNA, 120 bp, Homo sapiens
caaaagggaaagactcgtgtttgagctggggctgggctccttccagggcgtcatggtgggcatgggccagaaggactcctacgtgggcgacgaggcccagagcaagcgtggcatcctgac

SEQ ID NO: 109795 - DNA, 109 bp, Homo sapiens
aaaccttattgggtagtacaaccaaaatcggagatgcgattgttcttggaatgataacgcagttaaaagaggtaaccctgtatcatttgctaaagctgtttcaatcaga

SEQ ID NO: 109796 - DNA, 100 bp, Homo sapiens
gacccagaggagagttctccaaacatgatcgtttactgcaaagaactttatattgctgttggaatatctggagccatccaacatttagctgggatgaaag

SEQ ID NO: 109797 - DNA, 76 bp, Homo sapiens
ctctctatccatctctcgaagacttgaaggtatgaaaatgaaagtcttcagaatggaaggaagtcaactgaatttc

SEQ ID NO: 109798 - DNA, 82 bp, Homo sapiens
atcataagtggaattttggagatattcaaaggctcacgaggcccagggaatcctctggaccatcagattaccaatgaaagag

SEQ ID NO: 109799 - DNA, 100 bp, Homo sapiens
aagcagaggaaggtggaggtctacgcagatgccgacgaaatcctccaggaggagatcaaggagtacaaggactccctggaggaaaagcggaagcggcagc

SEQ ID NO: 109800 - DNA, 51 bp, Homo sapiens
caataactcctatgcatgcaaacagagccttcacgtaaatgggtccagtca

SEQ ID NO: 109801 - DNA, 60 bp, Homo sapiens
gtcaagacatttcttcggcattctgcaacaggcttaagcaggtaaagcagtcactgtgaa

SEQ ID NO: 109802 - DNA, 89 bp, Homo sapiens
tcaaatgcagtcggcttgtcctggctcttgccctcatcctggttctggaatcctcagttcaaggtaactaggatttctacctcaaccgc

SEQ ID NO: 109803 - DNA, 100 bp, Homo sapiens
aatcaacgacgggctccccggctcggctctcgctgcggcagacgggctcccccgggatgatctacagatagccatccgagcttgtttcctggggtttgtg

SEQ ID NO: 109804 - DNA, 97 bp, Homo sapiens
atgactggaaactgattggaaactctttgggaaagccactcgaaaaggacaactacacctttgcccaacctgggattcaaatgaaagtgaaaatgtt

SEQ ID NO: 109805 - DNA, 80 bp, Homo sapiens
cagcgcctcggccgaacccctccgcagcaggttgcacagtgaattaaaagatgctgttgaaaaaaaattggaggcctttc

SEQ ID NO: 109806 - DNA, 96 bp, Homo sapiens
cagcatgccatcctgaacgtctctccctgtcctagctctgtaactgtttacaaggcctgaatatttggacaagatggcagattcatcatcatcttc

SEQ ID NO: 109807 - DNA, 96 bp, Homo sapiens
ccaagaccagcgcgagggccctgggcaaggcccgacaggataaaagaatcagagtgtctcaacccttgacaagaggaccaagtgcctttattccag

SEQ ID NO: 109808 - DNA, 75 bp, Homo sapiens
agattgttacaaggcaaaggaaaggaagagttctagaggacagtcattttgtttactcattcagccctgttgcag

SEQ ID NO: 109809 - DNA, 100 bp, Homo sapiens
gctggctctggtcttcgatgcacaggagtggccgttatggaacgcagacgcaagatggctgtcctctctaaggaatatggttttgtgcttctaactggtg

SEQ ID NO: 109810 - DNA, 100 bp, Homo sapiens
taggcaccgaggggcctcggccatcaactggagatgactgatgacatggattcatacacaaacgtatatcgtatgttctccaaagagcctcaaaaatcag

SEQ ID NO: 109811 - DNA, 101 bp, Homo sapiens
ctaacaccagctactgcgagctgtgccacacggagtttgcagtggagaaacggcctcgacccctcacagaggatgatccactcacaaatctgaatacggct

SEQ ID NO: 109812 - DNA, 101 bp, Homo sapiens
gtggtctcaataagtgtgttatacttgctttggtgattgcaatcagcatgggatttggccatttctatggtattggtggcatggatggaacacaacagcag

SEQ ID NO: 109813 - DNA, 80 bp, Homo sapiens
aaaagcaaccagtcctatcctactcctgtcactgtggaaaaggacagggggctgttgtggttccgactataaacagtacg

SEQ ID NO: 109814 - DNA, 100 bp, Homo sapiens
ggcgccccgcagccccccaacatcctgctcctgctcatggacgacgtgaaaggtgtagcagtcactcggcctacacccacagcatcgaccttgtgaaccc

SEQ ID NO: 109815 - DNA, 50 bp, Homo sapiens
cctctactggccttgcccagcgcctaggacacattcagctaacgtatttt

SEQ ID NO: 109816 - DNA, 100 bp, Homo sapiens
tttccccctgttgcagggttttgtttatataactcaagttgtttggctaaattcttcagttgtgctgcatggaaacaacctgttagtatttggaggtacg

SEQ ID NO: 109817 - DNA, 75 bp, Homo sapiens
catctacatccaggcccacatcgacagggacgtcctcattgtcctcggataagttctgaacgtcgaaaagaaaag

SEQ ID NO: 109818 - DNA, 82 bp, Homo sapiens
gttggaagtgtgaaagcattgatggaatgtgctttagaagttaaaaaggttcgagaacttgtcttggacaattgcaaatcaa

SEQ ID NO: 109819 - DNA, 96 bp, Homo sapiens
cttgtgaccctgcagctcctcaaaaacgagatcacccacgatgagcactgtgccgcctgcaagcgaggggccaacctgcagccctgcggcacctgc

SEQ ID NO: 109820 - DNA, 104 bp, Homo sapiens
agacagttacaggacaggctaacaccaatggaggctttacttcagacaagatatgttccatttaaggctctgaagatggggagagaattctggatgatccaggt

SEQ ID NO: 109821 - DNA, 75 bp, Homo sapiens
gatatgtgttgctaatacccatctttactggcatcctaaagaacacagatatgtagaactcttcttgaattctac

SEQ ID NO: 109822 - DNA, 90 bp, Homo sapiens
gggctggtgggcatagtggctgccctgctggatattgtcagcatgtgctttgtgaaactgttcgaactgccaaactgactccagtttctg

SEQ ID NO: 109823 - DNA, 100 bp, Homo sapiens
aggtgtttgacaaaacataccaattcttgaatgacatccgagcgaaagagaaagaggacagaagcagtacaacatccacgtgggaactgctggatcaaag

SEQ ID NO: 109824 - DNA, 98 bp, Homo sapiens
ccatcatgttttccaggctgatctcaaactcccacggtcaagcgatctgctggcctcggcctctcaagaggttggagcaatcactgaagaaactgaag

SEQ ID NO: 109825 - DNA, 121 bp, Homo sapiens
gacctaaggggattctcccatttggcccgtcctaccctaaagtcaccacctgctgcttttctggagcgcttaccagtgctcttaaagttccgtacagataaaggaagagatcccagttctg

SEQ ID NO: 109826 - DNA, 100 bp, Homo sapiens
aagatgacggatgaaaagaatgaacactgtccttcaaaacgaggagtgatgatgaatacagtgatgatgatgacatgagttggaaagtgagacgtgcagc

SEQ ID NO: 109827 - DNA, 95 bp, Homo sapiens
gcaccttcggcatctgcccctgccatgaccactgtggagaacaaatccaagattagcacagaaatggtggagtcaatgaagaaagtagcagggat

SEQ ID NO: 109828 - DNA, 100 bp, Homo sapiens
ggaactcgaccggatccaacccagttagttacttcctgtctagagttgtagcttccacctgttctaggcctgattcttcactacctgagacgtctaaaaa

SEQ ID NO: 109829 - DNA, 97 bp, Homo sapiens
ttctggccagtttgatgttgagttccggcttgccgcggcctgccgcaatggaaacatctatattctgagaaggtgctccttgtcttctgagatgttg

SEQ ID NO: 109830 - DNA, 115 bp, Homo sapiens
cagatgacctgggaacttctagcatcatgaagattgaaggaaaatttgtcaatccagttcaggggcatacaaacttgcctgattccagggatgtatggataggggatgagcgagg

SEQ ID NO: 109831 - DNA, 110 bp, Homo sapiens
ctcaatatctgtcttcggtggactccttcggcagtccacccaccgccgccgcctcccagcagcctcccgcgacgatgcccctcaacgttagcttcaccaacaggaactat

SEQ ID NO: 109832 - DNA, 100 bp, Homo sapiens
caggcatgccccgctacgagctggctttaatcctgaaagccatgcagcggagtgatcagcagctggactgtgccttggacctaatgaggcgcctgcctcc

SEQ ID NO: 109833 - DNA, 83 bp, Homo sapiens
ggccgtgttgctgatcgcctgggtggttgttggcgtgtccctgcagcgaaggatcctggcgatcagtgggtgaccgcggctgc

SEQ ID NO: 109834 - DNA, 75 bp, Homo sapiens
ctaaaggagcaacagtttacagcccttccagatacagctaccagcgagtgatagacagccaagcagagaaactga

SEQ ID NO: 109835 - DNA, 90 bp, Homo sapiens
tctgcctttcaaggtcatgatgttggattctgttgcctgggtaccaccagagggaaagctggggcgtcctcccctgcccaagggaaccgg

SEQ ID NO: 109836 - DNA, 100 bp, Homo sapiens
ggagccctcaattgcattggaaaagctgcgggaactcagctttagtgagcaaatttttcagaacataaaacaagaatatagtcgttatcagaggtggaga

SEQ ID NO: 109837 - DNA, 82 bp, Homo sapiens
tcaagcaagggctgtatgagctctcagcaagcaactttgagctgcacgttgcacaagcccatcatcttcgtttcggacagag

SEQ ID NO: 109838 - DNA, 100 bp, Homo sapiens
cagacactgtctgagcaggtgcaggaggagctgctcagctcccaggtcacccaggaactgagctctgtgacttcctggagactcacttcctagatgagga

SEQ ID NO: 109839 - DNA, 49 bp, Homo sapiens
ctcagaagtgatctacggtcgtaaggtggagatgaagacgctggtgtca

SEQ ID NO: 109840 - DNA, 51 bp, Homo sapiens
ttgttcccggagatgcggcgcgcaggaatatgaagccatctacctagcaaa

SEQ ID NO: 109841 - DNA, 112 bp, Homo sapiens
cctatgggcaaactgggagacagctgccatccactgactcgtaaatccacagtttggaaagagttgctgttagcaaccatcggggaacagttcacagactgtgccgcagcag

SEQ ID NO: 109842 - DNA, 101 bp, Homo sapiens
atctacaaccttcgatctcctgacgaagtgtgaacatggctacgcctcttcattcccgtccatgccgagcccccgactgcagcattcaaagcccccacgga

SEQ ID NO: 109843 - DNA, 100 bp, Homo sapiens
aggagggggcgcagaggtcaggggcgctgggggcgccacaccagaatcgagagctccagatcatgagaaagctagatcactgtaacatagtccgattgcg

SEQ ID NO: 109844 - DNA, 100 bp, Homo sapiens
cagatttcagatactctgactccacctttacttttacctacgttggcggccccagaagacttaattcagtgcacaaatgagatgaatgtgaacatcccac

SEQ ID NO: 109845 - DNA, 82 bp, Homo sapiens
acggaggagcttgtaccaccggggctttgaccacgacctttgaagagcttcattttgagatcaagccccacgatgactgcac

SEQ ID NO: 109846 - DNA, 100 bp, Homo sapiens
ctcttaataaacacttcgagagttcttccaaagtcgcccaggcaccttctccatgcattgcaagctgtacaggaagaggcacatacaaagaaaagaatcc

SEQ ID NO: 109847 - DNA, 51 bp, Homo sapiens
aacactggacagctgaataaatgcagaaataggaaggttgttgattactca

SEQ ID NO: 109848 - DNA, 105 bp, Homo sapiens
aagaccttcactgattgttttaactgtctgcctatagcagccattgtggatgagaagatcttctgttgtcatggagccatgcctttcttggacatccagaaaagg

SEQ ID NO: 109849 - DNA, 99 bp, Homo sapiens
ctcctgtgttccagttaataaagcatctacaaatgaggcagcctggggcaggacgctgccaaggtctgcagagaattcaccgagcgtgagcaaggagaa

SEQ ID NO: 109850 - DNA, 88 bp, Homo sapiens
atcgagatagaacggatcttgtctgtgtccctcaggtttgtggtaaatatgccagctctagaacacatgaatcagattttacacatct

SEQ ID NO: 109851 - DNA, 98 bp, Homo sapiens
gcggggacctcggagggagcccggcggcttcgggtatcgagaaccttccctgcgaacttcagaggaacttccagctgatgcgagagctggaccagagg

SEQ ID NO: 109852 - DNA, 100 bp, Homo sapiens
gctaatccagtggaaatcaggagaggtagcacaggcggagtgcagcggaggcccctgccgctgccgtcatgccgttcccgtttgggaagtctcacaaatc

SEQ ID NO: 109853 - DNA, 50 bp, Homo sapiens
aggcggagggcgcaaagcgagccggtatggcctcacaagtcttggtctac

SEQ ID NO: 109854 - DNA, 100 bp, Homo sapiens
cagaatcgagagagatctgctatttctttgtggagacatcaatgtatttcttaccaaaagacactttcagcagctccacagctgggtcctgctcctcaga

SEQ ID NO: 109855 - DNA, 101 bp, Homo sapiens
tcgtcagcactgactttcagctatggaatcgacaacaagggaggtgtcacagttttccatttagatcaacaacttcaagttcttaccatggaaaattccga

SEQ ID NO: 109856 - DNA, 75 bp, Homo sapiens
ccccaccagcccagtccctcaaccctttcctggcaccagaccgagacatgggtgcccggcaccgcgcccgagccc

SEQ ID NO: 109857 - DNA, 100 bp, Homo sapiens
cagccatggcgaccgtgctgtccagggcgctcaagctgccgggaaggaaatctcagatggaggaagtgcaagatgaactcatccacagactgaccattgg

SEQ ID NO: 109858 - DNA, 82 bp, Homo sapiens
agctggatgtatttcttcagaaagagggtaaaactgattattatgctcggaaacgcttggtgatacaagataaaaataaata

SEQ ID NO: 109859 - DNA, 97 bp, Homo sapiens
tgacggcaggctgtaccatcgccactgcttccgggaggggctggagacaggtctgaggaggaggcgtcatccacggagaaaccaaccaaagccttgc

SEQ ID NO: 109860 - DNA, 100 bp, Homo sapiens
atcccatctaccgcaactctcagttcgagagtaaagggctggaccccaatggagaacaggtggtgtggcaggcgagcgggtgggcagcccgcatcatcca

SEQ ID NO: 109861 - DNA, 75 bp, Homo sapiens
cagttcctgatgttacaaatgaacaaggatctcccagttatttctcaaactctgaggctgcggagttcacacatt

SEQ ID NO: 109862 - DNA, 51 bp, Homo sapiens
aaaccccgcctcttacagtcacgaggttctttggcatggacacaagttcag

SEQ ID NO: 109863 - DNA, 134 bp, Homo sapiens
gagctcgcctgcatctactcggccctcattctgcacgacgatgaggtgacagtcacggcaatgaggaaaggtctactagatgtgcttccaaaaaattcattagaagatttaacggcagaagattttaggctttt

SEQ ID NO: 109864 - DNA, 82 bp, Homo sapiens
aaaatatctttgatgaaatgaagaagaaatttttacaggatgagaacaagttgagcagtgccaacggccatgaagaacgtag

SEQ ID NO: 109865 - DNA, 100 bp, Homo sapiens
cggagttccttagttgaaaggtgcgccctgctgtgacagcaccatggggcaggtgggacggcagctcgccatcatcggggacgacatcaaccgacgctat

SEQ ID NO: 109866 - DNA, 98 bp, Homo sapiens
gcaaagtgtggaaacagcagatgtaccctcagtacgccacctactattacccccagtatctgcaagccaaggaacatcatttacagcgagcaatttca

SEQ ID NO: 109867 - DNA, 75 bp, Homo sapiens
gcgcatccatcaaagctttgcgcaacgccaacctcaggcgagatgagcgatcgtcttctgatcaaaggaggtaaa

SEQ ID NO: 109868 - DNA, 100 bp, Homo sapiens
tcacactccttggatgatttccgaagattactgacagccctgtcctaggagcacaacgtccgagaaatgctcagcttgactgctccaaattggagacctt

SEQ ID NO: 109869 - DNA, 100 bp, Homo sapiens
agacccccctgtgttgaggacctgcaccgccaagccaagctcaacctcaaatcagtactgagggctgcagaaccttggcctgaaaatgctacattatatc

SEQ ID NO: 109870 - DNA, 83 bp, Homo sapiens
gcggaatctgggtgcagttcctgcagtaccccactctacgatcaggatgagccccaagagcctcaagaacccaacaaggtgcc

SEQ ID NO: 109871 - DNA, 142 bp, Homo sapiens
tctctacaagggacacaggtgactgaacttcctcctggccccgaggacccagggaagcacctctttgagatcagcccaggccttctcctcgacaatgccgcagaaactactcatcaaattaagcaatgaattccacatagat

SEQ ID NO: 109872 - DNA, 76 bp, Homo sapiens
gttacctatgtacctgttaccactttcaaaagcaggatgacgcaaaacacggtgattgtgaatggagttgctatgg

SEQ ID NO: 109873 - DNA, 50 bp, Homo sapiens
gcctttgctttaaaacagtattacttgcgattcagaatggacagtttaga

SEQ ID NO: 109874 - DNA, 100 bp, Homo sapiens
agaaccttgtgacctgtctttgaatataacctggtatctgaaaagcgctgattgttacaatgaaatctataacttcaagtgggaaaacagagtatcagac

SEQ ID NO: 109875 - DNA, 100 bp, Homo sapiens
gtagctgaatgtgttactccattgctgaggagtggtgtcatggagaaactccagctgggcccagagattctgcagcgggaaaatccaaggcttatttatg

SEQ ID NO: 109876 - DNA, 99 bp, Homo sapiens
gaagctggaggagcggctgaagcgcgtgcgcatgatgcgtctgttactagagtggagagtctaccttcgtctcacatgtgccacaaaggatggcatggc

SEQ ID NO: 109877 - DNA, 98 bp, Homo sapiens
ggcgaccggagcggtaggagcagcaatttatccgtgtgcagccccaaactggaaagaagatgctaattaaagtgaagattcactgcgtgctgtcctca

SEQ ID NO: 109878 - DNA, 82 bp, Homo sapiens
ctgagcgaggcggagaaggtgtacatcgtgcatggcgtccagctttgcccgaagtttttacatacaaattctactagtcaca

SEQ ID NO: 109879 - DNA, 75 bp, Homo sapiens
gcccggagagcgcgctctgcctgccgcctgcctgcctgccactgaggagaaaagccttacagatgctcatgggaa

SEQ ID NO: 109880 - DNA, 110 bp, Homo sapiens
gcgcgcagggcctgcagcgggagctggacggcgagcgcgagcggcgcgagaaagtctcggcgcggaagatggccggcggcgtggacggccccatcgggatcccgttcccc

SEQ ID NO: 109881 - DNA, 75 bp, Homo sapiens
ttcgttgcttgcttgcctgtgcgcgcgtgcgcggacatggcctcaaacggccggtctaattgaagccaacggaga

SEQ ID NO: 109882 - DNA, 100 bp, Homo sapiens
tctgttctgtagtcagcacaaatctgaagatggtgtcaaagagaaattctggtgctaactgccaaagaaaggaaaactcaaattgatgatagaaacaaat

SEQ ID NO: 109883 - DNA, 82 bp, Homo sapiens
gtcatgagcgacagcggcgagcagaactacggcgagcgggtgtggacactgccagcggctgcagccgacttggaatgacctg

SEQ ID NO: 109884 - DNA, 100 bp, Homo sapiens
gaagcccccgggaaatccagcgcagccagagctgggatgacaggttggctcgaggccgggaagagtgggagagtgccgccctgcagaatgccaacaccaa

SEQ ID NO: 109885 - DNA, 96 bp, Homo sapiens
ctccggaacagcaagaactgcaccgaaccagagtgtgaacatggctacgcctcttcattcccgtccatgccgagcccccgactgcagcattcaaag

SEQ ID NO: 109886 - DNA, 100 bp, Homo sapiens
cgttgcctggctccacgccctgctgggtcctacctgtcagagccccaaggaaagtatgtgatggtgatgggagtggttcaggcctgcagccctgagccct

SEQ ID NO: 109887 - DNA, 90 bp, Homo sapiens
gccatggagaagctgcggcgagtcctgagcggccaggacgacgaggagcagggcctgactgcgcaggacttaaccaccaccatgtcgagc

SEQ ID NO: 109888 - DNA, 75 bp, Homo sapiens
ggacacagcaatatctctgggctttcacagcttggatttacactgggcaacgtggttggaatgtatctggctcag

SEQ ID NO: 109889 - DNA, 110 bp, Homo sapiens
gcaccattgaagttaaccggtgtaggagaagaaatccgcagaagcttattaaagttaaggaggaggacttcatccaacccagcagccgagaagaggcccagcagctgtgg

SEQ ID NO: 109890 - DNA, 75 bp, Homo sapiens
gcctatcacctaagagaccttatcaaaagagggaagtggaatcccgattgcttgatgattgatggactggtttct

SEQ ID NO: 109891 - DNA, 95 bp, Homo sapiens
cggggcgcccgcgcgcggggaccccacgggttacagatgtagagctaaaacgactgaaggatgctttcaagaggacctgtggactctcatattac

SEQ ID NO: 109892 - DNA, 71 bp, Homo sapiens
accgccctctggccgttgcctcaccggatgatgtgcgaggtgatgccgaccatcagcgaagcagaaggccc

SEQ ID NO: 109893 - DNA, 83 bp, Homo sapiens
ccggagccgtgtggaccaggaggagcgctatgtggaagatgtgaaatttgtcatcaattatgactaccctaactcctcagagg

SEQ ID NO: 109894 - DNA, 95 bp, Homo sapiens
attggaaggaggagattctgaagataaggagacaggggcaagtgtccgagtggtgaatcagctacttacagagatggatggtctggaagcacgcc

SEQ ID NO: 109895 - DNA, 100 bp, Homo sapiens
gagggcggcggcagcgggtcctacgaggagggctgtcagagcctcatggagtacgaaccccagctcaaagggattgtgacaaggttattcagccagcagg

SEQ ID NO: 109896 - DNA, 100 bp, Homo sapiens
ttaaaatctcccaagaggaatgacaaacaaccagctcttcagatattttggagtgtatacaataatatccctcctgtgactagcctgcctttgagatgta

SEQ ID NO: 109897 - DNA, 90 bp, Homo sapiens
cggaccggagactttggggcctaactagagccccccaagatgaacccagtggtggagccactgtcctggatgctgggcacctggctgtcg

SEQ ID NO: 109898 - DNA, 137 bp, Homo sapiens
tctgcctgcagcctcttccggcatgaagagttctaagtcttcaacttccttggcttttgagtcccgactcagcagggatctcatctggccaccgcgttctggaagaggcgagagggagagcgtgcgcgagaggagag

SEQ ID NO: 109899 - DNA, 82 bp, Homo sapiens
cgagtttagtgacgtggagcaggcgcagaacagtcggagagtgatgacagacctaatgctctattaagttcacctgcaacag

SEQ ID NO: 109900 - DNA, 75 bp, Homo sapiens
cccagagtgacctagaacagaccaagacacgacatctagccctgaatctgcagggtggatccatgctgtgctgac

SEQ ID NO: 109901 - DNA, 90 bp, Homo sapiens
caggaagtcaagatgcaagcaccagccttcagggacaagaaacagggggtctcagccaagaatcaaggtaacctggatgaggacatcatt

SEQ ID NO: 109902 - DNA, 100 bp, Homo sapiens
gtgcactaatagaagaacgggatgctgccttgtctaagtgctcagtgacctgtggaaaaggctacaaacaaaggcttgtctcgtgcagcgagatttacac

SEQ ID NO: 109903 - DNA, 76 bp, Homo sapiens
ttgatgccagccaaacctgtaaacaactttatgagtcttctgctcgtctgatggttcacaccgtggccacctttaa

SEQ ID NO: 109904 - DNA, 75 bp, Homo sapiens
agcggaggctggacgcttgcatggcgcttgagcgggaatgcatatcagtccacgtgggccaagcgggagttcaga

SEQ ID NO: 109905 - DNA, 82 bp, Homo sapiens
ccacgctctgcccgaagccgaagaagctcatcgcaccgccgggccgggcgggtctcgtgtcaacagcatctccaccctggag

SEQ ID NO: 109906 - DNA, 96 bp, Homo sapiens
ccgccctgttccccgcgctgcggcctggcggcttccaggcgcactaccgcggtacggacattgctgcaggagaagaggttgccatcaagcttgaat

SEQ ID NO: 109907 - DNA, 73 bp, Homo sapiens
tcgacttagaagctaccgagttaccctaagaaaggtgttgacagctcttctaccacaagcagtgcttctccaa

SEQ ID NO: 109908 - DNA, 100 bp, Homo sapiens
ctactacagagcacccgaggtcatccttggcatgggctacaaggaaaacgggtttctcctcttcaaaaatctgaagttgttgagatggttaagaaacaag

SEQ ID NO: 109909 - DNA, 74 bp, Homo sapiens
tcagcctgcacggatggtcttgaaacacaaatggtttttggtttttctatatgagtggagaagacagctgttac

SEQ ID NO: 109910 - DNA, 100 bp, Homo sapiens
gcgccgggagcagcaccgcggggccagatcttgagccagatgattgtgcatccatttacatctttaatgtagatccacctccatctactttaaccacacc

SEQ ID NO: 109911 - DNA, 82 bp, Homo sapiens
ggggccagggaaccctggtcaccgtctcctcagacccctcctcctgtagagagtggtgctgccctctcgggatgtacctgca

SEQ ID NO: 109912 - DNA, 110 bp, Homo sapiens
gcgtcgcgcccgggaggaaggaacgaggcaaggagctaaagcagcgtgcgttcagccctggggtcatcatcagatttgaaatatttaaagtggatacaaaactatttcag

SEQ ID NO: 109913 - DNA, 74 bp, Homo sapiens
attcaaccagctggaagtgaagggtgcggaggcagcaaatgttacaggtcctggtggtgttccagttcaaggca

SEQ ID NO: 109914 - DNA, 99 bp, Homo sapiens
cattcataggatcaactaacaaccatgtggtgaggaattcaagagctgaaggacaaacactggttcagttcgtaatggacctgaaagtggcagcaagat

SEQ ID NO: 109915 - DNA, 90 bp, Homo sapiens
gccgcgggcctatatggagaacaaggccttctccatggatgaacacaatgcagatgtatcggcaagcagtgtaaacggaggacttgggga

SEQ ID NO: 109916 - DNA, 100 bp, Homo sapiens
aatgtctggtagccaccggcactcacgaaaaactgcttaaggttgaaaagagaaatttaagaaattgctgacggaataaaaacataatagaactacaaca

SEQ ID NO: 109917 - DNA, 100 bp, Homo sapiens
gcggacgtgaggcatgacggctccgagccctgcgtggacgtgctgttcggccctggccaacgtcaacattgggagcctcatctgcaatgtaggggccggt

SEQ ID NO: 109918 - DNA, 100 bp, Homo sapiens
aggcagaaccttcacttgcaagcatgggtgttttcatcatcggctgtcttgaatcctttctacaaggagtggagactttagaagacagctttccatcgac

SEQ ID NO: 109919 - DNA, 100 bp, Homo sapiens
gtcgatccagctgccagcgcagccgccagcgccgggtatggacctgtctgccaatcaggacgaggagaccgaccaggagaccttccagctggagatcgac

SEQ ID NO: 109920 - DNA, 90 bp, Homo sapiens
aagaaagaaaattagagtgaatgtagttgcaccaggggccaagaaatgaagcttcaggcctgtgaagttggagagcagcaagaatagtgc

SEQ ID NO: 109921 - DNA, 96 bp, Homo sapiens
gactgctgctggggctgggctcgccagtcttggggacagtgtcagcgtacaggctgtgggtggacagctgctcggaaatgtttggcggcctggaca

SEQ ID NO: 109922 - DNA, 100 bp, Homo sapiens
ccagactcctttacatgatagtcttcctatcacgggcactagtgtggctctcctgttccagcaattggggatgattcagacaaacatagcttccaaaact

SEQ ID NO: 109923 - DNA, 75 bp, Homo sapiens
ccgagctgcccccgcaggcccacggtctcggcgtagacggtccctgtgcgttttattgcgacctgccggtgggaa

SEQ ID NO: 109924 - DNA, 73 bp, Homo sapiens
ttggcattgacatttaattttagggtcctttatatagaagggagagtaggttatttgggatggacctgaataa

SEQ ID NO: 109925 - DNA, 100 bp, Homo sapiens
tttgggtcctctgaggccccttgaccaggtgctgattggaagccagctcccccacccatttgggctgaccctctatggagagcgcatctattggactgac

SEQ ID NO: 109926 - DNA, 100 bp, Homo sapiens
ggaagtatcgatcccacctgtaacgtggcggatgtggtgaaaggattcactccttctccagttgcacagccacacccttcagctggccttaatgttgact

SEQ ID NO: 109927 - DNA, 83 bp, Homo sapiens
gcgctgcccgggccgcgaggacgaggcggcgccgccgggctgtggaggtggaccaggtgctctgaggctggcgtacagacaca

SEQ ID NO: 109928 - DNA, 75 bp, Homo sapiens
gcctcagcctcccgagtggctgggattacagactggctctcttgcccaagctggagtgcagtggcttaatcatgg

SEQ ID NO: 109929 - DNA, 75 bp, Homo sapiens
cactgtggttggagaaaagggtgttctcctctcaggtggggcggataaaaatgtcgttgtgtttgacaaaagttc

SEQ ID NO: 109930 - DNA, 75 bp, Homo sapiens
attcagttgcacatccccacatcaatgcactgccaatgtattttaaccacatcagcatcgaggactcgcgggtct

SEQ ID NO: 109931 - DNA, 100 bp, Homo sapiens
ttgtctcggacgtgcggggcctgggcctcccggtccgcaagcagctggttgtcttcttgcctgccctgtgtcgtaaaatgggggtcccttactgcattat

SEQ ID NO: 109932 - DNA, 75 bp, Homo sapiens
ctgatagcaccatcttcaaatttgtggaagcttataataacatagctgatccagaagaactgttcacaaaattag

SEQ ID NO: 109933 - DNA, 50 bp, Homo sapiens
ttcctgtacagcctgcagaacttgctgggattacaagcgtgagctaccac

SEQ ID NO: 109934 - DNA, 83 bp, Homo sapiens
cgtggagcggagtaacacacagctgggtgggggcacagcaaattgtggctactaatttgccccctgaagatcaagatggctct

SEQ ID NO: 109935 - DNA, 75 bp, Homo sapiens
acctcaagcacacccaatggacagcatgcctcaccaagtcacatgacaagcaaaacctctgcgccatgagagcca

SEQ ID NO: 109936 - DNA, 116 bp, Homo sapiens
tggcttcgtggtccctgatgggagagcatgaacaggtgagtgcgcccccacccctgtgtccaagtggccgcactccagacctgaaggctctactcaacgtggtggacaatgcccgg

SEQ ID NO: 109937 - DNA, 50 bp, Homo sapiens
gatttctaagcaggaactccccagggcaagttaaagtcttcagagccctg

SEQ ID NO: 109938 - DNA, 80 bp, Homo sapiens
ggaagccgcccgccccccaccgccgccccctccggcgtgttcatgcccccgggggtctccatcacccaactccatgcttc

SEQ ID NO: 109939 - DNA, 50 bp, Homo sapiens
cccagccctgccagctgcgccgggacggccgccatggcatcagatgaagg

SEQ ID NO: 109940 - DNA, 50 bp, Homo sapiens
tgatgcagaagaggagtcctttaggaagaatgatggaaacttggtggaag

SEQ ID NO: 109941 - DNA, 80 bp, Homo sapiens
cgcgcacgttggaaccgaagagagctctgttgttgcagtcagcccaagactaccccgtcggtcattctgttcctgccgtc

SEQ ID NO: 109942 - DNA, 80 bp, Homo sapiens
aatggcacttttgatttccaaaatgacttcctgcggctccttcgggagaaggccagtggctttgaggaatctatgaagtg

SEQ ID NO: 109943 - DNA, 90 bp, Homo sapiens
ggccgccgagctggacccggaccggttttggtacggcaagaagaagctgaaatacctgccctacaatcaccagcacgaatacttcttcct

SEQ ID NO: 109944 - DNA, 83 bp, Homo sapiens
ctttattctgtgggctctgattctccaatgggaataccaagggactcattctgatgaaggaaagagcgtccctgtgcagctgc

SEQ ID NO: 109945 - DNA, 100 bp, Homo sapiens
gaaaagaaaagaaaacttgaaactaatcctgatattaagccatcaaatgtggaacctatggaaaagggatcactgagattctgatgaacagaccttctgc

SEQ ID NO: 109946 - DNA, 74 bp, Homo sapiens
tgtgtggttgcaacggagataaattcccggaaccgcgattcggcgtgtcagagccaaatctcctcagccacctg

SEQ ID NO: 109947 - DNA, 83 bp, Homo sapiens
gatgaatcctgcggcagaagccgagttcaacatcctcctggccaccgactcctacaaggtgctgctgcatgaggaggcgggtg

SEQ ID NO: 109948 - DNA, 120 bp, Homo sapiens
gcactccagccactgctgtctccttagctgctcacatatggatactttcacagttcagggagtgcatccgccccaacccttttccccctcgtctcctgtgagaattccccgtcggatacg

SEQ ID NO: 109949 - DNA, 78 bp, Homo sapiens
cctgcgggtgcctttgaaaatcaacgacaacttgagcacagggcaaaagagttggtagtggtgcacaaaaaacaagaa

SEQ ID NO: 109950 - DNA, 100 bp, Homo sapiens
cgtgtttgtcgtcttcttcatctgctttggcctgaccatcttcgttgggatcagagcgtctggatggttccatcaagggagaaatccgaaaacaggcact

SEQ ID NO: 109951 - DNA, 98 bp, Homo sapiens
ctcagcaggctcaaataccctccttttgcgaaaaagtggatcaatattcggaagtcatatggaaatttttacaagattcagatgaagagatatttgta

SEQ ID NO: 109952 - DNA, 111 bp, Homo sapiens
gggggaggacattttcaccggcgccgcggtggtcatggtgtgggcatcctccaatcggctgggctgtgccatccacacctgtagtagcatcagtgtctggggcaacacctg

SEQ ID NO: 109953 - DNA, 100 bp, Homo sapiens
ggagagggagccgccgcagccgccggcgctgtggagccaggcatggtggtgtgttcctgtagtcccagctactcgggaggctgagcaggagaatcgctgg

SEQ ID NO: 109954 - DNA, 98 bp, Homo sapiens
gaatcagaaatgtcatcctcaggcacgccagacttacctgtcctactcaccgatttgaagattcaatatactaagtaaaataaaacagggtctgttac

SEQ ID NO: 109955 - DNA, 82 bp, Homo sapiens
gcggacggggagctgaacgtggacagcctcatcacccggctgctggagggaactgtggctgcaccatctgtcttcatcttcc

SEQ ID NO: 109956 - DNA, 83 bp, Homo sapiens
tgggctacggactatgggcgaatagctctgaccacccggcgaaggtcaaaatgcagatcttcgtgaaaacccttaccggcaag

SEQ ID NO: 109957 - DNA, 74 bp, Homo sapiens
tcaattcggtgctccgccagccccagcttggcgtcctgagaaatggacatgaaagatcagatgtcaacttcatc

SEQ ID NO: 109958 - DNA, 50 bp, Homo sapiens
gcaagctgttcgatgccacgctgacccagctctggactgaagccaaggtc

SEQ ID NO: 109959 - DNA, 100 bp, Homo sapiens
gtctgcgcagcgtatgcacacgaactgccaaaatatggtgtgaaggttggcctgacaaattatgctgcaggtaaaattatgaaaattccaggcacctgct

SEQ ID NO: 109960 - DNA, 100 bp, Homo sapiens
aacagcctcgagtggcctgcagtcacagggaaccctcaggaagaccttccgggcagagaccagagggaaggccttcctgatgcgcttgcctgctccctgg

SEQ ID NO: 109961 - DNA, 74 bp, Homo sapiens
acctactcgccgaccttcatccgcgctcccgattctcctgaaggggacgtccgatgatgatgtcccgtgtccgg

SEQ ID NO: 109962 - DNA, 100 bp, Homo sapiens
acggagccagcggctgaggaggggccccagcagcccccgaaggccctatcaggacatggagtatgaaagacgccattcaaactcctccccacgacactct

SEQ ID NO: 109963 - DNA, 75 bp, Homo sapiens
gatccagaagtccagagctgaggactgcctgtttgcagactgtcttctgaagattgatgtctatttccttgagct

SEQ ID NO: 109964 - DNA, 100 bp, Homo sapiens
ccaggcagaccttgcagtcaaagctatgactttgcagccgtcctggagtggttcgcggagcgtgtggaccgcatcatcctgctcttcgacgcccacaagc

SEQ ID NO: 109965 - DNA, 100 bp, Homo sapiens
ttcatatcctgtttaccgggccttcctggaatacctatacacagacagcatcagcctttctcctgaggaggcagtaggtgaaaggtgtagcagtcactcg

SEQ ID NO: 109966 - DNA, 75 bp, Homo sapiens
ggcggcggtgtcggcagctgctgtagcgaagagagtttggcgcgatggtgcgggagtatgagttaagaaaaaaca

SEQ ID NO: 109967 - DNA, 139 bp, Homo sapiens
cacttgtggaatgagagaaccgaggaacgaagaaacagacattcaacatgattgcatttgaatgtggtttattgacaatcatttacaatgccgaagagtgctgtagtgagccagcacagtgggtaacacagcaacggag

SEQ ID NO: 109968 - DNA, 98 bp, Homo sapiens
ctcggccaccccggctccctcgtctcgctcagcgcctgcggcgccgccggcggcctgatggcccactgcgtgaccttggttcagctgtccatttcctg

SEQ ID NO: 109969 - DNA, 50 bp, Homo sapiens
aaaaaatttcaggattggtactacaaggatgagctttctgatgttagcca

SEQ ID NO: 109970 - DNA, 50 bp, Homo sapiens
tgagccaagggatcatgccgcgctaccggctctctgaccagttccacgac

SEQ ID NO: 109971 - DNA, 100 bp, Homo sapiens
gaagccagtactacagaagttaggtcaagatgaagacatggatgtcaaatactttgcacaggaagctataagtgctggagctctcaaacactgctgtcct

SEQ ID NO: 109972 - DNA, 80 bp, Homo sapiens
cagaagacgggtgatttctgcatttccatctgagccctggtgcatacaacccagagaagaagccaccgccaaaaattgcc

SEQ ID NO: 109973 - DNA, 100 bp, Homo sapiens
gtgccgcgcagttaggcagcagcagccgcggagcagtagccgccgtgggagggagccatgaagcattacgaggtttgatgctataagtgcagagctgttg

SEQ ID NO: 109974 - DNA, 100 bp, Homo sapiens
gacgatggagggagacgtgctggacacactggaggcgctgggagacagggaagaacgattggcagcactcacagctgctcaacaagaagctatggaagag

SEQ ID NO: 109975 - DNA, 100 bp, Homo sapiens
ccagaagtgtccaaaccacaagttctcaaaactctctgaaaaatggctccctccgagttaaggtcacaaggcacttaaagcattgttgaggtcattggta

SEQ ID NO: 109976 - DNA, 97 bp, Homo sapiens
tggaagaacagtgtcatcagtggctgcatcacgggaggagctattggtttcagagatgaggacggggacttggttgccttttccagtgacgaggaat

SEQ ID NO: 109977 - DNA, 83 bp, Homo sapiens
ccgacatgttcacgcacgggatccagagcgccgcgcacttcgtcatgttcttcgcgccctgtcagggccgggacctgaagctg

SEQ ID NO: 109978 - DNA, 98 bp, Homo sapiens
ggattttcaaatttcacagaaggagcctccatgctggagaaagtatggcaccagaactagcacctctgaaaagtaaaatgatctatgcaagctccaag

SEQ ID NO: 109979 - DNA, 55 bp, Homo sapiens
cccagcggccggccatggtgcagacagagaaaagaacgcttggtgtatgttggta

SEQ ID NO: 109980 - DNA, 103 bp, Homo sapiens
tgtgaagctcaccgagacggcgatccgggcgctcgagacttaccagagccacaagtttggtgccctggttgtcagatgttggaaagcagtaggacggaacata

SEQ ID NO: 109981 - DNA, 100 bp, Homo sapiens
cgtccttctccactttcgccagcccgtgccgcgagcgcggcctgcaggaggcatgtcgggccccaggcctgtggtgctgagcgggccttcgggagctggg

SEQ ID NO: 109982 - DNA, 78 bp, Homo sapiens
aaatgacggttataagaccatttatttctttggagacaaaactatgccagataaagtggccagtgtgtacgaagcccc

SEQ ID NO: 109983 - DNA, 100 bp, Homo sapiens
cgagcagatcctggtcctcgatccgcccacagacctcaaattcaaaggatttttagactctgaggagcagttggagctaatccacattatggaaatggaa

SEQ ID NO: 109984 - DNA, 90 bp, Homo sapiens
caacgccatcaccgacctcatcagtgagctgtccctgctggaggagcgcttccgggacatggacccccggctgattgcatggaaaggagg

SEQ ID NO: 109985 - DNA, 96 bp, Homo sapiens
cgataagtgggttgacctgaccatggacgacattcgaaggatggaagaagagacgaagagacagctggatgaagccgtcgctttcgggttctctca

SEQ ID NO: 109986 - DNA, 100 bp, Homo sapiens
aggggattcagcagctgctgcaggccgagaagcgggcagccgagaaggtgtccgaggcccgcaaaaactctgagatttgcccacctgatgaccttgccag

SEQ ID NO: 109987 - DNA, 100 bp, Homo sapiens
aggaagatatccacacgacaaagtagagaggagctgataagaaggggagtgcttaaggaattgcctgatcaagggctaaactggccagcaccatagcaga

SEQ ID NO: 109988 - DNA, 100 bp, Homo sapiens
ccttacgtcgagaagtatagacctgcctccgcctcagtatcggctctgattggagacttcagctacgggacggacgagtacgacggagaggggaatgagg

SEQ ID NO: 109989 - DNA, 82 bp, Homo sapiens
ctgggagctggaggaaccgcgggaaaggcgtaggaggaggagcaggagttcttccagatcgccaagaacatcaaaaaccata

SEQ ID NO: 109990 - DNA, 90 bp, Homo sapiens
cggcagaggatccagtgttcaccatcctggccccggaagtgacgagtagcacagcccctctatggtttagatggcagtgctgcaaaggag

SEQ ID NO: 109991 - DNA, 87 bp, Homo sapiens
tctggtgtaccaggcgaagctggccgagcaggctgagcgatacgacgacagcccacctgaggatattgaccataaggactcatatct

SEQ ID NO: 109992 - DNA, 82 bp, Homo sapiens
ggagcatggacaagcgaatttcagtcagtcctccacaaatgggaagtgttcctgtaatgacgcaaccaaccttaatatacag

SEQ ID NO: 109993 - DNA, 100 bp, Homo sapiens
tgcagtggcgcctaaagtctgagagagggaagtcgcctctgtgctcgtgagtgcatggggtataaggcagcctggcatcctcgctacaacctcattgttg

SEQ ID NO: 109994 - DNA, 83 bp, Homo sapiens
ggtctgagtggactgtcctgcagacgtaaaattcatcctgatcagaaaaatattaatgcctatgttgtgtttaaggaggagag

SEQ ID NO: 109995 - DNA, 75 bp, Homo sapiens
gggagcggccgagccatcccaattaaacaggtttccaatacttatctacaggaatcgccatgaccccagctctga

SEQ ID NO: 109996 - DNA, 50 bp, Homo sapiens
ccccaatccccggcagctctctcaggaggtgaagatcgagaacttattca

SEQ ID NO: 109997 - DNA, 75 bp, Homo sapiens
gagtcacccctttccagccagcaaacaagtgaagatagtgatccggggagacaggaacacgggcaagacagcgct

SEQ ID NO: 109998 - DNA, 100 bp, Homo sapiens
tcatttgaaagatggtgttcctggattgaatattgaagaattaatagagaaacttcagtctggaatggtgattcttgttggatctagccttggagggtgg

SEQ ID NO: 109999 - DNA, 100 bp, Homo sapiens
cagggatcatcctgatattgttgattcatttatgcaactcctggcacagccactggccctgtcctgctgccattcaccctcaattttaccatcactaacc

SEQ ID NO: 110000 - DNA, 50 bp, Homo sapiens
ggagccacatgatggacgtccaggcacgtgacacaagctgacctcaagag

SEQ ID NO: 110001 - DNA, 101 bp, Homo sapiens
attttctgcagaagatgaagctttgagtaacattgccagagaggctggcagtgatggtgaaagcataggaaactgccccttttcccagaggctcttcatga

SEQ ID NO: 110002 - DNA, 100 bp, Homo sapiens
atttaatcctgagtggtacaaaggagaaccagactcagaaggtgtggacatcaagctgggcgtgtgtgctaatggacttctcatttacaaagacagactg

SEQ ID NO: 110003 - DNA, 100 bp, Homo sapiens
tgaactggaggctgagtacgacagcctcaaacaggagctggagcagctcaaagaggcatttgacattatcacagactgacatggcagcattaacaggagg

SEQ ID NO: 110004 - DNA, 100 bp, Homo sapiens
gtgaattctttgatttcaaaatatggatttcaggagcagcttctttactattctggaacttttcaaagcctgactctcttcttgaaacagtggagcatca

SEQ ID NO: 110005 - DNA, 90 bp, Homo sapiens
cggcggcagatgagagcatccaacggaagctgttttaggttatgtgaaagagatgtttcctcatctctaaggcttaccagaagctctgat

SEQ ID NO: 110006 - DNA, 51 bp, Homo sapiens
cccgctggcgcgcagcctcagctagagagaagaagaaggaggttcctgctg

SEQ ID NO: 110007 - DNA, 100 bp, Homo sapiens
gaactggatgccaactctgcccttatggaattggacaaaggcacaccgtccctgcagtctggtggaagaacgcccaaggcaaagaccagatgtggtatga

SEQ ID NO: 110008 - DNA, 74 bp, Homo sapiens
agtgcagaagtccagggaatggctggcccagcagctgagatcacagctggcagagaggctgatgacatcgtgaa

SEQ ID NO: 110009 - DNA, 80 bp, Homo sapiens
ctgcaccagcgccttgatcgagtacttgagatgtggacgagtgctcactagcagaaaaaacctgtgtgaggaaaaacgaa

SEQ ID NO: 110010 - DNA, 109 bp, Homo sapiens
ggccaggcgattcggtgaagcgattcctgcaggcgttggttcccctctttgacctggtgctggagaatctggtaaaagcaccattgtgaagcagatgaggatcctgcat

SEQ ID NO: 110011 - DNA, 100 bp, Homo sapiens
tggggcatcgacgatctccatatttcattgcaagacctgatggccaaaagaaaggaagaaaatttttcctctcctaaaaatgccaaaaggccaagacaag

SEQ ID NO: 110012 - DNA, 75 bp, Homo sapiens
ctgaggcctggagaggttaaagagacccgttcagagtcctacagtggcaggccagaaatcagcgaggagctcaag

SEQ ID NO: 110013 - DNA, 135 bp, Homo sapiens
caagttggataaaaggaggacctctcgccaagggccccaatgagtggcacacagtctactatcaccgacagatgccttcaattaagttgcagagttctgatggagagatatttgaagttgatgtggaaattgcca

SEQ ID NO: 110014 - DNA, 101 bp, Homo sapiens
tcaaccaagaacgtcaaacactccaacgattgagagcatttaaagatcaaactgaaaatatggtccactaaccagcagcatcagcatcacctgtgagattg

SEQ ID NO: 110015 - DNA, 96 bp, Homo sapiens
actggtggcgtcggcccaggtcggcgggaaccccctgaaccggaacccctgagccccttccagtgctgcctgaggtgccctctacctgtgcctgcc

SEQ ID NO: 110016 - DNA, 75 bp, Homo sapiens
tagctgaaataacccttgatcctcctcctaattgcagtggatatcaaagtattgcagagtgccttagcagccatc

SEQ ID NO: 110017 - DNA, 100 bp, Homo sapiens
gctgagtgaggccgaggccgggaggccgtgcccggaggttttagctaaagaagatactgaggcagctattcaatcaatattatacaaagaaaattctgta

SEQ ID NO: 110018 - DNA, 83 bp, Homo sapiens
tcagtttgttgtgcttgtcaagatcaggtagttgatgtcacttggcgatattcctgcaaacatgaagaggtgattgccagaag

SEQ ID NO: 110019 - DNA, 75 bp, Homo sapiens
cgcgaccacagctatgcgaccgaagcgtcatcacgtagacataaccaagaaacttcacccaaatcaagctggcct

SEQ ID NO: 110020 - DNA, 100 bp, Homo sapiens
tgaatcatgaagctactaaccagagccggctctttctcggcgccaagcccatctttgtgtgcttgcatccaactgtgatgagcctatgtatgtcaagttg

SEQ ID NO: 110021 - DNA, 74 bp, Homo sapiens
gaggggccgcgccgccaccgtctgaactaggatgtcccgacatgaagtatctgctgaaggtcaacgaaatcaag

SEQ ID NO: 110022 - DNA, 90 bp, Homo sapiens
ctggactcatggaggctgagcatttattcaggaaccttccctgtatactgtcaaagccatcctgattctggacaatgatggagatcgact

SEQ ID NO: 110023 - DNA, 50 bp, Homo sapiens
aaaatgtcaacaaattgatggatggaaatcatattatgtagaatacttgg

SEQ ID NO: 110024 - DNA, 80 bp, Homo sapiens
ctaactggcaaccaaaggttgcaccaacaaccgcttggaatgctgcaacaatgatatttgttcagtcgaatcaaggtgaa

SEQ ID NO: 110025 - DNA, 96 bp, Homo sapiens
cacagtgcaaggaagacgccgagggaaggagacttggtctgaaagatgccacattcctgcagcctctcttggtgcagtggaatacagtcttgggcg

SEQ ID NO: 110026 - DNA, 75 bp, Homo sapiens
agaactcttaacggccgatgcagctcttccaaagctaaggcacatccatctggaaggcctttttcttcaccccca

SEQ ID NO: 110027 - DNA, 51 bp, Homo sapiens
gggaggagactcctgaccctcagaatgcactctacacccccaagtgcatat

SEQ ID NO: 110028 - DNA, 83 bp, Homo sapiens
aaaacatggcgtctgccctggagcagttcgtgaacagtgtccgacagctctcagctcaagacaatgcagatcttcgtgaagac

SEQ ID NO: 110029 - DNA, 49 bp, Homo sapiens
ttttgacttgtttggaggtgttgatcaccctggaggagaagaggttctg

SEQ ID NO: 110030 - DNA, 100 bp, Homo sapiens
cataataattcagatggagaatatatggctggacagctagctgcttatggctataaaattacagtgttgacctaaccaatgaagaaacaactgattccac

SEQ ID NO: 110031 - DNA, 147 bp, Homo sapiens
cggctcccggtctcggtgtagctgccgtggttgccaggagagctgcgccggcgagaagcggccgagccagcagcagtggtagtcgctcttctaaaacttttaaaccaaagaagaacattccagagggttctcaccagtatgagctct

SEQ ID NO: 110032 - DNA, 75 bp, Homo sapiens
ctgcaggcggagaagaagaagatgcagcagaacatccaggaggctagcgaagcgtacctggtgggtctgttcgaa

SEQ ID NO: 110033 - DNA, 74 bp, Homo sapiens
cggagctgacggtggaggttcgcggctctaacggggctttctacaagatggagaacatcattgcaacagtaaga

SEQ ID NO: 110034 - DNA, 75 bp, Homo sapiens
cctggtggaacagttgttgcagcaagcgattcagtatagactatggtcgaagaaaaagaaatgcttttaggattc

SEQ ID NO: 110035 - DNA, 100 bp, Homo sapiens
ggatcacccctgggtttcatctgccactgccccaagggagaaaactggttgtcctggatgtttgaaaagttggtcgttgtcatggtgtgttacttcatcc

SEQ ID NO: 110036 - DNA, 100 bp, Homo sapiens
gttggcgtggtggtcccggagtgatcctggcagccggtggggaagacaaggaggattgccaacactcctgatagctgaatgtgtgctggtttacatgact

SEQ ID NO: 110037 - DNA, 100 bp, Homo sapiens
gtgatggttggcgacataggaaaaaaactcgggcagaacggtctggataatggcaatggaagagttaatagttgaacttcgtctctttcttgaactcctg

SEQ ID NO: 110038 - DNA, 80 bp, Homo sapiens
cttccaagggacaaggtgtcaacaatgtgccgattggtgaggaaatgagccagaacagtttcataaaacagtatctggaa

SEQ ID NO: 110039 - DNA, 88 bp, Homo sapiens
cgtgttcgcaagcatcctagcagccttctccaaagccacattggatatcaaagtattgcagagtgccttagcagccatccgacatgcc

SEQ ID NO: 110040 - DNA, 75 bp, Homo sapiens
cctcctccgaggtggcgcggcacctggaacaggaaatatagtggtcattatgattagctatccaaaaggaagaga

SEQ ID NO: 110041 - DNA, 90 bp, Homo sapiens
gacaaatactgtcagactgaccaccatcatcacggatgctgtgaaccagtgctgcttttgacacaaaaacggggttacgtgtggcagtga

SEQ ID NO: 110042 - DNA, 83 bp, Homo sapiens
ctgtgcaatatggcaacgctcaggttgttcttcgtgggctcccgggagggccacctaccggaccttctgtccatgatccacat

SEQ ID NO: 110043 - DNA, 83 bp, Homo sapiens
ggagaaggatgacaccggagtttgacgaagaggtggtttttgaggaatgattatcggacactgcgccaggggattatcgacat

SEQ ID NO: 110044 - DNA, 97 bp, Homo sapiens
tatttttggacctgaaacagaaattctggaacacctatatggctcttgtcaggatggtgaagctgttcatcggaaacctgccccgggaggctacaga

SEQ ID NO: 110045 - DNA, 75 bp, Homo sapiens
gtcctcttcctgctgctctgggttggcatctacgtgtgagcacccaaggtgtaaactggagttgctggtgggcag

SEQ ID NO: 110046 - DNA, 125 bp, Homo sapiens
ccaaccaaccccacatccctcccggctgtagccaagaactattcggttctctacttccaacagaaggtccccttcccctgagcccatctacaatagcgaggggaagcggcttaacacccgagagt

SEQ ID NO: 110047 - DNA, 101 bp, Homo sapiens
ggaccggaagtgctccagaactcaagaaatcttcccaaggctgcagacaccgacggatttgctttgggagccagagtagctgccgccaccagagtccggag

SEQ ID NO: 110048 - DNA, 96 bp, Homo sapiens
cggcagcgccgctccccagggagggagtccgcagcctgaggtgtttgatcagtatgtaaagaccagggcagaggaagaacgcagggaaaagaaaaa

SEQ ID NO: 110049 - DNA, 100 bp, Homo sapiens
cgtatgatggtggtggtggtggtgtcttcctgtctcaacgatacctattttctagtgctgagatcctgagacaatgcaatgtctcaggctgtgcagacaa

SEQ ID NO: 110050 - DNA, 75 bp, Homo sapiens
tctcagccacagccagcatggccgtcccactgctggagttcctgtccaccctgggcgctgcctatggcacagcca

SEQ ID NO: 110051 - DNA, 100 bp, Homo sapiens
aaggagcaagagcaagatcaccgtgacatccgaggtgcctttctccaaaagcttgccaattctgtaactccttgggatatcttgctgagcttaattgcag

SEQ ID NO: 110052 - DNA, 90 bp, Homo sapiens
caggattcccacgctccactcagggactcaaggaggaagagcaagcaggccctgagggactataagaaggttcagatccagctggagaat

SEQ ID NO: 110053 - DNA, 82 bp, Homo sapiens
gattccgggaggcggtggcggccggagacgtggatttgcctcagacaatgcagatcttcgtgaagactctgactggtaagac

SEQ ID NO: 110054 - DNA, 83 bp, Homo sapiens
gttcccccaaatgtctgactctgactctcggactgagaaacgcaagaggcagaagaggcctggaccttggcgcacacagaccc

SEQ ID NO: 110055 - DNA, 100 bp, Homo sapiens
gggggctcctgtttctctccgccgcgctctcgctctggccgacgagtggagaaaacttttatcggacgttttcgccgcatcatggactcctcacagaatg

SEQ ID NO: 110056 - DNA, 96 bp, Homo sapiens
cggggctgctgggctgcaagcagtgcggcgggggccgcgaccaggacgagcggttgctgatgctattagaacaagccttggaccaaaaggaatgga

SEQ ID NO: 110057 - DNA, 130 bp, Homo sapiens
ggagcaagaaaaagagccctggaatatgaagagacatgagatggtggatgaacccccaggtgacttcatggtcatgacgattttcttcaatgtgagcaggcggtttggctatgttgcctttcaaaactat

SEQ ID NO: 110058 - DNA, 98 bp, Homo sapiens
cgggacccaggaccatgtctctgtctcgctcagaggagatgcaccggctcacggaaaatgtctataagcaaacggggattcagcgtccgatcctttgg

SEQ ID NO: 110059 - DNA, 100 bp, Homo sapiens
cgattctacatgattcagtccttcacacagttccctggaaatgacgtagacaagtttggcaacgagatcacccagctggcccggcccctgcctgtggagt

SEQ ID NO: 110060 - DNA, 100 bp, Homo sapiens
gtttaataatgatagaatgaagaccacaataaaagagacctctacttagctcagcaattcttaccttgcagttctgccttgagctaaatggacttgctgt

SEQ ID NO: 110061 - DNA, 90 bp, Homo sapiens
ggcgccagcctgcgaaggtggcggcgctgctgctcgggctgctcttggaggttctccttccccagtcaccagttgctcgagttagaattg

SEQ ID NO: 110062 - DNA, 75 bp, Homo sapiens
ccagttctgggagcggagcgccgccgctgttgccgggcaacgcgggactgcatcatgctctgttgcctgaacagc

SEQ ID NO: 110063 - DNA, 100 bp, Homo sapiens
cagacccggacgacccccattgctgagccagcggagctgcttggacttcctcgttctgcccatcttcctaacaaggctatggctgataacagcagtgatg

SEQ ID NO: 110064 - DNA, 50 bp, Homo sapiens
tataataccaagaaagccccacttgtgaacagagtatctgccaagcccgg

SEQ ID NO: 110065 - DNA, 75 bp, Homo sapiens
attcatctggatcttcagatgcacatgagaggccccctttcatccctgaaggagtggtggctcgcaggaagagga

SEQ ID NO: 110066 - DNA, 51 bp, Homo sapiens
gtcaccgccatggcaggcatcaaagtttgaaggatgacctctaggaagaaa

SEQ ID NO: 110067 - DNA, 82 bp, Homo sapiens
ccatatatgtcattgggcagggatcagatgaggtttatataactttccaagacaaggaagttgtgcaaagcctcacagctac

SEQ ID NO: 110068 - DNA, 82 bp, Homo sapiens
ctggagtgcgtgggggaccggctgttggcggattttgcaagaacgaggctcaaggatgtgagggacacagtattgacagctg

SEQ ID NO: 110069 - DNA, 83 bp, Homo sapiens
aacatcgtggccctgtacgacttccagctttccccagacatggccaacaagggtccttcctatggcatgagccgcgaagtgca

SEQ ID NO: 110070 - DNA, 101 bp, Homo sapiens
agaacatcggcaatgggattatttcctccccactgactggaaaggcagcacagcattctcagaagcagtctactgagctcttccagtgcatgtacttcaaa

SEQ ID NO: 110071 - DNA, 75 bp, Homo sapiens
gacaagccgttatgaaagagatgaaaagtggggattttgccctgatcccaggaatgcagtggtgtcttttgaaag

SEQ ID NO: 110072 - DNA, 51 bp, Homo sapiens
gaacttcttatgaatcaaaaaaggtggtactgtgaaggcaaggagcttgaa

SEQ ID NO: 110073 - DNA, 100 bp, Homo sapiens
tgttaaggattccaagtaactcttatttgccttggaatggatggctttggccaaccagttggcattcttggacgccctgccacagcatatggattccgcc

SEQ ID NO: 110074 - DNA, 90 bp, Homo sapiens
ctgtgacctctgtgcccctggctactatggctttggccccacaggctgtcaagcaatcagttctcaacttggacccatccatcctccccc

SEQ ID NO: 110075 - DNA, 101 bp, Homo sapiens
attcattaagcagtgcagaaacacagggtctgacatttcaggaggtggagaacttctttactttcctaaagaacattaatgatgtggacactgcattgagt

SEQ ID NO: 110076 - DNA, 100 bp, Homo sapiens
caatgacgagggcctggagtgtgtgcccactgaggagtccaacatcaccatgcaggatccctccccgcggcggcgatggcccgagccatgagagtgagga

SEQ ID NO: 110077 - DNA, 82 bp, Homo sapiens
gcctcgctcgtctgcctgctgcgccacggcggccggacggtggagaacatgagatcagtcgcatcgaatacattcattcaaa

SEQ ID NO: 110078 - DNA, 100 bp, Homo sapiens
caaggctcttccctgaccattttctactgtccctgcgcgagggttttggccaaattgggcgagggcacaaaataaccacttaccccttctcaccgaggaa

SEQ ID NO: 110079 - DNA, 100 bp, Homo sapiens
cagcaagaaccagagcatggggaagacactattgctaaagtcaaaggttatcaatactctggctgaccatcatcatcgtgggactgactttggtggaagt

SEQ ID NO: 110080 - DNA, 100 bp, Homo sapiens
ggatgggtatctactcgcgcatcaggcatgaagaagaatatctatggcaatatcgaggacctggcagaaatactcagtgtcctcagtcacagaaacatca

SEQ ID NO: 110081 - DNA, 82 bp, Homo sapiens
tgacaggaagcagagtggctatggtgggcaaactaagccgattttccggaaaaaggagagctcaaaggatggctactgacat

SEQ ID NO: 110082 - DNA, 75 bp, Homo sapiens
ccgccgcgcagcctgcgttttctccggtacaggttgaggctactaagcttaccaataaaactttaagcaatagca

SEQ ID NO: 110083 - DNA, 100 bp, Homo sapiens
atgtcgttatggtgggaggattgactgctgctggggctgggctcgccagtcttggggacagtgtcagcaaccagacataagttcagaggaatctgtctcc

SEQ ID NO: 110084 - DNA, 108 bp, Homo sapiens
actgagcctgttggaggaactggcccggaaacaggaggacgcccctggccccaacatggcccgtcgctctcagagctcctcgcagggggacaacccactggcacccgg

SEQ ID NO: 110085 - DNA, 109 bp, Homo sapiens
gttactgccgcgccaccgagtccggaccggagactttggggcctaactaggcgaggattaaatccaccacacagggtgaaatctatctccatgacaacattcacacaac

SEQ ID NO: 110086 - DNA, 100 bp, Homo sapiens
agacatgagcaagaaaagcctctgggagcagaagggaggctccaagacctcatcaacaattaaggtttccggggagttggtgtctgtggcacatgcgctt

SEQ ID NO: 110087 - DNA, 100 bp, Homo sapiens
cagagacgtctttgacaatagatggtgtggtgtttgtgattgatcctggatttgcgaaacagaaggtctgccagcttacatttacccaaactgtccatta

SEQ ID NO: 110088 - DNA, 90 bp, Homo sapiens
aatgaatgaaagtaaacctggtgactcacagaaccttggttatcttgacgaatcagattacaacccatctgagtggagccctggcttctc

SEQ ID NO: 110089 - DNA, 82 bp, Homo sapiens
agaaagtggtgaatcccctgtttgagaaaaggcctaagaattttggcattgatttttgatgaaattgagtcatgaaactgta

SEQ ID NO: 110090 - DNA, 75 bp, Homo sapiens
agtgcgcatggacgaggctcgggataacgcctgcaacgacatgggaccatggccaacctggagcgcaccttcatc

SEQ ID NO: 110091 - DNA, 73 bp, Homo sapiens
aatgctccttctcctggagacgcaactcaagtgaaactggaacgccaagctgaagaagaacgaatacggaagc

SEQ ID NO: 110092 - DNA, 90 bp, Homo sapiens
gcggtgtcccacctgccgcccttcttcgaaccgccacgagatgctggctgtggagcccatcaatgaactgctgcgggacaagtggcgcaa

SEQ ID NO: 110093 - DNA, 98 bp, Homo sapiens
gctggaggtgggatccacacagctcagaacagctggatcttgctcacactctttcaagagaagcttccttgaattttctcccaaactggttggcttga

SEQ ID NO: 110094 - DNA, 100 bp, Homo sapiens
aacctggtagtggccgggacctcgcagctctacgtgtaccgcctcaaccgcgacgccgaggtgcccctgggcgctgggattgctctagcctgtaagtata

SEQ ID NO: 110095 - DNA, 82 bp, Homo sapiens
gccgccggtcctgaccaccgtgaacggacagtcccccccagatcaggatcctcatgaccagccaaagagaagaagaattagg

SEQ ID NO: 110096 - DNA, 75 bp, Homo sapiens
ccctcgcaacctggcagccgccgccgtggaaggaatgggtaccacagaccatgtcatcgtcctggcgtccacgaa

SEQ ID NO: 110097 - DNA, 100 bp, Homo sapiens
cctgaagacaaaaatccagaagtacaagcagtctgctagatgtggatgatgagcaaaactggaccaagcaaatgaaggaaacaccataggtgtggcaaag

SEQ ID NO: 110098 - DNA, 100 bp, Homo sapiens
ggagaagaggaaacacaagaagaaacgcctggtgcagagccccaattcctacttcatggatgtgaaatgcccagtctagagcatgtttggaaaggattca

SEQ ID NO: 110099 - DNA, 75 bp, Homo sapiens
cgatggagcagcgaaaacgtggttgtagagttccgtgactcccaggtgaaatgacaatggatgctctgttggctc

SEQ ID NO: 110100 - DNA, 74 bp, Homo sapiens
caaaatagagtgtgaacaagcaagtttcaagatttctttaagaaaactgtcgctgaaaagcaggagaagagaaa

SEQ ID NO: 110101 - DNA, 75 bp, Homo sapiens
atctggcccaacgatggcgagggcgccttccatggagacgcagaaaacgcttttgctgtgcctcaggatggggga

SEQ ID NO: 110102 - DNA, 75 bp, Homo sapiens
tatggcctaatgaacaacttccaggctttcttgatcatggatggtgaagatataccagatttttcaagtttaaag

SEQ ID NO: 110103 - DNA, 100 bp, Homo sapiens
aaaagaggtcagatgatgacagctgtgtccttaacaaccaggccccagttggtcgcattatgtttcagctcttctcagacatatgtccaaaaacatgcaa

SEQ ID NO: 110104 - DNA, 74 bp, Homo sapiens
gaatatgggtcgaccattccaaaaaaatcgggagcgtaaccacgctgaaagcactgaacctaagacactgccct

SEQ ID NO: 110105 - DNA, 96 bp, Homo sapiens
agtaccctgatggagtcccttgcaggctgtacgtgctgaagctgtcagatgacattgggaactttggggaggtgcggctgcccctccttggctgcc

SEQ ID NO: 110106 - DNA, 112 bp, Homo sapiens
cagagggacacgctggtgcatctgtttgccggaggattacaggagcttattaatcataagaaggctgaggacacagagaagaaagatgagcccagcaaatataatcagcaac

SEQ ID NO: 110107 - DNA, 99 bp, Homo sapiens
agaaaaaacaaggagagaaatgacagccaaaggttctacaggaatggaaattctgctgtcaacattagaggcataaacttggaggaggcagtggagaga

SEQ ID NO: 110108 - DNA, 73 bp, Homo sapiens
agtgagtcggcggctgatttagaaggaggttcaggctacggtgagccgaaggaacgggctacctgtgcaggct

SEQ ID NO: 110109 - DNA, 100 bp, Homo sapiens
taggcattgaccccttgtccagttactctaacaagtctggaggttaccttccgaacaagaatctatcactgtaatattaacagccaaggtgtgatctgtc

SEQ ID NO: 110110 - DNA, 90 bp, Homo sapiens
tttacttttaatcatctttattatctcattgaagcttggaattacatagctggaaaggatcttacagtgaaagcaagttgaatacattgg

SEQ ID NO: 110111 - DNA, 98 bp, Homo sapiens
ccaaaagaaaccagctgttcttgtattttttgcatccgtgcgatctggaggaagtagccaagtgtttttcatgaccctcaacagaaattccatgatga

SEQ ID NO: 110112 - DNA, 75 bp, Homo sapiens
tacctgtggaaaacatccttggagaggtcggagatgggtttaagtgctccagcttttctgcagctcacccaaggc

SEQ ID NO: 110113 - DNA, 75 bp, Homo sapiens
gaaactctacgaggataaccagacaacctgcaatgcttcttttgccacccgagaccgtctgcgctcccacctggc

SEQ ID NO: 110114 - DNA, 98 bp, Homo sapiens
cgggcgccatcgagccttggcggcggacgtgcagccgctcgtgtttggtgccatggtgcacagggatgaggccttcgagaccattctcagccagtaca

SEQ ID NO: 110115 - DNA, 50 bp, Homo sapiens
gcgacagctagaattggaaaaccttacatgcagattgctgtctgaagctc

SEQ ID NO: 110116 - DNA, 75 bp, Homo sapiens
gttttataggaccagcaactttgataattatgggaagtaagcaatggcatagaaaaaaaaggaaagaaaaaatct

SEQ ID NO: 110117 - DNA, 96 bp, Homo sapiens
caagtcccatcactggtcgcactgagggtgaagtggcaggaggaggaggaggggctccggctggtctgtggtgagactggggcagcacctactccg

SEQ ID NO: 110118 - DNA, 90 bp, Homo sapiens
acagtttccacgagagcacagaagggaaggataagcacattgaagaagtgcggaagaacaaagaatccaaagaccctgctgacgagactg

SEQ ID NO: 110119 - DNA, 82 bp, Homo sapiens
ctgtcgcggttgccaagcgctcggcgcttggcgctggcgctggccaaggcggtgtcgtgaaaactacccctaaaagccaaaa

SEQ ID NO: 110120 - DNA, 122 bp, Homo sapiens
gtggaggactacagagccggtgatatgatctgtcctgaatgtggcttggttgtagttcaatcaatgtactgaatataactgctgaagaaattaaaccaaatcaggttggaggagaatgtaca

SEQ ID NO: 110121 - DNA, 74 bp, Homo sapiens
agcaggttgcaggtgaacatggccttgagcttcttggacacttaatgattgttggcaagaaatgtgctgctgat

SEQ ID NO: 110122 - DNA, 100 bp, Homo sapiens
ctcggagaccccgcgccgacggctgctcaaacatcaggatgttaactcattccagcaaactacaaagtggattgatgatgtcagaacagaaagaggaagt

SEQ ID NO: 110123 - DNA, 75 bp, Homo sapiens
atcgggctgaagcgactgagtccgcgatggaggtatggacctgtctgccaatcaggacgaggagaccgaccagga

SEQ ID NO: 110124 - DNA, 83 bp, Homo sapiens
agagcattgagaagttcagctgttgtagagccatcactggtgcaagctatatttaacggagatcctgatgaagttcgagcact

SEQ ID NO: 110125 - DNA, 97 bp, Homo sapiens
gcgaagagcggcctcctgaaggaggggaagggacgtgggggcggccacggcagacgctgaccggaaaggagattgagattgacattgaacctacaga

SEQ ID NO: 110126 - DNA, 100 bp, Homo sapiens
ccggaaacttaggggccacgtgagccacggccacggccgcataggatcgctacggttcctactgatccgagctctgtgactcaggcttacgatggtgacg

SEQ ID NO: 110127 - DNA, 74 bp, Homo sapiens
cgccaagaagcacggcaccaaaaacaagcgcgcttcttctcagcctgttgataaccatgttagcccatcttcct

SEQ ID NO: 110128 - DNA, 75 bp, Homo sapiens
ggggagcgtccggagctagctggatcctctaggcagaatctggcaatgggggcaggagctgttggagctttgcag

SEQ ID NO: 110129 - DNA, 100 bp, Homo sapiens
acgtcctcccacgtaccatttagaagaatgtcgagtggtaaagtccacttcttacaccaaaatagcttcatcatcccgcaggagcaccaccaagagccca

SEQ ID NO: 110130 - DNA, 99 bp, Homo sapiens
tggacgcaaagacaagggagaagctgtgtttcttggacaagctgagcattgaggatttcacagcatatggcggtgtgtttggaaacaagcaggacagcg

SEQ ID NO: 110131 - DNA, 100 bp, Homo sapiens
gagggatgggactggaaatcaaatgttacagcactgctcagcacgcaggcatgtgaggaagctgggcttaaaggagactccagcaaatggagagacagac

SEQ ID NO: 110132 - DNA, 90 bp, Homo sapiens
acttcatgcttagatacatgtataacaagggacaacaccttccatccacatatgggacgccatgaccaaacacaccctctccatgctgcg

SEQ ID NO: 110133 - DNA, 88 bp, Homo sapiens
ccactggatgaagaagcgcggccttcacacatcccagccggtgactgcagtgagtgtttctgaaagatctatccagcactccgatggc

SEQ ID NO: 110134 - DNA, 75 bp, Homo sapiens
ctgaaacgatcctctcatctcagcctccaaaagtgctggcattacagattggaggtggacacaaaggaagaggca

SEQ ID NO: 110135 - DNA, 100 bp, Homo sapiens
gtcggcggcccctgcgggcgccagtcagcacaaacgtgcagatatctgatagccctttccgttgcactcaagaggaagcaagatcattagttgaatcggt

SEQ ID NO: 110136 - DNA, 101 bp, Homo sapiens
gggccggagcgcctccttcgcaggcttcagcagtgcacagagccggaggatcgcggagggcatcctgaagactgcgaaggtgctggtggaggacaccaagg

SEQ ID NO: 110137 - DNA, 50 bp, Homo sapiens
gccatcgttgctgccttcttcgtcaaggagcgggacggtatgcgggccat

SEQ ID NO: 110138 - DNA, 100 bp, Homo sapiens
acgtgggcggtgggccccagccccacagaccagcccagcattcagttacagaatgtctgaaggggacagtgtgggagaatccgtccatgggaaaccttcg

SEQ ID NO: 110139 - DNA, 89 bp, Homo sapiens
gagctggcctggagtccgcggctggccgcgtgagtagcaggaggccactgtctgcagctcccgtgaagatgtccactccagacccaccc

SEQ ID NO: 110140 - DNA, 99 bp, Homo sapiens
gctggccgcggcccgcctcagcatctggtacagccgacctacaacacagcagtcccctcaggatgagcaggaaaagctcttggatgaagccatacaggc

SEQ ID NO: 110141 - DNA, 74 bp, Homo sapiens
ttgatatctggggccaagggacaatggtcaccgtctcttcagttcaaggagcagggacaagttacaggaatgtt

SEQ ID NO: 110142 - DNA, 101 bp, Homo sapiens
tgtaacccagcctgtttcacttcttgttactgtaaaatggggaaaggagaaatttgaaggtgtagaattgaatacagatgaacctccaatggtattcaagg

SEQ ID NO: 110143 - DNA, 100 bp, Homo sapiens
tgttccggtgcctggggaatctacgtgggtggacattgaagtggacctaattcggttttccttttaaaagccccgcaaacaaaagtcgtttaaaacctat

SEQ ID NO: 110144 - DNA, 97 bp, Homo sapiens
tacaaagaacatgctcacatcttcaggtgcctcattcacatacgtcaaggaaattgagggaccacttgtacggtggctgaaagtgaattttagtgaa

SEQ ID NO: 110145 - DNA, 98 bp, Homo sapiens
ctggaccgcctgcgcctggagaggatggaccgcatcgagaaggagcgcaagcaccagaaggcaaatcctcccccagtactggtcaacacagatagctt

SEQ ID NO: 110146 - DNA, 103 bp, Homo sapiens
cttcggtggactccttcggcagtccacccaccgccgccgcctcccagcggaaggagagttttacatggaagtggcttacagaaacttggcgctgaggtgcagg

SEQ ID NO: 110147 - DNA, 90 bp, Homo sapiens
gtacaagcttttgtccaaaatggcacagtgagcacaaatgttcccaaagagaatattacgtctgattctctcctaaccgcaagcatggct

SEQ ID NO: 110148 - DNA, 100 bp, Homo sapiens
caaggtctatgctgacaagaggctggacgcacaaggttttggctacgggcctccacctccaccgccagatcagtttgcccctccgggggttcctcctcca

SEQ ID NO: 110149 - DNA, 75 bp, Homo sapiens
ccgcaaccaagacccagcgagtgcagcggcggccgccgaggaggtactccaaagattcaggtttactcacgtcat

SEQ ID NO: 110150 - DNA, 82 bp, Homo sapiens
ctcccaggctcaagcagtcctaccatgtcagccttcccagtagctgggaccacaggaaagtgactattttaccccacaggga

SEQ ID NO: 110151 - DNA, 75 bp, Homo sapiens
gcgaggccaggccgctctggaccgtctcaaggtgtcgtcggggaattcacaagtgcattgaatgtcattccaaaa

SEQ ID NO: 110152 - DNA, 74 bp, Homo sapiens
gcggctgaaggcgatccgcatgccggatggagtgctgtgatgtgccagccgagacactctacgacgtcctacac

SEQ ID NO: 110153 - DNA, 75 bp, Homo sapiens
caagctcctacgaaagaaagctcatcgaggtcttagtggtgcaatggctagtataagcgtgcgttcgagtacccc

SEQ ID NO: 110154 - DNA, 50 bp, Homo sapiens
ctttttgtcagattatcaggatgagggatatcaacttacgagtgaagtgg

SEQ ID NO: 110155 - DNA, 75 bp, Homo sapiens
cagcccttgaacggagaatagagtacattgaagctcgggtccgtaaaagccctgggctcagccagagcagggcag

SEQ ID NO: 110156 - DNA, 100 bp, Homo sapiens
tcaagcttgaatgtgtcaaaaccaaacaccctcagctccacattgagagcaaaatctacaagatgatgcagggaggagagttttatggacgaggagcccc

SEQ ID NO: 110157 - DNA, 130 bp, Homo sapiens
tttggaaacacactggaggacaaggctcgggaactcatcagccgcatcaaacagagtgaactttctgccaagatgcggtctctggacactatgggcacacgactcctcccagctctgtttcttgtcctcc

SEQ ID NO: 110158 - DNA, 99 bp, Homo sapiens
agcaggacaggacgaagccggagtgtaggcggcagaggattcgctcccagagcagctgcggccaggatgtacagttacccagcacgtgtacctcctcct

SEQ ID NO: 110159 - DNA, 100 bp, Homo sapiens
atggtccacgagggcaaccagcgctgggacaaccttcagaggcgggtcacagccgtcctgcggagactcaggacccgtcgcagcatggtgtttgccaggc

SEQ ID NO: 110160 - DNA, 97 bp, Homo sapiens
ggaagaattcattagcactttacaagcccagctcagccagacacaggcagagcaagctgcacaggactttgcctcccgggccaaactggcagttcaa

SEQ ID NO: 110161 - DNA, 82 bp, Homo sapiens
tcgaggcccggtactacccaaacgtcagtcgaatcacaggcaggagtggatcaatcttcctgtcctacaactgacaaaggat

SEQ ID NO: 110162 - DNA, 51 bp, Homo sapiens
gtgaaacaccactgaagcattgccaaggttgaaggggcccggccaggactc

SEQ ID NO: 110163 - DNA, 50 bp, Homo sapiens
ctttacctcgctgaccctatgaaggtttacaaaagatactgcaaggttca

SEQ ID NO: 110164 - DNA, 75 bp, Homo sapiens
cgaaactttcaccgcgagcgggtgaaatgacaatggatgctctgttggctcgattgaaacttctgaatccagatg

SEQ ID NO: 110165 - DNA, 100 bp, Homo sapiens
gccgtggatggcataccattctcatcgttgtcctggaatcaagatgtgagaccaagaaattatttctgaagaaagaaatttatgaaatagaatcaaccca

SEQ ID NO: 110166 - DNA, 50 bp, Homo sapiens
ggagagcctactgagcagcctgagtggtccagtgtgaaaaaagccagtat

SEQ ID NO: 110167 - DNA, 75 bp, Homo sapiens
ccgtccttctccactttcgccagcccgtgccgcgagcgcggcctgcaggaggtaccagttcttagaggatgcagt

SEQ ID NO: 110168 - DNA, 100 bp, Homo sapiens
caacgatggcctcaagttctcccaggagtatgagcgtgccaagggggccttgcaaagcatcactgcaggccagaaagtcattagcaagcataagaacggg

SEQ ID NO: 110169 - DNA, 82 bp, Homo sapiens
ttatcagcaacagaagacttcggttcctgttcttgagctgttccagacaactataaggtgatttttctgcaaggaggtgggt

SEQ ID NO: 110170 - DNA, 90 bp, Homo sapiens
ggccacggagcagagtccctcacccccaccagctgtagctgaacgtctggatggtggagaagagcagcggagcgtgctttggacaccatg

SEQ ID NO: 110171 - DNA, 111 bp, Homo sapiens
ggaagccatggactctaccaagtctgaacccctgaagggatcaccagagaataactgaagtgaagtgatggactccgatttggagagtagtaagacgtgaaaggaatacac

SEQ ID NO: 110172 - DNA, 82 bp, Homo sapiens
ggggagtcgtaaacaaccctgaagagaacagccaggcctgcacttctcagaacttctggatgagttttcccagaacgtcttg

SEQ ID NO: 110173 - DNA, 100 bp, Homo sapiens
gcaagctgtggaatggtataagaaaggtattgaagaactggaaaaaggaatagctgttatagttacaggacaaggttaaaggactggatgcatttgttct

SEQ ID NO: 110174 - DNA, 90 bp, Homo sapiens
ccgagggggatggagcgagcgccgagccgggtcaggctatgtccaaactgggtcttcggcaggttacaggagttactagagtcactatcc

SEQ ID NO: 110175 - DNA, 100 bp, Homo sapiens
ttcagtaggtctgatccaacttcgtatgcagggtacattgaagaccttaagaagtttctaaaacatgcggaaaacgccatgcggtacataaatgggacgc

SEQ ID NO: 110176 - DNA, 100 bp, Homo sapiens
accaaagggaacttcaaattagtcaggttgcagaagatcattcaccgcaatgacggggcagagaattcctgcacagaacgggatgggtggtgcctcccca

SEQ ID NO: 110177 - DNA, 76 bp, Homo sapiens
tcagaaaaacagaatggactaggactcagtcaagggcaagaccacactcctcaagcacattgccaaccgagccctg

SEQ ID NO: 110178 - DNA, 90 bp, Homo sapiens
cttagacaacatctttgataattctgatgacgacgaacttgggccacatgaaatgaagatcacctctgcctatctacaggacattgagaa

SEQ ID NO: 110179 - DNA, 100 bp, Homo sapiens
cgggatggagccgctcagccaccggggcctgccgcgcctgtcctggatcgacaccctctacagcaataaactcatcctgaaagtcgctgttgttctcctg

SEQ ID NO: 110180 - DNA, 50 bp, Homo sapiens
ttcgtcgcgagatggaacgctggaaatcatgttgttgatgtcagtgttgc

SEQ ID NO: 110181 - DNA, 87 bp, Homo sapiens
gaggtcatcggggatgtggacgaaggggccgacctcctagcttccccgggcgctgcctggacaggcctgcctgcgtgctgggacatg

SEQ ID NO: 110182 - DNA, 88 bp, Homo sapiens
agtgaaattttcctttggccaacgtgacagatttgggatgatgaaattgttgcagacttttacgtagctgttccagaaataatgcctg

SEQ ID NO: 110183 - DNA, 51 bp, Homo sapiens
atgagcctgcagagcgcgcagtacctccgaaaagtagcagctctgaatcct

SEQ ID NO: 110184 - DNA, 100 bp, Homo sapiens
aacgaccacaggaatctggaattttattaaacatggagaaagaccatttatctgcgaattatgtggaaattcttacacagatattaaaaatttaaagaag

SEQ ID NO: 110185 - DNA, 100 bp, Homo sapiens
ccccccgcccccccagtctcggagatctcagaggcaccgactgggagagacgagttgtactgctgtcacaggaaatggacgctggattacaagcatggca

SEQ ID NO: 110186 - DNA, 90 bp, Homo sapiens
atcagatcgatctaagatggcgactgtcgaaccggctggcggtaaggctggaaaggactccggaaaggccaagacaaaggcggtttcccg

SEQ ID NO: 110187 - DNA, 100 bp, Homo sapiens
tgcgtcaagtacactgaaattcatcctgagatgaggaaggatcgagatcgagaccgggatcgtgaagatcggtctaaagatcgagaccgagaacgtgata

SEQ ID NO: 110188 - DNA, 96 bp, Homo sapiens
ctgctgtctgtgaattctttttgaaagctgcctgcggcaaagatcgttcagaaagaggcagagcgggccgaacgggccaaggagcgggagaagcgg

SEQ ID NO: 110189 - DNA, 98 bp, Homo sapiens
gtttgaacaaactcgaagaacagctgtggaaagaagttgcaaaacactgggacttggatgttgtgggtgatggtatgcagtgtcctccttcacctttg

SEQ ID NO: 110190 - DNA, 82 bp, Homo sapiens
cggaatgtgatcacagagcctatttacccagaagtagtccatatgttatacatgggaagctgttgataccaaaaataatgta

SEQ ID NO: 110191 - DNA, 90 bp, Homo sapiens
acccagggccgggaccgactcttcaggtcagataccaggcccaggttccatgatgcccgggcagcacatgccaggccgcatgattcccac

SEQ ID NO: 110192 - DNA, 83 bp, Homo sapiens
ttccctcctcaaactgactttgcagccacggagagtgggtaattccagaattgattggccataccattgtcactgtattactg

SEQ ID NO: 110193 - DNA, 100 bp, Homo sapiens
ccttggctcactgaggaggtttgttagagatgtttatgattacttccgagctgtcctgcagcgtgatgaaagaagtgaacgagcttttaagctaacccgg

SEQ ID NO: 110194 - DNA, 90 bp, Homo sapiens
gcggagactgggcggccggccgacccttcctgtcgctgacggcgactgcgggaggccagactgagcgtgcctaccaaaagcagccgacca

SEQ ID NO: 110195 - DNA, 85 bp, Homo sapiens
gagaagccgccgagagccgactaccctccgggcccagtctgtctgtccgtggtggatctaagagtcttgctgtgtcacccaggct

SEQ ID NO: 110196 - DNA, 95 bp, Homo sapiens
gagacactcccaccgaaagttcttgcgcagtggccgccattggcaccctggaaggcagccccccagactccaagaactttcccctcagagcacag

SEQ ID NO: 110197 - DNA, 100 bp, Homo sapiens
tgaagaattgtctgaaagaaaatatgccgggcccctcagatgagagctgcacccaggccagcaccagtcgctcagccaccagcagcggcacccccatctg

SEQ ID NO: 110198 - DNA, 100 bp, Homo sapiens
gacgattctccactggcagcagcagctgaacaacattcagatcaccaggatgttcaagcaaatgctttcagaaaagcaaaccaaatgggagcattacaag

SEQ ID NO: 110199 - DNA, 87 bp, Homo sapiens
ggccggaagcgcggagggagccgcgggatggaccgcagagctgaaaccaccaatgggtgaggtcgtcacccctacggccccccagga

SEQ ID NO: 110200 - DNA, 75 bp, Homo sapiens
gtccagcggtcacctacccccagcaccacctccagcccctgcgcctcggtcagggaagtcaaagatgcatccctg

SEQ ID NO: 110201 - DNA, 51 bp, Homo sapiens
tccgctacagaactactggacaggttattccaggatctttggagacccgag

SEQ ID NO: 110202 - DNA, 73 bp, Homo sapiens
acagtaacccgtttgccgacccggatctcaacaatcccttcaagatggagaaggatgaaactgtgagtgactg

SEQ ID NO: 110203 - DNA, 90 bp, Homo sapiens
atggagtccgcgctggaccagctcaagcagttcaccaccgtggtggccgacacgggcgacttccacgctggaagctctttgacatccttt

SEQ ID NO: 110204 - DNA, 107 bp, Homo sapiens
cctttctcctcggcactgtattctttacctgcttcccaatcccactgatgaggatcagcccatgattgttttcagagggaggcaacttttctcctaaagaaatcaat

SEQ ID NO: 110205 - DNA, 90 bp, Homo sapiens
tcccccaaatgtctgactctgactctcggactgagaaacgcaagagaaattcactgcatgtaactatgaccacgcatgattttatcagaa

SEQ ID NO: 110206 - DNA, 95 bp, Homo sapiens
ggaccctggaaggctgggaagaggactgagaagccacagccctgcgctgggaagagccacggagaatgaaaatgcggttcttggggttggtggtc

SEQ ID NO: 110207 - DNA, 100 bp, Homo sapiens
ttcgcgggcaggcccccgcccaggaatcagagatcattgatttcttcctgggggcctctctcaaggatgaggttttgaagattatgccagtgcagaagca

SEQ ID NO: 110208 - DNA, 100 bp, Homo sapiens
gccagacgacaagcacacactatggcgctgaaacggattaataaggacccagatgatgtggtaccagttggccaaagaagagcctggtgttggtgcatgt

SEQ ID NO: 110209 - DNA, 100 bp, Homo sapiens
acgtggaaagcgcatacaggaccctaaacaggtggctccagccccgggcctggctggggttcccagacgcctggggcctccccaccccgcagcaggcccg

SEQ ID NO: 110210 - DNA, 75 bp, Homo sapiens
ccggggccgctggattctgaggaccagcagatggccagtcacgagaacccaggtcgcgtggggcaggcagtggcg

SEQ ID NO: 110211 - DNA, 89 bp, Homo sapiens
taagagcaaagctacttccattccagaaagatggcatcatttttgccctcaaaagaaatggcagtatgacttctctttggaaaagaaaa

SEQ ID NO: 110212 - DNA, 83 bp, Homo sapiens
gctgtcactccttccccatctttccagcagaggcacgagagcctgcggccagcagcagggaattacatgaatgacagtcttcg

SEQ ID NO: 110213 - DNA, 75 bp, Homo sapiens
gaagtacagcgagcaaaccgagtttgggatcatgggcttgctgggtttgctgaagtggcgtatgaagcctcaact

SEQ ID NO: 110214 - DNA, 100 bp, Homo sapiens
cggagaagcgcacagacaagatcttcaggcagatggacaccaacaatgacgtattaaaggtggaagaaggtccatatctttttctgtgggtgcttcaagt

SEQ ID NO: 110215 - DNA, 91 bp, Homo sapiens
cgtggacgtcactggccctggtggggattgacagccacgggaaggccgccatggcatcagatgaaggcaaactttttgttggagggctgag

SEQ ID NO: 110216 - DNA, 98 bp, Homo sapiens
aaagatggccgggaactcgatcctgctggctgctgtctctattctctcggcctgtcagcaaagtaaaaagatggcctatcagaaggtccatgcagatc

SEQ ID NO: 110217 - DNA, 50 bp, Homo sapiens
cagtttggtttcactcagaccggttcgatacaagaggctgttttcctagc

SEQ ID NO: 110218 - DNA, 71 bp, Homo sapiens
gacttgctacctcttgggtgaactctagcaattacaaggcagcctgcttctgcaaagtggtacgatcgaag

SEQ ID NO: 110219 - DNA, 75 bp, Homo sapiens
gccgccttcccgcgccccgcagcgccccgcagagcagtcgagtgggtaattccagaattgattggccataccatt

SEQ ID NO: 110220 - DNA, 75 bp, Homo sapiens
ctgctcggacagatgaagctccccaaggagctgcaggtagcacaggcggagtgcagcggaggcccctgccgctgc

SEQ ID NO: 110221 - DNA, 83 bp, Homo sapiens
cacccaggagtacgtgctgcatgtctacggtatcatgaactgatcactaaatatgggaagttggagcctttggcagaagtgga

SEQ ID NO: 110222 - DNA, 100 bp, Homo sapiens
aagcacagtaaatacccactatttctccatcgatgaggagctggtctatgaaaagtacagcagttgcaaggagtttacagtttacaggaacagcacttct

SEQ ID NO: 110223 - DNA, 100 bp, Homo sapiens
ccccgctggacagcgccgacgtccgggtgcacgtgccacgcacgctctccctgtccagccgcctgcagctgaccctgtaccagtacaagacgtgtccctt

SEQ ID NO: 110224 - DNA, 100 bp, Homo sapiens
gaatagcctctgctggtgtggaggagggaagctgcccccggattagacagcaggatgacaaggctcgtggcggtcggtcagcggggcgttctcccacctg

SEQ ID NO: 110225 - DNA, 83 bp, Homo sapiens
attatctttcattgtgttttcttctcaagcaactattattttgccattaactggagacagatgaggctgtggacccaggctag

SEQ ID NO: 110226 - DNA, 100 bp, Homo sapiens
gcaagaagttcaagaagatcattatggagcagagatcaggccaagtttggaatcactgggattccatatggctctcatatcattccattccatctctgcc

SEQ ID NO: 110227 - DNA, 83 bp, Homo sapiens
ccccacctgcccggtgcccgaggaggcagccaagctcgtggcctgcctctgcgtgcgcgacgttgtggacgtttaccagcggg

SEQ ID NO: 110228 - DNA, 83 bp, Homo sapiens
ggaagataaatgaaggggtctagatgtaaatgtcagtggaaaggagagctaccatcactaagtccaagtggtaagaagttcag

SEQ ID NO: 110229 - DNA, 82 bp, Homo sapiens
gcacccaggcgactgcctcatcttcaaggagagaacggagagccagtgtgctgtgtgtcacggtccctggatgaacgtttgt

SEQ ID NO: 110230 - DNA, 100 bp, Homo sapiens
cgcagcgcccggcccgggccgcacccgccggccccatgaggagggacgtgaacggagtgaccaagagcaggtttgaggacgctgtgcagagctgcaagtc

SEQ ID NO: 110231 - DNA, 100 bp, Homo sapiens
cttgacgaggctgcggtgtctgctgctattctccgagcttcgcaatggaaaatgtttataggaggccttagctgggacactacaaagaaagatctgaagg

SEQ ID NO: 110232 - DNA, 100 bp, Homo sapiens
tgctggtcatgatggaaacgtgatagtgtgggatctggcaagaggagtcaaaatacgatcttatttcaatatggttaacttggataagctgaaggaaaga

SEQ ID NO: 110233 - DNA, 75 bp, Homo sapiens
cacccttctgcagtgaatgtcctcacggaacacaggtgtatactcttgatgtaccagatgcattctattactgtt

SEQ ID NO: 110234 - DNA, 90 bp, Homo sapiens
tcggagccgaataccaagctcggatccctgaatttgatccaggcaggccagaaagcagacccagggaggatagcacatgtcttcggctac

SEQ ID NO: 110235 - DNA, 101 bp, Homo sapiens
aatatgatatacaagacaaggtgaagcctcggaaggtactagcaaaggccagacgtcttactcaacaacttccctgccaccacctccaccatcccatccgg

SEQ ID NO: 110236 - DNA, 82 bp, Homo sapiens
gtgagacatgtctgagactcctgctcagtgtagcattaaggtggcaaagaaacacagcatgatgtttggaaatataattctt

SEQ ID NO: 110237 - DNA, 75 bp, Homo sapiens
tgagccgtcgcggagccgcgcagccctcggagcacggtgaccctggcagcaaccccaacaaacgccagaggcagc

SEQ ID NO: 110238 - DNA, 99 bp, Homo sapiens
gaaaatcgtcttatagttgagaatttatcctcaagagtcagctggcagggtaagatgatcatgcaggataaactggagaaggagcggaatgatgctaag

SEQ ID NO: 110239 - DNA, 75 bp, Homo sapiens
agaaggaaatgctgcttagattaaatgcgttgttggtgaaatagcccaatttttggtatgtgctcatagtttagc

SEQ ID NO: 110240 - DNA, 83 bp, Homo sapiens
cgcggaccggcgtccccggcgcgaagaggctggactcggattcgttgcctgaggtctcggcgcggaagatggccggcggcgtg

SEQ ID NO: 110241 - DNA, 82 bp, Homo sapiens
gctcaccccgcggccgcaccttcccgccttctcaggtgtgttccagagaacaagccttcagacatttgctatattgacgctg

SEQ ID NO: 110242 - DNA, 88 bp, Homo sapiens
acagaaatgtgtgagcgaagcccagacatgcttgcgcatttcagaaaggcatcaagcatgatggaaccatgtgtgatacctgccgcca

SEQ ID NO: 110243 - DNA, 50 bp, Homo sapiens
ccagcttcggaacaagagaccctggttgtgggctgcacactgcagaaaga

SEQ ID NO: 110244 - DNA, 51 bp, Homo sapiens
atcctggggacctggtacatggaggcaaaaccttcaactgaggacttgggg

SEQ ID NO: 110245 - DNA, 75 bp, Homo sapiens
cagaagccgacgttcgagaggaagattcttacctctttgatctcgacaataagaaactggcgatggaatatgaga

SEQ ID NO: 110246 - DNA, 100 bp, Homo sapiens
gtacagcaccggcaagaccaccttcatcaggatattagaaatggctactccccagtcaattttcatctttgcaatctgcattttaatgataacagaatta

SEQ ID NO: 110247 - DNA, 80 bp, Homo sapiens
agaaatccaaggccaagagcaaggcccggcgtgaggaggaggaggaggccatggaattccatgaacacttgcacagcata

SEQ ID NO: 110248 - DNA, 100 bp, Homo sapiens
gccggcctgagccccagagtcagctcccctttctcgcccagcgcccccaggccgctcccggggctcacggcaggatgacgcaaaacacggtgattgtgaa

SEQ ID NO: 110249 - DNA, 75 bp, Homo sapiens
caccgcaacattccttatccaatcccttaccgccatccgcagagccatcctgtgcaaaggaaggagctaggctgt

SEQ ID NO: 110250 - DNA, 74 bp, Homo sapiens
ggagctgttcctattgggccatcttggctccaccaccctggttcagccgtctgtatatctccccagatacctga

SEQ ID NO: 110251 - DNA, 75 bp, Homo sapiens
gcctcctcctcctcagtaacgcggggatgcttgaagatggaaagaaatttgattcctcccgggacagaaacaagc

SEQ ID NO: 110252 - DNA, 101 bp, Homo sapiens
cccgctgctgcccgcccgctgcctgcctgcctggcatctctctctcccgatgaggcccacagcgacaaggccaaggagagcattcgagccaagtgcgtgca

SEQ ID NO: 110253 - DNA, 73 bp, Homo sapiens
ttcctcccttcgctcgcaccatgggtgactatgaccagagcaggaccaaagtgctgcacatgagcctgaaccc

SEQ ID NO: 110254 - DNA, 100 bp, Homo sapiens
gaaggagggcaaagagaagaaggagaagcacaagaccaagacagctcaacagatgccaagtgacaagaccattgggggaggagatgactccttcaacacc

SEQ ID NO: 110255 - DNA, 108 bp, Homo sapiens
tgcaccccggcagcgcgaggaaatgcccaaaggaaatgcaacctcaccacaagtacaaagaccatctttcatggactactttgataagcaagacttcaagaataagag

SEQ ID NO: 110256 - DNA, 98 bp, Homo sapiens
ggagcagttgtatgtgtagaaagtgaaatcagaggagatgtaactatcgaatgcaagttctagccggtttttcctacaaggaatccagttgaatacaa

SEQ ID NO: 110257 - DNA, 97 bp, Homo sapiens
cgccaccgaccccaacggcaccagccctttgcacctcgcagctaaaaacggccacatcgacatcatcaggaactttgtgaaggaagccgaggagatc

SEQ ID NO: 110258 - DNA, 123 bp, Homo sapiens
cttgacacaattgtccctttggaatcaaccaaagcctacaacatggtggacatcatacactctaacactcctatgccaccttcaccagctgtacaagtgcagggccagcctaacagttctcag

SEQ ID NO: 110259 - DNA, 88 bp, Homo sapiens
cccggggcgaggcagggccagcagcaggcgggaggaggactggaatgaaattgaccccattaaaaagaaagaccttcatcacagcaat

SEQ ID NO: 110260 - DNA, 90 bp, Homo sapiens
tgcacggattgctttgaaagccttgatcaggggaaaggtgctcatggaaacaacctcattgctgttctagccaaatacatctaccacaaa

SEQ ID NO: 110261 - DNA, 82 bp, Homo sapiens
gctgctggtggcccctttgcagatgcttgtttgctactgatgggtgtgagcaagttagatattctataccggagacttctcc

SEQ ID NO: 110262 - DNA, 83 bp, Homo sapiens
ccggcgcccgggagacccaggaggagcccgcaggtgtcgtgaaaactacccctaaaagccaaaatgggaaaggaaaagactca

SEQ ID NO: 110263 - DNA, 97 bp, Homo sapiens
ggttatggtgggaggagccgatactgagcttcttcctatttgccatgggagaaggagaagctgactgtgctggaaaggagataccactcactcacag

SEQ ID NO: 110264 - DNA, 76 bp, Homo sapiens
cagagatccaagtgcgcgccctggcgggtccggaccaaggtcaccaagaagttctactcaatgggctgctacgaga

SEQ ID NO: 110265 - DNA, 82 bp, Homo sapiens
aaactctggatatatatcacggttactcctggatggagcacctctgatagcaatccacaaagccaggtattacaagaggaaa

SEQ ID NO: 110266 - DNA, 87 bp, Homo sapiens
caagtactgcttcaccatgtaataataacataaatgcagctacagctgtggctctacagcgatttgaaattattaatgcaatttatg

SEQ ID NO: 110267 - DNA, 100 bp, Homo sapiens
tggatggccacttacctgaatgaccacctagagccttggatccaggagaacggcggctggattttggggaatgtctcagaattccaaagagtggttgaag

SEQ ID NO: 110268 - DNA, 87 bp, Homo sapiens
ataaaaagaagtgttaagaattgcctttgggactctgaaggctgaagtgtccatctatggaatttggttttatgataaggaagaatg

SEQ ID NO: 110269 - DNA, 75 bp, Homo sapiens
gcctgattaacgagcctagtaatgactgggatatttactactgggccacagacctcagttggatgaacccattcc

SEQ ID NO: 110270 - DNA, 88 bp, Homo sapiens
tccctgcagctgtgtttgaacagatgggttctctacctggcctgtgccttgttgcctgttcctttactgtacatgtgatgacaagaaa

SEQ ID NO: 110271 - DNA, 48 bp, Homo sapiens
aagctgaggatgaagaagatggtgaaatgacaatggatgctctgttgg

SEQ ID NO: 110272 - DNA, 90 bp, Homo sapiens
ttaattcagtggctgctcttaaaatacaaaatccgaatcggaaggtgaggaaaattaaatggctcaacaagcacaatacctaggttacca

SEQ ID NO: 110273 - DNA, 125 bp, Homo sapiens
tgctctcagatgctgccagggtccctgaagagggaagacacgcggaaacagcctcctgacaaggtgatccgggcgggccccgcaggaattttatcccctcaccggcctcacactagtatcgcatg

SEQ ID NO: 110274 - DNA, 78 bp, Homo sapiens
agaggtggtgcggaagatgatcagccaggcacagaaggtctctgacattgacagagcctggacgttggaggaagcccc

SEQ ID NO: 110275 - DNA, 100 bp, Homo sapiens
cggcgccgagtgggaggatggcggaaccctgggcgctgcctatggcacagccaagagcggtaccggcattgcggccatgtctgtcatgcggccggagcag

SEQ ID NO: 110276 - DNA, 76 bp, Homo sapiens
agaggaggcggccaaggacctggccgacatcgcggccttcttccgatccgataagaactccattttctgttgatgt

SEQ ID NO: 110277 - DNA, 73 bp, Homo sapiens
tcttctgttctacccctggggttgccttggcaagagcagtgcctagaaaggggaatggatttttcaaagaggg

SEQ ID NO: 110278 - DNA, 100 bp, Homo sapiens
acaaaagccaagaggaggacagttcgctacacagcaatgcatcgagatttgataatgggctgcattaaaagtaaagaaaacaaaagtccagccattaaat

SEQ ID NO: 110279 - DNA, 100 bp, Homo sapiens
ccttcaaaatggagatgttgttgggcagcattcatttcctggcagaagctttgcatcgtccctatggttgtgatgttgaaccccaggcactaaatgaggc

SEQ ID NO: 110280 - DNA, 75 bp, Homo sapiens
ctctgcgggaggtggagcacctgaagagatgccagcagggtttccaggcctgaggtgcccgccctggccccagga

SEQ ID NO: 110281 - DNA, 100 bp, Homo sapiens
gatcagacagacagtgtgagattcatggccacgcagtgctttgcaacgctaattagactcatgccacttgagctcgtttgacagcaagtttgtttaccag

SEQ ID NO: 110282 - DNA, 100 bp, Homo sapiens
atcaagaagatcatgcagacggacgaagagattgggaaggtggcggcggcggtgcctgtcatcatctatctccatccagttcctggtgtacaggcgcagc

SEQ ID NO: 110283 - DNA, 100 bp, Homo sapiens
gtccgagccagccgctgttttgccggaggagcccctcaggcctatcaaaggtgcagaatctgggacaagttgcatgaagagcatatcaatgcaggacgta

SEQ ID NO: 110284 - DNA, 75 bp, Homo sapiens
ggacctcagaggttgtctgaaggccgaggccaagatggcggtgctgtcaggtgctggagaatctggtaaaagcac

SEQ ID NO: 110285 - DNA, 100 bp, Homo sapiens
cttagctccatcaaatctcaaacaatttatgagattattgataattctcaaggattctacgtgcttggcttggactcatcgtcaacagcagcagcatcat

SEQ ID NO: 110286 - DNA, 78 bp, Homo sapiens
tttggccatcttggaagcaaaaacccctagggtttttaaggtatctcattcagttgctaaacttatattagttaattt

SEQ ID NO: 110287 - DNA, 100 bp, Homo sapiens
gcaaaactaaatgtggcaattgtaaggccatcgattgttggtgccagttggaaagaaccttttccagggataattctatttaaagaaaaagccaaggaag

SEQ ID NO: 110288 - DNA, 80 bp, Homo sapiens
actgttgctgtccgtaaactggaacctctgttcactcaagattgaccctgttcctaacacccacccacttctcgtctttg

SEQ ID NO: 110289 - DNA, 75 bp, Homo sapiens
ggcagcatgagtgcctacgagatgcggatggccattgagtcggcaggcttcagaagaggctcgcctctagtgtcc

SEQ ID NO: 110290 - DNA, 96 bp, Homo sapiens
ttctagaccctactgcggtctcggatattgccgggacctgaaggagaagaaggagaaggtggaggagaaggcaagccggaaagagcgaaagaaaga

SEQ ID NO: 110291 - DNA, 88 bp, Homo sapiens
gcttctcccgcttcaacgaagaccgagactttcaggtgattgatgagatttatcgtgtgttgagatatgtcaattctaccagagcccc

SEQ ID NO: 110292 - DNA, 100 bp, Homo sapiens
agagattttttagtctaaatgatgggcagtcatggtcccagaaacgtcactatcaagaagactgcttttggcttctggatgccctcctccagtacacatc

SEQ ID NO: 110293 - DNA, 100 bp, Homo sapiens
caacgctgagccaccttgggaacctagctgatgataggggggttccatctcccaacttgtccattgagaaagatcagtctaaagaaaaggagaagaaagt

SEQ ID NO: 110294 - DNA, 83 bp, Homo sapiens
aacgcattcaagaaagccgacccccaaggtgacagagctgaatgaacctctctccaatgaagatcgaaatctcctctctgtgg

SEQ ID NO: 110295 - DNA, 80 bp, Homo sapiens
cgttgtgccagcgactaaaaagagaacaagttgaaatcatcgcagaaggataaagttcgtcagtttatgatcttcacaca

SEQ ID NO: 110296 - DNA, 75 bp, Homo sapiens
gatgtataagaagtcttaacgtagacccaaatgatttgtacattgtagaacccctcaagttttctccagaaaaga

SEQ ID NO: 110297 - DNA, 97 bp, Homo sapiens
atggcatttacagaaagagtcaacagcagtggcaacaggatggagggtacagagtctgcctacatcagctcctttgtctgtttctcttccgacaaac

SEQ ID NO: 110298 - DNA, 74 bp, Homo sapiens
catcattggacctggtattgtgctttccaaccctgaccgaccatgtcaccagtttgctgaggctaaacactatc

SEQ ID NO: 110299 - DNA, 100 bp, Homo sapiens
gacgccctgagctcccattaggagccgctggctgcggcagcaggggactagcgtgagagaaagttcaggagccctggaaaggagaaggaataagacggca

SEQ ID NO: 110300 - DNA, 73 bp, Homo sapiens
agcagccttggtgctcaggtgccagatgcaaaggtgtgtcgtttggactggtgatgagcgggtcttcttttat

SEQ ID NO: 110301 - DNA, 100 bp, Homo sapiens
cctcatggatgaacttcaggatgttcagctcacagagatcaaaccacttctaaatgataagagacggtaaagaacaggtccaagaaaagctcaaagaaag

SEQ ID NO: 110302 - DNA, 116 bp, Homo sapiens
agggatcttctcaccacatcacagtgaaaattaacgagcttaagaaaccaactttgatccagcagaatgggggagtaaggtagaagaccgcttctataacaatcatgcattcgagg

SEQ ID NO: 110303 - DNA, 75 bp, Homo sapiens
agatcaggcaaagtgtcagacattctctcaaagacattcttatgaagagtgtttcaggctgcatgtaccaagtag

SEQ ID NO: 110304 - DNA, 129 bp, Homo sapiens
cgcccggctcggtcctcggtctccaccgcggcccggaaggaatccgggcagcctccgcggagaagctcattcacacagaagacccatttaatgatgaacatcaggagaggcaagaggtggaaatgttgg

SEQ ID NO: 110305 - DNA, 87 bp, Homo sapiens
tgctgagccgggtgctgcggctctgcgcggtccccgccagcgccccatcctgagccggtgtggaaacaggaagagaactagaactgg

SEQ ID NO: 110306 - DNA, 51 bp, Homo sapiens
taaggattccaagtaactcttatttgatatatttttgccatcatggatcag

SEQ ID NO: 110307 - DNA, 83 bp, Homo sapiens
caggaagagcaagagagtttatctgtgggtgaggctactgcagcactggggtgtcagttgttggtccgacccagaacgcttca

SEQ ID NO: 110308 - DNA, 100 bp, Homo sapiens
cctacggtcacgtctacaaggcgaggcggaaagatggatcttagcaaagcaatgtctcaagatggtgcttctcagttccaagaagtcattcggcaagagc

SEQ ID NO: 110309 - DNA, 50 bp, Homo sapiens
atgttccttagaaaggagcagcagactatcaagaaatccaagtggtaatg

SEQ ID NO: 110310 - DNA, 100 bp, Homo sapiens
gtgaatataaaaggacttcatctcctcaacatggaaactaagatcctaattatctcatggctaatgaacgcatgaacctcatgaacatggccaagctgag

SEQ ID NO: 110311 - DNA, 75 bp, Homo sapiens
actacaggaacctggtctccctgggtgccttcaaatctcttgacaaagatggcactggacaaatccaggtgaaca

SEQ ID NO: 110312 - DNA, 100 bp, Homo sapiens
gcaggcagctcggcaaaatgtagaccactcacaggaagcagggcggcgactggcggcgcgatggacctgaccgggctcctgctggacgaagaaggcacct

SEQ ID NO: 110313 - DNA, 98 bp, Homo sapiens
cactaacgcaggatccggctgccgaaggtcctcgccaggttgaaatcacaaagattagacacctttttagataggtgttcttcagcaccactgacaac

SEQ ID NO: 110314 - DNA, 100 bp, Homo sapiens
gccgcttccgcagcctggaggaagcactgaaagcttgagtgagatcattggccgagacctgagtggcttccctgcacctcctggagaagagcctcctgcc

SEQ ID NO: 110315 - DNA, 75 bp, Homo sapiens
atctttgcactctttaatacagagcaaagtgttatagttttgccgctggactcttccctcccttcccccacccca

SEQ ID NO: 110316 - DNA, 83 bp, Homo sapiens
caaaagcctctcattcgtagccccccccagctggaaaatggtctgctctgcgaatcgatccacctccgacccttaagccagag

SEQ ID NO: 110317 - DNA, 101 bp, Homo sapiens
ctatgggagtcccggcgttcttccgctggctcagccgcaagtacccgtccatcatagtcaactgcgtggaagagaaggcatcgttggcttcacagtatgac

SEQ ID NO: 110318 - DNA, 100 bp, Homo sapiens
aggccttccagtacacagacgagcatggggaagttgttgacctcctgtactggagagacattaagaagactggagtggtgtttggtgccagcctattcct

SEQ ID NO: 110319 - DNA, 100 bp, Homo sapiens
ggaggttcgagcgctgttctcgctccggagccgctgcacatttcggagcagcatttctttctattactactatctatgctgagactggttcaggttttgt

SEQ ID NO: 110320 - DNA, 87 bp, Homo sapiens
aagaagaacagaaaattggaaaagttgttcatcaaccagactatcaagaaatccaagtggtaatgggcgaagtttattcagcatccg

SEQ ID NO: 110321 - DNA, 50 bp, Homo sapiens
cttcggggaggttgcgggccgagacaggatgggatcttaaaccctcacgc

SEQ ID NO: 110322 - DNA, 98 bp, Homo sapiens
caagggtcctaaaacaggatcagtaaagaaggaaaaagcagtaaagccagaggaagatgatctcaatgccacccaccaacactgtgttttggccggtt

SEQ ID NO: 110323 - DNA, 100 bp, Homo sapiens
cttagccgaagagttgaaaaacactggcggttgctccttgagggcaggacagttcttatggctttatccgttgcgtaagcacagagaggtctgcgaggtc

SEQ ID NO: 110324 - DNA, 125 bp, Homo sapiens
ctgtgctgcgcaaggctggaggcacgggccctggggaagagaagcagttcctggaggttcggagcgaccttggccgttggcctgaccatctttgtgctgtctgtcgtcactatcatcatctgctt

SEQ ID NO: 110325 - DNA, 75 bp, Homo sapiens
agcgcagcaaagcgcccagcctgccgcctcgctgtccctgcggcttctggggggacaagctgtggggggtctgtg

SEQ ID NO: 110326 - DNA, 100 bp, Homo sapiens
ggtgtgattagcttcgcagtctggaaagctttaggagttcacagtttccaagatgagatgggattctccaacatggaagatgatggcccagaagaggagg

SEQ ID NO: 110327 - DNA, 98 bp, Homo sapiens
cccctcaccaatttagccattccaggtcctacaggtatggatctctggcagctgctgttgaccttggcactggcaggatcaagtgatgctttttctgg

SEQ ID NO: 110328 - DNA, 75 bp, Homo sapiens
tcctgcctcaggtttatttgtacaaatagcacaggaggaccatgacttcttccagcatgtggaaatgcacctgcg

SEQ ID NO: 110329 - DNA, 98 bp, Homo sapiens
tattccagcctcctcgagagaaactccacctctgtgaagagaaagcaaagtcctattccaacagtcatgaggcaccatgagccaggacaccgaggtgg

SEQ ID NO: 110330 - DNA, 98 bp, Homo sapiens
tggacaagcgaggaagtttctttaaggcccttctgcgatgttttacctggctgcggctgtgtcagatttctatgttcctgtctctgaaatgcctgaac

SEQ ID NO: 110331 - DNA, 100 bp, Homo sapiens
ctgtcgtggcaatgttttgaaactggcaaaatcagttcctgtgccttaagaacattagaaccttcctgtccacctgctgtgagaagttcggcctcaagcg

SEQ ID NO: 110332 - DNA, 74 bp, Homo sapiens
ttaaggattccaagtaactcttatttgattgtcaagtggtcagactgttgtttgccattagcttgcagacctgg

SEQ ID NO: 110333 - DNA, 100 bp, Homo sapiens
cctgtacagcctgcagaacttattggctggagttggcgatgactcagcagatcaaggctggaagactcattctcgtcaggtggttgacgttggctgtcag

SEQ ID NO: 110334 - DNA, 75 bp, Homo sapiens
aagggagtttgctaaatttgaaaaggagaaaatgaatgccaaatgggacacggttgtacatcctggagacctgaa

SEQ ID NO: 110335 - DNA, 51 bp, Homo sapiens
gtcatgctcagggaccctgtggagagaaacctctgcgccatgagagccaag

SEQ ID NO: 110336 - DNA, 74 bp, Homo sapiens
cagagatctacaaccttggagcccagagccacgtcaaaaaactaattctgaagcaagcccttatagttgtgctg

SEQ ID NO: 110337 - DNA, 75 bp, Homo sapiens
ctcatcagcggccccctcaacgccagctgtcggaaaaggtaacagaagatggaactcgaaatcccaatgaaaaac

SEQ ID NO: 110338 - DNA, 100 bp, Homo sapiens
gctacgtggagcggctgaagggcatgtccctgcttgtcagggctgagagcgacggttgcagtccatgagctgggaaaggaggcagtgctcttgggagaaa

SEQ ID NO: 110339 - DNA, 88 bp, Homo sapiens
ggaatgcatttgtcacgggcattgcaaggtacattgagcaggctacagtccactccagcatggaagatgagaatgtgcctactgctcc

SEQ ID NO: 110340 - DNA, 100 bp, Homo sapiens
aggttctgggaagatggcgaaggtctcagagctttacgatgtcacttgggaagagaatagtgacagtggtacaggaaagaaagaaaaagaaaagaaaaac

SEQ ID NO: 110341 - DNA, 75 bp, Homo sapiens
gtaggaagccggagacagcagggtgacagaactcccccactggaaaggattctgaaagaaatgaagtcagccctc

SEQ ID NO: 110342 - DNA, 87 bp, Homo sapiens
ccgctgctcagcgtcctcatgtggggggtaaaccactcggatccaaactactggatacaggtgcatcgcttggaacatggagatgga

SEQ ID NO: 110343 - DNA, 126 bp, Homo sapiens
actgctcgacctgagagacccatggcattcctcagggaatactttgagaggttggagaaggggctgacgtttaccctacgtcctggtgaggtgacggcgctggtgggacccaatgggtctgggaag

SEQ ID NO: 110344 - DNA, 141 bp, Homo sapiens
cgagatgttattgagaaggggagaaagcttgacgtcactgacctgcttgctgatcctgtggtccggatccagagaaaagtttgccagatccggcccggtgcctgggttccaggaggacacgctgcagttggccttcatcga

SEQ ID NO: 110345 - DNA, 50 bp, Homo sapiens
aaggattccaagtaactcttatttggtatggaacgccgtggactccgggc

SEQ ID NO: 110346 - DNA, 75 bp, Homo sapiens
ctgcgtcaggcatctcaatcatggaaaatatatgcagatgatgaacattcttaagccaattgcctttgatgttat

SEQ ID NO: 110347 - DNA, 90 bp, Homo sapiens
atgggggatttctacgacccggagcacccgacccctgaatgatatcatcaagttgaatcgaaaggaagggaagaagcagaattttccaag

SEQ ID NO: 110348 - DNA, 75 bp, Homo sapiens
ttagtgtccagtgcgaaaaccaaagtggtggtcaccatggagcattctgcaaagtttaaactcatatcccaggca

SEQ ID NO: 110349 - DNA, 51 bp, Homo sapiens
ccgcaccacccgcctctgggccccagacagatctggatgaatgtgctgaag

SEQ ID NO: 110350 - DNA, 83 bp, Homo sapiens
gatttgttaaggattccaagtaactcttatttgccatcactggtgcaagctatatttaacggagatcctgatgaagttcgagc

SEQ ID NO: 110351 - DNA, 96 bp, Homo sapiens
cagcggttggaggcttcgcccggctttgcagcggggacttcggcggcggcgcctcaggcacctcggcccggacgcaggaggagggagacgcactga

SEQ ID NO: 110352 - DNA, 100 bp, Homo sapiens
ccaggctcaagcagtcctaccatgtcagccttcccagtagctgggaccacaggatggtgccatgacaatggtgtgaactacaagattggagagaagtggg

SEQ ID NO: 110353 - DNA, 90 bp, Homo sapiens
agagatccaagtgcgcgccctggcgggtccggaccaagacggccaatgggaacgtggaggccaaagtggtgtgcttctaccggaggcggg

SEQ ID NO: 110354 - DNA, 75 bp, Homo sapiens
gccgcaggcgcagacccacccgccatgaagccccccgcagttccatgccattgcagtgtcaactaggcctcagtt

SEQ ID NO: 110355 - DNA, 100 bp, Homo sapiens
aaagggaagctggaagatggggatggcatcaacctgaatgacatcgagaaggtccttccagcctggcaggtatgagttaatacagaaaggagtgactgaa

SEQ ID NO: 110356 - DNA, 144 bp, Homo sapiens
atgctggaaatcgacttcggtttcagttggagttggaatttgtgcaatgtttagccaacccaaattaccttaattatccagacatttaatgtggatgcaccatgccagaccgtggaagatttaacgaatggggttgtgatggcc

SEQ ID NO: 110357 - DNA, 75 bp, Homo sapiens
gtaaagagccctctctgaaagccttgtaagaactgactgcatttgcaacgatgcatgtctgcaagaccccatgga

SEQ ID NO: 110358 - DNA, 80 bp, Homo sapiens
tccaggacccgctgcagcagggctgtgtgagctcaggtacactgatgctgaagtactatgagccttcggaacttgtggag

SEQ ID NO: 110359 - DNA, 50 bp, Homo sapiens
cagcagcttcggcggcggcagaggtgtttgattgcatcgaggtctatgcc

SEQ ID NO: 110360 - DNA, 82 bp, Homo sapiens
caaagagcaactaactgatgctgacaccaaagtttcagagactcctccactctctgggaatgacacggactccctctcctgc

SEQ ID NO: 110361 - DNA, 75 bp, Homo sapiens
atgacatctcactacagtctctacctgaaaatattggcaactggtcttttgggatcctgctctatgagatggtga

SEQ ID NO: 110362 - DNA, 95 bp, Homo sapiens
tggagctccgcgtttgaccccaactccgaggaggtttaccaaagatgcaggtcattaggaactattctggaacaccacccccagctctgcatgaa

SEQ ID NO: 110363 - DNA, 51 bp, Homo sapiens
gcacactcaggaggccttccgcacccgggactatacacagaatgggatttt

SEQ ID NO: 110364 - DNA, 101 bp, Homo sapiens
cgggagtgttcgttgtgccagcgactaaaaagagaggggtgtttgatgcttccctcaaaatggctggcttctatggattgtatacctggctgactcatact

SEQ ID NO: 110365 - DNA, 100 bp, Homo sapiens
ttcaagatggcggtgcaggagtcggcggctcagttgtccatgaccctgaaggtccaggagtacccgaccctcaaggttggtaggaggagaggattggagc

SEQ ID NO: 110366 - DNA, 82 bp, Homo sapiens
ctctccttgcagcggacaagaaggacatttgctaatgaagactgtggaagcaatggcaccagcatgatatcattgatcattc

SEQ ID NO: 110367 - DNA, 82 bp, Homo sapiens
ataggtcctggaaggaagaccatttaagaaataccgctaccaagatgaagacacgccccctctggagcacagcccggcccac

SEQ ID NO: 110368 - DNA, 82 bp, Homo sapiens
cgctgccctcagctccgagtccagggcgagatgctggacgagaaccaccacctgatccagtgcatcctggagtaccagagca

SEQ ID NO: 110369 - DNA, 97 bp, Homo sapiens
caccgacgaggagaggctggctgagtccaagcaggcgtttggccgcctgggttccacttccagcaacagctcctgcagcagtaccgagtgccccggg

SEQ ID NO: 110370 - DNA, 95 bp, Homo sapiens
cgggcctgggatgtggccaggcttcagtcactggacacaagctttctggggacccagtcgcagagcgcaccccactggggacccccagctcagcc

SEQ ID NO: 110371 - DNA, 100 bp, Homo sapiens
gccccaccctgggcagtatagagacgtcggacttcacggtctcctctgagcctccggcctccataagacccaaaacagatgacacctcttcccagtcccc

SEQ ID NO: 110372 - DNA, 100 bp, Homo sapiens
gaaatcacccgccgagatgaccttgttgaacgacctggtgtccgcaatgttgccagtgtctgtctgcagattggctacccaactgttgcatcagtacccc

SEQ ID NO: 110373 - DNA, 75 bp, Homo sapiens
tttgttctctggcatggaaggggtcctcagagttactgggcgtgtgaaggcaaagaagaatgctgctccattcag

SEQ ID NO: 110374 - DNA, 90 bp, Homo sapiens
ccgttcggactatttgtagtcatgtacagaacatgatcaagggtgttacactggagcctcctcaacaagcccaagagtgagatgacccca

SEQ ID NO: 110375 - DNA, 100 bp, Homo sapiens
gagggccgcagggagaagggcagcgaccccgccatggagctgcggctgaagcagcccagctttcttctagtcaagatgagtgataaaccagacttgtcgg

SEQ ID NO: 110376 - DNA, 100 bp, Homo sapiens
ctcgcgtccacctttctcttcatgtcgacgtccctggaaacggccacacggatgccatggttacttttgccacgaccatatactccttgacgacagggac

SEQ ID NO: 110377 - DNA, 100 bp, Homo sapiens
ccatcaaatcagagagaaggaatccaccttcttacgctatggcagctgaaggcaggtacaatctctacacagcggaaggcaaatatatcttcaaggaaag

SEQ ID NO: 110378 - DNA, 73 bp, Homo sapiens
tagaggaagttctggagatgaagttattgccgacatggaggcccaggttcacaagttgagagaagaattgatc

SEQ ID NO: 110379 - DNA, 75 bp, Homo sapiens
acgctcttctccaccacaccgggaggttggcaaaagcagcttttgatgatgcaattgcagaactggatacgctga

SEQ ID NO: 110380 - DNA, 90 bp, Homo sapiens
ctgcagtgattttaaccaaggcagttggtggaaatgagccaaaagaatgcaatggtgtaaagattccagttgatgccagtaaacctaatc

SEQ ID NO: 110381 - DNA, 74 bp, Homo sapiens
ttcttacaacatggcagacattgacaacctttaaatctacaagacagcagccttcccgaaatgtcactactaag

SEQ ID NO: 110382 - DNA, 83 bp, Homo sapiens
gcggcccggaggacctgcctctcgtcagcattagtgaccagaaggatcccaaggatcgaatggttcaggttgtgaaatggtac

SEQ ID NO: 110383 - DNA, 100 bp, Homo sapiens
ggtggagaaggtggtagacaagttcatcaagcaaagggactaccaccagcagggctgaaatctctttaatgatggagggaagcaggcagacgcgagtgtc

SEQ ID NO: 110384 - DNA, 101 bp, Homo sapiens
cggagccggagtcgcggacgccgcggggtctccgggacagcttcggaaccaaaaagaagcttcccagagccggggccaggagccccaagcgccctctagca

SEQ ID NO: 110385 - DNA, 100 bp, Homo sapiens
cccggtaccccggctggagggcgtttctcgggagcagttcatgcagcacctctacccacagtggaaatcctgactgctcgtcagaagaaagcagaagaac

SEQ ID NO: 110386 - DNA, 88 bp, Homo sapiens
caggctgtaggtttagttgagcaccggaaagaacacaagttggatggcttgaggactggtactaaaaggaaacgtgactgggaggcca

SEQ ID NO: 110387 - DNA, 75 bp, Homo sapiens
tgggcgcagagctgctggtcgacgtgggtcagaggctgcgccgtggcctgggttctgaggaaaacgcaatggtgg

SEQ ID NO: 110388 - DNA, 124 bp, Homo sapiens
aggaggacaagatctacgactgctcacagtgccctcagaagttcttcttccagaccgagctgcagattggccttaagagaaggacggagccacatactgctgacggcccagaactggcagagag

SEQ ID NO: 110389 - DNA, 82 bp, Homo sapiens
ggaggtgaagttgctgctgttggccccttggatctcccttcgtggagacgacaccggggtcctcctgcccaccccaggggag

SEQ ID NO: 110390 - DNA, 95 bp, Homo sapiens
cttcctaagcccatagccacatgcagagaatgtgttcagtgcagagccttcaataaaggagaaaagaaagacacatgcacacaggaatgttccta

SEQ ID NO: 110391 - DNA, 98 bp, Homo sapiens
gccagcgttgaggcgctgaccacgatatttggtttccaggcaggactgacgtctttggattgcagtggatcttactgcttacctgtaccagttattcc

SEQ ID NO: 110392 - DNA, 97 bp, Homo sapiens
gccgggaactccccatcgcgttttgccagcgataatacgcctcaggtaagagcttctgttcgtgtgcagggaaagcagctcacagacgccgttaaaa

SEQ ID NO: 110393 - DNA, 75 bp, Homo sapiens
tcggacaccttcgagggttgggtggcatttacaccctacgccccggagcccgggagcacatgccggctcagagaa

SEQ ID NO: 110394 - DNA, 80 bp, Homo sapiens
aggagtcagctgtgtgtccagaacgtgccatggagacgcttaacggtaagaatgattgatgttggctgatattggagtgc

SEQ ID NO: 110395 - DNA, 100 bp, Homo sapiens
cggtatccaattggcatccagggtcggactcccggggccatggccggaatgcagtaccctcagcagcaggactttgtgttttatgccccacgtctgagaa

SEQ ID NO: 110396 - DNA, 98 bp, Homo sapiens
agcagctccagagctttgtcaaagactctggattaatcgaattacagctgctagccaggaacatggactgaagtatccagcgctcattgggaatttag

SEQ ID NO: 110397 - DNA, 83 bp, Homo sapiens
ctactacgccaaggaggtcacccgcgtgctaatggtggaaacccacaacgcaattctgtggtgttcttggtcacacatttatg

SEQ ID NO: 110398 - DNA, 100 bp, Homo sapiens
agcttgccgcacaaaaagctagagaggtccaagacaagctgctgctatctgcgtgccacttactggtctcactggccaccaccgtgcggcccgtctttct

SEQ ID NO: 110399 - DNA, 100 bp, Homo sapiens
ttgcagagtgaacttgataaaggaaaagaagatactcaaaagaaaattcataaatttgaggaagctttgaagttaccccacagcctatccagcagctgcc

SEQ ID NO: 110400 - DNA, 80 bp, Homo sapiens
cacatgcccgctcacctgcgctgtgatgcctgcagagctgtggcttaccagctcaggcgctcaggactgccaggacccag

SEQ ID NO: 110401 - DNA, 75 bp, Homo sapiens
gggagtgcaagcttagagcgtctggccaagaatcagaggaagtggaaataacattccagctaattttaccaggag

SEQ ID NO: 110402 - DNA, 75 bp, Homo sapiens
cccggggcgaggcagggccagcagcaggcgggaggtgcgcgcggagccatggttatcatgtcggagttcagcgcg

SEQ ID NO: 110403 - DNA, 101 bp, Homo sapiens
gtcttacacagagacactctagtgaaagccttcctggatcagggaccacgggatcattcgaactctggatttacccatctatgtcacacgggtgaagggca

SEQ ID NO: 110404 - DNA, 80 bp, Homo sapiens
gctagctttggcgaggggacggagccggatcaggagccgccgccgccatatcaggtgtgatcccctgggcccgtttgttg

SEQ ID NO: 110405 - DNA, 98 bp, Homo sapiens
gcaagaccgaattcagaaggatatcgacgtcgtgatccagaagtccagagctgaggactgcctgtttgcagggaaatgatcttcattggttagcatgt

SEQ ID NO: 110406 - DNA, 100 bp, Homo sapiens
ctgaagattgcatggccaaagaggttttgttggcaatgcatgcaaatgtggaagataggggaatcaaaggtgacattacacctttaatggctgctgctaa

SEQ ID NO: 110407 - DNA, 100 bp, Homo sapiens
agaagacgaggatgatgcggaaattaaccccaaggatttttagactctgaggagcagttggagctaatccacattatggaaatggaaaccaccgaacctg

SEQ ID NO: 110408 - DNA, 100 bp, Homo sapiens
tctttttccctgtggctcagcccgttcgctggactgcaaaccgagctcccgtctgccttgcagttcctctgtgacgagggtgcaggtatctctggggact

SEQ ID NO: 110409 - DNA, 75 bp, Homo sapiens
agaacaccaaccaaattgtcgccattaagaaagtagaacaatctccatctagcagcaaactgaaagtaatgcaaa

SEQ ID NO: 110410 - DNA, 96 bp, Homo sapiens
gaaaattgtgaactaaggccccctgcccccttttcctggtgcatgtgaagttatcaaaaacaggtgtcatggagaaactccagctgggcccagaga

SEQ ID NO: 110411 - DNA, 100 bp, Homo sapiens
tgcaggtattgggagatccacagctaagacgccaggacccactggaagcctagaaatgaatgctgcctttttatatggtcttggtttggtctacttccat

SEQ ID NO: 110412 - DNA, 100 bp, Homo sapiens
ttaccttggagaggctgtgagccacaatgcatcgctggaagtagccatattctaccttgtaaatactgttatttgtatatactgtaaatgatgacatcgg

SEQ ID NO: 110413 - DNA, 73 bp, Homo sapiens
cgcgctgcgcagccgacgcgggaatgaagcgggcgctgggcagcggggatctgatgagcttctttcttctggc

SEQ ID NO: 110414 - DNA, 96 bp, Homo sapiens
cgctttgggacaactcggggccgcatcaacggtctcctctgagcctccggcctccataagacccaaaacagatgacacctcttcccagtcccccgc

SEQ ID NO: 110415 - DNA, 82 bp, Homo sapiens
cctcaactcagcgatgacatccctttccgagtcaactggcccggcaccgagttctctctggagggagccatggatttgctgc

SEQ ID NO: 110416 - DNA, 100 bp, Homo sapiens
agagccgagcggcggcgctccgagagctccaggagaagcaggctctgatggagcagcagagacgccgtggggccaattttttaactcagatcttgctgag

SEQ ID NO: 110417 - DNA, 98 bp, Homo sapiens
gttgccagctcctgcgccctccggactaacctcaaaaaccagataatgagaagcccatgcgagtggtggatgatgaagacttggtagaccagcgtctc

SEQ ID NO: 110418 - DNA, 75 bp, Homo sapiens
caaagcctcattaattgaatatataaagcaggtgcacctaggtgattatgggagtgctattgagacactggtaac

SEQ ID NO: 110419 - DNA, 75 bp, Homo sapiens
ccaaccctggaaccgcagacctctgggcttcctgtggtgggggaaaagtagctccagctcaaccatctgaggaag

SEQ ID NO: 110420 - DNA, 75 bp, Homo sapiens
tggatgtggaggggaatagactccatctatccatatgaggaccgtataatagacgctggccccaaaggaaactac

SEQ ID NO: 110421 - DNA, 83 bp, Homo sapiens
cagggcccgcgggccaggagagcgctcggcggcacatggattaattgatgtatgttgagtttatggagctgccttttggtggc

SEQ ID NO: 110422 - DNA, 83 bp, Homo sapiens
cctccgtgcggagaccactgttcaaggccacaggtgctgaaaccaagaacctacagttactggttccaaaaactgagatatgt

SEQ ID NO: 110423 - DNA, 98 bp, Homo sapiens
ctggactgtcctctacagaaggaagcacaaaaagggacagtcggaagtatttgaaaaggagcagtccatctgtgctgcagaggaacagccagcagaag

SEQ ID NO: 110424 - DNA, 98 bp, Homo sapiens
gtgcttcagagtgagttttgtacagctattcgagaggcggcgctggcggcggccctgggacccgcggaagccggcatgctggagaagctggagttcga

SEQ ID NO: 110425 - DNA, 75 bp, Homo sapiens
cggcgtctgtctctgcggcttctggttctcacttgtcgatatggaatgtgcagatgtcccactattaactccaag

SEQ ID NO: 110426 - DNA, 80 bp, Homo sapiens
ggacagcacctcatcccctggatgggggaccacaagatcctcatcgacaggccctcaagagtattgagtatctggaggag

SEQ ID NO: 110427 - DNA, 100 bp, Homo sapiens
aacaactctcattattaccatatggcccatggaaaagattttgcatctagaggaattgaaaatcctgataacttaagtgactctctcttttccggtgatg

SEQ ID NO: 110428 - DNA, 100 bp, Homo sapiens
cagcaggcgctggctcctgctcaggcaaggccaggcgggtgctgcctgggacccagtgactcagcacccctgcccggatcaactggacttttgccccctg

SEQ ID NO: 110429 - DNA, 101 bp, Homo sapiens
aagaggacagagcccgcggccgcgccgagcggggtgagtgcgtccgggcggccgctccgcaggcccgcgcgtgagtgcatctccatccacgttggccaggc

SEQ ID NO: 110430 - DNA, 135 bp, Homo sapiens
agcctcccgctccgccgcgctccagcctcgctctccgccgcccgcaccgccgcccgcgccctcaccaggtcgcaatggaagaagagatcgccgcgctggtcattgacaatggctccggcatgtgcaaagctggtt

SEQ ID NO: 110431 - DNA, 100 bp, Homo sapiens
gtttgaggtacctcccataattttaaggggatctaagcctttcccacgttatggttataaaccctccccaccgaatggatgtggctctccactgtttggt

SEQ ID NO: 110432 - DNA, 82 bp, Homo sapiens
caaggagctaaagcagcgtgcgttcagccctggggaccacagccgctttgtcaactgtgtgcgattctctcctgatgggaac

SEQ ID NO: 110433 - DNA, 90 bp, Homo sapiens
gcacgagcagaagactctgcccggggtgtcggatgatttatcagagacagacatcagcaatgaggctcgggatccccagactctcacaga

SEQ ID NO: 110434 - DNA, 82 bp, Homo sapiens
atgtttgccagtggtttattttacagatacttgcttctggttctgatggatgctgaaagagcctggagctacgccatgcagc

SEQ ID NO: 110435 - DNA, 50 bp, Homo sapiens
ctgctgtcgtctttcaagaaaaggtaaaagtcttgcagtgaaaaacccga

SEQ ID NO: 110436 - DNA, 82 bp, Homo sapiens
ctccgggcccccaggcatggctagctcgggcaacaggtttgtctatgctggctctaactcgggcgtggtccaggccccgctg

SEQ ID NO: 110437 - DNA, 100 bp, Homo sapiens
gcccagatgcgcgcgatgctggaccagttgatgggcacctcccgggacgattcgtggtacagagaaaagcagcgtgagggagttacacatcgcatatcgg

SEQ ID NO: 110438 - DNA, 75 bp, Homo sapiens
ctccttttccctctccctttccctaagggtgcttcaaggatgaccgcatcgtcttctggacttggatgttctcca

SEQ ID NO: 110439 - DNA, 75 bp, Homo sapiens
cagcctggcctgccatgtccgggagaagacattcctgggcttcccgatggactcgagtttttactatgtgagcat

SEQ ID NO: 110440 - DNA, 88 bp, Homo sapiens
cagtgcagatcattgctttttttgcccacctagcttgtaacgaagagtaccaagttcgatccatagcaagtcatgttcgtcctgacag

SEQ ID NO: 110441 - DNA, 100 bp, Homo sapiens
gcaaaagctgcttgaaaacattccaggtggatgagaatggcaaaattagtcgccttcgtcgagagtgcccttctgatgaatgtggtgctggggtgtttat

SEQ ID NO: 110442 - DNA, 97 bp, Homo sapiens
taagagtacatgtaacataatgtaagggacaagaatccttcaagaaacaggaaaaaactcctaaaacaccaaaaggacctagttctgtagaagacat

SEQ ID NO: 110443 - DNA, 102 bp, Homo sapiens
aacaagggccggattctcacccaggttgtcaccgagccacccaatgggctgaaactcaacatgagggcaacttacttcaagatctctcacgaaatgctggac

SEQ ID NO: 110444 - DNA, 75 bp, Homo sapiens
ttcacttctgctggaaggacaggacgtccgggaacgtggaagacgctcagagaagttaagcaagttgccccggac

SEQ ID NO: 110445 - DNA, 83 bp, Homo sapiens
gaacgaccggctcctgctcaagatctcagagaaggaggaggtgaccacgcgcgaggctgaaggggatgctaagggagataaag

SEQ ID NO: 110446 - DNA, 90 bp, Homo sapiens
ctctttacctggctgttcatcttccataatcaactggtgaaaggtgtagcagtcactcggcctacacccacagcatcgaccttgtgaacc

SEQ ID NO: 110447 - DNA, 83 bp, Homo sapiens
cggtgcgctgggggccggggcgcgtcgcagctggaagaagaaagatctgtgctcaataatcagttgttagaaatgaaaaaaag

SEQ ID NO: 110448 - DNA, 100 bp, Homo sapiens
aagatagttgtggtgggagacagtcagtgtggaaaaactgcgctgctccatgtcttcgccaaggactgcttccccgaggctgcctgctgtttcccgggga

SEQ ID NO: 110449 - DNA, 82 bp, Homo sapiens
tgaagtcaaattggccctgaaaaaagacagagaaactatgggacacagatatgttgaaggaattcttttagttggaccccca

SEQ ID NO: 110450 - DNA, 82 bp, Homo sapiens
tgtgactgctttggacgtgggagtcacctgaaagccaggaaatggaaccatcactgttgctggaggcacctgacaaatccta

SEQ ID NO: 110451 - DNA, 75 bp, Homo sapiens
agaagaaagacgtggcagcaagcgggagtcggggatagtgtcatcggttcggtccagctgggagctccccgacct

SEQ ID NO: 110452 - DNA, 82 bp, Homo sapiens
ggtattgggagatccacagctaagacgccaggacccactggaagcctagaaatgaaatatggctacacacacctttctgcag

SEQ ID NO: 110453 - DNA, 75 bp, Homo sapiens
cggggggcagccggcgcggccggggcaggaggcgcagtgataacaatccatattcctcatttggagcaactctgg

SEQ ID NO: 110454 - DNA, 100 bp, Homo sapiens
cggcgcaggcccagatgcgcgcgatgctggaccagttgatgggcacctcccgggacgcttggaaatgacccgccacacctgaagcctgcaggtgctgagg

SEQ ID NO: 110455 - DNA, 90 bp, Homo sapiens
ctttgcaatttatcatcgatgcgtttaagggacaggacttggacaacttcattgccaactttggggatgcagggtttgtccttgtggcct

SEQ ID NO: 110456 - DNA, 76 bp, Homo sapiens
tctgaaactcatctgtacctcacttagaaaggggcataatcaacccatttcctgcttcaaaaggaatcagagcttt

SEQ ID NO: 110457 - DNA, 87 bp, Homo sapiens
gagagagagcttggttaacttgggagaaagtttcatctgtggatggagtattggtttatgatgataaagactacaggagaattcggt

SEQ ID NO: 110458 - DNA, 108 bp, Homo sapiens
gcttggggcccgcacggaccctctacttcagaatgggtaccacagaccatgtcatcgtcctggcgtccacgaaccgagctgacattttggacggtgctctgatgaggc

SEQ ID NO: 110459 - DNA, 75 bp, Homo sapiens
gggtcctttatatagaagggagagtagccttgttagatgacttggataaagaactaaacaactacattatgcgat

SEQ ID NO: 110460 - DNA, 100 bp, Homo sapiens
ccaattttgcattgtttgtttgaaattgcattgacgactgtgccaaacccaagtctgaaatccacgtgtctatggccactccggtcactgtgtccatgga

SEQ ID NO: 110461 - DNA, 100 bp, Homo sapiens
ggccacagtcatgccctaccttcaggtgttatcagaattccgagaaggagtgcggaagattgcccgagagcaaaaaggggacacattggcaatgtctgga

SEQ ID NO: 110462 - DNA, 90 bp, Homo sapiens
cgagaagtccccgaccgactgaggctgtgcccaggtgggcgttctcaaggccttggcggagtgcggcatccctgtggacatggtgggagg

SEQ ID NO: 110463 - DNA, 74 bp, Homo sapiens
ggatttacgcgcacgttggaaccgaagagagctctgttgttgcagtcttaaaattttggtagcagaaagcaaat

SEQ ID NO: 110464 - DNA, 75 bp, Homo sapiens
ctgaggcacatggagctgaaaaacttgatccaggccagcccaccttgggacaccttgactccaagcccagcagta

SEQ ID NO: 110465 - DNA, 50 bp, Homo sapiens
gggcatgtggcaaaacacacagctgagctcatttagaggcgagttttgag

SEQ ID NO: 110466 - DNA, 98 bp, Homo sapiens
gtgctgccactgcgggggcaagacgaaggaagatgagaatgtgcctactgctcctgatcctccaagtcaacatttacgtgggcatgggacaggctttt

SEQ ID NO: 110467 - DNA, 101 bp, Homo sapiens
agctgctgcagtccttcgcgccctcctcgccctccccaccgacatcatgctccagttcctggagcagatgtctcaagtattagatgccatgtttgaaaaat

SEQ ID NO: 110468 - DNA, 83 bp, Homo sapiens
cctccttcttcctcaactatctcgctgacacgcagaataccctctaccatctgctttggtcagggtgccgctcgaggatttaa

SEQ ID NO: 110469 - DNA, 75 bp, Homo sapiens
gcaactcccagctcaatgcaatgagctcaaatgatacttttcccacagcaatgcacattgctgctgcaatagaag

SEQ ID NO: 110470 - DNA, 95 bp, Homo sapiens
ccgcgaggaggcgcgggaggtgttcgagaacgaccccgagacgggcatgacgtccttgatgaaggccgcgctggacctcacctaccccatcacgt

SEQ ID NO: 110471 - DNA, 108 bp, Homo sapiens
ctcggtagaaggccagagtcacacacggtcctaagagctgggcaccaggaagcgaaggctggatgcagcagtctcggccctggctgctctatgcagtgaatattacat

SEQ ID NO: 110472 - DNA, 100 bp, Homo sapiens
taacagtacatctttttctaaggccctgggctgcatcttgtacctgctgtgcttccggcagcacccttttgaggatggagcgaaacttcgaatagtcaat

SEQ ID NO: 110473 - DNA, 100 bp, Homo sapiens
tgaccggatattcagttgcacatccccacatcaatgcactgccaatgatgagttttgatcatcctgagaaaaatgggccttggcctgcagacccaataaa

SEQ ID NO: 110474 - DNA, 100 bp, Homo sapiens
aagcaagaaggccctggacacagcaatatctctgggctttcacagataacaacgaacttgatgcaagtgataggtttgccaaggtcagacctctcatcat

SEQ ID NO: 110475 - DNA, 101 bp, Homo sapiens
ctggaaactgtgtggagacccttaggctacaggctttaagaaaaatgcctcacattaaacatgtggatctaagcgaaggacaaggttgcccttttgatagg

SEQ ID NO: 110476 - DNA, 100 bp, Homo sapiens
tgtgccctggccatcaagcagaggggagcctgttgtgaacagtgcaaaggctgaccggttccctgatgtgttacctgcttctgctactgatccaaactgc

SEQ ID NO: 110477 - DNA, 88 bp, Homo sapiens
ttcagcaagtatgttctcagaagctatacactcattatctgatacttgtaatcagatggtgtcctcagaccgaagccaactttccttt

SEQ ID NO: 110478 - DNA, 100 bp, Homo sapiens
gtcttcccaggctgtcatataactcctgagaatagtggttcttaactctgtgtaatcctgagagattcacatggtgttgcacaagtacgttttgtgacag

SEQ ID NO: 110479 - DNA, 90 bp, Homo sapiens
ggaggacctgcctctcggtggccccgggccagcaggttgagaacttgttgcttagtaaccaagggaccattaagctgtgtgactttggca

SEQ ID NO: 110480 - DNA, 88 bp, Homo sapiens
atgcccttgtccgagctttaacagactcaacacccagagatcttgattattccagagtttgtgattcagacactatgcttgacccagc

SEQ ID NO: 110481 - DNA, 83 bp, Homo sapiens
gttggaagcagccgatccagcctgcggagcctgtggggcaggtacatgatgttgattgatggcacaaatgaagtttttatgat

SEQ ID NO: 110482 - DNA, 74 bp, Homo sapiens
tgggcttcatcgtttataaaatccgggctgctgggtccttttgtacaagtggatgaactgatggaaattttccg

SEQ ID NO: 110483 - DNA, 83 bp, Homo sapiens
tcctggggttgacgacctagctggacaatgcagatcttcgtgaagactctgactggtaagaccatcaccctcgaggttgagcc

SEQ ID NO: 110484 - DNA, 82 bp, Homo sapiens
cagaatgcagtcatggttgacatacatgatcaggtgggtcttcaaacaactctatgataaaggccttgtttatagaggtgtg

SEQ ID NO: 110485 - DNA, 98 bp, Homo sapiens
tatcttaacaaagcgggaattgtgcaagccataattacagaggactcggatctcctagcttttggctgtaaaaaggcaccacgaagaagaagtttgaa

SEQ ID NO: 110486 - DNA, 75 bp, Homo sapiens
tgcggcacctggaggaggagaaccgagggaggcgccacatccaccacctggggaaccagctgcagctgaaccagc

SEQ ID NO: 110487 - DNA, 98 bp, Homo sapiens
cgcagtggtcgcttcttctccttggaacaggcctttgagagcagccagaagtacaaagaggggaagtacatcattgaactcaaccacatgatcaaaga

SEQ ID NO: 110488 - DNA, 100 bp, Homo sapiens
ccccgcactgcagccgcggggagcgccgcgccatcgagaagctcgcggtggaagcctctggaacctgaggcggctgcttgaacctttggatgcaaatgtc

SEQ ID NO: 110489 - DNA, 101 bp, Homo sapiens
ggaagaaatgaaatttcatgagttcgttgagaaactgcaggatatacagcagcgaggaggggaagagagatgtgtctgagggctcagtccccaatggagat

SEQ ID NO: 110490 - DNA, 100 bp, Homo sapiens
cgaaggcggctttagtggcagcatgaagcgcaccccgactgccgaggaacgagagcgcgaagctaagcttcagtatcagacacagcacagcagccatctg

SEQ ID NO: 110491 - DNA, 100 bp, Homo sapiens
ccacagtgtgcacagatgaacgaagttatggcagagttagctaaagaactccctcaagtttcatttgtgaaggatcatgctcctctgtggagcaagtgcc

SEQ ID NO: 110492 - DNA, 100 bp, Homo sapiens
gggttccagggagatcaaggacttcaaggatttctacctttccatagcaggtatcattaatgggattggaaattttaagtgcctttgtggacagattatc

SEQ ID NO: 110493 - DNA, 74 bp, Homo sapiens
gtctgacagccctgtgtgacaccaagataagtaacattctgcctgatcaatgcaggagtcctgtacctctactt

SEQ ID NO: 110494 - DNA, 49 bp, Homo sapiens
aatcttccctctcttccggatgcttttgaacacttgcagcaattagaat

SEQ ID NO: 110495 - DNA, 82 bp, Homo sapiens
acgagattcaagattatttgcaacagctcacgggagcaagaacggtacatccaagcagaagtccagttccctccaggtagca

SEQ ID NO: 110496 - DNA, 75 bp, Homo sapiens
tccagcgccggcctcctcagtgcgaagaagctgcagccgcacctggccaaggggccctccaggaaccggcaagac

SEQ ID NO: 110497 - DNA, 86 bp, Homo sapiens
gagtgtatgaccacaaacagccatcaaggtaacaactccaagtttcctttggataatacacctgttcgaaatcggggcgatggaga

SEQ ID NO: 110498 - DNA, 75 bp, Homo sapiens
aaacctgcttggataacttagccagcaagggcaacttgatccagctggaggccttcctgagccgcctgtgctgca

SEQ ID NO: 110499 - DNA, 90 bp, Homo sapiens
agatgaggagcccctggcctgcccggacgagttcgatgacttcgtcacctatgaggtcaaaatgcagatcttcgtgaaaacccttaccgg

SEQ ID NO: 110500 - DNA, 99 bp, Homo sapiens
agccggcagcacgcgggcgtggaggaggtggacatcccgtctaattccgtgtaccgctacccgcccaagtccgaatcagctgaaccaagccagttggaa

SEQ ID NO: 110501 - DNA, 74 bp, Homo sapiens
tgcaggctatggaacacactgaagttcttcagcttctcagccccccaggtactccaaagattcaggtttactca

SEQ ID NO: 110502 - DNA, 75 bp, Homo sapiens
accatcggtgcaaatttacagaagcagtacgagaactggcagccaagggagtaaaagtccctcgcaatttccgac

SEQ ID NO: 110503 - DNA, 83 bp, Homo sapiens
ctgcaaagcgaggctgaagaaggccaaggctgcagaagccaaagccacggagtgtggccatctggggccgtgtggtatttgcc

SEQ ID NO: 110504 - DNA, 80 bp, Homo sapiens
agaaggccaagaagcagctcctgcatctggcggaggagaagaattcctccacgtactgggaaggcaaagcagatatggag

SEQ ID NO: 110505 - DNA, 50 bp, Homo sapiens
gattccaagtaactcttatttgtttcatgatcaacatgggagactcccac

SEQ ID NO: 110506 - DNA, 83 bp, Homo sapiens
gtttggcatctgtggccgagttgctgttgccgggtgatagttggagcggagactgacccagatgatgtggtaccagttggcca

SEQ ID NO: 110507 - DNA, 96 bp, Homo sapiens
cttgggggaaaacttcaaagagccggatcgcaggctccctgcctactcccccaccggggatttcagagttgcatgctgagaatttgaaaaatgaag

SEQ ID NO: 110508 - DNA, 75 bp, Homo sapiens
cggggctccaatggcgctttctacaagcaccacacactggaagcagacgctgttcatgatggacgacccagtccc

SEQ ID NO: 110509 - DNA, 101 bp, Homo sapiens
catgaagccagtaagtcgtcgcacgctggactggatttattcagtgattctgaaaagaaatcatctctcctgtcagaggaacaacaagaaacaagcacttt

SEQ ID NO: 110510 - DNA, 97 bp, Homo sapiens
cgctcgggtcagtcggcggccggactgggaagatggacgcagttcaaaaggtgatgacctatcaacagccattctcaaacagaagaaccgtcccaat

SEQ ID NO: 110511 - DNA, 90 bp, Homo sapiens
ggaacagtgtgtccagcatgggagagtacatgagacgatgaagcaaaggtactccaaagattcaggtttactcacgtcatccagcagaga

SEQ ID NO: 110512 - DNA, 97 bp, Homo sapiens
catcctggaagctgggaaatgggtcacgatcgtggagtaaactgggctgccttccaccccactatgccccttattgtatctggggcagatgatcgtc

SEQ ID NO: 110513 - DNA, 50 bp, Homo sapiens
gtcgccctcaaggccatgatcaaaacggtaacccagtgcaagtacaaacg

SEQ ID NO: 110514 - DNA, 74 bp, Homo sapiens
ctgtcccggttcatcacggccaatcagtatgagatggtgtaaggagaaggtctcctcatgaccatatccctgtt

SEQ ID NO: 110515 - DNA, 82 bp, Homo sapiens
ccgagagcgcgaatatcgtcatcgttagaagggacagagcagaatgggctgatatagatccggtgccgcagaatgatggccc

SEQ ID NO: 110516 - DNA, 75 bp, Homo sapiens
caggcccgagcccaccgcgccgggccccggacgccgcgcggaaaaggtgggccatgcacagacacagctcatgtc

SEQ ID NO: 110517 - DNA, 100 bp, Homo sapiens
gaaacggcgcaagcgggagcctccgcgggccaaggagccacgagagaatgaacagccttccctcgtttggtttgacagaggaaagttttatttgactttt

SEQ ID NO: 110518 - DNA, 100 bp, Homo sapiens
gggcaggctcggcagggcaggcagctccaggagggtgctggagaatctggtaaaagcaccattgtgaagcagatgaggatcctgcatgttaatgggttta

SEQ ID NO: 110519 - DNA, 96 bp, Homo sapiens
actggttggtgaagaaggatttgtaggatcgggtgataggatttcatattcttggaccaaacgccggtgaggttacccaaggatttgcagctgcaa

SEQ ID NO: 110520 - DNA, 96 bp, Homo sapiens
atggtgcagagattaaatgcggtttccaagcacacgggacctgctgaagctcacacccgtggaccacccagactgcctgccgctacaggatgccct

SEQ ID NO: 110521 - DNA, 75 bp, Homo sapiens
cctgagtgtctaccagaagtgcaaggacaagcaggctgctgctaaagggtcaccatgaagttcaatcccttcgtt

SEQ ID NO: 110522 - DNA, 109 bp, Homo sapiens
agccaaagctactcctactcatctattttgaataaatcagaaactgaagcgtaaaagatgtgttgttttcaatcaaggtgaattggatgctatggaataccatacaaag

SEQ ID NO: 110523 - DNA, 82 bp, Homo sapiens
ttccggcggctgccgtgactccagtgcaagcatttgaccaagccgtgaccaaggacacctgcatggcggttggcttcttcca

SEQ ID NO: 110524 - DNA, 75 bp, Homo sapiens
tgatcgctccgttaggctgtgtgtctgttacagataactgtgtccagaggacccccaggccatccgtggataatg

SEQ ID NO: 110525 - DNA, 51 bp, Homo sapiens
tgaagccgcctctgtattacttaccaggccccaggcatggaagagctgata

SEQ ID NO: 110526 - DNA, 100 bp, Homo sapiens
aaagggaagtcatttctactggacttcatgcttagatacatgtataacaaggttcttcacacacccccattcggcgtagtacccagagagctcaagatgt

SEQ ID NO: 110527 - DNA, 100 bp, Homo sapiens
caggatctccttcccagccttcagaaattgccggtctgggagttgggggcaaggagaagatcctgggccatcactgtgcatgtccccatgccctcagcag

SEQ ID NO: 110528 - DNA, 74 bp, Homo sapiens
cagctccgaaatcaccaccaagcttctgaaccgaatctgaaattacggtccaggctaaagcagaaagtggccga

SEQ ID NO: 110529 - DNA, 88 bp, Homo sapiens
tcggagcccggagcgtgcctcggcggcctgtcggtggaccctgatgacatacatggttgagggtggtggctcaagcaccatggctcag

SEQ ID NO: 110530 - DNA, 100 bp, Homo sapiens
caggaccctgtgcaggagcagctccgggtgacacgaggggactgaagatactcccacaggggctcagcagggtacaggcatccttcacctgctattgttg

SEQ ID NO: 110531 - DNA, 50 bp, Homo sapiens
gtcaggctctaaacaaaattctgctgaaccaataacgtttccatctggag

SEQ ID NO: 110532 - DNA, 74 bp, Homo sapiens
accgtgatcctgttagatatcgaagacagtacaatgtagattataaactggagacttacttgaagattgctagg

SEQ ID NO: 110533 - DNA, 100 bp, Homo sapiens
ctttttggcttggggagctgcagcgttcgacacttcgtgtatgatcatgtgttcgctgagaagatcacttccttgcaaggtcagccaagccctgatgaag

SEQ ID NO: 110534 - DNA, 100 bp, Homo sapiens
gaagcacttaagaaatgtcatgagattgagagagaaagaccacagcaagattctttcattcgtctcctcctagcctgggggaccaggctcgaactgaccc

SEQ ID NO: 110535 - DNA, 96 bp, Homo sapiens
ggatatttagaatatgtcaagaaattagggtttgtttctgcgtcacatgatcttggcctacagtaagctttctttcagccaagtgtttaaactgta

SEQ ID NO: 110536 - DNA, 49 bp, Homo sapiens
gagaaggaagaggtgtttgaaaagttgtcactcagcccagtccatcagt

SEQ ID NO: 110537 - DNA, 75 bp, Homo sapiens
acagcaatatctctgggctttcacagtaatgcacacgaatccggaagtgacgccagaagaagaggaagtgaaggc

SEQ ID NO: 110538 - DNA, 100 bp, Homo sapiens
ggggacccgcggtccccaccgtgcagcggggcatcatcaagatgattacataccggttacggcacctccttcgtgcaaggtgtgatgcatccccagtgac

SEQ ID NO: 110539 - DNA, 100 bp, Homo sapiens
tgagaggttctctgccctggaaaggctgactacaattcaagatggaaaaggtgatgtaaccattacaaatgatggtgctaccattctgaaacaaatgcaa

SEQ ID NO: 110540 - DNA, 101 bp, Homo sapiens
tgctcagtgcctgttacttgggcaccccgagggggcaggaacaaaggaccggaccctgattcgcatcatggtgtctcgcagcgagaccgacctcctggaca

SEQ ID NO: 110541 - DNA, 75 bp, Homo sapiens
tccaggaatgccagtgcatcttttgcacagctctcatttagaggcgagttttgaggaggtagagaacaacctgct

SEQ ID NO: 110542 - DNA, 100 bp, Homo sapiens
gatgaagatggaattgaagaggaagatgatgatgatgatgaaattgatgatgatgatacaatttctgactggaatctaaatttgggaatggatgatgaag

SEQ ID NO: 110543 - DNA, 98 bp, Homo sapiens
cccggacggtgggtctgcatcgagaccccgagctctggagctggaaaaacccgggcattgggatcccgtggcagttgcagcactgaagtggagaagga

SEQ ID NO: 110544 - DNA, 83 bp, Homo sapiens
gtcgaggaggcgcaggagactgaccgcaacggcaggtgcctccggagccagcgtggtggccatagacaacaagatcgaacagg

SEQ ID NO: 110545 - DNA, 80 bp, Homo sapiens
gctgaccccagagtggcctgtctcctgagcatgttatttgaaagcaattgagacgcaaccgaactttgcagtagcttgga

SEQ ID NO: 110546 - DNA, 100 bp, Homo sapiens
agcagccgccatggctctgctccgaggtatcagcagatgttgcacacaaacttggtataccttgctacaatagcagattctaatcaaaatatgcagtctc

SEQ ID NO: 110547 - DNA, 50 bp, Homo sapiens
ttcatggtgcggctcatcttcgagaggttgttattgatgccttcagattg

SEQ ID NO: 110548 - DNA, 82 bp, Homo sapiens
gcgccgagcggaggaggaggaggaggcgaggaggagagactttgatattcactgatggactccaaagaatcattaactcctg

SEQ ID NO: 110549 - DNA, 75 bp, Homo sapiens
tggggacgtgcctgggcctggcctgtacaagccagctgccatgttgtgagcacataccacatagctccatggaga

SEQ ID NO: 110550 - DNA, 83 bp, Homo sapiens
atgcccgcggccggagagctggaggagaggttcaaccgcgccctgggccaccactgtacgttacaaagggcggaacctgcgga

SEQ ID NO: 110551 - DNA, 83 bp, Homo sapiens
gtgttaaatctccttggtgtgatgtttttgacatagatgatgcaaagatgtttactgaactgcaacagatgaggcaacagtta

SEQ ID NO: 110552 - DNA, 101 bp, Homo sapiens
ggcggcggaggatgagcctgcagagcgcgcagtacctccgagagatgcaggtcagctcctccagtaccacaacttctgagagtcaagatccgtcttctggg

SEQ ID NO: 110553 - DNA, 100 bp, Homo sapiens
ggatgttcatgggcagcaccatcgagccagaagcagtatttgtcctggaatcttctgcggcttgtccatagtgtgaataaaaactaaatcacatctataa

SEQ ID NO: 110554 - DNA, 82 bp, Homo sapiens
gaggagcatgaacttccggtgctcagccgccaggcatcaacagggactcggagatcatgcagcagaagcagaaaaaggcaaa

SEQ ID NO: 110555 - DNA, 73 bp, Homo sapiens
gcggcgcggccatggctcacctccggggatttgccaaccagatctttgtagaatttgatggctgtaactggaa

SEQ ID NO: 110556 - DNA, 100 bp, Homo sapiens
atacgaggaggaagaggtggccataccgttgaccgctcctccaactaaccagttgtctgcattcaaaagagcattctattaaagctaccttaatttggcg

SEQ ID NO: 110557 - DNA, 51 bp, Homo sapiens
tcaacttaaaagatgccacctctaaggattgctgtcacgtctaatgtggct

SEQ ID NO: 110558 - DNA, 88 bp, Homo sapiens
agattcgcagtggtcgcttcttctccttggctgaccccgcactacatctacccaccagccatcgtgcagcccagcgtggtgatcccag

SEQ ID NO: 110559 - DNA, 75 bp, Homo sapiens
gatctttcagtagaactgcaagtgttccattgcctaaagaggagaacatttctgctcccttgatctccagctccc

SEQ ID NO: 110560 - DNA, 96 bp, Homo sapiens
gagagcgtgaccgagagcgcgaatatcgtcatcgttagaaggtttgaatattggcagcggtgcattcgagacaaagacagctaacaaaattgcttc

SEQ ID NO: 110561 - DNA, 100 bp, Homo sapiens
cgaacccccaatgctgaccaaggaggagcctgttccagaactgctggaagctgaggaaactggagcacccatcctaactgatgatgttagcctgcaggtg

SEQ ID NO: 110562 - DNA, 98 bp, Homo sapiens
caaattccgacgtcttgaagacttccgagtagataaaacatcggttgtgaagagaaagccaaaaagaatgccaacaagcctttgctggatgagattgt

SEQ ID NO: 110563 - DNA, 95 bp, Homo sapiens
gggacccttgcatggtgtttcaaagggtggtgaagaactaaggagagtagttatcttgatggaattagaagttttgaagtcagctgaagcagttg

SEQ ID NO: 110564 - DNA, 100 bp, Homo sapiens
agtacgcagacgccggccatgtgtgccacctgtgccatccaaactgcacctacggtgatgctgcttcaaaagtcatggtggaattgctcggaagttacac

SEQ ID NO: 110565 - DNA, 83 bp, Homo sapiens
ggtgaatggagatgcagctcagcagatctgactgcagccatgagcagcaatgagtgcttcaagtgtggacgatctggccactg

SEQ ID NO: 110566 - DNA, 83 bp, Homo sapiens
tccgccggggcgcaaagacttccgaggccgccctccgcgtgttcccaggcccgtggagagaatatatacagccctgctctggg

SEQ ID NO: 110567 - DNA, 98 bp, Homo sapiens
ggagaccgagcccgaacagcaggggagtacatcaagacctggcggccacgctacttcctcctcaagaatgatggcaccttcattggctacaaggagcg

SEQ ID NO: 110568 - DNA, 50 bp, Homo sapiens
ggaggaggttcttcagtgtatgcctggctccatctatgagatctctggga

SEQ ID NO: 110569 - DNA, 95 bp, Homo sapiens
aaagataaaaacttgcgccagagaaacacaaattaagtactgcttacaatgtttggcttgagcaacaagtttgatactgaatttccctccgttct

SEQ ID NO: 110570 - DNA, 74 bp, Homo sapiens
actgtgacgtctgaggctggagaaaatgatgaaagtcacagtcgaactgttattggaattgaagagaaaaaaaa

SEQ ID NO: 110571 - DNA, 74 bp, Homo sapiens
tgaaaagctgctgttttgcaggagatcgtgaccaggtgaaaggtgtagcagtcactcggcctacacccacagca

SEQ ID NO: 110572 - DNA, 100 bp, Homo sapiens
tgagatgggccgcctcatcactggagccaccagcccaaccgtgttgtatgtgagtggaggaaatacgcagtctattatcctcccagtccacaacgctgaa

SEQ ID NO: 110573 - DNA, 100 bp, Homo sapiens
tgaaaatgaagggtgattacttccggtaccttgctgaagttgcgtgtggtgatgatcgaaaacgctccatgacaattcaaaaggtgaagggattgctgtc

SEQ ID NO: 110574 - DNA, 100 bp, Homo sapiens
catccactttcccagcaagaaggtccagcagcagctgtggctccagtatcagaaaggtctcataacaacaaactgcagtctacagcttcttaaagttcag

SEQ ID NO: 110575 - DNA, 50 bp, Homo sapiens
cctcctaatccctagccactatgtaattcgccaaaatgacgaacacaaag

SEQ ID NO: 110576 - DNA, 75 bp, Homo sapiens
gggtgccaaagtcttcctcatctacgaggtcatggaaaatggaagatttgcaaaatacaaatattttacccatgt

SEQ ID NO: 110577 - DNA, 74 bp, Homo sapiens
ctgcttctcagaagatcagagaactagagtctatgatcggcatagacccagattgacttgatgcacaacatcac

SEQ ID NO: 110578 - DNA, 101 bp, Homo sapiens
cgggcccctgagccatgcccatcgcagccgccccgaaggagccaggatgtacagttacccagcacgtgtacctcctcctcctcctattgctcgggctgtag

SEQ ID NO: 110579 - DNA, 89 bp, Homo sapiens
agatgcttcagagagaggaagccgaaaacaccctgcaatctttcagacaggaactgtggctgcaccatctgtcttcatcttcccgccat

SEQ ID NO: 110580 - DNA, 75 bp, Homo sapiens
ctcctctgcccccccggcaagacctcaacgcccctgacctctatatccccattccagggtcacccccgagaggac

SEQ ID NO: 110581 - DNA, 82 bp, Homo sapiens
gtgccctgagggccttcgagagctaccgcgccagacaggttgaagaagcctcagcggaggcgatacggcctcctcgccaaca

SEQ ID NO: 110582 - DNA, 128 bp, Homo sapiens
tcgggaataacacaccggagacttttggggggaaactaggtcgatggtcggcggcgcccggatgggcagctgagacaatgcagatcttcgtgaagactctgactggtaagaccatcaccctcgaggtt

SEQ ID NO: 110583 - DNA, 82 bp, Homo sapiens
acccagcctcgtgggagccccgcgggtcctgcccagggccaattcctgtccccccagcagcatggcatcgtgtgctgaaccc

SEQ ID NO: 110584 - DNA, 74 bp, Homo sapiens
ccgcgcaatgggcacccgcgacgacgagtacgactacctctttaaaggacatgatccacatcgcggacaccaag

SEQ ID NO: 110585 - DNA, 119 bp, Homo sapiens
gtgcattttcctgatccaaacaagcttcattgttttcagctaacagtaaccccagggcgacataccttctgttgaataccttttacaaaatggaagtgatccaaatgttaaagaccatg

SEQ ID NO: 110586 - DNA, 90 bp, Homo sapiens
ggcctcgctggagatcgagtaccaatgccgcagtgtgtctggagaataaatgtggatatccctgaggaagctaatcagaatctttcgttt

SEQ ID NO: 110587 - DNA, 98 bp, Homo sapiens
ccttgcaaagggcacgtatagcattggtaaagaacgatcgtccagtggaggtttttcccactcggctttcacgtttgggattgagagccacatcagcc

SEQ ID NO: 110588 - DNA, 83 bp, Homo sapiens
ttgctttgcgttcagatgcggcagctcagcgcagctccgccaccggcacggccaggccagcatggtggaccacttacttccag

SEQ ID NO: 110589 - DNA, 100 bp, Homo sapiens
cctacgtgttcctgctcttctgcggcgcctacctctacaaacagggctttgccatccccggctccagcttcctggaactcgtgtccctgaagccttgtaa

SEQ ID NO: 110590 - DNA, 75 bp, Homo sapiens
ggtgtacgcgctgttcagcaccgtcaggattatacttactcagctgttaagagtaggcaatttcttcagttcttc

SEQ ID NO: 110591 - DNA, 90 bp, Homo sapiens
ctctcaggcacgtcctcgacctcagttgccacgtgcacatgctggtgccttccagagggagacgctgttgcggcagctggagacgaacca

SEQ ID NO: 110592 - DNA, 74 bp, Homo sapiens
cgctcctaaggcaggaagatggtggccgcaaagaagacggtgctgctacccccgtatgatgatgccactgtgaa

SEQ ID NO: 110593 - DNA, 101 bp, Homo sapiens
cctgcccccaacttcaaagccacagctgttatgccagatggtcagtttaaagatatcagcctgtctgactacaaaggatcccctaacaacagtgagagagc

SEQ ID NO: 110594 - DNA, 75 bp, Homo sapiens
gaacttagcataaatgctgaaggatgaaggtttaaggctcagaaaggtagcacattcggataaacctggatcaac

SEQ ID NO: 110595 - DNA, 132 bp, Homo sapiens
ttcttcatcaccgatggaaagtacaactccaccctgctgggaatcccgttcttcgccatggacagatttgaccagttttgggccatcaatcggaaactcatggaatatcctgcagaagaaaatggatttcgt

SEQ ID NO: 110596 - DNA, 115 bp, Homo sapiens
gtgtcccggcctgaggtgtcggccggatccctccttctcccggcgcctcaagcggaaggtgtttaatcaggaaggagaattcatgttgaagtttggctcaaatggagaaggaaat

SEQ ID NO: 110597 - DNA, 75 bp, Homo sapiens
ctattaaaaatgtgaacacagcactaaatacaactcagattcgtattttacatggagaagtgaacaaagtgaaac

SEQ ID NO: 110598 - DNA, 97 bp, Homo sapiens
atggagatgtcaacagagctatcaatgttcttctggaaggaaacccagacacggaatccggagatgatgagtatcaaggggaccagtcagacacaga

SEQ ID NO: 110599 - DNA, 105 bp, Homo sapiens
gttttttgagcagcaaaggacttgggatgcgattggaagagaagcccccggattttttatcaagcagaaatgcatcgaacaacgagaatcaagatcactgagcta

SEQ ID NO: 110600 - DNA, 100 bp, Homo sapiens
cccgccccgacgccgcgtccctgcagccctcgcccggcgctccagtagcaggacccggtctcgggaccagccgaaagtcagaaacatggccctggatgat

SEQ ID NO: 110601 - DNA, 75 bp, Homo sapiens
caagaagaaatccacagatttagttctgtacatcaggaacgtctctatcaagaatacaatttcagcaaggctgag

SEQ ID NO: 110602 - DNA, 78 bp, Homo sapiens
gcagctgcccccgagtcagagggcgcagtccgcattcaaaggtctcctctgagcctccggcctccataagacccaaaa

SEQ ID NO: 110603 - DNA, 50 bp, Homo sapiens
tgcgagcggcatctacctactgatgcaagtgctgctggaccaggcgggct

SEQ ID NO: 110604 - DNA, 117 bp, Homo sapiens
agctgtacaattcgattattcacaagaaagggtaaactgtttttggcagaagtcaattcatctggaaagactatctctgagtcagacttaaaccactctttttcactaactgattta

SEQ ID NO: 110605 - DNA, 75 bp, Homo sapiens
gggtcgggctggcgcgaccctcgggaacagcgccttttgatagtcctaagtaattgctgctatctagaacgtcac

SEQ ID NO: 110606 - DNA, 75 bp, Homo sapiens
aatcacgatgaagaggaggcggggagaccgcccgcgatgctcccagcccggtgagacctgcctgaatggcgggaa

SEQ ID NO: 110607 - DNA, 123 bp, Homo sapiens
gttttgctgggtgtgtcttggcccatgggaaccacatggatctgcctggagtccttcaataatgttaaacagtggctgcaggaaatagatcgttatgccagtgaaaatgtcaacaaattgttg

SEQ ID NO: 110608 - DNA, 82 bp, Homo sapiens
atctttctgcttttcaagagttccgatttcatcactcgtgacttcactcagccagccagccccagtgcctgctgagccgttt

SEQ ID NO: 110609 - DNA, 100 bp, Homo sapiens
gtgccttagaagccactgacagcccccagggcaggtgagccctgcatctggaataaggtcttcaaagcttcacctttctccaaaggcagatgtgaagaac

SEQ ID NO: 110610 - DNA, 83 bp, Homo sapiens
gacttagccctgctccaggaatgggacctcgagtcactgtgacatcacggctgcagccctggctacgggtgcctgcatcgtag

SEQ ID NO: 110611 - DNA, 75 bp, Homo sapiens
tggctgttcatcttccataatcaactggtttcattgaaaacagatcctgcaaaagttccaggtgcccacactgga

SEQ ID NO: 110612 - DNA, 74 bp, Homo sapiens
ggatcctgaggaggcagctgcggtggcagctgctgagttctcggtgaagaaactatgtgaagcaacactctgga

SEQ ID NO: 110613 - DNA, 73 bp, Homo sapiens
gcgctggtgtcaggcaagccagcagagagtgtggaaccatcagagaatctacaatccctgatggagaagaatc

SEQ ID NO: 110614 - DNA, 75 bp, Homo sapiens
cttttccagcatcgcagaggcaaaagcgtggcagtgggacccaaaagtaccgtgtgactgtgccgctgatggggg

SEQ ID NO: 110615 - DNA, 75 bp, Homo sapiens
tggaaatggaccctctcgggaccagggccagggagtgtctggcccagcacggctgaagtgagtagtgaatatagt

SEQ ID NO: 110616 - DNA, 100 bp, Homo sapiens
tcacaaggacttaatctgggttgagttaaagttcctcgtaattttcgcttgttggaagaacttgaagaaggacaaaaaggagtaggcgacggtacagtta

SEQ ID NO: 110617 - DNA, 80 bp, Homo sapiens
catcccatctcaatcagaattactagattttctctcaaactacgaggcagcacagcattctcagaagcagtctactgagc

SEQ ID NO: 110618 - DNA, 100 bp, Homo sapiens
cgtgcttttcgcaagaacaagactctcggctatggagtccccatgttgatggaatggggcgagtccttgctcaagatgtatatgcaaaagacaatttacc

SEQ ID NO: 110619 - DNA, 100 bp, Homo sapiens
tggcactgaggctctggaacttctgcccagctctccttgtctccagcttgtacctcatatcagatgactccgcaagggcacagggcccctcccaagatca

SEQ ID NO: 110620 - DNA, 98 bp, Homo sapiens
ccatatgttggtttgtagccaaaaacttgctggaaaccctgaaaggcgtcgggtttggagttcaagtcggtagccgacagcgttctgtttttacgtga

SEQ ID NO: 110621 - DNA, 82 bp, Homo sapiens
ttccagagagccagaaagaactgctgatgcaaggaatcccctgggctcccgtccactccactgctgaccagcccattcgcct

SEQ ID NO: 110622 - DNA, 75 bp, Homo sapiens
gcaaaaggtcacaaattacattacccaatggtggaatattgtatacctatcggacagctggcttttaaaggaatg

SEQ ID NO: 110623 - DNA, 75 bp, Homo sapiens
aaatgccagactgattgtcatgctcagggaccctgtggagagaaagctgtatgtgatggcttctgtgtttgtctg

SEQ ID NO: 110624 - DNA, 75 bp, Homo sapiens
acaagacctccgatatttagagctcatcagcagcattgagggaagtgttcgccagttactacatgaaaagataag

SEQ ID NO: 110625 - DNA, 100 bp, Homo sapiens
taataatgctggcaaagtggaaaaatgtgcgaaatgaatactgcattgagggacggacttctggtcttcttcttcctaattgttccccttattgtctgtg

SEQ ID NO: 110626 - DNA, 100 bp, Homo sapiens
cctgtcttcagatcttcacagcacagttcctgggaaggtggagccaccagcctctccttgtaatagctcttcaagtctgcaataaaaaatggcctccaac

SEQ ID NO: 110627 - DNA, 74 bp, Homo sapiens
aaaccttcaggcggcccatgggaacttcatgcccacttgaatggatccattagttctcataccatgaagaaatt

SEQ ID NO: 110628 - DNA, 75 bp, Homo sapiens
aagtgtccggggtagccccgttacagttgctgaacctgtttgcatgagttgctcctgacggccctttaggatact

SEQ ID NO: 110629 - DNA, 101 bp, Homo sapiens
tgtgtttccaattttgaacactttggagagattacctggggcaattgatgttatcggtcagactataactatcagccgagtagaaggcaggcgacgggcaa

SEQ ID NO: 110630 - DNA, 74 bp, Homo sapiens
taatccatcttcagcttcaattacaaggaagatcagttttcctgccatccaggctgctccctccttcagcaact

SEQ ID NO: 110631 - DNA, 100 bp, Homo sapiens
cccagagtcctggtcattccagtgcagggcaagagggtgaggatacactgaggaggcgactgctggccccagccttgacatcgccaatcgagtaccagag

SEQ ID NO: 110632 - DNA, 98 bp, Homo sapiens
tgacatagacactgtgaagcacctgtgtggcgactggttccccatcgagcccgccaagctgccccctgtgtgctattctttgatgagctggattcgat

SEQ ID NO: 110633 - DNA, 100 bp, Homo sapiens
cagatcacagccagagaaggggccagtcggaaaaactgaagcgctgcggcatggcgcgcgcctgcctccaggccgtcaagtacctcatgttcgccttcaa

SEQ ID NO: 110634 - DNA, 90 bp, Homo sapiens
gcgctgctggcctttgtgagcctcagcctgcagttctggaaaaaatgcatttttcaaagacctaacttcaattcagttattacctagtgg

SEQ ID NO: 110635 - DNA, 97 bp, Homo sapiens
ttcagtgactgctattgaaccaccaaaagtccattatgaaactggtcccctcttgctgttggctgcacatcaggaaggctgtgatgggaatgaaggt

SEQ ID NO: 110636 - DNA, 101 bp, Homo sapiens
cgcccgccgggaggaccgagcctaagagggcagccgcctgaaggaacgcgacggcggcgcccgcagatgctgagggttggaaaagcaaaagcagatgtgtg

SEQ ID NO: 110637 - DNA, 98 bp, Homo sapiens
gacattgcctgaggagcctcgttccgatgaagttaaattccgtcaagatttaatgaatattgcgggcacaacattatcctcaaaacttcttactcatc

SEQ ID NO: 110638 - DNA, 100 bp, Homo sapiens
atcatcagtctcctcctgaaggacaaagtccgggagagggatttcctaatggaaacattcatcatgtttaagaacctcattggaaagaacgtttacccct

SEQ ID NO: 110639 - DNA, 100 bp, Homo sapiens
ccttcccctgcctcaaggagctgtgcaccagcccccggtactgctataaccagaatttggtagaaaaaggatttacttgttggggccctcttgataaaaa

SEQ ID NO: 110640 - DNA, 89 bp, Homo sapiens
accagctggacattacattaagaaggggtcaaagtttagctgctcgagatcgaggagcatcccttcgtcagcagcatcaccagtaacaa

SEQ ID NO: 110641 - DNA, 75 bp, Homo sapiens
tcaaacaggagctggagcagctcaaagagctatatgttctcctttcagccaagacctttcaccagtgcaggggat

SEQ ID NO: 110642 - DNA, 87 bp, Homo sapiens
tacaggaatttcactatgaatacaaaggctctattccgttcgctggttcgccacctcaggggaacgatggccatggagtccacagcc

SEQ ID NO: 110643 - DNA, 73 bp, Homo sapiens
agctgttcctattcgggcatcttggctcctccttgaattcccactggaaattcgttgtatgaatcttattaca

SEQ ID NO: 110644 - DNA, 133 bp, Homo sapiens
cagagccaagaacgctggggttacaatccaagacacactcaacacattagacggcctcctgcatctgatggagggtgtttgtgagatatggttgaccagtgaagacacgggggcttatggcagagatattggc

SEQ ID NO: 110645 - DNA, 50 bp, Homo sapiens
ccccctgaggccccagaactatcttttcgtctctgctggatgaaccgaat

SEQ ID NO: 110646 - DNA, 99 bp, Homo sapiens
ggtcggctggcgtccctcttcagttctctggagccccagattcaacccgtgtacgtgcctgtgcctaaagttttgaacgaagaatgtgatcagaactgg

SEQ ID NO: 110647 - DNA, 141 bp, Homo sapiens
aaggcatctcctagtattgcatcctacagatgtgctgtaaacatcaaaagaagacggtgggatcaggagatgacattgctattttgggagaagtacaagcggaaaaagctgacgacactgaaaggcttgttgagatggaac

SEQ ID NO: 110648 - DNA, 75 bp, Homo sapiens
agatggagttcctcctggggaacccgttcagcacaccagtggggcagtgcctcgccgccaccggcacggccaggc

SEQ ID NO: 110649 - DNA, 82 bp, Homo sapiens
gatgtggggagtggcagagagtatgcattaaaggcttgggcactgtttaaaggaaagttccgagaaggcatcgacaagccgg

SEQ ID NO: 110650 - DNA, 100 bp, Homo sapiens
gatgtgttccgacagaggatgatgcagatgtacagacacaagcgggccaacaaataggatagtggctacccagagacgctggtcaacctcatcgtcctgt

SEQ ID NO: 110651 - DNA, 95 bp, Homo sapiens
gcccagaaacgtccacatgtgggtactgcattcctaccggtgtgacaggttgtgacaacgtgatcatggtgtgggacgtgggcactggggcggcc

SEQ ID NO: 110652 - DNA, 82 bp, Homo sapiens
ccttcggcagtccacccaccgccgccgcctcccaggggacggaaaatatagtcgcggtgatgataagcaacctgaaaggcat

SEQ ID NO: 110653 - DNA, 90 bp, Homo sapiens
catccccgcggacgccacagcgctgatgaaacaggcgcctatttaatcgacagagaccccacctactttgggcctgtgctgaactacctg

SEQ ID NO: 110654 - DNA, 74 bp, Homo sapiens
gcgggagggccgccggaggaaacgctgtcactgtggaaacgattctgagaacaataactccacaatggcgtcgg

SEQ ID NO: 110655 - DNA, 90 bp, Homo sapiens
gcccggagcaagcggagctcccccaagagccggaaagcggaatggccaaagactatgacgggtcttcctagcacatcagggacaactgcc

SEQ ID NO: 110656 - DNA, 83 bp, Homo sapiens
ctgacatcgcgacgctgctcaaaacctcgctccggaaaggggacacctgttggaatggtaacaaaaccagcaaatgaacaatc

SEQ ID NO: 110657 - DNA, 100 bp, Homo sapiens
ggatttcaccacaagaagggctgccagtatcttaaatagtgaagatggagaaatattcaataatgaagagcatgaatatgcatcgaaaaaaaggaaaaag

SEQ ID NO: 110658 - DNA, 75 bp, Homo sapiens
agtcacctctcaactgtgtgccaaaggcaccccctgtaatggcctatcctgctactacaccaacaggcatgatag

SEQ ID NO: 110659 - DNA, 100 bp, Homo sapiens
gacagagtcttctgggtctctctgcctgaggccctggagggagagaagcatttaaatcaaacggtattgagatggattgggttatgaaacataatggtcc

SEQ ID NO: 110660 - DNA, 90 bp, Homo sapiens
gccgtgcaggcagatcaggagcgggagaggcagcggcggctggaagtagaacgtgcactggaagacggttggatttcgtgcatcattcgg

SEQ ID NO: 110661 - DNA, 75 bp, Homo sapiens
gctgtgagggggttccgggaagatggtgctgatcaaggaattgatggacactccacagctgaccttgactgaact

SEQ ID NO: 110662 - DNA, 104 bp, Homo sapiens
cgtggaactgagcacctcccggcccccccagcatctaggaggggtgaaaactctttcagacccggttgcaaaggagagctgcatgctcaacctgctgctgtccc

SEQ ID NO: 110663 - DNA, 98 bp, Homo sapiens
actttatggaacctgaaaagcccaagtcgccctttccagaccacaattccacatgggaaacagaagtacctgtgcgccagcagaaatgattgcactat

SEQ ID NO: 110664 - DNA, 96 bp, Homo sapiens
cgcctcctccgccttcgccccaactgcttctcctggcagccctcgcgaggctcctgggtcccagcgagggtagcggctaccggagcgctgcagggg

SEQ ID NO: 110665 - DNA, 51 bp, Homo sapiens
ggagcacatgaagctgcacagtggtgatgagacaaaccatgcttctgccac

SEQ ID NO: 110666 - DNA, 90 bp, Homo sapiens
cagaatttcctgcgctgttccacctcattcaacttcagagctagagccggtgcaggccacgcagaacaagacagggaagtatgtgccgcc

SEQ ID NO: 110667 - DNA, 100 bp, Homo sapiens
ctaaactgtatagcactttgtgaagatctgcggaaccagccctacatccgcgcagacacaggccgccgcagtgcccgtcggcgtcccccgggccccccac

SEQ ID NO: 110668 - DNA, 100 bp, Homo sapiens
aacagactgcttttacacctacggagacttgcagctcctctgctgaaacgtttaagcctctccacatccaaattgaacagcctggccatcggtctgcgac

SEQ ID NO: 110669 - DNA, 50 bp, Homo sapiens
ctagccggacgtcctccgactcaaggtaaactgtcttgagccccaccctc

SEQ ID NO: 110670 - DNA, 100 bp, Homo sapiens
gtgcagtccgacaccgtgttgccctcacccatcagaagcgatgagccagcctgcagagccaagcctgatgccagcatgatttatccaataatggacaagt

SEQ ID NO: 110671 - DNA, 83 bp, Homo sapiens
ggcagtccacccaccgccgccgcctcccagctcacaggtgcagtgcggtcttcagcgcgcttgaaagcacgaagttgttcggc

SEQ ID NO: 110672 - DNA, 96 bp, Homo sapiens
cgggatcgtgaccgagaccgtgaccgagagcgtgaccgagagcgcgaatatcgtcatcgttagaagggttcagaatctcccatgatgattggtgag

SEQ ID NO: 110673 - DNA, 100 bp, Homo sapiens
attgtgagctatttcagaactgttctcaggactcattattttaacatttgggagaaacacagccagaaggatcagttcttaagagcagccccggtaactg

SEQ ID NO: 110674 - DNA, 90 bp, Homo sapiens
actcacagggaggaggaggcggcagcggcggaggaaggcggcgcaccccgagagatcatggaagggaagtggttgctgtgtatgttactg

SEQ ID NO: 110675 - DNA, 90 bp, Homo sapiens
ctggggactatgcctgcgccgatggtagtgtccggaaagacaacgtgtcctggagagacagcacaatgggctctatcttcatcacacaac

SEQ ID NO: 110676 - DNA, 50 bp, Homo sapiens
aaatgtgccgtgatgtatgtgaacagcatgtggagttccgaaagcaaaag

SEQ ID NO: 110677 - DNA, 75 bp, Homo sapiens
ccatggcccctggtgaagatctcctggctcttcctgacccctggactttgcctgattatgactgtaccttttaac

SEQ ID NO: 110678 - DNA, 90 bp, Homo sapiens
tgggccagaggcagaaaacggacggaagaaaaggtctggccgttgaatctggtatcaagtgtcactctctccaagtccgcatcggaggct

SEQ ID NO: 110679 - DNA, 75 bp, Homo sapiens
tcctcattgctactgccctctgcgctcctgcatctgcctccccatgtggatcctgagacccattgtcatgcagaa

SEQ ID NO: 110680 - DNA, 74 bp, Homo sapiens
ctgaagctgatgaacaggaagttgtggctgaggttcaggatgaagaagatgatgatgactatgttgaagaaggg

SEQ ID NO: 110681 - DNA, 94 bp, Homo sapiens
gatgagggcccttgaggggaaatggatgctaaagaggctggaacaatgcagatcttcgtgaagactctgactggtaagaccatcaccctcgagg

SEQ ID NO: 110682 - DNA, 100 bp, Homo sapiens
ccgagcccaaagcccactacgagcctgctgaccgagcgcgagagaaatcacctgctaagaagctgactaatgcattaagcaagtccctgagctgtgcttc

SEQ ID NO: 110683 - DNA, 97 bp, Homo sapiens
tcttgctcagctctcacaggagagggcgttcaggttatcaatactctggctgaccatcatcatcgtgggactgactttggtggaagtccttggttac

SEQ ID NO: 110684 - DNA, 100 bp, Homo sapiens
tctttcctcgtggaatttgaagattctacagataaatcaggcaccaagtatagatgagaaagtagatcttcattttattgcattagttcatgtagatggg

SEQ ID NO: 110685 - DNA, 100 bp, Homo sapiens
gggagcccggcgccggagcccaaggacttttccagatttctcagaataaagtagcagttcttcttctagctggtgggcaggggacaagactcggcgttgc

SEQ ID NO: 110686 - DNA, 122 bp, Homo sapiens
gctggaaccctggggactacgacgtccctcaaaccttgcttctaggagataaaaaggtacatgtcccagagcaagcacacggaggcccgggagctcatgtactcgggagccctgctcttctt

SEQ ID NO: 110687 - DNA, 75 bp, Homo sapiens
ggcgcagatgcgggccctgctggaccagctcatgggcacggctcgggacgcccctgcctgacttctcacgagtcc

SEQ ID NO: 110688 - DNA, 98 bp, Homo sapiens
ggcggaggccggcccgcacgctgggactcctgctgctggtcgtcttgggcttcctggtgctccgcaggacctgaaggagaagaaggagaaggtggagg

SEQ ID NO: 110689 - DNA, 100 bp, Homo sapiens
tacaaggacaaagatgagatcaagccccagattaatcctaccatatgaaagatttattaaaggagaagaagataagcccctgcctccaatcaaacctcgg

SEQ ID NO: 110690 - DNA, 100 bp, Homo sapiens
agagcccggaaccactctttgtgccgcagcttcgcaggcctcaggatcattcagctcagcaaacaaatacagctggaagcaatgttactacatcatcaac

SEQ ID NO: 110691 - DNA, 50 bp, Homo sapiens
cctgctggtgttcgcccacgaccatggtgctggagaatctggtaaaagca

SEQ ID NO: 110692 - DNA, 98 bp, Homo sapiens
gatccggctcctccagctaccggcccaaggccatctacctggacatcgatggacgcattcagaaggacgccaggaaagcatgtgcagatgcaactctc

SEQ ID NO: 110693 - DNA, 100 bp, Homo sapiens
ctgctggcgctctggctgtgctgcgcggcccccgcgcatgtgctgctctacgttcgaaaggagtcagaagaagtctttgatgccctgatgctcaaaaccc

SEQ ID NO: 110694 - DNA, 83 bp, Homo sapiens
gcgcgaacccggctttcgcatttgggaccctgcaggccggtggctgctggcagcggaatcccccagatcaagtgcttcctcaa

SEQ ID NO: 110695 - DNA, 82 bp, Homo sapiens
gggacacgcagtgacgagcggccgaagcagctttgcgcaccacacactggaagcagacgctgttcatgatggacgacccagt

SEQ ID NO: 110696 - DNA, 100 bp, Homo sapiens
acagggaatattgcttgtgaagactgctccaaatgcctgaaatgtgcagatgccccgtgtcagaagagctgtccaactaatcttgatattaaatcattca

SEQ ID NO: 110697 - DNA, 74 bp, Homo sapiens
gtgactctaggcagatcttttacttcttgtgcttgaatctgcttatcttaatggccatgcagaaaccccagtat

SEQ ID NO: 110698 - DNA, 100 bp, Homo sapiens
ctctggactgcagaagaacaaggtggagttggtgccttccagtattatcagttacacaagatattttggagtgtatacaataatatccctcctgtgacta

SEQ ID NO: 110699 - DNA, 75 bp, Homo sapiens
gcgcgggatcccagcctcaggcgtgcgcggacggtgtgcggccacccaggctactttgggaaagttggtatgaag

SEQ ID NO: 110700 - DNA, 50 bp, Homo sapiens
agacgcgctgccgaggagaacccagcgggctacggggcgtggagtgctgg

SEQ ID NO: 110701 - DNA, 99 bp, Homo sapiens
taaacatctatgtgcccatggaagatgtgcacgatctgattttctggagagatgtgaagaagactgggtttgtctttggcaccacgctgatcatgctgc

SEQ ID NO: 110702 - DNA, 100 bp, Homo sapiens
caaagactggcaaaagcacaaggattctcgctgtgacagagacaacaccgagtatgagaaatcgaacggttggaagtaagcagccttgcccaaacatcca

SEQ ID NO: 110703 - DNA, 82 bp, Homo sapiens
gggctaaccagttagtggtgctcaacgtgtacgacatgctgagcgggctttggacaccatgaactttgatgtgattaaggga

SEQ ID NO: 110704 - DNA, 80 bp, Homo sapiens
cgtccggcttcggagcgggagtgttcgttgtgccagcgactaaaaagaggaccataattatggtgctcgtcctcctccga

SEQ ID NO: 110705 - DNA, 100 bp, Homo sapiens
agtctgattcagatgacaactgtacagatgtcactgacatcaacgaatgtgagcacaggaaccacacgtgcaacctgcagcagacgtgctacaatttaca

SEQ ID NO: 110706 - DNA, 82 bp, Homo sapiens
tggaaaaatgctggacaaattgagatatcccggtctccagaatctcccccatgccgtttcatccatcgcaggtctctcccag

SEQ ID NO: 110707 - DNA, 83 bp, Homo sapiens
tttcctttgctgagaaatcactgatgggaagtgagacttgttaaacttgaaagggagcagattaagcgagtaaaagactcgga

SEQ ID NO: 110708 - DNA, 100 bp, Homo sapiens
aacaatcaagatgaatatgaccctatggaagcagaagaagctgaggatgaagaagatggaggaggtgcgccagtctgtaactcctgccgagccagtccag

SEQ ID NO: 110709 - DNA, 94 bp, Homo sapiens
cttgtggagccggagctgggcgcggattcgccgaggcaccgaggcactcagaggaggtgtgaacccacatccctgcccccagggccacctgcag

SEQ ID NO: 110710 - DNA, 74 bp, Homo sapiens
ctgcggccgaggtggcggacactcagctgatgcttggagtcgggctgatcggctgtgctggagactattcggaa

SEQ ID NO: 110711 - DNA, 82 bp, Homo sapiens
ccgcgaccagggccgcaggaagacgcatgggaatgtaagacggacttagatattgcatacaaatttggaaaaactgtggtga

SEQ ID NO: 110712 - DNA, 100 bp, Homo sapiens
caccgtatagacctgcacatgatccggccttacatgaaagtggtcacccacggaggaattccaatcatgtctgtgatggtggtgagaaagaaggtgacac

SEQ ID NO: 110713 - DNA, 100 bp, Homo sapiens
tggagattgacgcagagtgggcggcggtggtggccagtctgcttccttcagtccctgctctcaaaggggaaatcccatcacctcagctaaccagaccgaa

SEQ ID NO: 110714 - DNA, 85 bp, Homo sapiens
acctactagaatgtctgccagaaagaggatatgggctggtgtttggaatgctttatcctgcatattattcatacaaagctgtgaa

SEQ ID NO: 110715 - DNA, 107 bp, Homo sapiens
cttggctatgtgacgctgctggaggaaacacctcaggacacggcctacaacaccaagagactgtgccctgtccacggtgcctcctgcatgtcctgctgccctgagct

SEQ ID NO: 110716 - DNA, 90 bp, Homo sapiens
tccttctcaccgttccgggaacaaatgctagatacgtctcctctgagcctccggcctccataagacccaaaacagatgacacctcttccc

SEQ ID NO: 110717 - DNA, 100 bp, Homo sapiens
agatggaaagttgtcctccttgttagaactgataagcgaagtgattctcttataagtttacaggcagcattaagagcagacccaaaggacttcaattgtt

SEQ ID NO: 110718 - DNA, 75 bp, Homo sapiens
acatggaaacctaaggaaaaacgtctgacctgcggagattgtccccttggggcggaaagaagccaaggccaagga

SEQ ID NO: 110719 - DNA, 100 bp, Homo sapiens
ggatttttttctattttccctacgaaaaacagatctttttaagctggagcagttcaacatgatggagaacgccatcagctccagcagcctgtacagcccg

SEQ ID NO: 110720 - DNA, 75 bp, Homo sapiens
ggaggattgcattcagtctagttcctggttgccggctgaaataacctgaatcttttagctgaaaaagtagagcag

SEQ ID NO: 110721 - DNA, 100 bp, Homo sapiens
gatgatgccccccgggctgtcttcccctccattgtgggccgccctcgccaccagggcgtcatggtgggcatgggccagaaggactcctacgtgggcgacg

SEQ ID NO: 110722 - DNA, 80 bp, Homo sapiens
aaatccatatcccaaaggaagacctagccgcataaatggaattttcccacaaaagttcaaacagaccctccctcagttcc

SEQ ID NO: 110723 - DNA, 98 bp, Homo sapiens
ggcgttcaagcgaaaacatgaccgctgagcccatgagaattggcttggaaacgaaattgaggttatggtcagtactgaggaagccaaacgccatctga

SEQ ID NO: 110724 - DNA, 100 bp, Homo sapiens
ccccggtgtgcctcggcagccttgcgctgctctaatggtccggacttccgtgtgagaactacgatgacccgcacaaaacccctgcctccccagttgtcca

SEQ ID NO: 110725 - DNA, 100 bp, Homo sapiens
cggctccgcagcccgccgggagctctgaccgaggcgcctcgctggggcggggaccttgccttgcccggggattcctagatgaggttatgaagaagtatgg

SEQ ID NO: 110726 - DNA, 100 bp, Homo sapiens
ataatgctggcaaagtggaaaaatgtgcgaccattactgggacttccacccccaccacgtgcacagcgagttcgagagcttcgccgagaacaacttcacg

SEQ ID NO: 110727 - DNA, 76 bp, Homo sapiens
aaatatatcttcaaggaaagagaatcatttgatggccgaaatattttaaaggaattctcaagaaatttgaggaaga

SEQ ID NO: 110728 - DNA, 83 bp, Homo sapiens
ctcggagccctggaagcagcagctcaccgaggacggggactctgcagtcattggagaaatcgatgaagaaacagattctgcgc

SEQ ID NO: 110729 - DNA, 100 bp, Homo sapiens
gggcccacgggccagccccgccgccctcgcaacctggcagccgccgccgtggaagggaatacagtgagtaacctgatcatgattatacctccaatgttcg

SEQ ID NO: 110730 - DNA, 73 bp, Homo sapiens
gagaaccggtgtccagcggggctgcgggctacggctgttggaccacatggtgacaatgcatgatgtgcttgat

SEQ ID NO: 110731 - DNA, 101 bp, Homo sapiens
cctgaaggtaccgcggacctcgccccgggacagcgaggagctgagggacccttctgaaccggacggcttttctcatttccacttgtacgtgtgcgctgctt

SEQ ID NO: 110732 - DNA, 73 bp, Homo sapiens
cccgttattgccccgcgaccggatcatacgaaatcaggccgcctgggcagaatgtcacgatggacgagggcgg

SEQ ID NO: 110733 - DNA, 75 bp, Homo sapiens
ctggactcttttacactcaactaattggcatcatcacaagaccatcatgcagacatcagagactgggtcggacac

SEQ ID NO: 110734 - DNA, 83 bp, Homo sapiens
gcgggacctgttccagtttaacaagaatccacattcatctcaatggaaggatcctgccttaagtcaacttatttgtttttgcc

SEQ ID NO: 110735 - DNA, 75 bp, Homo sapiens
ggctcttccagccaccccctctccagtctgctcaggttcacaaaaaggattctggcttttggcgagattttggct

SEQ ID NO: 110736 - DNA, 135 bp, Homo sapiens
aattattagaaattccgcgggcggtgtagaggcggcggacgggccggagggaggatgttaaagccccgcggtccttttggaataaatcatgggattgagcttcattcagatgtggtggaatatgccaaggaaaaa

SEQ ID NO: 110737 - DNA, 100 bp, Homo sapiens
ttggatcaattaccagtgctaaggctttccatctgatggtcccctggtgtgtgccctggaacaggagcgaaggctccgcctccctccgaagccacctccc

SEQ ID NO: 110738 - DNA, 97 bp, Homo sapiens
ggcgagcaggcgaggaatcgccgtggcgtcttggtgttctccacgctggttcgcaggagctgactgctgggcaggaacgtctctcaggagaaagagt

SEQ ID NO: 110739 - DNA, 100 bp, Homo sapiens
tgttcagaatcctccaaaaccagtcatgaccactagacccacagctgttaaagcaacaggtgaaatggagacagaaagtcagcccaagagactcttccaa

SEQ ID NO: 110740 - DNA, 98 bp, Homo sapiens
ccacccagcagcagggcatcaagaataatccagaatggctactctgatctatgttgataaggaaaatggagaaccaggcacccgtgtggttgctaagg

SEQ ID NO: 110741 - DNA, 100 bp, Homo sapiens
ccgtggacaacatgatggtcagaaaaggggacacggcggtgcttagggaagcagtgcgttatatcaatgaaaacctaattgttaacacagatgaactggg

SEQ ID NO: 110742 - DNA, 147 bp, Homo sapiens
atactatccaacctactccacagactatacctgccattgatcccgcacttttcaatacaatttcccaggtcaccaggagactaaagtccatcaaaaacatccagaaaattaccaagtctatgaaaatggtagcggcagcaaaatatg

SEQ ID NO: 110743 - DNA, 90 bp, Homo sapiens
ctgagcccggcgcaggtgaccggcgcgcgggagcgctacggccccaacggtgaccatggaggaagaagatgagtctcgagggaagacaga

SEQ ID NO: 110744 - DNA, 75 bp, Homo sapiens
gagtacatgagacgatgaagcaaaggatattgtacctgtggatgcatcttatgaagtaaaagaactatatgtgcc

SEQ ID NO: 110745 - DNA, 100 bp, Homo sapiens
gtcatatctcgaaggttgtttggcttgtttaacagcatataccatcttcctatgcatggaaactcattatgagaaggtgcagtagacattgttgcaatca

SEQ ID NO: 110746 - DNA, 75 bp, Homo sapiens
caatgaacttcggagaggaagatctactgtgaccaagagtattgtggaggtctgaaggggcgtctcgattacctg

SEQ ID NO: 110747 - DNA, 100 bp, Homo sapiens
gtctttctgctgcgaactcaggcagagcactacctgtggtatggcaaggctccctttcccaatggtagttttgtgaatggctttaattcgccaggatctt

SEQ ID NO: 110748 - DNA, 100 bp, Homo sapiens
gagtaaagtcagcatgagcaaaaactccaaactcctctccaccagcgccaagagattgtaaaccatggctgtgtggatacaagctcagcagctccaagga

SEQ ID NO: 110749 - DNA, 100 bp, Homo sapiens
gaaatgttgtccaaagttcttccagtcctcctaggcatcttattgatcctccagtcgaggctcagcagggagctgctggatgagaaagggcctgaagtct

SEQ ID NO: 110750 - DNA, 74 bp, Homo sapiens
gaaatcctaatgacagtctccaaattcgcctccatctgtaccatggagatggctggccgagctctcaagcagac

SEQ ID NO: 110751 - DNA, 50 bp, Homo sapiens
tgtgtgctgggctttcacgtctacgccatcctgagaggcctgaagaagaa

SEQ ID NO: 110752 - DNA, 90 bp, Homo sapiens
gccgccgccgccgcccagagactgctgagcccgtccgtccgccgccaccacccactccggacacaggccatcagcatcagcaaagccatc

SEQ ID NO: 110753 - DNA, 100 bp, Homo sapiens
tgtttgctgcagaagagacaggggaggcactgtctgaggagactacagcagtgaacagcagagaatttcaaaggaccttgctaatatctgtaagacggca

SEQ ID NO: 110754 - DNA, 98 bp, Homo sapiens
gcgtctcggaaaccggtagcgcttgcagcatggccagttctacgtcatgatgacgccccaggatgtgcttcagacaggaacacagaggacgatcgccc

SEQ ID NO: 110755 - DNA, 90 bp, Homo sapiens
gtctggagctcgaccgggccagggattaatcaattcatgacagagacagtgaagaattgtaaaagagacggatttgttcagaccattttg

SEQ ID NO: 110756 - DNA, 82 bp, Homo sapiens
aataaccaggtgcttggcaaaatcgagcgggccattgctctacgaactcgacggggaccccaagaggaaggaattcctggat

SEQ ID NO: 110757 - DNA, 100 bp, Homo sapiens
gaggtccccgcgcggcccgggcctggcgccctgaggggaagagcggcccggcccgaggtgtcatggagaaactccagctgggcccagagattctgcagcg

SEQ ID NO: 110758 - DNA, 101 bp, Homo sapiens
ctttctatgtgcagattgacttcagtcgtccatatgaccccagaagggatctcttcagggtggaatacgtcattggtactaggttttgacaagcttgcatc

SEQ ID NO: 110759 - DNA, 83 bp, Homo sapiens
ggatgacaagaatgcaacaaagctgaatgaactcattcaggttggataaactcaagccatggagggattactgcattacatca

SEQ ID NO: 110760 - DNA, 100 bp, Homo sapiens
cgatgccgcagtaccagacctgggaggagttcagccgcgctgccgagaagctttacctcgctgaccctatgaaggaggcagtgaccttcaaggatgtggc

SEQ ID NO: 110761 - DNA, 100 bp, Homo sapiens
ctgtcgcccccgcagcaccgctactcggagggcgagcggacctccctggagaagaaaccgaaacttcattgccccttcaatgtgggaatccagccagacc

SEQ ID NO: 110762 - DNA, 101 bp, Homo sapiens
acccagcggccgccgagacagcgggagccggcgtgcgagcggcaggaaacccctcctggagtttccccaaagccatggacagccctagtcttcgtgagctt

SEQ ID NO: 110763 - DNA, 100 bp, Homo sapiens
gagcgagcgcagcaaagcgcccagcctgccgcctcgctgtccctgcggcttctgggggcatttatgtttgaatcatctttaagtctggcggtcacaaagt

SEQ ID NO: 110764 - DNA, 76 bp, Homo sapiens
aattgtctctctgggcggccacctatgagacttcatctgtgtgatatgccatctctatggcccgaaaaattggagc

SEQ ID NO: 110765 - DNA, 75 bp, Homo sapiens
gctgcaggcggcccactggcagttcgaggccagctgcgggccgtccagcggctgtgccacttctacagcgccgtc

SEQ ID NO: 110766 - DNA, 100 bp, Homo sapiens
aagggcaccggatgcccaggaatcaccacctggtaccagaagcggtgccagccagcaggtcctatgcccaaacacttggctgaagtgcagtgttgtgatc

SEQ ID NO: 110767 - DNA, 75 bp, Homo sapiens
cttgctgggtgagatggcagtgtgtgcaaaaaagcgccccccaggaagctcttcgtgggcggtcttgactggagc

SEQ ID NO: 110768 - DNA, 90 bp, Homo sapiens
ctcaacagagccaacatttcatagcaccatggatggctgtgactttgtctgccgttctaaacctcgaaatgtgcctgcagcatatcgtgg

SEQ ID NO: 110769 - DNA, 97 bp, Homo sapiens
cggccccgcatcgcagcggccgggcagcggggcctgggacgcgccccgaggaggagcggggcggcgcaggcggtactctctgaagatggcagaagct

SEQ ID NO: 110770 - DNA, 50 bp, Homo sapiens
tctggaggctgcatctgaaaagattgatgactacagcatggttcgatttt

SEQ ID NO: 110771 - DNA, 51 bp, Homo sapiens
cccggccgtcagcagcatgcaggaattttctcccaaactggttggcttgac

SEQ ID NO: 110772 - DNA, 50 bp, Homo sapiens
gacggtttcgccggcagtctcggtcaactttgtagtgtgccaactctttg

SEQ ID NO: 110773 - DNA, 101 bp, Homo sapiens
ggaaattcatccagagggtccaggccatgaagagtcctgaccacaatggggaggacaacttcgcccgggacttcatgactatatcatcatgtacatagaaa

SEQ ID NO: 110774 - DNA, 82 bp, Homo sapiens
attggagcgcagactgatggcgcaaagggaagaggatcacctagcccgggtagaagaggcaatcacccgtatgcttgtgtgt

SEQ ID NO: 110775 - DNA, 100 bp, Homo sapiens
cggggggcagcagaagtccaagaagatgaagatactcaggttgaggttccagtcgatcaggctgcctgctgtttcccggggagatcatgaaacgaggtcg

SEQ ID NO: 110776 - DNA, 75 bp, Homo sapiens
ccgggagtgggagagattggactgggagactcagcagccatccaacatattctttacaatggatgatgtggtcaa

SEQ ID NO: 110777 - DNA, 100 bp, Homo sapiens
cccagcccgggccgtccatcctcgcattgctgttgaatgtggtctggagccgaaccggcaatatctctgaggtgtgactgttctctcagcttcatcaaat

SEQ ID NO: 110778 - DNA, 75 bp, Homo sapiens
catgaagatgccacagggatcctaaaatctgttttgctgttactgctcagtgtagtcacaccttgaataagaaat

SEQ ID NO: 110779 - DNA, 73 bp, Homo sapiens
ggcaaggaggggaataaccctgcagaaaatggagatgccaaaacagaccagggttatgtggtccgaatcagtg

SEQ ID NO: 110780 - DNA, 90 bp, Homo sapiens
gagcaagaataaatactgactttgagtaacggccttgagaaagttgaagttgatggtagtttaagtgatagccacgtatctcctccagcc

SEQ ID NO: 110781 - DNA, 100 bp, Homo sapiens
ggccgaggtagaggcagtggcgcttgagttggtcgggggcagcggcaggactttgtgtcattgtatcaagattttgaaaacttttatacaaggaatctgt

SEQ ID NO: 110782 - DNA, 100 bp, Homo sapiens
ggagccctacctggatgagcagagagctgtgaaatatctttggcttgcagccaacaatggggatgctgatcctcccgctggcttccagacagacctggga

SEQ ID NO: 110783 - DNA, 100 bp, Homo sapiens
cagcagccattggaaccgggagaagccgcactccactctgactcccaggacgggcaccagggctatctgaagcagtgccggaagagaagggacatgttca

SEQ ID NO: 110784 - DNA, 100 bp, Homo sapiens
ttttcttcagaagaaggacttcggaatgcactacaacaggaaaatcatattatagatggagtaaagtgtgttatccaggattttcaagcttcggtacttc

SEQ ID NO: 110785 - DNA, 50 bp, Homo sapiens
tgaaagaacatgaccaccttcgaaataaaataaaacagggtctgttacct

SEQ ID NO: 110786 - DNA, 80 bp, Homo sapiens
cggagggcaccccgggcgggcggcggctgctttgtaatttagattcgagaagtggtttatcctttgactggaaaagaaaa

SEQ ID NO: 110787 - DNA, 100 bp, Homo sapiens
tgatgctgatggtgatggagattttgatgtggatgatgccaaagttttattaggcaaatggcattaaaattggccctcagcatgctgctaccaatgcaac

SEQ ID NO: 110788 - DNA, 82 bp, Homo sapiens
aagaggaaagacacacctaccaagaagccagtcaagcggccaggggcagaaccccttcgagctggccttctccctagaccag

SEQ ID NO: 110789 - DNA, 100 bp, Homo sapiens
ggggaggaagtggacatttcctttgaacctaataataagcagagcatgtctgttcgatcctggcttccctcctgcggaacctgagagggcagcagcggac

SEQ ID NO: 110790 - DNA, 51 bp, Homo sapiens
gtcccggacagagcccgtggtcgcgcaggtatttgtggaaacattagacaa

SEQ ID NO: 110791 - DNA, 75 bp, Homo sapiens
atgcagatagttactattatgaagatggagcctgcagaattttcttcctgccccttgaactctgatgaagaagtg

SEQ ID NO: 110792 - DNA, 98 bp, Homo sapiens
ccacgcttctcatcctggacatctgagtgctgccctgcccaggaggtacatgctgcgggagcgggagggggccccagagcctgcatcctgcgtgaagg

SEQ ID NO: 110793 - DNA, 50 bp, Homo sapiens
aaggattccaagtaactcttatttgtgaattgaatgcaggaattataaaa

SEQ ID NO: 110794 - DNA, 100 bp, Homo sapiens
cgcagatctgccaggccacctgtgctgttatgaagctgtcctttgatgaggagtaccgccgtgccatgaacgagctagggcgccttcagccgctgctaca

SEQ ID NO: 110795 - DNA, 51 bp, Homo sapiens
ttcaacatatctacaatctcggtactacagcaccaagaatttagtttcctc

SEQ ID NO: 110796 - DNA, 80 bp, Homo sapiens
gtgcaggcgcttcaccacagacgccaagacaatgcaaactccagtgaacattcccgtgcctgtgctccggctgccccggg

SEQ ID NO: 110797 - DNA, 74 bp, Homo sapiens
caggaagcttacgcggtggcagccgctcgctgagacaatgcagatcttcgtgaagactctgactggtaagacca

SEQ ID NO: 110798 - DNA, 75 bp, Homo sapiens
cgctgcatctttctcatgaagcacggggaacgggtcggatggttcccacgtaacatcacatcagacccaagggcc

SEQ ID NO: 110799 - DNA, 75 bp, Homo sapiens
cttcatcaaaaatagtgatagctttgataaggcaaatccagacagaacctttgacttggtgttgaaagtgaaatg

SEQ ID NO: 110800 - DNA, 82 bp, Homo sapiens
gttggagttttgcccacgcgttgtaattaagcctcgcacaatatggagcatattaatgaaaagtgccataaactgaaaaacc

SEQ ID NO: 110801 - DNA, 76 bp, Homo sapiens
gaataacccttttaacgagtattccaaatttgatggcaagccctgccaaggtaaccctgctggggtcagttatctt

SEQ ID NO: 110802 - DNA, 75 bp, Homo sapiens
caagacagtggagtgggactggaaactgctcacctatgtcatggaggaagaggtctctaattaacagaagatggc

SEQ ID NO: 110803 - DNA, 75 bp, Homo sapiens
tggaacctctgaataacctccagggacaattcaagctttcgaaatacaaaaatcacattgtgagagtacacaagc

SEQ ID NO: 110804 - DNA, 108 bp, Homo sapiens
gaactgtctcctggtgaccgagcacccgcctccgggcatcttcaacttccgagaaatgtggtttgtggtaggaaggaatggtggcctactccatgagcagagcctgtg

SEQ ID NO: 110805 - DNA, 74 bp, Homo sapiens
ggacagatgaagagtgacttgtttctggatgattctaagaggccaacatagccgaggtagaggtctccatccct

SEQ ID NO: 110806 - DNA, 75 bp, Homo sapiens
ggattacataaaccagtcacccaagtgcattgcctttggaaacgagtaccataacagcttgggggaaagaccatg

SEQ ID NO: 110807 - DNA, 74 bp, Homo sapiens
cctcggcagccaacacagctggggacccaaggaattctccagagagaggaaaatgtttataggaggccttagct

SEQ ID NO: 110808 - DNA, 75 bp, Homo sapiens
agcgtctccatggcctgcctgagcccctcgcagctccagaagtctgcagatctccaggggagcccaccagcctag

SEQ ID NO: 110809 - DNA, 87 bp, Homo sapiens
ggaccaacttctttggcaagtggacattttactggctcaaggtgaagttgaacaaattgctatgatgaaaccaaaaggccagactga

SEQ ID NO: 110810 - DNA, 51 bp, Homo sapiens
atggcctccgacgaggacataggtcaaccagaatcaagatgtctgggactg

SEQ ID NO: 110811 - DNA, 50 bp, Homo sapiens
cttcgggaagccatccatttagccagggccatgatccaaaggaaccagag

SEQ ID NO: 110812 - DNA, 83 bp, Homo sapiens
caaacttcctggcaccttgattttggacttcatagcctctagaactgtcagcccaaggccaaccccactgtcactctgttccc

SEQ ID NO: 110813 - DNA, 100 bp, Homo sapiens
tatgttcccaatttattaggtatcataccttatgcaggcatagatcttgctgtgtatgaggtgttgtgtaacggaccaggaacatgtgttcctatctgtg

SEQ ID NO: 110814 - DNA, 83 bp, Homo sapiens
agccgctcagccaccggggcctgccgcgcctgtcctggatcgacaccctctacagcagatttttagactctgaggagcagttg

SEQ ID NO: 110815 - DNA, 75 bp, Homo sapiens
agttcattttatgtgggaggatgttcagcagcgcggcagagtcatgggggtcacctttggctcttcagagatgca

SEQ ID NO: 110816 - DNA, 97 bp, Homo sapiens
agatgaagcaaggcccaatgacccaggcgcctctgacctttttgagcctgggaaatgcttaccttgctctgaagaatatcagtggggcacttgaggc

SEQ ID NO: 110817 - DNA, 89 bp, Homo sapiens
cgaatgtgcttactcacggcgttagttacacaggtgatttccttaagaaaaagcatattctcaagatgcctacctgaaaggcaacgaag

SEQ ID NO: 110818 - DNA, 82 bp, Homo sapiens
aattgctaggcggagacagtgcagggaagagagaccttagaaaggatcaggactggcggacaatgcagatcttcgtgaagac

SEQ ID NO: 110819 - DNA, 89 bp, Homo sapiens
tcaaagaagggcttgttccggtttcagaggatcctgtagccataaagattgcagaaaatgcttggacagaagagatgagtactatttcc

SEQ ID NO: 110820 - DNA, 74 bp, Homo sapiens
ccattccgagacatgagagaacttgccatgctacgaagacagcagatcaaggttgtctgcattcaaaagagcat

SEQ ID NO: 110821 - DNA, 90 bp, Homo sapiens
tcagaggacgaggcctccttcaagtccgaggaagtgcagagctgtactgttgacttaggtattacagcagacagctccaaccacccagac

SEQ ID NO: 110822 - DNA, 82 bp, Homo sapiens
accaaggctcgcaattttgagagagttttgggaaagccacttccggctcctgcgtcgctccggaagcctgcgagttccggaa

SEQ ID NO: 110823 - DNA, 82 bp, Homo sapiens
gatttttccagaaggaacttgtacaaacaggacctgcctaattaccttcaaacctggttggagtgcagtggcgtgatctcgg

SEQ ID NO: 110824 - DNA, 83 bp, Homo sapiens
tacagcctgcgtccagccataacccaggagtaacatcagtgcatctgggggaggtgttgtagccattgacaacaaaatagaac

SEQ ID NO: 110825 - DNA, 75 bp, Homo sapiens
aagtgatgacagaagagagaggaattctctcaggtacctgtccaggagggagccatggatttgctgcgggagctg

SEQ ID NO: 110826 - DNA, 96 bp, Homo sapiens
tgaagagcgacaagccgctggcagccgcggatctcaccgccgctcagggagctctttgttcaatgcctagccacctattcctacagacacggcagt

SEQ ID NO: 110827 - DNA, 82 bp, Homo sapiens
ggagctgttcctattcggccatctttgctcctccctgcaactaactccattcttaattgatgatcagtgcagaagcgcctgt

SEQ ID NO: 110828 - DNA, 75 bp, Homo sapiens
taaaatcatctccatattctcaggcacagagaaagatattcctatcattccggatctggaggaagtacaggaaga

SEQ ID NO: 110829 - DNA, 99 bp, Homo sapiens
tgggggaaatatctctggagaagccctcactccaaaggctgtccaggcgcaatgtgtggcttggcgttggccctcaacaagctctcccagtatttggac

SEQ ID NO: 110830 - DNA, 82 bp, Homo sapiens
aagcggaggacctacgccggcctgggaccttcgtggggatccaggcctctgaggcctccaggatggaggatgccaccaacgt

SEQ ID NO: 110831 - DNA, 74 bp, Homo sapiens
gtgatgttggagaactatagcaatctggttttcttgggttttcctttggaatatggataaatacaccatgatac

SEQ ID NO: 110832 - DNA, 100 bp, Homo sapiens
gcggcgttggaggccaccgtttccagggtctgcggaagagggagctgctgaaggagctgctaccagtcatcgggcagaacctccgattccagcgcctctt

SEQ ID NO: 110833 - DNA, 100 bp, Homo sapiens
ctcagcagatgcttcatggtcttcagggaacaatggcaaaagcctttgatgaagcattttcctctgagacaacagcggcaatacctgaagaccatgaagc

SEQ ID NO: 110834 - DNA, 100 bp, Homo sapiens
ggccctgaagggcttcacgaccaaaggtgtcacctcagtctctcagatcttccacagcccagaactcagcctcctcccaagctccctgtgggtcctagcc

SEQ ID NO: 110835 - DNA, 50 bp, Homo sapiens
ggcaggcgctgcgctgcactagaagcaagacccgagaaggtgtggtacaa

SEQ ID NO: 110836 - DNA, 76 bp, Homo sapiens
aagaagtatttgatgtcttagagaaacttggagaaggattgacgcgtcatgccttacgtgggaaggacaacagttc

SEQ ID NO: 110837 - DNA, 83 bp, Homo sapiens
ctgcggaggagaccggcgaggagaagcagggctgtcacatggtgactgaagaacttcattccataacgtttgaaacacagatc

SEQ ID NO: 110838 - DNA, 75 bp, Homo sapiens
cttggtgaagcagtgagtcgaaatgcgtctctggaagtggcatggaatctggaaacatcaaagctggattagaac

SEQ ID NO: 110839 - DNA, 82 bp, Homo sapiens
aagatcaccgtgacatccgaggtgcctttctccaaaagcccccggtccctgagaagcggccccctgaaatacagcatttccg

SEQ ID NO: 110840 - DNA, 73 bp, Homo sapiens
tttcagcgagggtactgtatttatggagaccgctgcagtgagtctgccaaaaaagaggtggttgctgaagtgg

SEQ ID NO: 110841 - DNA, 83 bp, Homo sapiens
cagggttcgtggataataaactcaagcagcgagtcatccagcatgcagccagtaaagatcccagagaagttcgagaagctaga

SEQ ID NO: 110842 - DNA, 90 bp, Homo sapiens
gcaaaatggcgactgtcattcacaaccccctgaaagcactgctgcagtaagaatgtcttttccacctcatttgaatcgccctcccatggg

SEQ ID NO: 110843 - DNA, 98 bp, Homo sapiens
aggaagatggcggatctggaggagcagttgtctgatgaagagaaggaaaatgatgctgctgctctatgaagaaggcctccgggttgtcatacacacct

SEQ ID NO: 110844 - DNA, 98 bp, Homo sapiens
cagctgctaaaggaagaggaagatggatgagatcaaagggaaagaccgtgtgattctggccttggagaaggaacttggcgtgcaggctgggcagaccc

SEQ ID NO: 110845 - DNA, 95 bp, Homo sapiens
gagccctgtccagagcctccagggccctgcgccttgctccttttgtctaccttcttctgatccagacagaatacagtcgctttgaatcgaagata

SEQ ID NO: 110846 - DNA, 78 bp, Homo sapiens
tggctgggagttcagccaggacgtctacctgtccaccgtcgtgaccgagagtcactttgtggcatgtatgacagccat

SEQ ID NO: 110847 - DNA, 100 bp, Homo sapiens
tccatcgaaccactcgctcaggccaacggccccattgctgataagctgcagcagggcctgcagcccgtggtggatcacgccacgtgctccaggattgact

SEQ ID NO: 110848 - DNA, 100 bp, Homo sapiens
gcaaagtccaagcattgtatcacttcatctgcaaatatttcaataagtacccaaaaggaacacctgattgagaatgaagtgtcaatactgcgccgagtga

SEQ ID NO: 110849 - DNA, 75 bp, Homo sapiens
gactgacacagatgagaaatgaatatgagcggcagtgcaggatcttatgccttcattcatccggcatggtccaac

SEQ ID NO: 110850 - DNA, 100 bp, Homo sapiens
gcaaagggtaaaagcaccaccttaacgcaggggaattcctggggaagtcggagcctgagcaccagcactgagcctggccgtgggaaggaagcatgaagac

SEQ ID NO: 110851 - DNA, 90 bp, Homo sapiens
cgcagtcgccctacagccgctgattccccccgcatcgcctcccgtggaagcccaggcccgcttcgcaggcccatgaagcttcccatcacc

SEQ ID NO: 110852 - DNA, 90 bp, Homo sapiens
gccaaaggttctacaggaatggaaattctgctgtcaacattagagggctgatgcaaatcgtactgcccctagtggaagtgaataccgaca

SEQ ID NO: 110853 - DNA, 82 bp, Homo sapiens
cgcagcaacaacagagagcacgtggtaagtaaggaggtctctgtaccatggctcgtacaaagcagactgcccgcaaatcgac

SEQ ID NO: 110854 - DNA, 74 bp, Homo sapiens
gtcgaagttgaaggtgacaaccggtatattgcaaataccgtagaggtatcagcagatgttgcacacaaacttgg

SEQ ID NO: 110855 - DNA, 98 bp, Homo sapiens
gccactctgctggctgaggctgcggagagtgtgcggctccaggtgggctcacgcggccatcgaggagggcacgctggaggagatcgaagaggaggtcc

SEQ ID NO: 110856 - DNA, 80 bp, Homo sapiens
aacaagaagttgagaccgagaatgtggaaacagtatgaagtgtaacagaacagactttaccacctgaaactgctgcttca

SEQ ID NO: 110857 - DNA, 100 bp, Homo sapiens
atcggaggcggctgcgagagtggcagaggagctggcggagagcggcctgcgggcgatcgggccgagcgccgtgccgtccctgcagtgacaccgaggtgct

SEQ ID NO: 110858 - DNA, 71 bp, Homo sapiens
agattccagccaggatacagatcttaaatttgtcaggacagaactgtaccgctctctttttggccagctcc

SEQ ID NO: 110859 - DNA, 104 bp, Homo sapiens
gtggatcatgttggaaatgcaactgcatcccaggaacttggttatggttgtctcaagataaaccacataatcctatggtaaatgctggagcaattgttgtgact

SEQ ID NO: 110860 - DNA, 90 bp, Homo sapiens
cgtgttgccttggagaaggacagcagagaataagctggacaccaaatacccgtacggatctaagcctttcccacgttatggttataaacc

SEQ ID NO: 110861 - DNA, 103 bp, Homo sapiens
gtgaccgtcactgacgtggacatcgtcttcagcaagatcaaacaatgcagatcttcgtgaagactctgactggtaagaccatcaccctcgaggttgagcccag

SEQ ID NO: 110862 - DNA, 87 bp, Homo sapiens
acgcgcagatagcagagccatccttggggatacagttgatatattagttggatggcatatagatcatactcagaaaccttcgctcac

SEQ ID NO: 110863 - DNA, 50 bp, Homo sapiens
tgggcttgcagaaggaatctcactctcagtgaacacctacctcttcatga

SEQ ID NO: 110864 - DNA, 100 bp, Homo sapiens
aaggattccaagtaactcttatttgccattgccgaaatctaaaaaaacttgtagcaaaggcagtaaaaaggaacggaacagttctggaatggcaaggaag

SEQ ID NO: 110865 - DNA, 83 bp, Homo sapiens
cgaagaagaaaggattcgttacagccagagattggacctagatgtgaaggctggtggaggctgtgtaatgaccattggagaaa

SEQ ID NO: 110866 - DNA, 89 bp, Homo sapiens
gaagagtcttgtccacagctggcaaattcagtgcagatcagctttgtgtccctggtgatgttggaacattaatgatggaacatggccaa

SEQ ID NO: 110867 - DNA, 82 bp, Homo sapiens
caacgcctggctcggagcagcagcctctgagatgtccagctcgccgctgtccaagaaacgtcgcgtgtccgggcctgatcca

SEQ ID NO: 110868 - DNA, 75 bp, Homo sapiens
atgatgaagatattgatgacagaaccatggagtctggcagtaccgccgccagtgaggaggcacgcagccttcgag

SEQ ID NO: 110869 - DNA, 85 bp, Homo sapiens
ggatcatgtctgcgagccaggattcccgacctgcctagagctggaacgttacctccagagcgagccctgctatgtttcagcctca

SEQ ID NO: 110870 - DNA, 100 bp, Homo sapiens
agggtctctatgccaaggtcaacaagccataccatccactggttccagctgacaggcctttttgcaaatgtgtaacttgcctatcaaagtagtttgtagg

SEQ ID NO: 110871 - DNA, 100 bp, Homo sapiens
ggggccctcagggaagagaccctgcaaagatcctgggagaccaaggatgccttcgtgaagatcgtgaggcacgagggcaccaggaccctctggagcggcc

SEQ ID NO: 110872 - DNA, 97 bp, Homo sapiens
gcgtccctcttcagttctctggagccccagattcaacccgtgtacgtgcctgtgcctaaagtaaaataccatgaagattttgaaaaaacaaagggga

SEQ ID NO: 110873 - DNA, 100 bp, Homo sapiens
atgagtgaagaaaacacagagccaccctggaaagagtgtgaacatggctacgcctcttcattcccgtccatgccgagcccccgactgcagcattcaaagc

SEQ ID NO: 110874 - DNA, 100 bp, Homo sapiens
ctccttcggcatgaccccagtgctgcctgcattcgcggggcatgttcccgaggctgtcaccagggactttgaacatgtcggggatcgccctcagcagact

SEQ ID NO: 110875 - DNA, 76 bp, Homo sapiens
acttctgttaggaatttacaatttggattccggagtttgaatccacctttgacaattgtccgaaagacgtttgaat

SEQ ID NO: 110876 - DNA, 100 bp, Homo sapiens
ggagggttcgtccttctggaaccaagggctcacgtggaaagtggcaagaaagtgaaggggggctccagcaagctgacaggccgtgtccttgctctgtcct

SEQ ID NO: 110877 - DNA, 100 bp, Homo sapiens
acaaggacaatccagacagcaattttgtgagcctgcaaatcaacatcactgctgtagcgcaggtggaaataagaggggatgatccaccaacacattctca

SEQ ID NO: 110878 - DNA, 50 bp, Homo sapiens
cgggagtttgcggattttgaatataggggcgtggagcgcatcgacgagcc

SEQ ID NO: 110879 - DNA, 89 bp, Homo sapiens
ccgcggtccggcccggggccccgggatctcggctgtccttcctcccgggctttctctacgtgctgttgtctcactgggtttttgtcgga

SEQ ID NO: 110880 - DNA, 75 bp, Homo sapiens
taaacagaaagtcttacatgacacaatggatctgaatcatctcttgaaaggttcaacatgcactgaaaaaatcag

SEQ ID NO: 110881 - DNA, 74 bp, Homo sapiens
ttagctgtgctcgcgctactctctctttctggcctggaggctatccagcacacttggcatttcacctgaagaaa

SEQ ID NO: 110882 - DNA, 100 bp, Homo sapiens
aagcatcaaacctggttcgaatgagaaaccagtcccttggacagtctgcaccttctcttactgctggcctgctccaagtacagcccagtatggaattacc

SEQ ID NO: 110883 - DNA, 83 bp, Homo sapiens
attttctgtaattgctgacccaagaggaaacactctaggacggggaacgacaattacgtatgccattttgaagactgagacgt

SEQ ID NO: 110884 - DNA, 82 bp, Homo sapiens
cgaggccgggaggccgtgcccggagggggatatgagactttctactcggaatatcctgagtgttgcgtggatgtaaaaccca

SEQ ID NO: 110885 - DNA, 75 bp, Homo sapiens
ttggcgaggcctttcaccaagtccatgaataccatcggagctcctctggaacatgtccttgtcttctcagagtgt

SEQ ID NO: 110886 - DNA, 74 bp, Homo sapiens
aaaacagaacgttgcaaactctggaaaaaaacttggaattcagcttagagaactatcaacacaggacaatgcaa

SEQ ID NO: 110887 - DNA, 76 bp, Homo sapiens
tcattcctgcagatgaaaaagtgtgacttggcagctggtgctggagaatctggtaaaagcaccattgtgaagcaga

SEQ ID NO: 110888 - DNA, 75 bp, Homo sapiens
ccgcagtggatggctggaggtgcagggccaggaggaacatgagttgggccatatggtgctcttcccagtctggtt

SEQ ID NO: 110889 - DNA, 71 bp, Homo sapiens
gcgagcctctctccctgatcttacgtgctcaaggaacaaatgtggtatctggggctggcggtctgagaaga

SEQ ID NO: 110890 - DNA, 100 bp, Homo sapiens
attctggtgtttatatctgtaaagtgaccaattcccttggtcaaagaagtgaccaaaaagtcatctacatttcaggggaaaagattaccttgaggttgtg

SEQ ID NO: 110891 - DNA, 74 bp, Homo sapiens
caggcacgcgccaccactcccaggctttccttaaagtttcccatgtctcaatggactcctgaatataacgagct

SEQ ID NO: 110892 - DNA, 98 bp, Homo sapiens
ctaaaccatcagctattgaatgaccgggctgtgtttgatgtggacaagaagaaagggttgactctgattgagctctgggaaggcctgacagtggatga

SEQ ID NO: 110893 - DNA, 103 bp, Homo sapiens
agccaaacagagagaccttgaaggggcagtcagtaggctttttgaaatgggtttcgcagagcagctgcaggagatcatcgcccgcctccccgggggccaccag

SEQ ID NO: 110894 - DNA, 50 bp, Homo sapiens
ctcggacttctcctggggatatggtgccagttctacgtcatgatgacgcc

SEQ ID NO: 110895 - DNA, 100 bp, Homo sapiens
tcgggcagaaagataatcacggtgatttgatgaaggctgctgcaggagagttcgcagatgatccctgctcttctgtgaagcgaggcaacatggttcgggc

SEQ ID NO: 110896 - DNA, 75 bp, Homo sapiens
aagaaagtccacatttccaaaagtccaaggggttaaagcacgaattgggagctctcagcgacatcaccagtcagc

SEQ ID NO: 110897 - DNA, 100 bp, Homo sapiens
gagaattggaagctaaagctaccaaagacgtagaaagaaatcttagcagcaactgcttcgagaacgacagcagatggccagccgtccctttgcttctgtt

SEQ ID NO: 110898 - DNA, 100 bp, Homo sapiens
tgggacttcacctccgcgctcttcttcgccagcaccgtgctctccaccacaggcaatgcggtgtgcagagggtgcttggtggttctctcctgatggcccc

SEQ ID NO: 110899 - DNA, 90 bp, Homo sapiens
cctccatctgggccatggatgggtggcacaagaatggctcaactctccaaatagagagaatttctatcagttgcaagtacgaaaatttcc

SEQ ID NO: 110900 - DNA, 101 bp, Homo sapiens
cactgccagcaacaagtcagaaggcctcgctgtcctggctgttctcattgaggtttctggtcctcataccgtgtggttgagtgaaatcaaaacttccacga

SEQ ID NO: 110901 - DNA, 82 bp, Homo sapiens
tgaaattcagagaggggaagtgatttgcctcagcttgtactaacaccaatcagggtcttcaggcctggaagattgaagacat

SEQ ID NO: 110902 - DNA, 75 bp, Homo sapiens
catcgacatcagtgaagaagatcagtcctattttgtaacggattatgatccaaccattgaagattcttacacaaa

SEQ ID NO: 110903 - DNA, 100 bp, Homo sapiens
gctggaggtactgagaggatggaaatcagcgcggagttaccccagacccctcagcgtctggcatctatgctagtgatcaaagagaagatgtttatattgg

SEQ ID NO: 110904 - DNA, 75 bp, Homo sapiens
cgggcagagagaaggaaacacttagaggaagttctggagatgaaggtgaaaatcctatttataagagtgccgtaa

SEQ ID NO: 110905 - DNA, 97 bp, Homo sapiens
gatgataagaagctgaaatccattgcatttccatccatcggcagcggcaggaagagcccgatgcccttggtttgactctactaagagcccctcagtt

SEQ ID NO: 110906 - DNA, 75 bp, Homo sapiens
tctgggatcccggccaccagcaattgtccgatcagtagtaatttcacttcgtcttcttccaaaactatttggtac

SEQ ID NO: 110907 - DNA, 51 bp, Homo sapiens
ctgtgccaacatcaacttcaagagcatcagatccatgctgctgctgactcg

SEQ ID NO: 110908 - DNA, 75 bp, Homo sapiens
tgttgacttggggatccaaaggcacaggctaccaacctggctcctgcagaccccaatggcaaagcagacccttac

SEQ ID NO: 110909 - DNA, 51 bp, Homo sapiens
atggaggagacagagcctgcttcgccaaaactggacaagccaaggcatctg

SEQ ID NO: 110910 - DNA, 75 bp, Homo sapiens
atcctgagggcagccctgaagctggaaccttccaacaaggtccccttcccctgagcccatctacaatagcgaggg

SEQ ID NO: 110911 - DNA, 49 bp, Homo sapiens
gcgcctggcgctggccaaggcggcaacacttccccagatcaaaaggagc

SEQ ID NO: 110912 - DNA, 57 bp, Homo sapiens
aatcaatgacgtgtttgaaggaagacgagatctctgacatctacattagtggagaat

SEQ ID NO: 110913 - DNA, 101 bp, Homo sapiens
gctggaggaaacacctcaggacacggcctacaacaccaagagaacccagcgggtgccgcttctccacccgaggcttccacctccaacgagccatgttccag

SEQ ID NO: 110914 - DNA, 100 bp, Homo sapiens
aacatttctgggtgacactcaacaggattcccgcggagctggagtttgttcagatcatcatcatcgtggtggtgatgatggtgatggtggtggtgatcac

SEQ ID NO: 110915 - DNA, 90 bp, Homo sapiens
gttccccatctgaggcgtttgttgcagctacctgcacttctagatgaacttgctactaccagcaccatgccctaccaatatccagcactg

SEQ ID NO: 110916 - DNA, 100 bp, Homo sapiens
cgcgctgggacctaccctgactacgggagttgggaggacccgggacaccgcacagccgggaaatgggatatggagaaggtggagcggcaggctgtccccc

SEQ ID NO: 110917 - DNA, 76 bp, Homo sapiens
gggacgggtttagcggcagcctcttcggtgaagctttgttctaagaatatttgtttcatctagtttatgagtccaa

SEQ ID NO: 110918 - DNA, 75 bp, Homo sapiens
gggctatctggtatctgtagatggctacatgaacatgcagagatttaccgcattgtttctcagaagcaaatgtca

SEQ ID NO: 110919 - DNA, 80 bp, Homo sapiens
gacaaggtggccgacaacctggccatccagcttgctgtgttggggatgtcctttgcactgaccctgaactgccagattga

SEQ ID NO: 110920 - DNA, 74 bp, Homo sapiens
attttagggtcctttatatagaagggagagtaggctggagcattggatttgctaaaggagcttaagaatattcc

SEQ ID NO: 110921 - DNA, 75 bp, Homo sapiens
accagatccagaaactggaggagtcccgctcgaagctagatgtgaaaggaccacccacccaccgtctgtcttgtg

SEQ ID NO: 110922 - DNA, 101 bp, Homo sapiens
ccgggtagattgggagcggaggtttgaccacatgcagcagcattcagagtcattcttatagaagagcatcagaggaagataaaaaagaatcctcaatgtca

SEQ ID NO: 110923 - DNA, 100 bp, Homo sapiens
caccaatgacaaaccgatttcgggaaatacttgatttagtatgtaaaagatgttttggcattgtgtggctgctcaattaatgtaccaacactggatggaa

SEQ ID NO: 110924 - DNA, 100 bp, Homo sapiens
aaaagatgaacctttggagtttaaaagggttctggacaacatcaaagtggatggagagagaaagaaaaagccagagaggagagctggggtccacctcgag

SEQ ID NO: 110925 - DNA, 100 bp, Homo sapiens
tggcaggcgtgctggccggcgtggagagccgccagggctctatcaaggggctggtgtactccagcaacttccaggtacaggtttgcagattccgccagca

SEQ ID NO: 110926 - DNA, 96 bp, Homo sapiens
aaaatccagtccagccacaacttccagctggagagcgtcaacaagctgtaccaggacgaaaaggacactggggttgggaaatcaagcatcgtgtgt

SEQ ID NO: 110927 - DNA, 137 bp, Homo sapiens
gagggagctggaggagcagatggacatgaatgagcatctgcaggggcagctcaactccatgaagaaggacttaaggcaaatgtttgcagactacggctgaccgtacctcctgagagtccagttcctgagcaatgtga

SEQ ID NO: 110928 - DNA, 83 bp, Homo sapiens
caactccaatgggcctttccagcccgtggtccttctccatattcgaggcatcgttggcttcacagtatgactgatgatcctcc

SEQ ID NO: 110929 - DNA, 60 bp, Homo sapiens
cccaggtcctcgaggagtcaaggtcctgtactcacatctctgcagatgaaaaagcagctg

SEQ ID NO: 110930 - DNA, 90 bp, Homo sapiens
gctctgatgcaagcgaagaaccttttccctaatacgtacctcattgtgggaggcagtgatggtttcagaaaattttgatatagaggcccc

SEQ ID NO: 110931 - DNA, 100 bp, Homo sapiens
ttggatggaccttgcactctagaagggacaatggacttctggctttggccactttacttcctgccaggcacgagatgtgcgtaccaatgaagtggtggcc

SEQ ID NO: 110932 - DNA, 74 bp, Homo sapiens
gggccactgcgaggccgttttagtgtcttgggacaaggtgcgcattcctggtgtgctgcagcgattgggagtga

SEQ ID NO: 110933 - DNA, 96 bp, Homo sapiens
gccgaccccagagcggcgctggacaggcgcagacggggaagcggagccaacatgccagtggcccggagctgggtttgtcgcaaaacttatgtgacc

SEQ ID NO: 110934 - DNA, 83 bp, Homo sapiens
cggaaagactgttccaaaaacagtggataattttgtggccttagctacaggagaggtgagcgttatgtacctggagtgggaaa

SEQ ID NO: 110935 - DNA, 100 bp, Homo sapiens
aggatgacaaactctggagtaattggagccaagaaatgagtatagcttagcagtgtctgcaaaaacgaatcttttcctacaacctgttaactgactggac

SEQ ID NO: 110936 - DNA, 98 bp, Homo sapiens
tacaaccctgaagtgcttgatatcacagaggaaactctgcattctcgcttcctggagtttgtgatggacgcctctgaccccacccagctctctgcatc

SEQ ID NO: 110937 - DNA, 96 bp, Homo sapiens
gttactgacctcaacataataatggagcccacagaatgctcagaattaagtgaatttgtgtctaggctaaagaattacctccaaagccattgtcaa

SEQ ID NO: 110938 - DNA, 82 bp, Homo sapiens
atgactgtggatttcgaggagtgtctgaaggactcgccccgcttcagttggttaccacagagaagcgcttcctcaaagacag

SEQ ID NO: 110939 - DNA, 82 bp, Homo sapiens
ctggatctcgcgccacaaggagatgttggaatcgaagcctcttaaaatggcagatgacttggacttcgagacaggagatgca

SEQ ID NO: 110940 - DNA, 98 bp, Homo sapiens
tttagggtcctttatatagaagggagagtagcccgtgaaaacagaaaccatgactgtcagcagtctggccattagaaagaagattgagccggaggccg

SEQ ID NO: 110941 - DNA, 75 bp, Homo sapiens
aagcgtgttggggaaggagctgtaaagagagctttggtgaagcacgtgcagtctaaaggatacccaaatgaacgt

SEQ ID NO: 110942 - DNA, 74 bp, Homo sapiens
gcaagatgaaggctatcgttgagaagcttcgcttcacatacaggaagatgcaacacgagaacctggtgcgtctc

SEQ ID NO: 110943 - DNA, 75 bp, Homo sapiens
gcgggagcgacgctggcccggaccgagtgtccacaggatgaaatgtccgagtcaggccagtcctcggcggccgcc

SEQ ID NO: 110944 - DNA, 100 bp, Homo sapiens
ggagggagaagttggcacagcctgtgtatgaaacggtgacaaccagggcatccccatcatgtccagcatcaagctgaaagaggagcagcgcataaccacc

SEQ ID NO: 110945 - DNA, 100 bp, Homo sapiens
atcagattctcagctatggagcggaactggatgctgaccaccctaattggttccttccattatgagcaacttgttgaatccagatgccattttctcaaac

SEQ ID NO: 110946 - DNA, 50 bp, Homo sapiens
aggggccgggctacgagcggctgagacaatgcagatcttcgtgaagactc

SEQ ID NO: 110947 - DNA, 97 bp, Homo sapiens
gttgcactgtagcctcggcagtgaaccgggaggtactaccagttcctgttcccgacatccggacgtgccacttctgcctcgtagaagacccttctgt

SEQ ID NO: 110948 - DNA, 99 bp, Homo sapiens
ggcagcgtgtgtcggtcgcctagtctggagaactagtcctcgactcacggttcacagcatgtccgcctcggcccctgctgcggagggggagggaacccc

SEQ ID NO: 110949 - DNA, 90 bp, Homo sapiens
agaaccgtcccaaaatatggcaaagaaacctattctgagggtaattatgtgctggatcgagatgacctggtggaggcccaaacacctgag

SEQ ID NO: 110950 - DNA, 100 bp, Homo sapiens
ggaaatgggctttacagatgtgggcccagaaaacaagccagtcaggtgtgatgaatgcagactctgctaccattttggctgtttggatcctcctttgaaa

SEQ ID NO: 110951 - DNA, 100 bp, Homo sapiens
gtcgtgtcagcttttggactccctattgtatttgccagagcacatctggttatggaggttttgatgactatggtggctataataattacggctatgggaa

SEQ ID NO: 110952 - DNA, 100 bp, Homo sapiens
aaggaacgaggcaaggagctaaagcagcgtgcgttcagccctgggaattgtgagaagctggagaataattttgatgacatcaagcacacgactcttggtg

SEQ ID NO: 110953 - DNA, 80 bp, Homo sapiens
tgcacaataaaccgacgtttagccaggagccagcaccgctctttgaccttgccatgcttgccttagatagtccagagagt

SEQ ID NO: 110954 - DNA, 100 bp, Homo sapiens
gctgattcaggaacgcctggctgaagaggattgcatcaagcagattataagcgccatggctatggctagtgttaaattgcttgccggtgttttaagaaag

SEQ ID NO: 110955 - DNA, 75 bp, Homo sapiens
tctcctcttcgtctccgccatcagctcggcagtcgcgaagcagcaaccatgaagctcctcctggggtagagacag

SEQ ID NO: 110956 - DNA, 100 bp, Homo sapiens
ggctcccttcgcctccaggatgcgctgagccctacaacacccccagcggccgccggctcccccacgaggacggctgtcctcagcgaggggccgtgcaccc

SEQ ID NO: 110957 - DNA, 75 bp, Homo sapiens
agcctttgcagtctcgacataagtgaggcatacacggaatacctgaggagcatccactatatctcccaggtgtta

SEQ ID NO: 110958 - DNA, 75 bp, Homo sapiens
ctgaaaattcttcaaaccggagtcgggtcggctcttgtcaggatggtgaagctgttcatcggaaacctgccccgg

SEQ ID NO: 110959 - DNA, 83 bp, Homo sapiens
cggccggtcaggctcgccgccgagctgtggagcggaggcggagggacaagatcaacaactggatcgtccagctttcgaaaatc

SEQ ID NO: 110960 - DNA, 74 bp, Homo sapiens
tccagatccccgtgtatgactttgtctcccattcccggccctggccaacgtcaacattgggagcctcatctgca

SEQ ID NO: 110961 - DNA, 101 bp, Homo sapiens
cagctctacaccatgcgacgaggaggtctcttctatgccaccggcctctgccagctttgcaccaaggagctctacggtgactttgaagacttggaaacagg

SEQ ID NO: 110962 - DNA, 101 bp, Homo sapiens
ctgagctcgtcaagcagctgtcggccaagctcatcgccaacgtgccgcgtatgatgctgtccttgacagaaatgtggccattaagaagctcagcagaccct

SEQ ID NO: 110963 - DNA, 75 bp, Homo sapiens
tcgctgatcgcctaacttctactgacgaagcttggaagttgcagaagatcgtaaagctgaaaattgaaatcatga

SEQ ID NO: 110964 - DNA, 100 bp, Homo sapiens
atcatccacctcaagtacccgctgaactgctccgatcccactagtgagaggaactgtggaaggtgcatcagtgaagaaatggaccaatgtgtataatcat

SEQ ID NO: 110965 - DNA, 98 bp, Homo sapiens
caaactcgaagaacagctgtggaaagaagttgcaaaacactggacgttatgaagaggacatgtactggaggagaatggaggaagaacaacatcattgg

SEQ ID NO: 110966 - DNA, 90 bp, Homo sapiens
cagggaggatgtcgggacaccccggaagctgggaaatgtttctggaactaatgcaactgaagtatcatgagaaagctgcagacaaagggg

SEQ ID NO: 110967 - DNA, 98 bp, Homo sapiens
gacaacagtgatgaggaaagctgtgaaagttctcaagatggagtctggctctgtcgcccaggctgcaatgcagtggtatgatctaggctcactgcaac

SEQ ID NO: 110968 - DNA, 83 bp, Homo sapiens
ggcagaagccgagttcaacatcctcctggccaccgactcctacaagccatgccagtgacggtaacccgcaccaccatcacaac

SEQ ID NO: 110969 - DNA, 75 bp, Homo sapiens
ccgcgcccttcctcggcgggccggactgatggaggagatgtataagaaagctcatgctgctatacgagagaatcc

SEQ ID NO: 110970 - DNA, 83 bp, Homo sapiens
cacagtctccgtgccggtggaggggcggccccacggcgagcatggtcaccttcttgactcctttgcccgttcagctttatggg

SEQ ID NO: 110971 - DNA, 88 bp, Homo sapiens
cttgccagaatttcctgcgctgttccacctcattcaacttcagctgcctgtggaggaaccgattgtgtccacagatgaggtcatcttc

SEQ ID NO: 110972 - DNA, 87 bp, Homo sapiens
caaataaagaagtccagcttgcacagatttttgagtgctgcaggtggagaaattttcagcctgtgtttacctgagttggctgaaatg

SEQ ID NO: 110973 - DNA, 88 bp, Homo sapiens
cccctgtgctcagtaaggactcggcggacatcgaggtgcagtctttgcaagccacatttggaacttttgagtccatcttgagaagctc

SEQ ID NO: 110974 - DNA, 75 bp, Homo sapiens
gggtctcgggggccgctctgggatcccggccaccagcaattgtccggcagaagctcctcctggggtagagacaga

SEQ ID NO: 110975 - DNA, 100 bp, Homo sapiens
cgcaacttcagcattaattctgttgccagcacctattctgagtttgcgcatgcttttcacttccactgcatctctcgctggctcaaaacacgacaggtgt

SEQ ID NO: 110976 - DNA, 74 bp, Homo sapiens
tgtcaacacaccagcattattaactcagattgatggacaacttttcttaattaagcaccttttgatacttcgtg

SEQ ID NO: 110977 - DNA, 100 bp, Homo sapiens
ctcctcagagtccgactctcccacctgctaagcttgcattgaaaggctctagttacagtggacttcttgaacgacatcatattcacaccaaaaatgtaga

SEQ ID NO: 110978 - DNA, 100 bp, Homo sapiens
tccccatccagccatggccagtgaagacaacctcatcagccttgaaaggtgccatccagttaggcattacccacactgtggggagcctgagtaccaaacc

SEQ ID NO: 110979 - DNA, 82 bp, Homo sapiens
ggagccccggcagcaggagcgtcgcagacaatgcagatcttcgtgaagactctgactggtaagaccatcaccctcgaggttg

SEQ ID NO: 110980 - DNA, 99 bp, Homo sapiens
catgacaaccaggcaatgctggatagataccgaattcttatcacaaagttctgggagatgattggtgaggaacacgggatcgacttggctgggagcgac

SEQ ID NO: 110981 - DNA, 97 bp, Homo sapiens
aaagttgaaaacaaagtgctggttctgtggacaatcacaatgggaatccaaggagggtctgtcctgttcgggctgctgctcgtcctggctgtcttct

SEQ ID NO: 110982 - DNA, 126 bp, Homo sapiens
gtggccagtgagcggcagcgagtgctccggggagacgccgacaatgacatggtcaagattgagaacctgaccaaggtgaggcggaccctgttcatcacaggactccccagagatgccaggaaggag

SEQ ID NO: 110983 - DNA, 100 bp, Homo sapiens
aagggcaacaacgacgccgaattacatctgtccagccacctacaggcctccaggaatggctaaaaatgtttcagttagaccgattcaaagaaccacctgc

SEQ ID NO: 110984 - DNA, 100 bp, Homo sapiens
tcccacctccacagacccgtccgggtgctgaaagtccacggatgctatccctggtcaaatcagagggacacagcaggtcaggagagattcaacagcatta

SEQ ID NO: 110985 - DNA, 104 bp, Homo sapiens
acttggttcaatgggtagcctcaccatgaaatcacagcttcagatcactggtaccgtatcctgaaccccagtgccatcccggatgacaccttcatggacagcag

SEQ ID NO: 110986 - DNA, 97 bp, Homo sapiens
agaagaagctgaggatgaagaagatgattgaagaaggtattgttgtaatggaagatgattctccagtggaggctgtgagcacacctaatactccccg

SEQ ID NO: 110987 - DNA, 73 bp, Homo sapiens
ccgccgcggacttcgctttgggccatgaccaggtatgactcttatgagtcctgcgactcgagggccgtcctga

SEQ ID NO: 110988 - DNA, 88 bp, Homo sapiens
caacctttacattttggacttccagcctccgaaatggtttaagaaaatctacgaagaaacgcagtgagtctccacctgctgagctccc

SEQ ID NO: 110989 - DNA, 74 bp, Homo sapiens
ttttggccatcttctcgcagagtgctccctgctaacggggacagaagtgagcttgtagtggacaaaacaaagag

SEQ ID NO: 110990 - DNA, 100 bp, Homo sapiens
gctgcagactgaccatacccctgtccacctggcgttgctggatgagctctggcaggctgccctgagcacgctcaaccccaaccccacggacagctgtccc

SEQ ID NO: 110991 - DNA, 100 bp, Homo sapiens
tggccgtgacccagctgcggccgccgcggagatgtgacccggcagtacggcaaatatggcggagacaatgcagatcttcgtgaagactctgactggtaag

SEQ ID NO: 110992 - DNA, 98 bp, Homo sapiens
ggggcatgttggtgcatttaactacaaaaccagatacgcctggctgcaactcaggggtggcctcatcctcccgccctgggctggcctctggttccatc

SEQ ID NO: 110993 - DNA, 75 bp, Homo sapiens
aggacgtgcttcctgcttcatagataagaggccttcatgccccgaggactagcagacaaacaaggacctgaggaa

SEQ ID NO: 110994 - DNA, 106 bp, Homo sapiens
cgcagatcggcgcccagcaatcacagaagccgacaaggcgttcaagcgaaaacatgaccgctgagcccatgagtattggtaaaggttttcaaggtgtcatgaaaag

SEQ ID NO: 110995 - DNA, 96 bp, Homo sapiens
gctggtactgcaatcattcattttgtgccttgcagtccgaggatcagaaggactgtacatggtgaatggaccaccacattttacagaaagcacagt

SEQ ID NO: 110996 - DNA, 75 bp, Homo sapiens
aggggacggccgccggagccgcgaggccaaggcatgacgtccttgatgaaggccgcgctggacctcacctacccc

SEQ ID NO: 110997 - DNA, 74 bp, Homo sapiens
cgggactctgactccgaacctactgatgataggaggagatgttaaagtaacccatcttgcaggacgacattgaa

SEQ ID NO: 110998 - DNA, 102 bp, Homo sapiens
atccaccccaccttgtatgcaacgccccccttcacacacagtaagaaggccaatgatgaggccaatcagagtgatacaagtgtctccttgtcagaacccaag

SEQ ID NO: 110999 - DNA, 100 bp, Homo sapiens
tggctcagtcctgctaactacattgacaatgtgggcaacctgcacttcctgtattcagaactgttttcctcctccaccaggcgctccacctccatctctt

SEQ ID NO: 111000 - DNA, 96 bp, Homo sapiens
aggagactcctgaccctcagaatggaagaccaacactgtcatctgaagttggaatcatcatctgtgatattgctaatccagcctcgcttgatgaaa

SEQ ID NO: 111001 - DNA, 83 bp, Homo sapiens
ccgcagcacccctaccagtgggcgaagcccaagcccctgtcccctacgtcctacatgaggaccaagaatcgccttcagccctg

SEQ ID NO: 111002 - DNA, 82 bp, Homo sapiens
gacagcggcggcttcgcggcgcgtcctccgcagaggcccccgacggagacaaggacgctcctgtccaaatatgacccccaga

SEQ ID NO: 111003 - DNA, 83 bp, Homo sapiens
caaatccaagcgcgacaagaaagggggatatgagactttctactcggaatatcctgagtgttgcgtggatgtaaaacccattt

SEQ ID NO: 111004 - DNA, 100 bp, Homo sapiens
ctggccatttaggagctctgctcaaagccagacggtctatgacacacagctggagaatgtggaggcctttgagggcctgtctgacttttgtaacaccttc

SEQ ID NO: 111005 - DNA, 75 bp, Homo sapiens
ccctgaagaaaagggaaaacttgctgcggttgctcaaggcagtcgatgatgtgaagaaaggttacatcaaagcag

SEQ ID NO: 111006 - DNA, 51 bp, Homo sapiens
ctcttcaccctgcacagccttgttagaaatgcatcttctgcagacaccggg

SEQ ID NO: 111007 - DNA, 127 bp, Homo sapiens
ttcattcagatgtggtggaatatgccaaggaaaaactggagagcttcatcaaaaatagtgatagctttgataagtacaccaggggttggaaaaaccacactaggcaaagaacttgcgtcaaaatcag

SEQ ID NO: 111008 - DNA, 100 bp, Homo sapiens
actctgatgtcaatcttgagggctagggagtcatcaagctttggtgtatgtgttggccggttctgaagtcttgaagaagctctgctgaggaagaccaaag

SEQ ID NO: 111009 - DNA, 99 bp, Homo sapiens
ggcggcggtgtgggcgcgtcaggccgcgacgagggcgctgagctgcggataaccgtctggtccttgtgcacaaaatccgtgtcttacatcaaatacccg

SEQ ID NO: 111010 - DNA, 100 bp, Homo sapiens
gacagcttctccgcctggctgcactgcgtgtgtgtggtgggcttcgacctggagctgggccaggccgtggagaaacgtgaagagggctggtgggtggtga

SEQ ID NO: 111011 - DNA, 131 bp, Homo sapiens
gagtggaagtttgagagaagtttaagagaagaaatggacatgattgcctaaatcagccaaacacaggaaatgtatgagagttcctgttctgcatcctcaccagcactgggtgttatgtcctttttatttta

SEQ ID NO: 111012 - DNA, 83 bp, Homo sapiens
ggcggcgctcaatggacggaggctgggaaagtctttgggttcggaggattccagaaacatgaaggagaagttggaggacatgg

SEQ ID NO: 111013 - DNA, 83 bp, Homo sapiens
tcggaagcctgcgtaactttctcccttgatccgggagtctttccactggccgacatcggcctggctgcctggggacgcaaggc

SEQ ID NO: 111014 - DNA, 82 bp, Homo sapiens
agcggggtcacccctcagcacatggtgggggccacaccatttgccgtggccaggctagagattgaaaatcttcaagagcagc

SEQ ID NO: 111015 - DNA, 75 bp, Homo sapiens
aatggacctgcctgggcatagacttccttaagcccaccaagaaaacacattgtggagcgctatacagagttttat

SEQ ID NO: 111016 - DNA, 99 bp, Homo sapiens
cggcgctctggctctggctgtgcgcgctggcgctgagcctgcagccggccctgccggtgcgcgcggagccatggttatcatgtcggagttcagcgcgga

SEQ ID NO: 111017 - DNA, 83 bp, Homo sapiens
aaacgaggaggagataacgcggccttgggctctgcggctggctgtcggcaattggattcttccagtacagcccgggcgctgcc

SEQ ID NO: 111018 - DNA, 101 bp, Homo sapiens
gtgcggcgcagcggccgctgtcgggctggccatggcgaggggtgcacggcggccacctgagtggcgcggcggtgtcaggtgaaaaattagacgatttcaag

SEQ ID NO: 111019 - DNA, 75 bp, Homo sapiens
agaaaaatgccagccagaagaggcgttcgctgcgcgtgcacattccgccctgccaggagcccggaagtgggtccg

SEQ ID NO: 111020 - DNA, 113 bp, Homo sapiens
caaacagcccgcccgaccccgtcccgaccctggccgccccgagcggagcctggaggaagtgggaaaactcttgcctttgccatcccaatgattcatgcggtgttgcagtggca

SEQ ID NO: 111021 - DNA, 100 bp, Homo sapiens
cctttccaatctttgcctgaagataaatgcaaaacttggaggaattaacaatgtgcttgtgcctcatcaaagggacctcccgaattccctggtaacagtg

SEQ ID NO: 111022 - DNA, 75 bp, Homo sapiens
gcatgcctcaccaagtcacatgacaagcaggcttttttgaagaagaagaaggtaaagagtatatttataaagagc

SEQ ID NO: 111023 - DNA, 100 bp, Homo sapiens
ctatgccaacgacgccttcccggaggagtacgtgcccaccgtcttcgaccactacgcagctagccatccaagaaaacaccatgaaagataacgatatcaa

SEQ ID NO: 111024 - DNA, 100 bp, Homo sapiens
gaatacctggcattgacctctcagatcccaaacaactggcagaatttgctagtacagctattggaatcagatgcaaagatggtgttgtctttggggtaga

SEQ ID NO: 111025 - DNA, 50 bp, Homo sapiens
cagggagtgcatcaaaggtgtgaacacagaatgtttgcctcacggaggaa

SEQ ID NO: 111026 - DNA, 75 bp, Homo sapiens
atcaggacctggctcccaattctgctgaacagatgagctttgatccaaaccttctccacaacaatggacataatg

SEQ ID NO: 111027 - DNA, 100 bp, Homo sapiens
cagcagctgcacagtgtcaatgcctccaagccctcggagcgtgggctggtcaggcaagttactgtaaaatggggaaaggagaaatttgaaggtgtagaat

SEQ ID NO: 111028 - DNA, 89 bp, Homo sapiens
tctgtttgggatcccgctgtggtacttctcgcagtccccgcgcgtggtcatccagcttcggaaccaaaaagaagcttcccagagccggg

SEQ ID NO: 111029 - DNA, 98 bp, Homo sapiens
acaaagtgtgtgaacgtgaaaattccacagttccgtggtttgtaaagcaatgcattgaagctgttgagaaaagagacagagtttcactcttgttgccc

SEQ ID NO: 111030 - DNA, 116 bp, Homo sapiens
cagagatccttccaaacaagtgcatgattcttaaaattttccaaaggagttgctcaggacaaaataacactgctgatgttctaatcatgtcagataaagatgatattgagactcca

SEQ ID NO: 111031 - DNA, 90 bp, Homo sapiens
tgcaactcgagccaagaaagtgaagatggccaccaaatcatgccccgagtgcgaccaacagcatctgtgggtcttgcagatatgatgtct

SEQ ID NO: 111032 - DNA, 100 bp, Homo sapiens
gtgcaagccctacagaatttgggacctacgatctgactgcagccatgagcagcaatgagtgcttcaagtgtggacgatctggccactgggcccgggaatg

SEQ ID NO: 111033 - DNA, 100 bp, Homo sapiens
ggtaatggtgtgaaggaaggcccggtgcgattgcatgaggatgctgaggctgtcctgtcctcgtccgtctcatcaaagtaacaaatgtggcaattatttt

SEQ ID NO: 111034 - DNA, 100 bp, Homo sapiens
cccacactggcttttaaggaggacacccggacacctggaagctgggaaatgtgatgtcttggcattgcccattttcaagcaggaagattccagccttcca

SEQ ID NO: 111035 - DNA, 100 bp, Homo sapiens
gatctcagctcactgcagcctccgcctcccgggttcaagcgattcttctgcctcagcctcccgagatggtgatgggaatctttgcaaattgtatcttctg

SEQ ID NO: 111036 - DNA, 98 bp, Homo sapiens
cagtcttcaagagcccacggacaccacctcaacgatgattataaccgtgttgaactctctgagataaacggagatgcagggtcaaactacataaatgc

SEQ ID NO: 111037 - DNA, 75 bp, Homo sapiens
caaaccgactatcacttggtatatgggtggccattcagggcaactggggccttcgtcagttgccccttcattccg

SEQ ID NO: 111038 - DNA, 100 bp, Homo sapiens
cggctgcttttgctgcgccctctcagcttcccaagaaaggctgaagaaatgtcaacaattgggagttttgaaggattccaggctgtgtctctgaagcaag

SEQ ID NO: 111039 - DNA, 75 bp, Homo sapiens
ctatcaggggaagatatgcatcagttccatcgagccattactacagacatatctgaagagatggattaagaatgc

SEQ ID NO: 111040 - DNA, 98 bp, Homo sapiens
ttcgctcgtggatcgatacttcactcgctggtacaaaccgggactggagtccagagttgccaccagatgggatattcaaaaatacgccagagaggcct

SEQ ID NO: 111041 - DNA, 75 bp, Homo sapiens
tcgccatcttggatccgcgggacaagaaaattcatgcgaatgctgaaatttctgtctttgaagtaaatatacgct

SEQ ID NO: 111042 - DNA, 83 bp, Homo sapiens
cgacaagccgctggcagccgcggatctcaccgccgctcaggattgagatggccatcctgcggttcccttacgagtcctggggg

SEQ ID NO: 111043 - DNA, 100 bp, Homo sapiens
tgcagtacctgcagaaggtctctggagacatcttcagcagatgtacggagcgcaagaggacggcagcgtcggcgaaggtgacctgtcctgcatcctcaag

SEQ ID NO: 111044 - DNA, 100 bp, Homo sapiens
ctacctcatctagaaggagagcaattagtgagacaggcaaagcctttggttgtgttggagggtacatcgccagcacgagttctctgattgacaccgtacg

SEQ ID NO: 111045 - DNA, 75 bp, Homo sapiens
ccaggcctcaggccccctcaccatcctagaggtcaagatcagctctggctagagttgatctctctaatgtattag

SEQ ID NO: 111046 - DNA, 51 bp, Homo sapiens
ccgagacatgcaggacaacaagtgtgaaatcaaagttgcacaacccaaaga

SEQ ID NO: 111047 - DNA, 50 bp, Homo sapiens
cgccagaccgctgccctgcagcagggtcccagatgagatctacgagctgt

SEQ ID NO: 111048 - DNA, 100 bp, Homo sapiens
acatttctggctctgaaggcgaacgcttcgctggccatttaggagctctgctcaaagccagacggttctaagctggtctatgtccatcaccttcttggag

SEQ ID NO: 111049 - DNA, 82 bp, Homo sapiens
gaagcacgagcagatcctggtcctcgatccgcccacagacctcaaattcaaagagaaaacactcattgatcttcaaaatgaa

SEQ ID NO: 111050 - DNA, 50 bp, Homo sapiens
gccaccactgcggcgggctctggggtgaggtggctttgaccccgggttgc

SEQ ID NO: 111051 - DNA, 50 bp, Homo sapiens
cctgtcgcggcgcgagacctctgaggcacagagctttggcctgctggatc

SEQ ID NO: 111052 - DNA, 100 bp, Homo sapiens
agcagccattctgtggcatagttatgagctgcttgtagaatatgacttaccagcactcctggaccaagagctctttgaaccattaaaaatctcaagtgac

SEQ ID NO: 111053 - DNA, 74 bp, Homo sapiens
caagaaacaaatcttgaagcacctctccaggattctcagtaagttaagtcaggaaatcaacaagaacgaagaga

SEQ ID NO: 111054 - DNA, 50 bp, Homo sapiens
ccaccttcaaagaccactccttctttgtgaatcccagaccttgctggcag

SEQ ID NO: 111055 - DNA, 100 bp, Homo sapiens
attggattgaaagaagcccagcttttccatcctggagatctacaggatttatcaaatcgagtcactgtcaagcctgttacatgaacagaatatggcaaaa

SEQ ID NO: 111056 - DNA, 100 bp, Homo sapiens
atggcctgcagaaggcccaggctcatgacggagctggtctgaagctggtagtttcctcacccaccagtccgtccaaaagaaactcttccttcaaaacctg

SEQ ID NO: 111057 - DNA, 50 bp, Homo sapiens
ccagatgaaccatagcgtgcttcaggcagctgtgtcaatgttgaaacaag

SEQ ID NO: 111058 - DNA, 100 bp, Homo sapiens
gtgcagctcaacttctaccagttcctcggggtgcagcagagaaagcaaccagcgagatgaatactgctgaggactggggcctcattttggatatctgtga

SEQ ID NO: 111059 - DNA, 90 bp, Homo sapiens
gaggagccagtggcaggcggcctgggtgaccgccctgaacgaggaggccgagaggaaagggctccagtccccaaaaggcaaaaatgtgac

SEQ ID NO: 111060 - DNA, 88 bp, Homo sapiens
gtattctaccaggcctggtgctggcctcctgtgatgggccttcgcactcccagattccgggaccccaaatcccagcggacgcaccagg

SEQ ID NO: 111061 - DNA, 98 bp, Homo sapiens
gaggaggggccccagcagcccccgaaggccctatcaggacatggagtatgaaagacgtatggatggagcagatctgtgttttgaaatcgtaaagcgag

SEQ ID NO: 111062 - DNA, 100 bp, Homo sapiens
ggagttcaagaagaacactccagagccaccaaccgctaaaatgcacgccatcatcgagcgcacggccagcttcgtgtgcaggcagggagcacagtttgag

SEQ ID NO: 111063 - DNA, 90 bp, Homo sapiens
ccaccatcaacaatgagtacaactaccgctgctggaccacaaaccgctgccagaaaaaggactaccccaatggcacctggctgggcgacg

SEQ ID NO: 111064 - DNA, 107 bp, Homo sapiens
cagcactttgtggagaaagtcgtcttccacttgcacgaaagctttcctaggccaaaaagagaaacctgtgaaggtcgaaacagctgcgtttcctgttttaatgttag

SEQ ID NO: 111065 - DNA, 83 bp, Homo sapiens
ggcgtctgctagtagggtcgttcaggaggcaggtggaagtcatcataaagtttctgtttcacccgtcgtccatgttcgaggac

SEQ ID NO: 111066 - DNA, 75 bp, Homo sapiens
gacaacgtgaagatcatctgcctgggagacagcgcagtgggcaaatccaaactgcctgcgctgctgacttaaggc

SEQ ID NO: 111067 - DNA, 90 bp, Homo sapiens
gagatagaggcagcagaagccagggcagctgaaagacagagaccttcaggcctggcagctgcgattcagccacctcgtggggtatggtgc

SEQ ID NO: 111068 - DNA, 74 bp, Homo sapiens
gtcattcagcaggcctggaaaagtttcctttttgcagagcagtctctgatgaagaatgccataaaaacatcgga

SEQ ID NO: 111069 - DNA, 74 bp, Homo sapiens
cgcggcacagagagggcctgggagcttgctgcagcttcagtaacctttggaaacatcagaagctactctccatt

SEQ ID NO: 111070 - DNA, 100 bp, Homo sapiens
tcatcatagctcactatggccttgatcctcctgccttagcctcccaagcagctggtattacaggtttctaccatgaatgaaatgaagagttattctcaag

SEQ ID NO: 111071 - DNA, 82 bp, Homo sapiens
ccgcgtgcccggccgcgcccagcagccttatgccagcctggaccatcttggaggcagtgtaggatcatggaagaactttgaa

SEQ ID NO: 111072 - DNA, 98 bp, Homo sapiens
tgctgcgcccgctacggcccgcgcaaggcctggcacctggtcgggcaaacctggtggacctgcagaagaagctggaggagctggaacttgacgagcag

SEQ ID NO: 111073 - DNA, 116 bp, Homo sapiens
gtttagttttcgaagccaagaagatctgaatgagccaattaaacgagatggcaaaaaggagtgtgatattggaacactgactatgccaaatggagactacattgaaggttatttta

SEQ ID NO: 111074 - DNA, 100 bp, Homo sapiens
aagggtttgactggaggaacctctggagcagctctatctttcagatcattcagagcataaggatgggcatgtgagaaagccagggatttgacaccacctc

SEQ ID NO: 111075 - DNA, 100 bp, Homo sapiens
aaatgttccaccaggacttgatgaatataatccattctcggattctagaacaatgatgaggagtctgatgaggaagctgtgaagaaaaccaacaaatgtg

SEQ ID NO: 111076 - DNA, 82 bp, Homo sapiens
aacgtgcgtgtcacccacgcagacatcttcagccgctgccagatgtggacgagtgctcactagcagaaaaaacctgtgtgag

SEQ ID NO: 111077 - DNA, 100 bp, Homo sapiens
cggatccttgctcagagcaacaaccagcagcttcgggatttagggattctctccgttcagattgaaggagacagaagaaattctggcagatgtgctcaag

SEQ ID NO: 111078 - DNA, 90 bp, Homo sapiens
gcgacttctccagccgggcccgcgaagtgcatttgacattgtgcagcaaagaaatggttatggagaagcccagtccgctgcttgtagggc

SEQ ID NO: 111079 - DNA, 100 bp, Homo sapiens
cctcgcccgaggagcgcggtggcggcgtgggagggagcctctgacggcgtctggatgcagcggaacctgaagatggagatgcttgccgggtgtggggctg

SEQ ID NO: 111080 - DNA, 101 bp, Homo sapiens
aacgttctcattcccaaaatgaaaatttctccaaaaaggatgtcatgttcctggcctggttcacctaaggatcatgaacgtaatggatgcagattatgtaa

SEQ ID NO: 111081 - DNA, 100 bp, Homo sapiens
tggcccttctatcacttctatgcagctgtctgtgatcctggaaacatacgtgtgactgaagctcccaaacacccaatctctgaagaactggaaactccca

SEQ ID NO: 111082 - DNA, 100 bp, Homo sapiens
tcgctgtgctcaaaactgtcattttgggactgctgtgcctcctcctcctgtggtggaggagaaggaaagctcctactccaatgtggccagatgacctgca

SEQ ID NO: 111083 - DNA, 75 bp, Homo sapiens
gggcagacggattcatttagagctgcggaacaggacgccctctgatcctcccgcgacgatgcccctcaacgttag

SEQ ID NO: 111084 - DNA, 90 bp, Homo sapiens
gtcgacggctggagagaagccgggagcgagcccaggcggcaggataattctggcctcatagaacaagttgggaagtgttccctcctcccc

SEQ ID NO: 111085 - DNA, 108 bp, Homo sapiens
gaagactgcacaaatgcagtgaagcttgatgacacttacataaaagcctacttgagaagagctcagtgcaaaaggaatggtgactctgcataagttgaaaactgcaaa

SEQ ID NO: 111086 - DNA, 96 bp, Homo sapiens
cgagtatctccgtttcctggatgtgaaccaagcaagagaaatggtactagagattatccgagaaaaagaccaagctgactttcggggtgtacgcgg

SEQ ID NO: 111087 - DNA, 101 bp, Homo sapiens
gtttaagaggcagcaggcgatgccctccacaggtatggcagagcttttgcgaaacatcagaacacaagtgcttataaaattaattaagccttacacaagaa

SEQ ID NO: 111088 - DNA, 100 bp, Homo sapiens
tgcccaccggaatggagaaggaagaggagtcgatttgaacatggaattcaatccttcagatcatcctcgggccagcacaatattcctcagtaaatctcag

SEQ ID NO: 111089 - DNA, 97 bp, Homo sapiens
tggctgcggctgcgccgaggcgccctactcaggcatatggctacccattctccccagaaatctcaccagtgtgctcactgtgagaagacgttcaacc

SEQ ID NO: 111090 - DNA, 100 bp, Homo sapiens
gacagcctcaaacaggagctggagcagctcaaagagatgctttgggaaaatggaattaatggcattttagcagatgaaatgggattgggtaagacagttc

SEQ ID NO: 111091 - DNA, 90 bp, Homo sapiens
gctagtcctggggtgcggtgcagggaggacctctttgtttttagacatgaattggccataatgagactagcagcctttatgggcattact

SEQ ID NO: 111092 - DNA, 82 bp, Homo sapiens
cgctggaccgtcgccttgctcctcgccgcggcggggactgcagggaaatcctcattgacgattcaatttgttgaaggccaat

SEQ ID NO: 111093 - DNA, 98 bp, Homo sapiens
agaatcgccgcccaccaggccctgcagcacccctacttccaagaacagaggtgttggagcgggccggagagaagtagagtgggctgcgaggagaagga

SEQ ID NO: 111094 - DNA, 82 bp, Homo sapiens
cagcagcgacggtagcagcagcatggccgcgatctatgggggtgtagagggaactcccccactggaaaggattctgaaagaa

SEQ ID NO: 111095 - DNA, 98 bp, Homo sapiens
ggcagcatccccattgagttcagggtgtccctgctccgcgactgccccaacaagaaggccatctatgcatcgaaggtccttgaatgggcaagagggca

SEQ ID NO: 111096 - DNA, 100 bp, Homo sapiens
cgtggagtgacggtcacaccgcggcggaaattccgctgtcagaaatcctcacggtggagtccgcccagaacttcagccttgtgccgccgggcaccaaccc

SEQ ID NO: 111097 - DNA, 75 bp, Homo sapiens
ggtcgatggtcggcggcgcccggatgggcagctgaggttcttcagaagagtgtgatcattggagtgattgaaggt

SEQ ID NO: 111098 - DNA, 98 bp, Homo sapiens
aggagctgtatgacgacgtggacctgtcagagctcacagctgcggcttgcggtgtggactatgaagtcaaagccttctgcgcggagaatttggaggag

SEQ ID NO: 111099 - DNA, 75 bp, Homo sapiens
gcgccgtggacacagacggggtggagcccatggaatcggtcctggaggacagattcttagatatggcagaggtat

SEQ ID NO: 111100 - DNA, 100 bp, Homo sapiens
ccgcgccccgcggcatgagccggtgaccaagctcggggccgagcgggaggcagccgtggccgaggcccagcctccgttatcagcaatgatgatgactctg

SEQ ID NO: 111101 - DNA, 75 bp, Homo sapiens
caagccggatcagaagacgaaaactctgcggaagttctgaatcaagaggaggtgccgtgagcgatgtggagatgc

SEQ ID NO: 111102 - DNA, 90 bp, Homo sapiens
aatgcttgaggctccttacaagaaggttggacaattaaagatactgctgaaatcagtgcttgaccaatggagtagtcacaaagtggcctt

SEQ ID NO: 111103 - DNA, 90 bp, Homo sapiens
gtctttgtcttgctgttggtgaaaagattcattccgaaggtttcctatcctgggagcaggagagtgtgcctatttgaatgacaaaggtgc

SEQ ID NO: 111104 - DNA, 100 bp, Homo sapiens
gggatgttgagcactacagacctcacagtgccaaatggagctggaagcagtccagtgggcaatctgaatatggcggtgtagtgtttggtggttgggcgcg

SEQ ID NO: 111105 - DNA, 51 bp, Homo sapiens
ttgtcccagaagcaatttaaggagcagccggcccaggcctttgtggtgaag

SEQ ID NO: 111106 - DNA, 74 bp, Homo sapiens
gtccgcgggaagatggcggcgccgctcatccccctctcccagcagtgttctaagaacggaagcatctgggctgg

SEQ ID NO: 111107 - DNA, 90 bp, Homo sapiens
aggaaatgcagctttaattggacagaaatttgcagccaactcagatttaaagattgactgttcaagtactattatgctggacaatattgt

SEQ ID NO: 111108 - DNA, 100 bp, Homo sapiens
cttctccgccgcggcactgatccccacagaatgtgagcatttgatccgccatatgttggtgttagatcccaataagcgcctctccatggagcagatctgc

SEQ ID NO: 111109 - DNA, 100 bp, Homo sapiens
gaagagcccccttttgaaaaagaggctaatattattgtggatagatggcttgatgagaacacaaagttatacctcaatttacttgaaatggaatatagtg

SEQ ID NO: 111110 - DNA, 51 bp, Homo sapiens
ttacttcagaattaccagtgttacaggatatcatgataacacattttgaac

SEQ ID NO: 111111 - DNA, 100 bp, Homo sapiens
aaggagtggaagtttgagagaagtttaagagaagaaatggacatgattgcctaaatcagccaaacacagggtcatcatcagatttgaaatatttaaagtg

SEQ ID NO: 111112 - DNA, 96 bp, Homo sapiens
ttgatggccgccatcctcatgacatcatcgatgacatcaacagtggtgctgtggaatgcccagccgtggccaatatgttctacattgtagtgatta

SEQ ID NO: 111113 - DNA, 75 bp, Homo sapiens
ccaaactagattggcagccgttttttgagagcaggtcaggttgccaaaaaggaagatctcatcagtgcgtttgga

SEQ ID NO: 111114 - DNA, 90 bp, Homo sapiens
tgtgaccacccctgaagaaattgcacagccaagggaagagatggtgttgagtggaaaatacaaatctggggaacaaattcttcgtttggc

SEQ ID NO: 111115 - DNA, 75 bp, Homo sapiens
tccgtcacctccgctcccccgatcctattcccagtcgtggcgccatgttttggaagtttgacctgcacacaagct

SEQ ID NO: 111116 - DNA, 75 bp, Homo sapiens
gatttgatgaaattaaacttgtccagataaaaatgtacagtgggagaaatcacagatgccctgaaaaaggtattt

SEQ ID NO: 111117 - DNA, 107 bp, Homo sapiens
gagtctccacgccgtcagctgagaagagtgaggagagatcgatgtcttattgtgatgagtctcgactgtcatatcttcttcggaggatcacccgggaaaacgaccga

SEQ ID NO: 111118 - DNA, 75 bp, Homo sapiens
acttcatcacctctttgtacatcttctgcaattactcgaaaaaatcaaggacttgttcccagatggctctattag

SEQ ID NO: 111119 - DNA, 76 bp, Homo sapiens
gggccgccagcctcggcaccgtcctttcctttctccctcgcgttaggagcagtgaggagaatgaataccttccaag

SEQ ID NO: 111120 - DNA, 80 bp, Homo sapiens
gcgtcccggggacttggggccgcagggaggtcttgaggaccggcccagctcaggctcctggggcagcggcgaccagagca

SEQ ID NO: 111121 - DNA, 75 bp, Homo sapiens
cgggagcttccgggagggcggctcgcggaaacccgggatggacgtggccgacgcctacgtgactttcgtccgcca

SEQ ID NO: 111122 - DNA, 76 bp, Homo sapiens
agctggagacagtggtggtgactgttggcagatgtgaatggagtcattgaggaggagtttaccatggcccgcctgt

SEQ ID NO: 111123 - DNA, 75 bp, Homo sapiens
agctttgaaaactatttctgtaattccaggatatcattatttcctggagggttttttagatgcactactatgtgg

SEQ ID NO: 111124 - DNA, 100 bp, Homo sapiens
ctactccatgctgctagaggaggaaaaggaaaaaaatcgccaagtggagttccaagcaggtatggcagcagccaaacttctgcatgactctggactgaat

SEQ ID NO: 111125 - DNA, 98 bp, Homo sapiens
ttcggcttctgagacggcggcagcagcggcattcagaactaaaattccagatggcaaactcaatgaatggcagaaaccctggtggtcgaggaggaaat

SEQ ID NO: 111126 - DNA, 101 bp, Homo sapiens
cacattaattagttccttgaaactcttccctcattaacttcagagagacaagagagacacctccaacttcgacaaagagttcaccagacagcctgtggaac

SEQ ID NO: 111127 - DNA, 101 bp, Homo sapiens
gccagctgaagaaatagaacattactaaagccacctgtacatctttctccttttgaattacctgccctccgaagaagaggtgcctcattagaccttaaagc

SEQ ID NO: 111128 - DNA, 87 bp, Homo sapiens
ggaagagaagatcatcgagcatttcaaacgtctctagtgatccctgaaaagttccagcatattttgcgagtactcaacaccaacatc

SEQ ID NO: 111129 - DNA, 100 bp, Homo sapiens
cttcagcacacatgtcagcattgactgcagccctcataaaactgtcaagaagactgacacacaaactcgggccacttctaagagtctcttacctgttagg

SEQ ID NO: 111130 - DNA, 98 bp, Homo sapiens
gtggcagagcccgcgcggcgctggaagcgagtggcggagcggcgggacctcggcggactcgccatggaggaggaggaacctggcggaccgaggctgtg

SEQ ID NO: 111131 - DNA, 96 bp, Homo sapiens
gcaggactgctctcctactacacggtggagccgccaccaaaatgcagattttcgtgaaaacccttacggggaagaccatcaccctcgaggtacggg

SEQ ID NO: 111132 - DNA, 100 bp, Homo sapiens
cggggacccacagacacagccggggtcgggagccgcccggggcagggctcgggagagcggccctgggcgctgcctatggcacagccaagagcggtaccgg

SEQ ID NO: 111133 - DNA, 75 bp, Homo sapiens
cgctgctgtacttcgtctatgtggcgcccggcataggtttcctgaaatgcagtttttccagcaagaaaatgtgag

SEQ ID NO: 111134 - DNA, 75 bp, Homo sapiens
cagagctgaggactgcctgtttgcagattggctcacagtggttgattgatcaaccccattggacgttggttctgt

SEQ ID NO: 111135 - DNA, 83 bp, Homo sapiens
tctgcgttttgttttcccctcggcactaggcagcggaggagcccgaccgacccgctccggtgtcggcgggtggcgcggcgccc

SEQ ID NO: 111136 - DNA, 50 bp, Homo sapiens
ggagaggagggaactgcggagcgggtagcctttccagtaaatatatgact

SEQ ID NO: 111137 - DNA, 100 bp, Homo sapiens
actcagccaaggcgactgcttaacacactgaggagcagtttttgcaagaaaggatcaaagtgaacggaaaagctgggaaccttggtggaggggtggtgac

SEQ ID NO: 111138 - DNA, 100 bp, Homo sapiens
agacacattccaccccagtggggggtcccataccactcatggatctgaatcagatggcagatggctcttcttaaggccaataaggatctcatttccgcag

SEQ ID NO: 111139 - DNA, 75 bp, Homo sapiens
gtcgaatgaggcacctaaaaattgtataccgcagattcagtatcgggaaaattgcctggcagcaaaagcactttt

SEQ ID NO: 111140 - DNA, 75 bp, Homo sapiens
tgttttcgggttcatcattgcatgccgagtgatagctactttcacatgttcaggagaaaaggaagtaaatttggc

SEQ ID NO: 111141 - DNA, 89 bp, Homo sapiens
aaaccgtccctgctacagagcaggagttgccgcagccccaggctgagacagtgaaacctgctgtggaccctgctgctgccaagctgtgg

SEQ ID NO: 111142 - DNA, 90 bp, Homo sapiens
gtctgcacagtcaccaatgccgtgggcatgggccgcgctgagcaggtcatctttgtccgagggaaagaatatggcaaagctgatgcaaga

SEQ ID NO: 111143 - DNA, 87 bp, Homo sapiens
gctacggggcagatggactcggagcgccccgccgggtaagcttgatgattaccaggaacgaatgaacaaaggggaaaggcttaatca

SEQ ID NO: 111144 - DNA, 98 bp, Homo sapiens
ctgggataagatctggaacttccaagccaagcctgatgacctgcttatttctacctatcctaaagcaggaagggcctgtcccagtcggctttacccta

SEQ ID NO: 111145 - DNA, 75 bp, Homo sapiens
ctaatcttctgaatcattatgaccaacagacagcagctttggcaatggaggttatcaggacaccccatgggagag

SEQ ID NO: 111146 - DNA, 100 bp, Homo sapiens
atcaggaatgtgtttcactgtgaggcacacagaattctctacatttgtgaaagtcagtttctgaggaatttcatcagctgcacggaacgtcatgaaggac

SEQ ID NO: 111147 - DNA, 96 bp, Homo sapiens
cttgccttcctgttctccaagaccagatcaagccaagtccagctgcttccaaagagtactttcagaaggtaaatcagtagatcacccatgtgtatc

SEQ ID NO: 111148 - DNA, 50 bp, Homo sapiens
gtcagccttcccagtagctggaactacagcccatttttcagtgaagaatt

SEQ ID NO: 111149 - DNA, 100 bp, Homo sapiens
gacactgcttgaatacactgagacccggaatcagttccttgatgagctcatggaggtggccgtaacctttggcctggggcagctgcaggagcgctgcgtg

SEQ ID NO: 111150 - DNA, 74 bp, Homo sapiens
tgccatgcaggcaggccctgagcacgctgctgtgtgagcagcagctgcaagctttcttcctggtggcagatgac

SEQ ID NO: 111151 - DNA, 80 bp, Homo sapiens
agggaagctggggctggtgcaactttcagaagtggtcccaggtcagcccaagactaccccgtcggtcattctgttcctgc

SEQ ID NO: 111152 - DNA, 75 bp, Homo sapiens
gacagattcgcagtggtcgcttcttctccttgggtgagttctgcatcctggtacttcctcaatgtatttgggctt

SEQ ID NO: 111153 - DNA, 107 bp, Homo sapiens
gacccatttgtgtccattgatctcttggagcagctggggatcatggttacctgtcctgctgccgattcctggatgacaatcagatcgtcaccagctctggagacacc

SEQ ID NO: 111154 - DNA, 100 bp, Homo sapiens
gtgccagaagcagtgccgggacgagggctgcagactcctgttccagaggtcattgttgatgtggaatccatggacatcttcccagtgggctggtgtgaag

SEQ ID NO: 111155 - DNA, 80 bp, Homo sapiens
acgatgttggactcatagtcactgccagaaaggttacaggaggttccagtggcatcgggaagtgcattgctatcgagtgc

SEQ ID NO: 111156 - DNA, 74 bp, Homo sapiens
gcgggtctgtcatcatgtcgcgttacgggcggtacggaggagatccacctccgacccttaagccagagactcag

SEQ ID NO: 111157 - DNA, 83 bp, Homo sapiens
caccaaagcaggcgatgacgagccagagtacgagcctggtccgacccccagtggcactaacgtgggatcctcagggcgctctc

SEQ ID NO: 111158 - DNA, 75 bp, Homo sapiens
caaggcacccccaccaggcttgccagccgaaacgatcaagtttctccttggaccaagatgactgatggaaaactc

SEQ ID NO: 111159 - DNA, 100 bp, Homo sapiens
ttaaggaacttacgcacttaaaataattgggcagaagagaagcagtgaaggagtgcagaggcatcacctgaaagtccagtcaacctgcaaccaaaacgag

SEQ ID NO: 111160 - DNA, 51 bp, Homo sapiens
cgagaagttccacatcatcttatcggatgatggcttggaaaaaagtccaat

SEQ ID NO: 111161 - DNA, 112 bp, Homo sapiens
ggggcgggccctgggggtcctcagcgtggtctgcctgctgcactgctttgatcgtcagtatttaaacagatcacatcatgcgtgagtacaagctagtggtccttggttcagg

SEQ ID NO: 111162 - DNA, 100 bp, Homo sapiens
acgtggttcacgtgaaagatgccaatggcaacagctttgccactcgactttccaacatttttgttattggcaaggtgctcatctgccggaactaccgtgg

SEQ ID NO: 111163 - DNA, 96 bp, Homo sapiens
ttggccagtatgaagtggtgaaggagtgtgtgcagcgctcccggagccctgcctgttccctgtccatccaggccagcagctgaaggagcctcacct

SEQ ID NO: 111164 - DNA, 78 bp, Homo sapiens
ttaagtcggccttccctcacctacaagagtgcacaggatctaccgaggggctggcggaagcttccagaaggcacagac

SEQ ID NO: 111165 - DNA, 86 bp, Homo sapiens
gggaccacggtcaccgtctcctcaggtattttcaaatcaaagaagtttgaacacttaaaaacaagtcaaattgtactgaaagatta

SEQ ID NO: 111166 - DNA, 82 bp, Homo sapiens
gcgccttcaaaagcccacttggcgatgggttacagtaagaggtactccaaagattcaggtttactcacgtcatccagcagag

SEQ ID NO: 111167 - DNA, 90 bp, Homo sapiens
cggaggagcaggttgaaaagatccgatggcagcaccacttcgaccagcttcatcctcagacagatgtacattgaagatgtcagtttctac

SEQ ID NO: 111168 - DNA, 90 bp, Homo sapiens
agagaagaaagacagctttgtggaagagtttccgttactatggcaatgacggcagggactacaacaacctttcctatgagcaaccatacc

SEQ ID NO: 111169 - DNA, 75 bp, Homo sapiens
tcctttctttgtcaagccacccaatgcagagccacttgtggccccccaggacacatgacggaagtgtgtattttt

SEQ ID NO: 111170 - DNA, 74 bp, Homo sapiens
agtcctcgtcagcactgactttcagctatggaatcggataccatacttgcagagctccttcagatacataaaga

SEQ ID NO: 111171 - DNA, 74 bp, Homo sapiens
caggccgggctcaaccaaaagctgcctgagaacacccacaagtccactccagcgagctaccacgcagacatcaa

SEQ ID NO: 111172 - DNA, 100 bp, Homo sapiens
agaaaaacggccaagaggcagacctaggaaatggggcaagaagtacaagcccctggacctgcggcctaagaagacacgtgccatgcgccgccggctcaac

SEQ ID NO: 111173 - DNA, 75 bp, Homo sapiens
ccgattactgcgagaacaactacatacaggaaatggtgttcacactggccctgaatcaagggaacaccagttttc

SEQ ID NO: 111174 - DNA, 100 bp, Homo sapiens
attaaaaaattatgctgaataccagcttcttggacacttaatgattgttggcaagaaatgtgctgctgatctgggcctgaataagggttatcgaatggtg

SEQ ID NO: 111175 - DNA, 80 bp, Homo sapiens
ttggatatccacaccatccttctcgctgcaggcacctacgccccagtgaagtccttccttcgagtggataaagaaaaggt

SEQ ID NO: 111176 - DNA, 100 bp, Homo sapiens
caaaatccatagatggaaaagatgctggtgctcaagaccgaatcggctgggcttttggcctaggattagaaaggctagccatgatcctctacgacatccc

SEQ ID NO: 111177 - DNA, 74 bp, Homo sapiens
ggattgcgagtcaccgagtttcccgcgcggcttgaggtgtcagttgtacccgaggcgttctcagcagcagcaag

SEQ ID NO: 111178 - DNA, 50 bp, Homo sapiens
cccggagtcacctacgtggtcaaggtttttcgttggaatatacgttgcac

SEQ ID NO: 111179 - DNA, 100 bp, Homo sapiens
atctgtgctgggatttaaagcttcagaggcagaaaggcagaagtggaagcaacttctatttagtgatcatggtgggaatgatggttagatgctgccgaac

SEQ ID NO: 111180 - DNA, 98 bp, Homo sapiens
cgaaaatcaaattcaggagttcaagaaacgagatgcacagatttttggaagtaccagcacagtgacgcttcctgaaaccttgttgtttgtgtcaacgc

SEQ ID NO: 111181 - DNA, 100 bp, Homo sapiens
cagcctgcggagcctgtggggcagatggagttttcctctagttgtttaggatggagtgcaattgcacgatcttggctcaccgcaacctccgactcccggg

SEQ ID NO: 111182 - DNA, 95 bp, Homo sapiens
gggcccctcgcctcccctctgaggaccgaagatgagcttcctcttgaggcagaggttgcagtgagctgagattttgcgactacactccaacctgg

SEQ ID NO: 111183 - DNA, 83 bp, Homo sapiens
ccacccaccgccgccgcctcccagacactggctctgagaccccgactgcccgacggctctacactgccagcgggcctcctgag

SEQ ID NO: 111184 - DNA, 100 bp, Homo sapiens
cccaggtgcaggagctcttccatgaggcagcccagcagcaataccaagtttccaggcccgaagagcatcccagactattgggactcctctgccctgccag

SEQ ID NO: 111185 - DNA, 105 bp, Homo sapiens
tggagaaaccaccgtgctggaccgcttttacaatgcagcgtggggtagagcagcggctgccatgctcttctgtggcttcatcatcctggtgatctgtttcatcct

SEQ ID NO: 111186 - DNA, 75 bp, Homo sapiens
gctggcaccccgaacgggttgcttcccccgctgcgaggctgaaggggatgctaagggagataaagcaaaggtgaa

SEQ ID NO: 111187 - DNA, 100 bp, Homo sapiens
ggacattgaggctggatgctgcgatcccgcagggctgtaatccccttgcacaaaccggccggagtaaattgcagaatcaaagagctgctttgaatcagca

SEQ ID NO: 111188 - DNA, 75 bp, Homo sapiens
ttgggaccaagctgatgagcccttgaagcacagcaggtgacatcactcaaaaaggatatgaaaagaaaagggcaa

SEQ ID NO: 111189 - DNA, 75 bp, Homo sapiens
cgaggtaggagtcgactcctgtgagctgagcagcgccagttggcactagctgagaagttcaaggagctgaaacgc

SEQ ID NO: 111190 - DNA, 100 bp, Homo sapiens
tgtcattggcagcaattgctttatcaccaacagtgtcattggccccggctgccacattggagctgatggtacacacatggatggtgatcaaattgttgtg

SEQ ID NO: 111191 - DNA, 100 bp, Homo sapiens
gatcaacatagacagcagtggtgaaacagttggatctggagcttccatgggacttaatgaagagcagaaagaatttcaaaaagtggcctttgactttgct

SEQ ID NO: 111192 - DNA, 99 bp, Homo sapiens
atcgatggcaccccctgtgaccagaacggcacggccatctgtgtgtctgggcagtgcaaggacctcagcagccatgtcgaagccccatagtgaagccgg

SEQ ID NO: 111193 - DNA, 82 bp, Homo sapiens
tggacgtgctcgcgcccctggtcctgctgctcggggtccgcgcggcctccgcggagccaggccgtaagttcatcatcgccaa

SEQ ID NO: 111194 - DNA, 90 bp, Homo sapiens
cttcaagttggagcaaggagaggggccatggacattggaaggggaagccccacatcagagctgttcagagacagggtcttgctatgttgc

SEQ ID NO: 111195 - DNA, 83 bp, Homo sapiens
gaaaacactctttaagattccaagtgtaaacaggaacatcgataagtagtgtaaaaacttgcacaatgaaatccgaagccaag

SEQ ID NO: 111196 - DNA, 100 bp, Homo sapiens
actgcctccccacaccaccgaccaggacctggtgaagctctgtcaaccatttattgctaaacatgggtgcatttttggataaacccaaaactgaaaaaca

SEQ ID NO: 111197 - DNA, 90 bp, Homo sapiens
ctgggggcagcacgggcttgcccaggcggaaggaggtgacggaggaggaggctgagaggtggcaatggctacatcaatgactttcccatg

SEQ ID NO: 111198 - DNA, 83 bp, Homo sapiens
ggcaagaatcagctggggcagaagcgcgtggtcaagacaccagagccggaagtggaaccgcccagtgcccccgagctcaagca

SEQ ID NO: 111199 - DNA, 101 bp, Homo sapiens
gatgtctcgctccgtggccttagctgtgctcgcgctactctctctttctggcctggaggctatccagcctttgaagaaagatgacaccacctttgatgagg

SEQ ID NO: 111200 - DNA, 74 bp, Homo sapiens
ttctctctcctcgattgttgcgcgctcatcttcctctcggtctacttcgcatatccccccacgtccatgtccag

SEQ ID NO: 111201 - DNA, 51 bp, Homo sapiens
aaggactcacagtggctgcaaggctcctcagtggttggaaagtgattcttg

SEQ ID NO: 111202 - DNA, 100 bp, Homo sapiens
gggatcgtcagtagagatgctgcaggtgaccaagaatatggcccaggtgaccaaagccctggacaaggccctgagcaccatggacctgcagaaggtctcc

SEQ ID NO: 111203 - DNA, 75 bp, Homo sapiens
agaaggttgggttcagaagaggggcacgtgtggttctcaaatataggcattctgatgggaacttgtgtgttaaag

SEQ ID NO: 111204 - DNA, 100 bp, Homo sapiens
tgggaaacaaggcttccagtgccaagggaacaatggcaaaagcctttgatgaagcattttcctctgagacaacagcggcaatacctgaagaccatgaagc

SEQ ID NO: 111205 - DNA, 74 bp, Homo sapiens
aagaacttcacaatcaagaaatgcagaaacgtaaagaaatgcaattgaggaggagatgttaaagtaacccatct

SEQ ID NO: 111206 - DNA, 97 bp, Homo sapiens
tgctcaacttctgtgaaaaggagaccaagaaacttatgcagagggagatgtccatggatgaaattgcaagaacctattgatggcttggatgctctgg

SEQ ID NO: 111207 - DNA, 100 bp, Homo sapiens
ggccgagatgcgcgcaaccgcgggagcagccaagtggactggactcttttcttgacttagctaccagatgatatcatcaagttgaatcgaaaggaaggga

SEQ ID NO: 111208 - DNA, 97 bp, Homo sapiens
tacaacatgacgtttttccctaatctgatgggtcattatgaccagagtattgccgcggtggaaatggagaacctaaaggcagacccagaagagcttt

SEQ ID NO: 111209 - DNA, 100 bp, Homo sapiens
tttgcccagctgcccgcgctttatgaaatgactgtcagatcaggatcctcatgaccagccaaagagaagaagaattaggaagcataaatcaaagaaaaaa

SEQ ID NO: 111210 - DNA, 75 bp, Homo sapiens
tgacacggatgaaagcagaaaacagccacaatgcaggacaagtggacacgtttcctatcctgggagcaggagagt

SEQ ID NO: 111211 - DNA, 100 bp, Homo sapiens
cgccgctatgaagaaagtggttcaacagctccggctggaggccggactcaaccgcgtaaaactctctccttcctgcttcctccttgctgtggtggctggg

SEQ ID NO: 111212 - DNA, 75 bp, Homo sapiens
accagcaagaggatggggccctggatgagggggaagggcctcaaagccagaaggcaagtatatcgcgtcaacaca

SEQ ID NO: 111213 - DNA, 100 bp, Homo sapiens
tcagaaatatgaatatgttttacatccaagaactacaggctttacttttgtggtagaccgtctaagagaaggacaagacttaaaacctgtcttggataga

SEQ ID NO: 111214 - DNA, 75 bp, Homo sapiens
tgaatggaaaaaacattgaagacgtcattgcccagggtattggccatgtcaagccgctcatggttgagctattct

SEQ ID NO: 111215 - DNA, 98 bp, Homo sapiens
agcagttcctgatgttacaaatgaacaaggatctcccagaatcaggaaacccaggcccaacggcaggtggatgcaagaagaaatgttccccaaaacga

SEQ ID NO: 111216 - DNA, 75 bp, Homo sapiens
gagccagcgagccagcgagccgccgacccgccgagcaaaatgtttgtgaagtgtggatatgcaggctctaacttt

SEQ ID NO: 111217 - DNA, 100 bp, Homo sapiens
tggagcagcgctggggtttcggcctggaggagttgtacggcctggcactgcgcttcttcaaaggttgaaggggaccagctgcctccaggacacacagtca

SEQ ID NO: 111218 - DNA, 100 bp, Homo sapiens
catccaggttgttttgaagcaaagtccaagcattgtatcacttcatctgcaaatatttcaataagtacccaaaaggtgaatctggattgggaaagtcgac

SEQ ID NO: 111219 - DNA, 89 bp, Homo sapiens
gggacgggcccaaggccgagccggagccggggcccgggcccgcgtccgctcccgcgcccgacaatgcagatcttcgtgaagactctgac

SEQ ID NO: 111220 - DNA, 101 bp, Homo sapiens
acaccccctccgtgggtgtgtgcttcatcgcagtaggaatggcagccccatctatgaaggaaagacaggtctgctggggggcccgggatgagtactggaag

SEQ ID NO: 111221 - DNA, 100 bp, Homo sapiens
ttttgtcaccgttatgtgggaagcgaatccaagatgaggactcagtgtgtcgtcgtggctgctcttgagttcctgggctcaagtggtcctcctacctcag

SEQ ID NO: 111222 - DNA, 118 bp, Homo sapiens
gagcccttcagcgaggaagctacacttttcaccaaggaactggtgctgcagcgagagacaatgcagatcttcgtgaagactctgactggtaagaccatcaccctcgaggttgagccca

SEQ ID NO: 111223 - DNA, 100 bp, Homo sapiens
ctacctccccaataggtgcatcaggagaactgcgacacatcaccaagctgaagccctggagcctctttgatgtacttgtggaaaagtatggctggcccca

SEQ ID NO: 111224 - DNA, 75 bp, Homo sapiens
ctcgactcttggcgccaccgcctcatgcactgtgttcttagactctgtgagtaaagacagcttcatcttcccagt

SEQ ID NO: 111225 - DNA, 74 bp, Homo sapiens
tcctcgtcagcactgactttcagctatggaatcggttcatggaatccgagctggacctaaatgacatcattcag

SEQ ID NO: 111226 - DNA, 50 bp, Homo sapiens
aatcacttgggttcattctattcagaacatccatgatagcagtcttctgt

SEQ ID NO: 111227 - DNA, 105 bp, Homo sapiens
ccactgctggggtggtggttccaatgagacagggcacaccaaactccatctggacccttgaacatctgtgaagaaatgactattctgcatggaggcttcttgctg

SEQ ID NO: 111228 - DNA, 100 bp, Homo sapiens
cagggagctgcttggcagtgccagagcccaggccccagagccctgctggagaggaggcagactgaggcagcagtgaggatggccaggcctctggagcagg

SEQ ID NO: 111229 - DNA, 98 bp, Homo sapiens
ccgcgcgggccgggaggggacggccgccggagccgcgaggccaacaggtcaatggccagcaaggaggggggtccgagccggcggcggcggcggcagtg

SEQ ID NO: 111230 - DNA, 100 bp, Homo sapiens
gttagcatctctctcaaacctcaatggaagccttagtgtcaaggcaacacaaaaagtacctgtattgctgacagacagaacgccttggaggctgagtgga

SEQ ID NO: 111231 - DNA, 96 bp, Homo sapiens
aaaccccctggcttttgaagaatagtactttatacatctggatctgcacatcaggcaaagtaaaataccatgaagattttgaaaaaacaaagggga

SEQ ID NO: 111232 - DNA, 100 bp, Homo sapiens
ccgacctcgacgtcttgcctgtgtcccacttgttcgcggcctataggtcaaaatgcagatcttcgtgaaaacccttaccggcaagaccatcacccttgag

SEQ ID NO: 111233 - DNA, 101 bp, Homo sapiens
gccaaatgtaaaatcctcatttttcagacagattttgaagatggaatccgtagcgcccagctcattgcctcagctaagttgcgggacaaaggcaaagtgaa

SEQ ID NO: 111234 - DNA, 99 bp, Homo sapiens
aactacatcaccgctctgcaggctgttcctcctcggtttcttgcagaacataaattattaggaaacattaaaaatgtggccaagacagctaacaaggac

SEQ ID NO: 111235 - DNA, 96 bp, Homo sapiens
tactgtgcacccaggcctggagttgccatgggatcttctctggatcaagcaatggtggtgaaaaatgtttcgcaagggcaaaaaacgacacagtag

SEQ ID NO: 111236 - DNA, 96 bp, Homo sapiens
gggctacaggcgtgtgtcactgcgcccagcaagtccgcatgcaacaccatcgactcttcatttcccgacatcacccattatccagcagcctgggcc

SEQ ID NO: 111237 - DNA, 90 bp, Homo sapiens
tgcctcttcggccatggaagctgccggcagccctgcggctacggagacaggttgggggccgtcccgctcctaaggcaggaagatggtggc

SEQ ID NO: 111238 - DNA, 75 bp, Homo sapiens
gaccctgttcctgaacggcagccccaagaacggaaagatctcccttgagtttagaaatctggctgagaaatacca

SEQ ID NO: 111239 - DNA, 83 bp, Homo sapiens
cgcccctccgagctggggttggacgctgccagtttgcacagcagcagcaggttacgggcaggacttgagtggcttcggacagg

SEQ ID NO: 111240 - DNA, 83 bp, Homo sapiens
ggaagattatttcaagtggaatatgccattgaggctatcaaggttggacgtgataagtatgagcctgcagctgtttcagaaca

SEQ ID NO: 111241 - DNA, 50 bp, Homo sapiens
gtttgcctatgtcaagatcacaggaattgaatgatctggcacgggaccct

SEQ ID NO: 111242 - DNA, 90 bp, Homo sapiens
ctcccaagtagctgggactccaagtgggtgccactacagccaatatggatcagaaactttcgaagttggtagaagagctcacaacttcag

SEQ ID NO: 111243 - DNA, 75 bp, Homo sapiens
ctgctctactgcccctgcatgggctaaagaattacctccaaagccattgtcaagaccacagcagtcatctgcacc

SEQ ID NO: 111244 - DNA, 75 bp, Homo sapiens
ggaagcggcgatcctgccaccgggaggtgtggaagagccgggctttgctctctgtacatgatactgtggctcaga

SEQ ID NO: 111245 - DNA, 90 bp, Homo sapiens
cagcctgcttatccagcctatgggcagcagccagcagccactgcacctacaagtttctattccaaggacaatgaaggcagctggttccgc

SEQ ID NO: 111246 - DNA, 74 bp, Homo sapiens
ggctgggattggaactgtgtttgggagcctcatcattggttatgccaggttgctacaagatcaccacggttttc

SEQ ID NO: 111247 - DNA, 74 bp, Homo sapiens
gagaaattttgtgaagacattggtgttgaaccagaaaacccgtgctatcaagactaatcaggaccttctcccag

SEQ ID NO: 111248 - DNA, 100 bp, Homo sapiens
cctgagcccgtgcctgtcttcagatcttcacagcacagttcctgggaaggtggagccaccagcctctccctggtacccgcaagatggagtacaagggcag

SEQ ID NO: 111249 - DNA, 100 bp, Homo sapiens
ataatgatgagggacaacctctttgaaattgtaacaacgtctcgaactttctatgtgcaggtaaaatatacccaggaccataaacagatgaaaggtagac

SEQ ID NO: 111250 - DNA, 80 bp, Homo sapiens
acccggggcgcacgcggaggacgcgagggggacgctgcctggccgcgacaatgcagatcttcgtgaagactctgactggt

SEQ ID NO: 111251 - DNA, 80 bp, Homo sapiens
acatcagtgtgccagtacaagaagatgagctttccaaagtagaggagagttctgaaagatcaagcgtgctttccttatcg

SEQ ID NO: 111252 - DNA, 101 bp, Homo sapiens
gagaagagccatggatatcagagggagaaatccaacgacctttctatccagtcaagtatcatcacgtgggcaaactgctgaaggagggggaggagcccact

SEQ ID NO: 111253 - DNA, 88 bp, Homo sapiens
gctcgcgcagccatgtccgaggagaagcccaagcagggagagcaacaagccccggccctcagagctcagccggatgagcgcagcccag

SEQ ID NO: 111254 - DNA, 133 bp, Homo sapiens
taggcatcacgttgacgtccatttaccagtcttccctggcaagattcttctgaattgtgctgccttggccaaaagaggacagagcgggatgccaccagcttgtccaaagggaagttccaggagctcctggtgg

SEQ ID NO: 111255 - DNA, 50 bp, Homo sapiens
caagaatcgctctataagatctgcaagatcacctacaaagcagtcagttc

SEQ ID NO: 111256 - DNA, 100 bp, Homo sapiens
caaggtagaccagtgaggcagaatatgtatcggggatatagaccacgattccgcagaggagttgaagccaaacagccaaattctgccattaggaagtgtg

SEQ ID NO: 111257 - DNA, 100 bp, Homo sapiens
ggactggccctgggaattgccaaagcctgggagctctacggctcacccaaccccgtcgcagaatttagtctcaaaggaaacttcaaccacagcactgcag

SEQ ID NO: 111258 - DNA, 100 bp, Homo sapiens
gtggtttcttgtgaggacgcggcagcccgtggagtcggctgagggaaaagcgaggcaaggcaggcggcacttctcagaacttctggatgagttttcccag

SEQ ID NO: 111259 - DNA, 82 bp, Homo sapiens
acctggaagcggcagagttaggtgaaatttcagacatacacaccaaattgttgagacctgcctagggtagttaaaagacgag

SEQ ID NO: 111260 - DNA, 75 bp, Homo sapiens
gttgacacgtcttatttaatccacatcatagtaattattttgccgtagacactgcctctgctatagctattgcct

SEQ ID NO: 111261 - DNA, 90 bp, Homo sapiens
cctcccgcccgcaactccgccgcccaccatggcttccgaggagctgtacgaggaaaaacgtggtcttcgagaaatgcgagttcttgaaaa

SEQ ID NO: 111262 - DNA, 50 bp, Homo sapiens
acagtatttactgagagctcatcagtgccagggcaggggcccttggagtg

SEQ ID NO: 111263 - DNA, 82 bp, Homo sapiens
agccctggtccccggaggctcttgccagtctgacagtgttcttggcactgctcagagtcaagctacaacttcaagcagaaga

SEQ ID NO: 111264 - DNA, 98 bp, Homo sapiens
cttggaatatgtgccaggtcaggatattttggacatctggtttgatagcggaacttcatggtcttatgttcttccagcaggggaaatgctgtctgtag

SEQ ID NO: 111265 - DNA, 100 bp, Homo sapiens
gcccgcccgcgggccgtagggagcgggagaggcggaggcggcccgtggccaaagcacccgccaggctccgagggaaatatatcctggacaattccagcca

SEQ ID NO: 111266 - DNA, 95 bp, Homo sapiens
gccgacaatgacatggtcaagattgagaacctgaccaagggcatgaccattcggcccctggtagacctgttggctgtgaagaaaaagcaagagac

SEQ ID NO: 111267 - DNA, 97 bp, Homo sapiens
atttcccatcaacattgtggctgtcaagaatgatcatgattttcttgaaaaggaccttgtagaacctctttgcagaaagcatcatcattcaccagtt

SEQ ID NO: 111268 - DNA, 100 bp, Homo sapiens
tctccttagtgaggctcagagatgcctgtaccgtgatgtgacgctggagaacctggcacttatgtcctccctggggatacctcagacaatggcagctttt

SEQ ID NO: 111269 - DNA, 101 bp, Homo sapiens
agatacagggcagaggaaaatgcaagaagactgatggagcaggcttgcaatattaaagattactacagcatcccatttcccacacccactactccgctgac

SEQ ID NO: 111270 - DNA, 100 bp, Homo sapiens
gaccactctccagcaccagcttccagttagtggatatagcacaccatccccagccagcgccaagcccatctttgtgtgcttgcatccaactgtgatgagc

SEQ ID NO: 111271 - DNA, 101 bp, Homo sapiens
ggacgctgtacggatgcagcagctgaaaatgaaacacgccgctttttggatgcctcctatgcctggcgggagtcttgtctgagctggcaccaccacacggc

SEQ ID NO: 111272 - DNA, 99 bp, Homo sapiens
gtgtggattcctcagagagtgaacttggaatcttggacctcatccagagcccacaggcggttttgtgagctgcttccccaggagcagcggagcgtggag

SEQ ID NO: 111273 - DNA, 75 bp, Homo sapiens
aatcaacccaaggtgatgcttttgctacgacctcattttctgctggaactgatggaattggctgctctagaaaaa

SEQ ID NO: 111274 - DNA, 75 bp, Homo sapiens
ccatttctcgtctctcatctacatcgccttcatcctgggcagtacataccgagcatcaaatattaaggcacccgg

SEQ ID NO: 111275 - DNA, 100 bp, Homo sapiens
atcggcggagaccctcgaagtgcgcaaacttgacactcaccctgaccgcgtacacagactttactaaaagagtacaaagaaagggataaatccaatgtat

SEQ ID NO: 111276 - DNA, 98 bp, Homo sapiens
cgcctcaaccggctgtacggaatccaaggtgtgcaactgaggaacatggctcaagaaactaatcacagccaagtgcctatgctttgttccactggctg

SEQ ID NO: 111277 - DNA, 75 bp, Homo sapiens
agaaggcgttcgcaccggaaaatgtagcttcccggttaagaataagaaagccttgagttttgtgaaaaaccggag

SEQ ID NO: 111278 - DNA, 75 bp, Homo sapiens
cccagtttgaacctctggacatgaagctcatgaggtcgttccaggggtagaggaggcatgaaggatgaccgtcgg

SEQ ID NO: 111279 - DNA, 101 bp, Homo sapiens
atgttgcctggaccacgaagggaaagcagagcttcacttaaaggacaagaagcgatttgaaaaagctaaccaggattcaggtcccggtttgagtcttgaag

SEQ ID NO: 111280 - DNA, 74 bp, Homo sapiens
acagacctgcttggcacctcacccaaagcctcactgggtcctagcagaagatgtgactcagactgcctctgggt

SEQ ID NO: 111281 - DNA, 100 bp, Homo sapiens
gaagaatgaacattgtattgagaacaatatagatttgcaggtgctggagaatctggtaaaagcaccattgtgaagcagatgaggatcctgcatgttaatg

SEQ ID NO: 111282 - DNA, 82 bp, Homo sapiens
cgagcaggctgagcgatacgacgttaccggtattgtaagaacaagccgtacccaaagtctcgcttctgccgaggtgtccctg

SEQ ID NO: 111283 - DNA, 90 bp, Homo sapiens
atgaagtgcagaggtttttttctggcaaagccaaagctaattgagccactcgactatgaaaatgtcatcgtccagaagaagactcagatc

SEQ ID NO: 111284 - DNA, 100 bp, Homo sapiens
gagcatgtcacagatctatggactcattcatggtgacctggttctcatgtatcagccatcttctgtaagggtgcccagtgtgacttcggttgatcctgct

SEQ ID NO: 111285 - DNA, 76 bp, Homo sapiens
gattcgcagtggtcgcttcttctccttggacagagcgggatgccaccagcttgtccaaagggaagttccaggagct

SEQ ID NO: 111286 - DNA, 75 bp, Homo sapiens
ctcgggtctcgggggccgctctgggatcccggccaccagcaattgtccgtttgtccacactagaaattgaaaata

SEQ ID NO: 111287 - DNA, 100 bp, Homo sapiens
attcctcactaatgagctctccagaaaattgatgcagtgcagctgtctgcttcagaaagtgagggctccaggaatgaggagaatcttcaagaacttcctc

SEQ ID NO: 111288 - DNA, 100 bp, Homo sapiens
cctcaacatctctcagagacgaaagttgcaggaccagctctgccccctaattataaaagcagtagttcagattcatcagacagcgatgaagacagtagtt

SEQ ID NO: 111289 - DNA, 51 bp, Homo sapiens
cgatcatcgaggaaggcactgcgtttcggatgcagtggcagaacgtggagc

SEQ ID NO: 111290 - DNA, 119 bp, Homo sapiens
cacaaaggagtcgcgccgccgccgccgccccctccctccggtgggcccgggaggtagagaaaggagaaatgcctgctgcctctccagttggctttggaatccaagaatgtgaagctggc

SEQ ID NO: 111291 - DNA, 126 bp, Homo sapiens
agatgaatactgctgaggactggggcctcattttggatatctgtgataaagttggtcagtctcgcactggggtgctgataagactgtgaaaggcccagatggactgaccgcctttgaagccactga

SEQ ID NO: 111292 - DNA, 100 bp, Homo sapiens
ttgtgtttgtgaaacagagaaagataggcggccatggtccaaccttgaagccaaaactggacaagccaaggcatctgtagccaaagtaaacaaatctaca

SEQ ID NO: 111293 - DNA, 100 bp, Homo sapiens
ggagcctcatcattggttatgccagtgagcaatgaggagctgcggggaagtactccagaggcagcagcccaggtggtgcagtgggtgagctttgctgatt

SEQ ID NO: 111294 - DNA, 99 bp, Homo sapiens
ccacaggatgctgtagtagcaaatcaggagaactgcgacacatcaccaagctgaagccctggagcctctttgatgtacttgtggaaaagtatggctggc

SEQ ID NO: 111295 - DNA, 96 bp, Homo sapiens
atgactgccctgtagaatcagtgctgtgaccccgagtaacaacgcgcgcttgagttggtataaactcctgaagggaacacaacagatttgagaagc

SEQ ID NO: 111296 - DNA, 80 bp, Homo sapiens
ttctcccaagccattcacagctattacagtgaccacggatcaagatggatgaatcttcaagtcatgaatgtaaccagcgc

SEQ ID NO: 111297 - DNA, 75 bp, Homo sapiens
ccaaaaccagatcctttcaaagactacagtggtagtggaggccgaagcggcgggaacagctacggctcaggcggg

SEQ ID NO: 111298 - DNA, 50 bp, Homo sapiens
tgaagatgtggctagagacaccaacagatgctactggacttgaatggtta

SEQ ID NO: 111299 - DNA, 82 bp, Homo sapiens
cgccagacacccgcggcgaaggcggctcgggctcgggctccggtgagaagccctaccactgcaactgggacggctgcggctg

SEQ ID NO: 111300 - DNA, 49 bp, Homo sapiens
tggcacttatgtcctccctgggtttcagcgttaaaaacaatggccagtc

SEQ ID NO: 111301 - DNA, 82 bp, Homo sapiens
tctcatctcgctcggctgcgggaaatcgggctgaagcgactgagtccgcgatggaggtgccaggaccattgacaccagaaat

SEQ ID NO: 111302 - DNA, 76 bp, Homo sapiens
tggcagccttcctgatttctgcagctctgtgtgaagtgtattctggaggtcgaatggtcacatatgaacatctccg

SEQ ID NO: 111303 - DNA, 98 bp, Homo sapiens
cgaggcctccttctcctacaagctgcatgaaagcggttacgatgctggcaaagccctgcagcgcctggtgaagaagcctgtgcccaagctcatcgaga

SEQ ID NO: 111304 - DNA, 100 bp, Homo sapiens
cccgagcccaccgcgccgggccccggacgccgcgcggaaaaggggaagacggaatctatcactgtggtgaagctgctgagctgctttgatgacctggtgg

SEQ ID NO: 111305 - DNA, 100 bp, Homo sapiens
gaatatgctcacaaattcgtggaagacattcagcatgacctcacatacaacctccgagaaggtcatgagagtgatagttcacagttaccagccaagaaaa

SEQ ID NO: 111306 - DNA, 83 bp, Homo sapiens
cgcaggatgagccccgcgaccactggcacattcttgctgacagcagaaagatgaaggtcttagaatcattgattggaatgatc

SEQ ID NO: 111307 - DNA, 75 bp, Homo sapiens
tggtttctcgagatggaatctactggattccagtggaatgacactggtgatgcttgccgccgccggagggcagga

SEQ ID NO: 111308 - DNA, 99 bp, Homo sapiens
cttcttcgtagacattgtctcccaagacaacttcctcaccagcaccttacagatcgatgctatagaagacaaacaagggaaggttttttttccttttgc

SEQ ID NO: 111309 - DNA, 99 bp, Homo sapiens
gaaaagtggaggggtgaatcagtatgttgtgcaagaggtactgtccatcaaacatcttccaccacagcttagagaatcaaaggcatgggaggttgatac

SEQ ID NO: 111310 - DNA, 100 bp, Homo sapiens
caggctgactccagagtcactggctgtcatgtagtttcctcaactactgcctcagggcactgtgacctttgaagatgtggctgtgaacttttcccaggag

SEQ ID NO: 111311 - DNA, 83 bp, Homo sapiens
gccgacaagcccgggagacacagtgtcagaattacaaggatgaccgagtgggagacagcagcaccagcggtggcagagacccc

SEQ ID NO: 111312 - DNA, 50 bp, Homo sapiens
tggagcttctggactgagggccgcggttcttctgtgtggcagttcagaat

SEQ ID NO: 111313 - DNA, 75 bp, Homo sapiens
gacctggttgtggggctgtgcactgggcagatcaagacacagccatccgggtcttcgccatccccccatcctttg

SEQ ID NO: 111314 - DNA, 75 bp, Homo sapiens
ggaccttaaaatacccgcaacagccccttcgtcccaaacctacgctaccactgccatcgccatccaccgcatctc

SEQ ID NO: 111315 - DNA, 76 bp, Homo sapiens
ctgtcatcgtttgtcagaagaaagcagctggctcagaaaacaggcatattctcagtttgggtgtggtggcgtgtac

SEQ ID NO: 111316 - DNA, 90 bp, Homo sapiens
ctgatgaatattttccttctgaaccagggttctgcatccactacaacattgtcatgccagcacccagtcagtcagagtcagagccagaga

SEQ ID NO: 111317 - DNA, 83 bp, Homo sapiens
agatgccagcgtagctgaatccagtaccaaaaacgtcaacaacagttttacgaaagttgaagttgatggtagtttaagtgata

SEQ ID NO: 111318 - DNA, 80 bp, Homo sapiens
cctaagcctgcacagccgcggcggcagcagcagtgagagagtccggcagcgtcttctcttgagggagcaatttggagaag

SEQ ID NO: 111319 - DNA, 96 bp, Homo sapiens
ccccaactccacccagcgctaccggctggaagccctcaagtggtctcggaaagagggtcgtggtcccgcacggatgcgcttgttgggagaaacctt

SEQ ID NO: 111320 - DNA, 100 bp, Homo sapiens
ctgaatgctgcacagttcaaacagctgcttatttcggctgtgaaggacctgtttggggagagattgccttgcaacaggtttccatgttcttccgatcaga

SEQ ID NO: 111321 - DNA, 75 bp, Homo sapiens
agttaagtgggcgcaagtcccagaagatgtcggagcccatagcaggtacaggtttgcagattccgccagcagcac

SEQ ID NO: 111322 - DNA, 101 bp, Homo sapiens
ttaggaccatccagagcagcacggcatatcgcacggatgactgccatccctgggttttgccagtagtgaagaaagtggagcagaagattgctaatgacaat

SEQ ID NO: 111323 - DNA, 100 bp, Homo sapiens
tctccactctgaagaagacactggagctgagatctgtatctgtggacctgaatgttgatccctcgcttcagattgacatacctgatgcgctcagtgagag

SEQ ID NO: 111324 - DNA, 98 bp, Homo sapiens
tagcacccactcgagaattggctcagcagaagtggtccaaaggcaaagttcgggacaagctcaataacttagtcttgtttgacaaagctacctatgat

SEQ ID NO: 111325 - DNA, 98 bp, Homo sapiens
aaagatcctaactatgatgatgaccaggtatctaagaacttcagtgaagtattccagaagttagtacctggtggcaaagctactttggtgatgaagaa

SEQ ID NO: 111326 - DNA, 101 bp, Homo sapiens
ttccaagcagacaagtcaatcgaagtgcgaaaatttgtcatcggcttcatcgaggaggcatggcggaattctccacgagttttgagcagcctcgggtttcc

SEQ ID NO: 111327 - DNA, 83 bp, Homo sapiens
cgagaagccctacgagtgcaacatctgcaaggtccgcttcaccaggtggaagttaaacgagctgagcctcgggacagcaagag

SEQ ID NO: 111328 - DNA, 75 bp, Homo sapiens
atcgcatcctatggctcaaagaaagatgattatctttctgaaaaggatatgagcatgctcgaggagaggattaag

SEQ ID NO: 111329 - DNA, 82 bp, Homo sapiens
tgcgtgccctacttcaaggataagggcgacagcaacagctctgccggctggaagcgtccagcctgcatgccgtgcggactgc

SEQ ID NO: 111330 - DNA, 48 bp, Homo sapiens
cactggactacttacaaaaatggtggtattaaagataatcaaacatta

SEQ ID NO: 111331 - DNA, 100 bp, Homo sapiens
aatatgagttcttctggggcctgcgctcttactatgagaccagcaagatgaaagtcctcaagtttgcctgcaaggtacgaccccgaccacgtgtgcaatg

SEQ ID NO: 111332 - DNA, 100 bp, Homo sapiens
ttatcatcggttattaaggagcttcgcaaggctactgaagcactgaagaacatgttcttcaagtatacatggaataactttttgcatacacaagtggaaa

SEQ ID NO: 111333 - DNA, 83 bp, Homo sapiens
gtggactccttcggcagtccacccaccgccgccgcctcccagtggaagtatgcgagacttaagagctcaagtgactagtggtc

SEQ ID NO: 111334 - DNA, 98 bp, Homo sapiens
ggcagacctctacgagcaggagcagtacaggtgttggagcgggccggagagaagtagagtgggctgcgaggagaaggaaacaggcctttcggaggctc

SEQ ID NO: 111335 - DNA, 106 bp, Homo sapiens
aatgggctgaaggaggaggacaaagagcccctcatcgagctcttcgtcaaggagccggtgaaacctgaagaaggcagagatatggcaaacaggattggcgcttttg

SEQ ID NO: 111336 - DNA, 100 bp, Homo sapiens
tgaacaccgtttctggctcccctaaagtgcatcctcctaatgggacccggttttacacttttcaagtgtcatggagaaactccagctgggcccagagatt

SEQ ID NO: 111337 - DNA, 110 bp, Homo sapiens
aggaactcaggcgcctcttcttagttgatgatttagttgattctctgaagggtgtcagatgcctgatacattcaattcatggtttcttataaccctactccacgtctggt

SEQ ID NO: 111338 - DNA, 100 bp, Homo sapiens
tcggaaccatccaagtgatgctgctcaccatcagtgaatttaagcccacatatcaggaccgagtggccccgccaggttcaatacttcttcaagatcttgg

SEQ ID NO: 111339 - DNA, 100 bp, Homo sapiens
cgcccgtggccgccgtgcaggcggccgtcagcaacctcgtccgggtacaccagaggatcgcttcctggcagaatttgggagctgtttattgcagcactgt

SEQ ID NO: 111340 - DNA, 100 bp, Homo sapiens
tgagacggcggcagcagcggcattcaggattctcaaagttggattggtggaaacaatgaaccattgacaggctttacatggcgaggtggctgtgaaagag

SEQ ID NO: 111341 - DNA, 75 bp, Homo sapiens
tggaatgcattttgaaacttaaggatgggatacagtttgcagtgttgatgtgggtatttacctatgttggtgcct

SEQ ID NO: 111342 - DNA, 83 bp, Homo sapiens
ggcggatggccccaggtgtaagcgcagaaagcaggcgaacccgcggcgcaataacggcttgttagcagtggcacaagatctta

SEQ ID NO: 111343 - DNA, 83 bp, Homo sapiens
gtctcttagcagcgcgcggagaagaacggggagccaggccaccagcttgggctccccacggagggcagcaagtgggacttggg

SEQ ID NO: 111344 - DNA, 76 bp, Homo sapiens
ccatccactagtaggaagctgctttgaagacttagcagaggaaggttttcttcttggggaagtaaaaggtgaagcc

SEQ ID NO: 111345 - DNA, 51 bp, Homo sapiens
gaacggagtgtgcgacggattgggaggattacggtgggatcatggcagggc

SEQ ID NO: 111346 - DNA, 118 bp, Homo sapiens
caccatgtctcgccgcaagcaaggcaaaccccagcacttaagcaaacgggaattctcgcgtttttagaacttcagccataaaaatgggcagaattttccttgatcatatcggtggtac

SEQ ID NO: 111347 - DNA, 100 bp, Homo sapiens
ttcagaggtagatggagagatgttacagaacataaagacagggctccatgcagtggaccgatgggcctctacagactggctatgaaaatgagccggagat

SEQ ID NO: 111348 - DNA, 100 bp, Homo sapiens
gtctctttccttcaaactacgttaagatgacgacagactcagatccaagtcaacagtccctttctaaggcacaaaatgatgtgatggaaatgaagatgca

SEQ ID NO: 111349 - DNA, 75 bp, Homo sapiens
caaggattggagcacagaggctcagaagcaagtccagaaagttggagtgactggtccccctgatccacaagtccg

SEQ ID NO: 111350 - DNA, 75 bp, Homo sapiens
ggggccatgaccgtggagcagaacgtgctgcagcagagcgcggcgcagaaggttgtggcagcactgcctgaaggt

SEQ ID NO: 111351 - DNA, 51 bp, Homo sapiens
gccggagatccctcagccctggctgtgcacttacatttcaatcgaccaagt

SEQ ID NO: 111352 - DNA, 74 bp, Homo sapiens
ccagacctccacttccaaggatatagagcaggctaggcagctggaagagaaagaccgagtgctaaagaagcagg

SEQ ID NO: 111353 - DNA, 101 bp, Homo sapiens
aggggaacatggcagtgcctgtgagagaaagtggctcatgccaaagaagaaaaccttagtatgcatcagatgctggatcagactttactggagttaaacaa

SEQ ID NO: 111354 - DNA, 96 bp, Homo sapiens
acctgctgcacgcggctcctttccagaacatcttgccgcgagtccatgtgaaagaggtggaggagacactgaagcgactgcagagccagaagggag

SEQ ID NO: 111355 - DNA, 74 bp, Homo sapiens
cggaggagtcagctgtgtgtccagaacgtgccatggagacgcttaacggatgaagtgtcctcttgctagcacca

SEQ ID NO: 111356 - DNA, 75 bp, Homo sapiens
gcctatgtgaaactgctttctaaaacaccagaactcaacctggttggagtaatagatttttccctctaccttaag

SEQ ID NO: 111357 - DNA, 100 bp, Homo sapiens
atcagctgcagaaaattttctagttttggggagacaattacaaacatgttttatcaatgcagctaagattactctcgtggctttggtggccggtacgggg

SEQ ID NO: 111358 - DNA, 100 bp, Homo sapiens
gattgcttctcttctctcctccaagatgcacgaaggagagagagtgagaagtctctagaaaatgaaacactcaataaggaggaagattgccactctccaa

SEQ ID NO: 111359 - DNA, 75 bp, Homo sapiens
gagccaagcataaggtctgccgaagccttggcgttctcagggggtccactggacggggcctgagctacaacttca

SEQ ID NO: 111360 - DNA, 50 bp, Homo sapiens
tcccacctcagcttcctgagtagaggaagtatcattctgcaaaggaggca

SEQ ID NO: 111361 - DNA, 100 bp, Homo sapiens
tctcttctaattgatgctggggccaatgtgaatgtgaaggacagaaatggaaagacgccccttatgttggaggacgagtaagtcgtgaattaaattatac

SEQ ID NO: 111362 - DNA, 100 bp, Homo sapiens
caaatatcggaacccctccttgaagctgatggtgaatgtgtgcggacacactctctattgacctgttgtattggcgggacatcaagcagacgggcatcgt

SEQ ID NO: 111363 - DNA, 100 bp, Homo sapiens
gcctccccagccacgtggaactgctgtggtcaagccggacagtgtattctccaagacgttccctgacaaacaggtggctaggtggctgccatggaggacg

SEQ ID NO: 111364 - DNA, 90 bp, Homo sapiens
aagaagttcttcgatgtatctaaacttggcaccaagtatggacttgaaagaggagattgatattcgactctccagggttcaggatatcaa

SEQ ID NO: 111365 - DNA, 100 bp, Homo sapiens
aaagctctggagacttgtggcggggacctcaaacaggccactgagaatgcaaaggaggaagtgaggcgaattctggggctgctggatgcttacttgaaga

SEQ ID NO: 111366 - DNA, 80 bp, Homo sapiens
agctgccaagttgaaaatggacgagtaatcgcctgctttgattcattgaaacgcttctctgaagtagctttggaaagtag

SEQ ID NO: 111367 - DNA, 90 bp, Homo sapiens
gctcgatctaggttctgcggcacgggatggcggaggcgcctcctgtctcagatagctgatcagcttccttgggttttgctgatgacacaa

SEQ ID NO: 111368 - DNA, 87 bp, Homo sapiens
tcagaagacaatatcatgcaagtgtggcaaatggagcctcctcaacaagcccaagagtgagatgaccccagaggagctgcagaagcg

SEQ ID NO: 111369 - DNA, 75 bp, Homo sapiens
caggaccgtggagaagacttggaagctcatggacaaagtgcaggccagggagctggagagcagagaggcagagct

SEQ ID NO: 111370 - DNA, 82 bp, Homo sapiens
acagtcatcaagcctctgttggttgaaagtgctgatggcagagattggtgaggatttggataaatctgatgtgtcctcatta

SEQ ID NO: 111371 - DNA, 100 bp, Homo sapiens
gtcggacgcgtcttctttcaggctgaggacattgatgagtgcaaggacccagatgcctgcagccagatctgtgtcaattacaagggctattttaagtgtg

SEQ ID NO: 111372 - DNA, 75 bp, Homo sapiens
tcccgctgcacactgccctccgaagtcggggacgcgggctcgttacagcaattggaacttgcacagatacagcat

SEQ ID NO: 111373 - DNA, 99 bp, Homo sapiens
gaaatccaaaggtgaatcttttggttggtgattttgatgatagccacaaagcaagcagggttgaaatcacaaagattagacacctttttagataggtgt

SEQ ID NO: 111374 - DNA, 73 bp, Homo sapiens
gttctctaaaaaaactggctgtgaataatatagctggtattgaagaggtgaatatgtttacaaaccaaggaac

SEQ ID NO: 111375 - DNA, 91 bp, Homo sapiens
tcagagcggtatccctgtctcagcgaagtggtgaaagagcatcaggaaccgcggggaaaggcgaatgggtgcttttgaatgtgttcgtaaa

SEQ ID NO: 111376 - DNA, 82 bp, Homo sapiens
ggcgcgcgggagcgctacggccccaacgagtgaagacatttccacctggacacctgaccatgtgcctgccctgagcagcgag

SEQ ID NO: 111377 - DNA, 101 bp, Homo sapiens
gactggtctctcccaccacacagaggaatgaatctgaagtctgctgcagtaaaacacagaaggctttaaaatgttttcttgcataaaattcaaaactttta

SEQ ID NO: 111378 - DNA, 98 bp, Homo sapiens
ctgccctgatcggggatttcctgattggtgctggcatcagcacagacaccgctttgccgatagggcattttgtcagtgatgctgatctttgccttctt

SEQ ID NO: 111379 - DNA, 51 bp, Homo sapiens
atctgcctcctttaacttatgaccaggtggaagttaaacgagctgagcctc

SEQ ID NO: 111380 - DNA, 73 bp, Homo sapiens
gccgcccgtccacacccgccgccagcgctgtgcttcgccgtgagccgctcgctgctgctgacgtgcctggtgc

SEQ ID NO: 111381 - DNA, 78 bp, Homo sapiens
agaagtatggtcctgatgccttttttaactttccaggaaagagtgctgcagggttgccctgctgtcagacgtctatcc

SEQ ID NO: 111382 - DNA, 83 bp, Homo sapiens
aggggcagatcgccggcaccacgagagcccggcccgcctgtgtggacgacccaacatgagtgaagtttcctgcaagaaacggg

SEQ ID NO: 111383 - DNA, 75 bp, Homo sapiens
cctccgaagatgggggatttctacgacccggagcacccgacccctgaatgcatcactgtaagcgataccgctccc

SEQ ID NO: 111384 - DNA, 74 bp, Homo sapiens
agcccagcaaatgatcagccttgcaaataatcacagattagcttattctgaaaaggaggacaaatatgaagaag

SEQ ID NO: 111385 - DNA, 51 bp, Homo sapiens
gattcaccatctcaaaacctcctacaacacagcagtcccctcaggatgagc

SEQ ID NO: 111386 - DNA, 74 bp, Homo sapiens
ccggtgatatgatctgtcctgaatgtggcttggttgtagaatgtagaagcgaggcctggaggtgaagcagccat

SEQ ID NO: 111387 - DNA, 101 bp, Homo sapiens
ctcttccctgaccattttctactgtccctgcgcgaggtctggctctgggagaggagtggacagcagctggttgagatacatccccatctggagacaggact

SEQ ID NO: 111388 - DNA, 101 bp, Homo sapiens
gctccggagctgcccgcgccatgtccgcgcacaatcggggcaccgagctcggaagatgagaatgtgcctactgctcctgatcctccaagtcaacatttacg

SEQ ID NO: 111389 - DNA, 75 bp, Homo sapiens
ggcggcagagaacttgccggtgccagctgaggccagtactaaagtggaagtggacatggagaaagcagaaagcct

SEQ ID NO: 111390 - DNA, 100 bp, Homo sapiens
gattggcatcgatctctccatcccttccgaggcccgacttcgttcccagtgacctgacagcagaggagcgtcaagaactggagaacatccgacggagaaa

SEQ ID NO: 111391 - DNA, 82 bp, Homo sapiens
ggcgcctttctcattattataggctccctcctgctgtcaggctacatcagcaaaggggtgatggggaggaagtacatccggc

SEQ ID NO: 111392 - DNA, 75 bp, Homo sapiens
gtacgacatcctgggcgtcccgcccggcgccagcgagaacgagctgaagaaggcctccaagactgcagagaatgc

SEQ ID NO: 111393 - DNA, 80 bp, Homo sapiens
acatgttcacgcacgggatccagagcgccgcgcacttcgtcatgttcttcgcgccctgacccaacatgagtgaagtttcc

SEQ ID NO: 111394 - DNA, 100 bp, Homo sapiens
cttgactaatgcaggatattctgcagccaattcaaattcaattttcgccaactctagtggtcctgcagttctgagcttgggttccctttgcctggacacc

SEQ ID NO: 111395 - DNA, 98 bp, Homo sapiens
tggactcccgacagcagaatcccagacaccattcgcttttcacccaagatgatttgatgtcttataaaactctgatgaaccatgatggctacacagac

SEQ ID NO: 111396 - DNA, 101 bp, Homo sapiens
tcttacgtctgcggaagtgcagctgcctcagttcttagcgcagaattaaacaaccaccatgtcgagcaaaaaggcaaagaccaagaccaccaagaagcgcc

SEQ ID NO: 111397 - DNA, 100 bp, Homo sapiens
ccgaattcagaaggatatcgacgtcgtgatccagaagtccagagctgaggactgcctgtttgcaggaatcattgtagtcaatcattttccagttctcagc

SEQ ID NO: 111398 - DNA, 75 bp, Homo sapiens
ttagtgaaatgggctaataatgctggcaaagtggaaaaatgtgcgagctgtaggtaaaacttgcctactgatcag

SEQ ID NO: 111399 - DNA, 100 bp, Homo sapiens
gggagagaaatccttttctgttcataataatggtggggcagtgtcatttcagggatgtgtctgcaggccttcgtagaagctttctttttcctggctcaga

SEQ ID NO: 111400 - DNA, 75 bp, Homo sapiens
ctggtaaatgacgaaggggcttcttccagagccaaggaggaagggttgtccgggatatggttaataggagaattg

SEQ ID NO: 111401 - DNA, 98 bp, Homo sapiens
gatatttgcctttagtgcactcttctccttcacagtaaagtggctggaattggcagcaatgaaacagattctcgttaagatgcatagtaaacattctg

SEQ ID NO: 111402 - DNA, 100 bp, Homo sapiens
ccacccagaggcccagggtacgactcagtgccagagaaccgagcatccagtcatctcctataaaggaattacagtttgaaaggctgacccgagagctgga

SEQ ID NO: 111403 - DNA, 100 bp, Homo sapiens
tcccaaggccggcctggcgtgctggtcatcgatgtcaccttccccagcgtcgctcccttcgagcaatggctgccatccggaagaaactggtgattgttgg

SEQ ID NO: 111404 - DNA, 98 bp, Homo sapiens
gtggcggggatggaagtgttggctgggtcctctccgaaatcgacagcctcaaccttcataaacaggaacacgatgaacctattctgaagcacttgaaa

SEQ ID NO: 111405 - DNA, 75 bp, Homo sapiens
tccccggctcgcggggcccggcgaagggcaggtactccaaagattcaggtttactcacgtcatccagcagagaat

SEQ ID NO: 111406 - DNA, 101 bp, Homo sapiens
gccctcttcgacagctacacaaatctggaacgggtggccgattactgcgagaacaactacatacagatatttggagttcttacaacatggcagacattgac

SEQ ID NO: 111407 - DNA, 75 bp, Homo sapiens
aggaggccgagagatgaggccggagcccaccaagttctgggaagtgctggagaatctggtaaaagcaccattgtg

SEQ ID NO: 111408 - DNA, 98 bp, Homo sapiens
cagacattctcaaggaaacacaagagaaattctatggcctaccatatgttccaaatactcttttgcgagaattgaagcaccctaatgtgattgcattg

SEQ ID NO: 111409 - DNA, 75 bp, Homo sapiens
gggccggccagaagcgggcggcgcgggggagatggtggtgatgatgtccagcaactctgtgaagcaggagaagag

SEQ ID NO: 111410 - DNA, 82 bp, Homo sapiens
ccaagtgcacatggctgaccacccctaaaagcacctggccccgctacagcaaaccagaggctgggaggcggcagaatgcagc

SEQ ID NO: 111411 - DNA, 90 bp, Homo sapiens
agggggcgctgagctgttgggtggatccttcaggttccagggatttcaccagtagcagtgaaagcctacttctgctaattttgactgttc

SEQ ID NO: 111412 - DNA, 82 bp, Homo sapiens
agcagcccatctgcaaggaagtcctggcctcccatctggtccaaagccgccaccacgactggctaatttttttgtgtttccc

SEQ ID NO: 111413 - DNA, 50 bp, Homo sapiens
gcggggaccgctgtgctctcggtgttggagagcacaatggctgaacaagt

SEQ ID NO: 111414 - DNA, 82 bp, Homo sapiens
tttcttctctagaatccactggtatccaaaccttgaaacctttgctctagatgtcaggcttgtttttgacaactgtgaaaca

SEQ ID NO: 111415 - DNA, 98 bp, Homo sapiens
catcctcctggcctacctggcaggtgttgacagctcttctaccacaagcagtgcttctccaatgcccaacagttatgatgccctggaaggaggcagtt

SEQ ID NO: 111416 - DNA, 101 bp, Homo sapiens
aaactgtatggtggagaaagaagtgggaaggatctgcgcggggaacttatagaaatgctggcaatttcaagaaaccaaaagttgttacaggctggagagga

SEQ ID NO: 111417 - DNA, 98 bp, Homo sapiens
caatcccccactctttccgccctaatggaggtctccagtttcgagtgaaggctgcacagactgagttaggacagcaaatcctggcagattttgaagaa

SEQ ID NO: 111418 - DNA, 100 bp, Homo sapiens
attcctatctttctcccggaagtcaccattggagctcatcagactgaccgtgtcttacatcagttcagagagatcaatgtccgagttaccaccatggatg

SEQ ID NO: 111419 - DNA, 90 bp, Homo sapiens
tgctcattcttcaaagaaataaactcagtgacactcccaagggtttctttagagacgcgggctcaggcaatggaaaaagaccaattggcc

SEQ ID NO: 111420 - DNA, 75 bp, Homo sapiens
agaagctccagatggcgtcttccgtgggcaacgtggccgacagcacaggtactaggttttgacaagcttgcatca

SEQ ID NO: 111421 - DNA, 75 bp, Homo sapiens
cagaagatgatgatgaaagtatcagagatactaaatcagcggatcaaaaaacaacccttttgcattttattgccg

SEQ ID NO: 111422 - DNA, 75 bp, Homo sapiens
gaaacaagccgtggaataggtgtatcaagtaatggtgcaaagcctgaaattgttgaacagataaatacgaaactg

SEQ ID NO: 111423 - DNA, 83 bp, Homo sapiens
gggctttgaatgcatcagaaccatgcacgggagcgcatgtattcatatgatgatacagacataggcttagagccaggatcagg

SEQ ID NO: 111424 - DNA, 97 bp, Homo sapiens
actcctggacaggatggattgccagggcttcctggcccgaaaggagagcctcttcttggacacttaatgattgttggcaagaaatgtgctgctgatc

SEQ ID NO: 111425 - DNA, 100 bp, Homo sapiens
actctgtagcctaccatgctgatgatggcaatgatcgaactgtgagaatttggaaggctcgcaatttgcaagatggtcagatctctgacacaggagatct

SEQ ID NO: 111426 - DNA, 83 bp, Homo sapiens
ccgcggcggcagcagcagtgagagggctccctgcggactgccgtggccgctgggagagcttcgtggaggagacgctgacggag

SEQ ID NO: 111427 - DNA, 75 bp, Homo sapiens
tttagctatggcgactttgacttcctgccaaaatcctgttaccctagcaacagttggctggggaacagaccaggg

SEQ ID NO: 111428 - DNA, 96 bp, Homo sapiens
actgtacatgctttttattacaagactacggagcataggaggaaaattcatcatctgatatggatcagaaactttcgaagttggtagaagagctca

SEQ ID NO: 111429 - DNA, 82 bp, Homo sapiens
tggacatgagggtccccgctcagctcctggggctcctgctgctctggctcccaggtgaagctgtgtgactttggctttgctc

SEQ ID NO: 111430 - DNA, 83 bp, Homo sapiens
acttccctgcactctcatcgctctcggcctcggcctcggcctccgacacgccaagacaatgcaaactccagtgaacattcccg

SEQ ID NO: 111431 - DNA, 104 bp, Homo sapiens
tcttcatgcaaggaaacataagttggaggttctggaatctcaggggaagatggtgaaaggaatgggaggtgctatggatttagtgtccagtgcgaaaaccaaag

SEQ ID NO: 111432 - DNA, 75 bp, Homo sapiens
cagcaacaaggagggaaaaaagagcaggtggaaaaggaaaggaccaggactaaaacctccagaggaacggacaat

SEQ ID NO: 111433 - DNA, 100 bp, Homo sapiens
cgcggcgggtctggagcccccatcctcctgcggcagatggtgatggaatttcctgataatgtgttaaatctcgatggacatcagaataatggtgcacagc

SEQ ID NO: 111434 - DNA, 101 bp, Homo sapiens
gcggctggagagcctgttggagaaacacaaagagattgatctcatttgccagcaaaataatattatagtattggaagatacaataaaaaggcttaaatctg

SEQ ID NO: 111435 - DNA, 82 bp, Homo sapiens
tctagtgtcagtgatggcggtgaaacgtcagccgggttggacgtgataagtatgagcctgcagctgtttcagaacaaggtga

SEQ ID NO: 111436 - DNA, 100 bp, Homo sapiens
aggaggctcatgcgggatttcaagcggtcaaaatgcagatcttcgtgaaaacccttaccggcaagaccatcacccttgaggtggagcccagtgacaccat

SEQ ID NO: 111437 - DNA, 98 bp, Homo sapiens
cgaggaggcagcgcgacctccgcacgatatgacaatggatgatgttcgggaatacgagaaaaacatgcatgaacaaaccaacataaaagtttgcaatc

SEQ ID NO: 111438 - DNA, 100 bp, Homo sapiens
ggagtctgcgaaggccgggacccggttccccggcccacagtgggggtgtgcaaacccgagagaactgggttggcagagtcagcatatatgattccaaaag

SEQ ID NO: 111439 - DNA, 98 bp, Homo sapiens
ttcaagggtctctccagaaaatcttgtggacaaatccaggggaagtgtggacaacagtgagtatatgcggaatggagacttcttacccaccaggctgc

SEQ ID NO: 111440 - DNA, 90 bp, Homo sapiens
caggacttcgaccagcgcgcgcgcgaggagttccgccccaccatctacagcaacgtgatcaaagagccggtgccatctgtgggggctttg

SEQ ID NO: 111441 - DNA, 96 bp, Homo sapiens
ccgcgcgcagggcctgcagcgggagctggacggcgagcgcgagcggcgcgagaaaatgaggacggggacttggttgccttttccagtgacgaggaa

SEQ ID NO: 111442 - DNA, 100 bp, Homo sapiens
agtacagatgaggaagttacatctttggcaaagtctctcatcaaatcctggaaaaaattattagggtttctgatctctaacttggctgtgatcattgtga

SEQ ID NO: 111443 - DNA, 100 bp, Homo sapiens
cctcccaaagtgctgtgattacagaactgatagtgcatcagccgacccaggtaatttaaaatattcttcatccagagatagaggtggttcttcctcttac

SEQ ID NO: 111444 - DNA, 100 bp, Homo sapiens
ggcgtccccggcgcgaagaggctggactcggattcgttgcctgagcagagcatcctggccagaacaagccaaggagccaagacgagagggacacacggac

SEQ ID NO: 111445 - DNA, 74 bp, Homo sapiens
caacatttgccccccggaggaaagaactggaaccagatgcctgaggaaacccagacccaagaccaaccgatgga

SEQ ID NO: 111446 - DNA, 50 bp, Homo sapiens
catggtgattcaagacattactgctatgaatgctgaccccctgaaggtgt

SEQ ID NO: 111447 - DNA, 100 bp, Homo sapiens
gttctctccaggcggcacgatgccgaggaaacagtgaccctgagcgaagccaagccgggcggcaggtcaaaatgcagatcttcgtgaaaacccttaccgg

SEQ ID NO: 111448 - DNA, 108 bp, Homo sapiens
ctacagaaacaaaatgtcaacaaattgatgggaaactaaatatattttgccaactttggaaaaagaattattcttggcagagcacagtgaccttgaagaaggtggact

SEQ ID NO: 111449 - DNA, 100 bp, Homo sapiens
gtggtttttcggatcatgtctggtggctccgcggattataacagtttcttgcagaacataaattattaggaaacattaaaaatgtggccaagacagctaa

SEQ ID NO: 111450 - DNA, 100 bp, Homo sapiens
gagagcttatctacacgactcagatcttgttgtcacccccattattgacaatccaaaggtgcagaaagcactctgacaacatctgtgggtcttgcagata

SEQ ID NO: 111451 - DNA, 100 bp, Homo sapiens
gcccaaattgaggcgcaatgatgagaggatgtggtggtctactctgatgtcaatcttgagggctagatcagcaagttgctcggatggaaaaactagctgg

SEQ ID NO: 111452 - DNA, 74 bp, Homo sapiens
cgcgactcggcgcccgcccgcggcaatccagcatccagcagatgagaagttgcaagagaaggcatggggtgcag

SEQ ID NO: 111453 - DNA, 97 bp, Homo sapiens
attgaagtggagctagagaatctgctgggagaattctccatcaagatgaaaggaggcgatcccgcgccctgggtgcggtgaggccgctgggacagcg

SEQ ID NO: 111454 - DNA, 100 bp, Homo sapiens
aagttggtcagtctcgcactgggtgacagagctgaatgaacctctctccaatgaagatcgaaatctcctctctgtggcctacaagaatgtggttggtgcc

SEQ ID NO: 111455 - DNA, 75 bp, Homo sapiens
tctctgccacgtccatcttctttgaatctatgccctacaagggatgctcccatttcccagtagcctccaggcctg

SEQ ID NO: 111456 - DNA, 82 bp, Homo sapiens
accacagtccttctgcagtccctcgtccagccacccccagctctgaagagactgagggactcggccaatgccaatgatgtgg

SEQ ID NO: 111457 - DNA, 100 bp, Homo sapiens
ggtccctgaagagggaagacacgcggaaacagaatgccgggacattctgcttcctgtcatcaccaaagagctgaaggagctgctggagcagaaggatgac

SEQ ID NO: 111458 - DNA, 88 bp, Homo sapiens
gagttaaggacattccaggcagaggcaagggacacggccaacacggtgaaggaaaagttcgggaggaagctttatgaatccttactgg

SEQ ID NO: 111459 - DNA, 76 bp, Homo sapiens
atgaaaccctctcggctttatgatgcttatgaactgaaacatgccttgaagctttcagcttatgtggagaagtcgc

SEQ ID NO: 111460 - DNA, 74 bp, Homo sapiens
cccactttcccctgagcctcagcacctgcttgtttggaaggtgaaagaaaagatgttgtcccggttaagagtag

SEQ ID NO: 111461 - DNA, 50 bp, Homo sapiens
gaggatgatgtttttggtgaagggccaggtctggattaatggctttaacc

SEQ ID NO: 111462 - DNA, 100 bp, Homo sapiens
gatggtcaacatgaccaaggagatccgggacgtcacacgggacaagaagctctggaggaccttcttcatctctccagagctgaagaagcaggtggagagt

SEQ ID NO: 111463 - DNA, 100 bp, Homo sapiens
cagaaggattctgcagcaggcgggatttatacagtttgcacaacttcagttcctggaagctaaagagctcttcagggcctgctttcttccccgggcgatg

SEQ ID NO: 111464 - DNA, 90 bp, Homo sapiens
gggcctcggggttctgaagttcataccacctccgcagacgcccccaaacaagtactccaaagattcaggtttactcacgtcatccagcag

SEQ ID NO: 111465 - DNA, 82 bp, Homo sapiens
tgctatcctagaatcaaggatttcagcaacaatgcctctgttcaaactcccagcttaaagcttttcaagccaggccaagaag

SEQ ID NO: 111466 - DNA, 113 bp, Homo sapiens
ctggtaactgacaaggaggccaggaagaaggttctcaaacaaggtttcttgagtacaggcgatcaggctgcaaaggggaactatggactccttgatctcatacaagctttaag

SEQ ID NO: 111467 - DNA, 82 bp, Homo sapiens
gtggtttttcggatcatgtctggtggctccgcggattataacagcttcctgcctgacacagctcacttcaagaagtgcacaa

SEQ ID NO: 111468 - DNA, 133 bp, Homo sapiens
caggctccgagccttcagcagaggcggcagcctggagagtcgaagcagcagctctcgctccagaagcttcactttggttatgaagacagtatggagtttccagaccatagtagacatttgctacagtgtctga

SEQ ID NO: 111469 - DNA, 114 bp, Homo sapiens
cacgacttcaacatgttccgcagccaggccgggggcgcctgcgactgcggggacagcaacgtgatgcgggagagcggatgaacgacaatctccttgagagctggagcgacctcg

SEQ ID NO: 111470 - DNA, 90 bp, Homo sapiens
ctctgtttccatcactgccaataaagacagtaggcactttaaaagcaaacatttctggtctttttggagttcctgagctgagtgccccag

SEQ ID NO: 111471 - DNA, 50 bp, Homo sapiens
aatcggttggcaaacgtccgaaaggcaggtaaagtgaggaaacatgcaac

SEQ ID NO: 111472 - DNA, 83 bp, Homo sapiens
gaactcctttataagtgtcagctgtgagattcctgtgaggtttctcgggcttatttggtggagtttctgttccagaccagagg

SEQ ID NO: 111473 - DNA, 95 bp, Homo sapiens
gaggagactcctgaccctcagaatggatcagaattcaggctataaatgaaattggagctggaccatttagtcagttcattaaagcaaaaactcgg

SEQ ID NO: 111474 - DNA, 82 bp, Homo sapiens
ccctgctggaccagctcatgggcacggctcgggacggtttattcagtcaccatgaagctgctgctgctgcacccggccttcc

SEQ ID NO: 111475 - DNA, 83 bp, Homo sapiens
ccccgatcgggccgtgtccgccgcggccctgcgaggtccgagggtatggtttgaagtggtgaacatggatttttctcggcttc

SEQ ID NO: 111476 - DNA, 99 bp, Homo sapiens
tattcagagtctcccctcctcagtccttcatataattaaaagcacatttgtgcattgtaagtctccagaattcacaactctcccagagtgtcatggaca

SEQ ID NO: 111477 - DNA, 89 bp, Homo sapiens
atgtggaagactttgatgtggagtccaaatttgaaaggttggatttggtctagggagtcccagaaagaagtagaaaaagagagagaagc

SEQ ID NO: 111478 - DNA, 100 bp, Homo sapiens
cggctccctaacaggcccgcctgtctgctcgtggccagcggcgccgccgaagggctttgttcgcgggggtcacagctctcatggctgcagctagcgtgac

SEQ ID NO: 111479 - DNA, 100 bp, Homo sapiens
ttgctgttcatgagtggaatccatgtttctggacgcggatttttggcctcatactctgttatagataaacaagccaaaactggacaagccaaggcatctg

SEQ ID NO: 111480 - DNA, 98 bp, Homo sapiens
ctacctccatcaggaccccagatgtctgacagccctgtgtgacaccaagataagtaacgactgcacttggagaattttgtgagtgaagacctgggcaa

SEQ ID NO: 111481 - DNA, 82 bp, Homo sapiens
ctgagacccggacagtggcagtgaaacagaatgaactctggaagcccagccagggacaatgcaccttcacagagattctgca

SEQ ID NO: 111482 - DNA, 100 bp, Homo sapiens
acaagtggccgccacaaacaagaagactctttgtttgaagaaatgcttcaagttgctaatgctataggttagtcagcaacataaaatcaacctaatgaca

SEQ ID NO: 111483 - DNA, 88 bp, Homo sapiens
tgaaggcctttcactgttggacttgggagtatctccgtattctggagcagtatttcatgaagcattcccatcaagagcaccatggaca

SEQ ID NO: 111484 - DNA, 75 bp, Homo sapiens
atccaggaacaactgtgtcagcagctagcccttttcctcaagcgtgaaataactaagaagttgggcaaccccaaa

SEQ ID NO: 111485 - DNA, 73 bp, Homo sapiens
gcggcgcgcgagctggagcactcgctttatttacaaatgttggagtaataaagaaggcagaacaaaatgagct

SEQ ID NO: 111486 - DNA, 101 bp, Homo sapiens
ctagaatccttcgatctcgcttcaggaagaaaagtacctcatcctcggccaccgaaaccacgtggggaagaaaacatgacagaaacagatgccttctataa

SEQ ID NO: 111487 - DNA, 75 bp, Homo sapiens
ccgggtctgccagccacacggtgtctggagtgagcctccccagtgccttgacccccccggaacctggactcccgg

SEQ ID NO: 111488 - DNA, 74 bp, Homo sapiens
gttggagcttgctgcctggaagaatgacggatcccggctactcaacagaaatgaaggaggaatctgtaaagaaa

SEQ ID NO: 111489 - DNA, 100 bp, Homo sapiens
ccgggactacgaccacctcttcaagctgctcatcatcggcgacagcgtttcaccagtgatcattaaagaatgggcagcttacaaaggaaagtctcctcaa

SEQ ID NO: 111490 - DNA, 101 bp, Homo sapiens
cccgggccggcgctccaaggcccgcccgggagggccggggccgcgctcaggtaccatgcatttcacggtggccttgtggagacaacgccttaacccaagga

SEQ ID NO: 111491 - DNA, 87 bp, Homo sapiens
ggccctgcgcccggggcgcctcggagcaaattgtggctactaatttgccccctgaagatcaagatggctctggggatgactctgaca

SEQ ID NO: 111492 - DNA, 90 bp, Homo sapiens
gaaaaatctcaaggaaaagtattgcaagcaacagtagtcgctgttggatcgggttctaaaggaaagatatgagggaaggcaccattggag

SEQ ID NO: 111493 - DNA, 82 bp, Homo sapiens
ctacgaagaagtgcttcagcgggccaggaagcgcatccaggagggaaggtggagttgcagcaagggctacgggctgtgtacc

SEQ ID NO: 111494 - DNA, 75 bp, Homo sapiens
gtccctgtgacctgtggagacacggccagatctgccctccactcaaccagaacgtaagttctttccaaagaaaat

SEQ ID NO: 111495 - DNA, 100 bp, Homo sapiens
tggagcgatgcaagctcggatccgagactggcagcatgagcagcatgaggtactaggttttgacaagcttgcatcatgcgtgagtataagctagtcgttc

SEQ ID NO: 111496 - DNA, 75 bp, Homo sapiens
ggcggcgggagcttccgggagggcggctcgcagattgatgtacagctatatattttgtcctttctttcacctcat

SEQ ID NO: 111497 - DNA, 50 bp, Homo sapiens
ccgggagcacagttccgccgagttgcgccagtagaggaaatgctttttca

SEQ ID NO: 111498 - DNA, 109 bp, Homo sapiens
ggtgttccagtcaagcacatctcaagagcaagtgtataatgactgtgcaaagaagattgttaaaggtaactaaatgaccatggaatctggagccgagaaccagcagagt

SEQ ID NO: 111499 - DNA, 113 bp, Homo sapiens
caatgtttgaacaaactcgaagaacagctgtggaaagaagttgcaaaacactgggaaaatgttctgctgctgccctggatgttcttgcaaatgtgtatcgtgatgaactgctg

SEQ ID NO: 111500 - DNA, 51 bp, Homo sapiens
gctcagccgccaggcatcaacagagtgtgaacatggctacgcctcttcatt

SEQ ID NO: 111501 - DNA, 80 bp, Homo sapiens
ttctactggcacaagttcgtgagtcccgtgggaaagctaacctcaccaagttccaagaccaaagattaaattaagagaag

SEQ ID NO: 111502 - DNA, 76 bp, Homo sapiens
caccgaacagcacctcaggagcagtggaatccttcgaggaggtggaggacagcctgtgtgtcccccagtataacaa

SEQ ID NO: 111503 - DNA, 121 bp, Homo sapiens
ctgagatcaaatggcacttcattggccacctacagaaacaaaatgtcaacaaattgatgggtgaccctggcagcaaccccaacaaacgccagaggcagccccctctcctgggagatcaccc

SEQ ID NO: 111504 - DNA, 80 bp, Homo sapiens
tttgttccctgacaactttgtaagagttcaaaactggtcaaatcaatggtgatttgctgatataccatgtcttactgact

SEQ ID NO: 111505 - DNA, 80 bp, Homo sapiens
agatggagttcctcctggggaacccgttcagcacaccagtggggcagtgcctcgacatgtagactgccaaagtgtatggg

SEQ ID NO: 111506 - DNA, 106 bp, Homo sapiens
gtttgaaagggcccaggaaaggatgcagcaccagtttcagcagctgaagctgttgcagggtgtgatggagaacaaagctatgtacctacacaccgtcagcgactgt

SEQ ID NO: 111507 - DNA, 75 bp, Homo sapiens
gtctcctttgcatatcccaatcgccctgacaggcctgtgctcaagggtgagaaggactggcagaaatacgagact

SEQ ID NO: 111508 - DNA, 149 bp, Homo sapiens
gcatcttcaaagctgaactgaatgagtttcttactcgggagctggctgaagatggctactctggagttgaggtgctatgtgagctcattaatgcactgtaccccgaggggcaggccccagtaaagaagatccaggcctccaccatggcc

SEQ ID NO: 111509 - DNA, 82 bp, Homo sapiens
ctgaagagcgagaaggagcagcgccggcggctggagggagtgcatccgccccaacccttttccccctcgtctcctgtgagaa

SEQ ID NO: 111510 - DNA, 100 bp, Homo sapiens
aaagatttaaagaagagacgtcgggcccagggggaacaggcacgagctgaactcttgaatgcggattgtggatgatgatgtgagctggacagctatctcc

SEQ ID NO: 111511 - DNA, 74 bp, Homo sapiens
gattcttcaaggtggggttggcatcccccacatacggtagagaatggagccgaatacatcttggagaccatcga

SEQ ID NO: 111512 - DNA, 96 bp, Homo sapiens
atgctacatggttacaacaaccggacccagcatgtgaaccaaggccaagtcttccagatgacctttagaatgacagcaattcagcaggagcaggtg

SEQ ID NO: 111513 - DNA, 100 bp, Homo sapiens
gtcggacgcgtcttctttcaggctgaggctcagttttctgtgcttggaccctctgggcccatcctggccatggtgggtgaagacgctgatctgccctgtc

SEQ ID NO: 111514 - DNA, 75 bp, Homo sapiens
ccacgcccggctaatttgcaatacggaaattttaatagattgagaggatccagaatccagatctctggaatagct

SEQ ID NO: 111515 - DNA, 83 bp, Homo sapiens
aggggcttacgcagaaggacctggccacggatgaaacaggcgcctatttaatcgacagagaccccacctactttgggcctgtg

SEQ ID NO: 111516 - DNA, 100 bp, Homo sapiens
attgactgccatgcgccgattggaggcattgaccacaaacctcgggacggctttcatctggtcaagtttgtttgtaaaaacaatggtgtgttgtttgaaa

SEQ ID NO: 111517 - DNA, 83 bp, Homo sapiens
cgagaacggtgcttctatggcaggatatgacaatgcagatcttcgtgaagactctgactggtaagaccatcaccctcgaggtt

SEQ ID NO: 111518 - DNA, 75 bp, Homo sapiens
gtcgcgtgtctaggtgagtcgcggtgggtcctcgcttgcagttcagcgaccacgcaatggctgccatccggaaga

SEQ ID NO: 111519 - DNA, 90 bp, Homo sapiens
cccgttcttgcctcaggccagtcgcctccaggccaagagggatccttcacccgtgtctgggcagctgcaatgactctccgcacggtatta

SEQ ID NO: 111520 - DNA, 75 bp, Homo sapiens
gcagggaggatgtcgggacaccccggaagctgggaaatgatgtgaagttcatttccaatccgccctccatggtgg

SEQ ID NO: 111521 - DNA, 50 bp, Homo sapiens
ttacttcatgtctctgggtcacattttggagtctcgctctcagtcaaaat

SEQ ID NO: 111522 - DNA, 50 bp, Homo sapiens
ccaggatgtaccacctttctggcaatgagacttcatcgcctgattcttcc

SEQ ID NO: 111523 - DNA, 90 bp, Homo sapiens
aagactcaaaaccagataccactgctcctccttcatctcccaagaatctaggtcaacctattaagatacgtttccaggaatctgaagaac

SEQ ID NO: 111524 - DNA, 85 bp, Homo sapiens
atatgatcttggctgccttgatggtaattaccgcggcggaaacttttgagaagaactttgaaagagaaacccataaaataagtga

SEQ ID NO: 111525 - DNA, 75 bp, Homo sapiens
aaccaatatttgctatttgtcttttccagattcaaattcagtgagtgtgtccgcttgaaaccaactgacatacag

SEQ ID NO: 111526 - DNA, 80 bp, Homo sapiens
tcaggtcctactccaggggcgctcaggatggaatccgacgtggtaggcccagagcagatactgtccgcgatttaataaat

SEQ ID NO: 111527 - DNA, 73 bp, Homo sapiens
atcatcatgtgccgccttgtcacgggtcacaaggccacggcgctgcaggagaaactggcgatggaatatgaga

SEQ ID NO: 111528 - DNA, 75 bp, Homo sapiens
gggcagcactgactatggcaaggacgaagactctgctgagccattcgatgaggactatctaaaccatctcgagcc

SEQ ID NO: 111529 - DNA, 90 bp, Homo sapiens
cctccctgcttctggagaggagggtcatcttcattgcagacaagctcagtgccggtggtggtgtgcacattgagccccggtatagacagt

SEQ ID NO: 111530 - DNA, 97 bp, Homo sapiens
ctgagcggccaggccgtgcgccggcctttggtcgcctccgtgggcctcaatgggacccagacatggagctgcgggaagaagcctggtctccggggcc

SEQ ID NO: 111531 - DNA, 100 bp, Homo sapiens
gggcggcgcgggtctgcggctccagcgtgcagaagcaaaagctgatgaagcattgaaagccaaagaaagaaatgaggaagaagcaaagagaagaaaggag

SEQ ID NO: 111532 - DNA, 100 bp, Homo sapiens
gagagaagacgatctgcacttcgcattttggcattgacatttaattttagggtcctttatatagaagggagagtagcctctactcttcatggatcttttg

SEQ ID NO: 111533 - DNA, 75 bp, Homo sapiens
tgtgatgagccacatgtgtttcaaaatggccctatgcttaggcccgttttacggagaagacttttactgtgaaat

SEQ ID NO: 111534 - DNA, 102 bp, Homo sapiens
cagagattcaggccagagttgtgggccgccgtcggcagcaagaacagagagagaggtggacagatctgagagatactgaggccagctttgctccaatggagg

SEQ ID NO: 111535 - DNA, 100 bp, Homo sapiens
aacggatagctgaagtttttgctgcttggagtgatcacaggcctgtgtgtaaaggtttgttggcatccaaagctgttggggttgatggtgctgaaaaaaa

SEQ ID NO: 111536 - DNA, 98 bp, Homo sapiens
ttggagatgggaccacatcagtaattattcttgagccatccaaaactctgtttgtcaaaggcctgtctgaggataccactgaagagacattaaaggag

SEQ ID NO: 111537 - DNA, 99 bp, Homo sapiens
agaggctcgtgtggttttggctcatggctctcaccttgctcacgaatagctgaaacctttggacttcaagaaaattatatcaaaattgtcataaataag

SEQ ID NO: 111538 - DNA, 130 bp, Homo sapiens
gaagctgatgcaaattaccagtctgcattcactgaatgccttcttgctgccaattaaaactgtaggtgtgcaggttggttcatgtgatcctggttaatggaacataagtgagattttatgggtgacaggg

SEQ ID NO: 111539 - DNA, 100 bp, Homo sapiens
tccagaggttgggattcgtgtctggctctggaattgctactgctgcctctgtcactcctggtgaccagcattcaaggaagaatgtggccattagccttcg

SEQ ID NO: 111540 - DNA, 100 bp, Homo sapiens
gcatcttattgatcctccagtcgagagctgacatcgcgctgatcggattggccgtcatgggccagaacttaattctgaacatgaatgaccacggctttgt

SEQ ID NO: 111541 - DNA, 50 bp, Homo sapiens
ctgaagaggcctctgaactgcgcagttcaaatctgaacatcaatgatgta

SEQ ID NO: 111542 - DNA, 100 bp, Homo sapiens
catcaatcttattccactgcatgtatttgtgttgttactgatgcagagatacagcaaaagagtctacatagaatgccgggacattctgcttcctgtcatc

SEQ ID NO: 111543 - DNA, 90 bp, Homo sapiens
ccagtttgataagcctggcgcggaacggtcgtggagaagaagagctgctgatgaggactgggacagataatttttatggtgggacgagga

SEQ ID NO: 111544 - DNA, 98 bp, Homo sapiens
gcaacaaggagaagagccatggaaacaggaggaagaattcccaagccaaagctttccagcttattgcaggagtgaccaggacactacctcctagaagt

SEQ ID NO: 111545 - DNA, 100 bp, Homo sapiens
agaagcaagcattgtaggtgagaatgaaacttatcccagagctttgctacattggaacagggccgcctctcaaggtaaaattgcggagttgctctctccg

SEQ ID NO: 111546 - DNA, 100 bp, Homo sapiens
aaggaaatttagatgggttttccagagatgcaaaaatgcaccctactccagcatcgcaccccaagaaaccaggtacgagcaggtgataataaatatatgc

SEQ ID NO: 111547 - DNA, 86 bp, Homo sapiens
agaagcatgtccggtcactccgggcctggccacatgatgaaccgaggaggaatgtcagggtgtgtgttgggaaacactaccatcct

SEQ ID NO: 111548 - DNA, 90 bp, Homo sapiens
agagacatgagatggtagccaacccctcagatcctcccgtgcacatcgtggacccccgagaacatgtgttcgtgcatgccataacttccg

SEQ ID NO: 111549 - DNA, 74 bp, Homo sapiens
cgaagttcgaccccaacgagatcaaagtcgggatgctgagaacttgctggagtcacagccactgggatcctttc

SEQ ID NO: 111550 - DNA, 100 bp, Homo sapiens
cccgaaggctatttcgccgctggcgtcaggactattttcacgttttaatgccgagagaatttagcttgggttaaatcatataacatctgctttgaattgg

SEQ ID NO: 111551 - DNA, 101 bp, Homo sapiens
cagacagttcttgaaggtgacaacttagagactttttatggaaacgagccctcaaagatcgctttaaatatgttcgaagacccatagaagatgatgagcaa

SEQ ID NO: 111552 - DNA, 75 bp, Homo sapiens
cggaggagtactcggtgaaatcctgtcctgaagactgtaagagcacagcaatggaggaaacagctatatgggaac

SEQ ID NO: 111553 - DNA, 101 bp, Homo sapiens
ttctacctgacgctcgtcctcatcctggtcactagcggactcttcttcgccttcgaactgctgagaaggaagaatttgaacatcaacagaaagagctggag

SEQ ID NO: 111554 - DNA, 82 bp, Homo sapiens
gcctgacccaggcctgctcggccctcacagggtcttgagtcaccacgtccgaatataattcttgggttagtaatctgccaaa

SEQ ID NO: 111555 - DNA, 74 bp, Homo sapiens
tcacatgctgacagcacaagaaggtaactgcgtcattgattggctggtatccaaccagtctgttaggaatcgcc

SEQ ID NO: 111556 - DNA, 74 bp, Homo sapiens
ggagaaacaggtacctgtggatgtggtcgagatgaaaggtcctcctggcactggaaaaacatccctgtgtaaag

SEQ ID NO: 111557 - DNA, 101 bp, Homo sapiens
gaccaagctgactgaaagattcttcaagaatacaccttggcccgaggctgaagccattgctccacaggttggcaatgacggagtctcactctgtcgcccag

SEQ ID NO: 111558 - DNA, 100 bp, Homo sapiens
cgctgcccagcgccctggccctctcgctgttgctggtctctggctccctcctcccagggccaggcgccgctcagaacgtgctctggaactgaacccgcag

SEQ ID NO: 111559 - DNA, 134 bp, Homo sapiens
ccacgtcgccacctacggcccgagacacaccaggccggcaggctgagaaaagcgagaccgcgtgcgaggaccggtacgagtggctgctttacagaatctggtgaagataatgtccttatattatcagtacatgg

SEQ ID NO: 111560 - DNA, 75 bp, Homo sapiens
agaaacccagcttgatatgttggaagatgagaatgtgcctactgctcctgatcctccaagtcaacatttacgtgg

SEQ ID NO: 111561 - DNA, 96 bp, Homo sapiens
ctggtgggcatagtggctgccctgctgggggtagaaatatttctgtcatggctcattcaaagactaggaccaatgatggaaaaattacatatccgc

SEQ ID NO: 111562 - DNA, 76 bp, Homo sapiens
tggcagccactgcccaccaacacacccaaatcaatcaagatgaatcccagaggcggccttagcaacatgctgttcc

SEQ ID NO: 111563 - DNA, 75 bp, Homo sapiens
gcaagaacctgcacacgcaccacttcccgtcgccgctgtccaacaaccaggccaacgtggaacctgttgtgccgt

SEQ ID NO: 111564 - DNA, 75 bp, Homo sapiens
attggccttattaatgatatgtgaaacaaagagtcctcttcgtggaaaagaaaaaaatacgctccctttaaacgg

SEQ ID NO: 111565 - DNA, 90 bp, Homo sapiens
aaacctgttcgctgcaaatgtgggcgccaattttgtcaaggatgctatctaaatgggccttttaattcaaatctactgactatcccgaag

SEQ ID NO: 111566 - DNA, 50 bp, Homo sapiens
gacacggccagatctgccctccagctcgcgatgcctctacacaagtatcc

SEQ ID NO: 111567 - DNA, 83 bp, Homo sapiens
ctctgaagttgccaggcttcccaacattcttgtctgtgttcctggtccagaactttacacagaaaaggtgctcaaaggatatt

SEQ ID NO: 111568 - DNA, 82 bp, Homo sapiens
tggtgtggggttggtgtgattagcttcgcagtctggaaagctttaggagttcacagtgtggatgggcaggtggtagcactgc

SEQ ID NO: 111569 - DNA, 50 bp, Homo sapiens
tcacatcaacttctaccagctggaccgtataatagacgctggccccaaag

SEQ ID NO: 111570 - DNA, 83 bp, Homo sapiens
cagtgactgtcaggtcgatcatatgcggctatgagaggttttcctccgagtacccagaattctgttctaaaaccaaggccctg

SEQ ID NO: 111571 - DNA, 75 bp, Homo sapiens
gagggacccaccgtagagactaaggacaacgtctgacatgagccgagtgttctgctcacactgtgggaacaagac

SEQ ID NO: 111572 - DNA, 87 bp, Homo sapiens
ccgctcctaagcctgcacagccgcggcggcagcagcagtgagagagatcctgaaggagctagacgagtgctacgagcgcttcagtcg

SEQ ID NO: 111573 - DNA, 48 bp, Homo sapiens
agttcctgaatctgagtcttgaatttggagtccaggaatgagactaag

SEQ ID NO: 111574 - DNA, 87 bp, Homo sapiens
atgaatggagtcgccttctgcctggtcgggatcccgccccgcccggagccccggcccccacagtagtgaccaaagatggagtctatg

SEQ ID NO: 111575 - DNA, 83 bp, Homo sapiens
aagagatccattggcacaggaggtactgccaaatctgtcgaaagggagataatgaagaactgcttcttctttgtgatggctgt

SEQ ID NO: 111576 - DNA, 87 bp, Homo sapiens
gagagggtgacgcctgctccgtggacattgatggggacgctcctgtgtcctaccgacctctccactgtatctgggaattgccaagga

SEQ ID NO: 111577 - DNA, 50 bp, Homo sapiens
aaaaattaaacttcaacacaatgagatccagctccaggtcccacaggggc

SEQ ID NO: 111578 - DNA, 90 bp, Homo sapiens
gaagtttctaagtgaaagccttatgtggcatatttcatcacaagttgctgaacttaaggaggagatgttaaagtaacccatcttgcagga

SEQ ID NO: 111579 - DNA, 75 bp, Homo sapiens
ccaggttccaaatcatcaatgaagcaagtaaggagcatctttccttgaagaagtacattattgacattgtggttg

SEQ ID NO: 111580 - DNA, 51 bp, Homo sapiens
gttgaagattgtgaagcaatagcctaagtattcaactccctggacatgtcc

SEQ ID NO: 111581 - DNA, 83 bp, Homo sapiens
gcctggtcccgccaagctgccgcactcaggctggatcttcaacgtggttccttggttggtggcgattccggccagtctattca

SEQ ID NO: 111582 - DNA, 82 bp, Homo sapiens
agagacagaagaagctggaggccggcaaagccaaggtaatactgcattgcatgattgtgcagaatctggaagtttggacatc

SEQ ID NO: 111583 - DNA, 75 bp, Homo sapiens
gggagaaagtttcatctgtggatggagtattggccaagatcaaggctcgagatcttcgcgggaagaagaaggagg

SEQ ID NO: 111584 - DNA, 83 bp, Homo sapiens
agaagatgatgctccaagaacaatagcttgccctcataaagagaggttcacctgccccagcctcgccttgcacccgagagagc

SEQ ID NO: 111585 - DNA, 75 bp, Homo sapiens
gtgggatgatctctgtgaagattatttgccgctccgggtccagaacaagaggaaagtatggggaaggagccaagc

SEQ ID NO: 111586 - DNA, 50 bp, Homo sapiens
tgacacggaaccctcacctcaacaagataaatttgcgcctcattttggta

SEQ ID NO: 111587 - DNA, 90 bp, Homo sapiens
gccagcatcacttttcataccaagccattttatggtggcaaactgcatcggctggaagtgatggagagagtattggaaactgtccctttt

SEQ ID NO: 111588 - DNA, 100 bp, Homo sapiens
tgttcctcacggcctgtgagacaagagcatcttggatgtaggacaatggaagagttagggaaaagttaaccattggatgccgccagctggttgagatgga

SEQ ID NO: 111589 - DNA, 100 bp, Homo sapiens
atgaagctttgcagccttgcagtccttgtacccattgttctcttctgtgagcagcatgtcttcgcgtttcagagaaagaatcttcaagagggagacatag

SEQ ID NO: 111590 - DNA, 125 bp, Homo sapiens
tagagtagcgacccggggggagcgcggggcgacgctggctgcagggacccggtgacagcgtgagaggtgctggagaatctggtaaaagcaccattgtgaagcagatgaggatcctgcatgttaat

SEQ ID NO: 111591 - DNA, 82 bp, Homo sapiens
tgaaggcggcggcagagaacttgccggtgccagctgaggttttggctacgggcctccacctccaccgccagatcagtttgcc

SEQ ID NO: 111592 - DNA, 82 bp, Homo sapiens
ctgaagacaaaaatccagaagtacaagcagtctggttattcagcttctcaaggctggaaaagcgaaggaagtttcctacaat

SEQ ID NO: 111593 - DNA, 83 bp, Homo sapiens
gttcaagcgattctcccgcctcagcctcagaagttgctggaattacagtgccatggtctccatgaactgatttttttgtgcag

SEQ ID NO: 111594 - DNA, 100 bp, Homo sapiens
ccccgagcaccgggccctctgcgacctggggccctgggtgaagtgctccgccgcccttgcctccagtactaaggctcgtacgtctgcatcgattatctta

SEQ ID NO: 111595 - DNA, 75 bp, Homo sapiens
cggcagtccacccaccgccgccgcctcccaggtggggcaggagaccctgtaggaggaccccgggccgcaggcccc

SEQ ID NO: 111596 - DNA, 80 bp, Homo sapiens
cttcaggacgctgtgaattcgacagatgtacagaagattttaagaaatgcaaggaaactacctgaaaaaacacagacatt

SEQ ID NO: 111597 - DNA, 100 bp, Homo sapiens
aaggagactgacgatgtgttcgatgcattgatgttgaagtctcccacagtgaagggcctgatggaagcggctgatcagctgaccgaagaacagattgctg

SEQ ID NO: 111598 - DNA, 75 bp, Homo sapiens
tataaagagctctgatgggctatttgggtgatacccagtgcagtgaactgcagtatgccaccacgggctgttccc

SEQ ID NO: 111599 - DNA, 83 bp, Homo sapiens
ctgcggaacaggacgccctctgatttaagtgggcagaccaacatccacctcagcaaaaacttcttcctgacgaatcgcgccag

SEQ ID NO: 111600 - DNA, 98 bp, Homo sapiens
cttgctcctcgccgcggcggggactgcagggtctccgtctctccaccgggggcttcatccttccagggaggagaagagggactccagaatggctgagg

SEQ ID NO: 111601 - DNA, 100 bp, Homo sapiens
cctcaagtccctgatggcctcagaggaggagataggttcccatatcaaacaccgggtacaggagctgggccatggctgtgccgctctggtcaccaaggca

SEQ ID NO: 111602 - DNA, 100 bp, Homo sapiens
gtgaaacagattggaaattaattgctatcaatgcgaatgatcctgaagcctcaaagtttcatgtttgtggggacattcatggacaattctttgatttgat

SEQ ID NO: 111603 - DNA, 90 bp, Homo sapiens
cttctaacttcagaatcaaaactatgaccctagggagtgaggaggagagtgaaaaatgcatcactggcgttatccttcttgcagttggca

SEQ ID NO: 111604 - DNA, 100 bp, Homo sapiens
ccggagggtcttccagagcctcagcctggccgtggacggcctcatggagatggccctggactccagcaggcagggctcagagctgctttctgatgacgag

SEQ ID NO: 111605 - DNA, 90 bp, Homo sapiens
cccttgagttggtcacttgaaccttgggaatattgagacagagtttctctcttgttgcccaggctggagtgcaatggcacaatctgagct

SEQ ID NO: 111606 - DNA, 87 bp, Homo sapiens
acttctggccatgagagaacttgttaaaaagttgttgggaaggtcttggaaattactgaactaccagatggaataactcgcatggaa

SEQ ID NO: 111607 - DNA, 104 bp, Homo sapiens
gttccacgtgaagctcaccgacagtgccctgagggccttcgagagctaccgcgccagacaggagcacagaaaatggttctgccccctccacagctcccacagac

SEQ ID NO: 111608 - DNA, 73 bp, Homo sapiens
gaggcaacggagctaccagccgctggggctctcagtgcacataggtatttccgagataatccttccgaattat

SEQ ID NO: 111609 - DNA, 100 bp, Homo sapiens
ctcaaaagaagatgacagcccgcagagagttaacttctgtttacatggaactcagacatctgcaaatcatggcacaagtgatccttatgtgaaatttaag

SEQ ID NO: 111610 - DNA, 74 bp, Homo sapiens
ccgccttgaggatctttctgcccgcctgagtgatcttgaaatgaatagattagtgatgatgaaccaggttatga

SEQ ID NO: 111611 - DNA, 88 bp, Homo sapiens
ctccgggaacatggctcgcttcgctctgactgttgtccggcagaattgaatgatctggcacgggaccctccagcacagtgttcagcag

SEQ ID NO: 111612 - DNA, 75 bp, Homo sapiens
tcacacacatcctcgccctgcaggaggaggagctgaccaggaaggccaaatcctacatccagtccctgccacaga

SEQ ID NO: 111613 - DNA, 83 bp, Homo sapiens
cacggagggcgtggagtagaacagaatcatcagcttcttggacacttaatgattgttggcaagaaatgtgctgctgatctggg

SEQ ID NO: 111614 - DNA, 90 bp, Homo sapiens
gccagcgcgctgcaacacaagatcaagaactccatctggtgaagtgtcagactctgacagcaacagctcctcttccagttcagattcaga

SEQ ID NO: 111615 - DNA, 90 bp, Homo sapiens
acaacctctcccccggctccatcgacctcaaggacatcaacttccggccgcagatgtcccaggcctacagattcctggaggagatgcggc

SEQ ID NO: 111616 - DNA, 83 bp, Homo sapiens
gctggcgctggggatccctgctcttcgctctcttcctggctgcgtccctagcttcctgcctgacacagctcacttcaagaagt

SEQ ID NO: 111617 - DNA, 100 bp, Homo sapiens
aacggaggcgtgaggaggacgccaggtggacacgcccatccttggacttcctgaaaatgacccaggtctgtgtctggggtggacgctgaccctgacttgg

SEQ ID NO: 111618 - DNA, 74 bp, Homo sapiens
tgtcgctcttgtgccctagcaccccgagaaccgtcagtttgagccagatgagaatggatcttggagaatgtctg

SEQ ID NO: 111619 - DNA, 100 bp, Homo sapiens
aaccacagagctgtcatggctgccatctctacttccatccctgtaatttcacagccccagggatcaaggtggtcggacattgtgtggtgtaatgaggatt

SEQ ID NO: 111620 - DNA, 99 bp, Homo sapiens
gttccctatgggtcttttaaacatgctctcttggctcctgctctggccatgtgatgtgcctgctcccactttgccttccactgtgattgtaagcttcct

SEQ ID NO: 111621 - DNA, 75 bp, Homo sapiens
aagcagtcctaccatgtcagccttcccagtagctgggaccacagtttttccagaaaggaggagtcaaggaagccc

SEQ ID NO: 111622 - DNA, 98 bp, Homo sapiens
agtctatggatctacattataccaataacgaggcattgtcttgggaccacttgcacctccacctcctccaccactcccaccagggcctgcacaggctt

SEQ ID NO: 111623 - DNA, 119 bp, Homo sapiens
ccgcgctccctccgccgccgccgccttgctgctgctcaaagctgctgccgccccttgggctaaaagaagtgtatgctgacttgtaaagtgaagaagccagtggtgctgcgggtgttctt

SEQ ID NO: 111624 - DNA, 100 bp, Homo sapiens
gaagcgcgcgggcaaggaggtgctgctggaggaatctgtctatgatcttctcccaaaggagttacagttacctccatctagagaaacatctgtagcatca

SEQ ID NO: 111625 - DNA, 75 bp, Homo sapiens
tacggaccttaaaatacccgcaacagccccttcgtcccaagctgacccagctggatgttgacagccacctggccc

SEQ ID NO: 111626 - DNA, 90 bp, Homo sapiens
ggaatttcccttatctccttcgcagacagaggtgttccaggccttgcagcggctccatatgaccatcttctcccagagcgtctcaccatg

SEQ ID NO: 111627 - DNA, 75 bp, Homo sapiens
ctcccaagcagctgagactacaggattatatgcgtcaggcaggagaagtgacttatgcagatgctcacaagggac

SEQ ID NO: 111628 - DNA, 104 bp, Homo sapiens
caacagcacactgaaggaggctcagttcaaagacctgttcttaaaaaaaggacatggatttgattgacatactttggaggcaagatatagatcttggagtaagt

SEQ ID NO: 111629 - DNA, 76 bp, Homo sapiens
gccgaaaccgggctgcaggcggatttgaaagttgagagcagcatgttttgcccactgaaactcatcctgctgccag

SEQ ID NO: 111630 - DNA, 100 bp, Homo sapiens
ggacgctcgtgcacagatacggcagctggtggaatttttgaagaaaatggaatctcgaggccccctttcgtgcgacacggttctgaagatcttctaccag

SEQ ID NO: 111631 - DNA, 100 bp, Homo sapiens
cagacagttcttgaaggtgacaacttagagacggagacattagagaagcaagtattttctctctggaggcagaagatgtttcagcatcgagaaaaccgcc

SEQ ID NO: 111632 - DNA, 87 bp, Homo sapiens
tggagatatggcgcaactgcggcgcgatgcagtgatgacacgaaagaagatcatgaaacagaaggagatggtgtggaacaacaacaa

SEQ ID NO: 111633 - DNA, 104 bp, Homo sapiens
caacggatgaaaatgaagacgacattcagtttgtcagtgtatcattgcccagtgcctaagatcttttatgttcagctcactgtaggaaataatgaattttttgg

SEQ ID NO: 111634 - DNA, 98 bp, Homo sapiens
gccctcactaccctgtttaagtacatagatgaaaatcaggatcgctacattaaggtttcagaaggatcccacttggtcagagactggagaccgttatc

SEQ ID NO: 111635 - DNA, 100 bp, Homo sapiens
cagtggctggcggtgcctggacgtacaaccctggtacctgacagtgtaaagaaggagctcctacaaagaataagaacattccttgctcagcatgccagcc

SEQ ID NO: 111636 - DNA, 75 bp, Homo sapiens
cagagcacccgaggtcatccttggcatgggctacaaggaaaacggaatctatggatttcctgaaatatgttgttg

SEQ ID NO: 111637 - DNA, 101 bp, Homo sapiens
cacgcccgtgcccatgaacctgttcgccacctgggaggtggacggctccagccccagctgcgtgcccagggtctctcctcagggatgacatcatccgtcca

SEQ ID NO: 111638 - DNA, 80 bp, Homo sapiens
gtttttggtcttctgtcaaaaacacagggatgagagactggtgaactagagaatgctgagtctggaggagacggaggcag

SEQ ID NO: 111639 - DNA, 82 bp, Homo sapiens
ctcggcctcgcggcgacggcggcggtggcggcttggacgactcggagagccgggctgggttacgacccctacaaccctgagc

SEQ ID NO: 111640 - DNA, 83 bp, Homo sapiens
ttttccacggtgtgttctatgccgggggctttgccattgtgtattacctcattcaaagtaattgtcatgagaaaaccctggac

SEQ ID NO: 111641 - DNA, 75 bp, Homo sapiens
cagctgtggaaagaagttgcaaaacactgggtcttgggcgtctttggtactggcttttttaggggtctgcctggg

SEQ ID NO: 111642 - DNA, 50 bp, Homo sapiens
cctgcattgttggtattgaaaatggagtcttgctctgtcaccaggctgga

SEQ ID NO: 111643 - DNA, 75 bp, Homo sapiens
tagctactgccgcccaagtggaaggttgccaacttggcctgttccatctcaaataatgaagaaggtgtaaagctt

SEQ ID NO: 111644 - DNA, 87 bp, Homo sapiens
ggaggcgccccgcgcagctggctggcggagcatgagcgccccaggatttgattgccttatgtgacaagcccaagatctgtgacagtt

SEQ ID NO: 111645 - DNA, 87 bp, Homo sapiens
ggagttcagttacccggagctgctgctgtgcggagaacaacgggtggtattaaagataatcaaacattatcaagaagaaggacaagg

SEQ ID NO: 111646 - DNA, 75 bp, Homo sapiens
agcgtcccagcttctttgaaagagggcaggatgaagccccacccgcccttcaggatgccagccttggcaacatcg

SEQ ID NO: 111647 - DNA, 82 bp, Homo sapiens
ccctacttcaaggataagggcgacagcaacagctctgccggctggaaggttaaacccatccagagtaatggctgcggcctta

SEQ ID NO: 111648 - DNA, 89 bp, Homo sapiens
ctacgggcaagcgggcagctgaagatgatgagtgtgccctgctttacaccagctgtgcagggcagcgtcggctccgcatccataatctg

SEQ ID NO: 111649 - DNA, 75 bp, Homo sapiens
gtcctttcaagtctctaggactggactcttcctaagcaagtccgtaaactgtttcacgttagacctgtaacccaa

SEQ ID NO: 111650 - DNA, 100 bp, Homo sapiens
cggcgggctggagacatggaccgcggcgagcaaggtacttcgtactggatttcgaggctggcatcctgcagtattttgtgaatgagcaaagcaaacacca

SEQ ID NO: 111651 - DNA, 98 bp, Homo sapiens
gccagtgaggcccgcagcaccgccagtgaatgccccagccttctcagcaccactgcagaggacagccttggacctgcaagcgcaggaccgagcccacc

SEQ ID NO: 111652 - DNA, 97 bp, Homo sapiens
tctgacactgctgaacgtctaccatgcttttaaacaaaacacgatgaggcgagtggtacgacagagcaagtttcggcatgtatttgggcaagcggtg

SEQ ID NO: 111653 - DNA, 98 bp, Homo sapiens
ccacgaccccgcgagcggcggcatcttctcctccgactacaagcggttgagaacttgttgcttagtaaccaagggaccattaagctgtgtgactttgg

SEQ ID NO: 111654 - DNA, 100 bp, Homo sapiens
gagtggagatcctattcagaggggccggtctctctaaatatgccccagggcaccatgccggtggaaaggatgcgcatgcgcccgtggctggaggagcaga

SEQ ID NO: 111655 - DNA, 75 bp, Homo sapiens
gtctggctatggtggtgcaggacccgctgctctgcgatctgccgatccaggctggatctccagaactgttctctg

SEQ ID NO: 111656 - DNA, 82 bp, Homo sapiens
catgtatcatgcaaggatattcctcatatatcatggaagtctgttagaactgctgtgctgatcaacgggacgctccgtcttt

SEQ ID NO: 111657 - DNA, 98 bp, Homo sapiens
aagccctggtgccaggtgtccatccccgtgctgagtaatggaggggaaagttccagtcgcagcgctgagaagcgatcagctgaagaagaagctgccga

SEQ ID NO: 111658 - DNA, 100 bp, Homo sapiens
gccggctagaggaagaggcgttgcggcgaaaggaacggctgaaggccctacgggagaaaaccgggcgcaaggacttggatgttgtgggtgatggtatgca

SEQ ID NO: 111659 - DNA, 96 bp, Homo sapiens
gtatgtgtcaccctgattgatctggagcttcacaatcctaaagcaatagcagtagatccaatagcaggattgtgcttcaagaagaccatagggaag

SEQ ID NO: 111660 - DNA, 118 bp, Homo sapiens
gagagtccgtaaggagcagcttccaggatcctgagatccggagcagccggggtcggagcgggttattgttcaaaactacaactccattttgacactttctcacttgtaccgatcttca

SEQ ID NO: 111661 - DNA, 75 bp, Homo sapiens
aggatggaatcttcaatcaatcatatttcacaactatttgaactgctgggacctgaaggacttgaacttattgag

SEQ ID NO: 111662 - DNA, 75 bp, Homo sapiens
actagcagatgctggcgacctatccagaatgatcaagacactacaacaacaggagtgcaaacttctctacagccg

SEQ ID NO: 111663 - DNA, 115 bp, Homo sapiens
atgaaatggttaaagatggagaaattgtatacactggaacagaatcaacccagaacggatagctccctcctggaaaagtaaatacctgggcacaggacttcaaagcaaacacaga

SEQ ID NO: 111664 - DNA, 90 bp, Homo sapiens
gccaccaagaagaccaaagaaaaggagacaaggatggctcttcctcagccttccttgaatccagaagctggcaaacagcatcagccatgc

SEQ ID NO: 111665 - DNA, 100 bp, Homo sapiens
aaattggaacatgtcatcaaggtagcacatacttgtctccatcctcaggaatcccttcctgatactagaagtgaggttctgctccagacgagcccttacc

SEQ ID NO: 111666 - DNA, 100 bp, Homo sapiens
caccaacaacattggctcaatagcaagaatgtgtgcccttaatgaattccgcagctctctgtacttgctcatggagaccctcaatgcgacgacgccccac

SEQ ID NO: 111667 - DNA, 88 bp, Homo sapiens
cagctttttatggtgtttaatctaatacacttaagctgcagtcccaaaattagggacacatcatctcagagttggagcacctgacgtt

SEQ ID NO: 111668 - DNA, 106 bp, Homo sapiens
agacgggtgatttctgcatttccatctgaggtgtcaacaataaacggcttggtgtatgtggctggatcctgttttccctctctttcctgttggtgatcattacctt

SEQ ID NO: 111669 - DNA, 50 bp, Homo sapiens
ccagtttttagttgtagcacgaatgtcaaaactggaccaatggggccagg

SEQ ID NO: 111670 - DNA, 90 bp, Homo sapiens
tgatcttacttcatccagtctaatagggtacagccaaagaccggagctttggagagatgaagtttaaacagtgtcctacagagaacatgg

SEQ ID NO: 111671 - DNA, 83 bp, Homo sapiens
ctggaccacggcgcagacgcgggcgagctgcggctcggacgccagcggacacgcgggcgagatggtcagtaggacagaaggta

SEQ ID NO: 111672 - DNA, 75 bp, Homo sapiens
ccctaaaatgtcgagatttgtacaagcttccttcaaaatgtctactgttcacgaaatcctgtgcaagctcagctt

SEQ ID NO: 111673 - DNA, 101 bp, Homo sapiens
cattgtgttaatggtgaagcacagcgattcccgtttttcgttggaatatacgttgcacatttatggcgattctgagtgtgagggcagacttctgccaggct

SEQ ID NO: 111674 - DNA, 98 bp, Homo sapiens
ggcgcggcccctagctttctccttctggtgtggggcccgagaaatgaagctgttgtcatttctggaaggaaactggcccagcagatcaagcaggaagt

SEQ ID NO: 111675 - DNA, 73 bp, Homo sapiens
ggcctgcagaggtgccgacatggggcttaagatgtcctgcctgaaagaaagtgttgtgaagagcgaagacttt

SEQ ID NO: 111676 - DNA, 100 bp, Homo sapiens
ttggagtgctggttggggttgctctgatatagcagccctggtgtagtttcttcatttcaggaagactggaaaccactgttgctgcgattgccccggatat

SEQ ID NO: 111677 - DNA, 97 bp, Homo sapiens
acaaaatgtgctggttgatggtgttaagaaactctcagtttgtgtttctgagaaaggaaagaccacagcaagattctttcattcgtctcctcctagc

SEQ ID NO: 111678 - DNA, 75 bp, Homo sapiens
aggctgctattgaaagagagtatgcacagctgtgtgttctcatttcacccaaaacctttggacagtgcagggcat

SEQ ID NO: 111679 - DNA, 92 bp, Homo sapiens
gcccccaaactgtcacagaaagagctgttaacacttcctagataacgggtcaaaatgcagatcttcgtgaaaacccttaccggcaagaccat

SEQ ID NO: 111680 - DNA, 101 bp, Homo sapiens
cgagaagaggcgccaggccaaggtgcaggagaagcgcccgccgccctggaagaagaggacgtgtaccttccggtttcccagcacggccatcaagatccagt

SEQ ID NO: 111681 - DNA, 96 bp, Homo sapiens
tggctaagcccgccgtcttcatccccgtgaaccgctccccggaaatgcagacaatgcagatcttcgtgaagactctgactggtaagaccatcaccc

SEQ ID NO: 111682 - DNA, 80 bp, Homo sapiens
gaaggtgacgaggagggagaagacgaggatgatgcggaaattaaccccaagtttggagtttgagaatcagaagactcgct

SEQ ID NO: 111683 - DNA, 101 bp, Homo sapiens
gtctattatatcatttaaaccacatggctatctaaagaggattaaagcaaggagagccaatcatgactggcaaaacacagaccagcaacgtcaccaataag

SEQ ID NO: 111684 - DNA, 98 bp, Homo sapiens
ctggctctgaaggcgaacgcttcgctggccatttaggagctctgctcaaagccagacgtatggactttctgtcagattttgagatgatgttgcagcga

SEQ ID NO: 111685 - DNA, 82 bp, Homo sapiens
aaaagaagaagctgacccctgaaggaaacaaagatctttgatgatgcgtacaaatcccagctcagttgtgtggttgtggatg

SEQ ID NO: 111686 - DNA, 83 bp, Homo sapiens
gttctcttcacggtggaaaacacagatccagagtgttactggcttacaaattggattgaggttacaaaagtggatgaaaccag

SEQ ID NO: 111687 - DNA, 100 bp, Homo sapiens
ggcagagcaacagaaaatgcaggaacaacagatgcaggactaccgaccagactcccggaaatcatgttggtaggatcccagtctttttcgcctggagggc

SEQ ID NO: 111688 - DNA, 101 bp, Homo sapiens
cttccaaagcgcaaagaagttatttgccgaggatctgatgacgattactctttttgcagagctctgaagggaggtcctgaccactggcatgaacttttccc

SEQ ID NO: 111689 - DNA, 73 bp, Homo sapiens
gccaccagcgcagcgctgccatggagcccagcagcaaggacttggatgttgtgggtgatggtatgcagtgtcc

SEQ ID NO: 111690 - DNA, 82 bp, Homo sapiens
gtagggagcatagctgctacactgaagatgaagcaaggcccaatgacccaggcgcaaactcattattacattgggtaagaaa

SEQ ID NO: 111691 - DNA, 100 bp, Homo sapiens
gttatatcctccaggaatactggccaggtgctggaggtggtgagagccaactatgacacgctcacgctgaagctgcaggatggcctggaccagtatgagc

SEQ ID NO: 111692 - DNA, 99 bp, Homo sapiens
tccgaggacgcggaggatgacgatgatgatgatgctctgtccgactggaatttgaggtatcagctctgtgataacagcgtgggggtgctcttcaatgac

SEQ ID NO: 111693 - DNA, 100 bp, Homo sapiens
cagagaggcggaagaggaggcctgatgggggtttctccaaggacatcaaggtgcccaagagccgctacctgggctacatcaaggactacgagggagcgac

SEQ ID NO: 111694 - DNA, 100 bp, Homo sapiens
aaggtggactggggctactgcgactgcagacacggaaaccacccctactcctaatcccccgactacagaagaggagaaaacggaatctaatcaggaggtt

SEQ ID NO: 111695 - DNA, 50 bp, Homo sapiens
caggactccaaaatggcgtcagttggtggagccgccaccaaaatgcagat

SEQ ID NO: 111696 - DNA, 83 bp, Homo sapiens
tgcaaatgaagctctcgaggctgctaagagactaatcattgaaattatgagactatcattcaaatggaagcattatagttctt

SEQ ID NO: 111697 - DNA, 82 bp, Homo sapiens
agtgtttgcctctggttcagctcatacaacagcttcttagagcatatcggtatctccaaaaggcagcaagcatgaaccatac

SEQ ID NO: 111698 - DNA, 75 bp, Homo sapiens
cttgatcatgctagagctgctgaacctttgcttactttggaaagacttctaggccactgggaagaagcagcccat

SEQ ID NO: 111699 - DNA, 95 bp, Homo sapiens
gtaaagtcgagtatctggtgaagtggaaaggatggcccccaaatgtactaatggtcacttgatgtgcgctggctgttttatccacctactagcag

SEQ ID NO: 111700 - DNA, 100 bp, Homo sapiens
aaattttaaagactgttgtgaacagggatgtacctaatctttgtgtccctggtgatgttggaacattaatgatggaacatggccaaacttcagtcatgat

SEQ ID NO: 111701 - DNA, 100 bp, Homo sapiens
atggactttctggccgagaccagccagtggagctgctgaatcctgcccgcgtgaaccacatgcccagcacggaatgttcgcatcttaccacatacagttc

SEQ ID NO: 111702 - DNA, 95 bp, Homo sapiens
ggcccggacgcgcccgcgcccccgcggctggagggtgggattgccatggaaagcataactgtgtatcagacagttgcacacccaggaatccaagg

SEQ ID NO: 111703 - DNA, 98 bp, Homo sapiens
catcttttatcgggatggtgtttcagaggggcagtttaggcaggtattaaacatgagtggcaagtaaatggcttggatgatattaaggaccgttcgac

SEQ ID NO: 111704 - DNA, 100 bp, Homo sapiens
tgtccttctgctattgatcctgaagacaagttggatggcttgaggactggtactaaaaggaaacgtgactgggaggccattgccagcagaatggaggatt

SEQ ID NO: 111705 - DNA, 98 bp, Homo sapiens
ttctctaggccttttagaaaacatggagctgtgactgatgagaattaaaggccatggatgaagatgggcttgaattacaacaagagccaaactcattt

SEQ ID NO: 111706 - DNA, 88 bp, Homo sapiens
attcagcatagctattcctgttgatggtgatgaagacaggatcaaaatggtttcaatcccagaatactatgaaggcaagaacgtcctc

SEQ ID NO: 111707 - DNA, 75 bp, Homo sapiens
ccttcatctaccatggctcagccgggaactctgaacctcaataacgagctgataaaatactgggaagcattccta

SEQ ID NO: 111708 - DNA, 75 bp, Homo sapiens
ttttattactttcatctatacacttccagtgtcgaaggctggacaggatgaagagaaagatgctgatgtgccagg

SEQ ID NO: 111709 - DNA, 51 bp, Homo sapiens
cttggtttcaacactatcggaatgggggatgaaagaatgcatttgccaagt

SEQ ID NO: 111710 - DNA, 83 bp, Homo sapiens
gggactgtctatgatgtcatgtttgtcagcacaggtagctacagcaagctgggtagcaggcagatccaaaggatatcatgaag

SEQ ID NO: 111711 - DNA, 101 bp, Homo sapiens
gcaaaggcacaccactcactaatactgaagatgtgttgaaaaaaatggagaatttgccattttcagtggaaaacaagtggtcgttactagctaagatgtgt

SEQ ID NO: 111712 - DNA, 82 bp, Homo sapiens
tcagtgcgaagaagctgcagccgcacctggccaagggtatgccaccatatacaccatgttcccagtgttctccttagtgctg

SEQ ID NO: 111713 - DNA, 50 bp, Homo sapiens
gagacatcccgatctggggaaatccacatctcaaagaagtggggcttcac

SEQ ID NO: 111714 - DNA, 75 bp, Homo sapiens
ccggcatcctttctggggagaagcagcgcatcagccgaggcactcaaggagttgcccctggtcctgtaattggac

SEQ ID NO: 111715 - DNA, 97 bp, Homo sapiens
gctgtgggagctgccggtggagccggccgagcggaggcctgagtgcacccgctgcaggagaagccccgatatccaagcaaaagaagagttatggaag

SEQ ID NO: 111716 - DNA, 49 bp, Homo sapiens
cttatccgagcccctcttgcaggtttgtggtggtgtgtggtgatgggga

SEQ ID NO: 111717 - DNA, 104 bp, Homo sapiens
caagaaggtgccggtggtgcgagtcttcggagcgaccccggcagacaaatcttcctattttcaagctgaaagaatctactgttagaagaagatacagtgacttt

SEQ ID NO: 111718 - DNA, 100 bp, Homo sapiens
agatcacttcagtgcctcagagtgcagttcccaaggaggcttcaagacaaagggccccttacacaccagacaggccggctgttcggacggaagcatcagg

SEQ ID NO: 111719 - DNA, 49 bp, Homo sapiens
ttacggctttgggggggtgatgggccgacaatagatgatttgctgcggt

SEQ ID NO: 111720 - DNA, 98 bp, Homo sapiens
agggaagcagagatataccagacggtcatgctgcgccatgaaaacatccttggatttattgctgctgacaataaagcaactttgactctttgaatgaa

SEQ ID NO: 111721 - DNA, 75 bp, Homo sapiens
ccgcccgccccccaccgccgccccctccggcgtgttcatgcccccgggtctgcgctcctcagaccaccggcaggt

SEQ ID NO: 111722 - DNA, 100 bp, Homo sapiens
gtacagacaaagaaagttcgaaaagttcctccaggtttgccatcttcagcctcattgctacgatttcagagtaccctggtaatagctgagcatgcaaatg

SEQ ID NO: 111723 - DNA, 95 bp, Homo sapiens
cactttagaccctccacctaattgcaggccagacaatgcagtgccaggggacgtgctggtgctgacaaaacccctggggacacaggtggcagtgg

SEQ ID NO: 111724 - DNA, 100 bp, Homo sapiens
ttcaccagcaagctggaaggcatgttcaaggacatggagctttcgaaggacatcatggttcatttcaagcagtcttactactttgaccgcgatgatgtgg

SEQ ID NO: 111725 - DNA, 75 bp, Homo sapiens
gccgagtgtgagcggaaaggggcccggcgtctgcctcgagactgaagaccgatggcaggatggtggctggcaaag

SEQ ID NO: 111726 - DNA, 75 bp, Homo sapiens
atgtattttgtgatcgcagcgatgaaaggtgcgcgcggagccatggttatcatgtcggagttcagcgcggacccc

SEQ ID NO: 111727 - DNA, 75 bp, Homo sapiens
ttaaaaagtatggagctgctatggtggtcatggcttttgatgaagaaggacagacgtaaaattcatcctgatcag

SEQ ID NO: 111728 - DNA, 95 bp, Homo sapiens
attacccacctgcatcatctggggttccaatgcagggattgtcaatgaggcagatcagattccgatttgacgggcaaccaatcaatgaaacagac

SEQ ID NO: 111729 - DNA, 100 bp, Homo sapiens
gccagggaccctgtgcaggcctgctcctccgtttgcaaggtactccccgctggccgagcagttctcccaccagttcccatctcatgacctgccgtccgtt

SEQ ID NO: 111730 - DNA, 75 bp, Homo sapiens
tttctgtggcagaagatgatgatgaaagtaatacagattctgttcatcttgctctgaaattaaataattctgaac

SEQ ID NO: 111731 - DNA, 100 bp, Homo sapiens
aggagaggcacccgatatatgttctctaggccttttagaaaacatggatcctcagtcttccacaatgaaccctgtttacagccccgtgcagcctggggct

SEQ ID NO: 111732 - DNA, 121 bp, Homo sapiens
ctggcaggtgtttctggatgcatatcggcgctactcaggcccgtggaggcaatgcccagagctgtggcagccaccttgcagccgtgaagcaccagtgggaatgacagtcaagagaaccacg

SEQ ID NO: 111733 - DNA, 100 bp, Homo sapiens
gaaaaaaagataaaccaaaggtttgaccatgaaatgtttggcctgaagcctaaacacaggcactgcctccttacctgtgaggaatgcaaaataaagcatg

SEQ ID NO: 111734 - DNA, 83 bp, Homo sapiens
tggctcccttctgccccagctccgtctcggcggcggcggcaacaaatggtcattcagaatgcttacggctattaataggaaat

SEQ ID NO: 111735 - DNA, 76 bp, Homo sapiens
gcatctttggcttcagcgtgtcccggtggcccggtggaaatcctgccctttctgtacctgggcagtgcgtatcacg

SEQ ID NO: 111736 - DNA, 78 bp, Homo sapiens
aagatcgtatagtcctagaaagttgttgaagattggaaattcatagcccaggttcttgatcggatgtttctgtggact

SEQ ID NO: 111737 - DNA, 100 bp, Homo sapiens
tggctacagtgatggaatgcaggtctggagcatccctgcaactactctaagagtgaggaaattagaagaaaacattgaagcagaaagagcagcgcatttg

SEQ ID NO: 111738 - DNA, 107 bp, Homo sapiens
cttggagcaaaaatcagtgagagaatacagggccacacaggcatttaaatgtttccaagacaaattggaacaagaactactcaaatggaggagccaaggacagaaat

SEQ ID NO: 111739 - DNA, 75 bp, Homo sapiens
gctactgcgagaacaagtttaacgacaagcacatcaccactctgcagattgttcagattccattctgtggggaaa

SEQ ID NO: 111740 - DNA, 100 bp, Homo sapiens
ggcgcaggagcgggactgagagcgcctggaggctcgagcggagggtcatcatcagatttgaaatatttaaagtggatacaaaactatttcagcaatgcag

SEQ ID NO: 111741 - DNA, 82 bp, Homo sapiens
ccgtgacccggtggaaaatggcgatttgtgccagagactgctgctactttgaaacgtacgatagaggccctgatggacagag

SEQ ID NO: 111742 - DNA, 80 bp, Homo sapiens
acttcctaatgggtattgggcgtcactgtaataagggtgtgattaggcccactgggggatacgctgtcatgctacactgg

SEQ ID NO: 111743 - DNA, 98 bp, Homo sapiens
tgtatataaagtttgtgatcgttggcggacattttgattgttcctcatgtggttaatttggttcattctttcaaaaatgatggtctgccttcaagtac

SEQ ID NO: 111744 - DNA, 100 bp, Homo sapiens
acaaggacaacaatgagatcgtggacaagatcatgggcaaaggacagatccagctctccaagaggctgaagaaagtgtggaagccacagctgtttgagcg

SEQ ID NO: 111745 - DNA, 101 bp, Homo sapiens
cagcctcccgattagctgggattacagccaagacaatgcaaactccagtgaacattcccgtgcctgtgctccggctgccccggggccctgatggcttcagc

SEQ ID NO: 111746 - DNA, 48 bp, Homo sapiens
ccctctccactcccatcttcaggctctggattaatcgaattacagctg

SEQ ID NO: 111747 - DNA, 90 bp, Homo sapiens
cgggaactgctgacgcttgatgagaaggacccacggcgtctgttcgaagatgctcgtggtccccagcatccttgagccaccaggagtgag

SEQ ID NO: 111748 - DNA, 90 bp, Homo sapiens
tcagaactatgacatggtcagtgggatctactcatgcatcttctaaagtactaaagagcatgtgtgagaatttctacaaatattcaaagc

SEQ ID NO: 111749 - DNA, 75 bp, Homo sapiens
gatgaaccatccctagccaatggagcattcatgcccaactgtcggaaaaggtaacagaagatggaactcgaaatc

SEQ ID NO: 111750 - DNA, 100 bp, Homo sapiens
tttctcagaaaccttcacatcttggtcaagataacaacgaacttgatgcaagtgataggtttgccaaggtcagacctctcatcatccggatgaactgcaa

SEQ ID NO: 111751 - DNA, 75 bp, Homo sapiens
agccaccagcgcagcgctgccatggagcccagcagcaaggcatgtcgggccccaggcctgtggtgctgagcgggc

SEQ ID NO: 111752 - DNA, 75 bp, Homo sapiens
ctaaaaacaggtccctggcgagccccttgcagattgagaggatccagaatccagatctctggaatagctaccagg

SEQ ID NO: 111753 - DNA, 101 bp, Homo sapiens
cctcccagagtgctgagattacaggcgtgaggcaccactcctgggaagtttggttggcttagtggattatccagatgatgaagaggaagatgaagaagaag

SEQ ID NO: 111754 - DNA, 76 bp, Homo sapiens
agtcccacacacagtcgcagtcacaacacttacaagattggtgaggaaatgagccagaacagtttcataaaacagt

SEQ ID NO: 111755 - DNA, 103 bp, Homo sapiens
ccggcgggctaggctgcgcggtgcggaccccggcgcgcggtccgggttgctggggcggcgcgtaatgaaatgaatgatgtgcctttctttgatatccaactgc

SEQ ID NO: 111756 - DNA, 76 bp, Homo sapiens
ttcctcacccgcgcctgcgacctcgcattccccgtcggagccctttctagagaaaccagtgccggatatgactcag

SEQ ID NO: 111757 - DNA, 83 bp, Homo sapiens
tctggagctcccccgcgcggacgatgcctgccgtgcccgcctggggctcggggcgcagcctcccgcgacgatgcccctcaacg

SEQ ID NO: 111758 - DNA, 100 bp, Homo sapiens
agtattcaaagcctccggtgaaatctgaactcattgaacaggtgatgaaggaggagcacaagactctggacattaatgtgaaggccccagccctgatgac

SEQ ID NO: 111759 - DNA, 51 bp, Homo sapiens
caggtacaacctcgaggagctctaccagataaccatgatgactacacagac

SEQ ID NO: 111760 - DNA, 74 bp, Homo sapiens
ttcaatttgaaaacaagtggaatagtgctgtcttccttggatgaagcctgctgggagcgtgaatgacatggccc

SEQ ID NO: 111761 - DNA, 83 bp, Homo sapiens
gtccggcgcaactccgcaccgcagagccggcgcctcctcggcaggtgctggagaatctggtaaaagcaccattgtgaagcaga

SEQ ID NO: 111762 - DNA, 90 bp, Homo sapiens
gaacaggactgactccagtgatgacgcaggccttaaggagaaagtttcagtgaggactcttgtgaagatatgagttgtggagaggagagt

SEQ ID NO: 111763 - DNA, 97 bp, Homo sapiens
tgcttttcgcctcccttgcggtagcctccagttctctgtggcccatgaccttcggcctggcctgctgcgccgtggagatgatgcacatggcagcacc

SEQ ID NO: 111764 - DNA, 75 bp, Homo sapiens
attgaattgaagaaaattgcacgtaatcacccaaatgccaaaattcagaaggagctggcggacatcactttagac

SEQ ID NO: 111765 - DNA, 100 bp, Homo sapiens
cggcggtacgggggtggtgccgcgctcctggccccgcgcgggcggacggcggaggcgcctcccagcttcaaagaacccccgctcttgcttggtgttctgc

SEQ ID NO: 111766 - DNA, 100 bp, Homo sapiens
tcgcagttaccaccaaacccaggaggagactctccctggaaaacttcccttccctttcgctgggctcaaaatgcagagaactcaaagatattcatttcgg

SEQ ID NO: 111767 - DNA, 128 bp, Homo sapiens
ccaacatcgatgggcggcggaaaatagcctttgccatcactgccattaagaccatgctcgacagctgaccaaggccatgatgcgaaaggccacggccagccgcctggtcacgcagcgcgatgcggacg

SEQ ID NO: 111768 - DNA, 101 bp, Homo sapiens
ggcgagcccagcgaagtcttcatcaaccgggaccgtggcttcggcttcatccgcttggacctctttgtttttagacatgaattggccataatgagactagc

SEQ ID NO: 111769 - DNA, 71 bp, Homo sapiens
gtgagagtgaccaggcttgttctggatccctatttattaaaggtattcaaaacctttgaccacatggcccg

SEQ ID NO: 111770 - DNA, 100 bp, Homo sapiens
tattttctagtgctgagatcctgagacaatgaggccttcgaggaagaggcccacctccttcatgggcctctgagcctgaacgcccatccattcttagtgc

SEQ ID NO: 111771 - DNA, 100 bp, Homo sapiens
ggtaggagcagcaatttatccgtgtgcagccccaaactggaaagaagatgctaattaaagtgaaggaatcactctgcatgatgaacctgtcgactgggcg

SEQ ID NO: 111772 - DNA, 100 bp, Homo sapiens
ggtccgccagagcgccgacttcatgccccgctggcagatgctgtacccccacctcaagaaccatggtcttcaccactgcaactccttcctggaagagttg

SEQ ID NO: 111773 - DNA, 100 bp, Homo sapiens
gaatattaaaaaatctggagggactccaacttcaatgaacgtactcaggaaaagtggggatttccaatgtgccactatttaaaggaagagagatggtgct

SEQ ID NO: 111774 - DNA, 80 bp, Homo sapiens
tgaaaagagaacaagagagtgagaaaccaagccaagatttaaggaccatagtacagctatggatactgaaccaaacccgg

SEQ ID NO: 111775 - DNA, 100 bp, Homo sapiens
aattatcacaattactgatgggagcaagttgactaccaccagtggagtccaggatgaggtgtggctggatctcctaaaacccattgtgaaacagattaga

SEQ ID NO: 111776 - DNA, 100 bp, Homo sapiens
gaagccacatgcagccactgcaagagtcaggttccgatgatcgcgctgcagggcaaggactctccctctaagcagagccctggggagtccacgaagaagc

SEQ ID NO: 111777 - DNA, 75 bp, Homo sapiens
atggaactcagcaacatcacatacaggatgtagccatagctgtaacgtataaccatgatgggtcttatagcatgc

SEQ ID NO: 111778 - DNA, 100 bp, Homo sapiens
gattcatctttcatgcagtgacatgttgataaaaaatgatggtgaaaggtgtagcagtcactcggcctacacccacagcatcgaccttgtgaacccagcg

SEQ ID NO: 111779 - DNA, 100 bp, Homo sapiens
atagtttagaaggatgcttggattgtctgcttcaagccctggctcaaaataaactgtagtgaaatgtagtattgccaagtcccaagccctctacagtgcc

SEQ ID NO: 111780 - DNA, 100 bp, Homo sapiens
gacagatctttgatgaagatcagaatgatccccttctgccagcttcggggagttttgcctggctcacctgttactgaagaggaaccctgtcatgttcttc

SEQ ID NO: 111781 - DNA, 100 bp, Homo sapiens
aattattgaagcctgtgatgtgtgtctgaaggaggatgataaagagttgaaaggccagaacgatctgggagagaagtatcagggcacagtgtgagaggcg

SEQ ID NO: 111782 - DNA, 50 bp, Homo sapiens
gggcaccgaggaccagctcaatgacaggaccacagaatactggccatggt

SEQ ID NO: 111783 - DNA, 100 bp, Homo sapiens
gtgcgtggcggcctcccgcgtctacaagtccaagaggaacatcattctgggcgcagggatcctgttcgtggcagcagacaatgcagatcttcgtgaagac

SEQ ID NO: 111784 - DNA, 74 bp, Homo sapiens
gaagcagttctacaaggcgagccaggataaagataaagtttctctaaccaagaccccaaaactggagcgtggcg

SEQ ID NO: 111785 - DNA, 100 bp, Homo sapiens
taggtgaaaaggatgatacaccagttcatttctgtgacaagtgtggattgcctattaaaatctatgggagaatgagccataagtgtgatccttggtgaca

SEQ ID NO: 111786 - DNA, 82 bp, Homo sapiens
cggcggcctgcctccgggcacacccggctccccggacgcctcggatgaatttttagatgtgatctactggttccgacagatc

SEQ ID NO: 111787 - DNA, 76 bp, Homo sapiens
ctcccaagtagctgggactacagatctctcaaaggccttggttctgacagaaattggccccaaacgtgaccctgcg

SEQ ID NO: 111788 - DNA, 74 bp, Homo sapiens
cagccctgctggacctggagaagctcccagaattcaacagtttttccagaaaggaggagtcaaggaagccctta

SEQ ID NO: 111789 - DNA, 50 bp, Homo sapiens
tcctggagttcacgactctgagtgctggagggagcctgcgagcaaacgag

SEQ ID NO: 111790 - DNA, 100 bp, Homo sapiens
ccggccgcggggccaggaagtcggagtttgagccccggaggcagagcggctgccatgtataaatcaaagccattctgtgaaaaactgctttcctgggtga

SEQ ID NO: 111791 - DNA, 75 bp, Homo sapiens
ctctcgccaggcctgcgagcttcctcccagcggagccctgggcgagccgagtctgcagatctccaggggagccca

SEQ ID NO: 111792 - DNA, 98 bp, Homo sapiens
tggcaaagtacttaaatgagctggcagaaaagagagggcaagaacatgatcctttctgtcccagaagcaatccacccccaaagcaggttacagccaag

SEQ ID NO: 111793 - DNA, 100 bp, Homo sapiens
acgcgcagaccttcgttgccctctgtgccacagggagtgcatccgccccaacccttttccccctcgtctcctgtgagaattccccgtcggatacgagcag

SEQ ID NO: 111794 - DNA, 75 bp, Homo sapiens
caccactttccatcatgccccaattttctagaccttttgtccccgggcaagctccagaaggtcctgagcctcggc

SEQ ID NO: 111795 - DNA, 76 bp, Homo sapiens
gtggactggctgactgagaagatgcatgccagagacttcacagtttctgctctgagtcatttcctacagtgtaaag

SEQ ID NO: 111796 - DNA, 83 bp, Homo sapiens
accttggacattcagacttcagaatggtgaccactgactgggaccttcagaagggcactggctgcactgagggccacacaggg

SEQ ID NO: 111797 - DNA, 75 bp, Homo sapiens
cccaagtccctctactcgcgagagcctgtggggcccggatagtcagccgaccagaggaactgagagaagatgatg

SEQ ID NO: 111798 - DNA, 82 bp, Homo sapiens
ggagcagggccttggaccccgcggcgcccctcggcctcggagcaacgagcgcagcgccgaattaaacaaccaccatgtcgag

SEQ ID NO: 111799 - DNA, 100 bp, Homo sapiens
ggccgtgctgcttatggcggcgctggagagggggcgctgagctgttggggtgtcgtgaaaactacccctaaaagccaaaatgggaaaggaaaagactcat

SEQ ID NO: 111800 - DNA, 75 bp, Homo sapiens
gtggtctctgcacctcctttctacatattactgatgccacacttgccattgtgaaaggagagacagttccacttg

SEQ ID NO: 111801 - DNA, 80 bp, Homo sapiens
gttcgagaacgaccccgagacggggtcgggccccggctcagtggtcccaggcagctcgggtgtcggaacccccagacagt

SEQ ID NO: 111802 - DNA, 83 bp, Homo sapiens
aaacccaaattgtagctgacgaagcattttgcaacgcagttcggagttattatgagaaaaaaccactgtctgcaataataaag

SEQ ID NO: 111803 - DNA, 83 bp, Homo sapiens
gtcatggcggaggggacggcagtgctgaggcggaacaggccgggcaccaaggcgcagggcaccataaaacaagcttacacgag

SEQ ID NO: 111804 - DNA, 75 bp, Homo sapiens
ccttccgctacttccgggagctctttgggatccggccagatgattacttgacgagaccctgtacgaggctcctga

SEQ ID NO: 111805 - DNA, 75 bp, Homo sapiens
tcctggggcatcgacgatctccatatttcattgcaagacgttatgaagaggacatgtactggaggagaatggagg

SEQ ID NO: 111806 - DNA, 90 bp, Homo sapiens
ctggcggagcaccgccttccggcagaagctggtcagtcaaatgttgaaatcacaaagattagacacctttttagataggtgttcttcagc

SEQ ID NO: 111807 - DNA, 74 bp, Homo sapiens
ctgttcttcctgggggactggcagattgttgaacagataaatacgaaactgccatcatcatttgtagaaaaact

SEQ ID NO: 111808 - DNA, 74 bp, Homo sapiens
agattcgcagtggtcgcttcttctccttggatgaaatctttgacatggtaaaaccaaaggatcctttgaaaatc

SEQ ID NO: 111809 - DNA, 83 bp, Homo sapiens
gttggaagcagccgatccagcctgcggagcctgtggggcagacaagagtgagaatggtgaggcatatcagagaaagaaggcgg

SEQ ID NO: 111810 - DNA, 97 bp, Homo sapiens
gtggccaacatcctgctggtcaacttgctcattgccatgttcagctggcagagaggctgatgacatcgtgaactggctgaagaagcgcacgggcccg

SEQ ID NO: 111811 - DNA, 74 bp, Homo sapiens
gactgtcgacctaaagcctgactggggcaagcacaagctccgggtggataaggcagctgctgcagcagcggcac

SEQ ID NO: 111812 - DNA, 75 bp, Homo sapiens
agaaaggattcgttacagccagagattggccccttcacagatgtagtcactacaaatcttaaattgcgaaatcca

SEQ ID NO: 111813 - DNA, 100 bp, Homo sapiens
gtctgaagttgttaccaatggtgaaactacatgttcagaaagtcctgtccctgctatcagtggggcactgaagaaagcaggactgagtcttaaggacatg

SEQ ID NO: 111814 - DNA, 83 bp, Homo sapiens
ggagcagcgcgtcgtggggcgagcggcagaggcagaagaggcctggaccttggcgcacacagacccaggaacagatgagcagg

SEQ ID NO: 111815 - DNA, 50 bp, Homo sapiens
tcaagagtggaagttttcacagtaaaatgtttattggaggcttgagctgg

SEQ ID NO: 111816 - DNA, 83 bp, Homo sapiens
caccaatccagacagaatgtacgaccttgttgctgttgtggttcactgtggaagacagagcccagatagtgggaggactcgga

SEQ ID NO: 111817 - DNA, 100 bp, Homo sapiens
cgctatcgtgacctgcttttcggttccgggtcttggccccgtccttacctcacagccggaaatcactgtggaaaatcttcccagttatttcagacttcag

SEQ ID NO: 111818 - DNA, 100 bp, Homo sapiens
gggcacaccaaactccatctggtgaacgcttggccaagccagagcgaggcaagatgagagtgcacaagatctccaacgtcaacaaggccctggatttcat

SEQ ID NO: 111819 - DNA, 82 bp, Homo sapiens
cccggctgccggtcgacgaccgccccgcgtcatgcggctcctcggctggtggcacaaatcctgaagagcccgtgggcgtgga

SEQ ID NO: 111820 - DNA, 75 bp, Homo sapiens
ttcggttccgggtcttggccccgtccttacctcacagatgacttcccagaatctacaggagtaaagcgaattgtc

SEQ ID NO: 111821 - DNA, 50 bp, Homo sapiens
gtagaggaaatggcatcgcctggcaggctgaccaactgactgaagagcag

SEQ ID NO: 111822 - DNA, 97 bp, Homo sapiens
gtgcggggctccaatggcgctttctacaagcgaaccggccgatgatttacaaaggcaggacaacagagttgtaacgggtttgaagaaacaaagaagg

SEQ ID NO: 111823 - DNA, 99 bp, Homo sapiens
ccagagaaaccctgcaaaggagtccctagagacacctagtaatgagattattttgcagaggatgatggggagatggtacccagaacgagtcacacagca

SEQ ID NO: 111824 - DNA, 97 bp, Homo sapiens
cttccgttacttgctgcggaggaccgtgggcagccagggtcggtgaaggtgctggagaatctggtaaaagcaccattgtgaagcagatgaggatcct

SEQ ID NO: 111825 - DNA, 88 bp, Homo sapiens
gcacccgcctccgggcatcttcaactgaaagaagcacttgtaaggaaatatagcatccattgtgaaagtggaaaagtaaagataattc

SEQ ID NO: 111826 - DNA, 100 bp, Homo sapiens
atgttgacctgctcattatctccaaagatagacttaccagaggtgctgaacagcattttttttgagcttgaagcggatgagagagagcccacagagtcta

SEQ ID NO: 111827 - DNA, 83 bp, Homo sapiens
cctcctccggcctgcagcacgccctcgtcctgcacttcctcctcggaatctgcaagctgcttttctaacccaaactgtatgtc

SEQ ID NO: 111828 - DNA, 74 bp, Homo sapiens
cgcgcccggccggacccgggcccgaggcaagagcggtgagcggggcgcctatgcctccttcgggagagacgcag

SEQ ID NO: 111829 - DNA, 50 bp, Homo sapiens
cttcctgctggccgtgctgctgcagggcaagaatatcacggcatgggcat

SEQ ID NO: 111830 - DNA, 100 bp, Homo sapiens
cagcgaacatgtcgcggcctgtcagtttccaggaatatggatctactggaacagcccatgctgatagtgaatatgaaagaagaatgatgtctgtatataa

SEQ ID NO: 111831 - DNA, 82 bp, Homo sapiens
cagcaagcgggagtcggggatagtgtcatcggttcgagtttatgtggccgaggcagacaagtggaattaggccttgctgcag

SEQ ID NO: 111832 - DNA, 100 bp, Homo sapiens
ggagttagtaaggcgctccacaatgggacactgagctttgtggaagcatttggcggcataccaccctgcactgtgagatcaccacgcttattaatcataa

SEQ ID NO: 111833 - DNA, 96 bp, Homo sapiens
agtcctgcatcgaaattctagcagctgaaccatccaccatatgtgcaggagggtgcaacaccggaggatttcagcaacctcccacctgaacaaaga

SEQ ID NO: 111834 - DNA, 97 bp, Homo sapiens
atcatagttcattttatgtgggaggatgttcagcagcgcggcagagtcatggggatctgaggctgtcagagatgactctggttctgtccatgaatag

SEQ ID NO: 111835 - DNA, 100 bp, Homo sapiens
ctggggttcttagaagtggtgatgcaagaagtttctaggaaaggccggacaccagtctgttctctggggaggcagtaaggggccgtggagctggcctcgg

SEQ ID NO: 111836 - DNA, 100 bp, Homo sapiens
gccgaatgcagaggttccaagaccaattcccctggtatcctgaggtgcggcaccactgtcccaacactcccatcatcctagtgggaactaaacttgatct

SEQ ID NO: 111837 - DNA, 51 bp, Homo sapiens
caacgttcacctcatcgtccgagagggttgggtttggcactcaacttccag

SEQ ID NO: 111838 - DNA, 75 bp, Homo sapiens
ttgaaccccaaataaggaagattgtggatcaaataagaggccatcactgtgcatgtccccatgccctcagcagga

SEQ ID NO: 111839 - DNA, 98 bp, Homo sapiens
ttcgatctccgccctggggtcattgtcagcagcgcctccggcccctcctgtgacgcacagcactcctgtaactgtctcagaaccactcctggagaaag

SEQ ID NO: 111840 - DNA, 98 bp, Homo sapiens
gaaactggtcgccaaggacgggtcgtgcctgttccgggccgtggcggagcagatgctgagccttgacgcctcggccatggtctacccgccgcgggagg

SEQ ID NO: 111841 - DNA, 82 bp, Homo sapiens
accacagctcccgaaagcgacgttcggccaccggaggagcgggagccaagcagacatgcaagaaagcacttcagccaagcag

SEQ ID NO: 111842 - DNA, 100 bp, Homo sapiens
ttccatttctgtgaggaaatatcttccatgttttacatttctttccagaattatacaatatttgctccagcggcgccatgagcaaatgaaaaagaatttg

SEQ ID NO: 111843 - DNA, 78 bp, Homo sapiens
gcggcggctgagccgcgctgcgcagccgacgcgggaatgaagcgggcgctgggcagggagagacaaaggcagcgctgc

SEQ ID NO: 111844 - DNA, 83 bp, Homo sapiens
ataacatattacgaagtccttgttgtaagaacgcttggtttcatagagactgtttacaggaaccctaaggactctgcaatatg

SEQ ID NO: 111845 - DNA, 75 bp, Homo sapiens
ccgcgcccttcctcggcgggccggactgttgaggagctcaagcttgggaaaatggtgtgcattccttgtatcgtc

SEQ ID NO: 111846 - DNA, 74 bp, Homo sapiens
aatgcctatgatctggaagccaacctggctgtcctgaagctagtgcttgtgcacagagctcgaaaactagctca

SEQ ID NO: 111847 - DNA, 100 bp, Homo sapiens
gtcagagaagtcgaaggggtgctggcgagacgggggtgatgcccacccgggcgagaaaggtgacaatctccaatagacttgtgtcttcaccttgctgcat

SEQ ID NO: 111848 - DNA, 100 bp, Homo sapiens
gaccagtccaagctgcctggagtcaaggaagtggtgcttcatgccccacctccaaccaagatcaaacgggagctgcacagcccctcctctgagctgtcgt

SEQ ID NO: 111849 - DNA, 75 bp, Homo sapiens
ggagcagtgcgtcagagtttcaggctgcacgtgggaatttggagccatggtgaactacatcaagaagacatatcc

SEQ ID NO: 111850 - DNA, 88 bp, Homo sapiens
gcagagactctacctgccctaggcgttcgtgaagagaagcagctgttgctattggaggaggctctaagggatggaaataagctggcac

SEQ ID NO: 111851 - DNA, 100 bp, Homo sapiens
ggcgctgccgctcccgggcggccgcgggcgggagaagtacagcatcggggagcccacagtgccatccaccctggcagaggagtttacctacaaccccttc

SEQ ID NO: 111852 - DNA, 100 bp, Homo sapiens
attacctgaaaaacaccagttttgcttatccagctatacgatatcttctgtggagacccaaaggagtaaaggagcaagatgtgtacatctgtgattatcg

SEQ ID NO: 111853 - DNA, 98 bp, Homo sapiens
gtttagtatcttcttcagcaactcagtacggggctcatgagcagacgcatgcgatgtatggttcttcctgcaatacagtggatacaatttgtcatggc

SEQ ID NO: 111854 - DNA, 76 bp, Homo sapiens
cccgcggccggacgacccaagcccgctgagcaggatgaggacatcccagttaccagtgtccttgaattgatagtgg

SEQ ID NO: 111855 - DNA, 75 bp, Homo sapiens
ctccgccgcccgcaccgccgcccgcgccctcaccagcctgggcctcaccctgctcatcttttactactccttcgc

SEQ ID NO: 111856 - DNA, 100 bp, Homo sapiens
gttggagacacacattcataatcagggtcttgcagccattgaaaagtgtggagaagctgctttaaatgcagcttggatcttaaaagcaagagcgctaaca

SEQ ID NO: 111857 - DNA, 100 bp, Homo sapiens
gaggacattgccatgaacttccttgtctcccacatcactcggaagccccccatcaagttgttgaatgttgggtcacgaagatctcaacctggccaaagaa

SEQ ID NO: 111858 - DNA, 51 bp, Homo sapiens
ctctggggctatgttgctgccaggagctctccttgtgtacatcatcatggt

SEQ ID NO: 111859 - DNA, 80 bp, Homo sapiens
tcaacaagaggacccaggagaaattcgccctcaaaaagccatgcagtgacacccgctaagacttgttggtagccatgtcg

SEQ ID NO: 111860 - DNA, 99 bp, Homo sapiens
ggtgtccccacaggatgaaacattcttccagatgtcctccaggtgtctgctgcccccccagggccccgaggccgccaggccccaacctcacccccacgc

SEQ ID NO: 111861 - DNA, 112 bp, Homo sapiens
cgtcttgtttgcctagactacagttttcaagtatttaaggaccatttatttcaaaagctcgccctcccctacctgcggaagagtcaagggaatgtcatcaacatctccagcc

SEQ ID NO: 111862 - DNA, 100 bp, Homo sapiens
cttggatgttatacgagaaaatcatagattcctatggaatgaggaggacgaaatggacatgacttggggaaagttgctcagacagcttgcatgtcagcct

SEQ ID NO: 111863 - DNA, 100 bp, Homo sapiens
cgtgactctgcaccctgcccagaggtccctcagcaaagatggtacaaaagagtctttggaggatgcggctttgatggaggcccccagaatgagaagtgac

SEQ ID NO: 111864 - DNA, 75 bp, Homo sapiens
acattgagacagccaacagttttgctgtaacaaacgcctgtgaccaagaatatggcccaggtgaccaaagccctg

SEQ ID NO: 111865 - DNA, 95 bp, Homo sapiens
gaagacttgctagttaggattttattactggcagcatgtatatcttttgtcaaaatgcagatcttcgtgaaaacccttaccggcaagaccatcac

SEQ ID NO: 111866 - DNA, 93 bp, Homo sapiens
aggaacgaggcaaggagctaaagcagcgtgcgttcagccctggggttaacacagaaatctgcctcctgggccatgccgcttctaaggcctgtt

SEQ ID NO: 111867 - DNA, 75 bp, Homo sapiens
aggacagaggtgcctggggcaacctccaccttgacggttccaggtgagacgatgcggatcgcctcctccgagttt

SEQ ID NO: 111868 - DNA, 51 bp, Homo sapiens
gacgcggggcaagattctgctgtgcacaggaaggatgataaagactatgct

SEQ ID NO: 111869 - DNA, 83 bp, Homo sapiens
ctcctcagcccctttcaactctacttcaacccgcaccttgtgttccggaagttccagtttggtaactctcattcgacatccat

SEQ ID NO: 111870 - DNA, 74 bp, Homo sapiens
cgaggattgagcgtctccacccaacatatgaagatccatgagaaggaccctaacagtgccacagccacagcccc

SEQ ID NO: 111871 - DNA, 100 bp, Homo sapiens
cgagctgctgctggattgaactcagagaagccggggacagagcgggatgccaccagcttgtccaaagggaagttccaggagctcctggtgggcatcgttg

SEQ ID NO: 111872 - DNA, 100 bp, Homo sapiens
agagcactaaaaatcaagcaacaaaagagcaacaggaacttttaatgaaaatgcttgcgggattaatgaaaatcaagttccatcctcagacaagaggtaa

SEQ ID NO: 111873 - DNA, 100 bp, Homo sapiens
ctgtacctgaaacttatggtggcctagactccccagtatccactcttccttatcttgctgcacggtatgaatgtgctccggtgaaaccttttttctgcag

SEQ ID NO: 111874 - DNA, 100 bp, Homo sapiens
gattgcccatgcacttgttgcagaaacagccaagagttgctggagaatgtaaccctaatccataaaccagtgtcgttgcaaccccgtgggctgatcaata

SEQ ID NO: 111875 - DNA, 90 bp, Homo sapiens
ttggaagacctattatcagatcaaccaccaaagtgggaaacattgaaatcaaggtgtcagaaatggctgtttctgagctacctggtaacc

SEQ ID NO: 111876 - DNA, 100 bp, Homo sapiens
gaaaagcagcagaagtgactcaaattttcaagtgccaaacggaggaatacctcgtatgcaacctcaggcttcagccaacttaattcagtgcacaaatgag

SEQ ID NO: 111877 - DNA, 95 bp, Homo sapiens
aaatacgtggttggagagctcatctggaattttgccgatttcatgactaaccagtctaaagaactctcctattcatggaggcgaacactgaggat

SEQ ID NO: 111878 - DNA, 96 bp, Homo sapiens
gcgccgctgcctcgctggggcccgggcccccttcccggtccgtgctggagaatctggtaaaagcaccattgtgaagcagatgaggatcctgcatgt

SEQ ID NO: 111879 - DNA, 80 bp, Homo sapiens
tcgtggaagcaggactgcgccgcgtcttcctcaagcgggtccatatggaatatttgctggtagggatgcctccagaggac

SEQ ID NO: 111880 - DNA, 90 bp, Homo sapiens
ggatcctctgtacgcccgttcactgatggttggcaatggctgataaatgacactttgagacatctccatctcatctcaagtcactcccgc

SEQ ID NO: 111881 - DNA, 100 bp, Homo sapiens
aggagaggatccggcgccgaatcactgactggcacaggtgttggggttggaaaagagactgttcaaaccactgaggatcagattttgaagagagatatgc

SEQ ID NO: 111882 - DNA, 75 bp, Homo sapiens
ctttgcaaacaaaaggagatagcactggctcgaaggaaaaggaattctcaggcggatctgtgcacgggactgcag

SEQ ID NO: 111883 - DNA, 95 bp, Homo sapiens
ttccggcgaggggggagcctcagcaggattgctgtgtgaaaaccgagctgctgggagaaggttggcgctgtacgtttatgagtacctgctgcaca

SEQ ID NO: 111884 - DNA, 95 bp, Homo sapiens
atgagtgtatgattcgtctctttaatactggatctggaaatagtatattcctatttacatggtatggaagccttatcaaacttgagggagcatca

SEQ ID NO: 111885 - DNA, 98 bp, Homo sapiens
tcccggccctgagcgcactctggagggattctggcatcagggaggctttcagccggagaagcgagtttcagctggttatcaatactctggctgaccat

SEQ ID NO: 111886 - DNA, 95 bp, Homo sapiens
ggcgcgcaccggagagcgagcgagcgggcgggcgagcgcgagaagtacaaggcgccatgttttggaagtttgacctgcacacaagctcgcacctg

SEQ ID NO: 111887 - DNA, 80 bp, Homo sapiens
agagtcacccaaacaatcggctgagaatgagaagagctccagtgtgctgctctgctcgttacaacttagcaattttggcc

SEQ ID NO: 111888 - DNA, 98 bp, Homo sapiens
gctggctttgttcccaatgacatgcaagttggacagacgggaaaaatagtagcaccactctattatcaagtcctaaattttggaatgattgtctcatc

SEQ ID NO: 111889 - DNA, 87 bp, Homo sapiens
tgatagacttcgggccttgaaaagcagaagacaatccaaaacaaacgctattcctctcacaacccttaggagaaatcttgagagtgg

SEQ ID NO: 111890 - DNA, 97 bp, Homo sapiens
ggaaacagaagcaaccaatgcaattcttatggagcaaattaaggaccctgatgctcccataagacagaaaatgccccttgatgatctggatagagaa

SEQ ID NO: 111891 - DNA, 82 bp, Homo sapiens
gttaaggattccaagtaactcttatttggtcgttgaggacttccacatggagattggcacaggaccagactcaagacacaca

SEQ ID NO: 111892 - DNA, 88 bp, Homo sapiens
gtcggcgcctcattcgggtggagctgagccggagacaggttaaacccatccagagtaatggctgcggccttacccaggaccctggggg

SEQ ID NO: 111893 - DNA, 90 bp, Homo sapiens
tgtgacgctgctgctggggtcaggcctgtatccggtgtccgaggcgaactcagtaagatgatgttaagaggaaacctgaagcaagtgcgc

SEQ ID NO: 111894 - DNA, 74 bp, Homo sapiens
tttacgcttgtgtgataaaactgggatatgtcttgtcgttcaagacttgcaacactaaacgagaaattgacagc

SEQ ID NO: 111895 - DNA, 90 bp, Homo sapiens
gacggcaggactgtggccgtgggggacatcgtctggggattttttatcaagcagaaatgcatcgaacaacgagaatcaagatcactgagc

SEQ ID NO: 111896 - DNA, 75 bp, Homo sapiens
ccatctcaatcagaattactagattttctctcaaactacgaggtatctcagatgaagacatcatcaacattactc

SEQ ID NO: 111897 - DNA, 75 bp, Homo sapiens
aactgggttctggactttgggcgtcccattgccatggttttacctcacaaaaactactacaagcaccaagctccc

SEQ ID NO: 111898 - DNA, 100 bp, Homo sapiens
tgatcttcgccaaactgtggagcctcttctgtaaccaagagctgtaggtaaaacttgcctactgatcagttacacaaccaatgcatttcctggagaatat

SEQ ID NO: 111899 - DNA, 101 bp, Homo sapiens
aagagtagaagaaattatctgtggtcttatcaaaggaggagctgccaaacttcaggtggtcctggctctgccatatgacacccccgtgcccggctacatga

SEQ ID NO: 111900 - DNA, 100 bp, Homo sapiens
ggaaatcgggctgaagcgactgagtccgcgatggaggttatggtggagaattcagactttaccccctcacaagtaggatgtctctttaccttccttgctc

SEQ ID NO: 111901 - DNA, 83 bp, Homo sapiens
ctggcggcttccaggcgcactaccgcgacgttggacctctcgaacaaccagctgagcgagatccctgcagagcttgcggactg

SEQ ID NO: 111902 - DNA, 90 bp, Homo sapiens
gctccttcgtgtgtacctcctgctccggcagcctgtttgcctgcaatgagatttcattctctacatttaaaggacatcctttctgagctg

SEQ ID NO: 111903 - DNA, 138 bp, Homo sapiens
ccaaggtcaacaaggacaacaatgagatcgtggacaagatcatgggcaaaggacagatccagtctctcctggagctgcacaagaggaggaaagccctgactgagcctgaggcccgatactacctacggcaaattgtgc

SEQ ID NO: 111904 - DNA, 83 bp, Homo sapiens
agcctgcggagcctgtggggcaggattctaacattttcagagaaccttttggaaagaacaagcctacttcaataaatgaagga

SEQ ID NO: 111905 - DNA, 100 bp, Homo sapiens
cagctccgagccccagaccagctctcaggatgacttttacgaattggagcaatgttggcttatacacctctggatgagaagagccttgctttattactca

SEQ ID NO: 111906 - DNA, 75 bp, Homo sapiens
cgcaggagaggggactcaccgtgggcctctggctgtacctggcagggagcagcctgccctgtctcacgctgattg

SEQ ID NO: 111907 - DNA, 50 bp, Homo sapiens
cctgaactcaaagatgcccttaaaagatgttatacatccaggctctacca

SEQ ID NO: 111908 - DNA, 74 bp, Homo sapiens
attgaagactggctgcaggattgcggtgattcgcctttgccagtctcatctcgtgtctgctttgttaagttcca

SEQ ID NO: 111909 - DNA, 100 bp, Homo sapiens
gaacaagaagaagaggagaggaaaaaggaagagagcactgcagccagtgaaaccactgagagtgaagatagtccaagtcctaagagacagcgcctctctc

SEQ ID NO: 111910 - DNA, 75 bp, Homo sapiens
ggagacagcccaaatatcctcggaagagcgctcccaggagaaacaattgcagagtgggcaggatcttaagacccg

SEQ ID NO: 111911 - DNA, 50 bp, Homo sapiens
tgaagctgaagatgatgatgaaaccggtcatacagcagatggaacaaaaa

SEQ ID NO: 111912 - DNA, 96 bp, Homo sapiens
cggactcatacagagattgaaatgttccttagaaaggagcagcagaggttgacggatatattcagacgttacgacacggatcaggacggctggatt

SEQ ID NO: 111913 - DNA, 50 bp, Homo sapiens
atgaccttgtgcccacagcaccttctgagctgatggtacacacatggatg

SEQ ID NO: 111914 - DNA, 100 bp, Homo sapiens
caaggcactgctttttcatgacggtgtcatggagaaactccagctgggcccagagattctgcagcgggaaaatccaaggcttatttatgccaggctgagt

SEQ ID NO: 111915 - DNA, 112 bp, Homo sapiens
ctccatcagcaagctccagtgctacgtgtccctggcattttaggtgtcggttgggtagacaatgcagatcttcgtgaagactctgactggtaagaccatcaccctcgaggtt

SEQ ID NO: 111916 - DNA, 100 bp, Homo sapiens
cgcgcccggcgccgggcgcccgaagccgggagccgccgccatgggggcctgcctgggagcctgctccctgctcagctgcagacggggtttcaccatgctg

SEQ ID NO: 111917 - DNA, 76 bp, Homo sapiens
tggctgttgggctgaaagctcccaagagtacgttactcttcaagggaaacacatgaaattgtggcgatcaagaaat

SEQ ID NO: 111918 - DNA, 90 bp, Homo sapiens
cttcggagaatggagtcttccatcaatcatatctcacagcggcacccgacctgacagcgttcagcgacccgcgccagttccccgcgctgc

SEQ ID NO: 111919 - DNA, 75 bp, Homo sapiens
gtattactggactctgaaggccacattaaactcactgactacggcatgtgtaagagtctcgctctgtcgcccagg

SEQ ID NO: 111920 - DNA, 100 bp, Homo sapiens
tttcctgtgtccagcgctgccggagccgcctgagctgggagtgtccactcgccttccaccagcatggcaacgtcttcacagtaccgccagctgctcagtg

SEQ ID NO: 111921 - DNA, 74 bp, Homo sapiens
tcgcccggcccggccgcgcccgcggaaccagaccagatgagattgtggggaacctgggtgaaggcacctttggc

SEQ ID NO: 111922 - DNA, 48 bp, Homo sapiens
gaggactgccagctggcgctgcagttttctggatatgccgcagaagga

SEQ ID NO: 111923 - DNA, 98 bp, Homo sapiens
catgattgaccagaaccgtgatggcttcattgacaaggaggacctgcacgacatgctggcctcgctgggacagtcattttgtttactcattcagccct

SEQ ID NO: 111924 - DNA, 100 bp, Homo sapiens
ggaaaatggcggtgtctacagtgttctcgacttcgtcgctggccatgcacttggtgtaccgagccctggagaaggagcccgtgccctccgccctgccccc

SEQ ID NO: 111925 - DNA, 75 bp, Homo sapiens
cccagctcggcccgcgggggagccccgggagccgcacgccttatgccagcctggaccatcttggaggcagtgtag

SEQ ID NO: 111926 - DNA, 103 bp, Homo sapiens
aggcgcaagtcgagaggaaactgttgtgcctcttcatattggcgatcctgttgtacaatgcagatcttcgtgaagactctgactggtaagaccatcaccctcg

SEQ ID NO: 111927 - DNA, 100 bp, Homo sapiens
atccctgtacgggtgcctggcctcgcttctgtcccagctattagttcgttacaccaagaaagtaccccaagtgtcaactccaactcttgtagaggtctca

SEQ ID NO: 111928 - DNA, 100 bp, Homo sapiens
tgagctgtgggcaggccccacctgtctctgttggatgaacccaatcccaatagtccagcaaacagccaggctgctcagctgtaccaggagaacaaacggg

SEQ ID NO: 111929 - DNA, 74 bp, Homo sapiens
atggggtccagccagctcagcagctgcaatggaaccttactcaggtgattacatggatccaacacctgatcccc

SEQ ID NO: 111930 - DNA, 100 bp, Homo sapiens
ccccgctgcgcccagtccgtgcggaccgcgaggccgcgggcgggtggaggcgcgtctccggcacgagtccgatgggtggtccttttattcctgctgctcc

SEQ ID NO: 111931 - DNA, 80 bp, Homo sapiens
cagagttagagagagggatggtgttttcaggactctacatcctgtccttcactgtcatcatggtggggtttatcctgtac

SEQ ID NO: 111932 - DNA, 100 bp, Homo sapiens
ctccagacattaaggattataaactttatgatgtagaaaccaaatatggtttgcttcagtattggatgaacgaatatacctcatccattggaattggagt

SEQ ID NO: 111933 - DNA, 100 bp, Homo sapiens
agcagcgtgtgcatctgttggaagaatgctggaacgagttataggaagatgtagtccaacccacatcagcagggtgttgaaagcagcaggggcctagaag

SEQ ID NO: 111934 - DNA, 100 bp, Homo sapiens
gccattgctatcaatcttctgtctgtaggaagtcctggcataaggcctgctttcgatgtgccaagtgtggcaaaggccttgagtcaaccaccctggcaga

SEQ ID NO: 111935 - DNA, 98 bp, Homo sapiens
aggtggcccgtaagctggtcatcattgagagcgacctggaacgtgcagaggagcgggctgagctctcagaagggaggaagagcaagcaggccctgagg

SEQ ID NO: 111936 - DNA, 131 bp, Homo sapiens
ccagcgcgtggtgggggaactgctggggaaggcgattggcatcgatctctccatcccttccgaggcccgacttcgacaaatcttcctattttcaagctgaaagaatctactgttagaagaagatacagtga

SEQ ID NO: 111937 - DNA, 96 bp, Homo sapiens
aaaggaacgagcagtgatggctgaaaaggatgctttagaaaaacacgatcagctcttagacagataaaatttgatgctgggactctccttcttagt

SEQ ID NO: 111938 - DNA, 76 bp, Homo sapiens
atcatctagaaggacaaatgaacttcaatgcagattctagccaacataaaggccataggaaaaggatacagagtag

SEQ ID NO: 111939 - DNA, 90 bp, Homo sapiens
tgggcgccccggacgagagctccgtgcgggtggctgtcagcgttccctgctggctgtggtggagattggtgtgctgtgaattgcataatc

SEQ ID NO: 111940 - DNA, 100 bp, Homo sapiens
cttgccccgggagcccgcgagggacaatataaggcttcaagattgctcagcactatgtgaagaggaagaagatgaagatgaaggagaagctgcagatatg

SEQ ID NO: 111941 - DNA, 90 bp, Homo sapiens
ggctatgggggctctggtgatggactcatccccacagcccacttcgcctaagtttccagaagactttgacgatggagagcatgcaaagca

SEQ ID NO: 111942 - DNA, 75 bp, Homo sapiens
ccctttgatgaaatgaaggaaagaatactgaaaattgtcactggatttaatggacatgccaatatttggtttctg

SEQ ID NO: 111943 - DNA, 100 bp, Homo sapiens
caagtattgctgtgggtgctgggacttcccgtccgcggcgtggagggacttggactaaagtctgatgaacttcccaatcagatgagcatggatgattggc

SEQ ID NO: 111944 - DNA, 83 bp, Homo sapiens
tctcggcctcggcctcggcctccgacacggcatcaagcatgatggaaccatgtgtgatacctgccgccagcaaccaatcattg

SEQ ID NO: 111945 - DNA, 98 bp, Homo sapiens
cggccatggcgtacgcctatctcttcaagtacatcataatcggcgacacaggacctatatccagactttgcctgacactgcagggtccaagagaatta

SEQ ID NO: 111946 - DNA, 100 bp, Homo sapiens
gctggagaagctggagttcgaggacgaagggcgccctgcgtccggcagaggaggcgagcatcccgctcaggtgatgaggaacccctcgcgcacccagcgc

SEQ ID NO: 111947 - DNA, 74 bp, Homo sapiens
gacggatcaccgtacggccgaacgcgacccgaggaggcggaagagcggcgccggcttcatagagcccagtgtgc

SEQ ID NO: 111948 - DNA, 75 bp, Homo sapiens
gagtcctgagcggccaggacgacgaggagcagggcctgactgcgcaggctgtggagtttgaaggctgggctgaca

SEQ ID NO: 111949 - DNA, 75 bp, Homo sapiens
ctaccttgagttcaagtctttccggaggatatcggaggtgaatcaactctgggctggcctgggctactattctcg

SEQ ID NO: 111950 - DNA, 83 bp, Homo sapiens
ttgggtccgaaggggacggacgtcctcccacgtaccatttagaagacaatgcagatcttcgtgaagactctgactggtaagac

SEQ ID NO: 111951 - DNA, 100 bp, Homo sapiens
ggcggcctttctgctcctcgcggcccaggccatctggctgctgtgcacaggcgctcgtgaggctgccttccggaacattaagaccattgctgagtgcctg

SEQ ID NO: 111952 - DNA, 97 bp, Homo sapiens
tttatgctgtacatggaaatcatgtgaaatgtgtaaagatgctcttaggccaatggaagcactgttgtgaagaacttatgaaaattgagattatgtc

SEQ ID NO: 111953 - DNA, 100 bp, Homo sapiens
aggcagatcacccaaacgtctgacagatttggttgttgacctcctgtactggagagacattaagaagactggagtggtgtttggtgccagcctattcctg

SEQ ID NO: 111954 - DNA, 96 bp, Homo sapiens
caactacccgccaggcaccaactgcagctggtacatccagggcgaccgtggtgacatgattaccatcaggggtccccacggagtctggaccatgga

SEQ ID NO: 111955 - DNA, 83 bp, Homo sapiens
gtccagtaatgtcccggcggatatggtagcgagggagttgggtctccaggttgtgcgaggagcaaatgatgaccgccaaggcc

SEQ ID NO: 111956 - DNA, 87 bp, Homo sapiens
agatagagccaaacaatcttttcaagaatcttatggcaagggccttatatgacaatgtcccagagtgtgccgaggaactggcctttc

SEQ ID NO: 111957 - DNA, 100 bp, Homo sapiens
cgacgcccgccgcctcactgtttctagccttcagaaaataccagagcagagtgttcttcttctgcatgcctgcgcccacaatcccacgggagtggacccg

SEQ ID NO: 111958 - DNA, 75 bp, Homo sapiens
tgtagatagtgtcaaaaattccactgtagtcagatactcaatatggctgatatgtatggactagaaggattaaaa

SEQ ID NO: 111959 - DNA, 75 bp, Homo sapiens
gacaacagaaacagaaacgattgtggaaacagcaccatatgaaggcggagtatggaaagttagagtggacctacc

SEQ ID NO: 111960 - DNA, 51 bp, Homo sapiens
ccggtccccatcaccggcacacattgtcatggagtctcgctctgtcaccca

SEQ ID NO: 111961 - DNA, 100 bp, Homo sapiens
gaagccctttctcctcggcactgtattctttacctgcttcccaatcccactgatgaggatcagcccatgatgctgctgcagattgctgatgattttatcg

SEQ ID NO: 111962 - DNA, 83 bp, Homo sapiens
ctgccggctgtaaagtcatcacctcctgggatcagatgtgcattgaggcagggcaagaatcctttcgttccatcacaaggtcg

SEQ ID NO: 111963 - DNA, 100 bp, Homo sapiens
ctgaaaatcttggtcaggtactattcggggaaagaattgaaccttcaccatataagcatagtggtaaaatggatgaaaacagatttgtggcagttaccag

SEQ ID NO: 111964 - DNA, 100 bp, Homo sapiens
gctctggcagtcatcgtgcctgaaggagtacatgccctttatgaagatattcttgaggacttaattcagtgcacaaatgagatgaatgtgaacatcccac

SEQ ID NO: 111965 - DNA, 75 bp, Homo sapiens
gatcatgatacagttgataaaattgttgatcttgcttctgaaatatctacctgggatggagtgatagtaacacct

SEQ ID NO: 111966 - DNA, 83 bp, Homo sapiens
cggaggacggctcagcggtctgatgcctggagcaccactgcagccagaaagcgaggtccaaccgtgactgccagatcgaccag

SEQ ID NO: 111967 - DNA, 98 bp, Homo sapiens
cattgccaagttatgcagccttaaacgacttgttctctatcgaacaaaagtagagcaactttcatcctttgaaacgtgtgctgaaaaagaagaatcag

SEQ ID NO: 111968 - DNA, 75 bp, Homo sapiens
agcacgtggaattcgcgaagctgccaaagccttagacaagggtgaagctaagtagtcttcttggtaaaaagggaa

SEQ ID NO: 111969 - DNA, 75 bp, Homo sapiens
ctcggctggtggaaggggcgaggagctttgcagttgtgtgcgagtgtgtacagttttccaagagataacttcacc

SEQ ID NO: 111970 - DNA, 50 bp, Homo sapiens
ccacagtgtcctctggaaaatggccctcgggaccaaggatcacgtcatga

SEQ ID NO: 111971 - DNA, 82 bp, Homo sapiens
tctaaacagagcagcagcagcagagatgataacatgtttcagagtactgggatttaatgaatttgtctgaaaaacatgataa

SEQ ID NO: 111972 - DNA, 72 bp, Homo sapiens
cctgaagttctgcctattgtctcagaattattagagtatgacttctctttggaaaagaaaaccattgagtgg

SEQ ID NO: 111973 - DNA, 100 bp, Homo sapiens
ggacccaggagtttctgtctgcctgcaagtcgctgcagacccgtcagtacctttgtgttggatgaatttaagcgcaagtactccaatgaggacacactct

SEQ ID NO: 111974 - DNA, 100 bp, Homo sapiens
caaacaagaaatgggaaaactcgaaacagattttgcccagaataaagagaccagtgttttagctgctgcaaaagtgattgacactaaatctgaagaagaa

SEQ ID NO: 111975 - DNA, 100 bp, Homo sapiens
gacggcctcagcaggcggggaagatgaaagggggtgatccattcatgttgcagcagtctacaaatccagcaccaggaattctgggacctccacctccctc

SEQ ID NO: 111976 - DNA, 82 bp, Homo sapiens
gcaaacccaaagatccccgttcctggagattctgattgagagccccacagtcttcgttacaacctcatggtgctgtcccagg

SEQ ID NO: 111977 - DNA, 100 bp, Homo sapiens
ttaaagaaacagcttcatgaactccaagccaaaatcacagctttgagtgagaaacaggcttactcaattccagatatggccgaggatgggttgatcacag

SEQ ID NO: 111978 - DNA, 50 bp, Homo sapiens
cccagggtaggacggactgttcgcacccagtttggccttctctgaggtca

SEQ ID NO: 111979 - DNA, 100 bp, Homo sapiens
gccgcgtcctcagccaccgctccctcttcccacggcaatgaatcgctccctggctaatgtgattcttggaggctatggcaccacttcaacagctggtgga

SEQ ID NO: 111980 - DNA, 82 bp, Homo sapiens
aaggcagctgtcactgagcccctggaacagagcgagagtatcaaaaatggctacaaacttcctagcacatgagaagatctgg

SEQ ID NO: 111981 - DNA, 99 bp, Homo sapiens
ttccggcggccgaagacactgcgactccggagacagcccaaatatcctcggaagagcgctcccaggagaaacaagcctgagctgaagcctgtggacaag

SEQ ID NO: 111982 - DNA, 124 bp, Homo sapiens
ctcccctcccactgtggctcccgcatctgcctccctgccccagcccatcctctctaaccaagttcaatctcatccctcccagcagctccccttccaccccccggggaactgaagattgtcctgg

SEQ ID NO: 111983 - DNA, 90 bp, Homo sapiens
gcccctgagtgtgcaactgaagcctgaggtctccccaacgcaggacatcaggtttggaattcacccagttgcaggccgaatgcctggtca

SEQ ID NO: 111984 - DNA, 74 bp, Homo sapiens
gatctcatagcagattcaaatccaatgattggtttttcagcagcagatgctgtaacaggactgaaattggtaga

SEQ ID NO: 111985 - DNA, 100 bp, Homo sapiens
ctcatgtgttacaaaataagcccaccctttatcgtacataccgagcatcaaatattaaggcacccggagaacagacagtaccagccttgaaccttcagaa

SEQ ID NO: 111986 - DNA, 101 bp, Homo sapiens
cccaagttctgcagccagtgcggagagaggctgcctcctgcagcccccatagcagcggtgcagaggggcaggatgccgccgacccagccgacccacgggca

SEQ ID NO: 111987 - DNA, 75 bp, Homo sapiens
cgattaggcatgtcagctgatccagataatgaggatgcaacagggcatcgcaggcacagatgtagcaaaggaggc

SEQ ID NO: 111988 - DNA, 75 bp, Homo sapiens
actgggattcttgctggtgccaatatctcaggagatttggaggtaacagttgacaaatgggaacctttgttgaac

SEQ ID NO: 111989 - DNA, 100 bp, Homo sapiens
gaaagaagttgcaaaacactggaataatccagaatggctactctgatctatgttgataaggaaaatggagaaccaggcacccgtgtggttgctaaggatg

SEQ ID NO: 111990 - DNA, 100 bp, Homo sapiens
gcagctctcaggcctatacagggaatgcagtctggctggaaggaaggtgatgtctggcccaactcatcagctgaaatcaccgtgtactttaacccactag

SEQ ID NO: 111991 - DNA, 100 bp, Homo sapiens
cgcccctgcaggtggctgtgctgggccccacagctattcctgcaccaactgacctgaagttcactcaggtcacacccacaagcctgagcgcccagtggac

SEQ ID NO: 111992 - DNA, 82 bp, Homo sapiens
tagccttgacgaggtctgagcgaccatggaccggccggggttcgtggcagcgctggtgggtcggctcgtgctcatcatcctg

SEQ ID NO: 111993 - DNA, 96 bp, Homo sapiens
taagatccatttgcagtatgccaaagccaaggaagcagatggaagaagaaagctgtggtgattcgtcacttgtataatgaagataatgttgacatt

SEQ ID NO: 111994 - DNA, 100 bp, Homo sapiens
gatttcctcaggactccagattatctacaacactgatgagagtttgaagcagcccgaaagcgagcaaagaaggccaagcaggcattcgaacagatcaaga

SEQ ID NO: 111995 - DNA, 50 bp, Homo sapiens
cttggtgctcaggtgccagatgcaaagattgtgttcaattagaccttcag

SEQ ID NO: 111996 - DNA, 83 bp, Homo sapiens
cgagcgcacgccttgccgccgccccgcagatgtgaagttcatttccaatccgccctccatggtggcagcggggagcgtggtgg

SEQ ID NO: 111997 - DNA, 90 bp, Homo sapiens
ggtgaccacaaaagcaggccttcttgaggaaacagagcaaatgcagcgttacaatcaaagacttattgaggaattgaaaaacagacagac

SEQ ID NO: 111998 - DNA, 80 bp, Homo sapiens
ctcggagattggctgcctcatccgcttctatgcagatggtagtgaaaacctttatggatatggatcaggactcagaagat

SEQ ID NO: 111999 - DNA, 100 bp, Homo sapiens
gccgggggcctgctgcgcccgggtgacagagctgaatgaacctctctccaatgaagatcgaaatctcctctctgtggcctacaagaatgtggttggtgcc

SEQ ID NO: 112000 - DNA, 75 bp, Homo sapiens
ggaagactcactagtaatatggtctgcaaacactgtgaacaccagggcgacatggagtccaatgggaaatacatc

SEQ ID NO: 112001 - DNA, 99 bp, Homo sapiens
acttagccttctggcaggatcttggcaacctggtagcaaaaccagcctggacaccaagtctgtgtcagaaggccacctcaagaggaacatcgtggtgaa

SEQ ID NO: 112002 - DNA, 75 bp, Homo sapiens
tacagtctctgcacctcgcgccccagcagggcaaagcccaacaccttcccccactggtaagaattaatatttata

SEQ ID NO: 112003 - DNA, 98 bp, Homo sapiens
gagttagctgaggaggtcaatttaaatggttctggcaaactgctcaagtgccgagcactgtctaaaagactggccttggctgaaaagtctaaggaagc

SEQ ID NO: 112004 - DNA, 100 bp, Homo sapiens
ctgtgacagggtccaacagggcctggtccgtgtccggtcccccaaatctgtcgtccctgcccccaggtgaatttaggaggacttttactccaagcactcc

SEQ ID NO: 112005 - DNA, 90 bp, Homo sapiens
cgtggctgtgatgtgcaaaccccacagatgtccacacatcagttttacaggaaatatatgtgtattaaacccaacctcactaaacttcgc

SEQ ID NO: 112006 - DNA, 90 bp, Homo sapiens
ctcctgactatgacagaagccagtggctgaatgaaaaattcaagctgggcctggactttcccaatggtggatatgcagcctacagatatg

SEQ ID NO: 112007 - DNA, 100 bp, Homo sapiens
ggtggtggagtgtagagatatagttggcaacctcactgagttagaatcagaggatggccaggccatgttatgggatctcaacgaaggcaaacacctttac

SEQ ID NO: 112008 - DNA, 74 bp, Homo sapiens
ataaattgatcttcgggagtgggaccagactgctggtcaggcctgccactgaagatcctggtgtcgccatgggc

SEQ ID NO: 112009 - DNA, 98 bp, Homo sapiens
cacggtcctaagagctgggcaccaggaagcgaaggctggatatttggccttgacattaaaggcagagactgtggcaatgaggcagctaagtggttcac

SEQ ID NO: 112010 - DNA, 90 bp, Homo sapiens
caagttggtcaacccaatgttccgaggctatgcccagcaggattctgaaggtgatacccctcttcatgatgcaataagtaagaaacgtga

SEQ ID NO: 112011 - DNA, 75 bp, Homo sapiens
gctccaagtttaaaagaactacgtgttttatccaacaggtcagtatgggaatcctttaaataaatatatcagaca

SEQ ID NO: 112012 - DNA, 82 bp, Homo sapiens
ctttgcaccctgcttggagacggacttgcttccgggcacagaccatcatgaaggctcgtttaaagggagcacagacaggtcg

SEQ ID NO: 112013 - DNA, 75 bp, Homo sapiens
gccaagccaagctcaacctcaaatcagtactgagggttgtcgccgtgatcctgaaggcgctgacctacgacgaga

SEQ ID NO: 112014 - DNA, 75 bp, Homo sapiens
tatgcaccagaaggagatgaagagactcaccgcactgtgttaaaccagatcctacggcagtccacgacccacctt

SEQ ID NO: 112015 - DNA, 75 bp, Homo sapiens
caggtcattgtgagagaattctcacaggcttatcactggaacaggcctttgagagcagccagaagtacaaagagg

SEQ ID NO: 112016 - DNA, 96 bp, Homo sapiens
gtgacgttttccacaggcatcaaaatgagtgcttatgccttaccaaccatggctttttcatttctctgccatacctcaatattgcccatatactgt

SEQ ID NO: 112017 - DNA, 98 bp, Homo sapiens
tcactgcggtcctaaccccgccgcagctcctcggacgcaggcagtataactccaactgtggaactgaatgggcttgctatgaaaaggggagagcctgc

SEQ ID NO: 112018 - DNA, 90 bp, Homo sapiens
gtgggatttcgttttgcctccggttggggctgctgtttctcttcgccgacggtgcatggaggactgcaacagaggagtgggggactgaag

SEQ ID NO: 112019 - DNA, 78 bp, Homo sapiens
aggccctatcaggacatggagtatgaaagacgtcatccgtccttggctcaggatttggagagcttgcaccaccaaaaa

SEQ ID NO: 112020 - DNA, 97 bp, Homo sapiens
ccaaaggaaggactggtcatctctttcatatctcaaaaccatggctcagtttcattggggatcatgtccatggagctcctcatgctgtcatgccaga

SEQ ID NO: 112021 - DNA, 75 bp, Homo sapiens
catctctgctgctctctcatttgctggccatcggattggggggctatcaaggactcacaaactgcatgatggccg

SEQ ID NO: 112022 - DNA, 98 bp, Homo sapiens
gagtgctagaatctactactgtctggccactggctgctgagcctgttccacttgtcctacacagacaaggagcgctatgaaaatgaagaaagacctga

SEQ ID NO: 112023 - DNA, 75 bp, Homo sapiens
gacaaggagaacaccggaagttggagaagagctccaagagtcaggatcgcaagtcagaaagcaaagaaaagagag

SEQ ID NO: 112024 - DNA, 100 bp, Homo sapiens
ctgatgcagagatacagcaaaagagtctacataggtgaatgaaaactttgccattgatttgatagcagagcagcccgtgagcgaggtggagactcgggtg

SEQ ID NO: 112025 - DNA, 75 bp, Homo sapiens
gaagcctgcagcttcattttgagatgtgtatatctcatgattgatatggagaaactagtcatgggccaaaggtca

SEQ ID NO: 112026 - DNA, 100 bp, Homo sapiens
atgaaatccaaaggtgaatcttttggttggtgattttgatgatagccacaaagcaagcagggtgctggagaatctggtaaaagcaccattgtgaagcaga

SEQ ID NO: 112027 - DNA, 99 bp, Homo sapiens
cgttcacagaggaacactgccggggcccaaccacaagacgactcaataggaggaagaatcttgccctgtcgctcaagctggggtgcagcggtgtgatct

SEQ ID NO: 112028 - DNA, 85 bp, Homo sapiens
ttcccagccttcagaaattgccggtctgggagttgggggcaaggagaagatcctggaatactcccccagttgcaagaggcgcagg

SEQ ID NO: 112029 - DNA, 89 bp, Homo sapiens
taccatccataagaaatataatgacacagcagaaggactccttcgaaatggaagagcaattgtgggcacacttgaagctgaaaaagaaa

SEQ ID NO: 112030 - DNA, 100 bp, Homo sapiens
ccgtcatcaacgggcagtttgtcgaacgatgttggactcatagtcactgccagaaagctgctctgttaaaagcgaaaatgaaacaattgcctgcggcaac

SEQ ID NO: 112031 - DNA, 75 bp, Homo sapiens
ggacccacttcactccagtgcctccgacgcctcctgatggaggcatacacggaatacctgaggagcatccactat

SEQ ID NO: 112032 - DNA, 88 bp, Homo sapiens
accgcttgaagcctgaatgcagtactgaagaactgctttcaattctaagtgtcagaatggtggcagcggagcatcgtcattcttcagg

SEQ ID NO: 112033 - DNA, 83 bp, Homo sapiens
ttcgagaacgaccccgagacgattgtcactgctgttccaagggcacacgcagagggatttggaattcctggagagttgccttt

SEQ ID NO: 112034 - DNA, 82 bp, Homo sapiens
ttaaagtatatgtatgacttttaaaagagagagcttgtgaaactgagggaataggaatggacaatcagaccgttctggctgt

SEQ ID NO: 112035 - DNA, 75 bp, Homo sapiens
gggaaggcggcgccccggccgaggtggcggcggctcctcaggctcccaggccagtgccagtacttgggcttgcca

SEQ ID NO: 112036 - DNA, 75 bp, Homo sapiens
ttggtttgtggaacagacagctccttctttattggaatttagataatgggctgtgtgcaatgtaaggataaagaa

SEQ ID NO: 112037 - DNA, 76 bp, Homo sapiens
gtggaattaccttcactctgggaaaaggcactgaagttgaggagaaggcagagcccccccaggctatgaatgccct

SEQ ID NO: 112038 - DNA, 110 bp, Homo sapiens
cgataaacagggccgtgccgcagatgcccaccggaatggagaaggaagaggagtcgacaatgcagatcttcgtgaagactctgactggtaagaccatcaccctcgaggtt

SEQ ID NO: 112039 - DNA, 101 bp, Homo sapiens
tcaaggatccggggatcaaagagcagtgggggttgctgacccagaggagagttctccaaacatgatcgtttactgcaaactccacggagaagaactgctgc

SEQ ID NO: 112040 - DNA, 82 bp, Homo sapiens
tgagttcctgcgtacctatgccagcacagagcaggagcaggatgcagaggagaacgttttaaaggacaccttggaaaaaaag

SEQ ID NO: 112041 - DNA, 83 bp, Homo sapiens
agtttgtcattaaacccatcgacaagaaggcacctccctgggcgctgcctatggcacagccaagagcggtaccggcattgcgg

SEQ ID NO: 112042 - DNA, 100 bp, Homo sapiens
ccataacgtttgaaacacagatctgcctctatggcctgaccatagatttggagaatggagatgtatgcatttcgattcttcatccgcctgtagatgaccc

SEQ ID NO: 112043 - DNA, 83 bp, Homo sapiens
ctcccactgtggctcccgcatctgcctccctgccccagcccatcctctctaaccaaggaattgactttaaaattaggaccata

SEQ ID NO: 112044 - DNA, 100 bp, Homo sapiens
agaccaatgtcttcttctaccctcggctcttacctttggaacttcaaggagtgtccagcagtttctggctatgtgtgacaggggtgaaacttcccaaggg

SEQ ID NO: 112045 - DNA, 75 bp, Homo sapiens
gtgtaccaggcgaagctggccgagcaggctgagcgatacgacgagtggagactgctgcacggactctggaaccat

SEQ ID NO: 112046 - DNA, 100 bp, Homo sapiens
atcgtgacggagaaccaggccctgcagcagcagcttcaccagccagttctggtgactcagtccgcagctatagttccagtaagaactaaaaaacgtttca

SEQ ID NO: 112047 - DNA, 50 bp, Homo sapiens
ttcagacccatttccagtcatgacggggccttttccgaagtggttttagc

SEQ ID NO: 112048 - DNA, 75 bp, Homo sapiens
aaaaattcaattctttagacgctcatgaagaaatcagggatttcctcaggtaaaataccatgaagattttgaaaa

SEQ ID NO: 112049 - DNA, 98 bp, Homo sapiens
gcagaggccaggcgtgctcagcacagaaggctcagcctgtgggtacctgcccagggcacagcgggcctggaagtgacggcttatgaggagatgtccag

SEQ ID NO: 112050 - DNA, 100 bp, Homo sapiens
agaatttgaccatcttggtgagaaacattaagacctactaccagtccacaggtcctggctaccctgggaagagacaagaagtaaatgaagaaagaggaag

SEQ ID NO: 112051 - DNA, 100 bp, Homo sapiens
agggaagcagccctcaaggccagcggagtcttcagcacccccacaagcatgcaggttggaagcgaagtggaagcactgaacctccaggtgacatctctgt

SEQ ID NO: 112052 - DNA, 101 bp, Homo sapiens
gtggacattccaggaacctctgttgccatcagcaactgtgatggtctggttttttgcatgtctgacacccatgactccacctggaccttatggctccaccc

SEQ ID NO: 112053 - DNA, 100 bp, Homo sapiens
gtcatgtacccggtggactcggtgaagactgtgccctgtccacggtgcctcctgcatgtcctgctgccctgagctgtcccgagctaggtgacagcgtacc

SEQ ID NO: 112054 - DNA, 75 bp, Homo sapiens
ggcagcgtctgaggaactgaaacccgaggcagtgtggcaaaggagcagagaactttgacaagttcttcacacgag

SEQ ID NO: 112055 - DNA, 82 bp, Homo sapiens
cgcctaacttctactgacgaagcttggaagttgcagaaggagttcatgatcaagtgttgcccacaccaaatgcttcatccag

SEQ ID NO: 112056 - DNA, 100 bp, Homo sapiens
ctgtgcagcgagttacatgttgagccatttcaggctctgtggatagcaactggatcgtgggtgccacgctggagaagaagctcccacccctgcccctgac

SEQ ID NO: 112057 - DNA, 100 bp, Homo sapiens
gtttgccaacaccgtggggctggtggttgagcgaaggcggctggagaccgagctagatgggctcaggaccctcgtgttagaagtcacgtgtcccgccagg

SEQ ID NO: 112058 - DNA, 83 bp, Homo sapiens
cattaatgcaactaccattacactaaggggccagcagcctcccccgatgggtcgtcagcaacgagggtgcctcaggatgtgac

SEQ ID NO: 112059 - DNA, 101 bp, Homo sapiens
gtttcaatattggaagcgctttgatttacagcagctgcaggtatgggcactaggaaaagacttcttccatcaagcttaattgttttgttattcatttaatg

SEQ ID NO: 112060 - DNA, 98 bp, Homo sapiens
ttgatggccatggcataaggaactctatcccaggaatacagctttgcattaggaggccagatgctccagtgcctgatggcgaaagtgagaaaactgta

SEQ ID NO: 112061 - DNA, 98 bp, Homo sapiens
gcgcggggaagtcatgctcgcttcacggaggcaatagctagccggggatcccaacaagccctcaggattcagaagtgttaaagctcctgtcactaaag

SEQ ID NO: 112062 - DNA, 114 bp, Homo sapiens
tgtatgtactgacgggaaaaggaggataagcaagtcgaatttttgtcttacggtgctggagaatctggtaaaagcaccattgtgaagcagatgaggatcctgcatgttaatggg

SEQ ID NO: 112063 - DNA, 90 bp, Homo sapiens
gagaagcaaagcttcagtttgcttggtttagatgtagattctctggtcattgagcatatccaagtgaacaaagcacctaagatgcgccgc

SEQ ID NO: 112064 - DNA, 96 bp, Homo sapiens
cgatctgcccgttgtgtttgtgaaacagagaaagataggcggccatggtccaaccttgaaggggaatcccggaggcaagacacttgaggagaggcg

SEQ ID NO: 112065 - DNA, 102 bp, Homo sapiens
ggcacaatctcagctcactgcagcctcaacttcccaggctcaagtgatcttcccacttcatcctccccaagcagctgctaggtcaggcagctcgaaacatgg

SEQ ID NO: 112066 - DNA, 100 bp, Homo sapiens
gcacagtccaactacctgctaaccaccgccgagaacgagctgggagtggtggtagcccacagtgagtcagtccctgcactaggtcagacaatcccctttg

SEQ ID NO: 112067 - DNA, 75 bp, Homo sapiens
cacggattgctttgaaagccttgatcaggggaaagctggaatgttctgaagaactgggtgatcttgtgaaatctg

SEQ ID NO: 112068 - DNA, 90 bp, Homo sapiens
tggaagggcttaggaccaaatgtgctacctccaacgacctcacacaaaaagaaatccggaccctggagaacattatgctatggaagataa

SEQ ID NO: 112069 - DNA, 82 bp, Homo sapiens
ctcccaaagtgctgggcttacaggcatgaaccaccactcccggcgagaacttttgagcactgttgcaagaattcaattccgt

SEQ ID NO: 112070 - DNA, 101 bp, Homo sapiens
cccttagtgatgggacaacagcctacgtccagcaagctgtcaaaggttattcttggacagtataattggctttcctatgaagatgtctttgttcgagcctt

SEQ ID NO: 112071 - DNA, 75 bp, Homo sapiens
tcctttatatagaagggagagtagtgtaccacatgaaggaagatggttgggtgaaagtagaaagtacagatgtca

SEQ ID NO: 112072 - DNA, 75 bp, Homo sapiens
gccgtgctccaggtggccactggcgtcatctctacgctgcagatgaggaaactgaggctgagcgggaaggagggg

SEQ ID NO: 112073 - DNA, 100 bp, Homo sapiens
gccctactgagcgtgctcccctctgagactggagtgagagggtcttctgggtcgagctgtgcagttttagcgggtacaagatctaccccggacacgggag

SEQ ID NO: 112074 - DNA, 75 bp, Homo sapiens
cccacttggtgaatggagatgcagctcagcaggaagctgttttaggttatgtgaaagagatgtttcctcatctct

SEQ ID NO: 112075 - DNA, 83 bp, Homo sapiens
gagactgaaaaacctgaggctgatgacccaaaggtgacttaagagattaaaattaatttggttgctgttggttctgaacaaat

SEQ ID NO: 112076 - DNA, 75 bp, Homo sapiens
tgaagttgttcattgtttgtcaccacaaaaaggacagaacaagttgaaatcatcgcagaaggataaagttcgtca

SEQ ID NO: 112077 - DNA, 75 bp, Homo sapiens
ttctgcactgtttacaggcacaggtggtattaaagataatcaaacattatcaagaagaaggacaaggaactgaag

SEQ ID NO: 112078 - DNA, 82 bp, Homo sapiens
tctggccccgagatcagaatgccggaagatttggagactggagttcaccttgaccctgccgtcaaagaagttcagtataatc

SEQ ID NO: 112079 - DNA, 100 bp, Homo sapiens
gccggctgcttcggcatcaagcagagcatcgtgctggactctggagatggtgtcacccacaatgtccccatctatgagggctatgccttgccccatgcca

SEQ ID NO: 112080 - DNA, 100 bp, Homo sapiens
cccgactgcaactgctggattgctgcaaggctgagggacgagaacgaggtccgtgacgagaagttattaccgaggcgcggccggggctctcctcgtctat

SEQ ID NO: 112081 - DNA, 75 bp, Homo sapiens
ctgtgacgaaggtgctaccatcgtgagagtaaggcaacagtgcatcccgacagcagcaacctgatccccaagctt

SEQ ID NO: 112082 - DNA, 100 bp, Homo sapiens
gcagctgctgaagcgggtgctcgtccggacagtgaaaattccagattcagctgatggacttggcttccagatccggggatttggcccttctgttgtgcat

SEQ ID NO: 112083 - DNA, 100 bp, Homo sapiens
gggtcagttggcagccatcaaagttatggatgtcactgagatcacctctgcagcctgcacagccgggcctttggactcctggatgctagagtgacctggg

SEQ ID NO: 112084 - DNA, 101 bp, Homo sapiens
cgtggccttagctgtgctcgcgctactctctctttctggcctggaggctatccagcttccaaagaactactggttcagattttagctcttcccaagttgtg

SEQ ID NO: 112085 - DNA, 51 bp, Homo sapiens
accgagggctaccacgttctgcgggataagttctgaacgtcgaaaagaaaa

SEQ ID NO: 112086 - DNA, 100 bp, Homo sapiens
taattttgcaattattaaatatgctatgccaagctcagccccgaagtgcttcagatgtagagttttcggctttgtgagaaaccttaccatcaaacacgat

SEQ ID NO: 112087 - DNA, 96 bp, Homo sapiens
ggaggctccgtacacgcttgtggtcattgattacaacggggaacgcacgctggatggttttaagaaattcctggagagcggtggccaggatggggc

SEQ ID NO: 112088 - DNA, 80 bp, Homo sapiens
caaagaaacactctccttctgccacatttgttttgagctaaatattgagggctgggagtcctccgtcagcatcagctccg

SEQ ID NO: 112089 - DNA, 98 bp, Homo sapiens
tttgtcactttttgtacaaaagaagcagctcaggaggctgttaaactggtagttgtcctgggaacccctgcagaagaagatggtggtggcaaaattga

SEQ ID NO: 112090 - DNA, 75 bp, Homo sapiens
ccagaggtcgtggaggtggccgtggaggcagaggtggcatggggtgcgaagcccagcggtgcagagtccagcaaa

SEQ ID NO: 112091 - DNA, 75 bp, Homo sapiens
gggacgggtttagcggcagcctcttcgaaaacatcggttgtgaagagaaagccaaaaagaatgccaacaagcctt

SEQ ID NO: 112092 - DNA, 73 bp, Homo sapiens
aagtacccgtccatcatagtcaactgcgtggaagagaaggaaacctgtccagtttaagtcgtcttggtctgag

SEQ ID NO: 112093 - DNA, 75 bp, Homo sapiens
cttcgagctcccagcctttgatccgacaatgcagatcttcgtgaagactctgactggtaagaccatcaccctcga

SEQ ID NO: 112094 - DNA, 90 bp, Homo sapiens
cgatggctctgtgcaacggagactccaagggttttgacccaccacatcagagtgacacaagaaccatctacgtagccaacaggtttcctc

SEQ ID NO: 112095 - DNA, 95 bp, Homo sapiens
ttacttggtgcaggaaggcagtctttgctacgtacagcaaaagattttgtggaagtataatactttgtcattatgagatgtcgtctctcggtgcc

SEQ ID NO: 112096 - DNA, 98 bp, Homo sapiens
cgacctcatgccaaagaccatcatgcacctcatgatcaacaattttaactcggctgctaagcagctgatagaatgggataagcctcctgtgccaggag

SEQ ID NO: 112097 - DNA, 80 bp, Homo sapiens
ggctggtgatggggagagggcacgagcggaggctgctgagaagctgcagcgagcccagcctctcattttgaaaagacatg

SEQ ID NO: 112098 - DNA, 99 bp, Homo sapiens
ctttcctttgacgaaggtgtatgttgtggaagatgagctgcttcagaaagagcaaaactattcagatgacgtcttggccaacatgattagtgaaccaag

SEQ ID NO: 112099 - DNA, 100 bp, Homo sapiens
gaaagcaatgtgtcaaccgcattattactgaaaaggaaaatgtttataggaggccttagctgggacactacaaagaaagatctgaaggactacttttcca

SEQ ID NO: 112100 - DNA, 100 bp, Homo sapiens
taaccaccccttgcactttgttttcaatgacaccaagttggacgctatgctggaagaatttaagaaagatgatgtgatgccagccacttactgtgaaatt

SEQ ID NO: 112101 - DNA, 100 bp, Homo sapiens
atattgcgtgaaatatctgaatctacccccgtggaagatgttgcttcagagtgtgaagtcaaatgcatgccaacattccagttttttaagaagggacaaa

SEQ ID NO: 112102 - DNA, 75 bp, Homo sapiens
gaaagacagtgctctgggttcaagttgtcctcaggtggagtattgctcctggaaaatccaaaaggtgacaatagg

SEQ ID NO: 112103 - DNA, 51 bp, Homo sapiens
ggaaagacatggagattctcttaaaaaggatttccagatgtgacttgcact

SEQ ID NO: 112104 - DNA, 83 bp, Homo sapiens
ggaagatcgtcgccacctggatgctggaggaacccaagacagaccaggatgaggagcattgccggaaagtcaacgagtatctg

SEQ ID NO: 112105 - DNA, 100 bp, Homo sapiens
agatgtaaagcaatatttcgagcagtttggcaagcggatgaccaccaggctctcatctgggacatccagcaaatgccccgagccattgaggaccctatcc

SEQ ID NO: 112106 - DNA, 75 bp, Homo sapiens
acaccatggagaacaagcccatcgtcacctgcttgtccagccggaagccctgagggcagctgttcccactggctc

SEQ ID NO: 112107 - DNA, 74 bp, Homo sapiens
tggagggcatcttcaaccacaaagggaaacccccatcagcacctccccctgactcacaaagcatcccgtcaaca

SEQ ID NO: 112108 - DNA, 100 bp, Homo sapiens
cactatggcgctgaaacggattaataaggaacgaatgcaggaatttgggaactgagctgtgcaagtgctgaagaaggagatttgtttggaggaaacagga

SEQ ID NO: 112109 - DNA, 100 bp, Homo sapiens
cgacagtacaaagaagactcttgtcacactaattgccaacaacaatggacctttattgggcttgaggtcacttcagggcatgcccagttcctggacctgg

SEQ ID NO: 112110 - DNA, 100 bp, Homo sapiens
atcgccgccatcatgggtcgcatgcatgctcccggtcagtcaagaacaatacccaagtgctcatcaactgccgcaacaataagaaactcctgggccgcgt

SEQ ID NO: 112111 - DNA, 99 bp, Homo sapiens
agcactccaaggcatccctgcccacgggcgaaggcagcatcagccatgaggagcagaagtcagtccggctgggctgccaggcgcccagctgtgcccaga

SEQ ID NO: 112112 - DNA, 98 bp, Homo sapiens
cggcggcggcggagcgcaggcctcgtgccgttacggccatcacggcggccgcagtggcgtcctggagccctcctcagtaagactttgaccccgacgca

SEQ ID NO: 112113 - DNA, 107 bp, Homo sapiens
actctgctaacaccagatagtggaaagaaaccatgtgctgaaatgtttgacgacactgatggtttgaaagatttgatcaccaggagatttttcgggacattaccaaa

SEQ ID NO: 112114 - DNA, 85 bp, Homo sapiens
acgaaagcctttctctttcaaggagggcttatcgagacaaattgaagttttggacccattgtgtactagcaacattgattatgtt

SEQ ID NO: 112115 - DNA, 100 bp, Homo sapiens
cagatgcaccggacactttgttattggagaaacatgcagattatatcgcatcctatggctcaaagaaagatgattatagtcatcaccagtgttatcgcca

SEQ ID NO: 112116 - DNA, 136 bp, Homo sapiens
ttggccccgcgcagcgtctggtcactcgctctcctctggggactgcagagaagcaggacctcgggccatggatgaaggactgaaccatgaatgcaaactctgcagccagacctttgactctcctgccaaactccag

SEQ ID NO: 112117 - DNA, 101 bp, Homo sapiens
aatgaaacttcctcctccttataaagctctgactgatgacagtgatgaaaatgaagaagaagatgcctttaccgaccgtgtcatctttaagaaatgaaaag

SEQ ID NO: 112118 - DNA, 82 bp, Homo sapiens
ggagctgctgctggcgagcccgctactgcagggacctatgacaatgcagatcttcgtgaagactctgactggtaagaccatc

SEQ ID NO: 112119 - DNA, 100 bp, Homo sapiens
tcggaggtctttctgcctgcctggtaattatgtgctggatcgagatgacctggtggaggcccaaacacctgagtatgatgtggtgctctgcctcagcctc

SEQ ID NO: 112120 - DNA, 98 bp, Homo sapiens
gctgctggagccttgtggccccacacctggtggagatgcaaccttaaaatcagtgacaagaaacattccaaacaagcaacagtcttcaagaaattaaa

SEQ ID NO: 112121 - DNA, 98 bp, Homo sapiens
gatggacccaagctctgccggacatggtggtgtcccacctttttgggaagctacaccaaaattgcattgagccaaacttgccaccaagagcccaacaa

SEQ ID NO: 112122 - DNA, 90 bp, Homo sapiens
gggttccatgtgatggtggagtaggaggcaggtctccgcgtatggtttgaagtggtgaacatggatttttctcggcttcacatgtacagt

SEQ ID NO: 112123 - DNA, 75 bp, Homo sapiens
agccgaatccgcgtcgggctgtaactcgagtgccaggaatgtatagaggccagctgtatctgcagtcatcagtca

SEQ ID NO: 112124 - DNA, 75 bp, Homo sapiens
gcaaattcactccccagtacaaagcatttgcaacagctacagtctaaaattgcttctttaccaaggatatttaca

SEQ ID NO: 112125 - DNA, 83 bp, Homo sapiens
gttggaagcagccgatccagcctgcggagcctgtggggcaggatttttagactctgaggagcagttggagctaatccacatta

SEQ ID NO: 112126 - DNA, 75 bp, Homo sapiens
cggccaaggacctggccgacatcgcggccttcttccgatccgtatccatatattcctgcacatattacaaagcct

SEQ ID NO: 112127 - DNA, 50 bp, Homo sapiens
cgaggactccagcacaccgaggacaatgcagatcttcgtgaagactctga

SEQ ID NO: 112128 - DNA, 90 bp, Homo sapiens
ccaggatttcatctgtactatcagcttcttcaaagagagagaggttgttgaacgccatttggaatgaacaggaaaaggctgaacttttta

SEQ ID NO: 112129 - DNA, 100 bp, Homo sapiens
aagctggggacgcgtcctcagacgcagcgtctagtccctggccatagctccgccgctgcccggtgacttgcttttggagggcttcaacaactacaccttc

SEQ ID NO: 112130 - DNA, 74 bp, Homo sapiens
atgtttgtaaatgtgagtggaagccatgaggccaaaggcagttgtattggattcttggactatgtctgttacag

SEQ ID NO: 112131 - DNA, 83 bp, Homo sapiens
ctatgtactgcgcctggatgtggccagtaacagggggtatcacagaagagcagtttcagacacatcagcagcagttagttcag

SEQ ID NO: 112132 - DNA, 75 bp, Homo sapiens
cacctaccaagaagccagtcaagcggccagtcttcagccagggttgacgagcccatgaccatgttcctctggaca

SEQ ID NO: 112133 - DNA, 83 bp, Homo sapiens
gtggtttggacgccggcggagacgcgggcgagcggacaaggcaaaatctcagcaagttcggacctctagtacaataaggcgaa

SEQ ID NO: 112134 - DNA, 82 bp, Homo sapiens
ctgtggcatttattactttgaagtgaagattgtcagcaaaggaagagatgggagcacgtgaattgcctctgcttacgttcag

SEQ ID NO: 112135 - DNA, 100 bp, Homo sapiens
ggatgatgccttcaatactacctttatttccaccatagcgcttctctgaagtagctttggaaagtagagaagaaaatccagtttgcttcttggagaacac

SEQ ID NO: 112136 - DNA, 100 bp, Homo sapiens
aaatgacagcatctttgtaaagcttcttaagatatcaggaattattcttaaaacgggagagagtcagaatcaactaggttcaagtgctggggccggcagt

SEQ ID NO: 112137 - DNA, 100 bp, Homo sapiens
ctccagccaaattcaaaaaggataaggagatcatagcagagtacgatactcaggtcaaagttttgccccacaaaagctgaggcccggaggagtgctgcaa

SEQ ID NO: 112138 - DNA, 51 bp, Homo sapiens
tgtcctgctgtcaccaagagctggaggcagctgcattcagcctcagcggag

SEQ ID NO: 112139 - DNA, 140 bp, Homo sapiens
gcggcgtctccagcgagcggcgcggagctggacgccgcgatcgtggggcccgcgaggcgggcagccggggcgtccaggtgctggagaatctggtaaaagcaccattgtgaagcagatgaggatcctgcatgttaatgggt

SEQ ID NO: 112140 - DNA, 100 bp, Homo sapiens
ggccttccgacgtgggcggtgggccccagccccacagaccagcccagcattcaggcttgcttccggcgtcatggctcaaagggccttcccgaatccttat

SEQ ID NO: 112141 - DNA, 75 bp, Homo sapiens
tggaaataacggagcaacttgctaatggcaggcattttacaagaactgataaatttcaaacggaagagagtggca

SEQ ID NO: 112142 - DNA, 90 bp, Homo sapiens
gctggacccacgtctgtctggtgataccaggggcagagggaccactctgacaggcagaagctcctcctggggtagagacagatcttattg

SEQ ID NO: 112143 - DNA, 73 bp, Homo sapiens
gctgtgcttgccaggcctggctccatgggcaagttacggaagcaatggctaaaggaaagtatctctgatgtcg

SEQ ID NO: 112144 - DNA, 74 bp, Homo sapiens
gccctgcagtacctgcagaaggtctctggagacatcttcagcagggtcctgaggacaccgtgagccagccaggc

SEQ ID NO: 112145 - DNA, 78 bp, Homo sapiens
aaggattcaaatgctagcagacacggtggctactctgcctcggggacgaaagcagattgagaggatccagaatccaga

SEQ ID NO: 112146 - DNA, 100 bp, Homo sapiens
gaaacatccaagaaaaatgtccttaaagcaattgagcaggctgatctactgcaggagaattgcctgaggttctgtccattgaggaggaagtggaagaaac

SEQ ID NO: 112147 - DNA, 83 bp, Homo sapiens
gtgtctggagcagtggagcccaaagacccctggagacatggtctccagaaatgctttgggttcatctttcattgctgcaagga

SEQ ID NO: 112148 - DNA, 75 bp, Homo sapiens
cgcgggggcggcgtgtcaggtggttgcggagctgacaatgactgatgtggtgggtaacccagaggaggagcgccg

SEQ ID NO: 112149 - DNA, 100 bp, Homo sapiens
cttgatgcttggagcattctcattcgagaggcacaggcatattttggtggtgaagctcgctgcgatgctgaggctggacggggagatgattatgatccca

SEQ ID NO: 112150 - DNA, 74 bp, Homo sapiens
cttccttactttgtcttggtatactacatggcaaaatgggaaagccaaggaagtatcgcctggggatgctggag

SEQ ID NO: 112151 - DNA, 75 bp, Homo sapiens
tgccaaggaaaaactggagagcttcatcaaaaatagtgatagctttgataatgcttagatgagtacgaagatgat

SEQ ID NO: 112152 - DNA, 74 bp, Homo sapiens
ccaagacagtggagtgggactggaaactgctcacctatgtcatggaggaagagagaacactttttacagttggc

SEQ ID NO: 112153 - DNA, 82 bp, Homo sapiens
cgcagccttgggcctcgcgccggctatggccgtgccctggggctgagccctcagctggagcagatccgcagggacatccgag

SEQ ID NO: 112154 - DNA, 95 bp, Homo sapiens
gaccggacgggtctaggtgagacagaagccaaacaggaggaggaagtggagggacatccataaaaattcatcagagagcattttactactgagct

SEQ ID NO: 112155 - DNA, 100 bp, Homo sapiens
tttcctggggctatcgtcgtgacatggcattgtctgatgttacagaagaatctgaaatcatttcggcctcttctgaagagctgaaagctgcctaccggag

SEQ ID NO: 112156 - DNA, 90 bp, Homo sapiens
ggaactggcggacgtgggggcggcagccagctcgcaggagcatgggcatgtgtttcatcgggaagaggaattttgaacatttccttcttc

SEQ ID NO: 112157 - DNA, 100 bp, Homo sapiens
gcagttatggactcatctgtcattcaaaggaaaaaagtagctgtcattggtggtggcttgatggagtttcactcttgttgcccaggctggagtgcaatgg

SEQ ID NO: 112158 - DNA, 96 bp, Homo sapiens
ctgctcacctggagaagggatggaaatacttcaacaagggtgtccgcaatgttgccagtgtctgtctgcagattggctacccaactgttgcatcag

SEQ ID NO: 112159 - DNA, 98 bp, Homo sapiens
gctgctctcctctttgtaaccgaggagtcaagaaatggtgaggtggctttgaccccgggttgcccggccagcacgaccgaggaggtggctggacagct

SEQ ID NO: 112160 - DNA, 100 bp, Homo sapiens
catcaccgacggctaccgggcctacctgccgtccaggctgtgtatcaaaaggctccatctactctttgaagcttctgcccagcttgcattgtttctagga

SEQ ID NO: 112161 - DNA, 75 bp, Homo sapiens
ggcctttggttctgcatcaaaaatatcaacgatgaaagagtatttggaaaatatgagagccacacccgtgttcac

SEQ ID NO: 112162 - DNA, 100 bp, Homo sapiens
cgcagcggcgcagctgatagcaggaacagacaatgcagatcttcgtgaagactctgactggtaagaccatcaccctcgaggttgagcccagtgacaccat

SEQ ID NO: 112163 - DNA, 100 bp, Homo sapiens
tgaattggcagagcttgacccaggcactagtgcaacattagaggaaatcaatcagcactgggactggctggaacaaaatctcctccacaccttgtctgtc

SEQ ID NO: 112164 - DNA, 97 bp, Homo sapiens
agcttcccagcaacctgccgcagttacagaatctaatcaagcgagacccgccggcctacatcgaggagatctaaatgagtgtggcctgaagccccgg

SEQ ID NO: 112165 - DNA, 90 bp, Homo sapiens
tggccatcgttttcttcgcctccataggtggagccgccaccaaaatgcagattttcgtgaaaacccttacggggaagaccatcaccctcg

SEQ ID NO: 112166 - DNA, 100 bp, Homo sapiens
ctgagcaagaaattaaaacactggaagaagatgaagaggaactttttaaaattgccagcacttcaaatattgctagaatagaagaaatggagagactttt

SEQ ID NO: 112167 - DNA, 80 bp, Homo sapiens
cggggaggccaacgtgaagaaggagtgcatccgccccaacccttttccccctcgtctcctgtgagaattccccgtcggat

SEQ ID NO: 112168 - DNA, 75 bp, Homo sapiens
ccgaggagccgggcgcaatggagcggaagagtgtcaacagcatctccaccctggagcctgtgagccggtgccagc

SEQ ID NO: 112169 - DNA, 96 bp, Homo sapiens
tctacctaggcctctcacaaagttttaagttgaatgtagacagtcattgtgctctcaaggaagctgtggaggaggaaggacaccaacttcttgagc

SEQ ID NO: 112170 - DNA, 98 bp, Homo sapiens
gcctggcctgcgcgccgctgcccgcgccacagatatgatttggctatcaaagaccttaaagaagccttgattcagcttcgagggaaccagctgataga

SEQ ID NO: 112171 - DNA, 100 bp, Homo sapiens
gagattatgcctgaggttgtggaaaaggaagattactcagagattatagggagcatggcatagctgtcagtcagatgggaactccatttatttccatgga

SEQ ID NO: 112172 - DNA, 100 bp, Homo sapiens
ctggatgctagagtgagtgtgcccacctgcgtaagggggcagagacagctctggcaggctgccctgagcacgctcaaccccaaccccacggacagctgtc

SEQ ID NO: 112173 - DNA, 82 bp, Homo sapiens
aactggtgatcgaattaggggaaaaggggcctcgtcggagagtagagaggaaggaacagagccacagagaaaaatgacttgc

SEQ ID NO: 112174 - DNA, 98 bp, Homo sapiens
ggggacgcggggtctcgcggcgcctggcagcagagaccaccagaaggatatggatgtaatgaggcccttgataaatgagcagaattttgatgggacat

SEQ ID NO: 112175 - DNA, 100 bp, Homo sapiens
ctcatggggaaaatctccccggtgactttcaggtaaccaaggagcagtgaacagcagctactacagtagtggaagccgtgcatctatgggcgtgaacgga

SEQ ID NO: 112176 - DNA, 75 bp, Homo sapiens
agaaaagcctctgggagcagaagggaggctccaagacctcatcaacaattaagggaaaggtggcccagacagcgt

SEQ ID NO: 112177 - DNA, 100 bp, Homo sapiens
aactggaatatctagaggaggtacctccaggaaatgtgctaggtgctggagaatctggtaaaagcaccattgtgaagcagatgaggatcctgcatgttaa

SEQ ID NO: 112178 - DNA, 98 bp, Homo sapiens
agagccgggagttcaagaagaacactccagagattcgaaatcagagcaaagcctctgggtctgggctctgtgagggagatgaagtggtttccatcaat

SEQ ID NO: 112179 - DNA, 87 bp, Homo sapiens
gaaatccatagctaagatgccaggaccccctgaaagcctagacatgatagggccagatttgagtgtgtgaatttttgagtgaaacct

SEQ ID NO: 112180 - DNA, 83 bp, Homo sapiens
gacgaaggtactcgcagcacttggagcgcagaaccggccgcgcccggtgtaattgaaaagtgatcctctcttcagagatgtca

SEQ ID NO: 112181 - DNA, 100 bp, Homo sapiens
gagctgcggcccagacgcccgggcttgaccgccgcgaaggccaaccccgggaagggggctgaagaggacgcccacctggatggggctgttcctatccctg

SEQ ID NO: 112182 - DNA, 51 bp, Homo sapiens
taaagatgacaccttgcattccctatttagacggagtctctctctgtcgcc

SEQ ID NO: 112183 - DNA, 75 bp, Homo sapiens
acagctgcagtctgacgagagggctgcatcttcctcccgtgaggctggccgagctccacgctgatctgaagatac

SEQ ID NO: 112184 - DNA, 96 bp, Homo sapiens
acgtgcgatccatgcccatccgaaaggatgatgaagttcagggcggcgactggcggcgcgatggacctgaccgggctcctgctggacgaagaaggc

SEQ ID NO: 112185 - DNA, 98 bp, Homo sapiens
tcatatatcattggattttatggagcattttttgtagaaaacaggatttcaatatgtacagaattcatggatggcatagaatgtcaagctaaccaggc

SEQ ID NO: 112186 - DNA, 100 bp, Homo sapiens
agacgaggaaagaggaggaaaacaaaagctgctacttatggaagatacaaaggtaatccagtccctcatagcactggtgaatgacccccagcctgagcac

SEQ ID NO: 112187 - DNA, 75 bp, Homo sapiens
tctgcctaacgttcacttcactcacggccacccgggaccttgcccagtacgacgcagcccatcatgaagagttca

SEQ ID NO: 112188 - DNA, 100 bp, Homo sapiens
gcggcgagagatggtcaggtctggagctcgaccgggccagcaagctgtgtaatgttcttgatcgactaaatgtgattgcagaaagtgtggtgaagaaaac

SEQ ID NO: 112189 - DNA, 100 bp, Homo sapiens
ccgggagaagcgggaacgcaggcgtaccatccacaccttcccctgcctcaaggagctgtgcaccagcccccgctcatcagcatcggatcttcctataact

SEQ ID NO: 112190 - DNA, 83 bp, Homo sapiens
gggctggaaattgcgctggaccgtcgccttgctcctcgccgcggcggggactgcagggtttccaggcctgaggtgcccgccct

SEQ ID NO: 112191 - DNA, 50 bp, Homo sapiens
gcaagatggacgcgggatttttccgcattggtttatcttggaagctaaag

SEQ ID NO: 112192 - DNA, 74 bp, Homo sapiens
ctacaacaccaacatcaccacagagaccagcaagattctggttggatggcaagcatgtggtgtttggcaaagtg

SEQ ID NO: 112193 - DNA, 90 bp, Homo sapiens
aaaaacgcttttcacgtcacctggagagatgcacagatgtggatcaatccatgtgctcaggtgatctttgactcagacccagcccccaag

SEQ ID NO: 112194 - DNA, 90 bp, Homo sapiens
agtgccagaacccaaggaggtgcaaatggacagagccatactgcgttatagcggccgtgaacatagggcctgattacattccaacagagg

SEQ ID NO: 112195 - DNA, 75 bp, Homo sapiens
atcagcagtgtcatgggcctgcaggtgaccaggagttaaactttgggatgtgcccgtgatgttggaccacaagga

SEQ ID NO: 112196 - DNA, 75 bp, Homo sapiens
ttgcatgaggatgctgaggctgtcctgtcctcgtccgtctcatcaaagaacatgccgagtttttgcactgcaagt

SEQ ID NO: 112197 - DNA, 98 bp, Homo sapiens
taaaaacaagactggggctgctcccatcattgatgtggtgcgatcgcttcacttaaagagaggaaacttcttggtgctcaaagcaaaggagatgggcc

SEQ ID NO: 112198 - DNA, 90 bp, Homo sapiens
gatgttggatctacactttctcaagcactgtgatcttcaaatgtgttatgaagcggagattgaggagatagatgaagaaaatggcaccgc

SEQ ID NO: 112199 - DNA, 100 bp, Homo sapiens
cgctcgtggggctgcagtactcgggcaagaccaccttcgtcaatgtcatcgcggtaagaatgattgatgttggctgatattggagtgctcattcacatga

SEQ ID NO: 112200 - DNA, 74 bp, Homo sapiens
cagccactaatgaagttgggaactcagaccgtaccttgcaacaagttgctgattttatagggctagatcccaga

SEQ ID NO: 112201 - DNA, 74 bp, Homo sapiens
ccctaacgcacaataatatggctccgatgggctcaaagggaatgcagtggtgtcttttgaaagaagaggatgtc

SEQ ID NO: 112202 - DNA, 98 bp, Homo sapiens
tagaagaggctggaaaagagggtggaaaaagcagggaggttatgaggcttaataaagaaggtctgctgagaacagacccagtccctgaggaaggagaa

SEQ ID NO: 112203 - DNA, 118 bp, Homo sapiens
atgactacccggtggttttcttgcctgcctatgagaatcctccagcatggattcctcctcatgagaattgctgggcacccactggctcagaatgaacgctgcctacacatgttcctgc

SEQ ID NO: 112204 - DNA, 90 bp, Homo sapiens
ggaatgacaaaacctatcactgcaaagaaaaaggaccagtgatgtctaagactcatgatcatcaattggaatcaagtctcagtcctgtgg

SEQ ID NO: 112205 - DNA, 100 bp, Homo sapiens
gaaacaatggcatttacagaaagagtcaacagcagtggcaacagcattaggtggtctcttcagtcagcctacacaagctcctacccagtccaaccagctg

SEQ ID NO: 112206 - DNA, 100 bp, Homo sapiens
caaaatataatcaagcaaatacacttctatataccagtcaattgagtggtgttaaagattttggaagatggcaaagttcatgacacccgtgatccaggac

SEQ ID NO: 112207 - DNA, 98 bp, Homo sapiens
ctgaatcctgcccgcgtgaaccacatgcccagcacggtgtttcaggagccgtagagccagatcgtcatcatgtctgcattgtggctgctgctgggcct

SEQ ID NO: 112208 - DNA, 90 bp, Homo sapiens
gcaaaagtggctgcacttacagtgctgggctttgacaaacttcctctgtggggtaccatcctcatctcggtgggatgtgcagttttctgt

SEQ ID NO: 112209 - DNA, 98 bp, Homo sapiens
ctgggcagtatagagacgtcggacttcacgctggagaagaagcaggcgctccctccattccagccacagatcacagacgactacggtctggacaactt

SEQ ID NO: 112210 - DNA, 48 bp, Homo sapiens
ccaggtcatttaaccgccttcagccgccgccatgtctgcgcatctgca

SEQ ID NO: 112211 - DNA, 99 bp, Homo sapiens
ccgcactgtccagcccaagcctgactatgaggtgtgggcctcagcttcctctttgctgcacccctcatcctcctggtgttcgccaccttcctggtgggt

SEQ ID NO: 112212 - DNA, 98 bp, Homo sapiens
ccacaaagtcccctttgtgttcacataatgctgtcaggaactgtgaccaaggtggcttcccacacttctgactcggacgttccttccggtgtcactga

SEQ ID NO: 112213 - DNA, 100 bp, Homo sapiens
gtgggcgaaggacacccgcaggaactcggcagaggagaaattcagacggctcccgaggctgggatctagcaattgggaggcagcagacttgggtaatgaa

SEQ ID NO: 112214 - DNA, 75 bp, Homo sapiens
caacccgcagcacttgtcccagagggagctcatcacccgaaagaccacagcaagattctttcattcgtctcctcc

SEQ ID NO: 112215 - DNA, 96 bp, Homo sapiens
aacaaaatacaagataatgccgctggaacttaaaactggcaaagaatcaaattctattgaacaccgtagtcagaaaagggagatttcattgccctg

SEQ ID NO: 112216 - DNA, 82 bp, Homo sapiens
tgctaccctggtatatgcacttttcagagtcactcaagggaaaggattaatgccagatggtaccagcagatttacttgcaaa

SEQ ID NO: 112217 - DNA, 126 bp, Homo sapiens
ggcacccgagcagcgccagcggccgagcgggcggcttcctggcctgggcgctccggtggcggcggaggagcatcagatccatgctgctgctgactcggagccccacagcttggcacaggctctctc

SEQ ID NO: 112218 - DNA, 75 bp, Homo sapiens
ctcagttggaagcagccgatccagcctgcggagcctgtggggcaggtgctatacttggtagatcagaaactcagg

SEQ ID NO: 112219 - DNA, 96 bp, Homo sapiens
cttctatctgtggctcattggaaggaaacccagatgtgttcagagcaacattgttttgttgacacaagcatttagaagaaagtttgtgattcctga

SEQ ID NO: 112220 - DNA, 99 bp, Homo sapiens
atggctacctgtatgagcgtgaggccatcctggagtacattctgcaccagaagaaggagattgcccggcagatgaaggaaccagcaatgagaaggccag

SEQ ID NO: 112221 - DNA, 75 bp, Homo sapiens
cggaggatgagcctgcagagcgcgcagtacctccggcctactctgtgtatgatgaagacattgggtactgtcaag

SEQ ID NO: 112222 - DNA, 75 bp, Homo sapiens
gaattcattcataactttgtggaagttttagatgagtatttcagccgagtgttttttgctccactcaagcctgtt

SEQ ID NO: 112223 - DNA, 75 bp, Homo sapiens
cacggagctcaatggcggcagtcgcgctgagggactcggctcagctctcaaatcgactggaagtggtgaaggaat

SEQ ID NO: 112224 - DNA, 75 bp, Homo sapiens
ctagtatcggacatgatcctcatcttttatacactcttagtgctgtccagtttctgccagtccctgagttgatgc

SEQ ID NO: 112225 - DNA, 100 bp, Homo sapiens
ccaagtggactgcgacaacggctcagacgagcaaggctgtcaacatgccgagtttttgcactgcaagtccaaaaagtttacagactttgatgaagtccgg

SEQ ID NO: 112226 - DNA, 100 bp, Homo sapiens
ccgcggctggggccgcgccctttcgcttcgttgcgcgccccgtgcgcttcccgcgggagcaccagttcttcgagatctgcagcctcctccgtggtggcat

SEQ ID NO: 112227 - DNA, 100 bp, Homo sapiens
ccgagacagacagagtaatggttgcattgaagcacttctgttaggaatttacaatttgataacagtgttttatggacaggcacagtggctcacacctgta

SEQ ID NO: 112228 - DNA, 135 bp, Homo sapiens
gcgagccgtcttccccaggcctgcgtccgagtctccgccgctgcgggcccgctccgacgcggaaggatccagccgcagaagccaggatgaaggtagcctgcatcacagagcaggtcttgaccctggtcaacaaga

SEQ ID NO: 112229 - DNA, 88 bp, Homo sapiens
ctggaactgctccgcgcttgagggcggcggccgcctgccgcaccacagcgccatcctcaagcgcgaacctgtgggctctgaggacatg

SEQ ID NO: 112230 - DNA, 100 bp, Homo sapiens
ggattgtagccttgacgaggtctgagcgaccatggaccggccggggttcgtggcagcgctggtgtttgtgaagtgtggatatgcaggctctaactttcca

SEQ ID NO: 112231 - DNA, 100 bp, Homo sapiens
aagctaaagaggctgcccagaaagcagttaacagtgccaccggtgttccaactgtttaaacgctttgaacttcaagattcaggaagctctctacttccta

SEQ ID NO: 112232 - DNA, 50 bp, Homo sapiens
gaggcagtacgacaccaggaacagcagggagaacagatcccattccaatc

SEQ ID NO: 112233 - DNA, 90 bp, Homo sapiens
gaaacaaggcttccagtgccaagtatgagcccagaggacctggtcggcccttgtaccaaagaagaatctcatctagctcagttcaacctt

SEQ ID NO: 112234 - DNA, 100 bp, Homo sapiens
gaggttgctaacccagaacactatattaaacatcccctacagaacagttaatgacagttcggactatcacaggaaatatctactatgcaaggtcaggaac

SEQ ID NO: 112235 - DNA, 100 bp, Homo sapiens
cgtcggcccagtcggacggttccgaggcgttgccgggagccgggcgcggctctgtgtggactcggagaaacgcgggctttgaagacgacccccaggctgt

SEQ ID NO: 112236 - DNA, 83 bp, Homo sapiens
taggaaccggggactcaggagtgcccgcgccctgagcgctcagctccagaggcgggtggtgaaggaggagatctttgatgaca

SEQ ID NO: 112237 - DNA, 51 bp, Homo sapiens
acctgcagcacagagactttcctctgtgtgcaacttgctttggtgtttgct

SEQ ID NO: 112238 - DNA, 50 bp, Homo sapiens
ccgggctgccccgcaggatcatcaaggtcaaaatgcagatcttcgtgaaa

SEQ ID NO: 112239 - DNA, 100 bp, Homo sapiens
ctgtgtctcagctgcagagcaggctggagcccaagccccagccccctgtggctgaggctacaccccggagccaggaggtgatcagggccaaagcggtcag

SEQ ID NO: 112240 - DNA, 90 bp, Homo sapiens
aagatttgtaaagaaaactcttaggtcctgtcatttgggcagaggtgggagacaccatcagagtaaccttccataacaaaggagcatatc

SEQ ID NO: 112241 - DNA, 100 bp, Homo sapiens
cgccgagcggagacccgggagcaggagctgggcctaggtctgcgccctggtctcctctgagcctccggcctccataagacccaaaacagatgacacctct

SEQ ID NO: 112242 - DNA, 75 bp, Homo sapiens
cccctttgccaggttcaataagtttaattggttggggtcagataagaagaggagtgacaatcaagccaacagtag

SEQ ID NO: 112243 - DNA, 83 bp, Homo sapiens
cttcagagggcaatgaaggcacagaaatggaagtaccagcagaagatattgagctcctggcagcttgcagagaagaatttcat

SEQ ID NO: 112244 - DNA, 82 bp, Homo sapiens
aaatctaccagtacctgcgcttcttcaccaagaccatctccaacagccggtgctggagaatctggtaaaagcaccattgtga

SEQ ID NO: 112245 - DNA, 83 bp, Homo sapiens
ctcgggtctcgggggccgctctgggatcccggccaccagcaattgtccggttttaaaatcaaagatgggaaaatcggagaaaa

SEQ ID NO: 112246 - DNA, 90 bp, Homo sapiens
tctctacgctgcggggatgcagcccgcaccctggggccccgggtatatgaatgacctaaaggtacaaataaagacggagagagaacagtg

SEQ ID NO: 112247 - DNA, 87 bp, Homo sapiens
cacaacacctgatgaatggtggagagttacgcagagacgagttgtactgctgtcacaggaaatggacgctggattacaagcatggca

SEQ ID NO: 112248 - DNA, 89 bp, Homo sapiens
tggccgccgccgccgccgccgcgccgagcggaggaggaggaggaggcgaggaggagagactgtaagaatgattgatgttggctgatatt

SEQ ID NO: 112249 - DNA, 100 bp, Homo sapiens
tttcacaaatttggaatctgccttctactccatcgtgggactcagcagccttggtgctcaggtgccagatgcaaaggatgtgtttcacatggtagttgaa

SEQ ID NO: 112250 - DNA, 90 bp, Homo sapiens
cgggtcgctgactactgcgaggacaactatgtgcaggtggggtggaagacaacccgtgagtattacaccttcatgtgggttactttgccc

SEQ ID NO: 112251 - DNA, 100 bp, Homo sapiens
ccatgatttcttcctgggaaaggagagaagtggtgatgaccaggaggtgctttttgatcagattttgatggggcaggtggactttccttctccatactgg

SEQ ID NO: 112252 - DNA, 81 bp, Homo sapiens
aagcagccgatccagcctgcggagcctgtggggcagattggtgctgaagacatggacggcttccaggcagacacggaggag

SEQ ID NO: 112253 - DNA, 75 bp, Homo sapiens
gaaaattatggatcaatacaaattttatgacccatctcctcctagaagatatgtgttgagacggattctccgccg

SEQ ID NO: 112254 - DNA, 78 bp, Homo sapiens
gcggcgcgggtgcaggagcaggacttacggcagtgggggctgacagtttttggctttcacccccaaccagtgaccaaa

SEQ ID NO: 112255 - DNA, 99 bp, Homo sapiens
gatctgtctgagatgtacgctaagactgaacaggatattcagagaagttctgcaaaactagatggtggaagacagcaatggagacctgtcctcatggct

SEQ ID NO: 112256 - DNA, 75 bp, Homo sapiens
cgagcagaggcttaaggtcttcagcggggcgctccaggaggcactcacagatccacagtgatcgatcaaaagagg

SEQ ID NO: 112257 - DNA, 82 bp, Homo sapiens
gccgcgcacttcgtcatgttcttcgcgccctgccccatggctgggggttatggagtgatgggtgacgatggttctattgatt

SEQ ID NO: 112258 - DNA, 76 bp, Homo sapiens
ccccaatactgaccatgtctgcacacgattctttttcgtgtgcccctgtagacaatggccctcgtgtctgccgatt

SEQ ID NO: 112259 - DNA, 73 bp, Homo sapiens
cggcggctctctggtccgcagcggcaacagtaacgaaaaacagggctgtttaagaaaatctacgaagaaacgc

SEQ ID NO: 112260 - DNA, 100 bp, Homo sapiens
gacctgcgtcctttttcgtttttcggatgatgccttcaatactacctttatttccaccatagtaccattgtttgttgcaatgaccaaaacccatgtgata

SEQ ID NO: 112261 - DNA, 100 bp, Homo sapiens
attaacaatcgcaaagggaaacttatcttcttttatgaatggagcgtcaaactaaactggacaggtgtttggagaagagggattgaccctgaatcttgaa

SEQ ID NO: 112262 - DNA, 82 bp, Homo sapiens
cccactttctcggcgccgcggctcttttctaaaagtcaaatgcagccctgaggatttggctactgcatataacaacaggggg

SEQ ID NO: 112263 - DNA, 75 bp, Homo sapiens
cttaaaggagtggacattgctagcaatgagctcccaaagccatccagcactttcagaccatgctgaagtctaaat

SEQ ID NO: 112264 - DNA, 82 bp, Homo sapiens
cgacgtcgtgatccagaagtccagagctgaggactgcctgtttgcagcggagctggagtttgttcagatcatcatcatcgtg

SEQ ID NO: 112265 - DNA, 98 bp, Homo sapiens
ggcctcctcagtgcgaagaagctgcagccgcacctggccaagggggagaagccgcaccagtgcgccgtgtgctggcgatccttctctctacgcgacta

SEQ ID NO: 112266 - DNA, 90 bp, Homo sapiens
ttacttggaaagtccaagaggcccaaggaagtgggaaaactcttgcctttgccatcccaatgattcatgcggtgttgcagtggcagaaga

SEQ ID NO: 112267 - DNA, 80 bp, Homo sapiens
gggtgagacaaggccggggtttggctcggattcaccgcgagggtggatgtgaacactgaccggaagatcagtgccaagga

SEQ ID NO: 112268 - DNA, 100 bp, Homo sapiens
tgggcctgagggtccctcatggagggagcaccccagggccctgtggcatgaggaagctgggggcatcttctccccaggtttcatctgatggaaatcttcc

SEQ ID NO: 112269 - DNA, 98 bp, Homo sapiens
ctgcgatggacaaggactctttttctgatccaaaattaacgggacaggctcttattccaggatcagtaatataccacaaacagtcacaaatactattg

SEQ ID NO: 112270 - DNA, 101 bp, Homo sapiens
gccctcccctccccccgtcctgcaagatcttatgcggctaggtgcctgggaagtaacagcaagaggccagaagcggactcctagaagaggggagcagcaag

SEQ ID NO: 112271 - DNA, 100 bp, Homo sapiens
gccttgctgaatcctgctcagagaaaactctacagagatgtcatgctggagaccttcaagcacctggcctcagtaggactcagtggtctttgaggatgtg

SEQ ID NO: 112272 - DNA, 89 bp, Homo sapiens
attcgcagtggtcgcttcttctccttggaggcagttcccatgttatacgcagcagatacttacggagcattgtaatgaagtgtggttct

SEQ ID NO: 112273 - DNA, 82 bp, Homo sapiens
cagagctgttcctattcggccatcttggctcctccctcgcggctatgtgactacgtttgtgacctcctcttagaagagtcaa

SEQ ID NO: 112274 - DNA, 100 bp, Homo sapiens
accgcatctgaagaggagtttctccatcatcccctgctttgtcttcgtggagactgcatccaggtggatccccccgagcggccccctccgccccccagcg

SEQ ID NO: 112275 - DNA, 100 bp, Homo sapiens
ctgcaaggaaggcagctacctagtgcggctcagtgagaccaacccccaggactgctccttgtctctcagggcttcgtgctgtgtcactccatcgctgggg

SEQ ID NO: 112276 - DNA, 98 bp, Homo sapiens
aggattcagagcagatgtgatctgcgctaggtggcatctcctctcacggatgcctcgtgtgtaaatatgttgctgtggagctgaagtcagcctttgag

SEQ ID NO: 112277 - DNA, 75 bp, Homo sapiens
caggattgcttctacttcaggcagtgtcgtgggcatcagccaatgaatttccctgtttgccaaagcaagtggctt

SEQ ID NO: 112278 - DNA, 100 bp, Homo sapiens
ttcaagcatacatcaaggaacaccacaccacgggcctcacatggagcaaaacagtctacctgcaagtcggatttcccaggttattgttggagatgagcgg

SEQ ID NO: 112279 - DNA, 83 bp, Homo sapiens
agaaagagtaattcacgcagagccggctttgcaggaagttctacagactttgaccaagttttgtttccccttctatgtggaca

SEQ ID NO: 112280 - DNA, 82 bp, Homo sapiens
cttggctctgggagacctgctgcacatcgtcattgacatccctatcaatgtctacaagctgccccagtgctcagctgtgaag

SEQ ID NO: 112281 - DNA, 82 bp, Homo sapiens
tgctgctcaaaatttctcttccaggcaccgaccgtcacgagctaacttcctggaagagctttccgtctattttcaaattctt

SEQ ID NO: 112282 - DNA, 76 bp, Homo sapiens
aaaaaagattcagagttggataagcacttggaatcacgggttgaaggggcatatgatattttcctgaatgcaaaag

SEQ ID NO: 112283 - DNA, 75 bp, Homo sapiens
gtttccgcagacagaagtggggagaagcggaggccccttcccagctgcctgcctgccctagccagctcccaggtg

SEQ ID NO: 112284 - DNA, 75 bp, Homo sapiens
gaagcgcggccttcacacatcccagccggtgactgcagtgaggttgggtgggactatatcagcatacaagatagt

SEQ ID NO: 112285 - DNA, 87 bp, Homo sapiens
gagcccgacctcgggcgccccgccggtcacctccgcgcggacaccaggctgaaggtgatgtggccgccctcaaccgacgcatccagc

SEQ ID NO: 112286 - DNA, 51 bp, Homo sapiens
gatgaatgatttggatgcctttggaacagtccaggctctgcagacagcatc

SEQ ID NO: 112287 - DNA, 98 bp, Homo sapiens
tgatacaggatctgattatgaagatcaggttcaaaccttgtactactcagctgatcacaagctgcttgatgggaacctactagatggacaggctgagg

SEQ ID NO: 112288 - DNA, 100 bp, Homo sapiens
ccacggaggcttcgcgggaagacgcggcggcggcggcggaggatgagcctgcagagcgcgcagtacctccgacactacccgaagcagtccttcaccacgg

SEQ ID NO: 112289 - DNA, 50 bp, Homo sapiens
accgtctggagcagctgaaggccattgcagagggaatggcatacatcgag

SEQ ID NO: 112290 - DNA, 82 bp, Homo sapiens
gccgcccgcttccccatcatcgccagctgcacactcttggggctctacctctttttcaaaaatgctcctgagttctccattg

SEQ ID NO: 112291 - DNA, 100 bp, Homo sapiens
agctgcgtttcctgttttaatgttagcgttgttaatactacctgcttttggatagaatgtaaaggaaagaatacccacctcatgtccaaaaagttgaaat

SEQ ID NO: 112292 - DNA, 99 bp, Homo sapiens
gccaccgtctgaactaggatgtcccgacatgaagatgcagacagacatgctgaactatctggaagtccactgaaaagcaaaagcactaggaagcctttg

SEQ ID NO: 112293 - DNA, 99 bp, Homo sapiens
agatgacaactccgcagcaaacaactccgcaaacgaaaaagaacgacatgatgcaatcttcaggaaagtaagaggaggtgacagcatcagacaaatatt

SEQ ID NO: 112294 - DNA, 100 bp, Homo sapiens
agccttactccccccgtgaccccacccatcaccccctcctcttcattccgcagcagcactccgacaggaaggccgctgcttgtttgtcatcctgctcatg

SEQ ID NO: 112295 - DNA, 85 bp, Homo sapiens
aaacaaatggggcaggaaattgggaatgaattggatgaacaaaatgggcaactgtactcctgatgatattggtctgtgaaacccc

SEQ ID NO: 112296 - DNA, 100 bp, Homo sapiens
gggaggagcctgttcccctgaggaaagaaaccttgactggttccccaggatgagagccatgtcattggtcagcagtgattctgaaggagaacagaatgag

SEQ ID NO: 112297 - DNA, 83 bp, Homo sapiens
ggcggagctccacgacgagctggaaaaggaggatacgaagcgttttcggcttcctgcccggagctgtgcagcaaacagtcgac

SEQ ID NO: 112298 - DNA, 75 bp, Homo sapiens
agtgttcattctagttattttttctaacttactgaactttgggagcttctgataattggaggtgttgcagcccgg

SEQ ID NO: 112299 - DNA, 83 bp, Homo sapiens
tctccactttcgccagcccgtgccgcgagcgcggcctgcaggagaagtttgcctgcaatggtactgtaattgagcatccggaa

SEQ ID NO: 112300 - DNA, 50 bp, Homo sapiens
ctgcggcctcctggcgtcaagacccggaatgtgaattggacccttgctgc

SEQ ID NO: 112301 - DNA, 75 bp, Homo sapiens
gcgcactggcaagtgcagcgcctgtaatgtttggcgagtctgcctgccaggagtgaagaaagctttgggcaaata

SEQ ID NO: 112302 - DNA, 50 bp, Homo sapiens
aaaactgaaggactctgaagctgagaatcctgctgcatcacagaagctgg

SEQ ID NO: 112303 - DNA, 82 bp, Homo sapiens
gggccgccgctgctacctgcagcgccgtgtggcacgacacaaaaatcaggaatccattgaagaggccatctccacattcaga

SEQ ID NO: 112304 - DNA, 100 bp, Homo sapiens
cagaagcttacctccgagggtgccgccaagctcctgctagacaccttgttggatggcaagcatgtggtgtttggcaaagtgaaagaaggcatgaatattg

SEQ ID NO: 112305 - DNA, 98 bp, Homo sapiens
aggcccaaaagcgtcaaactcaccaaaaacaacatctttccagaaagaggacctgaaggagaagaaggagaaggtggaggagaaggcaagccggaaag

SEQ ID NO: 112306 - DNA, 117 bp, Homo sapiens
gcaggatggtggtggatgcggccaactccaatgggcctttccagcccgtggtccttctccatattcgaggtgctggagaatctggtaaaagcaccattgtgaagcagatgaggatcc

SEQ ID NO: 112307 - DNA, 90 bp, Homo sapiens
tgagatggtagccaacccctcagatttggacacctcccacactgagtccccaaccccccatgactcaaattcacaccgccctcaactgca

SEQ ID NO: 112308 - DNA, 100 bp, Homo sapiens
tgctaaggcgggatgtgtcagtcaaagcagcctctgaacttctcatgaaactctcagatcattggaaattgtgtgtccatcttggttttgagctctgctc

SEQ ID NO: 112309 - DNA, 98 bp, Homo sapiens
ccttcccagtagctggaactacaggctgggagcctatatgtgagactgaagaattaaccccaaagcaggatttttatgaagaacatcaatcccagaag

SEQ ID NO: 112310 - DNA, 100 bp, Homo sapiens
ggccttagctgtgctcgcgctactctctctttctggcctggaggctatccagcacatgggaaagcggaaccaccaaaaggagtgatgatcaacgatctca

SEQ ID NO: 112311 - DNA, 136 bp, Homo sapiens
aatcgggagccgggcgcggggagctgcgcgaagccggggcggagcacgcgagctatggtactccaaagattcaggtttactcacgtcatccagcagagaatggaaagtcaaatttcctgaattgctatgtgtctgg

SEQ ID NO: 112312 - DNA, 83 bp, Homo sapiens
cagcccgcctctgtgccactttgcatcccacgccggaggaggcattaacgagaccggggcctactctaggtgcggtacttcac

SEQ ID NO: 112313 - DNA, 100 bp, Homo sapiens
tgaaggtgcaggcccggcgccgccactgccgcagccaggagatggttcgggcctagcggagccgggactggaggcattttgttcccaacatcacctttgg

SEQ ID NO: 112314 - DNA, 132 bp, Homo sapiens
gaggacgccagttactgcacggaaagcagcgtcaggagccatagtacctacagcagcactccagattgtaaaccatggctgtgtggatacaagctcagcagctccaaggagaagcccttcatcagatgcaag

SEQ ID NO: 112315 - DNA, 100 bp, Homo sapiens
aacctgcgtgaggtcaacctgcgcccccagatgtcccaggatggagccctggggctgtcgctggagatcggggagaaccgcctggtgatggggggccccc

SEQ ID NO: 112316 - DNA, 83 bp, Homo sapiens
ccgcgggggagccccgggagccgcacggcttcaacggaccacaccaaaatgccatctcaaatggaacacgccatggaaaccat

SEQ ID NO: 112317 - DNA, 96 bp, Homo sapiens
gctggctgcagtaaaaatcattaaattggagcctgattgctgctctctgaacactatagtcgtcgaatctcacaagcgtacggtctgatgaatgaa

SEQ ID NO: 112318 - DNA, 83 bp, Homo sapiens
cctgtcacaggccatgctctggcaaaaacagtaatcaagtcagaggattatatgacttttatctgcctagagaagaactatgg

SEQ ID NO: 112319 - DNA, 75 bp, Homo sapiens
cactgaggaaggaaaatggagcccggagcttcctgtctgtgctcataagcaacgatgtgctgagctgaagaaagc

SEQ ID NO: 112320 - DNA, 74 bp, Homo sapiens
ccccggcccacagtgggggtgtgcaaacccgagagaactgggtcctgaacgaggctgtgggggccctgatgtac

SEQ ID NO: 112321 - DNA, 75 bp, Homo sapiens
atgatcacatggactggttaaataagaggctggacagtcattttgtttactcattcagccctgttgcaggtccca

SEQ ID NO: 112322 - DNA, 90 bp, Homo sapiens
ccatgcccaagagaggaaagcgactcaagttccgggcccacgacgcctgctccggccgagaccatggacccgcacagcggccgctggctc

SEQ ID NO: 112323 - DNA, 75 bp, Homo sapiens
cccagatcttcattgtgggccggcccaccaagaagtaccaaacccagtgccagccctagggtggtcccaaccatg

SEQ ID NO: 112324 - DNA, 74 bp, Homo sapiens
ctgccatgaggactatgattcaacaacagggagggtctattgttaatgtagggaaaacaaagtgcatgatgaag

SEQ ID NO: 112325 - DNA, 82 bp, Homo sapiens
acaatgattctgaaaagaacggagcttgaagcaaagctgcaggttttaaaggacacaactcagatgggaagttcatcgcccg

SEQ ID NO: 112326 - DNA, 83 bp, Homo sapiens
cctggggatggcgcatcacacaccaaagatatcatggtggaagagtttgtggaagggggtcctctggatctcttcatgcaccg

SEQ ID NO: 112327 - DNA, 98 bp, Homo sapiens
cggctacttctcagctttaccatccctggaggagacctggcagcaggaaagaccacagcaagattctttcattcgtctcctcctagcctgggggacca

SEQ ID NO: 112328 - DNA, 100 bp, Homo sapiens
ctgctcactaccaagttcgtgtcgctgctgcaggaggccaaggacggcgttctggatctcaaagcggattttttatcaagcagaaatgcatcgaacaacg

SEQ ID NO: 112329 - DNA, 90 bp, Homo sapiens
cttttcttaacctgggaagtggaaccggatatttaagtacaatggtgggcttaattttaggtgcctccgaagaagccctaagtgccgtgg

SEQ ID NO: 112330 - DNA, 98 bp, Homo sapiens
gaaagaaggcgatccgagttctgctacttcctagtaagggacgtctctggagagattctgaggtgtttgaggtggtttgtgatgaaaatggttccaag

SEQ ID NO: 112331 - DNA, 100 bp, Homo sapiens
agcaagcatgcagcttactgcttgaaagcacacactcacgggacacagtgggaaagtgctgtctgctaagttcctgctggacaatgcgcggattgtctca

SEQ ID NO: 112332 - DNA, 90 bp, Homo sapiens
tcgatctgacaatgctaggagcgatgcaggtttccaaatatggtgacctggctaactggatgatacctatgcaaatagtacggtattccg

SEQ ID NO: 112333 - DNA, 90 bp, Homo sapiens
gttggagacagttggtgtgtttgaggtgccaaaacagaatggaaaatatgagaccgggcaggacttggacgaggacgactttgacgtggg

SEQ ID NO: 112334 - DNA, 50 bp, Homo sapiens
gagttctgcgagtgttacacttgcgaaagtagagacggggtttcgccatg

SEQ ID NO: 112335 - DNA, 75 bp, Homo sapiens
tcgggctgctggtgctgtgcgcgaggctcctcactgcagcgaagggtcatcttccacgatgttgctgtgctgacg

SEQ ID NO: 112336 - DNA, 83 bp, Homo sapiens
gacaagtttgcagatcgggagcgcaaggtcgccctcaaggccatgatcaaaactgttttaaccaaacagttgtggctactcat

SEQ ID NO: 112337 - DNA, 100 bp, Homo sapiens
cgaagagcttcgtcagcggctcatcgagactgagctggctaagcaggtgctgcagacggagctggagcgaccgagagagacagggtctggctctgttgcc

SEQ ID NO: 112338 - DNA, 100 bp, Homo sapiens
cgtttacgagtttactgcatcagtgatggaggacagagtgcggttagctccattcagaaccaaatgcagtccaagggaggttatggaggtggaatgcctg

SEQ ID NO: 112339 - DNA, 100 bp, Homo sapiens
cagaagccgacaaggcgttcaagcgaaaacatgaccgctgagcccatgaggagccctggtattccttgaacatgcatacctttcccagcgtgagggacat

SEQ ID NO: 112340 - DNA, 96 bp, Homo sapiens
ggaggcggcgaatcacttataaatggcgccgaagcaggacccgaagcctaaattccaggagggcacaaatatttaaacatggaaaacgtgaagact

SEQ ID NO: 112341 - DNA, 101 bp, Homo sapiens
agagtcaagttcttcgtggagcctcatctcatcttacaggagcagactagctataaggaagaccagatggatgagaaactaatggaacctctgaaatatgc

SEQ ID NO: 112342 - DNA, 100 bp, Homo sapiens
cagcatatttgagtcatttccttcgtacccacagtgcttcatgagaggtgtgttcatcctcgaggtggtgtgattcagagtgtttcttcatggaagcatg

SEQ ID NO: 112343 - DNA, 90 bp, Homo sapiens
gctgctggcgcgccacgagcagtcctcctgcaaggagaatccttttaaccggaagccatcacctgcagcgtccccagccacaaagaaggc

SEQ ID NO: 112344 - DNA, 75 bp, Homo sapiens
aggagtcggaggagccgcgggcggcgcggcccagctcgttccaggatgcagcaccgaggcttcctcctcctcacc

SEQ ID NO: 112345 - DNA, 90 bp, Homo sapiens
gctcctgctggccgcctggacggctcgggcgctggagatttcgccagaagtttgagtatcactactcctgaagagatgattgaaaaagcc

SEQ ID NO: 112346 - DNA, 100 bp, Homo sapiens
tgctgcacctgccttcagaacagggcgctcctgagaccctccagcgctgcctggaggagaatcaagagctccgagagtccctgcaggaagcatcacccag

SEQ ID NO: 112347 - DNA, 90 bp, Homo sapiens
agcttcaccacgcggctgcacaactgcaggaacaccgtcacgctgctggaggagagtggagcctttcaggctggcatggagagcttaagg

SEQ ID NO: 112348 - DNA, 100 bp, Homo sapiens
tagccctcctactgatgaacagttgaacatgaagaatactggaaagttgctatgttttgagtcctgtgtatggaaactcacatgagtcagctcagtctag

SEQ ID NO: 112349 - DNA, 87 bp, Homo sapiens
aaaagtgaacttttcgaggcatttgacttgtttgatgttcgtgactttggaaagcggaatagaagatgaactcaactgaattcaccg

SEQ ID NO: 112350 - DNA, 99 bp, Homo sapiens
cggcaacatggtgcggtcggggaataagtgataacaatccatattcctcatttggagcaactctggtgagggatgatgagaagaatttatggagtatgc

SEQ ID NO: 112351 - DNA, 100 bp, Homo sapiens
aaccagtgagtgaccttggaagtggatccttcccccgaaagcccggctttcagggccaggaaggaatactgggagaatcttcggatagcctcaggccggc

SEQ ID NO: 112352 - DNA, 100 bp, Homo sapiens
tcccagcctggagcagccggaccagcccagaaggcagcggcggcccaggccagcattcccgcacctcttcgagcactactgctactcccggggcggcatg

SEQ ID NO: 112353 - DNA, 75 bp, Homo sapiens
agagaaccgaggaacgaagaaacagacattcaacatgattgcatttgaagtgacttaagagattaaaattaattt

SEQ ID NO: 112354 - DNA, 99 bp, Homo sapiens
tattgaggaagattgtgtggtcaacgcagcacagattggttcctatgttcatgttgggaagaactgtgtgattggccggccaaggattgcgaaaaggac

SEQ ID NO: 112355 - DNA, 90 bp, Homo sapiens
tttaccagagataattgataacaccctgtaacagctgagcagcaaatatgaagtctatggaccctgcctcaggttattcaaataacatcc

SEQ ID NO: 112356 - DNA, 100 bp, Homo sapiens
cttgtttggactctctgctcctctagaagatttcacagcaatgctggactgcagtgactatgttctagtttttgaagagccggaagatccaagcaacaga

SEQ ID NO: 112357 - DNA, 89 bp, Homo sapiens
gcatgtgaacacgaacactctaattgcctcctgatagcacacagaaagttgccaccttccagagaagaggtacgagatgacaagacaac

SEQ ID NO: 112358 - DNA, 100 bp, Homo sapiens
cattctggattccagaagatttaactacgtggtccggggagaaaactggttgtcctggatgtttgaaaagttggtcgttgtcatggtgtgttacttcatc

SEQ ID NO: 112359 - DNA, 89 bp, Homo sapiens
ccacagaggacagcaggacttccaaggagagcatgtcggaggctgatcgcgcccagaaggttggcctcattcagcttgggcaggagcag

SEQ ID NO: 112360 - DNA, 100 bp, Homo sapiens
gcacaaagggacactatagaagaatgtttgcttgccatttgcaagcagcctggcatcctcgctacaacctcattgttgtgggccgatacccagatcctaa

SEQ ID NO: 112361 - DNA, 100 bp, Homo sapiens
atttcccaagagaagagccaggaggaagaaagaatggctgttgggcttcttaaagccatgtaccaggagcctgtgttggaagagatggtgatgggcctgg

SEQ ID NO: 112362 - DNA, 51 bp, Homo sapiens
acctgctcaagctctcttaagagattatggacacaactcagatgggaagtt

SEQ ID NO: 112363 - DNA, 97 bp, Homo sapiens
tgatctccagcgccggcctcctcagtgcgaagaagctgcagccgcacctggccaagggtgtctttcctgaagactatcttcccgtctcaaaatggac

SEQ ID NO: 112364 - DNA, 100 bp, Homo sapiens
agcaagatctcagtcagagtaggaaataattttcacaaccttcaagaaattcgggatcttatggttggtgatgaggcaagtgaattacgatcaatgttag

SEQ ID NO: 112365 - DNA, 100 bp, Homo sapiens
gctgaacaaagtcagccacaaagcagactagccagccggctacaattggagtcagagtcccaaagacatggattgaaaaggaagatcaggccaaccccaa

SEQ ID NO: 112366 - DNA, 100 bp, Homo sapiens
actatacaaaacatccttctaaaccaggtttctggccagaagaaccaactccacattcaaccaggttgtgttgaagaggttgtttatgagtcgcaccaac

SEQ ID NO: 112367 - DNA, 100 bp, Homo sapiens
gtctgccactcggctgccggaggccgaagacttcgacccccaccacttctggcagtggagcagcttctcggactacgtgcagtgcgtcctggccttcacg

SEQ ID NO: 112368 - DNA, 74 bp, Homo sapiens
cctgagtgactgcgtcaggcatctcaatcatgccttcaaagaaaaacctcggtatccaccaagtcaggctcaag

SEQ ID NO: 112369 - DNA, 75 bp, Homo sapiens
cggatgttcatgggcagcaccatcgagccagaagcagtatttgtcctggctggcgcccatgcggctctacacgct

SEQ ID NO: 112370 - DNA, 83 bp, Homo sapiens
cccctgcagcggaaccggacccagtccctgagccgcccctacacccacaggcctgtctgaagagcatgcagcccccttactcc

SEQ ID NO: 112371 - DNA, 82 bp, Homo sapiens
gccaagaaggagaagcagctgcggaaaatgctagaaggtcaaaatgcagatcttcgtgaaaacccttaccggcaagaccatc

SEQ ID NO: 112372 - DNA, 100 bp, Homo sapiens
agctatgcaaatatagaacactaaagtgttacatgacagatgtatgagctactacccacagatggcatgatccgaaaacactctcatgtcaagatagggc

SEQ ID NO: 112373 - DNA, 98 bp, Homo sapiens
agaattatacctagaagtctactaatggacagttagtcacccacctacatgttgaggccaagctataacatcagaaatggtgaatgaatacaagaaaa

SEQ ID NO: 112374 - DNA, 100 bp, Homo sapiens
agtccaaaggggatcccactgctaaaaaggttaatgttgaagaaggaaaatgcggaagtcgtcatttgacaagttttataaatgagtatttgaagctcag

SEQ ID NO: 112375 - DNA, 75 bp, Homo sapiens
caccctcccgagttgaaaaagagggtgcatctgcccggaagactcagactcctgcagcccagccagtaccaagac

SEQ ID NO: 112376 - DNA, 51 bp, Homo sapiens
ctttggactgagctatgccagactcagaattgagcccctgagtcctgagtt

SEQ ID NO: 112377 - DNA, 100 bp, Homo sapiens
tgtatcacctatagaaagaaatgagcagctttggataatgacgacagcaacccgaagacagggaaatttaggctttcatctgagtggcacagtaactgag

SEQ ID NO: 112378 - DNA, 100 bp, Homo sapiens
caacaagtacaagcggcgggtgccccggaatctatctaccgccggggagccagaagatggaggaagctgtaccgtgccaacggccacctcttccaagcca

SEQ ID NO: 112379 - DNA, 100 bp, Homo sapiens
aatgttcttaatggcatctagaatgcaaaacttagagagtaacctcaccaaccttattaagaggaacacagaactggagacccttttggctaaactcatc

SEQ ID NO: 112380 - DNA, 97 bp, Homo sapiens
ataatattctcttcagagattctgcaaatgcgacaagcctcccagccagtatttctaaaggagacttcagattgttcctacttgtttgagtggcgaa

SEQ ID NO: 112381 - DNA, 100 bp, Homo sapiens
cttaccagccagccccaccaagtgctggccagtgagcccatcccgttctctgatttgcagcagaccccatatcatgtgaacctcctcctggctggctatg

SEQ ID NO: 112382 - DNA, 74 bp, Homo sapiens
gaatattggctcactatttttcctctgggcatgttccagcaacagatagaaatgctttaagttcactctgggga

SEQ ID NO: 112383 - DNA, 76 bp, Homo sapiens
gccatctgaagatgacatcaaggggcagtgggaccgcttggtgatcaacacacctagagacggggtttcgccgtgt

SEQ ID NO: 112384 - DNA, 75 bp, Homo sapiens
tggacattggagagagtggtattatggtgtaaacaacgattctttggagaattatatccagatcgagagacagaa

SEQ ID NO: 112385 - DNA, 106 bp, Homo sapiens
gcagctggtgagtcggtgacctggcctgtgaggcatattctcaagatgcctacctgaaaggcaacgaagcttatagcggcaatgcccgcaatatacctgaacctcc

SEQ ID NO: 112386 - DNA, 100 bp, Homo sapiens
tggggaaaaggcaaaaatcccatctaccgcaactctcagttcgagagtaaaggagcggacatgataagcatacataatgaagaagaaaatgcttttatac

SEQ ID NO: 112387 - DNA, 83 bp, Homo sapiens
acagatggaacagaaaagatggattcagttatttaaggaagaacatacttcgtttcttagatgcagaacgagatgtgtcagtg

SEQ ID NO: 112388 - DNA, 100 bp, Homo sapiens
tctacgattgcagcgcagtggaagtcaagagcaagggctttttggtggtgctggagttggcaagactgtactgatcatggagttaatcaacaatgtcgcc

SEQ ID NO: 112389 - DNA, 99 bp, Homo sapiens
catgccgctcctaagcctgcacagccgcggcggcagcagcagtgagagcacttgcacctcctgcgccgccgccccccatccaaggatatgccttcaagc

SEQ ID NO: 112390 - DNA, 100 bp, Homo sapiens
cattgaccagaaggtgtatgagatccaggacatctatgagaacaggtgcagagattcttagaagaggaggtgtatcccctgttaaaaccatatgaaagcg

SEQ ID NO: 112391 - DNA, 95 bp, Homo sapiens
aaatccgttttgaagattgttgagaaattggatcttacacttgaaatacagactgttggggaacaagaggtccttggtatagtagtgggagttct

SEQ ID NO: 112392 - DNA, 100 bp, Homo sapiens
gagccaccacgcctggcctcactcaaacagtaaacgagatcgtcagtatttaaacagatcacatcatgcgtgagtacaagctagtggtccttggttcagg

SEQ ID NO: 112393 - DNA, 100 bp, Homo sapiens
agtcaccactggacctccaaggaagccacgtgcagacatctacaaccttcgatctcctgacgagggctttgttatgcacctaaagccatattggaagctc

SEQ ID NO: 112394 - DNA, 100 bp, Homo sapiens
gacacagccgaggcccagagcctgaagcccagcaaagccgacctgcggtggaagcacacctcctccctgaaggtggccaacgagcccgtcttagccttca

SEQ ID NO: 112395 - DNA, 100 bp, Homo sapiens
gagcagctctcccacagcgtggcggcgcagttgtgtagcagttgagtaatgctggttagctgttaaggtggcgtgttgcagtgcagagtgcttggctgtt

SEQ ID NO: 112396 - DNA, 98 bp, Homo sapiens
tggaagatgcagatgagaaggttcagttggcaaaccagatatatgacttgtctcagaccagtatccttcaggggttctcttactctgatttgcggaaa

SEQ ID NO: 112397 - DNA, 100 bp, Homo sapiens
agcctgtatcaactctggtatggacacagcttctagtgttgctttggatcttgtggaaagtcagagttttgaaagagggaaggaagatatttctcaaaat

SEQ ID NO: 112398 - DNA, 100 bp, Homo sapiens
gcgagtgaggaaaggaggtactgtaggttcaccggaacagcacaatccgccctggctgtgatgtgaatccctcctgcgcactgtgtggttcaggcagcat

SEQ ID NO: 112399 - DNA, 75 bp, Homo sapiens
agcagcaccaaatccaagatggcggccagcaggaggctgatgaagttcccagtgacctgacagcagaggagcgtc

SEQ ID NO: 112400 - DNA, 83 bp, Homo sapiens
cgtgtcctgaaggagttccaccaggccgggaagcccatcggccatggattgcaaagatagaccagcttttccagttaagaagt

SEQ ID NO: 112401 - DNA, 96 bp, Homo sapiens
gccatcgttgctgccttcttcgtcaagtgggccccatgctgattgagtttaacatgcctgtggacctggagctcgtggcaaagcagaacccaaatg

SEQ ID NO: 112402 - DNA, 100 bp, Homo sapiens
ctactgggttattaatcctgctgacagtagtggcattacacctaaaggattagcaagccaaaaaggggctcctcaccctcaccgtgagaacccgcctgac

SEQ ID NO: 112403 - DNA, 51 bp, Homo sapiens
aggcctgggggaccagaagcaagagacaaatttacatgtattggagaccag

SEQ ID NO: 112404 - DNA, 101 bp, Homo sapiens
atcatcaacgtggaaaaaataagggcaatgcagttttcatgtgtgtaagcctctacggcagacacatgcaggccaacccagaaccaccgaagaagaataat

SEQ ID NO: 112405 - DNA, 100 bp, Homo sapiens
gaatatccaaagccattcactacctgcacaacgttcaaccatgctcggtcatctgtggcagtatatcaaggcaaaaactgattattccaagtggaagttg

SEQ ID NO: 112406 - DNA, 75 bp, Homo sapiens
aagtgcagaggtttttttctgcttcaagaatccagaggctttaggaagaagataaaacgccttgaggagtcaaac

SEQ ID NO: 112407 - DNA, 90 bp, Homo sapiens
tgaagacccctacgctcaaggtgttcatgcacgaaaacctctacttcaccaaccggaaggtcccagtagggatggcacaatcagcgagga

SEQ ID NO: 112408 - DNA, 74 bp, Homo sapiens
tcatcatgaaggacgtgcccgactggaaggtagagcagagccggagccaggtgcaggccattggagagaaggtc

SEQ ID NO: 112409 - DNA, 97 bp, Homo sapiens
aaaattaggaagactgaaaggcaaggccatttaaatgtgccaatggaagcactgttgtgaagaacttatgaaaattgagattatgtcaccacggaaa

SEQ ID NO: 112410 - DNA, 100 bp, Homo sapiens
cagagagctgcagaagccagacagcttccacagcctgacgccgaccttcgcaggtgacttcatggtcatgacgattttcttcaatgtgagcaggcggttt

SEQ ID NO: 112411 - DNA, 100 bp, Homo sapiens
agctgagaagctaaaggagctacagaacgaggtagagaagcagatgaatatgagtccacctccaggcaatggttttcggaggcggcggtgattatgggtg

SEQ ID NO: 112412 - DNA, 82 bp, Homo sapiens
gaagaagtgcccagaaggtcggggctgtcggccggccacagggatgtcttttactatagatagcctgggctggaagctcttc

SEQ ID NO: 112413 - DNA, 97 bp, Homo sapiens
cgagcgggcgggcgggcaagccagacagctgggccggagcagccgcgggcgcccgaggggccgagcgaggtccctcgtctgagctggctcactcgcc

SEQ ID NO: 112414 - DNA, 75 bp, Homo sapiens
tggacagcttggcctggtaggatcagaggaatgcatcagagtacccagcataagcagtactataatggatgtaga

SEQ ID NO: 112415 - DNA, 74 bp, Homo sapiens
gaaaacttacccggaggatacagtggaataggactttgctataaaacacgtgaccctagggaaacttttgaagt

SEQ ID NO: 112416 - DNA, 50 bp, Homo sapiens
ggcagcattttttccagaacacaaaaggagcttcctggacgatttaacag

SEQ ID NO: 112417 - DNA, 100 bp, Homo sapiens
tgctgtggaggctgaggaggcggcggcggagatctggagtgatcagcagctggactgtgccttggacctaatgaggcgcctgcctccccagcaaatcgag

SEQ ID NO: 112418 - DNA, 100 bp, Homo sapiens
gtggtcagagcgagtctcggagaagatgtggtggcttccgtttgttggtggaggaggtggcaggcctcggcggagatgttaaacatgtctaagaaaacag

SEQ ID NO: 112419 - DNA, 83 bp, Homo sapiens
agaagaagatgaagaaaccagcttgatatgttggttgtcttttggaaatgcaggtttaaggacaaattatctgcttaagctag

SEQ ID NO: 112420 - DNA, 98 bp, Homo sapiens
attttcgagagccgaatgcagaggttccaagaccaattccccttatggctgcagcttcgattgccaatattgtaaaaagttctcttggtccagttggc

SEQ ID NO: 112421 - DNA, 50 bp, Homo sapiens
aactggttctacacgcgagctggtacatctccgttcatggatgcattaac

SEQ ID NO: 112422 - DNA, 82 bp, Homo sapiens
gattcatttagagctgcggaacaggacgccctctgatgttggatttggtctagggagtcccagaaagaagtagaaaaagaga

SEQ ID NO: 112423 - DNA, 82 bp, Homo sapiens
agatgcaccgggcgttccaccccagcgagccccgcaccccagcccgcagctcggttttaaaatcaaagatgggaaaatcgga

SEQ ID NO: 112424 - DNA, 100 bp, Homo sapiens
gggagattccggcctggagctcccagggccgagatggcccactgcgtgaccttggttcagctgtccatttcctgtgaccatctcattgacaaggacatcg

SEQ ID NO: 112425 - DNA, 98 bp, Homo sapiens
aaacatacagtcgcctctgacaagccaggtatatgagggtgggagcaacgtggaccagtttgtgacccgcttcctcctgaaggagacggccaatcaga

SEQ ID NO: 112426 - DNA, 75 bp, Homo sapiens
agacaagacggatgtgatgctggagagattaaacagattctagaaaatgaacttcagatacctgtgtccaaaatg

SEQ ID NO: 112427 - DNA, 75 bp, Homo sapiens
tcatcaacaaccagacagggcagcacgccgtcattgacatcaatgccttcccagcggaaggagagttttacatgg

SEQ ID NO: 112428 - DNA, 141 bp, Homo sapiens
agcctgtgttgtacagcagaaagatgccaggcaatggtttgctgagctttctgtggatatggaaaagggaccaccaagctcaccgcagagcgcagcctccgcggacccgaggaccgccctgcgcgcagtctcgagcagcaa

SEQ ID NO: 112429 - DNA, 82 bp, Homo sapiens
cgggaagtgtgaagcggccaatggcacggaggcctgcgtcagcccctgtcaaagggaacaggaagcagtccacggagggtga

SEQ ID NO: 112430 - DNA, 140 bp, Homo sapiens
gtacacctgctctgtgcagacagacaatcatcccaaaacgtcccgggttcacctaatagtgcaagctggttcgatgcccagaactgaatgctgtgctccagctgtggcctcaccggtgctgaatagagaggaagagccac

SEQ ID NO: 112431 - DNA, 89 bp, Homo sapiens
cctggtcttcgggctgtcgctcgtctacttcctcagcagcaccttcaagcaggtgaaatgacaatggatgctctgttggctcgattgaa

SEQ ID NO: 112432 - DNA, 98 bp, Homo sapiens
ggtgagccgcatggagccccgggcggcggacggctgcttcctgggcgacgtggaatatcctccgaatcctaaatctagagctccaaggatgctggtca

SEQ ID NO: 112433 - DNA, 75 bp, Homo sapiens
ccatcgaacattccgagaatgcgagagaaagagcctccgtcaccacatactcaacatcctggtggatacaggcag

SEQ ID NO: 112434 - DNA, 50 bp, Homo sapiens
aaactgaacttataatcgtcactggattactatctgttatagtccctggg

SEQ ID NO: 112435 - DNA, 83 bp, Homo sapiens
cgcggcacagcgaggcgccggcccagactccactccccagctgtgaaagggatttttagactctgaggagcagttggagctaa

SEQ ID NO: 112436 - DNA, 88 bp, Homo sapiens
tccatccacgaggcctggactgacgagagaatggcttactacacctccaggatgcagttccccatggagatggcggcagctccgggac

SEQ ID NO: 112437 - DNA, 99 bp, Homo sapiens
agtgtggctggtgtggcaatgaggacaaccccacactgggacgatcatccagctgaccccggtgcctgtgagcacacccagcggcctggtgccgcccct

SEQ ID NO: 112438 - DNA, 100 bp, Homo sapiens
tctatcaaggggctggtgtactccagcaacttccagattctgaaaaagagttccacgtcctcccttatcgagtctttgttccccttcctggatccactgt

SEQ ID NO: 112439 - DNA, 83 bp, Homo sapiens
ctcggccgcgcggactgaaggagactgaaggggcgcagcccagtggtttggagtcagcggcgactgggaggggcagcggcagc

SEQ ID NO: 112440 - DNA, 100 bp, Homo sapiens
caacatttcctgcatgtccaaaatgggagacaggcgcctgagtaacccggggcaagattctgtttctggcgtctgcatacgcaagtccccaactcgctga

SEQ ID NO: 112441 - DNA, 89 bp, Homo sapiens
ggtgattctgaagcttatattgttggatatgtcaagtgaccagatagctgccaatctgcaagcagttattaatgaagtttgtaggcaca

SEQ ID NO: 112442 - DNA, 73 bp, Homo sapiens
gaaaggaaaagactcatatcaacattgtcgtcattggacacgtagattcggttaaacacagtgggaatatcac

SEQ ID NO: 112443 - DNA, 100 bp, Homo sapiens
ttcagagttctttgtggatggacttgattctgatgagagcccctcatatggaaaatttgaaatgcagaggggaaacagtagcaaaggagatcagtgaagc

SEQ ID NO: 112444 - DNA, 75 bp, Homo sapiens
agcatggctacttcatattttggaaagcagtttttaagacaaggagaaacaaaggcagcgctgccctcgggggag

SEQ ID NO: 112445 - DNA, 82 bp, Homo sapiens
ggggaggatccggtggcagtttaacaccagagcagttggttgaatctggcgatgtggaacccatggatatggagggctgact

SEQ ID NO: 112446 - DNA, 100 bp, Homo sapiens
gaggaagaaacccagaagaggagagcaaaggagtcaggaatggcttttactcaggtacaccttgactgtccctggagacagcccctgtgctcgagttggc

SEQ ID NO: 112447 - DNA, 75 bp, Homo sapiens
aggatgtaagtgcgtttgaaggcttccacaccctctactccaggaaacgcttcgttaagggactcaggcagtacg

SEQ ID NO: 112448 - DNA, 83 bp, Homo sapiens
accacctccgagggaggagccacgtcgccgacctcgccttgagccttcacgtaaatgggtccagtcatgcctcccagtaagaa

SEQ ID NO: 112449 - DNA, 75 bp, Homo sapiens
gccgggtgtttatctaccagagaagacagatgggagttttgtggttcatgatataccttctggatcttatgtagt

SEQ ID NO: 112450 - DNA, 100 bp, Homo sapiens
gtgctaccgaagtcatctgttgctgtagggaggccagggactcagccgatgcctcaatggccaactgcagagtgcctggaagagctgggatgtctggttg

SEQ ID NO: 112451 - DNA, 90 bp, Homo sapiens
tttcccgctcgcagagagccggcttgcagtaacaaatgtggcaattattttggatctatcacctgtcatcataactggcttctgcttgtc

SEQ ID NO: 112452 - DNA, 100 bp, Homo sapiens
ggggaccaggacagtcgcgaggttcgagtgttgcagagcctgcggggcaagatctagttggcgtggacctggatgaaaatctgaaggaggacccctcctc

SEQ ID NO: 112453 - DNA, 100 bp, Homo sapiens
gccatcctgctgctcagcccacagggagcccactccttcatcaacgagactgtggatattcataaggagaaagtggcacgaagagagattggtattttga

SEQ ID NO: 112454 - DNA, 149 bp, Homo sapiens
ctcgcgcccgtagccgggctgggccagaacagcccaagatggccgacttcgatgatcgtgtgtcggatgaggagaagataaacctctcataatgaaggcccccgctgtgcttgcacctggcatcctcgtgctcctgtttaccttggtgc

SEQ ID NO: 112455 - DNA, 101 bp, Homo sapiens
tcgctcgtctgcctgctgcgccacggcggccggacggtggagaacatgaggactttagccggttgagaaggatcaagcaggcatttggagcacaggtgtct

SEQ ID NO: 112456 - DNA, 100 bp, Homo sapiens
ggctcccttcgccaaactcttcattttctctgtggtggtatcatggatacagaaatgtctgaagatatagaccacaacttaactcctacccttgacagca

SEQ ID NO: 112457 - DNA, 97 bp, Homo sapiens
aatgtctcttcaatctccagaaaggtggataaatatttgaaagaaattcttcaagatttggttaagaaccttacaagcaatatgtggcgagttcgag

SEQ ID NO: 112458 - DNA, 100 bp, Homo sapiens
gtaggaggagttggcggaagcacttggaactcctttataagtgtcagctgtgagcccccttacccaggaatggaacaacctccacaccatccttactatc

SEQ ID NO: 112459 - DNA, 75 bp, Homo sapiens
cccagctgcaggagcgttggcaccgagtcattgcccagctcgagattcgatcagccaaatggccgatgacacagt

SEQ ID NO: 112460 - DNA, 75 bp, Homo sapiens
aagaggatggagagggcaacgtttggattgcaaagtcatcagccggtgccaaagaaagttactgtggcccatgtc

SEQ ID NO: 112461 - DNA, 101 bp, Homo sapiens
gagcaggcccagcaagaggagcagtccagcggcatgaccattttcttcagcctccttgtcctagataaagactatttcctgattgtgattcagaatccaac

SEQ ID NO: 112462 - DNA, 100 bp, Homo sapiens
ttctcgactggaccgggttggtggcctgaatgtattagcttcgctgcgtctgcccaagagctatggaagtgataaacaagtccagtgttaagtattcagt

SEQ ID NO: 112463 - DNA, 90 bp, Homo sapiens
gtggacatctgctgccggaaggggtcccgaagccccctgcaggaactctacaacccaatccaggtgattgaagatagtactggagtccgc

SEQ ID NO: 112464 - DNA, 100 bp, Homo sapiens
attctgacgccctcaaggtcgccaaggaggtggacccccaggttccaggaaggatgttacctttgacgatgacagtgttaatcctgctgctgctccccac

SEQ ID NO: 112465 - DNA, 74 bp, Homo sapiens
gtagctctgctaattgggccaaatgctcctttaatttttgaacgaggagaattctcaccaaatgttcccaaatc

SEQ ID NO: 112466 - DNA, 74 bp, Homo sapiens
ccgcaacctccgccagcgtcggtccctgggcaggtgtggtgagagtctgagaaaactgtgcgtcttcaagaaaa

SEQ ID NO: 112467 - DNA, 98 bp, Homo sapiens
gagcttgcattccagcctcccatttccaatcatcctgtgtccccagttgtcctcatccagggtgctattcgagtccagcctgaagggccggctccctc

SEQ ID NO: 112468 - DNA, 90 bp, Homo sapiens
tgagaagtgaggagcccctccgcccggcagctgccccgtctgagaagtgattgatgagatttatcgtgtgttgagatatgtcaattctac

SEQ ID NO: 112469 - DNA, 100 bp, Homo sapiens
gaagatgcccgccctgcgccccgctctgctgtgggcgctgctggcgctctggctgtgctgcgcggcccccgcgcatgggccaattcctgtccccccagca

SEQ ID NO: 112470 - DNA, 75 bp, Homo sapiens
ttagggtcctttatatagaagggagagtaggaatttcacgtttctgaagattttaataaaatgaactttatcaag

SEQ ID NO: 112471 - DNA, 82 bp, Homo sapiens
ggggctcaagggcgggccagaggtggtagcatgccagagctgatagacacacaccttagctggatacaaaacatattatgaa

SEQ ID NO: 112472 - DNA, 80 bp, Homo sapiens
gagcaaaatggcggatcatgtgcaggccaacgcagacccgtcagtgataaactgtctgcataacctgtcccgtcgtatcg

SEQ ID NO: 112473 - DNA, 99 bp, Homo sapiens
aggacccgggctttagctatggcagcggcagcaccgggagtcagcagagtgaagggagctgctgttgacggaggcaagttggatgtcgggaatgctgag

SEQ ID NO: 112474 - DNA, 90 bp, Homo sapiens
atatcctggcaaagcgagagaaagaatatgtcaacattcagactttcaggaaacatgttcaaccaaatggcaaagtgggtgaaacaggac

SEQ ID NO: 112475 - DNA, 75 bp, Homo sapiens
gtgttactccattgctgaggagtgggttacattccgaaaagcaaatgggagatggacacatctgaggcaaagcta

SEQ ID NO: 112476 - DNA, 75 bp, Homo sapiens
ggacctgcagcagctgagaaaggagctcggggactcccccaaagacaaggctcctcctgctggaccctccagccc

SEQ ID NO: 112477 - DNA, 74 bp, Homo sapiens
acctttgacctcttattcgtaacattactgtggataatagagttaaatgaagatgagaatgtgcctactgctcc

SEQ ID NO: 112478 - DNA, 100 bp, Homo sapiens
tgtcattgggccaaagatagagattccggtacattatgcagatgcagagccgaaatatctgatagttgtgcgacctgctccacctccaagtcaaaagaag

SEQ ID NO: 112479 - DNA, 80 bp, Homo sapiens
atcgttgctgccttcttcgtcaagtctgcaaaatgaatgttcaccgtcgatgtgagaccaacgtggctcccaactgtgga

SEQ ID NO: 112480 - DNA, 101 bp, Homo sapiens
gcctggctggctggacaggccccgactgctcccagcgttcggactaaggatcaccgctttgaaagtgtcagtcaccttatcagctaccacatggacaatca

SEQ ID NO: 112481 - DNA, 98 bp, Homo sapiens
tgccggtgccggcctagcgtcctggaattacttcaatcaaggctacaacagaccaaaagcttatattgctgcccaaggcccactgaaatccacagctg

SEQ ID NO: 112482 - DNA, 100 bp, Homo sapiens
ggaatttgccattctgctgtacagacactgatttttttttcttctttttaaaaagcaagggaccatatgatgtggtggttctaccaggaggtaatctggg

SEQ ID NO: 112483 - DNA, 74 bp, Homo sapiens
agatacagagatgtaagcccatgctggaggctcccaggtgattttcacaaatcctttagaaatcgtcaagatcc

SEQ ID NO: 112484 - DNA, 75 bp, Homo sapiens
ggcctgtggactgcagcctcggcggtcagcagaggcagaggaggtggacacggtggacgtctccggcgtgcccgc

SEQ ID NO: 112485 - DNA, 100 bp, Homo sapiens
ggaggacagccgcggcgcgaggaggcagtgagcgccctgtgttggggcaccggcggcgagacccagtctgcgctcctcagaccaccggcaggtgaacagc

SEQ ID NO: 112486 - DNA, 101 bp, Homo sapiens
gcgaggaatggcggtatttgtgagaggagtcggcgtttgaagaggtggaactcctagggcttttttgagagtggtttatttcaatctacagaggacccagc

SEQ ID NO: 112487 - DNA, 100 bp, Homo sapiens
gcgccgtgcagctcgccgcctaccgcaaattacaggagcttattaatcataagaaggctgaggacacagagaagaaagatgagcccagcaaatataatca

SEQ ID NO: 112488 - DNA, 75 bp, Homo sapiens
cccaggaccgccggccgggggacgagctcggagcagcagccaggctgaccccgcactacatctacccaccagcca

SEQ ID NO: 112489 - DNA, 103 bp, Homo sapiens
gctgggtcagtccgccgctcaccccgcggccgcaccttcccgccttctcagggtttccaggcctgaggtgcccgccctggccccaggagaatgaaccagccgc

SEQ ID NO: 112490 - DNA, 90 bp, Homo sapiens
agtccgattaccccccgggcatcagctgttcctggcacatcatcgcgcccccggaccaggtctcctctgagcctccggcctccataagac

SEQ ID NO: 112491 - DNA, 83 bp, Homo sapiens
gcgaggccgggcacagccttcctgtgtggttttaccgcccagagagcgtcatggacctggacatgggaaagcggaaccaccaa

SEQ ID NO: 112492 - DNA, 90 bp, Homo sapiens
aattccttatgaggtcactctctggatacttctagcatcccttgcaaaaataggcctatatgaacccaatagcaatggcgagatcaaggg

SEQ ID NO: 112493 - DNA, 75 bp, Homo sapiens
tgcagcacgtggacgctgactcggaagtgcaggttaatttggagtggcccctggagtcagtttcctacaccatcc

SEQ ID NO: 112494 - DNA, 90 bp, Homo sapiens
cccgcatgctctttgtcactccccggcggcagcacgaaagtaccatgacatgctgctcagttcctccaggacatgagaagatatatgcca

SEQ ID NO: 112495 - DNA, 74 bp, Homo sapiens
atgataactctgaatatgtggaaactattataggtggatattcagagtcaaagaaggatgatgctcgagcacag

SEQ ID NO: 112496 - DNA, 98 bp, Homo sapiens
cgcgaccgcggatccgcagttcccgggccagcctggggcggccggccaggaaccacccgttaaggttgcacgttttcaaaaaatacctaatggtgaaa

SEQ ID NO: 112497 - DNA, 90 bp, Homo sapiens
ataagcagcttcggaaaggagccaatgagggtacaggtttgcagattccgccagcagcacagcaagctctacagatgagtggctctttgg

SEQ ID NO: 112498 - DNA, 76 bp, Homo sapiens
gatcgacatgcaacaaggcacctcgtcagtaaaaccacaggctaatggtatgtcgagagtaccaacgtggcaattg

SEQ ID NO: 112499 - DNA, 88 bp, Homo sapiens
cgagtgggagcaccaggatctcgggctcggaacgagactgcacgaatcagcatgattcttcagaggctcttcaggttctcctctgtca

SEQ ID NO: 112500 - DNA, 96 bp, Homo sapiens
cgggatcccagcctcaggcgtgcgcggacggtgtgcggaagaagactgcataaactgggcgtgtcaaaggtcacccaagtggatttcctgccaagg

SEQ ID NO: 112501 - DNA, 104 bp, Homo sapiens
gtgtaaccagtctatgggaagtgaggcctccccatggccacccatggaccagtcggcattcacttcctcccttctgcggcccataaaagccctgggttcaggca

SEQ ID NO: 112502 - DNA, 97 bp, Homo sapiens
ggtggcctggcttgtgccaaggagggtgccaatgaactggctgtgcagaaagcaaaggcagaaatcaccaggctcataaaagaagagctgatccggc

SEQ ID NO: 112503 - DNA, 74 bp, Homo sapiens
aagaaaccatgtgctgaaatgtttgacgacactgatggtttggtggcagagatgcatggcgagctgattgagtt

SEQ ID NO: 112504 - DNA, 101 bp, Homo sapiens
catgtggggggtaaaccactcgatttcaacactacacttgcacaatgtctttgaaaccaagagtagtagattttgatgaaacatggaacaaacttttgacg

SEQ ID NO: 112505 - DNA, 98 bp, Homo sapiens
ttaagaagtacaatagcattcgcgggcacggtgcaccctgtgaccactgtcagcagtagcgacgtggagaaggcctacctggcctactgtacaccggg

SEQ ID NO: 112506 - DNA, 80 bp, Homo sapiens
ttcacttgaacaactttcactgccatcggggacaagggagttgaccacatttggccatttcccagaagggccccacccca

SEQ ID NO: 112507 - DNA, 87 bp, Homo sapiens
cgcaggcagacaagctgttcgcggcgaccggagagcccacagcccccatcccgtagcccttcctggatctggagagagcagctgctg

SEQ ID NO: 112508 - DNA, 106 bp, Homo sapiens
aggacctctatctcgcttttcccctggccttctgtatcttcatggtgcggctcatcttcgagaggcagtggagctactgctgtggttcaggcagccctatgcaaac

SEQ ID NO: 112509 - DNA, 83 bp, Homo sapiens
cgcgctgctgggcacccacggagcctccggggctggactttccttatcccagttgattgtgcagaatacactgcctgtcgctt

SEQ ID NO: 112510 - DNA, 83 bp, Homo sapiens
ggcaatgtttggcctcaaaagaaacgcggctctgtgtgctccgggatggagcaggtgtgcagagggtgagaacccagctctgg

SEQ ID NO: 112511 - DNA, 90 bp, Homo sapiens
gtgctcgcgctactctctctttctggcctggaggctatccagctgtgttgttggtggctgcaatgccagctttgcttctcagggagggct

SEQ ID NO: 112512 - DNA, 100 bp, Homo sapiens
aaagcctctgctctgcctccggggacaagaaactagagcaaataaccgttttgaaattatgaataatacggcagctagtccaatgtctactgcaacttca

SEQ ID NO: 112513 - DNA, 82 bp, Homo sapiens
gggacaccccggaagctgggaaatggtgctacaaagtacacagataaagacaatggagggatgcttgtatggtctccatatc

SEQ ID NO: 112514 - DNA, 51 bp, Homo sapiens
cctggagaagcagatggaaaaggttctgtacagagtaatgagatgtgtgac

SEQ ID NO: 112515 - DNA, 100 bp, Homo sapiens
ccagaagtgcctgcagttcagacccttctctcccctccactttctcccggatcatggaagggaagtggttgctgtgtatgttactggtgcttggaactgc

SEQ ID NO: 112516 - DNA, 135 bp, Homo sapiens
tagacgctggcactatggtcatggcggaggggacggcagtgctgaggcggaacaggccgggcaccaaggcgcaggagcatcagatccatgctgctgctgactcggagccccacagcttggcacaggctctctcag

SEQ ID NO: 112517 - DNA, 82 bp, Homo sapiens
aatgaacctcatgaaagcagaaccaactcggatattgttgagtctatccagaagttaaaggagagattgctcgtaaagatga

SEQ ID NO: 112518 - DNA, 100 bp, Homo sapiens
catgggtagcctttgataaacaggttcaaaccttgtactactcagctgatcacaagctgcttgatgggaacctactagatggacaggctgaggtgtttgg

SEQ ID NO: 112519 - DNA, 100 bp, Homo sapiens
agaggtcgtggaggtggccgtggaggcagaggtggcatggggggcttcaagaagcgtgcacctcgggcactcaaagagattcggaaatttgccatgaagg

SEQ ID NO: 112520 - DNA, 96 bp, Homo sapiens
gttagaaaccatcacaatgcataaaatcctggagaccaccaccttcttccaaagagcggtgtacttgtttgcattgagactccttgcattccgcca

SEQ ID NO: 112521 - DNA, 74 bp, Homo sapiens
ctccgacgcccgaggagaaggaggagtggattaagtgcattaagtatgttgagtctaaaaaggacagagtcaca

SEQ ID NO: 112522 - DNA, 50 bp, Homo sapiens
ctcgcttgcagttcagcgaccacggctgaccccgcactacatctacccac

SEQ ID NO: 112523 - DNA, 83 bp, Homo sapiens
acactcctgggagccggctccaggcttctcacggcattcagcagcagcgttgctgtaaccgacaaagacaccttcgaattaag

SEQ ID NO: 112524 - DNA, 100 bp, Homo sapiens
cgccagcatccttagcgaggacgagttctatgatgcgctgtcagaaacgatggaaagaactttctaaggaagacttatctcctgcctttgatcattcacc

SEQ ID NO: 112525 - DNA, 51 bp, Homo sapiens
cagatccaagacaatggcaccgggatcaggactgctgatcttggacttgat

SEQ ID NO: 112526 - DNA, 51 bp, Homo sapiens
gaagaaaatttgagtgtaccgtttcataagcagtactataatggatgtaga

SEQ ID NO: 112527 - DNA, 100 bp, Homo sapiens
cgcgactcggggtgattcacgccggggaccccaaggagaagcccccgagcgcccacagcatgaaggaggaggccttcctccggcgccgcttctccctgtg

SEQ ID NO: 112528 - DNA, 100 bp, Homo sapiens
ggagctgaaagacacagacgccgctgtgggtgacaacattggctacattacctttgggtcctaaaaaggtggggacgctgtggcgagaagccgggcttag

SEQ ID NO: 112529 - DNA, 75 bp, Homo sapiens
caagatcggcaggcgagattgcctgacccaggcctgctcggccctcacaggggctttgttcgcgggggtcacagc

SEQ ID NO: 112530 - DNA, 83 bp, Homo sapiens
aagaaggggagtgcccgcggcagatttattgctaaacatgggtgcatttttggataaacccaaaactgaaaaacataatgctc

SEQ ID NO: 112531 - DNA, 51 bp, Homo sapiens
gacgctgcggcccggcccggcggggatgcccaggctgaggaagagatcaag

SEQ ID NO: 112532 - DNA, 118 bp, Homo sapiens
gtgatgcagccagccaggtctcagggagagggaacccagaagcctggcatgctggccaaagggataccgttaaccctggataaagagaatggaggttacctctgtccgtgtagattcc

SEQ ID NO: 112533 - DNA, 83 bp, Homo sapiens
aaacaaccgtcagcagcgggaaacctcgatgaacaaacaccgggagagtggccggctcttcagacttctctactggtgggctg

SEQ ID NO: 112534 - DNA, 98 bp, Homo sapiens
cgtgctacctgccctggccctgctcagcgccagcggcactggctccgccgcccaagcaaacttccttgataacatgcttttgcgaagtgcaggaaaat

SEQ ID NO: 112535 - DNA, 97 bp, Homo sapiens
cttttacagttctggccatggaacttcagagaagaattgctttagatttccaaagagggaatgatgttgccttccactttaacccacgcttcaatga

SEQ ID NO: 112536 - DNA, 87 bp, Homo sapiens
ccaggacaatggggacccgggacgacgagtacgactacctattcaaaggtgctggagaatctggtaaaagcaccattgtgaagcaga

SEQ ID NO: 112537 - DNA, 100 bp, Homo sapiens
tttttgatgaaattgtagagaactagtgatagattcgtgtggcctttcaaatgattgtgaagtggtggaaatggatccaaaataataagtgacttctcta

SEQ ID NO: 112538 - DNA, 82 bp, Homo sapiens
tccagctccctgcgtcccggccttcgctgtgctccctcagtacaaggtgaatatcttaaccagacttgccgcagaattgaac

SEQ ID NO: 112539 - DNA, 50 bp, Homo sapiens
gtcgctggagtccgcgcctccctggggccatgaaatgacaagcattggac

SEQ ID NO: 112540 - DNA, 118 bp, Homo sapiens
tatggtgacagactatggggcctttatcaaaatcccaggctgtcggaagcaaggccaacgcagacccgtcagtgataaactgtctgcataacctgtcccgtcgtatcgccaccgtgct

SEQ ID NO: 112541 - DNA, 76 bp, Homo sapiens
tctcggatgagatccaagtccaggttcgttccaccagtcataaaccagatgaaatctatggcatgattgaaagact

SEQ ID NO: 112542 - DNA, 98 bp, Homo sapiens
gaggatgcaccttcccctgccttggaaagatttatgtgatcagtttggctgaaccccgtctgcccctgcagctggatgatgctgttcggcctgaggca

SEQ ID NO: 112543 - DNA, 101 bp, Homo sapiens
aaaagagcagtctcacatgaagaccaatttttacgtctagatttccatgcccatggaagggttctgagcaaggttcaaccagtcaagaacaggccttatct

SEQ ID NO: 112544 - DNA, 51 bp, Homo sapiens
atggactagctctgctacagaacaccaagccttcgacgacgcagtggaaga

SEQ ID NO: 112545 - DNA, 100 bp, Homo sapiens
tgacgtcaccgtcaccaccggcgtgaagcgagacagtggtgagggcttctggtgcagcttttagcagcctggcaagagctgtgtcaaagtgacctatccc

SEQ ID NO: 112546 - DNA, 92 bp, Homo sapiens
ccgccgcctgaggaggcgagctagccgggagttacaccgccaccgccaggacttgaaagaggagattgatattcgactctccagggttcagg

SEQ ID NO: 112547 - DNA, 100 bp, Homo sapiens
tcgtatctaagactctgggacactcctgaagtcgggaaatgggccaattcctgtccccccagcagcatggcatcgtgtgctgaaccctctgagccctctg

SEQ ID NO: 112548 - DNA, 100 bp, Homo sapiens
cacctggttctgcctctggtcctactgggagtccagttgttaaacttcaggatgccttggccagtaattgtattgaaaatgtgtcccgacagaattgtcc

SEQ ID NO: 112549 - DNA, 100 bp, Homo sapiens
ccctgcccagattatgacactgataccaaaacagtcttggaccaagctctcagagtatgtcagtttgcaatggattttggataaacaagatctgttgaag

SEQ ID NO: 112550 - DNA, 101 bp, Homo sapiens
gacgtgatgttggagaactacaggaacctgctttctctcgatgaggataacatccctccagaagatggtgtggtcactcacctgtctaccactcccgtgaa

SEQ ID NO: 112551 - DNA, 99 bp, Homo sapiens
ctctgatttagtaaccctcaccaaaccagtaatctacatttccattggtgaaatcatcaacacccacactatgatgtgcgaggtgatgccgaccatcag

SEQ ID NO: 112552 - DNA, 100 bp, Homo sapiens
gacatccctgctgagagagccaagacgccctcctgcaaaacggcccaactacgttaagcttggcactctggcacctttctgctgtccctgggagcagtta

SEQ ID NO: 112553 - DNA, 95 bp, Homo sapiens
acatgtggcccaagtccgaactcaagctgcagtggttcgacaagctgctgatgactgtgagcaccatcaatcagacgcctgtgaccctgcaagtg

SEQ ID NO: 112554 - DNA, 75 bp, Homo sapiens
ccatcgcctgtcacctggacccgcgcgtgttcgtggacggcctgtgccggtccattgaagacttgaacaagtggg

SEQ ID NO: 112555 - DNA, 90 bp, Homo sapiens
ggaaatgttgtccaaagttcttccagtcctcctaggcatcttattgatcctccagtcgaggctctgccaaggctgagaatgacaaacatc

SEQ ID NO: 112556 - DNA, 76 bp, Homo sapiens
ggtcctgagcctcgagccgcagcacgagctcaaattccgagctgagatctgtatctgtggacctgaatgttgatcc

SEQ ID NO: 112557 - DNA, 100 bp, Homo sapiens
ccacatagacatttacgcggatgtcggcgaagagttcaaccaggcgtccctttcccttgcacctgttaacatctttaaggcaggagctgatgaagagaga

SEQ ID NO: 112558 - DNA, 50 bp, Homo sapiens
tagtcacccacctacatgttgagggcatacataatcttgctgctatgctt

SEQ ID NO: 112559 - DNA, 50 bp, Homo sapiens
cgaagaactcctaaacaggtggatccagcgcttctctgaagtagctttgg

SEQ ID NO: 112560 - DNA, 75 bp, Homo sapiens
tcctgcctcatcccagccatgtcatcttatctacgaaatgattcagttctgaagtttataggttaaacttagaac

SEQ ID NO: 112561 - DNA, 82 bp, Homo sapiens
atccagggaaccaggaaagaccacagccgatttgttacgccccatggtgtccatcctgccagcagactgattcagaatggga

SEQ ID NO: 112562 - DNA, 82 bp, Homo sapiens
gggagagaggtacctctccttttccctctccctttccctaaggtgtccctggagtccaacgcgtccatgagctccaacacac

SEQ ID NO: 112563 - DNA, 75 bp, Homo sapiens
gaagagcattttccgcagaggcctggtcaaggtggctcagaccacagactgcctctgtcaccgggtccctccacc

SEQ ID NO: 112564 - DNA, 75 bp, Homo sapiens
tgtatgccaaagcagcagccttctcgacagccttttactgtgaacaggttttgcacactagggaccaagaagccc

SEQ ID NO: 112565 - DNA, 87 bp, Homo sapiens
acatcgatgacatcaccgtcaccaccagcgtggagcaagacagtgacctgggctccagcagtgtgagagctggcctgcagtctctgg

SEQ ID NO: 112566 - DNA, 90 bp, Homo sapiens
atttggatgaatatacccttagaaaaaatgtggcagtacagttgatattcataaagagaaagttgcaagaagagaaattggtattttgac

SEQ ID NO: 112567 - DNA, 74 bp, Homo sapiens
aggcgtcgctgattccagagagctaaagccgatggtacagcaggtacagactgtgcagcaggtacaacatgtct

SEQ ID NO: 112568 - DNA, 100 bp, Homo sapiens
gagaaaaatggagaaaacaagacaagcccattcattcatttgagcatagcaagttatccggtgttggctcctgctgcttactatgaccaaactggtgccc

SEQ ID NO: 112569 - DNA, 52 bp, Homo sapiens
acacggccagatctgccctccagtcctccatgtgaatcaatcccatgatgca

SEQ ID NO: 112570 - DNA, 82 bp, Homo sapiens
aacaacaccacaataatccacagccaagcaaatgcagccctgaggatttggctactgcatataacaacagggggcaaatcaa

SEQ ID NO: 112571 - DNA, 100 bp, Homo sapiens
cctaggcaagatcgacgaactgcgcctcttcccgccggaagctcctcatctgggtagagaattggtgtgcaaagagagtaagaaaacgtttaaagctacg

SEQ ID NO: 112572 - DNA, 108 bp, Homo sapiens
cgcgtctctctgctgcggcgcggggaccgctgtgctctcggccaagactaaggggctgcagagcggggtggacattggcgtcaagtactcggagaagcaggagcggaa

SEQ ID NO: 112573 - DNA, 90 bp, Homo sapiens
ctacgacgtccctcaaaccttgcttctaggagataaaaagtaatctatgccagcaattatgacaatgttagcagaccatgcagctcgtca

SEQ ID NO: 112574 - DNA, 82 bp, Homo sapiens
cggaccttttaccatgaatagttctactccttctacaggtgtgtatgggccagctgaggggcccacggacatagggcaccca

SEQ ID NO: 112575 - DNA, 88 bp, Homo sapiens
aggagccggagcagcggcactgcctggagatctattgggaaactgattataaccactcgggcaccatcgatgcccacgagatgaggac

SEQ ID NO: 112576 - DNA, 98 bp, Homo sapiens
gaaccgactcccagaactccggacgtgtgcggcggatgcgcaggtcccacagaagatgagctgtccctgcccgagggacccagcgtccccagcagctc

SEQ ID NO: 112577 - DNA, 100 bp, Homo sapiens
ttggcctcttcactccaggatccagaattgaaagtatcttgatgtctttacctctaactgcccggaaatcaaggactttctgttcacagcccaatgaaag

SEQ ID NO: 112578 - DNA, 99 bp, Homo sapiens
tttggaacgggagatgactttttgcattgaaacgtagagaaatggtcagaaggaacgacaccacagaagaaattagaatgtttaaaagaaccaggaaaa

SEQ ID NO: 112579 - DNA, 99 bp, Homo sapiens
gtctgtttgatatcaccaaactggaggatgcctatgtattccctggggatggcgcatcacacaccaaagcagctggcttgaggacacccctggcagtgc

SEQ ID NO: 112580 - DNA, 101 bp, Homo sapiens
aagaggctggggagtctgtgtccttccagctgcagatacggagcctcctgaccctgctctggacccacacactcacagtgctggtggaggcggccgcctcc

SEQ ID NO: 112581 - DNA, 75 bp, Homo sapiens
ggtgccatggaacaggctgttcccaaatgctgactccaaaggaatcggtgagtttcaaggatgtggctgtggact

SEQ ID NO: 112582 - DNA, 96 bp, Homo sapiens
aatggagaccaaacctgtgataacctgtctcaaaaccctcctcatcatctactccttcgtcttctggggaagaggagcacagcagtaacgctgatg

SEQ ID NO: 112583 - DNA, 100 bp, Homo sapiens
cttttgggttacaaaaatccagaccagttcctattatccttgccgtaaataaatgtgacaaagctgaggctgatcctgagaaagtgaaaaaagagctgct

SEQ ID NO: 112584 - DNA, 100 bp, Homo sapiens
tggcagtgccctgaatgcaaagtgtgccaagcctgcaggtaaaggccgaggggcaaagaaaaggaaagcatctggctctgaaaatgaaggcgattataac

SEQ ID NO: 112585 - DNA, 75 bp, Homo sapiens
agcaatatctctgggctttcacagatcctgaggaggatgaaggggctggccctggaggccgagagtgagctggag

SEQ ID NO: 112586 - DNA, 75 bp, Homo sapiens
tttggcctggcttgtttgcaaagggtcctaaaaaggtggggacgctgtggcgagaagccgggcttagctggaagg

SEQ ID NO: 112587 - DNA, 74 bp, Homo sapiens
acccagacccaaagtttgcaacaatcagtcagctcccagatggacgtatcatcaaagttgggggagagagattt

SEQ ID NO: 112588 - DNA, 75 bp, Homo sapiens
tgccgccgctgccaacgtcgagcggcgacggctgattacatgaagcagatgacatttgaagcccaagccttttta

SEQ ID NO: 112589 - DNA, 113 bp, Homo sapiens
gagcgagctgagtggttgtgtggtcgcgtctcggaaaccggtagcgcttgcagcatgacctgcctagagctggaacgttacctccagagcgagccctgctatgtttcagcctc

SEQ ID NO: 112590 - DNA, 99 bp, Homo sapiens
caatcccccactctttccgccctaatggaggtctccagtttcgtttggaaattttagcattcaggtgccaggaatgcagatgggacagccagtgccaga

SEQ ID NO: 112591 - DNA, 100 bp, Homo sapiens
tgacgcagccatggcggaggcggctttggaagccgtgcggagcgagttacgagaattcccggccgctgcaaggggaccaggagctgcattatctattcta

SEQ ID NO: 112592 - DNA, 143 bp, Homo sapiens
gaaaggacaaaaaaattcctggaaaaagaagtccaagaagcaaaaaagggactgctaagaagataccaccaggacccagatgatgtggtaccagttggccaaagaagagcctggtgttggtgcatgtgctttggactagcatt

SEQ ID NO: 112593 - DNA, 96 bp, Homo sapiens
accgaggcacggacaacatcaccgtgaggcagggggacacagccatcctcagggtaactaaggaagtggatgctacatctaaagaggccaaatcct

SEQ ID NO: 112594 - DNA, 100 bp, Homo sapiens
cgccgcctcagcttgcgccgccgccgccgccgccgccgccgcgcacgccatgggagccgtgactgacggtgactcccacacgggtcatgctgttgtctcc

SEQ ID NO: 112595 - DNA, 100 bp, Homo sapiens
caggcgcggctgccggcggctgggactgaagagggacgggtcccgcggcgagcgagctcctgaggtacggcgtcgggggcataattggaatatcatttgg

SEQ ID NO: 112596 - DNA, 74 bp, Homo sapiens
ccagggagccaagcgtcctgcccggccgttcatgtcagggctggtctttttcatggtactgagctcctgtgtaa

SEQ ID NO: 112597 - DNA, 96 bp, Homo sapiens
ggtgttccgctcgcctcttgtgcggtgtggagctgcgcgccccccgccgaggcgggcccagccaggcgttgtggggcagatgatcgaggcagctga

SEQ ID NO: 112598 - DNA, 100 bp, Homo sapiens
ctggggacgaagagctgcagctcctcctgtgcggaggcctgagggagctcaatcctggtagcaacacccctgaattcctggtggtgaaaggatgtggccc

SEQ ID NO: 112599 - DNA, 83 bp, Homo sapiens
cagacggctcacctgtgcgggatggaacaaaagatctggtggctggacccagagctgacctatggctgcgccaagcccttcgt

SEQ ID NO: 112600 - DNA, 90 bp, Homo sapiens
atcctgacagctgtgtactttgccctcagcatctcccttcatgtctgggtcatggtaaaaatgcatttgcaaagggagaaaatgaaggcc

SEQ ID NO: 112601 - DNA, 87 bp, Homo sapiens
tgcatactcacagagttagagagagggatggtgattggctctaccagtgcacctggacagggaggaatcctggctcagcgggagttt

SEQ ID NO: 112602 - DNA, 81 bp, Homo sapiens
gcccagacggctcacctgtgcgggatggaacaaaaggtctaactcatcttattactatggatttacaccagaaggaaattc

SEQ ID NO: 112603 - DNA, 87 bp, Homo sapiens
gctgttctgcttcctgctgctctgtctcagcgccgcctccctgcttcttaacagtaactaacatcttgacaaagaggataaactgat

SEQ ID NO: 112604 - DNA, 82 bp, Homo sapiens
attcattcagtggtgttaaggattccaacaacaattccgatggcaaagccgttgccaagattgcaaatgcacaagattcgag

SEQ ID NO: 112605 - DNA, 100 bp, Homo sapiens
gggcgagatcctggcgagcctgcaggatggcgcggccgagtccccgtacggccacccggcggtgatgatgacagcctcttcatctatgactgcagtgctg

SEQ ID NO: 112606 - DNA, 50 bp, Homo sapiens
ttttgaagacaatcgtcacttatacaggaaagaccacagcaagattcttt

SEQ ID NO: 112607 - DNA, 100 bp, Homo sapiens
caaaattggaacagagtcgaagctgggaattcctgagtgtacctcacagccttctaggatctccagagtggacaggaatctcacttggagggaccatgga

SEQ ID NO: 112608 - DNA, 75 bp, Homo sapiens
gagaactgtggcatctgcaggatggcatttaacggatgctgccctgactctggcagagaggctgatgacatcgtg

SEQ ID NO: 112609 - DNA, 74 bp, Homo sapiens
gggaggtgttcgagaacgaccccgagacggtgcccgtggttgacacgagctgtgtccccagctgttcccgtcta

SEQ ID NO: 112610 - DNA, 80 bp, Homo sapiens
gcgcagcctccctctattaccagcgtgaagcctctgcgggccttcttttcgtcttatttgaagtcattgccggatgtgag

SEQ ID NO: 112611 - DNA, 136 bp, Homo sapiens
gcactcagaatgctccaggcagtgtaatctcattccatcttcattcatgactccagacagatctgaacataaagtctggtctcctctggtgacggaggaagggaagcgtcatccatacaagatgaatttagcctct

SEQ ID NO: 112612 - DNA, 90 bp, Homo sapiens
cgcaggcaggcggccctgcagaggaggctcaggtttgagaaatttctgtggttcattagctcagagaactatctaattataggtggacga

SEQ ID NO: 112613 - DNA, 98 bp, Homo sapiens
ccagtccaggcccagcctctcgaatgggcacacctgtgtagctgaagaagaggctgctaagagacggcagatgcaggaagcagaaatgatgtatcaaa

SEQ ID NO: 112614 - DNA, 105 bp, Homo sapiens
gatggctctgatgtcatttatcctgccaggatcagcctccgggaggtgatgttctgcaccctgaacacccacaaagtggacatggacaagctcctggggggccag

SEQ ID NO: 112615 - DNA, 100 bp, Homo sapiens
tggccccacagcaacagaggcacagcttcaagggggaggagtgtccagcaggtagaagtataggtacagataatgtgtgtagagatagactggaaaagac

SEQ ID NO: 112616 - DNA, 82 bp, Homo sapiens
gaccaaagcgcctgaggaccggcaacatggtgcggtcggggaataaggctccactttgaggctctgatgaacattccagtgc

SEQ ID NO: 112617 - DNA, 99 bp, Homo sapiens
atgcaatggctgtaccaagactcaggttttgcacactagggaccaagaagccctcggggacactgctgagaaaagactgccgaagggaagaccagcggg

SEQ ID NO: 112618 - DNA, 90 bp, Homo sapiens
cttcgtgcttccatgactaacttggtcaaggtgacaatctccaatagacttgtgtcttcaccttgctgcattgtgaccagcacctacggc

SEQ ID NO: 112619 - DNA, 98 bp, Homo sapiens
aaatgcctcctgaggatttctgtgcctggaaaatatctgttaacagactgcttttacacctacctaataagagacatggttaatgtctgtgaaactaa

SEQ ID NO: 112620 - DNA, 96 bp, Homo sapiens
cgcggggggctggcattctgtgtgtgtgagtggtgctggagaatctggtaaaagcaccattgtgaagcagatgaggatcctgcatgttaatgggtt

SEQ ID NO: 112621 - DNA, 75 bp, Homo sapiens
atgggctttgctggaattgctgtaggtgcagctatgagttcctcagcagaagggcataccgatgctgtccttgac

SEQ ID NO: 112622 - DNA, 83 bp, Homo sapiens
tcaacatcaataatccctttgttttcaaacacattagtaacctcaaggtaggggtccatgggattcgaattgaattcattaat

SEQ ID NO: 112623 - DNA, 100 bp, Homo sapiens
ttccagaattacgggcaagcgctgttcaaacccatgaagtctctaattaacagaagatggcaaagcccagccacagcagctatgtccttcagcagctaaa

SEQ ID NO: 112624 - DNA, 74 bp, Homo sapiens
ctggacacccaggctaactgcctcctctggtatatggacaacccccaggctttgggggaccagatactatttgt

SEQ ID NO: 112625 - DNA, 102 bp, Homo sapiens
ggaggggctccggctggtctgtggtgaggtcccagcatccatgactgctgaggagctcaccctggagatcctggatcgccggaacgtgggcatcagggagaa

SEQ ID NO: 112626 - DNA, 80 bp, Homo sapiens
atctcgttccagttccagagaacgttcgagatctcgtgggtcgaaatcaagaaaacccgcctagtgccaagcaaccctcc

SEQ ID NO: 112627 - DNA, 80 bp, Homo sapiens
ctacttaataatgacaatctcctcagggaaggggcagcacaattaatgctgaactgttgtttcggccaactgctctttca

SEQ ID NO: 112628 - DNA, 75 bp, Homo sapiens
cctggccttcaaccccgagccgctggtgctacaggagtcttttagtcctgctatacagctgcaccttgtacatca

SEQ ID NO: 112629 - DNA, 82 bp, Homo sapiens
tttaaaacaaactgcagttccaacaatattttctttgcctgaagacaatcagacatttctcttgggaagttgtgcatctgac

SEQ ID NO: 112630 - DNA, 100 bp, Homo sapiens
tgaagatgatgatctctacggccagtctgtagaggatgattattgtatttcgccgtcaacagtctatccagaagttaaaggagagattgctcgtaaagat

SEQ ID NO: 112631 - DNA, 100 bp, Homo sapiens
ccgaacttcagggtttccaccgttcgttcaagaatttatccagttggcgaaggactttgaggatttccgtaaaaagtggcagaggactgaccatgagctg

SEQ ID NO: 112632 - DNA, 97 bp, Homo sapiens
ggcgagcggtggtttggacgccggcggagacgcgggcgaggtggccagcatcgaaatgttcagccttttagtgatgaagatgcatcaattgaaacaa

SEQ ID NO: 112633 - DNA, 98 bp, Homo sapiens
aggcgctccacaatgggacactgagctttgtggaagcatttggcggcataccaccctgcactgtgagatccagatgcagaggtgtgccttcatgtact

SEQ ID NO: 112634 - DNA, 87 bp, Homo sapiens
gctgggtctgggggagtacaagaggatgccctgatggcagttagcacactggtggaaggatcatggcggtacaggaagggatggctg

SEQ ID NO: 112635 - DNA, 100 bp, Homo sapiens
gagcacatcttcacactggacactctcgtgcagggacatctctacaccgttcccatccgggaacagggcaacatctacaagcccaacaacaaggccatgg

SEQ ID NO: 112636 - DNA, 100 bp, Homo sapiens
agtcatggtctggagagacacgccaggatggagagagcaaaagaggaatgcaggctcaggttggaatgccaggaagtggaccagtgtccatggaacgggg

SEQ ID NO: 112637 - DNA, 50 bp, Homo sapiens
ccagtgttgtcatggacaaggacaaggagtttgggctttgcaaaactgag

SEQ ID NO: 112638 - DNA, 95 bp, Homo sapiens
aaccagcttgaggccactggcgtcacctgctatgcagcccacccaggttctcagctgctgcgggagttgaaaaagatggacgacaaagctctttt

SEQ ID NO: 112639 - DNA, 98 bp, Homo sapiens
aagcagtgccttgaaagattcagacctcccatagtggaaattgatgacttgaaaaaaattaccaattcactgactgtgctttgcagtgaaaaacagaa

SEQ ID NO: 112640 - DNA, 74 bp, Homo sapiens
agtgaccactgggcacccattcattatgcatgctgttgactaatctccttcagaatcaagcagtgaaaggaaaa

SEQ ID NO: 112641 - DNA, 100 bp, Homo sapiens
ccagtccctgctgagaatactgtcatcctacccaccataccacagatcactttgggaagcagtgacatccaacctgtatcaagtcttctaatctgtgaac

SEQ ID NO: 112642 - DNA, 100 bp, Homo sapiens
ccgacatcaattacgccaatgtggacggactcactgccctgcaccagggagtgatgatgaatacagtgatgatgatgacatgagttggaaagtgagacgt

SEQ ID NO: 112643 - DNA, 74 bp, Homo sapiens
cggttgtagcagctgccgctgcagccatagcagcagaaggaggccccaaccctgagcacaacagcaacctggcc

SEQ ID NO: 112644 - DNA, 103 bp, Homo sapiens
aagccaggcgctacctccgagcggagtgcttccgggtagagaagaacctgctcatctttggcaattctgtggtgttcttggtcacacatttatggagtttctg

SEQ ID NO: 112645 - DNA, 83 bp, Homo sapiens
aacgtgagcaagcccaggcacagccgacgccgcggggattctgtttcactgaggccatctatccgatttcaaggaagccaagg

SEQ ID NO: 112646 - DNA, 95 bp, Homo sapiens
gtgttggaggacagacattaacagtatttactgagagctcatcagactcgagaacaggaagaactggaagaagctttagaagtggaacgacagga

SEQ ID NO: 112647 - DNA, 100 bp, Homo sapiens
cagagcttgtcggttaaagaagaaagcccagtatgaagctaataaagtgaaattatggggcctcaacacagaatatgttctccgggagatgttgcataac

SEQ ID NO: 112648 - DNA, 110 bp, Homo sapiens
ctacgtggacacagaaagcaagtttctgaagttggtggccgccatcaaagccgccttggctcagggctaatgcgccctgaaggcagagagtcttgctctgttgcccaggc

SEQ ID NO: 112649 - DNA, 100 bp, Homo sapiens
caacgtcatctgctacttatcagccatccttcgctgcagaatagcctaacatggcagaccagagacagcgctcactgtctacctctggggagtcattgta

SEQ ID NO: 112650 - DNA, 50 bp, Homo sapiens
ggggtctcagtcaccgcgaggactcgaggtgtggatcagcctgtactacg

SEQ ID NO: 112651 - DNA, 91 bp, Homo sapiens
ggaatattggggggctcggctgcagacttggccaaatggacgggactattaaggattttttatcaagcagaaatgcatcgaacaacgagaa

SEQ ID NO: 112652 - DNA, 74 bp, Homo sapiens
ttttccgttgccggtgccggcctagcgtcctggaattacttcaatcaagtggctttttctcaagtatattttcc

SEQ ID NO: 112653 - DNA, 84 bp, Homo sapiens
caaccattgacgccatgtcgggttattcgagtgaccgagaccgcggccgggaccgagggtttttagaacttcagccataaaaat

SEQ ID NO: 112654 - DNA, 88 bp, Homo sapiens
gctttagtgaagttgggaaatactacagtaatctgtggagttaaagcactctggtagctgaagaacatctcacagtggacgccagggt

SEQ ID NO: 112655 - DNA, 89 bp, Homo sapiens
ctttgggtcctgaatcttctgggagctgaggaaccagatatcttgaaaagctgccagaaagtcttagagtttgaaagagtctatcttga

SEQ ID NO: 112656 - DNA, 100 bp, Homo sapiens
actgaaacttttgtcctggctgtcaatattttggacaggttcttggctcttatgaagagctggctttatgtgctggggcagaagagatccgatagctatg

SEQ ID NO: 112657 - DNA, 75 bp, Homo sapiens
ggtttgagtccgcatcgccacagctgaaggctgcgagggactaagagcagagcttgaagaaaatttgcctacacg

SEQ ID NO: 112658 - DNA, 100 bp, Homo sapiens
gctcttcatacctgggtattccgttcaatccatcaaagcttcttggacacttaatgattgttggcaagaaatgtgctgctgatctgggcctgaataaggg

SEQ ID NO: 112659 - DNA, 75 bp, Homo sapiens
gttccgcacaggcctgctgaactgggtgctttatataggagatggagtttcactgtgtcagccaggatggtctcg

SEQ ID NO: 112660 - DNA, 100 bp, Homo sapiens
gtggaagttactgccgcgccaccgagtccggaccggagactttggggcctaactagggagacttcccactgaaggctgacagggtggtccagtccgtcaa

SEQ ID NO: 112661 - DNA, 75 bp, Homo sapiens
gttaggtcaactgatccaactatgatcaagacactgaagggcactccacagaaggatgttattatcaagtcagat

SEQ ID NO: 112662 - DNA, 50 bp, Homo sapiens
ggcagttgcagtgttggagctaaagtgcagctaaatcaagtccagcagct

SEQ ID NO: 112663 - DNA, 74 bp, Homo sapiens
acgacttcgaccctgcccagcacgaccagctcatgcagaattatatccagatcgagagacagaagattctgaaa

SEQ ID NO: 112664 - DNA, 89 bp, Homo sapiens
catttctgttgctattgatgcaggtcatgagtccttcctgttctataaagaaggaaaaatgccagctgtgggacaaggagtgcaggccg

SEQ ID NO: 112665 - DNA, 74 bp, Homo sapiens
ggcggcgctgtgtccgtcgccatgacaggagtcttttagtcctgctatacagctgcaccttgtacatcaagctc

SEQ ID NO: 112666 - DNA, 82 bp, Homo sapiens
ccggatcctgaggaggcagctgcggtggcagctgctgagttctcggtgaagggaacccaccaagaccaacctggtcacattc

SEQ ID NO: 112667 - DNA, 75 bp, Homo sapiens
gaggacagttcgctacacagcaatgcatcgagtgccggtggtggtgtgcacattgagccccggtatagacagttc

SEQ ID NO: 112668 - DNA, 100 bp, Homo sapiens
ggccataccggacccgcaagcatgcccaccactgccacaaacgccgcaccaggtcttgtagcagcgcctcctcgagatgctgcccccacccccttaggcc

SEQ ID NO: 112669 - DNA, 76 bp, Homo sapiens
ggcactgcatgctgctgcccgccagggcccagatgggcaaattcattcgcatcaactttgatgtcaatggctacat

SEQ ID NO: 112670 - DNA, 83 bp, Homo sapiens
gccggcggccaagcagccaaccatgctcaacttcggtgcctctctccagcagactgcggaagccatcttcgacaagagcacag

SEQ ID NO: 112671 - DNA, 83 bp, Homo sapiens
cggcgccccggccgaggtggcggcggctcctcaggtgtggacactgccagcggctgcagccgacttggaatgacctgggagac

SEQ ID NO: 112672 - DNA, 98 bp, Homo sapiens
agctctaaactaaaattgtatcgaaatggctgcagaaatcgactttctgagagagcaaagaaatgatccgactagatgaagtccccaatctgagttcc

SEQ ID NO: 112673 - DNA, 75 bp, Homo sapiens
tcgaactaaacaaattcatcccagaaatctaagaggtggttatggagctacagctttaaatatgaagcgtgatcc

SEQ ID NO: 112674 - DNA, 100 bp, Homo sapiens
tcacttttgaaatcacatttcgttccaaaaatattactatccttgagctccccgatgaacgcaccctttgcatatctctacctacttgtgcataattcag

SEQ ID NO: 112675 - DNA, 100 bp, Homo sapiens
aatatcccaggagagaatactactttgcaataacaatggaaaggtcatttcaagaatgtatcctgtcaggtataatgtcagtgaatggcaagaaagttct

SEQ ID NO: 112676 - DNA, 83 bp, Homo sapiens
ggctcgcctcgactccaaatggttgaaaacagatatacagggcccttggaagaaaatcctcgctgtgtccaggctgaggcggg

SEQ ID NO: 112677 - DNA, 98 bp, Homo sapiens
ctctgcccatgcctcacaaagcttctgtgaaagttctagtgcttcaagtctggatagtcagaagtttgtgacagtgccctccagtaatgaagtggtaa

SEQ ID NO: 112678 - DNA, 82 bp, Homo sapiens
caaaaccaacgcctggctcggagcagcagcctctgaggttcatcatgcctagtggcgtataagaagaccccgccaccggtcc

SEQ ID NO: 112679 - DNA, 90 bp, Homo sapiens
actggcagacccgtagctaagacgccaggatttcctggaagcagagaaatggtctattattagcagaagatttttctgcatagttggcac

SEQ ID NO: 112680 - DNA, 100 bp, Homo sapiens
ctgggtgagacagcttgagccccatcgtggattccaagacatccctgctgagagagccaagtaaaagcagtctgggcgcaggctggggacccagatggaa

SEQ ID NO: 112681 - DNA, 51 bp, Homo sapiens
ggtgtctcttctcgccctggcggggaaggagggtgaggacaaaatcttctt

SEQ ID NO: 112682 - DNA, 75 bp, Homo sapiens
catctacttcacaggaattgccatttcaattaccagctctggctgggtcgccacaacttgtttgacgacgaaaac

SEQ ID NO: 112683 - DNA, 75 bp, Homo sapiens
gaatgcgcccgcacagtccatcggcatacggagacaggtaatgagaggccctaagatcccagaggatgccataag

SEQ ID NO: 112684 - DNA, 100 bp, Homo sapiens
ccagtgccggggagggttctgctgcttcgaaagctggtaaggcctgaggtctggtccgagagcaggaggctgggctgctgcagttcctccgcctggacgg

SEQ ID NO: 112685 - DNA, 75 bp, Homo sapiens
cgaagagatctacattaaccagctggaagccctgttgctggttctgcggcatgaggaatttgaagaaggctgcaa

SEQ ID NO: 112686 - DNA, 50 bp, Homo sapiens
cgggagttcaagaagaacactccagagctcattgctatggacagtgctat

SEQ ID NO: 112687 - DNA, 82 bp, Homo sapiens
tttgctacattggaacagggccgcctctcaagggactgctgagatgtcctctattcttgaagagcgtattcttggagctgat

SEQ ID NO: 112688 - DNA, 90 bp, Homo sapiens
caaaagattgagctgcactgtattcctgcatgaatgctttacagttgcagaacctggcgacgctggctgctgctgcagctgcggcccaga

SEQ ID NO: 112689 - DNA, 80 bp, Homo sapiens
agccgtgcgatctggacgcggcgctgctgaccgacatcgaaggagccatccgcaagcagttggcggctttcttagaaggc

SEQ ID NO: 112690 - DNA, 90 bp, Homo sapiens
cccaggtgttccggtctttcacgatgcattaaagttttaacagtgtatgccagggaacacacattctctttcgagaattcagcttcgtcc

SEQ ID NO: 112691 - DNA, 90 bp, Homo sapiens
cctgcacaaggagaggaccggcagcaatcgatttgccaagatggagtttgacgagaaggacttacgacgggagatcagctatgccattaa

SEQ ID NO: 112692 - DNA, 97 bp, Homo sapiens
aatacaccttggcccgaggctgaagccattgctccacaggttggcaatgatgcccaggcggaggtgcgcttgtctgtacccccgctggtggaggtga

SEQ ID NO: 112693 - DNA, 89 bp, Homo sapiens
cgtggtccttctccatattcgagggccatgaagcccccaggaggagaatcgagcaatctttttggaagtccagaagaagctactccttc

SEQ ID NO: 112694 - DNA, 90 bp, Homo sapiens
ccagccccacccctgctgacatcgggagcagtgtgccaggcccgcagtcctaccccattgtgacaggatcagtggtcaattggtcaggac

SEQ ID NO: 112695 - DNA, 83 bp, Homo sapiens
tgtgtaaacccaaaaggagcatgaaacgagacgacaccaagggtttgaacataatctttcatgtagctttggctctcctaaag

SEQ ID NO: 112696 - DNA, 100 bp, Homo sapiens
cagatttgactcaaagaggaaggatgggaaacatctcacacttcatgaggtaaagtcagtgataaatcttttgtttgctgcatatactggagatgtgtct

SEQ ID NO: 112697 - DNA, 98 bp, Homo sapiens
gccagagtaaagcaaagagaaaggaagcaggcccgttggaagtggttgtataacagtgatggtgaaattgctagtgaatgtgaatgcgatagtgtctt

SEQ ID NO: 112698 - DNA, 113 bp, Homo sapiens
cagaccctggagcctcagttggaagcagccgatccagcctgcggagcctgtggggcagatgcagacagacatgctgaactatctggaagtccactgaaaagcaaaagcactag

SEQ ID NO: 112699 - DNA, 90 bp, Homo sapiens
cagctctgtccgctgcccacagcctagcagtcgggaccgtactgaggtactccaaagattcaggtttactcacgtcatccagcagagaat

SEQ ID NO: 112700 - DNA, 82 bp, Homo sapiens
tcgtgcacgcgggccagaggcgatgccactgccgccaggagccctgtaacatcagccatcgtcaaccccaccgtgttcttca

SEQ ID NO: 112701 - DNA, 75 bp, Homo sapiens
gctcggcccgcgggggagccccgggagccgcacgtgaagtgaagacttacgatccttctggtgactccacacttc

SEQ ID NO: 112702 - DNA, 74 bp, Homo sapiens
taagcgtggtgatgtgatttacattcttagcaagatggagctaacacccattatggagattaaccacttttcat

SEQ ID NO: 112703 - DNA, 75 bp, Homo sapiens
attgtttgaccacaacaagggccggattctcacccaggtgctggagaatctggtaaaagcaccattgtgaagcag

SEQ ID NO: 112704 - DNA, 83 bp, Homo sapiens
actatccacacgacaggcctacactctattcaaacagatatgcacccaatgtccagggagcgtgcaaaatttgtcaaaagtgg

SEQ ID NO: 112705 - DNA, 95 bp, Homo sapiens
ccattgctcaccgaggacccagctcaagtttaaacacacctgggagcttcagacgtggcaaagcagagagcagaggttcttcagtccacgcaacg

SEQ ID NO: 112706 - DNA, 100 bp, Homo sapiens
agaatacaaaggcaatgcttatcatttaatgcataaaaactgcaatcatttttcttcagctttatcagagcagaaaaatatggctcaggagactaaccag

SEQ ID NO: 112707 - DNA, 51 bp, Homo sapiens
ggcgcacccagtgtaactgtgacgatcttcgggccagtgatgcagatcctg

SEQ ID NO: 112708 - DNA, 96 bp, Homo sapiens
tcctggatatatcagtgaagatggagaaacaagtgaccaacagttgaatcaaagtatggacacaggccatgtttttggtatactgtgcactggaga

SEQ ID NO: 112709 - DNA, 97 bp, Homo sapiens
tttgctacagcatcccacattaagtcaacgctgtcctgcagggtgagtacctggggcaaaaggtggccgtgaagaatatcaagtgtgatgtgacagc

SEQ ID NO: 112710 - DNA, 98 bp, Homo sapiens
cttcctccccggccggcagggtggacggtgggctctcctgccattgactctaccagaggagattcttcaagcttagttgctgaacttcaagaaaagct

SEQ ID NO: 112711 - DNA, 83 bp, Homo sapiens
cccacatacagcaacttagcgaagctgccggtgaagatgacaatgcagatcttcgtgaagactctgactggtaagaccatcac

SEQ ID NO: 112712 - DNA, 50 bp, Homo sapiens
gcatctgtgacaactgtgtggggaaactttatggacgaggagcgaccgac

SEQ ID NO: 112713 - DNA, 88 bp, Homo sapiens
tgccatcatggagggttatccagcacctggaggatacctgctacctggtctggaaagcaatcctccacagaaagaaagcagaatcttc

SEQ ID NO: 112714 - DNA, 102 bp, Homo sapiens
atcaaccaccaaagtgggaaacattgaaatcaaggggctttgaccacgacctttgaagagcttcattttgagatcaagccccacgatgactgcacagtagag

SEQ ID NO: 112715 - DNA, 75 bp, Homo sapiens
ccgagagcgcgaatatcgtcatcgttagaagctgagtccacctcaggacgaggccagtgcctgaaacgcatccgc

SEQ ID NO: 112716 - DNA, 100 bp, Homo sapiens
gtttgagtccgcatcgccacagctgaaggctgcgagggactaagagcagaatgagctttgatccaaaccttctccacaacaatggacataatgggtaccc

SEQ ID NO: 112717 - DNA, 83 bp, Homo sapiens
ccccgcgccgctcgcgcagccatgtccgaggagaagcccaaggcacacggaatgcagtgctgaacacggaggcgcgcacgatg

SEQ ID NO: 112718 - DNA, 103 bp, Homo sapiens
gagtcttctctgcatcccagccatcacctggatttacctgttttctgggagcttcgaagaagcctggctacagataagggaccaaaatgactgactcaaaata

SEQ ID NO: 112719 - DNA, 98 bp, Homo sapiens
cgagctccccgacgaggagcgcggcgagatctacgtgccaggaccaagaatcgccttcagccctgtctggtgcatccttggcagaaagtgaggaggaa

SEQ ID NO: 112720 - DNA, 50 bp, Homo sapiens
cgtctcgaactttctatgtgcagctcatgggcctcctgagtgacccagaa

SEQ ID NO: 112721 - DNA, 98 bp, Homo sapiens
gcaacatctacaccctcaaatgcaggtatgactcttatgagtcctgcgactcgagggccgtcctgagtgagcgcgacctgtaccggtcaggctatgac

SEQ ID NO: 112722 - DNA, 98 bp, Homo sapiens
agtggaaacaaaataaaagatctcagtacagtagaagctctggtataccgctgggccgaccactcaagcacggtgctgcagcggctgaacgagcagcg

SEQ ID NO: 112723 - DNA, 100 bp, Homo sapiens
gatgcttcagtcaacttctcagagttttctaagaagtgctcagagaggtggaagaaccgggagaagtacctgctgcccttcctgtccctgcaaatcatgg

SEQ ID NO: 112724 - DNA, 128 bp, Homo sapiens
ggagaagaggattggaggtgtcagtgttaaaggaacctctacaacgaaggtgaagccacggaagataaggccaagaagcttgagagaagaaaaatttcagaaaaattgtctcaatttgactagaatat

SEQ ID NO: 112725 - DNA, 107 bp, Homo sapiens
ggtgctcgccgtcctgcggaaccgctggctgtcagacagcttcaaggagacgttgatatgagactgaaacccctgggttgtggagggaaattggctcagagatggac

SEQ ID NO: 112726 - DNA, 100 bp, Homo sapiens
tccaggacagcacctagtcgtggccggaggagtctcagagctgtcagaaagatacttctgacattgtgcacatttggtgtccagaaggaatgaaaaccag

SEQ ID NO: 112727 - DNA, 90 bp, Homo sapiens
gttcttggtgcccctgggcatcaccaacatagccatcgacttcggggagcaggtgctggagaatctggtaaaagcaccattgtgaagcag

SEQ ID NO: 112728 - DNA, 82 bp, Homo sapiens
gcggatgggatccagctgttagtcgggtaggcatagtttggtgccctggttgtcagatgttggaaagcagtaggacggaaca

SEQ ID NO: 112729 - DNA, 100 bp, Homo sapiens
ggcagctggagcctcaggcggcagcgcttctaggtacgccgtcatgaaatacacaaatcgaagaatagagcattagtacactgggaactccaagaaaaag

SEQ ID NO: 112730 - DNA, 100 bp, Homo sapiens
atcatctatgtgtctgtgaagagggaggcaacaaactatggtataagaagccaggaaatttccagggaacattgttgtctgagggaagtcaaaagcatgc

SEQ ID NO: 112731 - DNA, 74 bp, Homo sapiens
gacagaatggatagaaattttaaagactgttgtgaacagggatgtacctaatgatctaggggtgtttattcctg

SEQ ID NO: 112732 - DNA, 75 bp, Homo sapiens
attctggaactgggagaagatggctttaaagaatacacttcaatcatggctccgatcttcatcttgaagaagagt

SEQ ID NO: 112733 - DNA, 83 bp, Homo sapiens
cgacagtaccagctgctcttcacacagggttctggggaaaacaaggaaggaactgtggctgcaccatctgtcttcatcttccc

SEQ ID NO: 112734 - DNA, 100 bp, Homo sapiens
atctccttctttgagattgatggacgtaagaacaagagacaggctcttgccatgttgcccgggctggtcctgaactgctgaattcaagtgatcctcccac

SEQ ID NO: 112735 - DNA, 76 bp, Homo sapiens
gggctctcctgatactaacagttttacgatttaaaacttcgccagaattttaatctcaggggcgatataatcaatg

SEQ ID NO: 112736 - DNA, 100 bp, Homo sapiens
cgggcacctgcaagtactggatcctcgacctagatgcctggaatgatgtcgtcagtaatgcctggaatgatgatgtctcatatgtctcaggcttccatgc

SEQ ID NO: 112737 - DNA, 100 bp, Homo sapiens
cctccacggcccgcgctcgtactggagcgaagagcggcctcctgaaggaggggaagggacgtgggggcggccacggcagaacaaagaactttgagtctgg

SEQ ID NO: 112738 - DNA, 90 bp, Homo sapiens
gtttctggacgcggatttttggcctcatactctgttatagataaacaagggaagacaaaggcgctttggctaagctggtggaagctatca

SEQ ID NO: 112739 - DNA, 74 bp, Homo sapiens
aatccgtagcgcccagctcattgcctcagctaatctctggatggtcgtcagatccgtgtggatcatgcaggcaa

SEQ ID NO: 112740 - DNA, 89 bp, Homo sapiens
agcaatatataattctggtcaaggtgtctgatgatttgtgagcctcaagtgactactctgtggaatcatctgtccttgcctttgaatta

SEQ ID NO: 112741 - DNA, 100 bp, Homo sapiens
atggagggccccgacgatagcgaggtcacctttgcattgcactcaggggccctggtgaaaacagatgaacaagaagtaatcaactttttattaacaacag

SEQ ID NO: 112742 - DNA, 100 bp, Homo sapiens
cggcgactacgacggcgttgatatcggtggtaacgacggcctcagcaggcggggaagatgaaagggtatcagcagatgttgcacacaaacttggtatacc

SEQ ID NO: 112743 - DNA, 50 bp, Homo sapiens
ctctgctcttcagtacaatcctgtgacaaccaaagccaagcaactgaagg

SEQ ID NO: 112744 - DNA, 100 bp, Homo sapiens
cagcgagcagatgcggacgcttttttccttcctaggagaaatcgaggagctgcggctctaccccccggagatcacctgctgttaccagctaccacccata

SEQ ID NO: 112745 - DNA, 100 bp, Homo sapiens
cctattcagctgtaccagtccgccattttgctaccaagaaagccaaagcccaggagttaaagtcactgtttgaaaaaaaatctctcaaagagaagcctcc

SEQ ID NO: 112746 - DNA, 90 bp, Homo sapiens
aagagattcagccagcacactcctcgcgagcaaggttatgaagacagtatggagtttccagaccatagtagacatttgctacagtgtctg

SEQ ID NO: 112747 - DNA, 100 bp, Homo sapiens
tgcttggctggattaagcgcctaattaggatggtttttcaacaagttggagtaagcatgcaatcgaggtcctgctgtactagccaccaaagcagctgctg

SEQ ID NO: 112748 - DNA, 100 bp, Homo sapiens
aattcagctacagggtgaccaacgcaagaacatatgccagttcctcgtagaggattttttatcaagcagaaatgcatcgaacaacgagaatcaagatcac

SEQ ID NO: 112749 - DNA, 100 bp, Homo sapiens
gcacaaccatcgcagttggaagcccatggggcagctggatgaactgcagctttgcaagaattgcttttacttgtcaaatgctcgtcctgacaactggttc

SEQ ID NO: 112750 - DNA, 76 bp, Homo sapiens
gcgcagggtcagccaccagggctacagcactgaggctgacatgcaagaaagcacttcagccaagcagaagggagcc

SEQ ID NO: 112751 - DNA, 100 bp, Homo sapiens
aagaaatcctgataagaactgctttaggcccagaaatctaaagatctttgttctataactgtaagtggagaagagatccctaatatgcctcctgaaatgc

SEQ ID NO: 112752 - DNA, 100 bp, Homo sapiens
ctcgaggatgacggtgctgcaggaacccgtccagctgctgtgacttactcgaagcctcgattggccacattttggtactacgccaaggttgagctggttc

SEQ ID NO: 112753 - DNA, 74 bp, Homo sapiens
acgtagaattaagacggagttcctagtgcaaatgcaagaggttctgtccggaagcagattctaaaaccatgttg

SEQ ID NO: 112754 - DNA, 105 bp, Homo sapiens
ttgagcccgggaggtggaggttgcagtaagccaacaccgtgccactgcactacagcctgggcgacaggggggcaatggcggcttcctgtgttctactgcacactg

SEQ ID NO: 112755 - DNA, 91 bp, Homo sapiens
caataagcagacagaagagccaagcagctatggaggaaaatcaggtggcaaagaaacacagcatgatgtttggaaatataattcttcgatc

SEQ ID NO: 112756 - DNA, 74 bp, Homo sapiens
aggaaccggattgatcaggccagcttagactattcatacgctcgacatatctgaagagatggattaagaatgct

SEQ ID NO: 112757 - DNA, 100 bp, Homo sapiens
ggattctcgacctgctaacagaactggaccttttcggccatccatgagcagatgaactgcaaggagtatcaggaggacctggccctgcgggctcagaacg

SEQ ID NO: 112758 - DNA, 100 bp, Homo sapiens
tcgagttcttcgccgccgacctgagaaagtatgctgaggccttggattaccaccgtcaggcactggtgttgattcctcagaacgcatccacctactctgc

SEQ ID NO: 112759 - DNA, 74 bp, Homo sapiens
cgaggacgccctgacggtcatcaaccagcaggaggactccagcgaggcaccatgactcctgtgaggatgcagca

SEQ ID NO: 112760 - DNA, 100 bp, Homo sapiens
taaccaagtaccaagtgaagactttgaacgcactcctcagagtccgactctcccacctgctaagcttggatttacactgggcaacgtggttggaatgtat

SEQ ID NO: 112761 - DNA, 101 bp, Homo sapiens
agcagcagcagacgtttggaaagtttcagagactcctccactctctgggaatgacacggactccctctcctgcgacagtggcagttcggcaactagcactc

SEQ ID NO: 112762 - DNA, 110 bp, Homo sapiens
gagagcatcgactggaccaagatcgagcccagcgtcaacttcctcaagtcgcccaaagttcaaatctgaacatcaatgatgtactagggaactactcattgactcttgtt

SEQ ID NO: 112763 - DNA, 88 bp, Homo sapiens
gagagaactgctggaaggagactggatgatagaattgggctttgttatgcacctaaagccatattggaagctccagaagaaagagcac

SEQ ID NO: 112764 - DNA, 100 bp, Homo sapiens
cggggatgggggcctcgggcgccccgcagccccccaacatcctgctcctgctcatggacgacatgaaggatttgggggcagagcacttggcaggtcatga

SEQ ID NO: 112765 - DNA, 75 bp, Homo sapiens
tctcgacctgctaacagaactggaccttttcgtccaacctaaggtgactgtatatccttcaaagacccagcccct

SEQ ID NO: 112766 - DNA, 83 bp, Homo sapiens
tggattgctgcaaggctgagggacgagaacgagaatgagctgaaagccagtggtggcgaaatcaaaattcataaaatggagca

SEQ ID NO: 112767 - DNA, 96 bp, Homo sapiens
acttcctcacccgcgcctgcgacctcggtcccccccgcctccagccagcctgtgcagacttgctgcctgctgtgtcaccgggaacgcaaaggctgg

SEQ ID NO: 112768 - DNA, 75 bp, Homo sapiens
acggcaagcgcctggagcggctggccatcggtccgcgggagagctgtggggcttggtgagtgtttcgtggcctct

SEQ ID NO: 112769 - DNA, 51 bp, Homo sapiens
gtccaagccagtggatgtttccaagagtaaaggtgggattctatccaaagc

SEQ ID NO: 112770 - DNA, 100 bp, Homo sapiens
tacggccgggtcatcgtcacctccttccagaaagccaacatgctggaccagcatcacaccgacctgatcttaaaggacagacccacgaagtcaagcatgc

SEQ ID NO: 112771 - DNA, 83 bp, Homo sapiens
cttagctgtgctcgcgctactctctctttctggcctggaggctatccagctattctaccttgtaaatactgttatttgtatat

SEQ ID NO: 112772 - DNA, 50 bp, Homo sapiens
ctcagagctcgggggcggcgctcaggaagtgaagctcagtgttcccatgc

SEQ ID NO: 112773 - DNA, 51 bp, Homo sapiens
gattcgcagtggtcgcttcttctccttgttgtcgagatgtccacagaagga

SEQ ID NO: 112774 - DNA, 100 bp, Homo sapiens
aaggagtgcatgctgtgtcttggggccctttgggacgagtgctgtgactgtgttgtaatgctacagccctttgactatgatccgaatgaaaagagtaaac

SEQ ID NO: 112775 - DNA, 74 bp, Homo sapiens
ttcttacatattcctggtgtagaatctgcaaacagattatcttagaagacctaggactccaaaaatgtttcccc

SEQ ID NO: 112776 - DNA, 90 bp, Homo sapiens
gatgatatcattatgctgacctctgacgagctgcaatttggttatgaggaatcaaacttgacgtatggagccaagaaagcccttggaaaa

SEQ ID NO: 112777 - DNA, 89 bp, Homo sapiens
gtcctcaaatttattgccaacactgaattctggagacctctgtgagtgaaagccttcagagggaagctgctaagaagcaggccatgaaa

SEQ ID NO: 112778 - DNA, 83 bp, Homo sapiens
ggaacaaacacttctggatgcatccgatcaactcactatcctgaaggtccattctcccaagaagaggggacagaaagacagat

SEQ ID NO: 112779 - DNA, 75 bp, Homo sapiens
aagagctgaaacttcagagcaagttttcattgggcaaaatgggggtctcctatggacagaagtgcgggcaaggag

SEQ ID NO: 112780 - DNA, 100 bp, Homo sapiens
cttgcgagtttgccaccttccccaaggggtccgtccgagggatgacctggctcagagtcataggacacaattgggaaaactggttattttaccaaggctt

SEQ ID NO: 112781 - DNA, 75 bp, Homo sapiens
caagaagggctttgggggcagtgattcagagcattcttcactccagaataatgagcaaccctctttggccaccag

SEQ ID NO: 112782 - DNA, 89 bp, Homo sapiens
ctgccaagctctgggggtcatcacagagaaggagacccaggtgatgcagaggccaggatgtgggcccagccctgtgccaggaggctggc

SEQ ID NO: 112783 - DNA, 90 bp, Homo sapiens
aggagattggctttgagacgaccagaaatattggttcagcccctgaaagtttccaacaggaaatcatattgctcatttagaaagtggatg

SEQ ID NO: 112784 - DNA, 100 bp, Homo sapiens
gaaaacggaagcgcagggagaaggaagaggtgtttgaaaaggattttttatcaagcagaaatgcatcgaacaacgagaatcaagatcactgagctaaatc

SEQ ID NO: 112785 - DNA, 95 bp, Homo sapiens
ccaccgagacagaggctgaagcaggtgtccgcggggcagacgtcggtgtatgccctggatgagaatgcatcgccctgagcaactggtggtttgtg

SEQ ID NO: 112786 - DNA, 98 bp, Homo sapiens
ccgggacccggccagccgtggagacaggtacatgctggtcacctacgacgaacccccgtactgcatcaaggcagctgctcccaaccccagaacctttg

SEQ ID NO: 112787 - DNA, 100 bp, Homo sapiens
ctgctcggcgcccgggtccgccatgcgctccgccgctgtcctggctcttctgctctgcgccgggcaagctggacaagatcgagggcgtgttcgagcggcc

SEQ ID NO: 112788 - DNA, 82 bp, Homo sapiens
cgggtgcgctgctcaaggacacggtctacaccgacttcgacggtctcggcgcggaagatggccggcggcgtggacggcccca

SEQ ID NO: 112789 - DNA, 101 bp, Homo sapiens
ctcctctgtgtttgccgcctggaacccagtgacttgattgtaaaaatttacagagcggaatcatatgctggtctccaagagtttaaagcagccatagaaga

SEQ ID NO: 112790 - DNA, 100 bp, Homo sapiens
cctgagcagcctggcctgccatgtccgggagaagacagtcccgcaggctcccgatggcgagattacggcgccctggccatcatcatggcaggcattgcat

SEQ ID NO: 112791 - DNA, 75 bp, Homo sapiens
gaaaacggagagactggggagaatctgcgctcctcagaccaccggcaggtgaacagcctgatgcagaccgaggag

SEQ ID NO: 112792 - DNA, 101 bp, Homo sapiens
ctcgctccgtggccttagctgtgctcgcgctactctctctttctggcctggaggctatccagcgcataatcaccagcaacacccgggacaataatacgggg

SEQ ID NO: 112793 - DNA, 89 bp, Homo sapiens
gagctccaggagttcgtctcttacgtctgcggaagtgcagctgcctcagttcttagcgcaggttttgctgttactgctcagtgtagtca

SEQ ID NO: 112794 - DNA, 75 bp, Homo sapiens
cggccctgggagctggaggaaccgcggatcagttcgaggtgctcgagcgccacacgcagtgggggctggacctgt

SEQ ID NO: 112795 - DNA, 82 bp, Homo sapiens
aatcaattgtaaagtcatcgttgggtatgacgattactactattatggtccacctcatatgccccctccaacaagaggtcga

SEQ ID NO: 112796 - DNA, 100 bp, Homo sapiens
gtggccgctgccgcctccgccccagtatcctggtgtgaaccagctatcctccagtataggaggattgagtcttcagagttctccacaaccagaaagcctg

SEQ ID NO: 112797 - DNA, 100 bp, Homo sapiens
gaccgtgaagacgggcgaggagatcttcggcaccatcggcatgcggcccaacgccaagaacaacatggtcagtaggacagaaggtaacattgatgactcg

SEQ ID NO: 112798 - DNA, 100 bp, Homo sapiens
gctcggcagtggtctgatatgtgtcagtgccaacaatgctaccacagagccccggagctatgtggagtctgtggcacggacagcggtggctggaccccga

SEQ ID NO: 112799 - DNA, 100 bp, Homo sapiens
ttgaaactatggctaaattacatattccagtaatggtggatgaagttgttcattgtttgtcaccacaaaaaggacagtattcagcaagcggaaatgggag

SEQ ID NO: 112800 - DNA, 83 bp, Homo sapiens
ggaggacctaggcggccgttccgcggagcccggccgaggagggttccgagtctgaggaagacataaccttgtgcctgcctgcc

SEQ ID NO: 112801 - DNA, 100 bp, Homo sapiens
aaacaatgggtcagtgttctcgaaggtctgaagaaaaccctgcgggatgagatcaatgccattctgcagaagaggattatggtgctggatggagggatgg

SEQ ID NO: 112802 - DNA, 99 bp, Homo sapiens
ctccagctgaaccgttactacccacagatccttaccaacaaggaggcggaaaaggtgctgaggagttcaacagcatgatcctttactgtgtgcccaagc

SEQ ID NO: 112803 - DNA, 104 bp, Homo sapiens
cagcccgtggtcctgatgccaacagtgtaccagcagggcgttggctatgtgcccatcacagtgcctccggagccagcgtggtggccatagacaacaagatcgaa

SEQ ID NO: 112804 - DNA, 75 bp, Homo sapiens
gcaaaagctcattgacgatcaagatatcagtggtcattgggactcccacacttaaacaaagaaaggaaattctgc

SEQ ID NO: 112805 - DNA, 103 bp, Homo sapiens
actcttcgttcgattattagctttagtgaaatgggctaataatgctggcaaagtggaaaaatgtgcgacactgtcacatgaacccaaagtccttcaagagggt

SEQ ID NO: 112806 - DNA, 83 bp, Homo sapiens
ccaccatctccatcacccaccaacaacaccacaataatccacagccaagcccgtgcagcctgccaggactcttccagacacgg

SEQ ID NO: 112807 - DNA, 82 bp, Homo sapiens
tgtgtttgctatgccacagtcaggaacacgaactctagttggcctagtaagagacctgagagggatcgctttcgctttcaat

SEQ ID NO: 112808 - DNA, 100 bp, Homo sapiens
gagcaaatgatgaagacatccggaagaagtacaaggtgaatatcttaaccagacttgccgcagaattgaacaaatttatgctggaaaaagtgactgagga

SEQ ID NO: 112809 - DNA, 96 bp, Homo sapiens
gactgttcggcccgccgtgctcccaggtgcccccggcctgcgctcccatccacacgctcgtcagagcaccataacatggtgtgggaagtgaagaca

SEQ ID NO: 112810 - DNA, 82 bp, Homo sapiens
gggagagtccgacgagcgctgcactaacgcaggatccggctgccgaaggtcctcgccaggacccatggatgaaggaccagat

SEQ ID NO: 112811 - DNA, 83 bp, Homo sapiens
ccttcgtctgcacttaccttggaagccaatatatcttcacagaaatggcctcggttggctgctttacctgagaatccaccagc

SEQ ID NO: 112812 - DNA, 95 bp, Homo sapiens
atggctgcggcggcccagctctctctgacacaggcacggatgggcagaagcctttgcaggtatcagaagttcacatatcaaatatatctgcccgc

SEQ ID NO: 112813 - DNA, 115 bp, Homo sapiens
caccaagctgaagatcattgagatactccagacgaagcttcacaaaagatgtctaaggtaagatcatacttcatgtatctacagcataaggagaaattgctttatgttttcagac

SEQ ID NO: 112814 - DNA, 82 bp, Homo sapiens
cccccgccgcagcagcaccggcgacaggtgtggacactgccagcggctgcagccgacttggaatgacctgggagacaaatac

SEQ ID NO: 112815 - DNA, 50 bp, Homo sapiens
attcctctccctgctttgcctcgatacatcagcccacagcaaggcgggct

SEQ ID NO: 112816 - DNA, 90 bp, Homo sapiens
agaactggatcataaaaatgctcaggcacaacaagagattctggtacaggtcaaagaggtcctctccaagctgagcacgctcgtggaaac

SEQ ID NO: 112817 - DNA, 89 bp, Homo sapiens
cgggaggcccgggaagctggtggcaccatgaatgtagagaatacagacttcgacccccaccacttctggcagtggagcagcttctcgga

SEQ ID NO: 112818 - DNA, 74 bp, Homo sapiens
ggcaggactgtggccgtgggggacatcgtctgggtcacgccgatgatggagctgaagcccaacgcaggtagcga

SEQ ID NO: 112819 - DNA, 75 bp, Homo sapiens
ctcgcctcgactccaaatggttgaaaacagatatacagcctttgaagaagatggtggagagaattcgcaagttcc

SEQ ID NO: 112820 - DNA, 82 bp, Homo sapiens
gaagacactgcgtcaagcaggtgccccgaataacgactggagactgatgcatgagggggctacggaggcgcaggagcggtgg

SEQ ID NO: 112821 - DNA, 74 bp, Homo sapiens
attgaagtgtcaaaatccatagatggaaaagatgggaaatccctaagtcagccaacccctcctcccatgccaat

SEQ ID NO: 112822 - DNA, 98 bp, Homo sapiens
gccgcgtggacgccgccgagtgggccgcgtgcgccggctacgcgagggacctgctgtgccagcttctcacctggggcgggtgggttctgcaccaccct

SEQ ID NO: 112823 - DNA, 100 bp, Homo sapiens
tcttaattcacttcagttctgacataatctacttggaggttccaacccagatgccagagcagaaccccacacatgcactgccagagtcccctcgcctgac

SEQ ID NO: 112824 - DNA, 100 bp, Homo sapiens
gacggattcatttagagctgcggaacaggacgccctctgatggcaccggcagaagctggaggaccagaccaagccgttccctgaccgctttggggacctg

SEQ ID NO: 112825 - DNA, 74 bp, Homo sapiens
cagacggctcacctgtgcgggatggaacaaaagatgaaaataaacccatctggatgcatgctgaagaaagagaa

SEQ ID NO: 112826 - DNA, 75 bp, Homo sapiens
ctcgcctcaccacagacgcagcacgtcaaatctgtgaggatgaaatactggagctgttgtagaagaaaaacttct

SEQ ID NO: 112827 - DNA, 97 bp, Homo sapiens
cttggccttgagtagcaggggcctggtccccacagcccacaggatggaccaaagggggcaggtggtcgttctcgttaccggaccacttcttcagcca

SEQ ID NO: 112828 - DNA, 97 bp, Homo sapiens
gaacaagaagttgagaccgagaatgtggaaacagtgtttaactgctgaagagatcttttcccttcatggcttttcaaatgctacccaaataaccagc

SEQ ID NO: 112829 - DNA, 50 bp, Homo sapiens
ccagtttgccatcccaaggccgaagatcatgagcgtcttgttgttcatcg

SEQ ID NO: 112830 - DNA, 100 bp, Homo sapiens
cccgggcctcgtcgtcatccccttccagttcgcctggccggtcgcaatggaagaagagatcgccgcgctggtcattgacaatggctccggcatgtgcaaa

SEQ ID NO: 112831 - DNA, 97 bp, Homo sapiens
gcggccctcagcggccgcgaccgagtcatggctgagacctacgggaaatgtttcaacgtgcgcaagcgttgcggcggcgggcagaggactactacag

SEQ ID NO: 112832 - DNA, 76 bp, Homo sapiens
gggcagaggatgcagtggaggccatcaggggccttgataacacagagtttcaagaacccttaggagaaatcttgag

SEQ ID NO: 112833 - DNA, 75 bp, Homo sapiens
ctttgcaggggagcctgagagccacagtgctgcttttgacacaaaaacggggttacgtgtggcagtgaagaagct

SEQ ID NO: 112834 - DNA, 100 bp, Homo sapiens
ggggaagatgttcagcgtagagtcgctggagcgggcggagctgtgcgagagcctcctcacttggatgaatgatttcggaatcaagaatatggaccaggta

SEQ ID NO: 112835 - DNA, 90 bp, Homo sapiens
gggaggtgaagatcgattctcagggcaagcatgagattgcagcggagcacagtgacaggtgaacagggatattgtgtcaggcctgaaata

SEQ ID NO: 112836 - DNA, 97 bp, Homo sapiens
aatgtcatccagcgagtgattaggatgtggcagataaccagatagactctggggacctgatggagtgtctgatacagaacaaacaccagaaggacat

SEQ ID NO: 112837 - DNA, 115 bp, Homo sapiens
tcaagatagtccaagaaatttctcccccagtgcctcagcccatttttcatttgcacggaggctacagaagaagtttccaaaaatctggttgccatgaaagaaattctgtatggca

SEQ ID NO: 112838 - DNA, 75 bp, Homo sapiens
aaccaacccactttctcggcgccgcggctcttttctaaaagtgcactttgtgagtgtgccctccagactccttat

SEQ ID NO: 112839 - DNA, 82 bp, Homo sapiens
gcctcccgagaagaagttgaggcgctatggttacacatcattttggaatgactgtatatcatctggattacgtggctgtatg

SEQ ID NO: 112840 - DNA, 75 bp, Homo sapiens
gagcagttggcactacccgtcttgaggaatgaagactatgaccgtctgaggcctttatcttacccaatgaccgat

SEQ ID NO: 112841 - DNA, 74 bp, Homo sapiens
atgacgcaggccttaaggagaaagtttcaggccttttcagatattaatggcaaagttcagaccattgttttgac

SEQ ID NO: 112842 - DNA, 80 bp, Homo sapiens
gacttctcaatcccaagtggccaaaggtttaactatagatcaacacatcatcttgcatctcatgggttctatgaattttt

SEQ ID NO: 112843 - DNA, 112 bp, Homo sapiens
tgcctggtgcagaggatcctggaggcctgggaagccaacgaccacacgcagtgagaagccctaccactgcaactgggacggctgcggctggaagtttgcgcgctcagacgag

SEQ ID NO: 112844 - DNA, 100 bp, Homo sapiens
cttggaagcttctttgatgatggcccaggaatttataccagctgtagcaaaagtgggaagccaagcctttcctcccggaaatgccagtcctcgattcatc

SEQ ID NO: 112845 - DNA, 83 bp, Homo sapiens
gttggagacaattcctggttcagaatttaaacatctttctagggcgtgatggtgggcatgggtcagaaggattcctatgtggg

SEQ ID NO: 112846 - DNA, 98 bp, Homo sapiens
acacccttaccaccaagatcaagttctcagatgtcctgcacaccatcaaggagcatgcctttgtggcctcagagtgggaagaagagcgctatcctgaa

SEQ ID NO: 112847 - DNA, 50 bp, Homo sapiens
gtggcgatcacgagaacaataagtatcgcgcttactatggagcatttaag

SEQ ID NO: 112848 - DNA, 83 bp, Homo sapiens
gataaattcccggaaccgcgattcggcgtgtcaggcaaggtgcccggcgacgactgcccgctggtgtggggccagtgctccca

SEQ ID NO: 112849 - DNA, 100 bp, Homo sapiens
aatcgtcttatagttgagaatttatcctcaagagtcagctggcagtctatgactttgaaagaagccatcaagtcttcactcatcatcctcaaacaagtaa

SEQ ID NO: 112850 - DNA, 83 bp, Homo sapiens
aagagtacgagcgtgccacgcgctacaactacaccagcgaggagaagtttgccctagtggagaggagaaggcagagccccccc

SEQ ID NO: 112851 - DNA, 75 bp, Homo sapiens
agaaacatgaagttcgggactatcttctggacctagatgtgaaggctggtggaggctgtgtaatgaccattggag

SEQ ID NO: 112852 - DNA, 50 bp, Homo sapiens
tcagcttcttaccaaatacagaaggagccagtgcatcaatcagatgaagg

SEQ ID NO: 112853 - DNA, 75 bp, Homo sapiens
ctgtaccaaggcaccgggtccctcgcccaggtccccttggacaaatggaggactacactgaaacattcaaatgtg

SEQ ID NO: 112854 - DNA, 133 bp, Homo sapiens
ctgccggatggtgctggccacttgcttgggatcctttatcctggtcatcttctatttccaaacaattctgtggtgttcttggtcacacatttatggagtttctgaagggcagtggagattactgccaggcaca

SEQ ID NO: 112855 - DNA, 90 bp, Homo sapiens
ggttattcgagtgaccgagaccgcggccgggaccgaggtatggtttgaagtggtgaacatggatttttctcggcttcacatgtacagtcc

SEQ ID NO: 112856 - DNA, 100 bp, Homo sapiens
gaataacccgcccccagcgggatgtgaaggactccgggtgaggccggccacgccccgcacgaatgtgaaagatgttgcagaagtgttccagaagtggctg

SEQ ID NO: 112857 - DNA, 100 bp, Homo sapiens
agtccgaagccaggttgctgaaggatgtgtctcacaaagaaaatgtggacacagacttgccaggcagcctggggcagagtgaagagaagcccgtgcctgc

SEQ ID NO: 112858 - DNA, 75 bp, Homo sapiens
ctcccgagggcgagcccccccacagcaggctaccctgtcatgatcaaggcctcagcaggtggtggtgggaaaggc

SEQ ID NO: 112859 - DNA, 90 bp, Homo sapiens
cgggacacccgcgaggccggaaaatggttctactgggacttcaccatgctgctgttcatggtgggaaacctcatcatcatcccagtgggc

SEQ ID NO: 112860 - DNA, 50 bp, Homo sapiens
tctgtagcaaagcagcttcttgccggattgtcaccagacctgcaatctat

SEQ ID NO: 112861 - DNA, 92 bp, Homo sapiens
ccgaaccccttcatgcccaaatcccggaaactccagcgtgtctccagccgtgacctggaatggccaaatatcaaggtgaagttcaaagtttg

SEQ ID NO: 112862 - DNA, 126 bp, Homo sapiens
ggaccgatgactcggaaagcgctcagaagaacgcttcgcccgttggtgctatgtatgacctggacgcgtgtgacattcaagaaaaatacccggatttatttcaagtgaacctggaagtggaggtgg

SEQ ID NO: 112863 - DNA, 100 bp, Homo sapiens
gactacctggtgcctctagtgaaaagaacaagaagtcttaccctcaggtcaaagaaaatgtttataggaggccttagctgggacactacaaagaaagatc

SEQ ID NO: 112864 - DNA, 90 bp, Homo sapiens
ataatttggggttcaagattccaggccacgatggtctcccagccctcagctcgccggggctccgggatttctgtgtctctgcctgtcggg

SEQ ID NO: 112865 - DNA, 74 bp, Homo sapiens
agaccggaccgaagacggaccgtgccgggaagagggtgtctgatgccatcaagtgttgcaggagaaacttcagt

SEQ ID NO: 112866 - DNA, 83 bp, Homo sapiens
ctccagtagacggtacagcgaaggcagagagttcaggatgaccgagtgggagacagcagcaccagcggtggcagagaccccag

SEQ ID NO: 112867 - DNA, 97 bp, Homo sapiens
ggggatttggaaatgtcatccgatggcacaatcaggttgcagcattgcaggaagagaaaagtagtttgttggcagagaatcaggtattaatggaaag

SEQ ID NO: 112868 - DNA, 97 bp, Homo sapiens
gtcggccggggccgcttcaccacttacgaaatcagggtcaaggcatggctaatgtaaaagcagccccaaagataattgacacaggaggaggcttcat

SEQ ID NO: 112869 - DNA, 100 bp, Homo sapiens
ctggagacgcggcctcggaccagccatttcggtgtagaagtggcagcacggcagatgtgaatgaatgtgaactgctcagtggggtgtgtggtgaagcctt

SEQ ID NO: 112870 - DNA, 100 bp, Homo sapiens
gttcggctttagagtgtggtgaagggtacttttcatggtgcatggaaggaaagccaatgcgcaggtcctctgctgtaccactttgaaaatctggcaaatg

SEQ ID NO: 112871 - DNA, 101 bp, Homo sapiens
ggctggcaaggatggagtggaagtgccgtggctcctgacactatcaacaatcatgtgaagacttgtcgagaagagcagaagaatctacacttctttgcacc

SEQ ID NO: 112872 - DNA, 101 bp, Homo sapiens
agtctgacggcgccggttcgctgcccggtccgcccgcggtgagaggttcgagaacttgtcttggacaattgcaaatcaaatgatggaaaaattgagggctt

SEQ ID NO: 112873 - DNA, 51 bp, Homo sapiens
cacaattatcaccgggtatttagtgaataaccctataccttccaatttgaa

SEQ ID NO: 112874 - DNA, 50 bp, Homo sapiens
tgttctgatcactactgacttgttggtgctgtttgaggccctcatctccc

SEQ ID NO: 112875 - DNA, 100 bp, Homo sapiens
cgccccctagtggaagcagagtgggaagcagggtgtttgtgaaccgaagtttagcaatggaaaagataaagtgttttggttttgatatggattataccct

SEQ ID NO: 112876 - DNA, 50 bp, Homo sapiens
gctcagtctcccaacacctctggtgctggagaatctggtaaaagcaccat

SEQ ID NO: 112877 - DNA, 75 bp, Homo sapiens
ccagactcaccttactggcaccaggtggccacagggcagccccatgagggctccagctactcttcgaggaaggac

SEQ ID NO: 112878 - DNA, 50 bp, Homo sapiens
cggagctgcggtctccccgccgcggctgccccggccctggactcggcggc

SEQ ID NO: 112879 - DNA, 90 bp, Homo sapiens
tgcagcagctgcctcccacaagtagctccagcgccgtaagcgaggcctccttctcctacaagaattcagatcaggaaggaggtggaaaga

SEQ ID NO: 112880 - DNA, 75 bp, Homo sapiens
ccgattcctcctccttggtcgccgcgtccttggctggcgtaaacgcttcgttaagggactcaggcagtacgggaa

SEQ ID NO: 112881 - DNA, 100 bp, Homo sapiens
ctattcagccttcaccagtgatggtgccatttcagtaccaagcctttctgctccaggtcaagtagtttatgccaacgtgacttcattcatacagatgaac

SEQ ID NO: 112882 - DNA, 100 bp, Homo sapiens
gctccctctcgggcgactggtaccgcaggaaccagacccaagaaactcgagagatcttacatttccactataccacatggcctgactttggagtccctga

SEQ ID NO: 112883 - DNA, 100 bp, Homo sapiens
cctcagccctggttccaagggtcaagaagacagtgaggacatggacagcctccttctacaccgtggtccttcagcatatctctgtgctgcagacaacaca

SEQ ID NO: 112884 - DNA, 83 bp, Homo sapiens
ctagctgacacatctatgtcctcgccttggttggagatattgatgatgttaagaagttcaaaccgggttacctggaagctact

SEQ ID NO: 112885 - DNA, 90 bp, Homo sapiens
gaagaacctcacatcaagggacttccagaggaatggctaaaatttccaaagcaggtgtggaaaatgggaaaccgacccacttcactgtct

SEQ ID NO: 112886 - DNA, 98 bp, Homo sapiens
gctcctgagccgccggcgcgccgggcgccccggcctcagaagaggaaagtggaaagcctttccagtgtccaatatgtggtttggttattaaaaggaag

SEQ ID NO: 112887 - DNA, 73 bp, Homo sapiens
tggcagcgaagaagatcgaaaattaaacctcagtatgaaaagacacagactgtactctcagaactgaagttga

SEQ ID NO: 112888 - DNA, 100 bp, Homo sapiens
ctgcagcggccctggcgggtgccctggctaccatggaccatcctgctggtcagcactgcggctggaccaggactaaaacctccagaggaacggacaatag

SEQ ID NO: 112889 - DNA, 76 bp, Homo sapiens
gctggtggcaaccgcctacgagacactcaaggtggaagatggtatcttgaagttgaggaatgctggcaatgaacaa

SEQ ID NO: 112890 - DNA, 83 bp, Homo sapiens
ccctgtcacccctaacagatgaagagaaggtatggatcctggcgggagccagtcaacccctattatgtcaatgccggctatgc

SEQ ID NO: 112891 - DNA, 82 bp, Homo sapiens
gagaccgcttaccgcatctggctggagccctgcattcgcggcgtgtgcaggtcttgggcgtctttggtactggcttttttag

SEQ ID NO: 112892 - DNA, 88 bp, Homo sapiens
cagctgtccgagtcccaggtcaagagcctctgcgagaaggttttatgaatgaagctatggctacagattccccaagaagacccagtcg

SEQ ID NO: 112893 - DNA, 100 bp, Homo sapiens
acttgccctgtctcctcgcagatgagggccatgtttatgagtggactaagtgaaagcaaacaaacccatgtacacctgaggaatgtcgatgctgccacct

SEQ ID NO: 112894 - DNA, 50 bp, Homo sapiens
tctacccactgccctcggcccgcggaacttagtgatttggcccgtgaccc

SEQ ID NO: 112895 - DNA, 109 bp, Homo sapiens
ggtgaggtccccaaatattgaccaactggcatcccacagcctcctcttccagaatgcctttgcgcagaatgagctgaaagccagtggtggcgaaatcaaaattcataaa

SEQ ID NO: 112896 - DNA, 82 bp, Homo sapiens
ggacgtccggcttcggagcgggagtgttcgttgtgccagcgactaaaaagaggaaagcttcctgctgactcaaaaggatttt

SEQ ID NO: 112897 - DNA, 83 bp, Homo sapiens
tctcgccgaggcacaggctgctcgcggaccaccctgctccgaaaactaaggtgccagaaccctgtggagcatcatgaactggg

SEQ ID NO: 112898 - DNA, 100 bp, Homo sapiens
ggtccaaatggtgctggcaaaagcacaattattaatattctggttggtgatattgaaccaacttcaggccagtgaagcataactttaacctggaagaata

SEQ ID NO: 112899 - DNA, 82 bp, Homo sapiens
gtctcacctttaactctccttatgctgggtgaaaacaaaggtacactgatgctgaagtactatgagccttcggaacttgtgg

SEQ ID NO: 112900 - DNA, 96 bp, Homo sapiens
agaaaaatggaacttgctgtattgctgacctgggcctggctgttaaatttattagtttgtcactcaagccctatcagaaggttggtttgaattggc

SEQ ID NO: 112901 - DNA, 90 bp, Homo sapiens
ggatctggatgagctggacaaggatcatttacagttgagagaagcctgggatggcctcgatcaccagatgataatctacctcactttccc

SEQ ID NO: 112902 - DNA, 90 bp, Homo sapiens
ctcaggacttactggagcaaatctcaaagagcagtcggatttctgtccttggtacatgtatatgaatggcacctgcccagaaggaaacag

SEQ ID NO: 112903 - DNA, 83 bp, Homo sapiens
ctgcccttcgccaaggagatcgtctctctcatcgaggcccaaaccgccaagataacgaaggaggcccaacttcattcaataag

SEQ ID NO: 112904 - DNA, 75 bp, Homo sapiens
cggcatctgcaaaattcggccgcccaagcacaaacatttcactgaagatattcaaacaaggcaatatcgttcctt

SEQ ID NO: 112905 - DNA, 100 bp, Homo sapiens
tactgacgtattcctgctgttcccagaagcgaagtggagagcgccagagtaatgggggccctggtgaaaacagatgaacaagaagtaatcaactttttat

SEQ ID NO: 112906 - DNA, 75 bp, Homo sapiens
ccggaagggtgatgtggctgcggcatcgccggcctcgctatgatccaaggttttgccatcaaggggggacgattt

SEQ ID NO: 112907 - DNA, 75 bp, Homo sapiens
aaaagatgcacaagcaccaaaagcaccacaagtaccacaagcatggcaagggagagctggtgacggcctccaagg

SEQ ID NO: 112908 - DNA, 100 bp, Homo sapiens
tgttgctaatacccatctttactggcatcctaaaggagaaagtggatgaggaggggctgaagaagctgatgggcagcctggatgagaacagtgaccagca

SEQ ID NO: 112909 - DNA, 106 bp, Homo sapiens
agagactgctgagcccgtccgtccgccgccaccacccactccggacacagataacgaaggaggcccaacttcattcaataaggagcctgacggatttatcccagac

SEQ ID NO: 112910 - DNA, 101 bp, Homo sapiens
cgctctccgagctcgatccgctgctcgcacgggagccagctgggtggaatctgagaaaaaggggttgattgaaagaatctatatggtacaggatattgttt

SEQ ID NO: 112911 - DNA, 100 bp, Homo sapiens
catccgcctcaccacgagctacctgaagatgcgcgccgtcttccccgaagactagacgcttgaagcaaagctgccatcccagaagacgacatgctctcag

SEQ ID NO: 112912 - DNA, 75 bp, Homo sapiens
cggtgttccaactgtttaaagtttgtatccctatacagaggaccatgtcatacatacaaagtacaaagacttaat

SEQ ID NO: 112913 - DNA, 99 bp, Homo sapiens
cgttctggaaaggcacccatccttattgctacagatgtagcctcccgtgggctaggtttccgcagacatgcagctccagttacaagaaggcagttccca

SEQ ID NO: 112914 - DNA, 100 bp, Homo sapiens
ggaattcgcgaagctgccaaagccttagacaagagggtcacgcagcacaatgccagctctgcccctggaccaactccagatcacccacaaggacccgaag

SEQ ID NO: 112915 - DNA, 90 bp, Homo sapiens
gcatttcaactctagaggaaaaaattgaaagagaaaaggaattagcagaagacattatgtcaggtgcccctttcggctcctccattgccc

SEQ ID NO: 112916 - DNA, 100 bp, Homo sapiens
ggcatcctccttgaagtatttggctgaggagttttcaatcccagatattattgctggattcctatataccattttaatcttagctgtcttctatccattt

SEQ ID NO: 112917 - DNA, 82 bp, Homo sapiens
aaaattaaaagaggagcagcatggcatttcagtcactggtttgcagagtccagggtgtcggttggtggaaatatgaattctg

SEQ ID NO: 112918 - DNA, 108 bp, Homo sapiens
aatgtcacctctatcatgtttctagtagcgcttagtgaatatgatcaagttctcgtggagtcagacaatgaggagctgtggccctcaagaatcttcaaattaaagaaa

SEQ ID NO: 112919 - DNA, 83 bp, Homo sapiens
ctttctgctgctgaagtaatgcaatggtctcaatctctggaaaaacttcttgccaaccaaagcaggtgacagcagggacatgt

SEQ ID NO: 112920 - DNA, 82 bp, Homo sapiens
ggaagccaacgaccacacgcaacctcctgccccccgaggtctgcagtctcctgaacccagcagccatctacgccaacaacga

SEQ ID NO: 112921 - DNA, 83 bp, Homo sapiens
cctcgaccccccactgatcgcgctggataaagatgcgcctctgcgatttgcagatgataacaccctatgcccattgtcctgat

SEQ ID NO: 112922 - DNA, 125 bp, Homo sapiens
ttccggacaaggagttccagaatgtcatgacctacctcaccagcatccccagattactacagcccggccatgctgggcctgaagaccgaccaggaggtcctcggggagctggtgcgggcgaagct

SEQ ID NO: 112923 - DNA, 75 bp, Homo sapiens
ggaatttcagaattttgaacaaatctttgaggtttactcctggcttgggggcattaggaagcactggaggctctt

SEQ ID NO: 112924 - DNA, 75 bp, Homo sapiens
tgaatcccctgtttgagaaaaggcctaagaattttggcattggtaaaaggtgatccctctaagaaagaaatgaag

SEQ ID NO: 112925 - DNA, 83 bp, Homo sapiens
cgacgtcttgcctgtgtcccacttgttcgcggcctataggcgtggaggactggccagcccccaaacctccaagcccatcggct

SEQ ID NO: 112926 - DNA, 75 bp, Homo sapiens
accgcggccatcctgcaggcacagttgccgattacaggaatcatttccagcaatggaaagagatggaaggagatc

SEQ ID NO: 112927 - DNA, 74 bp, Homo sapiens
cgggaactgctgacgcttgatgagaaggacccacggcgtctgttcgaagaaaccatcatagcctttgcctggga

SEQ ID NO: 112928 - DNA, 99 bp, Homo sapiens
tgtcttcggtggactccttcggcagtccacccaccgccgccgcctcccaggagaaaagccttacagatgctcatgggaagggtgtgagtggcgttttgc

SEQ ID NO: 112929 - DNA, 133 bp, Homo sapiens
gtgccaaaagagcagtctcacatgaagaccaatttttacgtctagatttccatgcccatggaagatcgcccaggaccacaccgcagcgtaactgcaggcctctcagcgaaaaagggggaaagcaaagacccgg

SEQ ID NO: 112930 - DNA, 90 bp, Homo sapiens
cagaattcatgtagatgaatttgctttgggctcagcgcctatcctggtggtcatggtgatcttgctcaacatcggagtcgccattctgtt

SEQ ID NO: 112931 - DNA, 50 bp, Homo sapiens
ccaactaccttttagagtgggatgaggtgaaagaaaagatgttgtcccgg

SEQ ID NO: 112932 - DNA, 100 bp, Homo sapiens
gacagaggcaagcaggggcgccgtgggtgccagagaggcggaagaggaggcctgatggggcctagtaaatgacaaagactcaaaagattctatgacagaa

SEQ ID NO: 112933 - DNA, 82 bp, Homo sapiens
gaaaaaattatcagtggcctacgagataattctattaagggacagcacgcaagattcaagaagtatgtggggcacagtgcac

SEQ ID NO: 112934 - DNA, 113 bp, Homo sapiens
gaactggaggctgagtacgacagcctcaaacaggagctggagcagctcaaagaggtactaggttttgacaagcttgcatcatgcgtgagtataagctagtcgttcttggctca

SEQ ID NO: 112935 - DNA, 101 bp, Homo sapiens
gagtgcgttcggtgtgccgtgggtccgcgctgcttccacccaacttcctgttaggcttacaaataccttcgagaagaagtcaaaacttttcaaggaaaacc

SEQ ID NO: 112936 - DNA, 97 bp, Homo sapiens
ctgtttggaaagacccaggagaagccgcccaaagaactggttcatcatgcctagtggcgtataagaagaccccgccaccggtccctccacgcaccac

SEQ ID NO: 112937 - DNA, 112 bp, Homo sapiens
cttctcatggcaatcgagttgagtacttggatagacttatacctcagggagaaacctcaacaaagtccagccattgaacatggaaggagatcaaatgttttgggggacaaac

SEQ ID NO: 112938 - DNA, 50 bp, Homo sapiens
ggtttccaatttatgacaccatacatgcttcatccaggtctttaaaagtc

SEQ ID NO: 112939 - DNA, 100 bp, Homo sapiens
cgaatctccttgccaaagagctctggtcatcttgcacaacacctgatgaatggtggagagttacgcaggccaaggcgaacctagacaagaataagcagac

SEQ ID NO: 112940 - DNA, 98 bp, Homo sapiens
gaaccgcagtatcatgctggccaagaagatcatcattaaggacggaggcacgcctaaacccaccaagggacgaatgcgcatccactgcttagagaatg

SEQ ID NO: 112941 - DNA, 76 bp, Homo sapiens
tgcacttcttttttgagaaaggaaggaatatatcctgactgatttcagatgatcctgatggctctcaaattgagaa

SEQ ID NO: 112942 - DNA, 76 bp, Homo sapiens
gatcgggagtacacagacatcatccggcctgatcacttgaacggacatatcaagcaggtgcacacttctgagcggc

SEQ ID NO: 112943 - DNA, 76 bp, Homo sapiens
ttttggatgatgatggatccatttctcctattgaggagtcaacagataattgacgaccttgccaacctagtggaga

SEQ ID NO: 112944 - DNA, 100 bp, Homo sapiens
cagtatgaacaacattactcagttgccagaagatgcatttaagaactttccttttctagaagagctgtgtgatgaatgcagactctgctaccattttggc

SEQ ID NO: 112945 - DNA, 124 bp, Homo sapiens
aaacaaagcgaaacctgcaccgcgaactcaaagaactataaacaggatgcctgcaaaggctccacctggtgatgaagggggacctggacgatctaccatgccaaccccaggaaatactgcagct

SEQ ID NO: 112946 - DNA, 76 bp, Homo sapiens
attatgtccattgttctcttggagcagctggtcatcatgggtcacatgcccactgtggagctcctgaaaaagtatc

SEQ ID NO: 112947 - DNA, 51 bp, Homo sapiens
cggctgcctaatttacagcaaccatgaggtttctgctttgggacaaccata

SEQ ID NO: 112948 - DNA, 74 bp, Homo sapiens
taaaagacagtcctcgtcagcactgactttcagctatggaatcgaacacagaatgttcttggtgagaagggccg

SEQ ID NO: 112949 - DNA, 90 bp, Homo sapiens
aatactggtttcacactccaccaagcatcccattacagatagaagaggcaagtactcaaacagatgccctgaaactgccaccttcccaac

SEQ ID NO: 112950 - DNA, 50 bp, Homo sapiens
gcaaggttcatttatgttcatggttttgggatttgagattgacgcggtga

SEQ ID NO: 112951 - DNA, 97 bp, Homo sapiens
cgcccttgatcttcgctgtggcatggcggacgaggggaagtcgtacagcgaccaagatcactccatggatgaaatgacagctgtggtgaaaattgaa

SEQ ID NO: 112952 - DNA, 100 bp, Homo sapiens
tggtgcgaggagaactactccgtgacctggtacatcgccgagttctaatatcctccgaatcctaaatctagagctccaaggatgctggtcattaagaaag

SEQ ID NO: 112953 - DNA, 82 bp, Homo sapiens
gagagcagcagccgcccgcttcaaccccaggggaccagaggaactcagccctgattgcggctgcccccaagtgtaactccag

SEQ ID NO: 112954 - DNA, 75 bp, Homo sapiens
gaagttgcccaaagaacaagtgagggggccatggactttatggacagcagcctgctaaccaagtcatcattcgag

SEQ ID NO: 112955 - DNA, 98 bp, Homo sapiens
ctgaaactcagagagggaagatgtcttgcaagtacagcagccacacccagaaaaatggctacaaacttcctagcacatgagaagatctggttcgacaa

SEQ ID NO: 112956 - DNA, 100 bp, Homo sapiens
gctggaaaggaatgaggagttacagagggccgagaaggacaggatcagaaagtggaatctcaagaacgagaagatgttctggctggaatgtctggaaaag

SEQ ID NO: 112957 - DNA, 100 bp, Homo sapiens
ggggcttgatgaaggcgtggatagcctgaaggcagccattcagacagaacactgaagattctgctctcagggtgttgattgacgtctggaaggcagagac

SEQ ID NO: 112958 - DNA, 114 bp, Homo sapiens
ggaccgggcctcaaaatggccacacgcgtacccccgtagcggaaaaacgtttttcgttggaatatacgttgcacatttatggcgattctgagtgtgagggcagacttctgccag

SEQ ID NO: 112959 - DNA, 127 bp, Homo sapiens
cgggcttcgctctcgccttacgacagcccggtcggatcatggggttgcccagggggccggagggccagggtctcccggagctgtgattgggttattatacccctgcattgacagacatctaggagaa

SEQ ID NO: 112960 - DNA, 75 bp, Homo sapiens
atggctagcaggaatgcttactgttgcgtggttcgttattaacagcttagcagtgtctgcaaaaacgaatctttt

SEQ ID NO: 112961 - DNA, 98 bp, Homo sapiens
ttttccactggctcacctttaggcttctgacacttttacctacggaatgtatcctgtcaggtataatgtcagtgaatggcaagaaagttcttcatatg

SEQ ID NO: 112962 - DNA, 132 bp, Homo sapiens
gaggcgcgagggcgcggagttccaggtcgagcagttaggccgcgagcgactgcggcgccgagccggtgaatacatcaagacctggaggccacggtacttcctgctgaagagcgacggctccttcattgggta

SEQ ID NO: 112963 - DNA, 90 bp, Homo sapiens
ggtaatggggggtcagagtgccggaccccagcacacagaagccgagacgatcatatctgaagatattagtgagctacaaaagaatcaaac

SEQ ID NO: 112964 - DNA, 82 bp, Homo sapiens
attcagttggcctcatgctatcttcattggatcttctttggaaagattatttgcatgggtgcaaaagaaaatggtttgccgc

SEQ ID NO: 112965 - DNA, 90 bp, Homo sapiens
agctggcaaagaagttgctgttggggactcggaaggccgtatttgggtctatgacgttggagagtcatccgtccttggctcaggatttgg

SEQ ID NO: 112966 - DNA, 100 bp, Homo sapiens
gcccaggccacagtaccctattcacgctctgtgcttgtgccaagatgatgatgtgcctgcagatatggttgcagaagaatcaggtcctggtgcacaaaat

SEQ ID NO: 112967 - DNA, 82 bp, Homo sapiens
ctcatgttctgcacctcaggagggaattcagcctcagtgatgtccatgagccatcactggtgcaagctatatttaacggaga

SEQ ID NO: 112968 - DNA, 101 bp, Homo sapiens
cgggccggccccgcggggagcgcccccggcgcgatgcccttcaggaaagttcattccttggaagaagctgtaccatcgatacctgatgaatgaagagcaag

SEQ ID NO: 112969 - DNA, 100 bp, Homo sapiens
tggagtccagtgtgagcactggtcgtaaatgtgcagtagacattgttgcaatcatgatcggcaatctgaaaggcacaaaaattctgcaatctattcaaag

SEQ ID NO: 112970 - DNA, 82 bp, Homo sapiens
ccgaaactggggtgtccaggcggaacagcagagcccagcctcctgcccgaaggccacctgaacctaacggctccctgcaacg

SEQ ID NO: 112971 - DNA, 74 bp, Homo sapiens
agtcttcagcctcatctactgcacacttgagtccatgagattttagagtggtcctatggcagcgtatacaaagc

SEQ ID NO: 112972 - DNA, 100 bp, Homo sapiens
cgccctgacgcccagcatcaggaacctggctatggagaaggtggcctcggcagtcctgtttccctgtaagtccgaggatcagaaggactgtacatggtga

SEQ ID NO: 112973 - DNA, 100 bp, Homo sapiens
ccgtgggcggctgcgtcacgtgacccaggtctggccgtgggcctgggcttcggggcactggcagaggtcgccaagaagagcctgcgctccgaggacccct

SEQ ID NO: 112974 - DNA, 50 bp, Homo sapiens
ctcctgaatagctgggaccacagatgtctttggtggacttgggaaagagg

SEQ ID NO: 112975 - DNA, 97 bp, Homo sapiens
caaacacagaatcagcaaagaggaggccatgcgctggttccagcagaagatccggacaaaggacagagtctttgacagtatcagccacctcatcaac

SEQ ID NO: 112976 - DNA, 74 bp, Homo sapiens
acagactcctatttgaagtatttgacgaaaatagactgcgacttcaggaagaaatcaccaaacagtctccaacg

SEQ ID NO: 112977 - DNA, 83 bp, Homo sapiens
ccagcttaccgcccagtacgcagactcttattggatgaacgaatatacctcatccattggaattggagtttttcattcaggaa

SEQ ID NO: 112978 - DNA, 100 bp, Homo sapiens
tagcaccccgagaaccgtcagtttgagccagatgcatggcggacaccgacctgttcatggaatgtgaggaggaggagttggagccatggcagaaaatcag

SEQ ID NO: 112979 - DNA, 96 bp, Homo sapiens
gaaagaacttgccagacttaaacagtgtggaaaagccactggcagtgattcaagtggtgtcattgatctcacaatggatgatgaagagagtggagc

SEQ ID NO: 112980 - DNA, 96 bp, Homo sapiens
tacatatcgatgtgaagccacaaacaccattggccaaagcagtgcggaatatgttctcattgtgcatgggacagcaatcagacctattgctttgag

SEQ ID NO: 112981 - DNA, 75 bp, Homo sapiens
agtcctttcgcctcagccttctaaggagctaggacctcagattgttgccagcaaaggaggttttgaaatggtcac

SEQ ID NO: 112982 - DNA, 75 bp, Homo sapiens
tatgcgatctccagagctcgctttaccccggggaatgcaggattcctgagctgaaatgcagatgaccacattcaa

SEQ ID NO: 112983 - DNA, 98 bp, Homo sapiens
aagtaaagttccatcctgagaatatttcacaaagaatttccttaagagctggactggtctcagggtggacatgatcacagtcaccaacatgcacatgg

SEQ ID NO: 112984 - DNA, 100 bp, Homo sapiens
ggcggcgcgctgcaggcgagcgggcgagcgggcgcgccctgcaggggggagctatccagtttgggaagatttcataaacaaagcaggaaagctgcagtcc

SEQ ID NO: 112985 - DNA, 96 bp, Homo sapiens
gttggcggtccctgtgacctgtggagacacggccagatctgccctccagccttttaaaggaccatgggctgtttgaggggccaacatcattaactg

SEQ ID NO: 112986 - DNA, 75 bp, Homo sapiens
tcagcaaggccagcaggccatgtcactggccatcctccgtgtcatccggttggccatggcccaaaaggaagatat

SEQ ID NO: 112987 - DNA, 99 bp, Homo sapiens
ctgggtttgaacggaatgctggagtcagtggaagacggagctggtcggcccgaagggggggccctcagcctcttggccttgaacgggctgttcatcttg

SEQ ID NO: 112988 - DNA, 90 bp, Homo sapiens
cagacccaatggaacatcagcaatgcttctggtgctggagaatctggtaaaagcaccattgtgaagcagatgaggatcctgcatgttaat

SEQ ID NO: 112989 - DNA, 76 bp, Homo sapiens
aaagacagtgaaggacgaggctcatcaggaacttagtgatttggcccgtgaccctccagcacaatgttctgcaggt

SEQ ID NO: 112990 - DNA, 100 bp, Homo sapiens
tgtgaggcctacagctctgccggggaggaggaggaggaggaagaggaggagaaggtttctggtcctcataccgtgtggttgagtgaaatcaaaacttcca

SEQ ID NO: 112991 - DNA, 142 bp, Homo sapiens
cggagctacagctccgcgcccgccagttgcttgatcaggtggaacagattcagaaggagcaggattaccaaaggagtgagcctcgcagctggtccctgctagagcagctgggcctggccggggcagacctggcggcccccgg

SEQ ID NO: 112992 - DNA, 99 bp, Homo sapiens
ctcagagcataatttggcaataattgtatgtggccttcgcttccctcttcttcatcctggtctccatcaccaccttctgcctggagacccacgagcgct

SEQ ID NO: 112993 - DNA, 82 bp, Homo sapiens
ccaggtgtaagcgcagaaagcaggcgaacccgcggcgcaataacggctgctgagcttcgtgcttatctgaaatctaaaggag

SEQ ID NO: 112994 - DNA, 100 bp, Homo sapiens
gttcggcgggactgtgatggccagagagatgacgatcttagaggacaaaagcatgtcttcccttcctgggtgcattggtttggatgcagcaacagctaca

SEQ ID NO: 112995 - DNA, 51 bp, Homo sapiens
ttgagctgccgcggtcccgggactgaggaaacttttgactacattggcagc

SEQ ID NO: 112996 - DNA, 75 bp, Homo sapiens
gaggcaacgccggggcgcccgaggtctggaaggcgcagggtgcttcaaggatgaccgcatcgtcttctggacttg

SEQ ID NO: 112997 - DNA, 82 bp, Homo sapiens
gtgctgggcctctgctgcgtcctgctgaccttcgttcatctccgcaatacctacccgatccctgaagttcctgaaggaggct

SEQ ID NO: 112998 - DNA, 100 bp, Homo sapiens
ccttccatcatcatgtcgtcgcagaaggcgctggtgtcaggcaagccagcagagagctggatggctccttggaggacaacctagacctccctcaccacgg

SEQ ID NO: 112999 - DNA, 51 bp, Homo sapiens
ctgtggtctctgcacctcctttctctgcatatctatgtgagactgaatttt

SEQ ID NO: 113000 - DNA, 75 bp, Homo sapiens
gcattttttgatgattgtgtagataaaaagcctggagagttgatgacctgatagagagaatccaagaaaacgaag

SEQ ID NO: 113001 - DNA, 154 bp, Homo sapiens
acggactcgctgttcctgtgggtgggggccacgccgcacctgcgcaacctcgccgtggccatgtgcagccgctacacgttccatcctcagagcagcctgaactgttcctaaagaaacttcagcagtgctgtgtcatttttgacttcatggacac

SEQ ID NO: 113002 - DNA, 100 bp, Homo sapiens
ctgcacttcgcattttggcattgacatttaattttagggtcctttatatagaagggagagtagcagaagatgactcaagaccggcctctgcttgccgtgc

SEQ ID NO: 113003 - DNA, 100 bp, Homo sapiens
tgtttctgcatagaaacagatttcttgaggcaaaaccttcaactgaggacttgggggataagaaggaaggtgaatatattaaactcaaagtcattggaca

SEQ ID NO: 113004 - DNA, 100 bp, Homo sapiens
cctggcagtgcctggagtattatgcgggcttggctgcatccatggctgtatctggagtccatctttcaccatcttctcctgagattgtactggaccgtga

SEQ ID NO: 113005 - DNA, 100 bp, Homo sapiens
tgaggaggggccccagcagcccccgaaggccctatcaggacatggagtatgaaagacggtaagaatgattgatgttggctgatattggagtgctcattca

SEQ ID NO: 113006 - DNA, 88 bp, Homo sapiens
cgcaccccgactgccgaggaacgagagcgcgaagctaagctacaaggctttggccgaccaagtgtgtaccatgctgctattgtcatct

SEQ ID NO: 113007 - DNA, 75 bp, Homo sapiens
aacttgtctgtgcttactggagtggcactctgagctgagcctggacaggctggagtgcagtggcaagatctcggc

SEQ ID NO: 113008 - DNA, 100 bp, Homo sapiens
aaaccctgcaggttctaagaagactcttcccggttgatcgtggattatttgagccaccttttgtggtgacattggatgaggtagagctgatccactttga

SEQ ID NO: 113009 - DNA, 115 bp, Homo sapiens
caacaaatgagaaattccaattggagattttgtcaaacaggaatttacttttctggaacattcaaattcagtgtttctacagccagttagtctacaaaccattgcagcagcacca

SEQ ID NO: 113010 - DNA, 50 bp, Homo sapiens
tcgagacttaccagagccacaaggtcaacgaagtgacggtggaacagctg

SEQ ID NO: 113011 - DNA, 99 bp, Homo sapiens
agctatttactctaaaggaggtattccttgcagagccctaatttgtttagaactgtaatatgcacagttaaaacaacttgtcctctcaggaccttttgc

SEQ ID NO: 113012 - DNA, 74 bp, Homo sapiens
tgtaccattcttgagtgatcgcttagggtgaagttgaacaaattgctatgatgaaaccaaaaggccagactgaa

SEQ ID NO: 113013 - DNA, 100 bp, Homo sapiens
agctgaggtgtccgtaaagattccagagaagcctgtgaacaaaagtcccccacccctgggcttccaggtgggcatgaagctggaggctgttgaccgcatg

SEQ ID NO: 113014 - DNA, 96 bp, Homo sapiens
gccccgccaccgtcatcaacgggcagtttgtcgaacgatgttggactcatagtcactgccagaaaggaggccactgtctgcagctcccgtgaagat

SEQ ID NO: 113015 - DNA, 75 bp, Homo sapiens
agtacctctggcttcccctctcttcaactaatctctggaaacatggctacagaacatgttaatggaaatggtact

SEQ ID NO: 113016 - DNA, 80 bp, Homo sapiens
cggatggccccaggtgtaagcgcagaaagcaggcgaacccgcggcgcaataacgttccagggtctccctccactgctgta

SEQ ID NO: 113017 - DNA, 101 bp, Homo sapiens
gtcattaaacccatcgacaagaaggcacctttgtgtgacttcattgagacacattacctgaatgagcaggtgaaagccatcaaagaattgggtgaccacgt

SEQ ID NO: 113018 - DNA, 100 bp, Homo sapiens
gagcccacgagaggcagcgccatggcggagcagacctactcgtggtagctacagcaagctgggtagcaggcagatccaaaggatatcatgaagtttccag

SEQ ID NO: 113019 - DNA, 100 bp, Homo sapiens
aataagctatatactttggttacctatgtacctgttaccactttcaaaagaacttgtcgagatggtaaaagcaaagaaagctgctcaagaacaagtgctg

SEQ ID NO: 113020 - DNA, 83 bp, Homo sapiens
acttagactaccccaggaacccgcgccgcgagggctccttccctcagaatattatccagcaatgcaaatgaacaaactataac

SEQ ID NO: 113021 - DNA, 152 bp, Homo sapiens
caagtttcacatccttgtctgtgaagctaaactcaatgctgctgtgtgggaagaagatttgtaaagaaaactcttagaacatccagtcatggataaaaatgagctggttcagaaggccaaactggccgagcaggctgagcgatatgatgaca

SEQ ID NO: 113022 - DNA, 90 bp, Homo sapiens
tcccccaggatacagggtcaaaggagagcacaaccatcgcagttggaagcccatggggcagggcaagaggattatgacagattacgaccg

SEQ ID NO: 113023 - DNA, 90 bp, Homo sapiens
ggcgaccgagacggtggagctccataagctaaaggtgcagtctttgcaagccacatttggaacttttgagtccatcttgagaagctccca

SEQ ID NO: 113024 - DNA, 100 bp, Homo sapiens
cggcaccatgcaggtcaccctgaagaccctccagcagcagaccttcaagatagacattgaccccgaggagacgcctcagttttatgaccctgtggagcca

SEQ ID NO: 113025 - DNA, 100 bp, Homo sapiens
ggtttgatcctctgcctccttcggacacaatctactcctacgtcaggccagagaggtttgcctacaaggacgagtatgagaagttcaagctctacctcac

SEQ ID NO: 113026 - DNA, 101 bp, Homo sapiens
atcagtgctttggaacagtatgcagcaaagcaggatcaggtgagctgtgtccagaaaaccaacgagaaggagtggaaggaggaatgaacgtttcattctcg

SEQ ID NO: 113027 - DNA, 75 bp, Homo sapiens
ctggcctcggcgccaagatcccagtcacaattatcaccgggtatttagtttcatgatcaacatgggagactccca

SEQ ID NO: 113028 - DNA, 82 bp, Homo sapiens
agctcgtaaggtccctcaaagcgggaaatgcgtcaaagctccccgcagccaccgccacccattggaatggccaacaggggac

SEQ ID NO: 113029 - DNA, 84 bp, Homo sapiens
cctctggatgtggaattctccgtccctttccagggagggaacaaagcccacagcaccgaatcccatgcatgatgatacatgaag

SEQ ID NO: 113030 - DNA, 75 bp, Homo sapiens
tttcgtgatatccaagaacaagcactgcagagagatcgatgtcttattctgatgagtctcgactgtcgaatcttc

SEQ ID NO: 113031 - DNA, 82 bp, Homo sapiens
cccaggtccgcccagcagccgcgcttcagccaggaaccatcactgttgctggaggcacctgacaaatcctagcgaatttttg

SEQ ID NO: 113032 - DNA, 100 bp, Homo sapiens
gagtcgcggaacagcaggcccgagcccaccgcgccgggccccggacgccgcgcggaaaaggaccagtcctgcctctgttgtagaagacatgtggtgtata

SEQ ID NO: 113033 - DNA, 50 bp, Homo sapiens
accaagaaattactgtctcaagtgatacgtgctcatcttcaaactctatc

SEQ ID NO: 113034 - DNA, 89 bp, Homo sapiens
cggcgggagcttccgggagggcggctcgcagcaaccgcgtcttcactgagggcacctgtaagctgctgaccttggtggtcactgacctg

SEQ ID NO: 113035 - DNA, 71 bp, Homo sapiens
gaggaccattattttttaatgaagatgcagatgcctccagctattacgagtcccatggcaacaaggatcag

SEQ ID NO: 113036 - DNA, 82 bp, Homo sapiens
cgggaagtgtgaagcggccaatggcacggaggcctgcgtgactcctcctattttgaggacttctccaacatctccatcttct

SEQ ID NO: 113037 - DNA, 82 bp, Homo sapiens
ccccccttccccacgcaaccccagatccatttacactttacagtttccaatacttatctacaggaatcgccatgaccccagc

SEQ ID NO: 113038 - DNA, 100 bp, Homo sapiens
tgtctcgtgtgtgaacatcacaggagttagaagccgctcttcacagagatgacgtggagtttatcagtgacctgattgcctgcctgcttcagggctgcta

SEQ ID NO: 113039 - DNA, 51 bp, Homo sapiens
ctaaacacctcaacgatgacgtggtcaaggaccatggccaacctggagcgc

SEQ ID NO: 113040 - DNA, 100 bp, Homo sapiens
ttatgcttataagagtggaacagttccatgttaactgggctgtttggggcctcagcaggcaccatttttgtatatggaaaagatatcaaaacagacctac

SEQ ID NO: 113041 - DNA, 74 bp, Homo sapiens
cacttccagcccttctggattcagatgagctggtgagtgacacacggagagtgtctgacatccagtggtttcgg

SEQ ID NO: 113042 - DNA, 73 bp, Homo sapiens
atctctgagacccggaggaggttcgaagctgagtatgtgacagctcattcttggaatcccagaacaggcctta

SEQ ID NO: 113043 - DNA, 90 bp, Homo sapiens
cccaaggaaggatgagaatagctactgaagaagccctcctatgacactgaaacagatcctagtgagggattgatgaatgttctaaagaaa

SEQ ID NO: 113044 - DNA, 90 bp, Homo sapiens
cagcaatcctcagacgcctcacttaggacaatgccggtggtggtgtgcacattgagccccggtatagacagttcccccagctgaccagat

SEQ ID NO: 113045 - DNA, 83 bp, Homo sapiens
ctcgcttgcttccctcggccgggccgtcctcggcggcagtgtcagggagtcctggcaaaataagcatgcaggtagtaatggta

SEQ ID NO: 113046 - DNA, 83 bp, Homo sapiens
ttcctgaagcatgtggagtatgaggtttccagccagggcgtgatggtgggcatgggtcagaaggattcctatgtgggcgacga

SEQ ID NO: 113047 - DNA, 76 bp, Homo sapiens
tggacacagaagtatttgtgacaggatttaagtgccctgtatgctcaaaatttgtatcctcagatgaaatggattt

SEQ ID NO: 113048 - DNA, 83 bp, Homo sapiens
tattcgagtgaccgagaccgcggccgggaccgaggcatcacaggacatggccccctcagccacctagctggggcccatctagg

SEQ ID NO: 113049 - DNA, 90 bp, Homo sapiens
cccgagttatgcccaccctccaactttgcgacggaaatgtgtcatcgaaagccagggaaacctcaaatgaattctgaaggggagatacct

SEQ ID NO: 113050 - DNA, 74 bp, Homo sapiens
tttccgttgccggtgccggcctagcgtcctggaattacttcaatcaaccaccagtgaagactataagctcctgg

SEQ ID NO: 113051 - DNA, 83 bp, Homo sapiens
ggaaggaacaagaaggggcacggaaggttcctcaggccctgctgttcctgccatcacgagagacaagagagacacctccaact

SEQ ID NO: 113052 - DNA, 100 bp, Homo sapiens
aggatatcgacgtcgtgatccagaagtccagagctgaggactgcctgtttgcaggcagtataccttaaatggcaagaaggaaataaatcatctgacatca

SEQ ID NO: 113053 - DNA, 100 bp, Homo sapiens
cagctggccagaaggactctgagcccctggttgtgagtacagaggtggtcagagcccaagaagaatgggaagctgtggacaccatccagccagagacagg

SEQ ID NO: 113054 - DNA, 100 bp, Homo sapiens
cgaagtcattgaaactgaaaaaacactctacctaatcatggaatatgcaagtggagagcatgtaacttctaatgccagcgatagtgaaagtagttaccgt

SEQ ID NO: 113055 - DNA, 90 bp, Homo sapiens
ccaataccttagaagtaacaaatcaggaaaatcctgccttgcttcgttgggcctatgcaagaacaataaatgtctatcctaatttcagac

SEQ ID NO: 113056 - DNA, 96 bp, Homo sapiens
atgcacacactctccagcagtgctaaggctgacacctccaaacccagcacgctggtgatggagttctgtggtgctggttcagtgactgacctggta

SEQ ID NO: 113057 - DNA, 99 bp, Homo sapiens
ggacggagcgccggccgcaccaccgccctctggccgttgcctcaccggggcgtctctggccgagcctctttttgtggaaaacgacagcagcagcagtgg

SEQ ID NO: 113058 - DNA, 100 bp, Homo sapiens
gaggaagatgtgacaactaccggaggaactttccgctgtactttttgccatacagaggtagaagaggatgaatcagcaatgcccaaaaaagatgcacgca

SEQ ID NO: 113059 - DNA, 74 bp, Homo sapiens
ccggagcaagcggagctcccccaagagccggaaagcgttttaccaacgaggatcatttggctgtccataaacat

SEQ ID NO: 113060 - DNA, 74 bp, Homo sapiens
aacaagatcggcaagccccacactgtcccttgcaaggtggtgctgatgcagtgcaacattgagtcggtggagga

SEQ ID NO: 113061 - DNA, 74 bp, Homo sapiens
ctcctcccagtgctgaagtcccaaggagccgccctgcagcttattctaccagattccatgaaagtattgccagt

SEQ ID NO: 113062 - DNA, 74 bp, Homo sapiens
aatccgatatgatgctgtgaagagtaaagttaaagctgaagctcaacaaagatatagtgatctctgtgggcatt

SEQ ID NO: 113063 - DNA, 75 bp, Homo sapiens
ttgaattgctcaacagcatcttggaagtccttagctaccaggatgcggagcccatgaaatcaagagcaccacagc

SEQ ID NO: 113064 - DNA, 100 bp, Homo sapiens
tgatgctctctctccagtccttgctgaagagactttccgttacatgagggtaaaagcatgtctacgaagaaaagtatgtgaacaggaagaaaagtatgaa

SEQ ID NO: 113065 - DNA, 100 bp, Homo sapiens
gagaaaactcgatcagaagtcatttgcagcatccactttttagatggcgtggtacagacctttaaagttacttggacctaagcgttatgactggactggg

SEQ ID NO: 113066 - DNA, 90 bp, Homo sapiens
ggcggaggctgaggagaaggaggagcgggccgtggaggcttcgccgcctaggactttccttatcccagttgattgtgcagaatacactgc

SEQ ID NO: 113067 - DNA, 74 bp, Homo sapiens
gaagaatttcgtaaagaatttaccaagctagaggagaaactatggaggagtatatgttggcctaccatctgaag

SEQ ID NO: 113068 - DNA, 75 bp, Homo sapiens
cagcctccgcggatccgggcccgctcggcccctcccatgaccatcaagtgcctgctgatccaccctaaccccgag

SEQ ID NO: 113069 - DNA, 74 bp, Homo sapiens
aaaacagaacgttgcaaactctggaaaaaaacttggctaaaagatggcggcaaggcagcccaggcaaatgtaag

SEQ ID NO: 113070 - DNA, 90 bp, Homo sapiens
actgcgccaaatttggtgcctggagtaggagggagagacaaaggcagcgctgccctcgggggagtattggccctggcggaacgcagcaac

SEQ ID NO: 113071 - DNA, 75 bp, Homo sapiens
tgtccattgatctcttggagcagctggggatcatggtaacttgggtttttactcctgtaacaactgaaataacaa

SEQ ID NO: 113072 - DNA, 102 bp, Homo sapiens
gccccgagacgcgcctggcgcggggataaacacacttgttacctatgatatggttccagagcccaaaatcattgatgctgctttgcgggcatgcagacggtt

SEQ ID NO: 113073 - DNA, 100 bp, Homo sapiens
ggaccttccggagcttctcagaagacagagggttttcttttgagctgcaattctcattgcaagatcatcgcctccctggtttatagtagacagacctttt

SEQ ID NO: 113074 - DNA, 76 bp, Homo sapiens
cccaagctgtacttgtcacctcgaattgagcagcattttgttcccaacatcacctttggtcaccctgtggtagaaa

SEQ ID NO: 113075 - DNA, 98 bp, Homo sapiens
gcaaacatgctccgccagatcatcggtcaggccaagaagcatccgagctatatcagttacagcaagaggcacctcgtcccaagagaatcatttgtcct

SEQ ID NO: 113076 - DNA, 75 bp, Homo sapiens
gaggctgcaacttggtcgctctggcctggcttggggggcccctcgggagcatttcctgaagacgtagtcatgcag

SEQ ID NO: 113077 - DNA, 100 bp, Homo sapiens
aaagagcagaggcggcggctggaggaggtgcatggcggcctgctgcagatcttccctgagggccggcccgtggtagccaacatcgagccactctttgacc

SEQ ID NO: 113078 - DNA, 90 bp, Homo sapiens
tagccatggcacaagaatatatggccacagatgtctttaattccaaaaacctggccgttcaggcacaaaagaagatcttgggtaaaatgg

SEQ ID NO: 113079 - DNA, 75 bp, Homo sapiens
cctgaagagggaagacacgcggaaacagttaacagccaggtccttgcctgctgtgcagtctgatgaaagacttca

SEQ ID NO: 113080 - DNA, 50 bp, Homo sapiens
cccgaacttcgtggactcttcaccgtctggacctgtgatctgcagaatgc

SEQ ID NO: 113081 - DNA, 85 bp, Homo sapiens
ggtcggggtggtctgtctgctcctggcatgccctgccacagccactggggctggggagaacaccaaaacaaacctggagagcatc

SEQ ID NO: 113082 - DNA, 75 bp, Homo sapiens
aactcttaaagcagctgacttcccagcagcatgcgattcttattgaccttgaatctccctggaaaaggagacatg

SEQ ID NO: 113083 - DNA, 100 bp, Homo sapiens
ctgatgatgtgcgggttcaggaggtacccaaactgaagtgtgaatgggaaacgctacttcgaatgccaggccaagtatggcgcctttgtcaagccagcag

SEQ ID NO: 113084 - DNA, 82 bp, Homo sapiens
ccgaggaggaagacgaatcgttaaacatctgaaagggtcaggtttgtatccctatacagaggaccatgtcatacatacaaag

SEQ ID NO: 113085 - DNA, 95 bp, Homo sapiens
agaaataggacttactgaaagtgaagggccacctctcacatctttcagcattgatatgaaccatggacaagtatattctgctgccacaaagactg

SEQ ID NO: 113086 - DNA, 75 bp, Homo sapiens
aggaagccacgtgcagacatctacaaccttcgatctcctgacgacctgtggacatctctacagcaatgagtgaac

SEQ ID NO: 113087 - DNA, 83 bp, Homo sapiens
gcgaaaatcaggcccatcgcagagaaatcgggcatttgcaagatccgcccacccgcggtttttcacgactgaaaacaacatag

SEQ ID NO: 113088 - DNA, 100 bp, Homo sapiens
ttgtttgcctggggcaatggagaaaagccagaaaattagtccagaaggaaaagctaaaattcagcttcagctggtcctacatgcaggggacacaactaac

SEQ ID NO: 113089 - DNA, 96 bp, Homo sapiens
agaccatctggtacgtgcgcttcctgtgggagtgacccgccgcccccgacccagggatcgtgggactttaccagatcggtttgtaataacacctcg

SEQ ID NO: 113090 - DNA, 96 bp, Homo sapiens
ggcggtgtgggcgcgtcaggccgcgacgagggcgctgagcgcttctctgaagtagctttggaaagtagagaagaaaatccagtttgcttcttggag

SEQ ID NO: 113091 - DNA, 75 bp, Homo sapiens
tgcacaagcaccaaaagcaccacaagtaccacaagcatggcaaggtatggtggatattgcccgacagacggttga

SEQ ID NO: 113092 - DNA, 75 bp, Homo sapiens
ctctgagaagggagacgacgctgctgggtccgctgagcggggcgacccgaggccttcctgatgcgcttgcctgct

SEQ ID NO: 113093 - DNA, 50 bp, Homo sapiens
ggtgtcagtgtggaggagactgaggtgtccctggccagtgtccttccacc

SEQ ID NO: 113094 - DNA, 99 bp, Homo sapiens
agctgcgggaactcagctttagtgcctgggccgagccagtggcccccagaggatgagaaggaggtgatccgccgggccatccagaaagagctgaagatc

SEQ ID NO: 113095 - DNA, 90 bp, Homo sapiens
gtttgagaaacctggatctgcgatctgtttgtgtgctgggctttgacaaacttcctctgtggggtaccatcctcatctcggtgggatgtg

SEQ ID NO: 113096 - DNA, 51 bp, Homo sapiens
ggggtccaccactgctccccgccaacaagcacaagccatggattgaggcag

SEQ ID NO: 113097 - DNA, 75 bp, Homo sapiens
cggctgaccaggaacctgggcgagcagcggcgggggcccgaggggtggtcctgccatcatggctgtcctctgcaa

SEQ ID NO: 113098 - DNA, 100 bp, Homo sapiens
ttttctccggtccaggctttacagaagggaagaacttttaacttgacagcagggatcatagacggtatttctatgtaaacgaacagtcgggcgagtctca

SEQ ID NO: 113099 - DNA, 75 bp, Homo sapiens
caagaggaccagactttgttaatgaaggtatagtcgtctccccctccaccacggcaagtcctgcagagggaacca

SEQ ID NO: 113100 - DNA, 90 bp, Homo sapiens
ctaagaaacagggagatcattacatcctcaatggctccaaggtagtgctagagaccttggctggtcagagggctgtgaagacgcacggtg

SEQ ID NO: 113101 - DNA, 90 bp, Homo sapiens
tgcgccggagctgggggccttagcggagactggaccctagttccctgaagagaaaggggaatgtaccagaaggagaacacgcagtggttg

SEQ ID NO: 113102 - DNA, 82 bp, Homo sapiens
gccaaggcagaagaaatcttggagaagggtctaaaggtgcttatgtgcggctttcccttcctcctccttttcctcggcaatt

SEQ ID NO: 113103 - DNA, 100 bp, Homo sapiens
gacaggaaaataattaaatattcttaccgagggactttgaacatgtcggggatcgccctcagcagactcgcccaggagaggaaagcatggaggaaagacc

SEQ ID NO: 113104 - DNA, 98 bp, Homo sapiens
gcaggggctccggaatcgcccgaccgcacacgttgccaccctgagaacgacaccgtaactatccgcactagaaagttcatgaccaaccgactacttca

SEQ ID NO: 113105 - DNA, 50 bp, Homo sapiens
atgtttaagcagaaggaaggatctgtcctgcacttcttcctcgatagccg

SEQ ID NO: 113106 - DNA, 97 bp, Homo sapiens
aaaacagtacatttctgcaattgagaaacaggcacacaagtgtgaggagttgctaaatgctcaggcagtcatggatcaggtaatgcagtttgttgag

SEQ ID NO: 113107 - DNA, 83 bp, Homo sapiens
ggcttacagacgctgccagcatcgccgccgccagcttgcattgaaaggctctagttacagtggacttcttgaacgacatcata

SEQ ID NO: 113108 - DNA, 99 bp, Homo sapiens
ccccacccgacagtcgcgggcacccctacgtcgtgtggaaatccgagttgccgaacaagcaaccggaaaagcttaataggcaatgggcagtcaccagca

SEQ ID NO: 113109 - DNA, 83 bp, Homo sapiens
gaagttgatgtaccgctacgatgagggggatatgagactttctactcggaatatcctgagtgttgcgtggatgtaaaacccat

SEQ ID NO: 113110 - DNA, 100 bp, Homo sapiens
catgaatattctgttttgctgcccgaagcttggatcactactcttggaatcaaagataaatccaaatactgcatatcagaaacaacaggcaagtagttgt

SEQ ID NO: 113111 - DNA, 90 bp, Homo sapiens
gatcgatccagccctatcagatccccatcacaggtaactgcatcctgcccagcatgacggccccctgcccgccgccacctccagaccccc

SEQ ID NO: 113112 - DNA, 98 bp, Homo sapiens
ggacgtcagcatgggggcgcaggagccctcccggcccctattttcccttataaagttctgtgcacccttacgaagtggccgaggtaattgcattgcct

SEQ ID NO: 113113 - DNA, 99 bp, Homo sapiens
cctggtcacttccccaccggaggtttatcacaagggaaaggggctgtttgccacacagctcatccggaagggggagaccatcttcgtagaacggcccct

SEQ ID NO: 113114 - DNA, 100 bp, Homo sapiens
cggcggcggcgcctcccgggctccggctccggcttctgctgttgctcttctccgccgcggcactgatccccacaggagacgcaggtcagaatggaaatgg

SEQ ID NO: 113115 - DNA, 100 bp, Homo sapiens
gtgatggcatcaaccgctacgactgtgtctgccaacctggcttcacaggtacaggtttgcagattccgccagcagcacagcaagctctacagatgagtgg

SEQ ID NO: 113116 - DNA, 100 bp, Homo sapiens
aaggagatgcaggagaaaatacggcattgctagcatgatgccttcttctgtagagtgggcgctttgcagaatacgtgttgaatgaaatcactgatctagg

SEQ ID NO: 113117 - DNA, 100 bp, Homo sapiens
cggcgcgctgctggacgaagagctctcctccttcttcctcaactatctcgctgacacgcagctaaaacccaatctcggatatactactaataggcgcggc

SEQ ID NO: 113118 - DNA, 83 bp, Homo sapiens
ccagtccccagtgagggtgtacaaatacccctttgaattaattatggctgtacttcgtactggatttcgaggctggcatcctg

SEQ ID NO: 113119 - DNA, 96 bp, Homo sapiens
acgaagctgcatgtgtttgacgcaaaggccccagacctaaagcaggaggagcgtctgcaagaactggagagctgttctggactgggtagcacatct

SEQ ID NO: 113120 - DNA, 82 bp, Homo sapiens
ggacgctttactctaccagagcaagggtcagcccaaggccaaccccactgtcactctgttcccgccctcctctgaggagctc

SEQ ID NO: 113121 - DNA, 96 bp, Homo sapiens
gttcctggtgatattgtagaaattgctggacgctgtgcagagctgcaagtccgtatcactgaggctgtggccacagccactgagcagagagagctg

SEQ ID NO: 113122 - DNA, 75 bp, Homo sapiens
tttggagaccggggctgtttggagccctctgacgtccatcatctctgcggtggttggcattctgctggtcgtggt

SEQ ID NO: 113123 - DNA, 82 bp, Homo sapiens
atggtgctgtaaccacctcacagattccagcttcggaacaagagaccctgaataactgtgtagaatacattgaggatgatga

SEQ ID NO: 113124 - DNA, 75 bp, Homo sapiens
ccagcacgcgcctgcttcccgtctgcgcgagtccacgcagctccccagcatgttcagctcttgacacaaatccac

SEQ ID NO: 113125 - DNA, 100 bp, Homo sapiens
ttttcctgaagagagttcagctctgattgaattttttgacagaaaaggttttccagttcctgaggtgagctggtttagggatggccaggtgatttccact

SEQ ID NO: 113126 - DNA, 100 bp, Homo sapiens
gactaccagaaagtggttcgtgaagctgttaaacacattggatatgatgattcttccaaaggaagccctcaatctagaagagtagaggtccaaaggtgcc

SEQ ID NO: 113127 - DNA, 75 bp, Homo sapiens
tacccccatcactgcttccctcagccataacagatttagtttcctaagcaaacctgttgatgagaatcaccagca

SEQ ID NO: 113128 - DNA, 75 bp, Homo sapiens
ccaacattgaccgtattacaaaaatcctgtgaagcagctccagctatgtgtgaagaagaggacagcactgccttg

SEQ ID NO: 113129 - DNA, 100 bp, Homo sapiens
gggtgcccacaaaaattccacctctgagtcctcaactgctgaccccggggtcaggaagaaggtagataatgactataatgcccttcgagaaagactcagc

SEQ ID NO: 113130 - DNA, 74 bp, Homo sapiens
aatgggaagaggcccagtccagagagtggttctatagatggtaataaccaacttgtaatcaaaggaagattcca

SEQ ID NO: 113131 - DNA, 100 bp, Homo sapiens
accaagccctgttggagactatgcaaaacaagtttatcatttgggaatacctgctactgcaattcagttcttcaagcactttatttttgtcgtccatttc

SEQ ID NO: 113132 - DNA, 129 bp, Homo sapiens
aacaactgaaacctactgcttctgtcaaaccagtacagatggaaaagttggctccaaaggttaagaatagacccaccagcatttcgtgggatggtcttgattcagggaagctctacaccttggtcctga

SEQ ID NO: 113133 - DNA, 51 bp, Homo sapiens
ggacctgatggcctgagccgagaagctgccccgagtccgtgagcaccgagg

SEQ ID NO: 113134 - DNA, 83 bp, Homo sapiens
ctgaggcggcgcggcagcggagggacggcagtctcgcgcgataacgaaggaggcccaacttcattcaataaggagcctgacgg

SEQ ID NO: 113135 - DNA, 83 bp, Homo sapiens
tggactccttcggcagtccacccaccgccgccgcctcccagggaggatgccattgctccccggaccctgccctggcccaagag

SEQ ID NO: 113136 - DNA, 75 bp, Homo sapiens
gctgcagtgggacaggtggcggcgaccggcggcgtccgaggagcacactagcaacttcagacgtcagcaggcgga

SEQ ID NO: 113137 - DNA, 75 bp, Homo sapiens
cttctgcagagagagtgcgcagaaggattccgggagcacagttccgccgaattccaactccacagagtgaccaga

SEQ ID NO: 113138 - DNA, 82 bp, Homo sapiens
tgcccgtcatccaccgtgatctcaagtccaacaacagcctgaggcccagccagcgcccaatggatgacaaaaagaagaaacg

SEQ ID NO: 113139 - DNA, 51 bp, Homo sapiens
gagagctgaggctaatgaaaaacaggagccctctggcacaaatggaagaag

SEQ ID NO: 113140 - DNA, 75 bp, Homo sapiens
gggggcagcacgctggccaaggtcttcctcgatttcaaggaaagggatcgactacaagaccaccaccatcctgct

SEQ ID NO: 113141 - DNA, 75 bp, Homo sapiens
ctgagtcactgcctgcgcagctccggccgcctggctccccatactagtcgccgggcttcctgaagaatgagaagg

SEQ ID NO: 113142 - DNA, 96 bp, Homo sapiens
tcaacctggagctctacgcctcctacgtttacctgtccatggtgctgcggatggcaatcctgctgtcttactgctctatcctgtgtaactacaagg

SEQ ID NO: 113143 - DNA, 96 bp, Homo sapiens
gtttttttaatgtggttggaacaactgaggagccggtgaaacctgaagaaggcagagatatggcaaacaggattggcgcttttgggtacatggagt

SEQ ID NO: 113144 - DNA, 100 bp, Homo sapiens
cctcctcgtgctcagcctggcgccggagctgaaacacgacgtgaagagagaaaaggaacagttccgtaagctctttattggtggcttaagctttgaaacc

SEQ ID NO: 113145 - DNA, 82 bp, Homo sapiens
gtggacgttcggccaagggaccaaggtggaaatcaaacgtgaagcatatatgcgtttaagcaaactccccgaagcagagcat

SEQ ID NO: 113146 - DNA, 90 bp, Homo sapiens
gtcctggccattcggagtcgatatgtgctggaagctgcagtctacaccttcaccatgttcttctccacgagtacaggggctcaggtccag

SEQ ID NO: 113147 - DNA, 82 bp, Homo sapiens
gcacgagttcaccgtgtaccgcatgcagcagtacgacctgcagggccagccctacgagacaagaggagcagcagcggcaccg

SEQ ID NO: 113148 - DNA, 75 bp, Homo sapiens
tgtgtggactggagtaacatcagacaactcttgttatgtgaaattacctccagagaaatttgcacctaagaaaca

SEQ ID NO: 113149 - DNA, 100 bp, Homo sapiens
gccaagatggtgaagcagatcgagagcaaggaccttctaccgctttgaggctgtgtgggatagctctctgcataactcccttcttctgaaccgagtgaca

SEQ ID NO: 113150 - DNA, 101 bp, Homo sapiens
ggcattatccttcagtggggctattggactgacttttcttatgctgggatgtgccttagaggattatgggttcagcagatagatcgtgtggtagaagttgt

SEQ ID NO: 113151 - DNA, 100 bp, Homo sapiens
gccatcgttgctgccttcttcgtcaaggtgttacagcacatgaaggccgtgcaggcagatcaggagcgggagaggcagcggcggctggaagtagaacgtg

SEQ ID NO: 113152 - DNA, 101 bp, Homo sapiens
cttggacagacaattgtccccgatttgggatcactggaaagtcagcatgattttcgaaccccggagtttgagaaggcacaatccctgtggaatccagtgac

SEQ ID NO: 113153 - DNA, 100 bp, Homo sapiens
gcattttgtccacatgagaggattacctttccaagccaatgcccaagacattataaacgaaggtgtcttgctgcaggtaactaatgaagaagtggtcaac

SEQ ID NO: 113154 - DNA, 100 bp, Homo sapiens
ctgagccggtgggtgagcggcggccacggcatcctgtgctgtgggggctacgaggaaaggtgatgcagaagatggggaagaatatgatgacccttttgct

SEQ ID NO: 113155 - DNA, 82 bp, Homo sapiens
gtttcccattaggcccattagggggcagcagcagctgaagatgacttcctgctgtacctggaccctcactactgccagccca

SEQ ID NO: 113156 - DNA, 75 bp, Homo sapiens
ttctgaagactattgtggaagaagcatccattaaggtatgggttcgaaggggtcatcctctccatctatggctta

SEQ ID NO: 113157 - DNA, 82 bp, Homo sapiens
ttttctgggtgctatgggtgatcattccaagagtggaagttaaacgagctgagcctcgggacagcaagagccaagcgccggg

SEQ ID NO: 113158 - DNA, 75 bp, Homo sapiens
caccccctggatccagcattgggtcacccaaccgagtcatctgctcaccttcaggccattcagaggaggaaagag

SEQ ID NO: 113159 - DNA, 101 bp, Homo sapiens
aagcccatctgttttggaagttagagaaaagggctatgaacgattaaaagaagaactcgcaaaagctcagagggcatcagaagttgagagacaactctcca

SEQ ID NO: 113160 - DNA, 83 bp, Homo sapiens
ccgggaccggccgaaaggcgaggaaccggttttaaaatcaaagatgggaaaatcggagaaaattgcccttccccatggccagc

SEQ ID NO: 113161 - DNA, 132 bp, Homo sapiens
ccaacagcccccccaaacccctttccaaacctcgcacgcccaggaggagcaagtccgatggagaggctaagcgttgggtatctacagccattggttgctgttcaggtcagctttgctcctaacaacactggg

SEQ ID NO: 113162 - DNA, 96 bp, Homo sapiens
ctcgtcagcagcgaggaaggaaacagcgggtgtactctgtgtgaccgcgcctatccctcggactgtcccgaacatggaccagtgacttttgttcct

SEQ ID NO: 113163 - DNA, 83 bp, Homo sapiens
cagcaagagattaaagatgcagtacgccacggggccgctgctcaagttccagatttgacacgatgaggcgagtggtacgacag

SEQ ID NO: 113164 - DNA, 78 bp, Homo sapiens
acatgattctgaagcaagtagtcaatcaggctgtgggtgagcgtggaggatgctcagatgcacaccgtcaccatctgg

SEQ ID NO: 113165 - DNA, 50 bp, Homo sapiens
ccaaggaactggtgctgcagcgagagatgtctcccactccaggcgaggag

SEQ ID NO: 113166 - DNA, 75 bp, Homo sapiens
gaacgcttattcaacggcaaaagatacacattccagttttcctgatggtgaacaaataggccctgaagatctcag

SEQ ID NO: 113167 - DNA, 50 bp, Homo sapiens
gttttatctagccacatcttggaggtcctggcattgatgtgcctgctcca

SEQ ID NO: 113168 - DNA, 98 bp, Homo sapiens
caatatcatgcaagtgtggcaaatgcgccctcacaaagccaatgctgaggagatgaccaagtaccacagcgatgactacattaaattcttgcgctcca

SEQ ID NO: 113169 - DNA, 83 bp, Homo sapiens
ttattagtcatcaccgttattcctactaacgtcctgtgtcactgagctatgcaagaagaggccttgaagctggtgttactggc

SEQ ID NO: 113170 - DNA, 100 bp, Homo sapiens
gaacagcttgtccacccgccggccggaccagagatgccctgtatccaagcccaatatgggacaccagcaccgagtccgggaccccgtgaccacctggcaa

SEQ ID NO: 113171 - DNA, 75 bp, Homo sapiens
tcctccaagaccgtgctggtctttctcaacctcatcttctggaaatacaggtatcaggatgaagatacacctcct

SEQ ID NO: 113172 - DNA, 74 bp, Homo sapiens
aggagagcaaggatggagatcctaggaaaggtcttcgccttgatcgtgttctcctgcatctatggtgagggcta

SEQ ID NO: 113173 - DNA, 50 bp, Homo sapiens
agaggagagagcgcgggcctctaggaagaaaggaaggcagaggaagccac

SEQ ID NO: 113174 - DNA, 50 bp, Homo sapiens
ccaaggaggtggacccccagggacagagcgggatgccaccagcttgtcca

SEQ ID NO: 113175 - DNA, 95 bp, Homo sapiens
acagggcgtcggacctgcacgagctgtctggtgaaatgacaatggatgctctgttggctcgattgaaacttctgaatccagatgaccttagagaa

SEQ ID NO: 113176 - DNA, 100 bp, Homo sapiens
ttagccaccatctttctggcggttgtgatggccttattgagcctgcactgcttagcagcctttaagctatttgagaaagtcaaagaagtttgtccaaatg

SEQ ID NO: 113177 - DNA, 75 bp, Homo sapiens
gtgaagataggatcaagatggccatgtggcagggtttgaggaagcgatgaaggaggctcatgctgtagatcaaaa

SEQ ID NO: 113178 - DNA, 100 bp, Homo sapiens
cgaggcaggcgaaccgtggcaccgagagcaagaaaatgtgccggtggtggtgtgcacattgagccccggtatagacagttcccccagctgaccagatccc

SEQ ID NO: 113179 - DNA, 75 bp, Homo sapiens
ccaggagcggctccgcgccgcagtccccaggtaagaatgattgatgttggctgatattggagtgctcattcacat

SEQ ID NO: 113180 - DNA, 90 bp, Homo sapiens
atggagtccccaagctgaagcggatcctggaggagcgccatagtatccacttcatcattaagaggcttcagggatgacttcttagggggc

SEQ ID NO: 113181 - DNA, 75 bp, Homo sapiens
agggcaagccccgctccggccaacaaagagagaatctgaccaacacagttgatcacttgtaggtagatgacactg

SEQ ID NO: 113182 - DNA, 100 bp, Homo sapiens
cgctcaggaggcgccccgcgaccggcgcgatgagtgccaacgaggaccaggagcgatctagggcagccctgcagaggtacctgttctactgtaatcgcta

SEQ ID NO: 113183 - DNA, 75 bp, Homo sapiens
cagagatgctgtggttcggggggtgctcggaaggatgcctgtggccctcggagagcacagtgtcaggcaacggaa

SEQ ID NO: 113184 - DNA, 83 bp, Homo sapiens
aaactattggattcataacctgctccatgcttgaaaacatggggattggaattcggtcagcccaaggccaaccccactgtcac

SEQ ID NO: 113185 - DNA, 83 bp, Homo sapiens
gggtactgtccatatctttgctctcaaggatacccgcctcaaccgccgctccgccagggagaagaggatgatgagcatgccag

SEQ ID NO: 113186 - DNA, 100 bp, Homo sapiens
agtagttgttgagcagagggaaagggataggagaaggatgtggactgcagtgctgcagtgccagccggttgctgaaccaatccccatctgtagtttctgt

SEQ ID NO: 113187 - DNA, 83 bp, Homo sapiens
actgaaagtgcaatatttgagtatcactgcgaggccaacagagcacttatggcaaggcatctcgagggggtggcaatcaccaa

SEQ ID NO: 113188 - DNA, 100 bp, Homo sapiens
ggcggttgcgggggggaagtgactgggcggtgccggcgccggagacgatgccgttcacttgcacctcctgcgccgccgccccccatccaaggatatgcct

SEQ ID NO: 113189 - DNA, 100 bp, Homo sapiens
cggaatctaatcaggaggttgctaacccagaacactatattaaacatcccctacagaacagatattgatgatgttaagaagttcaaaccgggttacctgg

SEQ ID NO: 113190 - DNA, 100 bp, Homo sapiens
ctggaagttcacatcccgtcggtggggcccgaggccgaggggcccaggcagagcccggagaaaagccacatggcgtctccatgtcctcactgagctccga

SEQ ID NO: 113191 - DNA, 74 bp, Homo sapiens
gatcgctgtgatcgtcacttgatggaaattccttcttccagcattataaatcagtacattgcttgtcaagggcc

SEQ ID NO: 113192 - DNA, 87 bp, Homo sapiens
gccaagatgcaggaatcaggagagcaaactataagtacctgtttgaaaatggtagaatagataacatttttactgagccctattcca

SEQ ID NO: 113193 - DNA, 75 bp, Homo sapiens
tggggagcccttctgcgccacagtactatactggcaattgctggagaagattttgcaattgttgcttctgatact

SEQ ID NO: 113194 - DNA, 101 bp, Homo sapiens
aagctgaaggagaagtttatgaatgagttgcataaaattccatgctcccagccaacctctgataaaccctcccagcggccatcagagagcacaaattgtag

SEQ ID NO: 113195 - DNA, 75 bp, Homo sapiens
ggggcgactcaggcctgtccagccggggcaagaagttttaagaagaggagaggtcactcaattgggggagcccct

SEQ ID NO: 113196 - DNA, 90 bp, Homo sapiens
gttcctagacggagccagacttcggaacgggtgtcctgctactcctgctggggctcctccagctccaccgggggacggctacgtgcaggc

SEQ ID NO: 113197 - DNA, 100 bp, Homo sapiens
gctgggcaggtcatgagtcaccatggacacattcagctaacgtattttagcaggtggagtgaggttgaagattcctgtgacagcgatgccatagagagaa

SEQ ID NO: 113198 - DNA, 87 bp, Homo sapiens
tccttcgtacccacagtgcttcatgagagcttgcagatgccagcaagttacctaacctgaaagaacttctccagtcctccggagaca

SEQ ID NO: 113199 - DNA, 75 bp, Homo sapiens
ggccttccctcacctacaagaatacatcgagatatttccaagcagaaggaatgaagttcgaacacatgtcggttc

SEQ ID NO: 113200 - DNA, 97 bp, Homo sapiens
acaaggctacacagagacagatcaaagcagctcatgaacagactagccactttgcattgactggaaacaatggcatttacagaaagagtcaacagca

SEQ ID NO: 113201 - DNA, 75 bp, Homo sapiens
ctttttctatctcacaatgggattctctccagccttggtggtgacatcaatgctgactgagttgaataccttctt

SEQ ID NO: 113202 - DNA, 97 bp, Homo sapiens
gacacaacacatgttttcttctggtatctggctaaatcactgtgtgcccagtattctgcagacaaacgagaagatgagaagatgtgtgatcatttga

SEQ ID NO: 113203 - DNA, 82 bp, Homo sapiens
caccatcattgcatttacctcggatcatggttcggctttccagtttggcagcagcactacaaatttcaacttcacaaacaac

SEQ ID NO: 113204 - DNA, 100 bp, Homo sapiens
ggtagcgggagagcggcagcgggaccccagcgcgggcggcggcggctgggcgggagccccagagatgaggacggggacttggttgccttttccagtgacg

SEQ ID NO: 113205 - DNA, 51 bp, Homo sapiens
aggaattccaccggaagcacccaaatgagaaaatcagaaagtgcagttgac

SEQ ID NO: 113206 - DNA, 82 bp, Homo sapiens
ctggtgcagagggacgtggatgcctctccctcgcctctgtcagcgccgtgaagaacctggtggacagcagcgtctacttccg

SEQ ID NO: 113207 - DNA, 100 bp, Homo sapiens
ttccggtaggagctgtaatcaattgtgctgacaacacaggatacaatgtctctttgctatatgaccttgaaaatcttccggcatccaaggattccattgt

SEQ ID NO: 113208 - DNA, 113 bp, Homo sapiens
agaatatgctgccaaaattatcaacaccaaaaagctttctgctagggctatgaagtcttacactccatatttcattctcctgtggagtgctgttgggatagcgaaggctgcca

SEQ ID NO: 113209 - DNA, 100 bp, Homo sapiens
gcccctgcatattatgcccggcttgtagcatttagggcaaggtatcatctggtggataaagatcatgacaggcctgtctcctccctcctacacatttcca

SEQ ID NO: 113210 - DNA, 83 bp, Homo sapiens
cccagggcctcggcggccgctctgcctgcgcgctgctcctgctctgctacctggatcaaaatacttgctggatggtggactca

SEQ ID NO: 113211 - DNA, 50 bp, Homo sapiens
ttattggaaaaacatttcttacgccaatttaacctttgacccagctgctc

SEQ ID NO: 113212 - DNA, 95 bp, Homo sapiens
acctggggatcgctacggaccttaaaatacccgcaacagccccttcgtcccaaatattctctaagccgctttcatcatgggagaaatagagcaga

SEQ ID NO: 113213 - DNA, 87 bp, Homo sapiens
atccgggggcaaggccaaaaagaagcatttcttatactgaagcagtggagatcttaaagcaagcatcccagaacttcacctttaccc

SEQ ID NO: 113214 - DNA, 51 bp, Homo sapiens
agcggaggtgctgggagcgagttggctggctccccacaggtgcaggaagcc

SEQ ID NO: 113215 - DNA, 98 bp, Homo sapiens
cgtcggtttgctatcgggactcggcgaggacggaatactcccccagttgcaagaggcgcaggaccgtggaagacttcaacaaattctgcacctttgtc

SEQ ID NO: 113216 - DNA, 75 bp, Homo sapiens
attgaaggcacaggaatatccatgtcggcttgtagagagattgcagtcttgggcgtctttggtactggctttttt

SEQ ID NO: 113217 - DNA, 96 bp, Homo sapiens
ttcgtgcaggcgtacgaggatgtgctggagcggtacaaagatcggagcacagtgctacttggaatgttcagctctgactcagaaaggtctcaaagc

SEQ ID NO: 113218 - DNA, 100 bp, Homo sapiens
ctgcgccagagaccagataaaaataagaccacagcttgccaaagagaagattgaaggatgccatatttgtacatctgtcacaccaggagagcctcaggtc

SEQ ID NO: 113219 - DNA, 48 bp, Homo sapiens
gcttttaatgaagatgaagatacttaattcagtgcacaaatgagatga

SEQ ID NO: 113220 - DNA, 90 bp, Homo sapiens
tggattttatgtgctacagtctgcggaacggagcagtatttcaatgtggagacatgggatgtagagctggaaagatctgcagaatcctgg

SEQ ID NO: 113221 - DNA, 100 bp, Homo sapiens
tcccagggcctttcccgctgcttcctctacccctgtatttcgctgggctctctaaatggattcagctccaggtaccttcgagattcaatctcttctaaaa

SEQ ID NO: 113222 - DNA, 74 bp, Homo sapiens
gccagggtccctgaagagggaagacacgcggaaacagatccgtgggcgtgagcgcttcgagatgttccgagagc

SEQ ID NO: 113223 - DNA, 83 bp, Homo sapiens
cgtcgggaggtagagcggaggctgcgagggatcattgaccaaatccaaggaaagaccacagcaagattctttcattcgtctcc

SEQ ID NO: 113224 - DNA, 75 bp, Homo sapiens
atgcagagacatgagatggtagccaacccctcagcccccaaatacatcaagatgtttgtactggatgaagctgac

SEQ ID NO: 113225 - DNA, 100 bp, Homo sapiens
ctgggctgctcttcctgaggttttcctaagccatcccctggcggaaccgcccccagacagggtctcactttgtcacccatgctggagtgtagtggagtga

SEQ ID NO: 113226 - DNA, 100 bp, Homo sapiens
ctggacaaaggaacaggtatctcagatatttgatcctgatgacctttattcaggggtcaatttctccaaggtactgagtactcttttagctgtcaacaaa

SEQ ID NO: 113227 - DNA, 97 bp, Homo sapiens
ttccggagcaggggaagctgccccgtgcccgggagggagcgggcgcaccgcggcccccaggacacgcgctgttatgaagacagtatggagtttccag

SEQ ID NO: 113228 - DNA, 80 bp, Homo sapiens
acagtaatcggaagtacgagtctgacgaagacagcctgggcagctctggacggatcaacaacccctccccgtcgtaaacg

SEQ ID NO: 113229 - DNA, 91 bp, Homo sapiens
ctcttcagttctctggagccccagattcaacccgtgtacgtgcctgtgcctaaagaactgtggctgcaccatctgtcttcatcttcccgcc

SEQ ID NO: 113230 - DNA, 90 bp, Homo sapiens
tctgaaatacgatgcaaccatgatagaaataaatccaatggtggaagattcagatggagctgcggaaggcagacagattgctgccaacat

SEQ ID NO: 113231 - DNA, 100 bp, Homo sapiens
cgtgggcagattcaatctttgcaacagtcagctgctgtttatgcaggtgtttaatgaacgctgccgaattcacttcaagcctccaaagaatgaataaaga

SEQ ID NO: 113232 - DNA, 98 bp, Homo sapiens
tgcaggaattcacacagaaaagtggaggccaaggcgtgagaattcctcaatgactgccctctaaaggaagagggtcgagcacgcacgcatgcatgcca

SEQ ID NO: 113233 - DNA, 107 bp, Homo sapiens
gagctgtgcagccgcgaggaggcgcgggaggtgttcgagaacgaccccgagacgattttgcaagaacgaggctcaaggatgtgagggacacagtattgacagctgaa

SEQ ID NO: 113234 - DNA, 75 bp, Homo sapiens
ggcctaagaatatgatgccgtctagttttgccatgaagtattctgaagaagccaataatctcattgaagaatgtg

SEQ ID NO: 113235 - DNA, 101 bp, Homo sapiens
aaaatctttcctctaaagtcaaactggccatttgtgtaggaccagaaaacatgcagataatgtatccagctatatttgaccagttgttggcatttgtagaa

SEQ ID NO: 113236 - DNA, 80 bp, Homo sapiens
ggacgaggaggcagccacggggcccctgggtatcatgatattagctggtttgacatcaagtcatttgtgagtcatcagat

SEQ ID NO: 113237 - DNA, 76 bp, Homo sapiens
gtggagttgctgcccttccggagtccgccccgtgaggagaatggattctaacattttcagagaaccttttggaaag

SEQ ID NO: 113238 - DNA, 74 bp, Homo sapiens
tggcaggagattatagctctgtatgagaaggacaacacctacttagaccccaccaacaactgaacgctttggtc

SEQ ID NO: 113239 - DNA, 50 bp, Homo sapiens
gagctgcttcccaataaggaaacaaggaattacggaggttgagctggtcc

SEQ ID NO: 113240 - DNA, 83 bp, Homo sapiens
gccagagggcggccacccggagccagcggagggacaggtggcccgctgcaagcagctgatctgtgaccccagctacatcccgg

SEQ ID NO: 113241 - DNA, 82 bp, Homo sapiens
attagctgctgtcatcaagccctttgccaccattccttcaaatgagcatgtgcagtctttgccaacaaaaaaaattaccaag

SEQ ID NO: 113242 - DNA, 101 bp, Homo sapiens
cgctggccgacgccatcatcctgctcaccgagagccgcggagagcggcacgagtgtggtttattgacaatcatttacaatgccgaagagtgctgtagtgag

SEQ ID NO: 113243 - DNA, 100 bp, Homo sapiens
ctcttctcaggccctaaacatgccatgcatgtacgcctgcctcacaccttgcgatgcgccaacatcaccatcattgagcaccagaagtgtgagaacgcct

SEQ ID NO: 113244 - DNA, 100 bp, Homo sapiens
gctcctggtttgcttggtctcaaggacactgcatcgtcaaactgatcccctggccgttggaggagcagttaaaacttggaatataacgtggagcctcaag

SEQ ID NO: 113245 - DNA, 75 bp, Homo sapiens
ggcagctgatagatgaggggattgccccggaagagggaggcgtggacgcgccgactgaaccaagctaactcctcc

SEQ ID NO: 113246 - DNA, 100 bp, Homo sapiens
gaatgacttaaaagcaaaatctgctagcatcagttgtggaagctgatcgaggaagcctaagcaggctctgtgaagtgggaatagtggtatttgagtcaag

SEQ ID NO: 113247 - DNA, 90 bp, Homo sapiens
caaaataaagcagcatcacttattcagggttaaagaagttgtactaaaagaagacctggaaaagctagaaagtatgaggcagcagcagcc

SEQ ID NO: 113248 - DNA, 100 bp, Homo sapiens
atcgacatcagtgaagaagatcagtgggtaattccagaattgattggccataccattgtcactgtattactgctcatgtcattgcactggttcatcttcc

SEQ ID NO: 113249 - DNA, 75 bp, Homo sapiens
cagctccaggcctgggaaagtgaagggagttcccattagacttgaagttgggccacgtgatatgaagagctgtca

SEQ ID NO: 113250 - DNA, 99 bp, Homo sapiens
gtaccacctaaaaccagaagaagtagatgattttatcagaggccagctagtgaccaatctaccaggccttggacaagattcgctatgagagcctgacag

SEQ ID NO: 113251 - DNA, 100 bp, Homo sapiens
gtgagcttgtttgtgtccctgtgggtggacgtggttggtgattggcaggatcctggtatccgctaacaggagaacatattgtgatgttcgtgcctcagag

SEQ ID NO: 113252 - DNA, 75 bp, Homo sapiens
aggagaagaaggaagttgtggaagaggccaaagaagctaaacgactaaaagaattcttagaagactatgatgatg

SEQ ID NO: 113253 - DNA, 50 bp, Homo sapiens
catgtagatactccagaggaaaggctttaatccagtgtgaccagttgagg

SEQ ID NO: 113254 - DNA, 51 bp, Homo sapiens
ggccggtcaggctcgccgccgagctgaacgacaaatcctccacccctgggc

SEQ ID NO: 113255 - DNA, 100 bp, Homo sapiens
caaagccatgttcagcggccgcgtggaggtgctgaccgatgccggaggtatctgaaaaggtttaaagtgatgaagatcaaagttctaagaagctggtgcc

SEQ ID NO: 113256 - DNA, 101 bp, Homo sapiens
gctgggtaacatacttcaacaagccagatatagatgcctgggaattgcgtaaaggtcagtgaagtttaacaagggctatactgctcttagccagagtccag

SEQ ID NO: 113257 - DNA, 101 bp, Homo sapiens
gtacaagggctatctggtatctgtagatggctacatgaacatgcagccaatggtcatgcatctggcctgtgtaaacatgagaatgtccatgcctgaggcct

SEQ ID NO: 113258 - DNA, 100 bp, Homo sapiens
tagaacaacttagcaaaatgttctttactactaagcaccgttggtatcctcatggacggttctaaatggcttctaagaagttgggtgcagattttcatgg

SEQ ID NO: 113259 - DNA, 83 bp, Homo sapiens
aagcatttgtgcattcagatgctgctaaacaaacgttggacctctcgaacaaccagctgagcgagatccctgcagagcttgcg

SEQ ID NO: 113260 - DNA, 100 bp, Homo sapiens
cgctgcattaggggcttcctgaggaagcgcgggcggacgacagaggatgccgaaccactccatgactcgatggaaacagaagaaaagacaagcagtgcat

SEQ ID NO: 113261 - DNA, 75 bp, Homo sapiens
ggctactcagtttacagccactgcagtatcacagccagggttattatgtgtaccgtgacatgctaggcgaaaaag

SEQ ID NO: 113262 - DNA, 111 bp, Homo sapiens
gcatatttgagtcatttccttcgtacccacagtgcttcatgagagacttgtgcaccatggacaattttgctgagggagatttcactgtggcggattatgccttgttagaag

SEQ ID NO: 113263 - DNA, 90 bp, Homo sapiens
ggcggcggggaccgtccagcccagcgattctcagtcagcaagagcctcctgatctagcagccaagactccccctgacctttggccatgta

SEQ ID NO: 113264 - DNA, 100 bp, Homo sapiens
aggaaaaacaacattgctacacatgctaaaagatgacagacttggacaacatgtcccaacattacatcccaacatagggcctgattacattccaacagag

SEQ ID NO: 113265 - DNA, 52 bp, Homo sapiens
gggattttgtcagcttgtcgtcaagcaggttcaggagaagtggcacctggtg

SEQ ID NO: 113266 - DNA, 83 bp, Homo sapiens
ctcactaccgcccggagctgcccgcaccgcgtacaggctaactcaggtgagatggagccgctatagtcctgaattcaaggatc

SEQ ID NO: 113267 - DNA, 110 bp, Homo sapiens
ccgcgacttcctggccatcgttttcttcgcctccatagactactggtgcctggatgatctgtaccgggagatggtgagatgctatgtggaaatcgttgagaagcttccag

SEQ ID NO: 113268 - DNA, 101 bp, Homo sapiens
ttggacttctgggttccacagaatgggctgagtctcaaatatctatcagtgtagaagagtgggaagacaccaaagactccaaagaacaagggcaccaccgc

SEQ ID NO: 113269 - DNA, 75 bp, Homo sapiens
cacactgccacctgattaaaggaattgttgcagcagttactcacagaccttccccatgacatgctggatgacgac

SEQ ID NO: 113270 - DNA, 82 bp, Homo sapiens
tggagtctcacgggtgaaaagagacatttccatatcaccagaccacaaacgtgggaataagacgagttggaagaagacctga

SEQ ID NO: 113271 - DNA, 51 bp, Homo sapiens
caaaatccatagatggaaaagatggtgctgtgattgtctccacgccccagg

SEQ ID NO: 113272 - DNA, 75 bp, Homo sapiens
ggggaacatcactcagaagtttgatgtagtcaacaaaaatctctcatttacttcaccaccagcagtttcctcaca

SEQ ID NO: 113273 - DNA, 134 bp, Homo sapiens
gggagccagtcagaatccagttcccatcccgccttgagccagtcaccaatgccacaggaaagaggtgaaatgacaatggatgctctgttggctcgattgaaacttctgaatccagatgaccttagagaagaaat

SEQ ID NO: 113274 - DNA, 56 bp, Homo sapiens
ctgacacttccccttccccaccgaaccgcgtgtcggacgagcacacatacagccgc

SEQ ID NO: 113275 - DNA, 51 bp, Homo sapiens
ccagggccaggcgccgctcagaacggctggagtgcagtggcgtgatctcgg

SEQ ID NO: 113276 - DNA, 100 bp, Homo sapiens
gcgccgatgtccctgatccctggagcgacgacggccgctgcctaagctggaaaatgtacattgaagatgtcagtttctacatgtgggaagtagacattga

SEQ ID NO: 113277 - DNA, 82 bp, Homo sapiens
cgcgaaaattcggccagggttctcgctcttggttttaaaatcaaagatgggaaaatcggagaaaattgcccttccccatggc

SEQ ID NO: 113278 - DNA, 82 bp, Homo sapiens
tcttctacagtggctgttgaagaggctgaagtctgaccagtgcacaggacttcagggcttcctggtgttccacagctttggt

SEQ ID NO: 113279 - DNA, 51 bp, Homo sapiens
gaagattcttccaaggaaccagtgcgaagtctattgcgtctgcagacatgg

SEQ ID NO: 113280 - DNA, 74 bp, Homo sapiens
tagccagactcagggatcaaagagcaaacagattcagtggcctgcattggcagcgagtatgacgaggaggaggt

SEQ ID NO: 113281 - DNA, 80 bp, Homo sapiens
agatgtaccctcagtacgccacctactattacccccagtatctgcaagccaaggtttttagaacttcagccataaaaatg

SEQ ID NO: 113282 - DNA, 74 bp, Homo sapiens
caagctctcgagagtctcacggagacgcagcatccccagtttcccgcgggcctggaggtgacagatgaggtact

SEQ ID NO: 113283 - DNA, 100 bp, Homo sapiens
cggcccggagcccccagcgcagcggccgcgtggactccaacgacagcctctacgggggagactccaagttcctggcagaaaacaacaagctgtgtgagac

SEQ ID NO: 113284 - DNA, 100 bp, Homo sapiens
gaagaggacctcttcgtgctggtctgcggaagagggagctgctgaaggagctgctaccagtcatcgggcagaacctccgattccagcgcctcttcaccga

SEQ ID NO: 113285 - DNA, 88 bp, Homo sapiens
cctcggcctcccaaagtacagggattacaggcgtgagccaccgcgtccggcctgatacttttgtggaactctatgggaacaatgcagc

SEQ ID NO: 113286 - DNA, 50 bp, Homo sapiens
gcgaactaaagggaacctgagggacttaaccaccaccatgtcgagcaaaa

SEQ ID NO: 113287 - DNA, 90 bp, Homo sapiens
ctgtgcgcaggctatgctccagggctgctggagccagttctgcttctcggcaaggagcgatttgctggtgtagacatccgtgtccgtgta

SEQ ID NO: 113288 - DNA, 112 bp, Homo sapiens
aatgaacagtatgcggggtggtctgccaccccgtgagggcagaggcatgccaccaccactccgtggaggtccccctgggcctcctggccccacaggtgtccctgggagtcct

SEQ ID NO: 113289 - DNA, 46 bp, Homo sapiens
ggccaatgttggtgctggcaaaaagtcttgccacttgcctagtgag

SEQ ID NO: 113290 - DNA, 87 bp, Homo sapiens
cgttccgggggtgaagcctcctgcgccggccttgcctcgggctgctctttggcgtaaattgcaatcgattagggatcgtttctcaga

SEQ ID NO: 113291 - DNA, 98 bp, Homo sapiens
ttgctctgggtgctggctggaggttggatggcaagcatgtggtgtttggcaaagtgaaagaaggcatgaatattgtggaggccatggagcgctttggg

SEQ ID NO: 113292 - DNA, 99 bp, Homo sapiens
cgcacctgggccgaggctgcccgcctggactcacaccacccggcaagaactgctcactacggctccctgccccagaagtcacacggccggacccaagat

SEQ ID NO: 113293 - DNA, 82 bp, Homo sapiens
gggaaatccttcggatggtgaactcattagaaatagcatagaagccaatgtggaaaatgcagaggtgcacgttcagcaagca

SEQ ID NO: 113294 - DNA, 127 bp, Homo sapiens
cgctcctggcgctgctggctgcgctctgcccggcgagtcgggctctggaggaaaagaaagccggcagcaaaagtggaccaagaaaccttgacagaaatggtgaaacccagtattgattatgtgcgcc

SEQ ID NO: 113295 - DNA, 100 bp, Homo sapiens
aggcttcccccagcgcttgccgccctgggcgcggccctgctcctgtcttccattgaggcagaagatggcagtggcagcaccatgatgcaaaccaagacct

SEQ ID NO: 113296 - DNA, 100 bp, Homo sapiens
gtttcacccccaaaggccccaagatccaccaagtcaagcacatgtaccaggtatgaacatgctaatgatgataagagcagtttgaaatcagatcccgaag

SEQ ID NO: 113297 - DNA, 100 bp, Homo sapiens
ctgagaacttcctgatctctctcgctgtgagacatgtctgagactcctgctcagtgtagcattaagggtgaagattatataaagatgagtcagtgattga

SEQ ID NO: 113298 - DNA, 75 bp, Homo sapiens
acggggtgaaactgaccacagtgctcaccacccaccaccactggggaacgcccttttgcttgtgactggcagggc

SEQ ID NO: 113299 - DNA, 100 bp, Homo sapiens
aagaaattgaagagtctggaagcagaaatccttcaattgcaggagcaacctttcccctggatctcacaaaaactcgactccaaatgcaaggagaagcagc

SEQ ID NO: 113300 - DNA, 120 bp, Homo sapiens
ggtcgaggagagaccccggggagtagagagagagaaactcactccccgagtccccgaccctccccaagcaagccttatgccagcctggaccatcttggaggcagtgtaggatcatggaag

SEQ ID NO: 113301 - DNA, 82 bp, Homo sapiens
aaacttcttaacccctagaccggtttttagtccattgactatgcagcctaatgatgctgggctcttgcactgtttggtggaa

SEQ ID NO: 113302 - DNA, 75 bp, Homo sapiens
ccctctattgaccagatcctgcgccatgacttctttaccaagggggatatgagactttctactcggaatatcctg

SEQ ID NO: 113303 - DNA, 90 bp, Homo sapiens
tggtggatgcggccaactccaatgggcctttccagcccgtggtccttctccatattcgagaccggcatgggctgcaggagccgcggcggg

SEQ ID NO: 113304 - DNA, 51 bp, Homo sapiens
ggattccaagtaactcttatttgggttatgtaccgaaggactctaccgtgt

SEQ ID NO: 113305 - DNA, 132 bp, Homo sapiens
agtatggcaaggacagttgcatcatcaaagaaggagacgtggggtcactggtgtatgtcatggaagactgggacagggagaaattacttgaagcttggatgtccaacccggagaactgctgccaacgatcag

SEQ ID NO: 113306 - DNA, 82 bp, Homo sapiens
ttattacattgaatctctgctctggaaagttcttgtcaataccaaggcaggaagttatgttcgtgatgatgcagtccccaat

SEQ ID NO: 113307 - DNA, 100 bp, Homo sapiens
tgccagatggtgttacctggagcttaaaaagctgcacgcaagtgttaaacttctgatacgacaccgagggaaaagggcacattacttaccaggaattttt

SEQ ID NO: 113308 - DNA, 78 bp, Homo sapiens
cgaggaagacatctatgagctggcactcaaggagttgcccctggtcctgtaattggacttcaggcaccatctactggt

SEQ ID NO: 113309 - DNA, 97 bp, Homo sapiens
aaaatttattaaaggaagcacacctaagaaatcccctttgccttccttgctgcacaacctttaccctaagtacaacttcagcagcactaacccattt

SEQ ID NO: 113310 - DNA, 77 bp, Homo sapiens
aacgacgttccatctgtggaaggacctaccaaccaggtcctcctcgactggattaatgacgtgctggtggaggagag

SEQ ID NO: 113311 - DNA, 96 bp, Homo sapiens
cctgaatgccaatgtgtggtccaatgtagtgatgaagaatggtcgagtctatgctgtcttgtcaaagagagaaggtcgggtacttcaagaagaaat

SEQ ID NO: 113312 - DNA, 100 bp, Homo sapiens
cctgttctcatcaccatggcaacagggcggcgctgtgaggtctgtgatgatggcttttttggggacccgctggggctctttgggcacccccagccctgcc

SEQ ID NO: 113313 - DNA, 83 bp, Homo sapiens
aatacccctttgaattaattatggctgcttctccagggaaagtgaccgaggcagtgaaagaggccattgacgcagggtaccgg

SEQ ID NO: 113314 - DNA, 78 bp, Homo sapiens
cggagccgcgccccaccccgccagctccagagccacggagaacagatcccattccaatcgttgtcaagtatgatgtca

SEQ ID NO: 113315 - DNA, 74 bp, Homo sapiens
ttgcccagtatgatggggcatacaagccgatcaaagtccagatctccatctccaaaaagaaggtaagctaaatg

SEQ ID NO: 113316 - DNA, 82 bp, Homo sapiens
cgccagtggaagcgggaggcagttgcagctttcagcattgtgagcgccatattcagagcctgcagacccgagtgttagagct

SEQ ID NO: 113317 - DNA, 75 bp, Homo sapiens
cgcacgcggcgatatggaagaggagggcaagaagggcaagaaggctgcctgctgtttcccggggagatcatgaaa

SEQ ID NO: 113318 - DNA, 75 bp, Homo sapiens
gcgggagcttccgggagggcggctcgcagtgtttgtggagaaggtgctgcagagactttttcctcctgttccaag

SEQ ID NO: 113319 - DNA, 90 bp, Homo sapiens
cgaggacggtcggactcccgcggcgggaggagcctgttcccctgaggctgaccggttccctgatgtgttacctgcttctgctactgatcc

SEQ ID NO: 113320 - DNA, 90 bp, Homo sapiens
cgcttcttgaatttctctctgtaaaggaggtgaaagaagaacgtccagaaaaaataccagatttaaaattattggtagagaagaaatttt

SEQ ID NO: 113321 - DNA, 88 bp, Homo sapiens
tttgccaatgttggagccgtctgcaaagtgtccccggcaagaagatcatttgctccagaagaagctggttgccatgtcttgaggacag

SEQ ID NO: 113322 - DNA, 50 bp, Homo sapiens
tgtccacctgcaaggattcaaagaaggccttgcaggaaaagttgtggaat

SEQ ID NO: 113323 - DNA, 98 bp, Homo sapiens
agcgccgcgactcgggctgagggagctcgggccaatcagagggacggccccagaatggcatggcgacagaaggctagagagaggcagcagaaattgct

SEQ ID NO: 113324 - DNA, 98 bp, Homo sapiens
ccaaaggcacaggaagaagcttgcagagccccagtttgagggacagcgggatatccaccatgctgctgtgagactcgggcagttgtgactggtttaga

SEQ ID NO: 113325 - DNA, 98 bp, Homo sapiens
cagtaacaacagcgaggaagaagaggacgacgacgacgaggaagaggaggtttctgaggaaaaggaccagcgcagcctagacataaacactgccaagt

SEQ ID NO: 113326 - DNA, 96 bp, Homo sapiens
cctcacctatgcaaagaaagggaagctattgctgggattttgaggagggattaggcaaagaggagtcccaaaatgagaaacagaccaaaaagagtc

SEQ ID NO: 113327 - DNA, 100 bp, Homo sapiens
gttcttcaggcttgggtgactacctagaactgcatatagttttgctgttactgctcagtgtagtcacaccttgaataagaaatggaaaaccttgggatgt

SEQ ID NO: 113328 - DNA, 83 bp, Homo sapiens
tttaacccggacagccatcagtcggagcagacgctgcggcggcggcggcgcccgggagccggagccttcgcggcgtccacgtc

SEQ ID NO: 113329 - DNA, 97 bp, Homo sapiens
ctcgtctgctgcaggtcatgaagaaggagccagcagagtcgtctttcaggtacagcaatcatttgaaactccaagggccaaagctcaaatgcccacc

SEQ ID NO: 113330 - DNA, 83 bp, Homo sapiens
gccagtgggttgacacagatggcagctgcaatgactctccgcacggtattattgtcattgcaagcactattggcagctgcaga

SEQ ID NO: 113331 - DNA, 101 bp, Homo sapiens
tcggccatctttgctcctccctgcaactaactccattcttaattggtactaggttttgacaagcttgcatcatgcgtgagtataagctagtcgttcttggc

SEQ ID NO: 113332 - DNA, 75 bp, Homo sapiens
ttatgagattattgataattctcaaggattctacgtattccagaattctctgatggtttctggactgggtcccag

SEQ ID NO: 113333 - DNA, 100 bp, Homo sapiens
tcagctcccagccagttccagccatgtcaaggaacccaggttctgctgtgaatgggaacatagaattggagctcctggagttgaggaaataaaaagtaac

SEQ ID NO: 113334 - DNA, 100 bp, Homo sapiens
agtgttgccctgttcagtctgagttggcaaacatgaattgactgggcataaagtagctgtgaagatactcaatcgacagaagattcggagccttgatgtg

SEQ ID NO: 113335 - DNA, 80 bp, Homo sapiens
cagtagtgtttgggaagaaaaacagaggagttctattaagacggttgaagcactggacaatgccacatactttgtggatg

SEQ ID NO: 113336 - DNA, 100 bp, Homo sapiens
ggcatgtggattttgtcgctggacgtctagagatgtgggcatggcagacaaatctgtagcatatgcaggaagcggcaggaataaggaaaagcagcctcct

SEQ ID NO: 113337 - DNA, 74 bp, Homo sapiens
ccggcacccccggaccgaccatgggcagatcccagagacttgcagccaatacaggaagcaaacagcgtagtcgc

SEQ ID NO: 113338 - DNA, 100 bp, Homo sapiens
tgctgggcaggtcatgagtcaccatggtcttcatcctccaggtccacctttagcaagacctattctcccccgagaacgaggtgctttggatagaattgtt

SEQ ID NO: 113339 - DNA, 75 bp, Homo sapiens
ggagacgatgcctgagatcagagtcacgcccttggctgaagtcgttcctccgggagtgcaaggtggccaactact

SEQ ID NO: 113340 - DNA, 87 bp, Homo sapiens
tgggagaaacttgaacgcaaagagatccagcccccttataagccaaaagctggaagcagtgcgttatatcaatgaaaacctaattgt

SEQ ID NO: 113341 - DNA, 50 bp, Homo sapiens
catgcacttccttccagcagctacacagagtctgagaagccaactggggc

SEQ ID NO: 113342 - DNA, 111 bp, Homo sapiens
cgctggtgtgtttcctgctccttgccaaaactggaagatccatggaacccagtgacatgcctgctggctaccactgccccttagactctgccccctgggatgagaccagag

SEQ ID NO: 113343 - DNA, 98 bp, Homo sapiens
actatgtctgcggaagtccccgaggcagcctccgcggaggagcagaagacctgaaagatgtctgaaaattccagtgacagtgattcatcttgtggttg

SEQ ID NO: 113344 - DNA, 100 bp, Homo sapiens
atctcaaaaacaaaattctgaactcaggacttggcaagacagagctccggcagaaagcaggccatttgggacccttcctcccaggcccccagggcaggac

SEQ ID NO: 113345 - DNA, 100 bp, Homo sapiens
ccgagtccagcccaggaaaatggagagcaagagcctcctgatctagcagccaagactccccctgacctttggccatgtaccccaaccctctcatctactg

SEQ ID NO: 113346 - DNA, 96 bp, Homo sapiens
aggctcatcatgatattgtacgatttctggtacagttagatgactacagcaggtgtcttctgcggaggtgcgcatcgggcccatgagactgacgca

SEQ ID NO: 113347 - DNA, 100 bp, Homo sapiens
agacccgtgtgaagctgccctccggctccaagaaggttatctcctcagccaacagagctgtggttgtggcgccctgctcaagccgtggctcttcacggag

SEQ ID NO: 113348 - DNA, 75 bp, Homo sapiens
cgaagtcgtggaggtggcgaaacgaggaggagataacgcggccttgggctctggaatgccatatggcagccgaga

SEQ ID NO: 113349 - DNA, 82 bp, Homo sapiens
aggccaccaccggccgcctcagccatggacgcgtccctggagaaggctactgcagcactggggtgtcagttgttggtccgac

SEQ ID NO: 113350 - DNA, 97 bp, Homo sapiens
gcggcagcagctggaggaggatcgcactgctcatcttggccatcactatacacaacgttccagatccaaaatacggagctggcatatacttcaccaa

SEQ ID NO: 113351 - DNA, 100 bp, Homo sapiens
cgtggacaaagctgttgtctcagggagcacagaaggtatgttagagcccaccaaggaaccactgaaaccactttctgctgcagaaaaaatagcttccatc

SEQ ID NO: 113352 - DNA, 74 bp, Homo sapiens
ggacagcagtgtgtgtccagtttgtcagccacaccctgtgtacaggtatgaacatgctaatgatgataagagca

SEQ ID NO: 113353 - DNA, 82 bp, Homo sapiens
aaatggcggagtatctggcctccatcttcggcaccgagaaagacaattttgctacttgagaagatagaacatgatgacatct

SEQ ID NO: 113354 - DNA, 95 bp, Homo sapiens
ctcggtcctgtttcgacagcgaacatgtcgcggcctgtcaggtggatccgatattgaatatctggacttctataagcctgtcgtgtggttctgga

SEQ ID NO: 113355 - DNA, 90 bp, Homo sapiens
ccatgtggtggtgtatgtgcgcttcccagggatcttgagagtgaagatctcgaaggatttcatagaccccccaaagacacacgtgaccca

SEQ ID NO: 113356 - DNA, 90 bp, Homo sapiens
tcgacaatgagacgttccggatcagcgtttatcaggtgctccaggagcacttgggcagtgctggtcccaaaggcgataacatctatgaat

SEQ ID NO: 113357 - DNA, 82 bp, Homo sapiens
gatatgacaggggtaacacccttccagatgatttttgaggcctcgaaaaagcccaagacagcagaagcagacacctccagtg

SEQ ID NO: 113358 - DNA, 75 bp, Homo sapiens
aggctaccaagtccgtgctgtttgtgtgtctgggtgtggtcactcacctgtctaccactcccgtgaaatggcagc

SEQ ID NO: 113359 - DNA, 96 bp, Homo sapiens
tggaccagccagaggacgcgggctctgaggatgagctggaggagggggctgctgagaactagccctagacctctgcgtgagggttcttctgccgaa

SEQ ID NO: 113360 - DNA, 125 bp, Homo sapiens
atgtccgtggccttcgcgtctgcccggccaagaggcaaaggggaggttacgcagcaaaccatccagaaggactttccttatcccagttgattgtgcagaatacactgcctgtcgcttgtcttcta

SEQ ID NO: 113361 - DNA, 100 bp, Homo sapiens
cagcagctttcacaaatagtaccaaaggtgaataaattaagcccagtaggtgacctgcacaagacgcataatgtgaccagcccaagacgcataatgtgac

SEQ ID NO: 113362 - DNA, 100 bp, Homo sapiens
ccagccgaccttgagctccaggagttcgtctcttacgtctgcggaagtgcagctgcctcagttcttagcgcagcgggtccatatggaatatttgctggta

SEQ ID NO: 113363 - DNA, 100 bp, Homo sapiens
accgccgctgggggaccctgtcggaagcaactgccgccgccgcctctttcatctcttctggggcaggggccagggccagatggagtctagctctgtcgcc

SEQ ID NO: 113364 - DNA, 82 bp, Homo sapiens
ctcagggcttccactgattctacattatggttggggtgactcagtgggaacgccatctgagcggggcatgacctatgacgca

SEQ ID NO: 113365 - DNA, 100 bp, Homo sapiens
ggtcggcagagcaaggggcttacgcagaaggacctggccacgatcaagtcccagcagagcgaggtgacccgaatcctggatgggaagcgcatccaatacc

SEQ ID NO: 113366 - DNA, 117 bp, Homo sapiens
gaccaggctgacacctttcgccccgcggagttccactggaagctggatcaggaatgtaccaggtcatccagggtatcatctctcctgtcaacgacacctatgggaagaaagacctcg

SEQ ID NO: 113367 - DNA, 75 bp, Homo sapiens
aaaaagcagctggacagcacaattggaatccaccctgtctgtgcagaggtgaaatgacaatggatgctctgttgg

SEQ ID NO: 113368 - DNA, 98 bp, Homo sapiens
agacaacaagcagcctattatgcccagacaagtccccagggaatgccacagcatcctccagcacctcaggttagcatggcctcattgaaagaactaga

SEQ ID NO: 113369 - DNA, 100 bp, Homo sapiens
atttgctccccctcgtgcagcaacccccacacccagcaccagaacacagatatgtagaactcttcttgaattctacagcaggagcaagcggtggtgctta

SEQ ID NO: 113370 - DNA, 96 bp, Homo sapiens
cagctgagtgtgccacacaggtagccctggacggcattcagtgttttgtgggcatccccaccatcagatggtgcggggcagagggggactacaacg

SEQ ID NO: 113371 - DNA, 60 bp, Homo sapiens
gcacagtcttcacagtattgcagtttgcagaaaaaacttcagcatgtgccaggaacacaa

SEQ ID NO: 113372 - DNA, 114 bp, Homo sapiens
agccaaaaagcattgctggtatttcgaaggactctatccaacctattatattactatactggcaattgctggagaagattttgcaattgttgcttctgatactcgattgagtga

SEQ ID NO: 113373 - DNA, 73 bp, Homo sapiens
tgctgcactgctttcagcatgcaagctattggatgttgtcactgtgccatcaggtgaacttcgtcatgtggaa

SEQ ID NO: 113374 - DNA, 100 bp, Homo sapiens
catcctggtcactagcggactcttcttcgccttcgagcaaaacccatttatggcggttggctgctcctggctccagatgggaccgactttgacaacccag

SEQ ID NO: 113375 - DNA, 95 bp, Homo sapiens
gagcggccaggacgacgaggagcagggcctgactgcgcaggttttaaaatcaaagatgggaaaatcggagaaaattgcccttccccatggccagc

SEQ ID NO: 113376 - DNA, 74 bp, Homo sapiens
acagagcacccaagatgaagatgctgttagcctttgcagtctcgacataagtgctttgatgaactaggtggact

SEQ ID NO: 113377 - DNA, 100 bp, Homo sapiens
gcctggtggcctccgttctcttggcccaggccatcgaggagggcacgctggaggagatcgaagaggaggtccggcagaagaaatcatcacggaagcgcaa

SEQ ID NO: 113378 - DNA, 100 bp, Homo sapiens
ctctggagaaagcaagcaagcagccccatggctgggggttatggagtgatgggtgacgatggttctattgattatactgttcacgaagcctggaatgaag

SEQ ID NO: 113379 - DNA, 90 bp, Homo sapiens
attcctttaaatccggagggggaaaaaatcccaaggtctgcaaaggacctcagcagccatgtcgaagccccatagtgaagccgggactgc

SEQ ID NO: 113380 - DNA, 51 bp, Homo sapiens
tgaggagggcccttcacagaaccggggtagcacaggcggagtgcagcggag

SEQ ID NO: 113381 - DNA, 96 bp, Homo sapiens
gccagaagagggcggaagtggctactcagggcgccgccatgacgagccgggccggaagaagaggagctcactcctctacttgaaaaagaaagagat

SEQ ID NO: 113382 - DNA, 51 bp, Homo sapiens
gtgataaagttggtcagtctcgcactggggtttgtgtttagtgaatcagag

SEQ ID NO: 113383 - DNA, 75 bp, Homo sapiens
acagctggagagaacagttcattgaagctatcactgtcagtgctggcagtaacagagaagaattttgaaacaaaa

SEQ ID NO: 113384 - DNA, 100 bp, Homo sapiens
aaggatgatccagttggaccttttggacaggaaagtgtaacatcagttacagagttgcttatcaagtgtcccacaaatgaaaaaaatttctacatcttac

SEQ ID NO: 113385 - DNA, 75 bp, Homo sapiens
atcctcctggccaccgactcctacaaggtatgaagctaaaatgcagcggctaagaacgcggctctggagcttgac

SEQ ID NO: 113386 - DNA, 100 bp, Homo sapiens
tggacgccgccgaagaagcatcgttaaagtctctcttcaccctgccgtcatgtctaagtcagaggagcccccccatggaactgcagccccctgtctcccc

SEQ ID NO: 113387 - DNA, 82 bp, Homo sapiens
atcttagtctagggactgaggagtcgccgccgccccgagtcccgcctgagcggtgcatccccgttcctgggcgagaccaagc

SEQ ID NO: 113388 - DNA, 100 bp, Homo sapiens
ctcacgtggcatcagtccccactgcggtccacggccaggtgaacaatggtgtcccgacccaggctaagcttgagcatggctgagcaggagcccacagccg

SEQ ID NO: 113389 - DNA, 50 bp, Homo sapiens
gaggaaaacaacttcgagggcagaatgagtgaccgaggaggtggcgttcc

SEQ ID NO: 113390 - DNA, 87 bp, Homo sapiens
gaaggaggtctgcatcaatccctaccactataagagagtagaaagccctgataacaacgaacttgatgcaagtgataggtttgccaa

SEQ ID NO: 113391 - DNA, 75 bp, Homo sapiens
ggcgctatggcacccggctgcaaaagatggctgcagctcctccaagttactgttttgttgccttccctccacgtg

SEQ ID NO: 113392 - DNA, 83 bp, Homo sapiens
tcttctctccgagttccccgacaagtttggatcctgtgttccccgagtgggaatagctttgcgaaaaatgggcgcaatggcca

SEQ ID NO: 113393 - DNA, 100 bp, Homo sapiens
gcaaggggtaaatgagggtgttgatttctccaaggatctgctgaaaggatctaccgaacagaaagggacaaagggacattgtatgagctcaccttcaaag

SEQ ID NO: 113394 - DNA, 83 bp, Homo sapiens
ccgggcacacaaaaaacgggtcgcccgcgattctcagggattgatcgcctcttcaggtgagcgagtgctgtgctttcatgggc

SEQ ID NO: 113395 - DNA, 97 bp, Homo sapiens
aatcagccagtgagggtcaacgtcaagcgggagtatgaccacatgaatggatccagtgccggtggtggtgtgcacattgagccccggtatagacagt

SEQ ID NO: 113396 - DNA, 80 bp, Homo sapiens
tgaaccgggccatccagaggctgcaggctgagatcgacaacatcaagaaccagtttgacaagtatgcgcccaagctggac

SEQ ID NO: 113397 - DNA, 100 bp, Homo sapiens
atcatttgggaattgattaaagagaaactcatttttccctacgtggaattggatctacataggcgggatcgctttgttggtcaaagtgaggggaaaaaag

SEQ ID NO: 113398 - DNA, 100 bp, Homo sapiens
cttgattacccgttaagtcccccaaagatgagatttacctgtgagatgtttcatcccaacaactataatgtaactgcaaactccaagctggtcattatca

SEQ ID NO: 113399 - DNA, 75 bp, Homo sapiens
ctagctgatgataggggggttccatctcccaacttgtccatatggatctgtctgtagaaactctgttcagcttca

SEQ ID NO: 113400 - DNA, 74 bp, Homo sapiens
aggagtgccaaagaaagaagtaaactgaagttgcaaagcaacagtaatagcataaaggcatcacaagtggtcgg

SEQ ID NO: 113401 - DNA, 75 bp, Homo sapiens
ctgtatatggctgcgccccaaatcagaggacaaaagcatgtcttcccttcctgggtgcattggtttggatgcagc

SEQ ID NO: 113402 - DNA, 90 bp, Homo sapiens
agaatggctggaagttcttggctgcggggtgatggaacaacaactggtcaattcagacgcaggaggagggagacgcactgatgacatcgg

SEQ ID NO: 113403 - DNA, 60 bp, Homo sapiens
gaaggggtgaaagagactcggtgacagatacaggtggggaagaaaacatgacagaaacag

SEQ ID NO: 113404 - DNA, 82 bp, Homo sapiens
ggcaaataatggcagttaaagaatgtatcctgtcaggtataatgtcagtgaatggcaagaaagttcttcatatggatcgaaa

SEQ ID NO: 113405 - DNA, 51 bp, Homo sapiens
aggacattatcattatacagctatctgacaggaaatctgcctcattcgtac

SEQ ID NO: 113406 - DNA, 100 bp, Homo sapiens
gagggaattgatgatgttcactggaaggaaaatgggacattagttcaagtagcaactatatcagtgaaggactaccagctggtccagaagggaggaggac

SEQ ID NO: 113407 - DNA, 101 bp, Homo sapiens
ctgcgtggccctagtccccctccaatggctggtggatgaggaaggtcaaaatgcagatcttcgtgaaaacccttaccggcaagaccatcacccttgaggtg

SEQ ID NO: 113408 - DNA, 100 bp, Homo sapiens
gcttttcaggcatcctcatataattaaacttggccacagatgtctttaattccaaaaacctggccgttcaggcacaaaagaagatcttgggtaaaatggt

SEQ ID NO: 113409 - DNA, 98 bp, Homo sapiens
tcaagcactgtgatcttcaaatgaccctgatgctcccataagacagaaaatgccccttgatgatctggatagagaagatgaagttagattactcaaat

SEQ ID NO: 113410 - DNA, 98 bp, Homo sapiens
ccaggaagagcggccccgcggggggcgatgaccgtgcgctgaccctgactcactccaggtgtcatggagaaactccagctgggcccagagattctgca

SEQ ID NO: 113411 - DNA, 74 bp, Homo sapiens
tgggacccgcggaagccggcatgctggagaagctggagttcgaggacgaaggacccagatgatgtggtaccagt

SEQ ID NO: 113412 - DNA, 82 bp, Homo sapiens
ggaacttatgctgtagacatttctttgtggtttatctaaaaaccaaaggtgaactcagttcatggattcagatgtcttttaa

SEQ ID NO: 113413 - DNA, 74 bp, Homo sapiens
aaaattcaatccctgctttagctcagtccaagccttatgcatttgatcgggtgttccagtcaagcacatctcaa

SEQ ID NO: 113414 - DNA, 96 bp, Homo sapiens
gaagtccttattattggccctccagatacactttaggttgcttttgtaatgaagaagcacttaaatactcatctactaggcaagcatggagttggc

SEQ ID NO: 113415 - DNA, 104 bp, Homo sapiens
agaaaatcgagacctcaagtaatcattcccaaggcccagatattcactattaagtgtccaggaaggatctttcttatataaaggtgcttctgaggacttccaga

SEQ ID NO: 113416 - DNA, 100 bp, Homo sapiens
aaagctatctacccttttgatgatctcctcttccttcagcaaaggccagcctctcccaccactgcaggtgccagagcaagtggcacaagcaccactgata

SEQ ID NO: 113417 - DNA, 83 bp, Homo sapiens
ctcggcggcgccaccatgtactcgggagccggccccggttactataacaacagtaccaaggtggctgtgaaaaccctgaagcc

SEQ ID NO: 113418 - DNA, 75 bp, Homo sapiens
ggtgagaaaggccagtacacacacaagatctaccacctgcagaggacagtctcatcgaactcaaggaatcttcag

SEQ ID NO: 113419 - DNA, 83 bp, Homo sapiens
gcctcgcctcctcgcagcagcgccatgtacctggagtagaacagaaaaattattatgtctgtgttcccttgggactcattgga

SEQ ID NO: 113420 - DNA, 83 bp, Homo sapiens
ctactacgaggcgcaccagatgtaccggaccctgttcttcagggagtgaggattctttggacaccagcctgagagctcacggg

SEQ ID NO: 113421 - DNA, 74 bp, Homo sapiens
cgacgtcgtgatccagaagtccagagctgaggactgcctgtttgcaggctctgaaaattggaaaaccaagaagg

SEQ ID NO: 113422 - DNA, 100 bp, Homo sapiens
gttcatgacaatgactttgagccctaccttactggacagtcaaatcagctggtattccctctcgagtggtttccactcaacaagcccagtgttggggact

SEQ ID NO: 113423 - DNA, 83 bp, Homo sapiens
ctcgtggcctggtctccattatttgagatgagttacatcttggaggtcggcagcttcactcccgagggtgccgcgagcccagg

SEQ ID NO: 113424 - DNA, 50 bp, Homo sapiens
tgctttgggccttccatgtcgtcaggtcatcatcagatttgaaatattta

SEQ ID NO: 113425 - DNA, 75 bp, Homo sapiens
ctcctgctctgtcctcatccccggcttaggggatcatggaagctgataaagatgacacacaacaaattcttaagg

SEQ ID NO: 113426 - DNA, 75 bp, Homo sapiens
ggtgatccgaggctgggaagaaggggttgcccagggttacacatcattttggaatgactgtatatcatctggatt

SEQ ID NO: 113427 - DNA, 83 bp, Homo sapiens
tccactggacctaaaatatgaccctgatccagggaaccctactctggaaactgtcagtcccagggcactggggagggctgagg

SEQ ID NO: 113428 - DNA, 90 bp, Homo sapiens
tgaagctgtttcgggccagcgacccgctgctcagcgtcctcatgtggggggtaaaccactcgacacttgtgtaacaacaaggaatagcac

SEQ ID NO: 113429 - DNA, 74 bp, Homo sapiens
tcactctcgctcgccgtttccaggagcacagacttcccaagtaagaagcggaagaggagccgctggaaccaaga

SEQ ID NO: 113430 - DNA, 102 bp, Homo sapiens
tccttgagctgaacgtcttgcaacagtggccgcacgcataggtgtcatggagaaactccagctgggcccagagattctgcagcgggaaaatccaaggcttat

SEQ ID NO: 113431 - DNA, 79 bp, Homo sapiens
tgaggcctccccagccatgtggaactaagttgagaggattctattttgcaaagctgtattatgaagctaaagaatatga

SEQ ID NO: 113432 - DNA, 139 bp, Homo sapiens
ggaggactgtgctgtgcctctctcgcccacattttccccaagcactctcaggaacctggcaacaggtcatcatcagatttgaaatatttaaagtggatacaaaactatttcagcaatgcagacaattaagtgtgttgtt

SEQ ID NO: 113433 - DNA, 75 bp, Homo sapiens
cgcagtcgggaccatcgccggagcctgaggacacttctctgtcgtcacagttagagacatagtcttgctctgtta

SEQ ID NO: 113434 - DNA, 75 bp, Homo sapiens
aggacccggagctcatgctggtacgctgctgctgcaggtggtatggtcaggaaaaagactacaatgtactagtca

SEQ ID NO: 113435 - DNA, 75 bp, Homo sapiens
cagtagcttggatccttgtgggcatgatccataatcggtttcaagagatcccactggcattgttggtggtaggcc

SEQ ID NO: 113436 - DNA, 50 bp, Homo sapiens
cgacagggacgtcctcattgtcctcggccgaatacatcaagcaatggtaa

SEQ ID NO: 113437 - DNA, 50 bp, Homo sapiens
agccactagtgggtttgccagtggaagccaaagaactgccaactctgaaa

SEQ ID NO: 113438 - DNA, 49 bp, Homo sapiens
ctttggatgccagtgtcagttgtcagaactgcatgaacttgcccccaga

SEQ ID NO: 113439 - DNA, 90 bp, Homo sapiens
ctttcattacgtataggattattactaagcctactcgacacccagcacctcccccgcaaaccgattcgtcagtgttggaccacgggatcc

SEQ ID NO: 113440 - DNA, 76 bp, Homo sapiens
cgggcaacgatcggaactcggacacggtgctcctgacctctgataaagctgcagccaatttctcagatcgttcttt

SEQ ID NO: 113441 - DNA, 82 bp, Homo sapiens
cctgagcagcctggcctgccatgtccgggagaagacacccgtggaccgggagcccgtggaccgggagccggtggtgtgccac

SEQ ID NO: 113442 - DNA, 97 bp, Homo sapiens
ctgcacggtgaacctggaccaggaggaggttttcaggaccaaaattgtggaaaagtcactctgttttagaaagagcgttttcgctacgtaaagcaca

SEQ ID NO: 113443 - DNA, 75 bp, Homo sapiens
tagcgggggcctttcctgaggacggcgtacggagtgtgggtcatttggatccaggattcctagcaagtgacaaaa

SEQ ID NO: 113444 - DNA, 111 bp, Homo sapiens
agggtgtcacccttagcggaggacagcgtgcccggattgcccttgctcgtgctgtctaccagacacagcaggatgccaatgcctcttccctcttagacatctatagcttct

SEQ ID NO: 113445 - DNA, 100 bp, Homo sapiens
ctcagtgaagcatttcgcctgaccattacacgcaaagatattcaaactctaaaccatctgaattggctcaatgatgagagctatcagcttcccagtttgc

SEQ ID NO: 113446 - DNA, 75 bp, Homo sapiens
gcagagttagctaaagaactccctcaagtttcatttgtgaagctctctgacacagctggctattctagtcccaga

SEQ ID NO: 113447 - DNA, 50 bp, Homo sapiens
catttagagagcatcagcaataacgttccatcctcagagcagcctgaact

SEQ ID NO: 113448 - DNA, 101 bp, Homo sapiens
cacgaaatggattggagtgaaccggagaccccgaaaacggaagcgcagggagaaggaagaggtgtttgaaaaggctgaagccgacgtagcttctctgaaca

SEQ ID NO: 113449 - DNA, 90 bp, Homo sapiens
cgccagcagccgtccggagccagccaacgagcgatgtgacaagccgaggcggtgagccgggcaggaggaaggagcctccctcagggtttc

SEQ ID NO: 113450 - DNA, 75 bp, Homo sapiens
tgcgctctgctcggtgtcgtggcctcgcagatgtatgggattgtgctggatgcgggttcttctcacacaagttta

SEQ ID NO: 113451 - DNA, 98 bp, Homo sapiens
tccccagaacgcagatcagaggtagtcggacctttcccgctggcgcgcagcctcagctagcaggcattttggagatcaaagatgggtagaaaagatgc

SEQ ID NO: 113452 - DNA, 74 bp, Homo sapiens
ctgacccctttatccggcggctgggcctggaagcagagctgcaggctaagcttctatcaccatcagagaaagaa

SEQ ID NO: 113453 - DNA, 75 bp, Homo sapiens
gtccagccctacctatagaagggccgagcacagcaatgcaaacaacagcagttctgtagagagtttaaatatgaa

SEQ ID NO: 113454 - DNA, 49 bp, Homo sapiens
tgtttttgccaccacactccagcttgggagcgcctggaccatgctgctg

SEQ ID NO: 113455 - DNA, 75 bp, Homo sapiens
gagctggcggggagtcgcgggcgcctccgcctcaggatggaaagagatgctgcatttacacagaaaaaggcagaa

SEQ ID NO: 113456 - DNA, 83 bp, Homo sapiens
gcccgctcacctgcgctgtgatgcctgcagagctgtggcttaccagtgtcaacctaagaaaaagtctacgccactgaagtatg

SEQ ID NO: 113457 - DNA, 83 bp, Homo sapiens
caaacagtgcaaggggaagtctggaaaacaacgccttaccaagtggctgctgaaattaggtgggtttggaggatttgggacaa

SEQ ID NO: 113458 - DNA, 74 bp, Homo sapiens
tttgagatcgtgattatggtgctgaaggacaaattccagatataatgaagatctggaacttgaagatgccattc

SEQ ID NO: 113459 - DNA, 117 bp, Homo sapiens
gcttccgcatcccttggaagcacggcctacggcaggatgcacagcaggaggatttcggaatcttccaggttgaagaagcctcagcggaggcgatacggcctcctcgccaacactgag

SEQ ID NO: 113460 - DNA, 100 bp, Homo sapiens
gcagtgtctgacttgtgacagggatcagttcgacagcttagacaagcatacacaatggggaattgacttcttggaaagatatgccaaatttgttaaagag

SEQ ID NO: 113461 - DNA, 50 bp, Homo sapiens
gctgccgccgctctgaggagttaaagcctactcatgaaggttacttctct

SEQ ID NO: 113462 - DNA, 82 bp, Homo sapiens
agacactgaacgaggagccagtgctcagtaaacgctctgccactgacctgtgtggcaggaatgatggaaaccttaaggtgat

SEQ ID NO: 113463 - DNA, 75 bp, Homo sapiens
ggtcggtgccggctcaggagccggggttttaaaatcaaagatgggaaaatcggagaaaattgcccttccccatgg

SEQ ID NO: 113464 - DNA, 112 bp, Homo sapiens
acaggctcagtctgcggccaagactccgtcctgcaagacctgatggccaaaagaaaggaagaaaatttttcctctcctaaaaatgccaaaaggccaagacaagaagaattgg

SEQ ID NO: 113465 - DNA, 75 bp, Homo sapiens
attctcagggcaacccagatctgtagctacagcaagctgggtagcaggcagatccaaaggatatcatgaagtttc

SEQ ID NO: 113466 - DNA, 73 bp, Homo sapiens
cgaagaaccattgggtctgccgctcgatcaagtcatccgccaaagaagcctgtccagtttggaactgttcctc

SEQ ID NO: 113467 - DNA, 98 bp, Homo sapiens
cacggccgagatgtacacgaagacaggagtcaatggagattctcgatacttcctgtggccactccagatgacacacaataatttttggttgaagaaga

SEQ ID NO: 113468 - DNA, 98 bp, Homo sapiens
gcggctgatggcggatcaggatcggaagcctgcgtaactttctcccttgatccgggagtctttccactggacatgtcatgctgcccaaggacatagcc

SEQ ID NO: 113469 - DNA, 73 bp, Homo sapiens
ggatggttgtgagggatgagaaaagaagatggactctagttgagtcgtggggacagcttgaaggagccaacct

SEQ ID NO: 113470 - DNA, 73 bp, Homo sapiens
tgattggaatgttctccctgcagcagtcagcccaaaggaagatgcagacagacatgctgaactatctggaagt

SEQ ID NO: 113471 - DNA, 100 bp, Homo sapiens
gggctggatggcagttttcctgctgtaatagactatacaccatatttgaagtatatccaaagtgatttgctgtcctctgaatacatagagagacacattg

SEQ ID NO: 113472 - DNA, 82 bp, Homo sapiens
cccggggcatcctggcgccggcggcgggtactacccaggcggggagccttcacgtaaatgggtccagtcatgcctcccagta

SEQ ID NO: 113473 - DNA, 75 bp, Homo sapiens
ctttccaggaggctttggagcggctaaaaacctgacacaatgtttgcacgaggactgaagaggaaatgtgttggc

SEQ ID NO: 113474 - DNA, 100 bp, Homo sapiens
ttgctctaacttcctcggccgagccgggccgcgccgccgctgccgccgccgcgcgcggcctcaagtactacagccttccagcagccttcccagacccaca

SEQ ID NO: 113475 - DNA, 75 bp, Homo sapiens
gcagatggcaagtggagacagcaatctcaacttcagaggacagagctgcccagtccttactcaacaagctgatca

SEQ ID NO: 113476 - DNA, 75 bp, Homo sapiens
ttcgcccagtaataggccttctggagaaacttctgttccacctcctcctgcaggacttaaacaggcacaatcaaa

SEQ ID NO: 113477 - DNA, 75 bp, Homo sapiens
gagaggtggagtccggcccccgaaagaggatctcccttgagtttagaaatctggctgagaaataccaaacagtga

SEQ ID NO: 113478 - DNA, 83 bp, Homo sapiens
gtgtgcggactgcagcgccccggacaatgcagatcttcgtgaagactctgactggtaagaccatcaccctcgaggttgagccc

SEQ ID NO: 113479 - DNA, 98 bp, Homo sapiens
gtttctggtcactccccaggattatgcgcgttcccattctgtgatggggctcacacaaaacataacgaagagactggagacaatgtgggccctctgat

SEQ ID NO: 113480 - DNA, 75 bp, Homo sapiens
gttcaaggagttcaccacacgcacgcaggccccaactcatgagccttgtgtctgggctgctgcagccagtccctg

SEQ ID NO: 113481 - DNA, 119 bp, Homo sapiens
cgccgccgccgccatgaacaactcgggcgccgacgagatcggaggagcaggagcggcttcgcttggagcaggagcgagagcaggaacagaagaaggccaatagcctggccaggctggca

SEQ ID NO: 113482 - DNA, 87 bp, Homo sapiens
agtcgtcttagatgttgattcaattggaaccaaccagatggctgtgtgtgccaaagcacagaacaaacctttctatgtggttgcaga

SEQ ID NO: 113483 - DNA, 100 bp, Homo sapiens
agatctattaagattgtcacatcttaaaccttccagtgaagatgaacgtgaccttgaagatttcctgcttgactttgaggaagacctgaaagcccttcat

SEQ ID NO: 113484 - DNA, 100 bp, Homo sapiens
cctgaaaatgcactcggatgccgccgctgtcagatctaagcctttcccacgttatggttataaaccctccccaccgaatggatgtggctctccactgttt

SEQ ID NO: 113485 - DNA, 82 bp, Homo sapiens
ctctgggatcccggccaccagcaattgtccgagttcttggagtctctgcggagtccctgggccagatctcacagtgaaagct

SEQ ID NO: 113486 - DNA, 82 bp, Homo sapiens
tccgaaccccttcatgcccaaatcccggaaactccagcgtgtctccagccgtgaacccagcgggtgccgcttctccacccga

SEQ ID NO: 113487 - DNA, 100 bp, Homo sapiens
gctgcccagaaaggatttaataaagtggtgttaaagcatctgaagaagacaaagaacctttcatcaattgcgcagtctctttgtggagaggacttgatca

SEQ ID NO: 113488 - DNA, 75 bp, Homo sapiens
ggacacgctggtgcatctgtttgccggagggtgctggagaatctggtaaaagcaccattgtgaagcagatgagga

SEQ ID NO: 113489 - DNA, 100 bp, Homo sapiens
acgggggcagtatcgacagtgggcctatgccccctgagaggaactcaaagttggcattcccgtcacggatgagaatgggaaccgcttgggggagtcggcg

SEQ ID NO: 113490 - DNA, 75 bp, Homo sapiens
gggggatcaggaagtggagaagtcaagaggacactgaagatcacagactgtgtgctccatcctctggtctcccca

SEQ ID NO: 113491 - DNA, 75 bp, Homo sapiens
acacgggacccgcttcgaggccgctttggcgccaaatcctgaggtgtggcaggcgtgcttgtgggacacccgttt

SEQ ID NO: 113492 - DNA, 90 bp, Homo sapiens
gagccggcggatgttcatgggcagcaccatcgagccagaagcagtatttgtcctgggtctccgtctctccaccgggggcttcatccttcc

SEQ ID NO: 113493 - DNA, 75 bp, Homo sapiens
cacgggatccagagcgccgcgcacttcgtcatgttcttcgcgccctgcaaattgtggctactaatttgccccctg

SEQ ID NO: 113494 - DNA, 97 bp, Homo sapiens
ccctggagctggacatgacccctttcatggcctccagggagacattagagaagcaagtattttctctctggaggcagaagatgtttcagcatcgaga

SEQ ID NO: 113495 - DNA, 100 bp, Homo sapiens
agcagaaaaccttgcaacttacatggaaagcatgagactatatgctagagataaaaatgaatgccatttcccatccagtactgaagtgttaaagttagaa

SEQ ID NO: 113496 - DNA, 56 bp, Homo sapiens
gctgggcctgccatcattcaaaccaggggctcagctcctggaactccggacaaaca

SEQ ID NO: 113497 - DNA, 90 bp, Homo sapiens
ctcaaagcaataccaggatagctgttgtttcagagaaaggtgccatgtttcagaacagagtaagacccctggtaaagaagaactgaagat

SEQ ID NO: 113498 - DNA, 100 bp, Homo sapiens
agacagctgggccggagcagccgcgggcgcccgaggggccgagcgagtacaaaattggacagctgtacatgatcagcaaacacagccatgaacagagtga

SEQ ID NO: 113499 - DNA, 100 bp, Homo sapiens
ttggcctacctatcctcagctctatgtttctggagagctcataggaggacttgatataattaaggagcgatatatagttatcagcaaagtagatgaagaa

SEQ ID NO: 113500 - DNA, 100 bp, Homo sapiens
caggaattggctctgctgacaggaattataagtaaagcagcacttcctgtattgaagctgcttctggtggtaaagctgaagttatcacttgtgatgtact

SEQ ID NO: 113501 - DNA, 100 bp, Homo sapiens
cgtgagcgagcagaggcttaaggtcttcagcggggcgctccaggaggcactcacaggtgagcacctgcggatctgtccccagggctacacctgctgcacc

SEQ ID NO: 113502 - DNA, 115 bp, Homo sapiens
gcctgaggatccccgtggagtacccctaatggctttcccaaggatagaaagccctctggaaaccttaagtgcacaggacctgcaagcgcaggaccgagcccaccgcatcgggcag

SEQ ID NO: 113503 - DNA, 89 bp, Homo sapiens
tctataagctgaattatggcagcccagtcaaggatagtgacaacctctggtgggacgcctttgccactgaattttttgaagatgacgcc

SEQ ID NO: 113504 - DNA, 80 bp, Homo sapiens
gagaaattcagacggctcccgaggggtaacaagatgctcaactatagtgctcccagtgcagggggttgcctgctggacag

SEQ ID NO: 113505 - DNA, 90 bp, Homo sapiens
atcctctggttccggggcctgaaccgtatccagactcaggcgtcctgcctctgcggctctgccccctgcatcctgtgcagctgctgcccc

SEQ ID NO: 113506 - DNA, 80 bp, Homo sapiens
gagcggataaacaggaaggacctgtgggagagaggacagagagaggacctggtgaggggaatactttcaagtcatcccaa

SEQ ID NO: 113507 - DNA, 80 bp, Homo sapiens
cctgagatccggagcagccggggtcggagcggaagctccaccatgaggcgaggtggatggaggaagcgagctgaaaatga

SEQ ID NO: 113508 - DNA, 95 bp, Homo sapiens
catgaaaccatccgaaactatgctcagatcttcgcaaatactgtggacaatgcccgcatcgttctgcagattgacaatgcccgtcttgctgctga

SEQ ID NO: 113509 - DNA, 100 bp, Homo sapiens
agggccccaatgagtggcacacagtctactatcaccgacaggtacggacattgctgcaggagaagaggttgccatcaagcttgaatgtgtcaaaaccaaa

SEQ ID NO: 113510 - DNA, 98 bp, Homo sapiens
ggcgacctcaagaagcagctccacgaaaggcagccgcggatcgccgcgctcagcgacaaacaagtgttccccccacactggggctcccactactgcga

SEQ ID NO: 113511 - DNA, 106 bp, Homo sapiens
tttgagcacgtgcaggagttctgggagcaccgcatggactcgaacgtgctttttctcaagtatgaagacatgcatcggggatttaatgtgcaaaatggcgattata

SEQ ID NO: 113512 - DNA, 75 bp, Homo sapiens
ctcgcctcccggccgagctgacgatgcgagtgtctctctggcttatgtggtttccccgtgtgtgaggtgggatcc

SEQ ID NO: 113513 - DNA, 100 bp, Homo sapiens
ctggtgcccgagtcggccaagcatgggcaaccactcaggacggcccgaggatccggaaccagggactttgaacatgtcggggatcgccctcagcagactc

SEQ ID NO: 113514 - DNA, 100 bp, Homo sapiens
ctgagtctccccagaagaggaagtttgatgtcacatgtacttcagtttgaggataaaagcagaaaagtgaaagatgcaagcatgcaagactcagatacat

SEQ ID NO: 113515 - DNA, 78 bp, Homo sapiens
tctgtgagcaatccgaatgtgtttggaaagaagttgattcaagtcagttgagacgccagttgtgtggaggaagtcagg

SEQ ID NO: 113516 - DNA, 95 bp, Homo sapiens
actctgaccgttttagtagtcgcagacctcgaaatgatagacggctgttcggctcttgaatcccagcgatgaaaccaggaactcactttcccggg

SEQ ID NO: 113517 - DNA, 83 bp, Homo sapiens
ttttgccaaagggaacctgactttcacagctcagtacctaagagagaactcgatgccaccgcaacggtattggcgaaccggca

SEQ ID NO: 113518 - DNA, 82 bp, Homo sapiens
aggattcaccacagtacttcacatcgtcgttcacatgggaactcttcatcttggcttatacctatactgcctgatatgctcc

SEQ ID NO: 113519 - DNA, 80 bp, Homo sapiens
aaacccaaattcttcgttctgtgcggcgacctcatccacgccatgccaggacctggaagccggcgagagagacccctgtc

SEQ ID NO: 113520 - DNA, 90 bp, Homo sapiens
ctgggacactcctgaagtcgggaaatgatgccttcaattaagttgcagagttctgatggagagatatttgaagttgatgtggaaattgcc

SEQ ID NO: 113521 - DNA, 51 bp, Homo sapiens
aaggattccaagtaactcttatttggattgtcagctgacctctgtcctgtg

SEQ ID NO: 113522 - DNA, 135 bp, Homo sapiens
ttccgtaacatccaggttgatgaagctaatttattgacttggcaagggcttattgttcctatgccttcaattaagttgcagagttctgatggagagatatttgaagttgatgtggaaattgccaaacaatctgtg

SEQ ID NO: 113523 - DNA, 100 bp, Homo sapiens
tcgctctgggagcctagaatgcatcagtgcccttgtggcgaatggggctcacgtcgagacagaagcagtacaacatccacgtgggaactgctggatcaaa

SEQ ID NO: 113524 - DNA, 96 bp, Homo sapiens
cacggaccgggggacttgcgcctggtgaattatgtaacctcattacgctggatgtagctcacaatcaacttgaacaccttccaaaggagattggaa

SEQ ID NO: 113525 - DNA, 94 bp, Homo sapiens
cactgttcctggaggaatccgagaagagcagagcggagggagccccagacacggaagctcttcgtgggcggtcttgactggagcacgacccaag

SEQ ID NO: 113526 - DNA, 74 bp, Homo sapiens
cggccatctgtgtgtctgggcagtgcaaggtatgggttcgaaggggtcatcctctccatctatggcttagaccg

SEQ ID NO: 113527 - DNA, 74 bp, Homo sapiens
tggcaaaggaggggttataccagtataagaacatttgtcaacaggaaaaacacttttttcacaaggtgaatgag

SEQ ID NO: 113528 - DNA, 74 bp, Homo sapiens
tgcttaccgaatccggagatcctgaggaggcaactttggctttggggattcacgtggtggcggtggaaatttcg

SEQ ID NO: 113529 - DNA, 100 bp, Homo sapiens
ggatgtgaaaatgaagccagaccgaggtgcactacatcctccaggaggtggtgatgggtgggatggtgttggaaacaaacatgaatgaaatcgtggctca

SEQ ID NO: 113530 - DNA, 89 bp, Homo sapiens
atgggtctctggcgtttctacggcgcggctctcacggactcaggccaggccactcgcaggttgcacgttttcaaaaaatacctaatggt

SEQ ID NO: 113531 - DNA, 82 bp, Homo sapiens
gacgtcctgcaggaacccgaacagttccccctggtgcagggagtggccataaaactggcgatggaatatgagaggagccctc

SEQ ID NO: 113532 - DNA, 100 bp, Homo sapiens
ttttcatacattactgcagtaacactccaccatatagacccggctttaccttatatcaggtgtccggctttgctggcccagcaagcctgataagcatgaa

SEQ ID NO: 113533 - DNA, 102 bp, Homo sapiens
tcaccgaatagccagtggcgaagagatgtataagcattccaataataaggccatgactacgggggcaattgctgcaatgctgtctacaatcctgtattcaag

SEQ ID NO: 113534 - DNA, 137 bp, Homo sapiens
ttttacaatttccactggaactgtgttcagattcacttccttctcatccttttccaccagctaaaggtgaccatggaggctggtggcctccccttggagctgtggcgcatgatcttagcctacttgcaccttcccga

SEQ ID NO: 113535 - DNA, 98 bp, Homo sapiens
acctctacaaacagggctttgccatccccggctccagcttcctgggtcgtcatgtcaaaacgggccagcttgcagccatcaaggttatggatgtcaca

SEQ ID NO: 113536 - DNA, 86 bp, Homo sapiens
gggattatttcctccccactgactggaaaggaagagagaagggcacagttacctaagtatcaacgtaatcttcctcggccaggaca

SEQ ID NO: 113537 - DNA, 50 bp, Homo sapiens
tacagagtgttgagaagtttattcagaaaaattatggcctcgaaactgat

SEQ ID NO: 113538 - DNA, 75 bp, Homo sapiens
ctagggctggagcctctccagcctcccgcgaagggtatttgaagtataccatacaactgttttgaaaatccagcg

SEQ ID NO: 113539 - DNA, 83 bp, Homo sapiens
cctaaggtcgaatcatcaggcgtccccgtcacccaacaacccactcaggcacttccgttcccagtgacctgacagcagaggag

SEQ ID NO: 113540 - DNA, 83 bp, Homo sapiens
atcaatgaggagatcacaccccgacggcagtccatgacggtgaagaagggagaggttggccgactgcgatgtgagtgacagca

SEQ ID NO: 113541 - DNA, 82 bp, Homo sapiens
ctggattatctactactgctcctcctggcatccgcagtggctgcgatggaaggattttttatcaagcagaaatgcatcgaac

SEQ ID NO: 113542 - DNA, 50 bp, Homo sapiens
cacagaaggccgacaccctgcacctggtttatcctcagtaaagaaagtcc

SEQ ID NO: 113543 - DNA, 74 bp, Homo sapiens
aaatataggacatgcgtttgagatctactgtgagttcaaaccttgtactactcagctgatcacaagctgcttga

SEQ ID NO: 113544 - DNA, 83 bp, Homo sapiens
ggaaaatatcccaaggactaatctgatcgggtcttccttcatttgttgacctcctgtactggagagacattaagaagactgga

SEQ ID NO: 113545 - DNA, 51 bp, Homo sapiens
cccctctgcagagccgcagtccctccgaggatgacagtgatgggattccgt

SEQ ID NO: 113546 - DNA, 51 bp, Homo sapiens
gcctcctcgcagcagcgccatggatttttagactctgaggagcagttggag

SEQ ID NO: 113547 - DNA, 100 bp, Homo sapiens
ctccagttgtccgcggttcctcctcctgtcgctgcccgtgtgattactgagactcagaagaataactgtgtgatgcctgaagatgtgaagaacttttacc

SEQ ID NO: 113548 - DNA, 100 bp, Homo sapiens
ttatgatgaatgcaataattctccattgagaagagagaagaacattctcgaatacctagaatgggcatactggagcatagtgaaagagtctattttgaag

SEQ ID NO: 113549 - DNA, 82 bp, Homo sapiens
gttggtggtgcggggcggcagccgattcctggccacctccatagcaagcaggacagctggcctgaagctcagagccggggcg

SEQ ID NO: 113550 - DNA, 75 bp, Homo sapiens
tgagtgtggacctggtggaagttgaggctgcctgcccactgacaaggaactgagagagactatagcattgctgac

SEQ ID NO: 113551 - DNA, 101 bp, Homo sapiens
gctggagcacttgagccacgtgcatgaaccaaacccacttcgttcaagacaggtgtttaagcgcatccgtgtcattctggaccttactcccaactaccggg

SEQ ID NO: 113552 - DNA, 87 bp, Homo sapiens
gctctacacatctcttcatctgtatcctctgcagcatccttgatgataaaccagtaaatagctcttcagtatccccatcagccagtt

SEQ ID NO: 113553 - DNA, 100 bp, Homo sapiens
cgggtgaagccaccgtcatcatgtctgaccagcagttccaagagcctctgagttcctgccttttttcatctctgaatccccaccattggcctacattggg

SEQ ID NO: 113554 - DNA, 101 bp, Homo sapiens
ggatatccgaggagccacctaaagaataatccagaatggctactctgatctatgttgataaggaaaatggagaaccaggcacccgtgtggttgctaaggat

SEQ ID NO: 113555 - DNA, 83 bp, Homo sapiens
aacaaactgctgagacgcacagtctccgtgccggtggaggggcggccccacggcgagcatgacaatgcagatcttcgtgaaga

SEQ ID NO: 113556 - DNA, 100 bp, Homo sapiens
cgtcacgcacacgctcggcgctgcgatccgcgcatataacgtggcagctctcgccgtcgggattactatgacagaggatatgatcggggctatgatgatc

SEQ ID NO: 113557 - DNA, 90 bp, Homo sapiens
tgcgtatagcagcaaaattcatcattcatgcccctcctggagaatttaatgaggttttcaatggagatctattgggaaactgattataac

SEQ ID NO: 113558 - DNA, 100 bp, Homo sapiens
cagaggatcagaaccggtacctggatggcatgaaataaaccccagctctctagctaccttgagcaaagaagggaagttattgatcgaatatcagtcaatt

SEQ ID NO: 113559 - DNA, 100 bp, Homo sapiens
gcactgcgcacctcgccagtgccggttaccaagcgcctcctcccccgtctgtgggacaacgctctgggtccaaattccaagcctgtagtgtccttcattg

SEQ ID NO: 113560 - DNA, 100 bp, Homo sapiens
cttctctctcctcgattgttgcgcgctcatcttcctctcggtctacttcctggattcactcctgcttgcgaaaagctgacaaaaacaaggacaacaagat

SEQ ID NO: 113561 - DNA, 75 bp, Homo sapiens
aggacagcttcagggcccggagtactagtctcaacgagagacccaagagggggatatgagactttctactcggaa

SEQ ID NO: 113562 - DNA, 88 bp, Homo sapiens
tccgaccggctgaggcggcgcggcagcggagggacggcagtctcgcgcggcagaggaggtggacacggtggacgtctccggcgtgccc

SEQ ID NO: 113563 - DNA, 75 bp, Homo sapiens
atggagagcctgaaggaggacaggaccacgctgctctatttttaccaacaggctgagaaaaactgattttgatga

SEQ ID NO: 113564 - DNA, 83 bp, Homo sapiens
gtgccctctccttttcgtttccggaaacatggcctccaggcccaaggtcagcatcccactgtcagccatcattgaggtccgca

SEQ ID NO: 113565 - DNA, 90 bp, Homo sapiens
tcctaatgttttccttcagcaaggacaaaggtggcaattttggaggtagccccggttatggaggaggaagaggaggatatggtggtggag

SEQ ID NO: 113566 - DNA, 51 bp, Homo sapiens
tgaaggtggaggcagcgcggctctcagggaaatgtttcaacgtgcgcaagc

SEQ ID NO: 113567 - DNA, 100 bp, Homo sapiens
ccagggaggatgacgaacccaacctggtgcccggcccgcaggacatagctcgccttttgcaagaaaaggagttacaggaagagaaaaagagaaagaaaca

SEQ ID NO: 113568 - DNA, 101 bp, Homo sapiens
ggtttgcctggcagagatggtgttgcaggagtgccaggtgacaaaggtgccccagggagagcaggcctgtatggcgagattggcgcgactggtgatttcgg

SEQ ID NO: 113569 - DNA, 90 bp, Homo sapiens
cgggcggcgcgcggcggcggcgctcggcgatggtaggcgtccctggagcggccgccttccagcgtgtgtgtggtttcagcgcagcatggc

SEQ ID NO: 113570 - DNA, 90 bp, Homo sapiens
ggtctgcccggccagctctcgcttctgcaagaccacgaacacaggaagcgtcagcccccgtagcacctctgttaccacgacttctagtgc

SEQ ID NO: 113571 - DNA, 75 bp, Homo sapiens
cacacaccggcagccacagctccgaagctggcaagaagcacagacgcagtcttcagcaaggaagtgctgggaacg

SEQ ID NO: 113572 - DNA, 74 bp, Homo sapiens
cttcgatgatcgtgtgtcggatgaggagaagctgagatctgtatctgtggacctgaatgttgatccctcgcttc

SEQ ID NO: 113573 - DNA, 100 bp, Homo sapiens
gtgactgcgtcaggcatctcaatcatggccatgtttttggtatactgtgcactggagaaagaacctgtgccaatgtccttgcctccagccttggtgccac

SEQ ID NO: 113574 - DNA, 101 bp, Homo sapiens
gcacatgtagatttcctgaaaagtgttttgtccatcaactaaaggcacaaacagatacctcacttctactggtgctgatggaacaatctgtttctggcaat

SEQ ID NO: 113575 - DNA, 83 bp, Homo sapiens
ctaatttgaaccatgtttggattgaagccgcctctgtattacttaccaggattttttatcaagcagaaatgcatcgaacaacg

SEQ ID NO: 113576 - DNA, 83 bp, Homo sapiens
attgactttgatgagaacactgctctggatgatgcagaagaggagtcctttaggaaggtaaaactgccattcaatgcacaacg

SEQ ID NO: 113577 - DNA, 75 bp, Homo sapiens
catgaaaatgggccccttcagtcagatcttggatgaccatgaaagctgtggttctaattctaccaaccgtagtac

SEQ ID NO: 113578 - DNA, 75 bp, Homo sapiens
tcccttacagtttctttgagcagtttgtggaagcgatcacccacatatgacagtggacatagaggacaacgcaga

SEQ ID NO: 113579 - DNA, 111 bp, Homo sapiens
ctcaggaaagtctttgtttgtactgccgcacactgaccaccttgtgggttatattataagcgtcgagggcgaggcccccagcagtgagactggcacatccctggacagccc

SEQ ID NO: 113580 - DNA, 101 bp, Homo sapiens
aagcgggggagggggggggcggcggccgaacgatgtgcgagaactgcgcagacctggtggaggtgttaaatgaaagtggtaaattcactccagcagcaacc

SEQ ID NO: 113581 - DNA, 110 bp, Homo sapiens
cagaagggctacgccagcggcgtcgagaggaccatcctgggtgctggccctgtgctggagaatcgagagctccagatcatgagaaagctagatcactgtaacatagtccg

SEQ ID NO: 113582 - DNA, 75 bp, Homo sapiens
gcgcgcgggagttcgaggccctgcggagctgcttcgccgctgcgcatcatcggctggttcgtgcgaagcttcaag

SEQ ID NO: 113583 - DNA, 100 bp, Homo sapiens
cctctttaagaatctttgtttggctgttactactttatttcatgcaagggagagataccaatgtactggtatatattaaaagaagattggcaatgtgtgc

SEQ ID NO: 113584 - DNA, 100 bp, Homo sapiens
tctatgtaacaacctgcgtgggcaagagtttccacacctatgacttctgggaggtgatcagtgatgaacatggcatcgaccccaccggcacctaccacgg

SEQ ID NO: 113585 - DNA, 99 bp, Homo sapiens
tattgtccgagtggccggaacgggagccaacatggcagcggggttcgggcgatgctgcaggctggaaaaggattttggtctgagatgctgggcgtgggg

SEQ ID NO: 113586 - DNA, 80 bp, Homo sapiens
ctggagcctcagttggaagcagccgatccagcctgcggagcctgtggggcaggggagtaaccatggatgttggtatgaca

SEQ ID NO: 113587 - DNA, 100 bp, Homo sapiens
cactgactgcagcatcgacctccggggctcaagtgatcctttcatctcagcctcctcagtagctgagactacagccaaaacctattgatgtacaagtcat

SEQ ID NO: 113588 - DNA, 75 bp, Homo sapiens
gaattacatctgacccccaaagctcagcagcaagagtgagccatggagctacgtgtggggaacaagtaccgcctg

SEQ ID NO: 113589 - DNA, 75 bp, Homo sapiens
ccttcgctgccgccacgggcccgtcttcttcctccttcggctcccagggaattacatgaacgacagccttcgcac

SEQ ID NO: 113590 - DNA, 87 bp, Homo sapiens
ctgacccccgagcctggggccgagcaggaggatgcattagcacaacaggcctttgaagaggctcggagaaggacacgcgaatttgaa

SEQ ID NO: 113591 - DNA, 100 bp, Homo sapiens
ctgcttcctctggcggaggcggcaggaaccgagagccaggtccagagcgccgaggagccggtctaggacgcagcagggcgccctgcgtccggcagaggag

SEQ ID NO: 113592 - DNA, 75 bp, Homo sapiens
ggtcaacgagcggggcaaccactgcgagtactgcttcaccaggtgttacctcattttgaaagtcttgggaaacag

SEQ ID NO: 113593 - DNA, 96 bp, Homo sapiens
ggggcagtcctcgccggcgagttcagcggcgccctgcgtccggcagaggaggcgagcatcccgctcaggtgatgaggaacccctcgcgcacccagc

SEQ ID NO: 113594 - DNA, 75 bp, Homo sapiens
ctacacaagtggagctccttttcctccacctaccttcccgaaataatcatgggccagactgggaagaaatctgag

SEQ ID NO: 113595 - DNA, 100 bp, Homo sapiens
ggaaaacttctgcataccctggaagcatctggttttgtagcctggatgtgtctgctagtagccgaatggtggtcacaggagacaacgtggggaacgtgat

SEQ ID NO: 113596 - DNA, 75 bp, Homo sapiens
tggaagcggccaccgactactgtcagcagctgtgccaggttgaaaggattgttgacaaaaggaaaaataaaaaag

SEQ ID NO: 113597 - DNA, 51 bp, Homo sapiens
cgccactgccgcaggaggcgtgagaccaagatcactccatggatgaaatga

SEQ ID NO: 113598 - DNA, 75 bp, Homo sapiens
acctgctgctgacttccatccctctggatccggcaagggggtgttgcggcagatccctgtagtgggctccgtgct

SEQ ID NO: 113599 - DNA, 76 bp, Homo sapiens
tccctgctggggcgatcccgggctgaaagaggcgtcagtaagactttgaccccgacgcaggcttcagtgattgccg

SEQ ID NO: 113600 - DNA, 100 bp, Homo sapiens
acacgagttttgcaaaaacatttgttggcacaccttattacatgtctcctgatttggtgctatggagaaatttttggtagaatataagagtgcagtggag

SEQ ID NO: 113601 - DNA, 51 bp, Homo sapiens
gcccaggtcctgccctacctctcccaagagatgttctctcccaggggctgg

SEQ ID NO: 113602 - DNA, 50 bp, Homo sapiens
cagatcagtggccgaggccccagaggcgcctgtgtctggcagagctggtg

SEQ ID NO: 113603 - DNA, 104 bp, Homo sapiens
agagggattcgtggtgaaggtccggggcttgccctggtcttgctcggccgatgaagtgcagaggtttttttctggccctcgggaccaaggatcacgtcatgact

SEQ ID NO: 113604 - DNA, 82 bp, Homo sapiens
ccggggccgggctcaggagcagagaataccgtagcagtaggcaggacagttccaattcaacaaaaacctctttaccctggca

SEQ ID NO: 113605 - DNA, 98 bp, Homo sapiens
cctacaaggaatctgagggtgccctcaatgagcacatgaccagcttagcttctgtcctaaaggtacttcctatttaacagacattgtgtggtgggctg

SEQ ID NO: 113606 - DNA, 118 bp, Homo sapiens
ggtccaaacaatcatgggaatttccaaggggattcaaacttcaacagaatgtggcaaccagttttttgctccactcaagcctgttagaatcaccatggaatacagctccagtgggaag

SEQ ID NO: 113607 - DNA, 74 bp, Homo sapiens
ccttgtttaatgactttggtgccctcaacatctctcagagacgaaagggaatagcatttcaaggttcagtggag

SEQ ID NO: 113608 - DNA, 100 bp, Homo sapiens
gactggagggctcgtcctgctacagacagctttgatgactacccacctagaagaggtgatgatagctttggagacagtttctaagcatgaattgaggaac

SEQ ID NO: 113609 - DNA, 100 bp, Homo sapiens
caggctgcaagtgaaagacaagaaagatgagactctggtgtgggaggccttggtgaaaccagaatgtgaaagatgttgcagaagtgttccagaagtggct

SEQ ID NO: 113610 - DNA, 100 bp, Homo sapiens
ccttggtcccagcgccttcccacggagcagcactcttcaccctgcacagccttgttaggtatgtctgattgacccgggctgcttccgagaaattgatgag

SEQ ID NO: 113611 - DNA, 100 bp, Homo sapiens
gttttccaaagtcacgctcattggccggaggaagctcaccttcgacgaggaagcttataaaaatgtggctcagctcctggaactccggacaaacaactac

SEQ ID NO: 113612 - DNA, 89 bp, Homo sapiens
ctgcccctgggaaaccagagagtcggagggagtccatctggagcggccaagcacggatgggcagaagcctttgcaggtatcagaagttc

SEQ ID NO: 113613 - DNA, 100 bp, Homo sapiens
atgacgggctttctgctgccgcccgcaagcagaggtgtacgtgaacggagagtgggtgaccaacatcagcgagggaggcagcttcggggagctggcgctc

SEQ ID NO: 113614 - DNA, 48 bp, Homo sapiens
ctcactgcagcctccgcctcccagatattttggagtgtatacaataat

SEQ ID NO: 113615 - DNA, 90 bp, Homo sapiens
cgagtgccaggagggagagatcctggccacaggcagtacggcatggtgctcgctttggtgcaattcccatcgaccagagttggtccgacc

SEQ ID NO: 113616 - DNA, 75 bp, Homo sapiens
cagaagaagctgtctctgctgatagactccttccagaataactcaaaggtataagaacagcactcctggaatcag

SEQ ID NO: 113617 - DNA, 83 bp, Homo sapiens
cccgccgagccggcggccgctcccttccccgcgcagccccgcacggcccgggcccacatagcctgggctggaagctcttctac

SEQ ID NO: 113618 - DNA, 99 bp, Homo sapiens
ctcctcgccagcagccgtccggagccagccaacgagcggacagagcgggatgccaccagcttgtccaaagggaagttccaggagctcctggtgggcatc

SEQ ID NO: 113619 - DNA, 100 bp, Homo sapiens
tgaccccaagattccagatgttcctgtggaccccagtccaggaatagccaggccagaagaaggaaggcctgtggtgagtgggacaggaaatgacatcacc

SEQ ID NO: 113620 - DNA, 82 bp, Homo sapiens
attccttttgggacgccaattatctgtctcgtaactgtgtaatcaaggaactagcaccacaacaggaaggtaacccaggaga

SEQ ID NO: 113621 - DNA, 74 bp, Homo sapiens
gggctctggccgcgcctggcctggccgggaccatggactggccgtttgacgatggggcgcccccgcccggcaag

SEQ ID NO: 113622 - DNA, 141 bp, Homo sapiens
gacggagtcctgttccaccttcagagcgtcacggcgtacgccctcatggggaaaatctccccggtgactttcagaggtcaaccagaatcaagatgtctgggactgaggaagcaattcttggaggacgtgacagccatcctg

SEQ ID NO: 113623 - DNA, 83 bp, Homo sapiens
cccccgacagcgccatggcccagattctgccaattcgttttcaggagcatctccagattaacgtcttcaaggacccagttgct

SEQ ID NO: 113624 - DNA, 88 bp, Homo sapiens
ttagccccgcgcagccgccggcgtcgccgccatggacctaggttgagactgagctaaagttaatctgttgtgacattctggatgtact

SEQ ID NO: 113625 - DNA, 100 bp, Homo sapiens
ttccaagtgatcctgctggagcacatcatcatgtgccgccttgtcacgggtcacaaggccacggcgctgcaggaggtggacccaagtggagagattgtgg

SEQ ID NO: 113626 - DNA, 50 bp, Homo sapiens
ttgctgaagaggaggcggaagccaagctaaaaagtttgcagagacccaac

SEQ ID NO: 113627 - DNA, 100 bp, Homo sapiens
agggacagcccagaaggcatcgtctgcactccccatacagactctggccatctatgaccggtttggccggttgatgtatggacaggaagatgtacccaag

SEQ ID NO: 113628 - DNA, 100 bp, Homo sapiens
gtaatgaaaaatggctgtgaatctaaagagctggtctacctcgtgcagattgcttgtcaggcactggagatattattgctgtcatgataacagaattgag

SEQ ID NO: 113629 - DNA, 90 bp, Homo sapiens
tccgcatgcagcagaagatattcaaggagatgaccgatggatgtctcaggtcaccctcgagtcctggctgattcttttcctggcagttcc

SEQ ID NO: 113630 - DNA, 101 bp, Homo sapiens
gcctgaaccaccgcctccagagcccgtgcccatgtactctgacgagtgccggaactgtgattaccagcaggaggccgacaacagctgcatctatgtcaaca

SEQ ID NO: 113631 - DNA, 100 bp, Homo sapiens
gcattgatgagatcaagcaggagctgaagcaggacaacatagcggtgaaggcgaacgcggtctgcaagctgacgtatggtcctcactgagcagcgagtcg

SEQ ID NO: 113632 - DNA, 100 bp, Homo sapiens
tgctctgtgggcgggcggcagcgatgttcggccaggtggctccaaggagaggaagcagtgatgcattgagatgatatcatcaagttgaatcgaaaggaag

SEQ ID NO: 113633 - DNA, 98 bp, Homo sapiens
tgggaaaagaatacaaaggcaatgcttatcatttaatgcataaaaactgcaatcatttttcttcagctttatcagagtgcctacaccaactaatgtta

SEQ ID NO: 113634 - DNA, 82 bp, Homo sapiens
acggcatgaccagtctgcataagcctctgcagtccttgtccctggctgactcgaaactcaagactgaggtcaccatcatcat

SEQ ID NO: 113635 - DNA, 75 bp, Homo sapiens
caatccgagagggcatgctggcccagctgtttgagggcatgaaggcgttcaaaggcaaagaccagcaggtgcgcc

SEQ ID NO: 113636 - DNA, 99 bp, Homo sapiens
ggacaactatgaaaggaccacgccggatggcagtgttggtgaggcagagcatatggaaaatgtgccggtggtggtgtgcacattgagccccggtataga

SEQ ID NO: 113637 - DNA, 90 bp, Homo sapiens
ccagcttcgaatggagggatcagccagacaaacacctatgacgcccagtatgagagaagtcaatgaaaggattctattttgcaaagctgt

SEQ ID NO: 113638 - DNA, 49 bp, Homo sapiens
cggggacggagagaacacgagcccatcagaaacctctgcgccatgagag

SEQ ID NO: 113639 - DNA, 74 bp, Homo sapiens
ggagctgaatattacggcagctaaggaaatccccatttggaagtacagaaagaaagactcctgttaaaaagctg

SEQ ID NO: 113640 - DNA, 83 bp, Homo sapiens
ggacatgttgttggaaaaatggctatgcccttcaacaaaacctggtgaaattgatgactacagcatggttcgatttttacctt

SEQ ID NO: 113641 - DNA, 100 bp, Homo sapiens
ccctccaaggttctcctatttggactctgctgcagatcccttgccctgcatgattctggaacagagtgcacaccaggagaatctaagaatttgggtcaaa

SEQ ID NO: 113642 - DNA, 116 bp, Homo sapiens
gtctctctgctgcggcgcggggaccgctgtgctctcggtccgcgggagagctgtggggcttggtgagtgtttcgtggcctctcgggttggtcagcacccccagccagctggcccag

SEQ ID NO: 113643 - DNA, 75 bp, Homo sapiens
tcgtgtcctgtgctgaagatgtttccggaacaacagaaagagtgacagctggagtatcagccttggaagtatata

SEQ ID NO: 113644 - DNA, 80 bp, Homo sapiens
ggttgtgttacaacagatgatgctttgcaagaacttgtggaactcatctatcaacagtttgcattgagactccttgcatt

SEQ ID NO: 113645 - DNA, 100 bp, Homo sapiens
ttctcttcgtcatgatcaacaaatatggtcgacggtccaaatttggaatgaagggaaaaccatccccttggttatccgttgatactgccttgtatattct

SEQ ID NO: 113646 - DNA, 74 bp, Homo sapiens
ctcgcggcaggctctgcgggccaggatgagttctaagcacaggtgtcgtgaaaactacccctaaaagccaaaat

SEQ ID NO: 113647 - DNA, 50 bp, Homo sapiens
cagcactgtctccaccctagagatcatgattgagttctgtccagggggag

SEQ ID NO: 113648 - DNA, 98 bp, Homo sapiens
cttggtccagtctggctgcagcaaaaagcaggcctagttccccgagagcgttcagacagtgggggctcaagctcagagccatttgaccgtcatgcacc

SEQ ID NO: 113649 - DNA, 75 bp, Homo sapiens
ccggggccctcttctacttcaacatgggcaaggtggattcaccaatgaacttgaagcatcctcatgacctagtca

SEQ ID NO: 113650 - DNA, 97 bp, Homo sapiens
gtgaagatgttgcctttggtggagtctttagatgcactgttggcttgcgagacaaatatggttctgatctacaatggccaactggacatcatcgtgg

SEQ ID NO: 113651 - DNA, 100 bp, Homo sapiens
ccagaggttccctccgagccccttcctgagaagatcccaggagacgttctcttccagatggctgaagtccacaggcagatccagaatcagctggaagaaa

SEQ ID NO: 113652 - DNA, 82 bp, Homo sapiens
gcagcgacggtagcagcagcatggccgcgatctatgggggtgtagaggggaaacaagctcacatcttcctgtgggaaacctt

SEQ ID NO: 113653 - DNA, 74 bp, Homo sapiens
atgacgctgcggctgtggtccagctgagttccgatgaagttaaattccgtcaagatttaatgaatattgcgggc

SEQ ID NO: 113654 - DNA, 101 bp, Homo sapiens
gcaacaatggcttcatgcaccacgactctgagatttgcccacctgatgaccttgccagcttgccatcatgcaaagaaaatcctgaagatgttctgagccca

SEQ ID NO: 113655 - DNA, 75 bp, Homo sapiens
gcaacctcttcaaacgcatcttgaacctgggccctttcctgggattgtggacatgttcggaactggaggtggcct

SEQ ID NO: 113656 - DNA, 100 bp, Homo sapiens
cgagttcccaaaaagctccgcaggggctgtagggaggttctggtatgaaaaccctggagtatttaccccggcacaactcactcagctgaagcaggcgtcc

SEQ ID NO: 113657 - DNA, 100 bp, Homo sapiens
tctgcacttcgcattttggcattgacatttaattttagggtcctttatatagaagggagagtagatactggctccaatactacagaatgaatagaaaaaa

SEQ ID NO: 113658 - DNA, 101 bp, Homo sapiens
gtgattccagatatactaaaacttgcaaaacagtgtgaagttctttccatcagaggatctttctctggaatcaaaggactccagctgaaagttaacctcca

SEQ ID NO: 113659 - DNA, 98 bp, Homo sapiens
gccccagcatttgccatcttcaagtttgttcaggaaatttgcgagaatccccgatttatcattgatggagccaacagaactgacatctgtcaaggaga

SEQ ID NO: 113660 - DNA, 100 bp, Homo sapiens
cgccacccccgtggatctctggagtgttggctgcatatttgcagaaatgtttcgtagaaaattcccaaatgctggaaaatcctctttgctaagttgtgtt

SEQ ID NO: 113661 - DNA, 98 bp, Homo sapiens
tatctacaatctcggtactacagtaacaatttggacaagacagcaaatgctattgtcgaagttttctaaagaagaatctgaagtgaaatgacatcaag

SEQ ID NO: 113662 - DNA, 90 bp, Homo sapiens
ccatcacccaccaacaacaccacaataatccacagccaagaatgatatggaacctagcaaagctgttccactgaatgcatctaagcaaga

SEQ ID NO: 113663 - DNA, 100 bp, Homo sapiens
caaggacaacccgtacatcaccgacggctaccgggcctacctgccgtccaggctgtgtatcaaaagcctctatcagacccgtttcagaagttacactgaa

SEQ ID NO: 113664 - DNA, 75 bp, Homo sapiens
ggtgctgcaagagaaggcactcaagtttatgataaagtggagaattttcatgaagaacatgaaaagaatagtcac

SEQ ID NO: 113665 - DNA, 82 bp, Homo sapiens
agggatgttctgaagctgaagaagggacagagggcagtgatcagcaatggaagggttcaaaccttgtactactcagctgatc

SEQ ID NO: 113666 - DNA, 88 bp, Homo sapiens
accaacaaccccttctcttcctcttcagcctactcagtgtgaagatgataagctaaatttggatttggctgggcttcggaaagaaaaa

SEQ ID NO: 113667 - DNA, 50 bp, Homo sapiens
tggacacagaagtatttgtgacaggccccttcacagatgtagtcactaca

SEQ ID NO: 113668 - DNA, 100 bp, Homo sapiens
caacgagaacgccgtggagaaggtgaacatcaagccgcagaaactccgaggagacgcacgccagaagctgcccatggacttgctggtgctggaggatgag

SEQ ID NO: 113669 - DNA, 75 bp, Homo sapiens
ccctggacggcattcagtgttttggtagtgggcagcagtcagtgacaggtgtaacctctgtggatgacagcaaca

SEQ ID NO: 113670 - DNA, 98 bp, Homo sapiens
cctggaccacggcgcagacgcgggcgagctgcggctcggacgccagcggacacgcgggcgaggacagagcgggatgccaccagcttgtccaaagggaa

SEQ ID NO: 113671 - DNA, 88 bp, Homo sapiens
cgggcgcactgggaggtggaacgggccgaactgcaggttggcagcctcgatggttccttctctgtgggggaatattgtcctattatga

SEQ ID NO: 113672 - DNA, 96 bp, Homo sapiens
acagattcgcagtggtcgcttcttctccttgggcctgccttaagtgtgaaagtaatgactgatgaaagtggaaaatccaaaggatttggatttgta

SEQ ID NO: 113673 - DNA, 82 bp, Homo sapiens
aagctccgccgcgcccgcggcccgcggccgccggagtgcatccgccccaacccttttccccctcgtctcctgtgagaattcc

SEQ ID NO: 113674 - DNA, 100 bp, Homo sapiens
catcttctgtcaaagatcggtgccgactgatgaaggatacttgcaacacaggcagtggcagaagagcatttggcagtgggtatcgcagggatgatgacta

SEQ ID NO: 113675 - DNA, 93 bp, Homo sapiens
actcctttgtaaattgcaagaaagctctggagacttgtggcggggacctcaaacagtaatccagtccctcatagcactggtgaatgaccccca

SEQ ID NO: 113676 - DNA, 100 bp, Homo sapiens
ctgacttcaagaatgaagccgcggaccctcacggaaactgacccagactttgatcattgtgcagtctgcatagagagctataagcagaatgatgtcgtcc

SEQ ID NO: 113677 - DNA, 99 bp, Homo sapiens
gtgacatccgaggtgcctttctccaaaagagttttgcggcctccaggtggtggatccaatttttcattaggttttgatgaaccaacagaacaacctgtg

SEQ ID NO: 113678 - DNA, 100 bp, Homo sapiens
ctaaactttatgcagtacatcaagaaggaaataaaaacgttggattagatattgaggctgactgtgctgtcctgattgttgctgctggtgttggtgaatt

SEQ ID NO: 113679 - DNA, 73 bp, Homo sapiens
tttactgaagaggaggaagcccagattagtgatgatgaaccaggttatgaccttgatttattttgcataccta

SEQ ID NO: 113680 - DNA, 50 bp, Homo sapiens
ggaatgttccctgacaatttcgttaagatttattgctaaacatgggtgca

SEQ ID NO: 113681 - DNA, 82 bp, Homo sapiens
agtgggtctacaccgaccagccgcacgccgaccggcgccgggagatcctgggttcaaaatggaaagtatttattgaccaaat

SEQ ID NO: 113682 - DNA, 75 bp, Homo sapiens
gggccggatgggtccttgagtcgacgaagcggagcaggtgtgggtgtgggagtacgagacggaggaaggagcaca

SEQ ID NO: 113683 - DNA, 76 bp, Homo sapiens
cccacactcaagttctttcctgccagtgccgacaggacgatgaccaaaatgttagacttgcttgaggacttcttag

SEQ ID NO: 113684 - DNA, 100 bp, Homo sapiens
ctaaagtcacccggcggccaaaggccagtgactaccaacgtttggaccagaaggaccgccgggagagcctgcccacctccccaccctggacgccgggcgc

SEQ ID NO: 113685 - DNA, 49 bp, Homo sapiens
agccgccctggagaaacagatcggttgtgcacagggacctgaagcccag

SEQ ID NO: 113686 - DNA, 100 bp, Homo sapiens
tgagtttcctggtagagccggccgagctgaggcggtcgcggccatgaaggttaaagatcgaggtccggaagccactaggagattttttaattggttttat

SEQ ID NO: 113687 - DNA, 82 bp, Homo sapiens
tacccaccggagcctggcgcagcctccctctattaccagtgtgctcatgggagcttagaagatcccaaaagtataacccatc

SEQ ID NO: 113688 - DNA, 90 bp, Homo sapiens
tggggaacagggtcacagctctcacccaggaaatgcaacctcaccacaagtacaaagaccatctttcatggactactttgataagcaaga

SEQ ID NO: 113689 - DNA, 100 bp, Homo sapiens
ggagagcctggctgagctggagctggagctgtcggaaggagggacagatgattatttcgttgcctgagagttgcctgctcaccacggacacagtgattcg

SEQ ID NO: 113690 - DNA, 98 bp, Homo sapiens
caaggatcccgatgtgaacatgctgcacgtgtttgttctgggcgaatggcagcccatcgagtgtgctggatcgaaggggtattttgccactggaggaa

SEQ ID NO: 113691 - DNA, 100 bp, Homo sapiens
gccgacgctggggcatttgcgctcgcacctgaggcagtccctgctgtgcacctgggggtacagaaatgcactcggtgatggaaagagagccactattctg

SEQ ID NO: 113692 - DNA, 75 bp, Homo sapiens
agaggccgagggtttgatgaaggtggaggcagcgcggctctcagtatggtttgaagtggtgaacatggatttttc

SEQ ID NO: 113693 - DNA, 90 bp, Homo sapiens
ggctgagctagcagtgagcaccttttggcccaatgaatatcagaaagttgaagttgatggtagtttaagtgatagccacgtatctcctcc

SEQ ID NO: 113694 - DNA, 83 bp, Homo sapiens
tgtattgagcaaaataaagaaaatcagagttttgaaaatgaaactgatgagacgacaactgagaaggaagccaacatcctttt

SEQ ID NO: 113695 - DNA, 100 bp, Homo sapiens
aagtttctggtcactccccaggattatgcgcgtagatctctggcttcctgctctgtttgttctggttgccctggaaagcctgctgctcagcccatgcccc

SEQ ID NO: 113696 - DNA, 98 bp, Homo sapiens
gagagcgcagaatatcaagtgctgagtgttgcggagataggaacatgggagagaaacaatctgggtaacatgaaagtgatgctggttgctaagggaag

SEQ ID NO: 113697 - DNA, 90 bp, Homo sapiens
actcatgggccctggcggtggacgagcaggaagctgcggctgagtcgatatgtgttgagacggattctccgccgagctgtccgatacgcc

SEQ ID NO: 113698 - DNA, 98 bp, Homo sapiens
ctgctgttcaggtaccccttccagagaagccaggagcacccggcgtcccagacaagcttgaccactatgctatcatcaagtttccgctgaccactgag

SEQ ID NO: 113699 - DNA, 100 bp, Homo sapiens
gggcgcatcacaaagtggaagtacccgttccccaaggagacagaggccaagagcaagctgacgctcacttatctaaagaatatgaggaggctaatttcag

SEQ ID NO: 113700 - DNA, 116 bp, Homo sapiens
ttggcggcgcgatgaggcgcagcaaggctgacgtggagcggtacatcgcctcggtgcagggctccaccccgtcgcctcgacaggttatgaagacagtatggagtttccagaccata

SEQ ID NO: 113701 - DNA, 100 bp, Homo sapiens
aattttaatgacatagtgaagcaagggtacgtgaggatccggagcagacgcctcggggcactcaaggagttgcccctggtcctgtaattggacttcaggc

SEQ ID NO: 113702 - DNA, 97 bp, Homo sapiens
agctgtggataacgggaggtgaatttccatgtcaacatagtcctggtccggcctctttggcctacccccgttggctccgctgccccaggtcgatgag

SEQ ID NO: 113703 - DNA, 83 bp, Homo sapiens
ctgagattttagtctgtccgcggttccactttataactcctgcactgcggtaggatggtgctgctccactggtgcctgctgtg

SEQ ID NO: 113704 - DNA, 98 bp, Homo sapiens
gctgtggataacgggaggtgaatttccatgtcaacatagtcctgcaaaacaagctatcgatcagggaagatctccagttataatagataacactaata

SEQ ID NO: 113705 - DNA, 96 bp, Homo sapiens
atcaaccctctgcatacagtaaatttgtcgctgatggcatcttcaaagctgaactgaatgagtttcttactcgggagctggctgaagatggctact

SEQ ID NO: 113706 - DNA, 75 bp, Homo sapiens
tctgacatcgcgacgctgctcaaaacctcgctccggaaaggggacacctgaaatgcccggcgaagccacagaaac

SEQ ID NO: 113707 - DNA, 100 bp, Homo sapiens
cgccccttgcaacaaaggcagactgagcgccagagaggacgtttccaactcaaatgttcctgacaggcagcgatcggattcccatctacggcatggccag

SEQ ID NO: 113708 - DNA, 100 bp, Homo sapiens
gaaaatacgtggttggagagctcatctggaattttgccgatttcatgactaaccagtacctggaatggccaaatatcaaggtgaagttcaaagtttgaaa

SEQ ID NO: 113709 - DNA, 75 bp, Homo sapiens
tcagcactgactttcagctatggaatcgggatcgtgggactttaccagatcggtttgtaataacacctcgaagac

SEQ ID NO: 113710 - DNA, 73 bp, Homo sapiens
actgatctccatgtcctgttgtggggcttttacagcctttggacctaatctgggagcctgcaagtgacaacag

SEQ ID NO: 113711 - DNA, 133 bp, Homo sapiens
caatgatcctgaaaacagaaggaaattgaaggaacttggagttaatggtctaatttatgataggaagaaggtagataatgactataatgcccttcgagaaagactcagcaccttgcctgataaattgtcttat

SEQ ID NO: 113712 - DNA, 98 bp, Homo sapiens
cagcaagtcatccaagacttgaataaagaggagtgacagtgaggattcacatttgggttatttcaagatgagcttcctactgcccaagctgactagca

SEQ ID NO: 113713 - DNA, 95 bp, Homo sapiens
tggtaatctgtaggaaaagcgctgcggcccagggggtaaagagagggatcagtgtctttcaatgatgtgactgtggacttcactcaggaggagtg

SEQ ID NO: 113714 - DNA, 75 bp, Homo sapiens
gtcagggggactgcaaaggccaatgttggtgctggcaaaaagaactctcttgatagagcccaagcagccaagaat

SEQ ID NO: 113715 - DNA, 101 bp, Homo sapiens
atcgttttgaagagttctgcgttttgccagtcacctctcaactgtgtgccaaaggtactggttttggattaggaattgttttctcacttaccttctttaaa

SEQ ID NO: 113716 - DNA, 115 bp, Homo sapiens
ggccttgaggtggaggactcagaccctgagcctgaaggggaggcggaggacagtctcgttccctgagcccctccccactgggctcttcagccgccagcactgccttggaacggcc

SEQ ID NO: 113717 - DNA, 50 bp, Homo sapiens
cctacccgggatacggaggaggggttctgatctacaatggccaactggac

SEQ ID NO: 113718 - DNA, 75 bp, Homo sapiens
ttcgtggacggcctgtgccggggaacggcaggagcagctgatgggatatcggaagagagggccgaagcccaaacc

SEQ ID NO: 113719 - DNA, 96 bp, Homo sapiens
ctgccgccatgtataaatccttggaccaagctatcagccgctttgagagtgaggacctgacctccattgtggtgtcatggagaaactccagctggg

SEQ ID NO: 113720 - DNA, 82 bp, Homo sapiens
cacggtgcctaggacccctgggaggcacagagaatgggatgctgggcccgggaggtgctggtccccgaggggcccttgtacc

SEQ ID NO: 113721 - DNA, 75 bp, Homo sapiens
tcaagcacatgcagattcgggtgaatgcggagcctgctgctttctacaggcgaacctcttcccggccgctctggt

SEQ ID NO: 113722 - DNA, 82 bp, Homo sapiens
gtccagagctgaggactgcctgtttgcaggcatgtcgggccccaggcctgtggtgctgagcgggccttcgggagctgggaag

SEQ ID NO: 113723 - DNA, 93 bp, Homo sapiens
caggggcggaggcggaggcagaggtggaggcgctttgaaaggtgtcgtgaaaactacccctaaaagccaaaatgggaaaggaaaagactcata

SEQ ID NO: 113724 - DNA, 90 bp, Homo sapiens
caaccacatgattgggattgggccagtcttaaatatctacccatggaataaagagctgtatttgatcagctctgcagtccttcatccaag

SEQ ID NO: 113725 - DNA, 90 bp, Homo sapiens
tccagagagctaaagccgatggtgactctgacatcattagaagcatgccagaacagactggtgaaaagtaaaccttttcacctacaaaat

SEQ ID NO: 113726 - DNA, 111 bp, Homo sapiens
cagcattcagctggagttccgggagctctcccgtctcacaggggataagaagtttcaggaggcacggaaggcccagctagaaaaccacgaaccggaggaggaagaggaaga

SEQ ID NO: 113727 - DNA, 75 bp, Homo sapiens
ccccctcatccagtaatccagtctccctcagcactctaccaaaggtctattatcctcccagtccacaacgctgaa

SEQ ID NO: 113728 - DNA, 100 bp, Homo sapiens
caaagacctgcgactttgctcagctcctggccactctgaatccacttcctggctctggattggcttgtcctggatattgcatagaaatgggatcctgtcg

SEQ ID NO: 113729 - DNA, 96 bp, Homo sapiens
gtggatttctccacttccagtttttcaagaagtaagggtaagatgataatgcaagataaattggaaaaagaaaggaatgatgctaaaaatgcagtt

SEQ ID NO: 113730 - DNA, 127 bp, Homo sapiens
ctcatctcgctcggctgcgggaaatcgggctgaagcgactgagtccgcgatggagatcttatgccttcattcatccggcatggtccaacaattccaagacgaactgatatctgtcttccagattcaa

SEQ ID NO: 113731 - DNA, 100 bp, Homo sapiens
agtgcggcatcacctcctccaagaccgtgctggtctttctcaacctcatcttctgggtgggcaccatgtccttgaagcttcaggcaagcaatgtaaccaa

SEQ ID NO: 113732 - DNA, 75 bp, Homo sapiens
gctgttttggaactgtcaggtacctcaaagcgtaagcgcatattaaatttcctattgactacccctattcaccac

SEQ ID NO: 113733 - DNA, 73 bp, Homo sapiens
tgcccgaggaggcagccaagctcgtagcctgccactccgtgcgttcgtggtctacaagctgccagctcttaga

SEQ ID NO: 113734 - DNA, 83 bp, Homo sapiens
gagggaaatcgtgcacatccaggctggtcagtgtggcaaccagatcggtgccaagaactcccccactggaaaggattctgaaa

SEQ ID NO: 113735 - DNA, 82 bp, Homo sapiens
taaaaactaaaggcctgggcctgagaactgaatcagctggaccagctattccttctgttgtggcgtatccgaaaaggagtca

SEQ ID NO: 113736 - DNA, 83 bp, Homo sapiens
cctggacaggacctgagcaagtacctgtagacaccttcagctgggacctgcccatcaagatcgtctcctctgcctccaccgac

SEQ ID NO: 113737 - DNA, 75 bp, Homo sapiens
ccgaagccttcctttatcgctttcaggccatttcataattctgaatcatgtctgataacggagaactggaagata

SEQ ID NO: 113738 - DNA, 89 bp, Homo sapiens
agtattgaagaaatatggtattccctttgacaaggctttagaaaagaactcaggaatttggaagcaggctataaatctcatgaattcca

SEQ ID NO: 113739 - DNA, 100 bp, Homo sapiens
gatcccaggcagccggtggcagatgacacctgtttggagaagctcctggactggtttaaaacggtcactgaaggagagaggagattcagacacttaccag

SEQ ID NO: 113740 - DNA, 96 bp, Homo sapiens
gtcgtaggaggctgtcctgtctgcagctgtctctctggatcaatgagaagatgctcacagcccaggacatgtcttacgatgaagccagaaatctgc

SEQ ID NO: 113741 - DNA, 90 bp, Homo sapiens
cataataatcaggagtgaagtcccagggatattctgtgctgaaacctctgtagaggagcaggatgcaaccgacaggctgtggccggacag

SEQ ID NO: 113742 - DNA, 90 bp, Homo sapiens
gggatttctggattctctacgggatctcatagcagattcaaatccaatggtctctaattaacagaagatggcaaagcccagccacagcag

SEQ ID NO: 113743 - DNA, 88 bp, Homo sapiens
gccagagtacacgctcctcacagagcgaggcctcccgcgccgcagggagtttgtgatgcagatggagtctcactctgtagcccaggct

SEQ ID NO: 113744 - DNA, 100 bp, Homo sapiens
acagtctgcggaacggagcagtatttcaatgtggagggttctccaaaaaatgtggaatcctttgcatctatgctgagacattctcctcttacacagatgg

SEQ ID NO: 113745 - DNA, 74 bp, Homo sapiens
ggattccaagtaactcttatttgagcccctgtagccattggagttgcagccatgtccacagctgagatgctcac

SEQ ID NO: 113746 - DNA, 100 bp, Homo sapiens
gaaaattcttttgggagccaaacccacgacaagttggatggcttgaggactggtactaaaaggaaacgtgactgggaggccattgccagcagaatggagg

SEQ ID NO: 113747 - DNA, 101 bp, Homo sapiens
ggaagcaggactgcgccgcgtcttcctcaagttgcagagtgggcaggatcttaagacccgataggtgcagaacccatctggacacggagaccaggaatgga

SEQ ID NO: 113748 - DNA, 80 bp, Homo sapiens
gattatgggcccttcaggatggatttgccaatcttgtgagacggtttaagcggaagcatcttactgccattgactgccag

SEQ ID NO: 113749 - DNA, 112 bp, Homo sapiens
tgtacagccaatgatgagcagctgctgggctgaagggactggggccattttataccagatgactttgggaaattgctgctggctgaggccctcctggagcagtgtttgaagg

SEQ ID NO: 113750 - DNA, 73 bp, Homo sapiens
tactaaaacacctacagaatctttttgtaccaagtgagatggaagattttcgaggtatagcagaagaatcatt

SEQ ID NO: 113751 - DNA, 75 bp, Homo sapiens
ccgcgacctgcgcaaagccagcgtgaccatctgcctccggagccagcgtggtggccatagacaacaagatcgaac

SEQ ID NO: 113752 - DNA, 100 bp, Homo sapiens
aatgccaccatgtctctgaagcatctcaccaagaagctgctaaaccgggatatccagctttcaggatgccaacccgcccctgaaggttattccccaacac

SEQ ID NO: 113753 - DNA, 83 bp, Homo sapiens
caccatgccgctcctaagcctgcacagccgcggcggcagcagcagtgagagctccgctctgcaccgaaggggatgggtccgac

SEQ ID NO: 113754 - DNA, 98 bp, Homo sapiens
cggggtcagcgaactggagaggcgccatgggctggagttggcaaaagcagcttttgatgatgcaattgcagaactggatacgctgagtgaagaaagct

SEQ ID NO: 113755 - DNA, 88 bp, Homo sapiens
caaacgccgcaccaggtcttgtagcagcgcctcctcgaatacagttatggccacccaggtaatggggcagtcttctggaggaggaggg

SEQ ID NO: 113756 - DNA, 100 bp, Homo sapiens
cagcacaccacgcacagcgtcctggacagcttcctccagggctacaactgctcaggttgagaatgagctggaggacctgatagatgagttgcttgagagg

SEQ ID NO: 113757 - DNA, 98 bp, Homo sapiens
ggaagctaaggcctgggttgggtaactgcctgacgttttactgagagtagttatcttgatggaattagaagttttgaagtcagctgaagcagttggag

SEQ ID NO: 113758 - DNA, 110 bp, Homo sapiens
tcagcgtgatggaaggggagctggaggccagagaccttgtcatcgaggccctgcgggaggaagatgaaggctcgtgctcccccacctcctggaaaggctgccactctgca

SEQ ID NO: 113759 - DNA, 100 bp, Homo sapiens
cttcaccatctaccactggtggcaggctgtggccatcttcaccgtgtacctgggctcgagcctgcacatgaagaggcaccttccactagcaacagtctcc

SEQ ID NO: 113760 - DNA, 100 bp, Homo sapiens
ggagttaggcaggttaggggactcggagactgcgatggtgccaggaaagggtggagcggggacaaaagtggctctcaatccagcacatgcacattgaagc

SEQ ID NO: 113761 - DNA, 82 bp, Homo sapiens
cgggacaccgcacagccgggaaatgtgtgtcccggcatggatatccggaacaacctcactaggttgcatgagctggagaatt

SEQ ID NO: 113762 - DNA, 74 bp, Homo sapiens
tgggctaaagaatgttggcaatacttgttggtttagtgctgttattcagcttgaaggatgccaatgatgtacca

SEQ ID NO: 113763 - DNA, 100 bp, Homo sapiens
ctgccctcacctgtctgctccgaggactgccactgcccggggatgggggtggaggacttgaagtctcagctggtggcccaggatgactcccagaggctgg

SEQ ID NO: 113764 - DNA, 82 bp, Homo sapiens
aagagagctctgcatcaatgcgccggccataggtccggcctctttggcctacccccgttggctccgctgccccaggtcgatg

SEQ ID NO: 113765 - DNA, 75 bp, Homo sapiens
ttaaatgatgtattttgtgatcgcagcgatgaaagggtcggcactcttcaccctcccgagccctgcccgtctcgg

SEQ ID NO: 113766 - DNA, 102 bp, Homo sapiens
aaatacagcttcaaggggccgcacctggtgcagagcgacgggaccgtgcccttctgggcccacgcggggagaggacttaaatgcattggacagtggacaaag

SEQ ID NO: 113767 - DNA, 96 bp, Homo sapiens
tcgcctcacagcgaaacgccgcgcactcggagccggcacggctcggcggtgctggagaatctggtaaaagcaccattgtgaagcagatgaggatcc

SEQ ID NO: 113768 - DNA, 74 bp, Homo sapiens
atacagaaggctggaggaaacgtcaggactgtaactcttgaccaggcaacagataatgcaaaaataattggaaa

SEQ ID NO: 113769 - DNA, 51 bp, Homo sapiens
acctcttcctttatcagccacagcatgttggagacttgggcaatgtgactg

SEQ ID NO: 113770 - DNA, 98 bp, Homo sapiens
cccggccaaagtcactgctgttaacaaggatgccgattacacctcaacaagaaggcaactgacaaacagccttatagcaagctcccaggtgtctctct

SEQ ID NO: 113771 - DNA, 97 bp, Homo sapiens
attagcttgggttactgtgaattttctgacagaaatgaccgctccttcatctgtcctgcagaaggttgtgggaaaagcttctatgtgctgcagaggc

SEQ ID NO: 113772 - DNA, 123 bp, Homo sapiens
aaaggaagcaagcagttcagaagagccaaggaataaacatgcaatgaacccaaaaggattactgacagccctgtcctaggagcacaacgtccgagaaatgctcagcttgactgctccaaattg

SEQ ID NO: 113773 - DNA, 90 bp, Homo sapiens
ctttgttattggagaaacatgcagattatatcgcatcctatggctcaaagaaagatgattatttggatccttatgactatgaaatgattg

SEQ ID NO: 113774 - DNA, 98 bp, Homo sapiens
gtctgaaggggttgtcctcacttctgtgcaacttcactaagtccatggaagaaggttatcacaaactgctgactaagagtgtggccgagactccagtg

SEQ ID NO: 113775 - DNA, 98 bp, Homo sapiens
ccggctcccattctggttaaagactccagttgtacagaatgcagcatctattgttcagccatctcctgcccatgtgggacagcagggcctatctaagc

SEQ ID NO: 113776 - DNA, 117 bp, Homo sapiens
tgcaaatctgcaaggggtaaatgagggtgttgatttctccaaggatctgctgaaagtacagaggtgcagttccatggtacaccataaatcttgacttaccaccctacaaaagatggc

SEQ ID NO: 113777 - DNA, 99 bp, Homo sapiens
gaggaaatggccttttgatagatcagaaggcgtaaagacagacatgaagcaagtgggtttgcaaggagaccagatccagattctgatgaagatgaagat

SEQ ID NO: 113778 - DNA, 99 bp, Homo sapiens
gctagacctgcagagtgaagaaagctggtaatagatgtctgacaaactaaagaaagacttgtgttacaacaagttgaaatcatcgcagaaggataaagt

SEQ ID NO: 113779 - DNA, 100 bp, Homo sapiens
cgcagttggaagcccatggggcaggaccttctaccgctttgaggctgtgtgggatagctctctgcataactcccttcttctgaaccgagtgacaccctat

SEQ ID NO: 113780 - DNA, 100 bp, Homo sapiens
gttgccggggcaggggcggaggcggaggcagaggtggaggcgctttgaaaggatgacgtcatgatgccccagcgggtgaggctgcaacacgaggctgccg

SEQ ID NO: 113781 - DNA, 100 bp, Homo sapiens
gaaaagacagtgttctgctttcatggagttcacagaagagtcgaggagaccaagatcactccatggatgaaatgacagctgtggtgaaaattgaaaaagg

SEQ ID NO: 113782 - DNA, 100 bp, Homo sapiens
gacgatattgttttcagatcacctctttcgatggaaaaaaatgtctttggtggacttgggaaagaggttgctagaagcagcaagaaaaggccaagatgat

SEQ ID NO: 113783 - DNA, 82 bp, Homo sapiens
actgatgggaagtgagacttgttaaacttgaaagtccaacatgtttaccgtggctgatgtgttgagtcaagatgaactgcgc

SEQ ID NO: 113784 - DNA, 100 bp, Homo sapiens
atgtagtgactcgctactacagagcacccgaggtcatccttggcatgggctacaaggaaaacgcaatcccacagagtattgatgaggaaactgaagtttg

SEQ ID NO: 113785 - DNA, 135 bp, Homo sapiens
ctgagagtgaccggcgaggtgcacattggaggcgtgatgcttaagctggtggagaaactcgtgtatgtggtagaagaccaaagaagagatgagctaggaccatccacctgcctcacagcctgctggacggctctc

SEQ ID NO: 113786 - DNA, 100 bp, Homo sapiens
atccccatggctgatgcagcaggcatcatccgctatgcaattgggaaaaatggctacaaacttcctagcacatgagaagatctggttcgacaagttcaaa

SEQ ID NO: 113787 - DNA, 88 bp, Homo sapiens
cattgatacctttcctgagtgtagtacggaaggtgactgctggctgctggcagccattgcctccctcaccttgaatgaagaaatcctg

SEQ ID NO: 113788 - DNA, 88 bp, Homo sapiens
cagcctcatccagcaggcggtgacccgctaccggaaggccatcgccaaggtactccaaagattcaggtttactcacgtcatccagcag

SEQ ID NO: 113789 - DNA, 96 bp, Homo sapiens
attttattcaggttcctaggaatctcgttgctccccagttaaagatctcagatgaccggctgactgtggttggagagaagggctactctatggtga

SEQ ID NO: 113790 - DNA, 90 bp, Homo sapiens
gaaaacttggaactaagctggaggacaccgagtactcttatgcagtccccatggcgcagttgtgtagcagttgagtaatgctggttagct

SEQ ID NO: 113791 - DNA, 82 bp, Homo sapiens
gtcttccgctgcatccccatcttcggcatgtccttcgcctgccagtcatcagtcgcatcgaatacattcattcaaagaactt

SEQ ID NO: 113792 - DNA, 100 bp, Homo sapiens
gggaagggcgagactggagcagagccgctgggcgccggagccgaggcgagcgccgcgcgcaccactgaacccagcccttgctgacatctacacagagcac

SEQ ID NO: 113793 - DNA, 83 bp, Homo sapiens
cgcactctggagggattctggcatcagggaggctttcagccggagaagcgagtttcagctggcagacgcgtgccatgcctacc

SEQ ID NO: 113794 - DNA, 100 bp, Homo sapiens
gggtattacagatgtagatgataaaatcatcaaaagagccaatgagcttttctgggagaagaggctacaaggacttagtgcatcagatgtaacagaacaa

SEQ ID NO: 113795 - DNA, 73 bp, Homo sapiens
tcctgatggtgaacatgccaggagagcaatgcaaaaggacagagcgggatgccaccagcttgtccaaagggaa

SEQ ID NO: 113796 - DNA, 100 bp, Homo sapiens
ttcatgtaaacagcatgacgtgaggccgtggatgcaggcattaagtctgtgatcaaaacagggcgactgctaatcagtcacgaggctcccttgacaggcg

SEQ ID NO: 113797 - DNA, 58 bp, Homo sapiens
gcaacttcttatggacagcctcccactgatgcacccactgggcctatgtaataacaat

SEQ ID NO: 113798 - DNA, 97 bp, Homo sapiens
tgcgccggctgtcactgctgtgccgggacctctgggcgctgtggctgctgctgaaggccggcgcagagatcctgaaggagctagacgagtgctacga

SEQ ID NO: 113799 - DNA, 49 bp, Homo sapiens
acctagtggaagtggttctttcagatttagatgtagatgtagatcaacc

SEQ ID NO: 113800 - DNA, 100 bp, Homo sapiens
cagattctgttgcgaaggcagccatctttagttcgtctttcctagagagaatatgacagatacctagcatctagcaaaataatggcagctgcttaccttg

SEQ ID NO: 113801 - DNA, 90 bp, Homo sapiens
cgccgatcccgccggaagcgccaggacaatggggacccgggacgacgagtacgactacctattcaaaggcaccccagcctgcggtccatg

SEQ ID NO: 113802 - DNA, 95 bp, Homo sapiens
agaagactcccccacatctggacccaacatgagtgaagtttcctgcaagaaacgggacgactatttggaatggccagagtattttatggctgtgg

SEQ ID NO: 113803 - DNA, 82 bp, Homo sapiens
tagcttggtgaagtcagttactgaatcagactctgtcagtcaaccagcagtggactacagctcactaccacacaggccctgg

SEQ ID NO: 113804 - DNA, 90 bp, Homo sapiens
gaggaattttacaaggtgactgtgcaggtgggcttggtgcttgcatttcctgcgttgcagtgtcaggatttttcagggatcagccttggc

SEQ ID NO: 113805 - DNA, 90 bp, Homo sapiens
ggagaagaaggccttgactacggaggggttgccaggaatagccaggccagaagaaggaaggcctgtggtgagtgggacaggaaatgacat

SEQ ID NO: 113806 - DNA, 87 bp, Homo sapiens
aagtgcagctgcctcagttcttagcgcaggtgcagtgtggtgactttcctcatctgttagtgtacggaccatcaggtgctggaaaaa

SEQ ID NO: 113807 - DNA, 89 bp, Homo sapiens
aaccagaacaccccgagatgagaggagaagagcccagcacaacgaagacgcaaacatgcagatctttgtgaagaccctcactggcaaaa

SEQ ID NO: 113808 - DNA, 83 bp, Homo sapiens
aagcccctggtgcctaatgagaagggttgatgataattagaagcatgctttccactgaacttcccgacaacatttgttatgca

SEQ ID NO: 113809 - DNA, 100 bp, Homo sapiens
aatggacctgttagaaggagcacagttattgaccagattccttttctggcagtagcaagagcacttgctttaccaacagggacgcttatgtcaactgggc

SEQ ID NO: 113810 - DNA, 100 bp, Homo sapiens
acgcatgggaatggacttcagactggtggactgttcatcattctgttgaagaaacgcttaacccaggcctgcccttctttgtccttgcactgacagccag

SEQ ID NO: 113811 - DNA, 100 bp, Homo sapiens
acccggggagctgactccattgcatgtgggaccttcagccgtgaactgagctggccacggtagtacggcggttctcccagaccggcatccaggacttcct

SEQ ID NO: 113812 - DNA, 88 bp, Homo sapiens
tgatgtcaatcttgagggctagggttgtggtctcctgaacagaagtctgtctccaaacacaaatcaagcagcaagatcatctgctgca

SEQ ID NO: 113813 - DNA, 100 bp, Homo sapiens
ggctgcctataatcaagtaaaaacaatagctcaaggaaacctttccaacacagatgtccaagctgccaagtgcattggatcgttgtgtgatggggataac

SEQ ID NO: 113814 - DNA, 98 bp, Homo sapiens
acgacaggctgtggatgtgtcccccctgcgccgtgtgaaccaggcagagctcatcgtgggtgaccagagcggggctatccacatctgggacttgaaaa

SEQ ID NO: 113815 - DNA, 100 bp, Homo sapiens
agaggaaactgttgtgcctcttcatattggcgatcctgttgtgccctgggaggagcggggacactgaggacctctctccaaattggcctctcaactcaca

SEQ ID NO: 113816 - DNA, 51 bp, Homo sapiens
atcctacagctcccaggagccccagctaatgtcaaaccccgaaattccaca

SEQ ID NO: 113817 - DNA, 100 bp, Homo sapiens
gaaccgcctcaccgttctgcccccagaactaggtgacacttggacagaaacactggcctatgtgctcttctggggagttgcaagcattggaacatttttt

SEQ ID NO: 113818 - DNA, 100 bp, Homo sapiens
catgaatgcccctttggccgcagtgccattgagctcaccaaaatgctctgtgaaatcctgcaggttggggaactactaccatctgccagcatgactcggc

SEQ ID NO: 113819 - DNA, 90 bp, Homo sapiens
tcggactacgcgggatttcgcgcgtgtgtgtgtcagatatttctccctcgagtggctgggaaacttggcaagagaccagaggacccaaat

SEQ ID NO: 113820 - DNA, 75 bp, Homo sapiens
gtcgacatgagtgatgtggaggaaaacaacttcgagggcagattggagtcattcgttgcccagtttgcagccaag

SEQ ID NO: 113821 - DNA, 96 bp, Homo sapiens
gctcaagtcagagggcttttactcctacctgtgtaccgagccaggtgtcatggagaaactccagctgggcccagagattctgcagcgggaaaatcc

SEQ ID NO: 113822 - DNA, 101 bp, Homo sapiens
gcaatatggcggaggcggaaggggaaagcctggagtcctggctcaacaatgcagatcttcgtgaagactctgactggtaagaccatcaccctcgaggttga

SEQ ID NO: 113823 - DNA, 50 bp, Homo sapiens
caccgttctgcccccagaactagtttgtgccattcagggattatattgac

SEQ ID NO: 113824 - DNA, 100 bp, Homo sapiens
tcggacttcaaaactgttccagggccagtatcggagtttgggacacagcaggtcaggagagattcaacagcattacctcagcttattacagaagtgccaa

SEQ ID NO: 113825 - DNA, 100 bp, Homo sapiens
cacaaagagggtcatctcttctattgtacctgcaggctcagcagggagctgctggatgagaaagggcctgaagtcttgcaggactcactggatagatgtt

SEQ ID NO: 113826 - DNA, 101 bp, Homo sapiens
ccctcctggctgggcctgcccaacaacgccgagagagtcctccttaccacacagggtgtgcttcctcctgggatggacttgagtcatttacagggaatatc

SEQ ID NO: 113827 - DNA, 97 bp, Homo sapiens
tgtctcttcgtcaccttcgacctgctcttcatctccctgctctggatcatcgaactgaatggtcgagctgtgcagttttagcgggtacaagatctac

SEQ ID NO: 113828 - DNA, 60 bp, Homo sapiens
aaaagaatatagagatgacccttttcatcagaatcaagctatagaagtggtctggagtca

SEQ ID NO: 113829 - DNA, 90 bp, Homo sapiens
agagtggaaaaagtaccatcatttgaaacagcttgccctgcagggacattcaaggccagccaggaagctgaaggctgctcccactgcccc

SEQ ID NO: 113830 - DNA, 100 bp, Homo sapiens
tctagcctgatgaacacgcaggcgccgccctacagcatggcgcccgccatggtgaacagctcggcaggcaagagggcacattgggagattcagcttgcaa

SEQ ID NO: 113831 - DNA, 83 bp, Homo sapiens
ggagtctccgcgtcccgctcgctgggagagagcggagctggagtttgttcagatcatcatcatcgtggtggtgatgatggtga

SEQ ID NO: 113832 - DNA, 74 bp, Homo sapiens
ggatggcaacctgctccagcgatcagagcgttaagacagcccacctgaggatattgaccataaggactcatatc

SEQ ID NO: 113833 - DNA, 98 bp, Homo sapiens
caaaagaagatgacagcccgcagagagttaacttctgtttacatggaactcagacatctgcaaatcatgtgtgggactacaatactggcagagtggga

SEQ ID NO: 113834 - DNA, 75 bp, Homo sapiens
cgcatctacatccaggcccacatcgacagggacgtcctcattgtcctcggttacgactatggctatgtctgcgtg

SEQ ID NO: 113835 - DNA, 75 bp, Homo sapiens
aacagccccaatcaccgtccttacacggcctctgatttcatagaagatgatagtgtcgaaccaagtggaacaaag

SEQ ID NO: 113836 - DNA, 98 bp, Homo sapiens
gtcagatcttcattcagtgttggcccagaaactacaggctgaaaagcatgacgtaccaaacaggcacgagataaggctccactttgaggctctgatga

SEQ ID NO: 113837 - DNA, 82 bp, Homo sapiens
gcagacgccgccaccgccatgggctcctgagggcagctggtggaatttttgaagaaaatggaatctcgaggccccctttcgt

SEQ ID NO: 113838 - DNA, 82 bp, Homo sapiens
cttcttggcagtgagcacttgtctatcaggcagtacggcccaaaacgccacccgttgtaatcaaatctcagcttaaaactca

SEQ ID NO: 113839 - DNA, 100 bp, Homo sapiens
cctgctggctatcctgcgcctttccactgctctggaatgttacgttcataacttactaaggattagtgtatattttccaaccttgaggcatgaaattctg

SEQ ID NO: 113840 - DNA, 100 bp, Homo sapiens
caccccgatggtagccgaggagctggtgtctctacatgccattttgcctgggcttttcattctgaggctgaagaagaactgattaatatgattccagcaa

SEQ ID NO: 113841 - DNA, 96 bp, Homo sapiens
tgctgtagtcatctacaataataaatccaaagaggagccagttaccatgactcatccagctctgatccagtatatacggcctgtgttcgtgtcccg

SEQ ID NO: 113842 - DNA, 100 bp, Homo sapiens
gcctccgagacatattggatggcttctttccctcagagctccagcgactgtaccccaatggggtcccctttaaggccacccagaggagaaggccaccccg

SEQ ID NO: 113843 - DNA, 100 bp, Homo sapiens
cttgatgacttctacataggaaagtattttggaggagtgtacctggagtagaacagaaaaattattatgtctgtgttcccttgggactcattggaaattg

SEQ ID NO: 113844 - DNA, 148 bp, Homo sapiens
tgggagtcgaagcgagggtctgaagttcacgactactagaaggggaggggagtggaaaggctctcagtgaaaaagcgagtcacctgttcccctacgtgaagaagagaatacaagtaattagccaatcgagcacagaactgaatccaat

SEQ ID NO: 113845 - DNA, 73 bp, Homo sapiens
ccctgcctccctgcgtggtggactgtggcaccggaatcaaatggctatagcatgtggatctcgagctcattta

SEQ ID NO: 113846 - DNA, 100 bp, Homo sapiens
gctgaggaggccggctgcagccccaagacagagcgctactcctggcagtgcgtcaatcagagcgtcctgtgcggtcagccatgtcatctgagcctccccc

SEQ ID NO: 113847 - DNA, 100 bp, Homo sapiens
gtcggacccagcagacatgaacgctctcgctctgggtccctcagaatatgactctctgcctgaaaatagcgagacagattgtctccagctttaagaccac

SEQ ID NO: 113848 - DNA, 98 bp, Homo sapiens
ttcaatccagttccaaggactccacggggtgctagactggatcgagaaccacggagaagcatttctgagcaaacatacaggtgtggggaaatctcttc

SEQ ID NO: 113849 - DNA, 80 bp, Homo sapiens
gatagacatgggggcctcaaacgtggagatcaactcctctctgttaatggagtggcgtttagatgccaaccatattacct

SEQ ID NO: 113850 - DNA, 100 bp, Homo sapiens
cgagtagccagtgaagataatgaatgtcgaatgtgactgactagcagcttcattttgaagctgaactccgagcagctgtgtttttagcactagaggagca

SEQ ID NO: 113851 - DNA, 75 bp, Homo sapiens
aggaccagttgaatcatctgttgaaatagaatgacattcgttgctgctcctagcttacctcataaggaatggatc

SEQ ID NO: 113852 - DNA, 100 bp, Homo sapiens
ctggggatcgctacggaccttaaaatacccgcaacagccccttcgtcccaaatctattaatgagatgaagcggttggaagaaatgtcaaatatgtttcag

SEQ ID NO: 113853 - DNA, 75 bp, Homo sapiens
cgatgccagctacacggccagtgccatgacagttcgtgtttggttaaagagagacagtggacagtattggccaag

SEQ ID NO: 113854 - DNA, 75 bp, Homo sapiens
actcggcaggcacacgttactcagcccctgcgaacctgtatgtgcgaggtttaccaagattcaaaacacgaagct

SEQ ID NO: 113855 - DNA, 82 bp, Homo sapiens
tggcttggagcacttcctattccactggattgggaaagaccatggcaggaaccattggcactggcaagtggggctctgccag

SEQ ID NO: 113856 - DNA, 83 bp, Homo sapiens
ctcccatcattgatgtggtgcgatcgggtggagccagccatcctgagacgtccgtacagcccgtactggtggagtgtcaggag

SEQ ID NO: 113857 - DNA, 82 bp, Homo sapiens
agaagggcttcgggtctgggatataagcacagtctcttcaggaatccatcaacagcatcaagtccagactaagcaaaagtgg

SEQ ID NO: 113858 - DNA, 95 bp, Homo sapiens
aaggtccaaactcctatctccttacagcccgcagacacaaggttaaacccatccagagtaatggctgcggccttacccaggaccctgggggagtt

SEQ ID NO: 113859 - DNA, 50 bp, Homo sapiens
ggggaggccaacgtgaagaagtgattccttcaacacccagaatgagccag

SEQ ID NO: 113860 - DNA, 100 bp, Homo sapiens
tggagaacgaccggctcctgctcaagatctcagagaaggaggaggtgaccacgcgcgaggacctgaaggagaagaaggagaaggtggaggagaaggcaag

SEQ ID NO: 113861 - DNA, 101 bp, Homo sapiens
gaaggagtgtggactttttgaatttcaagaacagtaaagttggaacacagcagagggtgtgtaataaaatacaggtttgccatgcagaacttgaattgggg

SEQ ID NO: 113862 - DNA, 98 bp, Homo sapiens
gggagcagcgcagcctccggaggaggaggcggaggccgagggtatacctcagttaccatgtgccaaagcattatacaactatgaaggaaaagagcctg

SEQ ID NO: 113863 - DNA, 100 bp, Homo sapiens
gggctccacaagcgcaagttctgtgctgtctgccgcaaggtcctggaggcaccggcgctccactgcgaagtgtgtgaccactgtgtggtcctgctcctgg

SEQ ID NO: 113864 - DNA, 99 bp, Homo sapiens
ggaagtagagagataacaaaagctgctcagagtctcaatgaacttgactgggctggcttagatgaagatgaagatgcacatgtctgggaggataattgg

SEQ ID NO: 113865 - DNA, 74 bp, Homo sapiens
ccatcgcggagaggtaccttgcacagtgacctctgcatctgtgaattcacataaaagggcatcagaaaaataca

SEQ ID NO: 113866 - DNA, 50 bp, Homo sapiens
gcctcacaaacctccacattggatgattatttccgcacttggagtccagg

SEQ ID NO: 113867 - DNA, 95 bp, Homo sapiens
gatttcagttttagcaagtaatgatgctggatctagcaaatcatcttcagcaatgaccctgaaaactggtgcagtctccaaagagattacgaatg

SEQ ID NO: 113868 - DNA, 82 bp, Homo sapiens
atgtctgagaactttgagagaccgaaaaagaaggacgtatgctctacaagagtgaagtcaccctgctgagaaatgaagtggc

SEQ ID NO: 113869 - DNA, 90 bp, Homo sapiens
agaagcccagcttttccatcctggagatctacaggatttatcaaatcgagtcactgtcaagtatcagcagatgttgcacacaaacttggt

SEQ ID NO: 113870 - DNA, 83 bp, Homo sapiens
gatttaacctgtcatcaagacctgggattttggtgtattctaccttgtaaatactgttatttgtatatactgtaaatgatgac

SEQ ID NO: 113871 - DNA, 87 bp, Homo sapiens
ctagaagctccttccattcagatccagttttcggctttgtgagaaaccttaccatcaaacacgatggccagcaacgttaccaacaag

SEQ ID NO: 113872 - DNA, 100 bp, Homo sapiens
ccgtcgcaaccctcatgaagtacaaccagcatatgctacaaggatgttcacggaagaccagggtgtagatgacaggctgctctatgacattgtattcaag

SEQ ID NO: 113873 - DNA, 82 bp, Homo sapiens
gcgcggagagaagccgcaaccagagccgccgccacggaacccaagacagaccaggatgaggagcattgccggaaagtcaacg

SEQ ID NO: 113874 - DNA, 95 bp, Homo sapiens
cgggctggttgttccgttgcgagctgcagctgcgatctctgtggtaggcccagctgcgggcgcttacctgccccccctgcagcaggtgttccagg

SEQ ID NO: 113875 - DNA, 73 bp, Homo sapiens
ggaggcgttcagctgcttcaagatgaagcctcccacatgaccaaggacatgttcccggggccctatcctagga

SEQ ID NO: 113876 - DNA, 98 bp, Homo sapiens
cgactcctaagtccttcggccgccaccatgtccgcctcggctgtcttcattctggacgttaagggcaaggaatagccaggtctggctgggtcggcaca

SEQ ID NO: 113877 - DNA, 74 bp, Homo sapiens
gaagaaaggattcgttacagccagagattgactgtgagctgcttgtccccatcctgcggccgtcctggggacac

SEQ ID NO: 113878 - DNA, 75 bp, Homo sapiens
tgagccacggccacggccgcataggcaagcacatctgggcttcttgtggaggggaaggtagagtgaaagaaagag

SEQ ID NO: 113879 - DNA, 75 bp, Homo sapiens
gtgaccaatcggatagaggaaggagagagacctgaccgatatggctcgtggacagcagaaaattcagtctcagca

SEQ ID NO: 113880 - DNA, 75 bp, Homo sapiens
ctttcaagagggaaggagacgattggagtcaactcaatgtgctcaaaatccactccttataccgccgcacaggtg

SEQ ID NO: 113881 - DNA, 74 bp, Homo sapiens
gttggggtgagaccctcacttcatccggtaagccaagatgggtgcatacaagtacatccaggagctatggagaa

SEQ ID NO: 113882 - DNA, 75 bp, Homo sapiens
ggtggccaccgcggcggagcccgaggttttgtagtgcatccctgagcatgagcacagaatgaagcggcgtttgga

SEQ ID NO: 113883 - DNA, 100 bp, Homo sapiens
ctttctgccatttttaacaaaccctaatacaggagatatgtatactccaggtgctgaagagaaaattttggaagagtttaaagaaacacacaatgcagag

SEQ ID NO: 113884 - DNA, 100 bp, Homo sapiens
gtcctgccgcctcccgggagtgccgtgcgccgcagcccgggcccaggccccggcagcgcctgggacaaggtgtcagtaattaacactgtggatacctccc

SEQ ID NO: 113885 - DNA, 90 bp, Homo sapiens
cccctacatgcccttccccgtggccgtcatctgcctcttcctcaacactttcgtgccgggactggctgtctgtgatcctggaaacatacg

SEQ ID NO: 113886 - DNA, 74 bp, Homo sapiens
gaaagcaatgaagaggaggaagaggaagatgaagaagagtcagagtccgaggataacgaaggaggcccaacttc

SEQ ID NO: 113887 - DNA, 50 bp, Homo sapiens
ggcatggatatctctactcgctccaaagacctacaacggccagagcgaga

SEQ ID NO: 113888 - DNA, 75 bp, Homo sapiens
tcctcgctgggcatgatcgaggccacagcccaggtcacagtgaaaggccctcgggaccaaggatcacgtcatgac

SEQ ID NO: 113889 - DNA, 96 bp, Homo sapiens
cggaagtgtatagggaaacctgggggctccctggacaactccgagcaggtgtcgtgaaaactacccctaaaagccaaaatgggaaaggaaaagact

SEQ ID NO: 113890 - DNA, 74 bp, Homo sapiens
cagtgacggaatgcctccatacatgtttcatatacactggagaagtcgtacatcgaatgctaacagccacacag

SEQ ID NO: 113891 - DNA, 83 bp, Homo sapiens
cgagaacctgggccaaggcgacaagcatcacaggacatggccccctcagccacctagctggggcccatctaggagtggcatct

SEQ ID NO: 113892 - DNA, 48 bp, Homo sapiens
gcaactcatagacatgaatgcagagggtgatgagacaggagtgatgga

SEQ ID NO: 113893 - DNA, 110 bp, Homo sapiens
gtgaccgagaccgtgaccgagagcgtgaccgagagcgcgaatatcgtcatcgttagaagccttttcaggagccaaaaaaacaaatacaaacaaacaaaaaaatacccaga

SEQ ID NO: 113894 - DNA, 100 bp, Homo sapiens
ctcacacccatgcctatgatattcttctcctggttaatcaagaattctctatttctgctccgtcatccatgccactggaatctggaaacatcaaagctgg

SEQ ID NO: 113895 - DNA, 90 bp, Homo sapiens
ctgactgagagcgtctgcttgtggatggcattcccaatgacagtagtgatagtgaaatggaggacaaaactacagctaatttggcagcct

SEQ ID NO: 113896 - DNA, 96 bp, Homo sapiens
gcgaggggagaggcgcagaaacggcgtgcctcagtaacatcatcggtatcatcgtctacatttccagcaacacaggtgacccgagtgacaagcggg

SEQ ID NO: 113897 - DNA, 98 bp, Homo sapiens
ccagctgcagccctggccgcgcactcgcctcagctgagcctggaatgtgaaagatgttgcagaagtgttccagaagtggctgaagatagaaggaaaaa

SEQ ID NO: 113898 - DNA, 75 bp, Homo sapiens
tgcgtgagtggctgttgagaagagatcctgctcacactaaaatatgaaccacaaacacacagagaaacaacctgt

SEQ ID NO: 113899 - DNA, 100 bp, Homo sapiens
tggaataggttcgccgaagagagagtgcaccaattccagctggacatcactgtgaaaatgggacgggataaagtccgagaaatgtttatgaagaatgccc

SEQ ID NO: 113900 - DNA, 74 bp, Homo sapiens
ttgaagaatagagccataaagaaagcaaagcgcagaaatgttggatttgaagtatgtgatagtggaatgtgaag

SEQ ID NO: 113901 - DNA, 95 bp, Homo sapiens
ctccactagtgcaatctgccggagtgtcaccttctggaccaggtgtagtggtcatgcagctgaatgtccctaatggaccccagccccctcagaac

SEQ ID NO: 113902 - DNA, 117 bp, Homo sapiens
cgtcgcgcccgggaggaaggaacgaggcaaggagctaaagcagcgtgcgttcagccctgggtaagactttgaccccgacgcaggcttcagtgattgccgcggatcagaagcctgagc

SEQ ID NO: 113903 - DNA, 100 bp, Homo sapiens
tgagagcaagatgggtcaccagcagctgtactggagccacccgcgaaaattcggccagggttctcgctcttggtcagtcattggcaccatgaactggaat

SEQ ID NO: 113904 - DNA, 97 bp, Homo sapiens
tgagctctggactttggggacagctgtcagtggcctaggccgcaggcattctggagctgcaagagcaggtgtttacaacctcaccaaatctttagct

SEQ ID NO: 113905 - DNA, 75 bp, Homo sapiens
gctgttttagagctggcagcagcatctcagcccaagagaagacaaatttacatgtattggagaccagaccagaag

SEQ ID NO: 113906 - DNA, 75 bp, Homo sapiens
ggatctggtgtaccaggcgaagctggccgagcaggctgagcgatacgacgctcggcaagatgtcggtgaaggagg

SEQ ID NO: 113907 - DNA, 98 bp, Homo sapiens
ggacgtctgctcactggagatgacacgtgcgtggggtgttgggcctcctgaaccggcccaaccccttgctggcgttgccccccgcccgcccccacggc

SEQ ID NO: 113908 - DNA, 50 bp, Homo sapiens
gcggcgttggaggccaccgtttccagatcagtgtgcgtgtgaccaccatg

SEQ ID NO: 113909 - DNA, 87 bp, Homo sapiens
cgccgcggccgggcgggcagcaacgagccaaactcaggctgtaccttgagcagctcaagcaactggtgcccctgggccccgacagca

SEQ ID NO: 113910 - DNA, 75 bp, Homo sapiens
atgacctccagaggtgtggtcgcatctccaatcaggtatctgatggtataattgccccaggatatgaagaagaag

SEQ ID NO: 113911 - DNA, 100 bp, Homo sapiens
ctctttcgaaaaccacaaagatccttttttggcaagttgttacgggaatttagacttgtagcagctgaccgaagggagtgtgaggaagaggctgtctgtg

SEQ ID NO: 113912 - DNA, 90 bp, Homo sapiens
cgcgcggcgggagagccgggggagcgctctcggagggagcgcgctttctttggagtcggcgaaacccggccctagaaaacaatctcctgg

SEQ ID NO: 113913 - DNA, 82 bp, Homo sapiens
cttggactgagtcctgcaggacacagaaattgacattgaacgctgtgtgagagaatctatcaacctgttttgttggactcct

SEQ ID NO: 113914 - DNA, 90 bp, Homo sapiens
gtttcaaaagctagtgctttgcaggatatgatgcgaactgacattgccaaagattttcccaggggcgaggagtctctggagacgctggag

SEQ ID NO: 113915 - DNA, 97 bp, Homo sapiens
cattttatactaatttacatgaagtgccttatcctgatgcaagaattggtgaccaagaatatggcccaggtgaccaaagccctggacaaggccctga

SEQ ID NO: 113916 - DNA, 98 bp, Homo sapiens
gaggatccagtgttcaccatcctggccccggaagcctgtgcaggagacatggcggacgcagcatctccgtgctctgtggtaaacgacctgcggtggga

SEQ ID NO: 113917 - DNA, 74 bp, Homo sapiens
cgccaccctccgacgccgcctcaaagtctacgagatcaagatgattgtgctccagtccctccataagtaccagc

SEQ ID NO: 113918 - DNA, 50 bp, Homo sapiens
ctttgtcgtccatttgctgctcactgctattccaatcaagttctctgaaa

SEQ ID NO: 113919 - DNA, 100 bp, Homo sapiens
gcagaggaagtagtttaaatgatacctatcactcaagagactcttcatttagattggattctgaatatcagaaaaagcagagagatcttgctaagatgag

SEQ ID NO: 113920 - DNA, 75 bp, Homo sapiens
agagcgtcacggcgtacgccctcatggggaaaatctccccggtgactttcagggcaagtgtccagagaatggctg

SEQ ID NO: 113921 - DNA, 100 bp, Homo sapiens
agctcctgcccctgtccgggggatgactgattctcctccgccagagctgtccgtggcacagtgcacgcagcggcccgtggacatcgtcttcctgctggac

SEQ ID NO: 113922 - DNA, 100 bp, Homo sapiens
acaatagcaatagacagttagaaagaagtggaagatttggtggtaatccagcgggaacttcattgcaggccgtgtgtcaccctgaccacgtctatctctg

SEQ ID NO: 113923 - DNA, 88 bp, Homo sapiens
gcgaacggggcgagcctggaggattgtcactccaacctcttttcgctggtggtgctggctagagtgtatacgtttggacccaagctta

SEQ ID NO: 113924 - DNA, 95 bp, Homo sapiens
ggcgaggttcgggctggttgttccgttgcgagctgcagctgcgatctctgtggtaggcccagctctgcttatgataatgtcaacaaagttcgagt

SEQ ID NO: 113925 - DNA, 90 bp, Homo sapiens
cgggatggcggaggcgcctcctgtctcagaatggagatgtatgcatttcgattcttcatccgcctgtagatgacccacagagtggagaac

SEQ ID NO: 113926 - DNA, 51 bp, Homo sapiens
aaggcgctagaattgattttaaagggccgcctgggcagaatgtcacgatgg

SEQ ID NO: 113927 - DNA, 75 bp, Homo sapiens
agtctctgcagaagatagggcccatcctggacaacaggagctctccttgtgtacatcatcatggttccccaggag

SEQ ID NO: 113928 - DNA, 100 bp, Homo sapiens
ggctccctggctggccagcctctgcttggcatccccttgctggacagtggctgtgggcctcatcctgtaccaccagcaccagcacagctgctgtgagtcc

SEQ ID NO: 113929 - DNA, 98 bp, Homo sapiens
ccccctctgcctcccaggtacaggtttcgagatttgctgctaggggaccaaggatggcaaaacgacgacaggtgtgcaactgaggaacatggctcaag

SEQ ID NO: 113930 - DNA, 100 bp, Homo sapiens
agcagtagacttcattttttgtttagttttagttgaagttctaaagcagtaccttctccaggcaaattccgttcccctgcagcaccatctcctttggctc

SEQ ID NO: 113931 - DNA, 90 bp, Homo sapiens
ccggggtccgcaaggccggagaaggccgccgggcccgggcatggtggtctggggcaacgcggaagggcgtctctggccgagcctcttttt

SEQ ID NO: 113932 - DNA, 100 bp, Homo sapiens
aaaaagtcttcaagccattaaaatacacagggatacttttctacaacagaaagctcaatcacttaccaacatccacccaacccaccagtatcaccaggaa

SEQ ID NO: 113933 - DNA, 83 bp, Homo sapiens
ccaggatctcgggctcggaacgagactgcacgaccatatactccttgacgacagggactaccaccttcaccttcatgcccaca

SEQ ID NO: 113934 - DNA, 75 bp, Homo sapiens
aatgtgacacggacaaggatagttttggctgatgtaccaaagagaaccctgtacagtaagaaatatggtgtggac

SEQ ID NO: 113935 - DNA, 75 bp, Homo sapiens
gaccagcaagcgtggcggcaagatcatcgtgggcgacgccacagagaaagagtttgtgatcctacgagatgagaa

SEQ ID NO: 113936 - DNA, 101 bp, Homo sapiens
cggcgccttcctgctgctcttcctgctcgtgctcactgtcaccgagccgctgcggccaggtgattgtccaagtgctgaccctacagtgaaactgggagctg

SEQ ID NO: 113937 - DNA, 90 bp, Homo sapiens
tgcccttgtttgaggccttcacagcatgtggttttgtgcaggtgatattatacccaacttctaatagctccaaatcagctgaattacacc

SEQ ID NO: 113938 - DNA, 100 bp, Homo sapiens
cagcctgcggagcctgtggggcagtcacgccgatgatggagctgaagcccaacgcaggtagcgaccgtgcctgggtctggaacacccacgctgacttcgc

SEQ ID NO: 113939 - DNA, 97 bp, Homo sapiens
tttccctctgagggaattgggaggtcggcggccccaaaaggaagaaggagaaagggccaacccctgaagaagcaatacagaaactgaaggagacaga

SEQ ID NO: 113940 - DNA, 101 bp, Homo sapiens
agcaagtttaatcagacctgctcacacttcagaatagagaagatcaacttccagccagacccagccaggcacaggctgggtccagttctgacctgagcacg

SEQ ID NO: 113941 - DNA, 89 bp, Homo sapiens
ctataatagaaggagcaaaatgtataaagggagattctagtatacaggttggatggcaagcatgtggtgtttggcaaagtgaaagaagg

SEQ ID NO: 113942 - DNA, 75 bp, Homo sapiens
ctgggacctctgaagtgaacactgcagggccatttggaagaagaaatgccagaggtagaaattgacattgatgat

SEQ ID NO: 113943 - DNA, 100 bp, Homo sapiens
ctggtggtgctgctcctcgtcatcttcctgctcgtggccaacatcctgctggtcaacttgctcattgccatgttcagtagagatggggtttcgccgtgtt

SEQ ID NO: 113944 - DNA, 75 bp, Homo sapiens
agagtcaaccagaaagagattgggtacttaatgactataatgtaactgcaaactccaagctggtcattatcacgg

SEQ ID NO: 113945 - DNA, 100 bp, Homo sapiens
ggaaaaaggaccacatagtccatcgaagaagagtccttggaacaagcaactggctattgaaaagagaattcggtcaacagtggatgaaaaagaacaaaaa

SEQ ID NO: 113946 - DNA, 99 bp, Homo sapiens
tgagccgacccatcttgtacagcaactggctgtcaaaggtgaccttgaggaaccctgggagctcaggaaggaaggagcgcccagaagcagggacaggga

SEQ ID NO: 113947 - DNA, 120 bp, Homo sapiens
ggcagctacttaatcctactcagaagaacttgtacagagatgtgatgttggagaactatagcaatctggttttcttggggtgcaactggaaactgacttgaagattgagaaggaatggag

SEQ ID NO: 113948 - DNA, 82 bp, Homo sapiens
ctggaattttggcatcaaggacaaacccaccttcatcaaaggggacagtcattttgtttactcattcagccctgttgcaggt

SEQ ID NO: 113949 - DNA, 101 bp, Homo sapiens
cgtggtcagagcgagtctcggagaagatgtggtggcttccgtttgttggtggaggaggtggcaggcctcggcggagtgcctgtgaagaaaacggggtattg

SEQ ID NO: 113950 - DNA, 101 bp, Homo sapiens
atttgatgtggtgaatgagagcacaggagaagccttcaggctgcaccacgtggaggccaacaggttcctaagaagccagaatctacggatgatgaagaaaa

SEQ ID NO: 113951 - DNA, 75 bp, Homo sapiens
gaatgttcttaacccagaagtagctgaatgtgttactccattgctgaggagtgatttgggaatggatgatgaagg

SEQ ID NO: 113952 - DNA, 83 bp, Homo sapiens
agccaacagcagaagagaaagccagttatccacggactggaagatcaaaagagggggagtaggttgcatctttgttgaaatga

SEQ ID NO: 113953 - DNA, 83 bp, Homo sapiens
gatgaacggagaggaagaattctttgatgccgtcacagcctcctgcccgaaggccacctgaacctaacggctccctgcaacgc

SEQ ID NO: 113954 - DNA, 83 bp, Homo sapiens
cgaccccgtcccgaccctggccgccccgagcggagcctggagtttgtttcgacgccggaccgcgtaagagacgatgatgttgg

SEQ ID NO: 113955 - DNA, 100 bp, Homo sapiens
tttcagtgtgatttgactacgaacaatagttctaatacccgatttacaattacattgaactacaaggatcccctcactggagatgaagagaccttggctt

SEQ ID NO: 113956 - DNA, 90 bp, Homo sapiens
gccggcaagagggagttaaggacattccaggcagaggcaaggcaccatggctgaggaaacagctccagcagttcttgagcggcaccaggg

SEQ ID NO: 113957 - DNA, 75 bp, Homo sapiens
atggaggccagatagtaccatgatagctgtatcactcctttggtgaagattaaacagagcttaacaaaactgaag

SEQ ID NO: 113958 - DNA, 83 bp, Homo sapiens
tgaatgacttgaccatcatccagactacacaggaaccatctctttttgctgttgccaaattgttagaaactggtttagttaat

SEQ ID NO: 113959 - DNA, 90 bp, Homo sapiens
ggccgcagcccgggagagcattgcagccctggtggacgagcagaagcaactgcgcaagcagaaggatggcacaacagcattattgaaagc

SEQ ID NO: 113960 - DNA, 100 bp, Homo sapiens
tatcatccctccattcctggcctatggcgagaaaggctatgggaaatgtttcaacgtgcgcaagcgttgcggcggcgggcagaggactactacagatgca

SEQ ID NO: 113961 - DNA, 89 bp, Homo sapiens
gaaggctgcgggctcggagccggagacgccgagctggggccgggaaataatgcaaaaggtgtcccaaggctcctgaccagtgaacaaag

SEQ ID NO: 113962 - DNA, 80 bp, Homo sapiens
agaagcccggcgacggaggaacgcaggtctgctgccagatgttggggatcagccaggtgaggtaggttattcaggctctc

SEQ ID NO: 113963 - DNA, 100 bp, Homo sapiens
tgcctgttcagtactgtgggtgatatttgcctttagtgcactcttctccttcacagtaaagtggctggctctttattgagaaactaccaaaacatcgaga

SEQ ID NO: 113964 - DNA, 85 bp, Homo sapiens
cgtcagcctatctcttctgctggctgggctcaatgccgcgggaacacgtggccatcagtaatcatgagcaacccattcgcacacc

SEQ ID NO: 113965 - DNA, 101 bp, Homo sapiens
gggaggagtttcatgaagagcccaaaacctattacgaactcaaaagtcaaccgctgaagagcagggcaccatgccggtggaaaggatgcgcatgcgcccgt

SEQ ID NO: 113966 - DNA, 75 bp, Homo sapiens
cttacgtctgcggaagtgcagctgcctcagttcttagcgcaggttgctacaactatctgtataggatgaaagctc

SEQ ID NO: 113967 - DNA, 100 bp, Homo sapiens
cggacggcagcggccaagcaagaagaaagacgtggcagcaagcgggagtcggggatagtgtcatcggttcgaaatggaatctatttggaatttgcagaag

SEQ ID NO: 113968 - DNA, 90 bp, Homo sapiens
ctcggcagcatggcgtccgtgacgctgagcgaggcggagaaggtgtacatcgtgcatggcgtccaggacctataaaaggcatcaccaagc

SEQ ID NO: 113969 - DNA, 75 bp, Homo sapiens
gcaagaatgtgccctactcccagtggccgcgtgcagaggacgtcgaccttggcttggccttcgtgcctctgcaga

SEQ ID NO: 113970 - DNA, 73 bp, Homo sapiens
ttccctctcccaacatggcggcctcagatcactgtcgtcttcctgaaagatgagaagtaccattctttgccta

SEQ ID NO: 113971 - DNA, 75 bp, Homo sapiens
ggatgacatatttttggacctgaaacagaaattctggaacacctatatggattggattcagcatcaaaatacatc

SEQ ID NO: 113972 - DNA, 75 bp, Homo sapiens
ctctccttttccctctccctttccctaagaaccttctgataacttaagagagattctccaaaatgtggccagatt

SEQ ID NO: 113973 - DNA, 98 bp, Homo sapiens
cgagaagcctgaaaagtcgcagcgagctggagccgccggaggagtgtacctcacagccttctaggatctccagagtggacaggaatctcacttggagg

SEQ ID NO: 113974 - DNA, 99 bp, Homo sapiens
ctggaggagcggcgggcttcagacagggaagtaagcaatggcatagaaaaaaaaggaaagaaaaaatctgtaggtcgtccacctggcccatatacaaga

SEQ ID NO: 113975 - DNA, 100 bp, Homo sapiens
gccttagctgtgctcgcgctactctctctttctggcctggaggctatccagcggaactactggagaccacgtgccgcctggccaacacgctgaagaggca

SEQ ID NO: 113976 - DNA, 98 bp, Homo sapiens
gctgctccagccctctgcccctggtcgtcaacacttggccctttaagaatgcaaccgaagcaggtgctggagaatctggtaaaagcaccattgtgaag

SEQ ID NO: 113977 - DNA, 100 bp, Homo sapiens
aagcagctctaccgccgcctcaactgccgcctcgcctactcactctggagcctgccggtggtggtgtgcacattgagccccggtatagacagttccccca

SEQ ID NO: 113978 - DNA, 87 bp, Homo sapiens
aaaacagtacagagcattgcccttctggcccatctggctgagtccccagaagaccatgtctgtgttgagctgtatctgtgaagccag

SEQ ID NO: 113979 - DNA, 100 bp, Homo sapiens
ctgtgcgccaccattgcagccaaaggcaccagttagaagacaaatgaaagctaagcaactcagtgcacaatcttacggtgtgaccagttcaacagctcgg

SEQ ID NO: 113980 - DNA, 90 bp, Homo sapiens
ggcctttccctccagctctgtctatcctaccaagtttgtcgctgatggcatcttcaaagctgaactgaatgagtttcttactcgggagct

SEQ ID NO: 113981 - DNA, 82 bp, Homo sapiens
ttcgcgtctctctgctgcggcgcggggaccgctgtgctctcgagctggaagtcgagtgtgctactcaactcaggagatttgg

SEQ ID NO: 113982 - DNA, 75 bp, Homo sapiens
catcattcagcgcatggtgcttggggacatagcggatcgagacgccattgtagaacaggccgacggtcgcaaggt

SEQ ID NO: 113983 - DNA, 75 bp, Homo sapiens
ccacgtaatccaagagaggctaaaggaagaacaacagatggatcccttcagtctcttcaagaaaatgaggaggag

SEQ ID NO: 113984 - DNA, 88 bp, Homo sapiens
cgctgctgctgctgctgctgcgcctgggccaggatactgtcatgaagcagacacatgctgacacacctgttgatcattgtctatctgg

SEQ ID NO: 113985 - DNA, 80 bp, Homo sapiens
aggcttcgagtgacccgggtgccgaggagcgggaagagttgctgggggcgtctctggccgagcctctttttgtggaaaac

SEQ ID NO: 113986 - DNA, 50 bp, Homo sapiens
cactaataaaggagccagccaggaaagtggagaatgaggacatgaataaa

SEQ ID NO: 113987 - DNA, 82 bp, Homo sapiens
tctgggtgctatgggtgatcattccaagatgagagggtccaagcctggtaagaatgtccagcttcaggagaatgaaatcaga

SEQ ID NO: 113988 - DNA, 101 bp, Homo sapiens
ctgcgacgttcacagaggaacactgccggggcccaaccacaagacgactcaataggaggaaggagggcctgaggctatggcaggaggagcaggagaggaag

SEQ ID NO: 113989 - DNA, 75 bp, Homo sapiens
aggaccagtttgccatcccaaggccgaaggttaattatagaaaatgccaagtaggaaatttgccgatggtgaagt

SEQ ID NO: 113990 - DNA, 76 bp, Homo sapiens
aaaatggtgtgactgattctctgaagagtaactttgccctcctcctaaagaaatctatcaaatgtggaagaaattg

SEQ ID NO: 113991 - DNA, 109 bp, Homo sapiens
agaagggaaggcgcgagtgaggaaaggaggtactgtaggtgctggagaatctggtaaaagcaccattgtgaagcagatgaggatcctgcatgttaatgggtttaatgga

SEQ ID NO: 113992 - DNA, 90 bp, Homo sapiens
ccagtaccttgattcagagagaagacagatgagctcacagtgcctgcactttaccccagtagccctgaagtgtgggccccgtaccctctg

SEQ ID NO: 113993 - DNA, 75 bp, Homo sapiens
tgcatgtgctctgtcagcctaaggaaacggtatccatcatcccacgtggcaaaggactaggttatgctcagtatt

SEQ ID NO: 113994 - DNA, 117 bp, Homo sapiens
caacgccgtatccagcgactacgcggccgcggagacctacctgcggcgtcggcagctgctgctccgagctgccgcagcgggaaccgcaagagcttggtggtaggaacgccctccccg

SEQ ID NO: 113995 - DNA, 90 bp, Homo sapiens
caggttatcatggattcccagcgcgggacagccaggttgcacactgggccacagaggatccagcaaggatgaagaaatggagcagcacag

SEQ ID NO: 113996 - DNA, 96 bp, Homo sapiens
tccgccgcggcactgatccccacaggtttccactgtatccaaaaggaggggagaagttgcagtttgattatggtgtctatcttctgaacaaaaata

SEQ ID NO: 113997 - DNA, 73 bp, Homo sapiens
tccagcttcccttcctcaaataaggaaattgacacctggcgtggtacaggtttgcagattccgccagcagcac

SEQ ID NO: 113998 - DNA, 82 bp, Homo sapiens
cccacagccggagcccccgccgctccacagtccctggggccgagcacgataaggtacctgccgtgggcagatctgagctttc

SEQ ID NO: 113999 - DNA, 75 bp, Homo sapiens
aaggtggaaagtcctgaagaaatccagtggtgtctttctcgagaagcaggtggaaacatgagcattcagtttctt

SEQ ID NO: 114000 - DNA, 50 bp, Homo sapiens
gatgccctgtccgtcggcgctggtgtcaaaatgcagatcttcgtgaaaac

SEQ ID NO: 114001 - DNA, 100 bp, Homo sapiens
ctggaagccttggagctaagggagagagaggccatgccacaaagtcattcccctcttcccccagcaaggggggttcctgtcctagccgggccaagatgtc

SEQ ID NO: 114002 - DNA, 83 bp, Homo sapiens
ccatgagcgacgtggctattgtgaaggagggttggctgcacaaacgagacccaacatgagtgaagtttcctgcaagaaacggg

SEQ ID NO: 114003 - DNA, 90 bp, Homo sapiens
agaatcaaactgctcacagtatatggaaaaggttgcatcccagcgcattagctcagtggacctctcgtgttgtagcctggaacatctgcc

SEQ ID NO: 114004 - DNA, 51 bp, Homo sapiens
cagtgtggagactcatgctgtagagaacatccagtcatggataaaaatgag

SEQ ID NO: 114005 - DNA, 75 bp, Homo sapiens
aaaaaaagtttagagggagatttggaggatctgaaggatcagattgcccaggaggagattgtatttcgttactac

SEQ ID NO: 114006 - DNA, 101 bp, Homo sapiens
ctggagttgctggtgatccgcaattacggccccgaggtgtgggaagacatcaaattactgacagccctgtcctaggagcacaacgtccgagaaatgctcag

SEQ ID NO: 114007 - DNA, 99 bp, Homo sapiens
taaaatattacttaagagaatctcaagctgctaagatgagtaacgaaagaggctttgaaaatgtagaactgggagtcataggaaaaaagaagaaagtcc

SEQ ID NO: 114008 - DNA, 100 bp, Homo sapiens
agggcctccgagaggacactctgaggctgcaccagctggtggagacggtggaactaaagaatccatcaacagcatcaagtccagactaagcaaaagtggg

SEQ ID NO: 114009 - DNA, 100 bp, Homo sapiens
gcgaacgagcgacggcggaacccgtgggcctgtggactgcagcctcggcggtcagcagcagcagcagttgcaagctcagcatctttctcatggccacgga

SEQ ID NO: 114010 - DNA, 95 bp, Homo sapiens
gggaggcgacgctaagttgctgatcgtggcgtaatctatgccagcaattatgacaatgttagcagaccatgcagctcgtcagctgcttgatttca

SEQ ID NO: 114011 - DNA, 82 bp, Homo sapiens
gtggtcatcgatgggagcaacgtggccatgaggatttcaaggaacagatcatccaccatgtggccaccatcattctcatcag

SEQ ID NO: 114012 - DNA, 82 bp, Homo sapiens
aggcaaggagctaaagcagcgtgcgttcagccctggggcattgaagttgatatcgatgtggagcacggagggaaaagaagcc

SEQ ID NO: 114013 - DNA, 101 bp, Homo sapiens
ggaagatgcaagcggtttgggaccttgaacaaggcaaatatggttttgggtttggaaatcccttgtctccaggttgctgggattgacttcttgctcaattg

SEQ ID NO: 114014 - DNA, 75 bp, Homo sapiens
cggcgaccggggcctgggtccacgccgagggcaggacgaacttcaccagagttgcatgctgagaatttgaaaaat

SEQ ID NO: 114015 - DNA, 85 bp, Homo sapiens
aaagaccatcaagtttaccagaatatgaagacaaggctggaagacctagcaagccaccctctccaaagcagaatgtgaggaagaa

SEQ ID NO: 114016 - DNA, 74 bp, Homo sapiens
cctgtgacctgtggagacacggccagatctgccctccagtttggagtgagccgtagatccccagcctccattga

SEQ ID NO: 114017 - DNA, 98 bp, Homo sapiens
gacagtgggcctgcagccaaggaaggaggcctgcaaattcatgacaggattattgaggttcccgtgtcagtggctatgatgacacctcaagttatcac

SEQ ID NO: 114018 - DNA, 99 bp, Homo sapiens
tgaacggagaggaagaattctttgatgccgtcacaggttctacctacagcgtcctgtccaccatgccctcagactcagaaagcagcagctccctcagca

SEQ ID NO: 114019 - DNA, 95 bp, Homo sapiens
tgtgatcagagccgtgttcggggagtctttcaggtcagagttgcctctgaagctgctgccgctaaatatatcccaagccctggaaatggcattgg

SEQ ID NO: 114020 - DNA, 101 bp, Homo sapiens
gagaagaaatccaaggctatcattgaggaatatctccatctcaatgacatgaaagaatggaagttggatacactttgtgacttgtacgagacactgaccat

SEQ ID NO: 114021 - DNA, 83 bp, Homo sapiens
gcaaatccggtctacagtggagcagtctttgagccagagggtggcagaaaagggaaaagaaactctgaatccgaccagtgtag

SEQ ID NO: 114022 - DNA, 100 bp, Homo sapiens
ccagtttcggtcctggaggtggggccgggcctgcgtagtgaaactgcgtaggaacctgggaagaaggtgaattatgtaacctcattacgctggatgtagc

SEQ ID NO: 114023 - DNA, 50 bp, Homo sapiens
ccgcggtccccgctcttgctggattctttctactaatccagatacttgtt

SEQ ID NO: 114024 - DNA, 100 bp, Homo sapiens
tcttacgtctgcggaagtgcagctgcctcagttcttagcgcagtgagggtcgctgtctgcccattgatagaggccagattgtcttggaagttccaaagtt

SEQ ID NO: 114025 - DNA, 74 bp, Homo sapiens
ctatccatttcaactacagatactttgaagtagaagaagctgatggttgcccccaagtttcctggcagtgtgtg

SEQ ID NO: 114026 - DNA, 51 bp, Homo sapiens
cattagcacagggcaaggcttcccaggcctctccatattgctgtggtgcag

SEQ ID NO: 114027 - DNA, 75 bp, Homo sapiens
atgggacgagattctgaactcattgtgaaagaactcttttcttctttgggagtcgaatgtaatgtcttggaactt

SEQ ID NO: 114028 - DNA, 75 bp, Homo sapiens
caaggaggaagggttgtccggggcatgagccagaaggagagctctaagtctgccatgatgtatattcaggagttg

SEQ ID NO: 114029 - DNA, 85 bp, Homo sapiens
cggaggatgagcctgcagagcgcgcagtacctccgtgatggaatggggagaagatattaaagcagtttcaaaagatgaagcagtg

SEQ ID NO: 114030 - DNA, 83 bp, Homo sapiens
cagagaaaaccagctgagacagggcgccacttactaggtgctggagaatctggtaaaagcaccattgtgaagcagatgaggat

SEQ ID NO: 114031 - DNA, 100 bp, Homo sapiens
aagagagaatttatctagaggaaaacccagagaaaagtgaaacaattcaggacactgcgcatattaaatttcctattgactacccctattcaccacctac

SEQ ID NO: 114032 - DNA, 75 bp, Homo sapiens
gcaagaccaccttcgtcaatgtcatcgcgggcctgcagttgccatcacccactgcaaccagccagctcccgctcg

SEQ ID NO: 114033 - DNA, 50 bp, Homo sapiens
ctttcttcaaagctgcatcatcacaggaatcttccaaagatgggatgacc

SEQ ID NO: 114034 - DNA, 98 bp, Homo sapiens
tggtcagccccgacggcaccgtcaccgaggcgccgcgcacagtcaagaagaatcagtcggatttgtcagatgaagagctaaatgatgatcttttgcag

SEQ ID NO: 114035 - DNA, 99 bp, Homo sapiens
ctttttcaatgagaagaatgaacagacctagtgggcgttgcctttagacccagggaccagtccaacgtcaggcggatgcacacggctgtgaagctcaat

SEQ ID NO: 114036 - DNA, 101 bp, Homo sapiens
agagaaagttacgtggagcgtgggcgtttcgcagactcctaagaaagaacacccaggttaatgcctgataaagaaagcatgtattacccacgggtacaaca

SEQ ID NO: 114037 - DNA, 80 bp, Homo sapiens
tgagcgaggacccccggtggcaaggtgtggatgtggaagcagccaagcgggcagaagaggaattgctccttcatgacacg

SEQ ID NO: 114038 - DNA, 76 bp, Homo sapiens
ccgcgactggacttcgctcagcttcagaccctgggctgcagctgcctaatgagagaatctggacgaggctagagaa

SEQ ID NO: 114039 - DNA, 88 bp, Homo sapiens
aaactagagcaaataaccgttttgaaattattgtcctgggtcacataatgccagctgagcgtaaaaagccagcaagtatggaagaaaa

SEQ ID NO: 114040 - DNA, 50 bp, Homo sapiens
aacaccgttcccccagccgggctgcccacagcccccatcccgtagccctt

SEQ ID NO: 114041 - DNA, 100 bp, Homo sapiens
ttgagtctactctgtcgctcttgtgccctagcaccccgagaaccgtcagtttgagccagatgggaggacatcacctaccggctgccggagctggacccaa

SEQ ID NO: 114042 - DNA, 75 bp, Homo sapiens
ggtattcgccggcacgcgaagtggccgcatccgcaagatcctgtgggagatcacccgcttcttcctgctggccat

SEQ ID NO: 114043 - DNA, 101 bp, Homo sapiens
gactccctggagaagcagatggaaaaggcctgcttcggccttctgctcttctgttgtgtggtgaccctcaccagaggacagcttcatgctcttggacttcc

SEQ ID NO: 114044 - DNA, 100 bp, Homo sapiens
cttctggataacactgtacaagctttcaaagtcaatagcgtcctcttcactacaaggaaaatgtactggagcaggtgcttcggtggagttcattagctga

SEQ ID NO: 114045 - DNA, 85 bp, Homo sapiens
tcagctggagaacgcggctaaagttctgatgctatctttcagatcattcagagcataaggatgggcatgtgagaaagccagggat

SEQ ID NO: 114046 - DNA, 75 bp, Homo sapiens
aaaacatcactgtaattcttgctgtagaaagcttaaacttccagatggaattgtcagccacttgaagaagcaggc

SEQ ID NO: 114047 - DNA, 76 bp, Homo sapiens
ggggaatcatgacttctgcagccggagttaaagttcctcgtaattttcgcttgttggaagaacttgaagaaggaca

SEQ ID NO: 114048 - DNA, 129 bp, Homo sapiens
tcgtagatacaaatttttggatgatgatggatccatttctcctattgaggagtcaacgcttggccttcgtgcctctgcagatctggtccaaagtcctggccatctcaggaatcttcaccatgggcatcg

SEQ ID NO: 114049 - DNA, 100 bp, Homo sapiens
ctggcatcagggaggctttcagccggagaagcgagtttcagctgataaactcaagccatggagggattactgcattacatcaaccctgcacacgccattt

SEQ ID NO: 114050 - DNA, 75 bp, Homo sapiens
gctaaccagacttacctggtgtcagaacgcctagaaagtcaacgaaacggaatattccaatgctctttgtccggg

SEQ ID NO: 114051 - DNA, 74 bp, Homo sapiens
atcccaggaacagccccgtgccccccacaaagaaagggggtccactggacggggcctgagctacaacttcaccc

SEQ ID NO: 114052 - DNA, 100 bp, Homo sapiens
ctgcaattcataatggagctactgtactggctattggaaggaggagattctgaagataaggaggttgaaaggattgttgacaaaaggaaaaataaaaaag

SEQ ID NO: 114053 - DNA, 100 bp, Homo sapiens
ctgcgtggaagcttccctgaggaagagctgataacaccttaaacctcctctggattcaagttaaagctgatttcatgccaatattgggaaccaacctaaa

SEQ ID NO: 114054 - DNA, 50 bp, Homo sapiens
ggaagttggagttgaacacttgttacgccggaagtcggtgcagcccacct

SEQ ID NO: 114055 - DNA, 90 bp, Homo sapiens
ggtcgtgcagcggcggcgagcgctcgcgagcggctgcgggacgcgaggtttccggggcagcttccccgccgagtacatactggatgagga

SEQ ID NO: 114056 - DNA, 75 bp, Homo sapiens
aaaagagccctggaatgtgaagagacaggaggcagcagacggacatccagaaggacagaataacgggctcccaga

SEQ ID NO: 114057 - DNA, 97 bp, Homo sapiens
attatgcactccaagaatggaaagtttctctatttcttaagatccagggttccagatttgggccaggcttagtcatctattggtatggatttatcca

SEQ ID NO: 114058 - DNA, 83 bp, Homo sapiens
ctgtctacatcattatggaactggtttcagcaattctgtggtgttcttggtcacacatttatggagtttctgaagggcagtgg

SEQ ID NO: 114059 - DNA, 90 bp, Homo sapiens
cgaatgggacaagatcccgtccatgaatcagaaattgcaggtgctgcagtgtctgaaatttccgggcctttctcaacagaggatgtagcc

SEQ ID NO: 114060 - DNA, 100 bp, Homo sapiens
agaacttgtggacttttggatggatttcctggtcgaggccacaaagacagatgttactgtggttaggtttccaagatttacaaacgaggaccacctggca

SEQ ID NO: 114061 - DNA, 101 bp, Homo sapiens
aggagctcacgcgcttccccggcttgcgcgggcccacgggccagaaggtggtgcgcttcggggacgagagcaaatcatggaggaagataaaaaacatggtg

SEQ ID NO: 114062 - DNA, 99 bp, Homo sapiens
cagatccgctgatctagtgcttctcgaaaaaaaccttcaggcggcccatgggttatggaggttttgatgactatggtggctataataattacggctatg

SEQ ID NO: 114063 - DNA, 102 bp, Homo sapiens
tagcagaatttcacaaaaaaatcaaagaggcatttgaagtctttgaccatgagtcgaataatacagtggatgtgaggatgaagccccacccgcccttcagga

SEQ ID NO: 114064 - DNA, 50 bp, Homo sapiens
ggaaaatcatattatagatggagtaaagacagattacatcaatgccagtt

SEQ ID NO: 114065 - DNA, 95 bp, Homo sapiens
caagttgtaaactgaaaaagaacgtgttgaaacaaggaattgccccatagccttcacagatgaggaccttgagattgaattggttgaggaagagc

SEQ ID NO: 114066 - DNA, 49 bp, Homo sapiens
attttctatccacacctcagtttttgctggagtgcaatggcgcgatctc

SEQ ID NO: 114067 - DNA, 74 bp, Homo sapiens
gctgtcagtggtaataataataataagtattttcaatgtggagttctatgcagagaccatggcgagcccaggga

SEQ ID NO: 114068 - DNA, 100 bp, Homo sapiens
ccctggtgttcaagttccagaggaacgggatgagctcctgagatggaaggtgaaagaacttgtcctggacaacagtcggtcgaatgaaggcaaactcgaa

SEQ ID NO: 114069 - DNA, 98 bp, Homo sapiens
gcagcaccaaggaccagcaattcaagttcaaaccttgtactactcagctgatcacaagctgcttgatgggaacctactagatggacaggctgaggtgt

SEQ ID NO: 114070 - DNA, 50 bp, Homo sapiens
ctcgggccggcggacagtgagggcgcggggaaaaaagttgttccatgtag

SEQ ID NO: 114071 - DNA, 100 bp, Homo sapiens
acccgctaccggaaggccatcgccaagaaactgcaacagccaccccaactttcaagcaccaccttgatcaacagccatcaacattgaggcaaaaccctcc

SEQ ID NO: 114072 - DNA, 75 bp, Homo sapiens
ctgcttttggtttccctggcaggggttgaactgtggagtgtgtgggtggagccgccaccaaaatgcagattttcg

SEQ ID NO: 114073 - DNA, 75 bp, Homo sapiens
tgccatgacaaccaggcaatgctggatagataccgaattcttatcacaaagatgtgaaaggaccacccacccacc

SEQ ID NO: 114074 - DNA, 83 bp, Homo sapiens
gaagggaggagactcctgaccctcagaatggtgtgagtacttgataagaattaaaggacaggagttcatccgtcaagttcaag

SEQ ID NO: 114075 - DNA, 88 bp, Homo sapiens
cctccctgctgagatgcgcaaattcactccccagtacaaaggttctaaattgggttagggaacaacctgaaaaggaaccggaattgca

SEQ ID NO: 114076 - DNA, 117 bp, Homo sapiens
gtctcaatatctgtcttcggtggactccttcggcagtccacccaccgccgccgcctcccagggtgaggtggctttgaccccgggttgcccggccagcacgaccgaggaggtggctgg

SEQ ID NO: 114077 - DNA, 74 bp, Homo sapiens
gctgcccatcgaggagacgctggaggacagcccgcaggccagcatccttcagaaaaagcatccccgaggaggaa

SEQ ID NO: 114078 - DNA, 98 bp, Homo sapiens
aggcttcgcgggaagacgcggcggcggcggcggaggatgagcctgcagagcgcgcagtacctccgggcagccactgatcacaatgtggataatacaac

SEQ ID NO: 114079 - DNA, 100 bp, Homo sapiens
tagcatcatcgcagccaccatggcacggaccgtttattgtacaggcttcagggatgacttcttagggggcaggggaggtagtcgcccaggcgaccggcga

SEQ ID NO: 114080 - DNA, 88 bp, Homo sapiens
gcgcccacgtgtcctgttgtgcttcattcccacaggccgcataaggtacggttcctggagcagcagaacaagatgctggagaccaagt

SEQ ID NO: 114081 - DNA, 90 bp, Homo sapiens
tgctcttcgaagtggcctgggaggtggctaacaagggagctctttgttcaatgcctagccacctattcctacagacacggcagtggaaag

SEQ ID NO: 114082 - DNA, 90 bp, Homo sapiens
caaagttagaccttccagaacctgtgacaggatcacagaatgtgaattttgaacagatctgaaaagttattaagttcaactccacagagg

SEQ ID NO: 114083 - DNA, 82 bp, Homo sapiens
gttaacacttcctagataacgggttctgggccggagaaggggcgacgttcgggcaccccccgaatggacaatctttccttct

SEQ ID NO: 114084 - DNA, 106 bp, Homo sapiens
ccgggaggaaggaacgaggcaaggagctaaagcagcgtgcgttcagccctggggaagggaaaaggccgaggcatcagcgtgtgaagaccgcaaagacgatcccgag

SEQ ID NO: 114085 - DNA, 82 bp, Homo sapiens
gaaaatgcccctcttcctcatactgtgcctgctacaagcattgcacaggagaagtcggcctgagtggtgcggcgctcgggac

SEQ ID NO: 114086 - DNA, 50 bp, Homo sapiens
tcaacctgcgcccccagatgtcccaggcctatgtgaacctccttttctgg

SEQ ID NO: 114087 - DNA, 74 bp, Homo sapiens
agacgaggttcctgtgcaactcttcacagaccaccgctgaaacttcacttctacacagaggctttctttcccag

SEQ ID NO: 114088 - DNA, 75 bp, Homo sapiens
aaagatttactttcccatccgtgactcctggaatgcagggtgtccgcaatgttgccagtgtctgtctgcagattg

SEQ ID NO: 114089 - DNA, 50 bp, Homo sapiens
cgcagcgtcaatgacttacgccaagaagaacgaaatctcacaaaactgtc

SEQ ID NO: 114090 - DNA, 100 bp, Homo sapiens
cgcggggagcgcccccggcgcgatgcccttcaggaaaggtgtaatggataggtaacagagaagacctcgtcccttcctagtcagggcatcagcatgactg

SEQ ID NO: 114091 - DNA, 83 bp, Homo sapiens
ctgcgagaccctagaggcctgcggcctgcggtctcggcgcggaagatggccggcggcgtggacggccccatcgggatcccgtt

SEQ ID NO: 114092 - DNA, 74 bp, Homo sapiens
cctccagggtctgcagacaaggcagggtcacgagaagagaatgccttctagatgcaaaatcacctccaaaccag

SEQ ID NO: 114093 - DNA, 103 bp, Homo sapiens
attttttgctgatggagagctggaatctatgggattttcagctcgatacaatttcacacctgacagtctccttcccctttccaggcacttgaggctgaaccct

SEQ ID NO: 114094 - DNA, 76 bp, Homo sapiens
caggcccagcctctcgaatgggcacacctgtgtagatcttcccagacccgtcagattttgaccgctgctgcaaact

SEQ ID NO: 114095 - DNA, 98 bp, Homo sapiens
tccgcgcccgccagttgcttgatcaggtggaacagattcagaaggagcaggattaccaaagggtggtcgagatatccagtctgacggagcacttgctg

SEQ ID NO: 114096 - DNA, 100 bp, Homo sapiens
gattaatcgaattacagctgctagccaggaacatggactgaagtatccagcgctcattgggaatttagttaagagagcgtactgcggtcagtgcagcgag

SEQ ID NO: 114097 - DNA, 97 bp, Homo sapiens
cagcaaacaactaataaagaacttgccattgaaagttccctgaatgtggtttctacggaatgtatgataagatcctgctttttcgccatgaccctac

SEQ ID NO: 114098 - DNA, 96 bp, Homo sapiens
gcaccagcaggacccgaggccaggagccaggggcccagaaggctcgtggtcccaagaagcatctgaagcgggtggcagctccaaagcattggatgc

SEQ ID NO: 114099 - DNA, 85 bp, Homo sapiens
tcgtttttccttgagctgaacgtcttgcaacagtggccgcacgcataggattgactcagtcagcattgacacccttatcttcact

SEQ ID NO: 114100 - DNA, 90 bp, Homo sapiens
ctccccgaatacctcagcaactggaccatggaaaaagtcagacgagagggctgaggactatgggcctgtggaggtgatctcccattggca

SEQ ID NO: 114101 - DNA, 100 bp, Homo sapiens
aagtagagcccgggaccgccaggccaccaccggccgcctcagccatggacgcgtccctggagaagaaatcttcccaaggctgcagacaccgacggatttg

SEQ ID NO: 114102 - DNA, 73 bp, Homo sapiens
acctcggttttctaagaaaggacagcttaatgcagatgaggtattcctgatgacagtctgcctctatcttaca

SEQ ID NO: 114103 - DNA, 98 bp, Homo sapiens
agctcctgcgcctcttctactgcactgtcctggtctgctccaaagagatctcagcgctcaccgacttctctggcgtcgattagcaaggtaaaagtaac

SEQ ID NO: 114104 - DNA, 50 bp, Homo sapiens
agctttgtaccaaagacctgggaaaaaaacctctgcgccatgagagccaa

SEQ ID NO: 114105 - DNA, 99 bp, Homo sapiens
tccagaggatcatggcagctcctatgagttaatatgatcctctgttgaagcaagaagacaaactgtatggtggagaaagaagtgggaaggatctgcgcg

SEQ ID NO: 114106 - DNA, 75 bp, Homo sapiens
gacggattcatttagagctgcggaacaggacgccctctgatgtgaatcagctcccggccgactttaggattcttc

SEQ ID NO: 114107 - DNA, 83 bp, Homo sapiens
cacagagaagagcccagagtatagagcggaagcaagagagcatgaatacaactttgtctgagagccccttcaagtgtgatcct

SEQ ID NO: 114108 - DNA, 100 bp, Homo sapiens
ctgggataggggctgtggcagtacgcggggacccggctgcggtggctgcgggactgacgaggactggttaaatatgttgagcccaccaatcgttcctccc

SEQ ID NO: 114109 - DNA, 75 bp, Homo sapiens
ggcagcggagggacggcagtctcgcgcgaatgtggccccgtcccagagcaccacccgagacatcaggagcccatc

SEQ ID NO: 114110 - DNA, 100 bp, Homo sapiens
cagcaccctggctttcaacacctacgtccacttccaagaaatggaggcaaacgaccattttaactttactggccttccccctgcacctgctgcctcagga

SEQ ID NO: 114111 - DNA, 73 bp, Homo sapiens
gtgtgcttccgccactggtggaggagaatggtgggcttcagaagtgctggtcccaaaggcgataacatctatg

SEQ ID NO: 114112 - DNA, 100 bp, Homo sapiens
gaaggagtggacttgattgatatatatgctgacgaggagttcaaccagtacgaggatgtcgtccaggaaagattgtgcagatgactgaagcagaagttcg

SEQ ID NO: 114113 - DNA, 100 bp, Homo sapiens
atacaaactaatggaaggatacagctatgcaaatatagaacactaaagtgttacatgacagatgtatgagaatgcaggctcaacagtaccagcagcagcg

SEQ ID NO: 114114 - DNA, 75 bp, Homo sapiens
agctacacaaagagggtcatctcttctattgtacctgcagattgtgttcaattagaccttcaggacctctccaag

SEQ ID NO: 114115 - DNA, 82 bp, Homo sapiens
tttctcatggaagtttgtgttgattcagtggaatcagctgtgaatgcagaaagaggagccaagttacatgctacagtcagaa

SEQ ID NO: 114116 - DNA, 75 bp, Homo sapiens
gggcttcaagttggtggcgctgaagctggtgcagataaccagcccgagtcatgcagtcttttcgagaaaggtgtg

SEQ ID NO: 114117 - DNA, 98 bp, Homo sapiens
gtcagcatcgatcaattattggagtcagaaataccatcagaggaggggtactgtgactttaatagtaggccaaatgagaactcttattgctatcaact

SEQ ID NO: 114118 - DNA, 121 bp, Homo sapiens
ggtgtttggccttcggagcaggaagctaaagctgtttctgaatgagacccaaacgcaggccctccaagccacaaaactgtggtgaatggaaaagaatgtataaacttcgcctcatttaatt

SEQ ID NO: 114119 - DNA, 100 bp, Homo sapiens
ctggatggaacctgagctgggtctctgactcacttctgactttaggttggtcaaagaaaaagtgatgtatgaaaaagaggcaaaacaacaagaagaaaag

SEQ ID NO: 114120 - DNA, 75 bp, Homo sapiens
cacaaccgtctccagccttggtctgagtggactgtcctgcagacctcctgccccccgaggtctgcagtctcctga

SEQ ID NO: 114121 - DNA, 90 bp, Homo sapiens
gatgtatttgatcctgattctacccaagtacatatgatttcagctgcaatggcaggtcggattgtttgtgctgaacgaactgtcctcttg

SEQ ID NO: 114122 - DNA, 100 bp, Homo sapiens
aaccagtcatatggcatggacaatcacagtggtggtggtgggggtagcaggggtcttgctcctcagaacaaaccagaattgcagaaggtgatggaaaaaa

SEQ ID NO: 114123 - DNA, 100 bp, Homo sapiens
gaccgcctgtcctcagacccctccgcagcgactgtggcggccgcagcattaacacccttgtgaagatcagcaaaagtgcaggagccatgttgaaaccgca

SEQ ID NO: 114124 - DNA, 96 bp, Homo sapiens
cattacaagcagcagtggggacgagctttgaaagaacttgccagacttaaacaggaatttataagtatttgaccgtactcaaaatgtgcaaggaag

SEQ ID NO: 114125 - DNA, 100 bp, Homo sapiens
gtcgaaacaggataaaattttgttctcttacatggaacctggtgaattgaaatcctggcccatccctccccctgttcctgctgcaaaaatagaaaaggac

SEQ ID NO: 114126 - DNA, 82 bp, Homo sapiens
agaacagtccgaaatggcggggactgttggtctcggccctgcggaaggtgctgggtttgtgcggagccgcttaccggcccac

SEQ ID NO: 114127 - DNA, 100 bp, Homo sapiens
tgcatgctgagaatttgaaaaatgaagatgatgtagacactggactattaggcctggcgcaagcgctggtttgtcctccggcgaggccgcatgagcggca

SEQ ID NO: 114128 - DNA, 76 bp, Homo sapiens
gaagaggatgatgtttttggtgaagagatcttcgctttaacagaatcagagagatccaacctggggcattcaggcg

SEQ ID NO: 114129 - DNA, 74 bp, Homo sapiens
atcaacactaccaaaaataatccagtgatgtcattgcaagatcaggtgcgcgtggaattcatggacgacacgag

SEQ ID NO: 114130 - DNA, 75 bp, Homo sapiens
gttaatcctcaatttaagcctgatctaacccctagaaacagcgaaaccttgaaagccatttgatgtcccctgctg

SEQ ID NO: 114131 - DNA, 98 bp, Homo sapiens
ctctccagcggggacctgctccgggacaacatgctgcggggcacagggtccgaacacttgtacaacgaccacggtgtgattgtggactacaacacaac

SEQ ID NO: 114132 - DNA, 82 bp, Homo sapiens
tcacctgtatggataccagcagccccggaccccccgattcaccaacgagccctaacgccatttggaatgaacaggaaaaggc

SEQ ID NO: 114133 - DNA, 82 bp, Homo sapiens
caacgcctggctcggagcagcagcctctgagactacatgaggaaataattgacttttataacttcatgtccccttgtcctga

SEQ ID NO: 114134 - DNA, 83 bp, Homo sapiens
ccgcatcaagagcttcaagaacaagggccgcgatgtggaagagttgtatcccgcattttgtattcacaacggaggctccgacc

SEQ ID NO: 114135 - DNA, 101 bp, Homo sapiens
tctgcctgaaggaaaatccacccagcctggtgtcattgcgagccaagtcttggatctcaggccagaaaagctgtaacaatgatgtttttctccaattttcc

SEQ ID NO: 114136 - DNA, 73 bp, Homo sapiens
atgtgtggtccaatgtagtgatgaagaatgcaaatggttatgagccttagagtttctgaactccaagtactgt

SEQ ID NO: 114137 - DNA, 50 bp, Homo sapiens
cttcatgcactctgtcaagctgagaccaaacctggaccacccaaaaagcc

SEQ ID NO: 114138 - DNA, 75 bp, Homo sapiens
tgaactggacggacataccagtggccatggattcttttactcaagaatgcatggaggagaaatctttcttttgcc

SEQ ID NO: 114139 - DNA, 75 bp, Homo sapiens
catcagctctcctgggaccctccaagagcactagtgtctagaaggcactaaggcacttttccagccattaactcc

SEQ ID NO: 114140 - DNA, 83 bp, Homo sapiens
gaaatgacaattacctgacgatcacagggccttcgcaccccttcctgtcaggggccgagtttgcctgagaatacagatcaacc

SEQ ID NO: 114141 - DNA, 100 bp, Homo sapiens
gcacagcaacgaggggacagtgaggacggaagcccaagtggcacaaatgcagaaactccctctggtgatgatttcagctatcagttgagggatttgcagt

SEQ ID NO: 114142 - DNA, 98 bp, Homo sapiens
ccaagacgattggtgccaaacagggcagaacgcaactcagctctggggactctgtctactagtgacgatgtcgaagacagggaaaatgaaaagggtcg

SEQ ID NO: 114143 - DNA, 75 bp, Homo sapiens
ctctctcggtcgtggtcacaggcaaaggcactgtactccagaaagccaagagcagcccgacggccatggaggctg

SEQ ID NO: 114144 - DNA, 100 bp, Homo sapiens
tctcaaagcatttacagtacctaaaaacaggtccctggcgagccccttgcaggtacttggtaatcaaataatgcctggatttcttaatatgaagataaag

SEQ ID NO: 114145 - DNA, 60 bp, Homo sapiens
cctgctgtcactgactttccaggaaaggttatttgtcaatgaagaaaatgttaatgagtt

SEQ ID NO: 114146 - DNA, 82 bp, Homo sapiens
tcggtgctgcagacggcgagacctcctgcacagttccagggtctccctccactgctgtagtaacccgggtccggggcctcgg

SEQ ID NO: 114147 - DNA, 99 bp, Homo sapiens
ttagcgttgtatcttgggagaaagacacagtctccatcatcccagagctgcggtgcaaccctgggcagtttgcgtgtcgcagcggcaccatccagtgca

SEQ ID NO: 114148 - DNA, 75 bp, Homo sapiens
attttgtggccttagctacaggagaggccccggtggcccggccccggatgagtgcccaggagcagctggagcgga

SEQ ID NO: 114149 - DNA, 83 bp, Homo sapiens
tgtgggagatcgtgggcgagctgggcgacggcgccttcggcaaggtttacaagggactggtgattgcagctggaagtgcccat

SEQ ID NO: 114150 - DNA, 100 bp, Homo sapiens
gaggagtatttcctgaactgtgtgggtacggttcctggagcagcagaacaagatgctggagaccaagtggagcctcctgcagcagcagaagacggctcga

SEQ ID NO: 114151 - DNA, 50 bp, Homo sapiens
cgagtgaggaaaggaggtactgtagattgtagatgtctttatggaataca

SEQ ID NO: 114152 - DNA, 51 bp, Homo sapiens
gcccgagaaaccgcagcactacacggggggccctcagcctcttggccttga

SEQ ID NO: 114153 - DNA, 50 bp, Homo sapiens
gaaaactttcgtttcagatttacttccggcagatgcactttgtgccttgg

SEQ ID NO: 114154 - DNA, 78 bp, Homo sapiens
ttctgctgcttctgggccctacgcgcggcttgcgcatattaataaggcagcggaaagaagaaatatgaatacggctcc

SEQ ID NO: 114155 - DNA, 76 bp, Homo sapiens
agtgttagtgatgcaaacgaacctggagagagccaaagtaccatagagccaggactgtctccagtttggtcctcct

SEQ ID NO: 114156 - DNA, 100 bp, Homo sapiens
cataccaattcttgaatgacatccgagcgaaagagaaagagtctctgctggatgaaccgaatcctaacagtccagccaatagccaggcagcacagcttta

SEQ ID NO: 114157 - DNA, 100 bp, Homo sapiens
ctgcggaccccgccgagtcctagcgcctggcctgcgcgccgctgcccgcgccacagcttgtggagagactccagagcaaatacgagcaccaagtggcata

SEQ ID NO: 114158 - DNA, 96 bp, Homo sapiens
aactctgttcacctgcttgcagattgaaaatcttcaagagcagcttagagacaaggaaaagcagatgagcagcttgaaagaacgggtcaaatcctt

SEQ ID NO: 114159 - DNA, 74 bp, Homo sapiens
acggccctatctgtctcctgatgcctgagcagagggcaattgaaggaacagactaaaaatcgtgtcctggaagg

SEQ ID NO: 114160 - DNA, 75 bp, Homo sapiens
cttttgcagatgatcgccgggtgtcgatccttttccctccagtcagttacagatgtagagctaaaacgactgaag

SEQ ID NO: 114161 - DNA, 88 bp, Homo sapiens
aaattacaagtggaaatccacaaggattcttttcaatacatcctaaaacaggtgaccctgagagtgtggctggggagtatgggcggca

SEQ ID NO: 114162 - DNA, 50 bp, Homo sapiens
ctatgagcttttgaaacttgttaagatatttggagttcttacaacatggc

SEQ ID NO: 114163 - DNA, 49 bp, Homo sapiens
atggcctcactgtggcccaaaaccaggaaactactttccagagaaaaac

SEQ ID NO: 114164 - DNA, 96 bp, Homo sapiens
tgctgggatcgctgctcctctctggggtcctggcggccgaccgagaacgcagcatccacggtgccatgcctctgcaactcctcctgttgctgatcc

SEQ ID NO: 114165 - DNA, 83 bp, Homo sapiens
gccagacaaacagcccgcccgaccccgtcccgaccctggccgccccgagcggagcctggaggagcatcagatccatgctgctg

SEQ ID NO: 114166 - DNA, 50 bp, Homo sapiens
gccaagatccaggataaggaagaaagtggggctgatccaacaattgaaac

SEQ ID NO: 114167 - DNA, 82 bp, Homo sapiens
cggcgctggactggagcagaaccccaggactgcgcccccgggagcgggcgcccagagtaatctcaggggcgatataatcaat

SEQ ID NO: 114168 - DNA, 80 bp, Homo sapiens
cctaccagagaccttacctgtcaccttggctctcccacccaatggagatggctctaatgtttgtgaagtgtggatatgca

SEQ ID NO: 114169 - DNA, 98 bp, Homo sapiens
atggaatcactgagatccaagactgaccacatccctgctcatctcacctatgggaagctgctagctctaacagaacgccgcgatggctgcgcagggag

SEQ ID NO: 114170 - DNA, 83 bp, Homo sapiens
caaacaggaagatgggagcctctgccttgtacagttcccatcacaatacggcaggagaatgatatggttgattcagcgcctca

SEQ ID NO: 114171 - DNA, 75 bp, Homo sapiens
tacaaagatgctctgcggtttttgggctgtgttgacatcaaggatctaccagacattgcagaaacgcttcacttt

SEQ ID NO: 114172 - DNA, 51 bp, Homo sapiens
gccagaggtctccggcagtgatcacagcagatataatttctacagtagaat

SEQ ID NO: 114173 - DNA, 82 bp, Homo sapiens
gcgcttagaacagaggcttgcacaggtggagatggcagtcttgggcacgtccatctgtaaacctgctgagagctctggtgac

SEQ ID NO: 114174 - DNA, 123 bp, Homo sapiens
gcaagtgccacaataaataggattacaccttcgtatttcaaccgaaccttctgaggaaaggaggccatacagaaattgaacctcagcacttctgtcaagctttccacagagagaatgatacac

SEQ ID NO: 114175 - DNA, 100 bp, Homo sapiens
tttcagcctgcccttgccagtgcctgggccgctgggagccgttattggctgccgttaaggaccgttacgtttcccggcattccacgcctacgggaaggca

SEQ ID NO: 114176 - DNA, 75 bp, Homo sapiens
tcggcagcaagaacagagagagaggtggacagatctgagagatactgagatgaggaaactgagacccagaaaggt

SEQ ID NO: 114177 - DNA, 74 bp, Homo sapiens
tggcacccgagtcgctctctgagacccgcaagatcttctctgggaaggcctggagctgctgaagactgctattg

SEQ ID NO: 114178 - DNA, 83 bp, Homo sapiens
ggattttgggactcgcctttgccctggcaaacactggaatcctactttttctgtttagcccaaaggcgtcccttcaaccacct

SEQ ID NO: 114179 - DNA, 78 bp, Homo sapiens
tttgccatccccggctccagcttcctggtcccgcagcccccggaagccaatagactccctcagggactctcggtccct

SEQ ID NO: 114180 - DNA, 101 bp, Homo sapiens
ctttgtcagctcccgcacagtaacgtggtgtaactgtcacactccctcaggcaggaccatggaacacagcatctttggtcttcaatcagtccccttcaatg

SEQ ID NO: 114181 - DNA, 80 bp, Homo sapiens
ccaatctatgggccgctgtcagggctcgaggatgccagtttttagggccagccacataaagaagatccctaatagtcatt

SEQ ID NO: 114182 - DNA, 100 bp, Homo sapiens
cccaggcctgcgtccgagtctccgccgctgcgggcccgctccgacgcggaagaaatgggacgtcggtcatcagatactgaagaagaaagcagaagcaaga

SEQ ID NO: 114183 - DNA, 49 bp, Homo sapiens
tacctcagccaaacaggacaagcagggattaatgaaaatcaagttccat

SEQ ID NO: 114184 - DNA, 82 bp, Homo sapiens
gggagtttctcgccctcgtcgcgcctgccgcgcggagagataagctgctgcagaagaatattttgcctgctggaacctgctg

SEQ ID NO: 114185 - DNA, 82 bp, Homo sapiens
atcaagaaaatggaccagtttgttcgttacgagatctatccatactaatggaaatgtaactggaactgactctgatgataaa

SEQ ID NO: 114186 - DNA, 83 bp, Homo sapiens
tttctcggcgccgcggctcttttctaaaagtagctccaaacgagaatggaagccgctggaggaccgtagctgcacagacatac

SEQ ID NO: 114187 - DNA, 100 bp, Homo sapiens
tgcgcacaataaagaaaaacgaagaaaggatgatggcatttctcttttaatatctgatactcagcctgaagaccgattattgaccgacctattcgaggtc

SEQ ID NO: 114188 - DNA, 75 bp, Homo sapiens
gccagcgacgccggccaccaacgagagtccacctgaaggagtggaaattgcaacactaacaagagagaatggaaa

SEQ ID NO: 114189 - DNA, 90 bp, Homo sapiens
ctctaactgttggcaaaccagaagatacaactgagatatcaggttgctatcaagatcatagataagacccagctggatgaagaaaacttg

SEQ ID NO: 114190 - DNA, 76 bp, Homo sapiens
caagaagttatggagtcctatgaagttgaaatagatgggaagacatatcaagacaatgcagatcttcgtgaagact

SEQ ID NO: 114191 - DNA, 75 bp, Homo sapiens
agccagagacctacgtggcagctgtgaaaaaagccatttccgaagcgcatggatttaggagaatgtaccaaaatc

SEQ ID NO: 114192 - DNA, 82 bp, Homo sapiens
ctgggattggagattccacccaaacttgctggtcactgggagctgcatcttcctcccgtgaggctggccgagctccacgctg

SEQ ID NO: 114193 - DNA, 50 bp, Homo sapiens
ggaagatcttcaaatgggcattcacaagtattgaaatggctgatggcaag

SEQ ID NO: 114194 - DNA, 96 bp, Homo sapiens
gccacagcccggactccatcgactcccccggctcttagactaggcgccctgcgtccggcagaggaggcgagcatcccgctcaggtgatgaggaacc

SEQ ID NO: 114195 - DNA, 75 bp, Homo sapiens
caaggctgtgctcaacagcgtcaggagagaagtttgctgaggaatgccttcaagcacaaagtgatgaatgactgc

SEQ ID NO: 114196 - DNA, 98 bp, Homo sapiens
ccaagtgagaatgggccaaatgggattagtgctgaggtcatggacacttacgttaaaagctgtggtggtaacaccagatggacatgggaagaaccgag

SEQ ID NO: 114197 - DNA, 100 bp, Homo sapiens
caacgacagtgagatatccagtgatgcgctgacggatgattccatgtccatgacggacagcagtgtgaatacaaacagaagcttgcacgagtaacccagg

SEQ ID NO: 114198 - DNA, 48 bp, Homo sapiens
aattatctctggtgctgcagctctggtgcgaagtaccacattactgtc

SEQ ID NO: 114199 - DNA, 101 bp, Homo sapiens
gcccttcctgcaccgactggccaggaaaaatggacattttcctctccccctaaaaaaagataaaactccttcctggttattaactgaaatgctgatcgagc

SEQ ID NO: 114200 - DNA, 74 bp, Homo sapiens
ttgtgagcaagttcggtgccgcgggctggggatagcagtgagattcacttcaaagtgaaaatgacaacacatct

SEQ ID NO: 114201 - DNA, 73 bp, Homo sapiens
ctcgctggcaccccgaacgggttgcttcccccgctgcgaggctggagaatcgggaagggagaaggctacgccg

SEQ ID NO: 114202 - DNA, 100 bp, Homo sapiens
agcgattatccagtacacattgataaggtagctacagcaagctgggtagcaggcagatccaaaggatatcatgaagtttccagggcctttggaaaaccag

SEQ ID NO: 114203 - DNA, 100 bp, Homo sapiens
aaaaaaggagcttgccttctgagctttgtaccaaagacctgggaaaaaaccttcgagatctgcggtctggggtctggttgaaagatggcggccctcacta

SEQ ID NO: 114204 - DNA, 82 bp, Homo sapiens
cgacatcgacgccgcctggcaggccctgcgcaccaggtgtctcgtgcctctgctggaccctgactctgggctcctggtcctg

SEQ ID NO: 114205 - DNA, 100 bp, Homo sapiens
atattcagaaaggctattccaagctcaagatgcatggtcatggaggctatgattctgattttagtgatgatgaacgctgtggagaatccagcaaaaggaa

SEQ ID NO: 114206 - DNA, 100 bp, Homo sapiens
tcctcaatgatgcctgccagggactggagcaggctcggaagaatcatggagaacgggcaggagcgggtggaagtggaggaggatgggcagctgaagtcag

SEQ ID NO: 114207 - DNA, 74 bp, Homo sapiens
aaagccaagaggaggacagttcgctacacagcaatgcatcgaggtgactctcctattccatctgtttcttcggg

SEQ ID NO: 114208 - DNA, 75 bp, Homo sapiens
ttagggtcctttatatagaagggagagtagagatgacctgatcagagccatcaagaaactaaaggcacttggcac

SEQ ID NO: 114209 - DNA, 98 bp, Homo sapiens
ctgaaatacatccaggaaagacatggagattctcttaaaaagatatgggaaggttggctgtatctcacttccacttcgtgagatgaccgcctggatta

SEQ ID NO: 114210 - DNA, 75 bp, Homo sapiens
cctgagtctttgaggacacagcctcgctggaggcagtttctgcggagctggagtttgttcagatcatcatcatcg

SEQ ID NO: 114211 - DNA, 100 bp, Homo sapiens
ctgttgtagcacagatttatgtaatgtcaactttactgagaattttccacctcctgacacaacaccactcagcctactgaacttgacgcactggtatttg

SEQ ID NO: 114212 - DNA, 74 bp, Homo sapiens
tacctccagagtgtgaagctgcaggaagatggtcatccagactcagagctctctctacagagaggaaattctcc

SEQ ID NO: 114213 - DNA, 96 bp, Homo sapiens
gcgtccacctgctcgtccgcagaggtgcttttgaagatgatgatatcacgcacgttgaaggaagtgtagatcctattcgagatatagaaataatac

SEQ ID NO: 114214 - DNA, 82 bp, Homo sapiens
ccccagctccgtctcggcggcggcggcgacagggtctcactgtattgcccaggttggtctcgaactcctggcttcaagcgat

SEQ ID NO: 114215 - DNA, 98 bp, Homo sapiens
cgatgaccccggtcgcggacttgcttcaggctggccaccccccattgggtggatcacaagaactaatctttcatgatttggaaaccggaaggaaagaa

SEQ ID NO: 114216 - DNA, 109 bp, Homo sapiens
attgtgatgagcgtgttctggggcttcgtcggcttcttggtgccttggttcatccctaagggtcctaaccgggggcagctatttttgctatgataatcctgctgccctt

SEQ ID NO: 114217 - DNA, 100 bp, Homo sapiens
agtagtcggagaaggagcggcgactcagggtcgcccgcccctcctcaccgaggaaggccgacctcctgccccccgaggtctgcagtctcctgaacccagc

SEQ ID NO: 114218 - DNA, 75 bp, Homo sapiens
aacctggccaacaagattgtccccattgccatccagctttaccgatttgttacaactcaagcaagggccagcaga

SEQ ID NO: 114219 - DNA, 82 bp, Homo sapiens
cggagacctttttggaggcctccaagctgctgctcacctatgctgacaacatcctcagattttgcaagaacgaggctcaagg

SEQ ID NO: 114220 - DNA, 75 bp, Homo sapiens
gccagcccgtgccgcgagcgcggcctgcaggagacctccttgaggcccgccgcccgcgggcccacgagtgcctgg

SEQ ID NO: 114221 - DNA, 100 bp, Homo sapiens
taaattacctcgctgccgacagggaggctgggcaggtgattccgtgaaggcttcgaagttatttggaaatagcggtgcttgcagcgcttgcggacagtcg

SEQ ID NO: 114222 - DNA, 75 bp, Homo sapiens
ggcagctggagcctcaggcggcagcgcttctagtagccggatcgagctgggagatgtgacaccacacaatattaa

SEQ ID NO: 114223 - DNA, 100 bp, Homo sapiens
aagagcgaataaagtttatcacgccggggtgacatcactcaaaaaggatatgaaaagaaaagggcaaagctgcttgcacgttatataccgcttattcaag

SEQ ID NO: 114224 - DNA, 100 bp, Homo sapiens
taccagaccctgaaattcacgcatcaggcgcgggaagcggttcgatacaagaggctgttttcctagcgtggcttgctgcctttggtaagaacatgtcgtc

SEQ ID NO: 114225 - DNA, 98 bp, Homo sapiens
gaagattgtgaagcaatagcctaagcagcaatgcagcaagtcttggaaaaccttacggagctgccctcgtctactggagcagaagaaatagacctaat

SEQ ID NO: 114226 - DNA, 74 bp, Homo sapiens
ggggcagtcccgggagaacctgcggcggccggagcggaatcacatgcagcccaactacagattcttatggaatt

SEQ ID NO: 114227 - DNA, 82 bp, Homo sapiens
tccgagctggggttggacgctgccagtttgcacagcagcaggttgggcccgaaggcatcctgcagaacggggctgtggacga

SEQ ID NO: 114228 - DNA, 75 bp, Homo sapiens
ttttcatcttgtgaaagcagtccttgttcctatggcctaatgaacaacttccagattactgacagccctgtccta

SEQ ID NO: 114229 - DNA, 100 bp, Homo sapiens
cggacggtgctgtggtgcaagggcttgtggaaaagcttttgaacacttgcagcaattagaattaataaagcccatggaaagaacttcaggaaattcacag

SEQ ID NO: 114230 - DNA, 100 bp, Homo sapiens
accatcatgggtagcctttgataaacaggccccttcacagatgtagtcactacaaatcttaaattgcgaaatccatcggatagaaaagtgtgtttcaaag

SEQ ID NO: 114231 - DNA, 82 bp, Homo sapiens
ccagggggccggagggccagggtctcccggagataacgaaggaggcccaacttcattcaataaggagcctgacggatttatc

SEQ ID NO: 114232 - DNA, 74 bp, Homo sapiens
tttgaaggtggcccctgtgctgttattgcacctgttcaggactggagagagttcatacagagcttgtttttctt

SEQ ID NO: 114233 - DNA, 82 bp, Homo sapiens
ctgcaggggaccagcaagcccaaagagccggccagctggtttggaaatcccttgtctccaggttgctgggattgacttcttg

SEQ ID NO: 114234 - DNA, 75 bp, Homo sapiens
tatactcctgatattattatagcctcaatactgaggctgattggaaacttttgagaagaactttgaaagagaaac

SEQ ID NO: 114235 - DNA, 75 bp, Homo sapiens
aggaaaaacacccctggatggggcgaagggaatttgaagtactgccttgtaattcttaatcagcctttggacaac

SEQ ID NO: 114236 - DNA, 87 bp, Homo sapiens
caggagcacgtcaagacggccctggagaaccagaagaaggcgaggaaggtctcaccaacggctttgggggtgcgaggagcgagcagg

SEQ ID NO: 114237 - DNA, 100 bp, Homo sapiens
cttcccggcgtctaggggagcgaaggctgaggtggcagcggcaggagagtccggccgcgacaggacgaaaccaatagagccatggcgactccctctgctg

SEQ ID NO: 114238 - DNA, 96 bp, Homo sapiens
attaatctaaaagaatatgatccagatgatcatctgatagaagagggccttcatcctagaataatcactgaaggatttgaagctgcaaaggaaaag

SEQ ID NO: 114239 - DNA, 75 bp, Homo sapiens
ggagagccagcggcagccagggacctacactttggctttaagatttatcagcaagactgttgaacgcataactgc

SEQ ID NO: 114240 - DNA, 100 bp, Homo sapiens
gctggtggtggaagtgcggggctccaatggcgctttctacaagattacatgcagcaaactggaggtcaagcacatctattcttttggatgacagtggaag

SEQ ID NO: 114241 - DNA, 101 bp, Homo sapiens
gaaatttgctgagctggtgtataccggcctcagtggctttagaggatgtggctgtgaacttcacccgagaagagtgggctttgctgggtccttgtcagaag

SEQ ID NO: 114242 - DNA, 100 bp, Homo sapiens
cagctctacagacataaagagattgcagtggctgctccttcctggctccaccattcagcaagagctccacagaccaagatcactccatggatgaaatgac

SEQ ID NO: 114243 - DNA, 74 bp, Homo sapiens
gcattttctctcacagagcagcaactagggaagaaccttctgaggaaaggaggccatacagaaattgaacctca

SEQ ID NO: 114244 - DNA, 98 bp, Homo sapiens
ccagagccgagatgagcagaacctgctgcagcagaagagacccaacatgagtgaagtttcctgcaagaaacgggacgactatttggaatggccagagt

SEQ ID NO: 114245 - DNA, 100 bp, Homo sapiens
ccgacttcccacagtctcagcagggccatttctgagcagtggaggtttcaagtaatccactaacaaccagttccaaattctgtcatcaaatcctgtgctg

SEQ ID NO: 114246 - DNA, 100 bp, Homo sapiens
tgtccaaagcagtcgtaagaagaggtcccaatcccccactctttccgccctaatggaggtctccagtttcgatttggagcaagaggtggtggtggccttc

SEQ ID NO: 114247 - DNA, 75 bp, Homo sapiens
acaaacttgaagatggatatcagctacagactttcctgagtcagaagctgcacacatacatgtaagagaagcaaa

SEQ ID NO: 114248 - DNA, 82 bp, Homo sapiens
gcgagccagcgcccggagcaagcggagctcccccaagagccggaaagggccggagttaagatgagtccagcgaagtgcctag

SEQ ID NO: 114249 - DNA, 75 bp, Homo sapiens
tatgtgtcgcaaccattagaaaggtctacatgttcaagtgcgtgtggcggtgctacagattgatcaagtgcatga

SEQ ID NO: 114250 - DNA, 91 bp, Homo sapiens
gagcctcagttggaagcagccgatccagcctgcggagcctgtggggcaggtcttgagtcaccacgtccgaatataattcttgggttagtaa

SEQ ID NO: 114251 - DNA, 87 bp, Homo sapiens
gcatcgtgactgttggtggagaagagagagtatcatagaggaggcatgcagccctgttctcctcagagatgccagcctccagccagc

SEQ ID NO: 114252 - DNA, 97 bp, Homo sapiens
gccaaagaaatccagtcccgaccagtggttgaccagattgacaccctgacctctgacctacagctggaggatgagatgactgacagctccaaaacgg

SEQ ID NO: 114253 - DNA, 75 bp, Homo sapiens
ggcgtggtccccctggcagggacaaatggcgagactaccacccaaggagaccctttgtcgatccaccactacttc

SEQ ID NO: 114254 - DNA, 100 bp, Homo sapiens
tatacaaaagacaaggaagatgagctgtcctttcaggaaggagccattatttatgtcatcaagaagaatgacgatggtagtgggcagcagtcagtgacag

SEQ ID NO: 114255 - DNA, 98 bp, Homo sapiens
agcacatgacgtatttgagttgaagcagttttctcagctgcctgctaacatagctgtttgcagttctaaggcaacagctgaacagatgcgtctcgctc

SEQ ID NO: 114256 - DNA, 75 bp, Homo sapiens
cgccatgtcgggttattcgagtgaccgagaccgcggccgggaccgaggatctgccttctggagactgcgccgtcc

SEQ ID NO: 114257 - DNA, 98 bp, Homo sapiens
ccaaatttgactacctgaaggaggaggatgtggagagcatcttgtgcgcaccatactggctagagaatgttcacatgctttacaagctgaggatgctc

SEQ ID NO: 114258 - DNA, 88 bp, Homo sapiens
gctgtgccttctctactgatggcagtgttttagctgctggaccttctttggtaacgtgaacgagtcggcggtggtgcgccatgacctg

SEQ ID NO: 114259 - DNA, 75 bp, Homo sapiens
ttccagcagtcagttgaacaagacaacttatttgatgctcatgctgaagattcggttatggaccatcatttccgg

SEQ ID NO: 114260 - DNA, 74 bp, Homo sapiens
tgccactgacattgcagagctgtgggctgtgttccacaagttcaaagttctaatacccgatttacaattacatt

SEQ ID NO: 114261 - DNA, 100 bp, Homo sapiens
cggagctgcagtcggcactgctactgcgaagacagctggcagatggctcatgatgccctcaatgcccctctgcacattctccgggccatatacgaactgc

SEQ ID NO: 114262 - DNA, 100 bp, Homo sapiens
cttcgcctttcccgagccctggaggtggggagaaaagagtcgggaagacatcactcatgaaccagtatgtgaataagaaattcagcaatcagtacaaagc

SEQ ID NO: 114263 - DNA, 76 bp, Homo sapiens
cactgcggggagatgctcttcggcctagtgcgccagggcctcaagtgcgatgaggagaggagacgccgtgagcggg

SEQ ID NO: 114264 - DNA, 90 bp, Homo sapiens
cgcgctcacggctggcctggctcggagccgggcactgcggggacccgtgtggaggccatagtggagtttgactaccaggcccagcacgat

SEQ ID NO: 114265 - DNA, 82 bp, Homo sapiens
agaacctgtccaggagctggcatgacgtgcaggtctctagcgcatgcaagagacaggctggctgtcctggcgggaaggagca

SEQ ID NO: 114266 - DNA, 75 bp, Homo sapiens
accagatccgggagcacgtcatctccatcgaggtgcagagcagagcgggcggaggaccccgggcgcgggcgcgga

SEQ ID NO: 114267 - DNA, 96 bp, Homo sapiens
agttggattttcacgtgctcttgctaaagaggtagcaagaaagaaaattagagtgaatgtagttgcaccagcatctgcaaacatagagaattctgg

SEQ ID NO: 114268 - DNA, 102 bp, Homo sapiens
atttcacagattctcaagaaaatgaagaaaaagcttctgaatatagagcatctgaaatagtgccaagccccggctggactgcttgattgaagtatacaggag

SEQ ID NO: 114269 - DNA, 100 bp, Homo sapiens
cattggaggaacagtaccttggcttggctcttgacgtggacattgctttgaattacggaatttataagcaggatctcccaagcctggatgagaaacctcg

SEQ ID NO: 114270 - DNA, 75 bp, Homo sapiens
tgctgctccttgcagccctggctgtggctacagggccaggaattgaatgatctggcacgggaccctccagcacag

SEQ ID NO: 114271 - DNA, 101 bp, Homo sapiens
gacagactccagacgcgccaccgtcttctccacccctcacgggctcgaagtgcatgtgcgacgctcccatagtgggacccggcccttcgcctgtgacatct

SEQ ID NO: 114272 - DNA, 98 bp, Homo sapiens
ctgcataatcaaccctgggaaccccacagggaaagaatatggcaaagctgatgcaagatgggtttattttgatccaaccattgtgtctgtggaaattc

SEQ ID NO: 114273 - DNA, 98 bp, Homo sapiens
ctggcttcccagtgcatggcgctcaagtctgtgcgccacatccacgacagcgatggcagttccagcagcagccaccagagcctcaagagcacagccaa

SEQ ID NO: 114274 - DNA, 80 bp, Homo sapiens
cgctgtgagacatgtctgagactcctgctcagtgtagcattaaggtttcatatacactggagaagtcgtacatcgaatgc

SEQ ID NO: 114275 - DNA, 83 bp, Homo sapiens
tcagtttcaagccttgcttcagtatgctgacccagtaaatgcacattatgccaaaatggatgaggaagatggagagaatgccc

SEQ ID NO: 114276 - DNA, 75 bp, Homo sapiens
aaaccagcagatattcctgcgggacatagaacaggtgccacaggacagagcgggatgccaccagcttgtccaaag

SEQ ID NO: 114277 - DNA, 75 bp, Homo sapiens
agccggatccagcatctctccaccatcgactacgtggaggacgggagaagaaatgggtgaccgttggtgacacat

SEQ ID NO: 114278 - DNA, 75 bp, Homo sapiens
acggctcaagaatttcaagaacaaaggccgcgacttggagcgatgccctcctagctagccgtcacgggatggagg

SEQ ID NO: 114279 - DNA, 76 bp, Homo sapiens
cgagtttagtcacttgcaggacgctacacgatggatggaagccaatcaggtgttcagtggaatcacacttacaaaa

SEQ ID NO: 114280 - DNA, 82 bp, Homo sapiens
agcccacacacaggtgaatttaaaggagcagccctggtgtcacctatcagtaaaaggtgggaatgatggttagatgctgccg

SEQ ID NO: 114281 - DNA, 90 bp, Homo sapiens
aagcaattgaatatgtgcatggatacttttctagtgaacaggcctggttgcagtatgcttgaaatctgggatgtggaagacccttccaat

SEQ ID NO: 114282 - DNA, 75 bp, Homo sapiens
cacatcccgggactcacacgggtcccttcaccgatgttgtcaccaccaacctaaagcttggcaacccgacagacc

SEQ ID NO: 114283 - DNA, 100 bp, Homo sapiens
aaccctagtgaataaagccaagagagaccttggagtaattcgtcgacaggattacaaggcagaggaagacccagcaaaatttaaatctatcaaaacaggc

SEQ ID NO: 114284 - DNA, 100 bp, Homo sapiens
attcgggacatacctgtaactattatggatgaaaagctgttactagaaccaatgtttgaagtccctaattctgatatcgtatgtgtggaggttgacaaag

SEQ ID NO: 114285 - DNA, 83 bp, Homo sapiens
attgactgcctcaaataacactgtcacaatcaatcaccttctgctgcttggatgggtggatttggtgctcagcctccccaagg

SEQ ID NO: 114286 - DNA, 100 bp, Homo sapiens
gtgaacactcaagtgaagcaaaagccttccatgattacgatgtcacatgtacttcagtttgaggataaaagcagaaaagtgaaagatgcaagcatgcaag

SEQ ID NO: 114287 - DNA, 75 bp, Homo sapiens
caaaacaattggaaaagtggcacagggcctgactccccttcactgtgcagtcatagcccacaatgctgtggtcca

SEQ ID NO: 114288 - DNA, 100 bp, Homo sapiens
ttcgttattggagccaggcctacaccccaggcctagttccccgagagcgttcagacagtgggggctcaagctcagagccatttgaccgtcatgcacctgc

SEQ ID NO: 114289 - DNA, 100 bp, Homo sapiens
agaagattcagaagtttcagatagcccaggtggttagagagtccaatgcaatgctcagatctctttgcagagtccctgcagtgcaaggtggactgtgagg

SEQ ID NO: 114290 - DNA, 51 bp, Homo sapiens
cgaatacaaagagccatacgaccttcggtcaagcaccacataccgacagac

SEQ ID NO: 114291 - DNA, 50 bp, Homo sapiens
gccacccctcctttcaggtcaagcttcgagagctgtgcccaggagtgaac

SEQ ID NO: 114292 - DNA, 88 bp, Homo sapiens
gaggaagagaagatgaatcatacaatatttcagaggtcatgtcaaaagaggaagctcataaaatggtgagagaagcaaatatcaagca

SEQ ID NO: 114293 - DNA, 100 bp, Homo sapiens
ttcgaaagctggtaaggcctgagcaacctttcccctggatctcacaaaaactcgactccaaatgcaaggagaagcagctcttgctcggttgggagacggt

SEQ ID NO: 114294 - DNA, 51 bp, Homo sapiens
ggtcatactaaagaacacatctggaaggtttctgctttgggacaaccatac

SEQ ID NO: 114295 - DNA, 90 bp, Homo sapiens
cggaggtggcagccatctccttctcggtatacatggactggtacgagaagttccaggacaggctcaacaagaaggtggtactcctgacag

SEQ ID NO: 114296 - DNA, 80 bp, Homo sapiens
cagcaacagaggcacagcttcaagggggaggagtgtccagcagggtttttggagtctctggatgatttttacattcttag

SEQ ID NO: 114297 - DNA, 83 bp, Homo sapiens
tcctcctggccaccgactcctacaagatctattccagaggggagcttcaccacttcattgacggctttaatgaagagaaaagc

SEQ ID NO: 114298 - DNA, 100 bp, Homo sapiens
cgctgcccccgatgcagccaggcagtctatgctgcggagaaggtgattggtgctgggaaggtgattgctggcttcaaccgccttcggcaggaacagcgag

SEQ ID NO: 114299 - DNA, 153 bp, Homo sapiens
aataagactgattttatgggaaaattaagcagatgctccagtttgagaaacctggatctgcgatctgtttgtgagagacaagagagacacctccaacttcgacaaagagttcaccagacagcctgtggaactgacccccactgataaactctt

SEQ ID NO: 114300 - DNA, 90 bp, Homo sapiens
ctgattctagatccacattataccggtgctgaagacctgcaagttattttggaaaaggaaattgaacttgaatgtggaacccagctttgt

SEQ ID NO: 114301 - DNA, 90 bp, Homo sapiens
cgagagggagccgcagctgatgtcaggtacatgtcccagagcaagcacacggaggcccgggagctcatgtactcgggagccctgctcttc

SEQ ID NO: 114302 - DNA, 75 bp, Homo sapiens
ttcgggatctcggtgctgcagacggcgagacctcctgcacaggtctagtgacggagcccgcgcgcggcgccacca

SEQ ID NO: 114303 - DNA, 75 bp, Homo sapiens
aaattccttcttggaacaatttatgatagaggagttcaaagaaggacgcagagccagccacacagccccacaggt

SEQ ID NO: 114304 - DNA, 82 bp, Homo sapiens
caggtcctgatagtcgatcaaaaattgtgcttctggtagatgcttcacagcaaactgtggatggcattcccaatgacagtag

SEQ ID NO: 114305 - DNA, 100 bp, Homo sapiens
tgcggaggcagggcagtgtggtgtccagccggatccagcatctctccaccatcgactacgtggaggacggcaatactagcccctctggagcacggagctc

SEQ ID NO: 114306 - DNA, 50 bp, Homo sapiens
agctcaacctcaaatcagtactgaggggaagctatgaagcagataaccca

SEQ ID NO: 114307 - DNA, 75 bp, Homo sapiens
caaaggaaggggagcccgggacccccgggggcgcaggtgctggagaatctggtaaaagcaccattgtgaagcaga

SEQ ID NO: 114308 - DNA, 83 bp, Homo sapiens
tcttggtccagctgctcactccttgctcaggcatcctgtcggctcacaagataatagccagctccccagaaatgaacctgccc

SEQ ID NO: 114309 - DNA, 51 bp, Homo sapiens
tacagatacttgggaatgcagagctgaaaaaattaggtgtgatgcccccgg

SEQ ID NO: 114310 - DNA, 88 bp, Homo sapiens
cttagctgtgctcgcgctactctctctttctggcctggaggctatccagcgtggaagcagggaaaggcctggagatgaggaagctggt

SEQ ID NO: 114311 - DNA, 75 bp, Homo sapiens
gccaaaggcaacagaacgagggattctccgtgccacaggtgttggttattaacacggggatcaaagtctggtgta

SEQ ID NO: 114312 - DNA, 74 bp, Homo sapiens
ggagacgccatgatccccaccttcacggctctgctctgcctcgacaccatcatccgagcagtattgatttttgc

SEQ ID NO: 114313 - DNA, 80 bp, Homo sapiens
gagatgacgggctttctgctgccgcccgcaagcagagttacgaaaagcggctgtactgaggacagcggtggaggccgagg

SEQ ID NO: 114314 - DNA, 87 bp, Homo sapiens
gcaccccagcagcagtcagagcccgccagaccttcctctgaaggcaaagtgacctgtggcctgctaccgacaccaaatctattccag

SEQ ID NO: 114315 - DNA, 90 bp, Homo sapiens
ctcgggcgccgacgagatcggccttctacaccagcaggtacggctacaagatgtgtctgcgtatctacctgaacggcgacggcaccgggc

SEQ ID NO: 114316 - DNA, 89 bp, Homo sapiens
gaattgaagcaggaatctttcagatacttctagatttcatttacacagcttggacctggcctgatgctttgaatattgaaaattcagac

SEQ ID NO: 114317 - DNA, 100 bp, Homo sapiens
gcaaagatctgctcaacctctctaggaagaagccgtgtggacagtctgaaatcaagactatcctattaagtgtaatctcactgcttaatgagcccaacac

SEQ ID NO: 114318 - DNA, 74 bp, Homo sapiens
agcaaagaggaggccatgcgctggttccagcagaagagtgatcagcagctggactgtgccttggacctaatgag

SEQ ID NO: 114319 - DNA, 99 bp, Homo sapiens
agaaaatcagaagtacagttttatctagccacatcttggaggtggagccgccaccaaaatgcagattttcgtgaaaacccttacggggaagaccatcac

SEQ ID NO: 114320 - DNA, 101 bp, Homo sapiens
gaacgactgcggcgcgctgctggacgaagagctctcctccttcttcctcaactatctcgctgacacgcagggactttgaacatgtcggggatcgccctcag

SEQ ID NO: 114321 - DNA, 125 bp, Homo sapiens
cctggaggatgtgcggggtgcgccggcagaggatccagtgttcaccatcctggccccggaagggaaagcaggcaggatgggagagtcgccgatagaaccacctcttccctgcctcctgggcttgg

SEQ ID NO: 114322 - DNA, 100 bp, Homo sapiens
acatgatccgcaagaacaagtaccgccccgacctgcgcatgacaatgcagatcttcgtgaagactctgactggtaagaccatcaccctcgaggttgagcc

SEQ ID NO: 114323 - DNA, 75 bp, Homo sapiens
ttggaccccggcttctgggacgcgtcagggtgaagaaggtgaatacagtgaagaggaaaactccaaagtggagct

SEQ ID NO: 114324 - DNA, 75 bp, Homo sapiens
gtcccacttgttcgcggcctatagaaccttcgagatctgcggtctggggtctggttgaaagatggcggccctcac

SEQ ID NO: 114325 - DNA, 75 bp, Homo sapiens
cagattgttcctaaaccagaagaggaggttgcccagaagaaaaaggagaccaagggcagcgtggccgtgcgcgtg

SEQ ID NO: 114326 - DNA, 75 bp, Homo sapiens
aacagagtatggctgcagaggatccatctgtcttagcaaggctgtcatcacagcagaactcacagtttggagatg

SEQ ID NO: 114327 - DNA, 83 bp, Homo sapiens
gaggcattttggggcagaatacagagatatggaatcagtctctggggtgctcgagagctagatctgctgaccttaacttctga

SEQ ID NO: 114328 - DNA, 100 bp, Homo sapiens
ggaacgattgggctgagcagaggacgacatgttgcttttcgtggagaactaaggccacatttcagccttgcatctgagagtgatactgctgatcaagaag

SEQ ID NO: 114329 - DNA, 97 bp, Homo sapiens
ccgagcactttcagctctgcaagatgccacctcagtatggacagcaaggtgtgagtggttactgccagcagggccaacagccatattacagccagca

SEQ ID NO: 114330 - DNA, 50 bp, Homo sapiens
acccagaatctttaggtaaatgaggcctgttacatgaacagaatatggca

SEQ ID NO: 114331 - DNA, 100 bp, Homo sapiens
ctgccagacccctcagctttgcaggatgaattaaaccttgctgattctgaagtggataaccaaaaacgagggaaacgacattatgaagaaaaacaaaaag

SEQ ID NO: 114332 - DNA, 100 bp, Homo sapiens
cggacgggcactgggcgactctgtgcctcgctgaggaaaccaaggtgtatgttggtaacctgggaactggcgctggcaaaggagagttagaaagggcttt

SEQ ID NO: 114333 - DNA, 88 bp, Homo sapiens
cacacctgttgccattatagagctggaattaggcaaatatggacagtactatggactacaaattttggaaaatgtgataaaaacaagg

SEQ ID NO: 114334 - DNA, 125 bp, Homo sapiens
gccaggagcagcagccgcgcctgcagaccggcctcgcggagcccgcgcgccgagccccacttggaatgccaagatgccttggaaacagcagcccgagccgagggcctctctcttgatgcctccat

SEQ ID NO: 114335 - DNA, 90 bp, Homo sapiens
gctgtactggttagggcgattgttcctgacaaccaaggggaaactggactgctacacaaggagattcttctgcacagtcagtatcctcgg

SEQ ID NO: 114336 - DNA, 83 bp, Homo sapiens
tctttactgctgaagctttacttcgagctcatggtgcccgagaatatcatgtccagttttttagcaaccagccagagagggcg

SEQ ID NO: 114337 - DNA, 73 bp, Homo sapiens
gtgtatcttcatacatcaccacacctgaaagcagggccttctcttcccaactcccagccaccccctgaggtct

SEQ ID NO: 114338 - DNA, 78 bp, Homo sapiens
aagaaagagccaaaatccaccagactgaacacaggagaattaaacaaccaccatgtcgagcaaaaaggcaaagaccaa

SEQ ID NO: 114339 - DNA, 96 bp, Homo sapiens
acctgctgcacccacgaatctgcccacccctcctgtaacccagcctgtttcacttcttgggaaggtggccatccagaaggaggacttgcagaagta

SEQ ID NO: 114340 - DNA, 75 bp, Homo sapiens
cagacccaggactctgcgactttaccctgcggcgagagggctacaccgtgcaggtgaacgtgaacgactatctgg

SEQ ID NO: 114341 - DNA, 100 bp, Homo sapiens
aacaaaatgtcaacaaattgatgggagagatgaatggagagtatagaggcagaggatttggacgaggaagatttcaaagctggaaaaggggaagaggtgg

SEQ ID NO: 114342 - DNA, 75 bp, Homo sapiens
gatgaaggcaaatattattgcacttcttgccacaatgttacagagactgatggtgcatctgcaatgttaatcatg

SEQ ID NO: 114343 - DNA, 100 bp, Homo sapiens
gagcgcggggcgacgctggctgcagggacccggtgacagcgtgagaggcctggtctccaagtcctctcctaagaagcctcgtggacgtaacatcttcaag

SEQ ID NO: 114344 - DNA, 50 bp, Homo sapiens
acggccgaggacttcgccgaccagatcaagaaggagtgcctggcctgcag

SEQ ID NO: 114345 - DNA, 74 bp, Homo sapiens
attaaagagccatctgtggtgccaattgaagctggagaagaagcaggcgctccctccattccagccacagatca

SEQ ID NO: 114346 - DNA, 97 bp, Homo sapiens
tcatctctgagacccggaggaggttcgaagctgagtatgtgacagggtcattatcgttattgtgatgctctttctatgctgggggaatatgactggg

SEQ ID NO: 114347 - DNA, 89 bp, Homo sapiens
ctcgacacagtccctccctcggtttgcctactgaagagcttatcagagctctacttgggaaagacttaaagcagcgtcttggccacagg

SEQ ID NO: 114348 - DNA, 75 bp, Homo sapiens
agaaagaggtgggcaagatcctgtgcactgactgcgatatggctcgtggacagcagaaaattcagtctcagcaga

SEQ ID NO: 114349 - DNA, 51 bp, Homo sapiens
tttcatccctatgtggaaaacgaggatctctgggaaagtttagaaaatgct

SEQ ID NO: 114350 - DNA, 82 bp, Homo sapiens
ttgcaggaaaacaagctcagggcttccactgattctacattatggcgttggagaccagggccagccctggccacaccccagg

SEQ ID NO: 114351 - DNA, 82 bp, Homo sapiens
tccaaataccagctcgacaaagatggggttgtcctctttaagaaggtacggacattgctgcaggagaagaggttgccatcaa

SEQ ID NO: 114352 - DNA, 143 bp, Homo sapiens
ttgcgcttgcaaacaaggcttcctgtccagcaatgggcaaaatcacttcaaggatccaggagtgcgatgcaaagttgctcctttggtagaagacaagatgatttgattagttctagtgttccaagcaccacatcaacaccaac

SEQ ID NO: 114353 - DNA, 90 bp, Homo sapiens
gaggagcaccttccacaaggacgtggttgtcgatttgttcacttcttcaactgagatggacatgatataatctccattgagtcaaagaat

SEQ ID NO: 114354 - DNA, 95 bp, Homo sapiens
cggggagctgcgcgaagccggggcggagcacgcgagctatggatttttagactctgaggagcagttggagctaatccacattatggaaatggaaa

SEQ ID NO: 114355 - DNA, 98 bp, Homo sapiens
agtgagaagcaagaaggccctggacacagcaatatctctgggctttcacagttctgggaggtgatcagtgatgaacatggcatcgaccccaccggcac

SEQ ID NO: 114356 - DNA, 100 bp, Homo sapiens
gggacggcagtgctgaggcggaacaggccgggcaccaaggcgcagcaagtctggaaaagtttgaaattccagtaaaaattcgtttgagtcctgaaccgtg

SEQ ID NO: 114357 - DNA, 87 bp, Homo sapiens
aggatatacagcagcgaggaggggaagagagttgcagaggaaagtggtcgcttatggtcagaggagcagcctgctcaccctctccag

SEQ ID NO: 114358 - DNA, 100 bp, Homo sapiens
ctgagaaagacatcgtgcactctggcttggcatacacaatggagcgttctgccagggtgcgggagtatgagttaagaaaaaacaacttctcagatactgg

SEQ ID NO: 114359 - DNA, 75 bp, Homo sapiens
ctggcttgttcgggctcagcggccgcgaggccgcagctcccgaccttattgcaatatgcaagcaacaagaatgca

SEQ ID NO: 114360 - DNA, 75 bp, Homo sapiens
aagaattcatctctgaagttacagatctcattcgtcggttcggatccaagccagttctgtggtcagcaaggctcc

SEQ ID NO: 114361 - DNA, 88 bp, Homo sapiens
ttattttcactgtgcagctgttacaccattggcgagctttagcccctctcctccttctccgtaccctaccactgttggaccagtggag

SEQ ID NO: 114362 - DNA, 100 bp, Homo sapiens
gagcgggctttcctcccccatctacatcgatctgcggggcatcgtgtctcgaccgcgtcttctgagtcaggatggcaaccttgttcctcggtggcacctg

SEQ ID NO: 114363 - DNA, 75 bp, Homo sapiens
gttaagaagcacctcatgcaagcgagggacctgggactgctcacagccagggcggaagcttcgacgtggcagaca

SEQ ID NO: 114364 - DNA, 76 bp, Homo sapiens
gacttcaagttcccattcacggcacttgatgacattagtgaaagcatcaaagagcttcagttttaccgaaataaca

SEQ ID NO: 114365 - DNA, 87 bp, Homo sapiens
ggccctgtccttgccccagtcactcctgtgcctgtggtagagagccttcaggtggactatatggatgaaaatgaagaatattttcag

SEQ ID NO: 114366 - DNA, 98 bp, Homo sapiens
atctcgctcggctgcgggaaatcgggctgaagcgactgagtccgcgatggagtctgcgggccaggcatcgacatccgcaacgactatcagcagctgaa

SEQ ID NO: 114367 - DNA, 50 bp, Homo sapiens
ttcacccaggccctggagtgcatgcgcagtttggaaattttagcattcag

SEQ ID NO: 114368 - DNA, 80 bp, Homo sapiens
tttggattcacccacagcggggcggcggcggcggcggctgcggcccaatatagacctgatggccaaaagaaaggaagaaa

SEQ ID NO: 114369 - DNA, 83 bp, Homo sapiens
cagcagccgtcggagcacttactggagtccaagatgctaatgctcattgctatggacagtgctatcaccctgtggcagttcct

SEQ ID NO: 114370 - DNA, 100 bp, Homo sapiens
cacggaccacacggagcgccgcggccgcatctacatccaggcccacatcgacagggacgtcctcattgtcctcggtgctggagaatctggtaaaagcacc

SEQ ID NO: 114371 - DNA, 75 bp, Homo sapiens
cgtcgtcctggtgctgcagcgcatcctgaggttagcattacacttctcccagtggagcccatgacttctgatcag

SEQ ID NO: 114372 - DNA, 98 bp, Homo sapiens
ggtcaaaatggaagtgaatccccctaaacaggagcacctgctggcgctaaaaggtacaccaggggttggaaaaaccacactaggcaaagaacttgcgt

SEQ ID NO: 114373 - DNA, 98 bp, Homo sapiens
ccgagcgcggccctgcaggcgatgtcgccgaaaccgggctgcaggcggttttgagtatccgaggagcccaggaggaggaacccacagacccccagctg

SEQ ID NO: 114374 - DNA, 114 bp, Homo sapiens
gctcttctggagctggagatgaactcggacctcaaggctcagctcagggagctgaatattacggcagctaagctgtcgccggtgtgcgcgagacggagagcaagatctacctgc

SEQ ID NO: 114375 - DNA, 126 bp, Homo sapiens
ccctactggaacaccttctcgctgccgccataccctgccttctccagcgacagccgccacggcctgcggcgcccgcggcaccatgatctccaccaaggagaagaacaagatcccgaaggacagcat

SEQ ID NO: 114376 - DNA, 83 bp, Homo sapiens
ggaagaatttcctctgaagcaccggctgaaggtgatgtggccgccctcaaccgacgcatccagctcgttgaggaggagttgga

SEQ ID NO: 114377 - DNA, 50 bp, Homo sapiens
tctccgccaccgtcttcaggccaggattgaccttccacccacacataaac

SEQ ID NO: 114378 - DNA, 90 bp, Homo sapiens
cttggaatggtgctgcttccagtggccagccagatggaagcatcctgcctcgtcatccagttggccaggagtggtggctcacacctgtaa

SEQ ID NO: 114379 - DNA, 74 bp, Homo sapiens
tggccctgtccactgagcgagaactatttgcctggggccgtggagacagcggcctcttcggcacaggaattcgg

SEQ ID NO: 114380 - DNA, 89 bp, Homo sapiens
aaggattccaagtaactcttatttgatgttggagtccggggtgacctggtctcagtgaagaaatctttaggccggaatcgactccttcc

SEQ ID NO: 114381 - DNA, 50 bp, Homo sapiens
tcagcctcccaagtagttgggactacaggcatgtgccaccacgcccagct

SEQ ID NO: 114382 - DNA, 83 bp, Homo sapiens
gtctcacctgaggtgaaccttcgaccttggacttctcagcctccagaatgatatctcccggggccaattcagcatctctacct

SEQ ID NO: 114383 - DNA, 75 bp, Homo sapiens
gtttatcctttcactgccacaaggcctgtttacttggcaagcattggggagtcagcaatgtccgttgtgttaaat

SEQ ID NO: 114384 - DNA, 100 bp, Homo sapiens
cactgggcgcagcggtgctcaatgacttgctctacgcagtgggaggctttgatggcagtactggtacatggaaaacttggggatttcacaataatttctt

SEQ ID NO: 114385 - DNA, 75 bp, Homo sapiens
gtattgctgtgggtgctgggacttcccgtccgcggcgtggaggaatgagatgctggaggaaggacatgagtatgc

SEQ ID NO: 114386 - DNA, 50 bp, Homo sapiens
ttctatcttaacatcaattcagatgctgggctcttgcactgtttggtgga

SEQ ID NO: 114387 - DNA, 100 bp, Homo sapiens
aggtaggacctgtgctggccgcgggagaggtaaacagaacaccaggacatcccagagtctgggaaatggtgctggagaatctggtaaaagcaccattgtg

SEQ ID NO: 114388 - DNA, 90 bp, Homo sapiens
gacgggagctacttccaaattaaccaagtccagggagtcggtagtaagggatggcgggacgtcaccacctttttttcggggaaagcagag

SEQ ID NO: 114389 - DNA, 75 bp, Homo sapiens
caggaaccagctcgggggccaactctgaggagtccactgcagcagtgtaaacaggaacatcgataagtagtgtaa

SEQ ID NO: 114390 - DNA, 75 bp, Homo sapiens
tagaccagctccaacaggattccatggtagctgggatgttagggctcagacacgttggtcgtcattgcctccgag

SEQ ID NO: 114391 - DNA, 73 bp, Homo sapiens
atgagcctgcagagcgcgcagtacctccgattggctctaccagtgcacctggacagggaggaatcctggctca

SEQ ID NO: 114392 - DNA, 94 bp, Homo sapiens
tgaagtccagtcacctacaggtgtttgtctcagaaatcgtatacatagacggatctcaatggaggttcaaaccttgtactactcagctgatcac

SEQ ID NO: 114393 - DNA, 100 bp, Homo sapiens
gatgaacatgtgcttggtgtcgtttttccttgagctgaacgtcttgcaacagtggccgcacgcatagctgataggaagatgtcttcaggaaatgctaaaa

SEQ ID NO: 114394 - DNA, 97 bp, Homo sapiens
caagtctctgaagccgtgcccgttcttcctggagggaaagtgccgctttaaggagaactgcagtccaaaagaaactcttccttcaaaacctgtgaag

SEQ ID NO: 114395 - DNA, 100 bp, Homo sapiens
agggaattcagcctcagtgatgtccatgagagaggattccggtcactgtgctgccacctgaggccatcacgatcctggaggcagagcccatacggatgct

SEQ ID NO: 114396 - DNA, 82 bp, Homo sapiens
ctggcggtttttattaaggctgttcatgtgaaagcctcccctggtgaagacacaaactgtcaccatctcagataatgccaat

SEQ ID NO: 114397 - DNA, 100 bp, Homo sapiens
caatttttccagcaacaccacaccctcctgatcaccatagctttatgaagctgaaacctatcaacactcttcaaaatgcaatggaatgtaccacggactg

SEQ ID NO: 114398 - DNA, 82 bp, Homo sapiens
gaacaatctctttcaaatgtcaaatagcggttgacatgacaactgaagagatagatgctcttgttcatcgggaaatcatcag

SEQ ID NO: 114399 - DNA, 100 bp, Homo sapiens
ccctgatggccaaaacccagaaaagatctttcagaacctctgtgacataactcgttctaggggcaccactatcagttaaccctaaagatttctgtgggtg

SEQ ID NO: 114400 - DNA, 75 bp, Homo sapiens
ttctgcccttccttctgtatatggctgcgccccaaatcagactgtgccctgtccacggtgcctcctgcatgtcct

SEQ ID NO: 114401 - DNA, 82 bp, Homo sapiens
ggaaatggctgcgagaccctagaggcctgcggcctgcgctcaccatggatgatgatatcgccgcgctcgtcgtcgacaacgg

SEQ ID NO: 114402 - DNA, 100 bp, Homo sapiens
tcggcgatcccaggcttggcggggcaccgcctggcctctcccgttcctttaggctgccgccgctgcctgccgccatggtagtttcctggtcccctacatc

SEQ ID NO: 114403 - DNA, 75 bp, Homo sapiens
ggcatttggagggtttctcatttggcctgctttgaaaagtccagccgcatttcatgagcagagaaggagcttgga

SEQ ID NO: 114404 - DNA, 82 bp, Homo sapiens
ggtgagtcgcggtgggtcctcgcttgcagttcagcgaccacggttggtggttctgtcagatgaaagcaaagcgaggctggat

SEQ ID NO: 114405 - DNA, 75 bp, Homo sapiens
cctgaccattttctactgtccctgcgcgagacatatggcatccaggagaaagatgtcttgccccttctccagata

SEQ ID NO: 114406 - DNA, 100 bp, Homo sapiens
tccgatggttctcgaaggcccgcggcgccccgtgctgcaggcaaaacccatttatggcggttggctgctcctggctccagatgggaccgactttgacaac

SEQ ID NO: 114407 - DNA, 100 bp, Homo sapiens
ttatgatgtctgcgatgatcaagagatccagaagaggctcgctgagcagcaggaccttatggattttctgaacccaaacggtagtgactgtactctagtc

SEQ ID NO: 114408 - DNA, 97 bp, Homo sapiens
aagttagtggattaaaatctcccaagaggaatgacaaacaaccagctcttcaggatggtgtcacatttttatggaaatggagatatttgtgatataa

SEQ ID NO: 114409 - DNA, 100 bp, Homo sapiens
tgctcttttaccgatgctttaacatacagccactaggattgctgtcacgtctaatgtggctgctgcctcgtgtcacatctgaaactcatctgtacctcac

SEQ ID NO: 114410 - DNA, 83 bp, Homo sapiens
caggcacgcgccaccactcccagaatgacagggagagagtttttctctcgtttcccagaactctatccttttcttctcaaaca

SEQ ID NO: 114411 - DNA, 90 bp, Homo sapiens
cacggatattaagactgcagccaaggactatggcaaggagtctcaggccaaggatgtcattgaagagtatttcaaatgcaagaaatgaag

SEQ ID NO: 114412 - DNA, 132 bp, Homo sapiens
ccgcgcctggccggggccgaggacaccgcggccgcccgggcctgcgggaagcgatggagcccgggaaggtgtggccgacgacgatgccctcgctgaggagcgcatgcggagaggccagaacgccctgccagc

SEQ ID NO: 114413 - DNA, 90 bp, Homo sapiens
ccgggcccccagccgcatcttctggcggaccgtgcgagggtgattctgggggtccacttgtctgtaatggtgtgcttcaaggtatcacat

SEQ ID NO: 114414 - DNA, 100 bp, Homo sapiens
aacaaacacccccaagaagaaggagagtaaagtcagcatgagcaaaaactccaaactcctctccaccagcgccaagaggaggaatgcaggctcaggttgg

SEQ ID NO: 114415 - DNA, 74 bp, Homo sapiens
caaaacccaagaagaaacagaattcaaaaggacttgctccttctgtggagatatacgactaaggggtcagacgg

SEQ ID NO: 114416 - DNA, 100 bp, Homo sapiens
agctcctttcctgcctctcacctcagcctgctccaggtctgcgctcctcagaccaccggcaggtgaacagcctgatgcagaccgaggagtgcccacctat

SEQ ID NO: 114417 - DNA, 75 bp, Homo sapiens
tgaggccggcttgcattccagtggcaatcggcgtgagttctgcttatatgagcatctgcctgcccttctgccatc

SEQ ID NO: 114418 - DNA, 100 bp, Homo sapiens
gtgtagaagctccatcccccttgtctttgtgcttgcctgcgtccccagactcagagagcggcactgcagaggtggagctgaagaagggagccactctcaa

SEQ ID NO: 114419 - DNA, 75 bp, Homo sapiens
gctgtcttcaatgctgttaactggattgagtccagctcttgggatgggtggttctcttcccaaagtggaagccaa

SEQ ID NO: 114420 - DNA, 97 bp, Homo sapiens
tccctctgagggaattgggaggtcggcggccccaaaagagagcgacttgcagttgtggaggtacagtgtgaacggctgaggatgctctaccgggact

SEQ ID NO: 114421 - DNA, 90 bp, Homo sapiens
gctgagacagaccggctggaggctcgcaagaaagccaagaacaagcagctgggccatgaggaaggttgtgaactaaaggccgacaaagat

SEQ ID NO: 114422 - DNA, 89 bp, Homo sapiens
caattccagaactccagtgagatggaaaaaatcccagaaattggcaaatttggggaaaaaggtatggcccatctcctgtacgcttggag

SEQ ID NO: 114423 - DNA, 75 bp, Homo sapiens
ggacggggagctgaacgtggacagcctcatcacccggctgctggaggtgcacttggaggctcctcagctcttcat

SEQ ID NO: 114424 - DNA, 74 bp, Homo sapiens
gcaattcaagatatccgaaggttcaattatgtggtcaaagttcagggagcaagtttccgaggttggaaagaagt

SEQ ID NO: 114425 - DNA, 111 bp, Homo sapiens
atgtagacatctcttcagtggaccccctgataggccggtttgctccaggtacaccaggggttggaaaaaccacactaggcaaagaacttgcgtcaaaatcaggactgaaat

SEQ ID NO: 114426 - DNA, 76 bp, Homo sapiens
gcggcggcggcagctgcagtgacatgtccagcatgaatcccgaatagtgaccaaaagccagccccactgtgagttg

SEQ ID NO: 114427 - DNA, 88 bp, Homo sapiens
cctgacgagcccctacctccccaacggatcgctctcgcccaccgcccgaaccgtggacatcttcaataaggagctactgctaatcccc

SEQ ID NO: 114428 - DNA, 85 bp, Homo sapiens
atatgaaactggaagacatcctggttttggcccgaaccgcgacttcaacaaaaaataagagaagaaaggaatattttctagctgt

SEQ ID NO: 114429 - DNA, 96 bp, Homo sapiens
gaagttcgaatggatcgcctgcttcctcacatgcataatatagttgagatttggagtcaaaatatggacctgagaaaatatctccagaaaatgata

SEQ ID NO: 114430 - DNA, 89 bp, Homo sapiens
tggatacggtcactttctacaagcttggagctcggcggcacaaccagcaccatctggtcgcgatggtggacacggaaagcccactctgc

SEQ ID NO: 114431 - DNA, 89 bp, Homo sapiens
cacttcattggccacctacagaaacaaaatgtcaacaaattgatggctatcatggtgaacttacttcagattgtgcgggaccactgggt

SEQ ID NO: 114432 - DNA, 90 bp, Homo sapiens
ctggtaggcacgggcggctccgcagtgaccggactcgggggagcaatcccacagagtattgatgaggaaactgaagtttggagcgatcac

SEQ ID NO: 114433 - DNA, 75 bp, Homo sapiens
cggccattcactgcccatgctgagcgcctctcacacagagcagcccgacggccatggaggctgaagagacgatgg

SEQ ID NO: 114434 - DNA, 75 bp, Homo sapiens
gaggacaaccacctgagcaatactgtacgtagccagtaccctcttatatatggactgattcttattccctgctgg

SEQ ID NO: 114435 - DNA, 90 bp, Homo sapiens
gaaagcaatagtgagccaaccacctgggccagtattatcaggcatggagatgctactgatgtcaggtcttgctgcaaagcttatgaatat

SEQ ID NO: 114436 - DNA, 98 bp, Homo sapiens
gccgccagcaaggaagaaatttgtgatacccctcgacgaggatgaggtccctcctggagtgagaggtggagaagagcgagtacttgagaaagaagagg

SEQ ID NO: 114437 - DNA, 98 bp, Homo sapiens
atgtgatgctggagaacttcaggaacctgctgtcagtggaacagacccaggaaagcattcagcattttgagcgacaggcagggctgagagatgctggc

SEQ ID NO: 114438 - DNA, 100 bp, Homo sapiens
cgcgtggagtgacggtcacaccgcggcgctccagaacctgggtatcaacccagcaaacattggcttcagtaccctgactatggagtctgacaaattcatc

SEQ ID NO: 114439 - DNA, 75 bp, Homo sapiens
gagctgttaacacttcctagataacgggttcttcacacacccccattcggcgtagtacccagagagctcaagatg

SEQ ID NO: 114440 - DNA, 96 bp, Homo sapiens
ccagtcccaagtcgtccccctctccgccccccaggaggggcgagagggagccgcagctgatgtcaggttttcctcctccaccaggcgctccacctc

SEQ ID NO: 114441 - DNA, 80 bp, Homo sapiens
tcggaggcggcgaggagcgcctgcctgaggagagcaggcatgttatttgaaagcaattgagacgcaaccgaactttgcag

SEQ ID NO: 114442 - DNA, 100 bp, Homo sapiens
caggaagctttggatcagacttttgtgttgcagttcgggtgctggagaatctggtaaaagcaccattgtgaagcagatgaggatcctgcatgttaatggg

SEQ ID NO: 114443 - DNA, 100 bp, Homo sapiens
ggaagaagatggcgctcaccaggtctctaattaacagaagatggcaaagcccagccacagcagctatgtccttcagcagctaaacaaccaaagagaatgg

SEQ ID NO: 114444 - DNA, 90 bp, Homo sapiens
ggtgcagatgaacctgtacgccacctgggaggtggaccggagctcgtccagctgcgtgcctagagaaccatggagtctggcagtaccgcc

SEQ ID NO: 114445 - DNA, 100 bp, Homo sapiens
gaacagtttatagagaacttcagaaactttcaaagtttgatgagcagagaactgctactccaaaagaatgcaatggtgtaaagattccagttgatgccag

SEQ ID NO: 114446 - DNA, 100 bp, Homo sapiens
tgcgtcgggttctgttggagtgcgttcggtgtgccgtgggtccgcgctgcttccacccaacttcctgttaggtgtcatggagaaactccagctgggccca

SEQ ID NO: 114447 - DNA, 50 bp, Homo sapiens
ccacaggtgttgaagaagataaagccttgaaaagatcttttgaggtcgag

SEQ ID NO: 114448 - DNA, 96 bp, Homo sapiens
ccagctttaccgcaaccaccgccaccagtccacggagggcatgagtaagactttgaccccgacgcaggcttcagtgattgccgcggatcagaagcc

SEQ ID NO: 114449 - DNA, 101 bp, Homo sapiens
caggcttttgtgtggacataagttgtcgactcatttggataaagaccaagaagtgggattactggattatatgctgctactgtttgaacggtcttggatga

SEQ ID NO: 114450 - DNA, 83 bp, Homo sapiens
caggagctcctccaccaggccaaagacttcggcaaccatggtgaatccgggcagcagctcgcagccgcccccggtgacggccg

SEQ ID NO: 114451 - DNA, 82 bp, Homo sapiens
ggaaccacaaaaaggccaatttcagatggcttcgggagcaggaaagaaaagaagcagaagaagctagtcaaaaggaaataga

SEQ ID NO: 114452 - DNA, 100 bp, Homo sapiens
actgcatctttctcaacatcacaaacagtgagctcttcattctgacaatgccatccccatcaaatcctggttcagtgaccccagcgacacagcccttctc

SEQ ID NO: 114453 - DNA, 50 bp, Homo sapiens
ggaaagaacaccgacttcattgagaaggtggcatttttcaactccgctgg

SEQ ID NO: 114454 - DNA, 96 bp, Homo sapiens
gccgaagcctcggaaggagcggcccacggcaaagctaccagagattcactgactgctataagtgcttctaccagttgcagcctgcgatgacacagc

SEQ ID NO: 114455 - DNA, 100 bp, Homo sapiens
cagccaagatcttggcaaagcttctccctcagtatttagaccagcgctgataaagcagtttgtgtccgacgtggcctggggggagctggactacctggtg

SEQ ID NO: 114456 - DNA, 75 bp, Homo sapiens
atcctaatgacagtctccaaattcgcctccatctgtaccatggctgaccggttccctgatgtgttacctgcttct

SEQ ID NO: 114457 - DNA, 83 bp, Homo sapiens
ctccgtcgcagactacggacctgtctgggtctcagccgccaaagaccccgtccggtaggtcttgggcgtctttggtactggct

SEQ ID NO: 114458 - DNA, 149 bp, Homo sapiens
aaggagtagtcggcggtggcggcggcaccaaggcccccaagccctccttcgtgtcgtacgtacgccctgagcttgtacctccttttaaacctcaagtaacatctgagacagatactagatattttgatgaagaatttacagctcagact

SEQ ID NO: 114459 - DNA, 121 bp, Homo sapiens
tagaagtggtgatgcaagaagtttctaggaaaggccggacaccaggcagctcacagtgtgccaccatggagttggggcccctagaaggtggctacctggagcttcttaacagcgatgctga

SEQ ID NO: 114460 - DNA, 50 bp, Homo sapiens
aaaacaacaattaaaactggtgcttcagagactaaggtgtcagtatgttc

SEQ ID NO: 114461 - DNA, 83 bp, Homo sapiens
ccaggaggaagcaggagcagcccaagcgccttccctcacggcaccatgccggtggaaaggatgcgcatgcgcccgtggctgga

SEQ ID NO: 114462 - DNA, 74 bp, Homo sapiens
aagattgaggcctacatggaagttccagctattcttcagatgctctggattttgagacggagcacaaattggac

SEQ ID NO: 114463 - DNA, 100 bp, Homo sapiens
ctcctatatggactaggagaaatatttcctattgagaacatctatagtgctaccaaaattggattatatgcgtcaggcaggagaagtgacttatgcagat

SEQ ID NO: 114464 - DNA, 90 bp, Homo sapiens
ggaatgccttaattgaacaagccctggccaacgtcaacattgggagcctcatctgcaatgtaggggccggtggacctgctccagcagctg

SEQ ID NO: 114465 - DNA, 75 bp, Homo sapiens
cggagggggagactgtgccgtggagggcctcgccatgtcctgctgcccgatcatggaagggaagtggttgctgtg

SEQ ID NO: 114466 - DNA, 144 bp, Homo sapiens
ggaaaccctgaaaagcgaccggcaatataaattttggagccagatctctcagggccatctcagctataaacacaagggcatgtatatcttcctgcacacggtgaaggggacaccctttgagaccccggaccagggcaaggcgag

SEQ ID NO: 114467 - DNA, 51 bp, Homo sapiens
ctggggaaccacacagccagagaggacatggatttgattgacatactttgg

SEQ ID NO: 114468 - DNA, 75 bp, Homo sapiens
gaaattacctgtgataattttgaacacagatatgtagaactcttcttgaattctacagcaggagcaagcggtggt

SEQ ID NO: 114469 - DNA, 75 bp, Homo sapiens
tgcttctgactatcttctcttcaccagctcttcagatcaatatgactcctgaaacagactactctttgccttttt

SEQ ID NO: 114470 - DNA, 101 bp, Homo sapiens
ggggggctagtggccacgctgcagagcctcgagtctctctgagaaatcaaggaaagtattccgaatatttcggcagtgggaatctctgtgctcatgctgaa

SEQ ID NO: 114471 - DNA, 75 bp, Homo sapiens
tgcggacgccgggagcttctgcgcttgctacagtccgggcgtcgggcctactttgaaaacgactgctgggtcagg

SEQ ID NO: 114472 - DNA, 75 bp, Homo sapiens
agaagttatgcttgttggaattggtgacaaaatcagaggcatactttatagtgcctccggagccagcgtggtggc

SEQ ID NO: 114473 - DNA, 88 bp, Homo sapiens
gttccttctgcaacagaaataataaaagcttccagcaaagatgccatcaggctttcgtgaaggaatccaaggaggagaccccaggcac

SEQ ID NO: 114474 - DNA, 100 bp, Homo sapiens
gctcaatgcagatctcatgacccttagccaccgggaacctaaagaactggatcctattgttaccagacgcgctttgatgacagtagggaaagaaccattt

SEQ ID NO: 114475 - DNA, 98 bp, Homo sapiens
ctttatgtggaaaagccaaaactggacaaaggccaacggaaaggaatgcgcttcaaatctactctggatgatgccactgatgcctggggaataaaggt

SEQ ID NO: 114476 - DNA, 74 bp, Homo sapiens
tggggctgtgctccatggcgagctgggttatacattggctcttcaaagacgttcacctcatcagagaaatccct

SEQ ID NO: 114477 - DNA, 76 bp, Homo sapiens
ccacccgccggcttggttcatccacccttggatccaagtcttcaggcacagtgtggatacaagtccaggatatcat

SEQ ID NO: 114478 - DNA, 74 bp, Homo sapiens
agtgatgacctggatagtgaagcccagcgaggtcatgatgatgatgtttctagcaccagtgaagatgatggcta

SEQ ID NO: 114479 - DNA, 75 bp, Homo sapiens
agcggagggagccccagacacgctcgccctcccctacctgcggaagagtcaagggaatgtcatcaacatctccag

SEQ ID NO: 114480 - DNA, 100 bp, Homo sapiens
ctcggagccagaggagaggcgcccccgccggccgccgcgccgcccggcagcctcggcagtttctccttggaccaagatgactgatggaaaactctccacc

SEQ ID NO: 114481 - DNA, 98 bp, Homo sapiens
ggggaccaaactctccatcacccagggccgttaattaaggaaaagttgagccagggcgtgaccctcgtcgtggacagatacgcattttctggtgtggc

SEQ ID NO: 114482 - DNA, 113 bp, Homo sapiens
ggcgagcggtgacctggaccacggcgcagacgcgggcgagctgcggctcggacgccagcggacacgcgggcgaggtactccaaagattcaggtttactcacgtcatccagcag

SEQ ID NO: 114483 - DNA, 75 bp, Homo sapiens
aagaaggtcagtgtgcttgcttggagatcaggacgcaaagggcgccaatgcttcggcattagagaaagagattgg

SEQ ID NO: 114484 - DNA, 90 bp, Homo sapiens
gatcttcttttggagcagcagagactgattcaccaaggcctgaaaagagggagaccaagtgcccgatccctggatgtgatggcacgggac

SEQ ID NO: 114485 - DNA, 100 bp, Homo sapiens
cccacccagatgccagtagtgcccgccccacccgcatgctctttgtcactccccggcggcagcacgaaagtaccatttctgatacaacaccccttttaaa

SEQ ID NO: 114486 - DNA, 100 bp, Homo sapiens
acctgcgcccagccagacacttattagctcaggtttatgctaaaactatcgatgggcaacagactattattgcatgtattgaaagccaccagtttcagcc

SEQ ID NO: 114487 - DNA, 98 bp, Homo sapiens
cctctccccaagcgcgggcccggccagcggaagcccctgcgcccgcgccatggagttgatccctgaattttattatctccctgagatgtttgtcaact

SEQ ID NO: 114488 - DNA, 51 bp, Homo sapiens
ggaggggctccggctggtctgtggtgagctttccccagacatggccaacaa

SEQ ID NO: 114489 - DNA, 98 bp, Homo sapiens
gcgagggcacaaaataaccacttaccccttctcaccgaggaagagcgggagaaaggacagaaagaatttactttcaggttttcttacctaaagggagc

SEQ ID NO: 114490 - DNA, 75 bp, Homo sapiens
cagctccgggaccggccgaaaggcgaggaaccggagccttcacgtaaatgggtccagtcatgcctcccagtaaga

SEQ ID NO: 114491 - DNA, 90 bp, Homo sapiens
aaggaagagctgaacgtttagaggcaacagaataccttgtctcagctgctgaagctggcatggattccgtgaaggaacaacacctaaacc

SEQ ID NO: 114492 - DNA, 74 bp, Homo sapiens
atggggctggacctgctggtgttcgcccacgaccatggttcgatacaagaggctgttttcctagcgtggcttgc

SEQ ID NO: 114493 - DNA, 83 bp, Homo sapiens
taccagtccccagtgagggtgtacaaatacccctttgaattaattatggctcatccaccagctgaggaacaaagtatcagagg

SEQ ID NO: 114494 - DNA, 98 bp, Homo sapiens
caaatgccagggataactggaactatacacctctgcatgaagctgctattaaagggaagatcgatgtgtgcattggtggataattactgtaccttcct

SEQ ID NO: 114495 - DNA, 90 bp, Homo sapiens
actgagctctgccgggacatgttctccaaaatggccacttacctgactggggaactgacgggcagcacttagatgagttgatcccttcac

SEQ ID NO: 114496 - DNA, 100 bp, Homo sapiens
cccccctccctaccgcccctgtcccgccggggagcggcggcggccttggactttgctgtctttcctcgcggagacaggttgagactgagctaaagttaat

SEQ ID NO: 114497 - DNA, 75 bp, Homo sapiens
gttcctggggcatcgacgatctccatatttcattgcaaggaatcccgttctgcttccagaagtggaagtgctcac

SEQ ID NO: 114498 - DNA, 100 bp, Homo sapiens
aggcactggcagaagaaaacaggaatgtggtggatgggccatacgctggagtcatgacagcttatgagtttgccagatccggcccggtgcctgggttcca

SEQ ID NO: 114499 - DNA, 82 bp, Homo sapiens
cgatgctggggacaagaatgccaccaaagcaggcgatgacgagccagagtacgagggcggcgactggcggcgcgatggacct

SEQ ID NO: 114500 - DNA, 80 bp, Homo sapiens
gttttacttcacggccgtgacccagtgctctgcggattcggttcattcacggtggctttttctcaagtatattttccagt

SEQ ID NO: 114501 - DNA, 100 bp, Homo sapiens
tgaggggtttgtactatcctcggtgctgtggtgcagagctagttcctctccagctcagccgcgtagaccccaagactgcttctgagacagaaacagatat

SEQ ID NO: 114502 - DNA, 100 bp, Homo sapiens
gagcagttttaccgcgacctccggaggccggcgtgacaggctctgtcactaaaatagattgccacggcagtgaagtttctacagaattcccgggtccgcc

SEQ ID NO: 114503 - DNA, 111 bp, Homo sapiens
agttataacgctacacgaagaactaagaatattattagcacaagagcaccatactttgaggatcgtctggggaatatttttcatcttagttgcattgctgtttgtaatttc

SEQ ID NO: 114504 - DNA, 51 bp, Homo sapiens
atcaagttcaaggagtctcttgttaatctctggatgagggggatattgcct

SEQ ID NO: 114505 - DNA, 101 bp, Homo sapiens
caagtaaaaacaatagctcaaggaaacctttccaacacagatgtccaagctgccaagtactataagatctccgtggtgctcatgtgctttgtggtccccac

SEQ ID NO: 114506 - DNA, 75 bp, Homo sapiens
cggacctgtcgcgatgtcagggctgcgcctctctgcagcagactacatgaggaaataattgacttttataacttc

SEQ ID NO: 114507 - DNA, 76 bp, Homo sapiens
gatatctgaggatggggagcagagtttgatcctgtctacttcacaaacaacagcctttgtgcctgctccacctgtg

SEQ ID NO: 114508 - DNA, 75 bp, Homo sapiens
ggccctgttcggaggggagcccaaaaacccagaaatgactgctgagtacgcctgcacaaggaaacagtttaacaa

SEQ ID NO: 114509 - DNA, 100 bp, Homo sapiens
accagttgtttgttggctccctacaaacatgtcattcaagtggctaatcttacaacagcacaaattcatctaaccagttccaccaggtgagaagagtgat

SEQ ID NO: 114510 - DNA, 50 bp, Homo sapiens
ggaaatactaagtttgttctggacaagagttgatctctctaatgtattag

SEQ ID NO: 114511 - DNA, 98 bp, Homo sapiens
tttcttcattcacaatcccaagcgccaggaccttgaagttgaggccctggccaacgtcaacattgggagcctcatctgcaatgtaggggccggtggac

SEQ ID NO: 114512 - DNA, 112 bp, Homo sapiens
tggaccccaacgaggtgtgggagatcgtgggcgagctgggcgacggcgccttcggcaaggtttacaagatgatgtctgtcctcatgaacaccattgtctttgaagactgtcg

SEQ ID NO: 114513 - DNA, 50 bp, Homo sapiens
agtgtcctttcacacccatgtgaaagagaccggccttattgtcgcctgct

SEQ ID NO: 114514 - DNA, 88 bp, Homo sapiens
tacagcagagacgtcatacttggaaatggctgcaggttcagactatgaaacccacgtagtcgaacaccgtgatgcttctcctgcaggg

SEQ ID NO: 114515 - DNA, 100 bp, Homo sapiens
gccgagccgagggccaccccctggtcctctgccctcgcgccccgctagggccagtggcttacagaagagacgaaatgtggtctgagggacgatatgaata

SEQ ID NO: 114516 - DNA, 75 bp, Homo sapiens
ccctgtgcaggctccaccaccgctgtgctaactggaccgcggcagaagagtggtgcctggatcaaagtggaacag

SEQ ID NO: 114517 - DNA, 97 bp, Homo sapiens
tctttccggatcaatccagatggcagccagtcagtggtggaggttaaagaactgaatcattatctggaagctgagaaatcttgtaggactgatctag

SEQ ID NO: 114518 - DNA, 50 bp, Homo sapiens
tggaggcagaggtggcatgggtccgtgcactggagaaggcgaggtcaagt

SEQ ID NO: 114519 - DNA, 89 bp, Homo sapiens
gcccctggtggctgtgctcattgattcaggtgacacctattattttggaggcaggagtagggctgattggagccattgtacagtgtcgg

SEQ ID NO: 114520 - DNA, 80 bp, Homo sapiens
gcgcgcctcgcctcacagcgaaacgccgcgcactcggagccggcacggctcggcgtgcacctatgatatgtgttttagaa

SEQ ID NO: 114521 - DNA, 87 bp, Homo sapiens
acttgcttccaatccatacaggcccaaaagagttcagagggatgccaagggagcagagatgcctgcagcccgtgggagcaagtcctg

SEQ ID NO: 114522 - DNA, 96 bp, Homo sapiens
cagataatctccaccgactctgctgtagcctcacctcagcgcattcagattaatggaaagtggagtggtcagagtgctggaggatgtggaaatttc

SEQ ID NO: 114523 - DNA, 88 bp, Homo sapiens
ttttcaacagccttctcaattttctttctcagaaagcagaggctcagagcttggagacagacgaataactgaagtgaagtgatggact

SEQ ID NO: 114524 - DNA, 88 bp, Homo sapiens
cttcctcacccgcgcctgcgacctcgggctgaagaagatgcagagcagcctgaagctggtggactgtatcatcgaggtccacgatgcc

SEQ ID NO: 114525 - DNA, 90 bp, Homo sapiens
ggaaacacatgaaattgtggcgatcaagaaattcaaggacagtgaagcactatttctgtgatgcatggaatacatttgacgccttgattg

SEQ ID NO: 114526 - DNA, 100 bp, Homo sapiens
cataaggataaaggatttggctttatccgcttgacagcacccaagaaaacctcatttggctcgctgaaggatgaagaccggattttcaccaacctgtacg

SEQ ID NO: 114527 - DNA, 90 bp, Homo sapiens
agcaagaaggccctggacacagcaatatctctgggctttcacaggatttggtgctatggagaaatttttggtagaatataagagtgcagt

SEQ ID NO: 114528 - DNA, 100 bp, Homo sapiens
cactacctccaccagatgttggggagggcgatgagacaggtgtgatggacagtcttctagaagccctgcagtcaggggcagcattccgacggaagagagg

SEQ ID NO: 114529 - DNA, 95 bp, Homo sapiens
ggattcgttacagccagagattgattggaaaatgccttttatgaacatgcacagacttattactacactgagatcagaagagtgaaatctcataa

SEQ ID NO: 114530 - DNA, 75 bp, Homo sapiens
ccaccaatgtcaacacacagacatggtctaggtgctggagaatctggtaaaagcaccattgtgaagcagatgagg

SEQ ID NO: 114531 - DNA, 82 bp, Homo sapiens
tgggcgttcatgatcctggccagcctgctcatcgcctactgcagtctctaattaacagaagatggcaaagcccagccacagc

SEQ ID NO: 114532 - DNA, 90 bp, Homo sapiens
aagagtgagagagagctattagagattgtgaagaagaatttcgatctccgccctggggtcattgtcagctgtgatgcagatccatccgcc

SEQ ID NO: 114533 - DNA, 98 bp, Homo sapiens
cagaggagatcctcagaggggagacccctcgggtggaagaagtggggccatacacctacaggcgcagtgagcctgcaggccgacctcactcgtggcac

SEQ ID NO: 114534 - DNA, 130 bp, Homo sapiens
aaacctgaaacaaggtgatctggggaaccaaagactctgggactcttggtgccaacagagttactctagctaattcatgaggtatttgcccttctgaagttggaatctgtaatgatttaaaacatgagac

SEQ ID NO: 114535 - DNA, 50 bp, Homo sapiens
cggcgatccggggtctgggcgcggcgagggcaaatgacacagctttgtga

SEQ ID NO: 114536 - DNA, 80 bp, Homo sapiens
acggacagtgcagggaagcaactgcagaggaaatggtgttcacactggccctgaatcaagggaacaccagttttcacatg

SEQ ID NO: 114537 - DNA, 100 bp, Homo sapiens
gggcggccccggccgcctccgcgagggcaccatggaggtgaatgcagaatacagttatggccacccaggtaatggggcagtcttctggaggaggagggct

SEQ ID NO: 114538 - DNA, 82 bp, Homo sapiens
tgggggcctgcagacgctgctccggaacagccaccaggtgttccaagacagttaaatctcacacagaaacagatgagaaaca

SEQ ID NO: 114539 - DNA, 100 bp, Homo sapiens
acttgagctgaaagcgaaaaactatgctgaccagaataatgctcggaatatttttcaatgtccattccgctgtgttgattgaggacgttcccttcacgga

SEQ ID NO: 114540 - DNA, 82 bp, Homo sapiens
gacacaggcagagcaagctgcacaggagcgtcttatggatgatgggcttgaagatgagagtggagaagatggaggtgaagat

SEQ ID NO: 114541 - DNA, 100 bp, Homo sapiens
ctttaaatcatgcagatcattcatcaaaaatagtccaggagagagaagctcttcagaaacagctggatgaagcaaatcgagaagcacaaaaatatcgaca

SEQ ID NO: 114542 - DNA, 82 bp, Homo sapiens
aaacggcgagagtgggcgagaacgtccactgcgggccggcgaaagctgcctcccgcgacgatgcccctcaacgttagcttca

SEQ ID NO: 114543 - DNA, 50 bp, Homo sapiens
acttttaaacattacagttgtataagatggagtctcgctctatcgcccag

SEQ ID NO: 114544 - DNA, 100 bp, Homo sapiens
ctggccgggcccaggtcccttcctccgaggaagacaatgtgtggcaccctggactacctgcccccagagatgattgaggggcgcatgcacaatgagaagg

SEQ ID NO: 114545 - DNA, 95 bp, Homo sapiens
ccgcgtgccgcgcttacgccacctccagcccgggccagagggtgcagaagggagtctgcgctcctcagaccaccggcaggtgaacagcctgatgc

SEQ ID NO: 114546 - DNA, 98 bp, Homo sapiens
aggatgcgcaaggtggagagccgcggggaagggggcagagaggatgctccaggatgaaacgccataggcctgtcagcagcagtgacagttcagacgaa

SEQ ID NO: 114547 - DNA, 90 bp, Homo sapiens
gggttattcgagtgaccgagaccgcggccgggaccgaggagactaaggtgtcagtatgttcttcaagctgctctgctcctgggcccaagc

SEQ ID NO: 114548 - DNA, 73 bp, Homo sapiens
gaacctggaagttgtgctttttaagatgggaacgttgtctgtgtgcagtctaatcatctgaaaaacatccctg

SEQ ID NO: 114549 - DNA, 98 bp, Homo sapiens
gccctgctccctctcagcacctgggcggacggagcctcacagtctactcagagaaaaataaaagaaggcaaaatgagtcctccccatttccatgcaag

SEQ ID NO: 114550 - DNA, 141 bp, Homo sapiens
tgccggtcgaccccagccagcgcagcgacggggcgctgcctggcccaggcgcacacggaagtgtacttcctcgcgtattgctaaaggaggagttgaccacaccaaaatgagtctacatggtgctagtgggggacatgagag

SEQ ID NO: 114551 - DNA, 97 bp, Homo sapiens
gcacatctcagtgaatttgcaagtggaagtgttgatggcgtctctgaatccaagttgcaaatctgtgttgaaccaacttcccaaaagctgatgccag

SEQ ID NO: 114552 - DNA, 101 bp, Homo sapiens
gggaagccgtgatgagggccgtgttgacgtggagagataaagccgagcactggtctcggcgcggaagatggccggcggcgtggacggccccatcgggatcc

SEQ ID NO: 114553 - DNA, 90 bp, Homo sapiens
ggagaactgccccaaggatttgcaaggcatttgttgctatcggggactacaatggccacgtcggtctgggtgttaagtgctccaaggagg

SEQ ID NO: 114554 - DNA, 113 bp, Homo sapiens
cgcgcattcggccccggacgaaggtactcgcagcacttggagcgcagaaccggccgcgcccgacaatgcagatcttcgtgaagactctgactggtaagaccatcaccctcgag

SEQ ID NO: 114555 - DNA, 74 bp, Homo sapiens
ggggcggcagccgattcctggccacctccatagcaagcagtctctagtgatccctgaaaagttccagcatattt

SEQ ID NO: 114556 - DNA, 90 bp, Homo sapiens
ccagcatcttggctgaccttgagtgcagctccccctataagcctcggcctccacaggtcagctcaagtaatgtcgtcttgaagacgggat

SEQ ID NO: 114557 - DNA, 75 bp, Homo sapiens
gaagaacttaaaactcaaagttgtatggattgtatagagcaattctgtggtgttcttggtcacacatttatggag

SEQ ID NO: 114558 - DNA, 100 bp, Homo sapiens
cgaacatcagggccctccagactcaggcgccccaacaatatcagaaaggtagatttgtcaaaaaacctgttgtcatcatgggatgaagtgatacacattg

SEQ ID NO: 114559 - DNA, 100 bp, Homo sapiens
acaggctcaggtttccttccttcgcagcttttagaccaaaatatgaaagacttacaggcctcgctacaaggaagggatgagaccatgcagcctgcgaaac

SEQ ID NO: 114560 - DNA, 78 bp, Homo sapiens
cagaaccgacttctccccttgtggaattacaagagatttcgactgtggaagatatctcccggggccaattcagcatct

SEQ ID NO: 114561 - DNA, 100 bp, Homo sapiens
attcattgcatggtctccagatcattctcatgaaagtggacacttaagttatgcctgtccgaaaaatatgctcggagaacgtgagcctccaaagaagaaa

SEQ ID NO: 114562 - DNA, 82 bp, Homo sapiens
gaggagtcccgctcgaagctaggtcttccgaccccgaactccaccggaggcaattgcactgtgtagccgtctgctggagtat

SEQ ID NO: 114563 - DNA, 75 bp, Homo sapiens
ggcagcgcccgcggagacgtgaagagaagaagcgctgcaagtacaaaattgaaaaaattgagaccataaagcctg

SEQ ID NO: 114564 - DNA, 75 bp, Homo sapiens
aaactagtccttattttccaaccacagatttcagatgcatgccaggtttccactgattgccagaactcgagatca

SEQ ID NO: 114565 - DNA, 100 bp, Homo sapiens
ggcggtgtctggcaggagctgcgtggcagggagggcgtccatggctgcagccaacaaggctgacaatggcaccatgcatctttgggactggagaactggc

SEQ ID NO: 114566 - DNA, 100 bp, Homo sapiens
ggaaagaagggaatgagtttaagatgatgcctaacaggagaaatatgtatacagtacagaataattcaggtcgtctccatgtccaaacgtcaagcacggg

SEQ ID NO: 114567 - DNA, 88 bp, Homo sapiens
ggaatcaggcagttttgtgtccatgtgaacaactgtcacagtgctgtcgatatcaccaaggtggctagaagacatcgcatgtctcctt

SEQ ID NO: 114568 - DNA, 100 bp, Homo sapiens
tgagcagtcaactcaaatgcaagtccaagaggaggaggaggcggaggtccaagcggaaagcgtcgagggcgaggcccccagcagtgagactggcacatcc

SEQ ID NO: 114569 - DNA, 75 bp, Homo sapiens
agtcgacactctcgcgcccggaggtaaaatcatctctattgatactagttccctgagagctgctggcagaactgg

SEQ ID NO: 114570 - DNA, 100 bp, Homo sapiens
gcacattttgcctctggttggtggaaagaaacccagtacagcagtggaatatctagccgcccacctctccaaaatccatggcctggactggcacccagac

SEQ ID NO: 114571 - DNA, 80 bp, Homo sapiens
gcggccggtcgggcggggcggcggcgctgacaggtgtggacactgccagcggctgcagccgacttggaatgacctgggag

SEQ ID NO: 114572 - DNA, 90 bp, Homo sapiens
caacacggtggcaagcaagtttaatcagacctgctcacacttcagaatagagaagagggagagacaagctcaacgagaagatgccctcga

SEQ ID NO: 114573 - DNA, 100 bp, Homo sapiens
ctttgaccttctgccatgattgtgaggcctccccagccacgtgaaactgtgctcatctgccggaactaccgtggcgacgtggacatgtcagaggtggagc

SEQ ID NO: 114574 - DNA, 90 bp, Homo sapiens
cgtgtgttggcagcgcaattgtgcagacgctgtaaggccaaaacgaggatttgtgttgtgagagggcacatctgctcgataacacagaga

SEQ ID NO: 114575 - DNA, 80 bp, Homo sapiens
caacgcctggctcggagcagcagcctctgaggtctctaattaacagaagatggcaaagcccagccacagcagctatgtcc

SEQ ID NO: 114576 - DNA, 100 bp, Homo sapiens
cgtaattgagttctgacacggccttggatgtttctgtcctaaatagctgacattgcatcttcaagactgtgacacagcaggccaggaaagatacaggact

SEQ ID NO: 114577 - DNA, 83 bp, Homo sapiens
gcttcctggcctgggcgctccggtggcggcggagcctcccgcgacgatgcccctcaacgttagcttcaccaacaggaactatg

SEQ ID NO: 114578 - DNA, 82 bp, Homo sapiens
atgtccgcaccgggacgatcatcctggggacctggtacatggtatcagtgcttcaaatcggcctggatgtttgaggtgtttc

SEQ ID NO: 114579 - DNA, 100 bp, Homo sapiens
gcgtggcgttgcagaagctttccggcacaggagtgacactgctgatcctgtaacatggaggattgtcttcatacctcatctgagaatctgtccaaattgg

SEQ ID NO: 114580 - DNA, 88 bp, Homo sapiens
cagattcgcagtggtcgcttcttctccttggtgctgaaggtcgccatcctggctgagaagtacgcggtggactacacctggtatgtgg

SEQ ID NO: 114581 - DNA, 50 bp, Homo sapiens
tggacttccagcttccagaactgcactggtgagaaaaattgatgcctcag

SEQ ID NO: 114582 - DNA, 100 bp, Homo sapiens
cgagctgagtggttgtgtggtcgcgtctcggaaaccggtagcgcttgcagcatgtgggatggagtaggacctcttccagactgtgctgaaccaccaaaag

SEQ ID NO: 114583 - DNA, 90 bp, Homo sapiens
cagaaattctggaacacctatatggtagcaaaagatatggcagcggcagcagttagatgcatcagaaaggagatccgggatttgtatgtt

SEQ ID NO: 114584 - DNA, 100 bp, Homo sapiens
gggccgccgagctggacccggaccggttttggaaagccaaacttggccctgctggcaacaaagtcatcagtccctctgaagacaggaaacaaccttccaa

SEQ ID NO: 114585 - DNA, 101 bp, Homo sapiens
gagagaccccgcggctgggcgttcatctaccacgctttcgtgtcagcccaaggccaaccccactgtcactctgttcccgccctcctctgaggagctccaag

SEQ ID NO: 114586 - DNA, 80 bp, Homo sapiens
cgccttcctcaacgacgcggacatggtcatgagctttgtgaacctggtgcaagcagctaatgactcagtctgtagactcc

SEQ ID NO: 114587 - DNA, 90 bp, Homo sapiens
gccggcctgcggaacgaaagtgaacaggagccgctcttaggcgacacacctggaagcaggaagctcttcgtgggcggtcttgactggagc

SEQ ID NO: 114588 - DNA, 74 bp, Homo sapiens
gagatttattcgtaatgcgactcaaagctgcacggcagtctgtttatgaggaacaagagctggacacattaaaa

SEQ ID NO: 114589 - DNA, 100 bp, Homo sapiens
cggcttccggagccctcggggcggcggactggctcgcggtgcagacggtctggaaaatcccgaagcagaagcccgtattcatctaggcattcaagatctc

SEQ ID NO: 114590 - DNA, 98 bp, Homo sapiens
ccaagcactctagatgccctcaactatgctctccgctgtgtccacagcgttcaaggtgaacatgatgaccttggcagaacacattattgaagccacac

SEQ ID NO: 114591 - DNA, 100 bp, Homo sapiens
gggcagcagcggcgccgtgctcgctccaggtatgtgaggagcagcgctgtgaggaggaagtcttccccctggccatgaactacctggatcgctacctgtc

SEQ ID NO: 114592 - DNA, 100 bp, Homo sapiens
aaaaatacatatctggttttggtgttagtaaaatggcctttcgccatttaattgagttcacatatacagcaaaattaatgatacaaggagaagaagaagc

SEQ ID NO: 114593 - DNA, 100 bp, Homo sapiens
ggccagctgccgcgactgggaggagcgccggaacgccgaggcccaggattgacttctaaagactcttggtacgtgaggaagaaacccggaagaggaagag

SEQ ID NO: 114594 - DNA, 76 bp, Homo sapiens
gctcactgtcagcgcctggaaacttgctcacatgttctcaaatagtgatgaagctgtaatcaataaaaaacttccc

SEQ ID NO: 114595 - DNA, 137 bp, Homo sapiens
agccctgctgtatatgtattgtcattctcttaccaaaagaagagagtggctcttaagaaaatccagtttgcttaaaaagctatagaatgtgctgtccatacacaagaagagcttcaaaatccagccgtcctatgtat

SEQ ID NO: 114596 - DNA, 98 bp, Homo sapiens
attggtgtgctgtattttgctattcatgtaagcacagtcttcacagtattgcagcaccagcagacgtttttgaatcaactgagagaaattacggggat

SEQ ID NO: 114597 - DNA, 100 bp, Homo sapiens
cctcaaccaatcggacacctaccaggtggacggcacggacgacagaagcgactttggtgagactctgggagaagatacccattatcagaaaaaaaaatta

SEQ ID NO: 114598 - DNA, 90 bp, Homo sapiens
ggtactacctgcgcaagctcaacctggacgggtccaactacacgttacttaagcaggggccctcctcgccaaagacagcctagagaggac

SEQ ID NO: 114599 - DNA, 98 bp, Homo sapiens
cacaacgttcaaccatgctcggtcatctgtggcagtatatcaaggtttatggctacaaatgatttgatgacggaactgcagaaagattccatcaagtt

SEQ ID NO: 114600 - DNA, 87 bp, Homo sapiens
gcgcaactagcggcgggtcgtgggcacctccagatctgttacctaaagcaataaaaaatggccagaggatcagtgtccgatgaggaa

SEQ ID NO: 114601 - DNA, 51 bp, Homo sapiens
gccaatgttggtgctggcaaaaagtgatgctggaaatagtgaccgagtagt

SEQ ID NO: 114602 - DNA, 75 bp, Homo sapiens
tctttcctcgtggaatttgaagattctacagataaatcagaaagaagcagatgccattgatgacactctgagttc

SEQ ID NO: 114603 - DNA, 74 bp, Homo sapiens
agtcaccagcaggagcagccaaccagcagcagccatcatggagccaaagtggaacaggtgaagttcgatgccac

SEQ ID NO: 114604 - DNA, 96 bp, Homo sapiens
agaggagctttaccgcaattatggcatcctggccgatgccacggagcaagtgggccagggtctgtttgtatcctggctttgttgacgtgaaagaag

SEQ ID NO: 114605 - DNA, 51 bp, Homo sapiens
gggaatggatcaaagctgtgatcacaggattgacttctaaggactcttggt

SEQ ID NO: 114606 - DNA, 87 bp, Homo sapiens
gaagccctgcagaagggggctgaggctggccaaggggaggagccccagccccgcgacgaggaggaagcggagctggagctgctgagg

SEQ ID NO: 114607 - DNA, 88 bp, Homo sapiens
aggcgcaaacaagccaatcccaggaggaaaaacgagcacaaagttatcattgttgggctggataatgcagggaaaactaccattcttt

SEQ ID NO: 114608 - DNA, 100 bp, Homo sapiens
gaaaaatggcttcggggcaaggcccaggtcctcccaggcaggagtgcggagagcctgccctgccctctgcttctggaaagatgagtccaaggagcccatc

SEQ ID NO: 114609 - DNA, 90 bp, Homo sapiens
aacaactacctgctgaaattgatgcaactgtgaaagttccttttcttaagaaatgcaaggaagcaggacttcttaattacttacttgaag

SEQ ID NO: 114610 - DNA, 101 bp, Homo sapiens
cacagaaattcctttcctgctagaactttcagaatctcaggcgggtgagagtatctgcacaaccaccactgcatttttgcactttttcttcctggcttcat

SEQ ID NO: 114611 - DNA, 75 bp, Homo sapiens
ggagttaagggctccgtggacatctcaggtcttcagggtcttccatctgaagatgattgaagaatcactgaagat

SEQ ID NO: 114612 - DNA, 82 bp, Homo sapiens
agagggccctgcagctcttcagacatgtgtgtcaggtccgtgtttatgatccagcatccccccagcgccggccagtcctaga

SEQ ID NO: 114613 - DNA, 96 bp, Homo sapiens
cccggaaaacctaaccatgaagacttgaacttaatacagcaagaaagaccatcaagtttaccaacactacaacaacaggagtgcaaacttctctac

SEQ ID NO: 114614 - DNA, 98 bp, Homo sapiens
cacagcctgctcccgagccaacaacacgatgggcttttcttctctcctgggggacatcccaccctcgaacaactactacatgtatcagcagcagcagc

SEQ ID NO: 114615 - DNA, 75 bp, Homo sapiens
ccaaggcccattttgattcatcagaaccccagctcctatgggactgtggcttcagggatgacttcttagggggca

SEQ ID NO: 114616 - DNA, 100 bp, Homo sapiens
gcctatccagaaagcaacagcagaggactctgaaaaggaatcttgcccaagcagtgatgaagttgatgaggaggaagaagaggataattatgaatctgat

SEQ ID NO: 114617 - DNA, 100 bp, Homo sapiens
tgacatggaggatgatttcatgtgcgatgatgaggaggactacgacctggtgctggagaatctggtaaaagcaccattgtgaagcagatgaggatcctgc

SEQ ID NO: 114618 - DNA, 60 bp, Homo sapiens
gacttgcttcagcatttctcaatatttaacaccgtgcccgatatgcctctcaccaatgcc

SEQ ID NO: 114619 - DNA, 88 bp, Homo sapiens
ccatgaccctggaccagcgggactcagaaagccatatcttggaagatgtcaacaagtgtatcatagccttaagagaccaggatgctga

SEQ ID NO: 114620 - DNA, 75 bp, Homo sapiens
cgcgtctctctgctgcggcgcggggaccgctgtgctctcggaaacaagcctccaggtctgcttccccgcaaagga

SEQ ID NO: 114621 - DNA, 82 bp, Homo sapiens
ttctcctatgactacgtctttgactggaacatgctgaaattcgctttatcctgtggataaacgcagagtgaacgagtttggg

SEQ ID NO: 114622 - DNA, 90 bp, Homo sapiens
gaaatctacacagtaccagaggtggggactgttgttggaggaacactttccaggcctaaatgtgcacagcatgctcaagcaccagacgct

SEQ ID NO: 114623 - DNA, 83 bp, Homo sapiens
agaggctggactttctgctgggctccgtggtccatgagattagaagcccaggacccaggaaggagacacaggaaatttattca

SEQ ID NO: 114624 - DNA, 118 bp, Homo sapiens
ggagactgggcggccggccgacccttcctgtcgctgacggcgactgcgggaggccaggaagcatcggagagcaagagacaggtccagatcctcctcctcttcctcccagtcatctcac

SEQ ID NO: 114625 - DNA, 89 bp, Homo sapiens
catttctggcaatttctacagaaacaagttttgcaggacagatggcggctctgtgttcccgggatgacttcctcggcagcttctgtcgc

SEQ ID NO: 114626 - DNA, 129 bp, Homo sapiens
gggcagtcagagcatcgggagcaacgtcacgctcatcaccctgaactcggaaggtacaccaggggttggaaaaaccacactaggcaaagaacttgcgtcaaaatcaggactgaaatacattaatgtggg

SEQ ID NO: 114627 - DNA, 98 bp, Homo sapiens
tctcaggttgaaatttttgactgcattgactttcgtagtacttgtcattagatcactccaagaactgaggcccctgtcagcagtgtcagtaatagttt

SEQ ID NO: 114628 - DNA, 90 bp, Homo sapiens
accatctccatcacccaccaacaacaccacaataatccacagccaaggtacaaagtagatttcatagaagagaaggcatctcagaaccct

SEQ ID NO: 114629 - DNA, 100 bp, Homo sapiens
atgccccctcacatctatgccatcacagacaccgcctacaggagtatgatgcaaggtgtcatggagaaactccagctgggcccagagattctgcagcggg

SEQ ID NO: 114630 - DNA, 75 bp, Homo sapiens
cttgccagttgggtatcctcctcagtatccaccgacagcattccaagctcgatgcattctatttctcatcatttg

SEQ ID NO: 114631 - DNA, 83 bp, Homo sapiens
gacctaaagccacagtcttcaagagcccacggacaccacctcaacggactatgatgatggatatggcactgcttatgatgaac

SEQ ID NO: 114632 - DNA, 82 bp, Homo sapiens
gagcgggcggcttcctggcctgggcgctccggtggcggcggagataacgaaggaggcccaacttcattcaataaggagcctg

SEQ ID NO: 114633 - DNA, 76 bp, Homo sapiens
ccgggcagtgggtgtgaagctcagctccttctcgttacatcttccggcccagctgtactcgcctggggcagtgggc

SEQ ID NO: 114634 - DNA, 100 bp, Homo sapiens
tggtgatccttcgggacaagattcgcttctatgaggggtttggaaatcccttgtctccaggttgctgggattgacttcttgctcaattgaaacactcatt

SEQ ID NO: 114635 - DNA, 76 bp, Homo sapiens
aaggactacagtatgcacttaatgtccctgtttggcaaatacgtgtagacctacatttattaaatcatgatggaaa

SEQ ID NO: 114636 - DNA, 100 bp, Homo sapiens
gaggagaaggagccgcctgtgagtcagcctgcagcctcgtcagactcggagacgtctgacagtgacgatgaggtggagccgccaccaaaatgcagatttt

SEQ ID NO: 114637 - DNA, 142 bp, Homo sapiens
tgggagccgccgatcccggagcccgagccgggagagggagccgccgcagccgccggcgctgtggaggtactaggttttgacaagcttgcatcatgcgtgagtataagctagtcgttcttggctcaggaggcgttggaaagtc

SEQ ID NO: 114638 - DNA, 83 bp, Homo sapiens
caccactgcagccagaaagcgagggaacaccagctggctgatgagcctggagaacccgctcagccctttctcctcggacatca

SEQ ID NO: 114639 - DNA, 100 bp, Homo sapiens
aaccaaaagttacaacagttcagagtagaattgcacgtaggtgaaaaccagattgaaatgttagaggcagaacatcttaaacatctgaattcaattcttg

SEQ ID NO: 114640 - DNA, 75 bp, Homo sapiens
cctggctcccttctgccccagctccgtctcggcggcggcggggtgtcagcctgaccatggcgcgggagcgtgggc

SEQ ID NO: 114641 - DNA, 83 bp, Homo sapiens
tcaagagtcacttctttacttggtgcaggaaggcagtctttgctacgtacagcaaaaggcattgaatccagctctccagaggt

SEQ ID NO: 114642 - DNA, 100 bp, Homo sapiens
acagaagagatggatattgaaatggacagtggagatgaagcctaagaatatgatcagacatcgctattgcggttccgaggcagtgggaagagatgcggcc

SEQ ID NO: 114643 - DNA, 100 bp, Homo sapiens
gccgtcttctttgcctgcactaatgcatggaaataaccagcctgcaagaactggcacactgtcgagaacaaatcctcctactcagaaaccgccaagtcct

SEQ ID NO: 114644 - DNA, 75 bp, Homo sapiens
aggaatccattatggtgtcattacatgtgaaggctgcaaggtttgttcggacagtgttaccattttctcaggaat

SEQ ID NO: 114645 - DNA, 100 bp, Homo sapiens
gcttcggtgaacttaggttccatgatgtgctattctatacttggaccgtttttccccaaagagtccctcctgctttttagccggtctttggacaccaatg

SEQ ID NO: 114646 - DNA, 82 bp, Homo sapiens
tgaagctgaggacacacccaggaaaagactcaggacggacaagcacagtcttcggaaggaaactccgggacgttttacagca

SEQ ID NO: 114647 - DNA, 75 bp, Homo sapiens
gtggataacgggaggtgaatttccatgtcaacatagtcctgatgcatttgctaaaaagtgaaacatcagtagcaa

SEQ ID NO: 114648 - DNA, 100 bp, Homo sapiens
gttttcttatttagccggagtgagaagcaagaaggccctggacacagcaatatctctgggctttcacaggctatggagttactagtagagaaagcaatca

SEQ ID NO: 114649 - DNA, 98 bp, Homo sapiens
ggagatatggcgcaactgcggcgctggacatcctcatcatggatgatgacgacgtccccagctggcctcccaccaagctgtccccgccccagtctgcg

SEQ ID NO: 114650 - DNA, 50 bp, Homo sapiens
gatgtgaaaatgaagccagaccgaggtggtgcttcccacctttatcctgg

SEQ ID NO: 114651 - DNA, 74 bp, Homo sapiens
tgaccctaaggaagcggccacaatcgacagggacaccgccttcgccattgctcctgacatcaagtgctgttcac

SEQ ID NO: 114652 - DNA, 100 bp, Homo sapiens
gaggtgcagggccaggaggaacatgagaattgcaaccttgccaatggacctgatcggttttggttatgcagccctcgtgacatttggaagcatttttgga

SEQ ID NO: 114653 - DNA, 100 bp, Homo sapiens
aaggcaagaccgaattcagaaggatatcgacgtcgtgatccagaagtccagagctgaggactgcctgtttgcaggtacaagaatattccacagatgtcct

SEQ ID NO: 114654 - DNA, 83 bp, Homo sapiens
gacatctgcgccggagagaatatcagcgacaggactacatggatgccatggctgagaaggtggccagcatcgaaatgttcagc

SEQ ID NO: 114655 - DNA, 98 bp, Homo sapiens
ctggacctccagagagggatgatccataccctgttctctttaggaagcggctcagccccagggcagcacatcagagacaccatggaacacagccattc

SEQ ID NO: 114656 - DNA, 76 bp, Homo sapiens
cagagctgttctcttgacagcagtggagctgttacaagagtatgacaatcagccaaatggccgatgacacagtggc

SEQ ID NO: 114657 - DNA, 83 bp, Homo sapiens
agcgggagctggacggcgagcgcgagcggcgcgagaaagaatttcagggaagagccaggtcctgtttgctgtggtgttcactg

SEQ ID NO: 114658 - DNA, 75 bp, Homo sapiens
tcgaagggctgaggcgcctgtcggactaccccgagtacatgtggtgtgtgatccagtcttgggtgacaagtggga

SEQ ID NO: 114659 - DNA, 100 bp, Homo sapiens
ttgcaggagggccaggacttccttcacttcagctgacggacccatggcagctgctcccagggcggcgactggcggcgcgatggacctgaccgggctcctg

SEQ ID NO: 114660 - DNA, 100 bp, Homo sapiens
gatacagatccacgggttttagaaaaacaagaattacagcagccaacctatgttgccctgagttacataaatagatgccttcaattaagttgcagagttc

SEQ ID NO: 114661 - DNA, 74 bp, Homo sapiens
atggttctgatgaagtgaaacgtgccatgaacaaatcctttgttgtctgcattcaaaagagcattctattaaag

SEQ ID NO: 114662 - DNA, 100 bp, Homo sapiens
atagcgtgtccggaactggtgggttcttggtctcactgacttcaagaatgaagccgcggaccctcgcggtagacgttacatccaagaggaaataatccag

SEQ ID NO: 114663 - DNA, 108 bp, Homo sapiens
ctttgtgtcctgagatcaaatggcacttcattggccacctacagaaacaaaatgtcaacaaattgatgggaagaaacacctcttacagtcatctgcaggggattctcc

SEQ ID NO: 114664 - DNA, 73 bp, Homo sapiens
ggccgccggcggcccggcttcagggttttggtgcctttgaacgctcaatcttgactcagatcgaccatattct

SEQ ID NO: 114665 - DNA, 118 bp, Homo sapiens
ctagaatgcatcagtgcccttgtggcgaatggggctcacgtcgagtaatagcctgcagctggtgttttgagaagccctactgctgaaaacttaacaattttgtgtaataaaaatggag

SEQ ID NO: 114666 - DNA, 75 bp, Homo sapiens
ggcagatcttcagttgcggtgcggagctgagcagcctcttagcaaatatccggctgtgatcaatgatatttcatt

SEQ ID NO: 114667 - DNA, 75 bp, Homo sapiens
ttaaacctgagccactatctgaagatttctcgaatgctggcagccaaaaccgttttggctatccgttatgatgct

SEQ ID NO: 114668 - DNA, 100 bp, Homo sapiens
aatgaaggcgttgtggaccaccaaacagaactttctaatttagccaaggaaggtattgactgggctcccaagagcgaccgcattgtcacttgtggggcag

SEQ ID NO: 114669 - DNA, 100 bp, Homo sapiens
aagtccaagtgtcctcgattaagaggagttcccattagacttgaagttgggccacgtgatatgaagagctgtcagtttgtagccgtcagacgagatactg

SEQ ID NO: 114670 - DNA, 101 bp, Homo sapiens
tgtggaagctactcatgttttgcccttgcattggggagcctggttagaactctgtaacctgatcacagacaaagagatggctggacgtaaagaaagaagtg

SEQ ID NO: 114671 - DNA, 50 bp, Homo sapiens
gaacatcaccgtggtgaagggcatccggaaaccaatagagccatggcgac

SEQ ID NO: 114672 - DNA, 82 bp, Homo sapiens
aacggcagcaacagcatcagcatgtcggtggagatcaacggcatcatgtacacaggtgagaagccctaccactgcaactggg

SEQ ID NO: 114673 - DNA, 74 bp, Homo sapiens
atggcagccagtcagtggtggaggctgtaacagaagacaagtacgaaatactgcaatctgtcgacgatgctgcg

SEQ ID NO: 114674 - DNA, 100 bp, Homo sapiens
acatcagagagctcgtactggcaaacacttaaggagttccgtgatcgaccgaaaggacttaataatcaaaaggattaagcccaaaccccagcaaggagat

SEQ ID NO: 114675 - DNA, 98 bp, Homo sapiens
cggacagtggctctgacggcgttactgatggtgctgctcacatctgtggtccagggcagggccactccagcttccttcaaaatgtctactgttcacga

SEQ ID NO: 114676 - DNA, 100 bp, Homo sapiens
ggcagctgaagacccggccgcccagatgatgcggtggtgggggacctgccggcacgcgactccccccgggcccaaagtctacaactcgaacaaagacagc

SEQ ID NO: 114677 - DNA, 50 bp, Homo sapiens
gcgtcttgatccttttgcagatggcctggttgcagcatgcttgaaatctg

SEQ ID NO: 114678 - DNA, 82 bp, Homo sapiens
cgcgcccgccagttgcttgatcaggtggaacagattcagaaggagcaggattaccaaaggctccatccttggagcagcttcc

SEQ ID NO: 114679 - DNA, 100 bp, Homo sapiens
caaaatgaagaacttggactgattattgatttaacatatactcaacgctattataaaccagaggttcaggcctcatctccagtggcactgggtgtaagga

SEQ ID NO: 114680 - DNA, 100 bp, Homo sapiens
ccatcttgatcttacagaatcagaggtgcagccgcaagaaaggtctgttttgggaccctggcccagccgcggaccccctgaccgacctgcgctacgtgtg

SEQ ID NO: 114681 - DNA, 100 bp, Homo sapiens
aggaacctgatgctttaactttgctggccccagccgctggagacacaatcatatctttagattttggcagcaacgtggcttctagaagagtgagtctgga

SEQ ID NO: 114682 - DNA, 90 bp, Homo sapiens
gggacacctggaagccgagaaatgttccttacaaactcttcacggaccacggcggcctcaacgagaagcgcaagcagcggcgcatccgca

SEQ ID NO: 114683 - DNA, 85 bp, Homo sapiens
cccagctggatcgtgtaaccagtctatgggaagtgagacttcctgctatatcctgatcatcactattgcaaatattgcaaatttg

SEQ ID NO: 114684 - DNA, 82 bp, Homo sapiens
cagagattgaaatgttccttagaaaggagcagcagggtgctgttggcccaaaggttgccctgaagccccccatccagaggaa

SEQ ID NO: 114685 - DNA, 90 bp, Homo sapiens
gcttggcaaggcaagtagcggcggcgcttcaagctagtgaaccagcagcttcttgctgacccacttgttccacctcagctaactataaaa

SEQ ID NO: 114686 - DNA, 100 bp, Homo sapiens
cgagtggcggacgggctcccgctggccgcctcgatgcaggaggacgaacaggaataagacgagttggaagaagacctgatcaacaacttcagggtgaagg

SEQ ID NO: 114687 - DNA, 90 bp, Homo sapiens
gtgtacgtgcctgtgcctaaaatatttcagcagttgaatcagttgaattcacttcatcaagaaactatcatgaaatgcgtgaaaagtagg

SEQ ID NO: 114688 - DNA, 90 bp, Homo sapiens
ccaaggaagccacgtgcagacatctacaaccttcgatctcctgacgagcaattaagttggaatatgcaaggttggttaagttggcccaag

SEQ ID NO: 114689 - DNA, 75 bp, Homo sapiens
aactccagggtgtctggtccacgacctatcctaggcgccatggttggttgaagactttcaatgactactttagag

SEQ ID NO: 114690 - DNA, 50 bp, Homo sapiens
tctgccaagtgcccaagagagaggagattgcatcctacctgatcaccttt

SEQ ID NO: 114691 - DNA, 71 bp, Homo sapiens
acagatgaagacagatgcaccaacgagattgtcaaaagagtggggaatggtgaggaaacgccgatgattgg

SEQ ID NO: 114692 - DNA, 100 bp, Homo sapiens
gatcgtctctctcatcgaggcccaaaccgccaagttcaaatctgaacatcaatgatgtactagggaactactcattgactcttgttgatgcattggatac

SEQ ID NO: 114693 - DNA, 75 bp, Homo sapiens
gcttgactttgaaaatgatttaattgaatcaagctgcaaagtaactaggtttttctattgggaaagctactgatc

SEQ ID NO: 114694 - DNA, 80 bp, Homo sapiens
gtcgggggagtcgtaaacaaccctgaagagaacagccaggcctgatcacggatacacgactctagccaccagtgtgaccc

SEQ ID NO: 114695 - DNA, 100 bp, Homo sapiens
atgttacccagtatcttggtgttgctgaagaggttgctgtgagtctaggtactccaattatgaagccagaatggatttataaagcttgggaaaggcggaa

SEQ ID NO: 114696 - DNA, 75 bp, Homo sapiens
aagaaatgggagatgaaaatgcggaggatgctgaaaacgccattcaacagatgggtggccagtggcttggtggaa

SEQ ID NO: 114697 - DNA, 73 bp, Homo sapiens
cccgagcacgtcctgcgcctcagccgggtcaccgagaagctagagccggtgcaggccacgcagaacaagacag

SEQ ID NO: 114698 - DNA, 75 bp, Homo sapiens
cacaggatggagactacgagtttcaactccgatccaatatccgagaaattgagaaactttgtttgaaagtccgaa

SEQ ID NO: 114699 - DNA, 88 bp, Homo sapiens
ggaagatgagctgtcctttcaggaaggagccattatttatgtcatcaagaagaatgacgatgaacattaaccaggtggtatttgttgg

SEQ ID NO: 114700 - DNA, 118 bp, Homo sapiens
gtcgtgagcgaattgtggcagagtgtaatgctgtccgccaggccctgcaggacctgctttcggagtacatgggcaatgcatttggctttatgtcccgagttgccctacaagcagagaa

SEQ ID NO: 114701 - DNA, 100 bp, Homo sapiens
gaaggcctgccagcacccctggagaagcgcgttaaggagctggctcagggtatcaaaaagccattcacagaggtcatccgagccaacatcggggacgccc

SEQ ID NO: 114702 - DNA, 74 bp, Homo sapiens
gaaactgctttctaaaacaccagaactcaacctgagcgacaccacaggcaagctgggctttgaggaattcaagt

SEQ ID NO: 114703 - DNA, 82 bp, Homo sapiens
atgagtgtaaggttaccccagagtatagacagacttcctctgctaaattacctcgctgccgacagggaggctgggcaggtga

SEQ ID NO: 114704 - DNA, 100 bp, Homo sapiens
ctcaaggatcagttggctttagcaattgagagtgactcagacatctcctctacaagtacctaacccatcctggatgcaccaccattcatacctcatgcag

SEQ ID NO: 114705 - DNA, 100 bp, Homo sapiens
aacaaatgctaaactctactgtaatcggggtacggttaattccaagggaggtcctggccagtgaagccatccttaatgttcctgataagtctgactggag

SEQ ID NO: 114706 - DNA, 88 bp, Homo sapiens
ttcgttgtgccagcgactaaaaagagccattgagacccagagcagcagttctgaagagatagtgcccagccctccctcgccaccccct

SEQ ID NO: 114707 - DNA, 75 bp, Homo sapiens
caaattgaaagatatcatcaaacgacatcagtctcatataatggcagcaaaggctgtagcaaatacaatgagaac

SEQ ID NO: 114708 - DNA, 89 bp, Homo sapiens
gaagtccgtgccagtgaccggaggcggcggcggcgagcggttccttgtgggctaggcgtgcaatggaattgagttttgccctggtaaat

SEQ ID NO: 114709 - DNA, 85 bp, Homo sapiens
ggcggctgcagggcatttccttcgggatgtattcggctgaagagctcaagtgcgaatcataaacatgtacaaggaaattgatcaa

SEQ ID NO: 114710 - DNA, 100 bp, Homo sapiens
ggctaccccaaggagccagcagccttgtgtcctgggatccccagcccctgcagaatgacccaccaggatctgagcccggaagcaggagatcattaagacc

SEQ ID NO: 114711 - DNA, 89 bp, Homo sapiens
cacatactttctcagaaaccttcacatcttggtcaaggtaagagcttctgttcgtgtgcagggaaagcagctcacagacgccgttaaaa

SEQ ID NO: 114712 - DNA, 100 bp, Homo sapiens
tgctcagtatgacgcttctgagctaaaagcttccatgaagacagattctttcaaaatgggacaagagtttgtgaaacacttcactagcagtgcagacaag

SEQ ID NO: 114713 - DNA, 100 bp, Homo sapiens
cccagtttttcatctgcactgccaagactgagtggtggtcctggctctgccatatgacacccccgtgcccggctacatgaataacactgtcaacaccatg

SEQ ID NO: 114714 - DNA, 51 bp, Homo sapiens
gctgatcccgagcagcgtcatgtacccctctggttcgatgcccagaactga

SEQ ID NO: 114715 - DNA, 75 bp, Homo sapiens
gcaagtattttcagcgagggtactgtatttatggagaccgctgcaggtggataagtggagcagctgtagtcaatg

SEQ ID NO: 114716 - DNA, 75 bp, Homo sapiens
gtggcagagatggagcactacggccagtggtcaggcggccggcatgagagacgagttgtactgctgtcacaggaa

SEQ ID NO: 114717 - DNA, 100 bp, Homo sapiens
agaagatcacctactccatcaaggtcatcgaggccaacaacccattccaggctgtgcaggaaggcaatactgaacactgcgcagcttgcagaggtctcct

SEQ ID NO: 114718 - DNA, 76 bp, Homo sapiens
gacaccttctcaggttgcctttgaaataagaggaactcttttaccaggtaccagcaacttcaaggtttctgccagc

SEQ ID NO: 114719 - DNA, 83 bp, Homo sapiens
cggctgcggaggcgcaggcagcaactgaggcagcggcaggctcaggtgcagccgctggaaataatgcaaaaggtgtcccaagg

SEQ ID NO: 114720 - DNA, 100 bp, Homo sapiens
gggctgccccaggcgcgcaagcgacagcgcctcacgcacctgagccccgaggagaaggcgctgaggaggctcctgctccagcccagcccccagagagcag

SEQ ID NO: 114721 - DNA, 100 bp, Homo sapiens
gctagttcggagccttgcagtgtgtgaagaatctccaccaccccctgcaccagagatatcacaggagaaccagaatgtgacagtgatgataacatgggtg

SEQ ID NO: 114722 - DNA, 50 bp, Homo sapiens
aagagtcaacagcagtggcaacagagagatcaaccagctttcactcctag

SEQ ID NO: 114723 - DNA, 95 bp, Homo sapiens
cgaccctcatacaggacattggactaatgttacaccaatggccaccaagcgttctggcaagacttctttaatggatagtatcatttactgaacct

SEQ ID NO: 114724 - DNA, 100 bp, Homo sapiens
agtcggcactgctactgcgaagacagctggcagattgtaaaccatggctgtgtggatacaagctcagcagctccaaggagaagcccttcatcagatgcaa

SEQ ID NO: 114725 - DNA, 82 bp, Homo sapiens
agccgaggccgccgccgcctctccttgctgcagccatggagggttgtgtccactgtggtccccgactctgcccacaagctgt

SEQ ID NO: 114726 - DNA, 90 bp, Homo sapiens
agcgggggggcaggcgatcgaaggcagtagaagatggtgaaagaaacaacttactacgatgttttgggggtcaaacccaatgctactcag

SEQ ID NO: 114727 - DNA, 96 bp, Homo sapiens
cccttcgctttcatccacaagatccggcccatagccgagcagactggcatctgtaaggtgcggccgccgccgcaggcgaccatggggaacgtgttg

SEQ ID NO: 114728 - DNA, 74 bp, Homo sapiens
accagattgaaagtttaaggcagcgctttggagggggccaggataagccagagacatgggaaaaccaatggaag

SEQ ID NO: 114729 - DNA, 82 bp, Homo sapiens
gcgagcgcgagcggcgcgagaaaatgcagtgcaagctgtttgtctttgacaagacctcacagtcctgggtggagagaggccg

SEQ ID NO: 114730 - DNA, 73 bp, Homo sapiens
ggattcatttagagctgcggaacaggacgccctctgatgtgatgtgtccaatctagatcccaacttctcattt

SEQ ID NO: 114731 - DNA, 100 bp, Homo sapiens
gctggcgcagttccacagggacggtgcgctcacccagctcaacgtggccttctcccgggagcagtcccacaaggacccacgcagccacccagcctcagca

SEQ ID NO: 114732 - DNA, 83 bp, Homo sapiens
tatgcccgttcagtttacagttcattttttgcttggtttggaaaaatttcattagagccgttggacataccagatggtcgaag

SEQ ID NO: 114733 - DNA, 75 bp, Homo sapiens
ccgccggggaggactggggaagactgtgaggcagaccgccctggtggtgcaggctgtgaagaaagaccaggaggg

SEQ ID NO: 114734 - DNA, 102 bp, Homo sapiens
acacggctctgcacatctgcgccctctacaacaagaaacccaaggacttggacttcgcccagcagaagctgaccgataagaacctgggcttccagatgctgc

SEQ ID NO: 114735 - DNA, 75 bp, Homo sapiens
gaaagaactggagcttgcacataggaattacatgaacgacagccttcgcaccgacgtcttcgtgcggttccagcc

SEQ ID NO: 114736 - DNA, 99 bp, Homo sapiens
gaggcggcgcggcagcggagggacggcagtctcgcgcgaaaccaaggtgtatgttggtaacctgggaactggcgctggcaaaggagagttagaaagggc

SEQ ID NO: 114737 - DNA, 98 bp, Homo sapiens
taatactgggactgacttacctaggaatgagagggacaggagtatctgaggatggagaactcagcagcatcattcttaacaaagaagttaaatattgg

SEQ ID NO: 114738 - DNA, 126 bp, Homo sapiens
attaccgtatgcagtcccccaggatacagggtcaaaggagagcacaaccatcgcagttggaagcccatggggcaggtcttctcgtgggcaccctggacgtggtgctggactccagtgcccgcgtgg

SEQ ID NO: 114739 - DNA, 100 bp, Homo sapiens
ccaacgaggtggccgaatcttccttcaggatatcaagaaaccagcctggacaccaagtctgtgtcagaaggccacctcaagaggaacatcgtggtgaaga

SEQ ID NO: 114740 - DNA, 50 bp, Homo sapiens
ggtgatttctgcatttccatctgagagtgcagtgggccatgagtatgttg

SEQ ID NO: 114741 - DNA, 100 bp, Homo sapiens
ggcacctaacgtgctgtgcgtagctgctcctttggttgaatccccaggcccttgttggggcacaaggtggcaggccaactgtgatttgagacggcagatt

SEQ ID NO: 114742 - DNA, 90 bp, Homo sapiens
agaacatgagaactgcgactcagcatgcagaaggtgaactgtcacccctacaactcagcttgcaaccagccctggccaccagtttcccca

SEQ ID NO: 114743 - DNA, 74 bp, Homo sapiens
ggatttgttaaggattccaagtaactcttatttgatataattgaccctgcaatcctgcgcccgggccgcctgga

SEQ ID NO: 114744 - DNA, 97 bp, Homo sapiens
gtccgtgcgagaggaccaacggagcgctgaggcgggcgttttcttggatgaattgcttgctttggaggtccctgtgcgttttattgcgacctgccgg

SEQ ID NO: 114745 - DNA, 83 bp, Homo sapiens
cgggcgtgcatcatccacggggtgctgcagatcctgttccagggatcgactacaagaccaccaccatcctgctggacggccgg

SEQ ID NO: 114746 - DNA, 90 bp, Homo sapiens
ccaccgcggtcactcaccgccgccgccgccaccactgccaccacggtcgcctgccacaggtgcccttgctcgtgtgaatgaacagaggcc

SEQ ID NO: 114747 - DNA, 51 bp, Homo sapiens
ctcctggttcttcttcttcacaagcacagaaacagcatcaagtgtgcggag

SEQ ID NO: 114748 - DNA, 100 bp, Homo sapiens
tcctgcaagatactgagagattgaagcatgctctggaaatgttcccagaacattgcacgatgcctcctgcagatataatttctacagtagaatttaatca

SEQ ID NO: 114749 - DNA, 50 bp, Homo sapiens
cctccccagtagctgggattacaggttctctgactctgaaaacacatcat

SEQ ID NO: 114750 - DNA, 88 bp, Homo sapiens
gtctcttacgtctgcggaagtgcagctgcctcagttcttagcgcaggtcgggaactacaagcggactgtgaagcggatcgacgatggc

SEQ ID NO: 114751 - DNA, 100 bp, Homo sapiens
aattggtattgttggattgccaaatgttgggttctaaatgagaagaaacttcaagaggttgatagtttatggaaagaatttgaaactccagagaaagcaa

SEQ ID NO: 114752 - DNA, 75 bp, Homo sapiens
tccgtcgattaaagagccatctgtggtgccaattgaagatacaaactggactctcaggacaaaacgacaccagcc

SEQ ID NO: 114753 - DNA, 97 bp, Homo sapiens
tgtctgacgacctcaccagcgtcaccaaccatggctaccgcgtgcaggtgttggtaaatcatgcttattgctacagtttacagacaagaggtttcag

SEQ ID NO: 114754 - DNA, 98 bp, Homo sapiens
tcatgagcttcgtcaacctcggtacaagtaagttagtggataacagaccacctgccctagcaaaattcctcccgaatagtcaagaattaggcaacacc

SEQ ID NO: 114755 - DNA, 50 bp, Homo sapiens
gagcggaaaggagaagtcgtagacagtgctgtccccggcataggtccatc

SEQ ID NO: 114756 - DNA, 89 bp, Homo sapiens
agcgatcgagcgagcgcgcgcgcgaaaactccgggcagggaactctaatgatccaggacaaagaagttaccctggagtatgtatcaagc

SEQ ID NO: 114757 - DNA, 82 bp, Homo sapiens
tttcctgctggtggcaaccgcctacgagacactcaagtcgggaacatgccctgtgtgccgccgtcatttcccacctgcggtt

SEQ ID NO: 114758 - DNA, 74 bp, Homo sapiens
aaaattttctcctggtagacctcggtccaaacagactatgtcttcagcagtggtgcagttatatgcagcagatc

SEQ ID NO: 114759 - DNA, 82 bp, Homo sapiens
accattgacgccatgtcgggttattcgagtgaccgagaccgcggccgggaccgagggtgttgacttcaaaatcaaaactgta

SEQ ID NO: 114760 - DNA, 50 bp, Homo sapiens
tggaggtggacgccatcgtcaacgccgcttgttctcagaacacaaacaaa

SEQ ID NO: 114761 - DNA, 80 bp, Homo sapiens
ccataataatcaggagtgaagtcccagggatattctgtgctgatgccatggacaatattaccaggcagaaccaattctac

SEQ ID NO: 114762 - DNA, 73 bp, Homo sapiens
gacgttcatcgccgtgttatccttgagtaaaggcatgatcaagcagttcctccgagatgtggactggggagag

SEQ ID NO: 114763 - DNA, 75 bp, Homo sapiens
gctcatgcaaaattgactactttttatggagcatttggaccagaaaaattcagaacgtggaatcttgtagaagga

SEQ ID NO: 114764 - DNA, 75 bp, Homo sapiens
gacagcctcaagggcttcagcaccgcgcccatggcagagccagacccagtcctgcgttaactgcggccgggaggc

SEQ ID NO: 114765 - DNA, 100 bp, Homo sapiens
attttggcagctactaaccgtccagataggatagacaaggcttgtctggagcgggaaagactactgtgagcatggccttggaggagtacctggtttgtca

SEQ ID NO: 114766 - DNA, 75 bp, Homo sapiens
gacgaacaagataaggagcaatccaatccatctatggtattggacatagagttcaaaccttgtactactcagctg

SEQ ID NO: 114767 - DNA, 100 bp, Homo sapiens
tcctgaccaagaagatctaaagagaacgtctctgaaatcaagtccggatgaaggtcctgaggaccagacagtgctgttggtgactgtccctgacttcagt

SEQ ID NO: 114768 - DNA, 101 bp, Homo sapiens
agcggctgtgtggatgtcggcgaagccgcgggcgaggtttcttcttgaagggctcaaggaatgaagcatcccacaaaatgatcctgctgaataattgccag

SEQ ID NO: 114769 - DNA, 75 bp, Homo sapiens
gaaaatgccctcaaacgcgccaacgtcaggccttgaaaagaggatagaccaggctgtggaggagtggaatattga

SEQ ID NO: 114770 - DNA, 90 bp, Homo sapiens
cgtggagacctcatcacggagccctttctgccaaacttattctaccagattccatgaaagtattgccagtgtacatgaattgcttgttga

SEQ ID NO: 114771 - DNA, 75 bp, Homo sapiens
gcgccaccgagtccggaccggagactttggggcctaactagatggaagaactggagcaaggcctgttgatgcagc

SEQ ID NO: 114772 - DNA, 97 bp, Homo sapiens
tattcatccacctcagataccagcaactcccccatcgtatgaatctgcgaggaaacgagacctctttcgttccttctagaaggtctggaggacgtag

SEQ ID NO: 114773 - DNA, 50 bp, Homo sapiens
attgagtccagctcttgggatgagttcaagctgaagaagatgtggaaaag

SEQ ID NO: 114774 - DNA, 74 bp, Homo sapiens
gagccgcgcacgctacagtacaagaccctgctctcagcggcccacgaggtggagttgcagcggcagaaggaggc

SEQ ID NO: 114775 - DNA, 89 bp, Homo sapiens
gtgattgtagcattcgttgttgcctttcataatctcaggatcctggtgatgcggcccaacaggaagcaaagcacaggtatgggctggaa

SEQ ID NO: 114776 - DNA, 100 bp, Homo sapiens
gatgcttgtttcttcaccatcaaccggacctacctccatcatcacatgaccaaagcattcctcttctatgacattgtatgcaaacctgttccattctttc

SEQ ID NO: 114777 - DNA, 101 bp, Homo sapiens
ggcgatcggtgctgattcggcgcgatttgaggagctgctgctgcaggatgatcggctgaatgtaacagaggaactaacgtccaacgacaagacgaggattc

SEQ ID NO: 114778 - DNA, 50 bp, Homo sapiens
gaattacaggaatcttctctcattggagattgggtcttgctatgttgccc

SEQ ID NO: 114779 - DNA, 82 bp, Homo sapiens
tattcagagatattttggaattatatgactggaatcttaaagtaagttcttggagacgtgctgatgacaggaaagatgaccg

SEQ ID NO: 114780 - DNA, 82 bp, Homo sapiens
cttcctcggtggctgcgccggaggcctgactctgggagcacgcaagacaagaggagcagcagcggcaccgcccctcaccctg

SEQ ID NO: 114781 - DNA, 82 bp, Homo sapiens
ttcttgtttgtggatcgctgtgatcgtcacttggtaagtaaggaggtctctgtaccatggctcgtacaaagcagactgcccg

SEQ ID NO: 114782 - DNA, 89 bp, Homo sapiens
agggagaaaggcgggcccgggaacaggaaccacgtgaatgttgagggggcgacacacaagcaggtggtggacctgattcgagcaggcga

SEQ ID NO: 114783 - DNA, 81 bp, Homo sapiens
aagccaagctcatctctgagacccggaggaggttcgaagctgagtatgtgacagacttagaaggttttgactccgtggtat

SEQ ID NO: 114784 - DNA, 90 bp, Homo sapiens
ctaacttctattaaagatcaccagtggcatatccaggcatgctgtgctctaactggcgaggggccgccatccagtcacagttggacgggg

SEQ ID NO: 114785 - DNA, 82 bp, Homo sapiens
ctttgcgacggaaatgtgtcatcgaaagccaggtccctgactatggctccccagagcctgccttcatctaggatggctcctc

SEQ ID NO: 114786 - DNA, 98 bp, Homo sapiens
ctggatcttgctcagagaaacctctacagagatgtgatgctggaaaacttccagaacctggcctcactagagatgcggtcttgctgtgttgcctaggc

SEQ ID NO: 114787 - DNA, 75 bp, Homo sapiens
cacccaggaaaagactcaggacggacaagcacagtcttcggaaggcaatagccctctggaacaagacaattcatg

SEQ ID NO: 114788 - DNA, 100 bp, Homo sapiens
ctgatacagaagagatggatattgaaatggacagtggagatgaagcctaagaatatgatcaggtctatgctccatcagcaagcactgccgactacaatag

SEQ ID NO: 114789 - DNA, 100 bp, Homo sapiens
atgtgaaatccctgaacttgcgatcaagctcattacagctgtgggcataaaaactgttcaggttccattatcaaaacgagcaaaatttgttggacctggt

SEQ ID NO: 114790 - DNA, 97 bp, Homo sapiens
cgggcatcctggtgcagctcctggtgcgtggcccagcctcagatgtactaatggtcacttgatgtgcgctggctgttttatccacctactagcagat

SEQ ID NO: 114791 - DNA, 100 bp, Homo sapiens
agggaaaagatccagaagcatgttagttcgacatcatcatcttttcttgaagctgataaagaatttgtatggtctttgtggaaacgtctccaggttacaa

SEQ ID NO: 114792 - DNA, 75 bp, Homo sapiens
gaaactcagcgctggggaagaagttcttttagaactcatcaaattgaagctgttccaaccagctctgcaagtgat

SEQ ID NO: 114793 - DNA, 100 bp, Homo sapiens
tgagagcgcctggaggctcgagcggaggcattccatattggaagaagagatttctacacatgaaaaaaatgcctttgtttagtaaatcacacaaaaatcc

SEQ ID NO: 114794 - DNA, 75 bp, Homo sapiens
gccgaatcagccttttcacgctcaagattagatcctgtgctgaaagagaaaccaagaaaaaagatgacattccag

SEQ ID NO: 114795 - DNA, 96 bp, Homo sapiens
tgcatcagtttgtacaaagaccacttttcccactacctgcagccttttatcacccaggtttcagaggtgccgggaagtctgagccttcgccctcct

SEQ ID NO: 114796 - DNA, 75 bp, Homo sapiens
gcctaggcattttgctgtctcctcctaatacgctatgctttatggaggccaggcactgtttatcagctgctaatg

SEQ ID NO: 114797 - DNA, 100 bp, Homo sapiens
gatgatgctgggacttatttttgtatagctgataatggaaatgagacaattgaagctcaagcagagcttacagtgcaagtttcaccagtgatcattaaag

SEQ ID NO: 114798 - DNA, 101 bp, Homo sapiens
gtcgggtccggtttccagggggttcctggtgctcgaggctggcggcgaggaaggtttctgctttgggacaaccatacatctaattccttaaagtagtttta

SEQ ID NO: 114799 - DNA, 100 bp, Homo sapiens
ggacccgcttctctgaaaggctctccttgcagctgcttagacgctggatttttttcgggtagtggaaaaccaggtgcaagctggcccaggagaatggctg

SEQ ID NO: 114800 - DNA, 73 bp, Homo sapiens
aatcatggaatcccttgcatggctctcaatggagtgaaggtacctgagcgcaggaaccatggtcttcattgct

SEQ ID NO: 114801 - DNA, 75 bp, Homo sapiens
cattccttttcacctcagagtcggtcggggaaggccacccaggtgatgatgaacagtctacacagatggctgcaa

SEQ ID NO: 114802 - DNA, 100 bp, Homo sapiens
agccctagccaggctccaccacctgaggacacagaggaagagagagttttaattgataaagaccagagtccaaaatggaaaccagctgatctaaaagaag

SEQ ID NO: 114803 - DNA, 81 bp, Homo sapiens
ccaggaagaggagccgagcatctgggccgagaccattccgtatggagagccggatgatgaagtaataggagttagtgtcag

SEQ ID NO: 114804 - DNA, 98 bp, Homo sapiens
cccgggtactatgaagatggggcttttggaattcgcattgagaatgttgtccttgtggttcctgtgaagaccaagatggaatctcactctgtgagtct

SEQ ID NO: 114805 - DNA, 51 bp, Homo sapiens
ctcacagcccgacgaaaggatgccaaatatgtatcggcaagcagtgtaaac

SEQ ID NO: 114806 - DNA, 74 bp, Homo sapiens
acgccagtaagaacgaggaggatgaaggcaattaccagctctggctgggtcgccacaacttgtttgacgacgaa

SEQ ID NO: 114807 - DNA, 100 bp, Homo sapiens
aggacaaacccaaggtcatcattgtccaggcctgcagaggtggaatctctgaaggaagaagatgaatcagatgatgataatatgtaacatttactccagc

SEQ ID NO: 114808 - DNA, 100 bp, Homo sapiens
cctgccccaggaacagaggaagatacccctttgaaaccttcagcacaaaccacagttgtaactagccaggatatgctgcaggctgctagtcattatcgcc

SEQ ID NO: 114809 - DNA, 82 bp, Homo sapiens
aaggaacgaggcaaggagctaaagcagcgtgcgttcagccctggggttcctgacggagacttcgcccttcatgtggtccaac

SEQ ID NO: 114810 - DNA, 98 bp, Homo sapiens
aacttggatgaaaatggcttggatttgctctcgaccatgtctgcaaaggagaagtcgaagtttgaagatatggcaaaaagtgacaaagctcgctatga

SEQ ID NO: 114811 - DNA, 100 bp, Homo sapiens
gttgtacttggaaaatactcagtttcctgcttactgcttcattatggattatacagtgccggtggtggtgtgcacattgagccccggtatagacagttcc

SEQ ID NO: 114812 - DNA, 90 bp, Homo sapiens
ggactgggagggcaacgagcacaacaggagctacgaggagttgaaacctcctgcaaaagtggaagcgaagccgaaaaaggcagcagcgaa

SEQ ID NO: 114813 - DNA, 72 bp, Homo sapiens
gctgctgctgctgctgtgggcgccgcctccgagccgcgcagataacgaaggaggcccaacttcattcaataa

SEQ ID NO: 114814 - DNA, 82 bp, Homo sapiens
gattttatcaaatgtgtggaacagaaggacccatgccccctttgtgatgaagccaaggaagtactcaagccttatgaaaaca

SEQ ID NO: 114815 - DNA, 88 bp, Homo sapiens
cgggacacctggaagccgagaaatgataacagcgacttgattgcatgtacagtgatcaccaaggatggcggcatggtccagcgattcc

SEQ ID NO: 114816 - DNA, 96 bp, Homo sapiens
cgggtgggagtgacccgattttccagtctccacaaaccggaggactacccccagactgcagtaagtgttgtcatggagactacagctttcgaggct

SEQ ID NO: 114817 - DNA, 85 bp, Homo sapiens
agagatgtgatgttggagaactacagaaacctggtctccctagatgggcccaaaagcacaagaactggaggtttcagaagacgag

SEQ ID NO: 114818 - DNA, 100 bp, Homo sapiens
aaccacttgaccttcattccagaagaaatccagtatctgagtaatttgcagtactttgctgtgaccaacaacaatgaatgtttacccttgcggaagttgc

SEQ ID NO: 114819 - DNA, 82 bp, Homo sapiens
caaaagtaccaagagactgccttggagaggttactttcaatggagacaccaactctacaacattacctgtcatatactgaag

SEQ ID NO: 114820 - DNA, 97 bp, Homo sapiens
ggctgaatgcactaaacatgaagagcttgaaagcgaagttcaggaagagtgacgacatatttgacagtgattggtacacttctcgaaatctaattgg

SEQ ID NO: 114821 - DNA, 74 bp, Homo sapiens
gcggagagcaatcgccgggacagctgcaagagcagcccgacggccatggaggctgaagagacgatggaatgcct

SEQ ID NO: 114822 - DNA, 95 bp, Homo sapiens
gcctccaggttatatctcacagagatgttgacctttcaaataggtcagtgttgtccaggctgacctcgaacttctgggcccaagtgatcctcccc

SEQ ID NO: 114823 - DNA, 75 bp, Homo sapiens
gaacactttttgaactcattctggctgcagaacaagcaaaagcaagcccagctcttgtagccaaggatcctggta

SEQ ID NO: 114824 - DNA, 77 bp, Homo sapiens
aaaatgacaggcatcggcaaagggtttggctatgtgctctttgagaatatcgataacttgatgaccccagaaggagt

SEQ ID NO: 114825 - DNA, 75 bp, Homo sapiens
gagaagaattttccaaatgaatttgcaaaacttactgtagaccccacctcagagttcactccccgagagcccaac

SEQ ID NO: 114826 - DNA, 82 bp, Homo sapiens
aggcggtgtggtttactccatgcagttgtcaggaggtggatcagtacaagggaaagcgggatttggagtcactgagggagta

SEQ ID NO: 114827 - DNA, 101 bp, Homo sapiens
tttgcatccggagagtggacaagaaaaacattgacatcaccaatttcagcagcagctggagcgatggcctggccttctgtgctctgctccacacctacctg

SEQ ID NO: 114828 - DNA, 100 bp, Homo sapiens
agacgcacccgtccatcttcgggatcttcgacgggcacgggggagaggatgaagtaggtgttccaggtagcaattcagctgacctattgcgctggaccac

SEQ ID NO: 114829 - DNA, 100 bp, Homo sapiens
tggttacattgaatactacatatgtcgagggaatgcagaaagagttaaggaaggcaggtcctgcatgccagtaaaactactcatgtcagctgttctgcag

SEQ ID NO: 114830 - DNA, 100 bp, Homo sapiens
ctcaactcaggccatctggcgccgactctgggatgaactgatgaagacaaggccttccagtttggaatggtagacggaggagaagtccatccccaccacc

SEQ ID NO: 114831 - DNA, 50 bp, Homo sapiens
ggagtcatcatgtacatcctgctgtgtgggtatccccccttctactccaa

SEQ ID NO: 114832 - DNA, 75 bp, Homo sapiens
tagtattttactaggtcatgaagggaagatggctgtggaaggtgttttaaagaggctgacccgcggctgattgag

SEQ ID NO: 114833 - DNA, 75 bp, Homo sapiens
ggggattctcgacctgctaacagaactggaccttttcgtttgaaaatctgaacacagttgctgagtgtctgtttt

SEQ ID NO: 114834 - DNA, 100 bp, Homo sapiens
cgcctcctccggcccggcggggccgacgagtccggaggggctgccgcgggagataagaaggctgactgcacaatcacaatggctgactcagacttcctgg

SEQ ID NO: 114835 - DNA, 100 bp, Homo sapiens
ctgtttctggtgtcttgacaaatacctgctccatctcaaccaggtgttgtgtaacggaccaggaacatgtgttcctatctgtgtatctgcccttctcctt

SEQ ID NO: 114836 - DNA, 100 bp, Homo sapiens
cgccgggagattgagattgcagagcaaggtttgatgatctgatggccaacattccactgcccgagtacacaaggcgagatggcaaactgaatttggcctc

SEQ ID NO: 114837 - DNA, 75 bp, Homo sapiens
cagacggagtgctgtgccacaatcagcatgattcttcagaggctcttcaggttctcctctgtcattcggtcagcc

SEQ ID NO: 114838 - DNA, 83 bp, Homo sapiens
tggactgtggtgcgggcctcctcggcttccaggtcttccccagggaggtcctgaactacacagctgagaacatctgtaagtgg

SEQ ID NO: 114839 - DNA, 99 bp, Homo sapiens
gcttgggaggagtgtggctaccacttggccccctctgatctgcgccgggtcgccacatactggaggagctggagttctgtgaaaagctgctacagacct

SEQ ID NO: 114840 - DNA, 90 bp, Homo sapiens
caggagctggctgctgcccagggcaccacctgccctggtcagctccagccagtccctgctggagtggtgccaggaagtcaccactggcta

SEQ ID NO: 114841 - DNA, 75 bp, Homo sapiens
cagatggagaaaaagtaatacccagattgacccatgagcttccaggaataaagtgccctgggcttgctgtacttc

SEQ ID NO: 114842 - DNA, 97 bp, Homo sapiens
ctacctacaacaagcacattaacatcagcttccacagggtgacatccagcagctgctctttgtctcggaccaccgggcagcttatgattactgtgag

SEQ ID NO: 114843 - DNA, 75 bp, Homo sapiens
gccgagcatctgggccgagaccattccgtatggagagccgggcctcatgcattgtgcgtcagcagcaatgtttat

SEQ ID NO: 114844 - DNA, 88 bp, Homo sapiens
gattcgcagtggtcgcttcttctccttgactcctttctacgaaaccgttcaagttctgaccatgaagctacagccatgatgaaagctc

SEQ ID NO: 114845 - DNA, 127 bp, Homo sapiens
attacctggaaaccagctctcagccggcattgcacatcctgaccaccttgcaagagccacatgacaaggtccagacccagtacttattatgaactgttgggggtgcatcctggtgccagcactgagg

SEQ ID NO: 114846 - DNA, 75 bp, Homo sapiens
ctgaggaaccagatatcttgaaaagctgccagaaaggttatgatgtgattgctcaagcccaatctgggactggga

SEQ ID NO: 114847 - DNA, 100 bp, Homo sapiens
caaggatttccaagtgatttcttccaaagcacaggaatctcactctgttaaagctggtctgttctaactgaggtgagcctcacgtggatggggagcctgg

SEQ ID NO: 114848 - DNA, 75 bp, Homo sapiens
agcctcccgggtagctgggactacagcaccctggaggagaagaggttctgctggaacaagctggtgtagatgcaa

SEQ ID NO: 114849 - DNA, 88 bp, Homo sapiens
aggccaaaaatgtgcatactcacagagttagagagagggatggtggacttcatagacctcacgttgtcgaagactcaacgaaagactc

SEQ ID NO: 114850 - DNA, 90 bp, Homo sapiens
cacatccacttcccccaagactgaccattcatgccccacctcaggagttgggaccaccagttcagaatcactacggtgggctggatggag

SEQ ID NO: 114851 - DNA, 75 bp, Homo sapiens
cagacaggtcttcaattagctgctgttatctgtacaaatgggagaaggatggaagttccagctctgatagtgacc

SEQ ID NO: 114852 - DNA, 74 bp, Homo sapiens
cgcgagtgaggaaaggaggtactgtagcgccggcatcggccgcacaggcaccatcattgtcatcgacatgctca

SEQ ID NO: 114853 - DNA, 100 bp, Homo sapiens
cttataagttaatatttttccagggatataacagtccactttggaaagaagatttctcagggtctcacgtattgcagggaaggtttggttgtgagatcga

SEQ ID NO: 114854 - DNA, 75 bp, Homo sapiens
gccctactctggggcttcctgctccagctgctgtatgccactgggtatggtgcaggtggcagactaggcattgga

SEQ ID NO: 114855 - DNA, 90 bp, Homo sapiens
ggcgcgaacagacggacgcaccggcgagcgccgaggggacaggccgagcgcggggcgccggaggcagaaagtttcctacactactgaggt

SEQ ID NO: 114856 - DNA, 83 bp, Homo sapiens
caaggccaagttcatctcctccgtcaccagccacatctaccagcagaaagatgaaggtcttagaatcattgattggaatgatc

SEQ ID NO: 114857 - DNA, 98 bp, Homo sapiens
tctttctgatgctccatcccactactctcaagatacgccaatgcgctcaaaggcaaaaagggttgaaaggattgttgacaaaaggaaaaataaaaaag

SEQ ID NO: 114858 - DNA, 51 bp, Homo sapiens
ctacccgggatacggaggagggggctcattgtcatccccaagccaggccag

SEQ ID NO: 114859 - DNA, 75 bp, Homo sapiens
accgcgggccctgccctgggctggaacgaccctgacttcctctgctaaattacctcgctgccgacagggaggctg

SEQ ID NO: 114860 - DNA, 50 bp, Homo sapiens
ctgcgcccccgggagcgggcgcccagagaccatatactccttgacgacag

SEQ ID NO: 114861 - DNA, 87 bp, Homo sapiens
tacatcgtcagctggtgcctaaacctcagagtcctagatggatatgtgatttctcagaaggaaaggccaacccatggccagcacaga

SEQ ID NO: 114862 - DNA, 98 bp, Homo sapiens
tgggattcagcattttggattaccagtattctaccttgtaaatactgttatttgtatatactgtaaatgatgacatcggtgggcactaaccgagcccg

SEQ ID NO: 114863 - DNA, 101 bp, Homo sapiens
gctaacggcatcttcccgaggcccagaatccaccgtcaggcataaattgattattcctcgcccacatctgtgccagggtgtgtgctggtggtgtctgtaat

SEQ ID NO: 114864 - DNA, 80 bp, Homo sapiens
gtctgctttaaagcgcataagaatgtcctggcagcattcagccagtattttaggaagacagagatgtcaatgaccccatg

SEQ ID NO: 114865 - DNA, 95 bp, Homo sapiens
ccttccagtacacagacgagcatggggaagacatgcgtcgggatgtccaggaaatttttcgcatgaccccccacgagaagcaggtcatgatgttc

SEQ ID NO: 114866 - DNA, 88 bp, Homo sapiens
atcagaaggatacagttcatgacaatgactttgagccctaccttactggacagtcaaatcaggaaatgatccgactagatgaagtccc

SEQ ID NO: 114867 - DNA, 51 bp, Homo sapiens
ccagtttgaagcctttcatgtttttaagatggaatttcgctcttgttgccc

SEQ ID NO: 114868 - DNA, 100 bp, Homo sapiens
tcaaaaatgtgataactttgctgaaaaaagacccctccttggtgtttgtaagagcattggatcttctggctttaccaacagggacgcttatgtcaactgg

SEQ ID NO: 114869 - DNA, 100 bp, Homo sapiens
gggcactccacagattctgttgcgaaggcagccatctttagttcgtctttcctagagagaagagtcaagtaccattggccaggatcaaacgcttatggaa

SEQ ID NO: 114870 - DNA, 100 bp, Homo sapiens
actctggagctgcacagcgagggcaccaccgtcctgctcttccagttcgggatggagactggtctctgtgctgacttccacccgagtggggcagttgtgg

SEQ ID NO: 114871 - DNA, 100 bp, Homo sapiens
agatcacaagttgcatgttgactttaggttctgggaggtgatcagtgatgaacatggcatcgaccccaccggcacctaccacggggacagcgacctgcag

SEQ ID NO: 114872 - DNA, 100 bp, Homo sapiens
atcttcacagaatacacctctggctcaagtgtttgtccctttggagtctgttaagcccagccctgggaggagcggggacactgaggacctctctccaaat

SEQ ID NO: 114873 - DNA, 102 bp, Homo sapiens
ctgctctaggcccagcgccttggacgtgcacagtagatccctcccggcttcccggcttcccgtctcgtcaccctctggtcaaccaatcaatggctcagacag

SEQ ID NO: 114874 - DNA, 100 bp, Homo sapiens
ccattctcttgcctcagcctcccgagcagctgggactacaggtgcccgccaccacacccaggcaactcatgcagcaattccagaaccccgacttcccacc

SEQ ID NO: 114875 - DNA, 83 bp, Homo sapiens
aacgcctggctcggagcagcagcctctgagagccaaatctcctcagccacctgttgaagaagaagatgaacacttcgatgaca

SEQ ID NO: 114876 - DNA, 75 bp, Homo sapiens
gtcagactccagcagccaagatggtgaagcagatcgagagcaaggcctgcggggagccatcccctatgccctgag

SEQ ID NO: 114877 - DNA, 75 bp, Homo sapiens
tacctgctctgtaccaactgccggaaagtgctgcggaagcatgatggaagtggttcattgcatgatattcaactg

SEQ ID NO: 114878 - DNA, 50 bp, Homo sapiens
cgaggaggcggatcccccggcgtcagctacgagttccagggagctctgtc

SEQ ID NO: 114879 - DNA, 97 bp, Homo sapiens
agtcgaaggccgtgaggtatttttctaaggtcgtcaaagtcctacattttagctttcagtgctgaacttccttctcccttaaattattataaacttt

SEQ ID NO: 114880 - DNA, 100 bp, Homo sapiens
agaggtggagtggacaggagcattaccacctcagccaccctgaccactatcatcaccatggaaaaagtgacttgagcagcgaggaggtctgcaagcgtgg

SEQ ID NO: 114881 - DNA, 83 bp, Homo sapiens
cgacaagccgctggcagccgcggatctcaccgccgctcaggggaacggcaggagcagctgatgggatatcggaagagagggcc

SEQ ID NO: 114882 - DNA, 98 bp, Homo sapiens
ggacatcaagtacccgctgcggctcatcgaccgggaggttacagattatgccattgccaggcgcatagtagatttgcattcaagaattgaggaatcaa

SEQ ID NO: 114883 - DNA, 98 bp, Homo sapiens
ccctgatgctggcgcagggcacggtgggcgcctacctgattgcttccaagtatgatcatcaggcagaagaagatcttcgcaattggatagaagaggtg

SEQ ID NO: 114884 - DNA, 83 bp, Homo sapiens
cacggtgctgcctcctttccaagcgcgacccgttgaggctgtgattctaggattgaaaaagaggaaatgattccaaagcagga

SEQ ID NO: 114885 - DNA, 75 bp, Homo sapiens
ggggcggtccgttgccaaagccaggacgtgaccacgcagtctgtgatggggtttgatcctctgcctccttcggac

SEQ ID NO: 114886 - DNA, 100 bp, Homo sapiens
gaagcagtaccaccctgttgtacatccactggacctaaaatatgaccctgatccagagaaccatggagtctggcagtaccgccgccagtgaggaggcacg

SEQ ID NO: 114887 - DNA, 90 bp, Homo sapiens
ggccaggggtgagaggccaggcccagcctgccagctgtgtggggggccgacagtcctcatcaccgggggcatcgtggccacagctgggcg

SEQ ID NO: 114888 - DNA, 102 bp, Homo sapiens
ctcgcaactcacacaggtcatcaacgagcttcggaacacctcctaccgctctctagagcgctctggtgtatggctggtggcccccctcattgctaaactgcc

SEQ ID NO: 114889 - DNA, 129 bp, Homo sapiens
cagaaattggggaaagctgtagaaaccaaagatgaacgatttgaacaaagcgctagcaacttctaccaacaacagatggttccaatccctatacattgaagctttgcttttctacatcatcccatttat

SEQ ID NO: 114890 - DNA, 100 bp, Homo sapiens
agtgatggtgacatcaatgaaaggagggttctgacacgttctcacctcgcgggatggcagctgctgatttgtcccatgggagagcctggggatgtacagg

SEQ ID NO: 114891 - DNA, 131 bp, Homo sapiens
cgcgagagatggagatgggcagacggattcatttagagctgcggaacaggacgccctctgatgtttggtgcacctcgatttggaggaagtagggcagggcccttatctggaaagaagtttggaaaccctgg

SEQ ID NO: 114892 - DNA, 97 bp, Homo sapiens
tgcttgtagtaagttcttctacaaattctttcaggagtttacccaagaaccattggtggagatagaaggtgtcatggagaaactccagctgggccca

SEQ ID NO: 114893 - DNA, 100 bp, Homo sapiens
tcatgatagtccaggcaaaaggaagaggacgtgggaggaaagaaacaggtctcggcgcggaagatggccggcggcgtggacggccccatcgggatcccgt

SEQ ID NO: 114894 - DNA, 75 bp, Homo sapiens
gcgctgcagtgaattttccccccaaactgcaataagccgccttccaaggatcaacactctgtggtaggccagaac

SEQ ID NO: 114895 - DNA, 49 bp, Homo sapiens
gatgagccttttaggcctgttcagaatagttctgtcccaagaagaactc

SEQ ID NO: 114896 - DNA, 90 bp, Homo sapiens
agctggaatttgccattcagcccaatacaactggcaaacaactttttgaccaggcatggattccgtgaaggaacaacacctaaacccaag

SEQ ID NO: 114897 - DNA, 105 bp, Homo sapiens
ggatttgttaaggattccaagtaactcttatttgttttgatgtggacaatggcacatctgcgggacggagtcccttggatcccatgaccagcccaggatccgggc

SEQ ID NO: 114898 - DNA, 51 bp, Homo sapiens
caatgagtacagcgacaggtgtaccccgcgctgatcccgctggccctggaa

SEQ ID NO: 114899 - DNA, 73 bp, Homo sapiens
cagcccagacgcggcacagagagggcctgggagcttgctgcagcttcagcctctgaagagccaatccattcag

SEQ ID NO: 114900 - DNA, 100 bp, Homo sapiens
cacccggagtggggcggggactcaccctttagctgctcgggtccttgaccgcttcgcacagggtagtaacagattatgggcaacagtccttttaattaat

SEQ ID NO: 114901 - DNA, 82 bp, Homo sapiens
ggcacctacggggacgtctataaggtaaatttggaaggcaaagccagccctctgtcacttctacaaatggcctccccaagtg

SEQ ID NO: 114902 - DNA, 74 bp, Homo sapiens
ctctaccctggaggagattctggggcagtatcaacggagtctccggggctagtgaaaactttagtggctgacac

SEQ ID NO: 114903 - DNA, 83 bp, Homo sapiens
gttggtcctgtgcggtcacttagccaagttggaatcgaagcctcttaaaatggcagatgacttggacttcgagacaggagatg

SEQ ID NO: 114904 - DNA, 74 bp, Homo sapiens
cccagtacacttactactatcctcattatctccaaaccaaggacacattcagctaacgtattttagcaggtgga

SEQ ID NO: 114905 - DNA, 100 bp, Homo sapiens
gaaaagctagaggggcaaggagatgtgcctacgccaaaacaattcgtagcaggtattctccactggttgaatgcaaatggaagccagaggaaaagggaac

SEQ ID NO: 114906 - DNA, 73 bp, Homo sapiens
aagtcggtgtctgctgcgttcacggcaggattcggttaggtctctctcctcctgggcgagccgttcttcacta

SEQ ID NO: 114907 - DNA, 90 bp, Homo sapiens
ccgggggagggtgaagtcctcctgaaggtggcggccagcgccctgaaccgggcggacttaatgcagtcttccatcccgtggagtgctcct

SEQ ID NO: 114908 - DNA, 74 bp, Homo sapiens
atccgctggagcggagccggccgtacgcggtgctgcgagggcagaacctgggaagccgaaaactggaatattaa

SEQ ID NO: 114909 - DNA, 100 bp, Homo sapiens
gcccagctgggcgagtatctggaggagatatccaaacacagcctgtgagcttctgacttgtgatgtgccgcagatcagcgaccgcctcggtggggacgag

SEQ ID NO: 114910 - DNA, 100 bp, Homo sapiens
caccctatggagaaaagatctacatgaccttgtcggcctacctagaggcgttcaatgtcatcaatggcggttctcatgctggcaacaagctggccatgca

SEQ ID NO: 114911 - DNA, 75 bp, Homo sapiens
agctttgaaggtcttgcggtggcttgcagatgggtcaagggttgtggagagtggtcagaaaccagcagctgcaac

SEQ ID NO: 114912 - DNA, 50 bp, Homo sapiens
cgtccactgcgggccggcgaaagctgatggtcatcatgggccagtgctac

SEQ ID NO: 114913 - DNA, 75 bp, Homo sapiens
ttcgctcctgggcagctgcgcggagaactgggctctattaccaggttttaaacttcgccatgatcgtgtcttctg

SEQ ID NO: 114914 - DNA, 76 bp, Homo sapiens
ctcgatcagggcatacatctttcttcgacaaaggccgtaagaactaaaatggtctactgcaaaattgatcagaccc

SEQ ID NO: 114915 - DNA, 51 bp, Homo sapiens
ggatgttcttcttcgagtatttgtagaaggaatgtgaagtggacactagct

SEQ ID NO: 114916 - DNA, 51 bp, Homo sapiens
ggcctccagggtctgcagacaaggcaggaaggagctgagtctccccagaag

SEQ ID NO: 114917 - DNA, 82 bp, Homo sapiens
tgcttactggtattcttcctggcttagaagaaggatcagagtactatgagaggaattacatgaatgacagtcttcgaaccaa

SEQ ID NO: 114918 - DNA, 95 bp, Homo sapiens
ctctgaagatgatcagacaaggcaaagcgaaattggtcattctcgctaacaactgcccagctttgagacatgtgcattgccattgcgatttctct

SEQ ID NO: 114919 - DNA, 100 bp, Homo sapiens
gtggggtgcctgtggccatacaggaaaggggagcagctcccacctcgaggctctgtctgcctcagattcccgacagttaagcaatggggagacatttggc

SEQ ID NO: 114920 - DNA, 80 bp, Homo sapiens
accaggttatctctcaggctgctgtggttcatgccacagccaaagatatggctcgtggacagcagaaaattcagtctcag

SEQ ID NO: 114921 - DNA, 83 bp, Homo sapiens
attgacgccatgtcgggttattcgagtgaccgagaccgcggccgggaccgagggccaccagcccctcgggttccaagatgcag

SEQ ID NO: 114922 - DNA, 100 bp, Homo sapiens
cagcagtaccgagtgccccggggaagccattccccaccccccagatccgagcaccagccggcgcttcagccccccctccagcagcctgcagcccggcaaa

SEQ ID NO: 114923 - DNA, 80 bp, Homo sapiens
taggcctctgcgggagaagatgaagccggaaaggccatccttcttgcctggatatgacaatggagcttgtttctatgatt

SEQ ID NO: 114924 - DNA, 83 bp, Homo sapiens
gccaagaccaaattagaggctcagtgagaaagatcagtctaaagaaaaggagaagaaagtgaaaaaaacaattccttcctggg

SEQ ID NO: 114925 - DNA, 75 bp, Homo sapiens
cgcttttcccctggccttctgtatcttcatggtgcggctcatcttcgagaggtttctgctttgggacaaccatac

SEQ ID NO: 114926 - DNA, 90 bp, Homo sapiens
gggcaggcggagcagggccttggaccccgcggcgcccctcggcctcggagcaacgagcgcagcgccgatcaggatcctcatgaccagcca

SEQ ID NO: 114927 - DNA, 50 bp, Homo sapiens
cagcacattctggaagtttggagaaagaatcttcaagagggagacatagg

SEQ ID NO: 114928 - DNA, 90 bp, Homo sapiens
ccgaagttggaagtgtctcttagcagcgcgcggagaagaacggggagccagtcgccaatatgcagctctttgtccgcgcccaggagctac

SEQ ID NO: 114929 - DNA, 51 bp, Homo sapiens
agcaccggctccagtgggctctgtactccaaagattcaggtttactcacgt

SEQ ID NO: 114930 - DNA, 75 bp, Homo sapiens
gaggagtgcggcgcggcggccccgggaccaaggagctgggagtgtccactcgccttccaccagcatggcaacgtc

SEQ ID NO: 114931 - DNA, 100 bp, Homo sapiens
ctgcatgtgaagctcaccgagacggcgatccgggcgctcgagacttaccagagccacaagattatgtgtgacaatccaagaagccaaccaattaagaacc

SEQ ID NO: 114932 - DNA, 100 bp, Homo sapiens
ggaccagctcatgggcacggctcgggacggtagttttgctgtcagccacaatgccttctgatgtgcttgaggtgaccaagaagttcatgagggaccccat

SEQ ID NO: 114933 - DNA, 82 bp, Homo sapiens
cttgctgccagtggtagcgctcgtctggcggagctggcttccccgggcgctgcctggacaggcctgcctgcgtgctgggaca

SEQ ID NO: 114934 - DNA, 99 bp, Homo sapiens
cgcgccgcactacatcgcccaccgtaaaggctggctgtcgctgcacacaggctgcatggctgagaggttgaaggaggagattctcaacagagagaaaat

SEQ ID NO: 114935 - DNA, 100 bp, Homo sapiens
gagagtgggaaccggacttcagtggatcttcggatacgaagaacccaggatcaactcactatcctgaaggtccattctcccaagaagaggggacagaaag

SEQ ID NO: 114936 - DNA, 73 bp, Homo sapiens
aagggcccctttcgactagcctctgctgaaaggttttgacaacttcgagcagctgctctcgggggctcactgg

SEQ ID NO: 114937 - DNA, 90 bp, Homo sapiens
ttctttaagggctacgggaagatcctggaggtggatctgaagaacggtccaaccaagccctgatgattatgggactgagctattgagacg

SEQ ID NO: 114938 - DNA, 100 bp, Homo sapiens
tcagagaggacgcacaagaacttgagcgacatggagaacgaattctactatcgctacccaaacaagttggatggcttgaggactggtactaaaaggaaac

SEQ ID NO: 114939 - DNA, 116 bp, Homo sapiens
ctggaatattgacccttatttatccagaagattgatcatcatatgggttggcctgctttcttccccgggcgatgtgcagagatctttgccaggggtcaaagcgtcgggaagcttgg

SEQ ID NO: 114940 - DNA, 125 bp, Homo sapiens
gagaactacattaatgagagcacggaagcccagagtgaacagaaagagaagtcgcttgagacatgtcatgctgcccaaggacatagccaagctggtccctaaaacccatctgatgtctgaatctg

SEQ ID NO: 114941 - DNA, 75 bp, Homo sapiens
gcctggagtatgaagagacatgagatcatggtggccaaacccacagtggggtgccgaggctcaggcagcatgacg

SEQ ID NO: 114942 - DNA, 82 bp, Homo sapiens
agtccttgacacatgtggacaatggcatagttgctacagagactaaggtgtcagtatgttcttcaagctgctctgctcctgg

SEQ ID NO: 114943 - DNA, 76 bp, Homo sapiens
ggttcggctgcgcgagcggagggaggcggccccctacagaagctaagcagcatggacccggccatgctggagcgcc

SEQ ID NO: 114944 - DNA, 83 bp, Homo sapiens
agagtatttcaaccataaagacatcttaattgggcacgaaagagggcagcccaatggatccaatggtgatgaagagacctcag

SEQ ID NO: 114945 - DNA, 119 bp, Homo sapiens
ctttgttattggagaaacatgcagattatatcgcatcctatggctcaaagaaagatgattatgttcctaaaagtaaagctctagaggccgtcaaattggcaatagaagccgggttccac

SEQ ID NO: 114946 - DNA, 80 bp, Homo sapiens
ctgcagccgcccaccacagccccagggtacatgtccagggccgccgggtccccttccccattgccagcccctgaccctgc

SEQ ID NO: 114947 - DNA, 100 bp, Homo sapiens
cttggaatttgctgagaataaggcaaagaccaggttgtcactgattcgtagatcaatggtggagccgccaccaaaatgcagattttcgtgaaaaccctta

SEQ ID NO: 114948 - DNA, 90 bp, Homo sapiens
cagatgtgtgtgggacaaagctagtagtttgggaagctgctcagaatggtgcagatgagggaactgcaattctgtggtgttcttggtcac

SEQ ID NO: 114949 - DNA, 98 bp, Homo sapiens
tgccactgcgagcctggctggggagggcccgactgctccagcgaataatccagaatggctactctgatctatgttgataaggaaaatggagaaccagg

SEQ ID NO: 114950 - DNA, 101 bp, Homo sapiens
taccagtccccagtgagggtgtacaaatacccctttgaattaattatggctagaaatggtcaatgcatggtttgctgagagagttcacaccatccctgtgt

SEQ ID NO: 114951 - DNA, 83 bp, Homo sapiens
atagtggaaagaaaccatgtgctgaaatgtttgacgacactgatggtttggtggtgatgatgtccagcaactctgtgaagcag

SEQ ID NO: 114952 - DNA, 98 bp, Homo sapiens
gacgacctacgcacacgagaacatgcctctcacaattgactatcaacactgctatagtatacatgcatcgattctacatgattcagtccttcacacag

SEQ ID NO: 114953 - DNA, 112 bp, Homo sapiens
cgaggcccctatggcagatttgaaaattcacccttgtagagtcattcctgcctttgagcggactcccttttaagcaatggctgccatccggaagaaactggtgattgttggt

SEQ ID NO: 114954 - DNA, 82 bp, Homo sapiens
ttctatgtcaccaagtaccgccaggagatctctggaaacatggctacagaacatgttaatggaaatggtactgaagagccca

SEQ ID NO: 114955 - DNA, 74 bp, Homo sapiens
cagaagtgccgaaagagcactggactccggaagggtgccttcaccagggatggaagaggcaggctgcagcagag

SEQ ID NO: 114956 - DNA, 146 bp, Homo sapiens
cgctggagcacaaaagagtctccgcggtggaggtctgcgttgctcttgcttttcctcgctggggtgtacgcatgttggcagataaattgaacatgactccagaagaagctgaaaggtggattgtaaatttgattagaaatgcaaga

SEQ ID NO: 114957 - DNA, 100 bp, Homo sapiens
ctgcacgaagttccggcgcatcctccacaccgacaccatctggaggaggcgttgccgtgaggctgaggagtacctgtcatttgcctttgagcattgtcac

SEQ ID NO: 114958 - DNA, 100 bp, Homo sapiens
tactataacgagaagtacggaggccccaaccaccacctgccccttccagacaactggaaaagtcaggtaaaaccacctcagctaattgattatctgcagc

SEQ ID NO: 114959 - DNA, 100 bp, Homo sapiens
tggccacagcctctcctgcccgggatgacaaagcctcctatgttgcctggggacacagcaccgtggtgaacccttgaaactaattctgaagcaagccctt

SEQ ID NO: 114960 - DNA, 82 bp, Homo sapiens
aggccatccagccccaggctgcacagggcccggcagccgtccagcagaagtccagaatgacagggtccagaaactggcgagc

SEQ ID NO: 114961 - DNA, 90 bp, Homo sapiens
ggagccaccagcctctccctggacaacagtagtagcagcagctgccttcttggacgcctttcagaaagtggctgacatggccaccaacac

SEQ ID NO: 114962 - DNA, 101 bp, Homo sapiens
gtatagagatgtgatgttggagaactacagaaacctggtctccctaggcaacagatcccctaatttgtggctgaaagatgttctcaaggaagaaggtgtct

SEQ ID NO: 114963 - DNA, 74 bp, Homo sapiens
gaggcaaggtggttttggaccagacaggcgtgtctaacagtcccagctatctgacttcatgtgaaagatggcta

SEQ ID NO: 114964 - DNA, 82 bp, Homo sapiens
cctgcacagccgcggcggcagcagcagtgagaggggtgagcccctccagactccgaataggagatcaagagtttgattcatt

SEQ ID NO: 114965 - DNA, 96 bp, Homo sapiens
gatcgtattacacttttgcgaggaaatcatgagagtagacagataacacaggtctatggattttatggtttttctattgggaaagctactgatcgg

SEQ ID NO: 114966 - DNA, 74 bp, Homo sapiens
tcctccgttcatgtttaaccgcgacaggcacagactctggatatgaggccccaggattcctggcgaggtcctcc

SEQ ID NO: 114967 - DNA, 88 bp, Homo sapiens
tcattgagaaaagtggttaccaggccctgccctgggttcgctacatcacccagagtggcggacatggatttgattgacatactttgga

SEQ ID NO: 114968 - DNA, 96 bp, Homo sapiens
tttgcctgaagaaggtcagtgtgcttgcttggagatcaggacgcaaagacaatgcagatcttcgtgaagactctgactggtaagaccatcaccctc

SEQ ID NO: 114969 - DNA, 74 bp, Homo sapiens
ctggaatttgccattcagcccaatacaactggcaaacaactttttgaccaggtcctttcccataacctgtgcac

SEQ ID NO: 114970 - DNA, 135 bp, Homo sapiens
gagagaagagggcagagccgtgcatggggctgctccccaggacctgagcaggaacctggagttttcagctcactgttaatgaagcggctgctcaactctgtgtgaaggataatgccctgctgacaagaagagatg

SEQ ID NO: 114971 - DNA, 98 bp, Homo sapiens
tcttttgccctagagcaattgaagtccatgaaggctctggagaaactagtcaaaaggagacatccacctgtgatatttgccagtttggtgcagaatgt

SEQ ID NO: 114972 - DNA, 90 bp, Homo sapiens
atgaaacagcagttttggtagaagatgtggtacacactcagttaattaatctgacggcaaatggatacatcttgttttttcatattacat

SEQ ID NO: 114973 - DNA, 82 bp, Homo sapiens
aaaatcataccatatcagatgcctcgcagagcaccaggcccaccgtgaaaggaagagcccgatgcccttggtttgactctac

SEQ ID NO: 114974 - DNA, 50 bp, Homo sapiens
gaaaaggcctaagaattttggcattgatggagttttaacattgaatgcgg

SEQ ID NO: 114975 - DNA, 108 bp, Homo sapiens
gaaagtctcagcatagaaaatacattgtgggcaagcaccattgttgcatcaggatacaagaccctcctgaaaggaatttccgggaagttcaatagtggtgagttggtg

SEQ ID NO: 114976 - DNA, 75 bp, Homo sapiens
caggcctgcagaggctgttctacaggggcaaacagaaaaatggctacaaacttcctagcacatgagaagatctgg

SEQ ID NO: 114977 - DNA, 98 bp, Homo sapiens
cggggccagattcccatggaagcgccgcgatgttcgccccccggctgctggatttccagaagacgaaatacgcgagtgatatggagaatgcagaaaac

SEQ ID NO: 114978 - DNA, 99 bp, Homo sapiens
aacacgattcttctaatggatgggaacatggggtacctggaactggaaagtagtggccatcggaatgaagtcagactgcattaccgctcaggcagtcac

SEQ ID NO: 114979 - DNA, 106 bp, Homo sapiens
gtcttactgatgaaggcaaatattattgcacttcttgccacaatgttacagagtcctcctccgcctcctcctctctgcatgcgcgtcagagcccgtgccaagaaca

SEQ ID NO: 114980 - DNA, 100 bp, Homo sapiens
gtggtgtggacacctccgtgctccgcagggccatctggaactatatccactgcgtctttggcatcaggaagtgttttagatcacagtttggaaagcctca

SEQ ID NO: 114981 - DNA, 60 bp, Homo sapiens
cttcaaagcacctagtacctcctaccattgtcaactgatgagaactggactgatgaccaa

SEQ ID NO: 114982 - DNA, 78 bp, Homo sapiens
ccggagatccaggaaacgctccagtccgagcactttcagctctgcaagattgaatacctgcttaagaagcttacagaa

SEQ ID NO: 114983 - DNA, 100 bp, Homo sapiens
agaacgtgcgcggggtgatcaccatgaacgaggagtacgagacgaggttcctgtgcaactcttcacagtccaacgtggagcacctgacggagaaaatgaa

SEQ ID NO: 114984 - DNA, 90 bp, Homo sapiens
ctcctcctccactgccactacagggaagtgcatcacatgtcaggcaaagccaaagctaattgagccactcgactatgaaaatgtcatcgt

SEQ ID NO: 114985 - DNA, 100 bp, Homo sapiens
gatttggcaacagactttgtttcttggagtccacttccaattccaagccaaatttgtatcctactgtggggcttcaaacaccaggagaagtggtcgatgc

SEQ ID NO: 114986 - DNA, 100 bp, Homo sapiens
ctcttctaagctgaataaagctgttttggaactgtcaggtacctcaaagcgaacttagtgatttggcccgtgaccctccagcacaatgttctgcaggtcc

SEQ ID NO: 114987 - DNA, 49 bp, Homo sapiens
agctaaaaccttcctcaccgtgtactgctggagtgcagtggcgcgatct

SEQ ID NO: 114988 - DNA, 125 bp, Homo sapiens
gccaacgccgcgcggttgtaactcggccctagttacctggccagggtacgcgacaattggcggagggttctctccccttgccaccatgagcgagtcatttgactgtgcaaaatgcaacgagtccc

SEQ ID NO: 114989 - DNA, 100 bp, Homo sapiens
tcccaactacgcttctttccaggataaaatactctaagtgacaaatgttgagtacattatcaggtgaacgcttggccaagccagagcgaggcaagatgag

SEQ ID NO: 114990 - DNA, 96 bp, Homo sapiens
actgaatggaaatccaatgtgtatctggcacggtctcggattcagcattttcttcctctcgcaaatctggaatgttcaccaaacattgaaactttc

SEQ ID NO: 114991 - DNA, 100 bp, Homo sapiens
ccttccgcacccgcctcggactctattgggaagaactgtaggaatagtcacagcttgacaaccgaacacaacctgagtgtgctgagaactcatggcgttg

SEQ ID NO: 114992 - DNA, 98 bp, Homo sapiens
cgtcgggccagggccggttctgcaccatcttcaggtcctactccaggggcgctcagggcgtctctggccgagcctctttttgtggaaaacgacagcag

SEQ ID NO: 114993 - DNA, 83 bp, Homo sapiens
tttttttttttctgttcagtgacatctgctgtgtgtaacagcatctcaaaccctgtcaccaaggagatgctgtttgagttcat

SEQ ID NO: 114994 - DNA, 75 bp, Homo sapiens
tgcaaatcaacatcactgctgtagcgcaggtggaaataagaggtcattatattttggagagaacagattaagaag

SEQ ID NO: 114995 - DNA, 85 bp, Homo sapiens
tgtgttgagagcttctcagactatccacctttgggtacatgtccagggccgccgggtccccttccccattgccagcccctgaccc

SEQ ID NO: 114996 - DNA, 100 bp, Homo sapiens
atcagtgactatgaccagatcattgactatgtggagcgcaccttcacaggagagcacgcggctgtgctgctccaccgggccttcctggtgggcatgtacg

SEQ ID NO: 114997 - DNA, 100 bp, Homo sapiens
cccagctggtggccagagtgcacctgtaccaaccgggactggtatgagcaggctcttgtcaggatggtgaagctgttcatcggaaacctgccccgggagg

SEQ ID NO: 114998 - DNA, 75 bp, Homo sapiens
agtttgattccagtcatgatagaaatgaaccatttgtctttagtcttggcaaagaatgttgtaccatctttgggt

SEQ ID NO: 114999 - DNA, 95 bp, Homo sapiens
gcgccggctatggccgtgccctggggctgagccctcagaggctgggaggcggcagaatgcagccagaggagggcacaggctggctgctggagctg

SEQ ID NO: 115000 - DNA, 75 bp, Homo sapiens
tggggatattctccgaacaccggtgtctgaggatatgcttgggtgttcctgaaaagccccatagtgattgagtct

SEQ ID NO: 115001 - DNA, 80 bp, Homo sapiens
cagggacacctggttccagctgcagcacgtggacgctgactcggaagtgcagggagactcatgcatctgtatgccgtgtg

SEQ ID NO: 115002 - DNA, 100 bp, Homo sapiens
cgccgccgcccgcggcgtccccggtttggtgttgcggcgcccaccttcgggaggatcagctttggaaacatgatgagcaaggagaagcgagaggctgtca

SEQ ID NO: 115003 - DNA, 82 bp, Homo sapiens
cgacatccgagtgcagaacctgcaagcggagctggagtttgttcagatcatcatcatcgtggtggtgatgatggtgatggtg

SEQ ID NO: 115004 - DNA, 95 bp, Homo sapiens
agatgatgccgaaaacgcaaggccgaagccaaagccagtgcagtgtgccctgaaccgccctgccttctttgctgagaggctctactatgctatga

SEQ ID NO: 115005 - DNA, 100 bp, Homo sapiens
agaatgaaatcagagtataagaactgcgctgagtgtgacaccctggtgtaccttccggtttcccagcacggccatcaagatccagttcacgtcgctctat

SEQ ID NO: 115006 - DNA, 90 bp, Homo sapiens
cagcagtgatggtggcagcaacaaggagggaaaaaagagcaggtggaaaaggaaagctccctgtgctgtcaggaatctacaggacttggc

SEQ ID NO: 115007 - DNA, 51 bp, Homo sapiens
cagaaagagctgaaccacatgctgtcggtatacatgtgccatggtggtttg

SEQ ID NO: 115008 - DNA, 100 bp, Homo sapiens
tgagggagcaagaggtgtcggaggtctcatctttgaactactgccggagcttctgccagggttacacatcattttggaatgactgtatatcatctggatt

SEQ ID NO: 115009 - DNA, 100 bp, Homo sapiens
aagagacaagacttactgaatgtcctggcccggatgatgaggccagtgagtgatcaagtggatggccaggccatgttatgggatctcaacgaaggcaaac

SEQ ID NO: 115010 - DNA, 74 bp, Homo sapiens
cttcctgcaggcccagagccggcatgaactctcccaacgagtcggggcttcaagatgggctgcgctccagttcc

SEQ ID NO: 115011 - DNA, 75 bp, Homo sapiens
atgagtctggaaaactgggccaaagcagtgaaacgctccatgaattgttttctggatatgccgcagaaggatccg

SEQ ID NO: 115012 - DNA, 110 bp, Homo sapiens
cccgcgcgtgctgcgggtctgctcgggggtctacttcgaggggggatatgagactttctactcggaatatcctgagtgttgcgtggatgtaaaacccatttcacaagaga

SEQ ID NO: 115013 - DNA, 97 bp, Homo sapiens
ggagcaagatggcggacatctccctggacgaactcatcaggaagcgcggggcggcggcgaaaggacgatcgggagcggtgccgagaaaaatttcctt

SEQ ID NO: 115014 - DNA, 96 bp, Homo sapiens
aaggactggaagttcaccttaaaagaggcactggctacaattaggcttctcgacgtcctgtgcgaaatgactgtgaatactgagctgctcggctat

SEQ ID NO: 115015 - DNA, 100 bp, Homo sapiens
atgccgacgctattcttacaaaggacaacaatattagagtaattggagggctgatggagttatgagaacaatgaacacagaaaaactcctaaaaactgta

SEQ ID NO: 115016 - DNA, 78 bp, Homo sapiens
gaccccaggcgatgacaacaatagccccattacaatcttatgatgtaatcagcgcgatttcacttcctgaatttcgat

SEQ ID NO: 115017 - DNA, 96 bp, Homo sapiens
aatttcaagaacaaaggccgcgacttggaggagatgtaatcagtgtagagaaaaccgtgaagagatgccttttggacactttcaagcatactgatg

SEQ ID NO: 115018 - DNA, 100 bp, Homo sapiens
gcgccggcaagagctcggtgctggagaacttcgtgggccggaatactcccccagttgcaagaggcgcaggaccgtggaagacttcaacaaattctgcacc

SEQ ID NO: 115019 - DNA, 100 bp, Homo sapiens
tcagggcaaaatcaccacccctctccacaggaatacaggccacaacatctattccaatatattaggtttcctcggtggtgtttcctgggctatgctagta

SEQ ID NO: 115020 - DNA, 73 bp, Homo sapiens
tggaaactgccgttctctcctggtggtgctttgcatatcagttgatgtatctcaagactataaccaagtagag

SEQ ID NO: 115021 - DNA, 129 bp, Homo sapiens
aagagaactgtctcctggtgaccgagcacccgcctccgggcatcttcaactttccgccatggtttttaaatcatccttccaacctgtatgcctatgaaagcatggatattgagtttgaatgtacagtct

SEQ ID NO: 115022 - DNA, 75 bp, Homo sapiens
gctaagttatccactagtgctaaaaggattcagggaatattccagaagccatagcttcttaccgcacggctctga

SEQ ID NO: 115023 - DNA, 100 bp, Homo sapiens
acctaaagccacagtcttcaagagcccacggacaccacctcaacgggcttaccacccaaaagatgggaggcagaagatacccacctgagttgcccagagc

SEQ ID NO: 115024 - DNA, 102 bp, Homo sapiens
gcatataagccaggcatgtctcccgaggagtgcaggcgcttcaccacagacggccttgctgtctctaaccctgatctgatctcctgccttgagcaaataaaa

SEQ ID NO: 115025 - DNA, 82 bp, Homo sapiens
tacaacccgacgaggaacgaatgggacaagatcccgtccatgaatcaggggaatttcagagtgcctgccccggttgacatgc

SEQ ID NO: 115026 - DNA, 90 bp, Homo sapiens
ggaagatctccccagctaaagtagctgagtttgcagagcagtctctgatgaagaatgccataaaaacatcggaggagtcatggattgaac

SEQ ID NO: 115027 - DNA, 89 bp, Homo sapiens
gatgctacagtcaatcaggttctggcctcccgatacgggctctcaaaggtctatggccctgtgttcactctgtattttggcctgaaacc

SEQ ID NO: 115028 - DNA, 100 bp, Homo sapiens
aaaagatgttctgaagactttagtcctctctcacctgatgtgcctatgactctggccatctatgaccggtttggccggttgatgtatggacaggaagatg

SEQ ID NO: 115029 - DNA, 102 bp, Homo sapiens
cttccgtgctgtcctacgaaagcctggtccacgccgtggccggagccgtgttggattggatgctgctggcaagacaaccattctgtataaactgaagttagg

SEQ ID NO: 115030 - DNA, 75 bp, Homo sapiens
gctgttccgggccgcgcagctgccgaacgacgtggtcctacagggacaagaatccttcaagaaacaggaaaaaac

SEQ ID NO: 115031 - DNA, 82 bp, Homo sapiens
cagaccctggagcctcagttggaagcagccgatccagcctgcggagcctgtggggcagctgatggtgttgctttgggagcag

SEQ ID NO: 115032 - DNA, 82 bp, Homo sapiens
caggagcagcttctggatgaaatacatcgtgagaagagagctccacagcacctgttgccttcattagcagcttttcctcctc

SEQ ID NO: 115033 - DNA, 75 bp, Homo sapiens
gaacatctagcacagaaaccagtatttctccccaggatatggcctaccagatgacattgtgatagaaaagagggg

SEQ ID NO: 115034 - DNA, 75 bp, Homo sapiens
gcactccgtcagtgagatggcctccaacaaggaccgtataatagacgctggccccaaaggaaactactctcgatt

SEQ ID NO: 115035 - DNA, 83 bp, Homo sapiens
ccctggtgtctggtggactaggtgggctcatgaacatttggtctttaaggattgtatgcaggcccagaggtagatatatggag

SEQ ID NO: 115036 - DNA, 82 bp, Homo sapiens
atatggaagaagatggaaaaaacttgtttaatgggtttactcctggcttgggggcattaggaagcactggaggctcttcggg

SEQ ID NO: 115037 - DNA, 100 bp, Homo sapiens
caggcattgctactctggtctctggcattgctggtgagtgctgacaccatcacagtatgttcccttctcaaccctggacatggttcagaaacagctaaag

SEQ ID NO: 115038 - DNA, 98 bp, Homo sapiens
aataaaaaaattgcaagagagagactattttcgttattacaaggcacgtgtggttctcaaatataggcattctgatgggaacttgtgtgttaaagtaa

SEQ ID NO: 115039 - DNA, 75 bp, Homo sapiens
ggggcgccggcgccgccgcccccgggctcgcggcctgcagtacagaacctgctaaggccatcaaacctattgatc

SEQ ID NO: 115040 - DNA, 100 bp, Homo sapiens
tctggctgttagaagaattcatgctcatccggttgctgctgacacgccgaccgcctgctgcttcagctacacctcccggcagattccacagaatttcata

SEQ ID NO: 115041 - DNA, 98 bp, Homo sapiens
gtgacgcagtagaaaaggtggcgtggctggcgattcgtgttcgtgagggccttttctggtaaaataccatgaagattttgaaaaaacaaaggggagag

SEQ ID NO: 115042 - DNA, 83 bp, Homo sapiens
acatcatacttggacatatcaagcattggtgcacgatgtactggcatttattaatacagcaaaagaaatttatgaaaaaattc

SEQ ID NO: 115043 - DNA, 100 bp, Homo sapiens
aacatgaagctaccggccagggttttctttactctggggtcccggctgccctgtggcctcgctcctcggaggattccattatgacattagtctctggtca

SEQ ID NO: 115044 - DNA, 100 bp, Homo sapiens
ggcgcttctgcatctgtgggccgaggacttcattgacttaactagagagaccagaccaaggacaaaagatcgcagtggactgtatgtgattgacctgaca

SEQ ID NO: 115045 - DNA, 83 bp, Homo sapiens
tctgcccccccttccccacgcaaccccagatccatttacactttacaatgcgagccacccctctggctgctcctgcgggttcc

SEQ ID NO: 115046 - DNA, 99 bp, Homo sapiens
cccgggtctgccagcgcgacgtcctctcgcggccctcagggcacagcccaaggctgtcagcctcccggcccagggctttgttcgcgggggtcacagctc

SEQ ID NO: 115047 - DNA, 100 bp, Homo sapiens
caggttttgccggagcgctattcttcactcgagacaagcagtcgtgagatggagaataaagaaactctcaaagggttgcacaagatggatgatcgtccag

SEQ ID NO: 115048 - DNA, 100 bp, Homo sapiens
cctggctggggaaaagggaagtgaaaagagatctgttttcaggaaaagggtggaaagcaagtcctggaagaatctgcatttgaagaaatggaaagagatt

SEQ ID NO: 115049 - DNA, 117 bp, Homo sapiens
atatcaagccacaatttccatcaaaaagtgattaagcagagaatggagaagaaggttgattccaggaagctaaagaaactatttcgaaagctgaaagatgagaccgaagctggagaa

SEQ ID NO: 115050 - DNA, 83 bp, Homo sapiens
tgaagagcgacaagccgctggcagccgcggatctcaccgccgctcagggtttgcctgcaatgagatttcattctctacattta

SEQ ID NO: 115051 - DNA, 82 bp, Homo sapiens
ttatactcctcccagtgacgggtctggagtgcgtgggggaccggctgttggcggatgacagatttgaagatctggaagaggc

SEQ ID NO: 115052 - DNA, 142 bp, Homo sapiens
ttctttagttccatcaaacacagaggaatgaccaccatggcagatggcaacagaggatgtcaacaattttttggagaatccacattcatctcaatggaaggatcctgccttaagtcaacttatttgtttttgccgggaaagt

SEQ ID NO: 115053 - DNA, 95 bp, Homo sapiens
gtcaaacaaccagatgacggctgaaaaattcctttaaaaagccagatgtgaagttcatttccaatccgccctccatggtggcagcggggagcgtg

SEQ ID NO: 115054 - DNA, 50 bp, Homo sapiens
cttttggaggctgccaggataataagggcataacctgggtcctggtttac

SEQ ID NO: 115055 - DNA, 131 bp, Homo sapiens
cccacattgagaactggcattcgatcctgcgcaatgggctggtcaatgcatcctacaccaaactgcagctctccagggcacaccgtattcagctctgagcggtctttgctagtgaggccaaggagccaccc

SEQ ID NO: 115056 - DNA, 100 bp, Homo sapiens
gccaacagttttgctgtaacaaacgcctgccatggttgcttgttatccgggcaatggaacgggttatgtacgtcatgttgataatccaaatggagatgga

SEQ ID NO: 115057 - DNA, 141 bp, Homo sapiens
ctggagcacaaaagagtctccgcggtggaggtctgcgttgctcttgcttttcctcgctggggtgtacgggggtcagctttggtgtacaactacgaaggccatctctgagggtgaagagctaattgcctttgtggtggattt

SEQ ID NO: 115058 - DNA, 98 bp, Homo sapiens
ctcccgagtagctgggactgcagagtctctattgcatttccaaagggagtatgtaggcagagaagtccaggctgagacgctccctgcaaaggctcagg

SEQ ID NO: 115059 - DNA, 75 bp, Homo sapiens
cacggctttggaaacgacgtcatgtgttaggtgtgagttcttgatacgaatgaaaggccaagagtttgttgatga

SEQ ID NO: 115060 - DNA, 129 bp, Homo sapiens
caactatatgctcagccatcgtgtctgctgcaaagcttaatttgcccattaatattataggcttgctttgcatctctggtgagtcaggactatgtcaatggcaccgatcaggaagaaattcgaaccggt

SEQ ID NO: 115061 - DNA, 98 bp, Homo sapiens
gccgagcaggcccaggctgcggcagcccgggaacacagccccagaatgtccctcttccagtggaaagcccaaccatgcagacatcttgctcataaact

SEQ ID NO: 115062 - DNA, 116 bp, Homo sapiens
ccgccacattccagttccgcacgcgctgggattcggagcttcagcgggaaggagataaggagggttcctgcccccaggtgaacattaactttccccagctcggcctctgtcgggac

SEQ ID NO: 115063 - DNA, 98 bp, Homo sapiens
ttttcaccaaggaactggtgctgcagcgagaggatttgtacacacagatatgacgaaagacttgaaagaagaacatttaaagaaaaatattcctcttg

SEQ ID NO: 115064 - DNA, 75 bp, Homo sapiens
gcagccgccgccgcagcgcgaacatggacgccgtcaacgccttcaaccaggagagaatgtgatcaatgggcagga

SEQ ID NO: 115065 - DNA, 100 bp, Homo sapiens
ttgagttggtataaactcctgaagaacacttgctgaaatggcagcagccacatccgtccatgtggttgcagtgattgaacccatcattcagcatgccgac

SEQ ID NO: 115066 - DNA, 101 bp, Homo sapiens
cagccacagctgatgacaaaaagcttcagagttctctaaaaaaactggctgtgaataatatagctggtattgaagagaaactgctggagcgaacccgtgcc

SEQ ID NO: 115067 - DNA, 101 bp, Homo sapiens
ggtgtcccagggcccaagggagaccctggattccagggcatgcctgttctacacatgttttaacacccaaaaagctgttggatgatataaagatgctgaat

SEQ ID NO: 115068 - DNA, 75 bp, Homo sapiens
cagcatagagaatgagatagccgtcctgagaaaatttaagtaagtcttccccaacaccgaatgggattccatctt

SEQ ID NO: 115069 - DNA, 100 bp, Homo sapiens
gacccggcctgggagaagcagcagcgcaagctgcaccacctcgtgagcgatgacgtctgcctgaaggtggtggagctctacctgaacgagaagaagcggg

SEQ ID NO: 115070 - DNA, 75 bp, Homo sapiens
catcaaaaatagtgatagctttgataagtggctcacttggtcctcaaggctcatgccagaacttggcaccactac

SEQ ID NO: 115071 - DNA, 98 bp, Homo sapiens
cccgagcggaactggagaaagctgaggggtgggattaaaaactcagcctgaatcaaaatgccctgagctgcttgccaattactgtgacatgttgctaa

SEQ ID NO: 115072 - DNA, 100 bp, Homo sapiens
ccgcggcgcggccctggatgtgcacgagtcggaacccttcagctgaaagtacccatggcagacaagcctggtaacacagtgaatttccggaagctgctac

SEQ ID NO: 115073 - DNA, 100 bp, Homo sapiens
cctgggaggagaagctgcggcggacagaagccatccggatggagaggtcattaaggagtccaagcaggagcacaaggatgtgatgtgaggcaggacccac

SEQ ID NO: 115074 - DNA, 98 bp, Homo sapiens
ccttcgcccagttccctgcatcctaagactcgaaggcagcacaggacctggaaaaattacatgcatcaactcaattgtggccattgcatcatacactg

SEQ ID NO: 115075 - DNA, 101 bp, Homo sapiens
gctttcacaattgcagcagatgaagatccattggtaaattgatcaggatttttggcctaccctccaaagaaaaggagaagattggctggcgaaaggatgca

SEQ ID NO: 115076 - DNA, 100 bp, Homo sapiens
gtttctggaagttataacgctacacgaagaactaagaatattattagcacaagagcaccatactttgagggtcctcgatgggcttcctggaatattggtg

SEQ ID NO: 115077 - DNA, 75 bp, Homo sapiens
gcccagctggcttctacacggcccaacacctgctaaaggagaccagtatgatgtctgtgccatttgcctggatga

SEQ ID NO: 115078 - DNA, 75 bp, Homo sapiens
cctacacagctggattggctgcagcagcgacactaggcgatatgaaaggtgaggtctatccatttggcatcgttg

SEQ ID NO: 115079 - DNA, 82 bp, Homo sapiens
ctgggctcgagcctgcacatgaaggtcttgggcgtctttggtactggcttttttaggggtctgcctggggattacccttgct

SEQ ID NO: 115080 - DNA, 90 bp, Homo sapiens
tacaccgagagagtgaggagccagacgacaagcacacactatggcgctgaaacggattaataagacctaatctgggagcctgcaagtgac

SEQ ID NO: 115081 - DNA, 94 bp, Homo sapiens
ttcaccgccgcagaccccttcaagttctagtcatgactccatcaagaatgctggaggaagggtgtttgtccactgccaggcaggcatttcccgg

SEQ ID NO: 115082 - DNA, 53 bp, Homo sapiens
atcacacgtaccacctggatgttgtggtgaacatgaaaagatcattttgtata

SEQ ID NO: 115083 - DNA, 100 bp, Homo sapiens
atccagagatttccacagaaggactgggatgatacaccttttccacagggaattgagttgatagaaaatgctgctgaagaacctagagtcttatgtatta

SEQ ID NO: 115084 - DNA, 51 bp, Homo sapiens
tactgagcttcttcctatttgccatgggtgattgcagtggtcatggacgtg

SEQ ID NO: 115085 - DNA, 48 bp, Homo sapiens
cctcaggtgtccagcctgctcagggtgtgtgttgtattgatgaatttg

SEQ ID NO: 115086 - DNA, 100 bp, Homo sapiens
ggatctttgctcttccatccgcctttgatcgtcttcctcttcagccatccaggaagttattccaacttttgacatggctgtcaatgaaatcttctttgac

SEQ ID NO: 115087 - DNA, 74 bp, Homo sapiens
caccatcaagttcttcaggaatggagacacggcttcccccaaggaatatacagagctatgccaagaccaagacg

SEQ ID NO: 115088 - DNA, 89 bp, Homo sapiens
ggaggccaggggtgtcgccatggtagatgatgagctggagatcaaggcctactatgcaggccacgtgctgggggcagccatgttccaga

SEQ ID NO: 115089 - DNA, 75 bp, Homo sapiens
gatgctactgctagtgagaagaatgaaccagaagttcaatgctgtcaccactgactaaagaagagaaaactgcgg

SEQ ID NO: 115090 - DNA, 101 bp, Homo sapiens
acagaaggatgtggtacagctccatgctcctcgatatcagtctatgagaaggccacctgtctttaccagtttccaagactatgttactgggcttcagactt

SEQ ID NO: 115091 - DNA, 51 bp, Homo sapiens
aacatgatcaagggtgttacactggttgcagcatgcagagatactggatat

SEQ ID NO: 115092 - DNA, 100 bp, Homo sapiens
gtggggttggtgtgattagcttcgcagtctggaaagctttaggagttcacagtgatgtaggtggaggatggctggaaggaagaaacatcaaaggagaacg

SEQ ID NO: 115093 - DNA, 75 bp, Homo sapiens
accagctcgaccacagcaagctcctggggtctcagcggtctgttcctgaggcattttccgcccccctggaactct

SEQ ID NO: 115094 - DNA, 75 bp, Homo sapiens
gtcggctccagcaccctcttcttcgtgttcaccccgtggaccgggagcccgtggaccgggagccggtggtgtgcc

SEQ ID NO: 115095 - DNA, 49 bp, Homo sapiens
gtttgagtccagcagtgctttagaacttcagcgagagggaagcatcgag

SEQ ID NO: 115096 - DNA, 100 bp, Homo sapiens
tctgcgtttgcaggccacgttctttcccatctccaccgaatgtacaagcgcttgcgtgtcggcctctgtggcaggtgcgcgtggaattcatggacgacac

SEQ ID NO: 115097 - DNA, 80 bp, Homo sapiens
acctccaggggaacaatgaggcctacgcagagctcatcgtccttgaaaaactggcagggtgcaagctgaatgtggctgag

SEQ ID NO: 115098 - DNA, 74 bp, Homo sapiens
cggggactggggggaccagtactctgccgagtgcggcggagcagtctcacaggtgctggacagcctggaagaga

SEQ ID NO: 115099 - DNA, 75 bp, Homo sapiens
ggtgaatcccctgtttgagaaaaggcctaagaattttggcattgggctggtgaattaccagatctctgtcaaggg

SEQ ID NO: 115100 - DNA, 73 bp, Homo sapiens
tttgctcttccatccgcctttgatcgtcttcctcttcagccatccaggctggatctccagaactgttctctgg

SEQ ID NO: 115101 - DNA, 51 bp, Homo sapiens
catctgcggcaagaacgccaatgatctcaagtattttaaccatctcttgaa

SEQ ID NO: 115102 - DNA, 74 bp, Homo sapiens
aggaataagacggcaggaggaagagagagagaggaaatgcactcggtgatggaaagagagccactattctgaag

SEQ ID NO: 115103 - DNA, 95 bp, Homo sapiens
tgcagatctgaagacctattttactgataagaaaacacatctttacacactaatctcttccagttgcgcctcttctccttggtggtcttcttaag

SEQ ID NO: 115104 - DNA, 100 bp, Homo sapiens
ttgggatttgctacttcttctgatgtaatagagatgaaaggacgagtggcttgtgagataagcagatgcacttcctgaaggattcagtcaggaatttgaa

SEQ ID NO: 115105 - DNA, 98 bp, Homo sapiens
tctgtggatcacgttataatgcttactgttgccctggatggaaaaccttacctggcggaaatcagtgtattgtcctatttcctttgaaagacctccct

SEQ ID NO: 115106 - DNA, 82 bp, Homo sapiens
agggcctgcagcgggagctggacggcgagcgcgagcggcgcgagaaatacgaggatgtcgtccaggaaagattgtgcagatg

SEQ ID NO: 115107 - DNA, 74 bp, Homo sapiens
cgaggtggagctgcggggccctggcatgaaaggatgtgtgaccggaatggtggtcggcggcttcgacagtggct

SEQ ID NO: 115108 - DNA, 101 bp, Homo sapiens
gacccattcctggtattcctgttggatcaacttggagatttagagttcagttatcttcaggcagagtgagaagctgcagcaatgtctgattttgtggaaag

SEQ ID NO: 115109 - DNA, 100 bp, Homo sapiens
gcccacacctctgcctttgttgggaaatgttttgtcctatcgtcagctcttgaccatgacagatgtgaccagcacacagattgttacagctgcacagcca

SEQ ID NO: 115110 - DNA, 75 bp, Homo sapiens
gagccgctggggtcccttttgcctcagatactattttgaaggagaagatgtatggtcttatgcaaagggacttcc

SEQ ID NO: 115111 - DNA, 100 bp, Homo sapiens
ctccgcgcccggccggacccgggcccgagaacctgtccctgctggtggtgggtgtcggcgccgtgttctcactgctattccacctgggcacccgggagag

SEQ ID NO: 115112 - DNA, 85 bp, Homo sapiens
tggcattgttcaatccagatgtttggtgtgatgaatgcagactctgctaccattttggctgtttggatcctcctttgaaaaagtc

SEQ ID NO: 115113 - DNA, 100 bp, Homo sapiens
actcagatcttaagtagtgatatttctcttttgtctgcccctattgtaagtgcagatggaacacaacaggcgatgcaaaaactttctggatggagctaga

SEQ ID NO: 115114 - DNA, 100 bp, Homo sapiens
tgtaccgcggcgagaagccccagctgcactacgcgaataacatagctgatccagaagaactgttcacaaaattagagcgcattgggaaaggctcatttgg

SEQ ID NO: 115115 - DNA, 100 bp, Homo sapiens
cccaggtggaccccaagaagaccattcagatgggatctttccggatcaatccagatggcagccagtcagtggtggaggttttaggtagaggaatttcagg

SEQ ID NO: 115116 - DNA, 74 bp, Homo sapiens
gcagccgctgccgcccaggactgggcccttagggaaagaatcatgtgatgtacagctttatataaagagacaat

SEQ ID NO: 115117 - DNA, 73 bp, Homo sapiens
tggagattgtccgctcgagcctgaaggaccctgagaaaggtcatgcttcaccccttcctccatctgctgcacc

SEQ ID NO: 115118 - DNA, 101 bp, Homo sapiens
cggaaggggtcccgaagccccctgcaggaactctacaacccaatccagatgtgtcttgctgaatcagggctctcttatccctgccatcgacttacagtggg

SEQ ID NO: 115119 - DNA, 87 bp, Homo sapiens
ataatggatgaaaggaaccgacagtgatcccgaaggtcaccaagcacctgctctcaaaccctgtgttcacctgcatcatcctggccg

SEQ ID NO: 115120 - DNA, 74 bp, Homo sapiens
aacaccacatgaagagctagagagacttgcagttttgcacagtaataagttgactcacacagacttaaagcctg

SEQ ID NO: 115121 - DNA, 75 bp, Homo sapiens
ggggcggggggaaagagccccagcaccgcccctcctggaagaaggaagagcactattcctgatcagagaactcca

SEQ ID NO: 115122 - DNA, 82 bp, Homo sapiens
tagaatcttcccttttttactccattcaagagcagcattcataaatttccaggcccgccaagctgccccctgtgtgctattc

SEQ ID NO: 115123 - DNA, 90 bp, Homo sapiens
gtgatccacaaggcattagagcatggtggagcagctcctgtacgaaagccctgagcggtactcccgctcagtgcttctcatcacccagca

SEQ ID NO: 115124 - DNA, 75 bp, Homo sapiens
gatttgctcaatgcattgaagtcagtcattaatgaccctattatccctctgaagaagatatgatcgaatgggcca

SEQ ID NO: 115125 - DNA, 100 bp, Homo sapiens
ggaacttgtgtgttaaagtaacagatgatttagtttctccaaaaaaagttggtgatgacattgccaaggcaacgggtgactggaagggcctgaggattac

SEQ ID NO: 115126 - DNA, 100 bp, Homo sapiens
ccccttcctggtggctgtgaagtgtttgtggagaaggtgctgcagagactttttcctcctgttccaagtggccaaggaaagagggaaccccagacgctgg

SEQ ID NO: 115127 - DNA, 97 bp, Homo sapiens
gcccgagttcatggccaacctcaggctcaggattcatcaaacgtgaggaagcctttggaaaccgggcaccgttgttccagctcctcttccctccctg

SEQ ID NO: 115128 - DNA, 100 bp, Homo sapiens
acaagtgtctttggttataaattatgatctacctaccaatcgtgaaaactatattcacagcagaaaaatatggctcaggagactaaccagaccccggggc

SEQ ID NO: 115129 - DNA, 90 bp, Homo sapiens
ctctgcttcctggtgcagagctcagatttcaaggagggatttgttcgtgttgaccgagattatgtgctgaagtctgcagagctggcaaaa

SEQ ID NO: 115130 - DNA, 75 bp, Homo sapiens
tgggacaatgcttttgcagagcctgacgacctgaggaaggaggatttcagcagcatgagcgctcagttgttatac

SEQ ID NO: 115131 - DNA, 76 bp, Homo sapiens
actccggcagcgaaagcggtgcagacgggaggaaggtgctggagaatctggtaaaagcaccattgtgaagcagatg

SEQ ID NO: 115132 - DNA, 86 bp, Homo sapiens
tgaggcggcggccgaggcggcgacggaggaaacagaagatggagcttctggaagaggtgaagaaggaattgcagaaagtgaaagag

SEQ ID NO: 115133 - DNA, 50 bp, Homo sapiens
catcatgaaggacacttaactgctgctgatactttggctgtgaggcaaaa

SEQ ID NO: 115134 - DNA, 82 bp, Homo sapiens
tatttagaacataaatacttgactcccatggccagcacgaggatcaggaatcagagactgcacagttccagcaagattggga

SEQ ID NO: 115135 - DNA, 96 bp, Homo sapiens
ccatggttgtacctccccaggaacctgacagaacttcacaggagaactctcctgcccttttaggagtgcaaaaagaatcattgaaaaatggctctg

SEQ ID NO: 115136 - DNA, 100 bp, Homo sapiens
aaaacagagcggggccagctgcagcgtgtagtgcgagtggggcggacgcgcgcagcccgcccgcccggcgaccagcaagatggagtctcactctgtcgcc

SEQ ID NO: 115137 - DNA, 75 bp, Homo sapiens
ccgcttcttcactaacttcgagagtcgaaaaggaaaagagctgtccctcaacaccttacactaagtcaaagcgtg

SEQ ID NO: 115138 - DNA, 100 bp, Homo sapiens
gagaaaagcgagcctcttctgataactcaggatttacttgaaatgaaaggagattccaacctacttcaggtcaatgtgacggtggactacattagaccag

SEQ ID NO: 115139 - DNA, 101 bp, Homo sapiens
cttccctcctggcaaagaacccaaggaaggcgagcggaagatttacttggcaattgaaatttgctggcctagacctgaactcttcagataatcagagtgga

SEQ ID NO: 115140 - DNA, 117 bp, Homo sapiens
gcggacaaaacgccaggcggatctcagaaggccagttcaaagttgcagaatgaagaagagtctggagaacctgaacaggctgcaggtgatgctcctccaccttacagcagcatttct

SEQ ID NO: 115141 - DNA, 100 bp, Homo sapiens
cggcagcatggcgtccgtgacgctgagcgaggcggagaaggtgtacatcgtgcatggcgtccaggcttcttctcatatcggtaattccactcaggccact

SEQ ID NO: 115142 - DNA, 90 bp, Homo sapiens
ggagccggcagcggcgcgggaggccgtgcggttggtgacaaagttcctgctgatataaggttaacttccatcaaatctaccacactaaga

SEQ ID NO: 115143 - DNA, 51 bp, Homo sapiens
cgaaaggattggattggcatctttagagcactcttaaaagacccattttac

SEQ ID NO: 115144 - DNA, 51 bp, Homo sapiens
agaaggttgggttcagaagagggtattctaccttgtaaatactgttatttg

SEQ ID NO: 115145 - DNA, 75 bp, Homo sapiens
cagcctgcgggagcccccggccgagacgagttgtactgctgtcacaggaaatggacgctggattacaagcatggc

SEQ ID NO: 115146 - DNA, 49 bp, Homo sapiens
agatgcctggcagccccgctctctgcattccagtctcatcagattttcc

SEQ ID NO: 115147 - DNA, 82 bp, Homo sapiens
gcccgcggatgcgcaccccgccagctctcgggagccaggtttggtgcacctcgatttggaggaagtagggcagggcccttat

SEQ ID NO: 115148 - DNA, 100 bp, Homo sapiens
cttccgaaatcaataaagttgctgtatttacagagattacatctcgtttagcagatgtgttcaaccaaaggtgtgaggtgaaccgaagggcatctgtgag

SEQ ID NO: 115149 - DNA, 97 bp, Homo sapiens
acagcgtcgggctgactctgcttgtgttcgtggccacgctgctgatcgtcctgctgctgatggtgtgcgggcaaatccagacagaacctttgacttg

SEQ ID NO: 115150 - DNA, 96 bp, Homo sapiens
cgggagcacctggagaggggccgcggaaacctggagtggaagggaatgatgagaagacagcagctgattacaagattttaggtggttcagtccttc

SEQ ID NO: 115151 - DNA, 101 bp, Homo sapiens
cttggcggcctcccggaagacgtcctccacattctcccgaaacttggcggaacattccaggatgagagccactcagagtgggtgtcttgtgtccgcttctc

SEQ ID NO: 115152 - DNA, 90 bp, Homo sapiens
gacgcgcgcgccggagcggggtccgatggttctcgaaggcccgcggcgccccgtgctgcagttgttgacctcctgtactggagagacatt

SEQ ID NO: 115153 - DNA, 100 bp, Homo sapiens
cctggccccacgggactgcattataaggttgaagaaattgtggatattggagcatttgctccagaagacatccatattcctcagatttatgtacatcgcc

SEQ ID NO: 115154 - DNA, 90 bp, Homo sapiens
ttgagccatttcgaatcacttaaaggagtggacattgctagcaatgagctcccaaagccatccagtcatctcagcaaaacttaaggaaaa

SEQ ID NO: 115155 - DNA, 100 bp, Homo sapiens
agcaaatgcctccatgggaagaactactgtcgacaggtcctctgtctgtatgatcttgccaaggtaactgcatcctgcccagcatgacggccccctgccc

SEQ ID NO: 115156 - DNA, 74 bp, Homo sapiens
caccgttataactttcccaatctcaatatggatgtgcataaagaactaaagaatattctggacatgttgcaact

SEQ ID NO: 115157 - DNA, 97 bp, Homo sapiens
caaccttctgtccatctgcaaaacagctgagctgaacatgaccttccacttgtttattgtggcacttgctggagctggggcagcagtcattgctatg

SEQ ID NO: 115158 - DNA, 110 bp, Homo sapiens
agtgaaaatggaaattctgggcaagaaagatattgaaacaaccaccatttcaaattttcacactcagctgtgaaagttgtgtagatttactgtttgtgagaggagctgga

SEQ ID NO: 115159 - DNA, 100 bp, Homo sapiens
aacccgcagagacttctactggctgcgctcctttctggccggaggccgaggagtcttgtaaatgtaatggctggaaaaaccctaacccctcacccactcc

SEQ ID NO: 115160 - DNA, 100 bp, Homo sapiens
gtagtcctcaggggaagcagcgatggatgcgaaggtcatgtcctggtgggattatggctatcagattacagctatggcaaaccgaacaattttagtggac

SEQ ID NO: 115161 - DNA, 101 bp, Homo sapiens
agccgcatatttggatcttcaacggatactagacagtcattttgtttactcattcagccctgttgcaggtcccaataaactcttcataaggttgacagaag

SEQ ID NO: 115162 - DNA, 75 bp, Homo sapiens
accaacgcctggctcggagcagcagcctctgagcctgacatttaccccggtaactgctgggcatttaaaggctcc

SEQ ID NO: 115163 - DNA, 96 bp, Homo sapiens
cagttacattacagacctgttccaggtgttacttactggaaatggaaacacgaaggtgcctttactacatgtgtgatctgaaaaccctgcttggtt

SEQ ID NO: 115164 - DNA, 125 bp, Homo sapiens
cggagccctaggccggtgggtgagtgcaccgcgttctcgcacgcgtcatgggccaattcctgtccccccagcagcatggcatcgtgtgctgaaccctctgagccctctgccccactgcccgccgg

SEQ ID NO: 115165 - DNA, 127 bp, Homo sapiens
agcatgggaaggaggccgagccgggatctcaggtcctcgggggcggcggccacgccaaggacggattcagaccaggatgtagcactcaaacttgcccaggagcgagctgaaatagttgctaaatatg

SEQ ID NO: 115166 - DNA, 100 bp, Homo sapiens
aacattcagacccatttccagtcatgagactcaggacggggagacagccctccagctggccatcagaaaccagcttccactcgtagttgatgccatatgc

SEQ ID NO: 115167 - DNA, 100 bp, Homo sapiens
tgcaagagaagcacctgcacctcagagtaaagctgctggacaacaccatggaaatatttgacattgagcctgccacagtgactcaggtcactcaaggaac

SEQ ID NO: 115168 - DNA, 101 bp, Homo sapiens
attgtaaaaatttcttttaagtgcaaacagttttttattcaacttagaaaagaattggtcccaggtgtgacaccttcagcaggtctcagggaagatggcag

SEQ ID NO: 115169 - DNA, 90 bp, Homo sapiens
agatgctagagcatcgagaagttcgtgatagacaccacagtcttgagcctaatgggaggtgactggatcatgggagcagagttctcttgg

SEQ ID NO: 115170 - DNA, 51 bp, Homo sapiens
cgagctcccgtctgccttgcaggtacctgaagcacaccctggaccagtacg

SEQ ID NO: 115171 - DNA, 83 bp, Homo sapiens
tgaatacaaaagaaagagatatgaagatcttcctataaatagcaatccaggctgaactcacgggaatcaaatggcgtaggtac

SEQ ID NO: 115172 - DNA, 90 bp, Homo sapiens
atgccaaagcattctctaaagacttgccaagaggtgctgagattagaagcgtctgcacagaggctggtatgtttgccatcagagcacggc

SEQ ID NO: 115173 - DNA, 75 bp, Homo sapiens
aatgagccattctcaccccgctgggacatttgggcttccaggacagttttgtcacatcaggtgtttttagtgtca

SEQ ID NO: 115174 - DNA, 75 bp, Homo sapiens
agactttttatcccttcgcaggtcatgatcttgcagctccatcaagtatgatggtgaaggatgaatatgtgcatg

SEQ ID NO: 115175 - DNA, 75 bp, Homo sapiens
gtagtgagattgaacttggccttgaggaacagctgcctctagagttgttactaaaccaaggagatttaactgaaa

SEQ ID NO: 115176 - DNA, 80 bp, Homo sapiens
tactctccgtacatccatgtaccagaagtgtaccactgtggatgaagcagatatggaatgtgcagatgtcccactattaa

SEQ ID NO: 115177 - DNA, 98 bp, Homo sapiens
tgactacataataaggatgatgaattgtactctacagtgtctcatagttgggggaggaccctgtggcttgcgcactgccattgaacttgcctacctgg

SEQ ID NO: 115178 - DNA, 82 bp, Homo sapiens
aaagacaaggtcatttcactgcctgagctgaagggctgcctgggtgttagcaaagaaggtgtttgtaaaatgtatgaagaac

SEQ ID NO: 115179 - DNA, 51 bp, Homo sapiens
ctgcaggaaggacggacttcaggggcagggggcagtacccaaaggaaacgc

SEQ ID NO: 115180 - DNA, 82 bp, Homo sapiens
atttcctgctcggaaccttgtttactaattgttggggtgactcagtgggaacgccatctgagcggggcatgacctatgacgc

SEQ ID NO: 115181 - DNA, 101 bp, Homo sapiens
atgtttgacagcgattttaagcaaggtgattcgttggaaaaattcattgtctctagagattgtcagcttggtccacatcaccagaaatctaactccctgaa

SEQ ID NO: 115182 - DNA, 75 bp, Homo sapiens
tcgcctttgccgatccgccgcccgtccacacccgccgccaggaaccctcagtgctgcgtctagattctgcagggg

SEQ ID NO: 115183 - DNA, 100 bp, Homo sapiens
aaagttccagagctacaaaagtttttccaggctccatggtccccttctcgatgcgcatcttgcacgcggagcttcagcagtacctggggaacccacagga

SEQ ID NO: 115184 - DNA, 74 bp, Homo sapiens
cagattctaccacctgtagttcagccaagtccaagggaaagcaggcaggatgggagagtcgccgatagaaccac

SEQ ID NO: 115185 - DNA, 89 bp, Homo sapiens
caatgaaactcgatgcttgaactgtgaaactgctgtgtttgatgtggacaagaagaaagggttgactctgattgagctctgggaaggcc

SEQ ID NO: 115186 - DNA, 90 bp, Homo sapiens
gtgcagcacctggagggaaaacaacacacattgcagcactaatgcatgatcagtgtaatgttcaagctcagaaatgccttatgtggatcg

SEQ ID NO: 115187 - DNA, 101 bp, Homo sapiens
gggagacctcatcatcctcatcacttttggcccgctggctgtgatgttcgcctacgccatccagataatcgcttatcagccgtatggaaaatctgtggact

SEQ ID NO: 115188 - DNA, 90 bp, Homo sapiens
ccagcctaggttccacccttttctgggaacagcccattcagtcccgctgtgcagtcctccggtacacaaagctgaccgacgcccagatcc

SEQ ID NO: 115189 - DNA, 82 bp, Homo sapiens
agcgcaccgcgccgcagtgtctactccggatcaagcgggccgacgagattgaaatgatcatgacggaccttgaaagggcaaa

SEQ ID NO: 115190 - DNA, 82 bp, Homo sapiens
aagagctcttcccttcaagactttgatattcgagcacgacctggccctgcgcaactgcctgctgacctctgacctgaccgtg

SEQ ID NO: 115191 - DNA, 88 bp, Homo sapiens
tttcccattgttcaaggacaaaggtggcccagaattttccagtgccctgaaaaataatcatgtttcaggcatatggagacaaacaggg

SEQ ID NO: 115192 - DNA, 90 bp, Homo sapiens
caaagatctgagccaggttgtgggaggtcagtttacgttgcgagacatgtatgagcaatttcaaaatatcatgaaaatgggccccttcag

SEQ ID NO: 115193 - DNA, 97 bp, Homo sapiens
cgtggcatgagggagccggaagagctgatgcccgacctgaaggaaaagattatgcccttcattggctagtgctggggactcatacgtctgatgagca

SEQ ID NO: 115194 - DNA, 50 bp, Homo sapiens
cctcccgagtggctgggattacaggatgttcacggaagaccagggtgtag

SEQ ID NO: 115195 - DNA, 100 bp, Homo sapiens
gtacttgtgcttcctgctggccgtgctgctgcaggtgacagagctgaatgaacctctctccaatgaagatcgaaatctcctctctgtggcctacaagaat

SEQ ID NO: 115196 - DNA, 100 bp, Homo sapiens
tgcattgactggaaacaatggcatttacagaaagagtcaacagcagtggcaacagctgcggttggatttctcacgatgtccagtgttatctccatgtctg

SEQ ID NO: 115197 - DNA, 100 bp, Homo sapiens
cgcaaatactggaagaacctcacctttgtctccccgatctacggggctgacatcagcggctctttgtatgatgacccttatgccagcctggaccatcttg

SEQ ID NO: 115198 - DNA, 74 bp, Homo sapiens
tgatccatcactcggattggcaggacctggggccaaaagccaaggatccaacgcatgcctggagtggaggacta

SEQ ID NO: 115199 - DNA, 100 bp, Homo sapiens
cgccggtcccggtcctgagctggaccagagccctcctccagaaacccctgcgtccgccacggcccaggataactgggatgacgatgatgatgaaaaaaaa

SEQ ID NO: 115200 - DNA, 88 bp, Homo sapiens
gggaagccgctgtcgccgccgctacctctccctgttgccgccgcctcagctactctccagagagaccggatcttcaaacattttacca

SEQ ID NO: 115201 - DNA, 98 bp, Homo sapiens
gcatcacagaagctggaagttctgatgttccactgaaatcacaatggaaagtcttgacttgactggcacgtgacacaagctgacctcaagagctccac

SEQ ID NO: 115202 - DNA, 73 bp, Homo sapiens
ggcagcccgggaaatctccaagtcagaaagaaatcagagcctcattcccttagtagtgaagcattgatgagga

SEQ ID NO: 115203 - DNA, 50 bp, Homo sapiens
cgggagctgggcggccatttaccagatatatgcaagttgccgaaagacga

SEQ ID NO: 115204 - DNA, 75 bp, Homo sapiens
tggcctccttgttcagttgcctcttccaggtgaattcatcattggccgagttatcaaagccatgaataacagctg

SEQ ID NO: 115205 - DNA, 87 bp, Homo sapiens
aagagtgtggcctcctagaaatctagcacggagaaagggctgctggtggcctactgccacaggtttgacatccaggtacagtcctcc

SEQ ID NO: 115206 - DNA, 100 bp, Homo sapiens
agttggtcgggggcagcggcagacgttccatcctcagagcagcctgaactgttcctaaagaaacttcagcagtgctgtgtcatttttgacttcatggaca

SEQ ID NO: 115207 - DNA, 78 bp, Homo sapiens
gccgatcctcgcgtgagacagatcaagatcaagaccggcgtggtgaagcgtgaaaatgcctcgtgtaaaagcagctca

SEQ ID NO: 115208 - DNA, 82 bp, Homo sapiens
gagagaccagacctgcaagctctttgacacacagcagttcttgtcagcccattttgactaccagtttggctaccgaaagttt

SEQ ID NO: 115209 - DNA, 100 bp, Homo sapiens
ggggagcgccgccgccgcctcgatggggtctcctctgagcctccggcctccataagacccaaaacagatgacacctcttcccagtcccccgcgccttccg

SEQ ID NO: 115210 - DNA, 90 bp, Homo sapiens
tgctgccgccatacgcgctctccctgtttagattgatgccaagaaggaacagctagcagatgcccggagagacctgaaaagtgctaaggc

SEQ ID NO: 115211 - DNA, 100 bp, Homo sapiens
gccgacaacagcctggcgtccgccacggttggacgtgataagtatgagcctgcagctgtttcagaacaaggtgataaaaagggcaaaaagggcaaaaaag

SEQ ID NO: 115212 - DNA, 75 bp, Homo sapiens
tgtgtctgaactgaagaagcttgggctcacttccacaaataagaagaagaggacagtgctccagtgaaagtggaa

SEQ ID NO: 115213 - DNA, 100 bp, Homo sapiens
caaactcgaagaacagctgtggaaagaagttgcaaaacactggactatgtcagagagtcacaatgaccttgcacaataacagtacaacctcgcctttgtt

SEQ ID NO: 115214 - DNA, 100 bp, Homo sapiens
cattacaggatcaacactgcttctgatggcaaggatcagtgaggaggaggacctgcacctggggacatcgttttctgcagaaaccaaccgaagggatgag

SEQ ID NO: 115215 - DNA, 75 bp, Homo sapiens
aaggaacagtttacaagcacatgataatttcttcaacagcttgcacaactacagaaagaaaaatcagagattctg

SEQ ID NO: 115216 - DNA, 82 bp, Homo sapiens
cagcagggcgttggctatgtgcccatcacaggtgagaagccctaccactgcaactgggacggctgcggctggaagtttgcgc

SEQ ID NO: 115217 - DNA, 73 bp, Homo sapiens
cgcgagtgaggaaaggaggtactgtaggtctgttaatggagtataccggattggactctatgctcttaaagac

SEQ ID NO: 115218 - DNA, 98 bp, Homo sapiens
gctcgatacaatttcacacctggcagcctgccctacgagtacaagatcgtgatcgcaggcaaccacgagctgacctttgaccaggagttcatggccga

SEQ ID NO: 115219 - DNA, 75 bp, Homo sapiens
aaaagtggcagaagatggttccattattttggatgaagaaagacgcagtaaaacgcaggactcttcccgcttgga

SEQ ID NO: 115220 - DNA, 75 bp, Homo sapiens
gctaagactccaggacacccctgaagccgagaaatggagaagacagactgctgctttggacctgttggtaatgat

SEQ ID NO: 115221 - DNA, 75 bp, Homo sapiens
ccggggcttgccctggtcttgctcggccgatgaagtgcagaggtttttttctgctgcagccccctaaacccagga

SEQ ID NO: 115222 - DNA, 101 bp, Homo sapiens
tggctctcctgtaggaagcaaccagtctcgatctggcccaatctctcctgcaagtatcccagccaaatttgtatcctactgtggggcttcaaacaccagga

SEQ ID NO: 115223 - DNA, 101 bp, Homo sapiens
tcacaggttctggcaaaaccagtctgttgtccaaactctgcagtgaaagccccgataacgtcgtgtcgaccacagggctgatcccttatccaacatggttc

SEQ ID NO: 115224 - DNA, 83 bp, Homo sapiens
caagactacggagcataggaggaaaattcatcatctgatgtatcggcaagcagtgtaaacggaggacttggggaaaaaggacc

SEQ ID NO: 115225 - DNA, 100 bp, Homo sapiens
gaagaattaagacgcatggaagaacttcacaatcaagaaatgcagaaacgtaaagaaatgcaattgaggcaaaccagcgggttagtattgacaactggtg

SEQ ID NO: 115226 - DNA, 100 bp, Homo sapiens
tgagagatggaacccgaagaagaaaggattcgttacagccagagattgtgggcaaatcaaactagcagattttggacttgctcggctctataactctgaa

SEQ ID NO: 115227 - DNA, 51 bp, Homo sapiens
agcagcagagaagccttcctggaaaagcattgggaatggtaccacctcccg

SEQ ID NO: 115228 - DNA, 75 bp, Homo sapiens
aaaccttattaatctcagggaactggatgtcagcaagaatgtcttagagtttgaaagagtctatcttgataatct

SEQ ID NO: 115229 - DNA, 90 bp, Homo sapiens
gaagaggtcccaatcccccactctttccgccctaatggaggtctccagtttcggtccggcctctttggcctacccccgttggctccgctg

SEQ ID NO: 115230 - DNA, 50 bp, Homo sapiens
caggattctgacagggatgttgcgaagctcacccgacgactgccacccat

SEQ ID NO: 115231 - DNA, 98 bp, Homo sapiens
tgctggagaattataggaacctggtctccctgggtttctgggtgtctctggggagcccctgggccagattttcctctagactccagcccatctcttca

SEQ ID NO: 115232 - DNA, 90 bp, Homo sapiens
attttgtgggacaaggaacacatttatgatgagcagccccccaatgtcgaggagtggtgtgaaatggccaccagtggtgacagacaaaga

SEQ ID NO: 115233 - DNA, 74 bp, Homo sapiens
ctactggtgccagaacacagagacagcagcccagtgcaatacaatgcagatcttcgtgaagactctgactggta

SEQ ID NO: 115234 - DNA, 80 bp, Homo sapiens
ctgaagggaaattcacagaagctatagttggtatattgaagcaagtcaaagattacattaaacagtgtagcaaatgccag

SEQ ID NO: 115235 - DNA, 75 bp, Homo sapiens
tttctcacatttgtttcattgaagaaatagttaaggttggtgttcgaggaagagacattgttgttcttggtgtgg

SEQ ID NO: 115236 - DNA, 100 bp, Homo sapiens
tccctggggcggcagcgcggacccgcccggagatgaggccattgaaaagtattgccgagttaatggtgggttttctggagtcaaagatgtatattcctct

SEQ ID NO: 115237 - DNA, 100 bp, Homo sapiens
ctattggattcataacctgctccatgcttgaaaacatggggattggaattcggtgtgaatcatggcaatacagtgaaagacagtgatttactgcttttga

SEQ ID NO: 115238 - DNA, 50 bp, Homo sapiens
ccactgcgggccggcgaaagctggcccacaatgccccgctgagccggtgc

SEQ ID NO: 115239 - DNA, 95 bp, Homo sapiens
gaggagccattttgagcaatggggaacgctcacggactgtgtggtgcatgtttgcctacaagctgggtctgaatgacttgccccagtcagtcgcc

SEQ ID NO: 115240 - DNA, 82 bp, Homo sapiens
atcgtagtcttcctaggagttgtcaaaatgcagatcttcgtgaaaacccttaccggcaagaccatcacccttgaggtggagc

SEQ ID NO: 115241 - DNA, 100 bp, Homo sapiens
cttggagaggctgtgagccacaatgcatcgctggaagtagccaggggtcctgatgacaacttaattgaaggtggaggaacaaaatttgtctgcaaacctg

SEQ ID NO: 115242 - DNA, 75 bp, Homo sapiens
ggagagagaccagacctgcaagctctttgacacacagcagttcttgtcaggtcccagcatccatgactgctgagg

SEQ ID NO: 115243 - DNA, 100 bp, Homo sapiens
cagccaaggaaggaggcctgcaaattcatgacaggattattgagttaatagccaagataccaaccatcacggcagtttgcaacttgcacggggagaagct

SEQ ID NO: 115244 - DNA, 50 bp, Homo sapiens
cctcccacagtgctgggattacagggtgtccgcaatgttgccagtgtctg

SEQ ID NO: 115245 - DNA, 99 bp, Homo sapiens
cgagtggccgcgggcgccatggagggggtgctgtacaagtggaccaactatctgagcggttcattttccagacactgaaagagcagaatggctaaataa

SEQ ID NO: 115246 - DNA, 51 bp, Homo sapiens
cggaggtggcagccatctccttctcggtgctggagaatctggtaaaagcac

SEQ ID NO: 115247 - DNA, 100 bp, Homo sapiens
ttccctcacattagccagtgtgaagacctccgaaggaccatagaacttcagcgagagggaagcatcgagactctgagtaacagctcaggctccaccagcg

SEQ ID NO: 115248 - DNA, 100 bp, Homo sapiens
tgatcagtagcaccagtgtttatggccaaaatcctgagcatgatggaagacaataagcagctcgcgctccgcatcgatggggcggtccagtcggccagcc

SEQ ID NO: 115249 - DNA, 95 bp, Homo sapiens
ctgcagccgccgccgtccccggagcacggggtggtgtgtgggggaagccgcccccggcagcagggaaaaagaaatagtggtttcagacagtgctt

SEQ ID NO: 115250 - DNA, 100 bp, Homo sapiens
gatgtgtctgtggagcacggatgccattagcaaggatgtttttaataaggatgttgcttcagagtgtgaagtcaaatgcatgccaacattccagtttttt

SEQ ID NO: 115251 - DNA, 100 bp, Homo sapiens
gcctgatctacacactgcgctgcggggtctttgccaccttccccattgtgctgggaagcgtcagcccccgtagcacctctgttaccacgacttctagtgc

SEQ ID NO: 115252 - DNA, 75 bp, Homo sapiens
gaggtcggatgacgggaagaggcaagaccagttggaaacacttttactgtattatctatgaagaaacgtttttga

SEQ ID NO: 115253 - DNA, 76 bp, Homo sapiens
gcagctagcaaggtgacccatgcattggttaatatcagggtcagtatagaccttctgatttgctgtgccctgagac

SEQ ID NO: 115254 - DNA, 100 bp, Homo sapiens
catggggctggcctgcggcgcctgggcgctctgaggccctggccaacgtcaacattgggagcctcatctgcaatgtaggggccggtggacctgctccagc

SEQ ID NO: 115255 - DNA, 98 bp, Homo sapiens
gcatgaatcagtctctctccctgctctacaacgtgcctgcagtggccgaggagattcaggatgaagttggtccatgatgggaaaaaaagcatcagagc

SEQ ID NO: 115256 - DNA, 82 bp, Homo sapiens
agaatatttagaatgcaggatggagagtctctgctttctatccgtcaagatgataaagtcgtgtgcccgagaaccaaagaag

SEQ ID NO: 115257 - DNA, 75 bp, Homo sapiens
tgcagcacaatctggcctcccggtacggatagagagtattaaatgtgatgagaagcatgaggctgagagaggagg

SEQ ID NO: 115258 - DNA, 100 bp, Homo sapiens
aactcagagccgggaagcccccattcactagaagcactgagagatgcggccccctcgcagggtagcagcaattgcagagacagatgaatctgcagaatca

SEQ ID NO: 115259 - DNA, 97 bp, Homo sapiens
aggctttcaatcaacccaaggtgatgcttttgctacgacctcattttctgctggaactggtggataatattaatgcagctgtgatggatttgaaaaa

SEQ ID NO: 115260 - DNA, 101 bp, Homo sapiens
aaaagggacattatgcttatgattgtcatcgttacagccggcgaagaagaagcaggcaatgataccgtctttatccaagttactctgccccatggcccaag

SEQ ID NO: 115261 - DNA, 100 bp, Homo sapiens
acctgggaagtggaaccggatatttaagtacaatggtgggcttaattttaggtatgagaaagtgccagtcatcttggttgggaacaaagtggacctggaa

SEQ ID NO: 115262 - DNA, 83 bp, Homo sapiens
cgtctctctcggcagtcaccggagtgcccgagggggaagcacgatttacggaaggatgggtttgtggagttcttccatgtaga

SEQ ID NO: 115263 - DNA, 83 bp, Homo sapiens
tatggctgtaactggagatgacacagaacgctgtccaactgggcgtacgagtttgacaagtgggccccctccgtggtgaaggt

SEQ ID NO: 115264 - DNA, 91 bp, Homo sapiens
cgtgactcttctgcttcaggcctgccaaaagaaaagattgtgacagatcactggacccagcacctagagtcttgctctgtcgcccaggctg

SEQ ID NO: 115265 - DNA, 106 bp, Homo sapiens
tgaaactaaaagatgtcacaaaggaaaacgaggaaagtcccaggatgactactgtgtcaagttatgatgtgattgctcaagcccaatctgggactgggaaaacggc

SEQ ID NO: 115266 - DNA, 90 bp, Homo sapiens
cgcctggtgctcaagactttctccgagacattcacggcatggtgtaactcccacctccggaaggcggggacacagatcgagaacatcgaa

SEQ ID NO: 115267 - DNA, 51 bp, Homo sapiens
cagagatcagaacaatggcctagtaagaatgattgatgttggctgatattg

SEQ ID NO: 115268 - DNA, 75 bp, Homo sapiens
gtaaagtgaccctcttagatggcaccgaatacagctgtgacctggaggattaccttgactgcatcagggaccaaa

SEQ ID NO: 115269 - DNA, 75 bp, Homo sapiens
gacgtacccgccgccgccgttggctggaggaaaattgcctaagaattatgacccaaaagttaccccagatccaga

SEQ ID NO: 115270 - DNA, 90 bp, Homo sapiens
cgagcctgggtcccactatagcggcttcgcagttgtcgccgtgatcctgaaggcgctgacctacgacgagaagcggggtgcctgcagcgt

SEQ ID NO: 115271 - DNA, 100 bp, Homo sapiens
caacaacctcttgaggatcgaatcttcactcccgctgtctcagcagtctacagcacgttcaaatctgaacatcaatgatgtactagggaactactcattg

SEQ ID NO: 115272 - DNA, 76 bp, Homo sapiens
cgcctgctgctggctcctcactgagaccgatcagaaaggatttcttaactggcactgctggcagagacggagaccg

SEQ ID NO: 115273 - DNA, 100 bp, Homo sapiens
ggggaggtcacctgacgaggagccaagaagtatgatgcgtttttggcctcagagtctctgatcaagcagattccacgaatcctcggcccaggtttaaata

SEQ ID NO: 115274 - DNA, 129 bp, Homo sapiens
gcaggtccaaacattcaccgtggagaagctactggagcctctcataatccaggaatgaatctgaagtctgctgcagtaaaacacagaaggctttaaaatgttttcttgcataaaattcaaaacttttaa

SEQ ID NO: 115275 - DNA, 124 bp, Homo sapiens
gtccgccctcaggcccgtggccgctgtccaggagctctgctctcccctccagtttcttatcaccacaggagaaaatctagattatcttgatggtgtccatacggtgtttggtgaggtgacagaa

SEQ ID NO: 115276 - DNA, 100 bp, Homo sapiens
aagtgttagaaacagtagtggagaatcaagctctggagcctcccagctcaattgcctgggatttatacaagataaaattacagtgtgtgcaacaaacgac

SEQ ID NO: 115277 - DNA, 101 bp, Homo sapiens
atgcagccctcagtggctcggaggatgtgtctcgggtcctcatccacgcaggaggctgcgccaacgtggttgatcatgtactccaaagattcaggtttact

SEQ ID NO: 115278 - DNA, 73 bp, Homo sapiens
agatcggcttcatgctgtgcagcaagaacccggaatgatgtatttaaaatccactggctgatggcggcccttc

SEQ ID NO: 115279 - DNA, 83 bp, Homo sapiens
ctccactccgtcccccgcgggtctgctctgtgtgccatggacggggtgctttcttctgcgacctggtactcatctacctcatc

SEQ ID NO: 115280 - DNA, 75 bp, Homo sapiens
caaagctgctgccgccccttgggctaaaaggcggctatgagaggttttcctccgagtacccagaattctgttcta

SEQ ID NO: 115281 - DNA, 119 bp, Homo sapiens
caataactatgcccgagggcactacaccattggcaaggagatcattgacctcgtgttggaccgaattcgcaagctggatcaagtcttccataccagggaccaggccaaaaccagactgc

SEQ ID NO: 115282 - DNA, 101 bp, Homo sapiens
cttctatgaagtcaactttgatgatggctccttcagcgacaatctttatcctgaggacatagtgtcagcagataagcagagagccctagaagaaaccaaag

SEQ ID NO: 115283 - DNA, 75 bp, Homo sapiens
agttctgcgagtgttacacttgcgaaagtctggatgtggatagtgaagctaagaaactattgggtttaggacaga

SEQ ID NO: 115284 - DNA, 101 bp, Homo sapiens
ttcctttatatggccaaggagaactcccccagtgtttctgcagggaatcaatttcgagcaaattacttcttacaaccagagctcatgccttcacaactggc

SEQ ID NO: 115285 - DNA, 75 bp, Homo sapiens
gactttttgtacttacaaagtccatgctaacctactatgagggtcgagcagaggctgaccaactgactgaagagc

SEQ ID NO: 115286 - DNA, 100 bp, Homo sapiens
gttatttaggaggattcgatggcaattttttgtggaacagaattggagcagatatgatggtaattccctgctaagtagcattgaatgttatgaccctatc

SEQ ID NO: 115287 - DNA, 100 bp, Homo sapiens
tttttggatggtatctatgtctctgaaaaaggaactgttcagcaggctgatgaataagatctaagagctgctggctgatcgtggggactgcgacccagag

SEQ ID NO: 115288 - DNA, 82 bp, Homo sapiens
agactcctcaacaagttgctgcaatgtctgtgtctaatctatcatgtggaaggaatgaaggccagctgaatggtgaaacaaa

SEQ ID NO: 115289 - DNA, 101 bp, Homo sapiens
aggacaccgacatggaacagggactcactggggattccaaaggttttcctaaaaatataaccaacaacagggggaaaaaaagatacccagattccaaggac

SEQ ID NO: 115290 - DNA, 80 bp, Homo sapiens
agtagagaggggccagttagaacagataactggcaaaggtgcttcggggacattccagagcacgaacttccaggagccgg

SEQ ID NO: 115291 - DNA, 74 bp, Homo sapiens
tacagcaagcagaagacttcatcctcccagacactacagagctggaggagctgatagacatggctgtgctggag

SEQ ID NO: 115292 - DNA, 97 bp, Homo sapiens
ccgtggccttagctgtgctcgcgctactctctctttctggcctggaggctatccagcctgatggtgagaccattctaaaaggcctccagtccatttt

SEQ ID NO: 115293 - DNA, 75 bp, Homo sapiens
aggcaggggaggaagccacctcgagataccatgtttgtgtggaagtgccccgtgtttgctatgccgatgctgtcc

SEQ ID NO: 115294 - DNA, 100 bp, Homo sapiens
tgctacatggttacaacaaccggacccagcatgtgaaccaaggccaagtcttccagatgacctttagggattaatgaaaatcaagttccatcctcagaca

SEQ ID NO: 115295 - DNA, 97 bp, Homo sapiens
gcatgcagcagttacttccactcaagaatcgtaggccaggctgatggagagctgaacattactcttccagaagagagacaaggtctcgctgtgttgc

SEQ ID NO: 115296 - DNA, 101 bp, Homo sapiens
aggggaaccacactgtttaccggatctcagctccgacgcccgaggagaaggaggagtggattaagtgcattaaacaacgtggacgaccccacggggaactt

SEQ ID NO: 115297 - DNA, 88 bp, Homo sapiens
agcaattccaggccttcaggaatgaggtggctgttctgcgatcttactgtgccgagatcgctcacaatgtttcctccaagaaccgcaa

SEQ ID NO: 115298 - DNA, 82 bp, Homo sapiens
tcctgtctggagagaagcagcggatcagcagaggtgagaagccctaccactgcaactgggacggctgcggctggaagtttgc

SEQ ID NO: 115299 - DNA, 75 bp, Homo sapiens
aagagaagctggacgctctgcaggggatcctctctgctttcctgtaacaaatgtggcaattattttggatctatc

SEQ ID NO: 115300 - DNA, 100 bp, Homo sapiens
gcaggagagagacacaagctggcaaaggagcggcgagaagagcgggccaagtacctggcagctaccaagggggtgccagctggaaacagtgacacagagg

SEQ ID NO: 115301 - DNA, 100 bp, Homo sapiens
gttggctcagatacactctctgatttggggatctctagcctacaggatggcttggccttgcacataaggtgatctgtgaaaatggttcgctattcacttg

SEQ ID NO: 115302 - DNA, 100 bp, Homo sapiens
gttgctgctgcacattaggttgcagtatgtggccagttatttgcctcagtaaaagagacactcaatcacttgtcggaagtccctcaacccgtatagcacc

SEQ ID NO: 115303 - DNA, 100 bp, Homo sapiens
gcttatcaccgagaggcagcagaagcactgcctggccttcagacatcaccctacagtggcttattcaacactcgaagtcacggagaagctgagactccag

SEQ ID NO: 115304 - DNA, 51 bp, Homo sapiens
cgaagctggtaaaagaacttgaaggtggtgaagcagtattttccaatttga

SEQ ID NO: 115305 - DNA, 77 bp, Homo sapiens
tggactacggggagcgcgccgagctggatgactcggacgggggggccctcagcctcttggccttgaacgggctgttc

SEQ ID NO: 115306 - DNA, 84 bp, Homo sapiens
tctccttccttgagatgatgtggaggatttgccctgccctggctgtgggtgagaagccctaccactgcaactgggacggctgcg

SEQ ID NO: 115307 - DNA, 75 bp, Homo sapiens
aacaggagattagctccctcaaggatgagctgcagacggcactgcgggtacctggcgctggtatctgcactggcc

SEQ ID NO: 115308 - DNA, 83 bp, Homo sapiens
ccgctgttttgccggaggagcccctcaggccgaagccatcttcgacaagagcacagggaaggttgttttgaagacgttcagcc

SEQ ID NO: 115309 - DNA, 50 bp, Homo sapiens
acaggacccctcaactttcctatccgaggaatgggcatgaactccccgga

SEQ ID NO: 115310 - DNA, 83 bp, Homo sapiens
gacgtcttcaccgccccacactggcggatgaagcagctggtggggctctactgcgacaaggttttgatgatgatggttcagaa

SEQ ID NO: 115311 - DNA, 97 bp, Homo sapiens
cctattagatgaggttgacaaactgggaaaaagtctacagggtgatccagcagcagctctgcttgagtggcagctgaaatatcctaaactaattctc

SEQ ID NO: 115312 - DNA, 88 bp, Homo sapiens
caacatgcctcaccctcatctatatcctttggcagctcacagtcgcaatgtatctgctgagcaaaaagatgaaaacaaagaagcaaag

SEQ ID NO: 115313 - DNA, 100 bp, Homo sapiens
cagaaaatggcttggtagcatacaaagatgggaaactcttgtgtagacaggtgatccgggagccgaagccacgttcagcccgctggctcagcacctctat

SEQ ID NO: 115314 - DNA, 100 bp, Homo sapiens
gtaatttcaacagaagagtgagagatggaacccgaagaagaaaggattcgttacagccagagattggaatgaatctgaagtctgctgcagtaaaacacag

SEQ ID NO: 115315 - DNA, 75 bp, Homo sapiens
gccgaggccttgagcccagagcaggctgctcattacctaaggacctaatccggagagacatcctgtactacaaag

SEQ ID NO: 115316 - DNA, 89 bp, Homo sapiens
cccagcaagcaccagggcccgtgtggtggtccgagtgtggttctgtaaccggcgccagaagggcaagcgatcaagcagcgactatgcac

SEQ ID NO: 115317 - DNA, 98 bp, Homo sapiens
catgaaggctagtttggatgtggaggggaatagactccatctatccatatgagttaataacgacatgatagtcactgacaacaacggtgcagtcaagt

SEQ ID NO: 115318 - DNA, 100 bp, Homo sapiens
agatgtatatacgctacattcacaaactctatgatctgcatctcaaagcacagaactttacaggacctctgccctacccccactggactggcctctgccc

SEQ ID NO: 115319 - DNA, 100 bp, Homo sapiens
acctgaggctgcagcagaagcagccgctgagctgtggtggcctagatgcccgatacaacgtccaccttcatccgaagaggctgaatcataaatataaccc

SEQ ID NO: 115320 - DNA, 101 bp, Homo sapiens
tagccgggagttacaccgccaccgccaggttgattcttcaccacactgaaaccattaggaaaaatccttgtggttaacagcagaggcttcagagtgtaacc

SEQ ID NO: 115321 - DNA, 100 bp, Homo sapiens
gccctgcagtgcgcagcctttaactcccaggaattcatgggccagctgtatcagtgggagcccttcactgaaggtcaccttccgcaaccctgtcattgag

SEQ ID NO: 115322 - DNA, 75 bp, Homo sapiens
tgttttagaggataccttggtcccagagtcatcatgaaggtgtttcagtcacctccagtaacacgggcgtgccag

SEQ ID NO: 115323 - DNA, 82 bp, Homo sapiens
ccagctcagagacccctgccaggaccctgcccttcaccacaggcttgatggtgtcaggctatgctgtgactggggctgtcct

SEQ ID NO: 115324 - DNA, 74 bp, Homo sapiens
ccatgctctctttggattgcttggtacctgcagcacgtttccatgcctgggagagtacccaaaggcaagtggaa

SEQ ID NO: 115325 - DNA, 90 bp, Homo sapiens
gggcggggccacgctgcgggcccgggccatggccgccgccgatgccgagacaatgcagatcttcgtgaagactctgactggtaagaccat

SEQ ID NO: 115326 - DNA, 82 bp, Homo sapiens
ggtggaggtctacgcagatgccgacgaaatcctccaggaggagatcaaggagtacaagatgaggacggggacttggttgcct

SEQ ID NO: 115327 - DNA, 83 bp, Homo sapiens
cctcccgcttctgcacctgctgtctggctggtcccgggcaggatgggtcggcagcctgcttctgcaaagtggtacgatcgaag

SEQ ID NO: 115328 - DNA, 46 bp, Homo sapiens
tcacgacgggccgagcctgccactattcaaccctatgaaaagataa

SEQ ID NO: 115329 - DNA, 75 bp, Homo sapiens
gaatctgcttttcaagtatgccaccaacagtgaagagaaatacagtccatactgcccggaatctctgcaaagctg

SEQ ID NO: 115330 - DNA, 99 bp, Homo sapiens
ctcggccgggccgtcccggcctgcgcagcctgaggatgggtcatcagttaaggaagttgaaacctaccaccggacacgtgctttaagatctttgagaaa

SEQ ID NO: 115331 - DNA, 75 bp, Homo sapiens
cagctccaaagcattggatgctggataaattgaccggtgtgtttgacaccattttaaggctcacaaggctgtttt

SEQ ID NO: 115332 - DNA, 90 bp, Homo sapiens
cagtcactaacttctctctcagatgttgaaaagatcaagagactgaaatctcatccttctatcatcatatggagtggcaataatgaaaat

SEQ ID NO: 115333 - DNA, 87 bp, Homo sapiens
ccttcctgatccgggagagtgagagctccccaggggagttctctgtgtctgtgaagacagctaacccccgcatcggtgacgtgatcc

SEQ ID NO: 115334 - DNA, 74 bp, Homo sapiens
aaggacaaggacagaatcaccagcactggctgaagattactatgacatggaatccatggtccatgcagacacaa

SEQ ID NO: 115335 - DNA, 100 bp, Homo sapiens
ctgagattgaaacccagacagaggggagcacagagaaagagaatgatgaagagaaaggcccggagactgaaagctgtgtgaagagacaaagggagaatgc

SEQ ID NO: 115336 - DNA, 75 bp, Homo sapiens
tgaacgtacagcaaggccaaacggttagaccaattacactagttccaggaagggatgagaccatgcagcctgcga

SEQ ID NO: 115337 - DNA, 154 bp, Homo sapiens
ctaccaacacccatcatggctaaaagtgcggaggtcaaactggcaatatttgggagagcaggcgtgggcaagtcaggtatatttgaaggctcccatgattctgaatggagtctgtgttatctggaaaggctggattgatctccaaagactggat

SEQ ID NO: 115338 - DNA, 100 bp, Homo sapiens
attcttccactgatatctcaaaaggtgatctggacaaaggaacaggtatctcaggaagtcaacttcaagcagattgacttgaaacgggatctcatttagg

SEQ ID NO: 115339 - DNA, 101 bp, Homo sapiens
cctgatggaaaacacaaaggatctgttcacaaaagaacttccaggatatggctataccaaaaaactcatcttggcgttaattgtgactggaatactaacga

SEQ ID NO: 115340 - DNA, 50 bp, Homo sapiens
ccgagaccgcggccgggaccgagggatcttttgccagaaatgagggcata

SEQ ID NO: 115341 - DNA, 101 bp, Homo sapiens
gtacaaatacccctttgaattaattatggcttggaatgcagtagccctctgggcctgggatattgtggttgataactgtgccatctgcaggaaccacatta

SEQ ID NO: 115342 - DNA, 82 bp, Homo sapiens
cccccccttccccacgcaaccccagatccatttacactttacacatgtagagcgcatgaagtacaggacaataaagcttcct

SEQ ID NO: 115343 - DNA, 75 bp, Homo sapiens
gctgactgatgatgaagcctggaatggattcgtggctgctgctgaactgcccagaacccgagcaacttcccgaga

SEQ ID NO: 115344 - DNA, 74 bp, Homo sapiens
ggacctgccggcacgcgactccccccgggcccaaaatctgtgccatcattggcgggaccttcaccgtcgccggc

SEQ ID NO: 115345 - DNA, 100 bp, Homo sapiens
gggctcggtgcgactgcgcagctcctcggcgcttcctcggtggcttccccgggtcgagcaaacagagaggagccggtgcgcaagttcacgggcaaggcgg

SEQ ID NO: 115346 - DNA, 75 bp, Homo sapiens
cccagaagaagctgggaagtttgtctttgaaatcattccaggactcgggtcaagctggaaagcctggaagacgcc

SEQ ID NO: 115347 - DNA, 82 bp, Homo sapiens
atcctgccgtccttctccactttcgccagcccgtgccgcgagcgcggcctgcaggagaatgagtctgcaggtcttaaacgac

SEQ ID NO: 115348 - DNA, 97 bp, Homo sapiens
gaaagattcatcaggccaatgtccgggaccatgtctggagaactaccaccaaacattaacatcaaggaacctcgatgggatcaaagcactttcattg

SEQ ID NO: 115349 - DNA, 75 bp, Homo sapiens
accctcatccagctgatgcccttcttcgtatggtgagaacaagaccaagattggaaagccagcttcagaggaggg

SEQ ID NO: 115350 - DNA, 80 bp, Homo sapiens
ccgctcagtccttccaccggaagtgtccgatcggaatcagccctgtccgagaggaactctgcgaccttcaagtcgtttga

SEQ ID NO: 115351 - DNA, 82 bp, Homo sapiens
tgcagccgccctccatcctctacgggggcaggaaacctgatgtgagactctctcgaggcagtattgacagggaggatggaag

SEQ ID NO: 115352 - DNA, 100 bp, Homo sapiens
ggaagttataacgctacacgaagaactaagaatattattagcacaagagcaccatactttgagggatctaagcctttcccacgttatggttataaaccct

SEQ ID NO: 115353 - DNA, 98 bp, Homo sapiens
gtttccaatcattactttctcctctgtgtcaatctgcctcttcgagaaattcatactcctgggtagaatggttttgaagaagaaaaaacctgctttct

SEQ ID NO: 115354 - DNA, 100 bp, Homo sapiens
ctcacaagatgaaagagcacatgccttcaattaagttgcagagttctgatggagagatatttgaagttgatgtggaaattgccaaacaatctgtgactat

SEQ ID NO: 115355 - DNA, 111 bp, Homo sapiens
ggctcacttgcatgtatttggaacaaaaaaaggagatgcctggcagccccgctctctgcattgtcactcagcccagtccatcagtttctcagcccagtacttctcagagtg

SEQ ID NO: 115356 - DNA, 75 bp, Homo sapiens
agcaagccgggcggcctgccccgccggagcagcatcatcaaggtgcaactgccaaaagaactggcgtaagaggca

SEQ ID NO: 115357 - DNA, 51 bp, Homo sapiens
cgcggccgcaccttcccgccttctcagatcaggatcctcatgaccagccaa

SEQ ID NO: 115358 - DNA, 82 bp, Homo sapiens
agatgtacctgaaaagtcgtcactctttcaccaaggttggactcttcacagaaattgggcccatgtcttgcttcatctctcg

SEQ ID NO: 115359 - DNA, 88 bp, Homo sapiens
aaggagccctaaacagccaggaggaagaagaagtcattgtcacagaggatgagcaccatgccaggactgcccacccggccctgctttt

SEQ ID NO: 115360 - DNA, 74 bp, Homo sapiens
agcgattctcctgcttcagccacctgagctgatcttcagacaagttctcagcgtttaaatctttcagcctccaa

SEQ ID NO: 115361 - DNA, 51 bp, Homo sapiens
ggtagagagaccaaagatcttgatgaggccgggtgctcgtccactgccggg

SEQ ID NO: 115362 - DNA, 101 bp, Homo sapiens
cgccaaggaggtttacaaaatagacatgccgcccttcttcccctccgaaactcctggacttctagggatctcagccgtggctgaggccacccccagaggag

SEQ ID NO: 115363 - DNA, 90 bp, Homo sapiens
taagaaacagtgctttctgaaacaacaaagccaaacttccattggtcaggtggataaattagatgcttcagaatcactgagaaaagaaga

SEQ ID NO: 115364 - DNA, 100 bp, Homo sapiens
tacaagacctggtgaaggtggaacggggctcccaggacctccactaatcaccagaacaaaatgtgcaggtctctaattaacagaagatggcaaagcccag

SEQ ID NO: 115365 - DNA, 93 bp, Homo sapiens
gcaccgcggacgcccgctgagcttggcgcacgggccgaccaggcatgggcaagaaggacgaccccaagctgatgcaggagtggttcaagctag

SEQ ID NO: 115366 - DNA, 75 bp, Homo sapiens
gttttccttacatctcaatgaagcaagggactatgaagatgagggttactaccagggtggaaaatttcagtttga

SEQ ID NO: 115367 - DNA, 90 bp, Homo sapiens
cgcatcgctgaatgtgcccggacctgcgccttctgggagtcggagaggatggcaggggccggaggccagcaccaccctccgggcgccgct

SEQ ID NO: 115368 - DNA, 146 bp, Homo sapiens
gtaacagggccatggagaagctgcggcgagtcctgagcggccaggacgacgaggagcagggcctgactgcgcaggcaccatgactcctgtgaggatgcagcactccctggcaggtcagacctatgccgtgcccctcatccagccag

SEQ ID NO: 115369 - DNA, 74 bp, Homo sapiens
tccaacagggatgcgctgagcgatttcttcgaggtggagtcggagctgggacgcctctgcaatcccagataatg

SEQ ID NO: 115370 - DNA, 98 bp, Homo sapiens
gaaaagaagcccaaggatagcacaacccctttgagtcacgatgtcaagccctccaacatcctagtcaactcccgtggggagatcaagctctgtgactt

SEQ ID NO: 115371 - DNA, 97 bp, Homo sapiens
ggatcgggtggagtgtaggtcatatcgccgcggctgcgggcctctcgggtgcttcttgtcggcttgaaaggacttggggctgaaattgccaagaatc

SEQ ID NO: 115372 - DNA, 83 bp, Homo sapiens
gcctttaactcccaggaattcatgggccagctgtatcagtgggagcccttcactgaaggttcaagggcagcaggaaagacgag

SEQ ID NO: 115373 - DNA, 90 bp, Homo sapiens
taacttatgttgtgattggagatggccgagatgaggagcatgccgctaaccaggatgtgatcttcgtggtggaaagctaaattttaaaac

SEQ ID NO: 115374 - DNA, 100 bp, Homo sapiens
gacacattcaatccggaccattttctggagaatggacagtttaagaaaagggaagcctttatgcctttctcaatagaacttcagcgagagggaagcatcg

SEQ ID NO: 115375 - DNA, 100 bp, Homo sapiens
gtcgaaccccgggacacgcaggaacggctccagcatcaagatccgtctgacaggatggacaaccggaaattttctacacattttggaattcagttactca

SEQ ID NO: 115376 - DNA, 78 bp, Homo sapiens
gttaagaattgcctttgggactctgaaggctgaaggaacgtcaaggtcgtgggaaataaaaggcagttctacacagac

SEQ ID NO: 115377 - DNA, 112 bp, Homo sapiens
tgagcagggtctgcacgaaataaagctcctgggcaaggggacgtctgcagctgaggcttatttcaaaacctttgtccctcagttccaggaggcagcatttgccaatggaaag

SEQ ID NO: 115378 - DNA, 100 bp, Homo sapiens
gagtcctgttccaccttcagagcgtcacggcgtacgccctcatggggaaaatctccccggtgactttcaggaaaaatcagccgtagaattgttgattagt

SEQ ID NO: 115379 - DNA, 83 bp, Homo sapiens
ctggggccccctgctcctgtgcctgctgcaggccgctccaggatggctggctgtggtgaaattgatcattcaataaacatgct

SEQ ID NO: 115380 - DNA, 98 bp, Homo sapiens
gaaataccagtccccagtgagggtgtacaaatacccctttgaattaattatggctcactctggcccccagaagcttctccacattgcccaggagctcc

SEQ ID NO: 115381 - DNA, 95 bp, Homo sapiens
ctcacatctgtgacttcatccgaaaaacactgaatgctggggcgtactccaaagttgttcaggaacggtggaaccgtcccaaaatgtcccttgct

SEQ ID NO: 115382 - DNA, 83 bp, Homo sapiens
gtcgaagacatggaccagggctacggagatgtgaagttcatttccaatccgccctccatggtggcagcggggagcgtggtggc

SEQ ID NO: 115383 - DNA, 51 bp, Homo sapiens
aacaccgcacaggcaggaggcatggccaagaatgacatagggactgcaagg

SEQ ID NO: 115384 - DNA, 74 bp, Homo sapiens
gaaattacaggccctggcaaatgagcagttcacatttgccaaaatgtggatactgtatgcacagtttgaaatac

SEQ ID NO: 115385 - DNA, 100 bp, Homo sapiens
agagacgtgaaacatgtgaacactcaagtgaagcaaaagccttccatgattacgctcagccggagatgggccctgacgtgctggtgcagacgatgggggc

SEQ ID NO: 115386 - DNA, 51 bp, Homo sapiens
tggagtggtggatcagaccaaagatgggctgacttcaaaatttctgaggag

SEQ ID NO: 115387 - DNA, 104 bp, Homo sapiens
cgtagagtcgctggagcgggcggagctgtgcgagagcctcctcacttgggaacatcatttacagcgagcaatttcagcacagcaagtgtttagagaaaaaaaag

SEQ ID NO: 115388 - DNA, 83 bp, Homo sapiens
tgataatggaggtcttggtcaagcatacagaggaagaatatttctcagccctccgttctcaagacagatgagtgctttagaaa

SEQ ID NO: 115389 - DNA, 50 bp, Homo sapiens
ggagctgcaaagccagtttggcctgaagggctgacagatgaagagattga

SEQ ID NO: 115390 - DNA, 75 bp, Homo sapiens
ggatcccccagttccaaagtgtcttaaaggagagaaggatattcctggactgactgatactacagtgcctcgccg

SEQ ID NO: 115391 - DNA, 83 bp, Homo sapiens
gctaaagcagcgtgcgttcagccctgggaacactctgctccagccaaggtggtgagggcagctgttcctaaacagcgcaaagg

SEQ ID NO: 115392 - DNA, 100 bp, Homo sapiens
accaggaacccaccagaaggaaccaattccggacacataacaagcagcagtgaggacaccaaagagtaatcaagtcagaggattatatgacttttatctg

SEQ ID NO: 115393 - DNA, 83 bp, Homo sapiens
ttcagcgcatcggcagcggcacctacggcgacgtctacaaggaattgcattttgtgaaaaaagaacaagaattttctgcaagg

SEQ ID NO: 115394 - DNA, 80 bp, Homo sapiens
ggttaacttgggagaaagtttcatctgtggatggagtattgggttttcagagaaagatgctgatgaggtgaaaggaattt

SEQ ID NO: 115395 - DNA, 83 bp, Homo sapiens
ggaagaacagcctgaagaagggctccctcgtgaagaacctgaaggacacactaggttaaacccatccagagtaatggctgcgg

SEQ ID NO: 115396 - DNA, 88 bp, Homo sapiens
gagctgagggagcaagaggtgtcggaggtctcatctttgaactactgccggagcttctgccagagaacatcagttacttttatatgaa

SEQ ID NO: 115397 - DNA, 98 bp, Homo sapiens
actaaattgatggccagcacacaaccttttaagcttttccagaagcctgttaaaagcaaggtctccccacaagcaacttctctgccacatcgccaccc

SEQ ID NO: 115398 - DNA, 87 bp, Homo sapiens
ccagcgctgcaagaggcctacgtgcgggtggtcaccgagaagtccccgaccgactgaacattgatgatggcacctcagatcgcccct

SEQ ID NO: 115399 - DNA, 100 bp, Homo sapiens
actgtaattccagctacatgagaggattgcctgaggccaggagtttgagaccagcctgaacaacatataatctatgccagcaattatgacaatgttagca

SEQ ID NO: 115400 - DNA, 100 bp, Homo sapiens
tggaaaatgacagccttcatttctctgaacatactgccttatgggacagatcaaggcaagaatatcacggcatgggcatgagtagcttgaaactgctgaa

SEQ ID NO: 115401 - DNA, 90 bp, Homo sapiens
cctgtccccgggggcgccatggcgaccggagcgaacgccacgccgttgggcttcaagctcaacaagaagctgtacgagctcatcatcacc

SEQ ID NO: 115402 - DNA, 83 bp, Homo sapiens
gacaaaactcttggattctatgcatgaatgttcatcatttgccacttaagctacttgcagtcacgtcacaccttggatctcta

SEQ ID NO: 115403 - DNA, 75 bp, Homo sapiens
tgcctggactgcattgtcgaatggtccaaggtgcccgtggttgacacgagctgtgtccccagctgttcccgtcta

SEQ ID NO: 115404 - DNA, 100 bp, Homo sapiens
aggagagccggagtcggggacccaggagtttcctgtgtccagcgctgccggagccgcctgaggctggatgacaccaaaatcctcccaggcaacatgaagg

SEQ ID NO: 115405 - DNA, 82 bp, Homo sapiens
actctttccgccctaatggaggtctccagtttcgccttatgccagcctggaccatcttggaggcagtgtaggatcatggaag

SEQ ID NO: 115406 - DNA, 50 bp, Homo sapiens
aaattattcacatgcttgaatactgtggatctattatcctcccagtccac

SEQ ID NO: 115407 - DNA, 82 bp, Homo sapiens
gacagtctcctgcgaaaccaggcaatgggtgtggacactgccagcggctgcagccgacttggaatgacctgggagacaaata

SEQ ID NO: 115408 - DNA, 82 bp, Homo sapiens
cgggaagatcctggaggtggatctgaagaacggactcagattgatggacaacttttcttaattaagcaccttttgatacttc

SEQ ID NO: 115409 - DNA, 89 bp, Homo sapiens
cagctcgctctgggagcctagaatgcatcagtgcccttgtggcgaatggggctcacgtcgagtaccgttttgcagagattcgctaccat

SEQ ID NO: 115410 - DNA, 50 bp, Homo sapiens
cgccgtcaacgccttcaaccaggagggtctcggattgcgagctggctgcc

SEQ ID NO: 115411 - DNA, 88 bp, Homo sapiens
aaaatttgtgcacacatttcatggacagctgattctttcccaggcctttggacaagcacacacaaaccacaagaaggtggctgctgac

SEQ ID NO: 115412 - DNA, 51 bp, Homo sapiens
gccaccgtggaaggacagaatgggctctcgaaatatcggccagctagctcc

SEQ ID NO: 115413 - DNA, 100 bp, Homo sapiens
attaatggcatgatccttgtaggactctggttaattcagtggctgctcttaaaatacaatggatgattcaacagccacacaaagcagcaacattttttgg

SEQ ID NO: 115414 - DNA, 77 bp, Homo sapiens
cgtggccgtgatacagttcgccgtcggggagcaccgagcccagaaaaatggctacaaacttcctagcacatgagaag

SEQ ID NO: 115415 - DNA, 75 bp, Homo sapiens
atgatcaagcaggtgttggttgagaacttcagtaactttaccaacagaatgatgttgatgatgatggctctgctg

SEQ ID NO: 115416 - DNA, 83 bp, Homo sapiens
cggcgcgcgagctggagcactcgctgtcctcagcctgcgggggctgcgtggaggtggactcggagaccgaggccgtgtatggg

SEQ ID NO: 115417 - DNA, 100 bp, Homo sapiens
ggaccctctgtacggcatagctgagtttgcctatctggggcgcctggctcacgaggttggctggaagtaccaggcagtgacagccaccctggaggagaag

SEQ ID NO: 115418 - DNA, 90 bp, Homo sapiens
aggagatctcctcaaagaagtttgtccttctgctattgatcctgaagataaatgtggagaggactataaactgcacttcatcttccgaca

SEQ ID NO: 115419 - DNA, 100 bp, Homo sapiens
ctgtatgctatgaaggtgctgaagaaggcaacgctgaaagatcatcactgttgaagaggcaaagcgcaggaagagcacatgcagctactatgaagacgag

SEQ ID NO: 115420 - DNA, 100 bp, Homo sapiens
gagaactataagagcctggtgagacggagctatcggcgccgcggcaagagccaggtcaccgacgatgagggcgcacctgctgtcctggagcttccgatct

SEQ ID NO: 115421 - DNA, 83 bp, Homo sapiens
cctggctcggagcagcagcctctgaggccggtctaattgaagccaacggagaactcaaggtcttcatagaccagaaccttagt

SEQ ID NO: 115422 - DNA, 75 bp, Homo sapiens
tggttacctatgtacctgttaccactttcaaaagatatactgcggggacaccatacaaggtcccaccgacccaga

SEQ ID NO: 115423 - DNA, 83 bp, Homo sapiens
cttgcctacccgccggcccgcgggtctacttcctcaaagacaaatttacatgtattggagaccagaccagaagcccttctgaa

SEQ ID NO: 115424 - DNA, 100 bp, Homo sapiens
ccaatatcgatgccctgctgagccgcttggagcagatcgctgcggagcaaaaggccaatccagcacgtaaccaaggctttgacgtggtgctggtggacac

SEQ ID NO: 115425 - DNA, 75 bp, Homo sapiens
agaacatttccatcaaaccctgagagctttattaccagacatgatctttcagggaagaaggagaaagggccaacc

SEQ ID NO: 115426 - DNA, 100 bp, Homo sapiens
ccagtcgtgcatgttcttggtgaagtcggccagcctgagcaagcggaggacctacgccggcctggagcaaaatatgctgtgaattccatcaagaagaaag

SEQ ID NO: 115427 - DNA, 90 bp, Homo sapiens
tgccaaggaccacgcatccatccagatgaacgtggccgagacagcacccaagaaaacctcatttggctcgctgaaggatgaagaccggat

SEQ ID NO: 115428 - DNA, 100 bp, Homo sapiens
aatatcactttctttgtttatgtcagtaatttcacctggcccatcaaaattcagggtatatgagaaaatattgactcctatctggccttcatcaactgac

SEQ ID NO: 115429 - DNA, 83 bp, Homo sapiens
cacgacctatcctaggcgccatgggacttgccatgaggtgttgaagccttgtttcactgagttggagagactggacctaaatg

SEQ ID NO: 115430 - DNA, 100 bp, Homo sapiens
gggcatggcatcgaacagcatcttcgactccttcccgacctactcgccgaccttcatccgcggaggatttgatgaagatgttaaagcgaaagtggagaac

SEQ ID NO: 115431 - DNA, 75 bp, Homo sapiens
ggcgccgcacggagttgcgtcccggggacttggggccgcagggagaagatggcagtgaacgtatactcaacgtca

SEQ ID NO: 115432 - DNA, 73 bp, Homo sapiens
gttaaaagaactcttaattcaggagtgagttgaatgaaataaaagaaaatcagagaagtccagttagagtaaa

SEQ ID NO: 115433 - DNA, 90 bp, Homo sapiens
cagcccctggtggaggcggcttggcggagattcggagccgtcagcaggttggatggcaagcatgtggtgtttggcaaagtgaaagaaggc

SEQ ID NO: 115434 - DNA, 75 bp, Homo sapiens
cactggctacacatttccagcaggctgcagatacgagtggacaagtagagtggaacccccagctattagaggtcc

SEQ ID NO: 115435 - DNA, 90 bp, Homo sapiens
cttggaccctggaaaacctggccctcttcaatttctgacaaaaggtaactcaactggacccaaataaatcattattggaggtaaagttgt

SEQ ID NO: 115436 - DNA, 50 bp, Homo sapiens
attgactatggaaaagttgccaaattgggaggtggggaagacagggctcc

SEQ ID NO: 115437 - DNA, 82 bp, Homo sapiens
gtcccagctcggcccgcgggggagccccgggagccgcacggaagactatgaccgtctgaggcctttatcttacccaatgacc

SEQ ID NO: 115438 - DNA, 75 bp, Homo sapiens
gtaaaagtgaaattaaataggaagatcatcagtcaaggaagacccactggagattgatcagatgttttgggaggt

SEQ ID NO: 115439 - DNA, 82 bp, Homo sapiens
tgaatgtagagagaaagtacttcaaggtaacgtgaagcacctggttctcttcctccatgaggctgtcctggtgcagtatgtg

SEQ ID NO: 115440 - DNA, 101 bp, Homo sapiens
cagaaaagatggaaactttggacttcaagaacttggattaaagaacttgacaggttttccagggaaattttgacaatgacactcacagaaaaaatgtcatc

SEQ ID NO: 115441 - DNA, 97 bp, Homo sapiens
tgattgagcccttatgaggcaatttgttaggccttttgttgtatttaatttttggaacaatttgatgagctaggagtgctctggaactgaacccgca

SEQ ID NO: 115442 - DNA, 100 bp, Homo sapiens
tggggcacccacagccaacttccaacaagatgtgggcacaaaaactaccattcgcctgatgaactctcagagaacactaaactctacatctcccttcccg

SEQ ID NO: 115443 - DNA, 82 bp, Homo sapiens
actgctgagcccgtccgtccgccgccaccacccactccggacacaggtttctctagaggactttctaaagaaaattcagcga

SEQ ID NO: 115444 - DNA, 82 bp, Homo sapiens
atacgacacatccaggagtttattggagcgcagactgatggcgcaaaggggcgtgatggtgggcatgggtcagaaggattcc

SEQ ID NO: 115445 - DNA, 82 bp, Homo sapiens
gacgccatgatccccaccttcacggctctgctctgcctcgggtgagaactctgtctcagtcgacgggaagtgcagtgactcc

SEQ ID NO: 115446 - DNA, 74 bp, Homo sapiens
ctcggcctcggcctcggcctccgacacgaaactggcgatggaatatgagaggagccctctggaaagaaaaggac

SEQ ID NO: 115447 - DNA, 83 bp, Homo sapiens
caggagcccggcaccccccgccgacaaggaggagtttatgtggccgaggcagacaagtggaattaggccttgctgcaggggac

SEQ ID NO: 115448 - DNA, 82 bp, Homo sapiens
ctcgctgacaactctcacacagattcggctgcagatactcacaggtcagcccaaggccaaccccactgtcactctgttcccg

SEQ ID NO: 115449 - DNA, 95 bp, Homo sapiens
aaatatccagattttaagcagcatgttcagataaatctgaatggaagagtgaggtccttatgtcgtcagaagatcgagaagctcaggaggatgaa

SEQ ID NO: 115450 - DNA, 83 bp, Homo sapiens
gtcgggttattcgagtgaccgagaccgcggccgggaccgagggaggctactcacagtcgaactacaactccccggggtccggc

SEQ ID NO: 115451 - DNA, 75 bp, Homo sapiens
gagaggttcagctaaagagctgctacaggaagcagttcaggtacttttgaagcattctgcagatgttaatgctcg

SEQ ID NO: 115452 - DNA, 73 bp, Homo sapiens
gaattacaggtgtgagccacggcgccgggccccctagggattttcaggtacttaaacttcacccttgtttagc

SEQ ID NO: 115453 - DNA, 82 bp, Homo sapiens
ttgccctgtctcctcgcagatgaggacacattcagctaacgtattttagcaggtggagtgaggttgaagattcctgtgacag

SEQ ID NO: 115454 - DNA, 111 bp, Homo sapiens
ggacttctcgatctctggaggcacctgttgcaagtgacaggccaactacacagacccccagagcaaactgcggttcagcaccattgaagagttttcctacattcggaggct

SEQ ID NO: 115455 - DNA, 97 bp, Homo sapiens
tcctggtctgctccaaagagatctcagcgctcaccgacttctctgcgacaaggtgctggggcaaccaatggaaaagacaagacatctggtgaaaatg

SEQ ID NO: 115456 - DNA, 100 bp, Homo sapiens
gagaaaccgcagcactacacgtgcggccgggaacttcctgtgccccgctggcgccttgtccttcaacgccttcaagaccgtgatggacatcgataccagc

SEQ ID NO: 115457 - DNA, 100 bp, Homo sapiens
agtaactttgcccgagcatatgcacagggtatcagccgaaccaagtactgggagtgcaggtcgtaatctgaaggagtggctgagggagcaattttgtgat

SEQ ID NO: 115458 - DNA, 75 bp, Homo sapiens
gcacattcttacgacagggagcccagaaggaaggatatggagtaatagtactaaatcccaatgaaaactatattg

SEQ ID NO: 115459 - DNA, 82 bp, Homo sapiens
gctacgtggtgcaagagtcaggccagaacttcagcaccctggctgagaagtctattatcctcccagtccacaacgctgaacc

SEQ ID NO: 115460 - DNA, 100 bp, Homo sapiens
gagcctaagcaacccagctcccagacaaagaaacagccttggtataatagcacgttagcatcaagacgaaaacgacttactgctcattttgaagacttgg

SEQ ID NO: 115461 - DNA, 75 bp, Homo sapiens
aaagggtaaatgtaccctggaagagggatactggacctgtgatagatgtgggcgctatctccaactgtctttgca

SEQ ID NO: 115462 - DNA, 145 bp, Homo sapiens
gcagaagctactcaaatgcagtcggcttgtcctggctcttgccctcatcctggttctggaatcctcagttcaagacctgcctagagctggaacgttacctccagagcgagccctgctatgtttcagcctcagaaatcaaatttga

SEQ ID NO: 115463 - DNA, 75 bp, Homo sapiens
cctctctcccgcgcgcgcccggcgcttcggctccgctccctgtgcgcttggattagaagaacaagaaagactcca

SEQ ID NO: 115464 - DNA, 126 bp, Homo sapiens
caagttcatgaaacctgggaaggtggtgcttgtcctggctggacgctactccggacgcaaagctgtcatcgtgaaggagaccctcctgttcttaactgtgggcgatgagaaaggtggtggactctt

SEQ ID NO: 115465 - DNA, 96 bp, Homo sapiens
tagccatccaagcttcctgaaggaggttcgagatcacatgcaggactctttcttaatgcagcctgagtcccatgaagtgggcaccattgctattgc

SEQ ID NO: 115466 - DNA, 109 bp, Homo sapiens
cggagggaactttggaggtggtggaggtaattttggccgtggtggaagctacaatgattttgggaattacaacaatcagtcttcaaattttggacccatgaagggagga

SEQ ID NO: 115467 - DNA, 100 bp, Homo sapiens
ctcacacctgtaatcccagcacttcgggaggccgaggcgcatggatcatgaggtgtcacgtcttgaaattttaaatgtcctcagtgactctctacctctg

SEQ ID NO: 115468 - DNA, 100 bp, Homo sapiens
aaggatttgacaaagccacttttgaaagtcagatgtctgtgatgaggggtcagaccaactacggttgaaaacgtaaaaaggattgatggtgtttctgaag

SEQ ID NO: 115469 - DNA, 83 bp, Homo sapiens
attgtttctctccctctgcccccccttccccacgcaaccccagatccatttacactttacagacatggatttgattgacatac

SEQ ID NO: 115470 - DNA, 90 bp, Homo sapiens
gcggaggcgcaggcagcaactgaggcagcggcaggctcaggtgcagccgctgggaggcctcgtgggtctggtagattatcctgatgatga

SEQ ID NO: 115471 - DNA, 75 bp, Homo sapiens
aaaagaaaagggcaaagctgcttgcacgttatataccgcttattcaagccatacacactgctgctatggatatgc

SEQ ID NO: 115472 - DNA, 51 bp, Homo sapiens
gagagaaagtactttaacatgcacagcggggatctgatgagcttctttctt

SEQ ID NO: 115473 - DNA, 73 bp, Homo sapiens
aatgatgcaccagattattatggtgttattaaggaacctatggattcaagaaatccatggtgaaaggtttgga

SEQ ID NO: 115474 - DNA, 97 bp, Homo sapiens
cttccactcaagaatcgtaggccaggctgatggagagctgaacattactcttccagaagagaattcaattcgtcataatctgtccctacacagcaag

SEQ ID NO: 115475 - DNA, 99 bp, Homo sapiens
catttatttgggctttgctgttagcattagcctttggatttgtgtccagattgtcatcaagacgcaggcctactgaacttgacgcactggtatttggcc

SEQ ID NO: 115476 - DNA, 74 bp, Homo sapiens
ttaagaaaatcagataacttgtactggagagaaatcctacaagtgtgtgtggcccagagttgctcagaattgga

SEQ ID NO: 115477 - DNA, 98 bp, Homo sapiens
atcccagactctgccagtatgtggatatttctaggggaaagcatggtggtgggcccaggaaaagaaaattatcttcttcttcagagccatatgaggaa

SEQ ID NO: 115478 - DNA, 100 bp, Homo sapiens
aatctgagggtgccctcaatgagcacatgaccagcttagcttctgtcctaaagggtgaaaaggctgatagcttttacatcatagagtctggcgaagtgag

SEQ ID NO: 115479 - DNA, 75 bp, Homo sapiens
gagcttttggaatctgaacaaggggtgaacctgagcaaggtgggcgagtattggtggaacgccatcctggaggga

SEQ ID NO: 115480 - DNA, 75 bp, Homo sapiens
gaggattcagggaataggagctggggagcccttctgcgccacagtccgtgatctttattcgtgacagaaattctc

SEQ ID NO: 115481 - DNA, 78 bp, Homo sapiens
cgagagcgtgaccgagagcgcgaatatcgtcatcgttagaagctcgatgcattctatttctcatcatttggctcataa

SEQ ID NO: 115482 - DNA, 89 bp, Homo sapiens
gtcaccaacccggccttcaccaaactccctggccatgaagcccccaggaggagaatcgagcaatctttttggaagtccagaagaagcta

SEQ ID NO: 115483 - DNA, 76 bp, Homo sapiens
cccagaggtcgtggaggtggccgtggaggcagaggtggcatgggtcactctctgaaagagaacaaagtaattttct

SEQ ID NO: 115484 - DNA, 74 bp, Homo sapiens
ccggggaccttgccaaccctcccaagaagttcagagggtgttgatgatgccttctatacattagttcgagaaat

SEQ ID NO: 115485 - DNA, 83 bp, Homo sapiens
gaatccaccgccatccgccaccatgactgtgccctgtccacggtgcctcctgcatgtcctgctgccctgagctgtcccgagct

SEQ ID NO: 115486 - DNA, 49 bp, Homo sapiens
tgcttcacctcagaaaggtggaagaagtttttgaaatcatgaatcctgt

SEQ ID NO: 115487 - DNA, 90 bp, Homo sapiens
cagcaacagggacatcgtggagacggtgctcaacctgtgttaagtccaaaagtgctgggcattgccatcgctcggtatgacttctgtgca

SEQ ID NO: 115488 - DNA, 76 bp, Homo sapiens
ttatttgcatcacaaaaataccatgagacttttgccaacaagaagaagcttttgcgagaattgaagcaccctaatg

SEQ ID NO: 115489 - DNA, 100 bp, Homo sapiens
ccaactgtgaggcgttatgctgttgcccggttgcgacaggccgatgatgagatctcatgttcttgtgtggcttcctgcttcagtgctgtttgtgggtata

SEQ ID NO: 115490 - DNA, 74 bp, Homo sapiens
ctggcagtgacgaggacgaagtgtccgaggtcacgagaagagaatgccttctagatgcaaaatcacctccaaac

SEQ ID NO: 115491 - DNA, 100 bp, Homo sapiens
aaaggctcaacgagaacaagctatcagaatgctgcttctaaattacttgggcaaaattgggtccaaaacgcctttgatggcagctgcaactttttccgtt

SEQ ID NO: 115492 - DNA, 100 bp, Homo sapiens
gcctggtgagacggagctatcggcgccgcggcaagagccaggaccaagaatcgccttcagccctgtctggtgcatccttggcagaaagtgaggaggaaaa

SEQ ID NO: 115493 - DNA, 75 bp, Homo sapiens
atcaaaattcctgtccaaggacaaactcttcaagccttcctttgatgtgaaggtcagttgctgataaagaggcca

SEQ ID NO: 115494 - DNA, 82 bp, Homo sapiens
caggatttgagcggaagaacgaatgtaactttaagggtctcactctgctcactctgtctcccaagctggagtgcagtggtac

SEQ ID NO: 115495 - DNA, 100 bp, Homo sapiens
tcaagatcttgatctatatccatagattggaatattggtgggccagcaatcctcagacgcctcacttaggacaatcaggatggctaaaggtgaccccaag

SEQ ID NO: 115496 - DNA, 101 bp, Homo sapiens
ctgaggatgagctggaggagggggttcctctacctggcatgaaatgggtagataatcacaaaggtgtttttaatgttgaagttgttgctgtttcgtctatc

SEQ ID NO: 115497 - DNA, 75 bp, Homo sapiens
caactatgacctactgcttggcgtccatggcttctgcaactgcaactcttccatgccgaggccagtgaaggtggc

SEQ ID NO: 115498 - DNA, 102 bp, Homo sapiens
ttgtgaagaatctgctaccaaaatcactagactcagcccacctgcacccaggtgaaataaacagctttattgctcacacgaagcctgtttggtggtctcttc

SEQ ID NO: 115499 - DNA, 100 bp, Homo sapiens
cgatccttagccagagaactctctgccctggtacctgacagtgtaaagaaggagctcctacaaagaataagaacattccttgctcagcatgccagccttt

SEQ ID NO: 115500 - DNA, 100 bp, Homo sapiens
cgagcccgggaagtgcgttttggagccaatcaaacctcttgaaaagagagctctaaacttcttagtcaatgaatttttattgaagaataactataagctt

SEQ ID NO: 115501 - DNA, 76 bp, Homo sapiens
cccgcggcgaccacagccaaagcgggcaacatccatgatagcagtcttctgtaaatcgaacttttcaagaattctc

SEQ ID NO: 115502 - DNA, 76 bp, Homo sapiens
cgagtttgaagagttccctgccgaaggcttactagaaagcagcacccgcctgaaacctcacgaagcccagaactac

SEQ ID NO: 115503 - DNA, 75 bp, Homo sapiens
ctgctcccatcattgatgtggtgcgatcgattagcctgaggcctgctcagtcgttcctaatgaataaaaatcaag

SEQ ID NO: 115504 - DNA, 74 bp, Homo sapiens
ggcccctggctcctgctcctggaatggagatttacagacagtcatctgggtggaggacacccttttgggatcag

SEQ ID NO: 115505 - DNA, 49 bp, Homo sapiens
gggtcctttatatagaagggagagtaggccatcaccatcgaggctgagc

SEQ ID NO: 115506 - DNA, 50 bp, Homo sapiens
acgagctgttggcatccttggataagagatgctgcctatttctataagcg

SEQ ID NO: 115507 - DNA, 83 bp, Homo sapiens
gaggttcgagcgctgttctcgctccggagccgctgcacatttcggtgctccatctcgaaaagcgagaaaggcctccagaccac

SEQ ID NO: 115508 - DNA, 98 bp, Homo sapiens
aacagcatatgatgtgcttaaaaaaatgcagtcaaagaagatggatccacctgatgaggtcagcaaattaaaacgtcacattcgctctcatactggag

SEQ ID NO: 115509 - DNA, 101 bp, Homo sapiens
attcctctcctgatctggcctcatctgttccagggaggtgggattgatgactgtgaagtgctgaccacactcaccccagacactggccgtatcctgtccaa

SEQ ID NO: 115510 - DNA, 75 bp, Homo sapiens
ggactgactggggttctgagactccctgtcccggaccgcaggaagccattaatttgctagaaccaatgacaaacg

SEQ ID NO: 115511 - DNA, 75 bp, Homo sapiens
ggacttgcatcaggagtagcaagagaccaagacacattccaccccagtggggggtcccataccactcatggatct

SEQ ID NO: 115512 - DNA, 75 bp, Homo sapiens
gacgcagtcactgcagcactggtggaacttgagcaatggtacagcagttccatgaaagtcatttgcgtgtggttg

SEQ ID NO: 115513 - DNA, 83 bp, Homo sapiens
atccgagagaagctatgtttagcatcttctgtcatgagaagtggcgatcaaaattgatttcaggtatgctgctgaaagtggga

SEQ ID NO: 115514 - DNA, 75 bp, Homo sapiens
gacgctggaagagctcgtggcgtgcgacaacgcggcgcagaagagctcttgtccctggcaaagcgaaagcgcagt

SEQ ID NO: 115515 - DNA, 75 bp, Homo sapiens
gtcgggttttgagctgccgcggtcccgggactgaggaaattcgcccccgtctgcagcatctgtgaaaatcccatc

SEQ ID NO: 115516 - DNA, 75 bp, Homo sapiens
caagccttcccagttatcataaccttgaatggcgactagatgtacaggaagttggtgaaccatctaaagaagaga

SEQ ID NO: 115517 - DNA, 75 bp, Homo sapiens
accgcctgcccagcttgcttcacaccccaagcagtcacaagaggtggaggtggaggaagcgtccctgggatcgag

SEQ ID NO: 115518 - DNA, 85 bp, Homo sapiens
gaaaaggaagttttctggaatggaaaggagaatcacttgaacccaggaggaggaggttgtggtgagccgagattgcgccattgcc

SEQ ID NO: 115519 - DNA, 82 bp, Homo sapiens
accggggaccctcagctggacacggccatcgggcagtggctccgctgggataaggaatcaaaggatgaacagtggaaacgag

SEQ ID NO: 115520 - DNA, 100 bp, Homo sapiens
tgtgacatatcgttggacccagaattgaggtattttaacagcagtgataacaatttacagtattggggattggattacccacctcttacagcttatcata

SEQ ID NO: 115521 - DNA, 100 bp, Homo sapiens
ggaaggtggagccaccagcctctccctggtatgcagtgccattcagaatcaggatttcactgtgatcgaagactactgcactggcctcaaagccctgctt

SEQ ID NO: 115522 - DNA, 115 bp, Homo sapiens
cgcgagctggacgctccgcagcccgcccgccagccggcccgccggccgccgcaggacctgaaggagaagaaggagaaggtggaggagaaggcaagccggaaagagcgaaagaaag

SEQ ID NO: 115523 - DNA, 100 bp, Homo sapiens
cctccaccagaggaaaatagtatgggaattcctattatggttactacaaaaggctgaatttgaagggagtaaaggtcagttgcagtgaagaaactccctt

SEQ ID NO: 115524 - DNA, 83 bp, Homo sapiens
agagactctgccttttcaacatggatggctcctcccgctgccgctgccgctccaggagacaggtgcagaccatgaattacgtg

SEQ ID NO: 115525 - DNA, 98 bp, Homo sapiens
ggggctgagcactcgctccccaccctgggcctcaccaataaccagctcttcttcctgggctttgcacaggtgggatgtgtgtgggctgaaattccgag

SEQ ID NO: 115526 - DNA, 75 bp, Homo sapiens
tctggaagacgcgctcctgcgccgcatgatgccttcttctgtagagtgggcgctttgcagaatacgtgttgaatg

SEQ ID NO: 115527 - DNA, 101 bp, Homo sapiens
agaaagcctattttctgtatatgtattccagatatctgaacacactgttgcagcagctaggagtggctcctttttctgagggcccttggcccttgtacatt

SEQ ID NO: 115528 - DNA, 100 bp, Homo sapiens
cgagagagactacttctggcatcctttaagaatgagggtgccgaaccagatctaatcagcgaaagagcagatcccagttactgtaaggaccgcattgctg

SEQ ID NO: 115529 - DNA, 90 bp, Homo sapiens
gccacggtgtggcagctgctctgaaccaggacctggacccggacccaaagtgccatgtctttaatattttctggcatccttaaatcttgt

SEQ ID NO: 115530 - DNA, 100 bp, Homo sapiens
cagattgtaggaccgagcgcgggcaggcgggaggcaacggagctaccagccgggccagatattcgaagcttacaacatggcagctttgtggaaattacct

SEQ ID NO: 115531 - DNA, 75 bp, Homo sapiens
ccagtctgtgtctcaaatcaaccacaagctggaggttaatgactccagagagtaagatcagattcgtccacaaag

SEQ ID NO: 115532 - DNA, 90 bp, Homo sapiens
gctgagccaggaaggcaggtcgctgcctgtgccccagctggtggaacttgctactaccagcaccatgccctaccaatatccagcactgac

SEQ ID NO: 115533 - DNA, 74 bp, Homo sapiens
tcagcatccttcaccacacagttggaatcgaggtttctgacgtagaagagcttacccctccagagcatctttct

SEQ ID NO: 115534 - DNA, 100 bp, Homo sapiens
gaagaacatggccatgttggcccagcaaatgcaactagccaatgccatgatgcctggtgccccattacaacccgtgaataactgaagtgaagtgatggac

SEQ ID NO: 115535 - DNA, 75 bp, Homo sapiens
ctccgctgagtcctgccaggctgcaagggccaagcacgctgttccagtgtcaacctaagaaaaagtctacgccac

SEQ ID NO: 115536 - DNA, 100 bp, Homo sapiens
caacgcctggctcggagcagcagcctctgaggtgtcctgtggccaggcggaaagcagtgagaagcccaacgctgaggacatgacatccaaagattactac

SEQ ID NO: 115537 - DNA, 75 bp, Homo sapiens
agcatagacagtctgtgtaagaagtactccagggaaacctcccagggcaacaggtttgtctatgctggctctaac

SEQ ID NO: 115538 - DNA, 50 bp, Homo sapiens
gcggataagggacccgacactgatgactcacaccacccggcaagaactgc

SEQ ID NO: 115539 - DNA, 91 bp, Homo sapiens
tctggtcctactacgcgtacgtggtggagctctgcgtgtcgctttgaacttcaagattcaggaagctctctacttcctaaagagattgtaa

SEQ ID NO: 115540 - DNA, 98 bp, Homo sapiens
gtaacttggccaggctggccccgagcggaactggagaaagctgagggtgttctttgcagaagatgtgggttcaaacaaaggtgcaatcattggactca

SEQ ID NO: 115541 - DNA, 100 bp, Homo sapiens
ggagcgtcctggggctgtgctccatggcgagctggatgagcaccatgccaggactgcccacccggccctgcttttatgacatagatcttgataccgaaac

SEQ ID NO: 115542 - DNA, 90 bp, Homo sapiens
cttctctgggctacagctgggactagtacccagacccagagttcatgctgcttacggagttcctatgctagtcagcatagtcagcttggg

SEQ ID NO: 115543 - DNA, 101 bp, Homo sapiens
ggagcccctccacaagttccatctaggcctacgagggccccgcccagtgtcccaagattacaggaatgaagaactgttgcctaattggaaagtgccagcat

SEQ ID NO: 115544 - DNA, 100 bp, Homo sapiens
agaggaagatagtcttgggacccttgcatggtgtttcaaagggtggtgaagaactaaggctgaactcacgggaatcaaatggcgtaggtacaattttgga

SEQ ID NO: 115545 - DNA, 87 bp, Homo sapiens
aaagataaatccaaatactgcatatcagaaacaacagatgaataatacggcagctagtccaatgtctactgcaacttcaagtagtgg

SEQ ID NO: 115546 - DNA, 75 bp, Homo sapiens
gcggaggcagaggtggaggcgctttgaaagttgctctaggtcgtaaccagcctttgaaaaaggagaaaccaaaat

SEQ ID NO: 115547 - DNA, 82 bp, Homo sapiens
ccacagggtgatcccttccttcatgtgccaggttgcaataaattgacagaccagaccctgatctacctacggcgcattgcca

SEQ ID NO: 115548 - DNA, 151 bp, Homo sapiens
cgtatgttcactcgtctgccaccatcccattggatgaccccactttgctctttgccaatgcaggcatgaaccaggttggtaggaggagaggattggagctgttttctccttgatgccaagatacgccaagctaggagcattctgccctttc

SEQ ID NO: 115549 - DNA, 80 bp, Homo sapiens
ccgttatgaaatgtatcgccgctcagctttccctaaggcagccatcaaaaggaagagaatggcatggatcaagaaaatcc

SEQ ID NO: 115550 - DNA, 73 bp, Homo sapiens
aggttggatttatgcaaacttgggccaaaggacagttagaagacagtaggaatcagtgacattcaaagatgtg

SEQ ID NO: 115551 - DNA, 98 bp, Homo sapiens
aactgtgttgtttcagctgtattagggatcgtacctagccatatggcctgctgcctctgccaatttaaaaacagcattgaggctgtctgcaagacagt

SEQ ID NO: 115552 - DNA, 100 bp, Homo sapiens
gctccaggcagtgtaatctcattccatcttcattcatgactccagacagatttctctatgaatcatcatcaagaactctgggagaacttttgaattcata

SEQ ID NO: 115553 - DNA, 75 bp, Homo sapiens
cgggaactcatcagccgcatcaaacagagtgaactttctgccaagatgcgtgaacagcagagaatttcaaaggac

SEQ ID NO: 115554 - DNA, 82 bp, Homo sapiens
ccttgagggtccacaccgcgagggaagatgcgtgcgcccattcaatggctgccatccggaagaaactggtgattgttggtga

SEQ ID NO: 115555 - DNA, 100 bp, Homo sapiens
gatcgtcaagtccttcaagcagttcgcactacagcgggagcaggagctggaggtccccagtctatgtgaggatctcctgtcttctgttgaccagccactg

SEQ ID NO: 115556 - DNA, 82 bp, Homo sapiens
ggactcccgcggcgggaggagcctgttcccctgaggttctggaggacacgtgccggcggcaggacttcaacccctgtgaata

SEQ ID NO: 115557 - DNA, 90 bp, Homo sapiens
ccgcgctacaccaacctctcgtacatcggcgagggcgcctacggcatggtgtgatcaggatcctcatgaccagccaaagagaagaagaat

SEQ ID NO: 115558 - DNA, 104 bp, Homo sapiens
aaaatgtgaaaaccaacccccgaacattaaggttgaggaagactttggctttgaagcagatgaggccctggattccagttgggtttctcggggtccagacaaac

SEQ ID NO: 115559 - DNA, 90 bp, Homo sapiens
ttgattttggtctccgcgtcacgggataagactcttcgcatctgggacctgaataaacacgttcaaaagaatgctgaaccgggagctgac

SEQ ID NO: 115560 - DNA, 73 bp, Homo sapiens
gtcagcgccgacggcagccggcacctgacggcgtgaccgacccgagccgatgccatggacaatattaccaggc

SEQ ID NO: 115561 - DNA, 123 bp, Homo sapiens
accgtccacccctccgcgctggcggtgtggacgcggaactcagcggagaaacgcgattgaggtacccactgatggtaatgctggcctgctggctgaaccccagattgccatgttctgtggcag

SEQ ID NO: 115562 - DNA, 75 bp, Homo sapiens
tttcaagtcttcagaaacagtggcacgtgaagcactcagacagtgcctccctgaccagctgaaagacacaacctt

SEQ ID NO: 115563 - DNA, 100 bp, Homo sapiens
aacaacaccacaataatccacagccaaggtattgttgcagcatctggcagtgagactgaggatgaggacagcatggacattcccttggacctttcttcat

SEQ ID NO: 115564 - DNA, 75 bp, Homo sapiens
acgtcttatttaatccacatcatagagcccacaggcggttttgtgagctgcttccccaggagcagcggagcgtgg

SEQ ID NO: 115565 - DNA, 75 bp, Homo sapiens
caaataagctatatactttggttacctatgtacctgttaccactttcaaaagtgactctgacatcattagaagca

SEQ ID NO: 115566 - DNA, 83 bp, Homo sapiens
gccaggaggagagcccacaggtgctaaagagagcagtaccctgatggagtcccttgcaggaggcaagtgaggcctatctggtt

SEQ ID NO: 115567 - DNA, 90 bp, Homo sapiens
agctggacatcgagcctgagggaggggaaaggcgcagggcgacgttgtggacgtttaccagcgggagttcctggcgctgcgcgatcggtt

SEQ ID NO: 115568 - DNA, 100 bp, Homo sapiens
gctgaatagctggggctacaggcgtgtgtcactgcgcccaggtagctttggtgttcctgatgagtgtgctgttaaagaaagctgtcctcaccaatttggt

SEQ ID NO: 115569 - DNA, 98 bp, Homo sapiens
cccatccccactttgtgattccctaccgctgcttagccattaacaggccagatatcacagacacggaaatggaaactgttatggacactatagttgac

SEQ ID NO: 115570 - DNA, 87 bp, Homo sapiens
ggtgaatcccctgtttgagaaaaggcctaagaattttggcattgaagccctacaggtggcaactactagcccaactgccaatactac

SEQ ID NO: 115571 - DNA, 80 bp, Homo sapiens
gcggcggcgggcgcgggaagatggcggcagcggcggcggcggctgcagaacagacggagtctcgctctgtcgcccaggct

SEQ ID NO: 115572 - DNA, 75 bp, Homo sapiens
gctttcccgaatctcagaatgcccccattccagatgatgggatttattggcaggccaaccttgacagattccacc

SEQ ID NO: 115573 - DNA, 107 bp, Homo sapiens
gaagcagttttctcagctgcctgctaacatagctgtttgcagttctaagaaacctagaatgaaatctgtgctgcctgctacaacctgtggctttggattttctcgag

SEQ ID NO: 115574 - DNA, 100 bp, Homo sapiens
ctggattctcaaagtcatgaacttcacaatttgtatagtctttgctatgacttctggccagatgtggaaccatatccgtggacctccatatgctcataag

SEQ ID NO: 115575 - DNA, 82 bp, Homo sapiens
agggatgagtcatgtggcagtggaaaatgcgctcgggctggaccagcagcttcctgcctgacacagctcacttcaagaagtg

SEQ ID NO: 115576 - DNA, 74 bp, Homo sapiens
acaagacgatccgggtaaagttccagggaggccgcgaagaactgataaatttcaaacggaagagagtggcagca

SEQ ID NO: 115577 - DNA, 51 bp, Homo sapiens
caaaaatttccacccaaatttgtgcagatggatcctgagcttgaaaaaaaa

SEQ ID NO: 115578 - DNA, 95 bp, Homo sapiens
accatcaccgaccagagcctggacgaggcccaggccaaccaccctgaagggtcccttcccaagcccttagggaccgcagaggacttggggaccag

SEQ ID NO: 115579 - DNA, 83 bp, Homo sapiens
agcttgtggcgctgaaaacgaacggttactcctggatggagcacctctgatagcaatccacaaagccaggtattacaagagga

SEQ ID NO: 115580 - DNA, 75 bp, Homo sapiens
aagctggtctgttctaactgagggaagatcagttttcctgccatccaggctgctccctccttcagcaactcattc

SEQ ID NO: 115581 - DNA, 90 bp, Homo sapiens
gccgctgccctccggctccgcgggcggcccacggcgaggatgtaaatgaagaccctggagaagatgtggccctcctctctgttagttttg

SEQ ID NO: 115582 - DNA, 83 bp, Homo sapiens
ggaggctcatgcgggatttcaagcgacaatgcagatcttcgtgaagactctgactggtaagaccatcaccctcgaggttgagc

SEQ ID NO: 115583 - DNA, 99 bp, Homo sapiens
atccccctccgtgctaactgttccaggtgtcatggagaaactccagctgggcccagagattctgcagcgggaaaatccaaggcttatttatgccaggct

SEQ ID NO: 115584 - DNA, 75 bp, Homo sapiens
cacttattcatctgtccagcatgactcatccccgggagtgttgatcagcaccttgctggatgcctcggcaacact

SEQ ID NO: 115585 - DNA, 82 bp, Homo sapiens
ccagattgcagggagtatcaaatatgagaaagctaggccatctgaataactttactaagggcatggtgctgatgtgaaatgt

SEQ ID NO: 115586 - DNA, 82 bp, Homo sapiens
cgggtctggagtgcgtgggggaccggctgttggcgggtgacgcggcgcacggcgcggatggtggccgagtggcagtgtgtgg

SEQ ID NO: 115587 - DNA, 50 bp, Homo sapiens
gcgcctggcctacagcgaggctggtgaccaagaatatggcccaggtgacc

SEQ ID NO: 115588 - DNA, 75 bp, Homo sapiens
ccggggctccgtcatctgtctggaggttcgagtaggtgaagtaggtgggaatactttgggattttatgattgcca

SEQ ID NO: 115589 - DNA, 100 bp, Homo sapiens
gcagtccctgcagatggcccatttggagatcttgacaaagcctcttctgtttccaatgggcctcgtcacgtgttcaatatgctaaagaagtatgtccgcg

SEQ ID NO: 115590 - DNA, 82 bp, Homo sapiens
cagaaagccgcctcttggtttgcgtcctgcactgaaaggaaatgacggattttatgcaggccctgacttcctgtgagtgcac

SEQ ID NO: 115591 - DNA, 96 bp, Homo sapiens
tggatctctggcggggtgcagaactgagcccaggccacagtaccctattcacgctctgtgcttgtgccaagccaaaccaaacaggaagcttacttt

SEQ ID NO: 115592 - DNA, 98 bp, Homo sapiens
cgagctggagagttccatggctgagagtaggctccgggccccggacctaggtattagaaaactactcggatgctccaatgacaccaaaacagattctg

SEQ ID NO: 115593 - DNA, 74 bp, Homo sapiens
tggaatgtatcagcaccggacagtcatcgctgaccaagaaactaaatatattttgccaactttggaaaaagaat

SEQ ID NO: 115594 - DNA, 83 bp, Homo sapiens
tggtcatcccgcctgccatcacccccggacctgcctagagctggaacgttacctccagagcgagccctgctatgtttcagcct

SEQ ID NO: 115595 - DNA, 71 bp, Homo sapiens
ttacctgctctactgcccctgcatggcatcctcatggctgggatcttgcccttcggcgccatgttcatcga

SEQ ID NO: 115596 - DNA, 101 bp, Homo sapiens
tgaagtctgagggatgaaaggaaagtttgggagtgataatgtgcgggttttggatttgcctaggtccctagataagggtaatagcctgcagctggtgtttt

SEQ ID NO: 115597 - DNA, 90 bp, Homo sapiens
gacacacccaggaaaagactcaggacggacaagcacagtcttcggaaggttctgtcagtgtgtgtggaagaagaaaacataattccttac

SEQ ID NO: 115598 - DNA, 83 bp, Homo sapiens
cagataccgtttattaaaagagctgtggcttatgtgccaagagttgtaacctctgcacaacagaaagcaggaagaactattac

SEQ ID NO: 115599 - DNA, 90 bp, Homo sapiens
tcctaccttctctatcagatgctgtgtggaatcaagcaccttcattctgctggaattattcatcggctaattatagagatttcttccgtg

SEQ ID NO: 115600 - DNA, 75 bp, Homo sapiens
ttggaagatgaaggcttttctattacactctctggcctttctgggtcgacacgcacgtagaccctccgttccata

SEQ ID NO: 115601 - DNA, 98 bp, Homo sapiens
acaactcacagcctgaaaatgaaaaggaagcttcaggtggagacagcccgaagaaatgtgatacctcaaagcacaaagtgctggtagtgtctgtgtgt

SEQ ID NO: 115602 - DNA, 82 bp, Homo sapiens
agaggtacgccgaggaggttgggatcttcttcactgcctctggcatggatgagagcatcctggccagaacaagccaaggagc

SEQ ID NO: 115603 - DNA, 82 bp, Homo sapiens
gtctgcagcaaaaccagtgtcccttttcttttcagcaaagagctggcctaagatctggcaaacttggtgaacagtgtgaagc

SEQ ID NO: 115604 - DNA, 95 bp, Homo sapiens
cgcgaacttggtggccagcgccgcgcccggggccgtgcgctctcgggccactcggccgcagtgttgttacagatcttataacagtcggtttaaag

SEQ ID NO: 115605 - DNA, 82 bp, Homo sapiens
ggccctgatcatcctgctgggcttcgtccagatcgggaaggatgccgacaaaaggatcaaggtggcgaagcccgtggtggag

SEQ ID NO: 115606 - DNA, 73 bp, Homo sapiens
ctggctgtggactggctagtgtactgcttctccgagatggccccagtgtgtgcggtggttggagggattttgg

SEQ ID NO: 115607 - DNA, 147 bp, Homo sapiens
agagatccatggattcctacctaaaccagtcatatggcatggacaatcacagtggtggtggtgggggtagcaggaatgtttacccttgcggaagttgcatcacttaatgacattcagccaacttaccgaatcctgaaaccatggtgg

SEQ ID NO: 115608 - DNA, 100 bp, Homo sapiens
gggaaagttgagtctctcctgcgccgagccttcggggcgatgtgtagtgccttccatagggctgagtctgggaccgagaaaatgtggacacagacttgcc

SEQ ID NO: 115609 - DNA, 82 bp, Homo sapiens
tgcacacctggatccaggataacggaggctggatcatggaagggaagtggttgctgtgtatgttactggtgcttggaactgc

SEQ ID NO: 115610 - DNA, 100 bp, Homo sapiens
agaccgccatgcctcgccttggcgctttcttcctggagcggagcgcaggcgccgagactgacaacgcggtcccacagttcaaacgatatgtcaataaact

SEQ ID NO: 115611 - DNA, 89 bp, Homo sapiens
cagaagctctgaatcgtgttcctgaatgaaagaagtcaggccaatggaagcactgttgtgaagaacttatgaaaattgagattatgtca

SEQ ID NO: 115612 - DNA, 74 bp, Homo sapiens
tccatgtcggcttgtagagagattgcagacacgcaggagaaagaaggtattctgcctgagagagctgaagaggc

SEQ ID NO: 115613 - DNA, 100 bp, Homo sapiens
acaggcaccatcccaggggcacaaggactgatgaacagttccctccttcatcaggtggcggctttgaaatacatcccatctgtcctgcatgatgtagaaa

SEQ ID NO: 115614 - DNA, 98 bp, Homo sapiens
ttcagccgtgaagcaagtgcagatagatggccttccccagcatgagaccagatgtaagctctcctccatccagctcctcaacagcaacaacaggacca

SEQ ID NO: 115615 - DNA, 82 bp, Homo sapiens
cgatgccggaaccgacccgacgccggagccgtcggctccgtccttaccgttgctctccaggatttcagatgcatgccaggtt

SEQ ID NO: 115616 - DNA, 90 bp, Homo sapiens
ccgggacacgcctagcgcgggctccaggtacaggggcccgtgctggttgaggacacttgtctgtgcttcaatgcccttggagggctcccc

SEQ ID NO: 115617 - DNA, 83 bp, Homo sapiens
ttcaaacctggagacctcatcttcgccaagatgaaaggttatccccattggccagctcgaacataaccagtgcggtgcaatcc

SEQ ID NO: 115618 - DNA, 100 bp, Homo sapiens
gaaggaaaacctccttatgctgatatacatccaatgaggagaaccatggagtctggcagtaccgccgccagtgaggaggcacgcagccttcgagaatgtg

SEQ ID NO: 115619 - DNA, 88 bp, Homo sapiens
atggctgcggccttcttcaacaccccggagaagagcgtggtgagcctcttccacgacccgccaggccgagtgtactacttcaaccaca

SEQ ID NO: 115620 - DNA, 100 bp, Homo sapiens
atgtccgggcagctggagcgttgcgagcgcgaatggcacgagctggagggagaatttcaagaactgcaggctgatcagctgaccgaagaacagattgctg

SEQ ID NO: 115621 - DNA, 100 bp, Homo sapiens
ccaagagcatgaaagaagtatggcttatggactggtgattccttcaacacccagaatgagccagaagacatgatgaaaaaagagaaaaagtctgaagctc

SEQ ID NO: 115622 - DNA, 75 bp, Homo sapiens
tggagagcccaggagcgggcgggacatggggatcatcgtcttgctcttcttttatctcagtttgtgggtagccag

SEQ ID NO: 115623 - DNA, 104 bp, Homo sapiens
catcgatgtcaagtatccacacacctggcctgaatggatccctctgcctttcagagtccaagtggtaagaagttcagaagcaagcctcagttggcaaggtacct

SEQ ID NO: 115624 - DNA, 100 bp, Homo sapiens
ccttcccatgctatctgttgacatggaaaacaaggaaaatggctctgtcggtgtaaaaaaggcctgctttcttccccgggcgatgtgcagagatctttgc

SEQ ID NO: 115625 - DNA, 110 bp, Homo sapiens
atgagtgtatagagaaaacatgtgagaaacttggacagctcaatattgatatttccaacataaaagctctcatttcactcttcagtgttcctgttatttatgaacggcat

SEQ ID NO: 115626 - DNA, 100 bp, Homo sapiens
ccgaggggccggagctcctggcggtgccggatcctgacggcggccttcccccggtattccatctgcagtgaacctctaatagaactgtctaaccctggag

SEQ ID NO: 115627 - DNA, 101 bp, Homo sapiens
gtgatgacatcctcattgatgttaatgaatggtgctatacttgaattttctaaggtgtcattagcatctgtgttttgtgtgagcctggaccccaagaccaa

SEQ ID NO: 115628 - DNA, 145 bp, Homo sapiens
gcaatcatggtgcagaaataccagtccccagtgagggtgtacaaatacccctttgaattaattatggctatctttaatctcatgaagtacgacagctacagccgcttcttaaagtctgacttgtttttaaaacacaagcgaaccg

SEQ ID NO: 115629 - DNA, 88 bp, Homo sapiens
caagatgaatatgaccctatggaagcagaagaagctgaggatgaagaagatggaaacatgacagctgccctacaggcagctctgaaga

SEQ ID NO: 115630 - DNA, 100 bp, Homo sapiens
tgatggaatatgttaatgggggcgagaagctgcacacatacatgtaagagaagcaaaaatgtcagatgatatcaggaaaaggtttgaatttccaaattct

SEQ ID NO: 115631 - DNA, 83 bp, Homo sapiens
atcacatttaagagagctctggacaagctggaatgcatccaagagaatccctcaacatgctgaaagcacacctgagctgctct

SEQ ID NO: 115632 - DNA, 95 bp, Homo sapiens
ctgtcaccctcctgggagtcctgctgcaagaagttttcagcaaactcggattatctcgatcgtgcaatcaggcctcacagaggagctggaacgag

SEQ ID NO: 115633 - DNA, 74 bp, Homo sapiens
gatcctgctggtgggccagtacagcaccggcaagaccaccttcatcaggagctcttgtccctggcaaagcgaaa

SEQ ID NO: 115634 - DNA, 100 bp, Homo sapiens
atttcgggctacaccttcagtgctgtgtgtttccacagcgccaacagcaacgcggaccacatactccaagtatcacagctaaattaattagtgaacaaaa

SEQ ID NO: 115635 - DNA, 50 bp, Homo sapiens
gggagattggatgactgttacagatccagtaattcgccaaaatgacgaac

SEQ ID NO: 115636 - DNA, 100 bp, Homo sapiens
atagcccagtgcctagtgtctgtgccgcctaccaggcagagcctgaggaagctgaagcagaggtttcccagacgagagattaaacagttattgtctgagt

SEQ ID NO: 115637 - DNA, 74 bp, Homo sapiens
ggcccaaggccagttctccgcaggttaatgactccagagagtaagatcagattcgtccacaaagagatgggcat

SEQ ID NO: 115638 - DNA, 75 bp, Homo sapiens
gagcagcgtgctggacacgggcgccgaggaggacgtcgccagcagtgaggacaacacatgggagccagaagagaa

SEQ ID NO: 115639 - DNA, 100 bp, Homo sapiens
ataaggagaaggataagtcgaaggggaaggcgcctgaagaggacgaagttggattggatgctgctggcaagacaaccattctgtataaactgaagttagg

SEQ ID NO: 115640 - DNA, 85 bp, Homo sapiens
agcagcactatgctaaggaaactccaaggcttgccttcaagaataactgcgaactacttacaatgagttacaaggcactaatagt

SEQ ID NO: 115641 - DNA, 88 bp, Homo sapiens
gggaacggcccaggtccccgcccgcaggtcccgggcagcttattctaccagattccatgaaagtattgccagtgtacatgaattgctt

SEQ ID NO: 115642 - DNA, 75 bp, Homo sapiens
taaagacatcttaattgggcacgaaagagaacatccagtcatggataaaaatgagctggttcagaaggccaaact

SEQ ID NO: 115643 - DNA, 82 bp, Homo sapiens
aaccattgacgccatgtcgggttattcgagtgaccgagaccgcggccgggaccgagggttgtgaccgagattcccgacgaga

SEQ ID NO: 115644 - DNA, 97 bp, Homo sapiens
gtcatgccggggatagtggagctgcccactctagaggagctgaaagtagatgaggctaaagaattacctccaaagccattgtcaagaccacagcagt

SEQ ID NO: 115645 - DNA, 76 bp, Homo sapiens
cgggtgaggctgcaacacgaggctgccgttcagcacccgtcgagcattgtaaaccatggctgtgtggatacaagct

SEQ ID NO: 115646 - DNA, 74 bp, Homo sapiens
tcactgaaaatgatttatgcaagtttaagatgccaacgtccggcggtacctccagctgacacagtcagaactca

SEQ ID NO: 115647 - DNA, 100 bp, Homo sapiens
cattccaaagaatttggcagcggtttccctgtcagtgacagtaaacggcacctaacccccgaagaggagttttaatcagctggatctgcctgcctatgag

SEQ ID NO: 115648 - DNA, 83 bp, Homo sapiens
tcctgacagcctggaacaacgtcaagtacggatggatagaatgacagaagatgctcttcgcttgaatctgttgaagcggagct

SEQ ID NO: 115649 - DNA, 51 bp, Homo sapiens
agcaactgctggttcagaagcagccccccaggttcgcctaatagtcttggc

SEQ ID NO: 115650 - DNA, 100 bp, Homo sapiens
ggcgtcgctgccaccatgacgggaagcttcggaaccaaaaagaagcttcccagagccggggccaggagccccaagcgccctctagcagcaaacacagaag

SEQ ID NO: 115651 - DNA, 74 bp, Homo sapiens
ttgattccaagtttcctatagaagacacccctttggttccgggttcaaaaagaattcttcgctccaacgagatc

SEQ ID NO: 115652 - DNA, 75 bp, Homo sapiens
gatggtacaggaagggaacgtggaaagcgcatacaggaccctaaacaggtcttcaggcaccatggaggacaaacg

SEQ ID NO: 115653 - DNA, 100 bp, Homo sapiens
agtgagaagcaagaaggccctggacacagcaatatctctgggctttcacagtgggacactgtcacccaggagtggtcaaagctgccctgaaacagatgga

SEQ ID NO: 115654 - DNA, 100 bp, Homo sapiens
gattgatggtcaacagaaaagattttgctgtcaaagttgtgtcagtgaatacaaacagtcgtgagatggagaataaagaaactctcaaagggttgcacaa

SEQ ID NO: 115655 - DNA, 80 bp, Homo sapiens
cccgccgcccggagaggctctgcagccatgaagccaaccgtcccgaggaatactcccccagttgcaagaggcgcaggacc

SEQ ID NO: 115656 - DNA, 75 bp, Homo sapiens
ggctgaccagcaccagccctgatccaggcggcttacagggagaacacagttggcctccaccgtttctgccccaca

SEQ ID NO: 115657 - DNA, 75 bp, Homo sapiens
ggagaaggataagtcgaaggggaaggcgcctgaagaggacgaagtttaattggttggggtcagataagaagagga

SEQ ID NO: 115658 - DNA, 89 bp, Homo sapiens
ggaacctgtgcatggcctggtgcacacggaggtggtagagctgatcctgaagacagggcctcactctattgcccaggctagagtgccgt

SEQ ID NO: 115659 - DNA, 101 bp, Homo sapiens
gcacccaagatgaagatgctgttagcctttgcagtctcgacataagtatgccttcaattaagttgcagagttctgatggagagatatttgaagttgatgtg

SEQ ID NO: 115660 - DNA, 90 bp, Homo sapiens
ccggactccactgcgcctctgaggggctcaaatacgaattcaagggtttctatcttactaaaggatatttcagaaaatctatattcactg

SEQ ID NO: 115661 - DNA, 88 bp, Homo sapiens
gacctcggagctggaggagctcggttcttgctatgcactaacatacaatacacatattgatgaagataatactgttgccctgctacca

SEQ ID NO: 115662 - DNA, 75 bp, Homo sapiens
ctgaggagccggcggccgccgaggcagctggggcgccagaccgcggggatcccaacaagccctcaggattcagaa

SEQ ID NO: 115663 - DNA, 100 bp, Homo sapiens
tgggaggcactttgctgtctgcaatcgaagttgaggtctacaccagctctcagcccctgcgtgtggggtactatgagactgacaactataccatgccctc

SEQ ID NO: 115664 - DNA, 97 bp, Homo sapiens
tcagtgcagccaacaatagcagtattacatcggttatgaaacttggaaatcccgagattgccaggagactgctacttagaggtgctaatcccgattt

SEQ ID NO: 115665 - DNA, 98 bp, Homo sapiens
ataatgcccagcggcccgccaggtcccgaggtggtgggacacacgcaggggccactagatgggagcctgtatgctaaggtgaagaagaaagactccct

SEQ ID NO: 115666 - DNA, 75 bp, Homo sapiens
gtcgagggggaaatgaaagagcttccggagcagcttcaggaacatgctgagtccttcaataatgttaaacagtgg

SEQ ID NO: 115667 - DNA, 90 bp, Homo sapiens
ccggccgcgggagcctcgtggctgcgtcaccgccgcccccccagacaagatggacaccgcggaggaaggggtacacatctttctggaatg

SEQ ID NO: 115668 - DNA, 98 bp, Homo sapiens
gacaacgagacatacaagtccaacctcaagatagcggagctgaagctgcgggaggcccccagccccgttgggcccgaaggcatcctgcagaacggggc

SEQ ID NO: 115669 - DNA, 82 bp, Homo sapiens
cttcatcaaccgggaccgtggcttcggcttcatccgcttgttggaaaatggatataccttatttgattatgatgttggactg

SEQ ID NO: 115670 - DNA, 75 bp, Homo sapiens
gaaatgattgatgaagctgatcgagatggagatggagaggttgacatgacaactgaagagatagatgctcttgtt

SEQ ID NO: 115671 - DNA, 75 bp, Homo sapiens
agttcccttcccttccacagtgcaaggaagacgccgagatgttcaggatgatgaagtggcagaaactgttttcag

SEQ ID NO: 115672 - DNA, 75 bp, Homo sapiens
gttctcccagctggcagaagcctatgaggtacgagaagttctttgggcgcctgtcccacctgaacctgtgtgtta

SEQ ID NO: 115673 - DNA, 85 bp, Homo sapiens
cttcaatgtgggccgggagctgtacttctatatctacaagggggtccgcaaggtttatttatgaaacagagcatcataatggcat

SEQ ID NO: 115674 - DNA, 82 bp, Homo sapiens
caaaggctttggctttgtgagttacgaaaaacacgaggatgccaataagatgcttcaggactgccccaaggcccgcagggag

SEQ ID NO: 115675 - DNA, 100 bp, Homo sapiens
ggacgatgcagatctcccccacggcaagcagcagaccccctgcctgttctgtaacagccaggtgattggtgaaaacactaaacaaccctgagcccagggc

SEQ ID NO: 115676 - DNA, 85 bp, Homo sapiens
gaggaacaaacttcagaacaaatattcagactttaccgtgccattggaaatatagtcaaaatgcagatcttcgtgaaaaccctta

SEQ ID NO: 115677 - DNA, 75 bp, Homo sapiens
agatttactttcccatccgtgactcctggaatgcaggctgcatgttgtgcctgggtcagtccaccttccttcgct

SEQ ID NO: 115678 - DNA, 100 bp, Homo sapiens
ccccggatttgctccaagctatggctatcagttcccaggttccaccccgatgcaggtggtcacgtgcttgacgcgggacagctacctgacgcactgcttc

SEQ ID NO: 115679 - DNA, 100 bp, Homo sapiens
cctgggagtacggttcttgggcaagcgcctactgtgcgcccggcgccgttctacacaggaacacagcgcttttcaagatccaaaaggtaattctggcact

SEQ ID NO: 115680 - DNA, 100 bp, Homo sapiens
acagtgcctgccacccagactcagaccaccaccagaaccatcacctcggagacccagacaatcacaggccctggcctattttgagcagttaaaaatttcc

SEQ ID NO: 115681 - DNA, 100 bp, Homo sapiens
gagcagtcgcagtgagtttaaaaaccctttctaaggcacaaaatgatgtgatggaaatgaagatgcagtcagagagactttcgaaagaatatgatcaact

SEQ ID NO: 115682 - DNA, 51 bp, Homo sapiens
gtcgtttcagagaccaatgatgcaattagacagagtttcactcttgttgcc

SEQ ID NO: 115683 - DNA, 82 bp, Homo sapiens
ccaactttcacgctgcctcggcggcccggcccggctcgacgccaatgggcataatcaccagcaacacccgggacaataatac

SEQ ID NO: 115684 - DNA, 100 bp, Homo sapiens
ccaccacttcgctggcaactgttgcactggatccacccagtgaccggacttctcacccccaggatgtcatcgaggatcagtcgcatcgaatacattcatt

SEQ ID NO: 115685 - DNA, 100 bp, Homo sapiens
cgccaagaagcacggcaccaaaaacaagcgcggtccttccatagtgacgccccccaaggacatctggaatgtcactggtgcccaggtgtacttgagctgt

SEQ ID NO: 115686 - DNA, 90 bp, Homo sapiens
gtggcggtcgcctgggtccgcgccgaggtcccacgacagtgatgtccgagggcgcccggaacattgtggcagccatgaaggctcatggtg

SEQ ID NO: 115687 - DNA, 50 bp, Homo sapiens
gggtaacagatccccgttttctaatagagaaacacagtgaagtactgaca

SEQ ID NO: 115688 - DNA, 82 bp, Homo sapiens
gcgaccacagccagagcctcagcaggagcctgttctcatcaccatggcaacaggccgaatccgggtgcatggtattggcggg

SEQ ID NO: 115689 - DNA, 100 bp, Homo sapiens
gttgcttgatcaggtggaacagattcagaaggagcaggattaccaaaggggacttgccatgaggtgttgaagccttgtttcactgagttggagagactgg

SEQ ID NO: 115690 - DNA, 50 bp, Homo sapiens
gctcccagcctcagttctgcaatgcaggatccaaggagctggttctgctg

SEQ ID NO: 115691 - DNA, 83 bp, Homo sapiens
aagaagttgagaccgagaatgtggaaacagaatcttcagctagatgaagaaacccaataccaaactgctgttgaagaatcttt

SEQ ID NO: 115692 - DNA, 90 bp, Homo sapiens
gctcaagaacggcagccttgactccccagggaagcagatggcctgatatgaaggagtcacgcctcccgcctcccggagctgcccagtggc

SEQ ID NO: 115693 - DNA, 75 bp, Homo sapiens
ctctgagggagggtccgagccagccgctgttttgccggaggagcccctcaggccacttccttgccgtccaggaag

SEQ ID NO: 115694 - DNA, 83 bp, Homo sapiens
tcagtttacgcctctgagatcacacagctgcctgggggccgtgtgatgcccaaggggtttgttaaagttgttaagaataaggc

SEQ ID NO: 115695 - DNA, 95 bp, Homo sapiens
ctagatcaggaagtgacaaccacacggcttcctgctgggtcccaggctgcacggttaggtattttacctgtgggtcgaggaaagaccatgtcctc

SEQ ID NO: 115696 - DNA, 80 bp, Homo sapiens
gtctgccgcaagttcatgcaagatacaatgcagatcttcgtgaagactctgactggtaagaccatcaccctcgaggttga

SEQ ID NO: 115697 - DNA, 100 bp, Homo sapiens
ccacggccgccaccaagatgagcagggcccttgcggagttccgcgtccgaggtgtgaaggcctccggtgtggctgtctctgatggtgtcatcaaggtgtt

SEQ ID NO: 115698 - DNA, 89 bp, Homo sapiens
gggcaatgaaggcacagaaatggaagtaccagcagaaggctgagaatcaggctgaaagccgggcagcagtggaggggacagtggaggct

SEQ ID NO: 115699 - DNA, 100 bp, Homo sapiens
tccacaggatggacccagctgagcaagctcctggagctgacagggccaactaccagccctgcttcgtcctccggagcccctgcctacgccccatgtgctc

SEQ ID NO: 115700 - DNA, 99 bp, Homo sapiens
tagccgctgcctcctcctaccctcgccatgtttcttacccggtctgagtacgacaggattttgcctaccattttacagtatttgtcttctattttggag

SEQ ID NO: 115701 - DNA, 51 bp, Homo sapiens
agttaaagttggatgtgctggaacagaaaatggtgtgaatggaacattaac

SEQ ID NO: 115702 - DNA, 83 bp, Homo sapiens
cacctcaacggctgatgatttctgaaagggctattgcaagacacgaagtccgagaaattgagcagcgacatacaatggatggc

SEQ ID NO: 115703 - DNA, 98 bp, Homo sapiens
cgacgaggcggtgcaggcgttgaagcgcgcgggcaaggaagtgctgctggaagacctgaagattatcggctataagagaataagaattgcagaaaata

SEQ ID NO: 115704 - DNA, 100 bp, Homo sapiens
cccgggctccggctccggcttctgctgttgctcttctccgccgcggcactgatccccacagctctcccggggctgaagctgagtgcagatcaggtggccc

SEQ ID NO: 115705 - DNA, 100 bp, Homo sapiens
ctcctccaagaaccaacccccaaattggctgggacagacattatgatctcaaccagctgctggagcctcgaagcataacagcagatcctttggactaccg

SEQ ID NO: 115706 - DNA, 83 bp, Homo sapiens
gctcggggcacctgcgtccagcgagaggagcgcggcagggggccgggggcccagattgagcttctagagcctcagagatggaa

SEQ ID NO: 115707 - DNA, 74 bp, Homo sapiens
gcaactgaggcagcggcaggctcaggtgcagccgctgcataaagatgcctatcaagtgatattggatggtgtga

SEQ ID NO: 115708 - DNA, 75 bp, Homo sapiens
cgggaccggctgtatgattaggccacaatcttcaatgagtaaacatattcctgcaccatgactcctgtgaggatg

SEQ ID NO: 115709 - DNA, 100 bp, Homo sapiens
cgggccgcggatccccaagcccgccacgccgcccagcccggccccgcccgcgccggaagagccacgccggttaaagcggcaactggggaagaagtatctg

SEQ ID NO: 115710 - DNA, 50 bp, Homo sapiens
actcagcaccctctgcttaccacagccagaccctcaaactgacacaagac

SEQ ID NO: 115711 - DNA, 90 bp, Homo sapiens
cggtagctgcagctggagcagtggcgtttggaggagactcggcgtccgacctccgatcatgaacgggcccctgcacccgcggcccctggt

SEQ ID NO: 115712 - DNA, 100 bp, Homo sapiens
atgaagattttgacagtcgtagatacaaatttttggatgatgatggatccatttctcctattgaggagtcaacgttggaaaactgtcaccttacagaagc

SEQ ID NO: 115713 - DNA, 90 bp, Homo sapiens
cttaaagccccttcgtctccccagcacccactctctgggggcaggtgggcccggtgacagaaatgggcaagttcatgaaacctgggaagg

SEQ ID NO: 115714 - DNA, 101 bp, Homo sapiens
acctgcgggatacagtggagctacaacttctgaagggcgcatattaaatttcctattgactacccctattcaccacctaccttcagattcttgaccaaaat

SEQ ID NO: 115715 - DNA, 83 bp, Homo sapiens
gtcctgatgacacagccctcagcgagagtgccaaccaggccttcctgagctccacgcaggagatcggtgaggagctgatcaac

SEQ ID NO: 115716 - DNA, 73 bp, Homo sapiens
cgagcgcgcctggcgggcgaggaggaggcgctgcgtcagtaccagcaggttatcaatagtctggctgtctatc

SEQ ID NO: 115717 - DNA, 100 bp, Homo sapiens
gggagcggtcgccgcgggatttggagctgcctagcctcgcggtcgaatgaattaccagatggattaaacaaaaagcgtttacaaatcttattaaaaggct

SEQ ID NO: 115718 - DNA, 50 bp, Homo sapiens
cgcacggaccctctacttcatgtactaatggtcacttgatgtgcgctggc

SEQ ID NO: 115719 - DNA, 100 bp, Homo sapiens
gccacactttcctgggagcggcggccacggaggcaccatgaagaagtcttactcagatgaaggatttgggggcagagcacttggcaggtcatgaaggggt

SEQ ID NO: 115720 - DNA, 49 bp, Homo sapiens
atggacggtcactcagcctatggagatgcatcatcccattcagatgaaa

SEQ ID NO: 115721 - DNA, 50 bp, Homo sapiens
ccggaccgaccatgggcagatcccaggacagaatgacttggaagataacg

SEQ ID NO: 115722 - DNA, 100 bp, Homo sapiens
caacccgaagccacaggatggaggagggggatcccagcaaaggtgtcatggagaaactccagctgggcccagagattctgcagcgggaaaatccaaggct

SEQ ID NO: 115723 - DNA, 82 bp, Homo sapiens
tgtggaacttccccattgatgtcacctttaaaagcaccaacccctacggcttgcagggagactgaccctagacaaagctctt

SEQ ID NO: 115724 - DNA, 82 bp, Homo sapiens
aagcagtgacggaggagcttgtaccaccgacattttgctgtcagctggaagagctgatctgctggctgtataatgttgcaga

SEQ ID NO: 115725 - DNA, 75 bp, Homo sapiens
tcctggatttgcgaaacagaagtacctggtgtgtaagaggaagctggagagtaagaaggaagccctgctgatcct

SEQ ID NO: 115726 - DNA, 100 bp, Homo sapiens
actacgcctttcaggacgagaaccacctgagccagccccagtgcctgctgagccgtttgacaacactacctacaagaacctgcagcatcatgactacagc

SEQ ID NO: 115727 - DNA, 96 bp, Homo sapiens
tgctctgcctggcgctgctgcccgcgctcgccgcacgagccatcccaggcctcaggacctgagttctccgacgcccacatgacatggctgaacttt

SEQ ID NO: 115728 - DNA, 100 bp, Homo sapiens
gtgcttcaagtgagcttgcagagagtccactttgggttccacaaggagccatgtgttcacatgtcatgtggaccagtatttaactgtggaaaccgcgggt

SEQ ID NO: 115729 - DNA, 75 bp, Homo sapiens
ccagggccagcgcatcggccacttcgagttccatggtgctgaatgtggagtaaatgcagatgttgagaaacatct

SEQ ID NO: 115730 - DNA, 75 bp, Homo sapiens
cacagtgttgctgcaacatagagctgacattaactgtcaggaactgcaagcacatgttgaccagataactgaaat

SEQ ID NO: 115731 - DNA, 82 bp, Homo sapiens
tggagctctcacatgtggaagctgcaaggtcttcttcaaaagagccgctgaaggagccttcacgtaaatgggtccagtcatg

SEQ ID NO: 115732 - DNA, 82 bp, Homo sapiens
cctttgactgtgtcctgctgctgctgctgctactacttacaaactgaaactgttgaggagcccatggaggaagaagaagcag

SEQ ID NO: 115733 - DNA, 75 bp, Homo sapiens
ctaaatgaaaatgctgttgtatgcagtgaaagagttgctgaactacaaagaaagtggcatttattttcaactggc

SEQ ID NO: 115734 - DNA, 80 bp, Homo sapiens
aaggcaacatcctgtcacaggccatgctctggcaaaaacgatccctccccgcggcggcgatggcccgagccatgagagtg

SEQ ID NO: 115735 - DNA, 88 bp, Homo sapiens
ctggggccagggaaccctggtcaccgtctcctcagctatcatggtgaacttacttcagattgtgcgggaccactgggttcatgttctt

SEQ ID NO: 115736 - DNA, 101 bp, Homo sapiens
ggacgcggcggcagcggcggcggcggcggccctccggtggctgtgaaaaacaatatcgatgtcttctacttcagctgcctcatcccactcaatgtgctttt

SEQ ID NO: 115737 - DNA, 75 bp, Homo sapiens
cggggaagtcacccagcccccaaggattctgggggaggcctcaggcttgggcactgtttaaaggaaagttccgag

SEQ ID NO: 115738 - DNA, 75 bp, Homo sapiens
gtttttattgacagagctctgatagttgttccttgtgcagaaggtgtttcagtcacctccagtaacacgggcgtg

SEQ ID NO: 115739 - DNA, 80 bp, Homo sapiens
tcagctacagggtgaccaacgcaagaacatatgccagttcctcgtagaggaactgtggctgcaccatctgtcttcatctt

SEQ ID NO: 115740 - DNA, 89 bp, Homo sapiens
taacggcaatgcggctgcaacggcgctcgaagagtgtggaaaaactaccttcctgctatcaatggcattgtatttctggtggattgtgc

SEQ ID NO: 115741 - DNA, 98 bp, Homo sapiens
aaagactgtgatccgcaagttgtggaagaaatacgtaacctgtctggtcagagtgcagcttcagtcttgcacccccagcagaccctccaccctcctgg

SEQ ID NO: 115742 - DNA, 100 bp, Homo sapiens
ctcatctctgagacccggaggaggttcgaagctgagtatgtgacaggcaaatgttctgaaaaagactctgcatgggaatggcctgccttacgatgacaga

SEQ ID NO: 115743 - DNA, 50 bp, Homo sapiens
gcctcccgagtagctgtgattacagaaccccgagatgcccctgtccttca

SEQ ID NO: 115744 - DNA, 100 bp, Homo sapiens
cttccacccggaaagccccccaggctgagtgcggcatgatctccatcaccgaatggcagatgagggagactctgatgtggactcggagctggaggaccgt

SEQ ID NO: 115745 - DNA, 90 bp, Homo sapiens
aaagactgttgagtatgctccatgtagatcaccggaagatccatccaaaagctatgtgaaattacgagactttgtgcttgtgaagctttg

SEQ ID NO: 115746 - DNA, 98 bp, Homo sapiens
ccaattcctgtggtgacgtcagaccagaagagagagaaaatccttcaaaacggagtagaattgaacgtgatatagataacaatttgatcacgtcaaca

SEQ ID NO: 115747 - DNA, 100 bp, Homo sapiens
tgctgcttctgggccctacgcgcggcttgcgccatatagcactttctacattgtgggtttaatattatcaatgcagataccttttgtgggattccagcca

SEQ ID NO: 115748 - DNA, 82 bp, Homo sapiens
gtagaagatgtggtacacactcagttaattaatctggttgaagctccattcataccaaagtttagaggctctggagatacca

SEQ ID NO: 115749 - DNA, 100 bp, Homo sapiens
gtcgccttcaaagccaggccccggattcagatgttccatttaagcagacctcttccatagctgtagctggagcggtaattggagctgttcttgccctttt

SEQ ID NO: 115750 - DNA, 98 bp, Homo sapiens
tctgcaacgggctcatcaactcctacgaggacaaaagcaacgacttcgtatggtgccagtcacgaattgcccgaacattacctgctgatcagaagcca

SEQ ID NO: 115751 - DNA, 82 bp, Homo sapiens
cctcaccatcacagctgttaaagatgccactgatgactatctgcggcggagccccatcaagaaagtccggaagtctctggct

SEQ ID NO: 115752 - DNA, 75 bp, Homo sapiens
agctgaacgtcttgcaacagtggccgcacgcatagggccaattcctgtccccccagcagcatggcatcgtgtgct

SEQ ID NO: 115753 - DNA, 76 bp, Homo sapiens
cccagataagaaaaagcgcaaggcaaatacacaggcatagaatgtcaagctaaccaggcgtccgctacttcagaag

SEQ ID NO: 115754 - DNA, 90 bp, Homo sapiens
ctggccacccgcttccatgcggttcgggtccaagatgatgccgatgcctgtgaggagccaccaacatttgaagctatggagctcattggt

SEQ ID NO: 115755 - DNA, 75 bp, Homo sapiens
ggagttcccgtgcctgggtcaggagggcctggacaagatcctagagatcaatgtccgagttaccaccatggatgc

SEQ ID NO: 115756 - DNA, 88 bp, Homo sapiens
tctgctgcagaatcttataaagtattaccatgcacagtgcaaattgacctggagagcatcttttcacttaaccctgaccttgttcctg

SEQ ID NO: 115757 - DNA, 74 bp, Homo sapiens
gtgggttctagcctctctgaagccctggacttgatcgagtcgaattatatccagatcgagagacagaagattct

SEQ ID NO: 115758 - DNA, 74 bp, Homo sapiens
aactcacagcctgaaaatgaaaaggaagcttcaggtggagacagcccgaaggacgtagacaagtttggcaacga

SEQ ID NO: 115759 - DNA, 99 bp, Homo sapiens
ctggcggcagtcacttgtacagcgccggtcaacatcgcggtcatcaagtactgaaggaattttacagaagctacagagaagtgttgagcaagaagaaaa

SEQ ID NO: 115760 - DNA, 82 bp, Homo sapiens
gggcggagctgtgcgagagcctcctcacttggttctccaaggagaagtacatcctggactcatcgccagagaaactccacaa

SEQ ID NO: 115761 - DNA, 75 bp, Homo sapiens
ggaccaagcgggcccagaagcgggaggaagacagcgaacccctcccaccacaggatgcccagacctctgggtcac

SEQ ID NO: 115762 - DNA, 75 bp, Homo sapiens
atgtattccctggggatggcgcatcacacaccaaaggtattgcacatctattacaaatttcctggttatgggagg

SEQ ID NO: 115763 - DNA, 90 bp, Homo sapiens
ctggagtttgcaatccagccaaatacaactggaaaacagctttttgatcagaacaagaatgtggtggtggctgacttcgggctggcgcgt

SEQ ID NO: 115764 - DNA, 101 bp, Homo sapiens
gcttgaaggactgtgggcagatgtgaccaagagcctgcattaaggtccgtaaaagccctgggctcagccagagcagggcagaggatgacgggatgaccagc

SEQ ID NO: 115765 - DNA, 98 bp, Homo sapiens
tcatcatcgcctcctgcgtcatcaacttaggcgaatgtgaaagatgttgcagaagtgttccagaagtggctgaagatagaaggaaaaaagtgccactg

SEQ ID NO: 115766 - DNA, 83 bp, Homo sapiens
gaacttgcagttgaaggagtataacacagaaactccccaacttttaaatcatttgaagaaaaggtcgaaaacttaaaggcaag

SEQ ID NO: 115767 - DNA, 82 bp, Homo sapiens
ggccgagccgggatctcaggtcctcgggggcggcggccacgccaaggacggatctcagtggttcaatagcatccccagatgt

SEQ ID NO: 115768 - DNA, 100 bp, Homo sapiens
gagggcagcctgcgggattggtatgacttcgtgtggaaccgcacgcgtggcatacggaaggaaggatttgatgccctggatccctttattcccatcctgg

SEQ ID NO: 115769 - DNA, 88 bp, Homo sapiens
tatattttaaaatgcttaaaacatcttaacccattgcactggttccaattaaagaagggggccctcctcgccaaagacagcctagaga

SEQ ID NO: 115770 - DNA, 89 bp, Homo sapiens
cttggactgagtcctgcaggacacagataactgcgacctccacttcaaggtggcccgagatcggagtagtggctatccgctcacaattg

SEQ ID NO: 115771 - DNA, 85 bp, Homo sapiens
cgagactggagcagagccgctgggcgccggagccgaggcgagcgccgcgcgcaccactgctgcatcttcctcccgtgaggctggc

SEQ ID NO: 115772 - DNA, 100 bp, Homo sapiens
tacaggaatccagagagtttcaaggaaaagttcgttcgcaagacccgcgagaacccggtggtacccatagcaggaacgaatgcaggaatttgggaactga

SEQ ID NO: 115773 - DNA, 90 bp, Homo sapiens
gctgaaccagaagggctacaatgtcaagtccgacgtctggagcctgggcatcaccatgattgataagaacctgaagtcgctggagcggtg

SEQ ID NO: 115774 - DNA, 100 bp, Homo sapiens
tgcagactggagcctgagagcagggttaaagctcaaaaacgacactgaaaatcatcagcctgtgtctctttctgacttagaaatacaagcatcagcaggc

SEQ ID NO: 115775 - DNA, 100 bp, Homo sapiens
cgcatgtaccccccgccgctgatcgaggagccagccttcaatgtgtcctacaccaggcagcccccaaatcccggcccagtagtttatgccaacgtgactt

SEQ ID NO: 115776 - DNA, 82 bp, Homo sapiens
aacctggcggtgctcgagtgcctgcaggatgtgagggaggtggtgtcccagcgaatcagtaccgtggatctctcgtgttaca

SEQ ID NO: 115777 - DNA, 82 bp, Homo sapiens
acgcgtgaatgaattgatgactaaaatccgctgcgggggtcctacagcgcagatggtagaagaccatgatggagaaggtgat

SEQ ID NO: 115778 - DNA, 75 bp, Homo sapiens
ctttgacttcctgccaaaatcctgttaccctagcaacagttggttgaatctggcgatgtggaacccatggatatg

SEQ ID NO: 115779 - DNA, 100 bp, Homo sapiens
tgtcacatgtctagacgtctcggccaaccaagttgcttttggtgtacagggtctgggatgggtgtacgaaggaagcaagaaaacttggaatataacgtgg

SEQ ID NO: 115780 - DNA, 100 bp, Homo sapiens
gaaacacatttcatatactgcaggtccttatgattttggaggtgtacttactaatagtaaccgggatattattaatggagatgccatccacaaacgaaat

SEQ ID NO: 115781 - DNA, 75 bp, Homo sapiens
atatttggacacaagccttctccaggctttgaaatttctgaaaaccagaagaggcaggctgcaatgactgtgaga

SEQ ID NO: 115782 - DNA, 82 bp, Homo sapiens
caggcgaactcggcctatcgctaccctccgaagtccgggggatatgagactttctactcggaatatcctgagtgttgcgtgg

SEQ ID NO: 115783 - DNA, 87 bp, Homo sapiens
ctgtgcaggcctgctcctccgtttgcaaggaccaagaatcgccttcagccctgtctggtgcatccttggcagaaagtgaggaggaaa

SEQ ID NO: 115784 - DNA, 100 bp, Homo sapiens
agcaaaagaaggagggtcctctcagtgattaaggatttaagtgccctgtatgctcaaaatttgtatcctcagatgaaatggatttgcatcttgtaatgtg

SEQ ID NO: 115785 - DNA, 74 bp, Homo sapiens
ccctttggatgtagcaaggaagaaattgttcagttcttctcaggcgaccactttatcaagttcttcgctccgtg

SEQ ID NO: 115786 - DNA, 75 bp, Homo sapiens
agcagtatgtgccacaactgcaaaacaacaccatcctccgccttctgcagcagaatttatccagttggcgaagga

SEQ ID NO: 115787 - DNA, 101 bp, Homo sapiens
ttgcagaagaataggaacctctacttccccaccaaaaagtggcacacactggagagatatcaaaaagaggcacagttagatgaagaaggacagtttcttgt

SEQ ID NO: 115788 - DNA, 75 bp, Homo sapiens
ctcacattggctcaggggagatgggggccggagatggacttgccatgagaaaagaaaccttgtttattccctgtg

SEQ ID NO: 115789 - DNA, 100 bp, Homo sapiens
cggatgcggagcgcggtgctgccggtggagcttcaggtcgacggatagaccacgtactcctaaatgctgatggcattcgaggttttccagttgttcttca

SEQ ID NO: 115790 - DNA, 82 bp, Homo sapiens
ggaaccttcgggcaaacaggattccacagtgtcctctggaaaatgaataccaagctgctattttacacttgaagagggagca

SEQ ID NO: 115791 - DNA, 96 bp, Homo sapiens
catgctgagaatttgaaaaatgaagatgatgtagacactggactattaggctcctctgaggagaggcaggtcatggatcatgccttcctccttctc

SEQ ID NO: 115792 - DNA, 89 bp, Homo sapiens
agcttgccaccaaagacctgcgactttgctcagtgcaccgtccaggtgaggttagagctggggcatcgcgcccaactgcgcaagaagcc

SEQ ID NO: 115793 - DNA, 100 bp, Homo sapiens
gcaagatggaggcgctgattttgggacctggtggccttagtctttcaggtggaacggtgtgcgacatgggaaagaaaaccaagcggacagctgacagttc

SEQ ID NO: 115794 - DNA, 87 bp, Homo sapiens
ttgagcggctggcgcggttgtcctggagcaggggcgcagtcccttaagctcctaggatttttagatgttgaaaatactccctgcgcc

SEQ ID NO: 115795 - DNA, 90 bp, Homo sapiens
gaaggtctggtacgacatgttccgaggaaaatcctgccttgcttcgttgggcctatgcaagaacaataaatgtctatcctaatttcagac

SEQ ID NO: 115796 - DNA, 83 bp, Homo sapiens
ctgggctttcgggtcccgcgcccaggtgggaggaggagctcgccaagcgcatgaaccttcagaccatggtggacacgctgcag

SEQ ID NO: 115797 - DNA, 90 bp, Homo sapiens
ggtggaagcagcagtccaggaatgcagtcagtctgttgatgaaactattgtacctcggtatgatcaaccacctcctgtcacataccagcc

SEQ ID NO: 115798 - DNA, 50 bp, Homo sapiens
caggatgatgaagcagaagaggaagtctggctagataatcccaaaatgtg

SEQ ID NO: 115799 - DNA, 100 bp, Homo sapiens
cttggaaagaagaagagatagcgacttgccccagtccaaccccagagcggtgagcatttgtcctgtgctttcacattctttctgcatggagaaagtaatg

SEQ ID NO: 115800 - DNA, 100 bp, Homo sapiens
agagaacagggtggccgcttggtccaggaatctggaaaaccaggggctcatgtaactgtgaagaagctgtttgttggcggaattaaagaagatactgagg

SEQ ID NO: 115801 - DNA, 75 bp, Homo sapiens
gtttgagtccgcatcgccacagctgaaggctgcgagggactaagagcagagttacattgattacccacctagtac

SEQ ID NO: 115802 - DNA, 99 bp, Homo sapiens
caccaacaacaccacaataatccacagccaaggcaccaccaagtctgaagatcgtgctgctttgctgaagaaattcaatgaacctggatcccagtattt

SEQ ID NO: 115803 - DNA, 80 bp, Homo sapiens
ttcttattgcttgtggaacaagttaccatgctggtgtagcagcctttgaactggccacaggtgactatttgtttgaacct

SEQ ID NO: 115804 - DNA, 74 bp, Homo sapiens
cgcgagcagagccgcccagccctgccagctgcgccgggacggaatactcccccagttgcaagaggcgcaggacc

SEQ ID NO: 115805 - DNA, 98 bp, Homo sapiens
ctggcctgccttgggccggggatttaacacagttaagtgggcagaccaacatccacctcagcaaaaacttcttcctgacgaatcgcgccagggagcgc

SEQ ID NO: 115806 - DNA, 51 bp, Homo sapiens
ctatgtacctgttaccactttcaaaaggtgaaaatgggatggaggattgtg

SEQ ID NO: 115807 - DNA, 100 bp, Homo sapiens
tgacctctcagatcctccagaagaacacagacgtggtggccaccttgaagaaggatcaggagcgtctgggcaagcagctcaagttacgtgcagaaaggga

SEQ ID NO: 115808 - DNA, 90 bp, Homo sapiens
tgttgatgtagataccaacactatttctcagcgaaccatggaacttctcacacagaactgggacctctcaaagaaactcaggattccggc

SEQ ID NO: 115809 - DNA, 75 bp, Homo sapiens
gaggcaaggtggttttggaccagacaggcgtgtctaaacggagtctcactccaggcttgagtgcagtggggcgat

SEQ ID NO: 115810 - DNA, 50 bp, Homo sapiens
gtaccttatacttcaactgttagcatatcagaattatctttagattcaac

SEQ ID NO: 115811 - DNA, 100 bp, Homo sapiens
aacagactgagcgcgtccaggcctgacagctctgcggctcgggccctgagaattcctagaggacctgtgcaacaacctcttgaggatcgaatcttcactc

SEQ ID NO: 115812 - DNA, 100 bp, Homo sapiens
ggatgggcggaaggacccccagcggtgcacgctgctggtcagccagttccgctcctgtcaggtcctgaacgaggctgtgggggccctgatgtaccacacc

SEQ ID NO: 115813 - DNA, 88 bp, Homo sapiens
gcgcacgttggaaccgaagagagctctgttgttgcaagccagagcccagaggtggagcagttagggagggttgtggaactggacagtg

SEQ ID NO: 115814 - DNA, 74 bp, Homo sapiens
gcctgtcatcattgactgctggattgacaatatcaggtgccttcaggacaacaactgggactacaccagatctg

SEQ ID NO: 115815 - DNA, 90 bp, Homo sapiens
agagggggactctgtgtgagggaaagaaaacaatttctcctgctctgcagcttctgttcaggtctctaattaacagaagatggcaaagcc

SEQ ID NO: 115816 - DNA, 100 bp, Homo sapiens
atgatcgagaggatctggtgtaccaggcgaagctggccgagcaggctgagcgatacgacggacctcagcagccatgtcgaagccccatagtgaagccggg

SEQ ID NO: 115817 - DNA, 74 bp, Homo sapiens
cggggacgcagagactgcagctgccatcgaagaggaggccgtggaccccatgcgggcaacgtatctggatgacc

SEQ ID NO: 115818 - DNA, 100 bp, Homo sapiens
gtactatcctcggtgctgtggtgcagagctagttcctctccagctcagccgcgtaggatgattatttcagaaactggaatcccaacaagccctttgacca

SEQ ID NO: 115819 - DNA, 82 bp, Homo sapiens
acgccgctggagaaggatggcatcaccgttgtggaccaagaatcgccttcagccctgtctggtgcatccttggcagaaagtg

SEQ ID NO: 115820 - DNA, 99 bp, Homo sapiens
atgaaaccatggaattgattctgccttctgggacattagtcatgagtgccgagtgtgcggggtcacagaagtgggtctttctgcatatgcaaagcacat

SEQ ID NO: 115821 - DNA, 51 bp, Homo sapiens
cggaccgcgcctcaggctcccccagaacacacgcaggacttgaaagatgtt

SEQ ID NO: 115822 - DNA, 97 bp, Homo sapiens
atagactttcagctacttgaagatagccatcagccgctacgtgactcttttctccaggcctgaagacggaagaagggagtgtcagaggcgccctgcc

SEQ ID NO: 115823 - DNA, 100 bp, Homo sapiens
cgtttttcggatgatgccttcaatactacctttatttccaccataggagtatattagaaacttgcatttacaaatggaagaagaaagaacaagatttaaa

SEQ ID NO: 115824 - DNA, 100 bp, Homo sapiens
tgagtcgtctgtgggtacgctggacttgcggctttcatctgagtggcacagtaactgagctggccactgcctctgaaccagcagtgacttataaagttgc

SEQ ID NO: 115825 - DNA, 90 bp, Homo sapiens
tcagcatcggaagatcattttattgacattgctgaagtggagacagtgatatcagtatcaagataaaagtttggaatgggagaaaaattc

SEQ ID NO: 115826 - DNA, 75 bp, Homo sapiens
gtgatgaagctgtaatcaataaaaaacttcccaaagaactcctgttacgagaaaattcctgttccaagagaaaat

SEQ ID NO: 115827 - DNA, 98 bp, Homo sapiens
agaagccgaccaggacgggtactaccagaccacactccctgccattgtcttccaggtttccaaggtgctattgggagctcatgcactcttggccaacg

SEQ ID NO: 115828 - DNA, 100 bp, Homo sapiens
catgggctggccagagcacacaccaggcactggaatttcttcacatggctcctggagaagtgaccatcacagttcgcctcatccgttcctttgaacatcg

SEQ ID NO: 115829 - DNA, 51 bp, Homo sapiens
ctggatttaagcactgctgcactttatgagctttatgctgaaaaggtggcc

SEQ ID NO: 115830 - DNA, 85 bp, Homo sapiens
aggacctactcacagataggaattgaagccactgaggcggctcccagctgcgttggcgacatggccgacacccccagagatgccg

SEQ ID NO: 115831 - DNA, 75 bp, Homo sapiens
ctctcttcaccctgccgtcatgtctaagtcagagtggtggacttgctttgtgaagagacagttcatgaacaagag

SEQ ID NO: 115832 - DNA, 96 bp, Homo sapiens
aacaaaacaggtcatcactaagaaatcaggtgtagttctgctgaatcctattcctaagtattgctgacagacagaacgccttggaggctgagtgga

SEQ ID NO: 115833 - DNA, 75 bp, Homo sapiens
ggaaagcagtttttaagacaagttgaaatgttccttcttgcctatgctgtgcgccacaccatccaggtgtaccgg

SEQ ID NO: 115834 - DNA, 99 bp, Homo sapiens
tgaaagcctggctcgaaacatctgaagggttcgcagtgataaaggaggcatttgacagcactagcagtgagaaagatcagtctaaagaaaaggagaaga

SEQ ID NO: 115835 - DNA, 90 bp, Homo sapiens
gacaaaaagcttcagagttctctaaaaaaactggctgtgaataatatagctggtattgaagaggtgtttttcctagaaaacgatgaccag

SEQ ID NO: 115836 - DNA, 88 bp, Homo sapiens
cgtctccatcaaccgggccgtgccccagatgcccaccgggatggagaaggaggaggaatcgggaaacagtgcttcttagtcctacgtc

SEQ ID NO: 115837 - DNA, 75 bp, Homo sapiens
cgaggacggtcggactcccgcggcgggaggagcctgttcccctgagcaagagtgagccatggagctacgtgtggg

SEQ ID NO: 115838 - DNA, 73 bp, Homo sapiens
acagaaattctggaacacctatatggacataagcagctctatgaccaatagcacagctgccagtagacccccg

SEQ ID NO: 115839 - DNA, 82 bp, Homo sapiens
gtaagatcgtcgagatgtctacttcgaagactggcaagcacggccacgccaagcatgtgcagtctttgccaacaaaaaaaat

SEQ ID NO: 115840 - DNA, 100 bp, Homo sapiens
cgaataccaagctcggatccctgaatttgatccaggtgtctgctttttcaacgtgggagaaggagttgcacaagatagtttttgatccccggtacttact

SEQ ID NO: 115841 - DNA, 100 bp, Homo sapiens
gagaccgtgaccgagagcgtgaccgagagcgcgaatatcgtcatcgttagaagggtcccagggctggtggttgctttgggtctacagctacgtcttaccc

SEQ ID NO: 115842 - DNA, 100 bp, Homo sapiens
gtcatggggctgtttggaaagacccaggagaagccgcccaaagaactggacctgggaggaaggcaaggtgctcatctttgatgactcctttgagcacgag

SEQ ID NO: 115843 - DNA, 75 bp, Homo sapiens
cacagtcctgggaagtcagatgggattgaaagcttgcattcacaagagatgggctctgtggtctgtggaatgaaa

SEQ ID NO: 115844 - DNA, 100 bp, Homo sapiens
aggcaacggcagcacctgcagcaatccattgcaaacatggtgctttcctgtgacaagcagccccacaatgtcagctgttaaacgtttaatgaaagaagcg

SEQ ID NO: 115845 - DNA, 75 bp, Homo sapiens
ctggtgtgccggcacctaggccgagagtacaggggctcaggtccaggtggcaggggatatgctacccaactcaac

SEQ ID NO: 115846 - DNA, 75 bp, Homo sapiens
tcaccctcccgagttgaaaaatcctggaaagacaagcatcatgcctctgaccagtgccttcagggctgtggacaa

SEQ ID NO: 115847 - DNA, 75 bp, Homo sapiens
agcatatttgagtcatttccttcgtacccacagtgcttcatgagagggaaggtattcatgtaaatcaagaattac

SEQ ID NO: 115848 - DNA, 100 bp, Homo sapiens
gctattgctgcagcatttgccaaggagacatccctcttaggtgactattatatggttaaaaagattttggaggaaaacagttcaggtgacttgaacataa

SEQ ID NO: 115849 - DNA, 75 bp, Homo sapiens
cgaaaaagaacgacatgatgcaatcttcaggaaagtaagaggtgctgcattagacgtggaactatctgatgattc

SEQ ID NO: 115850 - DNA, 100 bp, Homo sapiens
ggaactcaggcgcctcttcttagttgatgatttagttgattctctgaagagaaagcaattgagctgcgtctggcaaaaattgaccatactgcaattcacc

SEQ ID NO: 115851 - DNA, 76 bp, Homo sapiens
cgagaagccagtcacgccgggagctggtacacagcctcagtgatgaaactacagaatctgtttgtagatgattcag

SEQ ID NO: 115852 - DNA, 82 bp, Homo sapiens
aggccaaccagagattcatctttcatgcagtgacatgttgataaaaaatgatggtggtggtgaagtttattaagaaggagaa

SEQ ID NO: 115853 - DNA, 75 bp, Homo sapiens
tttaacattccaacacataaaaattatttatccaacagctcctcccagaggatgtactgagtaaagatgctgggg

SEQ ID NO: 115854 - DNA, 83 bp, Homo sapiens
caggtcttgtagcagcgcctcctcgcttcccatcgacggtcagtgcgcacgttgtaatcagctgaggccatgtcaggagacgg

SEQ ID NO: 115855 - DNA, 90 bp, Homo sapiens
tccatttcaactacagatactttgaagtagaagaagctgatggaacgtgttgtgggctttcacgtactgggtccaaatgctggagaagtt

SEQ ID NO: 115856 - DNA, 98 bp, Homo sapiens
ttctgcacctcaggagggaattcagcctcagtgatgtccatgagcttcagtatcagacacagcacagcagccatctgaagagcaaagcaagtctcttg

SEQ ID NO: 115857 - DNA, 101 bp, Homo sapiens
cgggaggagaagcaccagaagcagatggagcggcaacagctggaaacagagaagaaaaggagagaaaccgtggagagagagaaagagcagatgatgcgcga

SEQ ID NO: 115858 - DNA, 99 bp, Homo sapiens
ggatccaacacctttccccagctctgcgcgtaccgcgctctttggaaacgaattgttcaggccctctgtggttaaagactgtatccatgctgtgctcaa

SEQ ID NO: 115859 - DNA, 76 bp, Homo sapiens
ctcagaccaccatacacttactacctacaggttcgtgggagtaagggagaagttttgtacattttggatgctacca

SEQ ID NO: 115860 - DNA, 100 bp, Homo sapiens
aaactcctgaggagattcgcaagaccttcaatatcaaaaatgactttactgaagaggaggaagcccaggtgcgcgtggaattcatggacgacacgagccg

SEQ ID NO: 115861 - DNA, 100 bp, Homo sapiens
ctcggcccgcgggggagccccgggagccgcacggccaacatagccgaggtagaggtctccatccctgccaagctgcacaactccctcattggcaccaagg

SEQ ID NO: 115862 - DNA, 100 bp, Homo sapiens
cattgccaccaccaccaccaccaccacagagtctgtggaagaggtggttcgagttaaacacagtgggaatatcacttttgatgagattgtcaacattgct

SEQ ID NO: 115863 - DNA, 90 bp, Homo sapiens
ccagctccagtgggcgggtggcagcagcaagatgaagagcgacgtcggcagctgagagagagagctcgtcagctaatagcagaagctcga

SEQ ID NO: 115864 - DNA, 101 bp, Homo sapiens
gagcgatatattcatctggagaaccttttggccaggtcttactttgatcctcgtgagctttctactaccaaagattccccacagcctgttgaggagaaggt

SEQ ID NO: 115865 - DNA, 100 bp, Homo sapiens
gccccaagtgtgccccagctcagaaggtgatgttctgcaccctgaacacccacaaagtggacatggacaagctcctggggggccagatcgggctggagga

SEQ ID NO: 115866 - DNA, 74 bp, Homo sapiens
tgccagggtccctgaagagggaagacacgcggaaacaggaattaaggataacctagacgacataaagaggataa

SEQ ID NO: 115867 - DNA, 82 bp, Homo sapiens
ggttattgaggaacatggcgttgctggtgcgagtccttacaaatttacatgtattggagaccagaccagaagcccttctgaa

SEQ ID NO: 115868 - DNA, 75 bp, Homo sapiens
agacgagaagcctgaaaagtcgcagcgagctggagccgccggaggtggacagcgccatgtccctgatccaggcag

SEQ ID NO: 115869 - DNA, 100 bp, Homo sapiens
accagcccctcaccgcctcccaggagagaagatgactgaggaggaggtggagaccgttctggcaggacacgaggacagcaacggctgcatcaactacgag

SEQ ID NO: 115870 - DNA, 99 bp, Homo sapiens
ctgcggtctctggccagcacgctggactgcgagacggcccggctgcagcgagcgctggacggagaggaaagcgctcccctcccacccggtcactccgtc

SEQ ID NO: 115871 - DNA, 88 bp, Homo sapiens
acattttcctgtcatagaaacgttcttgctgcaatcagcccttacttcaggattgttaaaatgagtcttcggaagcaaacccctagtg

SEQ ID NO: 115872 - DNA, 83 bp, Homo sapiens
ctcatctaccagcgtcatgtatacaacctgccaaagatccatgcatacaaccttgaaacgaatgcctgggaggaaattgcaac

SEQ ID NO: 115873 - DNA, 76 bp, Homo sapiens
cagcccttccctgaactacactgtgctgccttaaaagtgtttacggacttaaccaccaccatgtcgagcaaaagaa

SEQ ID NO: 115874 - DNA, 100 bp, Homo sapiens
tgtccgactgggagcagaggaagccttgaggacctactcacagataggaattgaaggtgtcatggagaaactccagctgggcccagagattctgcagcgg

SEQ ID NO: 115875 - DNA, 98 bp, Homo sapiens
tccttggggagacgcgggtcccagtcctgcggctcctactggggagtgcgctggtcggaaggccgaatccgggtgcatggtattggcgggggccacaa

SEQ ID NO: 115876 - DNA, 75 bp, Homo sapiens
tattggtactccagtccaggcaacaaatatgaatgacttcaaacgaatggagttttaacattgaatgcggagaac

SEQ ID NO: 115877 - DNA, 100 bp, Homo sapiens
ggtgcccacttaactgtgaaaaagatatttgttggtggcagagctgaagcaggagctgaagttgcgatcactgcctgtctcgggcaccaaaactgagctg

SEQ ID NO: 115878 - DNA, 82 bp, Homo sapiens
atcaacttaaaagatgccacctctaaggtcagaatggcggcagtggagcatcgtcattcttcaggattgccctactggccct

SEQ ID NO: 115879 - DNA, 90 bp, Homo sapiens
cggggcggcggcggcggcggctgcggcccaatataggtcactctgtgagactgctgggtcagaaaaaggataatggaaggcggcttgggg

SEQ ID NO: 115880 - DNA, 100 bp, Homo sapiens
gcggatccggcctgccctggcccagctcaacacctgatttcgcgtgccaagttggaggccgccattgccgaggctgaggagcgtggggagctggcgctca

SEQ ID NO: 115881 - DNA, 83 bp, Homo sapiens
aagtacgaggcggacatgtgcgtgaggttttttattggcacctcagtctcaacattttcttttcggattcatgaggaaagaga

SEQ ID NO: 115882 - DNA, 100 bp, Homo sapiens
agcgcccacggggacggattggttgttttttcctgtatgaagcggttggcaccactgaagtgaccgaatgagatggcccactgcgtgaccttggttcagc

SEQ ID NO: 115883 - DNA, 75 bp, Homo sapiens
taccagcccatgcccctgaaggcctcgctggagatcgagtaccaactagtgagacctgcaacgacttccacccga

SEQ ID NO: 115884 - DNA, 51 bp, Homo sapiens
caactctgcccttatggaattggacaaaggagattttagttcctaaaaatg

SEQ ID NO: 115885 - DNA, 101 bp, Homo sapiens
attggagaacttgttggagtgctggtgaatcatttcaagagctattgtacagggggatacgctggaagacatttacaaccaagtgaaacagatcatagaag

SEQ ID NO: 115886 - DNA, 100 bp, Homo sapiens
tttatactcattcaccattgacaattcaacttactctctcttcccacagttcacagaaccccaaagtccaagctcttcttgggatttcctaccttctgga

SEQ ID NO: 115887 - DNA, 97 bp, Homo sapiens
ggcctgggcctcccggtccgcaagcagacttaattcagtgcacaaatgagatgaatgtgaacatcccacagttggcagacagtttatttgaaagaac

SEQ ID NO: 115888 - DNA, 100 bp, Homo sapiens
agcgcagaagccgagccgcgaggagcgcactccgtggccccgatggagcggtacaaaggtaagtaaggaggtctctgtaccatggctcgtacaaagcaga

SEQ ID NO: 115889 - DNA, 100 bp, Homo sapiens
agaagcagatatttgaagagaacagagagactctgaagttctacctgcggatcatactgggggccaatatgacagcgcttctgctgcaagtagcatggag

SEQ ID NO: 115890 - DNA, 98 bp, Homo sapiens
caccgcgcgcgcctcgacctgctgctggagacctggatctcgcgccacaaggagatggtgtcctgtggccaggcggaaagcagtgagaagcccaacgc

SEQ ID NO: 115891 - DNA, 100 bp, Homo sapiens
gctgctgccgccccttgggctaaaagatagcagaccccacgttagctgaaatgggaaaaaacttgaaggaggcagtgaagatgctggaggacagtcagag

SEQ ID NO: 115892 - DNA, 75 bp, Homo sapiens
gcggatgtcagaccagagaagagcacagaatgtaccagagagcaatggcaccagcatgatatcattgatcattcc

SEQ ID NO: 115893 - DNA, 76 bp, Homo sapiens
gccgtcgcccaggagtcatcggacgccagaatctgggccaattcctgtccccccagcagcatggcatcgtgtgctg

SEQ ID NO: 115894 - DNA, 75 bp, Homo sapiens
aatccgaaatttcttgggtgaaaaatatatccgcagggttcggatgagaccaggcaactcatgcagcaattccag

SEQ ID NO: 115895 - DNA, 100 bp, Homo sapiens
tcaggtaggctgcgttgaggatctttgctcttccatccgcctttgatcgtcttcctcttcagccatccagtaataaaagactagtggccttagtgcccat

SEQ ID NO: 115896 - DNA, 100 bp, Homo sapiens
ctcagcaggaaattgaagataaaatgaaagggttcagcttcaaagaagacactttgctgttgatagctgaggccagtgaagaagcaaaggaagacatgaa

SEQ ID NO: 115897 - DNA, 96 bp, Homo sapiens
ccccggtcctcggctctggggccgccgccgcgggccggagccgagcagccgtcggcaggaacataattgctgagcatgaaattcgtaatatctcct

SEQ ID NO: 115898 - DNA, 105 bp, Homo sapiens
aggcataaggaagaatgtctcatgttcgagtctggggctgtcgctgtgctctgcttggaagcgtttgtgtctgctgccaagaagctaccacgagaagatgtgtat

SEQ ID NO: 115899 - DNA, 90 bp, Homo sapiens
ctataccaacgccaaacgcacgagtattacccctatctcagcagtgatggggagagccatagcgcggttgctgatgctattagaacaagc

SEQ ID NO: 115900 - DNA, 83 bp, Homo sapiens
ccaggatctcgggctcggaacgagactgcacgggatttgtcttggctgttactatgacacgggaagcaattgatgaatttcgg

SEQ ID NO: 115901 - DNA, 100 bp, Homo sapiens
gccaattgaaacatccttctatcttggaggatggtctagtctatgcagtcgagttctcccaccgctctggccgtgacctcattaacttggccaagaagag

SEQ ID NO: 115902 - DNA, 80 bp, Homo sapiens
ttagttcagtgcagtgtctgacttgtgacagggtacatcaggaacgtctctatcaagaatacaatttcagcaaggctgag

SEQ ID NO: 115903 - DNA, 100 bp, Homo sapiens
ggcctcggcgtgctgcgcctccgcggctgccctgcgccaggaatgtgttccagaagatctagaactgaagaagaagatttttgctcagttagattccatc

SEQ ID NO: 115904 - DNA, 76 bp, Homo sapiens
ccgacaacagcctggcgtccgccacggagagcgaagaggaactttactcctcctgtcgccagctgaggaggcggca

SEQ ID NO: 115905 - DNA, 101 bp, Homo sapiens
ccccagagagcgccctgagagaacagggtggccgcttggtccaggttgtttttcaccattcagaacattgcctgaagcaggtccaccatgccgttagtaac

SEQ ID NO: 115906 - DNA, 100 bp, Homo sapiens
tgcatgaaagagagattcctctgaaatgtgaaaggtgtagcagtcactcggcctacacccacagcatcgaccttgtgaacccagcgacctgactgccttg

SEQ ID NO: 115907 - DNA, 100 bp, Homo sapiens
cctgaggaggatcataaggcctgagctcaggccttacctcgtgcacatacctaggtgcacacattgagagaggagaaggaatgtagcatgagtcgggtac

SEQ ID NO: 115908 - DNA, 75 bp, Homo sapiens
gcgattgtccaggaatctgatggaacccctgaaaacaaccctctggcagtctattatcctcccagtccacaacgc

SEQ ID NO: 115909 - DNA, 75 bp, Homo sapiens
attaaaccaatgtttgtcatcaatgagatgcggcttgaagactgggatagtttccaagctattttggatcatacc

SEQ ID NO: 115910 - DNA, 50 bp, Homo sapiens
gcttcctgtacagcctgcaaaactgttttatgaatgaagctatggctaca

SEQ ID NO: 115911 - DNA, 75 bp, Homo sapiens
cggcgcccctgagccggccgagcggcgacggaccgcgaggacttctccagacaggttatgttacctgcagaggct

SEQ ID NO: 115912 - DNA, 75 bp, Homo sapiens
gaaagttccgccatgagctggggcacggagctgtggggaagaggaagaacgtctgagaaataaaattcgagctga

SEQ ID NO: 115913 - DNA, 90 bp, Homo sapiens
cgaatggcgagattgagcacgtgaccaagcgggccatcagcacccccgagagactttgtgttttatgccccacgtctgagaatcaacaag

SEQ ID NO: 115914 - DNA, 98 bp, Homo sapiens
ttgggtgagcttgtttgtgtccctgtgggtggacgtggttggtgattggcaggatcctggtatccgctaacaggtcaaaatgcggatcttcgtgaaaa

SEQ ID NO: 115915 - DNA, 75 bp, Homo sapiens
ccgttggctatagcaaatgccccagaatttatccagttggcgaaggactttgaggatttccgtaaaaagtggcag

SEQ ID NO: 115916 - DNA, 80 bp, Homo sapiens
tgatttagttgattctctgaagtttcttgcagaacataaattattaggaaacattaaaaatgtggccaagacagctaaca

SEQ ID NO: 115917 - DNA, 90 bp, Homo sapiens
aactcctggactgaaacgatcctctcatctcagcctccaaaagtgctggcattacaggcatgttacatggaattggaaaatttatagttg

SEQ ID NO: 115918 - DNA, 100 bp, Homo sapiens
tgacaacatccacgccctgactgcccagggtgaagttttacaggcggtcaccgaccatgatattcctcagcagttggtggagcgattacaagaagagaaa

SEQ ID NO: 115919 - DNA, 83 bp, Homo sapiens
ctggagccaatcagcgcgggcagcgaaccgggggagcgaggcacggctatgcccactggaagggccaagtgctgaattcagat

SEQ ID NO: 115920 - DNA, 100 bp, Homo sapiens
ttcttcgttgccatgaggaaagaattctccgaggtgttggagagcacaatggctgaacaagtccttcctcaggctttgtatttgagcaatatgcggaaag

SEQ ID NO: 115921 - DNA, 100 bp, Homo sapiens
ggatatggaggatctcttcgggagcgacgccgacagcgaagctgagcgtaaagcttcccatcgacggtcagtgcgcacgttgtaatcagctgaggccatg

SEQ ID NO: 115922 - DNA, 75 bp, Homo sapiens
ccgggaggtccatgagctggtggccagtttggagagaagatggcttttatccctcagaacctgtttttgttccag

SEQ ID NO: 115923 - DNA, 76 bp, Homo sapiens
cagaaacaaaatgtcaacaaattgatgggtgggcaatgccgtgccaccgcccctggccaaagccattggcttggag

SEQ ID NO: 115924 - DNA, 100 bp, Homo sapiens
acgggaacatgaagtgatgacagctggcagtggggtggaagacaacccgtgagtattacaccttcatgtgggttactttgcccattgacctaaacaacaa

SEQ ID NO: 115925 - DNA, 73 bp, Homo sapiens
tctgacagccctgtgtgacaccaagataagtaacaaaaagcttgtggtgaaggggggcaaaaaaaagaagcaa

SEQ ID NO: 115926 - DNA, 98 bp, Homo sapiens
cccgtccattgatagcattcagaaagatcccaggttctatttcaccaattggcatggaaccaacgacaatgagcagtcagtgtggcgtcattctccaa

SEQ ID NO: 115927 - DNA, 100 bp, Homo sapiens
ggtcctctcgctggacttctggcagaggtaccgtgtggaaggctatggggctgtggtgctgcctgccactccagaacttacgctggaaaaactccaacag

SEQ ID NO: 115928 - DNA, 100 bp, Homo sapiens
atctcattctagaaagaagcgatacagggtaagatgatggcatgcaaacactgcagtgacattttcagcaaggagggtgctttgaaactagcagccacag

SEQ ID NO: 115929 - DNA, 96 bp, Homo sapiens
cgctcgtgtacctggacgtggacgccaacgggaagccgctcggccgcgtggtgctggaggaattgaatgatctggcacgggaccctccagcacagt

SEQ ID NO: 115930 - DNA, 74 bp, Homo sapiens
acatcgtcatcttccgacaacgacgagggcagcggaggggcgacaaaggctgatcccttatccaacatggttct

SEQ ID NO: 115931 - DNA, 75 bp, Homo sapiens
caggaaaacagagaaagaagtgataggagggctctgtagctctggcaggctgccctgagcacgctcaaccccaac

SEQ ID NO: 115932 - DNA, 90 bp, Homo sapiens
acctctgcgtttttccctccaggttcatcatgaatgagaaatgggacacaaactcttcagaaaactggcatcccatctggaatgtcaatg

SEQ ID NO: 115933 - DNA, 83 bp, Homo sapiens
tcgcggaggccctcctgggggcgggcgcggggcgcggctcgggggcgccccctgagcagttccagggtctccctccactgctg

SEQ ID NO: 115934 - DNA, 100 bp, Homo sapiens
cgctgacgggcacgctgactggaggctggcggacaggcgacagcgacctgcggcagggatccatctgtctctaagtctgtagaacgaatctttaaaatct

SEQ ID NO: 115935 - DNA, 87 bp, Homo sapiens
aaggacttgcctaccctcatggcagcaattaactggagctgattaacagctgctccctttaggtggttgtgtcaaaccgattggtga

SEQ ID NO: 115936 - DNA, 50 bp, Homo sapiens
aacaacaccacaataatccacagccaagctatgtgatgatgatgccattt

SEQ ID NO: 115937 - DNA, 101 bp, Homo sapiens
gcactgtggttcctgcatgaagacagtggctggcggtgcctggacgtacaaggtgcatctgagaaagacatcgtgcactctggcttggcatacacaatgga

SEQ ID NO: 115938 - DNA, 50 bp, Homo sapiens
agaatgtaacatcatgcttccggacccactgatctcagcatgaagagaca

SEQ ID NO: 115939 - DNA, 98 bp, Homo sapiens
gaaatccttgggtttgaagatgatgttgtgattgagtttatattcaaccagctggaagtgaaggaagaggagttgtacgcatgtcagagaggttgcag

SEQ ID NO: 115940 - DNA, 75 bp, Homo sapiens
ctgttatcatcatggctgtagagaagtcgttggcttcgtaagagcagggtctatgggaagcctcctcagcgtggg

SEQ ID NO: 115941 - DNA, 100 bp, Homo sapiens
gagcgactaactcctgcgcccctgagggaaaggccgagggggacggcaagatgcacatcaccctctgtgacttcatcgtgccctgggacaccctgagcac

SEQ ID NO: 115942 - DNA, 100 bp, Homo sapiens
tcacctaccaacggcatagcaatcgcacagctgaggaggtccttgaatgggcaagagggcacatgaagtacggcgtcctccacattcacggcctctacac

SEQ ID NO: 115943 - DNA, 74 bp, Homo sapiens
gcctctagaaccgacgactggggagcactgtttgcagagttctctctctctggatggaccagcttttgggaaat

SEQ ID NO: 115944 - DNA, 90 bp, Homo sapiens
agggggaaaagcgagcgatcgagcgagcgcgcgcgcgaaaactccgggcagtattgctgacagacagaacgccttggaggctgagtggag

SEQ ID NO: 115945 - DNA, 83 bp, Homo sapiens
ccgcaccatgccgctcctaagcctgcacagccgcggcggcagcagcagtgagagggtgcttcaaggatgaccgcatcgtcttc

SEQ ID NO: 115946 - DNA, 98 bp, Homo sapiens
gggggcccgtactgcacatcgtggtggtcggatttcaccacaagaagggctgccagggtcttactgaagtaacacaaagcttaaaaatggaaaatgaa

SEQ ID NO: 115947 - DNA, 101 bp, Homo sapiens
gggagatacacccaactgggagccccacaggtaggctggaagagtacctgggaagcatggccaagattcagaaggcagtggagtatttccaggacaacagc

SEQ ID NO: 115948 - DNA, 82 bp, Homo sapiens
gcgggacctgacagccgggtcagagaagctccaccatgaggcgaggtggatggaggaagcgagctgaaaatgatggctggga

SEQ ID NO: 115949 - DNA, 82 bp, Homo sapiens
ccaggagtttactagatttgttcctaaatttaagggaaagaccatgtttgtagatttattggctgtgggaggaatgatcgat

SEQ ID NO: 115950 - DNA, 90 bp, Homo sapiens
gtgtttaccatgacgataagcaaccagcatttagagctgtttatgaagcactgagaaatgatttaggtcctgaatatgaaggtatattta

SEQ ID NO: 115951 - DNA, 87 bp, Homo sapiens
ttttcaagctcttgcattagaatctcggggaatgggagaggtttaagggaaaccacaggctccgagagtgatgggggtgactcaagc

SEQ ID NO: 115952 - DNA, 100 bp, Homo sapiens
ctcgaactttaaagtccgcttctttgtgttaaccaaagccagcctggcatactttgaagatcgtcatggggaggaagaaggcacctacgatcaaactctg

SEQ ID NO: 115953 - DNA, 74 bp, Homo sapiens
aaagtggtgaatcccctgtttgagaaaaggcctaagaattttggcattgattgtgaataagtggaatacagctc

SEQ ID NO: 115954 - DNA, 98 bp, Homo sapiens
tggagctactgtactggctattggaaggaggagattctgaagataaggaggaatgtatcctgtcaggtataatgtcagtgaatggcaagaaagttctt

SEQ ID NO: 115955 - DNA, 100 bp, Homo sapiens
actggcagagctgtggctcgaattcccagagttcgaggtggtgggactcaccgctctggccagggtgcttttggaaacatatggtactggaagatgtcac

SEQ ID NO: 115956 - DNA, 90 bp, Homo sapiens
tgtaggatccactggcgtcatcaagtcaccaagctggcaacggccaaaccaaggagagccggatatctcactcttttgctagggctgatg

SEQ ID NO: 115957 - DNA, 99 bp, Homo sapiens
aaatacctgaaagattgggcaagagaagaattcagaagaaacaaaagtgccaccgaagagagccactgtctcaagactctgcccttcttcaagagaaga

SEQ ID NO: 115958 - DNA, 90 bp, Homo sapiens
aagacagacaggatggggaggaggttcttcagtgtatgcctgagcccacctgaatgaccttgaaaatattattccatttcttggaattgg

SEQ ID NO: 115959 - DNA, 80 bp, Homo sapiens
tgcagctcaacttctaccagttcctcggggtgcagcaggtcctctcagggtgcgccatcattgtccgaggtcagcctcgt

SEQ ID NO: 115960 - DNA, 90 bp, Homo sapiens
gcctcccaaagtgctggaattacagggatgtgtttggccaaatgggagagtggttacaacacacgagctacaaactacaatgctggagac

SEQ ID NO: 115961 - DNA, 83 bp, Homo sapiens
ccgagaccgcggccgggaccgagggtggtgctgtgggtcggcctgggcgtcctggtggtgagcactgtcaccacactgtctgt

SEQ ID NO: 115962 - DNA, 82 bp, Homo sapiens
aggaactcaatcaaaccagtattcttttcacacagacctagaggatcaagacataatgggagcatttttagacaagccaaag

SEQ ID NO: 115963 - DNA, 102 bp, Homo sapiens
ctcctaccagaagcacgaaaaggcctgggtctgctgcgtctgccagcaagcgagtcaagttcatccgagaagtaacaccatatatcaagaagccatcattag

SEQ ID NO: 115964 - DNA, 101 bp, Homo sapiens
tccattttggaacgcccgtgccgcgtctccgcgttcccagcccgggtccccgcgttcacagccccagcgcagagagtgataatgaactctcaagtggaaca

SEQ ID NO: 115965 - DNA, 75 bp, Homo sapiens
cacagcagcccctgtgaggcgctcacctgcaccatggaggaggcagaaaacctgctcttggatgctgatatgaac

SEQ ID NO: 115966 - DNA, 51 bp, Homo sapiens
gtctggagaactagtcctcgactcacggtgtggatgaggtcaccattgtca

SEQ ID NO: 115967 - DNA, 75 bp, Homo sapiens
tcctccgtgaaattcagcccgaatggagagtggctggcaagttcattggggtgccgaggctcaggcagcatgacg

SEQ ID NO: 115968 - DNA, 75 bp, Homo sapiens
atcatcaaacagctatggtgatgattagagacatactaatgtacatggtttctgctttgggacaaccatacatct

SEQ ID NO: 115969 - DNA, 100 bp, Homo sapiens
gaaaagtgaatggtgtgcatcacattaagaggacgattatttatcatttctactaaagcaggatctctaggaattaatctggtagctgctaatcgagtaa

SEQ ID NO: 115970 - DNA, 100 bp, Homo sapiens
gacttctctgcacagcatccctgtgacagatctttgtggagttcacctctgtgtttgactgccagaaagccatgcagggcctgacgggccgcaagttcgc

SEQ ID NO: 115971 - DNA, 90 bp, Homo sapiens
aacaagtgtctttggttataaattatgatctacctaccaatcgtgaaaactatattcacaggacacttgggttgaattcagtaagtttcc

SEQ ID NO: 115972 - DNA, 50 bp, Homo sapiens
gccccatcgagaaatggccgcgtcggcagaaactatgttccaacttcctg

SEQ ID NO: 115973 - DNA, 73 bp, Homo sapiens
gccgcttccagactgggggagtgaagttgctgccaccgggacccaggagcttctctgcagactgacacaccct

SEQ ID NO: 115974 - DNA, 75 bp, Homo sapiens
gctggacggcgagcgcgagcggcgcgagaaagctaaccttgccgcgggccgagccctgcctcgccatggaccagg

SEQ ID NO: 115975 - DNA, 129 bp, Homo sapiens
ccagctgaaatggactggcccccttgagcctgtcccaagccctggtgccaggtgtccatccccgtgctgagcatcaacaacagcaacttgtgattggcggtgaccggatattcagttgcacatccccac

SEQ ID NO: 115976 - DNA, 51 bp, Homo sapiens
aagaccaccttcgtcaacgtgatcgcgcgagggcggcactgctcacaggac

SEQ ID NO: 115977 - DNA, 74 bp, Homo sapiens
cggaactggagaaagctgaggaattctgcttggtcagaatcgtgatggcattgtgttcagcactgatgactatt

SEQ ID NO: 115978 - DNA, 50 bp, Homo sapiens
atgctaaggaagctgtggcaatatccggagtgtgatgcagaagtaccttg

SEQ ID NO: 115979 - DNA, 82 bp, Homo sapiens
ctcgggggccgctctgggatcccggccaccagcaattgtccggcaaggattactgcaaagtaatatttccatatgaggcaca

SEQ ID NO: 115980 - DNA, 96 bp, Homo sapiens
tttctgtgtgcgccactcactggggccacctctgactgcttggggaggcgcccggtgatgctgctgtgcctgggagccccagactctggtaaatgc

SEQ ID NO: 115981 - DNA, 80 bp, Homo sapiens
agcatgttgtggctgttccaatcgctcctgtttgtcttctgctttggcccagggacaagaatccttcaagaaacaggaaa

SEQ ID NO: 115982 - DNA, 101 bp, Homo sapiens
ggctgctgcgacgaagagttccctcagcctccggccttgtgtgtccgactcggcagcagtgcaattaatggatgcctcgaagttgacgtacatatatattc

SEQ ID NO: 115983 - DNA, 74 bp, Homo sapiens
cccggcctcgtgcgccgcgctttgaggtcaaaatgcagatcttcgtgaaaacccttaccggcaagaccatcacc

SEQ ID NO: 115984 - DNA, 90 bp, Homo sapiens
cagaaacgtcactatcaagaagttctgggaggtgatcagtgatgaacatggcatcgaccccaccggcacctaccacggggacagcgacct

SEQ ID NO: 115985 - DNA, 83 bp, Homo sapiens
agcagactcaggagtacttcatcatccagtaccaggagagcctgaggatccaagggagaagagcctgctgagtgcagtgaggc

SEQ ID NO: 115986 - DNA, 99 bp, Homo sapiens
ggaaaagaagaccatctcaccagagcatgtcatacaaggtgatcatggaggaagcactttactcccaccaaatgtcacaaatgaatttccagaatatgg

SEQ ID NO: 115987 - DNA, 77 bp, Homo sapiens
tagaaataaatctgatattgcaccttcacagcaacaagaacattctagtatgccagtagaaaaaaatatcactttag

SEQ ID NO: 115988 - DNA, 108 bp, Homo sapiens
gaggtcccaaatcgtggccccttcgacctgcgctccgcgctctggcgctacggtctggccgtcggctgcggcgccatcgatacctcggatctgcattttcaagtgagc

SEQ ID NO: 115989 - DNA, 100 bp, Homo sapiens
cccgggagccgccggccaggacgcccccgagggtgtagaccgcgcccctggagagactatccttaaataacgacatatttgaggcgaactctgatagcga

SEQ ID NO: 115990 - DNA, 50 bp, Homo sapiens
atccagttaaactttttaccaagaaagacaacaaagttgctgcatagtct

SEQ ID NO: 115991 - DNA, 82 bp, Homo sapiens
gtgaccgagaccgcggccgggaccgaggaaggagaggacttgggtgaggagctgctgccacccgggctgggccaggacctga

SEQ ID NO: 115992 - DNA, 90 bp, Homo sapiens
agccgatcatggcggatggcccccggtgcaagaggcgcaaacaagccaatcccaggaggaaaaacggcccgatgagagaaagggaaagtt

SEQ ID NO: 115993 - DNA, 100 bp, Homo sapiens
cttgaaagagaagtctctccaggtagcagagatatcttggatggagtcagaataataatggcagataaggagggcggcgactggcggcgcgatggacctg

SEQ ID NO: 115994 - DNA, 100 bp, Homo sapiens
gacgccgcgagggcagcgcccgcggcgggaatactaatgcaccctaaagggcacggccgccgccgcagcagtctgtggattctagccttgggggtctttc

SEQ ID NO: 115995 - DNA, 98 bp, Homo sapiens
atttttgtcacctccaacaacatccgcgagatcgagatcaatgtccgagttaccaccatggatgcagagctggagtttgcaatccagccaaatacaac

SEQ ID NO: 115996 - DNA, 100 bp, Homo sapiens
cctccccaagctgagttccagtcatacagcaggacatgctacgacagtgaagattcaggtagcccctgaagaagatgaaaggaaaaagaggcgacgagaa

SEQ ID NO: 115997 - DNA, 82 bp, Homo sapiens
gtacaagggctgctgcgaggaccaagtcgaccgtgtgtgagaagatcatggagttgctgggacagaacgaggtggaacagcg

SEQ ID NO: 115998 - DNA, 75 bp, Homo sapiens
gagggagaacacagttggagaaaatcggcagctgagacggccttggccgataccccagaatcttccatgctccgt

SEQ ID NO: 115999 - DNA, 75 bp, Homo sapiens
ctcaggagtgaagctgcataccttcgcggtccggccgtagcacctccgcgccgtcgccatgtcgcggtttttcac

SEQ ID NO: 116000 - DNA, 100 bp, Homo sapiens
ggacgaggctcgggataacgcctgcaacgacatggaataatccagaatggctactctgatctatgttgataaggaaaatggagaaccaggcacccgtgtg

SEQ ID NO: 116001 - DNA, 100 bp, Homo sapiens
ggaaccacgaaggtggccacagtgtccaccaaaggagacagggctgggagcgctgcccggggcccaggtcctccctaatgacagcatgcacgaaagcccg

SEQ ID NO: 116002 - DNA, 74 bp, Homo sapiens
ggtcggcccggggctcggagaatgggcagtacctgaacagccaacttttctaaaggtcatcaaagttgataaag

SEQ ID NO: 116003 - DNA, 83 bp, Homo sapiens
gttgaccgctgacccttggcctgctaactgaaacaagattcccaaatgctggaaaatcctctttgctaagttgtgtttctcat

SEQ ID NO: 116004 - DNA, 75 bp, Homo sapiens
aggtaaatgtacttgaagaggattgttccagcagtccataactccaggtttggcagtgaaggaactgaaatgaac

SEQ ID NO: 116005 - DNA, 85 bp, Homo sapiens
ccgaacacaccactgcagcatctgcaacagctttgtcaccgaaaagacctggatttggcaaaagtaggataccttgactccaaca

SEQ ID NO: 116006 - DNA, 82 bp, Homo sapiens
ccagcccgtgccgcgagcgcggcctgcaggaggtggtctttgggaagaagcttcctgcctttgccaccatccccatccacca

SEQ ID NO: 116007 - DNA, 50 bp, Homo sapiens
gtgctggagaacttcgtgggccgctctggacatcctgagcccaagtcccc

SEQ ID NO: 116008 - DNA, 106 bp, Homo sapiens
cgccgcccagagactgctgagcccgtccgtccgccgccaccacccactccggacacaggcggctatgagaggttttcctccgagtacccagaattctgttctaaaa

SEQ ID NO: 116009 - DNA, 72 bp, Homo sapiens
gtgtcccaggcccggcctttctgacaagaggtggacccaagtggagagattgtggaactggcgaaaggtgca

SEQ ID NO: 116010 - DNA, 100 bp, Homo sapiens
ctgcgacacccctgataagccggtgcaagggccgttgctccagggagaactgcaaatatcttcatccacccccacatttaaaaacgcagttggagataaa

SEQ ID NO: 116011 - DNA, 75 bp, Homo sapiens
gccttgaaggacaagaacagcgccgtcaccagcagcacatggattaattgatgtatgttgagtttatggagctgc

SEQ ID NO: 116012 - DNA, 75 bp, Homo sapiens
caaatctgaaataggatccagtatgtctgaaatactgctcaaaccagtccagctacgggggcccagccagccagc

SEQ ID NO: 116013 - DNA, 75 bp, Homo sapiens
aagacaccgggacctcctggaagccaaaaatgttgccagagtctgccctccgagacctcatcgtagccaccattg

SEQ ID NO: 116014 - DNA, 90 bp, Homo sapiens
tggagctactgtactggctattggaaggaggagattctgaagataaggaggatgtaaatgaagaccctggagaagatgtggccctcctct

SEQ ID NO: 116015 - DNA, 50 bp, Homo sapiens
ggagcacttggagaagaagggaccccagtgctcccggattttgctctcca

SEQ ID NO: 116016 - DNA, 98 bp, Homo sapiens
gtatggtcagcagggcctgtgccccaaagatgcaaacggtggatgaagctgtagcagttctacaggctcatcatgccaagaaagaagctgcccagaag

SEQ ID NO: 116017 - DNA, 98 bp, Homo sapiens
tgtctggagcaaataaaagagccctgcaatttgaagatacatgagacagcagccaaacccccagcattaaagctaggtcctgaatcattcaagtttga

SEQ ID NO: 116018 - DNA, 90 bp, Homo sapiens
ctgtcccgcggcctggagtacaacgaggtcaacgtcaccctggacctgggccaggaacttgctactaccagcaccatgccctaccaatat

SEQ ID NO: 116019 - DNA, 82 bp, Homo sapiens
tgcggccaattcggtggaacgaggacgcggactgcgaaggcagttttgtaccaatggctagaagcagatcgtcatggcaaga

SEQ ID NO: 116020 - DNA, 98 bp, Homo sapiens
gttcctggtcgttcccacagccattctggcgttcctggtcaatcatgacttcacccctctggaggtggctggccgtgcggctggagtgtgtgggcaac

SEQ ID NO: 116021 - DNA, 100 bp, Homo sapiens
cagctatggtgatgattagagacatactaatgtacatggaagatgagaatgtgcctactgctcctgatcctccaagtcaacatttacgtgggcatgggac

SEQ ID NO: 116022 - DNA, 74 bp, Homo sapiens
cggatcaatccagatggcagccagtcagtggtggagaacctcaagaaggcatgaagccagcccctgcagtgccg

SEQ ID NO: 116023 - DNA, 75 bp, Homo sapiens
gaagcaccaaatctgcatacaaccagtgggcttaaaattgaattcagtggatccaacaatgagcattgatcttaa

SEQ ID NO: 116024 - DNA, 50 bp, Homo sapiens
aaccttcccagaaagtccaagctcgtgttcttggccaggctgactgagag

SEQ ID NO: 116025 - DNA, 74 bp, Homo sapiens
gccgctccatccagggccaccatgtctgcctcctggtgaaaaagggttcgcgctgcagctaggcagcatctccg

SEQ ID NO: 116026 - DNA, 100 bp, Homo sapiens
tgcgagaacagagaagggagctctatagtcggagtggagaactgcaaggccactgtaggaacttgcaagagttgaatgtctctgactgcccaacattcac

SEQ ID NO: 116027 - DNA, 82 bp, Homo sapiens
gcgctcagcgagtttgccctccagagcgacctggaccaacccgccttccaacagctgggaatgctggcctgctggccttggc

SEQ ID NO: 116028 - DNA, 100 bp, Homo sapiens
gttctgacttctgagtttatagaagtttcagttctgaagtttaagaggagtttcacttcatcccttttcattttgaaggctaatctagacgaaatccaga

SEQ ID NO: 116029 - DNA, 100 bp, Homo sapiens
gcagaggcaccgggcggcatacaggtgaaagaaaagatgttgtcccggttaagagtagtttccaccacttgtactttggcatgtcgacatttgcacataa

SEQ ID NO: 116030 - DNA, 71 bp, Homo sapiens
ctgctgctgagcagcgccgcgggtgtggaagatttccttacaagggccgtgttacatgacactgttaatga

SEQ ID NO: 116031 - DNA, 88 bp, Homo sapiens
tgctttatatatcatgtgtgttcctcactcaggtgctggagaatctggtaaaagcaccattgtgaagcagatgaggatcctgcatgtt

SEQ ID NO: 116032 - DNA, 100 bp, Homo sapiens
agtggtgcgtgatgtggctaagatgctgccgactctgggcggcgaggaaggcgtctcccggcttgaaatggcgattgaaaacctccaaaaaagcgaagga

SEQ ID NO: 116033 - DNA, 133 bp, Homo sapiens
ccagcttcaccacgcggctgcacaactgcaggaacaccgtcacgctgctggaggagggccatgtttatgagtggactaagtgaaagcaaacaaacccatgtacacctgaggaatgtcgatgctgccaccttac

SEQ ID NO: 116034 - DNA, 100 bp, Homo sapiens
aatgtactctggaaaaatcccttattgatgctgccaaatttcctcttccaatggaagtgtttaagaggatcttatgtctctccttgatgccgacattcat

SEQ ID NO: 116035 - DNA, 75 bp, Homo sapiens
gccctgaatgcaggttcctatgcgtcactagtgcagggacttcacagcccacacgggctacgaggtgctgctgca

SEQ ID NO: 116036 - DNA, 101 bp, Homo sapiens
gaagagggactggaaccatctcagaagccatgcccctcaggctggaacttgccctgtctcctcgcagatgagatgttgagcataccggagccaccagtgag

SEQ ID NO: 116037 - DNA, 82 bp, Homo sapiens
gaggccaggggtgtcgccatgggcaatgtgtatgtgaagtgcccatcaattgctgcagctattgctgctgtcaatgcattgc

SEQ ID NO: 116038 - DNA, 74 bp, Homo sapiens
taacatgttcaatgtgggacaagaacatggaagacttacatcggagcgagaacccgagcagcgccatgagcaac

SEQ ID NO: 116039 - DNA, 75 bp, Homo sapiens
tgtttctcatctttatactcttccagctccaattaaggaacagctatatcctgcttccttctgtaagcagcatcg

SEQ ID NO: 116040 - DNA, 80 bp, Homo sapiens
ggccgacagtggagtctcaccacgtctccatcacgggtatgcagactccatcaagaatgctggaggaagggtgtttgtcc

SEQ ID NO: 116041 - DNA, 82 bp, Homo sapiens
gcccgtccgtccgccgccaccacccactccggacacagatataattggtgattacaactttcctctataaattaactcttga

SEQ ID NO: 116042 - DNA, 100 bp, Homo sapiens
atttgttggggagaagaggattggaggtgtcagtgttaaaggaacctctacaacgaaggtgaagccacggaagataagtttgcatttatgtcggatcctc

SEQ ID NO: 116043 - DNA, 90 bp, Homo sapiens
cacgacctatcctaggcgccatgtgtcgtgtgggagccaatgggagatgggaagaaaatcatttccttggctgataaccatatcctgctg

SEQ ID NO: 116044 - DNA, 74 bp, Homo sapiens
gacggagagagcacgagcccatcagttagttgaatccatggacatgaaacccacagatatagagggttggcccg

SEQ ID NO: 116045 - DNA, 100 bp, Homo sapiens
tgagatcgacaacatcaagaaccagaacttcagtgaagatttcatacattggcctcatgacccagagctccttggagacacatcactatgtggattgtgg

SEQ ID NO: 116046 - DNA, 83 bp, Homo sapiens
ccggaagacagggctcgtgagcagcggcggcagctgcagaagcaggagcgcccgggatgggagtcccagcttctggagacggg

SEQ ID NO: 116047 - DNA, 83 bp, Homo sapiens
aactgtcggcttcaaagagaaaaggcaacatcctgtcacaggccatgctctggcaaaaacgtcccacgacagtgatgtccgag

SEQ ID NO: 116048 - DNA, 90 bp, Homo sapiens
cactgtacaagctttcaaagtcaatgtcctgggaactccaacaagggagcaaatcagagaaatgaacccaaactacacagaatttaaatt

SEQ ID NO: 116049 - DNA, 100 bp, Homo sapiens
ccttcatctgagccccttaaaactaatgtgttactgctagagaccgttggatggcagcttaaccttcagatggctcactctgctcaagcaaaactaaaat

SEQ ID NO: 116050 - DNA, 75 bp, Homo sapiens
ggcgtctccggggaaagccgtggccccgagggcggatccgaggttcatgtactggacagactggggagaagtgcc

SEQ ID NO: 116051 - DNA, 83 bp, Homo sapiens
cttacgacgggttggggatggcgtgcagcgcaaccacgagacggccttccaagtgtactaatggtcacttgatgtgcgctggc

SEQ ID NO: 116052 - DNA, 100 bp, Homo sapiens
ttagagcaagggacagagccatggatcatggagccaagcattccagtaggtacctgtgcagctgcaagagaaatagtgtggttagaaagagaagagcgag

SEQ ID NO: 116053 - DNA, 97 bp, Homo sapiens
cgggctggagcctgacgagctggcgggcaatgaatcgctccctggctaatgtgattcttggaggctatggcaccacttcaacagctggtggaaaacc

SEQ ID NO: 116054 - DNA, 75 bp, Homo sapiens
gcaagacagtcgacgcgctcaccggctgggtgggttcgagcaactaccggaatcctgctgcatcacagaagctgg

SEQ ID NO: 116055 - DNA, 100 bp, Homo sapiens
ctttgggtttagcacgatgagctcaatcggcactgggttttcggctttgtgagaaaccttaccatcaaacacgatggccagcaacgttaccaacaagaca

SEQ ID NO: 116056 - DNA, 100 bp, Homo sapiens
ctgatacaaaaagcccagattacgtttcacaagaaatgattatgccgacaagcccctggagaagcctctaaagctagtcctgaaggtcggaggaagtgaa

SEQ ID NO: 116057 - DNA, 75 bp, Homo sapiens
cagtttgatgcgtcacactacgacagtgagaaaggaggagacggtggctcagggagtaaaggaaggccagttgag

SEQ ID NO: 116058 - DNA, 83 bp, Homo sapiens
ccaggagctcctccaccaggccaaagacttcggcaattactgtggcatgatcctccaccattcacactctaccctggactctg

SEQ ID NO: 116059 - DNA, 82 bp, Homo sapiens
agccgtagacaccagctccgaaatcaccaccaaggttgtgaccgagattcccgacgagagagactgaggggaagagaggaag

SEQ ID NO: 116060 - DNA, 100 bp, Homo sapiens
gaagattttaatattgcactaggagtttttgctttagctggactaacagatttgggagagcctggggatgtacaggagatgcctgctccagaatctcctc

SEQ ID NO: 116061 - DNA, 75 bp, Homo sapiens
aagaatgaacagacctagtgggcgttgcctttagacccagcagcctcgtcttacagcgtgactgcaaagaaaaag

SEQ ID NO: 116062 - DNA, 100 bp, Homo sapiens
cctccgccggggggctatgggcccatcgactacaaacggaacttgccgcgtcgaggactgtcgggtactgctataaccagaatttggtagaaaaaggatt

SEQ ID NO: 116063 - DNA, 50 bp, Homo sapiens
ctgccaaccaagccatgaccacaggggaggaagttgccttgtactgtgcc

SEQ ID NO: 116064 - DNA, 51 bp, Homo sapiens
gactccatcccactgaggaccggatttcagtcataatcggttgtctaactg

SEQ ID NO: 116065 - DNA, 100 bp, Homo sapiens
acaggagagaatttgtgatgatgagctgatcttaatcaaaaagtatgaaaatgaaagtcttcagaatggaaggaagtcaactgaatttccaagaaaaata

SEQ ID NO: 116066 - DNA, 100 bp, Homo sapiens
gcagagggaatctggtcaaacatggaatgggggcaagtgtccagagaatggctgggatgaaagtacacttgaactctttttacatgaacttgcaatcatg

SEQ ID NO: 116067 - DNA, 121 bp, Homo sapiens
agcctctctcatcttgggaatctgcgtcagaagtcactcgcagtcccgtcagcccaggtgctggagaatctggtaaaagcaccattgtgaagcagatgaggatcctgcatgttaatgggtt

SEQ ID NO: 116068 - DNA, 99 bp, Homo sapiens
gggcgaggtgacctttgagaagatcttttcccagaagctggctgggtccatggctggcagtggaaatccctgatctgattcagaagggcgtcatccaac

SEQ ID NO: 116069 - DNA, 110 bp, Homo sapiens
gaaaaaggtgctgcagcaggaagaagctgggatctgattgaacagagccaaatggagaagggtatatttaatgagcgaacaggtcacagtgaccaaatggcaaatgagaa

SEQ ID NO: 116070 - DNA, 97 bp, Homo sapiens
aacacgtatgcaaaaacttgcagagcaacggcgccgttgggataatgatgatatgacaggagcagacgcctccgcctagacctgaagcctaccccat

SEQ ID NO: 116071 - DNA, 113 bp, Homo sapiens
aaaaccgaagttggaagtgtctcttagcagcgcgcggagaagaacggggagccagcagcctcccgcgacgatgcccctcaacgttagcttcaccaacaggaactatgacctcg

SEQ ID NO: 116072 - DNA, 90 bp, Homo sapiens
ctcggttgcacaataaaccgacgtttagccaggaatcccagtcagaagttccagcctgccactgttctctgatgccatgccagcaccaac

SEQ ID NO: 116073 - DNA, 102 bp, Homo sapiens
tctggtcccacggtttcatgccgacttcattcataagcacgtgaaaggctcacgactccatgaatttgatgagcaggtggctgctgttcgggaaggaatggc

SEQ ID NO: 116074 - DNA, 111 bp, Homo sapiens
tctctccctctgcccccccttccccacgcaaccccagatccatttacactttacagtggctattatcatggaaaactaatttttcccagagaatttcctttcaaacctccc

SEQ ID NO: 116075 - DNA, 100 bp, Homo sapiens
agctccggccgcctggctccccatactagtcgccgttccagggccctgcgaaccagaagacctcatcgacgggatcatctttgctgccaattacctgggg

SEQ ID NO: 116076 - DNA, 75 bp, Homo sapiens
cacagacccagccatcgttaagatcatggaaaatgctgagattaacaatatcatcaagattgtgggtcttcagta

SEQ ID NO: 116077 - DNA, 75 bp, Homo sapiens
ctatggaagatgaccagaggactagacctgaagtttcaaagacatatctgaagagatggattaagaatgctttgg

SEQ ID NO: 116078 - DNA, 131 bp, Homo sapiens
gataacatttttgaacgcacagatcgacagacattgtttgaaaatgtccaaagtggctgaaagaattaaacaaccaccatgtcgagcaaaaaggcaaagaccaagaccaccaagaagcgccctcagcgtgc

SEQ ID NO: 116079 - DNA, 100 bp, Homo sapiens
cgcggccgctgcggacggacgctcgcctgccggctgagcacctggctgcagtggaagaaagaaagatcaagtccctggtagctctcttggttgagacaca

SEQ ID NO: 116080 - DNA, 100 bp, Homo sapiens
cattgtttctctccctctgcccccccttccccacgcaaccccagatccatttacactttacagagaggagaggcagcagcatggcgagtgtcctgtcccg

SEQ ID NO: 116081 - DNA, 98 bp, Homo sapiens
gaaaagcaagatactgaaatgtgatgaacattcttgtgaaaatgccattgtgtgctggaaacctggcaagatggaagatgatatagataaaattaaac

SEQ ID NO: 116082 - DNA, 100 bp, Homo sapiens
gatttgttctgtatcagaagacaatatcatgcaagtgtggcaaatggcttatgtacataaaagcgtgatggaggaactgaagagaataattgacgacagt

SEQ ID NO: 116083 - DNA, 82 bp, Homo sapiens
cttagctgtgctcgcgctactctctctttctggcctggaggctatccagcgaggtgaagtgaaatctgcaagagtcctgctc

SEQ ID NO: 116084 - DNA, 100 bp, Homo sapiens
cactgcaatgtttttgtggaacatggtttgtgggggagagaaaccttatttgtctccagacattctagaggagaagcactgtgaattcaaacaacttgct

SEQ ID NO: 116085 - DNA, 132 bp, Homo sapiens
gctccgtggccttagctgtgctcgcgctactctctctttctggcctggaggctatccagcgacttgggaccctggaggactgacgctgctggcctgggcgtccccttccgctgagccatggcgactcccgac

SEQ ID NO: 116086 - DNA, 100 bp, Homo sapiens
ggcaccgaggactccgctcctgcccagtgttatagttttgccgctggactcttccctcccttcccccaccccatcaggatgatatgagacttgaaagaag

SEQ ID NO: 116087 - DNA, 82 bp, Homo sapiens
tgaacagaaacacctaggaagggagaactggcttgggcactgtttaaaggaaagttccgagaaggcatcgacaagccggacc

SEQ ID NO: 116088 - DNA, 75 bp, Homo sapiens
gaaaatctgtttcagctgagatcaactatggaataaggtttactcaggattcttggactatgtctgttacagaat

SEQ ID NO: 116089 - DNA, 97 bp, Homo sapiens
tgggtagacactttatcaatcactcattcaaagctggaggaaagcaggaatgttcagaggcaaatgaagattctgcagaataagcaagctcagattg

SEQ ID NO: 116090 - DNA, 101 bp, Homo sapiens
ccaggtgcagcagcaaggagaacattctcagagccaataggaatgatgtcacaggtggaagaagagacccaaatcattctgaaggctcaactactttactg

SEQ ID NO: 116091 - DNA, 75 bp, Homo sapiens
cccttccaggcccacagccgggagatccgagagctcttcagatctgtgccatcattggcgggaccttcaccgtcg

SEQ ID NO: 116092 - DNA, 100 bp, Homo sapiens
tgtgtttgtgaaacagagaaagataggcggccatggtccaaccttgaagatttgttcctgatcttgaagatattgtaaattttgaagaactagtaaaaga

SEQ ID NO: 116093 - DNA, 100 bp, Homo sapiens
gcttactggaggttttggctctgcgtgagtgtggtctacgagctgtttctcatctttatactcttccagcggcgtcttcgacatcttcggaacattgctg

SEQ ID NO: 116094 - DNA, 87 bp, Homo sapiens
tgcatcattccttggggcaaaatgtggacaagggatgataatgaagataattcaaatgatgggacccagccatccaaaaggaggcga

SEQ ID NO: 116095 - DNA, 90 bp, Homo sapiens
aagatccccaaggaggacggcgagagcacggacagactcatggggaagggccaggtccagcttagcagtgtctgcaaaaacgaatctttt

SEQ ID NO: 116096 - DNA, 100 bp, Homo sapiens
actcttagattcttatcacaaccaagtagaactggctcttcaaattgaagtagaagaatacatgttcacttccagtgaacaagagcatgttcccaaactc

SEQ ID NO: 116097 - DNA, 75 bp, Homo sapiens
attttttgccatggtggattttgatgaaggctctgatgtatttcagatgctccctcagtgtctctgcatccacct

SEQ ID NO: 116098 - DNA, 139 bp, Homo sapiens
tggatcgagcagctgaacgagtgcaagcagctgtccgagtcccaggtcaagagcctctgcgagaagggacatcaaagacgtcagactggatggcgagtcccagtgaggcgatgtgggcagaggagctccgagccgccca

SEQ ID NO: 116099 - DNA, 75 bp, Homo sapiens
gcttcagatccaagcagttggttaataataaagacgtttcttgaacaaaagttctgaagatgatgcggcctcaga

SEQ ID NO: 116100 - DNA, 100 bp, Homo sapiens
agctaaaaccttcctcaccgtgtactattataagcgccatggctatggctagtgttaaattgcttgccggtgttttaagaaagccagatgcctggattgg

SEQ ID NO: 116101 - DNA, 51 bp, Homo sapiens
gcggcgcccggatgggcagctgaggctggcgcccatgcggctctacacgct

SEQ ID NO: 116102 - DNA, 82 bp, Homo sapiens
caaataccaggactggggctgggagattctgcagagcttcagccgattcacacgggtgagaagccctaccactgcaactggg

SEQ ID NO: 116103 - DNA, 83 bp, Homo sapiens
ataagtggaattttggagatattcaaagtcttctcaagtcttaggattgcagcaacacgctcggctgcccaaacccaaggcga

SEQ ID NO: 116104 - DNA, 50 bp, Homo sapiens
cggtgttccaactgtttaaaccgtttccctggggagatggtaaccatact

SEQ ID NO: 116105 - DNA, 83 bp, Homo sapiens
tggagaccctcacggagctgggcgacgagctgaccctgggagacatcgacgaaacctgtttccctccaatcttgtggttgcag

SEQ ID NO: 116106 - DNA, 100 bp, Homo sapiens
accccgaggagccctgttccaaagcctcctggaccgtccaagaaatgtcctaaggaagtatatcctcatgtttctaccattataaatatttgtcttaaat

SEQ ID NO: 116107 - DNA, 90 bp, Homo sapiens
cgaggtggagctgcggggccctggcatgaaaggttgacatcatggacatatgtgagtccatcctggagaggaagcggcatgacagcgaaa

SEQ ID NO: 116108 - DNA, 75 bp, Homo sapiens
cttccaggacgtgggaccccaggccccagtgaaatatcatggagacagatcaaaggagagtttagtgagttttgc

SEQ ID NO: 116109 - DNA, 90 bp, Homo sapiens
cagaaaaaaatggagcacgtggctccaggcagaatgtcagcatctccacagttttgctgctgcagcccattgagagtgacgacatggagc

SEQ ID NO: 116110 - DNA, 100 bp, Homo sapiens
gctttacaagaaaaccacctaaatatgaaagattcatcaggccaatggtgaaatgacaatggatgctctgttggctcgattgaaacttctgaatccagat

SEQ ID NO: 116111 - DNA, 100 bp, Homo sapiens
acgaatcgttaaacatctgaaagggtcagggactgttgacatttagggatgtggccatagaattctctctggaggagtggcaacacctggacattgcaca

SEQ ID NO: 116112 - DNA, 50 bp, Homo sapiens
ctgtacaggattcttgacctgtgattgcagagggaatggcatacatcgag

SEQ ID NO: 116113 - DNA, 50 bp, Homo sapiens
cagcacgtggccaccaacctggggcgcaaatcaggaaacccaggcccaac

SEQ ID NO: 116114 - DNA, 96 bp, Homo sapiens
ctgtcacaattgttgcacaatatcgacctgaagatattttcaactccaggccatccaaaaatgatttacagctcctcaaacttaaagacaccttca

SEQ ID NO: 116115 - DNA, 100 bp, Homo sapiens
ctgcctcccccgtcccaccactgaggctgttgggccaggccagtcatgctagaacgagcggtggtgccccccccgggcacggggccatgtacaacgggat

SEQ ID NO: 116116 - DNA, 100 bp, Homo sapiens
atcgaggagcggatcctgcgcatcactggctactatggctaccagccctgggcagcgagctgcaaaagttgctccttgagggcaggacagttcttatggc

SEQ ID NO: 116117 - DNA, 100 bp, Homo sapiens
cagattcctcctgggcctcctcgccccatttgcgacagcatttgctacctgctccaggagtccttcaataatgttaaacagtggctgcaggaaatagatc

SEQ ID NO: 116118 - DNA, 118 bp, Homo sapiens
tccaaagcctgcgcgagaggagccgggacacgcctagcgcgggctccagggatgcttgaagatggaaagaaatttgattcctcccgggacagaaacaagccctttaagtttatgctag

SEQ ID NO: 116119 - DNA, 152 bp, Homo sapiens
ctcccggaagcggccaaggagcaggagctgtagtgagagcgaaggggagaggtccccccagcaggaggaagagacaggagctcaaggagtcttgcatccggaaccaggactgcgagactggctgctgccaacgtgctccagacaattgcgag

SEQ ID NO: 116120 - DNA, 90 bp, Homo sapiens
ggcaaaccccagcacttaagcaaacgggaattctcgcgttgaaatcacaaagattagacacctttttagataggtgttcttcagcaccac

SEQ ID NO: 116121 - DNA, 75 bp, Homo sapiens
agaatgttactaacaatctgaaatctctggaggctgcatctgaaaaggacgatggcctggggcaatttccctgca

SEQ ID NO: 116122 - DNA, 75 bp, Homo sapiens
ccaacagacattttgctgctgctacaaaattagtgtgatctcagctcaaggcaaaggtgggatatcatggcatct

SEQ ID NO: 116123 - DNA, 51 bp, Homo sapiens
agttggccttcatcgacttgagacaatcctcctcgccctctgactaatatg

SEQ ID NO: 116124 - DNA, 76 bp, Homo sapiens
cttagcagcagctccactgaacagataagggtataagcagtttagccaaattttgaagaacattggagaaaatgaa

SEQ ID NO: 116125 - DNA, 96 bp, Homo sapiens
cctgagatcgtcaagtctcccagcgaccccaagcaataccgaaatctccgagaagcaagggataatgctgtggctgaaaaggaacgagcagtgatg

SEQ ID NO: 116126 - DNA, 97 bp, Homo sapiens
cactatcatatgacaaaggctttgccgcagttcatcttcctccctgtgtactttccatttgccttcctggccaatgttttcagttgcaccaagctta

SEQ ID NO: 116127 - DNA, 88 bp, Homo sapiens
tgcgagacggcccggctgcagcgagcgctggacggagaggaaagcggttaaaaggacaactctggtggatagcagaacatctgttact

SEQ ID NO: 116128 - DNA, 75 bp, Homo sapiens
agattcaataacagttgcatttgaaaacaatttaacggatgaagagtcccggaaaaattgggaagaatttggaaa

SEQ ID NO: 116129 - DNA, 49 bp, Homo sapiens
gccctatgccgggggtgccgctcagcccaggcagtgactgacccgtgac

SEQ ID NO: 116130 - DNA, 100 bp, Homo sapiens
tgcgtcgctcgcgctgggagctgtagaccggagctgttcctattcggccatcttggctcctccacaagttggtcaaagaaaaagtgatgtatgaaaaaga

SEQ ID NO: 116131 - DNA, 82 bp, Homo sapiens
gcctatggtcggcctccgacagcgctccggagggaccgggggagctcccaggcgcccgggccaccagcccctcgggttccaa

SEQ ID NO: 116132 - DNA, 100 bp, Homo sapiens
gacgggctttaggctggaagcgccttagaggagccatttttccaggaatagcgggttttgcagcaattgttgcatatggattatataaactgaagagcag

SEQ ID NO: 116133 - DNA, 75 bp, Homo sapiens
ccgagaagaagttgaggcgctatgtctggaaatctctccaggcaccctgctttggccctctagaatacagacagt

SEQ ID NO: 116134 - DNA, 75 bp, Homo sapiens
attctgcccactctgcggagttagcagtcacgacctccagcacagctttctacaagttctgattaaagtcagaaa

SEQ ID NO: 116135 - DNA, 75 bp, Homo sapiens
ttggagcaacagtccaagctcaaagtgaattttaagaaggacaccacttccaaggcaattcatagtatatttaag

SEQ ID NO: 116136 - DNA, 75 bp, Homo sapiens
agccgatccagcctgcggagcctgtggggcagcattgatctggtagccttgctccagaagcctgttcctcacagt

SEQ ID NO: 116137 - DNA, 75 bp, Homo sapiens
atttacaccagcacttgaagcgcctggaaccgacagcccacctgaggatattgaccataaggactcatatctcat

SEQ ID NO: 116138 - DNA, 75 bp, Homo sapiens
aattacctaaatgcactctttcgaaagaaagtattacaatgactatggtgatattattaaggaaacactgagtaa

SEQ ID NO: 116139 - DNA, 83 bp, Homo sapiens
ctcagcgtcgctggcagccgctgtacttgggggatatgagactttctactcggaatatcctgagtgttgcgtggatgtaaaac

SEQ ID NO: 116140 - DNA, 100 bp, Homo sapiens
gatgaaagctatactccaagcaagatctcagtcagagtaggaaataattttcacaaccttcaagaaattcggatgcagaggaagatgaagatgatggcga

SEQ ID NO: 116141 - DNA, 100 bp, Homo sapiens
ggcaatccgggcttgcagacgagtgtgtgacgttcctctgtatgacatttgtgactacaacgtctccagggaccgatgccaggagctcgggtgctgcttc

SEQ ID NO: 116142 - DNA, 100 bp, Homo sapiens
gcctctgtcttcgcgtcaccacagaggcaagacaagggtccatatcgcggcatccggctcccgcccgtcttcaggcaactcatgcagcaattccagaacc

SEQ ID NO: 116143 - DNA, 98 bp, Homo sapiens
ttggcggcggcgctagcttcggagtctcccgcgcgcacctcagccgcctcctagcggcgcggcgctcgctcctacgatccggagttaggtgttggcac

SEQ ID NO: 116144 - DNA, 97 bp, Homo sapiens
agaaagtctcagcagacccttcctgagggccgagcaacagtgtagtggcgtattccacatagcaaacagagggagcactatgtctgcggaagtcccc

SEQ ID NO: 116145 - DNA, 100 bp, Homo sapiens
actatattcagtggctaaatggctccctgattcatgattacaacagcagtgaattgaaaacagcctgcaggaagcatgagctgtatgtgagtttccaaga

SEQ ID NO: 116146 - DNA, 83 bp, Homo sapiens
ctagcactgacacgtttacccacttgaaacagcttttcaggatgtccagcaaagaatcctgtgggaaaaaagagacatctcag

SEQ ID NO: 116147 - DNA, 96 bp, Homo sapiens
ggaactccttaggaaatgtctggaggagcaaaagtactttgactcaggagactacaacatggccaaagccaagatgaagaataagcagctgccaag

SEQ ID NO: 116148 - DNA, 75 bp, Homo sapiens
cgctcgggtggcgacttcctccccgcgccccctccccctcgccatgaaggttcgtgctggccgtgggcagcgccg

SEQ ID NO: 116149 - DNA, 100 bp, Homo sapiens
ccactagagtcatctctacagccgagaaatccgtctgcccctccgaatcaaaggggaaggcatgggacctaagattcacttcaactttgaattgctggat

SEQ ID NO: 116150 - DNA, 74 bp, Homo sapiens
ttttcctccaggcctttgagagcaaaacccatttatggcggttggctgctcctggctccagatgggaccgactt

SEQ ID NO: 116151 - DNA, 100 bp, Homo sapiens
atcgcccgccgagccacagccacgatgatcgcgggctcccttctcctgatttggaggccaatcactgccaccttttatttccctgtgggtccaggaactg

SEQ ID NO: 116152 - DNA, 82 bp, Homo sapiens
gagagatgctccctgcttgctgaaggaagaagaagaattttcagttcttgccagctgcctgggacttctgccaacgttttac

SEQ ID NO: 116153 - DNA, 97 bp, Homo sapiens
taaaacttgctgctgatgaagatgatgacgatgatgatgaagaggatgatgatgaagagtcaagagcaatctgaatccaaatgcaaaggagtttgtt

SEQ ID NO: 116154 - DNA, 133 bp, Homo sapiens
ataataatttacaatgaatggacacagtgatgaagaaagtgttagaaacagtagtggagaatcaaggcaaatacgccatgcgagacctagtccacaggcttccaggagggaacaacagcaacaacactgcaag

SEQ ID NO: 116155 - DNA, 102 bp, Homo sapiens
aggatctggtgtaccaggcgaagctggccgagcaggctgagcgatacgacgacctgcctagagctggaacgttacctccagagcgagccctgctatgtttca

SEQ ID NO: 116156 - DNA, 90 bp, Homo sapiens
ggccttcaccgcttcagtgcaacacgtggaggcggagctgtcagctcagatccgctacctcacccagaaagaaatttcagagcttccaag

SEQ ID NO: 116157 - DNA, 50 bp, Homo sapiens
tgactgataccactataatttagttgtctccaagcagccagccatcatgc

SEQ ID NO: 116158 - DNA, 75 bp, Homo sapiens
tgggaagacagggtgaatttatcacagaggaataacgagggagaggagaaaggtacagtgaaggtgaaattcgat

SEQ ID NO: 116159 - DNA, 75 bp, Homo sapiens
gtccagcatccgaccaccgaggctggagggggagaacacccaggtctcggcgcggaagatggccggcggcgtgga

SEQ ID NO: 116160 - DNA, 101 bp, Homo sapiens
aaaaatgaaacaatgctttctcctcgagaaaagattttctattacttcagcaacagtccttcaaaggatcccaatgaagatacagaatggaatgacatttt

SEQ ID NO: 116161 - DNA, 76 bp, Homo sapiens
cagtcctcgtcagcactgactttcagctatggaatcggtactccaaagattcaggtttactcacgtcatccagcag

SEQ ID NO: 116162 - DNA, 75 bp, Homo sapiens
tatccaggaaattgctgactctgtaaagggtgtgattactttagagtcccttggtaaaaggggttatcgagtacc

SEQ ID NO: 116163 - DNA, 100 bp, Homo sapiens
gaaatagccatgacccagggaaagccaaatcatttcggaatagagttttgccagttaaacaaggaggccagatgctccagtgcctgatggcgaaagtgag

SEQ ID NO: 116164 - DNA, 74 bp, Homo sapiens
tttggatgtggaggggaatagactccatctatccatatgagactgtagactccactccactttcagttcacaca

SEQ ID NO: 116165 - DNA, 50 bp, Homo sapiens
cggcccagctctctctgacacagatgaagcgccctcagttcagcaagccg

SEQ ID NO: 116166 - DNA, 75 bp, Homo sapiens
cccaaatgccccaaggatgaagaacggagacgttgagtggtgattttatgcaatggcttcaagccacagttcttc

SEQ ID NO: 116167 - DNA, 100 bp, Homo sapiens
cagctggaagaggagctgttccaggtaacatcatgtctcgggtaacagaggacacgtccaccctgagtgattctctgagtgagaatctgagcttatttct

SEQ ID NO: 116168 - DNA, 100 bp, Homo sapiens
caccgacatggaacagggactcactgggggatgaccagtgtcccagtgaaggaacgagtgaaggtgtctcagaactggagactggggcgctgccgagagg

SEQ ID NO: 116169 - DNA, 82 bp, Homo sapiens
ctgctcagccactacagattcagtcaggagttctcacgcagcttagaaatgttggacaaagttgagcctccaactatacctg

SEQ ID NO: 116170 - DNA, 50 bp, Homo sapiens
cggatggtgaactcattagaaaatcatttgctgtttcaaatagagaactg

SEQ ID NO: 116171 - DNA, 90 bp, Homo sapiens
tccaagacaaagacaggatgggcactgctggaaaaaatctgaattatccagaacagaaagttgtgactgttggacagttcaaaattggtc

SEQ ID NO: 116172 - DNA, 118 bp, Homo sapiens
ccacctccccccaaaccctgggagacccgccgaattccgggagccggaccgggaccaggaccgggccccactttccataatctatgccagcaattatgacaatgttagcagaccatgc

SEQ ID NO: 116173 - DNA, 90 bp, Homo sapiens
tctgtgtcactgtctcccggtgctcagcacagacaagttcaagacagatttttatgatcatttatataactctgcagccttcaaagctcg

SEQ ID NO: 116174 - DNA, 75 bp, Homo sapiens
ggacaaggttccccacatctacttggaaatctttgggatgctcaatgcgaagcagcagttttgggaatttcgatc

SEQ ID NO: 116175 - DNA, 100 bp, Homo sapiens
gaagaagtagagatgctggtggcagggcatgaggacagcaatggttgtatcaactatgaagccgccgccgcgccgccgtcgctctccaacgccagcgccg

SEQ ID NO: 116176 - DNA, 74 bp, Homo sapiens
gtgcgtgggggaccggctgttggcgggattcagcaccttggcacagctgaagcagaggaacacgctgaaggatg

SEQ ID NO: 116177 - DNA, 100 bp, Homo sapiens
agtagctgtcaataaatctatggtaaacagacaagagggtcaaggaggaggtcaagttggcctgaatggacctctccagctctggcttcctgctgagtcc

SEQ ID NO: 116178 - DNA, 75 bp, Homo sapiens
tcaagatccccctgaagaggtgccagttctaccgcacacgcaggtaccttcagaggattgtaaatcatcctacca

SEQ ID NO: 116179 - DNA, 83 bp, Homo sapiens
atcagatgttcattcatctggatcttcagatgcacatacaggggcaagtgtccgagtggtgaatcagctacttacagagatgg

SEQ ID NO: 116180 - DNA, 116 bp, Homo sapiens
gtttacatctggaaccttcagacgaaagagattgtacagaaactacaaggccacacagagacaagaggagcagcagcggcaccgcccctcaccctggagggtcctgtacaatctca

SEQ ID NO: 116181 - DNA, 98 bp, Homo sapiens
gaactgcggggtctctatcgcactgctaggggttctgctgctgggtgcggcgcgcctgccgcgcggggcagtaattcgccaaaatgacgaacacaaag

SEQ ID NO: 116182 - DNA, 100 bp, Homo sapiens
ctcatttaaaagctcacctgaggactcacactgctgtcggaaaaggtaacagaagatggaactcgaaatcccaatgaaaaacctacccagcaaagaagca

SEQ ID NO: 116183 - DNA, 90 bp, Homo sapiens
cagaggaatctatacaaagaagtgatgctggagaattacaggaatcttctctcattgggcatttgttgctatcggggactacaatggcca

SEQ ID NO: 116184 - DNA, 100 bp, Homo sapiens
acagaacaaagtcgttatcctcctcactctgtccagtatacatttcccaacacccgccaccagcaggtatcataactattgtggattcaaaatatggatt

SEQ ID NO: 116185 - DNA, 137 bp, Homo sapiens
cagatctcttgtgtggcggaaaatcttgtaggagaagatcaagattctgtcaacctcactgtgcattctcctaatttccgaatggaaccagtgacagccctgggtatcctctccctcattctcaacatcatgtgtgc

SEQ ID NO: 116186 - DNA, 75 bp, Homo sapiens
tccaggaaacgaagtgaagctaaaactctacgcgctatataagcaggccacgccgcaccaggacatcagccgccg

SEQ ID NO: 116187 - DNA, 75 bp, Homo sapiens
ggatatttctggctgtcgccaactccatggctttccaggacactttcttcatgagcaacaaaccccaaagataca

SEQ ID NO: 116188 - DNA, 100 bp, Homo sapiens
ggagcaggatctgcagaagacgcagggctcaagttatttggcaacatctggttatccatggccagcctggtcatctttatgcagctgcgttacctgtttc

SEQ ID NO: 116189 - DNA, 83 bp, Homo sapiens
gtggggactcgctctcggcttgaccgcattcttcctcccagcacatgattaagtaccggtacatcccgttcacacatgggaag

SEQ ID NO: 116190 - DNA, 100 bp, Homo sapiens
gttaaactggagaactactatgtccagcctatttgcacaccatccaggagtcagtttattactggaaagggggcattctcagtggtgagaagatgtatga

SEQ ID NO: 116191 - DNA, 101 bp, Homo sapiens
ggcggggcctgggggaccgagcagcgggaggctgtctttcccttccagcctggaagtgttgcagaggtgtatggaatgattcggttctcaggcaccacagg

SEQ ID NO: 116192 - DNA, 82 bp, Homo sapiens
aaccaattccggacacataacaagcagcagtgaggacaccaaaggaggtggacatctataccgtcaaggtggaagacctgac

SEQ ID NO: 116193 - DNA, 75 bp, Homo sapiens
gtggtctactctgatgtcaatcttgagggctaggtttcatgtccttagcaagctactgagtttcatggcacctat

SEQ ID NO: 116194 - DNA, 87 bp, Homo sapiens
ccaggaagtgaaaatgtgctgcctcgagagccgctgattttaggtgatgggcaagtcagaaagtcagatggatataactgatatcaa

SEQ ID NO: 116195 - DNA, 75 bp, Homo sapiens
actagtccactttatagagatgaacaattttacctgctcaagaatggaaacctcctcttccagcttatgattttc

SEQ ID NO: 116196 - DNA, 96 bp, Homo sapiens
ctgaggaccggcaacatggtgcggtcggggaataaggtgattcgcaaggggtggctcaccatcagcaacattggcatcatgaaaggcggctcgaag

SEQ ID NO: 116197 - DNA, 100 bp, Homo sapiens
tgccttttcattttacttcatcctccaaggagttcaatcacttggcgtgacttcactacttttaagcaaaagagaagacagagatgtcaatgaccccatg

SEQ ID NO: 116198 - DNA, 75 bp, Homo sapiens
cctgtgataagtcagccacacaagtcatcatctctgagaggagccttcaggggaagtagaggtggccgaggttgg

SEQ ID NO: 116199 - DNA, 88 bp, Homo sapiens
gcctcccgagtggctgggattacagacataattcaagacatttcctgagtgccttctgtgtgggccgaatgctgtagctgctgggata

SEQ ID NO: 116200 - DNA, 100 bp, Homo sapiens
taacccttccgaaaaaggaagtaaaaaaattaatttgtcatcagatcaaaataagtctgtttctgaaaggggatcttcaatattcatgttattttctcct

SEQ ID NO: 116201 - DNA, 80 bp, Homo sapiens
atgtgaaaaataccacgacaaaaccaccctagttggctggttccctgccaactacgtggaggaagattattctgaatact

SEQ ID NO: 116202 - DNA, 98 bp, Homo sapiens
tgacgttctcttctacccactgagaccagagttagtggaatccacatatctcctctaccagcatttaaatcaaacggtattgagatggattgggttat

SEQ ID NO: 116203 - DNA, 100 bp, Homo sapiens
cggcttccagatcaacctcaacccgctcaaggagccactcggcttcatcaaggtcctcgagtgggctgaccggttccctgatgtgttacctgcttctgct

SEQ ID NO: 116204 - DNA, 100 bp, Homo sapiens
ggccggcctgcggaacgaaagtgaacaggagccgctcttaggcgacacacctggaagcagttggttgaatctggcgatgtggaacccatggatatggagg

SEQ ID NO: 116205 - DNA, 96 bp, Homo sapiens
ggctttcattattacagcgttattttaaggatgacacagcattgttggttttgccatgtactattttacctatgacccgtggattggcaagttatt

SEQ ID NO: 116206 - DNA, 87 bp, Homo sapiens
ctggtggaacagcctcggccaccaaggtaggcgaaaaccaagagtacatcggcctcgttctcctatattggaagaaaaagacatccc

SEQ ID NO: 116207 - DNA, 96 bp, Homo sapiens
caggtagatacagcaccaacggccccatcacaggtatatggaggagtgacctactataaccccgcccagcagcaggtgcagccaaagccctcccca

SEQ ID NO: 116208 - DNA, 75 bp, Homo sapiens
aacaatcaaaaagaaagctgctgttatcatcatggctgtagagatggaacagattaaacgtgcaaaccgccttta

SEQ ID NO: 116209 - DNA, 100 bp, Homo sapiens
gtggaatatgccaaggaaaaactggagagcttcatcaaaaatagtgatagctttgataagtttaagaggctgactgatgcgcagaataactacctgctgt

SEQ ID NO: 116210 - DNA, 100 bp, Homo sapiens
ggcggtaaaaggccggcagaagggaggcacttgaggactcacggcagctgtgttctgatttcgtactactgctggggctgccacctcctcctccagacgc

SEQ ID NO: 116211 - DNA, 74 bp, Homo sapiens
tgtactggctgctgctgccctgcgcgctgctggctggattgaagacaatgatggtgaattcttgttaatagaag

SEQ ID NO: 116212 - DNA, 100 bp, Homo sapiens
ggagcaagtgtatcccatcattgccgagcgtgtccggagcggtgactggaaggggtacacaggcaagaccatcacggacgtcatcaacattggcattggc

SEQ ID NO: 116213 - DNA, 75 bp, Homo sapiens
gctgacggtggaggttcgcggctctaacggggctttctacaaggtaaactaacattatggatttttccaagctac

SEQ ID NO: 116214 - DNA, 100 bp, Homo sapiens
cccgaatggatctggtaggagtggcatcgcctgagcccgggacggcagcggcctggggacccagcaaggtcaaactgtgctgaaaatatccgcaaacaca

SEQ ID NO: 116215 - DNA, 100 bp, Homo sapiens
gccgcgcggcttcctccagacctctcggcgcggcgttttaagggtactgaaagtataagtaaagtgtctgagcaagtaaaaaatgtgaagcttaatgaag

SEQ ID NO: 116216 - DNA, 101 bp, Homo sapiens
cagaaactttcattagtctggaagagtgtcgtggccataagagagatgtcaagccctccaacatcctagtcaactcccgtggggagatcaagctctgtgac

SEQ ID NO: 116217 - DNA, 122 bp, Homo sapiens
tgacagcaatcagctggcctggtttgatactgacctgtaaatcatcctttagagagacaagagagacacctccaacttcgacaaagagttcaccagacagcctgtggaactgacccccactg

SEQ ID NO: 116218 - DNA, 99 bp, Homo sapiens
aggacctggtgctcttgctccagaaagactcactgctcacagctgcccagctgaaagccaagtacctggttgactgtgatgaagtgatcttcatgaaag

SEQ ID NO: 116219 - DNA, 51 bp, Homo sapiens
gaagacgcggtgggccgcccctccggactttgcctcccgggccaaactggc

SEQ ID NO: 116220 - DNA, 82 bp, Homo sapiens
tgcggacgcggaggccgcctggggtagcggcggcgggagtcctggcgctctgcagcacatacccccggcctcatgagtacct

SEQ ID NO: 116221 - DNA, 98 bp, Homo sapiens
gatgacctgctccatcaccaccacctgtcaccactgactaaagaagagaaaactgcggcagagcaattcaaatttcacatgccagatttatgaagaaa

SEQ ID NO: 116222 - DNA, 75 bp, Homo sapiens
agccccacacaaagttggacctgggcttgagcttacagacagcagacaacaaaggaggctttgaaaatgttttag

SEQ ID NO: 116223 - DNA, 75 bp, Homo sapiens
agagcgtcatgaacccgagctatagagaaaggagatgagctgacatgggctcattgctccttctccaagccctct

SEQ ID NO: 116224 - DNA, 75 bp, Homo sapiens
ctgccctcaaggtcgtgcgtctgaagcctacaagaaaggtcctacgtgtggaggacgtaccatctgacctctgca

SEQ ID NO: 116225 - DNA, 88 bp, Homo sapiens
ccctttagaaggcattcctggatatggtagtatagatcaatcagtgttaaaagaattaccccctgaactcctggcagaaattgagtcc

SEQ ID NO: 116226 - DNA, 75 bp, Homo sapiens
ctgatcgggaagcctcatctagcccagaggatcggaatgacagatgttttgacctgtagcagagaaccaattctg

SEQ ID NO: 116227 - DNA, 76 bp, Homo sapiens
cgtggacaaagctgttgtctcagggagcacagaaaatctacctgttactcgtattttggacaatcttatggagatg

SEQ ID NO: 116228 - DNA, 50 bp, Homo sapiens
gatttttatcacagactggtgctcaccatctgctacctggatatgctgat

SEQ ID NO: 116229 - DNA, 100 bp, Homo sapiens
tgctgcttttgatgtctgacaacgtggatcgttgttttgaaacgtacaaatcaagacctaccagctcctacattccatctttcagtatccaaatccagct

SEQ ID NO: 116230 - DNA, 75 bp, Homo sapiens
agcggccaccgactactgtcagcagctgtgccagtgagggccccaaggctgttgcagctcctcgacctgatcggt

SEQ ID NO: 116231 - DNA, 90 bp, Homo sapiens
cgtgcagggccggacgctctatgacgtcatcttgtacggggtctccgtctctccaccgggggcttcatccttccagggaggagaagaggg

SEQ ID NO: 116232 - DNA, 100 bp, Homo sapiens
agtgcgcaaacttgacactcaccctgaccggtctggccgtgggcctgggcttcggggcactggcagaggtcgccaagaagagcctgcgctccgaggaccc

SEQ ID NO: 116233 - DNA, 100 bp, Homo sapiens
ccgtcattaccagcatgtgttggctgttgacccagaaaaggcggcccagatgaaatcccaggtgatgaagtattagaatggaatggaagactactgcaag

SEQ ID NO: 116234 - DNA, 96 bp, Homo sapiens
ctctactccaggccccgtccgcccgggggcgccgcccaccgcgcctcgctcggccgcctgggttccacttccagcaacagctcctgcagcagtacc

SEQ ID NO: 116235 - DNA, 75 bp, Homo sapiens
ctgctgaccggcgtgtggaacactggtggtttgcagatcactgagcatggcctgtatgagaagaaaaagacctca

SEQ ID NO: 116236 - DNA, 100 bp, Homo sapiens
aagtccattttgaaaacaccaagatacctgtggaaaacatccttggagaggtcggagatgggtttaaggtgctagtgcttggaaacaagagagatcttcc

SEQ ID NO: 116237 - DNA, 100 bp, Homo sapiens
agcggcgggacctcggcggactcgccatggaggaggagatctattaatgagatgaagcggttggaagaaatgtcaaatatgtttcagagctctggagtcc

SEQ ID NO: 116238 - DNA, 82 bp, Homo sapiens
ctcagttggaagcagccgatccagcctgcggagcctgtggggcaggctttcagtccagtgtaaagctgttggagcgcgggag

SEQ ID NO: 116239 - DNA, 90 bp, Homo sapiens
ctgaaatccttcctggaacttgaataactgaagtgaagtgatggactccgatttggagagtagtaagacgtgaaaggaatacacttgtgt

SEQ ID NO: 116240 - DNA, 100 bp, Homo sapiens
caagatggaagcaggtttaaaattttacataagaagttacctttttcaggataaaagaatcagagtgtctcaacccttgacaagaggaccaagtgccttt

SEQ ID NO: 116241 - DNA, 101 bp, Homo sapiens
ggtcctgcgaaggagccgcagccgccgcgggaggccacaggtgaagcgaagggtgtgtcttacttcagcagccctgctggagtgcagtggcgtgatctcgg

SEQ ID NO: 116242 - DNA, 50 bp, Homo sapiens
ttttactactgtgacaacattaacgtttcagagactcctccactctctgg

SEQ ID NO: 116243 - DNA, 50 bp, Homo sapiens
gcatctttacccagcaatccagaacccttaggagaaatcttgagagtgga

SEQ ID NO: 116244 - DNA, 100 bp, Homo sapiens
agacaccaagcagcaataccttggatgattacatgagctggggctcccacaggatcagaggctggggccaactggaaccattggcagctgcacgctcatt

SEQ ID NO: 116245 - DNA, 98 bp, Homo sapiens
ccaagtccgctcatcaccctggagactcagaggaagaagcccctccagatggtgctgttgccgaatacagaagagaaaagcaaaagtatgaagctttg

SEQ ID NO: 116246 - DNA, 74 bp, Homo sapiens
agattcagaaggagcaggattaccaaaggcttctcaataggtttggcatggacaagatctatgaaggccaagtg

SEQ ID NO: 116247 - DNA, 98 bp, Homo sapiens
cttcatctttcaagataacccgtggaattgaagcagttggtggcaaattaagctgtacaggaagaggcacatacaaagaaaagaatccccgaaagggc

SEQ ID NO: 116248 - DNA, 100 bp, Homo sapiens
ctgaagttcacgactactagaaggggaggggagtggaaaggctctcagtgaaaaagagtacaggggctcaggtccaggtggcaggggatatgctacccaa

SEQ ID NO: 116249 - DNA, 50 bp, Homo sapiens
gaagggcggaaaccacatccccgaaagaattcaattcgtcataatctgtc

SEQ ID NO: 116250 - DNA, 98 bp, Homo sapiens
tggttttggcccctttgctgcaaagtggatctggaaatagtatattcctatttacatggtatggaagccttatcaaacttgagggagcatcaacttag

SEQ ID NO: 116251 - DNA, 50 bp, Homo sapiens
aggcttcaggagactcctcaggactgcagttgttgaagacatcaacaaac

SEQ ID NO: 116252 - DNA, 97 bp, Homo sapiens
tttttacctcctgggggcagggcagacgccgtgtgtctgtttcacggtggaagttaaacgagctgagcctcgggacagcaagagccaagcgccggga

SEQ ID NO: 116253 - DNA, 75 bp, Homo sapiens
ccggccgctagcgtcagcgccagccagtactatactggcaattgctggagaagattttgcaattgttgcttctga

SEQ ID NO: 116254 - DNA, 99 bp, Homo sapiens
gggaattttgcaaaagtaaaattggcaagacatatccttacaggcagagaggttttgtagtgcatccctgagcatgagcacagaatgaagcggcgtttg

SEQ ID NO: 116255 - DNA, 82 bp, Homo sapiens
accggctggacctgttcgagatcagccagccgaccgagagcaattctgcaagagagcttcagcaaaattccaaaacaatcgc

SEQ ID NO: 116256 - DNA, 127 bp, Homo sapiens
ggagaatggagaccaaacctgtgataacctgtctcaaaaccctcctcatcatctactccttcgtcttctggactgctctggcccatttagagtctcttgcagtggatgttgaggtggccaatccacc

SEQ ID NO: 116257 - DNA, 75 bp, Homo sapiens
ctggaaccgggatggcgacgtctacactgagtcggaggcgaagaagatggctgtgccacccacgtatgccgatct

SEQ ID NO: 116258 - DNA, 98 bp, Homo sapiens
gagccacgaaccacggcactgattttcagttctgggaaaatggtgtgcacaggagccaagaggaccctgctgggatctttgagcttgtggaggtggtc

SEQ ID NO: 116259 - DNA, 100 bp, Homo sapiens
ctgtagagtctagccctggggtgaggatgccacggctacccggctgtggaaaaccatgaattccttgtaaaaccttcatttgatcctaatctcagtgaat

SEQ ID NO: 116260 - DNA, 100 bp, Homo sapiens
gccccactactacggctctgaagtcaccaccaaaatgctgtgtgctgctgacccacagtggaaaacagattcctgccagtctattatcctcccagtccac

SEQ ID NO: 116261 - DNA, 50 bp, Homo sapiens
cctgaggcctccccagccatgcagaactgattacaaggcagaggaagacc

SEQ ID NO: 116262 - DNA, 82 bp, Homo sapiens
aacgaggcaaggagctaaagcagcgtgcgttcagccctgggggtctctcattcatcacttttatctgctatgtggcgtcctc

SEQ ID NO: 116263 - DNA, 100 bp, Homo sapiens
caacaaggcgctgctgaccacctacggattgaaaaggaagatcaggccaaccccaaagaagaagtgaccaaggaggagtttaaactgaatgaacaacctc

SEQ ID NO: 116264 - DNA, 75 bp, Homo sapiens
tgtggagaagcaggataatgaaacatttggatttgaaattcaggtgtgcaagcatttcctggaagctattgaaaa

SEQ ID NO: 116265 - DNA, 75 bp, Homo sapiens
cagcagtcagaaggggaacggatctgtgtgcccacagctcctggagccccacagttgttgaagacatcaacaaac

SEQ ID NO: 116266 - DNA, 50 bp, Homo sapiens
tgttaatataatggtctatcagcgagtaaccagctcataaatcacatcga

SEQ ID NO: 116267 - DNA, 74 bp, Homo sapiens
ggtaccttctacatgtgcaaagcagggggtgcactatagccatctggagctgagccctggggagccagtgcagg

SEQ ID NO: 116268 - DNA, 88 bp, Homo sapiens
ggccccgcccccgccggttcgcgtctctctgctgcggcgcggggaccgctgtgctctcggtttcagtgttgactggtgggctcttgga

SEQ ID NO: 116269 - DNA, 98 bp, Homo sapiens
cagaaggtctctggagacatcttcagcagaacccggcagtgggcaggtgtttgtgacttcagagaaccaacttgtgtattaccccagcatcacctatg

SEQ ID NO: 116270 - DNA, 75 bp, Homo sapiens
tagcccaacctgttcttgcaaacaagcagatatttgtgtgattgcattcacaggaactacttttattggctatgt

SEQ ID NO: 116271 - DNA, 82 bp, Homo sapiens
gtcgccgccacctcctctgatctacgaaagtcatgttacccaacaccggagcatgaataatctttcatttagtgagctatgt

SEQ ID NO: 116272 - DNA, 96 bp, Homo sapiens
ctcagaaagggaatcttcagtcgcacgtgcagcgagtccactcagaggatgaagatgagctggattcccacaccatggtgaagactagtgtggaga

SEQ ID NO: 116273 - DNA, 82 bp, Homo sapiens
atcgctacggaccttaaaatacccgcaacagccccttcgtcccaaattctgaggttgggaccaagaaggaactatctatttt

SEQ ID NO: 116274 - DNA, 96 bp, Homo sapiens
tacaaactgggtggacattacccaagattttgaagaagcttgtcgaggattgatttccagagacttatgttacttgaggaagacaccaagaaggca

SEQ ID NO: 116275 - DNA, 82 bp, Homo sapiens
aacgaggcaaggagctaaagcagcgtgcgttcagccctgggggttcagccgactcctacaccagccgcccatctctggactc

SEQ ID NO: 116276 - DNA, 101 bp, Homo sapiens
agaatgttctactgctatacatgttatgttccagttgaaaatgtacctattgaacagattccacttgtgaagaatgtggtggtaaaatgcacttgagggaa

SEQ ID NO: 116277 - DNA, 75 bp, Homo sapiens
gccaagcagaaagttgaacagaacgcggctcccagccacaccaagttcaggatcagtgaatgcttgtgaaaagac

SEQ ID NO: 116278 - DNA, 75 bp, Homo sapiens
gccgcgaggtctgcggcctcgatgatgctggagggtcttgaaatctttacagtaaaacctgcaacttgaaaacta

SEQ ID NO: 116279 - DNA, 90 bp, Homo sapiens
ggcccccgaccccaagctctgccacgaaggtgccaccggggaagtcatctacaataagaccgaccgagccggctgccatttctacgcagt

SEQ ID NO: 116280 - DNA, 100 bp, Homo sapiens
ccggaccgggccgcgcacgccgcctcagaggagctctacggtgactttgaagacttggaaacaggggacgtgcacaagggaaaatcaggccccaatactc

SEQ ID NO: 116281 - DNA, 87 bp, Homo sapiens
gttcttttggggtagtgtctgggatccagtacgagttgaatcattgttcaaataagattcaaaaacatgccacaggaaagaagtctc

SEQ ID NO: 116282 - DNA, 75 bp, Homo sapiens
actgcttgcaggtcccttggccatcacgctgggaagattcatgatgttgctatcaaaagttgagaaattgtcaga

SEQ ID NO: 116283 - DNA, 101 bp, Homo sapiens
caatctctgcttgaaaggagaagacttggattctcaggaacagatggagtcggataactgttcaggaggagatgatgactggacccatctgtcttcaaaag

SEQ ID NO: 116284 - DNA, 83 bp, Homo sapiens
ttatctttatacatcttttctttcctggaccctcggagcctttgtcgttgtgcacagaatggatttctgcctgatcctccaag

SEQ ID NO: 116285 - DNA, 50 bp, Homo sapiens
cggaggtggcagccatctccttctcggttctttgcagatgtagttccagc

SEQ ID NO: 116286 - DNA, 97 bp, Homo sapiens
agacgcaggaacttcggggggccctggctcttctcctcctttgctttttcacatctgccagtcaggatctgcagggccatccacggcttccgagaga

SEQ ID NO: 116287 - DNA, 83 bp, Homo sapiens
ctcctgctgggcctcaaggaccgcgagggtttccaggcctgaggtgcccgccctggccccaggagaatgaaccagccgcagag

SEQ ID NO: 116288 - DNA, 51 bp, Homo sapiens
gcaccccttctgttcttcgtagccggggagccaaagaagcctaaagcccca

SEQ ID NO: 116289 - DNA, 88 bp, Homo sapiens
caagtcgaccttgcagataagctgctacagcctccagggtcgtatagacctccccctcctatgggcaaaccaccaggttcaattgtaa

SEQ ID NO: 116290 - DNA, 83 bp, Homo sapiens
cggaggccgcgtggacccgaaagccgctgggaaaacattttgaaagcgaagcagaagccgtagaatcagcggcgagcctgttg

SEQ ID NO: 116291 - DNA, 101 bp, Homo sapiens
tcctctgacttggtactattctctctcccaggtagtagatgatgactccccagagatgtataagacaatctctcaagaatttcttacaccgggaaaactgg

SEQ ID NO: 116292 - DNA, 100 bp, Homo sapiens
accaaataagctatatactttggttacctatgtacctgttaccactttcaaaagaagatgttaccgagtacttcagtgaattccttagtgcaggggaacg

SEQ ID NO: 116293 - DNA, 143 bp, Homo sapiens
agcaactggcagaaggattgctttctcattatttgccagatctgcagagatcaaaacaagccctccaggaactcacattttacatcctgaagtccaaactctagatctacggagctgcgatatatcagatgctgctctcctgc

SEQ ID NO: 116294 - DNA, 74 bp, Homo sapiens
cagatcccctagcatctaaacttaacaagtataataagcctagtgaaacggtcatccctgaatctgtagatggc

SEQ ID NO: 116295 - DNA, 75 bp, Homo sapiens
tggtcaggtctggagctcgaccgggccagtttttggctttcacccccaaccagtgaccaaagacttgaccactca

SEQ ID NO: 116296 - DNA, 51 bp, Homo sapiens
attcgcagtggtcgcttcttctccttggaatctgagaaaaaggggttgatt

SEQ ID NO: 116297 - DNA, 75 bp, Homo sapiens
tcagtgcccttgtggcgaatggggctcacgtcgagtgcaagcggtcttctctgtcttctttatggccagtaaaat

SEQ ID NO: 116298 - DNA, 51 bp, Homo sapiens
ccggaccctgcccctggcggagtttcctccttatgcaactaatgaaattgg

SEQ ID NO: 116299 - DNA, 82 bp, Homo sapiens
aactgtgggaactctttccagcttgtgtctgatccagacacggggactgcagagaaaggctgtgtgcatccgctgtctactc

SEQ ID NO: 116300 - DNA, 74 bp, Homo sapiens
attaaccagctggaagccctgttgctgcccgcggcgccatggctcacgtcggctcccgcaagcgctcgaggagt

SEQ ID NO: 116301 - DNA, 51 bp, Homo sapiens
tggaagtgcacttaaccccagaagagctccagccacctaccaccacagttg

SEQ ID NO: 116302 - DNA, 58 bp, Homo sapiens
gtgcagaggcatcacctgaaagttgcaagatggtcgtctctccttcttcctgaataag

SEQ ID NO: 116303 - DNA, 100 bp, Homo sapiens
atatctaatattacagctggaaatagggcacagatccaggcagtagaagaactgtttaacctgatgcagctgtttatagctcagaggccagatatgagag

SEQ ID NO: 116304 - DNA, 100 bp, Homo sapiens
cggaggacttggggaaaaaggaccacatagtccatcgaagaagagtccttggaacaagcaactggctattgaaaagcatctcataatctatcctggggaa

SEQ ID NO: 116305 - DNA, 82 bp, Homo sapiens
ttcaggaaccaccagtgacagagactggtcctgctcgctcctcgtggcctccctcgcgggcgccttcggctcctccttcctc

SEQ ID NO: 116306 - DNA, 83 bp, Homo sapiens
aggagccagccttcaatgtgtcctacaccaggcagcccccaaatcccggcccagcagccattgtttgatgtcctgtgactgag

SEQ ID NO: 116307 - DNA, 97 bp, Homo sapiens
tgcccctgatcttccacctgggacgggacccaggggagaggttccccctcagggactgtttcaaggccttctacgtccacaagttcagagccatgct

SEQ ID NO: 116308 - DNA, 82 bp, Homo sapiens
gcccggcccggagcccccagcgcagcggccgcggaatatatatgtcccagatgtgaatcaggctttattgaagaagtgacag

SEQ ID NO: 116309 - DNA, 74 bp, Homo sapiens
ctacagccaattttgctaactttgcacatttcaacagtcatgcaggcaccatacaggaagattacttgagagag

SEQ ID NO: 116310 - DNA, 75 bp, Homo sapiens
ctgcagaaggtctctggagacatcttcagcagttcttccctgtggaacagtagagacctagtctgccttctttca

SEQ ID NO: 116311 - DNA, 80 bp, Homo sapiens
gatgaacccaacctagtgggtgtaatacatcatgaactgcagggggcatggtctagtggcccagtcaggacgcggaaaca

SEQ ID NO: 116312 - DNA, 51 bp, Homo sapiens
ttccgccctaatggaggtctccagtttcgggtgaatctgtaaaatatttcc

SEQ ID NO: 116313 - DNA, 90 bp, Homo sapiens
catagttcaaattcacattcttctaatccaagcaataacccaagcaaaacttcagatgcagtcgaacaagtaaaattacttgaccgattc

SEQ ID NO: 116314 - DNA, 75 bp, Homo sapiens
cgttgacaaggcactgctttttcatgacgagatgtggtatggtgtattcctgtgggcactggtgtcttctctctt

SEQ ID NO: 116315 - DNA, 83 bp, Homo sapiens
ggaaacattcaagaacctggcatctatagctggagaagcgactggaggagtggttggggaggacattgcctggcagtgactgg

SEQ ID NO: 116316 - DNA, 99 bp, Homo sapiens
cacactctgcaccgctaggccgtccccgaccttgcctgaacaagcgcttctctgaagtagctttggaaagtagagaagaaaatccagtttgcttcttgg

SEQ ID NO: 116317 - DNA, 82 bp, Homo sapiens
cccgtcccgaccctggccgccccgagcggagcctggagaacctaaaggcagacccagaagagctttttacaaaactagagaa

SEQ ID NO: 116318 - DNA, 97 bp, Homo sapiens
cacatgacagcaggagcgatggccgggatcctggagcactcggtcatgtacccggtggactcggtgaaggaacaagttccagttccagtctaccacc

SEQ ID NO: 116319 - DNA, 89 bp, Homo sapiens
ccgccgccgccgccttgctgctgctcaaagctgctgccgccccttgggctaaaagcggaagaagtccctatagaaccatacaacatccc

SEQ ID NO: 116320 - DNA, 75 bp, Homo sapiens
cggcccccgagcacgccggccccgcgcgcgcctcgaggccgagtcaagaagagccgaatgcacataaggtcgcca

SEQ ID NO: 116321 - DNA, 98 bp, Homo sapiens
tttctgccgagcctcggtcccggcccccatcctccccgccccatcggttgttgtctgggcggtactatactggcaattgctggagaagattttgcaat

SEQ ID NO: 116322 - DNA, 100 bp, Homo sapiens
gccgactgctgcctggtctgcaaagaagtcctttcaagtctctaggactggactcttcctaagcaagtccggccttcctgatgcgcttgcctgctccctg

SEQ ID NO: 116323 - DNA, 73 bp, Homo sapiens
actgctcgggaagctccatccgaatgtgtctgccccccagttggagtcattcgttgcccagtttgcagccaag

SEQ ID NO: 116324 - DNA, 82 bp, Homo sapiens
ggagctgtggataacgggaggtgaatttccatgtcaacatagtcctggggcaacaccctccactaaagagtcaagccagccg

SEQ ID NO: 116325 - DNA, 100 bp, Homo sapiens
ctcagtttgtgcaggacaccgacatggaacagggactcactggggtgggggcccctgaagccactgatggaagccacactaccggggcatcggaccatga

SEQ ID NO: 116326 - DNA, 75 bp, Homo sapiens
cgctgcctcttcggccatggaagctgccggcagccctgcggctacggagacaggctggagtgcaatggcctgatc

SEQ ID NO: 116327 - DNA, 51 bp, Homo sapiens
ctctggggaaaatggctgcgtcttcgagtgacggcagaatgcctccaaagg

SEQ ID NO: 116328 - DNA, 100 bp, Homo sapiens
tccgggcccgcccccggcctatgcccccactaacggggacttcacctttgtctcctcagcagacgcggaaggacaggcgacactaacaggtgaagatctc

SEQ ID NO: 116329 - DNA, 82 bp, Homo sapiens
tgaaaaatgaccctgaactggaccagcaggtggctattatcatggaaaactaatttttcccagagaatttcctttcaaacct

SEQ ID NO: 116330 - DNA, 75 bp, Homo sapiens
caggcagctcacggaggagatccagcggcatctggatgagtaactggctcaggattcccctttgattttggacgt

SEQ ID NO: 116331 - DNA, 75 bp, Homo sapiens
cccagaagcagaacttgaaggttaaaccactagcccatttcacaggctgtagagatcttaaaagtgttggaaaaa

SEQ ID NO: 116332 - DNA, 80 bp, Homo sapiens
acgagaagcctgaaaagtcgcagcgagctggagccgccggagcttactgaaacaaatgcaggtatcaagtgcttggactc

SEQ ID NO: 116333 - DNA, 92 bp, Homo sapiens
gaaggcgtcggccggaggacaccccatcgtgcaggatgataatgaagataattcaaatgatgggacccagccatccaaaaggaggcgaatgg

SEQ ID NO: 116334 - DNA, 83 bp, Homo sapiens
ccggaaggacaccaagatgcggatccgggcctttccggtttccaatacttatctacaggaatcgccatgaccccagctctgag

SEQ ID NO: 116335 - DNA, 98 bp, Homo sapiens
ggaacccatggctttagccggctgcccagattcctttttgcaccatccgtactaccaggtctcagtggcccttagcagcagctccattcgtgtggcca

SEQ ID NO: 116336 - DNA, 82 bp, Homo sapiens
gtaaagtcgagtatctggtgaagtggaaaggatggcccccaaaagcactacaaacaccactggtttcccgaaaagccgtcca

SEQ ID NO: 116337 - DNA, 108 bp, Homo sapiens
gaagaaagctatctagggacgagatctagaatcaactgagagagatgcttaaaaatcaccagttactttaatgatcgagcaaaagatgtgataataccagcaaagcca

SEQ ID NO: 116338 - DNA, 87 bp, Homo sapiens
ggccttggagcgaggctatcacaagctgcaccagcttctaaccgagagcggagagtttaataggcaagaaggaagggagaagacaga

SEQ ID NO: 116339 - DNA, 74 bp, Homo sapiens
tgcctttgaaaatcaacgacaacttgagcacaggaaggcagcaacaactcatctccagtggattttgtaaataa

SEQ ID NO: 116340 - DNA, 75 bp, Homo sapiens
tgtgggatgtgaaaactctgttactgaagaaactgcatgttttcctgttccaagaagtgcttgtgatcactcgag

SEQ ID NO: 116341 - DNA, 98 bp, Homo sapiens
tgtccctgtctcccagagcctgagccaccaaagcacaaggcagaaaggagtgggaaaacaaagtgcatgatgaagtcttcagactgtgtcataaagca

SEQ ID NO: 116342 - DNA, 51 bp, Homo sapiens
caaagcctgaacaggcagggccagacccagttttccaagagataacttcac

SEQ ID NO: 116343 - DNA, 100 bp, Homo sapiens
tatggactacgcctggggggccaacggcctggatgccatcatcacacagggtgagttctgcagtcagggtgtccgtgagggcctcatcgtgggcttcgtc

SEQ ID NO: 116344 - DNA, 101 bp, Homo sapiens
cggcggcgtgatgttctcggcaggagcggagagtttgctccaccaggccaggactggctttaattttgggataatcacaccaacaccgtcttctaatttca

SEQ ID NO: 116345 - DNA, 98 bp, Homo sapiens
cgaacggtaaccaagcccaacccaagcttcatgagacaactggaagagtatcaggggatcttgctggcaagtgttgaactaaactgcaaaatgaaatt

SEQ ID NO: 116346 - DNA, 95 bp, Homo sapiens
ctttttactgcatcctgcaacaaatatcactgaaatgattcatttctggaagcattctactaggaagaacttgtcgcttttcctaagcattagtt

SEQ ID NO: 116347 - DNA, 100 bp, Homo sapiens
ctgctctgcggggccgtggcgctcggctgcgcgctgctcctcgccctcaagttcacctgcagtgctatacgtattggtcacgttggaatgcaaattgagc

SEQ ID NO: 116348 - DNA, 75 bp, Homo sapiens
aagaaccggaagaaactgtccgagaagcccaaaatcctgggaagactctgcctgaagcccttgattattgcactg

SEQ ID NO: 116349 - DNA, 100 bp, Homo sapiens
ggaacagaaggaggtccattcctgttggtgacaacaccgtggccctgttctgggatgagcaaggtgtaaagttttcggctttgtgagaaaccttaccatc

SEQ ID NO: 116350 - DNA, 99 bp, Homo sapiens
caagcggccgtctcccctcgcacaccagagacaaagcatggaggacacaagaatgggaggaaaggcggactctcaggaacttcattcttcacgtggttt

SEQ ID NO: 116351 - DNA, 75 bp, Homo sapiens
ccgccagtcaataggaagtacgagtggaacagagttcagaggcagcagaaactggagttagtgaaaatgaagaga

SEQ ID NO: 116352 - DNA, 75 bp, Homo sapiens
ctagaagaaaacagagagatgagcagcttctgagtggttgtgtcaaaccgattggtgacatctccatgctgtatt

SEQ ID NO: 116353 - DNA, 100 bp, Homo sapiens
ggatctcttcagggtggaatacgtcattgaaatcatgaccaccccaggaaaagagaactttcgcctgaaaagttacaagaacaaatctctgaatcccgat

SEQ ID NO: 116354 - DNA, 100 bp, Homo sapiens
tttgattaactcattcaaggttacccagttgttaaacacagtgggaatatcacttttgatgagattgtcaacattgctcgacagatgcggcaccgatcct

SEQ ID NO: 116355 - DNA, 82 bp, Homo sapiens
gtttggaaagacccaggagaagccgcccaaagaactgaacaccttccaccatgaccacctcagcaagttcccacttaaataa

SEQ ID NO: 116356 - DNA, 75 bp, Homo sapiens
aaggctgaggtggcagcggcaggagagtccggccgcgacaggacgggcgtctctggccgagcctctttttgtgga

SEQ ID NO: 116357 - DNA, 101 bp, Homo sapiens
gccgagcaggctgagcgatacgacggctgggtccgatacgccgagcgggtgctgggtcgccccatcactgcccacctctgcaccgccaagtccccccagca

SEQ ID NO: 116358 - DNA, 100 bp, Homo sapiens
tcctaccaccaactcgtccaactgacaagcccttgcgcctgcctctccaggatgtctacaaaattggtggtcgaggcttgaagagtggagagaactttaa

SEQ ID NO: 116359 - DNA, 90 bp, Homo sapiens
gcacctctacctgtggctctttctgctgggcctgcccttcaccctctacatgagttatggtgaatggttgcatggatttgaaaaaaaggc

SEQ ID NO: 116360 - DNA, 50 bp, Homo sapiens
gggaatcttccacattcatgaaggtgctgctagctgaggaggggatagct

SEQ ID NO: 116361 - DNA, 50 bp, Homo sapiens
tatctggcaagccgggtgacaaggtctacaactcgaacaaagacagccag

SEQ ID NO: 116362 - DNA, 74 bp, Homo sapiens
ccagaatgtcagcatggaggctgctgggcaggtcatgagtcaccatggcgactgagtcaaagaccaacaccaga

SEQ ID NO: 116363 - DNA, 96 bp, Homo sapiens
caagctcggggccgagcgggaggcagccgtggccgaggcgaagctggtccgttacatttgtaagcagaggcagtgcaagctgagcgtggctcccgg

SEQ ID NO: 116364 - DNA, 83 bp, Homo sapiens
gctgagtggttgtgtggtcgcgtctcggaaaccggtagcgcttgcagcatgatgcgtctgttactagagtggagagtctacct

SEQ ID NO: 116365 - DNA, 53 bp, Homo sapiens
ggagcgtgggcgtttcgcagactcctaagggctgtaatccccttgcacaaacc

SEQ ID NO: 116366 - DNA, 82 bp, Homo sapiens
tgcacattaggttgcagtatgtggccagttatttgcctcagtaaaagagttgatgataattagaagcatgctttccactgaa

SEQ ID NO: 116367 - DNA, 98 bp, Homo sapiens
tacctgcaaaagcttgggcttggagaagtaaacggagttccctctcgaagtccaagattagttgcttctggggatgactctgtggatagtctgctgca

SEQ ID NO: 116368 - DNA, 96 bp, Homo sapiens
aggatcaagaagccggactacaaggtcgcctacgtgcagctggtctcggcgcggaagatggccggcggcgtggacggccccatcgggatcccgttc

SEQ ID NO: 116369 - DNA, 120 bp, Homo sapiens
gcgagagatggagatgggcagacggattcatttagagctgcggaacaggacgccctctgatgagcgcagctcagctgggctggaactgccctcctggaactcccccagcctacaacctag

SEQ ID NO: 116370 - DNA, 100 bp, Homo sapiens
gttcagatgtttggaacatttacttatcactgtgttgtaaatgacacaaagccagggtgtgatcccctgggcccgtttgttgtcgggggagaagacttag

SEQ ID NO: 116371 - DNA, 88 bp, Homo sapiens
agaataactgtcaagacaacagtgatgaggaaagctgtgaaagttctcaaggcacctgaatggacagaagaggacctcagccaactga

SEQ ID NO: 116372 - DNA, 98 bp, Homo sapiens
gaatggcaagcgcagcaacaacagagagcacgtggaaggtgctcgggtcttcggggcactgggtcccatcggtccctcctcacctgggctcaccctcg

SEQ ID NO: 116373 - DNA, 75 bp, Homo sapiens
gcatgcagagatactggatatgactggtttgagcaactgcttcaaaactttgacatcaacaacaagatcgagttc

SEQ ID NO: 116374 - DNA, 100 bp, Homo sapiens
ctggagaagttgtttgaactcagtgaagcatatccaatcaacatgcataatgatctggaactgctgacacaatactcaacactcgtgaaactgctcaggc

SEQ ID NO: 116375 - DNA, 83 bp, Homo sapiens
gtaaatgcaaaggacatggccggccggaagtcttctcccctgcacttcgctgcaggtcaaaatgcagatcttcgtgaaaaccc

SEQ ID NO: 116376 - DNA, 100 bp, Homo sapiens
cttcactccagtgcctccgacgcctcctgatgattgacgagatgcctgaggctgccgtgaaatcaacagccaacaaataccaagtcttttttttcgggac

SEQ ID NO: 116377 - DNA, 75 bp, Homo sapiens
cgggcccgggccatggccgccgccgatgccgagctttgagagagaaaagaaccacagtggttgcacaactgaaac

SEQ ID NO: 116378 - DNA, 75 bp, Homo sapiens
ggggctccggctggtctgtggtgagattctttcagtgacctgtatagttcctatgtaatcttttacttcctgctg

SEQ ID NO: 116379 - DNA, 100 bp, Homo sapiens
gaccttgtcatcgaggccctgcgggtggaaaaccatgaattccttgtaaaaccttcatttgatcctaatctcagtgaattaagagaaataatgaatgact

SEQ ID NO: 116380 - DNA, 75 bp, Homo sapiens
ctagaaatgactggaaagtttcaagaggcataagatacagtgccctatagaatggttccattatggctgcgttgg

SEQ ID NO: 116381 - DNA, 101 bp, Homo sapiens
gctggataatgtccaccccgagccgattcaagaaggacaaagagatcatagccgagtatgaaagtcaagtcaaagttcctctttagagagcaaagaccacc

SEQ ID NO: 116382 - DNA, 75 bp, Homo sapiens
ctcatctgtcattcaaaggaaaaaagtagctgtcattggtggtggcttgggtgaagttgaacaaattgctatgat

SEQ ID NO: 116383 - DNA, 50 bp, Homo sapiens
gctggagtccgcgcctccctgggcccgatgagagaaagggaaagttaagg

SEQ ID NO: 116384 - DNA, 75 bp, Homo sapiens
aaaacctttgaccatgaagagaaatgagatgatagccaaaccctcagagacctttggccagagcaagacataaaa

SEQ ID NO: 116385 - DNA, 97 bp, Homo sapiens
tttcccagtccccgaggcggatccggtgttgcatccttggagcgagctgagagctcgaggtatggacctgtctgccaatcaggacgaggagaccgac

SEQ ID NO: 116386 - DNA, 100 bp, Homo sapiens
gttgaggccccagggatgctgagcctgcacaagtggaagctctctgacacagctggctattctagtcccagaagaaagaggagagacttgctgaagatct

SEQ ID NO: 116387 - DNA, 75 bp, Homo sapiens
tagactatgctcggcaactcatagaagaaaagattggtgttttgcggctagttggctattcaagaaacctcgccc

SEQ ID NO: 116388 - DNA, 98 bp, Homo sapiens
agagatccaagtgcgcgccctggcgggtccggaccaaggcttacagcttcgccatgggctgctggcccaagaatggacttctagacatgaacaagggc

SEQ ID NO: 116389 - DNA, 83 bp, Homo sapiens
ctcacctgagagacggagccccggctcgcccgtgtgcagagacgagccaaactcaggctgtaccttgagcagctcaagcaact

SEQ ID NO: 116390 - DNA, 100 bp, Homo sapiens
ctgaggatgaactggcgggtgtggacgccactacagttcatcaacatcaactacgtccctctgaagctgagatctgtatctgtggacctgaatgttgatc

SEQ ID NO: 116391 - DNA, 75 bp, Homo sapiens
atgccaccaagtatggcaacatgacagaggaccatgtgatgcacctgctccaggggatgcattccaagaccccct

SEQ ID NO: 116392 - DNA, 83 bp, Homo sapiens
cggagcccccagcgcagcggccgcgtgagacggtttaagcggaagcatcttactgccattgactgccagcatttggctcggag

SEQ ID NO: 116393 - DNA, 100 bp, Homo sapiens
cttgggcaagttgcttcactctctgggcctccatttcctcatctgctaatataagtaaagccatcaataaggcctatgaggagtatgttttatctgttgg

SEQ ID NO: 116394 - DNA, 100 bp, Homo sapiens
ggccatcttggctccaccaccctggtgaccaagaatatggcccaggtgaccaaagccctggacaaggccctgagcaccatggacctgcagaaggtctcct

SEQ ID NO: 116395 - DNA, 74 bp, Homo sapiens
tcgccaagcagcaacagctggcagcatcacccccggacagcaagcaaactgcggaaccaggcacagagtgagcg

SEQ ID NO: 116396 - DNA, 101 bp, Homo sapiens
cgttgctcttgcttttcctcgctggggtgtacgggcgaactttctgaccaagtatacaactacccagagggcctaggagaagtgctgtatagagagcagtt

SEQ ID NO: 116397 - DNA, 100 bp, Homo sapiens
cgcgaaatcggcatgtggtacgcgaaaaaacaggggcagaagaacaaggaagcggagaggcaagaggcaattgctggctactttgatatatattttgaga

SEQ ID NO: 116398 - DNA, 90 bp, Homo sapiens
cgagagggcagaacgcctgctctcggacaggtgtccctggccagtgtccttccacctgtccacaagcatggggaacatcttcgccaacct

SEQ ID NO: 116399 - DNA, 101 bp, Homo sapiens
cgctgatgagtctgtttgggatcccgctgtggtacttctcgcagtccccgcgcgtggtcatccaggtgcaggccaatgtggagaagtcgctgacactgttc

SEQ ID NO: 116400 - DNA, 101 bp, Homo sapiens
ctttggatgattctgccaaaaaggctacccacctttctgttctgagacccctcaagagacatataagaaggtgatgaactggaaagaaactttgacttttc

SEQ ID NO: 116401 - DNA, 75 bp, Homo sapiens
aggcaccattcgtggggacttctgcattcaggttggcaggtgtgatgaatgcagactctgctaccattttggctg

SEQ ID NO: 116402 - DNA, 50 bp, Homo sapiens
ctgactttcagctatggaatcggtggagcagttctggaggttttatagcc

SEQ ID NO: 116403 - DNA, 100 bp, Homo sapiens
cctgtgtacttgctgtagatgaaaatgagacgtctcccacaacctgctccgggcgctggacgttgggctcctggcgaacctctcggcgctggcagagctg

SEQ ID NO: 116404 - DNA, 80 bp, Homo sapiens
cgtgatatttccaacacacttataatgctcgcagataagcatgctaaatatgacagatacctagcatctagcaaaataat

SEQ ID NO: 116405 - DNA, 90 bp, Homo sapiens
ctaatggacagttagtcacccacctacatgttgagtttttggctttcacccccaaccagtgaccaaagacttgaccactcaaagtccagc

SEQ ID NO: 116406 - DNA, 90 bp, Homo sapiens
ctgctgacaccgccgccacaccgccgccacaccgccgctgcctcagtcatgccgggcatgagccagaaggagagctctaagtctgccatg

SEQ ID NO: 116407 - DNA, 100 bp, Homo sapiens
cgagcgggccctggctcaggaacagggacagcacctcatcccctggatgggggaccacaagatcctcatcgacaggtggaagttaaacgagctgagcctc

SEQ ID NO: 116408 - DNA, 75 bp, Homo sapiens
gcggacaaaacgccaggcggatctcagaaggccagttcaaaggttaaaccacagcttgaagaaaaaacaaatgag

SEQ ID NO: 116409 - DNA, 100 bp, Homo sapiens
ccagccaatcctggagctgctgttgcagcacttgttccccaaacaagtgctcctacattctggtgtcatggagaaactccagctgggcccagagattctg

SEQ ID NO: 116410 - DNA, 100 bp, Homo sapiens
aggtcatcttcagaatgctaaaagaaaaggagccgcgtgtggaggaggctgaagtctcacatcagaggtgtcaagttccaatgacaggatttacacagag

SEQ ID NO: 116411 - DNA, 90 bp, Homo sapiens
attcaggaattctcctgccaccgcgtggtgcttgccgcagccagcaactatttcagtgaagaactgaatgtcatcatgtctggaatcaag

SEQ ID NO: 116412 - DNA, 51 bp, Homo sapiens
aatcatttccatcaataccggtactatactggcaattgctggagaagattt

SEQ ID NO: 116413 - DNA, 83 bp, Homo sapiens
gcatggagagatagataaacggataacaacgaacttgatgcaagtgataggtttgccaaggtcagacctctcatcatccggat

SEQ ID NO: 116414 - DNA, 75 bp, Homo sapiens
gcatccggtcctggtccctgctggttggtcttattagtaggtaagaaacagctgctcctccacctccaccccagc

SEQ ID NO: 116415 - DNA, 51 bp, Homo sapiens
gtggagtgtaggtcatatcgccgcgcttcaccagcctccaccaagacggga

SEQ ID NO: 116416 - DNA, 80 bp, Homo sapiens
cttagaacagaggcttgcacaggtggagcatgtagagcgcatgaagtacaggacaataaagcttcctacacatatcacca

SEQ ID NO: 116417 - DNA, 100 bp, Homo sapiens
gcaccctggagatcgaaagttattcaaggcctcttccagatgtagccctgactgggaagtgcactcgtgagtgtgatgagtatggccactcagactcctg

SEQ ID NO: 116418 - DNA, 100 bp, Homo sapiens
ctcgagtgcctgcaggatgtgagggaggtggagagtatagtgaagatgatgtaaatgaattagtgaaggaagatgaagtggatggtgaagagcagacaca

SEQ ID NO: 116419 - DNA, 82 bp, Homo sapiens
tggagagctgaacattactcttccagaagaggatgaggaagatggagagaatgcccacccatatagaaacagtgaccctgtg

SEQ ID NO: 116420 - DNA, 90 bp, Homo sapiens
agaacactatgatccttgagatctgtaccaggtctctggacactatgggcacacgactcctcccagctctgtttcttgtcctcctggtat

SEQ ID NO: 116421 - DNA, 90 bp, Homo sapiens
ataaggaccagtacctgcccaggaaactggtgttcaagcagccctggccagggatcatgcgcacagtctatgggaaccacgaacgctttg

SEQ ID NO: 116422 - DNA, 98 bp, Homo sapiens
agcaaagattacaccaagatctgtgctgaccacaggaattggatctactagtgcagatgatgataattccgaagaaggcttccacactattcattcag

SEQ ID NO: 116423 - DNA, 82 bp, Homo sapiens
cgggcagaggatgcagtggaggccatcaggggccttgataacacagagtttcaagttgggacccctgattttagcaggatgg

SEQ ID NO: 116424 - DNA, 83 bp, Homo sapiens
gtagaatctctggaattgtgcatcttcaagtctggatagtcagaagtttgtgacagtgccctccagtaatgaagtggtaacta

SEQ ID NO: 116425 - DNA, 82 bp, Homo sapiens
tggcaccatggacctgcccttccaggctgaaggtgatgtggccgccctcaaccgacgcatccagctcgttgaggaggagttg

SEQ ID NO: 116426 - DNA, 100 bp, Homo sapiens
cccgccgctcccgggggccgtgacggtgcgctttgtaaagaatataacttcctggaaagagatgaaaccaggattttatcatggacacgtttcttacttg

SEQ ID NO: 116427 - DNA, 95 bp, Homo sapiens
ccgacatgacggacaacatcccgctgcagccggtgcgccagaagaagcggatggacagcaggccccgcgccggaaactggcgatggaatatgaga

SEQ ID NO: 116428 - DNA, 90 bp, Homo sapiens
gtctatcaacaatgaagttgaggaaaagacaatctctatttggcacgtgcttcctgatgacaagcctgacactattagaagcaatcttca

SEQ ID NO: 116429 - DNA, 90 bp, Homo sapiens
cttgggatatagaaaaccaaaccagccctacagatggctatcttacaaacaggtgtcactctgcaaacctgaatggtgtatactacagcg

SEQ ID NO: 116430 - DNA, 75 bp, Homo sapiens
attaatgtggatgatcctgatgcagccaattataatggtggtcttcgagggatagcacgaggtggtctgacagga

SEQ ID NO: 116431 - DNA, 75 bp, Homo sapiens
tttgccttaaacagaaagacttgaccctcttaggtgtcatacctaaggtttgtaaccagattcatcgacttggat

SEQ ID NO: 116432 - DNA, 82 bp, Homo sapiens
atccgggccgtgaacgaaagcagtgacggaggagcttgtaccaccggaggcatacacggaatacctgaggagcatccactat

SEQ ID NO: 116433 - DNA, 100 bp, Homo sapiens
gatttctccgcctcagcccaacggggagcgcgtgaggcgggcagcgcggttgaggccgaagagctggtgaagggcagcccggcgtgggagccgcctgcca

SEQ ID NO: 116434 - DNA, 100 bp, Homo sapiens
tctggagttgaggtgcgagttacaccaaccaggacagaaatcattatcttagccaccagtcttagagtttgaaagagtctatcttgataatctccccagt

SEQ ID NO: 116435 - DNA, 98 bp, Homo sapiens
tggcagcagcgtggcctccgccaccgtgcacatccgaatgggttatcttatgatgaggcttttgctatggctaatgatcccttggaaggcttccatga

SEQ ID NO: 116436 - DNA, 100 bp, Homo sapiens
tgaggcggcgacgggctccgggaataagacgagttggaagaagacctgatcaacaacttcagggtgaagggaaaataattgatagaagaccagaaaggcg

SEQ ID NO: 116437 - DNA, 74 bp, Homo sapiens
gaatcattatccttggctgaggccatgctatgatagtggaagcttatccaaaataatagatccagaagaagtga

SEQ ID NO: 116438 - DNA, 74 bp, Homo sapiens
ccacaatagcgggattgatctccttaggacctaccttaacagtggaagtagaggttgtgatcatctcgaacagg

SEQ ID NO: 116439 - DNA, 73 bp, Homo sapiens
ccacaataaaagagacctctacttagctcagcaattcttaccttgccatcatctctcagcaaggtgacatatt

SEQ ID NO: 116440 - DNA, 82 bp, Homo sapiens
tggacgagtcttggattcgtgaacagaccacagtggaccacttctgggtcccgcaaaggcttttccccctccgctgcctcca

SEQ ID NO: 116441 - DNA, 82 bp, Homo sapiens
cacagacctcatcgtccagcggatcatcaccaacagccaaaacaacttcccgacaagtggcagcacgatcttttcgacagtg

SEQ ID NO: 116442 - DNA, 90 bp, Homo sapiens
gaaagtattctcaacgatgcagtctccattgttctgaccaactctttcgacgtgtagcagcagctttgccgggaatggaaagcacacagg

SEQ ID NO: 116443 - DNA, 51 bp, Homo sapiens
ccccagaactggccaacgtggcaggcatctatcgagctgtgcctattcgag

SEQ ID NO: 116444 - DNA, 100 bp, Homo sapiens
gtctcccttctctcctggacagaaggccgtgtcctgggacttctctgatggcgagaggctgcggctgtaccaggccatgttcgagctggtcacttccgag

SEQ ID NO: 116445 - DNA, 75 bp, Homo sapiens
cagggcagggctcctaaggaaggacccgcctttagctaaaagatggcggcaaggcagcccaggcaaatgtaagaa

SEQ ID NO: 116446 - DNA, 75 bp, Homo sapiens
agccccccaacatcctgctcctgctcatggacgacgctaagtcctatcagccatggaaacaccattgctctcttc

SEQ ID NO: 116447 - DNA, 100 bp, Homo sapiens
ctaccagcgttgagtcccctgtaaaggtcaaagctcagattcacagttgcataagccgtcacctggaatgtcttagaagccgtgaggtatggctgtatga

SEQ ID NO: 116448 - DNA, 90 bp, Homo sapiens
cgcaaccaggaatgacttctagtattcctccacctcgtcctggcatgatgcgcccacctttggtgcctccccttggacctgccccccctg

SEQ ID NO: 116449 - DNA, 122 bp, Homo sapiens
caccgggatcgtgaccgagaccgtgaccgagagcgtgaccgagagcgcgaatatcgtcatcgttagaaggatacagttgatatattagttggatggcatatagatcatactcagaaaccttc

SEQ ID NO: 116450 - DNA, 100 bp, Homo sapiens
gaagcaggagaccgctaacagcctgccagcccctcctcagatgcccctgccggagatccctcagccctggctgatctaagctggaaccagaaccaaatac

SEQ ID NO: 116451 - DNA, 75 bp, Homo sapiens
gaagaactcacgggtgacattcagtgaggatgatgagatcatcaacccaggctacttcacccccctcaacacccc

SEQ ID NO: 116452 - DNA, 83 bp, Homo sapiens
gggagccggagctttggaacgaggagtggcgcccattaagcgtcagaggaggcctcggtggtaccagaagaggaggggctgat

SEQ ID NO: 116453 - DNA, 98 bp, Homo sapiens
ctccttccacctggccaggaatcaggtcgtctacagctgcaagcagatcgccatcaagaacatatccgagctagagattcattaattcagtctttggc

SEQ ID NO: 116454 - DNA, 49 bp, Homo sapiens
atcgaacttaccctgaaggccgagcaggaaaccctggaggacctggaca

SEQ ID NO: 116455 - DNA, 90 bp, Homo sapiens
gccaccagaggagtagccaggaccacaggcagttccttaatgctggcaagcacgtccttgtggaataccccatgacactgtcattggcgg

SEQ ID NO: 116456 - DNA, 95 bp, Homo sapiens
tctctgactacatatggactcagtgcatatagtggaaaggctgaggcagctaaattagttccaatgggtttcaccactgcaactgaattccacca

SEQ ID NO: 116457 - DNA, 100 bp, Homo sapiens
gcgagggtgcagagcctggagagcatgccccggccccctgagcagtatctccagatgaaatggccactgcttgatgtccaggcagggagcctccagagta

SEQ ID NO: 116458 - DNA, 75 bp, Homo sapiens
cgctgcgcagttttgttctgctccagctgttcgaaggtgatccagtgggccccatgctgattgagtttaacatgc

SEQ ID NO: 116459 - DNA, 85 bp, Homo sapiens
aagaagctgccaggcataataggaaggatgttgcttcagagtgtgaagtcaaatgcatgccaacattccagttttttaagaaggg

SEQ ID NO: 116460 - DNA, 100 bp, Homo sapiens
tggccccacccacacctcctaaaaacccagaagaagaacagaaagccaaggccctgagaggcaggatggattaatgaaaatcaagttccatcctcagaca

SEQ ID NO: 116461 - DNA, 100 bp, Homo sapiens
aaagatatcagtagcttggaatttgctgagaataaggcaaagaccaggttgtcactgattcgtagatcaatgagctggctttatgtgctggggcagaaga

SEQ ID NO: 116462 - DNA, 75 bp, Homo sapiens
cggagatgcctctttttgccaccaatcccttcgatcaggatgttgatgcatcatcccattcagatgaaacctgca

SEQ ID NO: 116463 - DNA, 83 bp, Homo sapiens
cacaagacgactcaataggaggaaggaagagaggatggtgatgcaccggttacaaaagatgagaccacctgcatttcacaaga

SEQ ID NO: 116464 - DNA, 100 bp, Homo sapiens
agccccgtggatccgctggagcggagccggccgtacgcggtgctgcgagggcagaacctggggcagctgcaatgactctccgcacggtattattgtcatt

SEQ ID NO: 116465 - DNA, 100 bp, Homo sapiens
cagtaaagtttttatcagaaaaggatcggaaaagaattttgaaacatgatcaggggcaagtcttgttggatgtcgtcttcaagcatctagatttgactga

SEQ ID NO: 116466 - DNA, 50 bp, Homo sapiens
cctggtggaggtgttaaatgaaagactcgctcagcagcagcctgaaaact

SEQ ID NO: 116467 - DNA, 75 bp, Homo sapiens
tccaattaaccagatcttgccctggtgcagacaagacttactgggagtgtccactcgccttccaccagcatggca

SEQ ID NO: 116468 - DNA, 83 bp, Homo sapiens
gtcgtgctctcgccccaacccgcgcgccaggtggacgacatccttggagaaggcagcgacgacagcgacagcgagaagaggag

SEQ ID NO: 116469 - DNA, 82 bp, Homo sapiens
ctgattttaagctggcaaagtgggaaaaataaagtgttgagtaaacagaccaagttggcttaaagcttttcaagccaggcca

SEQ ID NO: 116470 - DNA, 50 bp, Homo sapiens
ggccgagcaggctgagcgatacgacgaaggaaggggagttcaccctgcac

SEQ ID NO: 116471 - DNA, 76 bp, Homo sapiens
gttcaagcagctgcttgccggccccaacacggaccttgacttccttgtgaaacctcctagtagaaaaagttcttgg

SEQ ID NO: 116472 - DNA, 101 bp, Homo sapiens
aggcccagatgcgcgcgatgctggaccagttgatgggcacctcccgggacgatgcagagcaaagcggcagtccccggacagggatgggctctgaccaggag

SEQ ID NO: 116473 - DNA, 98 bp, Homo sapiens
ccgcctgtccgtcgatgcaccgaaaaggctggacgtaaagaaagaagtgatgcactcaattctgcaatagataaaatgaccaagaagaccagggactt

SEQ ID NO: 116474 - DNA, 98 bp, Homo sapiens
aaaagcatgtcctttccaactggaaagtcagacagttggttaccaaggaagaccccaaagcactggctgttgccttgaactgggacataaagaagacg

SEQ ID NO: 116475 - DNA, 74 bp, Homo sapiens
cccgcggcagccgcgctcggggctctaagtgatcccagggcaccgccgtgtgaatataaagattggctgacaaa

SEQ ID NO: 116476 - DNA, 76 bp, Homo sapiens
ccgtggccctgatccagacctgggcagacttcattgttgggaacccatgggatgataagctgattttcaaactttt

SEQ ID NO: 116477 - DNA, 90 bp, Homo sapiens
gaaagctcagctggtggtgattgcacacgacgtggatcccatcgagccgaggcctgcctggagccccagatcaccccttcctactacacc

SEQ ID NO: 116478 - DNA, 120 bp, Homo sapiens
ctctgtggactcaacagtttgtggcaagacaagctcagaactgagaagctgtcaccacaggagctgttggacaaatatcttattcccaatgctacacaaccagaaagtaaggtgttctac

SEQ ID NO: 116479 - DNA, 98 bp, Homo sapiens
ccagtcaatatcccacttaaatcattccagttgttgacctcctgtactggagagacattaagaagactggagtggtgtttggtgccagcctattcctg

SEQ ID NO: 116480 - DNA, 122 bp, Homo sapiens
gaccacacagaggaatgtggaagtcatcatgtgtgtgtgcgcggaggatggcaaaacgctgcctctgagtccacctcaggacgaggccagtgcctgaaacgcatccgctaccatggcagagg

SEQ ID NO: 116481 - DNA, 98 bp, Homo sapiens
gtagaccggagctgttcctattgggccatcttggctccaccaccctgaatcctgctgcatcacagaagctggaagttctgatgttccactgaaatcac

SEQ ID NO: 116482 - DNA, 100 bp, Homo sapiens
gagcctcctgtggatatctgtctaagtaaggttgtacatcctggagacctgaagaattctgttgaagtcgcactgaacaagttgctggatccaatccggg

SEQ ID NO: 116483 - DNA, 78 bp, Homo sapiens
caagttcaggcttcatctttggatatcaacaggactgatcctttgaaatactccagccatgactaaaagagaagcaga

SEQ ID NO: 116484 - DNA, 100 bp, Homo sapiens
agcctgagaaaagcaagaaggaactgaaaagggaagcccggaatttgctcaaatctcatcttaaccttgttgtcgagatgtccacagaaggaggatttgg

SEQ ID NO: 116485 - DNA, 50 bp, Homo sapiens
gtgtgcaaacccgagagaactgggttgtcttttggaaatgcaggtttaag

SEQ ID NO: 116486 - DNA, 97 bp, Homo sapiens
actgtgcagtatttccagtctgtctcaggttggatggcaagcatgtggtgtttggcaaagtgaaagaaggcatgaatattgtggaggccatggagcg

SEQ ID NO: 116487 - DNA, 80 bp, Homo sapiens
accttctgaacaaggccaacacctatgcaggacccagatgatgtggtaccagttggccaaagaagagcctggtgttggtg

SEQ ID NO: 116488 - DNA, 103 bp, Homo sapiens
tatggtcctgtaattgcacgtaaataacgtttcctgcacgctctcctcttcagctggaaagcgctccctgaacttagtgatttggcccgtgaccctccagcac

SEQ ID NO: 116489 - DNA, 75 bp, Homo sapiens
tgaaatgcaatcagagctgggttttcccaatccacaggagagctcaaaggatggctactgacatgcagaggaaga

SEQ ID NO: 116490 - DNA, 100 bp, Homo sapiens
ctgcaggcctccgcgctcagtgccagtgccaatatctgcaatgtggtcctgatgcggtacggggagctggaggaagggattgatgtcctggacagcgatg

SEQ ID NO: 116491 - DNA, 74 bp, Homo sapiens
cctgcatgaccctcacggccagccctggggtgttccccgtcactgtctctctgatgtaaaggatggagtaaatc

SEQ ID NO: 116492 - DNA, 106 bp, Homo sapiens
cggaagctggcgtactccggcagcgaaagcggtgcagacgggaggaaggtgacagagctgaatgaacctctctccaatgaagatcgaaatctcctctctgtggcct

SEQ ID NO: 116493 - DNA, 87 bp, Homo sapiens
ccgagcagcgtcatgtacccctacctggcgcactgtcatgcctacctggtagaaatgagccagctcctgcaaagcatggacgtcctg

SEQ ID NO: 116494 - DNA, 82 bp, Homo sapiens
gcgagtgggagcaccaggatctcgggctcggaacgagactgcacggtcggggtatgataggtcggggaagagggggctttgg

SEQ ID NO: 116495 - DNA, 90 bp, Homo sapiens
cgccggatgagttgcttttaggcttgctggcccgcggggctgtccaggcacgcgaggcccctcaggctcctgggtagaactgcacttcag

SEQ ID NO: 116496 - DNA, 74 bp, Homo sapiens
ctggctggcatggccattgtcaaggaggaggcctcggtggtaccagaagaggaggggctgatgtgaacatccgg

SEQ ID NO: 116497 - DNA, 83 bp, Homo sapiens
aaggagcggaagaatggcagtgctcaaactcaccgaccagggactggtgattgcagctggaagtgcccatgaccgagctggcg

SEQ ID NO: 116498 - DNA, 75 bp, Homo sapiens
caaattttgagccttttgcaacagatgatctagttcgcccattgagccgagagatcacaatgagccaagcatatc

SEQ ID NO: 116499 - DNA, 100 bp, Homo sapiens
ggagtcggtgctcggcctcctgcggggagcagcccgagggcaatactgaacactgcgcagcttgcagaggtctcctggcagccctcattaggaattctgt

SEQ ID NO: 116500 - DNA, 78 bp, Homo sapiens
gatggtgctgagctccccactggctttggctggggacacccgacgttgatgataattagaagcatgctttccactgaa

SEQ ID NO: 116501 - DNA, 101 bp, Homo sapiens
cagcagaattaattacagggctcgtccaactggtccctcagtcacacatgccagagattgctcaggaagcaatggaggatgaagactccgggaaggctgac

SEQ ID NO: 116502 - DNA, 75 bp, Homo sapiens
caggcagaagctgagacggctaaggctgcaagaaagcgtaagattgccattcgaaaagcccaggggaaaaatgtg

SEQ ID NO: 116503 - DNA, 96 bp, Homo sapiens
caccttctaagagtttggcgagtcagtgactgaagcgcccgtccattccaagatggagttttaacattgaatgcggagaacactaattatgcctat

SEQ ID NO: 116504 - DNA, 97 bp, Homo sapiens
ttgggagagctcctgggccacccctcctttcaggtcaaggagaaggagaggaacgcgcggaggaagaagaagaaagcgccggcggcggccagcgagg

SEQ ID NO: 116505 - DNA, 101 bp, Homo sapiens
acgtgaacaacctgaacgtcaccgaggagaagtaccaggaggcgttggccaagggtacctggaatggaaacacaaaagtagccataaagactcttaaacca

SEQ ID NO: 116506 - DNA, 83 bp, Homo sapiens
aatgtgggacagcatgcaagaaggaaaaagttacaaaggaaatgcaaagaagccccagaccgtggtagggaccgacattgcgg

SEQ ID NO: 116507 - DNA, 88 bp, Homo sapiens
gcagaggctgcgcagagaatggagagctgtgtctgaggagccttggaacattcacccagatgtccggtctgtgctacgacagcaaaat

SEQ ID NO: 116508 - DNA, 100 bp, Homo sapiens
aaaattgagaagaactcataaacttggcttcctcgcttctgctcctcagcagatactttctgagtgcctactatgtgccagcctgtgctaggcactgagg

SEQ ID NO: 116509 - DNA, 75 bp, Homo sapiens
gtgctatacttgaattttctaaggtgtcattaggcgttgacccggacgacacctataatgagaccccctacgaga

SEQ ID NO: 116510 - DNA, 74 bp, Homo sapiens
cagaatgcacagtatttgctgcagaacaggttcgagaacttgtcttggacaattgcaaatcaaatgatggaaaa

SEQ ID NO: 116511 - DNA, 100 bp, Homo sapiens
cagcactgactttcagctatggaatcggttcatctcagaagaagttgttggcacctgatatgtttacagaatctgatgatatgtttgctgcgtattttga

SEQ ID NO: 116512 - DNA, 75 bp, Homo sapiens
aaggattccaagtaactcttatttggaacagatggagtcggataactgttcaggaggagatgatgactggaccca

SEQ ID NO: 116513 - DNA, 100 bp, Homo sapiens
cacacaccaacaccaggcatctacatgggcagaccaactcagtggaagtttagctgatgctataagtgaaaactacagaatcatgagttactttaaagaa

SEQ ID NO: 116514 - DNA, 129 bp, Homo sapiens
ccggattactggatcgacggctccaacagggatgcgctgagcgatttcttcgaggtggagtcggagctgggacgcatcaacaacagcaacttgtgattggcggtgaccggatattcagttgcacatccc

SEQ ID NO: 116515 - DNA, 100 bp, Homo sapiens
ccacagtcttcaagagcccacggacaccacctcaacgattgcagagggaatggcatacatcgagcggaagaactacattcaccgggacctgcgagcagct

SEQ ID NO: 116516 - DNA, 90 bp, Homo sapiens
atatgttatttacagaggagaacaggccatggagaagtgtaaggatgcaggattggccaagtccattggggtgtcaaacttcaaccgcag

SEQ ID NO: 116517 - DNA, 100 bp, Homo sapiens
ggatcttccccaaggtggccaccaacatcatgcgagcctggttgttccagcacctctcggtcccaggtgtgacaccttcagcaggtctcagggaagatgg

SEQ ID NO: 116518 - DNA, 100 bp, Homo sapiens
ccagacggaggtcccccctctgtttgtcattgagtttcttcaccgagtggtggacacatttcagaaatgtgaacataatttgagcaagccagaatttaac

SEQ ID NO: 116519 - DNA, 75 bp, Homo sapiens
gaaccgctctcgcttcgtcctacacttgcgcaaatgtctccgagtagcacagaagagggaggatgctgtttccaa

SEQ ID NO: 116520 - DNA, 90 bp, Homo sapiens
ggctaccacaaaattaaccgggacactccatcgcctcagggcgcctcggaaaccaggagatcatgagtattatcagaaaatccacccagc

SEQ ID NO: 116521 - DNA, 90 bp, Homo sapiens
cattgcaatgcattatagcaatcccagacctaagtttgaagattggctttgtaacaagtccacagatcctggtccctacaaataagcctg

SEQ ID NO: 116522 - DNA, 110 bp, Homo sapiens
agctgaagagcgacaagccgctggcagccgcggatctcaccgccgctcagggatttttagactctgaggagcagttggagctaatccacattatggaaatggaaaccacc

SEQ ID NO: 116523 - DNA, 100 bp, Homo sapiens
cgcccgtcctggtatcacagtgcttctgttcagggtgaggtggctttgaccccgggttgcccggccagcacgaccgaggaggtggctggacagctggagg

SEQ ID NO: 116524 - DNA, 98 bp, Homo sapiens
cgtggagccggcagccgacggcaaaggtgtcgtggtggtcattaagcggagatccggaataagacgagttggaagaagacctgatcaacaacttcagg

SEQ ID NO: 116525 - DNA, 90 bp, Homo sapiens
gcggacgggaaggcgggagacgagaagcctgaaaagtcgcagcgagctggagccgccggagattgtcctgggtcacataatgccagctga

SEQ ID NO: 116526 - DNA, 74 bp, Homo sapiens
catcttctcaacaaccctaggaggctttcttctagtcaagatgagtgataaaccagacttgtcggaagtggaga

SEQ ID NO: 116527 - DNA, 100 bp, Homo sapiens
cgcgtggaggagccggtgctgcagaaccagatccgggagcacgtcatcgccatcgaagtactatactggcaattgctggagaagattttgcaattgttgc

SEQ ID NO: 116528 - DNA, 90 bp, Homo sapiens
tgcacttcgcattttggcattgacatttaattttagggtcctttatatagaagggagagaccgtaagaggcaatatgagctgctgaaact

SEQ ID NO: 116529 - DNA, 74 bp, Homo sapiens
tactgcagacgacgagctgagcttcaaaaggggggacatcctcaagcagtggaagaaacaggaggagattcttg

SEQ ID NO: 116530 - DNA, 99 bp, Homo sapiens
cctcggatgccaggctcaatcctttgaacttttcctgtgggctgtcaggacccatagaaggtctttgagcagatggtgtcggacggcatgacaggcagc

SEQ ID NO: 116531 - DNA, 90 bp, Homo sapiens
agctgctcacatatggatactttcacagttcagggcttttttccagacttcaagctcccattccaacagtaagagcttcttccacatcac

SEQ ID NO: 116532 - DNA, 82 bp, Homo sapiens
agccccgccggagaggctgggcggctgccggtgacaggttagtggttacttggatgattgtacctgtgatgttgaaaccatt

SEQ ID NO: 116533 - DNA, 83 bp, Homo sapiens
agggatgcctgtaccatgatgtgatgctggagaccttgacacttatatcctccctgggttacttttcacatagaaccatatag

SEQ ID NO: 116534 - DNA, 100 bp, Homo sapiens
tggcgggcgtgggaacccaggccccgccgaggcggccaggagaactatgccatttttgggtcaggactggagatctcctggatggagttggattaagaca

SEQ ID NO: 116535 - DNA, 75 bp, Homo sapiens
atgtgttttctggctgcggggggttgtcggagggattccaccaagcagatctcagtcctggctttctctgtctgc

SEQ ID NO: 116536 - DNA, 98 bp, Homo sapiens
gcggaggccggcccccgagagccgccgacatgaagaaagacgtgcggatcctgctggtgggagaacatgttggaagctccatcagcctgggtcccaga

SEQ ID NO: 116537 - DNA, 100 bp, Homo sapiens
cgctgctgcccctgctgtcgctcctggtcggcgcgtggctcaagctagcccaagaagatgaaaggattgttcttgttgacaacaaatgtaagtgtgcccg

SEQ ID NO: 116538 - DNA, 101 bp, Homo sapiens
aagtaatattgcactaagctcaaatgggaaaaatgttaggattttgaggacacagcattgttggttttgccatgtactattttacctatgacccgtggatt

SEQ ID NO: 116539 - DNA, 100 bp, Homo sapiens
gcgcgactggccttgagggagagctggggcctgctcccggagagatacggctatgtcgatcgaaatcgaatcttcggagataaggagcacaagtgtcctt

SEQ ID NO: 116540 - DNA, 157 bp, Homo sapiens
attgagctcatcagtgagaaaacggctgcatattggtgtcaaagtgtcactgaactaaaggctgactttccagacaacggtgttgaaagcagcaggggcctagaagacattaaaccgataccacagaaatacaaaggatcattagagactattatga

SEQ ID NO: 116541 - DNA, 100 bp, Homo sapiens
acctccctaaactggttaatagtggcatggaagatccatttgcatttctgctgtgcagtggctctgtaatgctaacaagaagtctgaaaaccctgccaag

SEQ ID NO: 116542 - DNA, 89 bp, Homo sapiens
caagtggaggttcctacagagattcatatgagagttatggacacagcattgttggttttgccatgtactattttacctatgacccgtgg

SEQ ID NO: 116543 - DNA, 90 bp, Homo sapiens
gaagaacttcgctgtgctgcagaagaaaagaaactggcgatggaatatgagaggagccctctggaaagaaaaggacagaccctgtgcttt

SEQ ID NO: 116544 - DNA, 100 bp, Homo sapiens
tgaggcagctgtagcggccgtggaggaggtcggctcagccgggcagtttgaggagctgctgcgcctcaaagccaaatagaagatggtgagatttttgcaa

SEQ ID NO: 116545 - DNA, 102 bp, Homo sapiens
tgcccaggggtctgagtctcacagcttgtaaagactctgggctgggaagccctgttggcccggcgcctgccaccgccctttgtgcccacgctgtccggccgc

SEQ ID NO: 116546 - DNA, 75 bp, Homo sapiens
acgtggactccctttaatccagtgactgtcaggtcgatcatatctttctgagaccaagatcttcactgcctctaa

SEQ ID NO: 116547 - DNA, 100 bp, Homo sapiens
aacaaccacttccacatcagatgcttcacctgtcaaggcaaccccattccagctgccattgaagaaatgcgcggtggtgggaaatggtgggattctgaag

SEQ ID NO: 116548 - DNA, 75 bp, Homo sapiens
aacagcgagggcaaagagctggtggcctcaggtgaaaaacctgtcatttactccatcctttatagtgatgctaca

SEQ ID NO: 116549 - DNA, 98 bp, Homo sapiens
cggattcctcagctacgaggaggcgctgaggagagcattgcagtgtcgagatggctatgaaccctgtgtaaatgaaggaatgtgtgttacctaccaca

SEQ ID NO: 116550 - DNA, 51 bp, Homo sapiens
aaatggttgaaaacagatatacagcaaattgccatcgcaagagagggggac

SEQ ID NO: 116551 - DNA, 100 bp, Homo sapiens
ggggggctggtgctgcgggacctcaagctgcggaaattcatctttaaggacgaagagaggtccctatcactgttcagtccatcgtcattcagtctctaaa

SEQ ID NO: 116552 - DNA, 100 bp, Homo sapiens
ccagggttgaggcgattccagagagcggcggaaaggataagcctcgacttagaagctaccgagttaccctaagaaaggttttttgtgacatcgtaaacat

SEQ ID NO: 116553 - DNA, 98 bp, Homo sapiens
cgtcccgcgcggggcacgatgttgaacatgtggaaggtgcgcgagctggtggacaaagcgaagaaggtagataatgactataatgcccttcgagaaag

SEQ ID NO: 116554 - DNA, 75 bp, Homo sapiens
ggcagctccctgcatctattggctcccactgactgacagccagggccattatgctgtgatgaacaaccccaccag

SEQ ID NO: 116555 - DNA, 74 bp, Homo sapiens
atcttcctgcacacagccacgatttgcaaagtgccggtggtggtgtgcacattgagccccggtatagacagttc

SEQ ID NO: 116556 - DNA, 75 bp, Homo sapiens
gaaaatcctcactctgagtacggtctcacagacaacgttgaggaagcagtcaattatagatttcttcaaaccagc

SEQ ID NO: 116557 - DNA, 101 bp, Homo sapiens
gtgctttccctttggatggaactgaactttgtatatggaacactaaggatccttctcatcaggaaagggggctgtatacagctttgatccagtagggtctt

SEQ ID NO: 116558 - DNA, 89 bp, Homo sapiens
agccagcggcaggaccagcgggcgggggcccacgagtgcccgtggttgacacgagctgtgtccccagctgttcccgtctacaatggcat

SEQ ID NO: 116559 - DNA, 75 bp, Homo sapiens
agtcgttcttgctcttcgagggcgagaagaaggcgagaaaaatcatggctttgaggtcctgtaccacagcgtgaa

SEQ ID NO: 116560 - DNA, 98 bp, Homo sapiens
aacccctccggccagtgagaacagtctccattctggagcagcggttgacactgacagaagacaagctgaagcagtgtctggagaaccagcagctaatc

SEQ ID NO: 116561 - DNA, 75 bp, Homo sapiens
tcatgaagactgtgtaaataatatcagctaatagatcagttaaagcccggaggaagattgatattgcctgttggt

SEQ ID NO: 116562 - DNA, 75 bp, Homo sapiens
agcacgagctgtgaggggattcacttgtgtgcggaactcctcggaaccatgataggaaccaaggctttagccttc

SEQ ID NO: 116563 - DNA, 98 bp, Homo sapiens
gggcgctgcatgtgcaaagcaggcttcgaggccgttgagaatggcaccgtctgccgaggaggtatctttaaaatagcttcctgggcagatctagtaaa

SEQ ID NO: 116564 - DNA, 100 bp, Homo sapiens
tgctggtcgcctgttgggagtaaattacctttgcagagctgcagacagacatccacgagctgaccaatgacctggacggtgccggcatccccttccttga

SEQ ID NO: 116565 - DNA, 100 bp, Homo sapiens
atgctgagaaactgatgaagctgcagaaccaacgaggtggccgaatcttccttcaggatatcaagtcaaagatcactgaggacttccgggccctgaggaa

SEQ ID NO: 116566 - DNA, 97 bp, Homo sapiens
gttttcgaaggaggatgccctggagacacacaggcagacccatactgggtcctaacctgattataaaacaaccagatgagttgctggacagcatgtc

SEQ ID NO: 116567 - DNA, 75 bp, Homo sapiens
tgaagagacacagtatggtagccacacccccagacttaattcagtgcacaaatgagatgaatgtgaacatcccac

SEQ ID NO: 116568 - DNA, 100 bp, Homo sapiens
gcttcaacaaaggacactacatcaaggactgcccccaggacgaatgccttagtttccactttccagcctggatcccctcacactgaacccttcttcgttg

SEQ ID NO: 116569 - DNA, 50 bp, Homo sapiens
agcaccgcacgccctgcaagggaggctgaccccgcactacatctacccac

SEQ ID NO: 116570 - DNA, 80 bp, Homo sapiens
ctcagtctcccaacacctctggccatctacgtgattgacttcttctggaacgaaacctggtacctgaagaccattgacat

SEQ ID NO: 116571 - DNA, 100 bp, Homo sapiens
ggacatcctggaagctgggaaatgctggttatattctgggcactaaatgaaggcgtttctaggcaatttgattcgttcagagatggatttgaatcagtct

SEQ ID NO: 116572 - DNA, 100 bp, Homo sapiens
cgtggagtgacggtcacaccgcggcggttattgccatggaatggagaatgaggcgatagcttctgagcagagtgtatctatacaggtcaggacttctaag

SEQ ID NO: 116573 - DNA, 82 bp, Homo sapiens
gatggccagtcacgagaacccaggtcttctcagtacagcatggtggctggggcaggccgagagaatggcatggagacgccga

SEQ ID NO: 116574 - DNA, 83 bp, Homo sapiens
tgaggatctggaggacggagaggacctgttcaccagcactgtctccaccctagaggtcaaaatgcagatcttcgtgaaaaccc

SEQ ID NO: 116575 - DNA, 83 bp, Homo sapiens
ctgcgggaaatcgggctgaagcgactgagtccgcgatggagaattaaacaaccaccatgtcgagcaaaaaggcaaagaccaag

SEQ ID NO: 116576 - DNA, 82 bp, Homo sapiens
ccttgttctcctccaggtggtagtgctcgctctggcgcagattgcgatcagtgggtgaccgcggctgcgagggactttgtca

SEQ ID NO: 116577 - DNA, 100 bp, Homo sapiens
accatctcaaagggtaatcttccagtgctgacttgctcatcagttttgcacagtggcaattttgggactgatttagaacagaaactccattggaaccccg

SEQ ID NO: 116578 - DNA, 83 bp, Homo sapiens
gtttgtcctgtcctggatcagtttctttgtcatgtagccaagactggagaaacaatgctctgtggatagcaactggatcgtgg

SEQ ID NO: 116579 - DNA, 95 bp, Homo sapiens
ctagcagtgagcaccttttggcccaatgaatatcagaacccttaggagaaatcttgagagtggacagcaattgtgaagatcgccagagagttctg

SEQ ID NO: 116580 - DNA, 50 bp, Homo sapiens
aaaatactggagttcctgagatctcaagagtcttgctgtgtcgtccaggc

SEQ ID NO: 116581 - DNA, 100 bp, Homo sapiens
gggagaagcatgggaaggaggccgagccgggatctcaggtcctcgggggcggcggccacgccaaggacggacaaatgctgtgcttcatgaagttaaaaga

SEQ ID NO: 116582 - DNA, 83 bp, Homo sapiens
gtctgcgagccaggattcccggaaacatttactagggacaacttttgagtgtcagaccctgtggacacaaagaaaaagcttgg

SEQ ID NO: 116583 - DNA, 100 bp, Homo sapiens
ttcactggtttgtgtccagagccggactgattctctcaatttgccctctggaattgctttggcactcgttagatgaatggctagttttaatagccacaga

SEQ ID NO: 116584 - DNA, 74 bp, Homo sapiens
tcttggtctcactgacttcaagaatgaagccacggaccctcgcgagacaatggacctcagatagcctatgttcg

SEQ ID NO: 116585 - DNA, 75 bp, Homo sapiens
ctggaaagagagaacatccggaagatgcaggggggagccaaaagggtcatcatctctgccccctctgctgatgcc

SEQ ID NO: 116586 - DNA, 82 bp, Homo sapiens
cttacttactttattcccgattggagacaggaccaaagacaatgcagatcttcgtgaagactctgactggtaagaccatcac

SEQ ID NO: 116587 - DNA, 82 bp, Homo sapiens
gaaaaggcattgaggaactcaatcaaaccagtattcttttcacacaggtgagaattatgaagatgatgacctagtaaattct

SEQ ID NO: 116588 - DNA, 100 bp, Homo sapiens
ctccccagccatgcttcctgtacagcctgcaaaactgaaattatgatgtgatgaccccaatggttgatatacttatgaaactttttcgaaatatggtgaa

SEQ ID NO: 116589 - DNA, 82 bp, Homo sapiens
aaaaggcaaaaatcccatctaccgcaactctcagttcgagagtaaagacccaacatgagtgaagtttcctgcaagaaacggg

SEQ ID NO: 116590 - DNA, 88 bp, Homo sapiens
tgaacatgtaataatgcagaatgaagctcttgttgctttggcattaatagcagctttagaattgggatggaagagtgtagaaagtgtc

SEQ ID NO: 116591 - DNA, 80 bp, Homo sapiens
gacccagctgagcgggcggtcattcgcatcgcaggtcgcaatggaagaagagatcgccgcgctggtcattgacaatggct

SEQ ID NO: 116592 - DNA, 73 bp, Homo sapiens
gaattcgcactgatgaaaatgggctttgtcctgcatgtagaaagaagctcattcacacagaagacccatttaa

SEQ ID NO: 116593 - DNA, 116 bp, Homo sapiens
ctcagcccttcatttgacagtgtactgccccgttacttatttttacaaggctctctaaatacgtacagattctgcgataatgtgtggacttttgtactgaatgatgttgaattcag

SEQ ID NO: 116594 - DNA, 80 bp, Homo sapiens
ggcgcacacaactaccaggaaggtacaggtttgcagattccgccagcagcacagcaagctctacagatgagtggctcttt

SEQ ID NO: 116595 - DNA, 100 bp, Homo sapiens
gtgctgacgtcgcaaaaaaattggataaaatattgtatccacagtgaatcttggttgtaaacttgacctaaagaccattgcacttcgtgcccgaaacgcc

SEQ ID NO: 116596 - DNA, 75 bp, Homo sapiens
gttgaagaccaggtacctgaagctgtcttgccacttgcctagtgaggcttttccgaacctggaaggagacgtcta

SEQ ID NO: 116597 - DNA, 82 bp, Homo sapiens
cgggcgcacgcgctcaagaccaaggaaaagctggcacagaccgccacgggagcatcagatccatgctgctgctgactcggag

SEQ ID NO: 116598 - DNA, 83 bp, Homo sapiens
tgacccacgcggaggccgtcaagggtaatactgaacaacctgtccaaactagcaagattggacttggaagaagagagtatcag

SEQ ID NO: 116599 - DNA, 74 bp, Homo sapiens
tgacctcatgatccacccgactcagcctaccaaaatgctgggattacaggtgccagaagcccaggaagcacaca

SEQ ID NO: 116600 - DNA, 85 bp, Homo sapiens
gatcaccacggacgagatgatcaaacgcctgaaggtgatgttctgcaccctgaacacccacaaagtggacatggacaagctcctg

SEQ ID NO: 116601 - DNA, 95 bp, Homo sapiens
cagtaattggaggaagaatgatagcacagaaaatctctgtcagaactggtcacagtgctgtcgatatcaccaaggtggctagaagacatcgcatg

SEQ ID NO: 116602 - DNA, 100 bp, Homo sapiens
tctggtcactatggtacgagaacgaaaatgcatattatgccacatcgtgtacagctcaaaaaagccaaacaacaggacggggcagccgccatggagatgc

SEQ ID NO: 116603 - DNA, 82 bp, Homo sapiens
tgatgataatactcagaatcaggagaaggaaatgctgcttagattaaatgcgttgttgtgagaaagatcagtctaaagaaaa

SEQ ID NO: 116604 - DNA, 90 bp, Homo sapiens
gactcctcacctccaggatgagcactgcagtgtcgtgacccttggggttttgatacaaaagttgggactacaagcaagtgacataaaaag

SEQ ID NO: 116605 - DNA, 101 bp, Homo sapiens
gaagcattgcattgattgtcttatatttcaagttaaggtccaaaaaaactccagctgtgaaagcaacataaatgccaccagtgaagactataagctcctgg

SEQ ID NO: 116606 - DNA, 101 bp, Homo sapiens
gtggactttagcatttgaactgaatatttgagattgaagatttctgaataaccctgctagaccaacaggagttgctttgtggacagattgctggagttgtc

SEQ ID NO: 116607 - DNA, 95 bp, Homo sapiens
ccaccaggtcaccctggaagagtcgctggccgaaggtcaaaatgcagatcttcgtgaaaacccttaccggcaagaccatcacccttgaggtggag

SEQ ID NO: 116608 - DNA, 82 bp, Homo sapiens
gcggtgcggacccagcacgcctgggccgggggctgcagcatggctcacagaacatttcctgcctgttgctcacactctgttg

SEQ ID NO: 116609 - DNA, 82 bp, Homo sapiens
cgccgcgccctggcggctctagggaccccccccgcgcctgcacttagccccgcgcccgagagctgcggtgcaaccctgggca

SEQ ID NO: 116610 - DNA, 97 bp, Homo sapiens
attgcctgtgtcccaggatcaagtggtggaaggcttgcaagccgcggcccatggagcccgccggcccggcccccggccgcctcgggccgctgctctg

SEQ ID NO: 116611 - DNA, 75 bp, Homo sapiens
atcaaccctctgcatacagtaaagcctggtctccaagtcctctcctaagaagcctcgtggacgtaacatcttcaa

SEQ ID NO: 116612 - DNA, 98 bp, Homo sapiens
atgagaaacccggcaatgaaagaagagtctaacctgtctctgcaagctcttgagtcccgccaagatgatattttaaaacgtctgtatgagttgaaagc

SEQ ID NO: 116613 - DNA, 96 bp, Homo sapiens
gaaaaagaagatgaatcactgccaatagattaaagcccaatctgcaggtgttgcgagcccgattctctgagatcacaccccatgccgtcaggacag

SEQ ID NO: 116614 - DNA, 75 bp, Homo sapiens
ggcatgccccgctacgagctggctttaatcctgaaagccatgcagcgggctgggagtcctccgtcagcatcagct

SEQ ID NO: 116615 - DNA, 75 bp, Homo sapiens
accctgatctggcatggacatgttttaaatgcacagagagcaggatacaaggcagccatagttcacaatgttgat

SEQ ID NO: 116616 - DNA, 75 bp, Homo sapiens
tatttgaagataagtttaggccagacatggagggccgttgctccagggagaactgcaaatatcttcatccacccc

SEQ ID NO: 116617 - DNA, 98 bp, Homo sapiens
cttcgcaagattcgagcagcccagaatatctccaagacgtctctggcatctctatcccctatgaggcaccacgtaagacctcctgcccttagctctct

SEQ ID NO: 116618 - DNA, 75 bp, Homo sapiens
gacaggaaccagctcgggggccaactctgaggagtccactgcagcagctgaagcaggagatgggcggcatcgtga

SEQ ID NO: 116619 - DNA, 80 bp, Homo sapiens
aagaaaccgacgcccatgggcgaaagggacctgctcaagttcactcaggcacagtcttttgctgagcgcctgcgcctggg

SEQ ID NO: 116620 - DNA, 126 bp, Homo sapiens
aaaaagccctcagtaccagagacagaagcagatggattcgtccttttagggggaaatttgcagtggtgagaaaatgtataaagaaagattctgggaaagaatttgctgcaaagttcatgagaaaaa

SEQ ID NO: 116621 - DNA, 98 bp, Homo sapiens
cagcatatcttttctgttgtgacagacacttcacatactgctggctaaatttattgtgaagaaatcagaagatgaagaagacgccgctaaagatactt

SEQ ID NO: 116622 - DNA, 100 bp, Homo sapiens
ggcggccggagtttgtaatcaaagtcatcgagcagggcctggaggacctggtcttcactgacgcctctccccagggtacaccaggggttggaaaaaccac

SEQ ID NO: 116623 - DNA, 100 bp, Homo sapiens
agacgatgcgccccgcgcagccgcctgcgcctgcgggagccgtactccaaagattcaggtttactcacgtcatccagcagagaatggaaagtcaaatttc

SEQ ID NO: 116624 - DNA, 75 bp, Homo sapiens
cgcgggcaggagcctggcgaggatgcaccttcccctgccttggaaagtcctcctccgcctcctcctctctgcatg

SEQ ID NO: 116625 - DNA, 98 bp, Homo sapiens
ggaagagttctatgcactctgtgaccagctggagctgtgcctgattagcctgaggcctgctcagtcgttcctaatgaataaaaatcaagtgccaaagc

SEQ ID NO: 116626 - DNA, 102 bp, Homo sapiens
cctgtccattccatcaagtcctgaaaaatcaaaatggatttagagaaaaattatccgactcctcggaccagcaggacagattttgaagccagcttcataagg

SEQ ID NO: 116627 - DNA, 82 bp, Homo sapiens
ctgcgaggctcggagaaacaggcgccgcgggctccgcgcccggccggacccgggcccgaggcttgggcactgtttaaaggaa

SEQ ID NO: 116628 - DNA, 88 bp, Homo sapiens
cttatccaacgccaaccaaagatttgcatcagccatctcttagtccagcaagtcctcatagccagggggggacacagcgattgccacg

SEQ ID NO: 116629 - DNA, 83 bp, Homo sapiens
gttttggagcctcgccccccggggaagcggtggatgggtggcccagttgaaatccttcccttcctctaccttggaagtgccta

SEQ ID NO: 116630 - DNA, 76 bp, Homo sapiens
tggggagtctgccctgggaccggatggagagagaagcattgctggctgagatgggggtggccgtccgggaggatgg

SEQ ID NO: 116631 - DNA, 90 bp, Homo sapiens
aaatagcaaatgtacttggaaaatcacagccaccaccacctatcatgacagatggtgaagatgcggattacactcattttacaaaccagc

SEQ ID NO: 116632 - DNA, 82 bp, Homo sapiens
ttgctcggccgatgaagtgcagaggtttttttctggacaaagcagttccaattccagagaaaatgagtgaatgggcacctcg

SEQ ID NO: 116633 - DNA, 100 bp, Homo sapiens
gctggcagagctgggcaggagaggcctgttgctgccgtctcgactcgtggatggcagttccggcgaggggggagcctcagcaggattgctgtgtgaaaac

SEQ ID NO: 116634 - DNA, 100 bp, Homo sapiens
tgtgcagctgtcagaccacacccgctccgagcagtgctacagagacgtgtctgatctaaaggcgggagacactatattcaatcgtgctaagctcctcaat

SEQ ID NO: 116635 - DNA, 100 bp, Homo sapiens
gattccatacggaataagctcattttaattgccagaaacaaagacgcaaacatgcagatctttgtgaagaccctcactggcaaaaccatcacccttgagg

SEQ ID NO: 116636 - DNA, 74 bp, Homo sapiens
gtatttatctataccacaagcaaccacatcaaatatgctgtcaccactggaaaaatgagcaggcggaattgttg

SEQ ID NO: 116637 - DNA, 75 bp, Homo sapiens
cgaaaggattggattggcatctttagactgctgaatgccatggtggcaaaactggggaaccgggaggacccactc

SEQ ID NO: 116638 - DNA, 74 bp, Homo sapiens
tccggggacccttccgtatctgcctaggcattttgctgtctcctcctaatacgatcctgataacttaagtgact

SEQ ID NO: 116639 - DNA, 96 bp, Homo sapiens
gtttgcctatgggacatacccagattacataggggcaagattcttgccaagagaattaatgtgcgtattgagcacattaagcactctaagagccga

SEQ ID NO: 116640 - DNA, 90 bp, Homo sapiens
cacctatctatggtgcagatattaatgggagcatatatgatgaggtatgtacaagctgtgaggacaacgcagaagccaatgggttttgtg

SEQ ID NO: 116641 - DNA, 98 bp, Homo sapiens
cccccaacacctgagccaggtgaagggccccgtaaattggaaggatgcacaagttccaaggttacgtttcagttgttatggagttgatggagagagtg

SEQ ID NO: 116642 - DNA, 95 bp, Homo sapiens
cgatccggaacatgcgcgggaactcccactgtgtggactgcgagacccagagtatgacgctgggcgggatggcttcatcgacctgatggagctga

SEQ ID NO: 116643 - DNA, 100 bp, Homo sapiens
agaagagccatgggtcctcgacctgcagggagcagaggggacagaggcaccaaggacctccaagacagtttttacagagtcaagaggatcctatgaattt

SEQ ID NO: 116644 - DNA, 75 bp, Homo sapiens
ctgaaacttgcgaaatccctggtgccaaaggctttagaaggttatatcacaggtgaccaagaatatggcccaggt

SEQ ID NO: 116645 - DNA, 80 bp, Homo sapiens
taacgcctttcaccattaagaggaaagcgatggaggagctgagcgctgatgaggaattggattcaagtacgtggctctgg

SEQ ID NO: 116646 - DNA, 100 bp, Homo sapiens
gggggcccccagcaccctccagctccctacccatccgccaggagccctcttccttcagatggccaccatgtctgggagatggaagcgaaaactgaccggg

SEQ ID NO: 116647 - DNA, 75 bp, Homo sapiens
agaatgaatacgggtccatcaatcacacgtaccacctggatgttgtggacattggcgaggaggctgggagatctg

SEQ ID NO: 116648 - DNA, 100 bp, Homo sapiens
caaacactggaatcctactttttctgcgggatccacagcaccattgtttactgaccagccagaggaacctgagtcaaacacaacacatgggatagaatta

SEQ ID NO: 116649 - DNA, 104 bp, Homo sapiens
gcggaatcggggagcgtccggagctagctggatcctctaggcaggtgctggagaatctggtaaaagcaccattgtgaagcagatgaggatcctgcatgttaatg

SEQ ID NO: 116650 - DNA, 75 bp, Homo sapiens
gctgaaagagtaccggatctgcatgccgctcaccgtagacgaggtgaaagaacttgtcctggacaacagtcggtc

SEQ ID NO: 116651 - DNA, 100 bp, Homo sapiens
ttcagatgtggtggaatatgccaaggaaaaactggagagcttcatcaaaaatagtgatagctttgataacagtccagagcgtgagtccattcacatcctg

SEQ ID NO: 116652 - DNA, 90 bp, Homo sapiens
acctccgagggaaacaagaaaacatcaaagaggtctagcaaaggtctccaattgagaaacatggcactgtttttcctgcactctacccac

SEQ ID NO: 116653 - DNA, 80 bp, Homo sapiens
caatgcatcgctggaagtagccagaacaggaaatatagtggtcattatgattagctatccaaaaggaagagaaattttgg

SEQ ID NO: 116654 - DNA, 95 bp, Homo sapiens
cggccgtctcccctcgcacaccagttttctgaatttccagatcccatgtggggttcagattatgtgcagttgtcaaggacaccaccttcatctga

SEQ ID NO: 116655 - DNA, 100 bp, Homo sapiens
tcagcgcctagcagacccagagattattgctcagttgtaactattgtggaccagacaaatgtaaaactaacttgcctgctctttagtggaaactatgaag

SEQ ID NO: 116656 - DNA, 49 bp, Homo sapiens
gagagtctccgggtccctggaaagacggagtctcgctctgtcacccagg

SEQ ID NO: 116657 - DNA, 96 bp, Homo sapiens
ggaaacttatgaggtatcactcagtgagcacagagacgcctcatgaacgaaagtttgcctgtaggtacctgagttgacaccgaaggtgcctaaaga

SEQ ID NO: 116658 - DNA, 50 bp, Homo sapiens
aatggccatgaacgcctttggagacatgtgttctggacttggtgcctctt

SEQ ID NO: 116659 - DNA, 100 bp, Homo sapiens
gtctgcctcggtacctgttactgctgctacttcctcgtttgacaccttcctgggtaccttaacatggggaatcttcttaaagttttgacatgcacagacc

SEQ ID NO: 116660 - DNA, 75 bp, Homo sapiens
gaactcagttgtgcgttgcggccagtcgccactgctgtgtggccgacgacgatgccctcgctgaggagcgcatgc

SEQ ID NO: 116661 - DNA, 100 bp, Homo sapiens
cgcagtggtcgcttcttctccttggaagatgagaatgtgcctactgctcctgatcctccaagtcaacatttacgtgggcatgggacaggcttttgctttg

SEQ ID NO: 116662 - DNA, 74 bp, Homo sapiens
ggacgtgcctgggcctggcctggaacaaccaggaagctatatgagaaaaagcttttgaaactgagggaacaagg

SEQ ID NO: 116663 - DNA, 83 bp, Homo sapiens
aagattgcagaggagctggggctgctggagccagttctgcttctcggcaaggagcgatttgctggtgtagacatccgtgtccg

SEQ ID NO: 116664 - DNA, 100 bp, Homo sapiens
gttggctgccgtccccgctgctgtgcattggatctttgtagaatttgatggctgtaactggaagcaacactcctgggtaaaagttcatgctgaggaagtt

SEQ ID NO: 116665 - DNA, 100 bp, Homo sapiens
cgggagccgggatctgagcgagcgccggggccagcggagccggagccgccgggacatggacaatgcagatcttcgtgaagactctgactggtaagaccat

SEQ ID NO: 116666 - DNA, 75 bp, Homo sapiens
gactgtgtgttcagcaaggaagcaggacgcatgtgctacgccatcattcaggtccctgtacccctacccgaccgg

SEQ ID NO: 116667 - DNA, 50 bp, Homo sapiens
aagtttttcaaagcctaccaaaatctaaacacaactggttttgagaatcc

SEQ ID NO: 116668 - DNA, 101 bp, Homo sapiens
atactcagtggctgcaaaaagaactgcaagcacatgttgaccagataactgaaatggcagcagtaatgaggaaagccattgaaattgacgagcaacagggt

SEQ ID NO: 116669 - DNA, 100 bp, Homo sapiens
aggcaagaccgaattcagaaggatatcgacgtcgtgatccagaagtccagagctgaggactgcctgtttgcaggtaataattctgatggaattgaaaacc

SEQ ID NO: 116670 - DNA, 83 bp, Homo sapiens
agcgccccttcgcgtcccctgcaccatgagctggggcaccgagctctgggcctccggtgtggctgtctctgatggtgtcatca

SEQ ID NO: 116671 - DNA, 100 bp, Homo sapiens
aaggaagcaaacttggactttccaaaaataaaagtatcatctgttactataacacctaccagctggttatattctgggcactaaatgaaggcgtttctag

SEQ ID NO: 116672 - DNA, 75 bp, Homo sapiens
ctttactccatgtgtgggacattcattgcggaataacatcggaggagaagttacagaatgtctgaaggggacagt

SEQ ID NO: 116673 - DNA, 100 bp, Homo sapiens
cgagacagccgacacagatacagcagaccaagtcatggcttccttcaagatcctggctggggacaaggccataggaaaaggatacagagtagagtttcat

SEQ ID NO: 116674 - DNA, 89 bp, Homo sapiens
ggcggagcaaagtcgccgggggtgtggggtgttccacgctatgttgggagtgttcgctttcgagaagctatggagatattttgcataga

SEQ ID NO: 116675 - DNA, 50 bp, Homo sapiens
caacgccgtgcagctgcccatcgaccagtccttccggttcccgaccttca

SEQ ID NO: 116676 - DNA, 51 bp, Homo sapiens
cagggacaggatatggagcaacaagctgagactgctgtacgaatgcaaccc

SEQ ID NO: 116677 - DNA, 88 bp, Homo sapiens
ggacaagcagaagaagaaggtgtactcctttctattttaaagagccaagcctcagagaagacaaagcatggaggacacaagaatggga

SEQ ID NO: 116678 - DNA, 82 bp, Homo sapiens
aaaaatccagaagtacaagcagtctgggacccagacatggagctgcgggaagaagcctggtctccggggccgctggattctg

SEQ ID NO: 116679 - DNA, 74 bp, Homo sapiens
ctgacttcggccttgcccgcatctatagtttccagatggctctaacctcagtgctgccactgcagagccccgcc

SEQ ID NO: 116680 - DNA, 83 bp, Homo sapiens
agcagcgtgcgttcagccctgggcgggagatacagatgacccaccaagaattactcagaaccctgtgatcaatgggaatgtgg

SEQ ID NO: 116681 - DNA, 90 bp, Homo sapiens
aatcaacttgactcaagattgactctacagactcagaagatgatgctaacagtgtgggtttggaggatttgggacaacatctacaactgc

SEQ ID NO: 116682 - DNA, 75 bp, Homo sapiens
gagcgtgaccgagagcgcgaatatcgtcatcgttagaagaatttcagtctgccacatcagcacatttgctaaaag

SEQ ID NO: 116683 - DNA, 75 bp, Homo sapiens
cgcggcctgccgcaatggaaacatctatattctgagaagggttccaaaaggtcccaggtgtcctctccgtgcagt

SEQ ID NO: 116684 - DNA, 100 bp, Homo sapiens
ggcacttcaaccgcactgagtccctgaggctcttcaggctcccgcgtgccacgagaacctggtcaaagtgggcggctacatcctgggggagtttggaaac

SEQ ID NO: 116685 - DNA, 50 bp, Homo sapiens
ccggaagaaactgtccgagaagcccaaagcttgtaatgagccagtgctgc

SEQ ID NO: 116686 - DNA, 80 bp, Homo sapiens
gtctgacatggaggatgatttcatgtgcgatgatgaggaggactacgacctgggccaccagatgcctccacccagaaagg

SEQ ID NO: 116687 - DNA, 80 bp, Homo sapiens
tcatgtctgcgagccaggattcccggaacaagatcactcaaggtgaaggataatctactaataccagcactttgaatgaa

SEQ ID NO: 116688 - DNA, 100 bp, Homo sapiens
tgtgcgatgatgaggaggactacgacctgatatttggatttgacctgcattttggaatttatctacacttaaaatgccaccagcagttggaggtccagtt

SEQ ID NO: 116689 - DNA, 118 bp, Homo sapiens
agaaacctgggtgaactttcacggacaacctcagaggacaacgaagtgttcgaggccacaagaggaagctgaatgaagaggacgccgccagcgagtccagcagggagtccagcaacga

SEQ ID NO: 116690 - DNA, 98 bp, Homo sapiens
ggaaaatgcatcttctaagtttttggcaccatatactactttttccagaattcatacaaagagtctgctgctgttcttgaagggtttttcagagtcgg

SEQ ID NO: 116691 - DNA, 96 bp, Homo sapiens
agctgcctgctatgctgaaaacccctggaaacttgctaaagagctgtgcatcctgatgaaaagagattggaaggcctctccaagcaactggactgg

SEQ ID NO: 116692 - DNA, 82 bp, Homo sapiens
gcgagctcaaggcggcgcggcggccactgggcgcagcacccaggtttttagaacttcagccataaaaatgggcagaattttc

SEQ ID NO: 116693 - DNA, 83 bp, Homo sapiens
gtcgcgcccgggaggaaggaacgaggcaaggagctaaagcagcgtgcgttcagccctggggactcagtggcctttgaggatgt

SEQ ID NO: 116694 - DNA, 76 bp, Homo sapiens
gcatgcgctctcattgcagcctcggcgtttgtagaagaggagcatctgctccagatggtcagtaggacagaaggta

SEQ ID NO: 116695 - DNA, 75 bp, Homo sapiens
cgggagcctagatcctgtgctttactctgaagactccaggaagaagatgagccttaggtctgaacgccgaggaat

SEQ ID NO: 116696 - DNA, 90 bp, Homo sapiens
aaaccctcatcctggacgccctcagaaaagagggcattgagcaagtgcagcaaagtagaggcctgcaagaaatagaagagtcactcagga

SEQ ID NO: 116697 - DNA, 74 bp, Homo sapiens
cggagtgagcggagtagcgagtcggcaacccggaggaccatggccaacctggagcgcaccttcatcgccatcaa

SEQ ID NO: 116698 - DNA, 75 bp, Homo sapiens
tacatttggcagaataaatgaaccagttcctcgtctcctcattatgaaagacatggtcagacgactgcaggaact

SEQ ID NO: 116699 - DNA, 80 bp, Homo sapiens
gagcggcagccaggagtcgcctgggtccctgctggagtatgctgggtactagcaaaggccagacgtcttactcaacaact

SEQ ID NO: 116700 - DNA, 87 bp, Homo sapiens
tggcatcccaaggctttgggttttcctctccaaacaaaacaggcctccgaccagggagaccttccatcctcctccacctgttccacc

SEQ ID NO: 116701 - DNA, 75 bp, Homo sapiens
accaaccttgacttgcagcacaatgaactgctagacctcccagatactatagcttcctgcctgacacagctcact

SEQ ID NO: 116702 - DNA, 98 bp, Homo sapiens
ttcaccactcatttgcaacttatatcgccagtccagcagctaaggatattttgtgcagtgaataaccctataccttccaatttgaaatcagaagcaaa

SEQ ID NO: 116703 - DNA, 98 bp, Homo sapiens
cgccggacgtcggcaacggagaagtgggcggtgagatccccctagacatgcggctcgggggcgggcagctggtgtcagaggagctgatgaacctgggc

SEQ ID NO: 116704 - DNA, 75 bp, Homo sapiens
ctgggaccttctccctgcctggacccctactattgcaacaagtgttgctaacaaccacaagcagaatttgatgac

SEQ ID NO: 116705 - DNA, 50 bp, Homo sapiens
cgcgaatcccgaggcaatctcggaggcggataaacgtcttgtacccggag

SEQ ID NO: 116706 - DNA, 51 bp, Homo sapiens
acaatggtataagcctcattatcaagctgcacaaggcccaggaggagcacc

SEQ ID NO: 116707 - DNA, 100 bp, Homo sapiens
cgactgcccacggaggaagagtgggagtttgccgcccgagggggcttgaagggtccggcctctttggcctacccccgttggctccgctgccccaggtcga

SEQ ID NO: 116708 - DNA, 73 bp, Homo sapiens
ggccggcgaaaggagctggtgcctgtgcaagttgttgaggtgttgagaataataggcagtcagaaggtctgca

SEQ ID NO: 116709 - DNA, 100 bp, Homo sapiens
ttcaacgggactattatgataggtactggtcttcttggacattaatctttgaatacttgctgactgctaagaaatgaccagaggggaagaggagtttgac

SEQ ID NO: 116710 - DNA, 88 bp, Homo sapiens
aaagcatcaagcgcctttaccctggctctgtgggcctggtggcggtaataaccggaggagcctcgggcctgggcctggccacggcgga

SEQ ID NO: 116711 - DNA, 80 bp, Homo sapiens
tgagaagccgcatggatgaaaagttttttgtgacatcgtaaacatgagccccacacagtgggacttccctgtggaattat

SEQ ID NO: 116712 - DNA, 101 bp, Homo sapiens
ccgaggcgcctcgctggggcggggaccttgccttgcccgggcttcttctcagcctgttgataaccatgttagcccatcttccttcttgggccagacaccag

SEQ ID NO: 116713 - DNA, 50 bp, Homo sapiens
caacagctgagtcaggcactgggtcaggatcagaccccaacaccaacaag

SEQ ID NO: 116714 - DNA, 50 bp, Homo sapiens
gtggaggcgagaacactgaggagtgcctccggagccagcgtggtggccat

SEQ ID NO: 116715 - DNA, 98 bp, Homo sapiens
agaatgtcaccgcccagatctgcatagggtttgaagaagatctctgcctacatgaagtccagccaattcctccgaggtcttttgtttggaaagtcagc

SEQ ID NO: 116716 - DNA, 100 bp, Homo sapiens
aggtttgaaaagcagctggcctgcaaggagtctcaggagcaggggctgcggcagaggctgctggacgagcagttcgcagtgttgcggggcgctgctgccg

SEQ ID NO: 116717 - DNA, 100 bp, Homo sapiens
tccatcttctaaaccaacactcctagccaatggtggtcatggagtagaagggagcgatactacaggcaaagtgtttcatggatttcaaagctggaggcgc

SEQ ID NO: 116718 - DNA, 75 bp, Homo sapiens
gccgattgccagtaggaggatttgctgatctcatggcatccggaggggtttccaggtatataagcaggtgtgcgc

SEQ ID NO: 116719 - DNA, 100 bp, Homo sapiens
caccttttggcccaatgaatatcagctctacattaatcatactcctccaccactgtccaagagtaaggagagagaaatggacaagaaagatttggacaag

SEQ ID NO: 116720 - DNA, 75 bp, Homo sapiens
gagaaattgttggatctggcagtctaggaatggaggcctacaatgcagttgtgcgctactttggcgagagtccca

SEQ ID NO: 116721 - DNA, 100 bp, Homo sapiens
acaggatggagactacgagtttagaaagtggctcatgccaaagaagaaaaccttagtatgcatcagatgctggatcagactttactggagttaaacaaca

SEQ ID NO: 116722 - DNA, 83 bp, Homo sapiens
ggacagccgcgcgctgagggtctcggggcgggcgccgcgggacctctccgggccatggaaatgctttgtggtctacagccaca

SEQ ID NO: 116723 - DNA, 87 bp, Homo sapiens
gccttagctgtgctcgcgctactctctctttctggcctggaggctatccagccgtccagcctgcatgccgtgcggactgcacccacc

SEQ ID NO: 116724 - DNA, 96 bp, Homo sapiens
ttcagcgccaccaggaaggtgaacacgggcttcctcatgtcgtcctacactcacctgttctccaggaccagccctgctggggcccaggcccaggct

SEQ ID NO: 116725 - DNA, 82 bp, Homo sapiens
gccagctgacggagatggtgcagaagatggaggaggtggtagctgagcacccagatgcttcaggtgaggagattgaagagct

SEQ ID NO: 116726 - DNA, 74 bp, Homo sapiens
gaaggtggacagggtaaaagaaagagacttttttctaaagaatctaaggagagagtgttgaaaaaaggagagca

SEQ ID NO: 116727 - DNA, 97 bp, Homo sapiens
gagacagagtagaagaggaacatgaagatgaaagccgtgctggctcagagaagttgtgtggagtttgacttgaatgtaaacaatattgttggaataa

SEQ ID NO: 116728 - DNA, 100 bp, Homo sapiens
tcttctagatgtcatcacaatggatcccaaagacaattgttcaaaagatgcaaatgacggtctggaaaatcccgaagcagaagcccgtattcatctaggc

SEQ ID NO: 116729 - DNA, 74 bp, Homo sapiens
agctgctgtcagcatggcccaggctcctgctgacccgggcagagaaggcccaagtctgttttggtggtctgaga

SEQ ID NO: 116730 - DNA, 100 bp, Homo sapiens
gctggggctccctgtatgcatggtgtggggttggtgtgattagcttcgcagtctggaaagctttaggagttcacagttctacccatggtgttggaatgaa

SEQ ID NO: 116731 - DNA, 83 bp, Homo sapiens
cacgagtctcgggcaagtagtcctctaaggggtgagcccctccagactccgaataggagatcaagagtttgattcattgcctg

SEQ ID NO: 116732 - DNA, 100 bp, Homo sapiens
tttgcttccccaatgaaatctgtagtagcaaattttattgtgaaagatctgctaatgaatgacagggagaaagctttgcagaattcagatctgcaggaac

SEQ ID NO: 116733 - DNA, 75 bp, Homo sapiens
ggttagcggagcaatgcgcaggaataaggaagcgacctgcaaccgacgcaaccatgtccaagggacctgcagttg

SEQ ID NO: 116734 - DNA, 97 bp, Homo sapiens
tggaggtgtcactggccccggcctttgccccaatcttgtgtgggcactgaagggggactacaggttcgagagacttttcttggtagagatggaaatc

SEQ ID NO: 116735 - DNA, 100 bp, Homo sapiens
caggcctcattggacagcattcgaggttatgaagacagtatggagtttccagaccatagtagacatttgctacagtgtctgagcgagcagagacaccagg

SEQ ID NO: 116736 - DNA, 83 bp, Homo sapiens
tgcccaccgggatggagaaggaggaggaatcggtgtcgtgaaaactacccctaaaagccaaaatgggaaaggaaaagactcat

SEQ ID NO: 116737 - DNA, 96 bp, Homo sapiens
atccctgtgaatgtgtttgctctcatgaacatgcaatgagaagactgatcaatctggtaaaaatgcatttgcaaagggagaaaatgaaggccaaac

SEQ ID NO: 116738 - DNA, 100 bp, Homo sapiens
ggagtgagaagcaagaaggccctggacacagcaatatctctgggctttcacaggttatgaagttcatggaatggaaaaaataccagaagatggaccagca

SEQ ID NO: 116739 - DNA, 50 bp, Homo sapiens
tgctcccatcattgatgtggtgcgatcggcatccgtgtacaagatttgca

SEQ ID NO: 116740 - DNA, 83 bp, Homo sapiens
cgcaggctccctgcctactcccccaccggggatttcagctcaccatggatgatgatatcgccgcgctcgtcgtcgacaacggc

SEQ ID NO: 116741 - DNA, 82 bp, Homo sapiens
gcagcgcaaccacgagacggccttccaaggcctgtcatctttacttcagagtgttactgggaacccagttccagccagtgaa

SEQ ID NO: 116742 - DNA, 85 bp, Homo sapiens
ggcaactcagaaacatcaggtccaaggttatgcatgacatcctgggatgtaagatcacagaatccccctccagcccaccagtcac

SEQ ID NO: 116743 - DNA, 51 bp, Homo sapiens
gtcagctcccgcacagtaacaatcctcacaaattctttcctgatgaacgtt

SEQ ID NO: 116744 - DNA, 74 bp, Homo sapiens
gaacgcggtctgcaagctgacgtattgacaaccatgagtggaaaaaactaattatggttcagcactggcctgag

SEQ ID NO: 116745 - DNA, 100 bp, Homo sapiens
ggaggagaaagcggcagccgctggagcccaaagatccctgtgcagctccgattttattcgcatccttgtgatcttctctggaatgttccttgttttcacc

SEQ ID NO: 116746 - DNA, 82 bp, Homo sapiens
accatttctcatgaacagaaacacctaggaagggagaactggtgagccagccatgagagggtatcttgtggccatattcctg

SEQ ID NO: 116747 - DNA, 75 bp, Homo sapiens
ttatcttcagtgtgtcttggcggatgagttgtcggatatgttgcggtcactatctaacacaaaacctacagtcaa

SEQ ID NO: 116748 - DNA, 82 bp, Homo sapiens
gtggaggttaacagctatctttctaaaccaggaatggatctggcagacacctatattatgtttgttcggcaaaaccaagata

SEQ ID NO: 116749 - DNA, 100 bp, Homo sapiens
ccttttagctctgagcaaaagtggatggctgttaagtgtgtacaccgaacacagcaggtctccatcatcaccagttccagtagtgaaaaacagaacccaa

SEQ ID NO: 116750 - DNA, 50 bp, Homo sapiens
tgcaaagggatgtgcccaagtcagtgtggaggaatgaacgtaattaactt

SEQ ID NO: 116751 - DNA, 82 bp, Homo sapiens
gggcactgctttccactcggctcctgtcgtccgttctctcaggctcccgttcagctccttccgcttccagccgttcgagtcc

SEQ ID NO: 116752 - DNA, 100 bp, Homo sapiens
tttgaccactatgatttctccagggccaaaatcgcctgcaatctggcctggctggtggccaaagcctttgggacagattttaaagcctgcagagaaaaag

SEQ ID NO: 116753 - DNA, 96 bp, Homo sapiens
cgcggaaaccgatctgcccgttgtgtttgtgaaacagagaaagataggcggccatggtccaaccttgaagaatgaagaaggatggaggagagcagt

SEQ ID NO: 116754 - DNA, 50 bp, Homo sapiens
ggtggagttggcaggtgtgcgcaggccaaggaccccttcgctcacctgcc

SEQ ID NO: 116755 - DNA, 74 bp, Homo sapiens
gatttcttatcaaacttcatccagaggttcatggtgtgggccgaagatatgctcatgtggtgttgaggaaagca

SEQ ID NO: 116756 - DNA, 75 bp, Homo sapiens
tttcatccaactggtccagaaggcacggctagaggagagcaaggagcagaatcatgtccctaaggaggaagctgg

SEQ ID NO: 116757 - DNA, 100 bp, Homo sapiens
gcgggtcttgggtcctccgagagcagcagcggtaaccatgtgcgaccgaaaggccgtgatcaaaaatgcggacatgtcggaagagatgcaacaggactcg

SEQ ID NO: 116758 - DNA, 100 bp, Homo sapiens
tcctcgtgcaggaagtactcatcgactgatgtggcagactttgctccctggcaaaaactattgcccagaagaaaagatgtttggttttcacaagccaaag

SEQ ID NO: 116759 - DNA, 90 bp, Homo sapiens
gcgggccccgctccgcttcgaatggcactgctcagcacgcaggcatgtgaggaagctgggcttaaaggagactccagcaaatggagagac

SEQ ID NO: 116760 - DNA, 74 bp, Homo sapiens
aaacttcactttcttcattcacaatcccaagcgccaggaccttgaagttgagaagaagctcattcacacagaag

SEQ ID NO: 116761 - DNA, 100 bp, Homo sapiens
cccgcccagttggcccagaggatctcttctaacatccagaagatcacacagtgttacactcctagaatatgcagagaaatggaaaacttcagaagatcct

SEQ ID NO: 116762 - DNA, 76 bp, Homo sapiens
caactgtgcacctcagaaaactcaatgacagtaagcactatcctttgtactccctcaacgtggcctccatgtggtt

SEQ ID NO: 116763 - DNA, 90 bp, Homo sapiens
aaacagaccagaagattaccaaggacacaactcagatgggaagttcatcgcccgggcacagcggatagagtacgactgtgaactagttcc

SEQ ID NO: 116764 - DNA, 100 bp, Homo sapiens
ttccagaccaaaattgaaaaaatggttgacctcacccagatgaaccaaggatcgggatagcagtataaaattagaatcaagacagctgactgctcagcag

SEQ ID NO: 116765 - DNA, 100 bp, Homo sapiens
gtgtcccacttgttcgcggcctataggtgtgttccagagaacaagccttcagacatttgctatattgacgctgagctgtcaggggactcaggcttatgag

SEQ ID NO: 116766 - DNA, 101 bp, Homo sapiens
atctaccagatgtacttgtgcttcctgctggccgtgctgctgcagatcactggggtgatcctgctggctgttggagtctggggcaaacttactctgggcac

SEQ ID NO: 116767 - DNA, 90 bp, Homo sapiens
ggcggaggcagaggtggaggcgctttgaaagatgttccatttaagcagacctcttccatagctgtagctggagcggtaattggagctgtt

SEQ ID NO: 116768 - DNA, 90 bp, Homo sapiens
gagtggtaccaggaagttccttgttttaatgtaaatgctcagctgaaaccaatggagaacatcatcaagaaggtgatcgggcagaagttt

SEQ ID NO: 116769 - DNA, 100 bp, Homo sapiens
gaggtgctaagtggatcctctggccagctgactgcacttcttttttgagaaaggaaggaatatatcctgactgattagaccatgctgcagatgcgaggaa

SEQ ID NO: 116770 - DNA, 95 bp, Homo sapiens
gattttttgcctttgttgattaactggacaaattcagtaataatttttcaccatgcatcggaaaaaggtggataaccgaatccggattctcattg

SEQ ID NO: 116771 - DNA, 75 bp, Homo sapiens
gtccggaattcatggggtgaaccatggctcactgcaaatctaacttcatcatggtgaactaatttagagcatcct

SEQ ID NO: 116772 - DNA, 82 bp, Homo sapiens
tccaactcagaggacgaggcctccttcaagtccgagggcgaccattgacgaggtggagacggacgtggtggagattgaggcc

SEQ ID NO: 116773 - DNA, 90 bp, Homo sapiens
acctatgggaagctgctagctctaacagatattggtgctggaaaaggcaaatactatgctgtcaattttccaatgagagatggtatagat

SEQ ID NO: 116774 - DNA, 101 bp, Homo sapiens
tgaaccagctgagcgctgccatcccggccacgcgggtggaggtgtccgtgtcctgcaggtgacaaacagcatgtttggtgcttcaagaaagaagtttgtag

SEQ ID NO: 116775 - DNA, 50 bp, Homo sapiens
cactagaactacatagttggagtcagggggactgtattgtgacattcgtc

SEQ ID NO: 116776 - DNA, 74 bp, Homo sapiens
gaagaaggtccgcgttaaatgcaagtaggtgcacgtctcatcgcacatgctggcagcctcaccaacctggccaa

SEQ ID NO: 116777 - DNA, 100 bp, Homo sapiens
gtgcgctgcgccgcccgccgctgagggaccgcggggttagccactgctggctgcttccagtgttcgccgagagggagtgtttcaagagccagtgacaagg

SEQ ID NO: 116778 - DNA, 76 bp, Homo sapiens
tgaaatttggctgtcaagagagtccctattcaggtagaacgtcatgacatgaataccttaagcctgcccctgaaca

SEQ ID NO: 116779 - DNA, 98 bp, Homo sapiens
cgacatgatggagttgtacaacaggttacctcgagctgaagtgagcaggtatgtgtctgatttcaccagcactctccagtccatacgaaagaagtgca

SEQ ID NO: 116780 - DNA, 50 bp, Homo sapiens
tcaaaatggccctatgcttaggttacgccccatggtgtccatcctgccag

SEQ ID NO: 116781 - DNA, 90 bp, Homo sapiens
gtctccgaggagctggggccatcaaggctggaaactgacaaactagctctcccgatgagccccagcccgcttagcccgagccccatcccc

SEQ ID NO: 116782 - DNA, 98 bp, Homo sapiens
gcaggatgaaggcagagcgtgtggcatctccacctcaagggtatctgcccaaactggaacttatgctgtagacatttctttgtggtttatctaaaaac

SEQ ID NO: 116783 - DNA, 90 bp, Homo sapiens
ggctgcccctggagcacctggtggaagaacaagtggcagggcctgcaggagaggctgggcccccagggcctcctgggctgcagggacccc

SEQ ID NO: 116784 - DNA, 75 bp, Homo sapiens
gaagatacaggaagaggcttgtgtgggagtcgcctggagccctccatggatgattgtcttttgaaagtgtggtat

SEQ ID NO: 116785 - DNA, 48 bp, Homo sapiens
gcgacccgtactgggcctactctgatgttccatttaagcagacctctt

SEQ ID NO: 116786 - DNA, 101 bp, Homo sapiens
gaggagacggagcagaagcggcgcctggaggcagaaatgagcaagcggcagcaccgcgtcaaggcctccagaggaagaagtccaagttccgcttgtccaag

SEQ ID NO: 116787 - DNA, 90 bp, Homo sapiens
aaccaacttttcaagaaaaagcaatggagattggatggatgcacaatcggagacaaaggtggcagggcccagccccgaaccagacaaggg

SEQ ID NO: 116788 - DNA, 76 bp, Homo sapiens
aacaaagagatgccagggctggaccctaatttgagaagtgcaggtctagatgttgatggaatatatcgagttagtg

SEQ ID NO: 116789 - DNA, 88 bp, Homo sapiens
atgcacggttgtgttgcgtgtagcttccactttcataagagatactggtgtaatggtaaaattatatccaaatatgactgcggtactg

SEQ ID NO: 116790 - DNA, 75 bp, Homo sapiens
caacgggcagtttgtcgaacgatgttggactcatagtcactgccagaaagttagcagacttgaagaaagagaagc

SEQ ID NO: 116791 - DNA, 104 bp, Homo sapiens
cttcttcttcaccgccaggacctccttcttcaggagagcgccccagggcaagccccgctccggccaacaagcagaatacttctatgaattcctgtccttgcgct

SEQ ID NO: 116792 - DNA, 82 bp, Homo sapiens
ggaggccgtgaacacctacgaagcatcaagatggtgctcatgtggaccagtggtgacgccttcaagacggcctacttcctgc

SEQ ID NO: 116793 - DNA, 48 bp, Homo sapiens
aacagtttgaagctgaggattttatttcttctggtgaatacattcaga

SEQ ID NO: 116794 - DNA, 83 bp, Homo sapiens
cgagtgcgtggcctcctaatccggatcctagtcctgagcgtgtctgtgtgcgagtgggaggcagtaggggacacattagaaga

SEQ ID NO: 116795 - DNA, 50 bp, Homo sapiens
ggacctgctgtgccatcaacaagggatgtgcccttctcgtaaagttgttc

SEQ ID NO: 116796 - DNA, 141 bp, Homo sapiens
cctcttcgtggaaccctgagcggcagagggcagtgtccttgctgaagcaggctgcagactcaggcttgagagaggtccttatgtcgtcagaagatcgagaagctcaggaggatgaattgctggccctggcaagtatttacg

SEQ ID NO: 116797 - DNA, 110 bp, Homo sapiens
acggagttgcgtcccggggacttggggccgcagggagccttgaaaagatcttttgaggtcgaggaggtcgagacacccaactccaccccaccccggagggtccagactcc

SEQ ID NO: 116798 - DNA, 90 bp, Homo sapiens
aaaaagctgaaggtggaggcgccgcaagcgctgagcctgattacatcaaccccagagccgtgcagctgggctcccttctcgtccgcggcc

SEQ ID NO: 116799 - DNA, 90 bp, Homo sapiens
agtcaagctgccttaggcttataacatcacatttaaaagcatctcaggcctgaccctcttggacctttcttctttgccgacaaccactgc

SEQ ID NO: 116800 - DNA, 90 bp, Homo sapiens
ccgccactgccgcaggaggcgtgaggaccgtataatagacgctggccccaaaggaaactactctcgatttatgaatcacagctgccagcc

SEQ ID NO: 116801 - DNA, 95 bp, Homo sapiens
tctcgctgatcgcctaacttctactgacgaagcttggaagttgcagaaggtgatagaaattgaagatgcttcacccaccaagtgtccaataacaa

SEQ ID NO: 116802 - DNA, 100 bp, Homo sapiens
tctttcaccgcagtgggctaccataaacacatcaccttgatttttaatcccacggacatgaagaatgcaaccctctccctgaattctaatgacagtgagc

SEQ ID NO: 116803 - DNA, 89 bp, Homo sapiens
aattcagcctcaaaaccgtcctgctgcttgctgaccaaatgaactcacttgaaagcagtggggtccggacaaccaaaaatgaagaggag

SEQ ID NO: 116804 - DNA, 100 bp, Homo sapiens
gtcctacgaggagggctgtcagagcctcatggagtacgccatgaaccagagaatcagtcagagtgctccagtgaaacagccaccacccctggctccccag

SEQ ID NO: 116805 - DNA, 74 bp, Homo sapiens
ggtagttccatgctgtctgttcagacttcagcttggtgctttgatgcggcctggaagaattgatagaatcatct

SEQ ID NO: 116806 - DNA, 98 bp, Homo sapiens
gtcaatggcatccagctggggatccacttgtacgcccatggcgtgtttctggtgaataagtctgatgacacagcagaacatcttctggagttgggctg

SEQ ID NO: 116807 - DNA, 50 bp, Homo sapiens
cttgaaccaggtcatgctccaaatgcctgccgaggaggaactgaagacga

SEQ ID NO: 116808 - DNA, 100 bp, Homo sapiens
gagaagctggaccccttggtaaaagacaaggccttctccaagatgagcgtgaagccgtgcagaagaagaccttcaccaagtgggtcaattcccaccttgc

SEQ ID NO: 116809 - DNA, 99 bp, Homo sapiens
gctgacaactcacagcctgaaaatgaaaaggaagcttcaggtggagacagcccgaaggggaacgatcaggtccggtttgagctcagctgctactcactg

SEQ ID NO: 116810 - DNA, 74 bp, Homo sapiens
ggagaagctctaagtacactcgtcttgaatagccccatggctgggggttatggagtgatgggtgacgatggttc

SEQ ID NO: 116811 - DNA, 82 bp, Homo sapiens
atttccgggagaggctgctgtggaggctgaggaggcggcggcggagatctggttcaaatctgaacatcaatgatgtactagg

SEQ ID NO: 116812 - DNA, 80 bp, Homo sapiens
tccggccgcctggctccccatactagtcgccgcccacagcccccatcccgtagcccttcctggatctggagagagcagct

SEQ ID NO: 116813 - DNA, 99 bp, Homo sapiens
attggcaggagattatagctctgtatgagaaggacaacacctacttaggtggacctcccccacacggcgatccaggaagcctccaacaagaagaaattc

SEQ ID NO: 116814 - DNA, 50 bp, Homo sapiens
ggcaggttgggaggagcggccgaaggaaatgcaacctcaccacaagtaca

SEQ ID NO: 116815 - DNA, 100 bp, Homo sapiens
tcgtagtccgacgcctggggcgatggatccgtttacggagatctcacattcttgaaggtggcattgaagagcactaagatcggaagatgagtgagcttga

SEQ ID NO: 116816 - DNA, 99 bp, Homo sapiens
ctggaccagtacagagccagccttgttgatgcaataaagagattactccagcccaggcttgctgatgaccgtatggcactggtgtcaggcatcagctta

SEQ ID NO: 116817 - DNA, 74 bp, Homo sapiens
cttcatcaaaaatagtgatagctttgataacacttttccagccattaactccaggctctcgagaatttgaagat

SEQ ID NO: 116818 - DNA, 75 bp, Homo sapiens
ggagcacttcctattccactggattgggaaagaccatggcaggaggctgcattgaggcgtgagcaaaagaagttg

SEQ ID NO: 116819 - DNA, 75 bp, Homo sapiens
atgaggcaagcgcagggggacggggaccagcagctgtcgccgccgctctcagtggctagaaagtttgaaatggtg

SEQ ID NO: 116820 - DNA, 50 bp, Homo sapiens
ggagaagccgcccaaagaactgtattctaccttgtaaatactgttatttg

SEQ ID NO: 116821 - DNA, 75 bp, Homo sapiens
cgtggaggccacctctaggcttaagaccttcaacttgatcccggctgttgccttaaagcccactctcatcttgca

SEQ ID NO: 116822 - DNA, 50 bp, Homo sapiens
acaccactgaagcattgccaaggatgcggtgacggtgctcctggccagaa

SEQ ID NO: 116823 - DNA, 119 bp, Homo sapiens
tgaagatgtccttaccagctttgacaatacaggaaatgtttttggataacagggcaagattcagaggaagaaaaggatattgatgcattatgttgaagccaacatggaaaacaacaaat

SEQ ID NO: 116824 - DNA, 74 bp, Homo sapiens
cacaattcaactttcagaatgcagaatgaagactggcccatttgcagagcactccaaccagctgtggaacatca

SEQ ID NO: 116825 - DNA, 50 bp, Homo sapiens
agctccagagcccagacttgcagcacttgcacctcctgcgccgccgcccc

SEQ ID NO: 116826 - DNA, 100 bp, Homo sapiens
ccaaaaccagtcatgaccactagacccacagctgttaaagcaacaggagcccgtaggtcatcttggagggtcgtctcaagtattgaacaaaagacggaag

SEQ ID NO: 116827 - DNA, 104 bp, Homo sapiens
cggagcgcccccggcctctgtcggctccgtaggctcaggtgacagagctgaatgaacctctctccaatgaagatcgaaatctcctctctgtggcctacaagaat

SEQ ID NO: 116828 - DNA, 90 bp, Homo sapiens
ctggctatttggaatttaaaggatatttgactttttctaacctcccatgaggctgtaagccagtgagctcctccgacagcgaggcccccg

SEQ ID NO: 116829 - DNA, 75 bp, Homo sapiens
gcaagagtaacagcagcgccgtcccgtccgacagccaggcccgggagaagaaggatatggagtaatagtactaaa

SEQ ID NO: 116830 - DNA, 75 bp, Homo sapiens
cacgaatctgcccacccctcctgtaacccagcctgtttcacttcttggtctaccccgagccccggagcgagagcg

SEQ ID NO: 116831 - DNA, 100 bp, Homo sapiens
tcggcagcacatgcgcaaggctgtccccttccaggtggcccagaaagaggctgcacgtgggaatttggagccatggtgaactacatcaagaagacatatc

SEQ ID NO: 116832 - DNA, 83 bp, Homo sapiens
ggaagcgtcgggattaggtgaaactcaccatggatgatgatatcgccgcgctcgtcgtcgacaacggctccggcatgtgcaag

SEQ ID NO: 116833 - DNA, 75 bp, Homo sapiens
gatcctgggcctcctgtgcaaaagcatggaatcagagatcattgatttcttcctgggggcctctctcaaggatga

SEQ ID NO: 116834 - DNA, 98 bp, Homo sapiens
aggaggatgagggtgaggagaagtatgaggtggtgaaactcaagatccccatggacaacaaggaggtcccgctccccgaggcgcaggtcccccgtgcg

SEQ ID NO: 116835 - DNA, 75 bp, Homo sapiens
gctacccctaataaagcgactcattgagcaggaccccatcctgttctctggaagcctgaggatgaatctcgaccc

SEQ ID NO: 116836 - DNA, 74 bp, Homo sapiens
cataatcggaatgtgatcacagagcctatttacccagaagtagtccatatggggagaagcccgaggaagattga

SEQ ID NO: 116837 - DNA, 75 bp, Homo sapiens
cttttcagcatccttatgtgagagtttcgctctgctgcccaggctggagtacagtgatgtgatctcctgacgtca

SEQ ID NO: 116838 - DNA, 73 bp, Homo sapiens
tcgggggcaagggtggtgtgggcaagaccacctgcagctgctggagccagttctgcttctcggcaaggagcga

SEQ ID NO: 116839 - DNA, 90 bp, Homo sapiens
acgaagtcaggtgtatccaacagcctctaatatggagtatatgcaccagatactgctacaccatctcatcggcatggacctatatgtggc

SEQ ID NO: 116840 - DNA, 119 bp, Homo sapiens
aagatccctggaatatgaagagacacagtatggtagccacacccccaggttttttgcatgtctgacacccatgactccacctggaccttatggctccacccagaagcaattcagcccaa

SEQ ID NO: 116841 - DNA, 97 bp, Homo sapiens
taaccagagccggctctttctcggagcactcactgtgggcctcgtgcgacagtgtcaaacaatccatggacgagaccggacgtgcatccctccccgg

SEQ ID NO: 116842 - DNA, 90 bp, Homo sapiens
agaatgcctatgaccggcgtcgagaatttcaactgtttagaaacctgctgaagtggtatgctaaggagttcaaagacccactgctacagg

SEQ ID NO: 116843 - DNA, 96 bp, Homo sapiens
agccttccaagctctactgtgacttcagagacactgccaagcagccttagccctagtgtagagatatggcaaaccaggctgtaatgcagagacctg

SEQ ID NO: 116844 - DNA, 75 bp, Homo sapiens
gaagagaagcagtgaaggagtgcagaggcatcacctgaaagctatccgtggtcctgaaccagttatgtgtgttgc

SEQ ID NO: 116845 - DNA, 82 bp, Homo sapiens
ttagagctgcggaacaggacgccctctgatgagttaacagagcagtttcataaagttgaatctcaactgaataagctaaatc

SEQ ID NO: 116846 - DNA, 100 bp, Homo sapiens
ctcatctgtagagactgatttgcaacccttccgggaagccatagctctgcatggctcagtttatgaacctcttaaaagcattaatcttccaagacctgat

SEQ ID NO: 116847 - DNA, 107 bp, Homo sapiens
cggaagaccgcgcgcagggcctgcagcgggagctggacggcgagcgcgagcggcgcgagaaatccacaggtcctggctaccctgggaagagacaagaagtaaatgaa

SEQ ID NO: 116848 - DNA, 100 bp, Homo sapiens
tgtggtgcacccagaggccggggaccttgccaaccctcccaagaagttcagaggagcccagaggaaatgcaagggtggataaacaaaatcaattgtgtgg

SEQ ID NO: 116849 - DNA, 75 bp, Homo sapiens
caaaatcagagctggaacctgaggagagagttcctctgtgacgagggtgcaggtatctctggggactacatcgat

SEQ ID NO: 116850 - DNA, 75 bp, Homo sapiens
ccgcgcacttcgtcatgttcttcgcgccctgccttgccaacattccactaacccccgagactcagcgggaccagg

SEQ ID NO: 116851 - DNA, 101 bp, Homo sapiens
ctggattggacaagcaggcaaagctgagctccctgtgctgtcaggaatctacaggacttggctcgtatttacattcgacgcacacttagaaatttcataaa

SEQ ID NO: 116852 - DNA, 90 bp, Homo sapiens
gtctgtgagcgagatcttcgtggagctgcagggctttttggctgccgagcaggacatccgagaggattctggactctacttataatatcc

SEQ ID NO: 116853 - DNA, 100 bp, Homo sapiens
aaggtggagccaccagcctctccttgtaagcactatcctttgtactccctcaacgtggcctccatgtggttgaagctagggagactctacatgggcctgg

SEQ ID NO: 116854 - DNA, 74 bp, Homo sapiens
atggaggagcactgcaagcttgagcaccagcaggcccacctgtagatccagatgaagactctgacaacagtgca

SEQ ID NO: 116855 - DNA, 75 bp, Homo sapiens
caagtagcccgagagagcacctacttgtcctccttgaagggctccagtccctcaacaccttacactaagtcaaag

SEQ ID NO: 116856 - DNA, 50 bp, Homo sapiens
tgataacaccctgtaacagctgagcgggtttcttccctaatgtgggaagt

SEQ ID NO: 116857 - DNA, 94 bp, Homo sapiens
caaccgtacccggctgtaccggcagatcctcaggggcaagtacagttactctggggaggcaggggaaatggaaggtgatgcagtcgaagccatt

SEQ ID NO: 116858 - DNA, 50 bp, Homo sapiens
ctggagtaccctgttcctggcagatggtgatcgctcacaccaaatccttg

SEQ ID NO: 116859 - DNA, 75 bp, Homo sapiens
ttccaaacagaggccttcatgcctttctgaaaaatatgacaggttttgcactgattgcaaaaataaagtcctccg

SEQ ID NO: 116860 - DNA, 51 bp, Homo sapiens
tggaggaagtcaagaaatttctagtaccgggacaaactctgcctgggcgag

SEQ ID NO: 116861 - DNA, 82 bp, Homo sapiens
atctcgggctcggaacgagactgcacgctctaagcgaaagacatgaggcctcagcctgaaatgaggttgttttgaggtcatc

SEQ ID NO: 116862 - DNA, 98 bp, Homo sapiens
gggaacagccatgcaaaggcaggggaggaagccacctcgaggtgttccagatcgcgtatgtgattgtgaaggcagctaactccccccggcctggaaac

SEQ ID NO: 116863 - DNA, 80 bp, Homo sapiens
aggaacgaggcaaggagctaaagcagcgtgcgttcagccctgggtgttcacgccccgcgtcatcggcacagctgtggcca

SEQ ID NO: 116864 - DNA, 50 bp, Homo sapiens
agaaaatctggcttcggctccgcgggctcacgtgtggagtgagagcgagg

SEQ ID NO: 116865 - DNA, 97 bp, Homo sapiens
gccaattggtcgtggtcagcgtgaactgattattggtgaccgacagactggatgggatggaggtggataccacaccaacagttgctggacagtttga

SEQ ID NO: 116866 - DNA, 100 bp, Homo sapiens
tgatatttgccaaatttgatgaagtgcaaagttcaggcggtatgattttgagtgtctgcaaagatggagtttcactcttgtctcccaggctggagtacaa

SEQ ID NO: 116867 - DNA, 83 bp, Homo sapiens
taaagcccgagcccaaaccccgccaccatcatagtaatgttgcaggtcagtggaatccagtttttatgcagcctctgccagag

SEQ ID NO: 116868 - DNA, 87 bp, Homo sapiens
gcaatttaaagatcctctccaaggtgtagtattgagtcctgtttgagctattgttctctttttcctgaaaaatggcactgtcaaaga

SEQ ID NO: 116869 - DNA, 74 bp, Homo sapiens
tttggaagcatttttggatataagcggagaggccatctgagttcttcttcaatttatccagtgtgccttgcacc

SEQ ID NO: 116870 - DNA, 50 bp, Homo sapiens
ttgcagttgaaggagtataacacagattcttctaacagagaaaatgccat

SEQ ID NO: 116871 - DNA, 90 bp, Homo sapiens
gaagatgatgacgatgatgatgaagaggatgatgatgaagagaaaactcctccttaacttggtagatcatactgaagtggtcagagattt

SEQ ID NO: 116872 - DNA, 100 bp, Homo sapiens
gataccgaagcgggctgtgtgccccttctccacccagagatcttgtagaaaatttcagctgtagcccttggactagaagctgaaataacagaagctgtgt

SEQ ID NO: 116873 - DNA, 80 bp, Homo sapiens
aatctgaatgcggtgcgggagaccatggacggtcagcccaaggccaaccccactgtcactctgttcccgccctcctctga

SEQ ID NO: 116874 - DNA, 82 bp, Homo sapiens
tctccatcacccaccaacaacaccacaataatccacagccaagtccaagtggtaagaagttcagaagcaagcctcagttggc

SEQ ID NO: 116875 - DNA, 100 bp, Homo sapiens
tgctggcgctctggctgtgctgcgcgacccccgcgcatgagcttggggcttccttggtcgcacccaccacctgcctgcccactggtcagccttcagggac

SEQ ID NO: 116876 - DNA, 80 bp, Homo sapiens
tcagggctgcagcccaggagcctcaaggcggcccggcgggcgactggacggccggacagagccgctcccgaggccccggc

SEQ ID NO: 116877 - DNA, 100 bp, Homo sapiens
ctccactaatcaccagaacaaaatgtgcagctgtggaaatacaaagaactctgaatcaacttggaacacctcaagattcacctgaattgaggcaacagtt

SEQ ID NO: 116878 - DNA, 100 bp, Homo sapiens
tcgagctgctgctggattgaactcagagaagccgggttgtgcggtctgaaagtagaagtggatatggagaaaattgcagctgagattgcacaggcagagg

SEQ ID NO: 116879 - DNA, 83 bp, Homo sapiens
gtcggagccgaataccaagctcggatccctgaatttgatccaggattttttatcaagcagaaatgcatcgaacaacgagaatc

SEQ ID NO: 116880 - DNA, 100 bp, Homo sapiens
caagggcttcagcaccgcgcccatggcagagccagaccgaagcaccctcactatgtggctctacctggcggccttcgtgggcctgtactaccttctgcac

SEQ ID NO: 116881 - DNA, 83 bp, Homo sapiens
atatgatttggataaagatgaaaagatctcccgtgatgagctgttacagtccctggccccacctcttctgccacaaacgtcag

SEQ ID NO: 116882 - DNA, 100 bp, Homo sapiens
gtacagggagctgcagaggtacgccgaggaggttgggatcttcttcactgcctctggcatggatgaggaactagccagctgtggatggagtaagaaggag

SEQ ID NO: 116883 - DNA, 101 bp, Homo sapiens
agagcctgtgtgtttaggaggatgtgagcacatcttctgtagccatgaagatggacctacagctaaaaaattaaagactgagcaagggggagcccacttca

SEQ ID NO: 116884 - DNA, 83 bp, Homo sapiens
gtttgaaaaccagctgcttcaaattggacttaagtctgaatttcggcagaatttagtaagactttgaccccgacgcaggcttc

SEQ ID NO: 116885 - DNA, 82 bp, Homo sapiens
cccgggtggcttacagacgctgccagcatcgccgccgccagcagcctcccgcgacgatgcccctcaacgttagcttcaccaa

SEQ ID NO: 116886 - DNA, 106 bp, Homo sapiens
gggaagtgtggtttggattccatcagtctgttcggcctgccatgtggaaaatgatgcttaatatcgatgagaaagtttcattgtgcaaatctaacttcatggcctc

SEQ ID NO: 116887 - DNA, 80 bp, Homo sapiens
gtgaccgagagcgcgaatatcgtcatcgttagaaggaaagtacacaggaagatgctatgaaatttccatcttcccaatct

SEQ ID NO: 116888 - DNA, 90 bp, Homo sapiens
gaaataggctggtctgcagtgagcccttggattctagccagcacgactgaaggagaggcagttgctgtgggaggtgtggtaactgctgga

SEQ ID NO: 116889 - DNA, 73 bp, Homo sapiens
gacgagcagcaagtcagggagcttaaggccgtggagaccaacctggcttccaaggacagccactgggtctttg

SEQ ID NO: 116890 - DNA, 82 bp, Homo sapiens
accattgacgccatgtcgggttattcgagtgaccgagaccgcggccgggaccgaggtggccacagatgtctttaattccaaa

SEQ ID NO: 116891 - DNA, 97 bp, Homo sapiens
gacacctggggccgccgaggcaaaggacgcagagggctctacgtgtttgcacctggctgccaagaaaggccactacgaagtggtccagtacctgctt

SEQ ID NO: 116892 - DNA, 114 bp, Homo sapiens
caccgagtccgaggtctacgacgacggcaccaacaccttcttctggttggccgactgcgatgtgagtgacagcagctgcagcagcctcgccgcaaccctgttggccaaccacag

SEQ ID NO: 116893 - DNA, 100 bp, Homo sapiens
ggagtgaaccgctgcaaactcatctccaggaaggacttcgagaccctctacaatgactgcaccaacgcaaggaatttgctgcactgacaaaagaattaaa

SEQ ID NO: 116894 - DNA, 82 bp, Homo sapiens
ccactgatcaaggtcatagaaagtgaagattatggccaacagttagaaatcgagcacgtgaattgcctctgcttacgttcag

SEQ ID NO: 116895 - DNA, 100 bp, Homo sapiens
cggcggcttctacatcacctcccgcacccagttcaacagcctgcagcagctggtggcctactactccagcgcagttggcctcctgaccgtcatcagcaaa

SEQ ID NO: 116896 - DNA, 83 bp, Homo sapiens
cgcggtccctgtattggtctcctgctcctagagaaaacctcggatcaattctcagctggtggcacaacaagtggcacaacagt

SEQ ID NO: 116897 - DNA, 95 bp, Homo sapiens
tcgtcctctgctgcatcatgatgtcaacaaccgtggctcacaagatgaaagagcacttgagtcagcagatactggagttatttgaaacatgtcag

SEQ ID NO: 116898 - DNA, 50 bp, Homo sapiens
gctgtcccggccaggaaccatgagggccccaaggctgttgcagctcctcg

SEQ ID NO: 116899 - DNA, 100 bp, Homo sapiens
caggggagagcttcatcaccccctacctcctggggcccgacaagaacttcacgcgggagcagcgggctgacgcacgaggcacacaggaaggaggtggagc

SEQ ID NO: 116900 - DNA, 100 bp, Homo sapiens
agggggcgtccgtgggccgctgcgccgcctcaccctacctgcggccgctcacgctgcattaccgccagaccgagacatgggtgcccggcaccgcgcccga

SEQ ID NO: 116901 - DNA, 88 bp, Homo sapiens
gttcctaccttatgagctcggttttcttatgcttataagagtggaacagttgttgacctcctgtactggagagacattaagaagactg

SEQ ID NO: 116902 - DNA, 100 bp, Homo sapiens
gggcatttccgagagaagctgcaggctgccaatgcggaggacatcaaggtagagtcactgaccacagagctgtcagctgagcgcagtttctcagccaagg

SEQ ID NO: 116903 - DNA, 101 bp, Homo sapiens
acctcagccgcctcctagcggcgcggcgctcgctcctacggtgaatctggattgggaaagtcgacattaatcaactcattattcctcacagatttgtattc

SEQ ID NO: 116904 - DNA, 98 bp, Homo sapiens
gggctgcccgtggcgcccgcaggcggcaggaatcctcctccggcgatagtgcaaattgggaatcgtgaaattcatagaagctgaacaggtgcctgaac

SEQ ID NO: 116905 - DNA, 96 bp, Homo sapiens
aaattgccccagatgcctccttcatcgatgacgaagcactggacctaccatgaaagacttctgaatccaggaagagaaactgactgggcaacatgt

SEQ ID NO: 116906 - DNA, 75 bp, Homo sapiens
cgacaacagcctggcgtccgccacgaagatgcagatgcctccagctattacgagtcccatggcaacaaggatcag

SEQ ID NO: 116907 - DNA, 97 bp, Homo sapiens
aacgaatcatccacgcacctgcagctctgctgagagagtgcaagccgtggggctgttcggctcttgaatcccagcgatgaaaccaggaactcacttt

SEQ ID NO: 116908 - DNA, 75 bp, Homo sapiens
tgatggtgtagcgctttaggggaagggaacgatcagcgttggagtagatgccaccgacctttttgatcgctatga

SEQ ID NO: 116909 - DNA, 51 bp, Homo sapiens
agtggatatagcacaccatccccagccaatggtgcctggacatggccctgt

SEQ ID NO: 116910 - DNA, 80 bp, Homo sapiens
agtccttcctccacgggcagcggccagccgggaaatgtgagggtcccgatgtcctggtgtacagcttggactttggtggg

SEQ ID NO: 116911 - DNA, 75 bp, Homo sapiens
gacccggtttgctgatcgccccagggatcaggaggccaagctataacatcagaaatggtgaatgaatacaagaaa

SEQ ID NO: 116912 - DNA, 82 bp, Homo sapiens
cgaacacagtagtggaagatgtaaagcaatatttcgagcagtttggcaaggagtccaaaactacttacctggaagaccttcc

SEQ ID NO: 116913 - DNA, 87 bp, Homo sapiens
cttggcttccctcaagtctatccgagagtttgcagcaaagatcattgaaggtccaggaggcccaggaggtcctgggggacccatggg

SEQ ID NO: 116914 - DNA, 90 bp, Homo sapiens
ggcggcggtggtgcctccggactgcacttgcgaagggagcttggggaggaagagaactacgatgacccgcacaaaacccctgcctcccca

SEQ ID NO: 116915 - DNA, 76 bp, Homo sapiens
cggccccgtagggtccccggcgccaggccacccggccgtcagcagcatgcaggggatgatcatggtgattttactg

SEQ ID NO: 116916 - DNA, 75 bp, Homo sapiens
ccatgctcagagatgccaagaagaatctagacagacaggcctttctagaatgttggctcaattaagaaacatcag

SEQ ID NO: 116917 - DNA, 90 bp, Homo sapiens
gtcgggacccgtctggaagagcctccgcccgggctcatgatggagcagtccaagaagtcctccctcatggtggcccgcagtattctcaac

SEQ ID NO: 116918 - DNA, 83 bp, Homo sapiens
acagctcccgaaagcgacgttcggccaccggaggagcgggagccaagcagcaattctgtggtgttcttggtcacacatttatg

SEQ ID NO: 116919 - DNA, 97 bp, Homo sapiens
accacattgccaagttatgcagccttaaacgacttgttctctatcgaacaaaagtagaggtggatattccatctattataaccaagaaactattaaa

SEQ ID NO: 116920 - DNA, 90 bp, Homo sapiens
cgccgctgggcctgcaggtctctgtcgagcagcggacgccggtctctgttccgcaggatggctctacagattctcccctgcccctggaga

SEQ ID NO: 116921 - DNA, 99 bp, Homo sapiens
acccttcctgcgattctacttagatcccccaattattgaaggaaatatggaggcagcaagagcagtggacttaatcccatggatggagtatgaattccg

SEQ ID NO: 116922 - DNA, 82 bp, Homo sapiens
aggcagaaatcccaccagtgccaggatttcatcgtttaccttcgacaggttcacaactacatgatgccacccctcgaccgaa

SEQ ID NO: 116923 - DNA, 74 bp, Homo sapiens
cacaaaacagcagatttcccaagagcagcggaaaatgatccagtcacaggcatcgttggcttcacagtatgact

SEQ ID NO: 116924 - DNA, 75 bp, Homo sapiens
cgctcgtcctcatcctggtcactagcggactcttcttcgccttcgagaattacatgaacgacagccttcgcaccg

SEQ ID NO: 116925 - DNA, 96 bp, Homo sapiens
cagcattctaaagtgaatgactccaacgaattaggtggtctgactaccagtggctctgcagagttcctcagatgttagcaatgatggttgatttgg

SEQ ID NO: 116926 - DNA, 98 bp, Homo sapiens
tcctccccaggtccccgatggtcccccagacctgctgcttgagtcccagtggcaccactattcagaccacctcctccaccctgaagggtgccatccag

SEQ ID NO: 116927 - DNA, 75 bp, Homo sapiens
ctgggcttgtccttgctggtgcatgcgtcgtcggcctctgggcagcaggactgttgggaaagatcctgatggcta

SEQ ID NO: 116928 - DNA, 82 bp, Homo sapiens
gttaaagagacccgttcagagtcctacagtggcaggccattctacaggttcatgacaaagaggtccttgcctctcagctgct

SEQ ID NO: 116929 - DNA, 75 bp, Homo sapiens
ataaacaagtggatccgtctattacgaatggcgaggatcagatctgccccaaatgcagaggggaagacctccagt

SEQ ID NO: 116930 - DNA, 50 bp, Homo sapiens
ggaaactccagcgtgtctccagccgtgagccagtcttggtgctctgtgtt

SEQ ID NO: 116931 - DNA, 99 bp, Homo sapiens
aagccatccgcagaaggggagacacattttatgttgtgtcatttcgaagggattactacagcatcccatttcccacacccactactccgctgactggga

SEQ ID NO: 116932 - DNA, 50 bp, Homo sapiens
cttagactatttttcaaacactcagcgacccttccctctatgatgaagtg

SEQ ID NO: 116933 - DNA, 75 bp, Homo sapiens
atcctggctgtgtgaccccaagtgagaagccctaccactgcaactgggacggctgcggctggaagtttgcgcgct

SEQ ID NO: 116934 - DNA, 82 bp, Homo sapiens
acgctgcccattcttcctcctctgccgagtggatcgcctgcctggataaaagagtgaagtcaccctgctgagaaatgaagtg

SEQ ID NO: 116935 - DNA, 82 bp, Homo sapiens
gtcatgcaggacatcgtgtataagctggtgcctggcttgcaagacagccagtgaagaagcaaaggaagacatgaaaattgac

SEQ ID NO: 116936 - DNA, 86 bp, Homo sapiens
gcgagtcaagaattttcttaaggactttgcctcccgggccaaactggcagttcaaaaactagtacagaaagttggattttttggaa

SEQ ID NO: 116937 - DNA, 101 bp, Homo sapiens
ccagaaaccagcagatattcctgcgggacatagaacaggtgccacagggtttggaaatcccttgtctccaggttgctgggattgacttcttgctcaattga

SEQ ID NO: 116938 - DNA, 83 bp, Homo sapiens
taaagcgggcaaagttagaccttccagaacctggaagatgagaatgtgcctactgctcctgatcctccaagtcaacatttacg

SEQ ID NO: 116939 - DNA, 90 bp, Homo sapiens
acaacgtgcctgcagtggccgaggagattcaggatgaagttggcaacgcggtaaaaatattgcttcggtgggtgacgcggtacagctgcc

SEQ ID NO: 116940 - DNA, 100 bp, Homo sapiens
aattatccaaataaattgcaagcattctatccaaatgtcccgaaccgacagccacaagtggcgcccgaacagggacgtgagtgaagaaggtctgctggag

SEQ ID NO: 116941 - DNA, 97 bp, Homo sapiens
acctcctgcatcctgcgttcccctccatccttctggatctggccaacaccaccggcacagtgacggcttcagaggcagcccctgtcaaagggaacag

SEQ ID NO: 116942 - DNA, 87 bp, Homo sapiens
tcgccccgggccccccagcatgaagaccccggcggacacagccctgggcgctgcctatggcacagccaagagcggtaccggcattgc

SEQ ID NO: 116943 - DNA, 76 bp, Homo sapiens
tggaaccttgtgttcatccagtataacagggaattcctggggaagtcggagcctgagcaccagcactgagcctggc

SEQ ID NO: 116944 - DNA, 90 bp, Homo sapiens
gataaagcaatgaaggtgtttgatgtagtgaactttgacatgatcaacatgctgaaacttggatgcagcagcttttttatgagaattacg

SEQ ID NO: 116945 - DNA, 121 bp, Homo sapiens
ttgtactgtgttcgcagtgacctggggaacctgctcaaagccctgggtcgcttggaagaagccaaggaatgggtccctattatccagcaggacattcagagccagcggaaggtgaaaccgc

SEQ ID NO: 116946 - DNA, 82 bp, Homo sapiens
ccggaagctggtggaacagctacgcatagaagccgggattgagcgcatcaagcattgtcccagatatagccgttggtacaaa

SEQ ID NO: 116947 - DNA, 82 bp, Homo sapiens
gccggccaattccccccgcaccaaattgcatcgtttcccagatcaggatcctcatgaccagccaaagagaagaagaattagg

SEQ ID NO: 116948 - DNA, 75 bp, Homo sapiens
tcgcccgccaccctgcgctgccgccgctctgaggagttaaaggcctcggcccccctggggctgtggacaggagct

SEQ ID NO: 116949 - DNA, 100 bp, Homo sapiens
ctggaaaggaaaaccactgcgtctccttatctggacacgtgcaggctggtgccttcaaatctcttgacaaagatggcactggacaaatccaggtgaacat

SEQ ID NO: 116950 - DNA, 96 bp, Homo sapiens
ggcggagcaaagtcgccgggggtgtggggtgttccacgctatgttgggagtgttcgctttcgaggcccattacgcagtccaggcaagaagatcccg

SEQ ID NO: 116951 - DNA, 100 bp, Homo sapiens
ttgaggactctgccaactttattaaatatgagaatgccagaggacttggatctgagctaaaggacagtattccagttactgaactttcagcaagtggacc

SEQ ID NO: 116952 - DNA, 90 bp, Homo sapiens
ggcggcccccgcccccaccgccagctccaccatcaacatcaacacctccacctccaagttctcggagtttaagagagctgtgaaagtagc

SEQ ID NO: 116953 - DNA, 83 bp, Homo sapiens
caggggtcagctgggccgcaggggcgcgcagcgcggggagctgccagggagcatttcctgaagacgtagtcatgcagcacgtc

SEQ ID NO: 116954 - DNA, 101 bp, Homo sapiens
tgtccaagtgcctgggatgcaggaattgtcttagaagaaagaaggcaagccaccattttacccacgtaaatatatgaatatatttctgacattgaggtgtt

SEQ ID NO: 116955 - DNA, 83 bp, Homo sapiens
tgtgcgttagtcaccagctgctcctccgtcttctcaggagaccagctggtccaacgtgctgactgggttacttttttaaacac

SEQ ID NO: 116956 - DNA, 83 bp, Homo sapiens
gttagaggaagacgacgagtttgaagagttccctgccgaagttactatgcgagtcagaagaaaacatttgaaattaatcccag

SEQ ID NO: 116957 - DNA, 100 bp, Homo sapiens
agaagctggaactggcagagaagaaggctgctgattggatccggattggtgccaatgtctccaacttcacttttgctcctagcacgattatatttcacct

SEQ ID NO: 116958 - DNA, 100 bp, Homo sapiens
agatttgctgatggaagcataagaacatgagaactgcgactcagcatgcagaagataacgaaggaggcccaacttcattcaataaggagcctgacggatt

SEQ ID NO: 116959 - DNA, 85 bp, Homo sapiens
cctcagtcacacatgccagagattgctcaggaagcaatggaggttaatttggagtggcccctggagtcagtttcctacaccatcc

SEQ ID NO: 116960 - DNA, 100 bp, Homo sapiens
cccatttcgcccctcgcgtccggagtccccgtggccagcttgaaatccatggcccaaaatgactctaccagtggagactctcttctgtgaagaagacgac

SEQ ID NO: 116961 - DNA, 102 bp, Homo sapiens
aagaagctgcggccgcacctggccaaggtgctgatgtatggacagccgtatcgtgttaccttagagcttgagctgccagagtcccctgtgaatcaagatttg

SEQ ID NO: 116962 - DNA, 75 bp, Homo sapiens
cgaagccgccacccaaaccagtcaaaccaggtaatggaactgctggtccatctgaataaacgtataaaaagccgc

SEQ ID NO: 116963 - DNA, 100 bp, Homo sapiens
gtcggcgagtacaacaaagccagcaacgacatgtaccacagccgcgcgctgcaggtggtgcgcgcccgcaagcagacctacctggtggttctgtgccttc

SEQ ID NO: 116964 - DNA, 75 bp, Homo sapiens
cacagatcccatcagaggcaccccagacacaacttcccaagtaagaagcggaagaggagccgctggaaccaagac

SEQ ID NO: 116965 - DNA, 90 bp, Homo sapiens
ggagcgcttggaccccggcttctgggacgcgtcaggttgtggcagcactgcctgaaggtatgagaccagattctaatctttatggttttc

SEQ ID NO: 116966 - DNA, 98 bp, Homo sapiens
taccatgcatttcacggtggccttgtggagacaacgccttaacccaaggaagtgactcaaactgtgagaacttcagattgtaaaccatggctgtgtgg

SEQ ID NO: 116967 - DNA, 87 bp, Homo sapiens
aatacatcaagattctgaatctggtgatgaacttagcagcagctccactgaacagataaggtggatgattcaacagccacacaaagc

SEQ ID NO: 116968 - DNA, 97 bp, Homo sapiens
ctcccaagtagctgggattgcaggtggctgccacactcaacaatttggctgtgctctatggcaaaaggggcaagtacaaggaggcagagcctctgtg

SEQ ID NO: 116969 - DNA, 100 bp, Homo sapiens
ccgccgtggccgcagtgttcaccttcaccctgcccccttcggtaccggggggagactccgggaggtggggaagacagggctccagctaccacaggacggg

SEQ ID NO: 116970 - DNA, 101 bp, Homo sapiens
gtacagtgttttgggcatgcacgtgatactcacacagtggcttctgctcaccaacagatgaagacagatgcaccaacgagccatcccaatggaaattgctt

SEQ ID NO: 116971 - DNA, 90 bp, Homo sapiens
gttcaggaaaaataaaaaaccagcctcgttttatagaatctgcatatgatatcataaaactgtgtgggtgcatctagaagatgtttttca

SEQ ID NO: 116972 - DNA, 80 bp, Homo sapiens
gtcaatagtggttgcggttcccctatgcgtgtgggaattacagaaactggaggagttgatccctgaattttattatctcc

SEQ ID NO: 116973 - DNA, 98 bp, Homo sapiens
ccggggtgcgcaagggggaccgcatcctggaggttgactgtgaagtgctgaccacactcaccccagacactggccgtatcctgtccaagctacatact

SEQ ID NO: 116974 - DNA, 90 bp, Homo sapiens
gatggcgaccgagacggtggagctccataagctaaagacctgtgcacaccgatatgaggcaaggcagcgagtggaccagatcctggagac

SEQ ID NO: 116975 - DNA, 75 bp, Homo sapiens
gagatgaggagaatcccctcaaaaattatatccagatcgagagacagaagattctgaaagggttcaatgaaatga

SEQ ID NO: 116976 - DNA, 101 bp, Homo sapiens
actcaggctctgcccagaactcaagacttcacagagaatgcagttgtcttgacttcaggtctgtctgttctgttggcaagtaaatgcagtactgttctgat

SEQ ID NO: 116977 - DNA, 73 bp, Homo sapiens
ggtctgcacgaaataaagctcctgggcaaggggacgtctgcagctgatgtcttcaataggccgtgtttaagag

SEQ ID NO: 116978 - DNA, 100 bp, Homo sapiens
ccaagaggaatgacaaacaaccagctcttcaggtttaactatagatcaacacatcatcttgcatctcatgggttctatgaatttttaaattggtttgatg

SEQ ID NO: 116979 - DNA, 100 bp, Homo sapiens
ggccagcaggaggctgatgaaggatcagttcgacagcttagacaagcatacacaatggggaattgacttcttggaaagatatgccaaatttgttaaagag

SEQ ID NO: 116980 - DNA, 82 bp, Homo sapiens
ggcacaccagcgcccgcaggatgcccagcatcccagccatcactcttccacctgctccttagagaagggaagatgagtgagt

SEQ ID NO: 116981 - DNA, 82 bp, Homo sapiens
ggacgggcacctactcatggatggcggctacatcaacaatctgccaggagttgaactgaatgaccgactcttgggcagccaa

SEQ ID NO: 116982 - DNA, 74 bp, Homo sapiens
aaaatatccaaagctttctcgaagtcacgggatggatagccggcctgccatggccatctttgaactcctggact

SEQ ID NO: 116983 - DNA, 82 bp, Homo sapiens
gtctccttaacaccgaacaccactgactttatggcctttcaccaagaacatgaagtgcgtatgtcacacttggaagatattc

SEQ ID NO: 116984 - DNA, 74 bp, Homo sapiens
ctgcagatgacttcttagaggatttgccttttgagcaaataggtggtggcggtggaggacagcagcgagctggt

SEQ ID NO: 116985 - DNA, 123 bp, Homo sapiens
ccaggataagtcacagggctatgcaaggagtgaatgtttcagggtggagaagaatctgcttgtctatggaacttcagtgaagatttcatacattggcctcatgacccagagctccttggagac

SEQ ID NO: 116986 - DNA, 90 bp, Homo sapiens
gaactttatccctcttggtctgtggaggtagttgctgagtggcactgggtaaaagtaaccacggtggctgcagaccagagcttcaccatt

SEQ ID NO: 116987 - DNA, 90 bp, Homo sapiens
ggtattcttgaaccaggtcatgctccaaatgccccgcagggtggagcccgtctgctcagggttgcaggcccagattctccactgctaccg

SEQ ID NO: 116988 - DNA, 88 bp, Homo sapiens
cgccgctctccgagctcgatccgctgctcgcacgggagccagctgggtgaatgtcatacccaggctatcccccaacaggctacccacc

SEQ ID NO: 116989 - DNA, 51 bp, Homo sapiens
aaatgtgacatctccctgcaattcttaccaaaatccacacccttatcacag

SEQ ID NO: 116990 - DNA, 75 bp, Homo sapiens
gtccctgccaactttccaagtctggggatggccaggagagtagttatcttgatggaattagaagttttgaagtca

SEQ ID NO: 116991 - DNA, 100 bp, Homo sapiens
ctgaggaagacccggaaacttaggggccacgtgagccacggccacggccgcataggcttccgaagatcttctcaaggaacactacgttgacctgaaggac

SEQ ID NO: 116992 - DNA, 97 bp, Homo sapiens
cacgaaatcttctgctgcccgctgaagcaagtacaccacaaagagaacacagagccggaaggatttggagtggatcagttacgagatgacaatctag

SEQ ID NO: 116993 - DNA, 100 bp, Homo sapiens
acctggactcccagaggaagggcaagtgtgctgtgatcaaaacctctacacgacagtcttggtgatgccttggacagcagcaactccatgcaaaccatcc

SEQ ID NO: 116994 - DNA, 100 bp, Homo sapiens
ctgcaagaggcctacgtgcgggtggtcaccgagaagtccccgaccgactggtatggatgacaagaatgcaacaaagctgaatgaactcattcaggttggg

SEQ ID NO: 116995 - DNA, 100 bp, Homo sapiens
ggccctggtgacaccttgattttggacttctggcctacagaaccatagtggggtcaacagtggattggtccgcgccaaagactccatcaccagcttgaag

SEQ ID NO: 116996 - DNA, 100 bp, Homo sapiens
ccagggataactggaactatacacctctgcatgaagctgctattaaagggaagatcgatgtgtgcattgcgtcgagggcgaggcccccagcagtgagact

SEQ ID NO: 116997 - DNA, 98 bp, Homo sapiens
tctacagtgtggtcattgaggacaagttgacgagagagtcccaagtacgtccacggtcagccttgcggtatttacctcctgagtgttttgtagttgga

SEQ ID NO: 116998 - DNA, 83 bp, Homo sapiens
gtgaacagccgcgacacggcgggcaggaaatccaccccgctgcacttcgccgcagataaaccgagaaaactggtgtacaatag

SEQ ID NO: 116999 - DNA, 75 bp, Homo sapiens
acagtattgaaatgcatttgccttatacagctaaagccatggaaaggggataaaaacattcagatggcagatcac

SEQ ID NO: 117000 - DNA, 83 bp, Homo sapiens
ctgaaatctggagtgaagaacgccgccatccagccaccattccaaggttcccagtagctgcagcagtgaaagacagtgattgg

SEQ ID NO: 117001 - DNA, 75 bp, Homo sapiens
ggaggagaggatcgagttctccgaactggacaagaatctgaattatccagaacagaaagttgtgactgttggaca

SEQ ID NO: 117002 - DNA, 74 bp, Homo sapiens
ccaagggaccaaggtggaaatcaaacgtgctggagaatctggtaaaagcaccattgtgaagcagatgaggatcc

SEQ ID NO: 117003 - DNA, 99 bp, Homo sapiens
catgaagcgctcggtagccgtctggctcttggtcgggctcagcctcggtgtcccccagttcggcaaaggtgcttttcagtgggaagaattggaagaaga

SEQ ID NO: 117004 - DNA, 110 bp, Homo sapiens
ggggccctcttgataaaaagagatgtggggggattctcgacctgctaacagaactggaccttttcgaacccattaaaagagccagtaaatcctgtggaaaatggccttca

SEQ ID NO: 117005 - DNA, 75 bp, Homo sapiens
tcctcacagccagtgaccttgcagccagtgacctcaaaggatttcagccacaggaactgtggctgcaccatctgt

SEQ ID NO: 117006 - DNA, 90 bp, Homo sapiens
attactgccccatacctctactggagctttcaatagtagtaaagaccgagacatgggtgcccggcaccgcgcccgagcccactccattca

SEQ ID NO: 117007 - DNA, 100 bp, Homo sapiens
acgctttaaagagagataaagatgccatttatgggcagaagcacgtggcagccctcctcgacatccgtggcctgcgcaacacagccgcccgccaggagat

SEQ ID NO: 117008 - DNA, 75 bp, Homo sapiens
gaaatagtaaccctgccaaatacatcagcttgtaggagacagagagatgtcggcttatttataggaattgcttga

SEQ ID NO: 117009 - DNA, 97 bp, Homo sapiens
caccgcccagcccaaaccaggagattgcgagggagcgatgcggtgcagcgcggcacagttggcgggcagctcccaggtctccatgagtacggcgccg

SEQ ID NO: 117010 - DNA, 100 bp, Homo sapiens
tcgctaatgctgacgtgcagtccattgctgtagctgactcaagttcatccgagaagtaacaccatatatcaagaagccatcattagtatcagatctgccg

SEQ ID NO: 117011 - DNA, 139 bp, Homo sapiens
aattacttccatcagctgcagaaaattttctagttttggggagacaattacaaacatgttttatcaatgcagctaaggaaaatcctgccttgcttcgttgggcctatgcaagaacaataaatgtctatcctaatttcag

SEQ ID NO: 117012 - DNA, 80 bp, Homo sapiens
cgcgccggctatggccgtgccctggggctgagccctcagctgtcgcctggttgggcccggaaatgggacgtcgcgctttc

SEQ ID NO: 117013 - DNA, 119 bp, Homo sapiens
gtcggatttcgacagtaacccgtttgccgacccggatctcaacaatcccttcaagtttgatttgacagtttgagaggcacctcagagtttccttctttaccccgctgagacagtgggag

SEQ ID NO: 117014 - DNA, 82 bp, Homo sapiens
cacagccgggcgttgggggaaagatcctggtggctttgagacaccttcacttcaagaacattgtccactgtgacttgaaacc

SEQ ID NO: 117015 - DNA, 100 bp, Homo sapiens
cgagcttcagcaagctctctccaacggaaacttggatttaactggccagaagcaggtattcaaagcagagaacaatccctgggtgacccccattgcagac

SEQ ID NO: 117016 - DNA, 100 bp, Homo sapiens
atcagtacacctttcatctcgaggctactgagaacccaggggctttgattaaagacattcgggagaatgggatgaagaatggaggaacacctctgcttta

SEQ ID NO: 117017 - DNA, 100 bp, Homo sapiens
ccccgagaaccgtcagtttgagccagatgacattcaacgtctgcagttggatctgcagaaaatggagcttctagaaagtaagatgactgaagaacagcat

SEQ ID NO: 117018 - DNA, 127 bp, Homo sapiens
acgaatgcttgaagacagagatttattcgtaatgcgactcaaagctgcacggcagtctgtttatgaggagagaagaccaagaggtcggagaagaggtagaaaatgtggcagaggccataaaggagaa

SEQ ID NO: 117019 - DNA, 99 bp, Homo sapiens
gatgaagtggagagagtcggaggggagcggcctcggctacctggtgcaggtgaagcccatggcaggcgctgagatgcgtctggagagccagagggcctg

SEQ ID NO: 117020 - DNA, 75 bp, Homo sapiens
tatgtatctttaactagaatcctgaaatgttcagagcagaggccatccgggatggtgtcattgaggccagcatca

SEQ ID NO: 117021 - DNA, 82 bp, Homo sapiens
ccggttgtcctcaggcgctgtcaggcctcattgctacgatttcagagtaccctggtaatagctgagcatgcaaatgattccc

SEQ ID NO: 117022 - DNA, 101 bp, Homo sapiens
ttgctgatggagatctagaaatggttgctccttgagggcaggacagttcttatggctttatccgttgcgtaagcacagagaggtctgcgaggtcaaaacta

SEQ ID NO: 117023 - DNA, 76 bp, Homo sapiens
ggcggaaaggataagcctcgacttagaagctaccgagttaccctaagaaaggaatttagataatgggctgtgtgca

SEQ ID NO: 117024 - DNA, 101 bp, Homo sapiens
gagtacatctccattgccctgcgcatcgatgaggatgagaaaggccagaagcggactcctagaagaggggagcagcaaggatggaatgacagccgtgggcc

SEQ ID NO: 117025 - DNA, 101 bp, Homo sapiens
ggaattccacctctgcgtttttccctccaggacaatggaaacttggtggacagtgaaatgaaatatttgggcagtcccattactactgttccaaaattgga

SEQ ID NO: 117026 - DNA, 75 bp, Homo sapiens
tcggatacgatagaaaatgtaaaggccaagatccaggataaggaagtttccttgatggagaactatcaaagcagt

SEQ ID NO: 117027 - DNA, 100 bp, Homo sapiens
ccctttggatggaactgaactttgtatatggaacactaaggatccttctcatcagggattttatattggaagacatggatcttgctgccaacgagatcag

SEQ ID NO: 117028 - DNA, 75 bp, Homo sapiens
ggaaaacggggatttccaccatctgtcccaggaatgggtaccacagaccatgtcatcgtcctggcgtccacgaac

SEQ ID NO: 117029 - DNA, 82 bp, Homo sapiens
ttcttgtttgtggatcgctgtgatcgtcacttggacttaaccaccaccatgtcgagcaaaagaacaaagaccaagaccaaga

SEQ ID NO: 117030 - DNA, 75 bp, Homo sapiens
tccagccccgagcgggacagcgcggcggggagcgacgagcataatcaccagcaacacccgggacaataatacggg

SEQ ID NO: 117031 - DNA, 97 bp, Homo sapiens
ctctggataaggaccagtacctgcccaggaaactggccctggcctattttgagcagttaaaaatttccccagatgcctggcaggtgtgtgcagaagc

SEQ ID NO: 117032 - DNA, 75 bp, Homo sapiens
cagctttaaaggagatgcaggagaaaatacggcattgctaggttggtcaaagaaaaagtgatgtatgaaaaagag

SEQ ID NO: 117033 - DNA, 75 bp, Homo sapiens
tgtgcaaacccgagagaactggtatatttgccttccctccatgatctccaacactatccgataaagtagaagcaa

SEQ ID NO: 117034 - DNA, 101 bp, Homo sapiens
ggaacctctacaacgaaggtgaagccacggaagataagctgggattctgtccctgaccgtcttcacagtccaggtgatcttgactactgctttacagagaa

SEQ ID NO: 117035 - DNA, 100 bp, Homo sapiens
gccgccatgacagcgagcgaggcggagggtgagcctggtctgcctggatacccagggaaccctggtatcaaaggttctgtgggagatcctggtttgcccg

SEQ ID NO: 117036 - DNA, 75 bp, Homo sapiens
ccaatcccccactctttccgccctaatggaggtctccagtttcggccctgggctgcatcttgtacctgctgtgct

SEQ ID NO: 117037 - DNA, 83 bp, Homo sapiens
tgcctttgattttgactatggaaattggaattacatgaatgacagtcttcgaaccaatgtgtttgttcgatttcaaccagaga

SEQ ID NO: 117038 - DNA, 75 bp, Homo sapiens
ggctgaaggtgcccagctgcagggcggcagtaatgaggtggggtggaagacaacccgtgagtattacaccttcat

SEQ ID NO: 117039 - DNA, 98 bp, Homo sapiens
ttctatcagatgttccacgtaataatgctgacagctggaaatgatccctattgttttgtggagtttcatgagcatcgtcatgcagctgcagcattagc

SEQ ID NO: 117040 - DNA, 82 bp, Homo sapiens
tggcgtcttccgtgggcaacgtggccgacagcacagagtctctggtaagaagagtgaaagcaaagaagccaagaagtctgaa

SEQ ID NO: 117041 - DNA, 75 bp, Homo sapiens
ttggcattgcaacaccgtttcacattgccacaatcaaggctaagcttagaagcagtcatttgctttaaagaaatg

SEQ ID NO: 117042 - DNA, 80 bp, Homo sapiens
cagccgagtctgacggcgccggttcgctgcccggtccgcccgcggtgagagttcgtgtttagtaggagcacagtagctgt

SEQ ID NO: 117043 - DNA, 90 bp, Homo sapiens
tcatggggaaaatctccccggtgactttcagtattggtgagaagactgaagcttcgttagtatggtttactcctccgagaacttcaaacc

SEQ ID NO: 117044 - DNA, 101 bp, Homo sapiens
taaaacttcaccaagacctaaaaaaccccaacaacagctcccttagcctgcctagggtagttaaaagacgagtgaatgctctcaaaaacctgcaagttaaa

SEQ ID NO: 117045 - DNA, 104 bp, Homo sapiens
gcagattggatttgccagggcatgtagctctccaggcttgcaagcgattaccagatgccttcaattaagttgcagagttctgatggagagatatttgaagttga

SEQ ID NO: 117046 - DNA, 87 bp, Homo sapiens
caagatcaaagtgccagcagattcagtgtcatgtgaggacgtgcttcctgcttcatagataagaggcactggagtccaaactcgctt

SEQ ID NO: 117047 - DNA, 110 bp, Homo sapiens
gtttctagtccagaatacaccaaaaaaatagaaaacctatgtgctatgggctttgataggaatttagcttgggttaaatcatataacatctgctttgaattggaagattg

SEQ ID NO: 117048 - DNA, 98 bp, Homo sapiens
gctgcagcgctctcgtcttctgcggctctcggtgccctctccttttcgtttccggaaacatgggtgattctgggggtccacttgtctgtaatggtgtg

SEQ ID NO: 117049 - DNA, 50 bp, Homo sapiens
cacaatgaatgtctaattatcacaggtctgaatgctggtgctttttatgc

SEQ ID NO: 117050 - DNA, 88 bp, Homo sapiens
aaacccatttcagaccaatgccagaggagcaacagagatcttcgctttaacagaatcagagagatccaacctggggcattcaggcggc

SEQ ID NO: 117051 - DNA, 82 bp, Homo sapiens
tacttttcatttgcgacctcatcatccagtacctggcaaagaattctgcaactttgttcagtgccagcgattatgaagtggc

SEQ ID NO: 117052 - DNA, 96 bp, Homo sapiens
tgtccctcacatccgatgcaccctttttgtcagattatcaggatgaggtatgagcccagaggacctggtcggcccttgtaccaaagaagaatctca

SEQ ID NO: 117053 - DNA, 80 bp, Homo sapiens
cgggagcaggcctcgctgtttgcgcagatccccgtcgaggtcaagatcaagatccaggtctatttcacgaccaagaagca

SEQ ID NO: 117054 - DNA, 100 bp, Homo sapiens
tcagatccagtgataattgacagagatccgtgctcagctcacagagcagatgaaatgcctggaccagcagtgtgagcttcgggtgcaactgttgcaggac

SEQ ID NO: 117055 - DNA, 76 bp, Homo sapiens
ctcgcccgccaccctgcgctgccgccgctctgaggagttaaagaggacagttatgggatggatgggaaggttaatc

SEQ ID NO: 117056 - DNA, 82 bp, Homo sapiens
gttgacaaggcactgctttttcatgacggttctgcggggagtgtctccagccctgcctgcaggtgccatccccgctgtgccc

SEQ ID NO: 117057 - DNA, 114 bp, Homo sapiens
ggagtactccacagaggataaatttcaacctccggggccacaatagcgaggatctgtctggctccattgatgacctccccacgggaacggaagcaactttgagctcagcagtca

SEQ ID NO: 117058 - DNA, 78 bp, Homo sapiens
tcaggcgtgtgtccagttctgcgagtaaccagctcataaatcacatcgaacagtttttggatactaatgaaacaccgt

SEQ ID NO: 117059 - DNA, 83 bp, Homo sapiens
ccaagttccagtttgtggcctcctaccaggagctcatggttgagtgtacgaagaaatggttatacattggctcttcaaagacg

SEQ ID NO: 117060 - DNA, 75 bp, Homo sapiens
atctgtagcattcaagacttcaaactggttttgttaaaggccttcatagcgaacctgaagtcaagctcccccacc

SEQ ID NO: 117061 - DNA, 75 bp, Homo sapiens
caggtgtgcgtcatgcacttgaagcacctgaggaccctgctgagccctcagtggaatgcagtagccctctgggcc

SEQ ID NO: 117062 - DNA, 96 bp, Homo sapiens
ggcccctatggcagatttgaaaattcacccttgtagagtcattcctgcctttgagcggactcccttttaaggaggactcagagagagtaatgataa

SEQ ID NO: 117063 - DNA, 82 bp, Homo sapiens
taagtcagagacatcaaaacctggaccttctggattacaggccaaattagcaagtgacaaccaaagccaagcaactgaagga

SEQ ID NO: 117064 - DNA, 83 bp, Homo sapiens
gagaagctccccacgtggttccgtggcttgtcaatgaggcagatcagattcaggttcgacgggcagccaatcaatgaaactga

SEQ ID NO: 117065 - DNA, 100 bp, Homo sapiens
gacgaacacaaagggaaagaggagaggcacccgatatatgttctctaggccttttagaaaacatggaggagatatttcatcaaatactccagactatgcc

SEQ ID NO: 117066 - DNA, 107 bp, Homo sapiens
gtggccttagctgtgctcgcgctactctctctttctggcctggaggctatccagcgtgccagaaccctgtggagcatcatgaactgggaagagtagctgagccccag

SEQ ID NO: 117067 - DNA, 100 bp, Homo sapiens
ctagaaattccccccgaagaagactcccccacatctgggcggctatgagaggttttcctccgagtacccagaattctgttctaaaaccaaggccctggca

SEQ ID NO: 117068 - DNA, 52 bp, Homo sapiens
ccagcggcagccgagcccgcccgcgcgccggctgaaggtgatgtggccgccc

SEQ ID NO: 117069 - DNA, 96 bp, Homo sapiens
acaaggcagcccgcacgatatcatcagaataggtctcggcgcggaagatggccggcggcgtggacggccccatcgggatcccgttccccgaccaca

SEQ ID NO: 117070 - DNA, 90 bp, Homo sapiens
gcagaagccaagtgcttgatgctagctgaagaattcctccacgtactgggaaggcaaagcagatatggagactctccagagaatttatgg

SEQ ID NO: 117071 - DNA, 95 bp, Homo sapiens
gacgaggagggctgcctctcggaagtcggccagagcagcatgtggatctccactgatgccgccgcctcggtgctggagcctctgaaggtggtgtg

SEQ ID NO: 117072 - DNA, 100 bp, Homo sapiens
cagattttggcagattatggctttgtccccacccagcactgatgatattataaactctttcgacgtgtagcagcagctttgccgggaatggaaagcacac

SEQ ID NO: 117073 - DNA, 82 bp, Homo sapiens
gatttttggcctaccctccaaagaaaagagatcaatggcttttcaaaagcagcacaccaaactgtcaaagtggtgatccctc

SEQ ID NO: 117074 - DNA, 75 bp, Homo sapiens
atctgtcttgagctcccagcaagaaaatgcatccgatgcagatttatggctcctgaacagttgcactgtaaaaaa

SEQ ID NO: 117075 - DNA, 100 bp, Homo sapiens
ggactttctgcagtgcctctgagaacttacgcagatcagccgatgcatcagagaatttagatgagctgtcttcctccagtagctggttacttaaccagaa

SEQ ID NO: 117076 - DNA, 83 bp, Homo sapiens
aacgagtgacattggctgacatcacagttgtctgcaccctgttgtggctctataagcaggctttctgtctctggtcgtgatga

SEQ ID NO: 117077 - DNA, 73 bp, Homo sapiens
gcactggccagagtgaccaggctgaccagcaccagccctgatccagccgcggcccatggagcccgccggcccg

SEQ ID NO: 117078 - DNA, 83 bp, Homo sapiens
cgccggacttcgcaggcccagacgacgcgcgcgcagtgagaagccctaccactgcaactgggacggctgcggctggaagtttg

SEQ ID NO: 117079 - DNA, 100 bp, Homo sapiens
aggtggcaccggtcggctggcgtccctcttcagttctctggagccccagattcaacccgtgtacgtgcctgtgcctaaattggtgttggtattaggagat

SEQ ID NO: 117080 - DNA, 99 bp, Homo sapiens
caattttggtgttctcaggttatcggatgatcctttcaaaaataaagccttgttatttagcaacaacacgcaagagttgcatccggatcctttccagac

SEQ ID NO: 117081 - DNA, 131 bp, Homo sapiens
ggcgacctcaagaagcagctccacgaaaggcagccgcggatcgccgcgctcagcgacaaacaaatcctcgttcctagctgcctgccagcgtcctcggcccggccctgaggatggacccaggagatcccgct

SEQ ID NO: 117082 - DNA, 100 bp, Homo sapiens
agcctgctacacgcttgatgtggaaatcccagtatgttccatatgatggaatcccatttgttaatgcagggattttgcttatgtagcaagagataaagat

SEQ ID NO: 117083 - DNA, 75 bp, Homo sapiens
cttcaactggttgatcttccaacagagcccacccacctttgggttcctgttggacatcgatggagtgcttgtgcg

SEQ ID NO: 117084 - DNA, 100 bp, Homo sapiens
tgcaccacccccggagcccccctcaacacggaccgcgcccgccgggcacacaagaatggtcactgtatttctggtggtcgcattcatatgtcagttttag

SEQ ID NO: 117085 - DNA, 75 bp, Homo sapiens
ccgcaagtacccgtccatcatagtcaactgcgtggaagagaagcatgattccacctttccactgatagactcaag

SEQ ID NO: 117086 - DNA, 82 bp, Homo sapiens
aacagacctctgtttggggagacgtccgccaaggcctggttgcagtatgcctgaaatttgggatgtagaagatcctgccaat

SEQ ID NO: 117087 - DNA, 100 bp, Homo sapiens
aaggaaactccaaggcttgccttcaagaataactgcgaactactttccagagcacaacctccagaagacaacagaaggaagccagttttggggaaacttg

SEQ ID NO: 117088 - DNA, 82 bp, Homo sapiens
gaaatcgggctgaagcgactgagtccgcgatggagagacaaagcatggaggacacaagaatgggaggaaaggcggactctca

SEQ ID NO: 117089 - DNA, 83 bp, Homo sapiens
gggacaacaccgggacacccgcgaggccggaaaatggtgaatgaaaactttgccattgatttgatagcagagcagcccgtgag

SEQ ID NO: 117090 - DNA, 96 bp, Homo sapiens
ccaacattaccagctggccgatactctttgaatgtcacatacaatcgtgttcgacgagtgtcacaaagccaagaatgccggctccaccaagatggg

SEQ ID NO: 117091 - DNA, 99 bp, Homo sapiens
ttcggcttctgagacggcggcagcagcggcattcaggatacgaattgctggaattagaggtattcaaggtgtggttcgcaaaacagtcaacgatgaact

SEQ ID NO: 117092 - DNA, 74 bp, Homo sapiens
cacctcgagtcgtggtgcgtccagagccagaagatacctgaaattcctgcagatgttgtgggtgcccttctgtt

SEQ ID NO: 117093 - DNA, 90 bp, Homo sapiens
cttttcgaagaagcaaacaaaaagtatgatggattacagcaacagttgtcttcagtagaaaggcattgagcttagagaattggagaagaa

SEQ ID NO: 117094 - DNA, 87 bp, Homo sapiens
tgagactcaccggaggaagcggcgcgagcgccccgccatcgtcccgtgtgttgttggtggctgcaatgccagctttgcttctcaggg

SEQ ID NO: 117095 - DNA, 98 bp, Homo sapiens
agagaccctgcgataacctgcatctctgcaaactcaacttgctgggccggtgcaactattcgcagtccgagcgttaaacgagaagattcatcaccgct

SEQ ID NO: 117096 - DNA, 100 bp, Homo sapiens
aaccgctacccaggaggcggagcggacaaggctccggcctgcgaggagggatatggagaaggtggagcggcaggctgtcccccaggccaaccacacagag

SEQ ID NO: 117097 - DNA, 75 bp, Homo sapiens
cgtctattgaaagcccattcaaatatgattctataacagactcttccagaaatgatatgaagaggaaatttgccc

SEQ ID NO: 117098 - DNA, 100 bp, Homo sapiens
aggcctttgtttgtccttcctggtagaggcgggttccctccctcggcaagatgccggagtgctgggatgggtgtccatgaaactgggaggcgaccgtgtt

SEQ ID NO: 117099 - DNA, 100 bp, Homo sapiens
aagttaaaagagcagcactccaagagcttattggaaagtgatgttgaaagcactgcttcatctccacgtggggcaaagaaatccagattgaggcagtctt

SEQ ID NO: 117100 - DNA, 100 bp, Homo sapiens
ttggtgccctcaacatctctcagagacgaaagtgttatagttttgccgctggactcttccctcccttcccccaccccatcaggatgatatgagacttgaa

SEQ ID NO: 117101 - DNA, 50 bp, Homo sapiens
cctgctgctactgtgtccagcgcaggcaattaagttggaatatgcaaggt

SEQ ID NO: 117102 - DNA, 100 bp, Homo sapiens
acccgccgctgtcgccgaccgcccgcacatccgtcgggttttaaaatcaaagatgggaaaatcggagaaaattgcccttccccatggccagcttgttcat

SEQ ID NO: 117103 - DNA, 74 bp, Homo sapiens
tggaacaaaaaaaggagatgcctggcagccccgctctctgcaggcctgagccaagattctgccaaaagactgcg

SEQ ID NO: 117104 - DNA, 100 bp, Homo sapiens
gagaaatgttttgtttgactccagtgttaagagaagaaatgaggacatatcagtatcggtggaggtgaccgagaagacgacaactgtgctgagtgagagc

SEQ ID NO: 117105 - DNA, 74 bp, Homo sapiens
gatcaccgagggcatttacggcaggattaatgcagtatcgaatggacaagtccgaggtgatagttacagtgaag

SEQ ID NO: 117106 - DNA, 50 bp, Homo sapiens
caaaatcccagatgctgacaaagtcgtccctgatggcccctggaggcgaa

SEQ ID NO: 117107 - DNA, 100 bp, Homo sapiens
tgtgttttcttctcaagcaactattattttgccattaactggagacagaaatgcactcggtgatggaaagagagccactattctgaagaacacttggcca

SEQ ID NO: 117108 - DNA, 87 bp, Homo sapiens
actcacccgtggaccctggcgctaggcaggcgttgaggaagaagccacccgagcggactcccgaggaggcaagtgaggcctatctgg

SEQ ID NO: 117109 - DNA, 50 bp, Homo sapiens
ggaaaatgcgctcgggctggaccagcaggcctgccagtgagcttctacca

SEQ ID NO: 117110 - DNA, 100 bp, Homo sapiens
tccacagctcatcatgatggacttggagctgccgccgccgggactcccgtcccagcagcagtctctggtcccagcccaccccatggcccctcccagtccc

SEQ ID NO: 117111 - DNA, 80 bp, Homo sapiens
ccccctcggaaaatggttcccactgccgggcgagtttcaggtttagctgtgcctcccagtgactataatgacaaggaagc

SEQ ID NO: 117112 - DNA, 74 bp, Homo sapiens
ctctcctggcatgctacctcaagtcaagcactgtgacttctgccgtgttcaccgtgggagacaacgtggtttca

SEQ ID NO: 117113 - DNA, 75 bp, Homo sapiens
ctgtactggctattggaaggaggagattctgaagataaggaggagtaccgggcgtcaaagcagaacgctttgaag

SEQ ID NO: 117114 - DNA, 87 bp, Homo sapiens
ttgccagctttctactttgaccctttgatcaacccaatctcccataggcactcagtcaagacatatctgaagagatggattaagaat

SEQ ID NO: 117115 - DNA, 74 bp, Homo sapiens
aataagcccatttgagccctggataacaagggataaagtggagcggtggagacctttggcgacttggcctttgg

SEQ ID NO: 117116 - DNA, 148 bp, Homo sapiens
caattgaaagatggactaaggaaaagaccgagcccaaggcccgctcgtgggatgagagcagatgccgcggtagtgggcagcagtcagtgacaggtgtaacctctgtggatgacagcaacagttactggaggatacgggggaagagtgc

SEQ ID NO: 117117 - DNA, 83 bp, Homo sapiens
ctgacaagatggccgggctgccccgcaggatcatcaagcctatccctcggccagatcctgtgcataataatgaagaaacacat

SEQ ID NO: 117118 - DNA, 152 bp, Homo sapiens
ttttctttatgatggttccaaggtaaaggaagaaggcgatccaacaagagctggcatttgttacttttatccttcccagttcaccacaggcacgtgcagcgactcggtggttcacagctgtgacctgtgtggcaagggcttccgtctgcagc

SEQ ID NO: 117119 - DNA, 100 bp, Homo sapiens
ctggagtctggctaacttgtcttccactaaagagttggacctgtcagggaaaacaagtccaacctggaagaagacttccttctaaaccaggcagacgaag

SEQ ID NO: 117120 - DNA, 100 bp, Homo sapiens
cctgtacttgccgccgtcccggctcacctggcggtgcccgaggagtagtcgctggagtccgcgcctccctggcttggaagctcgaagtctggctgtggcc

SEQ ID NO: 117121 - DNA, 98 bp, Homo sapiens
accgcatcaagagcttcaagaacaagggccgcgatgtggaatttggtgccctggttgtcagatgttggaaagcagtaggacggaacatactcttcgtg

SEQ ID NO: 117122 - DNA, 74 bp, Homo sapiens
ttcaagtacatcataatcggcgacacaggccatgaagtacttgtcatacctgctgtaccctctctgtgtcgggg

SEQ ID NO: 117123 - DNA, 101 bp, Homo sapiens
gctgtgtcgacatgtagctaacaccatttgtaaagcagatgctggtgaagttgaacaaattgctatgatgaaaccaaaaggccagactgaacacgatgagg

SEQ ID NO: 117124 - DNA, 100 bp, Homo sapiens
ccccatcattgggagaaatccccactcctccaagaaccaacccccaaattggctgggacaggttctccgtggaggagccagccaacgtcctttgacccca

SEQ ID NO: 117125 - DNA, 75 bp, Homo sapiens
tggtgttagactgggattcagtcagagccagtgccggtggtggtgtgcacattgagccccggtatagacagttcc

SEQ ID NO: 117126 - DNA, 74 bp, Homo sapiens
tgggcgccgtgaagagccttcaggcgctgggcgaggagtgactccaaatttgcatatactggaactgaaatgcg

SEQ ID NO: 117127 - DNA, 83 bp, Homo sapiens
gctctgtggggctctggccgcgcctggcctggccgggaccatgtgctgagcttgcaagacctctgctgccgggcggtcgtgtc

SEQ ID NO: 117128 - DNA, 98 bp, Homo sapiens
tggcagacttcatcaaacaggagtgtctcaacaacattggcgatgcctcctcgctcatccgagccaccattggtacaggtttgcagattccgccagca

SEQ ID NO: 117129 - DNA, 88 bp, Homo sapiens
gaccagcgcgcgcgcgaggagttccgccccaccatctacagcaacgtgatcaaagatgtgaatcccgatggagcggcccgaggaaggc

SEQ ID NO: 117130 - DNA, 90 bp, Homo sapiens
ggcatggccatcgtgcctctttgggcttccatgggcaactacatcaccaggtgagagatgctgcaatattggctatagtggagatttata

SEQ ID NO: 117131 - DNA, 96 bp, Homo sapiens
gctgctgctgaggagaggagcgtcaacagcagcaccatggacaatgcagatcttcgtgaagactctgactggtaagaccatcaccctcgaggttga

SEQ ID NO: 117132 - DNA, 87 bp, Homo sapiens
acctcgtcaggccgctgcagatgaccattccagagatcatcttcagacaccaacgaaagtgaaataaagtcaaatgaagagccactc

SEQ ID NO: 117133 - DNA, 88 bp, Homo sapiens
cacgttgtactcaacagtacctgaagatgcagagcacaaggcagaaaatttactggttaaggagagaaactccagaaaatcttgccaa

SEQ ID NO: 117134 - DNA, 76 bp, Homo sapiens
gtggaagacaacaaaaacaactgcattgtgtacagcaaaggatggtgccatgacaatggtgtgaactacaagattg

SEQ ID NO: 117135 - DNA, 83 bp, Homo sapiens
ctcagttggaagcagccgatccagcctgcggagcctgtggggcaggtatccatcatcccacgtggcaaaggactaggttatgc

SEQ ID NO: 117136 - DNA, 100 bp, Homo sapiens
ggatggccagtgcccccttcactgtgagcagacatctaggcttgctgtcaaggcttctgatcaacatgagatgaccgccgtgtggtaaactgatgaaccc

SEQ ID NO: 117137 - DNA, 100 bp, Homo sapiens
ctcacactcatgaggagccggaaggttctccacagacgaaggtcaatgctggcaaacctacacgttcaccagggaccccatctatttcactggcctagct

SEQ ID NO: 117138 - DNA, 75 bp, Homo sapiens
tctaggtgagtcgcggtgggtcctcgcttgcagttcagcgaccacggttctcccctggacccggcctccaccacc

SEQ ID NO: 117139 - DNA, 137 bp, Homo sapiens
acctgcatcaacccctctaactggtgtgatggcgtgtcacactgccccggcggggaggacgagaatcggtgtgcctcttcgagcactactgctactcccggggcggcatgcgccacagctcctacacctgcatctgc

SEQ ID NO: 117140 - DNA, 96 bp, Homo sapiens
gatccttttccactgtatttggagaagaatggaaagagaagactgatagagacttcgttaagctgtcccccagcgagcagatcacagggtagtggg

SEQ ID NO: 117141 - DNA, 100 bp, Homo sapiens
ggaaagagagcgccaggtgcttagcagtaagaagacatgttggataacaagaagaggtgtagagtttgcatatatcaactgtggccttaatgagcatgtt

SEQ ID NO: 117142 - DNA, 98 bp, Homo sapiens
tgcagtggaccgaagtggacagcgactcggtgcccgcgttctaccgcgagacggtgcaggaaagaccacagcaagattctttcattcgtctcctccta

SEQ ID NO: 117143 - DNA, 100 bp, Homo sapiens
ggctgctgctgctgctcctcactttcttcctccgcacggatgctgagagtgttcccttcccaaagaacttccttcagatctgcaagaagatcctgtgccg

SEQ ID NO: 117144 - DNA, 100 bp, Homo sapiens
cagtttgctgaagtcaaggaggccctgaagcaaagagaggaaatgctcgagtctacatcagcatcagcatctgcgtcaccatttcaatctgcatggtata

SEQ ID NO: 117145 - DNA, 75 bp, Homo sapiens
ggtcacttgaaccttgggaatattgagtcactccatggattcctttgggcaacccagaccagaagataatcagtc

SEQ ID NO: 117146 - DNA, 75 bp, Homo sapiens
ctgccaagcatagccaccacgaaagcataacccctactgtagaactaaatgcactgtgcatgaaacttggaaaaa

SEQ ID NO: 117147 - DNA, 96 bp, Homo sapiens
ccccatcaagaacaccaatgatgccaactcctgccagatcattattccacagaaccaagtcaatcgaaagtcaggattctggactctacttataat

SEQ ID NO: 117148 - DNA, 100 bp, Homo sapiens
agaagtggtgaagcttcatccccatgaactaaataatctcctgtctaaagagttggcatcctttggaagagttcgtgaaagctttctgcccagagctcct

SEQ ID NO: 117149 - DNA, 150 bp, Homo sapiens
ggatccggggatcaaagagcagtgggggttgctgacccagaggagagttctccaaacatgatcgtttactgcaaagaaaccacccctactcctaatcccccgactacagaagaggagaaaacggaatctaatcaggaggttgctaaccca

SEQ ID NO: 117150 - DNA, 100 bp, Homo sapiens
aacttcaagatgggtaacagacacaaattcacagggaagaaagtgactgaagagcttctgaccgataatagctatcatggtgaacttacttcagattgtg

SEQ ID NO: 117151 - DNA, 74 bp, Homo sapiens
gggtttccaccgttcgttcaaggctcggcatggctgcccggggccacagctggccctgcctgcagcagacgcca

SEQ ID NO: 117152 - DNA, 83 bp, Homo sapiens
aacgtgaacctggcatatctgggcgccaagccgcggagcctccagacggacaatgcagatcttcgtgaagactctgactggta

SEQ ID NO: 117153 - DNA, 80 bp, Homo sapiens
ctcagtgacccggtgcagctagaagtccatatcgtggtattcatgggtagtttgaaatatccagatgagaatggatttga

SEQ ID NO: 117154 - DNA, 75 bp, Homo sapiens
agacagaaccatttgaagaaaattccttcttggaacaatttatgatagaggtagcacaggcggagtgcagcggag

SEQ ID NO: 117155 - DNA, 100 bp, Homo sapiens
gtcacgatggagcggtttgaacctcagattaatgcggaggaggtgaccagtgaaaccttcaacaaagaggccttcctggcctctcggggcctcactcgtg

SEQ ID NO: 117156 - DNA, 90 bp, Homo sapiens
aaagaaaagaaaggcaaagaaaatgatatggaaatggaaattaaatgggttccaggtggaatgaggtaccatctactgtctccagaggac

SEQ ID NO: 117157 - DNA, 75 bp, Homo sapiens
ggccctggactcccctaagggctgtggcactgtcctgctctccggtttggcagtgaaggaactgaaatgaaccag

SEQ ID NO: 117158 - DNA, 98 bp, Homo sapiens
tgcgccccgctctgctgtgggcgctgctggcgctctggctgtgctgcgcggcccccgcgcatggtacagcagttgcaaggagtttacagtttacagga

SEQ ID NO: 117159 - DNA, 97 bp, Homo sapiens
agcaagtattgaagtagtaaaaccgatggaggctgccagtgccatcctttcccaggctgatgctcgacagatggagggaccagcaagaacagagaca

SEQ ID NO: 117160 - DNA, 98 bp, Homo sapiens
ttctggtctcctggatcatgtgtgagccccatgcccgtttctacgcggcccagatcgtcctgacctttgagtatctgcactcgctggatctcatctac

SEQ ID NO: 117161 - DNA, 100 bp, Homo sapiens
ggggaccttgccaaccctcccaagaagttcagagcacttgctctgaaatttggggactgagtacaccaaatacgatagatcagtgggatacaacaggcct

SEQ ID NO: 117162 - DNA, 82 bp, Homo sapiens
gtcactgacgtggacatcgtcttcagcaagatcaaccctggtccagcgcctccctctctcagcatggacgaggagagcctgg

SEQ ID NO: 117163 - DNA, 75 bp, Homo sapiens
gatttcagcctgcacggatggtcttgaaacacaaatggtttttggaaatggaagttccagtattaccgaaaatct

SEQ ID NO: 117164 - DNA, 100 bp, Homo sapiens
agtactgatgcccagtggggcattcgtcttggtaaacttggtaacattaaccaggtggtatttgttggaaatttcttgagaattaatacgatcgccatgc

SEQ ID NO: 117165 - DNA, 82 bp, Homo sapiens
caggcggtgacccgctaccggaaggccatcgccaaggctcatcagattcaagagatgtttccccaggttccataccatctgg

SEQ ID NO: 117166 - DNA, 75 bp, Homo sapiens
tggcaatggcctacgtcgtcataccgggcttccttgccctgtccggggttgaaatcacaaagattagacaccttt

SEQ ID NO: 117167 - DNA, 100 bp, Homo sapiens
caaacgtctacactgtacatgctttttattacaagactacggagcataggaggaaaattcatcatctgggtgtccgcaatgttgccagtgtctgtctgca

SEQ ID NO: 117168 - DNA, 83 bp, Homo sapiens
ggatcaatgcggttcaagaatcgattccagcgccatcactggtgcaagctatatttaacggagatcctgatgaagttcgagca

SEQ ID NO: 117169 - DNA, 87 bp, Homo sapiens
gtgcaaaaatcttagctctctcaatctctgtctgaactggatcataaatgacagggaaggaaactgaaaaggccaaggaacgatacg

SEQ ID NO: 117170 - DNA, 100 bp, Homo sapiens
atatggatatgccttgttgccatgggatacctgttcatgtgttttggaggcaccgtctctccctgggaccaggctccagcaggaggaaatggtgcagaaa

SEQ ID NO: 117171 - DNA, 82 bp, Homo sapiens
caggactccaaaatggcgtcagttggtgaaatgacaatggatgctctgttggctcgattgaaacttctgaatccagatgacc

SEQ ID NO: 117172 - DNA, 99 bp, Homo sapiens
aagctgggacttccaaagctgggaatcctattttttattatgttgcacggaggtcagaagagatcaattctacagaaatttccagtggttctgttgagg

SEQ ID NO: 117173 - DNA, 75 bp, Homo sapiens
caagcaggggcttctgtctgaggccagcgtcaacaaccttatggctaagcgactccgtgggaaggaggcttgttt

SEQ ID NO: 117174 - DNA, 97 bp, Homo sapiens
tcgctggagcacaaaagagtctccgcggtggaggtctgcgttgctcttgcttttcctcgctggggtgtacggtgtcatggagaaactccagctgggc

SEQ ID NO: 117175 - DNA, 75 bp, Homo sapiens
cccgccctctccccgtggcgcggcggcggggaggcgaggaccaggcctcctcttcccacctgtccagcagcatga

SEQ ID NO: 117176 - DNA, 98 bp, Homo sapiens
gccgcagtctggccacccgcttccatgcggttcgggtccaagatgatgccggatggatagaatgacagaagatgctcttcgcttgaatctgttgaagc

SEQ ID NO: 117177 - DNA, 114 bp, Homo sapiens
ggtggtgttgtcgtggccggagcggcccgcgcctgggctgccggcacttcgcggcagggagattcggctgattcttttttcattgtagaatctggagaagtgaaaattactatg

SEQ ID NO: 117178 - DNA, 100 bp, Homo sapiens
aaatttaactttagaagcaatcctaacattacattctatgtgtacgtcagcaacttttcctggcctattaaaatacaggcaacagcattattgagaaaag

SEQ ID NO: 117179 - DNA, 87 bp, Homo sapiens
tcagctttgaagtgggagcccagttggaagcccgggaccgtttaaaaaactgaagacagcgacagctgtggcgcactgcaaacgcgg

SEQ ID NO: 117180 - DNA, 145 bp, Homo sapiens
ctcttatttagttctggggagcgcctcgtcgacatgagtgatgtggaggaaaacaacttcgagggcagagtactccaaagattcaggtttactcacgtcatccagcagagaatggaaagtcaaatttcctgaattgctatgtgtc

SEQ ID NO: 117181 - DNA, 100 bp, Homo sapiens
gtgctgctgctgctgctgctgctgcatgtctaccaggagaggagggaactgcggagcggtttcttaaacaattaggtctacatcctaactggcaattcgt

SEQ ID NO: 117182 - DNA, 75 bp, Homo sapiens
ttcccagaagttgttctaacgctgcctttgctttaaaacagtattacttgcgcactgccagtgaaagatgtagaa

SEQ ID NO: 117183 - DNA, 100 bp, Homo sapiens
gctgcagaggacacgaggcggcgggctggagacatggaccgcggcgagcaaggcgccttggtgctgaattggggaagtctgttgtatatcaagagaccaa

SEQ ID NO: 117184 - DNA, 100 bp, Homo sapiens
accgtggggctgcaaggacctcagcagcggtttcccaagtttcctgacttcttccatcctctggaaatcagctgtggtccaagggcagccattaatggtg

SEQ ID NO: 117185 - DNA, 101 bp, Homo sapiens
atggggcccatgacccactgtactggaaaggaaaaccactgcgtctccttatctggacacgtgcaggctgggtcttgctctgtctcccaggctggagtgca

SEQ ID NO: 117186 - DNA, 75 bp, Homo sapiens
ctgtgttccatggcagggaacttttggcagagctcccactaatcattgagactgaaaatatgatggaccgaattg

SEQ ID NO: 117187 - DNA, 50 bp, Homo sapiens
caagaagcatgctggattgtaatcagacctacctggtggttctgtgcctt

SEQ ID NO: 117188 - DNA, 100 bp, Homo sapiens
ccctctctctaccacgagcagcgccctgggagccctcacgagtcccgttgtatcacggactgattcaccgagcccaaccgtactcaactcacatatttct

SEQ ID NO: 117189 - DNA, 75 bp, Homo sapiens
attttggagccagatctctcagggccatctcagctataaacacaagtgagagccacgagccaaggtgggcacttg

SEQ ID NO: 117190 - DNA, 88 bp, Homo sapiens
tgtcgtgtcagcttttggactccctattgtatttgccagagcacatctgtcctaccctggtccaagcctggaaagtgaagacttcaac

SEQ ID NO: 117191 - DNA, 75 bp, Homo sapiens
cctcttctgcaggtactggaaacccacaggcacacccaagtgaaagaactcttttcttctttgggagtcgaatgt

SEQ ID NO: 117192 - DNA, 100 bp, Homo sapiens
ggaagatggcgaaggtctcagagctttacgatgtcacttgggaaggtactcatgcccgactgtctaccaggcacacagagtttgaggagagggagtatgt

SEQ ID NO: 117193 - DNA, 75 bp, Homo sapiens
ggacatcaggacaccgggagtgggagagattggactgggagactcagcagttggattggatgctgctggcaagac

SEQ ID NO: 117194 - DNA, 77 bp, Homo sapiens
ggacgcttgccacctcatcatacccctgagggagatcatggaagggaagtggttgctgtgtatgttactggtgcttg

SEQ ID NO: 117195 - DNA, 50 bp, Homo sapiens
ctgccatccactgactcgtaaagtagagttggctttgtgggacacagctg

SEQ ID NO: 117196 - DNA, 100 bp, Homo sapiens
ctactatgtgctggagccacgggtggataaattagatgcttcagaatcactgagaaaagaagaagaacaagctacagagacacaacccattgtttatggt

SEQ ID NO: 117197 - DNA, 82 bp, Homo sapiens
cggaagtggatggcgtggagatatggcgcaactgcggcgcagtacgggaatgtcaggtgctatttttagctggcaaaaccaa

SEQ ID NO: 117198 - DNA, 50 bp, Homo sapiens
gtggagaccagcagaactccaccagatgaagattatggaagagattcggg

SEQ ID NO: 117199 - DNA, 100 bp, Homo sapiens
ggctcagcagcagccaataggacatgatccaggaagagcagtaagggactgagctgctgcttcgtcagcaattgaagtggttgatatgtgaactctgcag

SEQ ID NO: 117200 - DNA, 100 bp, Homo sapiens
acttccacttcgtgttcttcctagcttccctgtatgtgatgatgaccgtcaccaactggttcaagttggtcaaagaaaaagtgatgtatgaaaaagaggc

SEQ ID NO: 117201 - DNA, 96 bp, Homo sapiens
gaagaatcctgagttccgtgtgcagttccaggacatgtgtgcaaccattggcgtggatccgctggccttatacgctcaacggcaagaaagtggaag

SEQ ID NO: 117202 - DNA, 100 bp, Homo sapiens
aagaaaatacaaatcacacgcataatggatgaaaggaaccgacagggatattggagaagatattccactagacaaagatttctgaaattgaaatattatt

SEQ ID NO: 117203 - DNA, 100 bp, Homo sapiens
aggaactgcgcagcctcttcgagcgccgcggacgcgtcatcgagtgtgacgtggtgaaaggcccactgctcagtggagcgtggaggacgaggaggaggcc

SEQ ID NO: 117204 - DNA, 74 bp, Homo sapiens
cgggcttggagttcgcctcagacgcggtggagccgccggagtctgagaaggctatggtgaactaaacggtaatg

SEQ ID NO: 117205 - DNA, 135 bp, Homo sapiens
ctccagcgcgtggtgggggaactgctggggaaggcgattggcatcgatctctccatcccttccgaggcccgacttcgtttgcatttatgtcggatcctcagtgaaaataaaagccatgatagttcaacatacaga

SEQ ID NO: 117206 - DNA, 75 bp, Homo sapiens
catccgcatcaacaagatgttgtcctgtgctggggctgacagactccaattccagggtttcagaaccgcatcgca

SEQ ID NO: 117207 - DNA, 75 bp, Homo sapiens
gagaaagaaggttaagctggctgtcctgaaatattataaggtggaagctcccttcataccaaagtttaaaggccc

SEQ ID NO: 117208 - DNA, 100 bp, Homo sapiens
cctctagtatgggcaagcgtacttctgaagcaaccaaaatgcatgctccacccattaatatggaaaggaaccgggaagagcagaatttggtggcttatcc

SEQ ID NO: 117209 - DNA, 96 bp, Homo sapiens
caacacgcccagttccaccgtctcgagagcctgttacctatccataaacccccaaaaggatgagacgctagagacagagaaagctcagtactacct

SEQ ID NO: 117210 - DNA, 100 bp, Homo sapiens
aaaagatccctggaatatgaagagacacagtatggtagccacacccccaggaacacatgattctgtgcagatttgcagaccagacagctgtccagctccc

SEQ ID NO: 117211 - DNA, 100 bp, Homo sapiens
cttgttactccctagcagtgtggtaaggaaccgcttagaaaatgtgcctgagtgggtatgtgaaagccgaaagctagaagttttggatattggccataat

SEQ ID NO: 117212 - DNA, 50 bp, Homo sapiens
ctcagagattatagggagcatgggaagttaaatgaagttcgaaagagatt

SEQ ID NO: 117213 - DNA, 80 bp, Homo sapiens
ggctgttctgaagagtgttactgtgaacattcatgcacaaatttttatgtggagttggttgaatctggcgatgtggaacc

SEQ ID NO: 117214 - DNA, 100 bp, Homo sapiens
gctttgtacggcttagaggacttccctttggatgtagcaaggaagaaattgttcagttcttctcagacagagtctcgttctgtcacccagcctggtgtgc

SEQ ID NO: 117215 - DNA, 82 bp, Homo sapiens
ggggactaagcaacaggtgtttcaaggaactaattctctgggttagagcagccagcgggtacagaatggattttggaagagg

SEQ ID NO: 117216 - DNA, 75 bp, Homo sapiens
ggaggctgggagccgcggcggcctggggacatccataaaaattcatcagagagcattttactactgagctgcaaa

SEQ ID NO: 117217 - DNA, 89 bp, Homo sapiens
catagcttcattcctgagtagcattacctacagctggtatgacagtgcccaccagaagtatgtccgacaagcctggcagaaggcagaca

SEQ ID NO: 117218 - DNA, 75 bp, Homo sapiens
aactccgctgcctttgccgccaccatgcccaaaacgttgattatggaagattcccacaagagtaccacgtcagag

SEQ ID NO: 117219 - DNA, 100 bp, Homo sapiens
ggagcccccagcgcagcggccgcgcggtcttgcgagtggctggttccctgcagaagagcacagaagtgatgaaggccatgcaaagtcttgtgaagattcc

SEQ ID NO: 117220 - DNA, 153 bp, Homo sapiens
gtggagagggattcgtggtgaaggtccggggcttgccctggtcttgctcggccgatgaagtgcagaggtttttttctgtgttgaattcaactgaaggcgaggaatgttggtgatgaagctgagttcaggactcggtggaccctttgggaatgg

SEQ ID NO: 117221 - DNA, 100 bp, Homo sapiens
gtggacgtgctggtgtctgagtggatggggacctgcctgctgtatctccagatgaaatggccactgcttgatgtccaggcagggagcctccagagtagac

SEQ ID NO: 117222 - DNA, 75 bp, Homo sapiens
tggcctgtggctgggattttacgattatgctcacaggacgtggctttatttctccaagaatttaatgctcctgat

SEQ ID NO: 117223 - DNA, 51 bp, Homo sapiens
gaaacaaaatgtcaacaaattgatggggggagtaaaacttggattgggaga

SEQ ID NO: 117224 - DNA, 100 bp, Homo sapiens
gatcacatcagggactccacggccagagccctggatgtcatttggaaaaacactagagacagacggctggcagaacgctccagaataatcagttgaaaac

SEQ ID NO: 117225 - DNA, 106 bp, Homo sapiens
atggcagatgtatgggtgaagatccaagatgttctacagagcatgcttgagaagggaggataaaaactttcagaatgagcaaaacaccatcaacgttaattccaga

SEQ ID NO: 117226 - DNA, 100 bp, Homo sapiens
ggctgacaggaatcttctggtgtactctttttatgaaaagcaatcagaaacggagactgttcatctgtttatcccagctctatcagtcggtgccatcatc

SEQ ID NO: 117227 - DNA, 100 bp, Homo sapiens
caaaggatttgatacgactgccataaacaaaagctattacaatgtggattgtgagggtgaaactcccattcacaaggcagctcgctctgggagcctagaa

SEQ ID NO: 117228 - DNA, 100 bp, Homo sapiens
cctgacccaagatacctgtcagttcctccgtcaccaaatatcaggtgacttaagagattaaaattaatttggttgctgttggttctgaacaaataatgag

SEQ ID NO: 117229 - DNA, 100 bp, Homo sapiens
gtcgatcaaaaattgtgcttctggtagatgcttcacagcaaactgactgaaacaacctcgagccaggaagatgttagatgaaggagtaatagttgctctg

SEQ ID NO: 117230 - DNA, 100 bp, Homo sapiens
gcggggagccaggcctgggccccgggtccccaagacccttgtgctcgttgtcgccgcggtcctgctgttggatgaaacaggcgcctatttaatcgacaga

SEQ ID NO: 117231 - DNA, 98 bp, Homo sapiens
ccaagaaggacattttctgccccgagagttgtatctctcagaagatagaagtgtgcaagaagtactacagaagcatttcaatatcagcaaaaacctgc

SEQ ID NO: 117232 - DNA, 80 bp, Homo sapiens
agccgatccagcctgcggagcctgtggggcagcactggcctgtgtttgtggaggtgaaagaccttttgacattggtgccg

SEQ ID NO: 117233 - DNA, 74 bp, Homo sapiens
tgttacagaggtctccagagccttctctctcctggtactaggttttgacaagcttgcatcatgcgtgagtataa

SEQ ID NO: 117234 - DNA, 75 bp, Homo sapiens
ccatcaatatgtttgcagtacacaactcccagctgaaagtttctcttcagcaacgggtagcagaattggaaaaaa

SEQ ID NO: 117235 - DNA, 96 bp, Homo sapiens
gcgtgctggccccgggtggcgcctccctgcgactcctggaccaccgggcgctggtctgctcccagccgatctgtgactttggcctggcccgtgttg

SEQ ID NO: 117236 - DNA, 75 bp, Homo sapiens
catgaaagcagtaatcagatgtttgccatgaaagaaataaggcttcccaaggcctgggcggatgatgtggagcgg

SEQ ID NO: 117237 - DNA, 83 bp, Homo sapiens
atcgggactgggagctgcgagctgctcacggcggttgttagtgccccttcccagctgcctgcctgccctagccagctcccagg

SEQ ID NO: 117238 - DNA, 75 bp, Homo sapiens
caaatccaagtcgttcttcgacaacatctcttctgaactcaagaccagagtctctggtaagaagagtgaaagcaa

SEQ ID NO: 117239 - DNA, 75 bp, Homo sapiens
cggatgcccagctgaagagcctgctgatgtcagtgggacccattcagggggtccactggacggggcctgagctac

SEQ ID NO: 117240 - DNA, 50 bp, Homo sapiens
ccagatgaagaagatgagatttcggaacgagttgaagcagttaatatggc

SEQ ID NO: 117241 - DNA, 101 bp, Homo sapiens
aggacatggagtatgaaagacgggatgtttttgaactaaatttcatgaacgtcaaattttccagtggttattatgacttccttgtcgaagttgaaggtgac

SEQ ID NO: 117242 - DNA, 100 bp, Homo sapiens
acatcaagtcctaccgggacgatatcgatctgcaaaacctcatcgactcccttcagaaagctggcattcttcttgagcaccgagaaaaagaatttggaga

SEQ ID NO: 117243 - DNA, 74 bp, Homo sapiens
cttcgggagttgatctctaatgcttctgatgccaccctggagaaatgtgccacgtgctcccagcccatcctgga

SEQ ID NO: 117244 - DNA, 100 bp, Homo sapiens
ttcgtggaagaggaaccccgagctcctcagccccaaaggtaacctggatgaggacatcattgcagaagagaacatcgtttcccgaagtgagttcccagag

SEQ ID NO: 117245 - DNA, 100 bp, Homo sapiens
ccggcatgggttaccgctgctgcccctgctgtcgctcctggtcggcgcgtggctcaagctagcaaaagctgatgaagcattgaaagccaaagaaagaaat

SEQ ID NO: 117246 - DNA, 97 bp, Homo sapiens
tcaccgagcgcttgatgtgcgcggagagcaatcgccgggacagctgcaaggaatgggtaccacagaccatgtcatcgtcctggcgtccacgaaccga

SEQ ID NO: 117247 - DNA, 99 bp, Homo sapiens
ccaccacgcactgggtcgtcacggaggacgggaaaatccagcagcaggccaatggaagcactgttgtgaagaacttatgaaaattgagattatgtcacc

SEQ ID NO: 117248 - DNA, 74 bp, Homo sapiens
aagattcacgtgtacggctattccatgtagtatcttcttagaagtggacccaaggcacccggagcttgtcagca

SEQ ID NO: 117249 - DNA, 101 bp, Homo sapiens
aagcaaaggctgctctgaagcgcacgacctccgactactttctccttcaaggttggatggcaagcatgtggtgtttggcaaagtgaaagaaggcatgaata

SEQ ID NO: 117250 - DNA, 100 bp, Homo sapiens
ggacagtcaccaaggaatgtcacagcaggcttcggtagattgcaaatgacctgctttctttcggatcccgggctgctttcggacacctgtcgaatagtaa

SEQ ID NO: 117251 - DNA, 100 bp, Homo sapiens
agaagccctacgagtgcaacatctgcaaggtccgcttcaccaggcagcctgcttctgcaaagtggtacgatcgaagggactatgtcttcattgaattttg

SEQ ID NO: 117252 - DNA, 75 bp, Homo sapiens
cgggtccccgcgttcacagccccagcgcaggactgatcctttgaaatactccagccatgactaaaagagaagcag

SEQ ID NO: 117253 - DNA, 83 bp, Homo sapiens
ccctggcctccctcaccttggacacctcgcttgggagaactacgatgacccgcacaaaacccctgcctccccagttgtccaca

SEQ ID NO: 117254 - DNA, 100 bp, Homo sapiens
tacgccaagaggaccctgcttggggaccccaagtttgtggatgtgactgaggtgggcatcaactaccagcccccgaccgtggtccccgggggagacctgg

SEQ ID NO: 117255 - DNA, 100 bp, Homo sapiens
catcaagatgatgatcatcttttccatcgccttcatcactgtccttatcttcaaggtgcagtacctgaaggacaggcagctggcgggcgccatggtatgg

SEQ ID NO: 117256 - DNA, 90 bp, Homo sapiens
cacgggagcaagatggcgattccgggcaggcagtggtaccatggccacatgtctggcgggcaggcagagacgctgctgcaggccaagggc

SEQ ID NO: 117257 - DNA, 100 bp, Homo sapiens
gaaacaagcaaccacctctggctagtggtggaactctgcacagacaggagacaatttatccagcatgttgctagaaaatctaactgataatgaaagtgaa

SEQ ID NO: 117258 - DNA, 101 bp, Homo sapiens
gcggctgcgagagtggcagaggagctggcggagagcggcctgcgggcgatcgggccgagtttacagaggatctggttggctctgtggtgcacgtgctaagc

SEQ ID NO: 117259 - DNA, 82 bp, Homo sapiens
cggaggctacagcatcgtggcgctgggcaatgacatctacgtgacggccaagaactacatcgcgctggatgactttgtggag

SEQ ID NO: 117260 - DNA, 122 bp, Homo sapiens
ttttatacacctgcagctactggactctacgtggatcagtatttgtatcactactgtgttgtggatccccaggaggaagagcaagcagtcagaccaaaatacctactgggtcgggaagtcac

SEQ ID NO: 117261 - DNA, 87 bp, Homo sapiens
agattctacttattcatcagtttgttgtgcttgtcaagatcaggtgctggagaatctggtaaaagcaccattgtgaagcagatgagg

SEQ ID NO: 117262 - DNA, 75 bp, Homo sapiens
ggccacggcgctggtcaccggggtctgcctgggagccttcacgtaaatgggtccagtcatgcctcccagtaagaa

SEQ ID NO: 117263 - DNA, 100 bp, Homo sapiens
gtgaattgcagtgatctttcagagaaagcgcctgttcaactttgtcctctctcagggaacagcacaggagaaggaggagagcgatgttgacctaacagcc

SEQ ID NO: 117264 - DNA, 83 bp, Homo sapiens
gccgagttcaacatcctcctggccaccgactcctacaagacttatgaaaatatgcatcagtttaatactgtcttggaattcat

SEQ ID NO: 117265 - DNA, 100 bp, Homo sapiens
ctctctcctttttaattgcgggtgatgacagcactatagtgcaggtgttggaagtgaaaggcgcagttgtgtagcagttgagtaatgctggttagctgtt

SEQ ID NO: 117266 - DNA, 100 bp, Homo sapiens
gcgggatgagaaggatgaacatggccgagcttactatgaattccgagaggaggcttaccacagccggctttatcctgtggataaacgcagagtgaacgag

SEQ ID NO: 117267 - DNA, 75 bp, Homo sapiens
ctggattctgaggaccagcagatggccagtcacgagaacccagactggtcttctgaggacctctgccctctacac

SEQ ID NO: 117268 - DNA, 98 bp, Homo sapiens
gacgatgcagctgtgcgctctcattttaccaaagtggaacgcatccccaaggccctggaagtgacagactccagagaagccttgggacaccaagagaa

SEQ ID NO: 117269 - DNA, 100 bp, Homo sapiens
gtaagaatggtgcctgtcctgctgtctctgctgctgcttctgggtcctgctgtcccccaggagaaccaagatggttttcaacacatactccaatgaagac

SEQ ID NO: 117270 - DNA, 100 bp, Homo sapiens
ctcgtatggtcaacattgatggaaaacaaatcaaactgcaaatctgggatacgaaaggagaagatgagtatgccaacgttgatgccattgttgtatcagt

SEQ ID NO: 117271 - DNA, 74 bp, Homo sapiens
gatcatcctggcgatctacttcctctggcaggtgccttcaaatctcttgacaaagatggcactggacaaatcca

SEQ ID NO: 117272 - DNA, 98 bp, Homo sapiens
caaagacccagtgaacaaatccgggggcaaggccaaaaagaaggtttactcctggcttgggggcattaggaagcactggaggctcttcgggaactaat

SEQ ID NO: 117273 - DNA, 75 bp, Homo sapiens
tgacagagacaacaccgagtatgagaagtctcctctgagcctccggcctccataagacccaaaacagatgacacc

SEQ ID NO: 117274 - DNA, 76 bp, Homo sapiens
ccgaaacatggagtcctgtaggcaaggtcttacctgaatcaggaagctcttcgtgggcggtcttgactggagcacg

SEQ ID NO: 117275 - DNA, 100 bp, Homo sapiens
tggagggactctccttctcaccgttccgggaacaaatgctagatacgcggcttacagggagaacacagttggcctccaccgtttctgccccacagaaaac

SEQ ID NO: 117276 - DNA, 87 bp, Homo sapiens
tgcagctcgggacttcggcctgacccagcccccatggcttcagaagagataacaacgaacttgatgcaagtgataggtttgccaagg

SEQ ID NO: 117277 - DNA, 100 bp, Homo sapiens
gctactctctctttctggcctggaggctatccagcgttggagctgaaggagtgcccaggctgcggatggaggaaggacgtgctcgggagaaggtgaagat

SEQ ID NO: 117278 - DNA, 74 bp, Homo sapiens
cccgcaggtgctatgctgtgggccccgctcagatctcacattcttgaaggtggcattgaagagcactaagatcg

SEQ ID NO: 117279 - DNA, 51 bp, Homo sapiens
ggtacatctgaaagccgggaaatggcctcttctgaagagctgaaagctgcc

SEQ ID NO: 117280 - DNA, 100 bp, Homo sapiens
tgctgtctttgtttgccggattagatccttccaaggtccagagccaaacccgtcactgaccccccagcccaggcgcccagccactccccaccgctaccat

SEQ ID NO: 117281 - DNA, 99 bp, Homo sapiens
ggggaggagaccatggctgactacctgctgtacaccctcaacaaacaccagcgctttggagaagctccatgaagaaattgacagggtgattgggccaag

SEQ ID NO: 117282 - DNA, 89 bp, Homo sapiens
gtgatctccagcgccggcctcctcagtgcgaagaagctgcagccgcacctggccaaggtttcgcgatcccgagtacggggaatggtttg

SEQ ID NO: 117283 - DNA, 75 bp, Homo sapiens
gtcgtgaggatcgtgtgcattacaggagtcctccacttgccactggaaagagcagtgatggacccatacagcgct

SEQ ID NO: 117284 - DNA, 100 bp, Homo sapiens
ggcagggaggatgacggagctgcagtcggcactgctactgcgaagacagctggcagggaattgcaacccagtgaagaagttacctggaagtaaagactgg

SEQ ID NO: 117285 - DNA, 83 bp, Homo sapiens
gaactgcgcagacctggtggaggtgttaaatgaaagttgtctgcattcaaaagagcattctattaaagctaccttaatttggc

SEQ ID NO: 117286 - DNA, 75 bp, Homo sapiens
ggagtctctgtccgggggcctggctaaggaaaccctattacctccaggcatgtactggcattgaaaacattgacg

SEQ ID NO: 117287 - DNA, 83 bp, Homo sapiens
tatctgtcttcggtggactccttcggcagtccacccaccgccgccgcctcccaggtattgatgtcaagctgaaccatcgtagg

SEQ ID NO: 117288 - DNA, 73 bp, Homo sapiens
aaaaacatcttttcgaccaggatgaggagacatgttggaactcagaccaggcagacatgcagcgttgggagga

SEQ ID NO: 117289 - DNA, 82 bp, Homo sapiens
gaggcgccagcctgcgaaggtggcggcgctgctgctcgggctgctcttggagttactccacaggatccgctgaacataggat

SEQ ID NO: 117290 - DNA, 87 bp, Homo sapiens
agcactttgaggacatggcctccgacgaggacatgccccttcccagctgcctgcctgccctagccagctcccaggtgaagagactct

SEQ ID NO: 117291 - DNA, 99 bp, Homo sapiens
atctgatgctgtggaacttgcaaatcgaagccgagattcgggccctccaccctctacagtgagtgaagccgaatttgaagatatcatgaagcgaaacag

SEQ ID NO: 117292 - DNA, 83 bp, Homo sapiens
atgcagtcggcttgtcctggctcttgccctcatcctggttctggaatcctcagttcaagaaatcaacgaccgggagcagaagt

SEQ ID NO: 117293 - DNA, 100 bp, Homo sapiens
tgataccaggggcagagggaccactctgacagttctggcataaagcatgcttccattgcgagacctgcaagatgacactgaacatgaagaactacaaggg

SEQ ID NO: 117294 - DNA, 100 bp, Homo sapiens
ccggtctggacacagaaagagaagtccgtgggctgctggacaccctggtgactgacctgatggtcctggctgatgagctcagccccataaagaatgtcga

SEQ ID NO: 117295 - DNA, 100 bp, Homo sapiens
caagaggatgctcacttcaaagctttcttccaggaacctagaaagattgtacaatgaatggtgattctcgtgctgcggtggtgacctcaccacccccgac

SEQ ID NO: 117296 - DNA, 100 bp, Homo sapiens
atggcgagagggggcaccggaggtgacaacaataacaagactgtccttcggacaagttttaggtacactttctccattgttctcggttcttctttggata

SEQ ID NO: 117297 - DNA, 82 bp, Homo sapiens
cgcgggtctgctctgtgtgccatggacggggaacggcaggagcagctgatgggatatcggaagagagggccgaagcccaaac

SEQ ID NO: 117298 - DNA, 51 bp, Homo sapiens
gggagttgatctctaatgcttctgatgtggtagacttgctgctggctcgag

SEQ ID NO: 117299 - DNA, 75 bp, Homo sapiens
cgggactggcggggggcagccgagacccaccgaggcagcccaggttttcccatcatatgattcccggtcctcctg

SEQ ID NO: 117300 - DNA, 82 bp, Homo sapiens
tgggagctgcctctgaggaacacgccgcagatagcctgggctggaagctcttctacgtcacaggctgcctgtttgtggctgt

SEQ ID NO: 117301 - DNA, 73 bp, Homo sapiens
aatgtctcatgttcgagtctggggctgtcgctgtgctctttaaagctgatacattcctgtgggtcaactatgc

SEQ ID NO: 117302 - DNA, 82 bp, Homo sapiens
acccttgtccacctcgacctctcagggaacgtccttcgtggagatgacctctcagctcttcgtcagattgggcagaggacga

SEQ ID NO: 117303 - DNA, 75 bp, Homo sapiens
cggagctcgtccagctgcgtgcctagggtgtcaaattgagaaccaggtagatccccaccacctacagtaaaaagg

SEQ ID NO: 117304 - DNA, 82 bp, Homo sapiens
aagagcccaaaacctattacgaactcaaaagtcaaccgctgaagagcagatccctccctggtgccacagcagctgagtgcgc

SEQ ID NO: 117305 - DNA, 96 bp, Homo sapiens
ccaagactgcctggcccagctgcgcctggcgcaggaggccgcccaggttatgaggcacagactttcaactgggagaactacttggagaagaccaag

SEQ ID NO: 117306 - DNA, 100 bp, Homo sapiens
aaggtctttgctgccatcctttcttctctaaaattgactggaacaacattcgtaactagcagcccgacggccatggaggctgaagagacgatggaatgcc

SEQ ID NO: 117307 - DNA, 75 bp, Homo sapiens
cacagtgggggtgtgcaaacccgagagaactgggttatgaagacagtatggagtttccagaccatagtagacatt

SEQ ID NO: 117308 - DNA, 100 bp, Homo sapiens
aaacatggcaggctcggatgctgtgaactaaatgttgctgctgttgatacaaacctcacattagctgtgtcaaaaaatgtggcaaagaccatccagttat

SEQ ID NO: 117309 - DNA, 73 bp, Homo sapiens
tggaagcctgtcccgttgtcagagtggaaggagccatgtgtgagatacctgcccaggctgtacctggacatac

SEQ ID NO: 117310 - DNA, 100 bp, Homo sapiens
cgtctttggaacaacttaaataagtcaaatatacttggagctttaaaaattaaaaggagagagattcgagattgaatttgccaggaagaatgtgtatagt

SEQ ID NO: 117311 - DNA, 100 bp, Homo sapiens
aagagggctgcaaggtgggaagtgaagtcagtgcctcagttgctgttattcaagcggagaaatgttgctacagcagaagaagaaacagaagaagaagtta

SEQ ID NO: 117312 - DNA, 71 bp, Homo sapiens
aagatgaaagtgctgagattcattgcagaggtatccgtacttgaaaactggaaggagagtgaagtgtataa

SEQ ID NO: 117313 - DNA, 49 bp, Homo sapiens
tgctgcagctcgtgggtgctcaggatgaatctggttatagatggacaag

SEQ ID NO: 117314 - DNA, 100 bp, Homo sapiens
ctggggactgcagagaagcaggacctcgggccatggtactatactggcaattgctggagaagattttgcaattgttgcttctgatactcgattgagtgaa

SEQ ID NO: 117315 - DNA, 83 bp, Homo sapiens
ctccacctgaaggaccagtgtctgatcagctgctgcgtgctcagccccagagcagacattgctgtcgaactgctccagaaggc

SEQ ID NO: 117316 - DNA, 100 bp, Homo sapiens
gaggcctgcaaagctgtacaagagatcatgcagactgaatctggatatggatctgaatccagcttgcgtcgacatggctcaatggtgtccctggtgtctg

SEQ ID NO: 117317 - DNA, 82 bp, Homo sapiens
gctcctaagcctgcacagccgcggcggcagcagcagtgagaggactctggtccttcctgtggttcgtgggcttctgcttcct

SEQ ID NO: 117318 - DNA, 101 bp, Homo sapiens
gcgcggctgccggcggctgggactgaagagggacgggtcccgcggcgagcgagctcctgaggtgaaaagaacggaggggagcccgatgacgctgaactagt

SEQ ID NO: 117319 - DNA, 100 bp, Homo sapiens
ctgcttcctcctcctcggcctcaccgctctatcacatcacactctggaccttcctccttgccctggggcatttcctctctgagttgtttgtctatggaac

SEQ ID NO: 117320 - DNA, 100 bp, Homo sapiens
tgttttgaagagaaggggaataagactgcatctgttcatatgagaggtcctgctgtactagccaccaaagcagctgctggtactaagaaatatgatctta

SEQ ID NO: 117321 - DNA, 75 bp, Homo sapiens
ccaagatggagactgccgagcagccttgagccgatagcctgggctggaagctcttctacgtcacaggctgcctgt

SEQ ID NO: 117322 - DNA, 90 bp, Homo sapiens
gattcgcagtggtcgcttcttctccttgtttaagtgctgtggggctgctaactacacagattgggagaaaatcccttccatgtcgaagaa

SEQ ID NO: 117323 - DNA, 101 bp, Homo sapiens
cgggttattcgagtgaccgagaccgcggccgggaccgaggaccaggtgataggtttgatcgagacagaccgttgagaggacgtggaggcccgagagggggt

SEQ ID NO: 117324 - DNA, 103 bp, Homo sapiens
tccccagagccaggcacaaggatgaacattctgccgaagagaacaagacgtgtgaagactcaggccaaccaggatctcccaacccgaagacagcaggcagccc

SEQ ID NO: 117325 - DNA, 116 bp, Homo sapiens
ttcgtatctaagactctgggacactcctgaagtcgggaaatgtgttctaagaacggaagcatctgggctggatggaatttagcatcaagcagagtcccctttctgttcagagtgtt

SEQ ID NO: 117326 - DNA, 83 bp, Homo sapiens
gaggaggcggccctggcgcggggaagcagtgggaaaatcgcaaggaagccggcttctaagtgccagatgatggaggagcgtgc

SEQ ID NO: 117327 - DNA, 90 bp, Homo sapiens
ccagtccagcttgatccacctggtggggccttcagactgcaccctgcacggctttgtgcacggaggctctcaccacacacttgttcatgg

SEQ ID NO: 117328 - DNA, 90 bp, Homo sapiens
gctgggacttcccgtccgcggcgtggaggacgtcaagccttctaatgtactcatcaatgctctcggtcaagtgaagatgtgcgattttgg

SEQ ID NO: 117329 - DNA, 97 bp, Homo sapiens
atcgcgaaaatcaggcccatcgcagagaaatcgggcatttgcaagatccgcccacccgcgataagctccgaagaagtatgcctaacctagcccggat

SEQ ID NO: 117330 - DNA, 97 bp, Homo sapiens
gctcttcatcaccttcgtggtcgtctggtcctactacgcgtacgtggtggagctctgcgtgtggaaatcctcattgacgattcaatttgttgaaggc

SEQ ID NO: 117331 - DNA, 90 bp, Homo sapiens
ggcaacaacccagcgcgcctagcctggcgccgtgcagcgaagcccaagagctggcctcgccacgaagtctccacaaaccggaggactacc

SEQ ID NO: 117332 - DNA, 100 bp, Homo sapiens
tccaccacctttcataaagccaccagcaggtattgcattggaactgagtgaattgagaaataagacaaacagatttcaagagaatgctgttgaaattacc

SEQ ID NO: 117333 - DNA, 75 bp, Homo sapiens
ttttggctgccctgagctggcagtacctgaccactctctcccaggtgttggaaatcaatagctcttctagccttt

SEQ ID NO: 117334 - DNA, 87 bp, Homo sapiens
tgcagctgcctcagttcttagcgcagatttctgcatgaatccccagacagtgctgctcctgcgggtcatcgccgccttctgtttcct

SEQ ID NO: 117335 - DNA, 98 bp, Homo sapiens
tgtgttcgcagtgacctggggaacctgctcaaagccctgggtcgcttggaagaagccaaggctcaagttgatgaaggagtccctctgaagatttgctt

SEQ ID NO: 117336 - DNA, 121 bp, Homo sapiens
ccacctgctgcacccacgaatctgcccacccctcctgtaacccagcctgtttcacttcttgttttctggatatgccgcagaaggatccgtgccagaagcaagcctgtgagatacagaaatg

SEQ ID NO: 117337 - DNA, 83 bp, Homo sapiens
gggcggcgtgggcaagtcggcgctcaccatccagttcatccagagcaaagactcaggtggactgaaggccgctatgatcgaat

SEQ ID NO: 117338 - DNA, 51 bp, Homo sapiens
caggatttcctggaagcagagaaatgaatcattgatcagcgattcgagaag

SEQ ID NO: 117339 - DNA, 82 bp, Homo sapiens
gagtgctgtcccttggaacaggaggagtaagattgaggtactaggttttgacaagcttgcatcatgcgtgagtataagctag

SEQ ID NO: 117340 - DNA, 75 bp, Homo sapiens
caccggcacagtgacggcttcagaggctgttctccatagtggtgttcggctccatcgtgaacgagggctacctca

SEQ ID NO: 117341 - DNA, 83 bp, Homo sapiens
aggaacctgggcgagcagcggcgggggcccgaggggttcgagaacttgtcttggacaattgcaaatcaaatgatggaaaaatt

SEQ ID NO: 117342 - DNA, 75 bp, Homo sapiens
ggctggtgggcatagtggctgccctgctggctgcattgtcttccttgaggtatggcgacaagaagtgaatgcagt

SEQ ID NO: 117343 - DNA, 75 bp, Homo sapiens
ctcacaatcggcagctgacacctgcagacaatctccactgttgcaaatccataatgagatggcatcaacatcaga

SEQ ID NO: 117344 - DNA, 82 bp, Homo sapiens
caagaattcaaggccagaggctaatgaaggtatttctttaaatccagaacaatggagccagctgaaggaacagatttctgac

SEQ ID NO: 117345 - DNA, 100 bp, Homo sapiens
gagcgagagcgagtgcctgagcaacatccgcgagttcctgcgcggctgcggggcttccctgcggctggaggtgtacgaagccatcgacagcagagatgga

SEQ ID NO: 117346 - DNA, 75 bp, Homo sapiens
gtcatgatcaacaaggccacgccctacaactacccaggctaatctagacgaaatccagatgagttcacctacatt

SEQ ID NO: 117347 - DNA, 76 bp, Homo sapiens
tgctgttggtgaaagagggtgtgcagaatgctaaggagtggagtcaacatatcaatggagcaagtcacagtcgtcg

SEQ ID NO: 117348 - DNA, 82 bp, Homo sapiens
caggagaggagcactttgaggacatggcctccgacgaggacatgtgtgcttcccgcacagctgcagccatggggtctgagga

SEQ ID NO: 117349 - DNA, 82 bp, Homo sapiens
ctcctctgcaccatggctctctgcaaccagttctctgcatcacggggcatcccggggcccatcgccttcggctgggtgatcg

SEQ ID NO: 117350 - DNA, 97 bp, Homo sapiens
acagctggtgcgggatccttgtctttgtcctgtactttgtgcagatcgaagcaaagctgagatggatttgaaggagctgagcgagtcggtccagcaa

SEQ ID NO: 117351 - DNA, 75 bp, Homo sapiens
cctctgggttgaaacccgggcgccgccaagatgccgtgtgtctctatgcatggagtaagaaagaaaccatcctac

SEQ ID NO: 117352 - DNA, 51 bp, Homo sapiens
tgcttggagacggacttgcttccggttatcttgacgaatcagattacaacc

SEQ ID NO: 117353 - DNA, 80 bp, Homo sapiens
taccacgggcctggtgtagactccatctcctgcactgaaggtgttgagctggcgagttcgcggaggctactattcaggaa

SEQ ID NO: 117354 - DNA, 75 bp, Homo sapiens
tttgctacagcctcctttgaccagatccatgactgttggtggtgcttctaaagtaaagaaataccgtaaattaat

SEQ ID NO: 117355 - DNA, 100 bp, Homo sapiens
gagccaccgtgcctggctgaaggcttcgcaaggcatggtgggtcagctggcggcacggcgggcggctggcgtggtgctggagatgatccgggaagggaag

SEQ ID NO: 117356 - DNA, 82 bp, Homo sapiens
ttagccttttctctgccttgcttgcttgagcttcagcggaattcgaaatggtcatgatgatgggcagcgcccgagtggcgga

SEQ ID NO: 117357 - DNA, 51 bp, Homo sapiens
gagaaattccttgaaatttgcaagtttcgtagaaaccccagctcatttctc

SEQ ID NO: 117358 - DNA, 50 bp, Homo sapiens
gggagacccaggaggagcccgcaggatctcaaagatttcatgagacaagc

SEQ ID NO: 117359 - DNA, 82 bp, Homo sapiens
tcctccacctaccttcccgagacttaaccaccaccatgtcgagcaaaagaacaaagaccaagaccaagaagcgccctcagcg

SEQ ID NO: 117360 - DNA, 82 bp, Homo sapiens
ggacagttcgctacacagcaatgcatcgagcaacgcacctcttgctttttcctccaaagtatgttatgttaagtttcgtgat

SEQ ID NO: 117361 - DNA, 83 bp, Homo sapiens
acggaggacggcaggactgtggccgtgggggacatcgtctgggtgtactaatggtcacttgatgtgcgctggctgttttatcc

SEQ ID NO: 117362 - DNA, 100 bp, Homo sapiens
gacctgaaacagaaattctggaacacctatatgatgtattgctgtccttgaatattagcccatttgaaaacgcctgggaagttcagccatcagtatgtcc

SEQ ID NO: 117363 - DNA, 100 bp, Homo sapiens
agagcctcaggcccaactcggaggaggcctccggtgtggctgtctctgatggtgtcatcaaggtgttcaacgacatgaaggtgcgtaagtcttcaacgcc

SEQ ID NO: 117364 - DNA, 90 bp, Homo sapiens
cagccatctttagttcgtctttcctagagagattttaggtgatgggcaagtcagaaagtcagatggatataactgatatcaacactccaa

SEQ ID NO: 117365 - DNA, 74 bp, Homo sapiens
tccgctttggaatggctcaaaccactaaggatatggccctgaagccacatgagcggaaggagaagtgggagcgt

SEQ ID NO: 117366 - DNA, 78 bp, Homo sapiens
agaaatgaaaatgaagggcgccctggaataggttcgccgaagagagaggcacatagagatgaaatccagcgcaaattt

SEQ ID NO: 117367 - DNA, 100 bp, Homo sapiens
caatcagtgccgagcaattgtgatgagatattctgctgagtggaagggctccaacaaaagaatcctctgaagaggagtatgactctggagttgaagaaga

SEQ ID NO: 117368 - DNA, 83 bp, Homo sapiens
ctctggctctggctgtgcgcgctggcgctgagcctgcagccggccctgccgatggagaaggaggagacaacccgggagctgct

SEQ ID NO: 117369 - DNA, 75 bp, Homo sapiens
tgaatctattcagtcaattcctgagggaagtgttcgccagttactacatgaaaagataagagatgcttatactca

SEQ ID NO: 117370 - DNA, 90 bp, Homo sapiens
ctcccaagtagctgggactgcaggtcagaaccatccagtcctggacatgggaccacatcggcgactgcagtggacgtggctgggccgggc

SEQ ID NO: 117371 - DNA, 88 bp, Homo sapiens
acaaaatttattttttgtgtgaatgtaagtttttattgagggttgttcggaatcctataattgaaaaacagtaaagatggaaaaccag

SEQ ID NO: 117372 - DNA, 100 bp, Homo sapiens
taaaaaggagctcaactccaaccacgacggggccgacgagacctcagggaaatcctcattgacgattcaatttgttgaaggccaatttgtggactcctac

SEQ ID NO: 117373 - DNA, 97 bp, Homo sapiens
tattatttcatagaagagactaatgctgtgcttcaaaagactgcaaaattcaaaatggggctcaaggtattcgtttcatctacaccagagaaggcag

SEQ ID NO: 117374 - DNA, 98 bp, Homo sapiens
ggcagacggcgacagtggcggcggcgccatggcagggcttgcagaaatggtggagtcaatgaagaaagtagcagggatggatgtggagctgacagttg

SEQ ID NO: 117375 - DNA, 99 bp, Homo sapiens
agaactcttaaagcagctgacttcccagcagcatgcgattcttattgaccttgaaaagacagctttgatttctggctgcaaaaaagatatgaggaagag

SEQ ID NO: 117376 - DNA, 85 bp, Homo sapiens
gcactttgcgccaccttactctaaccagagtcacctaaggtcctgcgagtacaagggtcgacccccaaaggcaggggcagagcca

SEQ ID NO: 117377 - DNA, 75 bp, Homo sapiens
ggctggagccctgcattcgcggcgtgtgcagggattcctggtcacctcccttgctcttttcttcctggatgaaac

SEQ ID NO: 117378 - DNA, 96 bp, Homo sapiens
cccaacatcatggcctgctacaatgaactgctccagctggagtttggagaggtgcgatcacaactgaaactcagacagagtctcgctctgttgccc

SEQ ID NO: 117379 - DNA, 100 bp, Homo sapiens
ccctggtcttgctcggccgatgaagtgcagaggtttttttctgataaatgtggagaggactataaactgcacttcatcttccgacacaaaaaccccaaaa

SEQ ID NO: 117380 - DNA, 100 bp, Homo sapiens
aatgaatttgaggaagaattagtgtctccatcgtcatcagaaactgaaggcaactttgtctatcgcacaggagaaaatgcagaagtctccatggacgttt

SEQ ID NO: 117381 - DNA, 82 bp, Homo sapiens
gtccagaagaccaagtacctgcagatcctgacctctctgatgagatggatcggtatggcctcacaagtcttggtctacccac

SEQ ID NO: 117382 - DNA, 98 bp, Homo sapiens
tggaaaagacaattgatgacctggaaggattcttaaatactccgaagcagaatatgctcccccaatatatatagctgagatggaaaaagaggagaaac

SEQ ID NO: 117383 - DNA, 51 bp, Homo sapiens
ggagaatccaccgccatccgccaccatgctccaccatgcctgcaatggacc

SEQ ID NO: 117384 - DNA, 100 bp, Homo sapiens
aaggccctatcaggacatggagtatgaaagacgtgctctataaaaagctgcatcactgccttccacgtcacctgtgcctttgagcacggcctagagatga

SEQ ID NO: 117385 - DNA, 98 bp, Homo sapiens
gaaccgaggcagcggaggtggtggtggaggtggaggttgcccccaagtttcctggcagtgtgtgatactgaggaggtgagcttgtttctggagctgtg

SEQ ID NO: 117386 - DNA, 51 bp, Homo sapiens
cttagtgccagggtcaccatctaccagatgctcagtgacctccaggagtct

SEQ ID NO: 117387 - DNA, 100 bp, Homo sapiens
aaagtcctctgtgtggccgaaaaaaacgacgcggccaaggggatcgccgacctgctgtcaaacggtcgcatgaggcgggggacaaaccagcagatcaagg

SEQ ID NO: 117388 - DNA, 74 bp, Homo sapiens
aaagaaaacatccggcaagacttctgaaaagacaatttagcaggtagaacagcggctggagccggccaagcggg

SEQ ID NO: 117389 - DNA, 98 bp, Homo sapiens
gataaggataaacccgatgcaaaggactcacccttggtgctggtctcagcctagcccaggtgaaggacattttggctgatgtagtccagaagcttcca

SEQ ID NO: 117390 - DNA, 75 bp, Homo sapiens
gagcgggcggctgagacaaaggcgacggctactgcagcactggggtgtcagttgttggtccgacccagaacgctt

SEQ ID NO: 117391 - DNA, 80 bp, Homo sapiens
cgcgagcggagcggcgcgtgggtcggttgcggtcggccccggcaggtttacccaaggtccagcctagcccctaggcacca

SEQ ID NO: 117392 - DNA, 83 bp, Homo sapiens
gcgatgttggtccaagggaactgggtggtgaagagataacgaaggaggcccaacttcattcaataaggagcctgacggattta

SEQ ID NO: 117393 - DNA, 83 bp, Homo sapiens
ttactgttctggcacagacaggctgtgtgcatgcaccaaagacagtgggagtagctcaccgttacccaagtatgcttcatctc

SEQ ID NO: 117394 - DNA, 75 bp, Homo sapiens
ttctggataacactgtacaagctttcaaagtcaatgtccattgcaaaagaacttgcagactggcttattagcaac

SEQ ID NO: 117395 - DNA, 96 bp, Homo sapiens
ctgctctacaactgctggcagcgccggctgcccaagctcaagcacgtgggccagctcttccgaggctccagcctgcttttccgccgggtgtcatca

SEQ ID NO: 117396 - DNA, 98 bp, Homo sapiens
tgcgtttaagttggatttccttccagaaatgatggtggatcattgctctttgaattccagtcccgtggccaattcctgtccccccagcagcatggcat

SEQ ID NO: 117397 - DNA, 89 bp, Homo sapiens
gggcctccgtctggatttccaaggaagaatttcctctgaagcaccggagtgtggccatctggggccgtgtggtatttgccactcaggag

SEQ ID NO: 117398 - DNA, 83 bp, Homo sapiens
gtccgacagccaggcccgggagaagtccagggagtcggtagtaagggatggcgggacgtcaccacctttttttcggggaaagc

SEQ ID NO: 117399 - DNA, 83 bp, Homo sapiens
cggctctccatgatgtccttcatcctcaacgccctcacctgacaatgcagatcttcgtgaagactctgactggtaagaccatc

SEQ ID NO: 117400 - DNA, 97 bp, Homo sapiens
cagtcccgggcgggccgtcgcgggagagtgggtaattccagaattgattggccataccattgtcactgtattactgctcatgtcattgcactggttc

SEQ ID NO: 117401 - DNA, 83 bp, Homo sapiens
gtgagctcttaccggctgaagcagcctaatgtaccatttcctccaacaagcaatgacggtggagaactgcgtgtgcaccctga

SEQ ID NO: 117402 - DNA, 100 bp, Homo sapiens
tcagaaatccagtactaaactttctgagcttcatgacaatcaggacggtcttgtgtaacagatcaactcctagcaatcatgatcggatacagcgtctgag

SEQ ID NO: 117403 - DNA, 86 bp, Homo sapiens
gagctagctgaaataacccttgatcctcctcctaattgcagtgatcggcatgttggtaaaatttattccaaatgttcttcttttct

SEQ ID NO: 117404 - DNA, 82 bp, Homo sapiens
ccatgaggcgccagcctgcgaaggtggcggcgctgctgctcgggctgctcttggagaagaagctcattcacacagaagaccc

SEQ ID NO: 117405 - DNA, 75 bp, Homo sapiens
cctggacaaagatctctcggaccgcagcaatgacattggcaggcaatccatggaccttgtggaacttgtgtctct

SEQ ID NO: 117406 - DNA, 100 bp, Homo sapiens
agtggatggaatctgctttgttgggagtgatggatggacagagttttgccgaattgacaagcccctgtgtcacagtgaggatgagaaactcagcttcgag

SEQ ID NO: 117407 - DNA, 90 bp, Homo sapiens
ttgaggatgtgaggaagtatgcgggctccaacattgtgcagctgctgatcggggcttgcttctgacatgtctgatgagcgcattcctgct

SEQ ID NO: 117408 - DNA, 90 bp, Homo sapiens
tgagcgcccccatcccggaggtctccgccggctcccggctgaagaaatcaggggagaaacccctgcttggtggaagcctgatggaatatg

SEQ ID NO: 117409 - DNA, 95 bp, Homo sapiens
gaagtctcagcggtattctggtgcttatggtgcctcaggtattccagcgtcttcaggaaacagtttagactctcttcaagatgacaatcctccac

SEQ ID NO: 117410 - DNA, 74 bp, Homo sapiens
tgtattctttacctgcttcccaatcccactgatgaggatcagcccatggctgtgggtgagcgtggaggatgctc

SEQ ID NO: 117411 - DNA, 98 bp, Homo sapiens
cggcctgtgtgtcaacgacctggcggtggggctgcggcgcctgggactgcaccgcaccgagggcgagctccaggtttggtgcacctcgatttggagga

SEQ ID NO: 117412 - DNA, 75 bp, Homo sapiens
agaggtgttaccggaacggcggcgacaagggtgttcccgaactagagtgggagctggttttccatccatcccagt

SEQ ID NO: 117413 - DNA, 51 bp, Homo sapiens
agatcgagaccatcccggctaaaacgcttgtctccttcagatggagcccgt

SEQ ID NO: 117414 - DNA, 100 bp, Homo sapiens
caggggtggaccccagcacaggcaaggtacaactgaccagggacatcatcaaaaggaatatccaggcccaggctttggtgcagtacctggaggagcccct

SEQ ID NO: 117415 - DNA, 51 bp, Homo sapiens
gaaagcgaaaaactatgctgaccagagtcacaccgacaaatctgaagcggg

SEQ ID NO: 117416 - DNA, 90 bp, Homo sapiens
gatcatgtgacttcaaatgcaggaagatgagaatgtgcctactgctcctgatcctccaagtcaacatttacgtgggcatgggacaggctt

SEQ ID NO: 117417 - DNA, 115 bp, Homo sapiens
ctactcatgatccggaccctgagactcccctaaaggccagaaagctgaagaaaaggtgactggtctcatgagccctgaagaatgaactcagaggaggttgtttacatgaggttct

SEQ ID NO: 117418 - DNA, 100 bp, Homo sapiens
cggcgagccaaagaggagccggccgcgcgggccgggaggggacggccgccggagccgcgaggccaagactcgggacctggttcgggccggggtgctgaag

SEQ ID NO: 117419 - DNA, 101 bp, Homo sapiens
tgatgaaactgaagaagataacaatcaagatgaatatgaccctatggaagcagaagaagctgaggatgaagaagatgttaagtgggcagaccaacatccac

SEQ ID NO: 117420 - DNA, 104 bp, Homo sapiens
tgggggactatgtggtggacttggacacgtcccagctctctctgggcatctggaaaggtttccacttgagcggcacagtgacagaacctgcaatacaatcggag

SEQ ID NO: 117421 - DNA, 100 bp, Homo sapiens
cctggacttccagagccggaacgtcatccctgatatccctgaccacttcctgtgtctgtgggagcactgtgaggtactgggcctaatcgctacgtgcctc

SEQ ID NO: 117422 - DNA, 110 bp, Homo sapiens
caggaccacagtcaagacgatcatagtcactggcatccgtgtcattctggaccttactcccaactaccggggtgagaactcgtggttctccactcaggttgacactgtgg

SEQ ID NO: 117423 - DNA, 75 bp, Homo sapiens
cggaccgcagtgccccaagagagcagctgagccagtaccagcagccagatcggaggaccggtaccggaatcccaa

SEQ ID NO: 117424 - DNA, 100 bp, Homo sapiens
tgagttcccatcccaactccttgatgaagaagaatgtccagaggaggtttatgaccctcgatctctatatgaaaggctacaggaacagaaggacaggaag

SEQ ID NO: 117425 - DNA, 100 bp, Homo sapiens
atcatatctcatgaggctgtaggctccttcaacccgtggctgatagctgaaagaggacagtgctgctgtgagtttgacgaagtggacatcacctgcagtc

SEQ ID NO: 117426 - DNA, 82 bp, Homo sapiens
gaagagtccccccaagtctcctgaagaggaaggagcggtgtcctcttaagaaaatgaagttcagttctgcaagcaagtatgc

SEQ ID NO: 117427 - DNA, 83 bp, Homo sapiens
acaagccacgtacagaaccacctgtcaggacttcagaatccttgaccgataccagtgggatgccatcactgaaatggatgaac

SEQ ID NO: 117428 - DNA, 75 bp, Homo sapiens
acctggcattgacctctcagatcccaaacaactggcagaatttgctaggcttattcaaacctccttagagctaac

SEQ ID NO: 117429 - DNA, 98 bp, Homo sapiens
agcggcatcggccggatttccctgcagggtgcgatagcgaactcgctgacctgcgtgcagctgcacaagagagctgagaagatcgccgtgatgctgat

SEQ ID NO: 117430 - DNA, 95 bp, Homo sapiens
ctccgaatttgcaaagaggaggaaggagggacttcttggcttctcccagcatagccccaggtgtgaatgacagaggtggtgccatccagcgcgct

SEQ ID NO: 117431 - DNA, 100 bp, Homo sapiens
cttagaatcagtatttgtggttgggaaagatggacttacgggagcttggattcaggagcagttccagaaaaatcccgacagttacaatggtgctgtccga

SEQ ID NO: 117432 - DNA, 75 bp, Homo sapiens
tcaccagaacccagcagcttgccagcatcgttgcagtgcaccaattccagctggacatcactgtgaaaatgggac

SEQ ID NO: 117433 - DNA, 51 bp, Homo sapiens
aggaacaacctacacttcctgtgatgagtctggaagtgttagttgcaaaga

SEQ ID NO: 117434 - DNA, 75 bp, Homo sapiens
ggttcaagcgattctcttgcctcagcctcccagatacttggtgttagatgaagctgatcggatgttggatatggg

SEQ ID NO: 117435 - DNA, 75 bp, Homo sapiens
cccaaaatatggcaaagaaacctattctgagcttctccaggcagccaccaactaccacaacgggcacacaggcca

SEQ ID NO: 117436 - DNA, 76 bp, Homo sapiens
gggagggagtgcctggccaggccggcctgtctgccgcgatggatgacagtaagttgatattcactgatggactcca

SEQ ID NO: 117437 - DNA, 132 bp, Homo sapiens
aaagcattggctcaggtcttctgtgaggaatctggattgtcacctttgctgcaaaaaattacggcgatgaagaacgatacagatacagggaatatgcagaaagaggttatgagcgtcacagagcaagtcgag

SEQ ID NO: 117438 - DNA, 96 bp, Homo sapiens
gagatccaaaagcttgaaacggagttacaagaggctaccaaagaattccaggcatcagttttgaatgtcaaggaatccaaagctcctgaaagaacg

SEQ ID NO: 117439 - DNA, 76 bp, Homo sapiens
cccagctttaaaggagatgcaggagaaaatacggcattgctagatgtgtgcaacagcaccgatcttccggaagtcg

SEQ ID NO: 117440 - DNA, 100 bp, Homo sapiens
ccctgtcctgggcacccagaagacctaccagtgggtgcccttccatggggtctccaaaaaaagttggtgatgacattgccaaggcaacgggtgactggaa

SEQ ID NO: 117441 - DNA, 83 bp, Homo sapiens
gtttcaactctccgccgagggcgagcaggagcgagagtgtgtcgatgccctctggtggtcagaagatgctgtgctgtctcgtt

SEQ ID NO: 117442 - DNA, 83 bp, Homo sapiens
agtcacccacctacatgttgaggtctatgaaggcctagacatcatcaccaacaaggtttctgcccaagagcagagaatctgcc

SEQ ID NO: 117443 - DNA, 96 bp, Homo sapiens
cgggccgcccgggtccccggcagcggggtaggatggcgctaaagcggatccagaagggctctctttacctatgaaggcaacagcaatgacatccgc

SEQ ID NO: 117444 - DNA, 100 bp, Homo sapiens
ggcaccctggggcttgtcgtagcacctggggcggcatccccgcccgacttcggaaggaccgggaggcaaaggacgcggattctgatagcggggacgattc

SEQ ID NO: 117445 - DNA, 100 bp, Homo sapiens
gaaaaacctactcttgatacacaatctaaaaagaattaggaaggtccttcagggaactctaatgatccaggacaaagaagttaccctggagtatgtatca

SEQ ID NO: 117446 - DNA, 108 bp, Homo sapiens
cagattggaggaggctggctctggtcttcgatgcacaggagtggccgttatggaacgcagtttccaacatggctagatccatcagaaactgaagccgtggagaacgct

SEQ ID NO: 117447 - DNA, 98 bp, Homo sapiens
tccagatgctaaaatggacccaatgaacatctgggatgacatcatcacaaatcgaattggcagagggggtcgatttgggaggaaaggtgtggctataa

SEQ ID NO: 117448 - DNA, 74 bp, Homo sapiens
tgtatgacgaggtggatcgaagagaaaatgatgcagtacaaccggcacgacagccccgaagatgtgaagcgacg

SEQ ID NO: 117449 - DNA, 100 bp, Homo sapiens
aaatagcattaattttgaaagactagaagctcaactgaaggcatgtcattgcaggatcatattttctaaagcaaagggtctgacatttcaggaggtggag

SEQ ID NO: 117450 - DNA, 100 bp, Homo sapiens
agagaagctgcaagagcaacatctttcctcaccccaagatatgcctcttcatgttcgacgcagtagtgacccagctctaattggcctctccacttctgtc

SEQ ID NO: 117451 - DNA, 78 bp, Homo sapiens
ttggtggatggggtattcttgaaccaggtcatgctccaaatctgccaatttgtggtgtctgaagaccaagactacaca

SEQ ID NO: 117452 - DNA, 75 bp, Homo sapiens
gacagagagaaccagtgcgtcattatcagtgagaagccacagaaatggagagtggaaatatatagtggtcaaaag

SEQ ID NO: 117453 - DNA, 50 bp, Homo sapiens
tgcccttcaagcgcctgtctgaaggaagaggcccagcagaagggactcgc

SEQ ID NO: 117454 - DNA, 98 bp, Homo sapiens
gaaaactattcggacctgcatcctcaagaacatcagaaaatagacctccttcctccttcagatgtttctttctcagcaaaatagaggagaagcttacc

SEQ ID NO: 117455 - DNA, 100 bp, Homo sapiens
gcttgccgccctgggcgcggccctgctcctgtcttccattgaggcagaagatgttttcacctcctgtgagcagtgggaaaaatggaccaacttctttggc

SEQ ID NO: 117456 - DNA, 90 bp, Homo sapiens
tggagctcctgtttatgttgttcgaagtggtggccttgtaaaaactagatcaaaaaacattcgggggatgttcgtctaaccccagaagac

SEQ ID NO: 117457 - DNA, 74 bp, Homo sapiens
ctcaatttgctggatttaagcactgctgcactttatgagggaagcgtgacagcaatgacagtgttttttcccct

SEQ ID NO: 117458 - DNA, 83 bp, Homo sapiens
gcccaggccgcgccgccacgagaattaaacaaccaccatgtcgagcaaaaaggcaaagaccaagaccaccaagaagcgccctc

SEQ ID NO: 117459 - DNA, 57 bp, Homo sapiens
cccggctgccttccacctccagtgctggtgatcagcttgaaattcagctaaccgagc

SEQ ID NO: 117460 - DNA, 75 bp, Homo sapiens
cctggagggagagagtgaagggtatgagaatgaactggccctgcgccagggcgtagaggccgacatcaatggcct

SEQ ID NO: 117461 - DNA, 75 bp, Homo sapiens
cttcaagccaaacatcaagcagaatgtgatttgcttgaagatatgaggaccgcagctgaatgcacagctagaagg

SEQ ID NO: 117462 - DNA, 74 bp, Homo sapiens
aaggcagacgaaccatcaagtgaggaaagtgatctaggaatccatcaacagcatcaagtccagactaagcaaaa

SEQ ID NO: 117463 - DNA, 75 bp, Homo sapiens
cttttttcttaccagcctccccccaatgaggtgaaaggtgtagcagtcactcggcctacacccacagcatcgacc

SEQ ID NO: 117464 - DNA, 118 bp, Homo sapiens
gtggcatttgcgtactgggccgggtctgtccacactgcgcttgttttcctgggattgaatgctggtgggaagtttgtggggacattcatggacaattctttgatttgatgaagctctt

SEQ ID NO: 117465 - DNA, 98 bp, Homo sapiens
cccaaatcaagtatacagaaaatcggtgaagagaggttttgaattcacgcttatggtagtggaaaacctacagagatttccgattgcaaggggtcctg

SEQ ID NO: 117466 - DNA, 120 bp, Homo sapiens
aaaccagaaactttaaatcttgagaaaagaagattgtctatcatgaaggagctgacatattgagcagaggaccaaaatcgatgatctccttggctggtggcttaccaaatccaaacatgt

SEQ ID NO: 117467 - DNA, 100 bp, Homo sapiens
cgtcagtccctgctctgtgcgcgcctccatctgggccatggatgggtgtgatagcagtggtgatatttattttgctttgcatcactgccatagccatacg

SEQ ID NO: 117468 - DNA, 80 bp, Homo sapiens
ctgactctgactctcggactgagaaacgcaaggaggtgtttcatagagaactaaggagcaactccatgaagacctggggc

SEQ ID NO: 117469 - DNA, 123 bp, Homo sapiens
aacagtatgcttgggagtcttctgctggaggttccttcactgtgcgtgctgaccatgggtgctgccccacgtcccccaccaaagcccatgtaaggagctgagttcttaaagactgaagacagg

SEQ ID NO: 117470 - DNA, 51 bp, Homo sapiens
cccagagacatgctgaaacatcgaaggggatatcattttcaatgcccaata

SEQ ID NO: 117471 - DNA, 71 bp, Homo sapiens
cgggggttggtgcggagctcggctcagtgagagcaggcttgcgataggcttttggctcatcgagtggaaac

SEQ ID NO: 117472 - DNA, 105 bp, Homo sapiens
cccacaggctctctccgctcgattttgtcaccgttatgtgggaagcgaatccagttctccagcatttggctcaaggccccaagggcacatgtgacaagaaggcgc

SEQ ID NO: 117473 - DNA, 90 bp, Homo sapiens
gaaaatgtaaaggccaagatccaggataaggaagctctggtagctgaagaacatctcacagtggacgccagggtctattcctacgctcta

SEQ ID NO: 117474 - DNA, 80 bp, Homo sapiens
cgggaagcgagccgcgacccgagctgggaaagcaggcaggatgggagagtcgccgatagaaccacctcttccctgcctcc

SEQ ID NO: 117475 - DNA, 60 bp, Homo sapiens
ggccctcttcaatttctgacaaaagatgtgttcagagcaacattgttttgttgacacaag

SEQ ID NO: 117476 - DNA, 100 bp, Homo sapiens
gattccagggtcgaacactcgtccgccgcgtggccccgcgcttctccatcctgcccatgagccacgagatcatgccagggggcaacgtgaacatcacctg

SEQ ID NO: 117477 - DNA, 50 bp, Homo sapiens
cgttggttcccctctttgacctgcaagtgcttctttggaaggccttgctc

SEQ ID NO: 117478 - DNA, 75 bp, Homo sapiens
ctcgggctcggaacgagactgcacgatgaggtttatataactttccaagacaaggaagttgtgcaaagcctcaca

SEQ ID NO: 117479 - DNA, 85 bp, Homo sapiens
cccttgggcctcacggacccagccgacacaagaatgccatcaagacaacacgtgcgaagattcctgccctgttggtggcatctgc

SEQ ID NO: 117480 - DNA, 112 bp, Homo sapiens
ctcgaaggttgtttggcttgtttaacagcatataccatcttcctatgcatggaaactcattatgagaagaaagctgatgtcctgaccactggagctggtaacccagtaggag

SEQ ID NO: 117481 - DNA, 83 bp, Homo sapiens
cgcggccgcaccttcccgccttctcaggtcagcccaagactaccccgtcggtcattctgttcctgccgtcctgtgaggagccc

SEQ ID NO: 117482 - DNA, 98 bp, Homo sapiens
tctcagcagcaacatccccaaacagcggcgtttcacggtggcacatacatggtgttacacataatattgcattacttcgagaggtgataatcaactca

SEQ ID NO: 117483 - DNA, 83 bp, Homo sapiens
tcaacaagtacatcctggacaagcacctgaactcctggggggaccgtcagtcttcctcttccccccaaaacccaaggacaccc

SEQ ID NO: 117484 - DNA, 83 bp, Homo sapiens
agagatgtgattaatgtattccaccacctccgccagttaagaggaaaaagaatgggaggcattccagctaaaagccatagggg

SEQ ID NO: 117485 - DNA, 75 bp, Homo sapiens
ctcatatccggagatattccaggcccactccagggcagaaaactgtcgctgaaaagcaggagaagagaaatcagg

SEQ ID NO: 117486 - DNA, 75 bp, Homo sapiens
ttccagaagggccaagggacttgcttttatttcgtggctggcgtggctcaccgattccacagtacttgcggcaag

SEQ ID NO: 117487 - DNA, 75 bp, Homo sapiens
caaaccaatgagggagaagtatcggaagaaagcagttccaaggtcagagaagaatgccggctcctgaacgcccca

SEQ ID NO: 117488 - DNA, 75 bp, Homo sapiens
gagggtttctcatttggcctggccgctttgtagttcagaatgtttctgcacagaaagatggagaaaaatctagag

SEQ ID NO: 117489 - DNA, 75 bp, Homo sapiens
tgtatggagcgattttgcagatggtgactgggtacctggatatgtgatcgagtattcttctgggtgtttctatga

SEQ ID NO: 117490 - DNA, 100 bp, Homo sapiens
tgcgggagagccgggtaccggccgtggaagcggccaccgactactgtcagcagctgtgccagtgggaaaagcaaggatgaacaatttgcagttacctcaa

SEQ ID NO: 117491 - DNA, 82 bp, Homo sapiens
tcgcggttgctacgcgcaccatggctggaggtgtggaaacaggaagagaactagaactggaagtaaagcattgaagatgtga

SEQ ID NO: 117492 - DNA, 100 bp, Homo sapiens
gaaggcgtccgttggccttcgtacccgtcttgattgagtgtgtcaggaagctgtctgggaagccttcaggactttttgggatcgacttcctgggcgtgag

SEQ ID NO: 117493 - DNA, 100 bp, Homo sapiens
catgagtttctccggcaagtaccaactgcagagccaggaaaactttgaagccttcatgaaggcaatcgcatttttcagttgaaggacagttggaattcag

SEQ ID NO: 117494 - DNA, 101 bp, Homo sapiens
ggactttccttatcccagttgattgtgcagaatacactgcctgtcgcttgtcttctattcaccatggcttcttctggaattgaatgatctggcacgggacc

SEQ ID NO: 117495 - DNA, 100 bp, Homo sapiens
gagaccagcctgggcaacacgatgaagagcatgagtgtgggggacccccgaaccttccccttcatcgagcccccaccaccagccagcctggaaaccgcca

SEQ ID NO: 117496 - DNA, 83 bp, Homo sapiens
agcctaagggtttctctactatgtccacaagattaccttatgctggctactttggatgagaatgaggaagtgatagatggagg

SEQ ID NO: 117497 - DNA, 74 bp, Homo sapiens
aaacaagaaaacatcaaagaggtctagcaaagcatgttggcagataaattgaacatgactccagaagaagctga

SEQ ID NO: 117498 - DNA, 75 bp, Homo sapiens
agtgcaacatctgcaaggtccgcttcaccagctgtctgcttttctgtggagactgcgggttgcagacaccagcag

SEQ ID NO: 117499 - DNA, 100 bp, Homo sapiens
aactgttccttcagccaaagaaacaagccgtggaataggtgtatcaagtaatggtgcaaagcctgaagcctttgaagacctcagcaaactaatgatcaag

SEQ ID NO: 117500 - DNA, 104 bp, Homo sapiens
cccacagtgggggtgtgcaaacccgagagaactgggttttataggatcacattgacaaaagtaccatggagttttatgagtcagcatattttattgttcttatt

SEQ ID NO: 117501 - DNA, 84 bp, Homo sapiens
taaaaagccctcagtaccagagacagaagcagatggattcgtccttttagatgtatcggcaagcagtgtaaacggaggacttgg

SEQ ID NO: 117502 - DNA, 90 bp, Homo sapiens
cactcgaagatttaatttttgagtctttaccagagaatgcatcacacaagttagagttggctgattgcaattctggcccaactcaaccct

SEQ ID NO: 117503 - DNA, 50 bp, Homo sapiens
cgctggcgcgcagcctcagctaggttatttggaaatagcggtgcttgcag

SEQ ID NO: 117504 - DNA, 100 bp, Homo sapiens
ccagaagagattccccttacttggatacaaccaggaactactgttctcaactgctcccatgacttcctgtcagattgaggtggtgccttctgcctctgcc

SEQ ID NO: 117505 - DNA, 50 bp, Homo sapiens
ccgcggcggcagcagcagtgagagatgggggctccggaggtggcgcccag

SEQ ID NO: 117506 - DNA, 100 bp, Homo sapiens
gggacagccagccagcagcaggaggtggaagatagatgataagcctgtaaaaattgacaagtgggatggatcagctgtgaaaaactctttggatgattct

SEQ ID NO: 117507 - DNA, 111 bp, Homo sapiens
gaaggggcaagacgggttcagttcgtcatggggctgtttggaaagacccaggagaagccgcccaaagaactggtttgtttgaagagactgtaccagagggccagggaggag

SEQ ID NO: 117508 - DNA, 82 bp, Homo sapiens
catttaaccagcatggctacttcatattttggaaagcagtttttaagacaaggcttccgagtggacctgccaatcaagtcgg

SEQ ID NO: 117509 - DNA, 136 bp, Homo sapiens
ggccgagatgtctcgctccgtggccttagctgtgctcgcgctactctctctttctggcctggaggctatccagcgctaccggctctctgaccagttccacgacatcctcattcgaaagtttgacaggcagggacgg

SEQ ID NO: 117510 - DNA, 100 bp, Homo sapiens
actgactgcaaagaccccaaggcctgcaccattctcctccggggggctagcaaagagattctctcgcactgctccgtgtggagatggcgccctctttgac

SEQ ID NO: 117511 - DNA, 100 bp, Homo sapiens
aaagttttcatctcacgagtttggagctgagggcccgtggggcaacatggccgaaggtttccaatacttatctacaggaatcgccatgaccccagctctg

SEQ ID NO: 117512 - DNA, 100 bp, Homo sapiens
gtgtacatcatttacggcatgtacttctgcatgaacatctccagccagggtttccaatacttatctacaggaatcgccatgaccccagctctgagggagg

SEQ ID NO: 117513 - DNA, 75 bp, Homo sapiens
tttggacctgaaacagaaattctggaacacctatatggaaatttccagaactctttgcacagttcaagtccttcc

SEQ ID NO: 117514 - DNA, 73 bp, Homo sapiens
gccacagcacaacacaggtctgggagggatccctgtagcagatatgattcatcaacttccactgttgacagaa

SEQ ID NO: 117515 - DNA, 133 bp, Homo sapiens
gtgcactctgcaggacccggatgggcagagaaacctaagtggcaaggtgatcttgagagtgacaggaattcctcctgatcagcagagactgatctttgctggcaagcagctggaagatggacgtactttgtct

SEQ ID NO: 117516 - DNA, 75 bp, Homo sapiens
ctcggcggtcgtcactggcagggcctcctcgagctccacggacatggtagtggtacagcagtttacaacaacaac

SEQ ID NO: 117517 - DNA, 75 bp, Homo sapiens
ctggaagccttgcaccaagacttgccaagccatttccccaaaggaatgtcttgcatattactgacatttggtatg

SEQ ID NO: 117518 - DNA, 90 bp, Homo sapiens
ttccagtatgtagaaacacatggagaagtctgcccagcgaactggacaccggattctcctacggaatgcccttcaatcagctgggcaccc

SEQ ID NO: 117519 - DNA, 101 bp, Homo sapiens
ggagctgttgctggacccctggcaggaggcaaggtctcactcggtcatccaggttggaatgcagtggtgtgatcacagttcactgtaaactcaaactcctg

SEQ ID NO: 117520 - DNA, 82 bp, Homo sapiens
ggaggagatggtggaggaggctgaaggctctacagattctcccctgcccctggagaaggaggagcaggtccgacttcaggct

SEQ ID NO: 117521 - DNA, 100 bp, Homo sapiens
gactggcccccttgagcctgtcccaagccctggtgccaggtgtccatccccgtgctgaggcacttcaggtggcaagacagctccttcttcagcagcaaca

SEQ ID NO: 117522 - DNA, 76 bp, Homo sapiens
accccctccggctcaagtgtgtcaagcaagccctggttgttgctatgaaacagctatgacaagacatttttatcat

SEQ ID NO: 117523 - DNA, 82 bp, Homo sapiens
ctcaagcatttcaacgtgcgtgtcacccacgcagacatcttcagccgctgccaggttgaaatcacaaagattagacaccttt

SEQ ID NO: 117524 - DNA, 75 bp, Homo sapiens
gtcaactcagcgtttctcctctcgtccctgatattcaagagaagcttatgtggagttagttcaccatattagaga

SEQ ID NO: 117525 - DNA, 100 bp, Homo sapiens
ctggcgcacacggtgcgcgaccacctggtggggcgctggatccgcacgcagcagcactactacgacaagtgccccaaggaatatgtggactataacgggg

SEQ ID NO: 117526 - DNA, 100 bp, Homo sapiens
catcacgcccagctagccatcttctaattttcattccttcaaaggtatgcaccttccaaacgatggcatatagacacaattatgcgtgttttgacaacgg

SEQ ID NO: 117527 - DNA, 96 bp, Homo sapiens
ttctcccggagtatgaatggaaggattcagtatgcgcttcacatttggtcggaccgatacctggagagccgcgatgcctctcgactgagtggccgg

SEQ ID NO: 117528 - DNA, 98 bp, Homo sapiens
gcaaccgccccgtctgagaacttctcccgttggcaacggttacatcaagcctccggttccacctgcttctggcacgcacagggagaaagggccgccaa

SEQ ID NO: 117529 - DNA, 100 bp, Homo sapiens
ccgccatacgcgctctccctgtttagcagaaaggacccaggagcgataacagtaaatcaaataagatatttgtcggtggaattcctcacaattgtggtga

SEQ ID NO: 117530 - DNA, 75 bp, Homo sapiens
aagaagactctttgtttgaagaaatgcttcaagttgctaatgctatacctgatctagttgaatctgaagatgtgg

SEQ ID NO: 117531 - DNA, 75 bp, Homo sapiens
cccgaactcgcccggccgggagccgccgcgggcaggacgcgcgctgcagtttggaaattttagcattcaggtgcc

SEQ ID NO: 117532 - DNA, 100 bp, Homo sapiens
gtgtacatggccgccgtcctggaatacctgacagaaagaagattggcccatgcacaagctggaatgttctcccatggttgtttttggggaaaactggaat

SEQ ID NO: 117533 - DNA, 100 bp, Homo sapiens
gctgggcaacatctgcttctcctcctcagagagcccccctccatgcgcctgaaggcccgacccagcagccctggcttttccgtgcttacctgcagcgcct

SEQ ID NO: 117534 - DNA, 83 bp, Homo sapiens
gattgactggcctgcttggcaaggcaagtagcggcggcgcttcaagatcctggtggacctctcaaaccccggtggccggcctg

SEQ ID NO: 117535 - DNA, 50 bp, Homo sapiens
aagactgagagtcaccacaaggccaaggcaattctgtggtgttcttggtc

SEQ ID NO: 117536 - DNA, 71 bp, Homo sapiens
atcagacctgctcacacttcagaatagagaaggaagaggatcacctagcccgggtagaagaggcaatcacc

SEQ ID NO: 117537 - DNA, 89 bp, Homo sapiens
agaaaatacaaatcacacgcataatggatgaaaggaaccgacaggtaaaaggattcttcagctctttgaaagaaaatggttctcagctc

SEQ ID NO: 117538 - DNA, 90 bp, Homo sapiens
ggctggtttcggaaatgcccttacagcagcagatgccgctcctacgaggactgctgtggctccaggtgctgtgtgcgggccctctccata

SEQ ID NO: 117539 - DNA, 100 bp, Homo sapiens
gagctttcataaccccaggatcctccagaaaatttgcggcgcgctgagggaaaaccttgctgaccttttcacagatgctgctgagactgaaaaaatggcc

SEQ ID NO: 117540 - DNA, 74 bp, Homo sapiens
gacactctggacttcagccaacaggacagtcattttgtttactcattcagccctgttgcaggtcccaataaact

SEQ ID NO: 117541 - DNA, 134 bp, Homo sapiens
gccactcctcccggaggcgacatggggcacccggtgtaccgcggcgagaagccccagctgcactacgcggtgctggagaatctggtaaaagcaccattgtgaagcagatgaggatcctgcatgttaatgggttt

SEQ ID NO: 117542 - DNA, 75 bp, Homo sapiens
agctcagaactgagaagctgtcaccacagcctaaaatgaccaatgtgtgatttcagtggaataaatggcgtccaa

SEQ ID NO: 117543 - DNA, 90 bp, Homo sapiens
ccatgaccaaggctcgcaattttgagagagttttgggaaaggtatgtgccagtcaaagatctactgggaatttatgagaaactgtatggt

SEQ ID NO: 117544 - DNA, 98 bp, Homo sapiens
ggaggtccccacggagtggagaagcgggagactcagcttaatcacagacaaagttgtgcatgagagttctttatagctccaagctctacagattcttc

SEQ ID NO: 117545 - DNA, 89 bp, Homo sapiens
gaagaagaagagcatgatcggcatgtccaccaaggcagctgttgttggcctactgtacccctgtatcgacagtcacctcggagaacccc

SEQ ID NO: 117546 - DNA, 88 bp, Homo sapiens
aacggagataaattcccggaaccgcgattcggcgtgtcagaataccctctaccatctgctttggtcagggtgccgctcgaggatttaa

SEQ ID NO: 117547 - DNA, 73 bp, Homo sapiens
ccacagaaagcctgagcttgagcggcccatcaaggtgaacctgaacaccatcaagcgctgcctcctcatcgac

SEQ ID NO: 117548 - DNA, 74 bp, Homo sapiens
ggcagtgatttcacaaaccacggtggcaccaggggagaacgcttgttcccactcatccaaacaatgcattcaaa

SEQ ID NO: 117549 - DNA, 75 bp, Homo sapiens
gctagccgggagttacaccgccaccgccagagatccagttgtcatcggtatccaggaagctctcctcttcctcct

SEQ ID NO: 117550 - DNA, 101 bp, Homo sapiens
tactggaggttttggctctgcgtgagtgtggtctacgagctgtttctcatctttatactcttccagttccagggtctccctccactgctgtagtaacccgg

SEQ ID NO: 117551 - DNA, 75 bp, Homo sapiens
acggctgtgctggaaaagtactgcgaggcctctggacagttcatccatcaggttgcctgcaggagggaaggcggt

SEQ ID NO: 117552 - DNA, 74 bp, Homo sapiens
gcggcggctgcggcccaatataggatggtgattgctcacaccaaagccttggacccctcccagcctgtgacctt

SEQ ID NO: 117553 - DNA, 73 bp, Homo sapiens
cgcgatggagcagcgaaaacgtggttgtagagttccgtgactcccagctgcatccagtggaactaaagccgtt

SEQ ID NO: 117554 - DNA, 101 bp, Homo sapiens
aacccggagaccaaatccttgcttagaccatgctcagcctccaagcagccttgtcatcgacaaagaatctgaagtttacaagatgcttcaggagaaacagg

SEQ ID NO: 117555 - DNA, 83 bp, Homo sapiens
acatctgtccagccacctacaggcctccaggaatggctaaaaatgtttcaggtatttctttacccctctggattccccacggg

SEQ ID NO: 117556 - DNA, 100 bp, Homo sapiens
agtcgtcttccacttgcacgaaagctttcctaggccaaaaagagtcgggaagacgtctctgattacgaggttcatgtacgacagcttcgacaacacatac

SEQ ID NO: 117557 - DNA, 73 bp, Homo sapiens
cgctgccgtctttcacacactgataggcccaggatgttttggtgcaggagatggaagtggttaaacaaggaat

SEQ ID NO: 117558 - DNA, 96 bp, Homo sapiens
tgccgaagatgatgtggtgactccaggaaccagcgaagaccgctataagtctggcttgacaactctggaaattgcccggcatttacgccctggaac

SEQ ID NO: 117559 - DNA, 76 bp, Homo sapiens
ttcatcattactaacaggatattcctcatgacattgctgtctgacgacctctctgcccgttgtggtgatctccaac

SEQ ID NO: 117560 - DNA, 49 bp, Homo sapiens
ctggatccaggataacggaggctggttggggaatggcggtcaatgtgta

SEQ ID NO: 117561 - DNA, 75 bp, Homo sapiens
gagaaccgagtcagtgctcttacccagagtctcactgtcgcccaggctgcagtgcagtggtgccatcacgcgtca

SEQ ID NO: 117562 - DNA, 82 bp, Homo sapiens
ttcggcagtccacccaccgccgccgcctcccaggattacttccttaggatagattgccagaagtggagttactgggtcagag

SEQ ID NO: 117563 - DNA, 74 bp, Homo sapiens
gagcaattgtcctgcctcagcctcctgagtagctgggattatagctggacatccgtggcaaactttacctggcc

SEQ ID NO: 117564 - DNA, 50 bp, Homo sapiens
atgctggagccaagtgctaacgttacacgggattatgatgaagaggaaca

SEQ ID NO: 117565 - DNA, 83 bp, Homo sapiens
tgctggccaagaagatcatcattaaggacggaggcacgccttatgccagcctggaccatcttggaggcagtgtaggatcatgg

SEQ ID NO: 117566 - DNA, 50 bp, Homo sapiens
gtatgacaacatcgggatcctggatacttgttacgtcctctcctttgcca

SEQ ID NO: 117567 - DNA, 75 bp, Homo sapiens
cagattcgcagtggtcgcttcttctccttgactatgaagaaatcgggagtgcactttttgactgtagattgttcg

SEQ ID NO: 117568 - DNA, 90 bp, Homo sapiens
ggtcatcaaccagcaggaggactccagcgaggtgcctctcttgaccagctaccctcccaggggaccatgaggaagctcagaggaaagacc

SEQ ID NO: 117569 - DNA, 99 bp, Homo sapiens
gctgatgggaaggagcacccaggagctgaagggcaagaagactatgaccggctgcggcccctgtcctaccagaacacccacctcgtgctcatctgctat

SEQ ID NO: 117570 - DNA, 100 bp, Homo sapiens
ctcaggtgtttgtgtacgtggtccacgctgcagtgctgctgctgtttggaggtctgtgcatgcatgttcagggaggctgccggcgtggaccgcgggaagg

SEQ ID NO: 117571 - DNA, 75 bp, Homo sapiens
tcagtgtggagtcgtgctgctccagagtgtaaaggtgtgctgggcatcaaggtgaagatcatgctgccctgggac

SEQ ID NO: 117572 - DNA, 97 bp, Homo sapiens
agacgggcctctgctgttccctgagcttgctgtcagcaaatgtttggtactccaaagattcaggtttactcacgtcatccagcagagaatggaaagt

SEQ ID NO: 117573 - DNA, 74 bp, Homo sapiens
ttgtgagggaagagacaggaagatggtgcccagatattgatgatgttaagaagttcaaaccgggttacctggaa

SEQ ID NO: 117574 - DNA, 75 bp, Homo sapiens
ctcagtcctactgaaagctgtgaagcagtcttatagctggatcagctaccaagagaagttgtaaaccaagaagag

SEQ ID NO: 117575 - DNA, 88 bp, Homo sapiens
agcttatctataaggatctggtgaggaccctgctgccgaagctgattccctccggtgcaggccgggagtggctggagcggcgccgcgc

SEQ ID NO: 117576 - DNA, 100 bp, Homo sapiens
tccacctcagcagcctcaacagtatggtattcagtattcaggagtaatggagtccaaagagaaacgagcagtaaacagtctcagcatggaaaatgccaac

SEQ ID NO: 117577 - DNA, 80 bp, Homo sapiens
cagaagaaatctgtattgctgcttctaaagcttgtggaggctctgtcggtggtgagcgacgaccagtccctctttgactc

SEQ ID NO: 117578 - DNA, 100 bp, Homo sapiens
gaacgcttagaaagagatcacatctttcgacttgaaaaattgatcgtggaacagcaggatgagcagttggagctggtctctggcagcatcggggtgctga

SEQ ID NO: 117579 - DNA, 100 bp, Homo sapiens
taaagacaggagtggagtgatatcagacaccgagcttcagcaagctctctccaacggagttggaaaaacaacattgatccataaagccagtgaggtttta

SEQ ID NO: 117580 - DNA, 90 bp, Homo sapiens
actgacgtgtttggagggaaatgggaatgtacacgataattaaagagtaaagttgtgctcaacggtgcaaacagctgcacagcaagtggc

SEQ ID NO: 117581 - DNA, 100 bp, Homo sapiens
ctaaagccccacatttgcagctcattgaaggaaaggatttgtactgtgttcgcagtgacctggggaacctgctcaaagccctgggtcgcttggaagaagc

SEQ ID NO: 117582 - DNA, 96 bp, Homo sapiens
tggagaacctgctgaaaaacagaaatttctggatcctgcggctgccccccggcagcaatggagaagttcccaagatttctccgtggacgatggcag

SEQ ID NO: 117583 - DNA, 78 bp, Homo sapiens
aagttccagtttgtggcctcctaccaggagctcatggttgagtgtacgaagaaatgaaatgctttgtggtctacagcc

SEQ ID NO: 117584 - DNA, 80 bp, Homo sapiens
gaccaaggaagaagagaccactagaatctggaattgaggaagatgttaccgagtacttcagtgaattccttagtgcaggg

SEQ ID NO: 117585 - DNA, 90 bp, Homo sapiens
tattgataaagtaacacgccctcaagagctggatttgacacatcaagggcagccaattactgaggtgcgagaagatgtactaaattcatt

SEQ ID NO: 117586 - DNA, 98 bp, Homo sapiens
atgaaggtgaaacagattggaaattaattgctatcaatgcgaatgatcctgaagcctcaaagtttcatgattgctaagaagcctcgaacgccaacctc

SEQ ID NO: 117587 - DNA, 99 bp, Homo sapiens
gcgctacactggttacaagggaccagatgcttggaaaatatggaatgtcatctacgaagaaaactgttttaagtgtgggtacgccacgctgcatcacgt

SEQ ID NO: 117588 - DNA, 100 bp, Homo sapiens
tctcgcgggccggggccacgctcagcgccgagggcgagatcgtgcagcaaccgttccttcagagttgatacagcgaagctccagcacaggtaccagcaac

SEQ ID NO: 117589 - DNA, 101 bp, Homo sapiens
gcctgcccagacggctcacctgtgcgggatggaacaaaagggtttggaaatcccttgtctccaggttgctgggattgacttcttgctcaattgaaacactc

SEQ ID NO: 117590 - DNA, 100 bp, Homo sapiens
aatgccagccagaagaggcgttcgctgcgcgtgcacattccggtatattgaagcaagtcaaagattacattaaacagtgtagcaaatgccaggagaaact

SEQ ID NO: 117591 - DNA, 139 bp, Homo sapiens
cgatgttgtgctgactattaacagagaggcctttcctgcacacaaggtcgtcctggctgcctgcagcgactacttcagctccagctccagaaatcccagtacctgcaactgggccccagccgaggccagtactatggcg

SEQ ID NO: 117592 - DNA, 98 bp, Homo sapiens
ccaaagttgcatttcctcgtcgagcgcaacccaaggtgcgagaagatgtactaaattcattgaataacaactttcttcaaacgctaaatcaagcttgg

SEQ ID NO: 117593 - DNA, 91 bp, Homo sapiens
catggcggagctgacggtggaggttcgcggctctaacggggctttctacaagtttgcctgagaatacagatcaacccacagaacaaagcgg

SEQ ID NO: 117594 - DNA, 100 bp, Homo sapiens
gaggtgcgctatgctgctgtaacacagtttgagatcttgtaaggccacaagatacatatcaattttttgttaagcatggtgagttgaaggtatacaagac

SEQ ID NO: 117595 - DNA, 82 bp, Homo sapiens
ctggactctacgtggatcagtatttgtatcactactgtgttgtggatccccaggaggtaatctgtaagtcagatgctccaac

SEQ ID NO: 117596 - DNA, 114 bp, Homo sapiens
tgactggggacctgtcccacctggcggccatcgtcatcctgctgctgaagatctggaagacgcgctcctgcgccgaatctgatgttccagcagaaatccaggtgttaaaagaac

SEQ ID NO: 117597 - DNA, 83 bp, Homo sapiens
agaagatctgggtgcccgtggaccacaggccctcgttgcccagataacctggagaagcagatgcgccagctggccgtgatccc

SEQ ID NO: 117598 - DNA, 100 bp, Homo sapiens
gcgggcgtgagcggcggcgtcttatccaaccttgcgctgcatccgctcgacctcgtgaagatccgcttcgccgatttggagcaagaggtggtggtggcct

SEQ ID NO: 117599 - DNA, 83 bp, Homo sapiens
gcacaatctggtctccccacatccctggttgttttgcttcagcctcagactttatattcagagcaccaatcaaattaagcaag

SEQ ID NO: 117600 - DNA, 75 bp, Homo sapiens
gctgacgctggacaagctggacgttaaagggaagcgggtcgttatgaggggacggcaaaacagaacagaaaggcg

SEQ ID NO: 117601 - DNA, 100 bp, Homo sapiens
tggacacagcaatatctctgggctttcacagtaagactttgaccccgacgcaggcttcagtgattgccgcggatcagaagcctgagcactttggctcgag

SEQ ID NO: 117602 - DNA, 100 bp, Homo sapiens
ctccttttcagctacaacatcatcttctgggggctgataacatccggaaatactggagccgctactaccaaggatctcaaggggtaatatttgtattaga

SEQ ID NO: 117603 - DNA, 83 bp, Homo sapiens
cccgcttcgaggccgctttggcgccaaatcctgagcctcccgcgacgatgcccctcaacgttagcttcaccaacaggaactat

SEQ ID NO: 117604 - DNA, 82 bp, Homo sapiens
ccttagctgtgctcgcgctactctctctttctggcctggaggctatccagcgaagcgccgcggagccatcaacagcaagcag

SEQ ID NO: 117605 - DNA, 50 bp, Homo sapiens
gagtggattaagtgcattaagaacaaaaggtcccaggtcattcttggggc

SEQ ID NO: 117606 - DNA, 82 bp, Homo sapiens
cacccaccgccgccgcctcccaggacaaggtgctgcggatgctgtacgtgtgggcgctctgccgagaccaggacgagctcaa

SEQ ID NO: 117607 - DNA, 75 bp, Homo sapiens
ggagacggtcgtagctgcggtcgcgccgagaaagacctattcaacgaattgcttgaaaactgaacaggcttttcc

SEQ ID NO: 117608 - DNA, 100 bp, Homo sapiens
caaaaggtgatctggacaaaggaacaggtatctcaggtttggaatttcagctgggcagcttcgatcccaccacctgtagccactgaggttcacaggctct

SEQ ID NO: 117609 - DNA, 100 bp, Homo sapiens
gtttgatgcgatcctgaccagtgcaaccacgggatgcagcttcatggagtttggccacaagatgttgttgacggaacgtgtgtagcagtaaataacaagt

SEQ ID NO: 117610 - DNA, 75 bp, Homo sapiens
tccgatgcaccctttttgtcagattatcaggatgaggatttctctatgaatcatcatcaagaactctgggagaac

SEQ ID NO: 117611 - DNA, 88 bp, Homo sapiens
gtccatggttccctggcccgtgctggaaaagtgagaggtcagactcctaagataacggaggagatgatggatcaggcaaatgataaaa

SEQ ID NO: 117612 - DNA, 100 bp, Homo sapiens
cgtttccgaggtgaaggcgccgcgccaggccgggcgggcgttggaccctgggcgttttttacacatggggacccaggctcgccaaagcattgctgctcac

SEQ ID NO: 117613 - DNA, 99 bp, Homo sapiens
actaaattcatcatacctttgaaggagtggtttcgactggatatctcttttaacggaggccaggtgaagaacgaggtggagaagctcccccgacagcag

SEQ ID NO: 117614 - DNA, 73 bp, Homo sapiens
agattaagaaatctgccccaaagtcttagaactggtggttgctgtatatggaactttatctgatttgctttct

SEQ ID NO: 117615 - DNA, 97 bp, Homo sapiens
cccagatgacctggaggggaaaaatgaggactcagtggaactgctggtgttggctgtcaataccagcaaatatgcagaaagctatcggatccaaacc

SEQ ID NO: 117616 - DNA, 76 bp, Homo sapiens
tggtcagtcaaaccttcaaatgtagtgtgaaaggtgaccaagaatatggcccaggtgaccaaagccctggacaagg

SEQ ID NO: 117617 - DNA, 50 bp, Homo sapiens
aagctgtcagaattgcaagggaaattggtcgaatgagtgatttgagtgta

SEQ ID NO: 117618 - DNA, 125 bp, Homo sapiens
gcaattacttgaggacagttcatatagcatctggacagtcaacacgggcaccatgaagcacttcctgagcagtccagagcgtgagtccattcacatcctgagtgttgatgagaagaacaagttgg

SEQ ID NO: 117619 - DNA, 90 bp, Homo sapiens
gtgcaactcctcttgggcaaggtgactctggacgtgaccatgggaactgcctgctccttcctgcagatggggctggcgagggcctggcac

SEQ ID NO: 117620 - DNA, 90 bp, Homo sapiens
agacaacagagtcattgatcttagggaatttcttcacatggctcctggagaagtgaccatcacagttcgcctcatccgttcctttgaaca

SEQ ID NO: 117621 - DNA, 100 bp, Homo sapiens
gcttctgagacggcggcagcagcggcattcaggttgcagagaacacatcttagaagatgaaaaacctgaatctatcagtgacactactgacttggctcta

SEQ ID NO: 117622 - DNA, 73 bp, Homo sapiens
ccagaaagagcgggagtccatcatgaaggagttccggtcgggcgccagtggggatggctataatggatttggt

SEQ ID NO: 117623 - DNA, 100 bp, Homo sapiens
accagctccgaaatcaccaccaagggtttggaaatcccttgtctccaggttgctgggattgacttcttgctcaattgaaacactcattcaatggagacaa

SEQ ID NO: 117624 - DNA, 83 bp, Homo sapiens
ctggcggccggcttggagaggccgagggtttgatgaaggtggaggcagcgcggctctcaggtggtacagaagttggtcctgcc

SEQ ID NO: 117625 - DNA, 100 bp, Homo sapiens
gtcaagcgaagccttgaaaaagctgccctgagacggtgtcccgccgaaaggttccttgcattgactccatggagagtatatcacctgatttccgtcatga

SEQ ID NO: 117626 - DNA, 75 bp, Homo sapiens
gtggtaacccgagaatacaccatcaacattcacaagcgcatccatggagtgagtagcactgtagatgggttaagg

SEQ ID NO: 117627 - DNA, 75 bp, Homo sapiens
agctcttcaaactcacagacaacatacaggacgaattacaatgcagatcttcgtgaagactctgactggtaagac

SEQ ID NO: 117628 - DNA, 75 bp, Homo sapiens
tcccaatttgcctccacttagtgagcggaagaatgacctgtcgcgaaatcgcctttcagaaattcctatagaagc

SEQ ID NO: 117629 - DNA, 83 bp, Homo sapiens
cttagctgtgctcgcgctactctctctttctggcctggaggctatccagcaacactatggctatgcatcctccaacgtcagcc

SEQ ID NO: 117630 - DNA, 98 bp, Homo sapiens
aaattatttgcgcatttcaagaagaacaacctaactccagatatctacctaattgattgatgggactgagtatgggctgagtgaagctgacatggagg

SEQ ID NO: 117631 - DNA, 90 bp, Homo sapiens
gtaacaacacccgttttggcattgctgctaagtacatgctggattgtagaacttctctctctgtatataatgtttacatggcagggaggc

SEQ ID NO: 117632 - DNA, 50 bp, Homo sapiens
cctggaggatacctgctacctgtgagccctattcccagaggcaggtggtg

SEQ ID NO: 117633 - DNA, 90 bp, Homo sapiens
gcagaatttgtatagagatgtgatgttggagaactacagaaacctggtctccctaggggatgttcgtctaaccccagaagactttgctag

SEQ ID NO: 117634 - DNA, 73 bp, Homo sapiens
tgtgaaactgctttctaaaacaccagaactcaacctgtttaagatccttaatgtacccatgtcctctcaactt

SEQ ID NO: 117635 - DNA, 75 bp, Homo sapiens
tctggaagcaagaatttatcaaaggaaagatggatccagacaagatgtggaattagaagaagctattagaagaag

SEQ ID NO: 117636 - DNA, 100 bp, Homo sapiens
gacgcgttcatgcttggcatggggatgctggcttttctgcaattagataaaaaaggaccacaaaaacatcactttgatcagccttcagtagcacccggga

SEQ ID NO: 117637 - DNA, 100 bp, Homo sapiens
ggaggggagtggcaggtgatcctcacaggctcctctgaggagaggcaggtcatggatcatgccttcctccttctcagttctgagagggagcacagacgac

SEQ ID NO: 117638 - DNA, 100 bp, Homo sapiens
aagcgttatgcaatggggaaaaacgaactccgtccactaacaaaagatggctacgagggtaacatgttcggcaagagcggtgagcggggcgcctatgcct

SEQ ID NO: 117639 - DNA, 100 bp, Homo sapiens
tggcaaccagatcggagccaagttttcggctttgtgagaaaccttaccatcaaacacgatggccagcaacgttaccaacaagacagatcctcgctccatg

SEQ ID NO: 117640 - DNA, 118 bp, Homo sapiens
aaacgggccgcgaaccgcagtatcatgctggccaagaagatcatcattaaggacggaggcacgggggatatgagactttctactcggaatatcctgagtgttgcgtggatgtaaaacc

SEQ ID NO: 117641 - DNA, 100 bp, Homo sapiens
cccacagacctcaaattcaaagctttaccgatttgttacaactcaagcaagggccagcagaaattctcttttgacagatataattgctgcttatcaaaga

SEQ ID NO: 117642 - DNA, 75 bp, Homo sapiens
caaaaagagatttcactggagctattaccctgttggagctggaaaggcagctcatcatgcagagtgaaatgaggg

SEQ ID NO: 117643 - DNA, 90 bp, Homo sapiens
taaaaactatactagagtccagcgacttcttaccactctgaattgccggtggtggtgtgcacattgagccccggtatagacagttccccc

SEQ ID NO: 117644 - DNA, 90 bp, Homo sapiens
ggcgtttggatgattgtctctcggcggcggagtcggtatcgtgatttccgatacccacctggacacccccaggagtataaacacaacatc

SEQ ID NO: 117645 - DNA, 98 bp, Homo sapiens
actgcgcagacctggtggaggtgttaaatgaaagtccaggggcaagttcatcctactctcgagtctaatgatgatgctcttcagtatgttgaagaatt

SEQ ID NO: 117646 - DNA, 87 bp, Homo sapiens
cgggaggggggagcggcgttggaggccaccgtttccaggaataggaaaattgtccacggctgatggtaaagcctttgcagatcctga

SEQ ID NO: 117647 - DNA, 90 bp, Homo sapiens
cccaaattatagagctaattacaactttcggggcatgtacaatcagaggctgaccggttccctgatgtgttacctgcttctgctactgat

SEQ ID NO: 117648 - DNA, 100 bp, Homo sapiens
aaggaataagtcctgaattagaaaaggtattcattaaagaaaataatgggaaggaagaagtatccaagttgcagagtgggcaggatcttaagacccgata

SEQ ID NO: 117649 - DNA, 100 bp, Homo sapiens
cgggaggaaggaacgaggcaaggagctaaagcagcgtgcgttcagccctgggaagaagctcattcacacagaagacccatttaatgatgaacatcaggag

SEQ ID NO: 117650 - DNA, 102 bp, Homo sapiens
aagcacaagagaaagaaggttaagctggctgtcctgaaatattataagggtttctccaaggacatcaaggtgcccaagagccgctacctgggctacatcaag

SEQ ID NO: 117651 - DNA, 98 bp, Homo sapiens
ccttgacgaggtctgagcgaccatggaccggccggggttcgtggcagcgctggtggcagttcaattaacctccagaagatggctgaacctgcaggaat

SEQ ID NO: 117652 - DNA, 100 bp, Homo sapiens
cagtttgaagcaacaccctagatggatgtacagccatcaagaggatcttaaagtgtggtctttagtggaaaaaaaggcgaagctggagaagtcactggag

SEQ ID NO: 117653 - DNA, 87 bp, Homo sapiens
acacccgggagtcaggaaatgaacgctgtccaactgggcgtacgagtttgacaagtgggccccctccgtggtgaaggtgtcttacaa

SEQ ID NO: 117654 - DNA, 76 bp, Homo sapiens
ttttaatcaacatcttggcaagagtcttctggtccctgttgactacaagccagctgccatgttgtgagcacatacc

SEQ ID NO: 117655 - DNA, 90 bp, Homo sapiens
atgaagacgagactttcaaagatggaatcacaaacggcgcacattggtatgatgtggaagctgaagaagcatctgtagggaatccagaag

SEQ ID NO: 117656 - DNA, 98 bp, Homo sapiens
aatcatccatgaaacgtaaacttccttttactattagcccatcaagaaatgaagaacgagattcagacacagatggtgagaacaagaccaagattgga

SEQ ID NO: 117657 - DNA, 100 bp, Homo sapiens
gccgccgctcaccgcagccccctcctggcgacccgcaagtgtctcactttgtcgcccaggctggagtacagtggtgcgatcttgactgactgcaacctgc

SEQ ID NO: 117658 - DNA, 90 bp, Homo sapiens
gcggggccgccggggccgccatggagcccgactcggtgattgaggacaagaccatcgagctcatggttttagctaaagaagatactgagg

SEQ ID NO: 117659 - DNA, 100 bp, Homo sapiens
caccaagcaagctgctctgaaaagcctgtgcccctgtaggatgcagtgaagaccttggaagagacagcacaaaactgcacttgatgaattttactgcaac

SEQ ID NO: 117660 - DNA, 73 bp, Homo sapiens
ctcaatctgacagccctagtttggcgcggtgtaaaacgaccgcagcttgaagtacatctggattccttatgtg

SEQ ID NO: 117661 - DNA, 98 bp, Homo sapiens
ggcaactgcgatgtctgtggactgtcttgggcagcatgcagtgctttctgggctttcagtccagtgtaaagctgttggagcgcgggagcaaaggtaaa

SEQ ID NO: 117662 - DNA, 50 bp, Homo sapiens
acacatacgtccacgatgcttatggcctgatcctcatgatccggtacccg

SEQ ID NO: 117663 - DNA, 90 bp, Homo sapiens
aagtacgcctcatgtctcaagatgctggacgagatgaagaaccgacactgcctcctggacattgctccgcacgctattgagcggctccac

SEQ ID NO: 117664 - DNA, 99 bp, Homo sapiens
ggacttcaggcggcggaggcagcaccgaggaagcatttatgaccttctacagtgaggctgtgtctttctatcacggatttccacccggacacgtggaac

SEQ ID NO: 117665 - DNA, 82 bp, Homo sapiens
gaagctggccgagcaggctgagcgatacgacgactcggtgaaatacctggagtgctcagctctcacccagagaggcctgaaa

SEQ ID NO: 117666 - DNA, 83 bp, Homo sapiens
agccactctcctggccgccaaaccccagctggaactccggccacagccagcatgcagtgtcaacagcatctccaccctggagc

SEQ ID NO: 117667 - DNA, 100 bp, Homo sapiens
tctcggactcccgacccgccgccggctccggccgcgtttcccgggtaaaggggggtccttggtgaattttgtcatggttatttaaggaaccttgcctaga

SEQ ID NO: 117668 - DNA, 75 bp, Homo sapiens
gccgtcccttcgcctccttcaccgccgcagaccccttcaagttctagtcatgagacgggttcgtgctatgttgtc

SEQ ID NO: 117669 - DNA, 50 bp, Homo sapiens
gctttactggtgttccagccctaagaacattaaccaggtggtatttgttg

SEQ ID NO: 117670 - DNA, 78 bp, Homo sapiens
gcagaggatcctggaggcctgggaagccaacgaccacacgcacaaactgtcatcaggagcttaaataggacagatttt

SEQ ID NO: 117671 - DNA, 73 bp, Homo sapiens
tcgagccgcagccatgtctggggacgagttttatgagcaatatgatgatgatgaaattggagctctggataat

SEQ ID NO: 117672 - DNA, 74 bp, Homo sapiens
ggagattctgcggcgaatacgccagctcttcagtaggttacctgcaacatccaggatcagaacaagtacaattt

SEQ ID NO: 117673 - DNA, 50 bp, Homo sapiens
agcgggatcatccagcacatagaattcaattcgtcataatctgtccctac

SEQ ID NO: 117674 - DNA, 73 bp, Homo sapiens
cgagatgcagctgatgcagtccgagagctagatggaaggaatacggttggacagaatgaactgaagattacaa

SEQ ID NO: 117675 - DNA, 100 bp, Homo sapiens
caggattttattcccaacgcatggcagaatatctctgaagatgtgattttttctgtgatgtgttataaagatgaggatgaagagctgtggcaagaagatc

SEQ ID NO: 117676 - DNA, 96 bp, Homo sapiens
taaagcctcctaagaacccatctcctgtggtcctgggcctggatcctaagtcctgacctttcatgagtggcaggacagctttgcaaatgagccgag

SEQ ID NO: 117677 - DNA, 101 bp, Homo sapiens
gggcctgcagcgggagctggacggcgagcgcgagcggcgcgagaaagctactgcagcactggggtgtcagttgttggtccgacccagaacgcttcagttct

SEQ ID NO: 117678 - DNA, 100 bp, Homo sapiens
gagtagggacaaaatatcttggctcacgtatttaagagcctgaatattccagatgcatcaatctcaaataattctacaagtaaaaggaaatctgagtctg

SEQ ID NO: 117679 - DNA, 97 bp, Homo sapiens
ggcgctggagaccatcaacctggaggagaacgagatcgtagggtttcccaaactctcgattgcctcttgcaagcagatgacctgggagcaaatgtta

SEQ ID NO: 117680 - DNA, 100 bp, Homo sapiens
aactgaagtaggcctacacagtaggaactcatgtcatttcttgtaagtaaaccagagcgaatcaggggaagaatggacagaagctatccaggctgtagca

SEQ ID NO: 117681 - DNA, 76 bp, Homo sapiens
attcagagactgaaaaacctgaggctgatgacccaaagcaatcatcctcttccagtggtagcgtgtttgggtctgg

SEQ ID NO: 117682 - DNA, 50 bp, Homo sapiens
gcagctgtgaaaaaagccatttccgaagtgaatatggaggtgagaccata

SEQ ID NO: 117683 - DNA, 82 bp, Homo sapiens
cagtgctgcgtccttatcagccgagccgacccgaccgcatgtctgtcatggacctcgccaatacttgctccagctttcagtc

SEQ ID NO: 117684 - DNA, 99 bp, Homo sapiens
caggcctgctgaactgggtgctttatataggattgatctggatactattgatgtaagcaacctcaacagacagtttttgtttcaaaagaaacatgttgg

SEQ ID NO: 117685 - DNA, 83 bp, Homo sapiens
cgctgctgcccctgctgtcgctcctggtcggcgcgtggctcaagctagggaaacactactatgaagtatcctgtcatgaccaa

SEQ ID NO: 117686 - DNA, 80 bp, Homo sapiens
acttttccaaaattctggaaatagagaaaaggaacagttccgtaagctctttattggtggcttaagctttgaaaccacag

SEQ ID NO: 117687 - DNA, 124 bp, Homo sapiens
gacatcaatgaaaggagggttctgacacgttctcacctcgcgggatggcagctgctgatttgtcccatggagagaagtggatgggccctatacctccagccgtgaatgccagactttaagattg

SEQ ID NO: 117688 - DNA, 78 bp, Homo sapiens
gtcactggacacaagctttctgggtactggtcttcttggacattaatctttgaatacttgctgactgctaagaaatga

SEQ ID NO: 117689 - DNA, 101 bp, Homo sapiens
tacttaacacatcatgaaggctagtttggatgtggaggggaatagactccatctatccatatgagcggaaagaacacccggaaatgaaaggccaccaagaa

SEQ ID NO: 117690 - DNA, 80 bp, Homo sapiens
taacaacctggatcttcgaacttttgacacggctttggaaacgacgtcatgtgttagagaccgatcagaaaggatttctt

SEQ ID NO: 117691 - DNA, 98 bp, Homo sapiens
tcttccccaggcctgcgtccgagtctccgccgctgcgggcccgctccgacgcggaaggctatgaaaatgattctgtagaagacctgaaggaggtgact

SEQ ID NO: 117692 - DNA, 50 bp, Homo sapiens
gccgtggaggcagaggtggcatgggctcccttgcctcagctcctatgata

SEQ ID NO: 117693 - DNA, 100 bp, Homo sapiens
tgtgtcagccctgagtgccccgagggcagcggcaatgtgagctacgtgaagacgtctccattagaagatggcgaattagaagatggtgaaatagacgatg

SEQ ID NO: 117694 - DNA, 51 bp, Homo sapiens
ctgaggagctgcagtctctgtcaaggatgtacagttacccagcacgtgtac

SEQ ID NO: 117695 - DNA, 82 bp, Homo sapiens
ggaggaaggaacgaggcaaggagctaaagcagcgtgcgttcagccctggggcccctgtgtccgtctgggatgaggaggagga

SEQ ID NO: 117696 - DNA, 98 bp, Homo sapiens
ccgcctccgaagatgggggatttctacgacccggagcacccgacccctgagtcctcagaatggttggaatgaccctccagctttgaacagagtaccca

SEQ ID NO: 117697 - DNA, 51 bp, Homo sapiens
ccgggaccctgagatggggggaaagccgaatacagattctgttcatcttgc

SEQ ID NO: 117698 - DNA, 82 bp, Homo sapiens
atcttgcccttggaatgaaggatggctcattcactgtacttagagtaaggataagttctgaacgtcgaaaagaaaagtctcg

SEQ ID NO: 117699 - DNA, 75 bp, Homo sapiens
gaacagccctccatcttgcagcccagaaggagtccaatgtgctgattgctgctaacagtcagggtacaattaagg

SEQ ID NO: 117700 - DNA, 98 bp, Homo sapiens
ctggatgattgcaaatgatgtgacaggaccatggtgcccaggcccaagaggatgctgagaaacttcggtccgttgtgatgccaatggaaaaggaaatt

SEQ ID NO: 117701 - DNA, 75 bp, Homo sapiens
cgcagtggtcgcttcttctccttgatgaaaaacctcatggtttattcattacctacaatggaaatactatattct

SEQ ID NO: 117702 - DNA, 90 bp, Homo sapiens
agaaatagttcatttgcctcatcacatgaagtgtggaaatatatctgcgaattgggaatcagtaagaaaagaatggtttgtcattcattg

SEQ ID NO: 117703 - DNA, 100 bp, Homo sapiens
ctatatactttggttacctatgtacctgttaccactttcaaaaattgatgaagatccctgcctcattcctgaagcaacacaaggaggtacctacaatttt

SEQ ID NO: 117704 - DNA, 83 bp, Homo sapiens
gcgggagccgcacgcggcgatatggaagaggagggcaagaagggcaagaagtgcgcgtcccgggacgactggcgctgtgcgcg

SEQ ID NO: 117705 - DNA, 98 bp, Homo sapiens
caatcaaggcaccaagacgcaggggggatatccacagttcgatcaagattgctcgctgtaagcagctcatctgtgaccccagctacgtaaaagatcgg

SEQ ID NO: 117706 - DNA, 100 bp, Homo sapiens
gtcgaatctgagcaaaggcacgggcagccggaaggacaccaagatgcggatccgggcctttccgatatggaatgtgcagatgtcccactattaactccaa

SEQ ID NO: 117707 - DNA, 82 bp, Homo sapiens
gcgcttgctgctggtaacagggccttgcctagtgggccttccttcccagacaatgcagatcttcgtgaagactctgactggt

SEQ ID NO: 117708 - DNA, 100 bp, Homo sapiens
cagcgacacaattgtctgtgacagtaacagtacttgggatcccccagttccaaagtgtcttaaagttatactcagcgtgtggttggaaatggaatcaaag

SEQ ID NO: 117709 - DNA, 75 bp, Homo sapiens
gtgaagttccccagtaagagtgcactgaccaacatctacaagaaggtgacatttcaaaaggcccgggaatactct

SEQ ID NO: 117710 - DNA, 82 bp, Homo sapiens
gtccaaaaaaactccagctgtgaaagcaacataaatgggtcctgcagttctgagcttgggttccctttgcctggacaccaac

SEQ ID NO: 117711 - DNA, 100 bp, Homo sapiens
gatgagatttacctgtgagatgtttcatcccaacagcatttgcaagtaaaatcactggcatgttgttggaattatccccagctcagctgcttctccttct

SEQ ID NO: 117712 - DNA, 101 bp, Homo sapiens
ggcccataggaaacaagtgacttgctgagtccagataacactgactgtcagaggaacaacctatcttcagcactcgagctcatgtcttccaaattgaccca

SEQ ID NO: 117713 - DNA, 75 bp, Homo sapiens
cccagaggtcgtggaggtggccgtggaggcagaggtggcatggggttgcaccattactcagacttctaaagagac

SEQ ID NO: 117714 - DNA, 83 bp, Homo sapiens
cagaccatgtggcctacgcccagcatcactgtggatctgcttaccaaaaggaactgtggctgcaccatctgtcttcatcttcc

SEQ ID NO: 117715 - DNA, 75 bp, Homo sapiens
acagggtgaagcgccagcaggagaggcaaacggggattcagcgtccgatcctttggaacagggactcacgtgaag

SEQ ID NO: 117716 - DNA, 100 bp, Homo sapiens
aagacatccctgctgagagagccaaggcgcagacggggaagcggagccaacatgccagtggcccggagctgggtttgtcgcaaaacttatgtgaccccgc

SEQ ID NO: 117717 - DNA, 75 bp, Homo sapiens
tgtgacatgtctgatcccttgctcccatccctgcagcatgaacaaggtagtatagatcaatcagtgttaaaagaa

SEQ ID NO: 117718 - DNA, 78 bp, Homo sapiens
tggagtgatatcagacaccgagcttcagcaagctctctccaacgatatctaacagtgatacgccttcaccaccacctg

SEQ ID NO: 117719 - DNA, 100 bp, Homo sapiens
gcggcaccagcagtaacaacagcgaggaagaagaggacgacgacgacgaggaagaggaggtttctgagtttttccagaggcctcaaatacagcctcctag

SEQ ID NO: 117720 - DNA, 98 bp, Homo sapiens
ttggctgtcgctgtgctcaaaactgtcattttgggactgctgtgcctcctcctcctgtggtggaggagaaggaaagcattggcatcaacaaaagtcag

SEQ ID NO: 117721 - DNA, 75 bp, Homo sapiens
tgaggaatgtttttgagaatcccaccatggtgcagtttgatcaccggattctggactcagaattcatgattgaag

SEQ ID NO: 117722 - DNA, 83 bp, Homo sapiens
agtacctgcagatcctgacctctctgatgagatggatcgatgtgcactcccagcaacacccctgccacgccgcccaacttccc

SEQ ID NO: 117723 - DNA, 100 bp, Homo sapiens
gaaacatcaaagctggattagaacatctggttgcatcataaatacaaaggactgaagttataaaagagaaaagagaagtttgctgctaaaatgaatctga

SEQ ID NO: 117724 - DNA, 100 bp, Homo sapiens
ggcaggccgcagagcaaggcccccgacagacctgcaggctgggacaatgaaaagaaaatagctattttacatgaaaattttacaaccgtgaagccggaag

SEQ ID NO: 117725 - DNA, 82 bp, Homo sapiens
ggattctcgacctgctaacagaactggaccttttcgattagaagcccaggacccaggaaggagacacaggaaatttattcaa

SEQ ID NO: 117726 - DNA, 88 bp, Homo sapiens
ctcccaaggtgctgggattacaggaaaacaccagtgggacttagatacctgcaagggcctcttgccccggtatgaacatgctagcttc

SEQ ID NO: 117727 - DNA, 98 bp, Homo sapiens
aatcggaaactcatggaatatcctgcagaagaaaatggatttcgttatatcccctttagaatatatcagtatggaccaatatttacagtctttgctat

SEQ ID NO: 117728 - DNA, 116 bp, Homo sapiens
ctccgactccttgcagctgctgtcagcatggcccaggctcctgctgacccgggcagagaagctggaagatctggaagttactgtagctgatcacattcaaaaggtcatgaaactga

SEQ ID NO: 117729 - DNA, 98 bp, Homo sapiens
cttgctcacctttcagcagccgcccaatacctcccagcctgacaaggattctcaaagaccaggtgcccacttaactgtgaaaaagatatttgttggtg

SEQ ID NO: 117730 - DNA, 90 bp, Homo sapiens
gtagaacatcttgcacataacagaaggcctgtctgtcggtcccactttccaaggtcacgagaagagaatgccttctagatgcaaaatcac

SEQ ID NO: 117731 - DNA, 74 bp, Homo sapiens
actcgaacggctcccacagccgggcgttgggggaaaggcagcctggcatcctcgctacaacctcattgttgtgg

SEQ ID NO: 117732 - DNA, 75 bp, Homo sapiens
ccctgagacggtgtcccgccgaaaggaaaaatgccagctgtgggacaaggagtgcaggccgcacaacctcggcag

SEQ ID NO: 117733 - DNA, 78 bp, Homo sapiens
agatattcaaaaccaactgaaggagaagatctttgccattgagggcttctggattcctttgacacagtcccaggccac

SEQ ID NO: 117734 - DNA, 101 bp, Homo sapiens
gacggtgtatcgagggctagacaccgacaccacagtggaggtggcctggtgtgagctgcagtctgagatagcagccggccctgcgagaatctccatgatta

SEQ ID NO: 117735 - DNA, 75 bp, Homo sapiens
tctggggcaggggccagggccaggagccaaaaacctgtatatcatctccgtgaaggggatcaagggacggctgaa

SEQ ID NO: 117736 - DNA, 100 bp, Homo sapiens
aaaattaccgagccagccagcaggaaatacagcatttgaagattcctgtctctggatccaaatcagagggccttctctacgtccactcatccagaggtgg

SEQ ID NO: 117737 - DNA, 98 bp, Homo sapiens
atctggaggcacagctgcagtctgacgagagggccatcccaggcctcaggacctgagttctccgacgcccacatgacatggctgaactttgtccggcg

SEQ ID NO: 117738 - DNA, 105 bp, Homo sapiens
catctcctccaatcgagcgtatgattttctgtacggttggagatgcttgatgctgcaaagaacaagatgcgagtgaagatcagctatctaatgattgccctgacg

SEQ ID NO: 117739 - DNA, 100 bp, Homo sapiens
cttcaagcccaaccaagtgcgagatctgcgtgaaaaggacagttgacattcaaggatgtggccatagaattctctcaggaggagtggacatgcctggacc

SEQ ID NO: 117740 - DNA, 74 bp, Homo sapiens
gagagcttcacagtgcagcggcgagggtcagcagcctctggacccgtgaaagagctggtcggttccgttggtgg

SEQ ID NO: 117741 - DNA, 96 bp, Homo sapiens
agggatttcgtgcgactgtcccaggccctgcaggtgcgcgtggaattcatggacgacacgagccgatccatcatccgcaatgtaaaaggccccgtg

SEQ ID NO: 117742 - DNA, 98 bp, Homo sapiens
tcatgtctggattggaacaaatggaagagctgaggacaggagtgacaggagttctgcaggtgaagtaagaactctgctagagaggaaatggctgcttc

SEQ ID NO: 117743 - DNA, 82 bp, Homo sapiens
gaaggcgacggcaacagtgaccagctcatgggcttcgagagagactcggaagtgccggtggtggtgtgcacattgagccccg

SEQ ID NO: 117744 - DNA, 80 bp, Homo sapiens
cgcggatgtcggcgaagagttcaaccagccgctgccatggcccagacactgcagatggagatcccgaacttcggcaacag

SEQ ID NO: 117745 - DNA, 100 bp, Homo sapiens
agcctcctgcagaagtttgcagctcaggagttgattgagatcaagcttcaggagtctccggaagacatgcctgcagggcagacaccacacacagttatcc

SEQ ID NO: 117746 - DNA, 100 bp, Homo sapiens
cttatacgctacttttactcagagtttgaaggttgtgaccaaaagaggctccgctgagcaacctctccgtgtagtaacagcggatacctgtctatttcac

SEQ ID NO: 117747 - DNA, 100 bp, Homo sapiens
ctcgcctgcgcagaagttgcttacgccttgtacaaacttgcagcccaagagaacagccgcggcgagtcctttgcacatgttggcaacacacgcatccgca

SEQ ID NO: 117748 - DNA, 90 bp, Homo sapiens
gatggtttctctcaaggactactgcaccagaatgaaggagaaccagaaacatatctattatatcacaggcaacacctaagtggaccaacc

SEQ ID NO: 117749 - DNA, 76 bp, Homo sapiens
cgcagcctccatctcatttctccgtcagcacaataaccagcttcagcgagaacccagacctttcccaaagctcagg

SEQ ID NO: 117750 - DNA, 80 bp, Homo sapiens
gcagagacctttggaggatttgacagccatcagatgaatgcttcaaaaggtctatgtacagacatggagcactcagaatc

SEQ ID NO: 117751 - DNA, 100 bp, Homo sapiens
ggaattgatgatcaagatttccagggagaagttatagcactggataaaatcttcaacaaagtagaaaaaatcaaacagaatgccttattgttagggctga

SEQ ID NO: 117752 - DNA, 89 bp, Homo sapiens
tggtcgacctgacttcttttgagcagttggcactacccgtcttgaggaatatataattgaccctgcaatcctgcgcccgggccgcctgg

SEQ ID NO: 117753 - DNA, 48 bp, Homo sapiens
gcagacctgttggcactgagtggacttatcaaactggtttcaaagcac

SEQ ID NO: 117754 - DNA, 82 bp, Homo sapiens
caagttccggcacaccgaggctcggccgccccgccgcgaggtgatgtgtccaatctagatcccaacttctcatttgaaggca

SEQ ID NO: 117755 - DNA, 75 bp, Homo sapiens
gggaaatggaaggggcctccagggtctgcagacaaggcagggtcctcagaatggttggaatgaccctccagcttt

SEQ ID NO: 117756 - DNA, 75 bp, Homo sapiens
aacagccagcaaccctaaagtggagaatgaggatgagaggtggcgagaggcgtgctgaccagtctgccaggagac

SEQ ID NO: 117757 - DNA, 90 bp, Homo sapiens
ccggaatcttctagtttatgtgcttccaaatcagacgaaggtctcccagatggtctaagggatcccaacggcttcaatgactggaccttc

SEQ ID NO: 117758 - DNA, 101 bp, Homo sapiens
gcccggtgcccgaggaggcagccaagctcgtggcctgcctctgcgtgcgtgcccgtggttgacacgagctgtgtccccagctgttcccgtctacaatggca

SEQ ID NO: 117759 - DNA, 75 bp, Homo sapiens
gctggctgtcctgaaatattataaggcctatattcacacacgtatgcgggcgaaaacgtctgacttcctcaaggt

SEQ ID NO: 117760 - DNA, 100 bp, Homo sapiens
agaatgggtgaggaatgtgttagtgtctggagccatgaaggccttgtgctgaccaagctgctcacctcgggcagagcggcttgggtaaatccaccttaat

SEQ ID NO: 117761 - DNA, 75 bp, Homo sapiens
aatggcacaaagttctctcgatcagggcatacatctttcttcgacaaagggtctctaattaacagaagatggcaa

SEQ ID NO: 117762 - DNA, 75 bp, Homo sapiens
ggcgtcgtgcattccttctcccataacgtgggcccggggcttttgcctctaatgacagagcagctacagtggatg

SEQ ID NO: 117763 - DNA, 75 bp, Homo sapiens
gccggagttgcataagggagatgtcatgtccatcctgttgcatggggatgctgcatttgctggccagggcattgt

SEQ ID NO: 117764 - DNA, 74 bp, Homo sapiens
cggcggcggtggcatctgcggccatggcggcgactactgccaaccccgctgatgaacttattagtcctaaagac

SEQ ID NO: 117765 - DNA, 83 bp, Homo sapiens
cccaggcgcgcagctgggcgcctccttcctgcaggccaggtcagcccaaggccaaccccactgtcactctgttcccgccctcc

SEQ ID NO: 117766 - DNA, 100 bp, Homo sapiens
tggcgccctacagcctactggtgactcggctgcagaatcttccctggagaaggagagggagactcccagtcccatcgaccccaattgtgtggaagtggat

SEQ ID NO: 117767 - DNA, 75 bp, Homo sapiens
tgtaggtccttctggaagatttactatgaatatgctggtcgacattttcttggccagctgccatgctgtgagctg

SEQ ID NO: 117768 - DNA, 98 bp, Homo sapiens
gagccagccgctgttttgccggaggagcccctcaggcccgtttagtgggctacagatggcatggcatctaaaaccttacaatgcttgattttcataca

SEQ ID NO: 117769 - DNA, 82 bp, Homo sapiens
gcggacaaggctccggcctgcgaggagttcccagtgacctgacagcagaggagcgtcaagaactggagaacatccgacggag

SEQ ID NO: 117770 - DNA, 73 bp, Homo sapiens
gctggaatccaacaagggcaaatcaatgttggagttccagggctacttctacaagtccgaacagccagtccag

SEQ ID NO: 117771 - DNA, 100 bp, Homo sapiens
ttgcgctacgctgagtacttgcagccctcggccaaacggccagacgccgacgtcgaccagcagagactggtgtgctatcgagtagtgatgcagctttgtg

SEQ ID NO: 117772 - DNA, 97 bp, Homo sapiens
cctagttggaaaaccaccttttcagaacattgacatcaccaatttcagcagcagctggagcgatggcctggccttctgtgctctgctccacacctac

SEQ ID NO: 117773 - DNA, 100 bp, Homo sapiens
ataagttggaggttctggaatctcaggacagtcattttgtttactcattcagccctgttgcaggtcccaataaactcttcataaggttgacagaagcacc

SEQ ID NO: 117774 - DNA, 97 bp, Homo sapiens
agcaaatgcagaatcagcccattgcaggaatgggataccaagtctcccaacaacagagacaggtgtgaggaggacatcaatgagtgcgaacgagagg

SEQ ID NO: 117775 - DNA, 75 bp, Homo sapiens
gcttcgggaagcagggattccagtgccaagatttgattagaactatccgggacccagaaaagcccaatactttag

SEQ ID NO: 117776 - DNA, 100 bp, Homo sapiens
ctaaatctgttgcttccagagccactgtcctccagaagacatccttcacccctgtagggcaagaaaaatctcgttgggaagtcctccaacaagaacaacg

SEQ ID NO: 117777 - DNA, 96 bp, Homo sapiens
ccgccgggcagctgagaggcgtgcagctgtggcgcgtgccgggccctggccagtatctgtgtggacactgccagcggctgcagccgacttggaatg

SEQ ID NO: 117778 - DNA, 100 bp, Homo sapiens
tgatttctccagtgctcatcttgttctcgagttttctctgccatgttgctattgcaggacggaagctacacccccacggtgtttgagcggtacatggtca

SEQ ID NO: 117779 - DNA, 90 bp, Homo sapiens
cgaggaatggggaaccgctgattgctgctattcaggattttctaacagaaactaatctggattcactccctctggttgatacccactcaa

SEQ ID NO: 117780 - DNA, 75 bp, Homo sapiens
ctgcgctgccgccgctctgaggagttaaaggaggagacatcacagctttcccagatcgggaggaaaaatatggaa

SEQ ID NO: 117781 - DNA, 100 bp, Homo sapiens
agtgcataggtcccggttggtagagggtttgagtccgcatcgccacagctgaaggctgcgagggactaagagcagagtttgcaacacaactacagacagg

SEQ ID NO: 117782 - DNA, 83 bp, Homo sapiens
gacgcagccgtagacaccagctccgaaatcaccaccaaggagaactacgatgacccgcacaaaacccctgcctccccagttgt

SEQ ID NO: 117783 - DNA, 82 bp, Homo sapiens
atcatctcagttttgatcccctggcatcatttattctccgtactgatcactacatcatggacattggctccctggattatca

SEQ ID NO: 117784 - DNA, 83 bp, Homo sapiens
ggcgtccaggctcggagcgcggcacggagacggcggcagcgctggactaggtggcagaacaccttccaccatgaccacctcag

SEQ ID NO: 117785 - DNA, 76 bp, Homo sapiens
ccctgcatgagcaaaagcagatgattggtatgccaatgtcttcctgcagcctgttacagatgacatagcacctggc

SEQ ID NO: 117786 - DNA, 100 bp, Homo sapiens
gaagagttcaactttcccagaagttgttctaacgctgcctttgctttaaaacagtattacttgcgcctttctgagaaaagtctacagcattctttctctg

SEQ ID NO: 117787 - DNA, 50 bp, Homo sapiens
ggagcttctgggagccaccgtctgaaggacatggatttgattgacatact

SEQ ID NO: 117788 - DNA, 100 bp, Homo sapiens
agactctccctggaaaacttcccttccctttcggatgacacagcaagaaggccctcaccagatgctgagcagatgccggcaccatgcctgtggacttccc

SEQ ID NO: 117789 - DNA, 75 bp, Homo sapiens
atgatcaagcggcacgaggtggagcagcagaacattcgggaggttaagaatagacccaccagcatttcgtgggat

SEQ ID NO: 117790 - DNA, 100 bp, Homo sapiens
aaaaggcttggcagacattcatcattgacttactattgcactgtcacagcaagacatcctcaatttcgtcgatgaccagcttggtgaataagtattactg

SEQ ID NO: 117791 - DNA, 50 bp, Homo sapiens
attcggggtgccagaaggaaagcatagcccatggcgaattgtggatgatt

SEQ ID NO: 117792 - DNA, 90 bp, Homo sapiens
cacagccggtccaaggcggtgcgctgggggccggggcgcgtcgcagagattattttgcagaggatgatggggagatggtacccagaacga

SEQ ID NO: 117793 - DNA, 75 bp, Homo sapiens
gaagcatcacattgccagtgacatagcttcagacagcatgttggcagataaattgaacatgactccagaagaagc

SEQ ID NO: 117794 - DNA, 102 bp, Homo sapiens
agttggtgagcagcgctctggggctcgccttgtatctcaacaccctgagtgcggatttctgctatgatgacagggcctattccactagaagcaagatggctg

SEQ ID NO: 117795 - DNA, 101 bp, Homo sapiens
agccagccctcggctccgggtccacaagaccttcaagtttgtcgtcgtcggggtcctgctgcaggttctgatctacaatggccaactggacatcatcgtgg

SEQ ID NO: 117796 - DNA, 95 bp, Homo sapiens
acgtgggcttcaccatggacaagctggtgcagaacattgcgcggcagacaatgcagatcttcgtgaagactctgactggtaagaccatcaccctc

SEQ ID NO: 117797 - DNA, 90 bp, Homo sapiens
gaccaccatggcagatggcaacagaggatgtcaacaattttttggaggagaggagtcactcacaatttttgtggacaagcggaagttgag

SEQ ID NO: 117798 - DNA, 100 bp, Homo sapiens
ttggattgaaacagctaatcgattctcaaagttggattggtggaaacaatgaaccattgacaggctttacatggcgaggtggctgtgaaagagaaacaac

SEQ ID NO: 117799 - DNA, 101 bp, Homo sapiens
ttctgggtttccagcccagcaaccaactgagtgcaatatgtagtcattcaggcgatatgaaaggtgaggtctatccatttggcatcgttgggatggccaac

SEQ ID NO: 117800 - DNA, 100 bp, Homo sapiens
ctcggctcaaggcgtcaacatgaacagacttcctgacaagttggatggcttgaggactggtactaaaaggaaacgtgactgggaggccattgccagcaga

SEQ ID NO: 117801 - DNA, 96 bp, Homo sapiens
ggcgctggagctgggtcagtccgccgctcaccccgcggccgcaccttcccgccttctcaggaagtgggacccatggcagccgagacctcccagtca

SEQ ID NO: 117802 - DNA, 76 bp, Homo sapiens
attacctgccacccattgtgtcttctcaagaaggttctgccctgatgtttcctggaataatgctgaggactgcctt

SEQ ID NO: 117803 - DNA, 100 bp, Homo sapiens
gatcgtgaccgagaccgtgaccgagagcgtgaccgagagcgcgaatatcgtcatcgttagaagtttttggtgttgagccagacttgaccagggaaggcgg

SEQ ID NO: 117804 - DNA, 51 bp, Homo sapiens
agggcatgacaccctccgccaagcaggagccagggagtaacgaagagatca

SEQ ID NO: 117805 - DNA, 80 bp, Homo sapiens
tcaatactacctttatttccaccatagattttaccaaatgttgcaagaactctggagttcttatggtagtaaaatgccgg

SEQ ID NO: 117806 - DNA, 88 bp, Homo sapiens
ccccgccgctctgtctacaacccgagattccctataaggagcccctgctggtgcaccagaactaccgggggccatctgcccaactgcc

SEQ ID NO: 117807 - DNA, 88 bp, Homo sapiens
tactgttgcaggagccaaagaacagaatcctgcactgggaaagagaaagaaatttcagagcttccaagaccacaaacttaaaataagt

SEQ ID NO: 117808 - DNA, 90 bp, Homo sapiens
atcgcgtgaccattgtggctgaccatccaggtataggctcatcatatgcccgaagctcagtggttacggctgtgaaatttacaatttctg

SEQ ID NO: 117809 - DNA, 74 bp, Homo sapiens
ctttgaacgcactcctcagagtccgactctcccacctgctaagattcatcacttctccagcagtttttatagtg

SEQ ID NO: 117810 - DNA, 100 bp, Homo sapiens
ttgccctgcaccgccccctgggatccgcaggttccctacacggtctcctgggtcaagggcaccgaggaagagaaccaatggcagaggccacatgtgcaag

SEQ ID NO: 117811 - DNA, 100 bp, Homo sapiens
ggaccaagaagccccggacgcaggcctggtatggagaacgagaggaaagaagtcccttatcacgggagccatggacaactgtttggcggccgcagcgctg

SEQ ID NO: 117812 - DNA, 98 bp, Homo sapiens
aaaattttctcctttgtgccagtgggtatggaacctggctaactgcaagctgaagaccaaccacattggccacacaggctatctgaacacggtgactg

SEQ ID NO: 117813 - DNA, 90 bp, Homo sapiens
gccgtttccgtggaatcaggccggctggtgagggtacagattgcccccgaggaattagcacttgttcacaacttgaggaaaatgatgaaa

SEQ ID NO: 117814 - DNA, 98 bp, Homo sapiens
gttacaatcaaggtctatgaaggccgctgtgcccccatgaagagcatctccagcagcctcaaggagaccatgaacccgcacgacatcgtgcaggacgc

SEQ ID NO: 117815 - DNA, 90 bp, Homo sapiens
cttctgagcgtgtgccagaagatccagctttgttgaaaagcgaagccgttagtcccttaatacaaaggcctggtccgacccccagtggca

SEQ ID NO: 117816 - DNA, 50 bp, Homo sapiens
ctttgcagtctcgacataagttgtgggcgaaatgctgaaaacttcgaccg

SEQ ID NO: 117817 - DNA, 100 bp, Homo sapiens
gctgggcttctctgagtactgccgaatctctaaccttattgtgcttcacctcagaaaggtggaagaaggtgctggagaatctggtaaaagcaccattgtg

SEQ ID NO: 117818 - DNA, 82 bp, Homo sapiens
gcggaaggggcaggggacgtggcttttgtgaagcacagcacggtactggagaacacggatgatcccagcatggtgagtgcct

SEQ ID NO: 117819 - DNA, 90 bp, Homo sapiens
gctgctgtacttcgtctatgtggcgcccggcatagccgcagggccgtaggcagccatggcgcccagccggaatggcatggtcttgaagcc

SEQ ID NO: 117820 - DNA, 101 bp, Homo sapiens
gcaggtgtttgagatgaaggtcaaagaaaaagttcaaaaactgaaggactctgaagctgaggcgccatgtcagaaccggctggggatgtccgtcagaaccc

SEQ ID NO: 117821 - DNA, 75 bp, Homo sapiens
ccttgtgggcatgatccataatcggtttcaaggagcacgcatgacctggtggccatggacggatggttgtacgcc

SEQ ID NO: 117822 - DNA, 100 bp, Homo sapiens
ctttcctgctggtggcaaccgcctacgagacactcaagctcaggaatcttgcttttaagaaaattccccagaaatcctcccatgctgtttgtaacgctca

SEQ ID NO: 117823 - DNA, 87 bp, Homo sapiens
ttggcaagtggacattttactggctcaatgacgttcaagtgtttctcacggatggaattctagtcagctgcaggcgggaagccaggc

SEQ ID NO: 117824 - DNA, 90 bp, Homo sapiens
aagatgagctgtcctttcaggaaggagccattatttatgtcatcaagaagaatgacgatgcaacttctactacaccagctaccaacacca

SEQ ID NO: 117825 - DNA, 82 bp, Homo sapiens
ttgtcatggtgaactgaagaacaatcggggcgtggatcgtagggcatcagaaaaacaaaaagaaatagagagagtaaaagag

SEQ ID NO: 117826 - DNA, 100 bp, Homo sapiens
ggagttcttacaacatggcagacattgacaagttttaatataactgcaggagttgatgaagaaacaggatttgtttatggaggaaatcgtttcaattgtg

SEQ ID NO: 117827 - DNA, 100 bp, Homo sapiens
cagaccctacccctatccccagtggagccggagtgcgggcgcgccccaccaccgccctcaccatggtaagccaagatgggtgcatacaagtacatccagg

SEQ ID NO: 117828 - DNA, 74 bp, Homo sapiens
tatcatcaatgccccgaccttggtgggaaactacctccgtatgttccgaggttctctgtacaagagatacccct

SEQ ID NO: 117829 - DNA, 75 bp, Homo sapiens
ggttcttctccagcgccctggcctccctcaccttggacacctcgcttgggttttgggatttgagattgacgcggt

SEQ ID NO: 117830 - DNA, 98 bp, Homo sapiens
gcatcttctgttcacgttcctgtttctgctcttggtgcaggatctgcagctactgctgcatcagaagaaatggtccgtttattaatggttagtcgaat

SEQ ID NO: 117831 - DNA, 82 bp, Homo sapiens
ttgcttggaaaaacgtgtgggtacgaccttggaacgaatgcaggaatttgggaactgagctgtgcaagtgctgaagaaggag

SEQ ID NO: 117832 - DNA, 75 bp, Homo sapiens
atcttcctatgcatggaaactcattatgagaagacatgtgcattgccattgcgatttctcttctcatgatcctga

SEQ ID NO: 117833 - DNA, 80 bp, Homo sapiens
ttccacagccaagtgcgggagtccacggtcatcatcagatttgaaatatttaaagtggatacaaaactatttcagcaatg

SEQ ID NO: 117834 - DNA, 89 bp, Homo sapiens
cagcggagccctgggctggggcaggagccggtggacttagtagttttaagcagaaccatgaaaacctctgtgacaactccctccagctc

SEQ ID NO: 117835 - DNA, 76 bp, Homo sapiens
cgttcacggcccacagacgcaacgtgagcgccctcaagtaccacgcgggcacctactgttggagcagaactactga

SEQ ID NO: 117836 - DNA, 90 bp, Homo sapiens
attgacaacaaggctttatatgataccttctccacctttgggaacatcctctcttgcaagttaatgaaattatcaggaaggagttttcag

SEQ ID NO: 117837 - DNA, 75 bp, Homo sapiens
cagctgaacctggtgttttagaggataccttggtcccagagtcatcatgaagacgcagaagaaacatgtccttca

SEQ ID NO: 117838 - DNA, 50 bp, Homo sapiens
cgaaaccaagttggacttacagagagacaggtggacagcttgaagcagag

SEQ ID NO: 117839 - DNA, 121 bp, Homo sapiens
ggcagcgaggaagagcggccagttaaacctgtcgggtagaaacctcagtgaagttacagctcttttgaggaagcttaagcagcaatccagggaaagtgttgaagaaaaacgacctcgatta

SEQ ID NO: 117840 - DNA, 75 bp, Homo sapiens
tcctgagtggctgggactacagtgtgtctatggcggagttctgagaggaactgggaagcaggcctttggtgccgc

SEQ ID NO: 117841 - DNA, 83 bp, Homo sapiens
aggcactgctgagggggcgcgaggggaacggaggccagagctgcgacaatgcagatcttcgtgaagactctgactggtaagac

SEQ ID NO: 117842 - DNA, 100 bp, Homo sapiens
caacattcagacccatttccagtcatgaggaactctaatgatccaggacaaagaagttaccctggagtatgtatcaagcctggatttttggtactgcaaa

SEQ ID NO: 117843 - DNA, 100 bp, Homo sapiens
cagatgctggagaagtccccttatgaccaggttttcctttggaatatggataaatacaccatgatacggaaactagaaggacatcaccatgatgtggtag

SEQ ID NO: 117844 - DNA, 74 bp, Homo sapiens
cccgagaatacaccatcaacattcacaagcgcatccatggagtaggccttcgaggaagaggcccacctccttca

SEQ ID NO: 117845 - DNA, 100 bp, Homo sapiens
ctgacttcttgaagaaagacagatcctgtgtcacccggcaactcagaaacatcaggtccaagccccagtggacaggaaagctaaggcctcagcgatgccg

SEQ ID NO: 117846 - DNA, 100 bp, Homo sapiens
tgaagttgacatctgacgacgtgaaggagcagatttacaaactggccaagaagggccttactccttcacagatcggtggctctggtaggcgaggaggaag

SEQ ID NO: 117847 - DNA, 83 bp, Homo sapiens
gtcgtccccctctccgccccccaggaggggcgagagggagccgcagctgatgtcagcattggggctttccagctctcacagaa

SEQ ID NO: 117848 - DNA, 100 bp, Homo sapiens
caaggccacaactctgcagtggaccacagcattcctgaaatacatccaggaaagacatggagattctcttaaaaagattttgtggaagtataatactttg

SEQ ID NO: 117849 - DNA, 71 bp, Homo sapiens
gccccttccacgagcacgtgcttggagccctgtgcaggtcctggtgaacgccatcatcaacagtggtcccc

SEQ ID NO: 117850 - DNA, 75 bp, Homo sapiens
cccgcaaaaccatgtccaaaccaggaaatggacagaacctagaagtcggaatccggaagaagatcgaacatgacg

SEQ ID NO: 117851 - DNA, 90 bp, Homo sapiens
gctatggtgaaacaccactgaagcattgccaagggaagcagtttaagtgcacggtgtgtgactacacagcggcccagaagccacagctgc

SEQ ID NO: 117852 - DNA, 98 bp, Homo sapiens
tacctggaaagcaagggattgctggctacagcttcagaagaccgaagcgttcgtatctggaagggttgcttcaatcagcttttgtatgacatccgaac

SEQ ID NO: 117853 - DNA, 100 bp, Homo sapiens
cctgagaaggtgactcggttctgccccctcgagggtctgaatctgcaagaggagccatcttgtgccacctcagaatcacctccttgttgtgggaaggaag

SEQ ID NO: 117854 - DNA, 90 bp, Homo sapiens
agtaactgaatttgcaaaaacatgtgttgctgatgagtcagctgaaaattgtgacaaatcacttggggacttgatctcatcttcatgcca

SEQ ID NO: 117855 - DNA, 100 bp, Homo sapiens
ccggggccctcctgtgacctgcatgtactgggggattcgcagggaggatgtcgggacaccccggaagctgggaaatgaaattggcgtgttagccaaggct

SEQ ID NO: 117856 - DNA, 75 bp, Homo sapiens
gagggacgtcttcctgtatagagcgtacctggcgcaggctgttcggctcttgaatcccagcgatgaaaccaggaa

SEQ ID NO: 117857 - DNA, 90 bp, Homo sapiens
gcaccctgcaggtggtcagacatgtcatcaactcagctgtttccctgaaacctgggctcttgaagacgcatcactggagcagatggataa

SEQ ID NO: 117858 - DNA, 101 bp, Homo sapiens
tgaagtaatgcaatggtctcaatctctggaaaaacttcttgccaaccaaacgcagcttatgatgccattcttgaaagaaatgttgcaatcaagaagctaag

SEQ ID NO: 117859 - DNA, 95 bp, Homo sapiens
gcaaggagctaaagcagcgtgcgttcagccctgggactgcaaaattcaaaatggggctcaaggtattcgtttcatctacaccagagaaggcagac

SEQ ID NO: 117860 - DNA, 82 bp, Homo sapiens
cgagcgcaaggacagcgcgaggtccgcgcagcccagcgcagccatgccccctcagaccgtgccatgggtgacagtgatgacg

SEQ ID NO: 117861 - DNA, 100 bp, Homo sapiens
ctaggggcgacgaggcgggacgtcatggaagtattgccaacactcctgatagctgaatgtgtgctggtttacatgactccagagcagtccgcaaacctcc

SEQ ID NO: 117862 - DNA, 100 bp, Homo sapiens
ctaaaattgctgaaaagacagcaggtactactgagcgagtgtgcttgatccagggaacggttgaagcactgaatgcagttcatggattcattgcagaaaa

SEQ ID NO: 117863 - DNA, 111 bp, Homo sapiens
tctccctgggccaccgctcctgcatcgggcagcagtttgctcagatgacagcgcttctgctgcaagtagcatggaggtgacagaccgcattgcttcactggagcagagagt

SEQ ID NO: 117864 - DNA, 51 bp, Homo sapiens
cctgggctgccggcacttcgcggcaggatattagaaatggctactccccag

SEQ ID NO: 117865 - DNA, 100 bp, Homo sapiens
cgccactgccgcaggaggcgtgagatccagacatttaatgtggatgcaccatgccagaccgtggaagatttaacgaatggggttgtgatggcccaggttc

SEQ ID NO: 117866 - DNA, 82 bp, Homo sapiens
agaccggagctgttcctattgggccatcttggctccaccaccctgaatgagagaagacagtgctagagtctatgaaaacgtg

SEQ ID NO: 117867 - DNA, 100 bp, Homo sapiens
ctgggactgaagagggacgggtcccgcggcgagcgagctcctgaggttgcataccctgtcctgagggcgcggcacggagtgcatgcgggccgctgccatg

SEQ ID NO: 117868 - DNA, 98 bp, Homo sapiens
caatgaagttccaattcaaaagatgtttgaaaagctgggtggtcattgggactcccacacttaaacaaagaaaggaaattctgcaagtgattacctcg

SEQ ID NO: 117869 - DNA, 102 bp, Homo sapiens
ttactgatatctcatgcaatagaagccctgattttggatccagaatcagcaagttattacttaattggtgaagaaattctatattgtgaacttaaaggatca

SEQ ID NO: 117870 - DNA, 100 bp, Homo sapiens
gtgcttatcacccagcagagccacgaggagctgaagaaggttctagatgctaacaagtacgaattggagcaatgttggcttatacacctctggatgagaa

SEQ ID NO: 117871 - DNA, 50 bp, Homo sapiens
tgaatttccatgtcaacatagtccaggttatcaatactctggctgaccat

SEQ ID NO: 117872 - DNA, 50 bp, Homo sapiens
cggcccatgaggatattgccgtgaaaggctaagtgctatttatggaggta

SEQ ID NO: 117873 - DNA, 100 bp, Homo sapiens
aatgaacatactcttcccaaatgtagagacacaatgcgggacagcctcagccaggttctccagagatgtcacagaacagaaagtgctggtggacatctct

SEQ ID NO: 117874 - DNA, 82 bp, Homo sapiens
gtgcagccaccctcgctccctctgctcttcctcccttcgctcgcaccatgaattctgagacttatggttggtcatatagaag

SEQ ID NO: 117875 - DNA, 82 bp, Homo sapiens
tggagcttggtttcgggatctcggtgctgcagacggcgagacctcctgcacaggtgtgaacccacatccctgcccccagggc

SEQ ID NO: 117876 - DNA, 73 bp, Homo sapiens
atgttctgggacttaggagggcaggaagagctgcagtctttgtgggacaagggtggttctcttcccaaagtgg

SEQ ID NO: 117877 - DNA, 75 bp, Homo sapiens
gaggcagtaagcatgcatgatggaaacgtcattactgcagcagaaaaggctggcatggttcatttgttggatttc

SEQ ID NO: 117878 - DNA, 90 bp, Homo sapiens
tcatttaaccccaaaatcagtgattctacatctcaagctcatattttgaagtgtttacgggatacagttgatatattagttggatggcat

SEQ ID NO: 117879 - DNA, 88 bp, Homo sapiens
gacttctattcactaaaaccatgtgtctgaactgaagaagcttgggctcacttccacaaatgtggcgacatgtctaagaatgtgagcc

SEQ ID NO: 117880 - DNA, 75 bp, Homo sapiens
gtagcattcgtgctatccctgggggttgcagctttgtataagatcccacttccagccgggcccctcatgtatcca

SEQ ID NO: 117881 - DNA, 82 bp, Homo sapiens
cgccccagtgccgcggcgttctggagccgggactggcttggcaactcttgtgaaatttcatagatctcgtcgcttactggga

SEQ ID NO: 117882 - DNA, 75 bp, Homo sapiens
cctggtcatacaccagtactaccaaggacagcttttttcctgcaagatgctgagatgaatcgtcacctgtgtgtt

SEQ ID NO: 117883 - DNA, 90 bp, Homo sapiens
aaacctcctgttgggccatttccgagaactcccatcagtttctgtatagtgtaaaagagcaagtgcaccggcacctggaccaacacgaag

SEQ ID NO: 117884 - DNA, 100 bp, Homo sapiens
aagaactacgcaatgggagcgcccaacacggaaagaccacagcaagattctttcattcgtctcctcctagcctgggggaccaggctcgaactgaccctgg

SEQ ID NO: 117885 - DNA, 82 bp, Homo sapiens
tggagagcctgcaggacggcgcggcagagtccccgtacgcctacagtaacgatgagcagcaccagcagtaagagggctccga

SEQ ID NO: 117886 - DNA, 96 bp, Homo sapiens
caagatatgtgcctggatgcagctcacctccgcgatggcaagccggcaggtggatattgcaactcagggctggttcattggtctgatgtgtgctgt

SEQ ID NO: 117887 - DNA, 121 bp, Homo sapiens
cgggagagtgctggaccctgagtgatggggccggcgccagctggagagcagcttcgcggagcgactggagagccagaggagccaagccgccatggcctaccacagcttcctggtggagccc

SEQ ID NO: 117888 - DNA, 83 bp, Homo sapiens
agcagctaaggatattttgtgcaggatgctaatgaatgttggatacaaatgatgcgagtattgcaacagaaattggaagcaat

SEQ ID NO: 117889 - DNA, 82 bp, Homo sapiens
acattgaagccgtgaaggagatctacagtgagaactctgtatccatcagttctttattggtgaaaacatgaatccagatggc

SEQ ID NO: 117890 - DNA, 75 bp, Homo sapiens
ccaccgtggagctgtttttcctgaatgcaaaggcctgtgtgcacaagtgatgtttatccatgcatcgttgagact

SEQ ID NO: 117891 - DNA, 75 bp, Homo sapiens
gaagatccagaccaaggcaggtgaggcgtccagcctagggtgaatgtttccccctccaagaaggggcccttgcag

SEQ ID NO: 117892 - DNA, 80 bp, Homo sapiens
tggacgtgctggtgtctgagtggatggggacctgcctgctgttcaaggagcagggacaagttacaggaatgttctccaag

SEQ ID NO: 117893 - DNA, 100 bp, Homo sapiens
attaagaggcatacaccacttagtaaactaatgaaagcctattgtgaacgacagagcttacaattgagactgctaacccctacctttgaagggatcaacg

SEQ ID NO: 117894 - DNA, 100 bp, Homo sapiens
cgcgcgccgctgcatcccgcgtccagcacctacgtcccgctgccgtcgccgccgccaccatgcccaagagaaaggataaggatgctaaattccgtctgat

SEQ ID NO: 117895 - DNA, 100 bp, Homo sapiens
cagagatactacgagcaaaggttccggaacagggcagggcaggacaggccttcaatgtgatcaacgggggctcccatgctggaaacaagctggccatgca

SEQ ID NO: 117896 - DNA, 75 bp, Homo sapiens
gactttggaaacgaggaggagctggcctttaggaaagccaagatcagatacttggtgcttgaaaaactgaagaag

SEQ ID NO: 117897 - DNA, 100 bp, Homo sapiens
ttgggatgatgacaatgtagaggatgacttctctaatcagttacggaaaatgactcaggcactttggacacggtaggcgctgtggttgtggaccacgaag

SEQ ID NO: 117898 - DNA, 75 bp, Homo sapiens
aaaaatgtaggcatcatagccattcagcagaaggggatcttagcaaagcaatgtctcaagatggtgcttctcagt

SEQ ID NO: 117899 - DNA, 100 bp, Homo sapiens
tgatccctgtgaatgtgtttgctctcatgaacatgcaatgagaagactgatcaatctgggcagctgcaatgactctccgcacggtattattgtcattgca

SEQ ID NO: 117900 - DNA, 98 bp, Homo sapiens
ctgctggacaagctggccaaggagaaccaggacatccggctgctgcaggcccagctgcagcctcctgctcttcatggatgaagcagacgccttccttc

SEQ ID NO: 117901 - DNA, 75 bp, Homo sapiens
aatagaccctctgtccaggcagcattaaaacttaagcagtcgttgaagaaagttggaaaagattctactgtctta

SEQ ID NO: 117902 - DNA, 82 bp, Homo sapiens
ggcgcagaaaccccgttgacaaggcactgctttttcatgacggacacctgctccacttcaccttttgccatgagtaaaagct

SEQ ID NO: 117903 - DNA, 100 bp, Homo sapiens
ctgttcttgtagttttctgcatagataagcgcatattaaatttcctattgactacccctattcaccacctaccttcagattcttgaccaaaatgtggcac

SEQ ID NO: 117904 - DNA, 118 bp, Homo sapiens
gagagggagtgcgtggaggagctgtgcagccgcgaggaggcgcgggaggtgttcgagaacgaccccgagacgcaagagtgagccatggagctacgtgtggggaacaagtaccgcctgg

SEQ ID NO: 117905 - DNA, 100 bp, Homo sapiens
gtgaatgggaagccagtgccacttgccacaaatgggtctcggcgcggaagatggccggcggcgtggacggccccatcgggatcccgttccccgaccacag

SEQ ID NO: 117906 - DNA, 75 bp, Homo sapiens
aaagcagccggtgtaaatgttgagcctttttggcctggcttgtttgcaaagatatgtgcagcgggggctacagcg

SEQ ID NO: 117907 - DNA, 98 bp, Homo sapiens
acaaattcatcccagaaatctaagaggttatacattggctcttcaaagacgttcacctcatcagagaaatccctgactcctttgcagtggtgtagaca

SEQ ID NO: 117908 - DNA, 99 bp, Homo sapiens
agaagacctcatctggatgccaggcccaggaattcccataccaaccacagaggttccatcaatggtgagcaccagcctgaatgcagaagcgctccagta

SEQ ID NO: 117909 - DNA, 85 bp, Homo sapiens
caagaagccagtcaagcggccagagtcaagaaacccccccttcttgagctatttacagcttttaacaattgagtaaagtacgctc

SEQ ID NO: 117910 - DNA, 100 bp, Homo sapiens
cgccaaggaactctatcctgggcagttcaagctcaaagccgtgcacgagcagcttgcagccctctctcagccccagcagaacaaaccaaagaaaaaggag

SEQ ID NO: 117911 - DNA, 100 bp, Homo sapiens
cggagatggtgcagaagatggaggaggtctcctctgagcctccggcctccataagacccaaaacagatgacacctcttcccagtcccccgcgccttccga

SEQ ID NO: 117912 - DNA, 89 bp, Homo sapiens
gaaatatctcagcaggacattaaagtgtcaatgtgtgcggataagaatccagcaactatcacaagaatactccttagccacttcaattg

SEQ ID NO: 117913 - DNA, 100 bp, Homo sapiens
gcaggcgcgacgtgcggctcgcagaacggcgagtagcggagcgggacccgctatcactggggtgatcctgctggctgttggagtctggggcaaacttact

SEQ ID NO: 117914 - DNA, 100 bp, Homo sapiens
taatgagagcagcaggatcagatggtactgaactttttgatcaggttagatggagtcagatttgaaaatgaaaaaattaatgttattgccaagaacactg

SEQ ID NO: 117915 - DNA, 75 bp, Homo sapiens
cctgctccaggaatgggacctcgagtcactgtgatgatatcatcaagttgaatcgaaaggaagggaagaagcaga

SEQ ID NO: 117916 - DNA, 90 bp, Homo sapiens
aaaccctaatgctcctatgttaccgccacctaaaaacaaagaggattttgagaagctgagatctgtatctgtggacctgaatgttgatcc

SEQ ID NO: 117917 - DNA, 75 bp, Homo sapiens
ctgccaagcagccttagccctagtgtagagagaaccatggagtctggcagtaccgccgccagtgaggaggcacgc

SEQ ID NO: 117918 - DNA, 100 bp, Homo sapiens
gtttaattcttcacattccttcttagaagacttgactggtcttacattgctgcatcaagaaacccaagctgctgagatgatagtcttacaatccttacac

SEQ ID NO: 117919 - DNA, 100 bp, Homo sapiens
cggcgaggggggcggccgcctcaccgccctccagaatacccatcatatagcccctgaggtggcatggtgatgtctccatgagggaaccccttcccactca

SEQ ID NO: 117920 - DNA, 50 bp, Homo sapiens
ctcatcacccggctgctggagggccaagatgctgaattatcagggacact

SEQ ID NO: 117921 - DNA, 90 bp, Homo sapiens
gtgctcctggcttcttacgccgtccaggccaagctggccagctcagcgtccctggaagggaagggacaactgaagttcacctcaggacgg

SEQ ID NO: 117922 - DNA, 75 bp, Homo sapiens
attatccaaataaattgcaagcattctatccaaatggctctcccggctgtgatagaccttcagttacagagagag

SEQ ID NO: 117923 - DNA, 74 bp, Homo sapiens
tgcttcgtggcccggcaccgttccgcggacgtgctcggttcacagaatgattgcagagttcaagctgatccctg

SEQ ID NO: 117924 - DNA, 100 bp, Homo sapiens
atattcatctcaaaaacaaaattctgaactcaggacttggcaaaggtgatgtttcaccatgttgcccgtggctaatcttgaactcctgggctcaagcgat

SEQ ID NO: 117925 - DNA, 96 bp, Homo sapiens
ataggcgtgagccaccgtgcctggctgaaggtcccggatgttacaggtcagagccctccagacccccaaggactgtactcactgcccagaaatagc

SEQ ID NO: 117926 - DNA, 51 bp, Homo sapiens
gcgggcccagcgtgccaggcatgggagaacccccagaggacatgactactg

SEQ ID NO: 117927 - DNA, 98 bp, Homo sapiens
agaggcagcagcggagacgcggtgctcctcgggcgccaagcgttctctcctcagaatacatctgaggaacttaatagagaaaaagtaaatgatgaaac

SEQ ID NO: 117928 - DNA, 51 bp, Homo sapiens
tcctagggcttttttgagagtgatgaggagaaaaggcgacctgatattttc

SEQ ID NO: 117929 - DNA, 82 bp, Homo sapiens
gccagcggccgagcgggcggcttcctggcctgggcgctccggtggcggcggagaacaaaactattgtgagtcgaggtatcat

SEQ ID NO: 117930 - DNA, 101 bp, Homo sapiens
attccatccaaatttagattattacaaagcacgaggagcagacctcatgaataaaagccgctgaccctctggtgggcagcatcgccacacagtacatgacc

SEQ ID NO: 117931 - DNA, 87 bp, Homo sapiens
agctgagctgcgaggaaaatggcggcgggagcagagagagatcatcattgcctgaatttagctttgtgactgcaagagcaagaccag

SEQ ID NO: 117932 - DNA, 82 bp, Homo sapiens
acattggcagtgtggtgcagcacagtgaggggctgccctccctgccaccggaagtgactcccctcagcaaggccaaggtggc

SEQ ID NO: 117933 - DNA, 100 bp, Homo sapiens
gtctgcgaaggccgggacccggttccccggcccacagtgggggtgtgcaaacccgagagaactggtaccgggaccctctggtgataatggcatcagtgtt

SEQ ID NO: 117934 - DNA, 74 bp, Homo sapiens
gcaggacagctttgtgatgtaaaagtggctcaccatggggagaatcctgtggacttacggtaactattatgagg

SEQ ID NO: 117935 - DNA, 50 bp, Homo sapiens
ggaaaggcttggaaagagccacattagaaccaagacatttggaggaggtg

SEQ ID NO: 117936 - DNA, 83 bp, Homo sapiens
cttcctgcagcagaggaactcctataaccaccaccaggatcccatgacagattctgttgtcacgtctccttacagagtttgag

SEQ ID NO: 117937 - DNA, 83 bp, Homo sapiens
ataattgttcgactacactgttcacttacacagtatttaaatggcccagaacattctagtatgccagtagaaaaaaatatcac

SEQ ID NO: 117938 - DNA, 97 bp, Homo sapiens
gggctgtccaggaactgtcggaacagaaccaaaggctattggatcagctcagcagggtgagtccacctgtaggtggaagagccagtccagagaggag

SEQ ID NO: 117939 - DNA, 90 bp, Homo sapiens
gtgacagtaacagtacttgggatcccccagttccaaagtgtcttaaaggttctcaaacaatgccaacaaacatgcctccacctcgtaaac

SEQ ID NO: 117940 - DNA, 75 bp, Homo sapiens
tcttcatttagattggattctgaatatcagaattctgcttggtcagaatcgtgatggcattgtgttcagcactga

SEQ ID NO: 117941 - DNA, 90 bp, Homo sapiens
aaaaacagtcctttctactatggagagaagatgactgaggaggaggtggagaccgttctggcaggacacgaggacagcaacggctgcatc

SEQ ID NO: 117942 - DNA, 75 bp, Homo sapiens
ctgcgcctgcctgctccgccccagacctgtcggcgaaaggatgaagtggccattctgcctgcccctcagaacctc

SEQ ID NO: 117943 - DNA, 100 bp, Homo sapiens
ccacggcgcagacgcgggcgagctgcggctcggacgccagcggacacgcgggcgagagacgtctcccacaacctgctccgggcgctggacgttgggctcc

SEQ ID NO: 117944 - DNA, 74 bp, Homo sapiens
taagcctgatctaacccctagaaacaggatggctggctgtggtgaaattgatcattcaataaacatgcttccta

SEQ ID NO: 117945 - DNA, 97 bp, Homo sapiens
ctcacctaacaccgcagcagcaaccgggcccggccaggttcggcgttccgtgagtgaacggttctgccattactgcaatagccacatctgtgtgtca

SEQ ID NO: 117946 - DNA, 99 bp, Homo sapiens
ctcggcactgtattctttacctgcttcccaatcccactgatgaggatcagcccatggagtacaagcgcaagctagccagagtttccctggtgcgcaaag

SEQ ID NO: 117947 - DNA, 78 bp, Homo sapiens
gcaaatgaccctgggccccaaggctccgaacacccgcccctctgctccagagtccggcagcgtcttctcttgagggag

SEQ ID NO: 117948 - DNA, 83 bp, Homo sapiens
gaaagaagttgcaaaacactggccatcactggtgcaagctatatttaacggagatcctgatgaagttcgagcactaatattta

SEQ ID NO: 117949 - DNA, 100 bp, Homo sapiens
gtgttttcctcttgatcgggaactcctgcttctccttgcctcgaaatggaccccaactgctcctgctcgcctggatcccatgacagattctgttgtcacg

SEQ ID NO: 117950 - DNA, 75 bp, Homo sapiens
ccgcgctgcgcccttcggccgcctacttcggggatacccacccaccatcccagggtctacaacatccacagccgg

SEQ ID NO: 117951 - DNA, 108 bp, Homo sapiens
ctcatccacaatgatttctccagtgctcatcttgttctcgagttttctctgccatgttgctattgcaggacggaagcccccctccatgcgcctgaaggcccgacccag

SEQ ID NO: 117952 - DNA, 104 bp, Homo sapiens
ccaggctttagattatggggcaccccctcatggaggaattgccttagggttgaatgcaccctcaggcacgaccatggagaaaggtgggaacatacaattggaga

SEQ ID NO: 117953 - DNA, 100 bp, Homo sapiens
agggagcggagcggaacctgcggggcagaggcggcggccgcagcggcgcagctgatagcaggaacaggccatcagcatcagcaaagccatcaacacccag

SEQ ID NO: 117954 - DNA, 75 bp, Homo sapiens
gggcagaatacagagatatggaatcaggtgcagagatggcagcggttctgaggcaagagtactgaaatttgcttt

SEQ ID NO: 117955 - DNA, 89 bp, Homo sapiens
tcttcacccaggccctggagtgcatgcgcaggtgcgagaagatgtactaaattcattgaataacaactttcttcaaacgctaaatcaag

SEQ ID NO: 117956 - DNA, 100 bp, Homo sapiens
tcggctgagagcccacaggcccccacaggaggtcaatcactacaaggggaagaactaccccatcatgaatctgcatgaacggactctgagcgtgctggcc

SEQ ID NO: 117957 - DNA, 75 bp, Homo sapiens
aggctgctattgaaagagagtatgcacaggttaatttggagtggcccctggagtcagtttcctacaccatccgag

SEQ ID NO: 117958 - DNA, 100 bp, Homo sapiens
gactttactgaagtttatcttattaaatttatgaacttacaaagtgcaaggtatcttggagatggccgcttccatctggagtctgtcatgattgccaacc

SEQ ID NO: 117959 - DNA, 100 bp, Homo sapiens
caccagttgaagcagcatgtcatcgatggagaaaaaaccattatccagaatcccacagaccagcagaatgctatgctggaaaatgagaagaagaagcgtg

SEQ ID NO: 117960 - DNA, 100 bp, Homo sapiens
atttgggggcttcctcactcgtggctttccgaaggctgctggactgttaaagattcactccagtcagtccagtccgcagcaggccgtcctgacgattccc

SEQ ID NO: 117961 - DNA, 82 bp, Homo sapiens
cttgacaaccaagggcctccgtctggatttccaaggaagaatttcctctgaagcaccgccgccaccggcacggccaggccag

SEQ ID NO: 117962 - DNA, 75 bp, Homo sapiens
caacaccgcgaccagattggaaaaggtgaaacggggtctctgggggatccagtgacgtgcccaaccacagagacc

SEQ ID NO: 117963 - DNA, 50 bp, Homo sapiens
tgtctctcggcggcggagtcgatgccagtatggacagaatagcttatgat

SEQ ID NO: 117964 - DNA, 82 bp, Homo sapiens
tgtaaatgtgagtggaagccatgaggccaaaggcagttgtattgctcgagatgctgctgtgcagaagattgagactattatc

SEQ ID NO: 117965 - DNA, 82 bp, Homo sapiens
tcgggttattcgagtgaccgagaccgcggccgggaccgagggtgtggtatgccgcatcctatgctgagttcgtgaaccagaa

SEQ ID NO: 117966 - DNA, 75 bp, Homo sapiens
tatgctttaggaactcaggattctacagatatatgcaaccctggtttcctgaggtttgtgagggttttatgtggc

SEQ ID NO: 117967 - DNA, 100 bp, Homo sapiens
ccaccacgcctggcctcactcaaacagtaaacgagtctattatcctcccagtccacaacgctgaaccgtggctggacgaatgtttgaggtctgttttgca

SEQ ID NO: 117968 - DNA, 98 bp, Homo sapiens
accaaagcacaaggcagaaaggagtggtctcaccaacggctttgggggtgcgaggagcgagcaggagccgggcggcggcctggggaggaaggccacac

SEQ ID NO: 117969 - DNA, 100 bp, Homo sapiens
tgggtcttcgtgctgctcgacgtgctgtgcttactggtcggatccagagaatcacccgctgatggtttttgcccaggcctgaaacaaccagagagctacg

SEQ ID NO: 117970 - DNA, 90 bp, Homo sapiens
ccatgagagccctgctggcgcgcctgcttctctgcgtcctggtcgtgagcgactccaaagcagggactggctgccaacccctccggctac

SEQ ID NO: 117971 - DNA, 90 bp, Homo sapiens
ctccagagccgcccgggagcagggagggctccgctagcccggggggccctccccgcggggcagatgccttatgtttgatcatcggccaag

SEQ ID NO: 117972 - DNA, 82 bp, Homo sapiens
aatctctgcagatggccgtacgtgtgaaggttcacttatgtagttcccatttgttacttcgacgagcagctgtggcatgtct

SEQ ID NO: 117973 - DNA, 90 bp, Homo sapiens
ctggacagacagctactccacgtgcaatggaggcaagtgaggcctatctggttggcctttttgaagacaccaacctgtgtgctatccatg

SEQ ID NO: 117974 - DNA, 73 bp, Homo sapiens
ggccagctggatgtcctcactcagacctcctgccccccgaggtctgcagtctcctgaacccagcagccatcta

SEQ ID NO: 117975 - DNA, 50 bp, Homo sapiens
ctggaacacacatcagtcacgtatgaaagtatcatcgccactctgtgtga

SEQ ID NO: 117976 - DNA, 88 bp, Homo sapiens
gagaaccagccgactggagcaggcagcagcccaggctgccagctgttggtatatccaggagcttttaatctgaccactggaccagccc

SEQ ID NO: 117977 - DNA, 82 bp, Homo sapiens
gatcacttggattcagtcgagtttgctttgctccgtgggaactgcaccagagctggaggtcaaaatgcagatcttcgtgaaa

SEQ ID NO: 117978 - DNA, 50 bp, Homo sapiens
agcggttctctaccctgtaaagttcagtgaattctacagtcttggtgaag

SEQ ID NO: 117979 - DNA, 75 bp, Homo sapiens
gccgagcagctggcccggctgggcccggggcgcgcagctgcccgccggggcgggcaacaacgaactgtctacaga

SEQ ID NO: 117980 - DNA, 100 bp, Homo sapiens
tgaagcctgcctacagttttcacaaatctgaaacatgacagctgccctacaggcagctctgaagaacccccctatcaacaccaagagtcaggcagtgaag

SEQ ID NO: 117981 - DNA, 100 bp, Homo sapiens
gtgacttgcagtcatcatccattaccacaaaattagcatcagaggctccttgaaatgctagatacagagaaggaactgttaaaagaaaaaataaaggaag

SEQ ID NO: 117982 - DNA, 99 bp, Homo sapiens
catgcagccccttgatcttagacttctcagcttctagaactgattctcagcaagttacagaagtatctttgacaactcttgtgaactttgtggacatta

SEQ ID NO: 117983 - DNA, 90 bp, Homo sapiens
agcctcgcctgggttctggaggctgcggggccatcgctccagtgaaggtggtgtttttaaggctcatcttactttcccaaaagattatcc

SEQ ID NO: 117984 - DNA, 74 bp, Homo sapiens
ccaggtgtctttctaacgtggagcagtgcttggagcatgaagctgaaccttagccggccgatcgaggagcaggg

SEQ ID NO: 117985 - DNA, 75 bp, Homo sapiens
cccgtggctatgccttcatcgagtacgaacacgagcgagacatgcactgagggagccatggatttgctgcgggag

SEQ ID NO: 117986 - DNA, 75 bp, Homo sapiens
gtggaagcaggactgcgccgcgtcttcctcaaggtgactaataaaggtaccagaagaatatggctgcacaaatac

SEQ ID NO: 117987 - DNA, 75 bp, Homo sapiens
gaggaatcacgctcggaaacaatggttggaatcgaagcctcttaaaatggcagatgacttggacttcgagacagg

SEQ ID NO: 117988 - DNA, 74 bp, Homo sapiens
gaacaggagttccgatcgacccggtaccaagaaggggagtgcccgcggcagaaccagaagagtgtgttaattgc

SEQ ID NO: 117989 - DNA, 74 bp, Homo sapiens
gcggagagcggcctgcgggcgatcgggccgagaaaggacccaggagcgataacagtaaatcaaataagatattt

SEQ ID NO: 117990 - DNA, 90 bp, Homo sapiens
ctcgggtgcctgcacctcggccgtcccggcgcccctggggacgccgccctcccgggtgaatctggattgggaaagtcgacattaatcaac

SEQ ID NO: 117991 - DNA, 74 bp, Homo sapiens
cggatgccctgcagtacctgcagaaggtctctggagacatcttcagcagctgagctgcccctcctggacctgat

SEQ ID NO: 117992 - DNA, 100 bp, Homo sapiens
gtacgataccgaagcgggctgtgtgccccttctccacccagaggattttttatcaagcagaaatgcatcgaacaacgagaatcaagatcactgagctaaa

SEQ ID NO: 117993 - DNA, 60 bp, Homo sapiens
aatatggcaaagaaacctattctgaggtgcggccggccggacggacctactacgactgcg

SEQ ID NO: 117994 - DNA, 101 bp, Homo sapiens
tgaaccttgggtgatttgttctgtatcagaagacaatatcatgcaagtgtggcaaatggagaatggtgttgaacgcgtgtgtcctgagagcctgctgcagt

SEQ ID NO: 117995 - DNA, 83 bp, Homo sapiens
ctgcctggctagccggcgacttgagtgacgaggtttccaggcctgaggtgcccgccctggccccaggagaatgaaccagccgc

SEQ ID NO: 117996 - DNA, 100 bp, Homo sapiens
agaagatgaagacaatgttctcaaagcatttacagtacctaaaaacaggtccctggcgagccccttgcaggacggcatcagaattaatgtaactacactg

SEQ ID NO: 117997 - DNA, 100 bp, Homo sapiens
gccaaactgtccaaggctttggcagcttgttagcagtggcacaagatcttacagaggatgaagaaacagtagaagattccataattgaggatgaagatga

SEQ ID NO: 117998 - DNA, 101 bp, Homo sapiens
catttacttaacacatcatgaaggctagtttggatgtggaggggaatagactccatctatccatatgaggcagtttggtggttatgccaaggaagcagact

SEQ ID NO: 117999 - DNA, 80 bp, Homo sapiens
ctgatttttatattttattcctcttcctatccaatccctgccttttgagtccaggtgttggcctgtgagtgttattcccg

SEQ ID NO: 118000 - DNA, 90 bp, Homo sapiens
gagcagttgaagaagtgaagaaattattggtacctgcaagtgatcagcagctggactgtgccttggacctaatgaggcgcctgcctcccc

SEQ ID NO: 118001 - DNA, 100 bp, Homo sapiens
ctgaaacctaactccaaagtgttatcgactcgagttacaaacgtcttaatgaaaggccgagggggacggcaagatgcacatcaccctctgtgacttcatc

SEQ ID NO: 118002 - DNA, 89 bp, Homo sapiens
caacaatttgaaatggcctgctcacctgatgcagtcgtctctccgtcttccgctttcttaaggtctgtactatactggcaattgctgga

SEQ ID NO: 118003 - DNA, 75 bp, Homo sapiens
gggatgaacagacaaaccccacaagcactgcatacgaaaaagaggaatccagtcgggctcggtggctcacaccta

SEQ ID NO: 118004 - DNA, 100 bp, Homo sapiens
aggacccaacctcaatgaaaccagcattgtgtctggtggctatgggggctctggtgatggactcatccccacagcaaaccagtccagctacgggggccca

SEQ ID NO: 118005 - DNA, 50 bp, Homo sapiens
gtcagccttcccagtagctgggaccacagatacaaactggactctcagga

SEQ ID NO: 118006 - DNA, 82 bp, Homo sapiens
tgggatacgacccctatcaggaaatattcgagtggcaactgcagcctatatgaacccaatagcaatggcgagatcaaggggt

SEQ ID NO: 118007 - DNA, 75 bp, Homo sapiens
cgtgtctgcagctagtgtgtcaactcagcgtttctcctctcgtccctggtctgggaggggctgaacgtggtgaag

SEQ ID NO: 118008 - DNA, 82 bp, Homo sapiens
gtggacagtgacagcgatgctgaggatcgaggaacgttgtctgtttggtgccctggttgtcagatgttggaaagcagtagga

SEQ ID NO: 118009 - DNA, 100 bp, Homo sapiens
gactcacactgctgtctctgtatatgttctgtgagaacaactctgctcatggtgattacatgcaaaataacgagagcagcttaatagagcaagctccaat

SEQ ID NO: 118010 - DNA, 100 bp, Homo sapiens
cgttcttggcagaaattatattttccagcccgtgtctgcaggagtacatcgatgcccaccctgagaccatcgtcctggacccgctccctgccatcagaac

SEQ ID NO: 118011 - DNA, 75 bp, Homo sapiens
tgagaaaaggcctaagaattttggcattgaactaaagatgactcagagccatctggagaagaaacagtagaaagg

SEQ ID NO: 118012 - DNA, 82 bp, Homo sapiens
tcctaagaacgccaacaggaaatatttttggagggtaactaagatggtgaccacctcgtctgtacaggcttctgattgttac

SEQ ID NO: 118013 - DNA, 100 bp, Homo sapiens
cttgtgccctctcgcttcctgacgctcctggcgcatctggtggtcgtcatcaccttattctggtcccggcaaatggcggatgacgccggtgcagcggggg

SEQ ID NO: 118014 - DNA, 83 bp, Homo sapiens
ggtctgcaaatgaagagtccagaaaagaagcgaaggaagtcaaatactcagggcacacgtgtttcacgttgacaggtttgctt

SEQ ID NO: 118015 - DNA, 75 bp, Homo sapiens
ctggaggatagcgttacacttggtccgatgcaagttttttgttccaaagcaaatttttcagaacataaaacaaga

SEQ ID NO: 118016 - DNA, 100 bp, Homo sapiens
tgatgtgagagatgaacagcagatcagtgctgcagtggagaaagccatcaagaaatttggagaggtcctgcttgaagctttgttcctcaccgtggatccc

SEQ ID NO: 118017 - DNA, 83 bp, Homo sapiens
attcgagggcagccggcgggaggaacgctcactgtcagcgcctggaaacttgctcacgtgaaaggtgtagcagtcactcggcc

SEQ ID NO: 118018 - DNA, 75 bp, Homo sapiens
ggtgtaccaggcgaagctggccgagcaggctgagcgatacgacggttgatgataattagaagcatgctttccact

SEQ ID NO: 118019 - DNA, 102 bp, Homo sapiens
cacaatggaaggctttcaccaaacctgaagaagcctgcagcttcattttgaggacatctggaggacctgttgatgctagttcagagtatcagcaagagctgg

SEQ ID NO: 118020 - DNA, 83 bp, Homo sapiens
gaaggggtctagatgtaaatgtcagtggaaaggagagctaccatcactaaggttctccggaagaaacggcgtttagagcaaca

SEQ ID NO: 118021 - DNA, 75 bp, Homo sapiens
gcccggggcgaggcagggccagcagcaggcgggagggggatatgagactttctactcggaatatcctgagtgttg

SEQ ID NO: 118022 - DNA, 89 bp, Homo sapiens
gggctgttgaaggcagcgaggaagagcggccagttaaacctgtcgggtagaaacctcagtgaaggagcgagaacccgagcagcgccatg

SEQ ID NO: 118023 - DNA, 75 bp, Homo sapiens
tgggtgctgggacttcccgtccgcggcgtggaggacatttatgcagtgtgtgattctttctaaaacaactccctg

SEQ ID NO: 118024 - DNA, 82 bp, Homo sapiens
cccggaccctggaagagaagagggtggctaatgattaaggtgacttaagagattaaaattaatttggttgctgttggttctg

SEQ ID NO: 118025 - DNA, 100 bp, Homo sapiens
agcacggagagaagctaagaagtctttcaatgatgatgctatgctgatcgagaagtttgtagacacaccgagactccaaccgggaagactttgacccagc

SEQ ID NO: 118026 - DNA, 74 bp, Homo sapiens
gttcccacaaagagtataagcgagggaagtcgtgcacgaacaccaagggcaaggactctccctctaagcagagc

SEQ ID NO: 118027 - DNA, 83 bp, Homo sapiens
cagagcgcagcgccgagcgcggcccgggcgccatcgagccttggcggcggacgtgcaggttgtgaccgagattcccgacgaga

SEQ ID NO: 118028 - DNA, 101 bp, Homo sapiens
atttctgccaagtacctgaagtcttcccacaactctagcagaagaccacgtggccttaaaccaactgctgcaactctgtgtgcaggatgattctgtgggcc

SEQ ID NO: 118029 - DNA, 90 bp, Homo sapiens
gtcctgggagaatgccccgaagtactgtttacagctcacgattcctgggggaactgtcttactgcagaactacctgaagaagcaggtcac

SEQ ID NO: 118030 - DNA, 121 bp, Homo sapiens
caggaagaacccatcgggcagctacacatcttgaaagagaagctcttcctgtgaggagtcgttcacgcctactgaggagcatgtgttggtggtgcgcctgctgctgaagcacctgcacgcc

SEQ ID NO: 118031 - DNA, 100 bp, Homo sapiens
cgcagcatccaagtcggccctgccatctgcctgcccaaccagttccggtgtgcgagcggccagtgtgtcctcatcaaacagcagtgcgactccttccccg

SEQ ID NO: 118032 - DNA, 83 bp, Homo sapiens
ctgtcttcggtggactccttcggcagtccacccaccgccgccgcctcccaggtgtccttaagtttgctcgcttggtcaagtcc

SEQ ID NO: 118033 - DNA, 83 bp, Homo sapiens
gaagacactccccagggcagaaatagcgaccatggcgagacaatgcagatcttcgtgaagactctgactggtaagaccatcac

SEQ ID NO: 118034 - DNA, 100 bp, Homo sapiens
agaaaagtggctgtcgtgaagacatctgcgtgtgcggggtgcgtgggtgcctggagatgaagctggaaaggcaaagcagagagcagaggttcttcagtcc

SEQ ID NO: 118035 - DNA, 97 bp, Homo sapiens
tcagaagacaatatcatgcaagtgtggcaaatggccctcagtctccgaggaggatctcaaggtcctgttttccagcaatgggggcgtcgtcaaagga

SEQ ID NO: 118036 - DNA, 51 bp, Homo sapiens
gatgcatcccagtgttatgtaaagtttcctccttatgcaactaatgaaatt

SEQ ID NO: 118037 - DNA, 82 bp, Homo sapiens
gggaggaccttctgagtttacctgttgggctcctggctgcgcaggtgctccatacttgcttgcagtgcctacgtggctctgg

SEQ ID NO: 118038 - DNA, 75 bp, Homo sapiens
cccgcctggctgcgagatatacagtggtgaccgaggattttagccacttgcccccagagcagcagcgaaaacggc

SEQ ID NO: 118039 - DNA, 100 bp, Homo sapiens
cgcgtcctcagcgcgaccctggagctggggtcggcagcctctgtgaagaagattttatgtgaagcccctgtggaatctgtggtgcaagtgtctggtacag

SEQ ID NO: 118040 - DNA, 97 bp, Homo sapiens
tggggcctcattttggatatctgtgataaagttggtcagtctcgcactgggttgctcaagaaacagatgtgagagcccagattcgtctgcaatttcg

SEQ ID NO: 118041 - DNA, 89 bp, Homo sapiens
catttctcctattgaggagtcaacgcatttagtaagaagaagattgatgacagaaaagaatggttaacaaattttatggaagaccggag

SEQ ID NO: 118042 - DNA, 90 bp, Homo sapiens
gtcattgcggggggtaccatgcagccgatggacgaggtgggtcgcatcctctgtaacctgtgcggtgtggtttctggaggggtggtctgt

SEQ ID NO: 118043 - DNA, 100 bp, Homo sapiens
tgagtacctgaaccggcacctgcacacctggatccaggataacggaggctgggaatatatgcagaacatgtcctgcggcccaagaatcttggacttgcac

SEQ ID NO: 118044 - DNA, 82 bp, Homo sapiens
cttggtaacctcgtggaggggatggatttccataagttttactttgagaatcagttgcatgctgagaatttgaaaaatgaag

SEQ ID NO: 118045 - DNA, 101 bp, Homo sapiens
ttcggttggcgcagcagccacaccacaaccaggcgaagcagcacttttcaggattagaagaggctgtgtatagaaacatacaagcttgcaaggagcttgcc

SEQ ID NO: 118046 - DNA, 90 bp, Homo sapiens
taaagggagattacacagaagcaaaagccttgatagcatggatttctgtgagctcactgaagcgagcagctgcaaagcatctaatagaac

SEQ ID NO: 118047 - DNA, 90 bp, Homo sapiens
ctttggccagcaccgtcactctcactgccattgccgagagtcctgttattgagggactgctgagatgtcctctattcttgaagagcgtat

SEQ ID NO: 118048 - DNA, 74 bp, Homo sapiens
ttactgggtaacattgaggaaacctagccctgtctattcatttggatacttggcatatcgaaattttatgattg

SEQ ID NO: 118049 - DNA, 100 bp, Homo sapiens
ccggcgggtctctgtgagagatccaggtagatggtgaacggccccggcagctgagggcagcagcaagatgaagagcgacgtcggcagctgagagagagag

SEQ ID NO: 118050 - DNA, 76 bp, Homo sapiens
gcctgcaggtctctgtcgagcagcggacgccggtctctgttccgcaggatggttcaaaccttgtactactcagctg

SEQ ID NO: 118051 - DNA, 101 bp, Homo sapiens
tggcgctcaacaagaatcactcggagggcggcggagtgatcgtcaataacaccgagaggcagaagtcaattcatctggaaagactatctctgagtcagact

SEQ ID NO: 118052 - DNA, 83 bp, Homo sapiens
gcaccatggaggacgtgaagctggagttcccttcccttccacagtgcaaggaagacgccgagatttttaagaagaagccagac

SEQ ID NO: 118053 - DNA, 100 bp, Homo sapiens
gcacggcagcagtgggcatacagaggcagtcgggacccgtctggaagagcctccgcccggggaatgctccaaaatgggaagaagtttgattcatccagag

SEQ ID NO: 118054 - DNA, 50 bp, Homo sapiens
gctaacccggcctctggacaagaggcagagcatcaaccccaagttggcgg

SEQ ID NO: 118055 - DNA, 100 bp, Homo sapiens
gggacgtgtaccctgtctaccagcctgtggcctgactccccttcactgtgcagtcatagcccacaatgctgtggtccatgaactccagagaaatcaacag

SEQ ID NO: 118056 - DNA, 75 bp, Homo sapiens
ggaacaatcaattggctgacttgttcaagatgttatcagatacaggctagttccaaaggtttattttcctgagca

SEQ ID NO: 118057 - DNA, 90 bp, Homo sapiens
cattccgaccttctgccttcacagttggttaccaaggaagaccccaaagcactggctgttgccttgaactgggacataaagaagacggag

SEQ ID NO: 118058 - DNA, 96 bp, Homo sapiens
caaaagccaagaggaggacagttcgctacacagcaatgcatcgagggtgagatgttagataacatagagttgaatgtcatgcacacagtggaccac

SEQ ID NO: 118059 - DNA, 75 bp, Homo sapiens
atccgcaggcgcaaggcttcaggcgacccgtactgggcctactctggcagttgcagtggtgcagaatggctgacc

SEQ ID NO: 118060 - DNA, 100 bp, Homo sapiens
gccgtggcgtcccccatggacgacgggtttgtgagcctggactcgccctcctatgtcctgtacagatatgttgatgatgtgatcagccgcattgacagga

SEQ ID NO: 118061 - DNA, 100 bp, Homo sapiens
gattttgggactcgcctttgccctggcaaacactggaatcctactttttctgttgaagaaattgtggatattggagcatttgctccagaagacatccata

SEQ ID NO: 118062 - DNA, 100 bp, Homo sapiens
tttatgtcacctcggtaccctggaggtccaaggcccccattgaggatacctaatcagttctaggcctgattcttcactacctgagacgtctaaaaaggag

SEQ ID NO: 118063 - DNA, 123 bp, Homo sapiens
caaaagccaagaggaggacagttcgctacacagcaatgcatcgagatactgagccttcataagggttgactacctcagatttgctgcactcattgtggacttcatgtggatcacaacttctgg

SEQ ID NO: 118064 - DNA, 138 bp, Homo sapiens
ttggggctgtgggacttcgaaggagggctctcctgtctgccaccatcctgggttgacaattctacacaaggaggagctgtggagtccaagtgtgactgccaagaggaatccagcaaagccaaaaagcccaagcatgta

SEQ ID NO: 118065 - DNA, 50 bp, Homo sapiens
ccccatcaagggaatgaacttcacatgaacgagataattgggagagacat

SEQ ID NO: 118066 - DNA, 90 bp, Homo sapiens
cccagagacaacgagatgaactaggcggggtttcaccatgttgcccagactggtcttgaactcctgagcttaagcaatccacctgcctcg

SEQ ID NO: 118067 - DNA, 100 bp, Homo sapiens
gggaaggtgaacagtgtggcccgccatgttcttctccgcggcgctccgggcccgggcggctggcctcaccgcccactggctgatcttgcatctttaatgg

SEQ ID NO: 118068 - DNA, 75 bp, Homo sapiens
ttcccctgagcctcagcacctgcttgtttggaagatgagtgatgtgtctgcaggaggagccactgtttttcctga

SEQ ID NO: 118069 - DNA, 100 bp, Homo sapiens
gacgcctccattgtttgaccacaacaagggccggattctcacccaggaagtgtttggattgtgagctatttcagaactgttctcaggactcattatttta

SEQ ID NO: 118070 - DNA, 100 bp, Homo sapiens
cgtgaaggggaagaggcccaccctggagtaaccctcactggagaatccagagatgaggaaactgagacccagaaaggtggaagcacttgtctaaggtcac

SEQ ID NO: 118071 - DNA, 96 bp, Homo sapiens
actttgtgattcaggagaactggtcgccatcaagaaagtattgcaggacaagagatttaaggttgcacgttttcaaaaaatacctaatggtgaaaa

SEQ ID NO: 118072 - DNA, 50 bp, Homo sapiens
gggaggcgcggcgagggcgccagactggtgaattttcagctcgtttcctt

SEQ ID NO: 118073 - DNA, 50 bp, Homo sapiens
ctcttatcccggaagctaaacagtggagattcccaacttcttctggagcc

SEQ ID NO: 118074 - DNA, 75 bp, Homo sapiens
ttcagctcctctgtgtttgccgcctgggtggtggctaatgccgtagcggcattatctgaaatcagtgagtctcac

SEQ ID NO: 118075 - DNA, 75 bp, Homo sapiens
ttgcagtgcaaacacctgatcaaggaagggaagtggaaatttaatggagccaccatttcagaaccaaaagaaatt

SEQ ID NO: 118076 - DNA, 75 bp, Homo sapiens
tcaccacctgtgcagcagacatccaacggcagagaggagaggagacgccgtgagcgggacgaccagatgtaccga

SEQ ID NO: 118077 - DNA, 122 bp, Homo sapiens
cactggcccgaggcgtctcggggatcttcgtgtggactgccctggtgctcacctgccaccaggcgaggccttcttgggcagctttgtggccagcgggatggggccctcggcctcgtcccatg

SEQ ID NO: 118078 - DNA, 100 bp, Homo sapiens
tccggccccaggcctaccccagtcacggacgcccgtgatgctgatgagcgagagaagtggatccatgccttagaagaaacaattcttcgacatactctcc

SEQ ID NO: 118079 - DNA, 83 bp, Homo sapiens
cttgtttcttatatgtgatgccattccagcactggactcatggaggctgagcatttattcagcggcttctacgctccggcact

SEQ ID NO: 118080 - DNA, 50 bp, Homo sapiens
caaatttagagaaacctcggcaggcctttttgcaaatgtgtaacttgcct

SEQ ID NO: 118081 - DNA, 75 bp, Homo sapiens
gctgcacccccaatgggcaccccactctgcaggaccggccagccttgcagctgtatgatccaggagctcgcttcc

SEQ ID NO: 118082 - DNA, 82 bp, Homo sapiens
cgtcgctgttgctgccgccatacgcgctctccctgtttaggtgtggcttggcgttggccctcaacaagctctcccagtattt

SEQ ID NO: 118083 - DNA, 75 bp, Homo sapiens
gcattcttcatctaaagataaggttttgcacactagggaccaagaagccctcggggacactgctgagaaaagact

SEQ ID NO: 118084 - DNA, 74 bp, Homo sapiens
acccacccatttgagtttgacttctatctgtgcagccacgcaggcatccaggctccttctcctgaaaaagccga

SEQ ID NO: 118085 - DNA, 89 bp, Homo sapiens
aaggtgcaagactgtccgtgtggaccctgactcacagatatatggtacatttgctggagttggctgtgactttcattgagagattagaa

SEQ ID NO: 118086 - DNA, 100 bp, Homo sapiens
agcgagctgagtggttgtgtggtcgcgtctcggaaaccggtagcgcttgcagcatgggcttatttcaaaacctttgtccctcagttccaggaggcagcat

SEQ ID NO: 118087 - DNA, 87 bp, Homo sapiens
gcgcaggacttctcctggcggcgctgcggatccagggggtcggctgccaggtacagtgaagctgtggtctaccaatctagacaactc

SEQ ID NO: 118088 - DNA, 75 bp, Homo sapiens
agcggcttatcgaacagagccgggagttcaagaagaacactccagaggtaagaatgattgatgttggctgatatt

SEQ ID NO: 118089 - DNA, 75 bp, Homo sapiens
accaacagtatggaagagactctgatgcaaataggcttgcaccctcacgacatgctctctctctctccctctcct

SEQ ID NO: 118090 - DNA, 100 bp, Homo sapiens
aacgcggcaatggtctcatcaaggtgaacgggcggcccctggagatgattgagccgcgcacgctacagtacaaggtctagcacataccgctccaagggct

SEQ ID NO: 118091 - DNA, 101 bp, Homo sapiens
gtcaattcgacggagctggatgaactcattcaggtccacactacctttatgagatgtaacactcactgagaaggtctgcagcttcattcctgaagtcagca

SEQ ID NO: 118092 - DNA, 100 bp, Homo sapiens
cacagcaatggaggaaacagctatatgggaacaacatacagtgacgcttcacagggctggagtgagacagctctacgtacagattgactttgcagccatg

SEQ ID NO: 118093 - DNA, 74 bp, Homo sapiens
gctaggccagcggctcggcggtgagatcgtcagcgctgactccatgcaggtggtgccaccaccacaacagaatg

SEQ ID NO: 118094 - DNA, 100 bp, Homo sapiens
tttgtttgccgaagtgacccccacaacgatgcgtctcctggatgggatttttcaagccacattcaattgataggatgaaaaaatttaagagaaggctatc

SEQ ID NO: 118095 - DNA, 100 bp, Homo sapiens
caaaataaccacttaccccttctcaccgaggaagagcgggagaaagggcgcagacggggaagcggagccaacatgccagtggcccggagctgggtttgtc

SEQ ID NO: 118096 - DNA, 96 bp, Homo sapiens
gcctggcatctctctctcccgataaactcatcctgaaagtcgctgttgttctcctgctgagcaagaatggaggccccactggtgagtctggatgaa

SEQ ID NO: 118097 - DNA, 75 bp, Homo sapiens
ctacaatgaggcctccaatctgcagtggccttcaagtcacaggacgcagcgattccctgccctcttcggtgttat

SEQ ID NO: 118098 - DNA, 100 bp, Homo sapiens
atgagatgattgccaaacccccagagccccccaagatgaacccagtggtggagccactgtcctggatgctgggcacctggctgtcggacccacctggagc

SEQ ID NO: 118099 - DNA, 98 bp, Homo sapiens
tgcagtcggtgaccgcgcgactcggcgcccgcccgcggtgaaagaactcttttcttctttgggagtcgaatgtaatgtcttggaacttgatcaagttg

SEQ ID NO: 118100 - DNA, 83 bp, Homo sapiens
cctccagcgagaagttgagggagaaaggcgggcccgggaacagaggctgggaggcggcagaatgcagccagaggagggcacag

SEQ ID NO: 118101 - DNA, 75 bp, Homo sapiens
ggttcccgctgtagcaaacgtccgcggcctctcagacgttttggaataatgggactctacaaaggccttgaagcc

SEQ ID NO: 118102 - DNA, 75 bp, Homo sapiens
atttttcctgcagaaaatttcaagcggagtttaagagagctgtgaaagtagcaacaggacaagaactctcaaaca

SEQ ID NO: 118103 - DNA, 100 bp, Homo sapiens
gatcctcttccaaaaccacaaacttgcctacgtcagtaacagccaccaaggttgaccccctgtttacagtgccagcgccaccaccgccgatttccagcag

SEQ ID NO: 118104 - DNA, 83 bp, Homo sapiens
ctactacgtggtgcttggaaaggagagggctgaacccccctcatcgtgtcaagtcaatctccatgacaactttcactgagcct

SEQ ID NO: 118105 - DNA, 100 bp, Homo sapiens
aatgacaagattttaaaaaaatcccatgaggagaaggcattctaatttagcgggacgaccctgggacagtctccactggggcagatccagctgaccatcc

SEQ ID NO: 118106 - DNA, 101 bp, Homo sapiens
cccctcggccgaggcggcgccagacaccaccgcggaccccgccatcgctgcctcggaccccgccaccaagcttcacgaggctgacattgtggtcctaggct

SEQ ID NO: 118107 - DNA, 98 bp, Homo sapiens
caacatcgtgctgtgaaacttcatgacaacctcattatttctgatctagagagtctcctctgagcctccggcctccataagacccaaaacagatgaca

SEQ ID NO: 118108 - DNA, 98 bp, Homo sapiens
taagggcaatgagaatgctaatggagcccctgccatcacactgctaatacgagaaaagatacaggtatccccgtttttacaacagatgttcatgcccc

SEQ ID NO: 118109 - DNA, 100 bp, Homo sapiens
gctggggtggatgaggaggagccggagacgccgcggaggagaccggaccgaagacggaccgtgccgggaagagaaggcggtcaccttctccttactatag

SEQ ID NO: 118110 - DNA, 83 bp, Homo sapiens
gcgacttccttaaagatgtcgaactcagcaaaatggctcctccagagtcaaccgggagaaaaccgagtgactctgatattttt

SEQ ID NO: 118111 - DNA, 88 bp, Homo sapiens
gcctcccccaccaccgcctcatctgtatcctaatacacaggccgccatggcatcagatgaaggcaaactttttgttggagggctgagt

SEQ ID NO: 118112 - DNA, 101 bp, Homo sapiens
atgctcgcttcacggaggcaatagctagccgagctgtaggtaaaacttgcctactgatcagttacacaaccaatgcatttcctggagaatatatccctact

SEQ ID NO: 118113 - DNA, 90 bp, Homo sapiens
accggacagcaattaaacacagaaggaaatacccagactgttactacaacctcgggcgtctgtactgttgcccagaaatggttgaatacc

SEQ ID NO: 118114 - DNA, 90 bp, Homo sapiens
cctgaccgggcacgaggagaaggtgagcggagaattagagtacatacactttgtttgccagtggtaagttcactagcagatgtatatgcg

SEQ ID NO: 118115 - DNA, 113 bp, Homo sapiens
aatgtggtggtgcctatgtgaaactgctttctaaaacaccagaactcaacctggatgagagccactcagagtgggtgtcttgtgtccgcttctcgcccaacagcagcaaccct

SEQ ID NO: 118116 - DNA, 74 bp, Homo sapiens
caaacttcaacagaatgtggcaaccagcttttatcaaaatacaactcaaacctagctactccaatagcaattaa

SEQ ID NO: 118117 - DNA, 90 bp, Homo sapiens
aggcgagctcgcgatgagtggtctcggcaggctcttcgggaagggcattgaagttgatatcgatgtggagcacggagggaaaagaagccg

SEQ ID NO: 118118 - DNA, 51 bp, Homo sapiens
ggagaactacagaaacctcgtctccctggcattcctctgaatattgatttg

SEQ ID NO: 118119 - DNA, 100 bp, Homo sapiens
gaaatcagcaggcacaggaacaagtggacggcctggtccaatggctcctcagccacggaaatgagagaccagggaagatagaaaggtagaagccatcatg

SEQ ID NO: 118120 - DNA, 101 bp, Homo sapiens
cggacccacctggaaccccacctgtcacggagctgctggacgtctccatggagctgggctgtttcctggctggagcgctcgtctcctctcagggccccgtg

SEQ ID NO: 118121 - DNA, 82 bp, Homo sapiens
tttaaggtgaaaacaatttcagtggatggaaataaggctaaacttgcaatatggtgagaaagatcagtctaaagaaaaggag

SEQ ID NO: 118122 - DNA, 111 bp, Homo sapiens
gaggccgccgccgccccggctgccgcctctggccccaaccagatgtccttcaccttcgcctctcccacgcaggtgctggacgtcattgctcctccttatacctctgacttc

SEQ ID NO: 118123 - DNA, 98 bp, Homo sapiens
ggcgaccaactcggcaggcacacgttactcagcccctgcgaacctgtatgtgcgagattcctgtctgactaaagggacctcaaaaaggagggaaaatg

SEQ ID NO: 118124 - DNA, 51 bp, Homo sapiens
tcctaatccctagccactatggcgagaaccactgtctctgatcaacgtgcg

SEQ ID NO: 118125 - DNA, 100 bp, Homo sapiens
aggaggaagatggcgggacggctgccggcctgtgtggtggactgtggcacgggcttttgctctgcatgcctgcaggaatgtctgaagccgaagaagcctg

SEQ ID NO: 118126 - DNA, 98 bp, Homo sapiens
cgctagcttcggagtctcccgcgcgcacctcagccgcctcctagcggcgcggcgctcgctcctacggcactgaaagtaaggcaagcagatatcaccag

SEQ ID NO: 118127 - DNA, 73 bp, Homo sapiens
ttcaagcttaggaccacccaccatgcctatccaggttggcaacattgtacaagtcacccagccagaaggaatg

SEQ ID NO: 118128 - DNA, 88 bp, Homo sapiens
tgtgcagatgctttcctagacactgcagccaaggacacagaggctcagagagtggtaagcatccgtggcattcaagacgaagatcccc

SEQ ID NO: 118129 - DNA, 90 bp, Homo sapiens
ccgcctcttggtttgcgtcctgcactgaaaggaaatgacggattttatgtctttggtggacttgggaaagaggttgctagaagcagcaag

SEQ ID NO: 118130 - DNA, 100 bp, Homo sapiens
ctggaccgtgagagcatcaagctcgtgtccatcggtgattacgtttttgaagaagaaggacaagttcatcagcctggtgttgaagcacatcggcacctca

SEQ ID NO: 118131 - DNA, 73 bp, Homo sapiens
atgaagttgttcattgtttgtcaccacaaaaaggacaggaactttgcaagttaatgaatctttggacagagag

SEQ ID NO: 118132 - DNA, 100 bp, Homo sapiens
catcctccaaggagttcaatcacttggcgtgacttcactacttttaagcaaaagagtcttgggcgtctttggtactggcttttttaggggtctgcctggg

SEQ ID NO: 118133 - DNA, 75 bp, Homo sapiens
cagagacacacgtcgccttggcgcaacaatcttatgatgtaatcagcgcgatttcacttcctgaatttcgatgaa

SEQ ID NO: 118134 - DNA, 71 bp, Homo sapiens
agctgcggacccagggctttggaggttaccgcagtgccattggattcttactgcaatgaccgaagtgcaga

SEQ ID NO: 118135 - DNA, 75 bp, Homo sapiens
tctgggtgcccgtggaccacaggccctcgttgcccagatttgcattaaaatcctcccctactgaaagaaacggag

SEQ ID NO: 118136 - DNA, 82 bp, Homo sapiens
tcgggttattcgagtgaccgagaccgcggccgggaccgaggttgatattcactgatggactccaaagaatcattaactcctg

SEQ ID NO: 118137 - DNA, 73 bp, Homo sapiens
gcaggctcaggtgcagccgctgaactgaaaagctccatcattggcaagaagaagccagcagcagctaagaaag

SEQ ID NO: 118138 - DNA, 132 bp, Homo sapiens
caggacgggtccatccatcgcataagagcaaagaatactattgttgccacaggaactggaaagagaactcatttgggacttataatggatggctggaactcaatgatacgatattataagaacaacttttcc

SEQ ID NO: 118139 - DNA, 96 bp, Homo sapiens
gtcctattatgatgggtaaggcggagaatcaggatttaaatgaagatcatgatgccaaaatggctattcatatgaaaaggaagcaatggaaaattg

SEQ ID NO: 118140 - DNA, 75 bp, Homo sapiens
acacaatgaaaagggaggaaactcagaaaagcgtaagcttgctcaggagaagctaaaacttacttatgaggaaaa

SEQ ID NO: 118141 - DNA, 75 bp, Homo sapiens
gagctagggctggagcctctccagcctcccgcgaaggttgcacgttttcaaaaaatacctaatggtgaaaatgag

SEQ ID NO: 118142 - DNA, 110 bp, Homo sapiens
ccctttcaactctacttcaacccgcaccttgtgttccggaagttccaggtgagaagccctaccactgcaactgggacggctgcggctggaagtttgcgcgctcagacgag

SEQ ID NO: 118143 - DNA, 73 bp, Homo sapiens
ggatctggaggagcagttgtctgatgaagagaagatgtttactgaactgcaacagatgaggcaacagttacca

SEQ ID NO: 118144 - DNA, 98 bp, Homo sapiens
aatgttcagagactgaccttctatggattcctcatggctctctcaaagcaccgtggaatcaaccaagccctcgatgtatcagttgagagtgaactggc

SEQ ID NO: 118145 - DNA, 100 bp, Homo sapiens
ctgctttaaccatcgaaaatgaggcccgccaagctgccccctgtgtgctattctttgatgagctggattcgattgccaaggctcgtggaggtaacattgg

SEQ ID NO: 118146 - DNA, 75 bp, Homo sapiens
ggacggtacttctgccactgctgctccgtggagatcgtcccgcgcctgccgggggatatgagactttctactcgg

SEQ ID NO: 118147 - DNA, 83 bp, Homo sapiens
gctggcgctgagcctgcagccggccctgccgaacatccagtcatggataaaaatgagctggttcagaaggccaaactggccga

SEQ ID NO: 118148 - DNA, 111 bp, Homo sapiens
gcagatctgaagacctattttactgataagaaaacacatctttacacactaaagacgagttgtactgctgtcacaggaaatggacgctggattacaagcatggcagctcag

SEQ ID NO: 118149 - DNA, 100 bp, Homo sapiens
tttgcttcagcgttctgtggttgtcaacaggcaagaggaggaacgacgtagaagagaggaagagatgatgattcgtcaacgtgagatggaagaacaaatg

SEQ ID NO: 118150 - DNA, 80 bp, Homo sapiens
acgcaggatccggctgccgaaggtcctcgccagttggggaatggcggtcaatgtgtattctacctcgataacccaagaga

SEQ ID NO: 118151 - DNA, 75 bp, Homo sapiens
catgtctggtggctccgcggattataacagatcatcaatgctgtggtactgttgattttattgagtgccctggct

SEQ ID NO: 118152 - DNA, 90 bp, Homo sapiens
cgaggtgcgggctgtgagagggggagcgtggagcctccgaggccgaggatggatgacatggctgtggatagtgatgaggaggtggattat

SEQ ID NO: 118153 - DNA, 100 bp, Homo sapiens
aactgatctctggcagaactgtagcacctcttcctcaggaaatgtccaccactgtttctcatcatcaccaaacgacaagttggatggcttgaggactggt

SEQ ID NO: 118154 - DNA, 75 bp, Homo sapiens
ctgtgggcggtaaacgcggttagtgcaagcatctgggccatcttcaatgtcagaagccaatgacctggccctgag

SEQ ID NO: 118155 - DNA, 100 bp, Homo sapiens
accagtactgctttgaatgtgactgtttccgttgccaaacccaggacaaggacccagatgatgtggtaccagttggccaaagaagagcctggtgttggtg

SEQ ID NO: 118156 - DNA, 75 bp, Homo sapiens
tctttgctcaaggatcccagttttctctggatgacgtgtgtggacgaatgtggaacctcgctctgtggctgtgtt

SEQ ID NO: 118157 - DNA, 73 bp, Homo sapiens
aaggacaaaagccaagaggaggacagttcgctacacagcaatgcatcgaggaagggaaaaggccgaggcatca

SEQ ID NO: 118158 - DNA, 100 bp, Homo sapiens
cagatgctcagctttgctggagagccgctgccccaaaacagctccatggcgagaggcttcagctgggagaggtgactggactgatgttctgttctagatg

SEQ ID NO: 118159 - DNA, 99 bp, Homo sapiens
cagtcggcaaggagagacgtcgctgaggggcttgcctgaagcgagggatctcacattcttgaaggtggcattgaagagcactaagatcggaagatgagt

SEQ ID NO: 118160 - DNA, 75 bp, Homo sapiens
ccgggctggcacatcgagtgctctgccatcgctagaccacctggtggcccatggtagaatggcagaaaaggaggc

SEQ ID NO: 118161 - DNA, 50 bp, Homo sapiens
ttccggccagcttcacgaagtcagagagctggaggagcaccggaattcac

SEQ ID NO: 118162 - DNA, 100 bp, Homo sapiens
gcattgctagagctccagggccggcttcaggaggcccaagacaccacagaagccctccgagcccagtgctttgcagtccgctctctgggctgggtagagg

SEQ ID NO: 118163 - DNA, 101 bp, Homo sapiens
aaataaaaacagaacaggaggtggtagagggcatggatatctctactcgctccaaaggaatgaatctgaagtctgctgcagtaaaacacagaaggctttaa

SEQ ID NO: 118164 - DNA, 100 bp, Homo sapiens
gttggtcggtcccggggtcacccgctacgggaagcaggcctcgccacagatattggggcctgtgaatccatcatgaagaagaaaaccaagcaggatttcc

SEQ ID NO: 118165 - DNA, 90 bp, Homo sapiens
ttagaacccaacatggatttgatcaacctgctcacgatgaactgagcgccaatggacaatatcaatgtcttgctgaactgtccaccagcc

SEQ ID NO: 118166 - DNA, 101 bp, Homo sapiens
tatgtttccacatcggtcagaaaaagatgtggtggaatgggtagcatgaacagtgtgactggaggaatggggatgggactggaccggatgagttccagctt

SEQ ID NO: 118167 - DNA, 50 bp, Homo sapiens
tatgttggctgcctctgctggagaagtgttggtccaggcgcaatgttcag

SEQ ID NO: 118168 - DNA, 50 bp, Homo sapiens
gaacgcgctaaggcaaagcacctgttacttacacgccaagtcaatcatcc

SEQ ID NO: 118169 - DNA, 98 bp, Homo sapiens
gctgttctgcttcctgctgctctgtctcagcgccgcctccctgcttcttaacagcaacatggccaacgccctggccagcgccacttgcgagcgctgca

SEQ ID NO: 118170 - DNA, 100 bp, Homo sapiens
caagccggagcccgagctggaggaagcccccaggtgccaggatctgcccggatccgtctcctacaccgccaccatgccattcggtaacacccacaacaag

SEQ ID NO: 118171 - DNA, 101 bp, Homo sapiens
cctgtcttcagatcttcacagcacagttcctgggaaggtggagccaccagcctctccctgcctgcctagggtagttaaaagacgagtgaatgctctcaaaa

SEQ ID NO: 118172 - DNA, 100 bp, Homo sapiens
cagactagaaattgcaccacagatatatgggttcctcctgacaaggtgatccgggcgggccccgcaggaattttatcccctcaccggcctcacactagta

SEQ ID NO: 118173 - DNA, 100 bp, Homo sapiens
catcaaccgggccgtgccccagatgcccaccgggatggagaaggaggaggaatcgaaatcaatgtggactgaacataaatcacctgatggaaggacttac

SEQ ID NO: 118174 - DNA, 100 bp, Homo sapiens
gctctcgcagaggatgtgttagactcagaatttcaactattgcagaaagtgaagattcacaggagtcagtggatagtgtaactgattcccaaaagcgaag

SEQ ID NO: 118175 - DNA, 50 bp, Homo sapiens
cttctttaaaagactctgagatgacaaccatgagtggaaaaaactaatta

SEQ ID NO: 118176 - DNA, 100 bp, Homo sapiens
cgctggctctgctgctgccgccggcgaaggaggaggcgttgccgggttctgaagaaagtctccaaatacattcaagagcagaatgagaagatctatgctc

SEQ ID NO: 118177 - DNA, 100 bp, Homo sapiens
cagtaccgagtgggcaccgaccgcacgggcttcaccttcaaatacaggacttaaacaggcacaatcaaaaccatctcagtcagaagtcagagcgtggtac

SEQ ID NO: 118178 - DNA, 90 bp, Homo sapiens
ggtgatcagcaccgcgaaagccccaggggccattggaccctacagtaataaaagactagtggccttagtgcccatgcccagtgaccctcc

SEQ ID NO: 118179 - DNA, 82 bp, Homo sapiens
gaagagactcggggccccccagcctccgccaacccagatctgactgcagccatgagcagcaatgagtgcttcaagtgtggac

SEQ ID NO: 118180 - DNA, 99 bp, Homo sapiens
caagaaaaatatcaggatggcgtatatgtgctgcatccccaatatcgaacaagaacagatctcggcccctttccaaacactcctgatgcctcatttgcc

SEQ ID NO: 118181 - DNA, 100 bp, Homo sapiens
ctgatgttgagcagttttgctcccaatatctactttctgtttttttcctatggcattgttgtagacagcccacctgaggatattgaccataaggactcat

SEQ ID NO: 118182 - DNA, 83 bp, Homo sapiens
accctgagagctttattaccagacatgatctttcaggacaagagcaatctttcccatccttagggtcttgtaatagcaggggg

SEQ ID NO: 118183 - DNA, 75 bp, Homo sapiens
gactatgagaactcaacacctccctacaaggaccttcctcccaagccagctgccattcgatttcacatggaagat

SEQ ID NO: 118184 - DNA, 90 bp, Homo sapiens
aaggatttgaagctggcagtctggttccaggaaccagcttgagttagaactaaaacaggaaaaagaaagaagattacaaaacgacaggag

SEQ ID NO: 118185 - DNA, 90 bp, Homo sapiens
ggaattcttctcttcagagaagctagtaaaatggtttgcacttatggaattacatgaatgacagtcttcgaaccaatgtgtttgttcgat

SEQ ID NO: 118186 - DNA, 101 bp, Homo sapiens
tgcagagcagctgaagcaagctgaggagctcaggtgtaaggagctcaagtactccaaggacctgccccagatatccatcatattcatcttcgtgaacgagg

SEQ ID NO: 118187 - DNA, 100 bp, Homo sapiens
cttgcttcattctccaattactttaagatgttgtttgtccatcagaccagatatgggcacggttatgaaatattttgtgttacttgtaacagttcaaaga

SEQ ID NO: 118188 - DNA, 75 bp, Homo sapiens
tggaccaggaggaggttttcaggaccaaaattgtggaaaagtcactctgcagcccctgtcaaagggaacaggaag

SEQ ID NO: 118189 - DNA, 83 bp, Homo sapiens
gtcgggttattcgagtgaccgagaccgcggccgggaccgaggatctctgttgaggagctggcgcggaatctggtcatcaaggt

SEQ ID NO: 118190 - DNA, 75 bp, Homo sapiens
cagatgttgatcactgaaaatgatttatgcaagtttaaggaggaagagcaaaagcaggcagtaagtgaacttcgg

SEQ ID NO: 118191 - DNA, 100 bp, Homo sapiens
ctcagcggaccatgctggctgggagctccgccctggggcttctgctctgctcagtaagactttgaccccgacgcaggcttcagtgattgccgcggatcag

SEQ ID NO: 118192 - DNA, 100 bp, Homo sapiens
ggttattaaggagcttcgcaaggctactgaagcactgaaggtccttatacctttagcatctgtgacacctccaacttctccgactacatccgtggaggca

SEQ ID NO: 118193 - DNA, 80 bp, Homo sapiens
tcaactaagaccaagtcctcgctggactgctcagggtgccagacctcatcgatatcacattggagtcactgccaagtcat

SEQ ID NO: 118194 - DNA, 100 bp, Homo sapiens
ggaaaaactggagagcttcatcaaaaatagtgatagctttgataagctccttttctgggcagtggagggactatagctccatcatctttttcttctcgag

SEQ ID NO: 118195 - DNA, 82 bp, Homo sapiens
gtggagctgcggggccctggcatgaaagagacaagaggagcagcagcggcaccgcccctcaccctggagggtcctgtacaat

SEQ ID NO: 118196 - DNA, 75 bp, Homo sapiens
cccaactatggcattgtcacagacatatctgaagagatggattaagaatgctttggattaaggattgtggagcac

SEQ ID NO: 118197 - DNA, 90 bp, Homo sapiens
cagacaagatggacaccgcggaggaagggcgtctctggccgagcctctttttgtggaaaacgacagcagcagcagtggcctggaagacgc

SEQ ID NO: 118198 - DNA, 100 bp, Homo sapiens
acacccgctgctgcccgcccgctgcctgcctgcctggcatctctctctcccggatgctttgttcttcctgaaggatttcttcacaagtctttctgcagaa

SEQ ID NO: 118199 - DNA, 50 bp, Homo sapiens
agatgaagaaacccagcttgatacgttggaccccaaattacgtgaacttt

SEQ ID NO: 118200 - DNA, 75 bp, Homo sapiens
agcagaggcaggcccagttgaacaacaatgtgaaagatgttgcagaagtgttccagaagtggctgaagatagaag

SEQ ID NO: 118201 - DNA, 100 bp, Homo sapiens
cttagacttggaggaggtatgcctggactgggccagaaacacagtgctctgtgcctatacagtgtacggataaaacagataaacaagaagcgctgtttaa

SEQ ID NO: 118202 - DNA, 100 bp, Homo sapiens
gtcctaccactgacttctcttatggaatacctgctgcagagatttcatgcactgccagtaactccaaccgcagcacgccggcctgctcgcccatcctccg

SEQ ID NO: 118203 - DNA, 98 bp, Homo sapiens
atttgagcccagctgcctggatgccttcccaaacctgaaggacttcatctcccgatttgagttaagtgggcagaccaacatccacctcagcaaaaact

SEQ ID NO: 118204 - DNA, 100 bp, Homo sapiens
cgagctcaagctgctgctgctcggtgatggtaatgcccgaaggagcagacacggtgtccaggcccagtcccgactaccccatgttacccacaattccact

SEQ ID NO: 118205 - DNA, 101 bp, Homo sapiens
cgcgggttgttcacaggcttaactccaagactgtgttcgggagtccttggaactgtggtccatggtaaagttttacagatggagtctcgctctgtcgccca

SEQ ID NO: 118206 - DNA, 50 bp, Homo sapiens
actagcagagaagcaggcgcaactgcctgatcaaccccgtataaccaaag

SEQ ID NO: 118207 - DNA, 82 bp, Homo sapiens
atcttcctgagcagagctctccgggttccccggctcgcggggcccggcgaagggcagtaatttctatgcagcccccgaccca

SEQ ID NO: 118208 - DNA, 100 bp, Homo sapiens
tctcccccctcatccctcaccacagatcccagccagtctctactcagcctggagcaagcacatgattaagtaccggtacatcccgttcacacatgggaag

SEQ ID NO: 118209 - DNA, 83 bp, Homo sapiens
gtggagagcccgtccgacagcgctgagcagcccctgtcaaagggaacaggaagcagtccacggagggtgacgccctagaccca

SEQ ID NO: 118210 - DNA, 73 bp, Homo sapiens
tgatggctccgatgagtccgaggccacttgcaatgggaagcggtctcgagcagaagccccactgaagtgtccc

SEQ ID NO: 118211 - DNA, 82 bp, Homo sapiens
gaagagctgccgtcgctgcagagaccccgctatggctatgaaggatttgggggcagagcacttggcaggtcatgaaggggtc

SEQ ID NO: 118212 - DNA, 117 bp, Homo sapiens
aagaggtcccaatcccccactctttccgccctaatggaggtctccagtttcggtactccaaagattcaggtttactcacgtcatccagcagagaatggaaagtcaaatttcctgaat

SEQ ID NO: 118213 - DNA, 100 bp, Homo sapiens
accaccatgctggccacacggaatttctcagcgaccgtggcagccatgtattacagctactacatgctaccggacggcacttactgcctggcgccgcccc

SEQ ID NO: 118214 - DNA, 100 bp, Homo sapiens
gactttctccagtgactgggaaatccaggaagacagtaggacagcccacctgaggatattgaccataaggactcatatctcattacaagaagcatcatgg

SEQ ID NO: 118215 - DNA, 75 bp, Homo sapiens
catctaggagcatctacccatggacagacatgtcttcccatggagaatatcctccgaatcctaaatctagagctc

SEQ ID NO: 118216 - DNA, 74 bp, Homo sapiens
tatcatcaatgccccgaccttgttagaggagtgcttggactcggcgtgatttttggactctggacgttacaaaa

SEQ ID NO: 118217 - DNA, 90 bp, Homo sapiens
agaatggcccttgtggataagcacaaagtcaagagacagcgattggacagaatttgtgaaggagttccgattctgaagaggcatttgaga

SEQ ID NO: 118218 - DNA, 75 bp, Homo sapiens
ctctcagcttcggagaatggagtcttccatcaatcatatctcacagagtggagactgctgcacggactctggaac

SEQ ID NO: 118219 - DNA, 83 bp, Homo sapiens
ttatactcctcccagtgacgggtctggagtgcgtgggggaccggctgttggcggggccagctctcaatgttgcaagaaaaaat

SEQ ID NO: 118220 - DNA, 82 bp, Homo sapiens
tgtatgaactggacatctcgttccctcccagggggcgacgatggccttctgaggggctgggacaccagggtacccggcaaat

SEQ ID NO: 118221 - DNA, 98 bp, Homo sapiens
aaggacagcttttttcctgcaagagccctaatttgtttagaactgtaatatgcacagttaaaacaacttgtcctctcaggaccttttgcagttagggt

SEQ ID NO: 118222 - DNA, 82 bp, Homo sapiens
actggtttcgtggcctgaccaaggacctccaagatttatgacctgtgtgttgatgccttgagtccaaccttctattttctcc

SEQ ID NO: 118223 - DNA, 74 bp, Homo sapiens
atgttgaaagacttttcaaatctattgttggtggtactctgtgactatgtattgagcaagtcaacaacctacga

SEQ ID NO: 118224 - DNA, 100 bp, Homo sapiens
gcattaatggtgatgaggacagtgctgctgccctcggcctgctctatgactactacaaggagaggcaagagaaagctctgggcatcctgacatacctggg

SEQ ID NO: 118225 - DNA, 99 bp, Homo sapiens
cgcgggacccggaggaccgtatccccagcccactgggctacgcagacaatgcagatcttcgtgaagactctgactggtaagaccatcaccctcgaggtt

SEQ ID NO: 118226 - DNA, 83 bp, Homo sapiens
aggaactggagcgagctccccgacgaggagcgcggcgagatctacgtgccagacggccgaagccctgcagcccacgctacagc

SEQ ID NO: 118227 - DNA, 83 bp, Homo sapiens
catcgtcatcctgctgctgaagatctggaagacgcgctcctgcgccgattcagaccaggatgtagcactcaaacttgcccagg

SEQ ID NO: 118228 - DNA, 90 bp, Homo sapiens
attcagggaataggagctggggagcccttctgcgccacagatgacaacggcaacacgacaagaagtccttggcctctaccgcagcatttt

SEQ ID NO: 118229 - DNA, 100 bp, Homo sapiens
agaagaccaagtacctgcagatcctgacctctctgatgagatggatcgtgatcagggccaaagcggtcagtgagaaggaagtggactctggaaacgacat

SEQ ID NO: 118230 - DNA, 75 bp, Homo sapiens
ccgccactgccgcaggaggcgtgagggaagagcatggaggaaatcaagaaggtgctgctgctggtgctgggctgt

SEQ ID NO: 118231 - DNA, 75 bp, Homo sapiens
ggagggggtgctgagaactgaagtctttgaggagggaactgctcgcagaaagaagaaggtggttcatagaacagc

SEQ ID NO: 118232 - DNA, 100 bp, Homo sapiens
aagtagggaaagtatttcttgctaccaacagtgactataaatatacagatgtagatataatctgtggtgatcacctgttggagcagtatcaaactctaag

SEQ ID NO: 118233 - DNA, 101 bp, Homo sapiens
ctcgccaccatgagagccctgctggcgcgcctgcttctctgcgtcctggtcgtgagcgactccaaaggcctacgcttctcaggggtcaatgacacagattt

SEQ ID NO: 118234 - DNA, 100 bp, Homo sapiens
agttggagtagatgtcggatttgaaaatccaatgtttgcttgtctggaaatggattatgaggtggatgagaatggcaaaattagtcgccttcgtcgagag

SEQ ID NO: 118235 - DNA, 75 bp, Homo sapiens
aacacaggagagatccagcagatcccggaaatgaatggggtgctgaaaggaatgctctcagaatggttttcctcc

SEQ ID NO: 118236 - DNA, 100 bp, Homo sapiens
caaaagacaggtgagacttcgagagccctgtcatcttctaaacagagcagcagcagcagagatgataacatgtttcaggactgactgcattgcacagatg

SEQ ID NO: 118237 - DNA, 90 bp, Homo sapiens
gactgggacctgggaacctactgtggggccgcggccggaccgagcgcctcgacctcggtctgagtactatactggcaattgctggagaag

SEQ ID NO: 118238 - DNA, 75 bp, Homo sapiens
ggggagggcatgttccgtggcctcgcccaggccgacggagaaagtggctcatgccaaagaagaaaaccttagtat

SEQ ID NO: 118239 - DNA, 100 bp, Homo sapiens
tgatggctatgcaccacctgatatcaccaactacctagaggatcaagacataatgggagcatttttagacaagccaaagatggaaaagcataatgcccag

SEQ ID NO: 118240 - DNA, 100 bp, Homo sapiens
tcacagcaacactggaatgacagaaatcatgagtggaggatctcaagtccacattttttggggtgctccaattgctccactgaaaatcacagtatcagaa

SEQ ID NO: 118241 - DNA, 100 bp, Homo sapiens
tgcctttttctttctggaatcagaaggctttgctggcctgaaaaaggaggaaaaggcttctcttttacatcgtactcaggaagaaagaagaaagagagag

SEQ ID NO: 118242 - DNA, 99 bp, Homo sapiens
gcggcggctgcccggggccaacatgaccaggggcctttatcatctgctggactcctggattggttttgttacttctagacgtgtgctgtccacagtgcg

SEQ ID NO: 118243 - DNA, 75 bp, Homo sapiens
agattaccctaaggaaaatgattcatcatcattaattggaggatctgacaacaaactgatttatagacattatgc

SEQ ID NO: 118244 - DNA, 60 bp, Homo sapiens
cggaccctggcctcttgggatgcaaaggtaataatagacgtggatggaatacaactagcc

SEQ ID NO: 118245 - DNA, 98 bp, Homo sapiens
gaagagtagaaagggatattcttaaggaaatgttcccctatgaagcatctacaccaacaggaattagattctacaagggggttgctcctctctggatg

SEQ ID NO: 118246 - DNA, 75 bp, Homo sapiens
gccgcttcaccacttacgaaatcagggtcaagataaacaggggtcacatgacgacagaagccaagagggctgcaa

SEQ ID NO: 118247 - DNA, 90 bp, Homo sapiens
gttggcgggagatgtcgaaccccgggacacgcaggaacggctccagcatcaagatccgtctgacagaacgatgccaacgggactgcaaag

SEQ ID NO: 118248 - DNA, 90 bp, Homo sapiens
gtgccatagagagtctccgggtccctggaaagaacttcgagaaaccaagacctctgaatacttcagcctttcccaccatcctttagacta

SEQ ID NO: 118249 - DNA, 75 bp, Homo sapiens
tccacatcttctatcagctgctggctggagcagatgaacagctgctgacaggtttggatgcatctgctcagacta

SEQ ID NO: 118250 - DNA, 100 bp, Homo sapiens
atgaaggggtctagatgtaaatgtcagtggaaaggagagctaccatcactaagacactaatatctggagctgtggtagaacaacttgatttcctacgaat

SEQ ID NO: 118251 - DNA, 98 bp, Homo sapiens
agagagccctgcactggaacatgatgctggaaaatgaccgtagcatggcttctttggagggtatattacctctctctggaattttacatgggccgaac

SEQ ID NO: 118252 - DNA, 88 bp, Homo sapiens
gaggttttgaagattatgccagtgcagaagcagacccgtgccggccagcgcaccaggttcaaggcaaacgaatgcacgtgcagttgtc

SEQ ID NO: 118253 - DNA, 75 bp, Homo sapiens
gtgaagttctccgccatgaacctgaggggcctcttccaggacttcaacccgagctattgacctgaaaagtggttc

SEQ ID NO: 118254 - DNA, 100 bp, Homo sapiens
tgctgctgccgccccccactccgcctccgggagagaccattcctcaagaattttgtatccaaggcccaaaagtttgttacccaagatgatgaatgctgac

SEQ ID NO: 118255 - DNA, 100 bp, Homo sapiens
cgagaaaagaggaagagcaaccatttgaaccatattggactggctaaggacgatcagctgaaggttcatgggttttaagtgcttgtggctcactgaagct

SEQ ID NO: 118256 - DNA, 75 bp, Homo sapiens
ccttatgttgatatactttttggaaatgagacaattcttccagccctttgtgttttaattcatcacacagatgta

SEQ ID NO: 118257 - DNA, 100 bp, Homo sapiens
tcctcctccaccacctcttgatgaagaggctttcaaagtacaggagagacagcgtctggagaccatcctcagtctctgtgctgaatacacaaagcctgac

SEQ ID NO: 118258 - DNA, 90 bp, Homo sapiens
tgagccgggcctggcggacgcggcgccatcgcagtcagaggatctgaagaggcaaaatgcagtattacaagctgcacaagatgatttggg

SEQ ID NO: 118259 - DNA, 75 bp, Homo sapiens
acatccctgaatcttggtgtttggacataggagattctgaaggaagatttccattaggtaatttgtttaatcagt

SEQ ID NO: 118260 - DNA, 82 bp, Homo sapiens
gcaggagctgaaagcctctaacacccacagatccctctatgactgcaatgtgagttgttgacctcctgtactggagagacat

SEQ ID NO: 118261 - DNA, 95 bp, Homo sapiens
agaaatagtgcagaagatagaggaagtactttctggggtcttagatacagaactacgatataagccaggcagtcgacaagtactttaagcttcct

SEQ ID NO: 118262 - DNA, 90 bp, Homo sapiens
ggagaaggcggcggctctctggtccgcagcggcaacagtaacgaaaaacagggctgccgaagataaccagattggattttaagaagaata

SEQ ID NO: 118263 - DNA, 74 bp, Homo sapiens
gcaaaccataaggatgtttcgttccctgatttctctatgaatcatcatcaagaactctgggagaacttttgaat

SEQ ID NO: 118264 - DNA, 50 bp, Homo sapiens
agcccccagcgcagcggccgcgtgactcgggccagtgtagaggtcctcag

SEQ ID NO: 118265 - DNA, 100 bp, Homo sapiens
attagagattgtgaagaagaatttcgatctccgccctggggtcattgtcagctattacaatttgggtgatgtgagccatgattctgtgaacaagtttctg

SEQ ID NO: 118266 - DNA, 100 bp, Homo sapiens
ccgcatctgcttccaggggccagaacagtttctggcccccaaagacaaaccaagtggagacacagcagctgtatttgaagaaggtggtgatgtggacgat

SEQ ID NO: 118267 - DNA, 115 bp, Homo sapiens
ggcttcctagtgagtcggcggctgatttagaaggaggttcaggctacggtgagccgaagtcaaggcggataagaaggcggcacaagaaaagatgatccagcaggagcatgagcgg

SEQ ID NO: 118268 - DNA, 90 bp, Homo sapiens
cagtacctttggtttcacagaagatctctgccaggcaaggccatcttagagatcctaagtgtgaacgtgaagtccccagccctgctgctg

SEQ ID NO: 118269 - DNA, 100 bp, Homo sapiens
gggaattgctgctttgaggagagtcttgacggcctatgcccaccggaaccccaagattggatactgccagtgtgtagcccacaatgccctggagtgtgca

SEQ ID NO: 118270 - DNA, 98 bp, Homo sapiens
ggactttttgaatttcaagaacagtaaagttggaacacagcagagggtgtgtaataaaatacagatggagatggacacatggatcatttactgccagg

SEQ ID NO: 118271 - DNA, 98 bp, Homo sapiens
cattcctatctttctcccggaagtcaccattggagctcatcagactgaccgtgtcttacatcagttcagagagaaaacaaccctttttgctgcacatg

SEQ ID NO: 118272 - DNA, 75 bp, Homo sapiens
agcctgttggaggaactggcccggaaacaggaggacgtgtggacactgccagcggctgcagccgacttggaatga

SEQ ID NO: 118273 - DNA, 90 bp, Homo sapiens
cgaggcggcgggctggagacatggaccgcggcgagcaaggtaccgcagactcgcccttaagcaccacccgttgaagtcaaatgagccgtc

SEQ ID NO: 118274 - DNA, 50 bp, Homo sapiens
aaatttgattccactgctgggatgacaagatttgagttctgtgaacctgc

SEQ ID NO: 118275 - DNA, 100 bp, Homo sapiens
atgagattgaggctgccttgagggagctagaggccgagggcgtgaagctggagctggccttgaggcgccagagcacccagctcaacattggcaatgtgct

SEQ ID NO: 118276 - DNA, 90 bp, Homo sapiens
gtggtttttcggatcatgtctggtggctccgcggattataacagatgctggctcgtgatttcttagatgaatatatcttcttggctgtag

SEQ ID NO: 118277 - DNA, 75 bp, Homo sapiens
tccgggggcaaggccaaaaagaagaatattgtcctctctggaggttcaaccatgttcagggactttggacgtcgc

SEQ ID NO: 118278 - DNA, 90 bp, Homo sapiens
aatgacagtctccaaattcgcctccatctgtaccatggtctcaagattctgccctccaagaaagtcttgccatgattggataggaccccc

SEQ ID NO: 118279 - DNA, 75 bp, Homo sapiens
cccagattttcagtctgataaccctgtaccgatgggagatgtaccaatggatggtatctctgttgctgatattgg

SEQ ID NO: 118280 - DNA, 100 bp, Homo sapiens
aaacccagtcttcatccacagatgaacttgctagccttggagaatacagagatacccccaaattacagaagacatccccgtgaagactttgaatatgaag

SEQ ID NO: 118281 - DNA, 83 bp, Homo sapiens
gcgaggcttccgcccggcacagggggacggcccacctccatggagacggcccacggcctcgccaccaccagccccacctggcc

SEQ ID NO: 118282 - DNA, 74 bp, Homo sapiens
atgagaaaaagcttggagataaagttgctttttactgattttctccaaaggaacatccggtgcttgccctgcca

SEQ ID NO: 118283 - DNA, 77 bp, Homo sapiens
catgggggtccacactgcaatgtttttgtggaacatggtgtgagcgacgtctcctcaccacagtgctgtgtggtcta

SEQ ID NO: 118284 - DNA, 100 bp, Homo sapiens
gagtgcagaggcatcacctgaaaggaattcattgaagagttgctgtctcccccttttgggggtttagtggcatttgtgaaggaggctgaggctttgattg

SEQ ID NO: 118285 - DNA, 83 bp, Homo sapiens
tccgggtgttcgcggtcggccgccaccaggtcaccctggaagagtcgctggccgaaggtggtatcacggcaacctcacacgcc

SEQ ID NO: 118286 - DNA, 100 bp, Homo sapiens
tttgaaggcatgttgagtgagcaagtgaagaccaatattcaacaggcagcgcagcagcttactgatctggaacaaaaattagctgtagccaaaaatgaac

SEQ ID NO: 118287 - DNA, 83 bp, Homo sapiens
caatgacaaactgacggaaaaggagagagagatgctgaaaacgccattcaacagatgggtggccagtggcttggtggaagaca

SEQ ID NO: 118288 - DNA, 100 bp, Homo sapiens
tctttatcaacttcaggagtttttggtgacagataatagtagaaattggcggtttcgagctgaactggctgaccttaccaataattctaggatcgtagga

SEQ ID NO: 118289 - DNA, 75 bp, Homo sapiens
cctgctactgctggattagcgccagtgatggaatggggagaagatattaaagcagtttcaaaagatgaagcagtg

SEQ ID NO: 118290 - DNA, 82 bp, Homo sapiens
gttttccggggccctctcagcaagaacgggaacaaaactctgctgctctgttaaaagcgaaaatgaaacaattgcctgcggc

SEQ ID NO: 118291 - DNA, 100 bp, Homo sapiens
caaagcttgcgaggtggcgttagaacatggagaaggcgactctgccgtcggtgacgctcatcgtgggctgtggcgtgtcctctctcaccctgctcatgct

SEQ ID NO: 118292 - DNA, 100 bp, Homo sapiens
cagctttcgcctgcatcacactgcaatgccttcaattaagttgcagagttctgatggagagatatttgaagttgatgtggaaattgccaaacaatctgtg

SEQ ID NO: 118293 - DNA, 100 bp, Homo sapiens
agcatgaagcgcaccccgactgccgaggaacgagagcgcgaagctaagggccggtgcataaacttctcccgagttccatctcagtaaaagggaagcagga

SEQ ID NO: 118294 - DNA, 82 bp, Homo sapiens
cctcactctcgctcgccgtttccaggagcacagatttgatggtagagtggtggcaaagcttccttttacccctctttcttac

SEQ ID NO: 118295 - DNA, 75 bp, Homo sapiens
gtccacatgagaggattacctttccaagccaatgcccaagacattataaactgaaaccaatccgtaatctaaatg

SEQ ID NO: 118296 - DNA, 80 bp, Homo sapiens
acctgcaggggaagctgcagctacgctaccaggagatctccaagcgggactccagaacgggtggaactggcacccctccc

SEQ ID NO: 118297 - DNA, 73 bp, Homo sapiens
aacaatgaaaataaaatgctcttaaaacgaatgcaggccttggaggccttttctgattatcagatgcaacaaa

SEQ ID NO: 118298 - DNA, 75 bp, Homo sapiens
tttgagaagttaatgaactctcagcactccatgattctagaacaggctcaaactgctttttctgcaaaccctgcc

SEQ ID NO: 118299 - DNA, 100 bp, Homo sapiens
atcggttatactcgggcagagaaagagtgcaagatagaatatgatgatttcgtagagtgtttgcttcggcagaaaacgtttgtgatggacgcctctgacc

SEQ ID NO: 118300 - DNA, 83 bp, Homo sapiens
atctttagaatctcaaacaagacaacttgagctgaaagcgaaaaactatgctgaccagacttttcatgcaacacccaacactt

SEQ ID NO: 118301 - DNA, 115 bp, Homo sapiens
tttttcagtgttcttggaggtgtggggtgtgagaacttgatcagtttgtgtcagccaccttgttctctaaaggaaagatactattcaagtccagtacatcataatgcagaattct

SEQ ID NO: 118302 - DNA, 97 bp, Homo sapiens
tttgaaattaatcccagacacccgctgatcagagacatgcttcgacgaattaaggaatcagagatcattgatttcttcctgggggcctctctcaagg

SEQ ID NO: 118303 - DNA, 100 bp, Homo sapiens
gacaatggacctgcctgggcatagacttccttaaggttaaaaagatcaagtggcatgagcagccttttggggaaaattggtgccaagaagcagaaaatga

SEQ ID NO: 118304 - DNA, 75 bp, Homo sapiens
cttagcatttgactagacggtatgaatttctaagtaaggtgccttagctggaccaattattgtggagccacatgt

SEQ ID NO: 118305 - DNA, 75 bp, Homo sapiens
cccgaagttgcggattgcagccgagaacgagctcaaccaggaaacaatgtgatgagaaccattcatggggtggga

SEQ ID NO: 118306 - DNA, 100 bp, Homo sapiens
ctccagtcttcctcttgatccatatgtttcagatatccttggaacagaagatcttattgtggaagtgacttccaatgatgctgtgagattttatccctgg

SEQ ID NO: 118307 - DNA, 75 bp, Homo sapiens
agagaaatggagcccttctccaagtcaagtaagggagaattgactacgcttatacatcagcttcaagaaaaggac

SEQ ID NO: 118308 - DNA, 90 bp, Homo sapiens
tctacgccctcaatctgctcttttggaatgcaggctcaacagtaccagcagcagcgtcgaaaatttgcagctgccttcttggcattcatt

SEQ ID NO: 118309 - DNA, 124 bp, Homo sapiens
aggagcctggagcgcgagtacagctgcaccgtgcggctgctggacgacagcgagtacacctgcaccatccagaatgattcaatacctcaagaagatttcactccagaagtgtacagagttttcc

SEQ ID NO: 118310 - DNA, 100 bp, Homo sapiens
gcggagaggaggctggaagaggaagatgcctagcacagaccttctgatgttgcactattcctgatcagagaactccagttgcttcaacacacagtatcag

SEQ ID NO: 118311 - DNA, 76 bp, Homo sapiens
ctctcagtgcctccatgaggagtataggagcaagggcgtctttgtgcagctggagttaaccgaatttcatactggc

SEQ ID NO: 118312 - DNA, 50 bp, Homo sapiens
ctcagatccagtgataattgacagcattggggacatcatagatcactatc

SEQ ID NO: 118313 - DNA, 75 bp, Homo sapiens
atttcctactgtatcatgatcatcataggagtggagaacatgcacaatcaagctgcagtttcagctcaggccaca

SEQ ID NO: 118314 - DNA, 100 bp, Homo sapiens
caccatgagcaaagctcaccctcccgagttgaaaaagcgggtgccacgtctatgtgggcttcgtgctgtgggctgctgaatgaagtcatgggaactggag

SEQ ID NO: 118315 - DNA, 75 bp, Homo sapiens
gcggctctgcgcggtccccgccagcgccccatcctgagccggtgaccattgtgaggtagatattttgttctaatt

SEQ ID NO: 118316 - DNA, 100 bp, Homo sapiens
aggattccaagtaactcttatttgaatgaggtagagagctgtgcagtgattagacaggaaccccgaaaccaaagactcttaaaagctgaagagaaatcag

SEQ ID NO: 118317 - DNA, 100 bp, Homo sapiens
cacctggctggagcaaggaaaagagccctggaatctgaagagacatgagatggtagacaaaaccccagctgcacggaacgtcatgaaggaccaacgcctg

SEQ ID NO: 118318 - DNA, 50 bp, Homo sapiens
cggaaatgtgtcatcgaaagccaggtacactgaggaggggacggctccgt

SEQ ID NO: 118319 - DNA, 51 bp, Homo sapiens
gctccgaggtgccagaggcatatggtaccagaatccggattataatttctt

SEQ ID NO: 118320 - DNA, 100 bp, Homo sapiens
ctggcaaaagcctctgctctgcctccggggacaagaaactagagcaaataaccgttttgaaattgtgcgttgtagaagacaagaactcaaaggtggcctg

SEQ ID NO: 118321 - DNA, 75 bp, Homo sapiens
tccgaagtattcagcgcagcctcttgtaggacaaaagcatgtcttcccttcctgggtgcattggtttggatgcag

SEQ ID NO: 118322 - DNA, 90 bp, Homo sapiens
ataacatgggaattgtgcaccgagatctgaaggttggatacactccagattggatatttctgctgagaaatgtaatgcgaatcagtccag

SEQ ID NO: 118323 - DNA, 100 bp, Homo sapiens
tcactcccttggaggttaatcacttacagctgcctgctccagaaaaggcaccccagcctgcggtccatgtgcaggggcaggagccactgactgcctccat

SEQ ID NO: 118324 - DNA, 100 bp, Homo sapiens
actcccattcacaaggcagctcgctctgggagcctagaatgcatcagtgcccttgtggcgaatggggctcacgtcgaccgattacacctcaacaagaagg

SEQ ID NO: 118325 - DNA, 101 bp, Homo sapiens
agcaaaaaagatgatccgggtataataatgaagttaaaagagcagcactccaagatataaggtggttgaactctttttctatctcacaatgggattctctc

SEQ ID NO: 118326 - DNA, 100 bp, Homo sapiens
cagtagaggagtatcagttcagtatcgctacttcaaagggtactttttagaaccaaagctcctgacccctgaggattaccagcgatttctagacctgggc

SEQ ID NO: 118327 - DNA, 73 bp, Homo sapiens
ggagggagaatttcaagaactgcagagtacaggggctcaggtccaggtggcaggggatatgctacccaactca

SEQ ID NO: 118328 - DNA, 83 bp, Homo sapiens
cttggactgagtcctgcaggacacagacttggagtccaggtgtgagaaatttctacaaaaagacatttttgaaatcggggcat

SEQ ID NO: 118329 - DNA, 100 bp, Homo sapiens
ttgatttcccagctaaagtgggttgaattgccatggctgctggaagaagtctcaaaaagctcccgactaggtgtcccatttcccaaaaactttatgtctg

SEQ ID NO: 118330 - DNA, 75 bp, Homo sapiens
gagtcgctggagcgggcggagctgtgcgagagcctcctcacttggacggagatgcggctgcaggaccagcaactg

SEQ ID NO: 118331 - DNA, 100 bp, Homo sapiens
ttcaaggaaagagaatcatttgatggccgaaatattttaaaggacttcatagacctcacgttgtcgaagactcaacgaaagactccaaccgttattcata

SEQ ID NO: 118332 - DNA, 100 bp, Homo sapiens
gcggcggcggcggcggcgcccgcgggcaggctcttgtcaggatggtgaagctgttcatcggaaacctgccccgggaggctacagagcaggagattcgctc

SEQ ID NO: 118333 - DNA, 51 bp, Homo sapiens
cgcggtggagccgccggagtctgagaagatggagtttcactcttgtctccc

SEQ ID NO: 118334 - DNA, 100 bp, Homo sapiens
attaatccagcatacataaaagccagaattagttttggctataatttgcagatattaataaggcagcggaaagaagaaatatgaatacggctccatcaag

SEQ ID NO: 118335 - DNA, 73 bp, Homo sapiens
aggggccagtctggagacagtcaaggttgattcttcaccacactgaaaccattaggaaaaatccttgtggtta

SEQ ID NO: 118336 - DNA, 102 bp, Homo sapiens
tcctaccatgtcagccttcccagtagctggaactacaggtgcaagaattgtttatccgtgattatggagagatttttaatgtccagttaccggataaagaag

SEQ ID NO: 118337 - DNA, 100 bp, Homo sapiens
atttgttaaggattccaagtaactcttatttgatgggcctctcagctcccacaatctctggcctccaggatgagctatcccatcttcaggagttattacg

SEQ ID NO: 118338 - DNA, 90 bp, Homo sapiens
aaacaacattgctacacatgctaaaagatgacagacttggacaacatgtcccaacattacatcccactgtgtcagcgtgttatgatgccg

SEQ ID NO: 118339 - DNA, 100 bp, Homo sapiens
gtattcagatcttcatgtgtctcttctaagctgaataaagctgttttggaactgtcaggtacctcaaagcgctgatatccccaataggtttgaaatgaaa

SEQ ID NO: 118340 - DNA, 74 bp, Homo sapiens
atggctcatagttcaccccagagcattttagatgatgttgccatgaccactgtgtgcagcataacgaagcgtcc

SEQ ID NO: 118341 - DNA, 82 bp, Homo sapiens
ggaggagctgtgcagccgcgaggaggcgcgggaggtgttcgagaacgaccccgagacgttctccaaggagaagtacatcctg

SEQ ID NO: 118342 - DNA, 83 bp, Homo sapiens
accgcacctcggtgcccgcaccgctcaacagctgtctcctcaaacaatgatcgtgcgcttcctgaccaagagattcattggag

SEQ ID NO: 118343 - DNA, 88 bp, Homo sapiens
gggaggccgaggcgggtggatcatgaggtcaggagatcgagaccatcctggctaacaagatgggccagttttactattctgccaaagc

SEQ ID NO: 118344 - DNA, 83 bp, Homo sapiens
ttaacgcgttgattcgttccgtgctgctgcaggtgaccctggcaaagatgagagtgcacatttcgtcctgcctgaaggtccag

SEQ ID NO: 118345 - DNA, 74 bp, Homo sapiens
caagctgctgaggcacatcctccagtgggaaggggtaccggcaagagatacaagccagctgccatgttgtgagc

SEQ ID NO: 118346 - DNA, 90 bp, Homo sapiens
cgcggcgaccgccaagaaaggcagcgaggtggagagcggtctcctctgagcctccggcctccataagacccaaaacagatgacacctctt

SEQ ID NO: 118347 - DNA, 80 bp, Homo sapiens
agacagccattggtacctacctgggggagaggcgcaatgtgtcatttaggcctgtgacgtcggaactttattatttgaac

SEQ ID NO: 118348 - DNA, 100 bp, Homo sapiens
ctgatccaggggacaaaagaggggaaactgagagttcccaattaataatgaagcagcaattctgtggtgttcttggtcacacatttatggagtttctgaa

SEQ ID NO: 118349 - DNA, 100 bp, Homo sapiens
ccggggaattgatattcctgaagtcaactgggttttgcagtatgaccctcccagcaatgcaaggttgttctgtacactctactaagccaagagagaagag

SEQ ID NO: 118350 - DNA, 82 bp, Homo sapiens
aacagaaggcgatcaaggccaagtatccgccagtcaataggaagtacgagtgtgaaaatgatgtgctcacgggtgccctctg

SEQ ID NO: 118351 - DNA, 75 bp, Homo sapiens
aaggaaaacctccttatgctgatatacatccaatgagggatcagttcagtgatatgagaatcagcataaaccaga

SEQ ID NO: 118352 - DNA, 100 bp, Homo sapiens
ccggtgcaagaggcgcaaacaagccaatcccaggaggaaaaacgagcataaatgcccagtggatgagcgggagcaactggaagaaaccttgcccctgatt

SEQ ID NO: 118353 - DNA, 96 bp, Homo sapiens
cggaaaggataagcctcgacttagaagctaccgagttaccctaagaaagtcaccaggagactaaagtccatcaaaaacatccagaaaattaccaag

SEQ ID NO: 118354 - DNA, 100 bp, Homo sapiens
ttcaaccccatctgcttctgggcagttcagcaagcctttctcattttctccatcaggcatggggctgcttttggtccaccgcaaggtggatttcatcctc

SEQ ID NO: 118355 - DNA, 75 bp, Homo sapiens
ctcgctcacgcagcaggagcaggggacgaagaaatcacctgcccaccaccccctgttatctacaatggggcacac

SEQ ID NO: 118356 - DNA, 90 bp, Homo sapiens
atgtctgcaacccagccattttcagaatgacagggagagagtttttctctcgtttcccagaactctatccttttcttctcaaacagttgg

SEQ ID NO: 118357 - DNA, 75 bp, Homo sapiens
ccaacagcaacaggtctcaattctctgcttatgataatgtcaacaaagttcgagtagctatcaagaaaatcagcc

SEQ ID NO: 118358 - DNA, 82 bp, Homo sapiens
cttgtaaagctgttctcaacccactttggttttcctttggaatatggataaatacaccatgatacggaaactagaaggacat

SEQ ID NO: 118359 - DNA, 100 bp, Homo sapiens
ttcagagtgtgaagtcaaatgcatgccaacattccagttttttaagaagggacaaaagcaactttcatcctttgaaacgtgtgctgaaaaagaagaatca

SEQ ID NO: 118360 - DNA, 101 bp, Homo sapiens
cgccatcgttgctgccttcttcgtcaagatttttaaagagcgagaagaagatttgaggcgtttgtctcgcccattggaatgttcttgtttccgaacatcta

SEQ ID NO: 118361 - DNA, 75 bp, Homo sapiens
aggggtaacacccttccagatgatttttgaggtaacttgggtttttactcctgtaacaactgaaataacaagtct

SEQ ID NO: 118362 - DNA, 75 bp, Homo sapiens
gcaagctgaagacatcaagaagatcttcgagttcaaagagaccctcggaaccctgtgggccaaagctgaccaact

SEQ ID NO: 118363 - DNA, 100 bp, Homo sapiens
ctgctctacagcgtggtcaacacggccgagccggacgctgatggccatcagcatcagcaaagccatcaacacccaggaggcccccgtgaaggagaagcac

SEQ ID NO: 118364 - DNA, 50 bp, Homo sapiens
tcagtggagccttctcagacccacagagacggagtcttgctatgttgccc

SEQ ID NO: 118365 - DNA, 100 bp, Homo sapiens
aaatcttgcccaaagaaatgtagccttggaccgagacatgatgaagaaaggggaagcaagcacttatttggctacttggtgtccatggggaaagaattcc

SEQ ID NO: 118366 - DNA, 50 bp, Homo sapiens
ccagtgggcttgggaaacgctccgagacaatggcttaagcaaaatcagac

SEQ ID NO: 118367 - DNA, 75 bp, Homo sapiens
gattattcacgaagctctagaaagatatctcccggggccaattcagcatctctacctggccatcctaacaaggtg

SEQ ID NO: 118368 - DNA, 90 bp, Homo sapiens
gtttaagaattctatgattgctctagtagacaaccttgcatcaaagccttacgaaggatgaatccaaaaggccaaagtataaagagcttc

SEQ ID NO: 118369 - DNA, 75 bp, Homo sapiens
gccgagtggtctaaggcgccagactcaaggcccctccagccagcgtcaggtgcagaatggcccctctcctgatga

SEQ ID NO: 118370 - DNA, 50 bp, Homo sapiens
tagtaacttcacttatttcagggaccgccgggagagcctgcccacctccc

SEQ ID NO: 118371 - DNA, 110 bp, Homo sapiens
caatgtttaatcaagttttgattttaatatctacattactatgccttatcttcacctgagatggggtctcactctgtcatccaggctggaatatagtggcacaatcatag

SEQ ID NO: 118372 - DNA, 100 bp, Homo sapiens
agcagaagggaggctccaagacctcatcaacaattaagaattttccagttcatatgaagaggtgatctctcaaataaatacgtcattacctgctccccac

SEQ ID NO: 118373 - DNA, 98 bp, Homo sapiens
tgtgagaccaagtttatgcccgcagcagaagggaccgtttgtggcttgagtatgagacagatggtcagtctggaggatgacgtggcgtgaacatctgc

SEQ ID NO: 118374 - DNA, 97 bp, Homo sapiens
ccttccgcagacgggctatgtgcacccagatgagttcttccagtcccctgaggtgatggcaggtctgaaggggcgtctcgattacctgagctctctg

SEQ ID NO: 118375 - DNA, 82 bp, Homo sapiens
ggccctttgcagctgcgattttcgccctacgttttcaacggaggatccagtttgctgaccagaagcaagaattcaacaaacg

SEQ ID NO: 118376 - DNA, 108 bp, Homo sapiens
cctgggtgaatctggcaatggtggactatccttatgcctctaactttttacagcctttgcctgcttggcctatcaagatacagtttatgtaacttgatggaagaaaat

SEQ ID NO: 118377 - DNA, 74 bp, Homo sapiens
cagaactatctcctactactctttcccctgttaatcatagcttgggctgctttgctggctctgcaagaaaatgg

SEQ ID NO: 118378 - DNA, 100 bp, Homo sapiens
tttgttgaagatgactcggacattttacatggtacggatgccactcatgcggagcacatcgagaccatcaaagcccggatgtacgtgggcctcaccccag

SEQ ID NO: 118379 - DNA, 75 bp, Homo sapiens
gctttgcggctgggtcctaaactgcggtcgcaatggaagaagagatcgccgcgctggtcattgacaatggctccg

SEQ ID NO: 118380 - DNA, 74 bp, Homo sapiens
acaatgcctccataatgaatgctgtaggctgctgtggtttacaggctattgagggcacctacattgacaagaaa

SEQ ID NO: 118381 - DNA, 90 bp, Homo sapiens
cttaagagcaaaatgatttatgccagctccaaggacgccatcaagaagaagctgacagatggcagtggcagcaccatgatgcaaaccaag

SEQ ID NO: 118382 - DNA, 122 bp, Homo sapiens
ctgactgctgtagttcagaagaggtttggctttccagagggcagtgtagagggccgagatggacgaaaaaatgtggttccttgtgttctctctgtaaatggggacctagaccgaggcatgct

SEQ ID NO: 118383 - DNA, 100 bp, Homo sapiens
aagctactcaaatgcagtcggcttgtcctggctcttgccctcatcctggttctggaatcctcagttcaagtctctcaagtcccgaggctacgtgaaggaa

SEQ ID NO: 118384 - DNA, 100 bp, Homo sapiens
aaggactgcctcactgagcaaccaagaatggagtggtttatgcctggggccacaatggatatagccagcttgggaatgggacgaccaaccaaggcattgc

SEQ ID NO: 118385 - DNA, 75 bp, Homo sapiens
tctttctttgagtctaaagaatcccttgaagaaagtattggcaagcctgtttctggaccagtacagagccagcct

SEQ ID NO: 118386 - DNA, 100 bp, Homo sapiens
aggattccaagtaactcttatttgcaacaccttacgagttacccgttctgctgcccccagcacactggacagttccagcactgcccctgctcagctgggg

SEQ ID NO: 118387 - DNA, 100 bp, Homo sapiens
ggcggacggctgcgtcgcccgaggcgaggaggagcgctggcgagtttatgtggccgaggcagacaagtggaattaggccttgctgcaggggacttcattt

SEQ ID NO: 118388 - DNA, 143 bp, Homo sapiens
ctttcttatccggactgggatattaaatatacgacacatccaggagtttattggagcgcagactgatggcgcaaaggaggcggggtttcaccatgttgcccagactggtcttgaactcctgagcttaagcaatccacctgcct

SEQ ID NO: 118389 - DNA, 100 bp, Homo sapiens
cactctggaccacgagaccggattgcctcaaggatgtcatatctatgagtaccgcgagagcaacaatcatatttgatcagaaattggatgaaccttcggg

SEQ ID NO: 118390 - DNA, 100 bp, Homo sapiens
ggcccttcacattctcccagagcacccccattgggttggaccgtgtgggacgccggcggcagatgagagcatccaacggatggtgatgggaatctttgca

SEQ ID NO: 118391 - DNA, 74 bp, Homo sapiens
agcaaggcatcaacgagtttctcaggtggacccaagtggagagattgtggaactggcgaaaggtgcatgtccct

SEQ ID NO: 118392 - DNA, 100 bp, Homo sapiens
ctgtgacgctgctgctggggtcaggtgattgtgaagtgctgaccaattgccactggacatacttgaaacaaaataggaaaatggcagcaaactcttcagg

SEQ ID NO: 118393 - DNA, 75 bp, Homo sapiens
gcacctcatcccctggatgggggaccacaagatcctcatcgacaggcttgggcactgtttaaaggaaagttccga

SEQ ID NO: 118394 - DNA, 100 bp, Homo sapiens
cgaggaaacactggagatgttgctgttgaggatttcatttcaggtggatcaagaagtgaacgttgtgatattgtttccaatttaataagcaaaggctgct

SEQ ID NO: 118395 - DNA, 90 bp, Homo sapiens
tttattgaccagattgatggaatagttcattttgaaagtgggtttggaggatttgggacaacatctacaactgcaggttctgcattcagc

SEQ ID NO: 118396 - DNA, 75 bp, Homo sapiens
caaggttattctggatggaaatagccttgaaaaggaaagtgactattttaccccacagggagaattccgtgtaga

SEQ ID NO: 118397 - DNA, 127 bp, Homo sapiens
ttttttcacctcgtctgaaatggctgcctcccagtgtctctgctgctcaaaatttctcttccagacttaattcagtgcacaaatgagatgaatgtgaacatcccacagttggcagacagtttatttg

SEQ ID NO: 118398 - DNA, 109 bp, Homo sapiens
gcctcgtggctgcgtcaccgccgcccccccagacaagatggacaccgcggaggaagtgaaagctggtggaatgcgaattgtgcagaaacacccacatacaggagacacc

SEQ ID NO: 118399 - DNA, 50 bp, Homo sapiens
cattggtctgaagaacgccctgtcatccatctatgttagcgttcctggat

SEQ ID NO: 118400 - DNA, 98 bp, Homo sapiens
gtgtcggcagaggagaccgaaaagtggatggaggaggcgatgcacatggccctgagacgggagttaaaggagaaagaatattctgtcctgaatgctgt

SEQ ID NO: 118401 - DNA, 97 bp, Homo sapiens
cataaggaagaatgtctcatgttcgagtctggggctgtcgctgtgctctggatctttgacattcagggatgtggctgtagaattctctcaggaggag

SEQ ID NO: 118402 - DNA, 100 bp, Homo sapiens
tgagtttagacaatataaaagaacatattacatgacgaagatgggggttgacgtagtatctgaatgaatgaagaaatgctgtgccaagaatttggaagat

SEQ ID NO: 118403 - DNA, 82 bp, Homo sapiens
caactgtgttggtgggaaaagctccacagagctgctgcggcagttagcggtgagaactctgtctcagtcgacgggaagtgca

SEQ ID NO: 118404 - DNA, 100 bp, Homo sapiens
ggatgggagcagccaaccagacaccatctccattgcttctaggacctctcagaacacagtggacagtgacaaggtgacagccgtgagggtgtatgtgaac

SEQ ID NO: 118405 - DNA, 100 bp, Homo sapiens
gaagaaatggagaaagtattagctggagacccagaagtccacattcccctcgagaatctacagcagtttcctgccttcaattcttatacctgctcctctg

SEQ ID NO: 118406 - DNA, 98 bp, Homo sapiens
gcccaactacccattcatcaacattcggtcaagtggtgctggagaatctggtaaaagcaccattgtgaagcagatgaggatcctgcatgttaatgggt

SEQ ID NO: 118407 - DNA, 50 bp, Homo sapiens
atcagttgttggagaaaattaaaggctggagtgcagtggcgtgatctcgg

SEQ ID NO: 118408 - DNA, 100 bp, Homo sapiens
gttttcaggaccaaaattgtggaaaagtcactctggtgagaagccctaccactgcaactgggacggctgcggctggaagtttgcgcgctcagacgagctc

SEQ ID NO: 118409 - DNA, 83 bp, Homo sapiens
tgatcgcgcaagaggggctgctgtgcggagcatcagatccatgctgctgctgactcggagccccacagcttggcacaggctct

SEQ ID NO: 118410 - DNA, 91 bp, Homo sapiens
aacggagccgccttggcctcggggtctccctacaccaacggtctccaaagcggcgtctgacctcatgagctactgtgagcaacatgcccgg

SEQ ID NO: 118411 - DNA, 76 bp, Homo sapiens
gaatactggaacaatagagctcgaccttatctctgtggtttgtgatgaaaatggttccaagggctatggatttgta

SEQ ID NO: 118412 - DNA, 100 bp, Homo sapiens
ctccccgccccgccgcggccatggaggacgagcggaaaaacggagcctacgaatccttgttgcctgatgactatgtggttccccttgactggaagacact

SEQ ID NO: 118413 - DNA, 82 bp, Homo sapiens
tttgagccgccccgaactaagcagggcggtcggggcaataccaagtttccaggcccgaagagcatcccagactattgggact

SEQ ID NO: 118414 - DNA, 96 bp, Homo sapiens
ccgagaagctggatggagacaagaaggggcgccccagcaccgccggctccaagatcaagaaatcctaagtaatgcactgaagagaggagagatcat

SEQ ID NO: 118415 - DNA, 80 bp, Homo sapiens
atcgacgtcgtgatccagaagtccagagctgaggactgcctgtttgcagggggggctgtcggggggctgttaggtgcctg

SEQ ID NO: 118416 - DNA, 100 bp, Homo sapiens
aggagatcaccgccctggcgcccagcaccatgaagatcaagattcgggcaagtccaccactactggccatctgatctataaatgcggtggcatcgacaaa

SEQ ID NO: 118417 - DNA, 50 bp, Homo sapiens
tgccatttccaggccttctggcgcgtacttgctttgtaagtgatctgaag

SEQ ID NO: 118418 - DNA, 100 bp, Homo sapiens
atgaataccgcttcctggagttcacgactctgagtgctgggccgttgctccagggagaactgcaaatatcttcatccacccccacatttaaaaacgcagt

SEQ ID NO: 118419 - DNA, 76 bp, Homo sapiens
gtgagcggagtagcgagtcggcaacccggaggctgtggaaaatctctgttctcacaaagtctccccaatgctctac

SEQ ID NO: 118420 - DNA, 90 bp, Homo sapiens
ctgcgctgtacctggagagagacgagacccgggcctggcagcctgtcacagtgttcatctgtagcttcatggtggctgcccccatcttcg

SEQ ID NO: 118421 - DNA, 75 bp, Homo sapiens
ttttagtcttgctcatcccactcttccttttactaggctcatctggggacaggtgacccttacacacctggattc

SEQ ID NO: 118422 - DNA, 100 bp, Homo sapiens
ctccgtgcggagaccactgttcaaggccacaggtcaaaatgcagatcttcgtgaaaacccttaccggcaagaccatcacccttgaggtggagcccagtga

SEQ ID NO: 118423 - DNA, 108 bp, Homo sapiens
ccagcgtccctgagacgccaacggcagtcactgccccccattccagctcctggggtgtgaaggtcaaaggcctcatcctcatcagcccccagaaccctctgggtgatg

SEQ ID NO: 118424 - DNA, 83 bp, Homo sapiens
ctagaagtccattatgataatcccacttatgaggaaggtggtgttcccactgatgaagagcaggcgactgggttggagaggga

SEQ ID NO: 118425 - DNA, 100 bp, Homo sapiens
cgaagagccgttagtcatgccggtgtggtggcggcggcggagactgcgggcccgtagctgggctctgcgaggagcaccagcgaaagcagccagtctgaga

SEQ ID NO: 118426 - DNA, 100 bp, Homo sapiens
ggatggtcttgccattcgcagcaagccattacgcaagacagttctactgtttctaaggcttatggtgcttcaaagacatttggaaaagctgcaggtccca

SEQ ID NO: 118427 - DNA, 75 bp, Homo sapiens
acatgatgatgattatgttgctgtagctaccaggcgaaattacaagagtccattgaatatgaagacttggggaaa

SEQ ID NO: 118428 - DNA, 98 bp, Homo sapiens
agcctggaccgcatccctcgtgaccacccctacatccagtacagttttgggatttgagattgacgcggtgaactctgtccagttttcaaaccacacag

SEQ ID NO: 118429 - DNA, 100 bp, Homo sapiens
aatggcttctgcctctgtggataacacagccatcatatgggatgtcagcaaagaaacattattccatcatttgtgttgatggatatccaggcttctacag

SEQ ID NO: 118430 - DNA, 87 bp, Homo sapiens
gaaaccagcaggcagctttcttactcagacaatcagaaagggaaggaaattctcacagataacaacatccctcatggccagtgtgtc

SEQ ID NO: 118431 - DNA, 100 bp, Homo sapiens
agacaggctgttccttaagcagagaatgagcttactctctcagatgacttcgtctcccaccgactgcctgtttaagccctctgggatgagtctgatgaca

SEQ ID NO: 118432 - DNA, 100 bp, Homo sapiens
cccaccactgggcaaagaaagtatccctttccctggtacctgacagtgtaaagaaggagctcctacaaagaataagaacattccttgctcagcatgccag

SEQ ID NO: 118433 - DNA, 98 bp, Homo sapiens
tagtcttgcaggtgtggtcattgctgacaatgaatacccatcccgggtggcctttaccttgctggagaagacagcgtggaagatgaactggagatggc

SEQ ID NO: 118434 - DNA, 75 bp, Homo sapiens
caggtcttgtagcagcgcctcctcggaccctgatgcttggtgtgacctgagtaaatttgacctccctgaggaacc

SEQ ID NO: 118435 - DNA, 89 bp, Homo sapiens
tgcaaaggccaatgttggtgctggcaaaaagctggttatattctgggcactaaatgaaggcgtttctaggcaatttgattcgttcagag

SEQ ID NO: 118436 - DNA, 98 bp, Homo sapiens
cctgcccagaggaccctgtaccgtgatgtaatgctggacaccttcaggcttctggtctctgtggattgtaaaccatggctgtgtggatacaagctcag

SEQ ID NO: 118437 - DNA, 95 bp, Homo sapiens
cgggcatcgagatcgagtcgcgcctcgggggcacagcacgagtacacgagacaggattgagaaaggagagattcaaattgtgacttcagattcaa

SEQ ID NO: 118438 - DNA, 135 bp, Homo sapiens
gggatcgtgaccgagaccgtgaccgagagcgtgaccgagagcgcgaatatcgtcatcgttagaaggtgaccgggctggtccacaagtgggcatggaccaaagacgacgtgatcctccacgtgctcccgctgcacc

SEQ ID NO: 118439 - DNA, 100 bp, Homo sapiens
ccgtctggcggttcagcgcgaccacgaaggccgctactccgaggcggtgttttattacaaggaactaagcgtcttgtagaaggaactattaatccaggag

SEQ ID NO: 118440 - DNA, 98 bp, Homo sapiens
ttcagataaaaaagtcttgtctgcaatcatcaacaaaacaattattccccgacttacagctgtccctttccccccaacacatcgcttgacatctgaag

SEQ ID NO: 118441 - DNA, 75 bp, Homo sapiens
cgacatggagggagctgctttgctgagagtctctgtcctctgcatctggcattcctagccgagtgtgacacagtg

SEQ ID NO: 118442 - DNA, 100 bp, Homo sapiens
gctgcttggagcgtccgccatgaggagaaggtgctggagaatctggtaaaagcaccattgtgaagcagatgaggatcctgcatgttaatgggtttaatgg

SEQ ID NO: 118443 - DNA, 82 bp, Homo sapiens
gtttgatgctgaacttcaccgttaagtttttcagttatgggacaaaaatattatatcaaaacactgaagctttgcaatctaa

SEQ ID NO: 118444 - DNA, 51 bp, Homo sapiens
gcttgccgcagccagcaactatttcaggtgagcgagtgctgtgctttcatg

SEQ ID NO: 118445 - DNA, 83 bp, Homo sapiens
gcgggagaagctgtctctgatccgcaagcatgctcagaccttcattgctctgtgtgccaccgatttggagcaagaggtggtgg

SEQ ID NO: 118446 - DNA, 100 bp, Homo sapiens
ccaaaagatgcagtgaaagctttgaagaaaaggatttccaaaaactacaatcataaagaaatccaacttaccttgtcattcagacttggttccttcaacc

SEQ ID NO: 118447 - DNA, 100 bp, Homo sapiens
gtctcttacgtctgcggaagtgcagctgcctcagttcttagcgcaggttaaacccatccagagtaatggctgcggccttacccaggaccctgggggagtt

SEQ ID NO: 118448 - DNA, 78 bp, Homo sapiens
gcggttcagccctttgatgaccgcagcaggaatatgagagcctggagcaagaaaacaccatgctgcggagagagatcg

SEQ ID NO: 118449 - DNA, 123 bp, Homo sapiens
gaaaagacaagctttccagagaatgtttcagagaaagttacgtggagcgtgggcgtttcgcagactcctaagaaaccaaggacgccaagccatacaaattcagcacagctgactcagagaggt

SEQ ID NO: 118450 - DNA, 100 bp, Homo sapiens
ggataacctctacaacatcgagatcctgcggctccccaaggctctgcgcgagatgaactggcttgactacttcgctatcagaggactcctgaaacctgga

SEQ ID NO: 118451 - DNA, 100 bp, Homo sapiens
tcagccgcgacctggacaacaaccggccgctggaggcgctcatggaggtgtctgtgtctgatgaggacggggacttggttgccttttccagtgacgagga

SEQ ID NO: 118452 - DNA, 50 bp, Homo sapiens
agcgacgcggcctgggaggataagatttgaaaaggtttatactcataacc

SEQ ID NO: 118453 - DNA, 75 bp, Homo sapiens
cagtattccaatcacagagaacttaagactgacaatctacctaatcaagctattacctggctggtgtttgcttgt

SEQ ID NO: 118454 - DNA, 100 bp, Homo sapiens
ccggattccagactcgtgggggaaaggctgtgctcaagtaaagctctttgtgacagggcttttcagcttaaatcaagatattcctgctttcaaggaacat

SEQ ID NO: 118455 - DNA, 75 bp, Homo sapiens
cagccaagctcgtagcctgccactccgtgcagtacagttgtgaatttggctccgcgaagtattatgcactgtgtg

SEQ ID NO: 118456 - DNA, 102 bp, Homo sapiens
tccgagctgagatccatctgcaccacggtgctgtatgaagtgaaggctcctgttccttctgcctgtttcaggaatatttgtaagcaaatgacaaaaatgcac

SEQ ID NO: 118457 - DNA, 100 bp, Homo sapiens
agacctgactgtggagatggcggctcagaagataaacgaggggctggaacacctcgccaaagcagagaaatagtatctcagcgtttgagtcagccaggag

SEQ ID NO: 118458 - DNA, 96 bp, Homo sapiens
gttgtgagattcccttgcaaatttacatacgagaatggcttgtgaaatcatgcctctgcaaagcctaaaatgaccaatgtgtgatttcagtggaat

SEQ ID NO: 118459 - DNA, 83 bp, Homo sapiens
caaaggcaagaaggcaacgacgttccatctgtggaaggacctaccaaccaggttttgagcaaaattttggactgtgaagcaag

SEQ ID NO: 118460 - DNA, 101 bp, Homo sapiens
ggaaagaagtaccttcgccggtcaccggctcctgcaggaatacagttatggccacccaggtaatggggcagtcttctggaggaggagggctgtttaccagc

SEQ ID NO: 118461 - DNA, 100 bp, Homo sapiens
tgttagctgggtcgggaagacatccatggaagtgaagatgcaaatgttccagatacctttgtctggatatggaggaacaagcaatcttattttggaaggc

SEQ ID NO: 118462 - DNA, 100 bp, Homo sapiens
gccgctctgggatcccggccaccagcaattgtccgcgtccgtctccaagagagtatgaagagagtgcgtctgtagggcagggaagatggcggacaagcgc

SEQ ID NO: 118463 - DNA, 100 bp, Homo sapiens
tgtctttggagaacttctggagctggccaacgtgcaggagggttaaagcacgaattgggagctctcagcgacatcaccagtcagcagccaaagacctaac

SEQ ID NO: 118464 - DNA, 100 bp, Homo sapiens
cggctccctcccccgcgtccctgcgaccgccgcggcgaagatgggaaggatgaagccagcagtgtggaggtgacgtggccagatggcaagatggtgagcc

SEQ ID NO: 118465 - DNA, 76 bp, Homo sapiens
cttcccaagattgtggactccggttatgatcatagctactacttcattgcaacctttattactgaccacatcagac

SEQ ID NO: 118466 - DNA, 87 bp, Homo sapiens
gggaaccctggtcaccgtctcctcagatggctctgagagattcctctgcgaatctgtttttagctatcaagtggcatccacgcttaa

SEQ ID NO: 118467 - DNA, 75 bp, Homo sapiens
ctggtcttcactgacgcctctccccaggaggcatttcatccttcatgaagccattcaggattttgaattgcatat

SEQ ID NO: 118468 - DNA, 80 bp, Homo sapiens
gggccgctctgggatcccggccaccagcaattgtccgaacaagcgagtgagcatcaataaagatgagctgaagtcaacgt

SEQ ID NO: 118469 - DNA, 83 bp, Homo sapiens
tggccatgtgctctgtgtaccagtctggaggagtcaacatggcctcgaaaaagcccaagacagcagaagcagacacctccagt

SEQ ID NO: 118470 - DNA, 100 bp, Homo sapiens
cacccactcgagaattggctcagcagatggggaagggatccttcaagtatgcctgggtgctggacaagctgaaggcggagcgtgagcgcggcatcaccat

SEQ ID NO: 118471 - DNA, 51 bp, Homo sapiens
accaccatttcaaattttcacactcagcttggcaagggtatatcgagattt

SEQ ID NO: 118472 - DNA, 101 bp, Homo sapiens
acagttgttaatgtcaccatcctcaacggcatgggagtcacaggaagaattgtagataaggtggtcaagaggccccggaaggtccaggtggccgcacttca

SEQ ID NO: 118473 - DNA, 50 bp, Homo sapiens
cgagcagtgacaacagtttgggtcccaggtgtgtgatggcggctgcaatc

SEQ ID NO: 118474 - DNA, 98 bp, Homo sapiens
agataatgcctttatgttacttactcaggagctgaaagatctccgaaaacaaagtgaaatcatacctcagctcatgtcagagtgcgaatatgtctctg

SEQ ID NO: 118475 - DNA, 98 bp, Homo sapiens
caggatgggatccggctcctccagctaccggcccaaggccatctacctggacatcgatggacgcattcagaagatattaataaggcagcggaaagaag

SEQ ID NO: 118476 - DNA, 75 bp, Homo sapiens
ctcaaccttgaactttccagacgcagaactatgagattgtggggaacctgggtgaaggcacctttggcaaggtgg

SEQ ID NO: 118477 - DNA, 98 bp, Homo sapiens
accttcaatccagttccaaggactccacgggggaagcagtgcgttatatcaatgaaaacctaattgttaacacagatgaactgggaagagattgcctg

SEQ ID NO: 118478 - DNA, 83 bp, Homo sapiens
caaaaatcccatctaccgcaactctcagttcgagagtaaagacctcctgccccccgaggtctgcagtctcctgaacccagcag

SEQ ID NO: 118479 - DNA, 98 bp, Homo sapiens
cccaggcagctcgccgctccctagcaccttctccagtcgacactctcgcgcccggaggctgatcccaaagaactaatcaagatggtcaccaggcatgt

SEQ ID NO: 118480 - DNA, 88 bp, Homo sapiens
aagtcctcagagcaagagatgaccttatcacagcacttcctggacctcactactacacatggggagaccacggcggaatcatcacggc

SEQ ID NO: 118481 - DNA, 82 bp, Homo sapiens
attaccaccaccacctgatataaaaaaagaaattagtgaaggagatgaagtagagatgcagaggccaggatgtgggcccagc

SEQ ID NO: 118482 - DNA, 139 bp, Homo sapiens
attgaattgacactatttgtggaggattgatatgacagaaaggagccaaggatgactcaagtttttggccagagtttttcgttggaatatacgttgcacatttatggcgattctgagtgtgagggcagacttctgccag

SEQ ID NO: 118483 - DNA, 74 bp, Homo sapiens
ccgacctcatcagtgagctgtccctgctggaggagcgcttccgggctgaacaactttttaaagcaacaatgagt

SEQ ID NO: 118484 - DNA, 75 bp, Homo sapiens
taattcaacagttcaccaccattaccggcatttatgtttgaatcatctttaagtctggcggtcacaaagtgggga

SEQ ID NO: 118485 - DNA, 90 bp, Homo sapiens
ggtaacctcgtggaggggatggatttccataagttttactttgagaatcatggtcatcatgggccagtgctactacaacgagaccatcgg

SEQ ID NO: 118486 - DNA, 101 bp, Homo sapiens
caaccggcggccttgagcgctgagcaagcaaaggaaagaatcttcaagagggagacatagggaaaaggaagacataaaaatcactaaggaaagaactccag

SEQ ID NO: 118487 - DNA, 82 bp, Homo sapiens
aagaaactagagcaaataaccgttttgaaattaatattgaaggatgtttgttccaagatctctaaaaatcaagaggaatgct

SEQ ID NO: 118488 - DNA, 100 bp, Homo sapiens
ccctggcccgtcatggagatggaaaaggagttcgagcagatcgacaagtccgggagctgggcggccatttaccaggtaccttctcaaaccagatttcatg

SEQ ID NO: 118489 - DNA, 82 bp, Homo sapiens
tcggtttcctggacccattccgactcagtttctgatgaagaattgaaaagaagagtagctgaggagctggcattggagcaag

SEQ ID NO: 118490 - DNA, 100 bp, Homo sapiens
gtccaggagactctggagcgccaggcgcgggggctctgcacacatgatcttcctgtccctggagatgggatctcactctgtcggccaggctggaatgcaa

SEQ ID NO: 118491 - DNA, 100 bp, Homo sapiens
gcatgccactggcttctatacagggagctactactttgatggaaccctctacaacaaagagttgggcagaggggagctggtctttcagccaccattgcta

SEQ ID NO: 118492 - DNA, 82 bp, Homo sapiens
gagggctgtgaagacgcacggtgccaggaccaagtatctgcgtcagcttttctttcgcaaaaagctgcttcactcatcccag

SEQ ID NO: 118493 - DNA, 101 bp, Homo sapiens
tccatttggggaccagagatggacggtcactcagcctatggagtgtgctcactgatccgcctccagggccaccgccatgtcgagccgcggtgggaagaaga

SEQ ID NO: 118494 - DNA, 100 bp, Homo sapiens
tctacccagaattcaattaaagtggctcaggacagcctttcctgcctcagggaagaagagagagacagactacagtgatggagacccactagatgtgcac

SEQ ID NO: 118495 - DNA, 100 bp, Homo sapiens
gcggcggcggcggcggcggcggcggcggcggagcagagtgatcagcagctggactgtgccttggacctaatgaggcgcctgcctccccagcaaatcgaga

SEQ ID NO: 118496 - DNA, 99 bp, Homo sapiens
ccgggctgcgactgtcttggcaactgtgttgctcttgtccttcggcagcgtggccgctagtcatatcgagagatgctgcaatttgtcagtaatcaagtg

SEQ ID NO: 118497 - DNA, 120 bp, Homo sapiens
atttcctttccttatgggcctccgagaccgctccttcatctccgagcagatgtatgaagattgttgcttgatagtgtatcatccttatagacctttgctccagtatgtgcaggacatggg

SEQ ID NO: 118498 - DNA, 75 bp, Homo sapiens
ctcccaagtggctgggattacagaaagttcccctaaagccctgaggaatcaccgaatgaaaggggctttttacaa

SEQ ID NO: 118499 - DNA, 75 bp, Homo sapiens
cgtctcttacgtctgcggaagtgcagctgcctcagttcttagcgcagccttccttgaatccagaagctggcaaac

SEQ ID NO: 118500 - DNA, 97 bp, Homo sapiens
agtgccttttgcctcccaccgtgattctgaggcctccccaaccatgtgcaatttgtcatcctgtgaccaagagcaccagtctgccctggaggaagcc

SEQ ID NO: 118501 - DNA, 100 bp, Homo sapiens
cctgcctgagcttgcaagcaggttaacaaggatttcagctgttctacttgaaggcatgaacaaagatgtcctctatggaaataaaatcacagaactcccc

SEQ ID NO: 118502 - DNA, 83 bp, Homo sapiens
cccagtactaccggcccctgcatggcagctgtgcggagggtagtggcagccatgaaccggatggaccagaagaagcacgagaa

SEQ ID NO: 118503 - DNA, 75 bp, Homo sapiens
ctcggctgcgggaaatcgggctgaagcgactgagtccgcgatggaggtggtcgagatatccagtctgacggagca

SEQ ID NO: 118504 - DNA, 101 bp, Homo sapiens
gaccattacgacctgttcttgaatacattgatctggtcagcagtgatgatgaagagcctagcacctcttatactgatgtgcatcatttctggcatggcttc

SEQ ID NO: 118505 - DNA, 90 bp, Homo sapiens
gagaggggcgccacgccgccgtggccgcaggctccaaccaggaatggagacgccattggatgttttgtccagggcagcatctctggtgca

SEQ ID NO: 118506 - DNA, 95 bp, Homo sapiens
agatcgccggggaggcagcgcgggatcccagcctcaggcgtgcgcggacggtgtgcggagtttcaggccaggtgtggtggttcacatctataatc

SEQ ID NO: 118507 - DNA, 100 bp, Homo sapiens
acctgaatcctgaattttccttgatggtcaaaagattaaggacaggaagatgtcacccaagcgcatagctaaaagaaggtcccccccagcagatgccatc

SEQ ID NO: 118508 - DNA, 75 bp, Homo sapiens
caagtagctccagaaataattcagtgacttggatatgtcggaattcttaattaatccaaatgcaggtccttgccg

SEQ ID NO: 118509 - DNA, 100 bp, Homo sapiens
aggagggcgagcgaggaggatggcggagtcggggctcctgacgttcaaaagaatgctgaaccgggagctgacacacctctcagagatgagccgatcaggg

SEQ ID NO: 118510 - DNA, 96 bp, Homo sapiens
ccctgatgctggcgcagggcacggtgggcgcctacctgattaagcctgatcaagatgacaacctcccaaaagcaccgagacttcgtggcagagccc

SEQ ID NO: 118511 - DNA, 82 bp, Homo sapiens
ggcctctctggcagcagacatcagccacgcatctgaccttgttggccccccggacagaccacccagccctgtacagggacct

SEQ ID NO: 118512 - DNA, 129 bp, Homo sapiens
ctttcctgtatgccatctgttttctgtggggccctgagtgatgaggagaggaacaaggattcatggaagtgagtgcaaacggttagagcaggagcttcatcatgtgaaagagcagaaccagacttcagc

SEQ ID NO: 118513 - DNA, 100 bp, Homo sapiens
cgcggagagaagccgcaaccagagccgccgccacgcgctggagagcaagtgtaagtcaggcgagaagaaggtggacgccctcctgaaggagaagcggcgc

SEQ ID NO: 118514 - DNA, 82 bp, Homo sapiens
ccgcggcgttcggggaaatggctgcgagaccctagaggcctgcggcctgcggtgtcgtgaaaactacccctaaaagccaaaa

SEQ ID NO: 118515 - DNA, 95 bp, Homo sapiens
cttgtcactttagccactgctactacagatcttcttcagcagtatcgttctgctgtgtgcaaactagacagtgtgaataaggatcttaacagtca

SEQ ID NO: 118516 - DNA, 82 bp, Homo sapiens
tgaaaatggttcgctattcacttgacccggagaaccccacgaaatgttttatgggagaattgtagacaaacctggtgaccat

SEQ ID NO: 118517 - DNA, 75 bp, Homo sapiens
ccaaccagtctataagaagatctggggctgctttgactctcccgcgaagacctttccttcactgttctactgtga

SEQ ID NO: 118518 - DNA, 75 bp, Homo sapiens
gaagagtctacctgtttactatcaaagagggcatgaacccaagctacgatgaatatgctgactctgatgaggacc

SEQ ID NO: 118519 - DNA, 100 bp, Homo sapiens
tcatctcagcctccaaaagtgctggcattacaggtggccagcatcgaaatgttcagccttttagtgatgaagatgcatcaattgaaacaatgagccattg

SEQ ID NO: 118520 - DNA, 100 bp, Homo sapiens
ttggaccaagagaacaatgggaaccagtctttcaaaatgctcctaggtggaagagacttgccttgcctcagatgagactttggacttggacttttgagtt

SEQ ID NO: 118521 - DNA, 75 bp, Homo sapiens
gcatgagatgaagcataaggtctgtcgatactgcatgcaccagcacctcaagtggccctgaagctgcactatgtt

SEQ ID NO: 118522 - DNA, 100 bp, Homo sapiens
ctgaaatacatccaggaaagacatggagattctcttaaaaaggtggtctgtttttctggggggccaccaacacctcccgtgaatctaccatgtacccaaa

SEQ ID NO: 118523 - DNA, 90 bp, Homo sapiens
cgcggcgcgccctcctgctgcctccccggagctcccgggccagtaggtatgcccaagaggacagagaacgaatgcacagaaatattgtca

SEQ ID NO: 118524 - DNA, 82 bp, Homo sapiens
agtcaccctcgtcttgcattttcccgcgtgcgtgtgttttaaaatcaaagatgggaaaatcggagaaaattgcccttcccca

SEQ ID NO: 118525 - DNA, 100 bp, Homo sapiens
gcaggacaaagatgtgaacattgtgcagttttacactccgtttggtgagatgttaaaacatggccgtgctggagttccaatggaagttatgggtttgatg

SEQ ID NO: 118526 - DNA, 82 bp, Homo sapiens
cagagcgccgcgcacttcgtcatgttcttcgcgccctggattgtcagtggcttcgccccgaggagagctgactgccctgggc

SEQ ID NO: 118527 - DNA, 88 bp, Homo sapiens
gaaaatacttttcttcaatgataagagctgtcagttttctgtggatgaaggagattatttggtagcaattgaagagaaaaacaaagct

SEQ ID NO: 118528 - DNA, 84 bp, Homo sapiens
ccgctcctaagcctgcacagccgcggcggcagcagcagtgagagccaaaacaacttcccgacaagtggcagcacgatcttttcg

SEQ ID NO: 118529 - DNA, 98 bp, Homo sapiens
tcgtccccgctgcgggtggcggtggtgtgctcgagcaaccagaaccggagcatggaggcgcacaacatcctcagaggtggggctggtgtccgagcact

SEQ ID NO: 118530 - DNA, 100 bp, Homo sapiens
tctgacctccgcgcgacgtacccgccgccgccgttggctggagaacctaaaggcagacccagaagagctttttacaaaactagagaaaattgggaagggc

SEQ ID NO: 118531 - DNA, 100 bp, Homo sapiens
aagaaatccacagatttagttctgttttgaagctggatttgagaatgaagataattcaaaacgggatatttctgaggaagtacaactgcataggacatta

SEQ ID NO: 118532 - DNA, 96 bp, Homo sapiens
ctggttatagatggacaagagacgatcattctgcaagcaggcaacctgaatacaggtgtgatgaatgcagactctgctaccattttggctgtttgg

SEQ ID NO: 118533 - DNA, 73 bp, Homo sapiens
cagtggtcgcttcttctccttgacccaaggggcgtcagcgaaagctatggaaggatgagggtcgctgggagca

SEQ ID NO: 118534 - DNA, 76 bp, Homo sapiens
ttcattgggtcctttcctggccttggtgtatccagggcagcagtatctgcaaggaggccagtatgcacccagcacc

SEQ ID NO: 118535 - DNA, 76 bp, Homo sapiens
caaacaagtgctcctacattctgatatggatgctaacaggcgataaactcgagacagctacctgcattgccaaaag

SEQ ID NO: 118536 - DNA, 83 bp, Homo sapiens
agccccgagccggaagatccatttcagcacggcgcccatccaagagaggagaggcagcagcatggcgagtgtcctgtcccgac

SEQ ID NO: 118537 - DNA, 90 bp, Homo sapiens
gaagactcagaagagatgcccagcctcctcactagcactgtgcaagtcgggctgtgaagtttttgtttgagattctcagtagttttgata

SEQ ID NO: 118538 - DNA, 75 bp, Homo sapiens
ccgacgcccgaggagaaggaggagtggattaagtgcattaaatatctcttccaaatgcatgatgaaggagttctc

SEQ ID NO: 118539 - DNA, 82 bp, Homo sapiens
caagctgaagacatcaagaagatcttcgagttcaaagagaccctcggaacggtgctttcttctgcgacctggtactcatcta

SEQ ID NO: 118540 - DNA, 83 bp, Homo sapiens
cgacgctaagttgctgatcgtggcgagccccacagtcttcgttacaacctcatggtgctgtcccaggatggatctgtgcagtc

SEQ ID NO: 118541 - DNA, 75 bp, Homo sapiens
ggaaacccgtgcgcggctgcgctttcctgtccccaagccgttctagacgcggcatgcagcagaactgattaaaac

SEQ ID NO: 118542 - DNA, 100 bp, Homo sapiens
acggcggcctccaggcctcaggccccctcaccatcctagaggtcaagatcagctctggctagaaacaggaccttgccctgtcactcaggatggagttcag

SEQ ID NO: 118543 - DNA, 97 bp, Homo sapiens
atcgcactcctgtatctccaagagatagaaagggtcttcgatgccaagaacatgatggctgcctgtgacccccgccacggccgatacctcaccgtgg

SEQ ID NO: 118544 - DNA, 89 bp, Homo sapiens
cccatctcttggacagatgatgccagttaattactttgaatctcttgcaagcttaggatatgaaaagagctgtgtgttgttcaattgtg

SEQ ID NO: 118545 - DNA, 90 bp, Homo sapiens
atggcatctaaatttaggaacactggacaggccaaatttgagtttcatcatggtgactatgaaaaacagtttctgcatgtactgagccgc

SEQ ID NO: 118546 - DNA, 106 bp, Homo sapiens
ctgggtaacacacgtctgcggtgttacccacgactgcctgggacctggccaagggctccacacaccaagaccaagtctattatcctcccagtccacaacgctgaac

SEQ ID NO: 118547 - DNA, 90 bp, Homo sapiens
tacggaagcgcctcaacctagaggagtggatcctggagcagctcacgcgcctctacgactgccaggaagctgagaccaagaccaaggacg

SEQ ID NO: 118548 - DNA, 111 bp, Homo sapiens
gcggggtcgtgtacagcgggaccccgtggaaacggaggaactacaaccagggagtcgtggggataacttcaaactaatgtgtactaatgccatgatttacaataaaccaga

SEQ ID NO: 118549 - DNA, 97 bp, Homo sapiens
tcttccatgaagaaatgatgaagatgcgacaggctaagctggattatcagaagaggtgcagtatattcaggctgagaaaaacaacaagggcccaatg

SEQ ID NO: 118550 - DNA, 98 bp, Homo sapiens
ttggagcgagctgagagctcgaggttcaagtgctggggccggcagtggagagttccacgtgtacagacatctgcgccggagagaatatcagcgacagg

SEQ ID NO: 118551 - DNA, 100 bp, Homo sapiens
ctcggacatcgcgagcctcgtggtgtggtgtatggccgtgggcatctcctacattagcgtctacgaccaccaagattcttacctctgaagacaatgttag

SEQ ID NO: 118552 - DNA, 106 bp, Homo sapiens
ttcaggattgagacccggaaggcttcaaaggctgtcgcaaggaggaaggtctccgggcttaacaacaacgaaggggctgtgactggctgctttctcaaccaatcag

SEQ ID NO: 118553 - DNA, 110 bp, Homo sapiens
cgggaggaaggaacgaggcaaggagctaaagcagcgtgcgttcagccctgggcaataccaagaaggagggtgacctgatagctgctcaggctcggctgaaggacctggag

SEQ ID NO: 118554 - DNA, 88 bp, Homo sapiens
caggaggatataaaaaagaaggagccatattgtagggcaattaagttggaatatgcaaggttggttaagttggcccaagaagacaccc

SEQ ID NO: 118555 - DNA, 89 bp, Homo sapiens
ctgaggtggtgcgcggctccgtgctcctgtacaaggtgaatatcttaaccagacttgccgcagaattgaacaaatttatgctggaaaaa

SEQ ID NO: 118556 - DNA, 99 bp, Homo sapiens
agacaacgccttaacccaaggaagtgactcaaactgtgagaacttcaggcctcctgggatggatgtcacccgcttactcctggccaccctgctggtctt

SEQ ID NO: 118557 - DNA, 83 bp, Homo sapiens
cctggatcgctcaggtgttcctgcaggaattggagaagcttcctgcctgacacagctcacttcaagaagtgcacaatgtcaga

SEQ ID NO: 118558 - DNA, 76 bp, Homo sapiens
tttgggagcggttctgtgccaacatcataaaggcacagaaagctgaaggtgctggagatgccaagtgaagtgtgtg

SEQ ID NO: 118559 - DNA, 100 bp, Homo sapiens
gtcgagcacataacggggttcgggtgtctcgtgtgtgaacatcacagatgggatgtcttgggagctgtcattggtacagaatgtggaacgatagaatcag

SEQ ID NO: 118560 - DNA, 100 bp, Homo sapiens
aaaatcttaaccttcaaccatctggggaaaaggcaaaaatcccatctaccgcaactctcagttcgagagtaaagtgctagttgccgcagaccaatcaaag

SEQ ID NO: 118561 - DNA, 104 bp, Homo sapiens
ccctctcgcctcgggtctcgggggccgctctgggatcccggccaccagcaattgtccggtatccgttacagcactgatgtgagtgtagatgaagtaaaagcttt

SEQ ID NO: 118562 - DNA, 110 bp, Homo sapiens
ggcccttgttcccccaaatgtctgactctgactctcggactgagaaacgcaaggccctactgaagatggactgccagggcctggtggtcagactcatccaggactttgtg

SEQ ID NO: 118563 - DNA, 75 bp, Homo sapiens
caagatggcggtgtgcatcgcggtgattgccaaggaggtaagaatgattgatgttggctgatattggagtgctca

SEQ ID NO: 118564 - DNA, 98 bp, Homo sapiens
ttgaactggaccgtggggaaactaaaaacgcatctatctaacgtttaccctagcaaaccagttgtctgcattcaaaagagcattctattaaagctacc

SEQ ID NO: 118565 - DNA, 98 bp, Homo sapiens
ctggatatcaaaggaaatcatggtggtttacatcttggagaaaaaacattctcgagcagcaaccggcttcctcaaactcttggctgataagaacagcg

SEQ ID NO: 118566 - DNA, 100 bp, Homo sapiens
caaggcccaaccagttcttcatctggagacagttcaacgttctgcaaaccagggtcaaagaattgactgtagatccaactgctgctggtgatgttcgtcc

SEQ ID NO: 118567 - DNA, 100 bp, Homo sapiens
gcaagaagtttctaggaaaggccggacaccagatcctcgttcctagctgcctgccagcgtcctcggcccggccctgaggatggacccaggagatcccgct

SEQ ID NO: 118568 - DNA, 90 bp, Homo sapiens
ggggctcccaggacctccactaatcaccagaacaaaatgtgcaggtgagccagccatgagagggtatcttgtggccatattcctgagtgc

SEQ ID NO: 118569 - DNA, 100 bp, Homo sapiens
aagcatggaattaaaaccgtttctcaggtgtgctccatcctctggtctccccattacaaggagctcatctcaggccatggctttgcacagaaccagctag

SEQ ID NO: 118570 - DNA, 82 bp, Homo sapiens
catgaacggaagcgtctttgctcaaggatcccagttttctctggatgacgtgggatccatatggctttggagacagtcgaga

SEQ ID NO: 118571 - DNA, 100 bp, Homo sapiens
aatcaatgggccatcttggacgaagcatcaagtgtacctgatttgtgaacctatcttgcttcagttggtttcctcctaaatattaggcagatgggattgg

SEQ ID NO: 118572 - DNA, 83 bp, Homo sapiens
taggaaacacctctacctcctgcgaggcctcccgggctccgggaaaactacactggccagggcctacaaagggagacatggaa

SEQ ID NO: 118573 - DNA, 100 bp, Homo sapiens
gaaaactaatgaaactggatatcagttgagacatttgggaaatgatgaagtgcacattgtttggtcagagcatactagagactacaggagaggaattatt

SEQ ID NO: 118574 - DNA, 90 bp, Homo sapiens
cccatcccctcgaccgctcgcgtcgcatttggccgcctccctaccggagaagatggggagccccgaggatgacctgattgggattccatt

SEQ ID NO: 118575 - DNA, 82 bp, Homo sapiens
ggggagccgtggcctcctctccgccctagcgctgagacggttgatgatgaagcgccggccgtgtaaatgaagatcgggtgag

SEQ ID NO: 118576 - DNA, 105 bp, Homo sapiens
ggagctgcagaacagaacactttctcatgtccagggtcagattacaagggccgttgctccagggagaactgcaaatatcttcatccacccccacatttaaaaacg

SEQ ID NO: 118577 - DNA, 83 bp, Homo sapiens
atacaatacctgtgatactcctccccctctcaacaatcttaccccttacagctgtttttggaaggaagaaagatggaaagcgg

SEQ ID NO: 118578 - DNA, 75 bp, Homo sapiens
ttttcaggcatcctcatataattaaactgagtttcaattactgaaaattacttggaaatagaaggaatggctaat

SEQ ID NO: 118579 - DNA, 100 bp, Homo sapiens
cacgaatctgcccacccctcctgtaacccagcctgtttcacttcttggatcaagaattggttaaaatagttggaatacgatatgaagttgggccccctac

SEQ ID NO: 118580 - DNA, 102 bp, Homo sapiens
atatttggatgcagaagaattacctcctattttggttgatctcctagaaaaatctcaggaaatggaagttccagtattaccgaaaatctctctaccgatcac

SEQ ID NO: 118581 - DNA, 100 bp, Homo sapiens
gtttgcagaagagagtcttcccgagaaggcagaacggtgggcttatctaaatcagatcccaaatagtatttaaaaagcctctaccaaaagaagaggaggg

SEQ ID NO: 118582 - DNA, 75 bp, Homo sapiens
gtggctcccacagctaatttggaccaaaaggacaagcagtttgttgccaaggaagtttcagctgatcctactgcc

SEQ ID NO: 118583 - DNA, 82 bp, Homo sapiens
cttgtgctcttcatgtgcgtgcacgtcactggtgtaccgcctgccccagtcgtgggtggggcccaaactgccctggaaactc

SEQ ID NO: 118584 - DNA, 103 bp, Homo sapiens
ctttcatgagcacaggcatcagtcaggcagatgtttgtcgactggaatgggaactgtggctgcaccatctgtcttcatcttcccgccatctgatgagcagttg

SEQ ID NO: 118585 - DNA, 75 bp, Homo sapiens
aaagtgggcagctcaaatggcaagacgaactcaaccagcacaacaggagcctaacccagaggaagtggagactcc

SEQ ID NO: 118586 - DNA, 82 bp, Homo sapiens
cagatggcagccagtcagtggtggagcttcctctgaagacgggccagttccttgctgtctggcaagaggaaacagctggggt

SEQ ID NO: 118587 - DNA, 75 bp, Homo sapiens
gctaattcaattcgaacacatggcacgggaattatgaatacaactaaagtgaaattcgttattctacatggaaga

SEQ ID NO: 118588 - DNA, 98 bp, Homo sapiens
tcaccattggctgggaaggaaaaacagaatcagctgttccctgcgaaaggtagtcaaaccacacactccattaataaggtttcctgacagaagagaca

SEQ ID NO: 118589 - DNA, 99 bp, Homo sapiens
cgcgtccgccccgcgagcacagagcctcgcctttgccgatccgccgcccgtccacacccgccgccaggctatgattaaaagtttcatggatgtctacca

SEQ ID NO: 118590 - DNA, 82 bp, Homo sapiens
agagagggaagagattcagccagcacactcctcgcgagcaagatgaggacggggacttggttgccttttccagtgacgagga

SEQ ID NO: 118591 - DNA, 75 bp, Homo sapiens
ccttgccttgggtcacacagccaaaggaggcagagccagaactcacaaccaggtttctcagtttgggtgcagatc

SEQ ID NO: 118592 - DNA, 100 bp, Homo sapiens
gggcagcttactcgagcacgggccattttggaaaagtctcgtctgaagaacccaaagaaccctgggctgtgatggggtcgaggatttggtcttttgggtt

SEQ ID NO: 118593 - DNA, 83 bp, Homo sapiens
gtgcatcggtacatgaagataaaatgtggtgacctggaagaagaactcaagaatgttactaacaatctgaaatctctggaggc

SEQ ID NO: 118594 - DNA, 75 bp, Homo sapiens
tcccacgtgaggaaggagcacgggaaggaagaggatcacctagcccgggtagaagaggcaatcacccgtatgctt

SEQ ID NO: 118595 - DNA, 75 bp, Homo sapiens
cgacgtctacactgagtcggaggcgaagacaccattcgcttttcacccaagatgatttgatgtcttataaaactc

SEQ ID NO: 118596 - DNA, 83 bp, Homo sapiens
cgcagctccggccgcctggctccccatactagtcgccgttgtgcatgcctaaagggctatctttcaggacacaaacggacaat

SEQ ID NO: 118597 - DNA, 101 bp, Homo sapiens
tggacgtgcacgggatccacttccgcaaggaccctttggaaggccgggtgggccgagccaagaaggatcaagaaggtggagaagaaaagaaatctgtgcaa

SEQ ID NO: 118598 - DNA, 98 bp, Homo sapiens
ctgcacattaggttgcagtatgtggccagttatttgcctcagtaaaagattcttcaccaaaggacatggatgaaaatgaaagcaaccagtctctgatg

SEQ ID NO: 118599 - DNA, 100 bp, Homo sapiens
agcctctacttacatttcatctttttgatgcttttgtcagtgtactggtgttatccaagataaattctgtgggattataaacatttcagtagaaggcctg

SEQ ID NO: 118600 - DNA, 98 bp, Homo sapiens
gatggctgacaagaacatccagtattatgagaaggtccttgaatgggcaagagggcacatgaagtacggcgtcctccacattcacggcctctacacgg

SEQ ID NO: 118601 - DNA, 100 bp, Homo sapiens
gattctagaggggtgacagcgaaactctcttccagttgcgcctcttctccttggtggtcttcttaagcaacagactcttccacaagacagtctacctgca

SEQ ID NO: 118602 - DNA, 98 bp, Homo sapiens
tctatacactttgttcccgggagctgtcggctggtggaggtggttgtgtcaaaccgattggtgacatctccatgctgtattgtcacaagcacatatgg

SEQ ID NO: 118603 - DNA, 83 bp, Homo sapiens
gcggagagactcgccggccgagggtggccctaggggcagcgagcaagacagcaagcaggtcgcaatggaagaagagatcgccg

SEQ ID NO: 118604 - DNA, 82 bp, Homo sapiens
atcttcctcctgtgcaccctcttcatcagattgatccaaatcctgatcagtcagcagatgatagaccatcctgcccctctcg

SEQ ID NO: 118605 - DNA, 83 bp, Homo sapiens
ttaatgatggcagtacagtcaggagtggttaatgtgttgctaacaactccactctgggtggtaaacaccagactgaagcttca

SEQ ID NO: 118606 - DNA, 100 bp, Homo sapiens
ttcagatgaaaatatcactacgattcagtgctactcccttagtaactatgcagttttaatggttttcctttggaatatggataaatacaccatgatacgg

SEQ ID NO: 118607 - DNA, 83 bp, Homo sapiens
gtcagccgatgcaccgagtccagcccaggaaaatggagagcgctggccgcgcgccgaacccgagtccggcggcaccgacgacg

SEQ ID NO: 118608 - DNA, 100 bp, Homo sapiens
tttctacagaaatgagatccgcttcctgcccaacgggggtgagaacatcaaaagcatcaaccagcagtcaggggcgcacgtggagcttcagaggaacccc

SEQ ID NO: 118609 - DNA, 95 bp, Homo sapiens
gctggcagcagcatctcagcccaagagaagctctgatccagtatatacggcctgtgttcgtgtcccggtcagaccaggattctcgcaggaaaaca

SEQ ID NO: 118610 - DNA, 74 bp, Homo sapiens
cctggaccgtttcttctcatctcccttgtggcacccatgctcctgtcagagtcagagttggaatcagggctacg

SEQ ID NO: 118611 - DNA, 75 bp, Homo sapiens
cttgtttaatgactttggtgccctcaacatctctcagagacgaaagctcatgatggagcagtccaagaagtcctc

SEQ ID NO: 118612 - DNA, 90 bp, Homo sapiens
ccatgttttacatttctttccagaattatacaatatttggttttacaactgcctacagcatgctttggaaagggaaacgatgactaactt

SEQ ID NO: 118613 - DNA, 83 bp, Homo sapiens
ccctcctggtcccatcctccggcttcatctaccagcaaaccagtccagctacgggggcccagccagccagcagctgagtgggg

SEQ ID NO: 118614 - DNA, 83 bp, Homo sapiens
gggcgcggatcgaccggagcagagagctggcgagcaaggctatgactttgcagccgtcctggagtggttcgcggagcgtgtgg

SEQ ID NO: 118615 - DNA, 82 bp, Homo sapiens
ggatggcgtgcagcgcaaccacgagacggccttccaagaagaagaaaggagggcgcgggctaatgaccgagaatacaatgag

SEQ ID NO: 118616 - DNA, 82 bp, Homo sapiens
aaatttgatccacccttaagaaaggagacagaaccacatcatgaacttaaaaatccagttacactcttaaaggaattgtcag

SEQ ID NO: 118617 - DNA, 89 bp, Homo sapiens
gcagttcttggacttggccatgtgagatacaaggctacacagagacagatcaaagcagctcgtacaggtttgcagattccgccagcagc

SEQ ID NO: 118618 - DNA, 83 bp, Homo sapiens
accaggacctggacccggacccaaagtgccatgtctttaattgtactaatggtcacttgatgtgcgctggctgttttatccac

SEQ ID NO: 118619 - DNA, 98 bp, Homo sapiens
gagtttcgctctaaactgcccttgaaatgaagctggacttggagtttcaccagtgatcattaaagaatgggcagcttacaaaggaaagtctcctcaaa

SEQ ID NO: 118620 - DNA, 75 bp, Homo sapiens
ctctgagctcactttgtgcactgagtaaaacgatgtttgcagaaatggaaatcattggtcagtttaacctgggat

SEQ ID NO: 118621 - DNA, 90 bp, Homo sapiens
ggttctaagtgatgtccaggaaggaggaggaataatatttatggagcatatattatggaacacagtgaatcaaaaactctggttttaagc

SEQ ID NO: 118622 - DNA, 98 bp, Homo sapiens
ccgccaccgcgagctggagaaggaggtccgcgcgggccagctggactgtgctgctgccatctcggctcactgcaacctccctgcctgattctcctgac

SEQ ID NO: 118623 - DNA, 75 bp, Homo sapiens
cctggccttctgtatcttcatggtgcggctcatcttcgagagggatcaccgtggttcttagtatttggggtcttc

SEQ ID NO: 118624 - DNA, 82 bp, Homo sapiens
gaattttccattggtggcattcttcaccaacaggaaaagagcactggttgccattggtacccatgatttggacactttgtcg

SEQ ID NO: 118625 - DNA, 75 bp, Homo sapiens
ttttgcttcagcgttctgtggttgtcaacaggtgccttggaacactatgttaattgcctggatctggtaaacaag

SEQ ID NO: 118626 - DNA, 98 bp, Homo sapiens
ggaggcagtaaattcttcagctgctcggacagatgaagctccccaaggagctgcagggagaccaaattttgaggaaggtggaccaacatcagtaggga

SEQ ID NO: 118627 - DNA, 100 bp, Homo sapiens
gagatgaaggcagtggacacacagcatggagaaatccttcgcaatgtcaccatcctacgagctttggcagcatgtaagcagctgtttgccaagaacccag

SEQ ID NO: 118628 - DNA, 75 bp, Homo sapiens
cttttgagtgagatggtcccagaggcctggaggagcggactgctgcatatctatgtgagactgaattttcctctt

SEQ ID NO: 118629 - DNA, 101 bp, Homo sapiens
gaggagccatcagcttcagctccagctccgctctcttcggctgccccaatccccggcagctctctcaggattcagtggtcccaatttaaaggctattttat

SEQ ID NO: 118630 - DNA, 75 bp, Homo sapiens
gcggattcgggaactgactgctgtagttcagaagaggtttggagcaggtatgttaagaagttaggggattttgct

SEQ ID NO: 118631 - DNA, 140 bp, Homo sapiens
gtggcggtgaagcgtgaggccggcatcgtctttccgtcctctgaggcgacggccgcggctgcacaggtcctggtgcttgatggtcgaggccatctcctgggccgcctggcggccatcgtggctaaacaggtactgctggg

SEQ ID NO: 118632 - DNA, 82 bp, Homo sapiens
gagagatggagatgggcagacggattcatttagagctgcggaacaggacgccctctgataacactatggctatgcatcctcc

SEQ ID NO: 118633 - DNA, 101 bp, Homo sapiens
cctaccctttcgcgactgctgctgctgctgcccggacgtggaagcagcaagaggcgcttggtcaagacacactgacgatgtgaactatgaagactttactt

SEQ ID NO: 118634 - DNA, 74 bp, Homo sapiens
agctggccaaagcctgcccagacggctcacctgtgcgggatggaacaaaagctttatcttcaagccaggatgaa

SEQ ID NO: 118635 - DNA, 83 bp, Homo sapiens
ctttctcggcgccgcggctcttttctaaaagtacaatgcagatcttcgtgaagactctgactggtaagaccatcaccctcgag

SEQ ID NO: 118636 - DNA, 75 bp, Homo sapiens
cctaggcgaagatccggactctgggtgttttgctaccgtgaccgtttagcgttttaccaacgaggatcatttggc

SEQ ID NO: 118637 - DNA, 82 bp, Homo sapiens
tcgccagcccgtgccgcgagcgcggcctgcaggaggtctgcgaggaacagaagtgcgaggaggaggtcttcccgctggccat

SEQ ID NO: 118638 - DNA, 100 bp, Homo sapiens
cttccctcggtctgggcttctctgaggcggcgagagatggtcaggtctggagctcgaccgggccaggctgtgtttgatgtggacaagaagaaagggttga

SEQ ID NO: 118639 - DNA, 75 bp, Homo sapiens
tgaagagcgacaagccgctggcagccgcggatctcaccgccgctcaggagcactgcagtttcctcctgaaggctg

SEQ ID NO: 118640 - DNA, 95 bp, Homo sapiens
gctgcgaccccgactacctgcgcggcgcgctcggccgcctcaaggtcgcccaagtgatcacacgcgctgcaacgtgtggattctggatggagact

SEQ ID NO: 118641 - DNA, 87 bp, Homo sapiens
aaaatacccgcaacagccccttcgtcccaataccttccactggaagaatctcaaacagcgctacttactcaggatcagtggcaccag

SEQ ID NO: 118642 - DNA, 74 bp, Homo sapiens
atataatcctggtgttatcaaaggtgtttgattgcatcgaggtctatgcccctggcttcaaggactctgtggtt

SEQ ID NO: 118643 - DNA, 74 bp, Homo sapiens
tcgatctcagagctcagacacagagcagcagtcccctacaagggctatatccgacagtgccgcaagcacacagg

SEQ ID NO: 118644 - DNA, 74 bp, Homo sapiens
gaaaggtgaccaagcccaaagaggagaaagatgcttctaaggcaaggacacccaggcccattattttcctccag

SEQ ID NO: 118645 - DNA, 100 bp, Homo sapiens
tcatctgatgtggtgcttttgaaccactggaaagtgaggaattttgaagtacaccgtggtgacattgtatcattggtggaacgtgctcagtcactttcaa

SEQ ID NO: 118646 - DNA, 137 bp, Homo sapiens
ctcaggaccgcgcgccgtggtctgaggtccgcggcagggtcccgcatggcggcgcacaggaagcacggacctggcctgggccgtcagctactacatccggttcttcatcacctacatccctttctacggcatcctgg

SEQ ID NO: 118647 - DNA, 75 bp, Homo sapiens
tctttctggcctggaggctatccagcgcttcagtttcacattcttggtacctcctggtggtgcctgggagggagc

SEQ ID NO: 118648 - DNA, 76 bp, Homo sapiens
cgaagagctgcagctcctcctgtgcgggccctgagcctgtgcaattatttcgagagtcaaaatgtggatttccgag

SEQ ID NO: 118649 - DNA, 87 bp, Homo sapiens
atgggttgttcagtcacttctaaaggagtcattcacctaaccaagagagctcagaaatatgctcagcaagtcttgcagaaggaatgt

SEQ ID NO: 118650 - DNA, 75 bp, Homo sapiens
gtctgatgagaagctgttcctcgttctcttttttgataataagagaagttggtttttagaacttcagccataaaa

SEQ ID NO: 118651 - DNA, 83 bp, Homo sapiens
aggagctctgctcaaagccagacggttgaaggtcgaggagctggaaggcgagcggagtcggctggaggaggaaaagaggatgc

SEQ ID NO: 118652 - DNA, 83 bp, Homo sapiens
gccagagcgccggcaagagctcggtgctggagaacttcgtgggccggtattgttgcagcatctggcagtgagactgaggatga

SEQ ID NO: 118653 - DNA, 83 bp, Homo sapiens
agaagctacaaacaagaaatgggaaaactcgaaacagattttgatttgtactgtgttcgcagtgacctggggaacctgctcaa

SEQ ID NO: 118654 - DNA, 100 bp, Homo sapiens
ctggtgcagcttcacctggccgggctgcgtcgcttcgatgccgcgcaggccggatcacctcaacagtcacgtcagacaagtgcactcaacagaacggccc

SEQ ID NO: 118655 - DNA, 98 bp, Homo sapiens
cagctgggcctgacagagaaggctcactcaaggatcagttggctttagcaattggttgggtatctacagccattggttgctgttcaggtcagctttgc

SEQ ID NO: 118656 - DNA, 90 bp, Homo sapiens
cgggtttggaggaccctcttcgccttcggagagcagagtcaacacggagattggtttatcttggaagctaaagggcattgctcatcctga

SEQ ID NO: 118657 - DNA, 90 bp, Homo sapiens
ctcaccaggctgcaagaacagtgctggggctcggtctggggttcttgcagctggcaccagccctcccggccccggccgcccacccgccgc

SEQ ID NO: 118658 - DNA, 83 bp, Homo sapiens
tttaaaacttcgccagaattttgaagtaagaactctgctagagaggaaatggctgcttcatcatcatcctcctcagctggtgg

SEQ ID NO: 118659 - DNA, 99 bp, Homo sapiens
ggcagaggtggaggcgctttgaaagggaacagaaagaacagcttcaaaagatgaaagacttcgggtctgagccacagatggctgaccatctaccacctc

SEQ ID NO: 118660 - DNA, 50 bp, Homo sapiens
cgcctggcagcagagaccaccagaagggcgcacatggcacagcactcaag

SEQ ID NO: 118661 - DNA, 98 bp, Homo sapiens
cctgctcaccctgatgggcttcaggctggagggcattttcccagcggcgctgctgcccctgttgctgaccatgaggggtctggttgctgcttacagtg

SEQ ID NO: 118662 - DNA, 82 bp, Homo sapiens
tgataagaatatctcttctgcacagattgttgttggaactgataatgggagagaagcaattgaaagtggggctgcatttctc

SEQ ID NO: 118663 - DNA, 97 bp, Homo sapiens
aaaagacggacagcccatcgtgtgaactatagagtttgtggacagatttatattggcattcctagagaagtacggatacctcaatgaacaggtcccc

SEQ ID NO: 118664 - DNA, 74 bp, Homo sapiens
gagcgggcggcttcctggcctgggcgctccggtggcggcggaggttattcagcttctcaaggctggaaaagcga

SEQ ID NO: 118665 - DNA, 100 bp, Homo sapiens
ccggaatgtcatccagcgagtgattagataagctccgaagaagtatgcctaacctagcccggatgccaagtacaactgccattagtagcaacattagttc

SEQ ID NO: 118666 - DNA, 100 bp, Homo sapiens
gctccctcattaccgtcgccagcggagcgaacccgagagcgtggagcgggctgggccagactgtcccaggtgccctccggctctttgtaaatggagaggt

SEQ ID NO: 118667 - DNA, 100 bp, Homo sapiens
ggggagccctgccctcctggttcggcctccccgcgcactagaacgtgccaacaatatgcccaagcaggtggaagtgcgaatgcacgacagtcatcttggc

SEQ ID NO: 118668 - DNA, 100 bp, Homo sapiens
ttactttacagataccagttcctttgtcaagagcatactttggaccctgttttcagaaagcagaatgatatggaacctagcaaagctgttccactgaatg

SEQ ID NO: 118669 - DNA, 100 bp, Homo sapiens
tccgcgcggagccgagccggaactgcggcagtctctccctgccaggctcttcatccaagccgagagacacacaagattgcagtattttatgttgctgaag

SEQ ID NO: 118670 - DNA, 74 bp, Homo sapiens
gacctgccccttgtcctggccccgggggggccctcagcctcttggccttgaacgggctgttcatcttgattcac

SEQ ID NO: 118671 - DNA, 82 bp, Homo sapiens
gtgctgcgttcacaggtgtttctgcggcaggaggctactcacagtcgaactacaactccccggggtccggccagaactacag

SEQ ID NO: 118672 - DNA, 74 bp, Homo sapiens
ctacaactacctgcaggtcgcctacttcaagctccacagcacctgttgccttcattagcagcttttcctcctct

SEQ ID NO: 118673 - DNA, 75 bp, Homo sapiens
gcatgaaccaaacccacttcgttcaagacaggtgtttaagcactgccatcagtgagaattatcagacaatgtcgg

SEQ ID NO: 118674 - DNA, 75 bp, Homo sapiens
caccttcatggcccctttatagctggggacaagggcctgtccgacacgccctacgacagcagcgccagctacgag

SEQ ID NO: 118675 - DNA, 101 bp, Homo sapiens
gatttgcttctggaagcttagctctggagaagagcagcattcaggacaagcgaacagatggacccgattcagaaagctgtaataaaccatacattcggggt

SEQ ID NO: 118676 - DNA, 75 bp, Homo sapiens
gaatgtgtgcggacacactctgaatgtggcttcggctatggggaggatgcacagtgtgtgacgtgccggctgcac

SEQ ID NO: 118677 - DNA, 100 bp, Homo sapiens
cgagcacaacaggagctacgaggagttgacagggtctcactttgtcacccatgctggagtgtagtggagtgaacttagctcactgcagcctagacctcct

SEQ ID NO: 118678 - DNA, 90 bp, Homo sapiens
cttttgaaaggtgtactgcaaggaacaaaatgtttgtaaattctccttttaccaaggtacccggaaattaaagaggagctggaggagctg

SEQ ID NO: 118679 - DNA, 97 bp, Homo sapiens
gatccctcaagactggtccacggagtgtatgaccacaaacagccatcaaggtgctggagaatctggtaaaagcaccattgtgaagcagatgaggatc

SEQ ID NO: 118680 - DNA, 51 bp, Homo sapiens
catcatccagaagctagagccgcaaagatatatcccctggggcagctggtg

SEQ ID NO: 118681 - DNA, 82 bp, Homo sapiens
ccccctacccgcttctcgtagtcctgggagcacagcagaagtgtctgagaaagaaccccagtttaagtttatctacttcaac

SEQ ID NO: 118682 - DNA, 83 bp, Homo sapiens
cgggaagagaagatcatcgagcatttcaaacgagaagcctgtgtctcccaaatcaggaacactgaagagccctcccaaaggat

SEQ ID NO: 118683 - DNA, 75 bp, Homo sapiens
ccgccgtgccgcatgagcatcgcggagcttgacccgtccatcgctgtggttacaggaggttccagtggcatcggg

SEQ ID NO: 118684 - DNA, 50 bp, Homo sapiens
tgctactgcgaagacagctggcagggcgtgatggtgggcatgggtcagaa

SEQ ID NO: 118685 - DNA, 82 bp, Homo sapiens
ttttgggtcttcttcttaatcccatatctggacatctggaacatccatgctttccgcttggccctcatccagcttcagattt

SEQ ID NO: 118686 - DNA, 100 bp, Homo sapiens
acctgaccatgcttgacactgcccttcaggactacatcgagggcacaggtgcccgaccatacactgggaaagttggtgctgaggatgccgatgggattga

SEQ ID NO: 118687 - DNA, 100 bp, Homo sapiens
tttcgaggcatttgacttgtttgatgttcgtgactttggaaagagtgcagcagctgccccgagccccgtgcttggcaacattccccccaacgatgggatg

SEQ ID NO: 118688 - DNA, 75 bp, Homo sapiens
gagagtggccccagccgggccagaagcagctcctgtatgacagccccaaggcccggcaggaggtagaccatcact

SEQ ID NO: 118689 - DNA, 46 bp, Homo sapiens
aaaagcactgactgctctgcttaagcaacttcagagtggacgttgg

SEQ ID NO: 118690 - DNA, 100 bp, Homo sapiens
gctggctggcttcagtggaccactgtttttctgatcgaggctctctgaagagcataatgcagtccaacacattaaccaaagatgaggatgtgcagcggga

SEQ ID NO: 118691 - DNA, 82 bp, Homo sapiens
aaaatggctatgcccttcaacaaaacctggtgaagaatgtctgaatctgaacaggctcttaaaggtacttctcagattaaat

SEQ ID NO: 118692 - DNA, 82 bp, Homo sapiens
gtaccatggcggagaagactcaaaagagacaatgcagatcttcgtgaagactctgactggtaagaccatcaccctcgaggtt

SEQ ID NO: 118693 - DNA, 75 bp, Homo sapiens
ccgggcggattccagccccgagcgggacagcgcggcggggagcgacgagtcccgcaggctcccgatggcgagatt

SEQ ID NO: 118694 - DNA, 97 bp, Homo sapiens
ctgggatcagaagttgtcactcattgtcatgttgacgactctcacagaacgagggcggcactggctggatcatgccaaacccataaaaaagcagatg

SEQ ID NO: 118695 - DNA, 51 bp, Homo sapiens
ctgggtcctacctgtcagagccccaaggggaacgcccttttgcttgtgact

SEQ ID NO: 118696 - DNA, 83 bp, Homo sapiens
gccgagggtttgatgaaggtggaggcagcgcggctctcagacctgcctagagctggaacgttacctccagagcgagccctgct

SEQ ID NO: 118697 - DNA, 75 bp, Homo sapiens
ttgacccttctactttgcagatgtgggcaaacggccaaaagagaaacattggctactttgacaaccttaaagcgg

SEQ ID NO: 118698 - DNA, 111 bp, Homo sapiens
ggattttgtaatggaagggcatggcaagactccacctcctggtgaagaaagcaaacaggaagaaggaggggccggcgtcagtgacgtcagcgagaccgaggtgagcgtggg

SEQ ID NO: 118699 - DNA, 143 bp, Homo sapiens
gcaaatactggaagaacctcacctttgtctccccgatctacggggctgacatcagcggctctttgtatgatgacccacaatggtgcgcatgaatgtcctggcagatgctctcaagagtatcaacaatgccgaaaagagaggca

SEQ ID NO: 118700 - DNA, 99 bp, Homo sapiens
ggaattcggggcgagccagagagggcccacacgactagaaggacgactgcctggcgcgatacaaaaatgacttgattattcttagaaatgcacttgacc

SEQ ID NO: 118701 - DNA, 97 bp, Homo sapiens
catttcacggtggccttgtggagacaacgccttaacccaaggaagtgactcaaactgtgagaacttcaggagaagaagtcctcaccagtgaacggag

SEQ ID NO: 118702 - DNA, 90 bp, Homo sapiens
tccagagaatgtttcagagaaagttacgtggagcgtgggcgtttcgcagactcctaagaatttctctgcaaagaatgtccaaaaattcat

SEQ ID NO: 118703 - DNA, 75 bp, Homo sapiens
aaaaaatgcccagcgcggcgcggggctgcggagtcgtccggagccgctgcgcgcttaaagaagtcttctgctgaa

SEQ ID NO: 118704 - DNA, 82 bp, Homo sapiens
caggctgagaaaagcgagaccgcgtgcgaggaccggtcttgagtcaccacgtccgaatataattcttgggttagtaatctgc

SEQ ID NO: 118705 - DNA, 99 bp, Homo sapiens
aagagtactacgccaaggaggtttacaaaatagacatgccgcccttcttcccctccgaaagttgccgaggagcccaagtagaagaaatatggagtttag

SEQ ID NO: 118706 - DNA, 100 bp, Homo sapiens
atttcccatggaaggaggacagaaggaccccaagcagcggatcatcccctttctgccagttatttcgagaagtacgaataatgaagatactgaatcatcc

SEQ ID NO: 118707 - DNA, 95 bp, Homo sapiens
cgtacgtcactaccactgtctctgctcacagtgccaagattggagacccacagttggtgatctgtatggactgctcggcagacaccatgaccaac

SEQ ID NO: 118708 - DNA, 75 bp, Homo sapiens
gcaagttttcacttatctcgaaagcctatcagcatagttaagatcaatgtccgagttaccaccatggatgcagag

SEQ ID NO: 118709 - DNA, 80 bp, Homo sapiens
tcaacttggatcaaaatatattttggaaacctgtgaaggtcgaaacagctgcgtttcctgttttaatgttagcgttgtta

SEQ ID NO: 118710 - DNA, 90 bp, Homo sapiens
tggtgctgtttgaaacgtctgtgggttacgccatctttaaggtcttccaagatttaccagccaaccagaaccttcctcagtttatgctgg

SEQ ID NO: 118711 - DNA, 83 bp, Homo sapiens
cgaataccctatttaggttttaaacagagttatcaatactctggctgaccatcatcatcgtgggactgactttggtggaagtc

SEQ ID NO: 118712 - DNA, 100 bp, Homo sapiens
accatgtccgcccaggcgcagatgcgggccctgctggaccagctcatgggcacggctcgggacgggcttttgccaagaggcagcagcagctgaccgccat

SEQ ID NO: 118713 - DNA, 100 bp, Homo sapiens
gcaaggaaaagatccctggaatatgaagagacacagtatggtagccacacccccaggagtacgaccccagcaaagcgacctttgtgaaggtggtgccaac

SEQ ID NO: 118714 - DNA, 100 bp, Homo sapiens
atgagattttctactgcacttttaggagattagatcctgaggaaaaccatacagctgaattggtcatcccaggagaaaaggaaatgtctgcagagttgga

SEQ ID NO: 118715 - DNA, 98 bp, Homo sapiens
tgaagaaattggaggaggtgcagaaggtggacagggtaaaagaaagagacttttttctaaagaatgtcaagagcaatctgaatccaaatgcaaaggag

SEQ ID NO: 118716 - DNA, 109 bp, Homo sapiens
cacgccagtgagggagatggagaccaatcacccacccagtgtgcggacctgcacgctgccttgctgttggagatctgtgcagtaggcagttgtggaattaaaagcaaca

SEQ ID NO: 118717 - DNA, 71 bp, Homo sapiens
ccagggcactggtaatttggctagaggaccgcgcggaggcagcgggagctggactggccattatggaggag

SEQ ID NO: 118718 - DNA, 83 bp, Homo sapiens
ctccactccccagctgtgaaaggacaatgcagatcttcgtgaagactctgactggtaagaccatcaccctcgaggttgagccc

SEQ ID NO: 118719 - DNA, 100 bp, Homo sapiens
gaaattgggtcttccacctcgagctcttcagaaacagttgttaagcttcgtggccagagtactgattctcttccacaggaaaacgttactgctaatgtca

SEQ ID NO: 118720 - DNA, 74 bp, Homo sapiens
ttttctacagtaatcctcgcttccatgggctccggggattccttgccgctggtgaaatcgatcccttaaataga

SEQ ID NO: 118721 - DNA, 97 bp, Homo sapiens
gtctggcaccttttaaaggtctgatcatcaattgtctctctgggcggccacctatgagacttcatctgtgtggttaatgttgaagaaggaaaatgcg

SEQ ID NO: 118722 - DNA, 98 bp, Homo sapiens
gaagaaaaagggactattccgacccattgaaaacaaggacgatgcatttacagattctctacagaggaaactgcactgcaaacaagatggggaagaag

SEQ ID NO: 118723 - DNA, 75 bp, Homo sapiens
ttgagaagagatttaaatttccatgtcttcttggaatataatcaagatgcatgaatcatacaaaactcaatatag

SEQ ID NO: 118724 - DNA, 75 bp, Homo sapiens
atgtgatgttagagaactacagaaacctgatcttccttgtgtgtcccggcatggatatccggaacaacctcacta

SEQ ID NO: 118725 - DNA, 75 bp, Homo sapiens
ttggggccaaaaaacagggccttctccttcacctgccctgcagccattcagatctccatttgccaggagatgccc

SEQ ID NO: 118726 - DNA, 100 bp, Homo sapiens
gacagaaaagaaagacagaaaaatagagcctctattaatggacacttctataaccatgaatttggatttaggtggcgagtagaaaaagaagtaatttcag

SEQ ID NO: 118727 - DNA, 88 bp, Homo sapiens
acgtcgtgatccagaagtccagagctgaggactgcctgtttgcaggtgaccattgtgaggtagatattttgttctaattttccagatg

SEQ ID NO: 118728 - DNA, 87 bp, Homo sapiens
tacaggaacagggcagacgttagcgtgagtgatcactctcaatcccggctgagtcagtgctgattctctcaaatagagcttgaagga

SEQ ID NO: 118729 - DNA, 90 bp, Homo sapiens
ttgttttggcctaggatcatccagtgactctgacagttggcagtgtgaacctagagatccacaatggcttcatcctcgggaagattcagc

SEQ ID NO: 118730 - DNA, 74 bp, Homo sapiens
gccacgtgcagacatctacaaccttcgatctcctgacgacactgctcagcacgcaggcatgtgaggaagctggg

SEQ ID NO: 118731 - DNA, 99 bp, Homo sapiens
ccggaccttcaagactgtctttgctgagcacatcagtgatgaatgcaagaggcgtttctataagaattgtgtctagttctggctcctaccagagagctt

SEQ ID NO: 118732 - DNA, 102 bp, Homo sapiens
cctgcagaaggattagtagctaatgtgattacagcaggagattatgaccttaacatcagtggtgttatgaagcggagattgaggagatagatgaagaaaatg

SEQ ID NO: 118733 - DNA, 119 bp, Homo sapiens
ctccatctaccagtcaaagttggttacaaaggcatatgctgacacacagtggagacaaacctttcaaggctgctctttggcgtaaattgcaatcgattagggatcgtttctcagaatca

SEQ ID NO: 118734 - DNA, 100 bp, Homo sapiens
taaagcacttccagagcctgtccggagctcagaggttcggaagacttatcgaccatgaaaaagggtgcagacgtctggttcaaagagttggatatcaaca

SEQ ID NO: 118735 - DNA, 99 bp, Homo sapiens
ttaagacggtctacaaaggtctggacactgaaaccaccgtggaagtcgcctggtgtgaactgcagcacatgcagatgacaatccaggctctccaggatg

SEQ ID NO: 118736 - DNA, 100 bp, Homo sapiens
atggagaactgggaccttgttacttatagatgggactgagtatgggctgagtgaagctgacatggaggcctcctacgccacagtgaagagcatggcggaa

SEQ ID NO: 118737 - DNA, 90 bp, Homo sapiens
ccaagccttcccagttatcataaccttgaatggcgactagatgtacagttgcaggacgaggagcggaggcggcagcagcagttagaagag

SEQ ID NO: 118738 - DNA, 100 bp, Homo sapiens
cctttgctgcaaaaaattacggcatcacaggacatggccccctcagccacctagctggggcccatctaggagtggcatcttttttggtgccctgaaggcc

SEQ ID NO: 118739 - DNA, 100 bp, Homo sapiens
atgagaggattacctttccaagccaatgcccaagacattataaactgtcgatacaccctgcaatacacctacccatatgcatattacatggagtccggac

SEQ ID NO: 118740 - DNA, 99 bp, Homo sapiens
gtccggaccggagactttggggcctaactagcagataagcagagagccctagaagaaaccaaagcctacaccacccaatccttagcaagtgttgcctat

SEQ ID NO: 118741 - DNA, 101 bp, Homo sapiens
cagaaagtcaagaagacagcggaagctggaggagtgacaggcacgtgtggttctcaaatataggcattctgatgggaacttgtgtgttaaagtaacagatg

SEQ ID NO: 118742 - DNA, 98 bp, Homo sapiens
ttcaccctctcgcctcgggtctcgggggccgctctgggatcccggccaccagcaattgtccgacttaattcagtgcacaaatgagatgaatgtgaaca

SEQ ID NO: 118743 - DNA, 100 bp, Homo sapiens
ccctcctgtaacccagcctgtttcacttcttgaatttaagaagtgcaacatggccaggggctgcctctgctgcttgaagtacatgatgttcctcttcaat

SEQ ID NO: 118744 - DNA, 100 bp, Homo sapiens
tcttcaccgttatcatctatgttcggctggacttctccatcaccaagaaaaagcttgtggtgaaggggggcaaaaaaaagaagcaagttctgaagttcac

SEQ ID NO: 118745 - DNA, 100 bp, Homo sapiens
accctctttaagacgaattaaagggagattacacagaagcaaaagccttgatagcatggatttctgtgagctcactcatcagacaacagtcagcgctttc

SEQ ID NO: 118746 - DNA, 100 bp, Homo sapiens
cagctgcaggacaacggcaggacgtgtaaggcagtttcgccatgttccacaaggtcagagttcctcgccagagccttctgaaccggatgggagacgtcac

SEQ ID NO: 118747 - DNA, 101 bp, Homo sapiens
gccgggggaagctggccttgggggaacatccttctgtatcagaaattcccatgtttccatatccagatttcttcaccaaggcagataaagagttggcaaaa

SEQ ID NO: 118748 - DNA, 90 bp, Homo sapiens
gcttggtgtcctcctggcctcagcaacctgacaattctgtcgtgtcccggttagcatacgtatcaaggacagtaactaccatggctcccg

SEQ ID NO: 118749 - DNA, 98 bp, Homo sapiens
ccgcatcttcacaactccgtcttacagagaattgagaaagtgactgaccacctggaagccctcattgatccatttgacctggacgttttcacgccaca

SEQ ID NO: 118750 - DNA, 98 bp, Homo sapiens
ccgcgtgtcctcggagcgcggtccctgtattggtctcctgctcctagagatcgccacatcacagaatcgtatctatctcacagctgacaaccttgtgc

SEQ ID NO: 118751 - DNA, 83 bp, Homo sapiens
catctttgacaagtttgagtgttgctggaacggttcggatagccgagcctcttgaagccattcttacagatgatgaaccagac

SEQ ID NO: 118752 - DNA, 51 bp, Homo sapiens
cggagcagacacagactatgcagatgggagccctgcaggttgtccctgacc

SEQ ID NO: 118753 - DNA, 101 bp, Homo sapiens
gtctgcctgtgtccctgaccatggctccctgcagtaccctttaacggtcaatgagtggtcattgaagataagaaaggaaatgagagttgttgacaggcaaa

SEQ ID NO: 118754 - DNA, 100 bp, Homo sapiens
ctggctgcagggacccggtgacagcgtgagaggttttgaaagagggaaggaagatatttctcaaaataaagatgaatcttcactttctatgtcaaagagc

SEQ ID NO: 118755 - DNA, 74 bp, Homo sapiens
gaaaacccggagtgccccgcacagtgctgcatggctaaaggtgaaaactagccccagagatgccacaaaagagc

SEQ ID NO: 118756 - DNA, 90 bp, Homo sapiens
tgtggttctcaaatataggcattctgatgggaacttgtgtgttaaagtaacagatgatttagttgtatataatgtttacatggcagggag

SEQ ID NO: 118757 - DNA, 48 bp, Homo sapiens
ctcccgaatagctgcgattacagtgagttattctccccacctcagaag

SEQ ID NO: 118758 - DNA, 83 bp, Homo sapiens
tccgagaagagcagagcggagggagccccagacacggtcttgagtcaccacgtccgaatataattcttgggttagtaatctgc

SEQ ID NO: 118759 - DNA, 100 bp, Homo sapiens
caggagaagccgcccaaagaactgatcgccggggagtggcctgtacagcaacctccagcagtacgatctcccgtaccccgaggccatttttgaactccca

SEQ ID NO: 118760 - DNA, 51 bp, Homo sapiens
aaattcatcccagaaatctaagaggccgtcgctttcgggttctctcatcgc

SEQ ID NO: 118761 - DNA, 133 bp, Homo sapiens
ctccagtgctttggtctgttgtgctggcttggtgacgctcacagtgctgggaaggaatctatccaaggtaatgtttgaaacttaccagttttccggtgtatatgtagccatccaggcagttctgactttgtac

SEQ ID NO: 118762 - DNA, 90 bp, Homo sapiens
agacttacatcgatgaccttggacacctccatgttatggacacggtctttcttattcagcaggaggattctttgtttgcatctatgccac

SEQ ID NO: 118763 - DNA, 96 bp, Homo sapiens
tgtgcagtggcacctgcgcgaagctggccaaagcctgcccagacggctcacctgtgcgggatggaacaaaagatattgatgatgttaagaagttca

SEQ ID NO: 118764 - DNA, 100 bp, Homo sapiens
tctgaagtcaagtgctgtaaggaagctgtgtgtgtcattgacatgtcctctttcacaaagtttgagataacagacacaactcagatgggaagttcatcgc

SEQ ID NO: 118765 - DNA, 88 bp, Homo sapiens
ggaaaatgccctcaaacgcgccaacgtgtggcaaaggagcagagaactttgacaagttcttcacacgaggacagcccgtcttaacacc

SEQ ID NO: 118766 - DNA, 74 bp, Homo sapiens
atcaagccaggagagcatatgatctgccagcaatacatctccaaggatcaagcaaccccttctgagcctgagat

SEQ ID NO: 118767 - DNA, 74 bp, Homo sapiens
aatattcacagttcataaactttcctatttatgtatggagcagcaagggtgatgcccggtatctgatctccaac

SEQ ID NO: 118768 - DNA, 100 bp, Homo sapiens
tgctctgctctaacaacatttagagctttgcttcccaaatttctccttcgaggacatctcaactcaacaaactgtgtcatcacgcagccactaacgggag

SEQ ID NO: 118769 - DNA, 74 bp, Homo sapiens
ctcagttggaagcagccgatccagcctgcggagcctgtggggcagcggccctccaggcactgaagcgtaagaag

SEQ ID NO: 118770 - DNA, 83 bp, Homo sapiens
ccttgaatagaggaaatgggatatcatctggtttgtgaaatggctgctgacatttctgaatccagcggggctgactgcaaagg

SEQ ID NO: 118771 - DNA, 82 bp, Homo sapiens
cgggcggcagcatgtcggtggcggggctgaagaagcagttctacaaggcgagccaggatgaacgtgaagccagagaaaatgt

SEQ ID NO: 118772 - DNA, 101 bp, Homo sapiens
tggactatttccctagcgaggacttctaccgctgcggctactgcaagaacgagtcgggcagccgctccaatggaaacctaacgaagcatatgaaatctaaa

SEQ ID NO: 118773 - DNA, 108 bp, Homo sapiens
gtcggtggggcccgaggccgaggggcccaggcagagcccggagaaaagccacatggggctgtttgcggggtggggtggggggttcgctatgtcggatgacgattcgag

SEQ ID NO: 118774 - DNA, 83 bp, Homo sapiens
ttgagcagtgttattgccagtggctccagcgtgggccacaacaacctgattcctttaggacagaagtggcggttgctgacgcc

SEQ ID NO: 118775 - DNA, 100 bp, Homo sapiens
agtgggctccgtgctgaattggttttctccggtccaggctttacagaagggaagaacttttaacttgacagcaggctatggagttactagtagagaaagc

SEQ ID NO: 118776 - DNA, 75 bp, Homo sapiens
cttggatactgattatggctcaggctaccccaatgttccagggtcacccccgagaggacaacaggcatctggaag

SEQ ID NO: 118777 - DNA, 83 bp, Homo sapiens
caatggcacaaagttctctcgatcagggcatacatctttcttcgacaaagggtggatccataaagaacccagccaacccgcag

SEQ ID NO: 118778 - DNA, 100 bp, Homo sapiens
gcagcggcggctggcgcttcctgcgcatcgtctgcaagaccgcgaggcgagacctctttcaccttcaggccattcagaggaggaaagagaggggaatatg

SEQ ID NO: 118779 - DNA, 100 bp, Homo sapiens
tcagatttgtgttgaaaccagcctcaagtttcacctatcctcactgatccgtggacttctgtatgatcagtagagatggggtttcgccatgttggccagg

SEQ ID NO: 118780 - DNA, 75 bp, Homo sapiens
tgggccacccctcctttcaggtcaaggctcagctgtcgcaggccctggaggagctgggaggccagaaacaaagag

SEQ ID NO: 118781 - DNA, 50 bp, Homo sapiens
ccccgcagaaagtgcctgtgcatcaggctggagcattggatttgctaaag

SEQ ID NO: 118782 - DNA, 100 bp, Homo sapiens
tgcggcttcagagaatccagatggagagagaaaggattcgaatgcgccaagaggagctcatgaggcaggttttaaatgcacagagagcaggatacaaggc

SEQ ID NO: 118783 - DNA, 75 bp, Homo sapiens
aagaccacaataaaagagacctctacttagctcagcaattcttaccttgcagcagaagatgtcgttttcattgga

SEQ ID NO: 118784 - DNA, 83 bp, Homo sapiens
aagtggtccgctttgccaagaagatggacaagatggtgcagaagaagaacgcggtgaaagaacttgtcctggacaacagtcgg

SEQ ID NO: 118785 - DNA, 101 bp, Homo sapiens
gctttcttgggctcagccccccagctgaccctacagctgtacataagtgtcatgcagcaggacgtcactgttggaagaaatgctgttgatggagtaatgaa

SEQ ID NO: 118786 - DNA, 100 bp, Homo sapiens
cacagctagaggccgcgcagcagcaaaggatgagcggaaccttggaaaaggtcttatatccagatggccaggctcagatgattcaccccaagcctgcaga

SEQ ID NO: 118787 - DNA, 73 bp, Homo sapiens
cgccctacaccgtggtctatttcccagttcgaggcctgctgggaacgggacttctaaaaggaactatgtctgg

SEQ ID NO: 118788 - DNA, 73 bp, Homo sapiens
tgaaacctaccccagagcctcccgcggcccacagagcacaggttgttgatgagcgtgaattttttgagatcat

SEQ ID NO: 118789 - DNA, 76 bp, Homo sapiens
gatgagccccggcacccccggaccgaccatgggcagatcccagtgatcctgccatgaagcagtttctgctgtactt

SEQ ID NO: 118790 - DNA, 100 bp, Homo sapiens
ccggcccacagtgggggtgtgcaaacccgagagaactggaaggccagggatgtaccgcctacgacgtagctgtcaacagcgacttctaccggaggatgca

SEQ ID NO: 118791 - DNA, 83 bp, Homo sapiens
gctgaaccaggcccttttggatcttcatgccctgggttctgcccgcacggacccccataatggctgcagtctgtccaggccac

SEQ ID NO: 118792 - DNA, 50 bp, Homo sapiens
taaaaggtgtcaagaagctcagaatgattgatgaactcccagagggcgct

SEQ ID NO: 118793 - DNA, 96 bp, Homo sapiens
cccttctgtgtcctctttacagagaacaatggcagatggatcgagtctcaacagatcaccccccaacttgcccttcaagttctacttcagtttgat

SEQ ID NO: 118794 - DNA, 75 bp, Homo sapiens
gtgaacattcatgcacaaatttttatgtggagaatgatatggaacctagcaaagctgttccactgaatgcatcta

SEQ ID NO: 118795 - DNA, 71 bp, Homo sapiens
aagtgcagctgcctcagttcttagcgcagttccagaaagctgagtctgatctggattacattcaatacagg

SEQ ID NO: 118796 - DNA, 102 bp, Homo sapiens
catatgttgaaagagaaggcagaattaaatcctgagctagatgctttactaggccatgctttacaagtatctggagtccatctttcaccatcttctcctgag

SEQ ID NO: 118797 - DNA, 95 bp, Homo sapiens
gcgccctctgcgcaaggaggagactcgacaacatgtcacccgcgctccaagacctgtcgcaacccgcgcttctctgaagtagctttggaaagtag

SEQ ID NO: 118798 - DNA, 75 bp, Homo sapiens
aaaagcaagctggttctctgggatataaataaggtcgctacccacaggagaacaagggaacctacatcccagtgc

SEQ ID NO: 118799 - DNA, 51 bp, Homo sapiens
ttgaagaactcttttgtacaacacaaaggttactcactataaacaatatcc

SEQ ID NO: 118800 - DNA, 75 bp, Homo sapiens
acagttaatcgtgatatcccaccccttacagagatcacaaaatggctcttcttcagatggcaacagtggaagaag

SEQ ID NO: 118801 - DNA, 114 bp, Homo sapiens
gctggacgccgacaccttcagcgccctggtcaagacgctgcagcgggactgcctggtgagaagccctaccactgcaactgggacggctgcggctggaagtttgcgcgctcagac

SEQ ID NO: 118802 - DNA, 100 bp, Homo sapiens
caaccttctcaacctcctgctgctgtctttgtttgccggattagatccttccaagtcccagcggcgtgtcacatttcacctgccagaaggctctcaggaa

SEQ ID NO: 118803 - DNA, 75 bp, Homo sapiens
gcgccttagaggagccatttttccagaaatgcactcggtgatggaaagagagccactattctgaagaacacttgg

SEQ ID NO: 118804 - DNA, 98 bp, Homo sapiens
ccccctctaacggctattcatacaccatgcaaaacagaaccttccaaatttccttttccaactaaggtcctaggcctacttacaagcctccagtctca

SEQ ID NO: 118805 - DNA, 100 bp, Homo sapiens
gggtgagtccctcacaaagggcggagcggggctgtcacctggagatcacggagggaagaatggtagctgagtggaggttgtctcgaggtgttgaagaaca

SEQ ID NO: 118806 - DNA, 98 bp, Homo sapiens
cggagtgtaggaagaggcactgctgagggggcgcgaggggaacggaggccagagctgcgtgctcaagtaaagctctttgtgacagggcttttcagctt

SEQ ID NO: 118807 - DNA, 82 bp, Homo sapiens
cccgggtccccgcgttcacagccccagcgcaggctcttttccacaatggcccccctgaccagcgcgtcgaccgcggccgcgc

SEQ ID NO: 118808 - DNA, 75 bp, Homo sapiens
gatgtcggagacacggtggaaacgcttatgtgtccaagacaaagattttggccacaggaggagcatctcacaata

SEQ ID NO: 118809 - DNA, 100 bp, Homo sapiens
cggcgaccccgataccgtgtaccagatgttttggtggctgatccaccaatagcccggttggactcttcacagaaattgggcccatgtcttgcttcatctc

SEQ ID NO: 118810 - DNA, 75 bp, Homo sapiens
tggaggcacagctgcagtctgacgagagggagtttatgtggccgaggcagacaagtggaattaggccttgctgca

SEQ ID NO: 118811 - DNA, 50 bp, Homo sapiens
aaccattaagcttgtgcgtcaagtcatgatgttctcaaatagtgatgaag

SEQ ID NO: 118812 - DNA, 91 bp, Homo sapiens
ggagccggtgccgcagctgcgatggccgtggccgtggggagaccgtctttggatatgtcaagtgaccagatagctgccaatctgcaagcag

SEQ ID NO: 118813 - DNA, 60 bp, Homo sapiens
gcctcccgagtacctgagattagcccagacagtgatgtgtgttctgaaattgtgaaccat

SEQ ID NO: 118814 - DNA, 83 bp, Homo sapiens
tgaaaggaaccactcattcacttctagacgacaaaatgcaaaaaaggaggccaaagactttgaaggaatgcagctcatttcag

SEQ ID NO: 118815 - DNA, 96 bp, Homo sapiens
tgtatcagagctcatcagagggtaaagttcacaaaagaccacactgtcagacagaaagaggaagtatctccagggaacgtgtgaaagaagaattgt

SEQ ID NO: 118816 - DNA, 75 bp, Homo sapiens
ctgctgtggaggctgaggaggcggcggcggagatctgggtatctactgagcgtttcagtcaacaatacagctcgt

SEQ ID NO: 118817 - DNA, 100 bp, Homo sapiens
tttctagatggagaaaacagaacctgaagacacccgtttccctaaactgctcttgctcatgtgccatttccaatccagaggaagaccttctagaagaagt

SEQ ID NO: 118818 - DNA, 100 bp, Homo sapiens
gtcttgatgggctacagttagagtctgaagttgttaccaatggtgaaactacatgttcagaaagtgtttggagaagagggattgaccctgaatcttgaag

SEQ ID NO: 118819 - DNA, 100 bp, Homo sapiens
gcagcatttgtcttgatattctacgatcacagtggtctccagcactaactatttcaaaaggtttcctatcctgggagcaggagagtgtgcctatttgaat

SEQ ID NO: 118820 - DNA, 74 bp, Homo sapiens
acgagattcaagattatttgcaacagctcacgggagcaagaacgattgtcactgctgttccaagggcacacgca

SEQ ID NO: 118821 - DNA, 74 bp, Homo sapiens
ggtaaacttcacaacatgatagttgatctggataatgtggtcaaaaagattcaggcttcttcaggagaaagcaa

SEQ ID NO: 118822 - DNA, 75 bp, Homo sapiens
actccaactcttgtggtgccacatcgtactgatggatttgctgaagcaattcatttccaaggcaggaaaggtaaa

SEQ ID NO: 118823 - DNA, 50 bp, Homo sapiens
ctgccagacaatagagcatatgggacttttcccatgctaaacagctcttt

SEQ ID NO: 118824 - DNA, 98 bp, Homo sapiens
ctcatggaatgatgccgcagatgatgccccctatgggagggccaccaatgggacaacaacagcttgcacaactacagaaagaaaaatcagagattctg

SEQ ID NO: 118825 - DNA, 96 bp, Homo sapiens
gttagacttctcaagtgcaattcaagatatccgaaggttcaattatgtggtcaaagtttctgaaggattgtcattcttgcatagcagtgtgaaaat

SEQ ID NO: 118826 - DNA, 85 bp, Homo sapiens
tatttgccttatgttatgggctatttgtgtagcagaaggttcaaaccttgtactactcagctgatcacaagctgcttgatgggaa

SEQ ID NO: 118827 - DNA, 83 bp, Homo sapiens
cagaaaacagtgtttacttggtttttgaatcagagccgacaggcacttgaattgaaaatggaaaaccctactgctggtggtgc

SEQ ID NO: 118828 - DNA, 97 bp, Homo sapiens
gcggcggaaaccgaaggggagccatggcggctgacagtcgggaggagaaagaagtgtcattgttgcagcaaaaaagtcagcagtctcaccttccacc

SEQ ID NO: 118829 - DNA, 75 bp, Homo sapiens
cgcagtggtcgcttcttctccttgggatgctgagaacttgctggagtcacagccactgggatcctttctcatcag

SEQ ID NO: 118830 - DNA, 100 bp, Homo sapiens
ttccctcccccttctttcgatcagagatcggcggagaccctcgaagtgcgcaaacttgacactcaccctgaccgccgattcgaagacagtctcttacacc

SEQ ID NO: 118831 - DNA, 99 bp, Homo sapiens
gtcaactttactgagaattttccacctcctgacacaacaccactcaggcctgtccttgatagtggtcgggaagcgaagtcccggagaagaacgtgcctg

SEQ ID NO: 118832 - DNA, 100 bp, Homo sapiens
agaccctacactttgaccatgctgtccggatgggtgtcacgtcttgaaattttaaatgtcctcagtgactctctacctctggcagatgatgttgaccttc

SEQ ID NO: 118833 - DNA, 110 bp, Homo sapiens
ggggggtaattcggggtctgggttctggtgccgcgcagctttccccggcagaggtggaggagacactgaagcgactgcagagccagaagggagtgcagggaatcatcgtc

SEQ ID NO: 118834 - DNA, 82 bp, Homo sapiens
tgaaagccactcaacaactctttatgtgacagatcagcttgaacgggtctttttacgacttggccatgctgaaacagatgaa

SEQ ID NO: 118835 - DNA, 96 bp, Homo sapiens
ctgcactgcgtgtgtgtggtgggcttcgacctggagctgggccaggccgtggaggttatacattggctcttcaaagacgttcacctcatcagagaa

SEQ ID NO: 118836 - DNA, 80 bp, Homo sapiens
atcatgggcaaaggacagatccagcttgccttgcgccatggactggcagccagacgagcagggcctgcagcaggtcctgc

SEQ ID NO: 118837 - DNA, 98 bp, Homo sapiens
tttctgatgaaaaccttcagaagatggaaaatgtgcttgatctttggagttcaggtcttaagataagtttataccatggatagcacaaaggagaagtg

SEQ ID NO: 118838 - DNA, 82 bp, Homo sapiens
cagaccctggagcctcagttggaagcagccgatccagcctgcggagcctgtggggcaggcgtttaaatgcagaattgcaggc

SEQ ID NO: 118839 - DNA, 100 bp, Homo sapiens
cctagcacccactcgagaattggctcagcagggtgagaaaattcatgaagacatctttgacatcatagaccgagaagcagatggaagtgacagtttggag

SEQ ID NO: 118840 - DNA, 87 bp, Homo sapiens
cagcaccgccagtgaatgccccagccttctcagcaccactgcagaggacagccttgcagtgagttcctcctcctaactcaggcttcc

SEQ ID NO: 118841 - DNA, 75 bp, Homo sapiens
ccgccccccaggaggggcgagagggagccgcagctgatgtcagaataatcatgggccagactgggaagaaatctg

SEQ ID NO: 118842 - DNA, 75 bp, Homo sapiens
cacttcgtcatgttcttcgcgccctgctacgagttccagggagctctgtcctggtgaccgtgcccgggttatgac

SEQ ID NO: 118843 - DNA, 100 bp, Homo sapiens
gggggacatggcctccttcttggctgtcgtcggggcgcccgggggagtcaactcctgtgtctttgagtgttccagatcgcgtatgtgattgtgaaggcag

SEQ ID NO: 118844 - DNA, 82 bp, Homo sapiens
caccattcccattgctccagatatgagaggacaggtctttcactaccattcctacagtgattggcaagataccgtttctacc

SEQ ID NO: 118845 - DNA, 83 bp, Homo sapiens
ctgaggaggaagacctggaagacagatctggaaataatgcaaaaggtgtcccaaggctcctgaccagtgaacaaagatttgag

SEQ ID NO: 118846 - DNA, 82 bp, Homo sapiens
tgctgattcacaattatggagactgtgtggaagttaaacgagctgagcctcgggacagcaagagccaagcgccgggacagcc

SEQ ID NO: 118847 - DNA, 82 bp, Homo sapiens
ttacatcaggaagatactgcagagatattctactccatctcattcattgtacaggggccaaaccagtgctcctgccacctct

SEQ ID NO: 118848 - DNA, 98 bp, Homo sapiens
gcgtcttctttcaggctgaggaccaggccccgtccccatgcctcggggtgcagtgtgcatttggggcgacgtgtgctgtgaagaacgggcaggcagcg

SEQ ID NO: 118849 - DNA, 100 bp, Homo sapiens
aacactaaaccacaaatatacaacaaggccattttctcaaacgagagtcagcctttaacggccactcgaccggatatgatcaggatcttgtcagcagccc

SEQ ID NO: 118850 - DNA, 100 bp, Homo sapiens
gcggcgacggagggggcggccgggtccgcatcgagaagatgagctcagaggtggtggattcgaatccctacaggcagttgcagtggtgcagaatggctga

SEQ ID NO: 118851 - DNA, 151 bp, Homo sapiens
cggcgcctcccctcacccccggccgccttccctccatccgttccagggacctcaccctcgggggagtcaagaaggtatctgagagcaagcagcaatagaaatttcctgcttaccatgagaccatttttaaaaagggccattttggtcctaa

SEQ ID NO: 118852 - DNA, 74 bp, Homo sapiens
tccagataaatataagctacaggcacatcttaaagttcacacagcactgattgcagagggaatggcatacatcg

SEQ ID NO: 118853 - DNA, 74 bp, Homo sapiens
ggacggcgggggccgagcccatgagtagggaggagaaacagaagcttgggcagcacaacaagattcgcagcgtg

SEQ ID NO: 118854 - DNA, 100 bp, Homo sapiens
ccagcgccgggccaaggccaaggccagccggactaaaacaaagcaaagagaaccctcctcaaggttgaggtcatgcagtgtcaccgacgcagttgcagaa

SEQ ID NO: 118855 - DNA, 124 bp, Homo sapiens
ggagcacttgagccacgtgcatgaaccaaacccacttcgttcaagacaggtgtttaagcggtatttctcaagctgccagatacgtttaccaacgactcatcaacgacgggattttgagccaagc

SEQ ID NO: 118856 - DNA, 101 bp, Homo sapiens
taaaggaacagccttccagcccggccccagtgaacgctcattgctatggacagtgctatcaccctgtggcagttccttcttcagctcctgcagaagcctca

SEQ ID NO: 118857 - DNA, 75 bp, Homo sapiens
gggcaagacagatatggaggctaaaaatatgtactacgaagccttggagagagctcagaaatatgctcagcaagt

SEQ ID NO: 118858 - DNA, 90 bp, Homo sapiens
tcctggtcgaggccacaaagacagatgttactgtggttaggtttccagtgagagagccatgtaatcatgccaacatcctgaccaagcccg

SEQ ID NO: 118859 - DNA, 75 bp, Homo sapiens
caagtgctggttctctttgaacagatgctggctgacaaacgggctcatcataatgcactggaacgaaaacgtagg

SEQ ID NO: 118860 - DNA, 100 bp, Homo sapiens
gtccgccccgcgagcacagagcctcgcctttgccgatccgccgcccgtccacacccgccgccaggtagtgtacactgataaaggtagggcgcggtggact

SEQ ID NO: 118861 - DNA, 100 bp, Homo sapiens
ggagactcctgaccctcagaatgaatttcgctaaggagtttgtgatcagtgatcggaaggagctggaggaagatttcatcaagagcgagctgaagaaggc

SEQ ID NO: 118862 - DNA, 98 bp, Homo sapiens
cgccggcgcgaggacagcgcgtgcccgcgaggagccgccgcgcgcccgcgccctccgcgcgacgccaggacactcatgaggaccatgatacttccact

SEQ ID NO: 118863 - DNA, 96 bp, Homo sapiens
agaagacaaacttgccaaagctacaagagacagggcacaagagactatagtccccggcagatggcagttcgcgagaaggtgtttgacgtaatcatc

SEQ ID NO: 118864 - DNA, 90 bp, Homo sapiens
cgccgtggtcaagttcaccatgagaggtctcaaaccatgaattatgtgggacagctggctgggcaggtgattgtcactgtgaaggaactc

SEQ ID NO: 118865 - DNA, 74 bp, Homo sapiens
tgcggagcaacgtcgcaccagcttttcctggcctacccgccgggtccctacgctacacctccggggtacggggc

SEQ ID NO: 118866 - DNA, 50 bp, Homo sapiens
ggataaaaccatccatcaattactaccaaagtcttttatgacatcaagag

SEQ ID NO: 118867 - DNA, 83 bp, Homo sapiens
gctggacatgaacttatatatgagaattgctccagaactctatcataagcacaacagatttgttttggactgtaaagacaaag

SEQ ID NO: 118868 - DNA, 98 bp, Homo sapiens
ggcggaggaaatggacataaacccgggttaatatgatcctctgttgaagcaagaagacaaactgtatggtggagaaagaagtgggaaggatctgcgcg

SEQ ID NO: 118869 - DNA, 96 bp, Homo sapiens
agcttcacattctcaggaactctccttctttggacttcaccacaagcaggaatgcagactcagcctcagatagcaactgctgcacaaataccaact

SEQ ID NO: 118870 - DNA, 113 bp, Homo sapiens
ctttgcggcctgccgacgagcctacttcaagagaaataagacactcctagaatatgcagagaaatggaaaacttcagaagatcctttacctttattggaggtatacacagtgg

SEQ ID NO: 118871 - DNA, 100 bp, Homo sapiens
ctcaggtcctcagaccaaccagcccaaggaacatcttgccaatttcaaatcgggagtggaagctggacacactatgtgacttgtatgaaaccctgaccat

SEQ ID NO: 118872 - DNA, 100 bp, Homo sapiens
ggaggatttgccctgccctggctgtggggacttgtacagcaaaagcacagcagccatgagcacttacacaggcatttttactgaccaagttctttctgtg

SEQ ID NO: 118873 - DNA, 97 bp, Homo sapiens
ctttccgagaatatggagatacaggtgaaatctgatcctgataacttaagtgactctctcttttccggtgatgaagaaaatgctgggactgaggaaa

SEQ ID NO: 118874 - DNA, 117 bp, Homo sapiens
agaacagaatgaagaaagtcagggggactgcaaaggccaatgttggtgctggcaaaaagcttttcgctgtggcctgcagtttttaggcaacattgcctcacggaatgaagattccca

SEQ ID NO: 118875 - DNA, 100 bp, Homo sapiens
ccgccgccgccggcgcggaaggacgaggctgaggcgagaaacgagaggcaatgccacttgctttgcttatggacagacaggtgctggaaagacctacacc

SEQ ID NO: 118876 - DNA, 50 bp, Homo sapiens
atcgctactattcaggactaatctatagataattgacgaccttgccaacc

SEQ ID NO: 118877 - DNA, 100 bp, Homo sapiens
tcttcacagcacagttcctgggaaggtggagccaccagcctctccttgtacgaggatgtcgtccaggaaagattgtgcagatgactgaagcagaagttcg

SEQ ID NO: 118878 - DNA, 100 bp, Homo sapiens
ttcgatctgcttctgatgaaggcagctgcaatgactctccgcacggtattattgtcattgcaagcactattggcagctgcagagccagatgatccacagg

SEQ ID NO: 118879 - DNA, 100 bp, Homo sapiens
acaatgcgggacagcctcagccaggttctccagagatgcctgttatggaatcctcaaggtaccagagggcagctggctgtgccggacatgtgccctgggg

SEQ ID NO: 118880 - DNA, 75 bp, Homo sapiens
atcagtatctgcatggagcacatggctgctggaaagtacagacaacaaggcagaaattatattgttgaagatgga

SEQ ID NO: 118881 - DNA, 75 bp, Homo sapiens
gggctggcctccatcactgctgagtgcgagttgatctctctaatgtattagatcttcatgcctttgatagtctct

SEQ ID NO: 118882 - DNA, 82 bp, Homo sapiens
ccgcgggccagcgcaccggtcccccagcggcagccgagcccgcccgcgcgccgctacgagttccagggagctctgtcctggt

SEQ ID NO: 118883 - DNA, 83 bp, Homo sapiens
gaaggaacgaggcaaggagctaaagcagcgtgcgttcagccctggggtgaacttcacggtagaccagatccgcgccatcatgg

SEQ ID NO: 118884 - DNA, 75 bp, Homo sapiens
gaggtgtgaacgtggaccctgagtctgagtcacaacagcatttctcaggaaagtgccctgtacctgctggagaca

SEQ ID NO: 118885 - DNA, 100 bp, Homo sapiens
ctggcgcccagcgcgcccgtggccgctgccgcctccgccccagcagtatcctggtgtgaaccagctatcctccagtataggaggattgagtcttcagagt

SEQ ID NO: 118886 - DNA, 75 bp, Homo sapiens
cccctttgaattaattatggctctttttgcctgaattcatcaatggagactttgattctattaggcctgaagtca

SEQ ID NO: 118887 - DNA, 98 bp, Homo sapiens
agcacacgcctgtggaggagcaggcccagcacagcgacctggccctgggaactctaatgatccaggacaaagaagttaccctggagtatgtatcaagc

SEQ ID NO: 118888 - DNA, 75 bp, Homo sapiens
gcgggttgtgaaggacatcactaacgccttcaggaggaacccacacatgtatgatctcgtgaaaccttgagagaa

SEQ ID NO: 118889 - DNA, 83 bp, Homo sapiens
ggacaaacgggagcggaagagagccggtggctgctggcagcggaatcccccagatcaagtgcttcctcaacggggtgaagatc

SEQ ID NO: 118890 - DNA, 75 bp, Homo sapiens
gccatgcttcctatctaccctgccattgatattgatgcacagctgagctgcccctcctggacctgatgaagctgt

SEQ ID NO: 118891 - DNA, 75 bp, Homo sapiens
tcaatgcggagttcgtgacccaggttgaagatgacagcgatgcagagacctatggagaagagaatgatgaacagg

SEQ ID NO: 118892 - DNA, 96 bp, Homo sapiens
caggtgagctggagctgcccggctcggcagcgggaagtcgggaagacgtctctgattacgaggttcatgtacgacagcttcgacaacacataccag

SEQ ID NO: 118893 - DNA, 83 bp, Homo sapiens
aaatcatcaggaatccattatggtgtcattacatgtgaaggctgcaagactttatattcagagcaccaatcaaattaagcaag

SEQ ID NO: 118894 - DNA, 100 bp, Homo sapiens
taatagtgagtcttccaaccagagcttgtgtagcgtcagatccttgagtgataaaggagtagagtgggacacagcaggccaggaaagatttcgaacaatc

SEQ ID NO: 118895 - DNA, 100 bp, Homo sapiens
gcagaaatcacattggaccctcctcccaactgtaggtcatcatcagatttgaaatatttaaagtggatacaaaactatttcagcaatgcagacaattaag

SEQ ID NO: 118896 - DNA, 82 bp, Homo sapiens
gcccctccacaagttccatctaggcctacgagggccccgcccagtgtcccaagagatcccactggcattgttggtggtaggc

SEQ ID NO: 118897 - DNA, 100 bp, Homo sapiens
tgaacctgtgttaaaacctggagacagggcaatggatcacttggagtcctttattgctgaatgtgatcggagaactgagctcgccaagaagcggctggca

SEQ ID NO: 118898 - DNA, 100 bp, Homo sapiens
caagtggccatggggagcctcagcggtctgcgcctggcagcaggttgtgaaggagctcctgacccagggagctgaccccaacctgcccctgaccaaaggc

SEQ ID NO: 118899 - DNA, 98 bp, Homo sapiens
aaaatgatcaactattgaccatataggttcagaaaagatcagtaagtctgaggaaaccttactaactccagagcgactagttggaacaaattaccgga

SEQ ID NO: 118900 - DNA, 88 bp, Homo sapiens
gcaccttgtccaggcgggcctcccgtttctggctccgggctgagcttcctggagaagaggaaggcccggtggttctgggaagcgtact

SEQ ID NO: 118901 - DNA, 134 bp, Homo sapiens
atccggggatcaaagagcagtgggggttgctgacccagaggagagttctccaaacatgatcgtttactgcaaacaacatggccaatctttcctaagctgctcagcttacaagaaaaggaatcatactgctaaga

SEQ ID NO: 118902 - DNA, 83 bp, Homo sapiens
aaacaccattggccactatgagattgaccctcctttcatttctgtcatgccacttgacaatgaaggaactgtatcagttgacc

SEQ ID NO: 118903 - DNA, 50 bp, Homo sapiens
cggcaaccaaatcggcgccaagatgaagatctccttcaacgacaaaagcc

SEQ ID NO: 118904 - DNA, 80 bp, Homo sapiens
gtgactgtaagctgtgatctcagtatacaaaggtgcgtcctggctgagagttggagctctccagcaacatgcctgagcag

SEQ ID NO: 118905 - DNA, 100 bp, Homo sapiens
ctgaaacaggcaataaactattcaaaaagtttagacatggagaaaggagttgagaatgacctaagctatcagaatatagatttattgctaaacatgggtg

SEQ ID NO: 118906 - DNA, 75 bp, Homo sapiens
agatcaccgtgacatccgaggtgcctttctccaaaagggccaattcctgtccccccagcagcatggcatcgtgtg

SEQ ID NO: 118907 - DNA, 75 bp, Homo sapiens
ctgcagagcgcgcagtacctccggtactaggttttgacaagcttgcatcatgcgtgagtataagctagtcgttct

SEQ ID NO: 118908 - DNA, 98 bp, Homo sapiens
gtgcaagcaaaaagcaatcagcaattggacaggtcccagtagggatggcacaatcagcgaggacaccatccgagcctctctcatctctgcggtcagtg

SEQ ID NO: 118909 - DNA, 75 bp, Homo sapiens
ggaaaactgggccaaagcagtgaaacgctccatgaattggtgaccaagaatatggcccaggtgaccaaagccctg

SEQ ID NO: 118910 - DNA, 82 bp, Homo sapiens
cttaaaagatgcaatatcctacatgcagatatcaagccagacaatatcctggcttgaagtagaaaatgccatgatgagaaaa

SEQ ID NO: 118911 - DNA, 90 bp, Homo sapiens
gaacagatgtcagcaatgtcgcttcaaaaagtgtctgtctgttggaatgtcaagagatgcaatggctgccatccggaagaaactggtgat

SEQ ID NO: 118912 - DNA, 78 bp, Homo sapiens
gacagccggggaccgcggccatgggagggctcgcaggtttcacgcatgtgtgctgcagctcccatttcatcagcaagt

SEQ ID NO: 118913 - DNA, 100 bp, Homo sapiens
atccgggagagtgagagctccccaggggagttctctgtgtctgtgaaggcgaccattgacgaggtggagacggacgtggtggagattgaggccaaactgg

SEQ ID NO: 118914 - DNA, 100 bp, Homo sapiens
ggccgatactcagggtatgctatctggaggcctggacactgtcacactcaacatcacctctcaggtaagaatgattgatgttggctgatattggagtgct

SEQ ID NO: 118915 - DNA, 82 bp, Homo sapiens
gctgggattacaggcacccgccaccatgcccgactaaataggttaatgactccagagagtaagatcagattcgtccacaaag

SEQ ID NO: 118916 - DNA, 100 bp, Homo sapiens
aagagcgaggccgagagcctcaagggcaagctggaggaggagcgagccaagctgcacgatgtggagctgtgatcttgtggctgggggacctcaactacag

SEQ ID NO: 118917 - DNA, 83 bp, Homo sapiens
atggacctgtacagcatcaactacctgcactttggggagcctaagtcctgatgaagatctccttcaacgacaaaagcctgcag

SEQ ID NO: 118918 - DNA, 100 bp, Homo sapiens
tttcggagagggcgagggccaccacctgcagcacatcagcgaccgcgagatgcccgaaggttcttgggtgtctctggggagtccctgggccagaccttcc

SEQ ID NO: 118919 - DNA, 82 bp, Homo sapiens
caaaggaggaaacagctggctaagctcatcattgttactggaagaggatcacctagcccgggtagaagaggcaatcacccgt

SEQ ID NO: 118920 - DNA, 100 bp, Homo sapiens
gccagaagcgggcggcgcgggggagatgacgatgttccacaggagcccgtgcccacgctgtggaacgagccggccgagctgccgtcgggagaaggccccg

SEQ ID NO: 118921 - DNA, 100 bp, Homo sapiens
caatctgtggatcagctacgaggaaccaacatgcctgcaaccttcggccatctggcaggtggctacgacgcccagtactacgggtacctgtggagcgagg

SEQ ID NO: 118922 - DNA, 95 bp, Homo sapiens
cgaggaggcagccgttctcgctctcgttcccgttccaaatctgcagaaaggtcagagatgtcatcatcgctgcaagcgttgcaggaatgggcttg

SEQ ID NO: 118923 - DNA, 75 bp, Homo sapiens
aacactgagccccagttcattattccttcatggtgttcctgaaaagccccatagtgattgagtcttcaaaaccac

SEQ ID NO: 118924 - DNA, 111 bp, Homo sapiens
aggctgtggaggagtggaatattgagaaggctgaggaactcagcaaccagctagctactcgagagcctctacggcagacacatgcaggccaacccagaaccaccgaagaag

SEQ ID NO: 118925 - DNA, 74 bp, Homo sapiens
gccagcggctcggcggtgagatcgtcagcgctgactccatgcagatgttctcagtgcagctgagtcttggtgag

SEQ ID NO: 118926 - DNA, 100 bp, Homo sapiens
ggcggagacagctggtgtctgaagccgctcgcgcccaggcagtttggagcatgtgaacaccttgagccttgatgagttccagtatgtggtatattatgca

SEQ ID NO: 118927 - DNA, 100 bp, Homo sapiens
agcctcgtggctgcgtcaccgccgcccccccagacaagatggacaccgcggaggaaggtgactgccaacagccagcccaatgtcgaatccagaaatgcac

SEQ ID NO: 118928 - DNA, 50 bp, Homo sapiens
tcaagttccatcatgaggcatctggtctttcccgcggtgacttcccttgg

SEQ ID NO: 118929 - DNA, 96 bp, Homo sapiens
aatgtggaagccaggagatacgtagacaggtaaagcggtaccaatgtacctttgagggctgtccccgcacctacagcacagcaggcaacctgcgaa

SEQ ID NO: 118930 - DNA, 98 bp, Homo sapiens
gtctgcgatcctgaatgggggcggcgtgcccgccggggggctagtggccacgctgcagagcctcgctgaaccaataacgtttccatctggaggaggca

SEQ ID NO: 118931 - DNA, 50 bp, Homo sapiens
aaaagaaagagacttttttctaaagaataaccaagatccaattccctgga

SEQ ID NO: 118932 - DNA, 100 bp, Homo sapiens
ttcgtatctaagactctgggacactcctgaagtcgggaaatgaaacctctgtagaggagcaggatgcaaccgacaggctgtggccggacagctgctgccc

SEQ ID NO: 118933 - DNA, 100 bp, Homo sapiens
aaactggagagcttcatcaaaaatagtgatagctttgataagttacaatggccaacattggaataaatggaaatcattctctggaaacctgtgaaacaac

SEQ ID NO: 118934 - DNA, 90 bp, Homo sapiens
tcagacagatcgccggggaggcagcgcgggatcccagcctcaggcgtgcgcggacggtgtgcgggtggttatcactaggctaaaactgga

SEQ ID NO: 118935 - DNA, 96 bp, Homo sapiens
tgtgaactcagaagtccatgttcaggaaatggctgaagttcgtaaagatgatgttgtaacagtgactggtctcctctgagcctccggcctccataa

SEQ ID NO: 118936 - DNA, 76 bp, Homo sapiens
tagtggcccctcaaaacacgtttctggagaatattgttcggcggtccaatgaaatggtggagtcaatgaagaaagt

SEQ ID NO: 118937 - DNA, 82 bp, Homo sapiens
tttcacgaaggcaccgacgtcatcatgctgaccaccaatcagatccgtaaggcctgtttaaagaagaaaacccgtatgctag

SEQ ID NO: 118938 - DNA, 90 bp, Homo sapiens
acaagagctggcatttgttacttttatccttcccaggtttttgtctgatgaaaatagtctggagtataaatattacaagctgaagttggc

SEQ ID NO: 118939 - DNA, 90 bp, Homo sapiens
cgcacggagcggccgggggctcggccgggccgtcccggcctgcgcagcctgagagacagggcagggcattgttcatgcactgaccgacct

SEQ ID NO: 118940 - DNA, 75 bp, Homo sapiens
gcgaccccagtcggtgctccggggaggtcacctgacgaggagggactggtgattgcagctggaagtgcccatgac

SEQ ID NO: 118941 - DNA, 75 bp, Homo sapiens
ccgctgaagcaagtacaccacaaagagaacacagagccggaagtctggctcttgctgattgaattcctttggtgc

SEQ ID NO: 118942 - DNA, 100 bp, Homo sapiens
gtgacccaaagatgatgaaaaatatgttcctgcccacaaggagttagcgacctactgggcccccaaatacatcaagatgtttgtactggatgaagctgac

SEQ ID NO: 118943 - DNA, 90 bp, Homo sapiens
gaactggagccgaggcgcaggtggcgctggggccacagatcgtgctcagcgtgtatggaccagatgtgttcgggaacgatgtggttcgag

SEQ ID NO: 118944 - DNA, 97 bp, Homo sapiens
cctgccgccgcccattcccggcgcgcacctggcagtcccgggctcgagccccgccctgccgccagccagacttgctacatttgtgatgaacaaggaa

SEQ ID NO: 118945 - DNA, 89 bp, Homo sapiens
gcgtgaccgagagcgcgaatatcgtcatcgttagaagggagtctgaagatacagtattgctcgtcctcaaagagatctaccaaacccag

SEQ ID NO: 118946 - DNA, 98 bp, Homo sapiens
gattttgatgtggatgatgccaaagttttattagctctaagcgaaagacatgaggcctcagcctgaaatgaggttgttttgaggtcatctgatttctg

SEQ ID NO: 118947 - DNA, 83 bp, Homo sapiens
gaggaccgggggtggaggtggtgcctctggcagtgacgaggacgaagtgtccgagacgttggacctctcgaacaaccagctga

SEQ ID NO: 118948 - DNA, 74 bp, Homo sapiens
agaaatctggtatgctggtaaaaaggttgactaatctccttcagaatcaagcagtgaaaggaaaagttgctgga

SEQ ID NO: 118949 - DNA, 75 bp, Homo sapiens
ccggtccctgcagagcgatccccgggcccagatatggacgcagcagagccgggtggacagcgccatgtccctgat

SEQ ID NO: 118950 - DNA, 88 bp, Homo sapiens
acgcagcaagacccgcgccgccgggacccccaggacgacgtgtacctggacatcaccggagggtgcatctgcccggaagactcagact

SEQ ID NO: 118951 - DNA, 100 bp, Homo sapiens
gccttcaacatcctggggatggtggtctttgcctttgccactatcacgcctctcatgttcacaggaaccactgtgtctcttgaaacaacaaatagtctct

SEQ ID NO: 118952 - DNA, 100 bp, Homo sapiens
gccaacctgagcgaaggcgtctccctggcagagaggggcagttttggagccatggcatccaggctggagaagcagaacagcacacctgagagtgactacg

SEQ ID NO: 118953 - DNA, 80 bp, Homo sapiens
gatgtggcgcggctgcgcgaggagcaggaaaaggaaggaagcagccaccctcgccatggcctccccgcccgcctgcccct

SEQ ID NO: 118954 - DNA, 95 bp, Homo sapiens
gtatctctagtctttatgggaaacctcagcttgatgatgtatctcagaaagccttgagccgggccatgcttctcacatcttacctgcctcctccc

SEQ ID NO: 118955 - DNA, 98 bp, Homo sapiens
agtcctagtccgaggtgccaccgtggaaggacagaatgtgaggtcctttggcactgaagaccgtcccacagataggcctgcgccccccagagaggaga

SEQ ID NO: 118956 - DNA, 75 bp, Homo sapiens
ggcaactgatgttccacttgacacactgtttctaccatgaatgaaatgaagagttattctcaagctgtcacagga

SEQ ID NO: 118957 - DNA, 88 bp, Homo sapiens
tggcccgttatgccagtatctgccagcagagtcagggcatgttgggacagtcatctgtccatcagatgactcccagctcttcctacgg

SEQ ID NO: 118958 - DNA, 74 bp, Homo sapiens
ttggtgctcaggtgccagatgcaaagttctagatgagcgcttggataagagggtggatgacatgcttgctgctg

SEQ ID NO: 118959 - DNA, 75 bp, Homo sapiens
aggccaggttttgcagtggtctgaggtactgggcctaatcgctacgtgcctctttggctatgatgcctatgtcac

SEQ ID NO: 118960 - DNA, 98 bp, Homo sapiens
gtgaatccggaagaaaagttcaatctggaaacatcaatgctgccaaggagaactagtggctctgaagaaggtgagactagacaatgagaaagagggct

SEQ ID NO: 118961 - DNA, 75 bp, Homo sapiens
cacatgcccgctcacctgcgctgtgatgcctgcagagctgtggcttaccagatggacaagaggaaagacccttct

SEQ ID NO: 118962 - DNA, 90 bp, Homo sapiens
ggtgagatcagccgcccggccaagctatcttctcgctagcaggttcgaatgcaagcactgaaatgtttctcagttttagcttttgaaaac

SEQ ID NO: 118963 - DNA, 96 bp, Homo sapiens
agaggtccgtgcggcagcagctccagagctttgtcaaagagctggtacagaaggcagagctggtacgactgtcccagacactgagcctggtgcccc

SEQ ID NO: 118964 - DNA, 80 bp, Homo sapiens
gtcacagtaaggccaaaaatgtgcatactcacagagttagagagagggatggtggtgtaccttgaaagacttttaacata

SEQ ID NO: 118965 - DNA, 75 bp, Homo sapiens
ctgcgactctgggaggcaaagaggtggtgttaatggcaaaaatcttggccccataaatgaatggtggatcactgg

SEQ ID NO: 118966 - DNA, 50 bp, Homo sapiens
gacacgggtcggaggaagcctacatggagtgcatccgccccaaccctttt

SEQ ID NO: 118967 - DNA, 80 bp, Homo sapiens
aggaggacaaagagcccctcatcgagctcttcgtcaaggaaggtggacttttaaatattctccactgaagcaaatgctgc

SEQ ID NO: 118968 - DNA, 97 bp, Homo sapiens
ccctgcacccaagccccgggttgtcaccactgccagcatccggccttctgtctaccagccagacttatgaaaatatgcatcagtttaatactgtctt

SEQ ID NO: 118969 - DNA, 75 bp, Homo sapiens
gcagacccgggagcagctgcatagcatcagcgactctgtgttgtttctgcagctgatcatcctggccaatggtgg

SEQ ID NO: 118970 - DNA, 74 bp, Homo sapiens
aaatttccaaggtgtgccgaaggctatgcactatacgcccagggccctttgcctaacacatgcggtcacttttg

SEQ ID NO: 118971 - DNA, 50 bp, Homo sapiens
ggctggtcctgccactgggacagctggcacagtgatgtttgagtatggaa

SEQ ID NO: 118972 - DNA, 82 bp, Homo sapiens
ataggatgttttggcgagagatgtattcagtggaggaagctggcctgtctggccctgagggagtcccctttctgaagctgtg

SEQ ID NO: 118973 - DNA, 99 bp, Homo sapiens
gttagaaatcctacaaaggaccttgcttcaggtgagaccacaggagttgacatcactaaaattcaagtcaagagatgtgagaccatgagagagaagcac

SEQ ID NO: 118974 - DNA, 133 bp, Homo sapiens
ccacatgacagcaggagcgatggccgggatcctggagcactcggtcatgtacccggtggactcggtgaaggactcgctcagcagcagcctgaaaacttgctacaagtatctcaatcagaccagtcgcagtttc

SEQ ID NO: 118975 - DNA, 73 bp, Homo sapiens
agagggactacgtgggcaccttgcgcttcttgcagtcggtactgagtttgagggtgcagtcatagctctgttc

SEQ ID NO: 118976 - DNA, 96 bp, Homo sapiens
gtcattgcagtgtatgaacccagggcactgtggggacagggcgacgtgtgtccaggcgtttgccgatcttcgagtacttccgcagagacacagaga

SEQ ID NO: 118977 - DNA, 75 bp, Homo sapiens
ccagcttcactatgtacagaggacacacccacaggaaggggccctggaccttctgaagaagctgcacagctgcca

SEQ ID NO: 118978 - DNA, 50 bp, Homo sapiens
tggacacagaagtatttgtgacagcttctgaaagttctgctgaagacagt

SEQ ID NO: 118979 - DNA, 87 bp, Homo sapiens
ggactcaacagtttgtggcaagacaagctcagaactgagaagctgtcaccacagttaattggccttggtcctcacagctccaaaaag

SEQ ID NO: 118980 - DNA, 82 bp, Homo sapiens
tcgttgcggccatcgccctgccggaccgcgcctcaggctcccccagggaaatcctcattgacgattcaatttgttgaaggcc

SEQ ID NO: 118981 - DNA, 98 bp, Homo sapiens
agaggctgaaactattgaagaacaagaatctccagtgaactgctttagaaaattatttggccagcagatacatagagaatgttttaaaacctcaccag

SEQ ID NO: 118982 - DNA, 50 bp, Homo sapiens
cccaggcagaccttgcagtcaaaggaacatttacggatgagaagtcaaaa

SEQ ID NO: 118983 - DNA, 100 bp, Homo sapiens
aacgcagatcagaggtagtcggacctttcccgctggcgcgcagcctcagctaggggtgagcccctccagactccgaataggagatcaagagtttgattca

SEQ ID NO: 118984 - DNA, 98 bp, Homo sapiens
aaggagttcatgcttatgaatgctcgacttcaggtggaatgaatggctgaattatgatatatacattcctgatcttcctcgtgctgctcgactttgcc

SEQ ID NO: 118985 - DNA, 100 bp, Homo sapiens
ccgacgcgctgttgcccgcggccccccagccgctggagaaggagaacgacggctactttcggaagctgagctgactgctgcccactttggaggaggcggt

SEQ ID NO: 118986 - DNA, 75 bp, Homo sapiens
atgttggctcaattaagaaacatcagggagataaattcaacccagtggcctcaaaacttccaatgtcaataatta

SEQ ID NO: 118987 - DNA, 73 bp, Homo sapiens
ttggccctgtcggttggtacagataaaactttaagccgggtaacagatcttgtaaaccaacaacaaaccctgg

SEQ ID NO: 118988 - DNA, 75 bp, Homo sapiens
aggaatcttctggtgtactctttttatgaaaagttatcccagatcactgaagctgagatggctgatgaagtaatt

SEQ ID NO: 118989 - DNA, 50 bp, Homo sapiens
ggagaaaagacagcaatggaccgagttataggtgcacagcgaaggagaag

SEQ ID NO: 118990 - DNA, 82 bp, Homo sapiens
caaacttgccttcctgttctccaagaccaggccaccagcccctcgggttccaagatgcagctactggagacagagttctcac

SEQ ID NO: 118991 - DNA, 100 bp, Homo sapiens
gcagcgaggaggacctatgtgctctgccctaccacgtgcgccctgacccaccccagggcctgcgggtagagtcagtaccaggttacccccgacgcctgcg

SEQ ID NO: 118992 - DNA, 75 bp, Homo sapiens
gagctgaccgaccgactccaggcgatatggatcagaaactttcgaagttggtagaagagctcacaacttcaggag

SEQ ID NO: 118993 - DNA, 75 bp, Homo sapiens
agacaaccctcagggcagctttgactgcatccagcaaacattctccagaacattctagtatgccagtagaaaaaa

SEQ ID NO: 118994 - DNA, 87 bp, Homo sapiens
ctggtgcaaacagactcaagaggctcggagaaccagcttgggcattatccaattggtttgctatttgatcttcttgcatcaagttca

SEQ ID NO: 118995 - DNA, 100 bp, Homo sapiens
tctttcagatttccacaaaagagcgatttggattgggacatcagctgaaaaacccagcgacttctccgtgtcccttaaagcgtcagggaagaacaaacac

SEQ ID NO: 118996 - DNA, 82 bp, Homo sapiens
tccagttccaaggactccacgggcatcagacaacagtcagcgctttcgagaaacctgttttgcatttgccttgacaccacaa

SEQ ID NO: 118997 - DNA, 83 bp, Homo sapiens
tccccttccaagccatggtgcagttccaccggcaccatggccaggagggctccatcctggccctggccaacgtcaacattggg

SEQ ID NO: 118998 - DNA, 75 bp, Homo sapiens
agccgagctggagctgccgcggcgcagccagctggacaggtagtgaatcaaatgaataagaagctacagacgggt

SEQ ID NO: 118999 - DNA, 97 bp, Homo sapiens
caaggaaggcttcgagaagattagcaaaggtgctaatccagtggaaatcaggagagatattgaagcacagattcgagaaattcaaggcaagaaggca

SEQ ID NO: 119000 - DNA, 88 bp, Homo sapiens
cagcagcagcagccagtattcgggaaaggcagacaggtctacttccccagcaggacagcatcattctcctatatcttctagacatcac

SEQ ID NO: 119001 - DNA, 83 bp, Homo sapiens
tccttctaacttgttcgtgccaaccccagatgcagtctacacagaactccagcccacctctccaaccccaacctggcctgctg

SEQ ID NO: 119002 - DNA, 100 bp, Homo sapiens
gtaaaaaccccggaagggcggacacctccacatcgccttttgccacctttccctttatttccggaggcgaaaattttgaccagagtcctttgagaagaac

SEQ ID NO: 119003 - DNA, 88 bp, Homo sapiens
tgaaagtacaattctattgcacatcaatgatatcatcccaggataacttcaaactaatgtgtactaatgccatgatttacaataaacc

SEQ ID NO: 119004 - DNA, 75 bp, Homo sapiens
catttttccatggacatgacaattatgatcagtggagcggaaggagtggatgcaggccctgcagcaggccatggc

SEQ ID NO: 119005 - DNA, 96 bp, Homo sapiens
tacgagatgaactcttcaagcagaccgtcatccaggctcatgggcctcctgagtgacccagaattaggtccagcagcagctgatggcttctctctg

SEQ ID NO: 119006 - DNA, 100 bp, Homo sapiens
cacccagtcccacttcaaacattcgtctcggaaaccccgcctcttacagtcacgaggcttaacagcattgcgcagtgatgaagtgattgatttaatgata

SEQ ID NO: 119007 - DNA, 83 bp, Homo sapiens
ctgggcggcaccctggccaggaagcggagggcgcgcgaggcccctgtcaaagggaacaggaagcagtccacggagggtgacgc

SEQ ID NO: 119008 - DNA, 100 bp, Homo sapiens
ctcgctccgtggccttagctgtgctcgcgctactctctctttctggcctggaggctatccagcgttatgaaaactacaattactatggcgcccagaacac

SEQ ID NO: 119009 - DNA, 121 bp, Homo sapiens
aggaaggtgagtcagcctcgaacgccacagaaacatccggcccagacatgactatcaagactgcttttcaggaagccttggacgctgcaggtgataaacttgtagtagttgacttctcagc

SEQ ID NO: 119010 - DNA, 100 bp, Homo sapiens
cccagtgagggtgtacaaatacccctttgaattaattatggctatcccagtggcaaggtgcatcctgaaatcatcaatgagaatggaaaccccagctaca

SEQ ID NO: 119011 - DNA, 82 bp, Homo sapiens
gggcgagaacgtccactgcgggccggcgaaagctggactggagactgatgcatgagggggctacggaggcgcaggagcggtg

SEQ ID NO: 119012 - DNA, 78 bp, Homo sapiens
tctttccggattctgcctccctccgctaacctccgatgttgctaaatttgcataagaagagttggatggaaggtttga

SEQ ID NO: 119013 - DNA, 100 bp, Homo sapiens
agcccgacgaggaggagcgagcgcgcctggcgggcgaggaggaggcgctgcgtcagtaccagcaggtctacgaccccttccgctttgacccagagaacag

SEQ ID NO: 119014 - DNA, 100 bp, Homo sapiens
ctggaatcagcttctctcattttctttccctgcaccaactagcagttgaggagctcaagcttgggaaaatggtgtgcattccttgtatcgtcattccagt

SEQ ID NO: 119015 - DNA, 100 bp, Homo sapiens
ggccacactgcaggcctccgcgctcagtggtagcagcagcagcagcagcagcagcagcagcagcagcagcagcagcagcagcagcagcagcaatgtttca

SEQ ID NO: 119016 - DNA, 50 bp, Homo sapiens
atggcaacatgtacaagagcatcctgttggctagagatttactacatccg

SEQ ID NO: 119017 - DNA, 71 bp, Homo sapiens
attaaatgtcactctcaccatccggctacttatgcatggaaaggaagtagaccagttgcgtttggagagat

SEQ ID NO: 119018 - DNA, 90 bp, Homo sapiens
gccacacacgctctgtggaggacctgcagtggtcaccgactgagaacacgaacccccagacctgactccggaggagcggatggagctgga

SEQ ID NO: 119019 - DNA, 75 bp, Homo sapiens
aagacatagttcctggtgatattgtagaaattgctgagttctagtaactcatgttctgtacttgaagctgccaag

SEQ ID NO: 119020 - DNA, 98 bp, Homo sapiens
cgacctacagctccaggaccgggtctacacggacgtgcagcaggtggccagcagcctcacccacccgcgcttcaccctcacccagagtgaggcggacg

SEQ ID NO: 119021 - DNA, 100 bp, Homo sapiens
cctcacctgtacgcttggctatgtgacgctgctggaggaaacacctcaggacacggcctacaacaccaagagaaaaattggaagctccaccacccacccc

SEQ ID NO: 119022 - DNA, 74 bp, Homo sapiens
tttgaagcttctcattctgtcaatggctgctgtattattggctgccttttctctatcctctttcctttattcat

SEQ ID NO: 119023 - DNA, 75 bp, Homo sapiens
acctggatccaggataacggaggctgggacttaaccaccaccatgtcgagcaaaagaacaaagaccaagaccaag

SEQ ID NO: 119024 - DNA, 100 bp, Homo sapiens
tggacaccaaacatttcctgccgctcgataattggttaagtgcaggcagccacacctttgacttccatttcaacttacctcccaggcttccttctacctt

SEQ ID NO: 119025 - DNA, 83 bp, Homo sapiens
cccagggcccgcgggccaggagagcgctcggcggcaaaatgatgcttcaacacccaggccaggtctctgcctcggaagtgagt

SEQ ID NO: 119026 - DNA, 98 bp, Homo sapiens
atttgaagtctgtgtcaaacatccatatcataagtggaattttggagatattcaaagcttaatcctgattatcgagatgcccaaaatgaaggaaaaaa

SEQ ID NO: 119027 - DNA, 82 bp, Homo sapiens
atagtattatgactctcctttcatccttgttaacttaccctcaggtccaacaatgcaggcaagaattggatccatgtaacgc

SEQ ID NO: 119028 - DNA, 98 bp, Homo sapiens
cgccaatccaaaccgaaagccagaagatctgaaactcagcaccgaggctctgctccccactctgagagtgatctaccagagcaggaagaggagattct

SEQ ID NO: 119029 - DNA, 98 bp, Homo sapiens
gtctcctgcacgtgcaactgcaaacgctctttgttccagagcatggagatcagtgtcatggagaaactccagctgggcccagagattctgcagcggga

SEQ ID NO: 119030 - DNA, 100 bp, Homo sapiens
cagagcctcagtttgtgcaggacaccgacatggaacagggactcactggggaaacgatcttcaagacacagaaataagtccaagacagaatcgccgcaca

SEQ ID NO: 119031 - DNA, 75 bp, Homo sapiens
cattgctgttgtggggattgaagatcctgtgagacctgaggtgccagatgtgacatccagatgacccagtctcca

SEQ ID NO: 119032 - DNA, 100 bp, Homo sapiens
taattctagatgctgagggttaccttaaattggtgaaggcttccataattaccatcacacctttccctttgactactctgcgagtgaatttggcttaaat

SEQ ID NO: 119033 - DNA, 95 bp, Homo sapiens
tccacgctcgcttgccctgattctctccgccctgcacttttgccagctgaaggtccagggagaagagcaacctggcccacagcctgcaggtggcc

SEQ ID NO: 119034 - DNA, 80 bp, Homo sapiens
cccagggcgtcgcagcgccgcgtgcggcccactcacgggccgtaagactttgaccccgacgcaggcttcagtgattgccg

SEQ ID NO: 119035 - DNA, 100 bp, Homo sapiens
cagattgcagtatccgggatccagttaggaaccttcacccccccaaggatgaaggacccaagggtctgaaggggcgtctcgattacctgagctctctgaa

SEQ ID NO: 119036 - DNA, 82 bp, Homo sapiens
cagagtgctgatgtgaaaaataccacgacaaaaccaccctaataagatgctcccaagtcccttgcagctctcttcagaagaa

SEQ ID NO: 119037 - DNA, 50 bp, Homo sapiens
caattttgctcaacttattgtgagagctgtggaaatacaaagaactctga

SEQ ID NO: 119038 - DNA, 96 bp, Homo sapiens
gaaatttggagtgtgcgtgcgcgccgagcgctttgcccgaagtttttacatacaaattctactagtcacacctggccattcagtgcagttgctgaa

SEQ ID NO: 119039 - DNA, 97 bp, Homo sapiens
gggaggaacgcgaggggagactgaagttcacgttccgctcttagtgcgcgttacagggatgcagaaaagaatttccacaatatctctaacagatgct

SEQ ID NO: 119040 - DNA, 50 bp, Homo sapiens
ccgcgcgttcgcgctcaagatcaacagtattctaccttgtaaatactgtt

SEQ ID NO: 119041 - DNA, 50 bp, Homo sapiens
aggccttccagctgtttgaccgaacagccaaaatgaagtttaatcccttt

SEQ ID NO: 119042 - DNA, 75 bp, Homo sapiens
aaggattccaagtaactcttatttgaccccatgctgcactatgtgggcttcgtccctgtcattgatggagacttc

SEQ ID NO: 119043 - DNA, 50 bp, Homo sapiens
aagataagggagctgctggctgacaagacttcctctgctaaattacctcg

SEQ ID NO: 119044 - DNA, 75 bp, Homo sapiens
tccagaagattggtggagcttgatctgaagatttcagaagttgattgcaaagatgcactggaaatgatctgtaac

SEQ ID NO: 119045 - DNA, 100 bp, Homo sapiens
caaaggaccctgaccccatacctttgaatcacaacatgagattttatgctaggaggaaggaagagacttgagctgttgtgtagcttctcttgttcaagtg

SEQ ID NO: 119046 - DNA, 80 bp, Homo sapiens
tccgaatggagccatcccccttcggcgacgtctcctcccgcctcaccacagctggacaggtagtgaatcaaatgaataag

SEQ ID NO: 119047 - DNA, 80 bp, Homo sapiens
cgggtccagacccacgcggcgccagttctccggcgggaaggaaaaccgcgcagagagatcttcgtgaagactctgactgg

SEQ ID NO: 119048 - DNA, 50 bp, Homo sapiens
agcagcaccagaagctgtgggaagaactcagcctcctcccaagctccctg

SEQ ID NO: 119049 - DNA, 75 bp, Homo sapiens
gaaaacaatttctcctgctctgcagcttctgttcagggaaaggaaaacctcttcagcgcaaggtgaaaccaccta

SEQ ID NO: 119050 - DNA, 99 bp, Homo sapiens
tatcggtccccagatacaaacatgtggagcagaatggtgagaagtttgtggtgcagattcactttataggaacagcttcagcttcagtgatgaaaaact

SEQ ID NO: 119051 - DNA, 100 bp, Homo sapiens
ggaagaagggcaggacctgggcggaggccgccaagacggcagtaccaagaagcaagagagacctatcttgatctggatagtaaagtgaggactttaaaaa

SEQ ID NO: 119052 - DNA, 100 bp, Homo sapiens
ctggagttagctaccggactgtcccgcgagcgtattaattttaaagacccacagtttgctgaagattacatttttaaagctgtaatgcttccaggagcaa

SEQ ID NO: 119053 - DNA, 80 bp, Homo sapiens
gattttgagccatacttaagtagccagacaaatcagaacccagtgacttgattgtaaaaatttacagagcggaatcatat

SEQ ID NO: 119054 - DNA, 82 bp, Homo sapiens
aagctcagggggaaaccgaggattcagtaagctgtgaggtccgtaatgtcagacactggcaaacatcatatgttcttcaagt

SEQ ID NO: 119055 - DNA, 83 bp, Homo sapiens
gaaaaaaagacgaaagaagaagaagagcaaagggccttctgcaggccgactcgcgggccgctgcacccaccgccaaggacaaa

SEQ ID NO: 119056 - DNA, 83 bp, Homo sapiens
gagaactataattctaggaagtggtcacaaaggaaaagctactattagaattggtttactcctggcttgggggcattaggaag

SEQ ID NO: 119057 - DNA, 75 bp, Homo sapiens
aaccctggtcaccgtctcctcaggttgggagccacgtgtaccagtgtgtgttgatcttggcttgattcagtctgc

SEQ ID NO: 119058 - DNA, 83 bp, Homo sapiens
cagctggtgcttttataaattatgaaaaaagttgagaaggtaaccatcatgagagatcttgcagctcgtaactgcctagtggg

SEQ ID NO: 119059 - DNA, 100 bp, Homo sapiens
gcactatcgagattggaaccacagaaggttttccctgatgaatttcacctccagactttgaatccttttcttcgggcctgtgctgagttacaccagaatg

SEQ ID NO: 119060 - DNA, 99 bp, Homo sapiens
aagggtcaccggagcgacagaaaacttggaactaagctggaggacaccgagtactcttatgcagtccccatggcatggaccaacatggtgctaacagtt

SEQ ID NO: 119061 - DNA, 75 bp, Homo sapiens
tggagaacctggcacttatgtcctccctggggggaacacacctgaaactagaggaacagcttatgtggtctatga

SEQ ID NO: 119062 - DNA, 75 bp, Homo sapiens
aagagacccgttcagagtcctacagtggcagagtctcattctgttaccaggctggaatgcagtggcgtgacctca

SEQ ID NO: 119063 - DNA, 100 bp, Homo sapiens
atctgtggtcttatcaaaggaggagctgccaaacttcagagatggacagagacgtatgtgcgttggtctcctaagggcacctacctggctacctttcatc

SEQ ID NO: 119064 - DNA, 100 bp, Homo sapiens
ttaaagaaggcctgcggcaaagagatgagcttattgagaaagaagcagatgccattgatgacactctgagttccaaacttaaagttaaagagctttcggt

SEQ ID NO: 119065 - DNA, 100 bp, Homo sapiens
ggtgttgtcattgcctgagcgcgtcgagccagacagactgctgagcgactatattgagaaggaggtaaagctttggagacatgctgtccttcaccctgac

SEQ ID NO: 119066 - DNA, 104 bp, Homo sapiens
atcaccctgctcagcttcaccatcgtcagcctcatgtacttcgcctttaccaggtatacaaaaatcctgatgaaagatattgatgttttaaactcttctggcaa

SEQ ID NO: 119067 - DNA, 100 bp, Homo sapiens
gcgtgtcctccgtgggagcccgagttaattggccttggtcctcacagctccaaaaagaaacaggatctcgataagctctatgagctgaagtccaaagctc

SEQ ID NO: 119068 - DNA, 100 bp, Homo sapiens
ctgggggttcctagacggagccagacttcggaacgggtgtcctgctactcctgctggggctcctccaggtctccgatgatgacctcgacccatcctttac

SEQ ID NO: 119069 - DNA, 75 bp, Homo sapiens
cgaactctgcaaagcctccagaggacataccacctccaggatcaggatgcagagatcagacctattgtgaccgcc

SEQ ID NO: 119070 - DNA, 50 bp, Homo sapiens
ccaggtgaagtagatttttatttcaagctacaacttcaagcagaagagag

SEQ ID NO: 119071 - DNA, 71 bp, Homo sapiens
cggcgcctgccttggcgctggccggctacatcgaggcagaggtggaggagacactgaagcgactgcagagc

SEQ ID NO: 119072 - DNA, 98 bp, Homo sapiens
cagaaacagaggagttggagttgctactaaaaagagaggtgcctttatctgatgatgatgaaagttacacagtgaaaatgcctcgtgtaaaagcagct

SEQ ID NO: 119073 - DNA, 82 bp, Homo sapiens
gagggggaaaagcgagcgatcgagcgagcgcgcgcgcgaaaactccgggcaggtgacttaagagattaaaattaatttggtt

SEQ ID NO: 119074 - DNA, 83 bp, Homo sapiens
ctccggggaggtcacctgacgaggagatgtggaaactaaagcccagagagaaagtctgacttgccccacagccagtgagtgac

SEQ ID NO: 119075 - DNA, 75 bp, Homo sapiens
agaaagctcagctggtggtgattgcacacgacgtggatcccatcgaggagatgcaaatgatgggaacaatggagc

SEQ ID NO: 119076 - DNA, 100 bp, Homo sapiens
caaaactacagttctgtcactcacttacacagtattgggaaatctgtgaaagaaacctctgtagaggagcaggatgcaaccgacaggctgtggccggaca

SEQ ID NO: 119077 - DNA, 100 bp, Homo sapiens
tgacaatgggcagaacgaattcagtgatatcattaagtccagatctggtactaggttttgacaagcttgcatcatgcgtgagtataagctagtcgttctt

SEQ ID NO: 119078 - DNA, 83 bp, Homo sapiens
catcaggacggaagcacaggggccactcagagtcgcccgagaaaggccacaagaggaagctgaatgaagaggacgccgccagc

SEQ ID NO: 119079 - DNA, 90 bp, Homo sapiens
cgcaagcatgcccaccactgccacaaacgccgcaccaggtcttgtagcagcgcctcctcggtctgctcaccaggtggccagataccgccc

SEQ ID NO: 119080 - DNA, 50 bp, Homo sapiens
ctggagggaagagcgatgggagagaccccatatcatgtgaacctcctcct

SEQ ID NO: 119081 - DNA, 118 bp, Homo sapiens
caaagagtagaagatgtccgacttattcgagagcagcatccaaccaaaatcccggctgctctttggcgtaaattgcaatcgattagggatcgtttctcagaatcaagttagaagtgag

SEQ ID NO: 119082 - DNA, 100 bp, Homo sapiens
aggaccccagatgtctgacagccctgtgtgacaccaagataagtaacgttatcaatactctggctgaccatcatcatcgtgggactgactttggtggaag

SEQ ID NO: 119083 - DNA, 98 bp, Homo sapiens
ctcaacccccagccagggtcaccatcaaaatggaatgtaaccctagccaggtgaatggctcaagattgtcctgggtcacataatgccagctgagcgta

SEQ ID NO: 119084 - DNA, 100 bp, Homo sapiens
tcgaagaaagtgcgcagcctgcaagattgtggtgcacacgccctgcatcgagcagctggagaagtctattatcctcccagtccacaacgctgaaccgtgg

SEQ ID NO: 119085 - DNA, 90 bp, Homo sapiens
ctaagagacccaggggaagacccaaaggcagcaaaaacaagagtccctctaaagcagctcaaaaggacgccaggaaagcatgtgcagatg

SEQ ID NO: 119086 - DNA, 100 bp, Homo sapiens
cgggccggcggcgacctgcactttcccgcagacagccatgctgcggatggtctcagcagttctccagtttggcaacattgccttgaagagagaacggaac

SEQ ID NO: 119087 - DNA, 75 bp, Homo sapiens
gattcgcattgaagatgacgggagctacttccaaattaaccaaggtacatccgggaaggcttcctggccgtgcag

SEQ ID NO: 119088 - DNA, 90 bp, Homo sapiens
gtaggcgggttatctgcgaacacagtagtggaagatgtaaagcaatatttcgagcagtttggcaagatcttatgccttcattcatccggc

SEQ ID NO: 119089 - DNA, 100 bp, Homo sapiens
cttgatcgtcctcatgattctcctggcagttgtcatatgtactgtgtcagccatcatgtgtgtcagcatgagaggactcctgatagttcaggatgcttca

SEQ ID NO: 119090 - DNA, 83 bp, Homo sapiens
ggcttctacaggacatggatattaatcggcttagggcagttgttttcagagacatacaattctgtggtgttcttggtcacaca

SEQ ID NO: 119091 - DNA, 100 bp, Homo sapiens
atggccagtttggccaaggagatgtacagaatgggccaagctccactgttcagatgcaaagagttaaacatgaagtttctggagagacagtggtatttca

SEQ ID NO: 119092 - DNA, 100 bp, Homo sapiens
cagctctggactctgcgtataacagtctcctctgagcctccggcctccataagacccaaaacagatgacacctcttcccagtcccccgcgccttccgaaa

SEQ ID NO: 119093 - DNA, 100 bp, Homo sapiens
gcaagctgaagacatcaagaagatcttcgagttcaaagagaccctcggaacgttgttcctcaaagtcattcaagctgtactcgccgaaggagcccccgaa

SEQ ID NO: 119094 - DNA, 83 bp, Homo sapiens
gagagttcagctctgattgaattttttgacagaaaagcccaagaagatgaaaggattgttcttgttgacaacaaatgtaagtg

SEQ ID NO: 119095 - DNA, 128 bp, Homo sapiens
ccaacatgtctgtacctactgatggtgctgtaaccacctcacagattccagcttcggaacaagagaccctggaccctgatgctcccataagacagaaaatgccccttgatgatctggatagagaagat

SEQ ID NO: 119096 - DNA, 98 bp, Homo sapiens
aagttgtcctccttgttagaactgataagcgaagtgattctcttataaggggcaagctctgtgtgattgattggaagacatcagagaaaccaaagcct

SEQ ID NO: 119097 - DNA, 74 bp, Homo sapiens
gccggctccctcccccgcgtccctgcgaccgccgcggcgaagatggagacagagctactggatctcagccttgt

SEQ ID NO: 119098 - DNA, 73 bp, Homo sapiens
attgtggcatttgaaactgtccattcaatggatggtaattaagaatcgttttcatcgtgtgttcctaccctcc

SEQ ID NO: 119099 - DNA, 82 bp, Homo sapiens
ccgccgcggacgagcggggcacgcagcagcgccgggcctgcgccaacgccacctggaacagatgacagtcatgtccctttcc

SEQ ID NO: 119100 - DNA, 100 bp, Homo sapiens
ctgcaacatgaccacgtcgttccgcgacggcctggctttctgcgccatcctgcaccgccaccggcccgacctcatgtacatgtcccagagcaagcacacg

SEQ ID NO: 119101 - DNA, 89 bp, Homo sapiens
tctgctcctaaccaaccccgacaaaagatttgttcccgacaaggagttttctggttcagaccgtagacagagaggccgagaaggaccag

SEQ ID NO: 119102 - DNA, 100 bp, Homo sapiens
acatcatggggtgatgtttctctctgggaaccttctggaaagaaagtggtcaaaatgcagatcttcgtgaaaacccttaccggcaagaccatcacccttg

SEQ ID NO: 119103 - DNA, 87 bp, Homo sapiens
ctcttacgtctgcggaagtgcagctgcctcagttcttagcgcagtcgtggcattcctggtggctttccatcagaacaagcagctcat

SEQ ID NO: 119104 - DNA, 96 bp, Homo sapiens
ctgcccttcaccctctacatggatattccccgagtccctccggtggctaatggccacccagcagtttgagtctgcaaagaggctgatcctccactt

SEQ ID NO: 119105 - DNA, 100 bp, Homo sapiens
cggagtctgagggagatggaagttgagcaagagcagcggcgcagaaaggtggaggccgggaggacgaagctgtttttggaaggaagaaagatggaaagcg

SEQ ID NO: 119106 - DNA, 75 bp, Homo sapiens
ttaaactttggccctgcgcctcgtccagcctaggttccacccttttctgggaactagagacggggtttcaccgtg

SEQ ID NO: 119107 - DNA, 100 bp, Homo sapiens
gaggagccaacctcccctgatgacattctggggcacgccaccatttccaaggtacagttatttgtcacccctgcaaatacagcaaatacctatccctaaa

SEQ ID NO: 119108 - DNA, 50 bp, Homo sapiens
aaccggctgtacggaatccaagctctgagaaagtggccgaaagaaaagaa

SEQ ID NO: 119109 - DNA, 90 bp, Homo sapiens
tggcaggcatctgtgggatctgtaatagaaatggcatttttggtcgaagagagctgaagtaatgagaagacatcatggaggcccagtccc

SEQ ID NO: 119110 - DNA, 82 bp, Homo sapiens
ccggagtgagcggagtagcgagtcggcaacccggagggagtgcatccgccccaacccttttccccctcgtctcctgtgagaa

SEQ ID NO: 119111 - DNA, 74 bp, Homo sapiens
tggttgtggtcagcaatgagtctgggagacactgtcggacattcgggaaggtgcgccgctaggggtccacctgc

SEQ ID NO: 119112 - DNA, 82 bp, Homo sapiens
ctgcttatggcggcgctggagagggggcgctgagctgttgggggcgtgatggtgggcatgggtcagaaggattcctatgtgg

SEQ ID NO: 119113 - DNA, 100 bp, Homo sapiens
gaagctgctattaaagggaagatcgatgtgtgcattggttcctagaagccaaaccaaactgacaataatgcttgaaaaattaggaatggattatgatggg

SEQ ID NO: 119114 - DNA, 142 bp, Homo sapiens
ctggaggagaacctcaatattgcaattgatgtcatagatgcttaccaaaaacatcctgaatcagaatggccagagaagacccctcctcgtcctcaaggacagaggccagagccggagaatagaggggtgaggaacattctag

SEQ ID NO: 119115 - DNA, 73 bp, Homo sapiens
cgagtacccaccagagggcgccactaaactggaatggatagcttgtgtcaggtccaacttcttggtcttatgc

SEQ ID NO: 119116 - DNA, 50 bp, Homo sapiens
gaagaaattgttcagttcttctcagaaactaatctggattcactccctct

SEQ ID NO: 119117 - DNA, 100 bp, Homo sapiens
gatttttgtattattctgcgtggaagctacacttactccagtgggaggaggactccaaaaccgaagctgaaagactggcatcctcctgggggctttattc

SEQ ID NO: 119118 - DNA, 97 bp, Homo sapiens
tgctcaggatcgcaatattgccattcaggttgaaatcacaaagattagacacctttttagataggtgttcttcagcaccactgacaacacggttctg

SEQ ID NO: 119119 - DNA, 100 bp, Homo sapiens
gtatcccaactgttagcaatgacatcgactgggatttctgcttccatataaaatccaagtccggctagtacgcgaattggagaaaaagttcagtgggaag

SEQ ID NO: 119120 - DNA, 80 bp, Homo sapiens
atgcctactctcaagaaatggggcttcctgaggctgcggtggtcacgcttcgcccgtgtcctcctcacccgctcctgcgc

SEQ ID NO: 119121 - DNA, 97 bp, Homo sapiens
ccggaggaggcgacaaacttcgcagtgccgcgacccaaccccagccctgggtaggtgctggagaatctggtaaaagcaccattgtgaagcagatgag

SEQ ID NO: 119122 - DNA, 75 bp, Homo sapiens
gccggttatctctgtgaatctcaggaggcccacttggccacggaatatgttcagcacatccaacaggccctggac

SEQ ID NO: 119123 - DNA, 75 bp, Homo sapiens
cacagcggcatctttggcttcagcgtgtcccgcgctggagtgacttgtctgagattcctccagaactgagccctt

SEQ ID NO: 119124 - DNA, 90 bp, Homo sapiens
ctctatgaccgcctgattaacgagcctagtaatgactgggatatttactactgggccacaggtactgggctggagtgccatggcatgatc

SEQ ID NO: 119125 - DNA, 100 bp, Homo sapiens
ccggaaactggggcttcggcagtgcctggtgacgcggagcggagtctccatggcaactgcatcctcccaggttctaattcctgaaatcaacctcaatgac

SEQ ID NO: 119126 - DNA, 130 bp, Homo sapiens
gcgaaatatgataaagcatgccgaaatggagaggacatctgtcttagagaaacaagttgtttttcaccattcagaacattgcctgaagcaggtccaccatgccgttagtaacgaggaacatcgagccaag

SEQ ID NO: 119127 - DNA, 100 bp, Homo sapiens
tgaaacaattacttgctaagagcaaacttgaagatacatactgccatgaaagaaagctcacctttatttgatgatgggcagccttggggagaagaaactg

SEQ ID NO: 119128 - DNA, 98 bp, Homo sapiens
taaattacatattccagtaatggtggatgaagttgttcattgtttgtcaccacaaaaaggacagattgattctctaaaagatgcctttgcaagcactt

SEQ ID NO: 119129 - DNA, 75 bp, Homo sapiens
ccccgccgagtcctagcgcctggcctgcgcgccgctgcccgcgccacagacaaatttacatgtattggagaccag

SEQ ID NO: 119130 - DNA, 100 bp, Homo sapiens
agacagtggcagctctggccctgctctttgccatccacagccaccaccagcctatgagcctccagcccctgccccattgcctccaccctcagctccctcc

SEQ ID NO: 119131 - DNA, 95 bp, Homo sapiens
ccatcgctgccagggcagaaattgagcaagcagcaagtcggctttcagatcagtttgctggaacattatcagatggcttagggaagacgatggac

SEQ ID NO: 119132 - DNA, 49 bp, Homo sapiens
ggaggaaaacaacttcgagggcagaatggggtcgaggatttggtctttt

SEQ ID NO: 119133 - DNA, 75 bp, Homo sapiens
ccgggccctggcacctgctgcctgcccagaggccacccagcctcctagacagggataaacacacttgttacctat

SEQ ID NO: 119134 - DNA, 100 bp, Homo sapiens
ggtgggagaacaaagctgaggtccagatgaaagagaagtttctggtcactccccaggattatgcgcgttcagattctgaaataataggttatgctttgga

SEQ ID NO: 119135 - DNA, 95 bp, Homo sapiens
cgggagactagcttggccacaggagacaacgttgaggtacagacaggcgatatgaaaggtgaggtctatccatttggcatcgttgggatggccaa

SEQ ID NO: 119136 - DNA, 100 bp, Homo sapiens
ctttggtccagaacctcagcaccaacactgcagaagacttctatttctctctggagccctctcaggttggattagcttttcaaaacagaaattcttggaa

SEQ ID NO: 119137 - DNA, 73 bp, Homo sapiens
acagtggcaatgagaccagtggaagcagcaccatcggggagacaagcaactcccatggctattgaagaacaag

SEQ ID NO: 119138 - DNA, 75 bp, Homo sapiens
tatcagatccgccgacgactgcaagcagtttcgggaggagttcaacaaaaagcttgtggtgaaggggggcaaaaa

SEQ ID NO: 119139 - DNA, 88 bp, Homo sapiens
aaaaatgacccaccaatggaagcagctggcttcactgctcagatcttcgcaaatactgtggacaatgcccgcatcgttctgcagattg

SEQ ID NO: 119140 - DNA, 100 bp, Homo sapiens
ctggctcaggagggaagctgcagaccttcgcggacccagccgccgcctccatctctgacggagactgtgacgcccgggagggtgagtcagtagccatgaa

SEQ ID NO: 119141 - DNA, 96 bp, Homo sapiens
ggccgacccggcccgtagtgtggaagcagcttcaggttgggataattcttcactattccacccttgccacagtactatgggtaggagtgacagctc

SEQ ID NO: 119142 - DNA, 74 bp, Homo sapiens
cttgctgttacctacttctttcatcagcaagaatttcgactgggagtgcgactctactcagaggaacagccaca

SEQ ID NO: 119143 - DNA, 89 bp, Homo sapiens
tcgtggagaatgatgtcatcatgcatgctctcactaagcagttggaggctgtgtctggacagagcgggatgccaccagcttgtccaaag

SEQ ID NO: 119144 - DNA, 100 bp, Homo sapiens
gggcttctggaactgaaccagatgagagccttcaaaagcagtgcaactggctcagtattcacagggaaagctgtgaggcctatatatgcaaacagatttg

SEQ ID NO: 119145 - DNA, 95 bp, Homo sapiens
ccatccgtctcaagactgtgaaaccagggaggtggtacaagcaaactgtgttcgctggagaaagaagttctcatttatgtgcaaaatgagtgcaa

SEQ ID NO: 119146 - DNA, 96 bp, Homo sapiens
gacaagaccatcgagctcatgaatacgccagacaccttttgaaagctaatttttggtgaagaaatggattcggttacataagagtgcaacttcaga

SEQ ID NO: 119147 - DNA, 74 bp, Homo sapiens
aagttatgcttgttggaattggtgacaaaatcagaggcatactttataggggcactatgaacgaagaggagcag

SEQ ID NO: 119148 - DNA, 75 bp, Homo sapiens
aagggcatcaccgtgaagcagaagaggcttgggcactgtttaaaggaaagttccgagaaggcatcgacaagccgg

SEQ ID NO: 119149 - DNA, 100 bp, Homo sapiens
ctctatagtgggcgtggccgaggccggggtgaccctgccggagcctccgctgccagcgacatgttcaaggctaaagaattacctccaaagccattgtcaa

SEQ ID NO: 119150 - DNA, 100 bp, Homo sapiens
atccaaacaagcttcattgttttcagctaacagtaaccccagaaaggtgactcttttgatggtgggacttgataatgctggtaaaaccgcaacagcaaag

SEQ ID NO: 119151 - DNA, 100 bp, Homo sapiens
ccgtttccccctgttgcagggttttgtttatataactcaagttgtttggctaaattcttcagcattcagcctgtatatggagcacagcatcctcctcttg

SEQ ID NO: 119152 - DNA, 100 bp, Homo sapiens
gttcccgttaaccttagccacaaagtcaaaggatttcaggtgttggcgtctgcttcccattactggccactggagaatgtggatgggatccatgaacttc

SEQ ID NO: 119153 - DNA, 96 bp, Homo sapiens
cagcagcaaccatcaagacttcacaggccacaaaatcaggaaccccagagccaggtaaagtgctgggcaacctgcagttgaacttgctgagcaagt

SEQ ID NO: 119154 - DNA, 98 bp, Homo sapiens
cgtggccccactgcctggagagtggaaaccatgatcatcgaaggtaacatgaaggcccactttattatggatgatccagcaggaaacagttacttgca

SEQ ID NO: 119155 - DNA, 100 bp, Homo sapiens
gcggcggccagaggaaccccgaggtcgtccttggtggaaggaaccatgaactggcatctccccctcttcctcttggcctctgtgacgctgccttccatct

SEQ ID NO: 119156 - DNA, 88 bp, Homo sapiens
cgggcggcttcctggcctgggcgctccggtggcggcggaggttttgggatttgagattgacgcggtgaactctgtccagttttcaaac

SEQ ID NO: 119157 - DNA, 75 bp, Homo sapiens
ttacaagcagcaagtgcgcggttggggccactgcgaggccgttttaggttacacaggcagtctgttgaaacagcc

SEQ ID NO: 119158 - DNA, 101 bp, Homo sapiens
cagcgccctgccgccgccgccgcggcccagcgagcggccctgatgcaggccatcaagtgtgtggtggtgggagacgggtatttctgggaaaagccagcttc

SEQ ID NO: 119159 - DNA, 100 bp, Homo sapiens
ctctgcccttatggaattggacaaagaaggggacgaactggtagtacctgaaacatcagataatagtcggaaacaaatggttagaaacattaacaataag

SEQ ID NO: 119160 - DNA, 96 bp, Homo sapiens
gccagaggtgctgggccagcggagcactgatgtagtggacctggaaaatgagggcttcatcaagatgaagagctaccccagcagcaccaatgtgga

SEQ ID NO: 119161 - DNA, 51 bp, Homo sapiens
cggggagggacgagagggcctgacgtacagagctttggatgtagtcgatgg

SEQ ID NO: 119162 - DNA, 85 bp, Homo sapiens
cggccacagcctgcagcggagcccacgagaggcagcgccatggcggagcagacctactcgtgaaatgacctccaccttcaacccc

SEQ ID NO: 119163 - DNA, 75 bp, Homo sapiens
gagagctatgacacagagtcagagttcacggagttcacagaggacgaggtcaaaatgcagatcttcgtgaaaacc

SEQ ID NO: 119164 - DNA, 90 bp, Homo sapiens
aggagccctgcaactggcgccgccctgaccccaagattccagatgttcctgtggaccccagtccagtactatactggcaattgctggaga

SEQ ID NO: 119165 - DNA, 100 bp, Homo sapiens
gaatatttcagaaaagatccaagaccattcttcaagtttgcaaaggtatcatgaactgatcactaaatatgggaagttggagcctttggcagaagtggac

SEQ ID NO: 119166 - DNA, 75 bp, Homo sapiens
tcatgacagctgagttccttttggaggatccgtcttcaggcagagctccttaataagcatttatagtcagttttt

SEQ ID NO: 119167 - DNA, 75 bp, Homo sapiens
ctccgctcccccgatcctattcccagtcgtggcagatgattctggaccagatgaagcctgaggagccttccagct

SEQ ID NO: 119168 - DNA, 101 bp, Homo sapiens
tccgggaacggcggcgggtacggcggccccgcgcagcccccggccgcagcgcaggcagcccagcaggctacttcacccccctcaacaccccacagagctat

SEQ ID NO: 119169 - DNA, 74 bp, Homo sapiens
agaattataggaacctggtctccctggtggtggacttgctttgtgaagagacagttcatgaacaagagtctttc

SEQ ID NO: 119170 - DNA, 80 bp, Homo sapiens
gactttggccggacttttgctaactgcggcgggcgagacgttctcaggtctatgctccatcagcaagcactgccgactac

SEQ ID NO: 119171 - DNA, 75 bp, Homo sapiens
gcttcctccaccaaggcatactgaatttttcacagacaacctatgggacacactcccttgctcatggcaggaagc

SEQ ID NO: 119172 - DNA, 75 bp, Homo sapiens
tcctcgtcgagcgcaacccaaggagggccaaacatgtgggctattacctctgaagaacgtactaagcatgacagg

SEQ ID NO: 119173 - DNA, 100 bp, Homo sapiens
gcaatctgctggatgatttgaaaagtgtaatgaaaacaaatgacattgttcgatacagggtgtatgaggcaaatgttctgaaaaagactctgcatgggaa

SEQ ID NO: 119174 - DNA, 95 bp, Homo sapiens
cgcctcggcaggaaccgggaccgccagcgcaggaggagcttgaagaaatccgcaaatgtgggatgaaaaacttccgtaacatccaggttgatgaa

SEQ ID NO: 119175 - DNA, 75 bp, Homo sapiens
acatcagcttgtaggagacagagaggcggggtttcaccatgttgcccagactggtcttgaactcctgagcttaag

SEQ ID NO: 119176 - DNA, 75 bp, Homo sapiens
ggtgagaagatcaactacaccgaggtgcgcgtggaattcatggacgacacgagccgatccatcatccgcaatgta

SEQ ID NO: 119177 - DNA, 153 bp, Homo sapiens
cttggaagcttctttgatgatggcccaggaatttataccagctgtagcaaaagtgggaagccaagcctttcctcccggaggaggagaacggggctgaggaggaagaagaagaaactgccgaggatggagaggaggaagatgaaggggaagaag

SEQ ID NO: 119178 - DNA, 83 bp, Homo sapiens
ctggagaatcttgtctttggcaaaggattccaagcaaagatcttccctgagagacaaggaaacaggtatcagcatgatggtag

SEQ ID NO: 119179 - DNA, 100 bp, Homo sapiens
ttttaacacctcaaggttgaagcagaagaataaggagaaggataagtcgaaggggaaggcgcctgaagaggacgaaggcaaaatcctcaatgatgatact

SEQ ID NO: 119180 - DNA, 100 bp, Homo sapiens
ctgtgttgatgaacatcaaggctgtgattgagcagcggcagtgcactggggtctggaatcacaaggacgagttaccgatgcaaccttaaaatcagtgaca

SEQ ID NO: 119181 - DNA, 48 bp, Homo sapiens
tgcaagaaagacgcctgccccagtacaggctgagaggctgagaaatca

SEQ ID NO: 119182 - DNA, 126 bp, Homo sapiens
ccaggatccaaatgaagagaactcttttaaatatttgataaaactactcacccagtttctgtatacatagccttcaggactgcttttggtggaaagagatagcaggtggtgctaattcactgtgtt

SEQ ID NO: 119183 - DNA, 76 bp, Homo sapiens
ttaagaagcagccaagccacatggaggccgctcattttggtgacctgggaactcatgtcgtgtcccattttgtaaa

SEQ ID NO: 119184 - DNA, 100 bp, Homo sapiens
gggtgctcacagctgcccattgcctaaagaacttcagcgcctgctcctggtcatcactaaccagatttacttggagtacatgtgaaagaaaacgtcagtc

SEQ ID NO: 119185 - DNA, 100 bp, Homo sapiens
cacagccaccaaccacactaacgagattcaagattatttgcaacagctcacgggagcaagaacgacagtgaccaacaccttcaggacgaacaatatccag

SEQ ID NO: 119186 - DNA, 97 bp, Homo sapiens
actactacatcccgcagtacaagaactggagagtccaagtggtaagaagttcagaagcaagcctcagttggcaaggtacctgggaaatactgttgat

SEQ ID NO: 119187 - DNA, 80 bp, Homo sapiens
cacgacggggccgacgagacctcaggttaatttggagtggcccctggagtcagtttcctacaccatccgaggccccaccc

SEQ ID NO: 119188 - DNA, 75 bp, Homo sapiens
aagatggcgactgtcgaaccggattttctgccgtctcttggcaaaaatggcaaataatgatgctgttctgaagag

SEQ ID NO: 119189 - DNA, 100 bp, Homo sapiens
tcctcccagctacgagctgccccagatcttgtagaaaatttcagctgtagcccttggactagaagctgaaataacagaagctgtgtacgatgcattaggg

SEQ ID NO: 119190 - DNA, 97 bp, Homo sapiens
ccgctatcaccatggggatggttcttctaaatgaagcagcaacttcgaaaggcgatgttggaaaaagacggacctgcctagggtagttaaaagacga

SEQ ID NO: 119191 - DNA, 98 bp, Homo sapiens
aaaatggttatcaaccacttggagaagttgtttgtgacaaacgatgcagcaactattttaagagaactagaacaactttcatcctttgaaacgtgtgc

SEQ ID NO: 119192 - DNA, 100 bp, Homo sapiens
ctgggtggagacccgagactgcttcctgcagcagtgcccagagacacctatggctgccgatgaaggctcagcagagaaacaggcaggagaggcccacatg

SEQ ID NO: 119193 - DNA, 100 bp, Homo sapiens
cgccgccgctgcatcccgcccggtccgagtccgcccgccacgcccgccgagccgctgccgccgccaggagcaacaagggagcagtgggcaactgcgtcac

SEQ ID NO: 119194 - DNA, 75 bp, Homo sapiens
gaacccgaagaagaaaggattcgttacagccagagattgttcctgtgccttaagaacattagaaccttcctgtcc

SEQ ID NO: 119195 - DNA, 101 bp, Homo sapiens
tccctgggaaaaacagaagagctccaacagcagctgaatttggaaaagttcaagactgccacactggaaaggtacttcgtcagtttgtaagacatgagtcc

SEQ ID NO: 119196 - DNA, 100 bp, Homo sapiens
ttcaggtcatctgaaccttctgagaaaacatggtcaacgtcttgaaaggagtgcttatagaatgtatgccaccacgggctgttccctgaccctgcaccat

SEQ ID NO: 119197 - DNA, 75 bp, Homo sapiens
ttattccttcaaagagcagatcatcgagctggagctgaaggagcgtacatcgtggccgtgtaccactgcatgaag

SEQ ID NO: 119198 - DNA, 49 bp, Homo sapiens
gaagaagctgaggatgaagaagatgacggagtcttgctctgttacccag

SEQ ID NO: 119199 - DNA, 100 bp, Homo sapiens
tgcctatcagaagtcaattcaaaggacctgcccccagagagagttcttgggtgtctctggggagtccctgggccagaccttcctccagactccagcccac

SEQ ID NO: 119200 - DNA, 98 bp, Homo sapiens
cgctgccgggcaccgaggaccagctcaatgacagaatcttgacaaaacttttggaagtgtcagatgatccccaagtcttagctgttgctgctcacgat

SEQ ID NO: 119201 - DNA, 100 bp, Homo sapiens
cagaaactgaagaaaatgagaagccgcatggatgaaaagcaaatgttctgaaaaagactctgcatgggaatggcctgccttacgatgacagaaatggagg

SEQ ID NO: 119202 - DNA, 75 bp, Homo sapiens
ctatcaatgcgaatgatcctgaagcctcaaagtttcatgtggctgacaagattttgaaaaagaaagaataccctc

SEQ ID NO: 119203 - DNA, 92 bp, Homo sapiens
gtacgtgtacatcatttacggcatgtacttctgcatgaacatctccagccaggggagtgcatccgccccaacccttttccccctcgtctcct

SEQ ID NO: 119204 - DNA, 71 bp, Homo sapiens
aacgggcagccatggccctccacagcccgcagtttcaccagtgatcattaaagaatgggcagcttacaaag

SEQ ID NO: 119205 - DNA, 101 bp, Homo sapiens
tttcatgcagtgacatgttgataaaaaatgatggttatgaagacagtatggagtttccagaccatagtagacatttgctacagtgtctgagcgagcagaga

SEQ ID NO: 119206 - DNA, 128 bp, Homo sapiens
agtgcacaactgtttaattggctctggaaacctcctacctccgttgaaaggagagccagttactaacttaatcatttgctgtttcaaatagagaactgtgcgatgatgagaaagagttcatacatttt

SEQ ID NO: 119207 - DNA, 75 bp, Homo sapiens
gcattgaagctgttgagaaaagagcctggtggctgatgtggttgtattcaactcagtttttaatatggaatcatt

SEQ ID NO: 119208 - DNA, 75 bp, Homo sapiens
cggccgaccagggacctgcccgcctgcggctgctccggtgtttctgaaagatctatccagcactccgatggccag

SEQ ID NO: 119209 - DNA, 100 bp, Homo sapiens
tgggaactagaggatgtcagggagggggacccagattttagtaaagaagggtgtcagatgcctgatacattcaattcatggtttcttataaccctactcc

SEQ ID NO: 119210 - DNA, 96 bp, Homo sapiens
gagccccagccaggacgagaggatgcggagcccgcagaacctccacagtcaagaggacggtgaccattgtgaggtagatattttgttctaattttc

SEQ ID NO: 119211 - DNA, 98 bp, Homo sapiens
tggaagacgcgtgccgcggcgcctggttgcctgcagcggcccggacccgagagacgaggagaagaccttttcatgtgtatggacatacagctcgttga

SEQ ID NO: 119212 - DNA, 98 bp, Homo sapiens
caagatgtccgccagagctgcggccgccaaggaaaatcctgccttgcttcgttgggcctatgcaagaacaataaatgtctatcctaatttcagaccca

SEQ ID NO: 119213 - DNA, 90 bp, Homo sapiens
gcagatgctatggtggcaacagatgtatgctcatcagtattatatgcagtatcaagaggtgttgccaaagattcacgaagataaacacta

SEQ ID NO: 119214 - DNA, 90 bp, Homo sapiens
gacatttcacccccccagcaccccagtcggcacaggctgcaagattaaggccttgagggccaagaccaacacctacatcaagacaccggt

SEQ ID NO: 119215 - DNA, 100 bp, Homo sapiens
gtagacactcctgctctcttccatccccatcttacagatgtattaagaagcctcaggtttggtgcacctcgatttggaggaagtagggcagggcccttat

SEQ ID NO: 119216 - DNA, 100 bp, Homo sapiens
ctggcccgtgacctgaaggctgtcaagtatgtggagtgttctgcacttacacagaaagctagggtgcgagctggcaagaccttccccagcagccctggag

SEQ ID NO: 119217 - DNA, 83 bp, Homo sapiens
ggagaacctgcggcggccggagcgacctgcctagagctggaacgttacctccagagcgagccctgctatgtttcagcctcaga

SEQ ID NO: 119218 - DNA, 98 bp, Homo sapiens
gagagactgaaaagacatctaatttcattgctcggcagttttctgagtttaaccagtaatgccattcagttgccaatctcaagcaaagcaaacataag

SEQ ID NO: 119219 - DNA, 90 bp, Homo sapiens
gcggcccagtccgagacagcaggagcctgagcttaggtgaattctcatgatgcagatgataggactgaggaattcaggctctaaagctct

SEQ ID NO: 119220 - DNA, 83 bp, Homo sapiens
acgtgggccagctgcgggctgagctggccagcgcaggcctagttccccgagagcgttcagacagtgggggctcaagctcagag

SEQ ID NO: 119221 - DNA, 75 bp, Homo sapiens
ctgggatgtggatggaagcatggtgcctcctgaatgatcagccatacctttgggctcgactagatagaaaaccca

SEQ ID NO: 119222 - DNA, 75 bp, Homo sapiens
agagctgcggaacaggacgccctctgatagttcaagctgaagaagatgtggaaaagtcccaatggaactatccgg

SEQ ID NO: 119223 - DNA, 98 bp, Homo sapiens
tgttattatggagatgggttctttggagaaaataatgagttctgcgagtgttacacttgcgaaaggtggttgaagatggatatgaattttttgcaaag

SEQ ID NO: 119224 - DNA, 101 bp, Homo sapiens
cgaggggctccgggtcttccagagcgtgaagatcaagatcgcaccagtggcagttcgcagcctccaggacttggctcgcatcgccatccggggcaccatta

SEQ ID NO: 119225 - DNA, 80 bp, Homo sapiens
aaattcttcagctgctcggacagatgaagctccccaaggagctgcagggaacagatgctgcttgtgttgctcagagtcac

SEQ ID NO: 119226 - DNA, 100 bp, Homo sapiens
aaaccagaagaggaggttgcccagaagaaaaagtgcacagccagaggacaacacatcacacacaagaaacagttgtgctcatgtgatgggggcctcagca

SEQ ID NO: 119227 - DNA, 100 bp, Homo sapiens
aaaaccctcagcgacatctttctgcttttcaagagttccgatttcatcactcgtgacttcactcagccgattcaagttcgaaatatggcaactttgaaag

SEQ ID NO: 119228 - DNA, 100 bp, Homo sapiens
ctgcaccgcgccctggagtcttctatcgctcccatcgtcatctttgcatccaaccgaggcaactgtgtcatcaggtgaaagaactcttttcttctttggg

SEQ ID NO: 119229 - DNA, 75 bp, Homo sapiens
ctgttcctattcgggcatcttggctcctccttgactgatgttctaatcatgtcagataaagatgatattgagact

SEQ ID NO: 119230 - DNA, 75 bp, Homo sapiens
ctgtttactctgaattaccatcagctgaagggaaaatgaaggttagcatggcctcattgaaagaactagatcaaa

SEQ ID NO: 119231 - DNA, 100 bp, Homo sapiens
ccactggcatggatggcggcatgagtatctgggatgtgaagcatgcttatgagcccactcctgatgatgtggccatatcctacctccctctggctcatat

SEQ ID NO: 119232 - DNA, 74 bp, Homo sapiens
caaggaccagaagaaactgcaccggaaatgtgcctaccaggagccagcaccgctctttgaccttgccatgcttg

SEQ ID NO: 119233 - DNA, 100 bp, Homo sapiens
atacccttgaggctcttctactgacagcctctgaaagaacgccaatctgaattgccaacgcaaagcaaagcgagcttccccagtattctcagtgacccag

SEQ ID NO: 119234 - DNA, 51 bp, Homo sapiens
aagatttcaggcatgaatgggatacatggcctcacctactgctattccatc

SEQ ID NO: 119235 - DNA, 100 bp, Homo sapiens
tggagaccgaggggctgcgcttcctgcacaccacggattctttggatgggaagagaccttgaaaggacctctagtttatcctgcaactccagtcaatatc

SEQ ID NO: 119236 - DNA, 51 bp, Homo sapiens
caaacttggacagctctctatgacttcacagagaatgcagttgtcttgact

SEQ ID NO: 119237 - DNA, 100 bp, Homo sapiens
tgctgtgcctctctcgcccacattttccccaagcactctcaggaacctggcaacagcatcttcatgatacagttaagaggaatcttgacagcgccacttc

SEQ ID NO: 119238 - DNA, 80 bp, Homo sapiens
gtgccgttacggccatcacggcggccgcagtggcgtcctggagccctcctcagcggagcgggcactggacacaatgaact

SEQ ID NO: 119239 - DNA, 97 bp, Homo sapiens
tcagaagaacttgtacagagatgtgatgttggagaactatagcaatctggttttcttggactctaaaatagagctcaagcttgagaagagagaacca

SEQ ID NO: 119240 - DNA, 82 bp, Homo sapiens
cccagcatccttgcccactacatgaggaggtttgctaagacatatctgaagagatggattaagaatgctttggattaaggat

SEQ ID NO: 119241 - DNA, 100 bp, Homo sapiens
aagaccagtccatttggggaaatccttcggatggtgaactcattagaaaataaaatacagtgttggatccctttctcctgtttctgcaagtgtcctgaaa

SEQ ID NO: 119242 - DNA, 100 bp, Homo sapiens
cgagagaggcaccgggatcgtgaccgagaccgtgaccgagagcgtgaccgagagcgcgaatatcgtcatcgttagaaggcagacctgttatcctaaacta

SEQ ID NO: 119243 - DNA, 74 bp, Homo sapiens
gttccatcaagccccaccagaaggtggaggcccaggtactcattgaccccagagggcctggagctggcccagaa

SEQ ID NO: 119244 - DNA, 75 bp, Homo sapiens
ccggctccgtcgtggaagcaggactgcgccgcgtcttcctcaaggggttgtagaaggtgatttagctgccataga

SEQ ID NO: 119245 - DNA, 50 bp, Homo sapiens
ccccgtggcgcggcggcggggaggcgagttgctgatcatctgggctgtga

SEQ ID NO: 119246 - DNA, 83 bp, Homo sapiens
gtcgacacgcacgtagaccctccgttccataagagcaggcatggaagaggagatggttcgtgttacgcagtggccgtttaact

SEQ ID NO: 119247 - DNA, 100 bp, Homo sapiens
taaagatttttgtttgaatgaaattaatgaagctgtacctcaggtgaagttttatgaagagggaactctaatgatccaggacaaagaagttaccctggag

SEQ ID NO: 119248 - DNA, 100 bp, Homo sapiens
aggactgatcatttcttgcagctctaaaaaccatggctcgggacttatcaaactggtttcaaagcacagagctcaagtaatttacaccagaaataccaag

SEQ ID NO: 119249 - DNA, 100 bp, Homo sapiens
ctgaaaatggggcggaagaaaatacaaatcacacgcataatggatgaaaggaaccgacaggaactgggaagtaacagccctccacagagaaactggaagg

SEQ ID NO: 119250 - DNA, 83 bp, Homo sapiens
gaaagcaggaggaggtggcggcggcgggaagatccgcggcgagtcctttgcacatgttggcaacacacgcatccgcatcggcc

SEQ ID NO: 119251 - DNA, 96 bp, Homo sapiens
atgttgtctatacatatactggaaagagaattgcattatatattggaaatctaacatgggactgatcctttgaaatactccagccatgactaaaag

SEQ ID NO: 119252 - DNA, 90 bp, Homo sapiens
aagaattcattagcactttacaagcccagctcagccagacacaggcagagcaagctgcacagcccagcagagctccccctgacagaccgc

SEQ ID NO: 119253 - DNA, 98 bp, Homo sapiens
ttcaaggtgggatcgtaataatggcaaaagacctcaccaagaatttggcatttcaagagctgcttatcatccagactttccaacagttctgacagctt

SEQ ID NO: 119254 - DNA, 76 bp, Homo sapiens
gggaccattgtctacagagaccaactgggatattgcccacatgatcagtggacaagctgtgccgaggttgtctccc

SEQ ID NO: 119255 - DNA, 100 bp, Homo sapiens
cgccagccccacctccccccggccttcctggagtccctgaaagaggaagaagtaggttttaagttcctcagagccttcaaactttaagattgaaatcaag

SEQ ID NO: 119256 - DNA, 82 bp, Homo sapiens
cacaccccacaacacctctaaagatgccggtgcagctgacgacagccctgcgtgtggtgggcaccagcctgtttgccctggc

SEQ ID NO: 119257 - DNA, 99 bp, Homo sapiens
tgaaaatcttaaaggatattttatgtgaatttctttctaatatttttcaggcattaacaaagggccttgatacaaagcatgcttgaaaaatgcgatcgg

SEQ ID NO: 119258 - DNA, 74 bp, Homo sapiens
tcggctctccacagccccgcgcacaggcctccgggtatggcctcacaagtcttggtctacccaccatatgttta

SEQ ID NO: 119259 - DNA, 75 bp, Homo sapiens
agaagacagagggttttcttttgaggtgccgtgagcgatgtggagatgcaggaacactatgatgagttttttgag

SEQ ID NO: 119260 - DNA, 100 bp, Homo sapiens
ttctgagcgagccttgaaagagataaaagcggaagtttgccacacgtttaaaaggatgcttaatcgggagctcacccatctctctgaaatgagtcggtct

SEQ ID NO: 119261 - DNA, 75 bp, Homo sapiens
ggccaccagtttccggacagcttcgtgctgggattaaactgcaaatatctcatgaagctgctgcctgtatcactg

SEQ ID NO: 119262 - DNA, 50 bp, Homo sapiens
gttctagaggcatggttgaaattgaattgaccaggagctgcattatctat

SEQ ID NO: 119263 - DNA, 100 bp, Homo sapiens
ccggtcgcgaggaggaggaggatgtggcgcgcggaggggaaatggctgccgaaaacaagccggaaggtttttcgttggaatatacgttgcacatttatgg

SEQ ID NO: 119264 - DNA, 98 bp, Homo sapiens
aggaggctaagaaagtggtgaatcccctgtttgagaaaaggcctaagaattttggcattggctgtggaaccctactaatattggatccagatgaagct

SEQ ID NO: 119265 - DNA, 100 bp, Homo sapiens
aggaaaacaagaggccccagagggaaaagaagcccaaagttttaaaggttcgttccaccagtcataaaccagatgaaatctatggcatgattgaaagact

SEQ ID NO: 119266 - DNA, 100 bp, Homo sapiens
ctggatcagtttctttgtcatgtagccaagactggagaaacaatgtacataagattctttcctgatggccatgtgatgatgttgacaacccctgaagagc

SEQ ID NO: 119267 - DNA, 119 bp, Homo sapiens
tgtcctgtcctggatcagtttctttgtcatgtagccaagactggagaaacaatgttcccgtgtcagtggctatgatgacacctcaagttatcactccccagcaaatgcagcagatcctc

SEQ ID NO: 119268 - DNA, 75 bp, Homo sapiens
caatgagacgttccggatcagcgtttatcaggtgctccaggagcacttgggcagctactccctgtatcaaagcca

SEQ ID NO: 119269 - DNA, 83 bp, Homo sapiens
gttgcaccaggttcttcgaaaactgaagcagatgttgaacaacaagataacgaaggaggcccaacttcattcaataaggagcc

SEQ ID NO: 119270 - DNA, 100 bp, Homo sapiens
aattgccaaggaactgggatttcaacctgaaagtggaggctgcgaaaatagttgatgaggaatctggattaaaggattcagaaccagagcgaaaacgcaa

SEQ ID NO: 119271 - DNA, 101 bp, Homo sapiens
cccagccgctgtctgattttaagctggcaaagtgggaaaaataaagtgttgagtaaacagaccaagttgggcaaatactgtggtctggggttgcaaatgaa

SEQ ID NO: 119272 - DNA, 101 bp, Homo sapiens
gtcattcttctctacagaagagcttctcctcatcaactggggatgattacagttcttcctaaaaaaggacccatggatgaaggaccagatcttgatctagg

SEQ ID NO: 119273 - DNA, 75 bp, Homo sapiens
gccgtctgcaaagtgtccccggcaagaagttctgtggaagcaaatcattgaacgcaatggaggagtcctcaccag

SEQ ID NO: 119274 - DNA, 83 bp, Homo sapiens
gtggctgttccaatcgctcctgtttgtcttctgctttggcccaggatagtggccaaagcctccaagaacctcatgtccacgca

SEQ ID NO: 119275 - DNA, 90 bp, Homo sapiens
caaccatctgaacaaaaagctgctttccccccacctgaacagaaaactgcatttgacaagggaaagctactattacctccaggcacggat

SEQ ID NO: 119276 - DNA, 90 bp, Homo sapiens
gccggcctcgcctcctcgcagcagcgccatgaggcggggtttcaccatgttgcccagactggtcttgaactcctgagcttaagcaatcca

SEQ ID NO: 119277 - DNA, 75 bp, Homo sapiens
tcatttttgatcaggagaaagaagacagccatcatttgaaagaaactaattctgaagcaagcccttatagttgtg

SEQ ID NO: 119278 - DNA, 50 bp, Homo sapiens
aaattgcgcagcgcggtggaagaggtgtgacgtttctccagatacttcat

SEQ ID NO: 119279 - DNA, 98 bp, Homo sapiens
aagaagagtccaccttgcgaccgtatccgctagcgcggcctgggatgcgcttgggctccctggcattttgttcccaacatcacctttggtcaccctgt

SEQ ID NO: 119280 - DNA, 74 bp, Homo sapiens
caagaagccaaagaactggctaggcaaataagctttaagggagctactttgcccgagatgctgcatattcccac

SEQ ID NO: 119281 - DNA, 82 bp, Homo sapiens
cgctctagcggccgggactctgaactatggcggctttggaatacgctaagaccatccccaaacccaaaccatcaaatctgac

SEQ ID NO: 119282 - DNA, 75 bp, Homo sapiens
ataaatcctccccgttccgcggacgatatggaatgatttatcaggagcagctgcattggcatggaagaatcctat

SEQ ID NO: 119283 - DNA, 82 bp, Homo sapiens
gtggttctcccacgtgggcccctttaacgagggaggtcagctaatgcacaagctgagtgtggaagccccacccaaaatcctg

SEQ ID NO: 119284 - DNA, 50 bp, Homo sapiens
gccgcccgccgccgctggagctagaggtcacaccgacaaatctgaagcgg

SEQ ID NO: 119285 - DNA, 100 bp, Homo sapiens
ccgctggcagccggggagctgcaggaaccagactgggggcgagctgagcacctgtagtcaatcacacgcaggttaatttggagtggcccctggagtcagt

SEQ ID NO: 119286 - DNA, 100 bp, Homo sapiens
cagctggctggcttcagtggaccattgctgagacaaaggaaaacccactcccttggaggagcatgaccttttcctgtaattcttcccactgctgttgttg

SEQ ID NO: 119287 - DNA, 100 bp, Homo sapiens
caaaaaagattgcagttatctgtccagaaaccagagcaagttatcaaagaggttgatatccctgaaagtacttaatagcatcgtgctgttggggaaatcg

SEQ ID NO: 119288 - DNA, 75 bp, Homo sapiens
agaaaatggacgctgacatcaatgtcacaaaagcggatgttgaaaagagctattctcaagctggaataactgaga

SEQ ID NO: 119289 - DNA, 90 bp, Homo sapiens
gagcagaaagaaagcccagcgtcacagtaagatgaagctttgcccgaagtttttacatacaaattctactagtcacacctggccattcag

SEQ ID NO: 119290 - DNA, 50 bp, Homo sapiens
tgtagatacgttagccagtttacttaagacaaggtcttgctgtgttgccc

SEQ ID NO: 119291 - DNA, 100 bp, Homo sapiens
cttcaacaatttccagatgaagattgaccccaccaacaactgaacgctttggtcaggctgctacaatggaaggaattggggcaattggtggaactcctcc

SEQ ID NO: 119292 - DNA, 75 bp, Homo sapiens
attgcgtatttcacaggagatgcacaaaaggtggaacacctacataatttcattttgtttcggttttcaatgggc

SEQ ID NO: 119293 - DNA, 98 bp, Homo sapiens
ggaccatggtgctgccggcgcctcctccgcgggcgtgaaggcggcgctcctactccctccccggactccgcggaaaacctcggatcaattctcagctg

SEQ ID NO: 119294 - DNA, 80 bp, Homo sapiens
aacggctccccgtcgtcctggtgctgcagcgtgcctccagaaagagtcgagaagataatggatcagattgaaaagtacat

SEQ ID NO: 119295 - DNA, 74 bp, Homo sapiens
tggtggttgccactcacctgaggatactttgagaatcactacaagaaaaactccttgtggtgaaggttctaaga

SEQ ID NO: 119296 - DNA, 96 bp, Homo sapiens
gattatatggagcttgcttcgatgccttttgtgactctggattcaaacataccactggatcttctcacacttgttggttgccacatccaagaagaa

SEQ ID NO: 119297 - DNA, 118 bp, Homo sapiens
gagcctcagttggaagcagccgatccagcctgcggagcctgtggggcagaattcctagaggacctgtgcaacaacctcttgaggatcgaatcttcactcccgctgtctcagcagtcta

SEQ ID NO: 119298 - DNA, 90 bp, Homo sapiens
ggtgtacttgggaacgaggggtgaagcggcccaggtgagggcagtggctctgccaatgatcctgtgagtattcaggaatcactgttgccc

SEQ ID NO: 119299 - DNA, 76 bp, Homo sapiens
cgtggaggcgctgctgtcctacacgcgcatcaagaggccgcagaggacagcacctacgatgagtacgagaacgatc

SEQ ID NO: 119300 - DNA, 75 bp, Homo sapiens
ggcaaatgaggaacagggcaatagtatgatggacagtcattttgtttactcattcagccctgttgcaggtcccaa

SEQ ID NO: 119301 - DNA, 90 bp, Homo sapiens
ccccactacgtccattccacgagccccacacatgcgccctggctactggcccacaagatccagtctccgcaagagaaggaagctctttat

SEQ ID NO: 119302 - DNA, 80 bp, Homo sapiens
tgccctgcagtacctgcagaaggtctctggagacatcttcagcaggaactgtggctgcaccatctgtcttcatcttcccg

SEQ ID NO: 119303 - DNA, 82 bp, Homo sapiens
ctcagtggtcctacctggggatattatcaaatctactactgttcatggcagagttgaaactgtgggacagccagacagaaga

SEQ ID NO: 119304 - DNA, 99 bp, Homo sapiens
ttaactgtgaatatcctgacaatgggctattggccgacatatgtgcctatggaagttcatttaccaccagaggatgggatcagagcagctaagagaaat

SEQ ID NO: 119305 - DNA, 82 bp, Homo sapiens
ctggcctggaggctatccagcatatttagcttcctgtggtatactgatgagcagaactcttccactacatacctcaattttg

SEQ ID NO: 119306 - DNA, 75 bp, Homo sapiens
acattttaccacaaacagctcttttcacaaaaagccataaccagcagaccacagcattcaggcatcctgtgacgg

SEQ ID NO: 119307 - DNA, 100 bp, Homo sapiens
cggcgcgcggcggcggcgctcggcgatggtaggcgtccctggagcggccgccttccagcccgattacacctcaacaagaaggcaactgacaaacagcctt

SEQ ID NO: 119308 - DNA, 100 bp, Homo sapiens
agttttatctagccacatcttggagtgataacaatccatattcctcatttggagcaactctggtgagggatgatgagaagaatttatggagtatgcccca

SEQ ID NO: 119309 - DNA, 88 bp, Homo sapiens
ttgtgccgtgaacctcgttttgagattaaggagcctgtgttggaagagatggtgatgggcctgggcgttttgttgttggtcttcgtgc

SEQ ID NO: 119310 - DNA, 75 bp, Homo sapiens
ccaccccagagtcagaagccgctatgcttcctggacagcttgcagaaccgcaattttcgttctgctctcaatgat

SEQ ID NO: 119311 - DNA, 101 bp, Homo sapiens
cggaagatcattcactacttcaacaaaggcaaggcttatcaggagggcagacttcaaaagctactaaaaatgaacggccctgaagatcttcccaagtccta

SEQ ID NO: 119312 - DNA, 100 bp, Homo sapiens
atagaaacagaagatgagattatgcctgaggttgtggaaaaggaagattactcagagattatagggagcatgggtagtgggcagcagtcagtgacaggtg

SEQ ID NO: 119313 - DNA, 96 bp, Homo sapiens
attccagaaaatggtagaagagcaggttccgacttcaggccagatggggactgtgcatcttcccttaatggtggaaatattaaaggcattgaagga

SEQ ID NO: 119314 - DNA, 101 bp, Homo sapiens
gcatgtctgcaacccagccattttcagggatccatatggctttggagacagtcgagattcaaggcgtgatcgatccccaattcgaggaagtccaaggagag

SEQ ID NO: 119315 - DNA, 75 bp, Homo sapiens
cacaggcacaccagggtcagaaggttacaaccgaatgtggacactcggcagaagcagctggccgcctggtgctcg

SEQ ID NO: 119316 - DNA, 50 bp, Homo sapiens
ctggactgtggatgattatcgattacgggctatcaagtactagctccaac

SEQ ID NO: 119317 - DNA, 95 bp, Homo sapiens
gagggagttccaggagattcaaccaggaatgggaagcggtctcgagcagaagccccactgaagtgtcccctggcagacacccacatgaactcttc

SEQ ID NO: 119318 - DNA, 80 bp, Homo sapiens
aagaagaacagctcgagagagcattacaagccagcctctgggaccgaggcatccagtaccctgctgactctgacatgccc

SEQ ID NO: 119319 - DNA, 75 bp, Homo sapiens
aagaccacacactgggaaacatcattaaatcggtaaaggcagcagtaatgctaacgctagcaagtaaactgaagc

SEQ ID NO: 119320 - DNA, 75 bp, Homo sapiens
catatttgacacctatgaaacatatgttggctgcctctgctggagaagtgctcaaagttatgaagtttcaggatg

SEQ ID NO: 119321 - DNA, 103 bp, Homo sapiens
ccgagaccgtgaccgagagcgtgaccgagagcgcgaatatcgtcatcgttagaaggagcgagaacccgagcagcgccatgagcaacactaccgtcgtccccag

SEQ ID NO: 119322 - DNA, 98 bp, Homo sapiens
gcgacctcaagaagcagctccacgaaaggcagccgcggatcgccgcgctcagcgacaaacaagaagccgagatcccccgcgaggtgatcgagaggctg

SEQ ID NO: 119323 - DNA, 50 bp, Homo sapiens
ggagatgagcaaggatctggaggaggtgatggcaagatcctgtacagcca

SEQ ID NO: 119324 - DNA, 97 bp, Homo sapiens
cattaatgggattggaaattttaagtgcctttgtggacagattatcaacacgctttaaatcctatgtagcaatggttggtgagtttgtaagtgatgc

SEQ ID NO: 119325 - DNA, 87 bp, Homo sapiens
gaaagagaacagagagtcctggggacagcacttttccagccattaactccaggctctcgagaatttgaagatgttgtaaatattctc

SEQ ID NO: 119326 - DNA, 82 bp, Homo sapiens
gtgcccagatgctcataaggattgtcctctttctacaaaaggttacccatgcagttgttactgtaccagcctattttaatga

SEQ ID NO: 119327 - DNA, 100 bp, Homo sapiens
taagaacatgtttttctaagccctttttgtgccaggtgtcccgttaacgtctctgttagttcagaggtacaggtttgcagattccgccagcagcacagca

SEQ ID NO: 119328 - DNA, 100 bp, Homo sapiens
tcggcaggagcagttctagaatactttattacatatctatggagacaatggcatggactgtactctcccctgggtatcgcctgcctgatctgtggaaaga

SEQ ID NO: 119329 - DNA, 97 bp, Homo sapiens
agcagcagagccgatgggtcatgaggatgtaagtgcgtttgaaggcttccacaccctctactccaggatgatatcatcaagttgaatcgaaaggaag

SEQ ID NO: 119330 - DNA, 100 bp, Homo sapiens
atacgaagtcacttgacatagagattccaaaacatattcccgaaagaacagcacattagttccagaagaaagatggaaattctgaaaactgaatgtcaag

SEQ ID NO: 119331 - DNA, 100 bp, Homo sapiens
agatggcagtgtgtgcaaaaaagcgccccccagagccactgctggtgaagctggtctcggagctgacaccactcactgtccacgagggcgatgatgccac

SEQ ID NO: 119332 - DNA, 98 bp, Homo sapiens
ggcatgtacttctgcatgaacatctccagccaggacggcagaacacaccggggagggcaggccagcgaaactgtcctacacggaggcagagggcgaac

SEQ ID NO: 119333 - DNA, 100 bp, Homo sapiens
accggcctagcattgctctcgccatggctctcagcgatgctgacgtgcaaaagcagatctaatgaggcgtcaagaagaactcagacgcttggaagaactc

SEQ ID NO: 119334 - DNA, 75 bp, Homo sapiens
aggatcaagaagccggactacaaggtcgcctacgtgcagctgtacctggagtagaacagaaaaattattatgtct

SEQ ID NO: 119335 - DNA, 100 bp, Homo sapiens
aaaaacacgatcagctcttagacaggccgaagaacagttgagaattgttgaagaacaaagaaagattcatgaggaaaggatgaaactagaacaagaacga

SEQ ID NO: 119336 - DNA, 100 bp, Homo sapiens
aatctttttgaaataaagaaacttcgagaactggaaggctatgataagggagtggacatccgccataacaaggaccgaaaggttcggcgcaaggagccca

SEQ ID NO: 119337 - DNA, 90 bp, Homo sapiens
gagcgaacccgagagcgtggagcgggctgggccaggtgtggccgacgacgatgccctcgctgaggagcgcatgcggagaggccagaacgc

SEQ ID NO: 119338 - DNA, 75 bp, Homo sapiens
ggactgccattgttcagaatcagcaccttgccatgctagcaaagatgcctgtcttagatgtcaagctgaaaacaa

SEQ ID NO: 119339 - DNA, 75 bp, Homo sapiens
tattatccagcaagaatgttcgtgtcaactgtttggacgagtaagaagccattaatggttattcatcacctggag

SEQ ID NO: 119340 - DNA, 74 bp, Homo sapiens
gccgcggccctgctgctcctggccctctgcttgcttgtccggcgcaccagcaatcatttggggaagaatctaca

SEQ ID NO: 119341 - DNA, 100 bp, Homo sapiens
cgcttccgacggggcggccgggggctcagagatccaagtgcgcgccctggcgggtccggaccaagggtatcaaaaagccattcacagaggtcatccgagc

SEQ ID NO: 119342 - DNA, 100 bp, Homo sapiens
cgtgggtttcttactaaggacgagctgatcaagtatatgactgaagaagcttaacctggcttctcagtctgtattggaaggactcaatgcttgttttgac

SEQ ID NO: 119343 - DNA, 74 bp, Homo sapiens
tgggtaaccggggatcaccatggcggcctcattggcggtcaagaagcagatcgagacggcggtcacattctaag

SEQ ID NO: 119344 - DNA, 123 bp, Homo sapiens
agagatcctggacctatgaatatccagtttgagccatcggatctaagatccaaaagctttatcttcaagccaggatgaagggagactgggcaagactcttacgccccacactgcaatttggtc

SEQ ID NO: 119345 - DNA, 90 bp, Homo sapiens
tgaggggggccttagagggcctccccaggccgcctccgcccgtgaagggattttgcttgcccaaagaatttatggaagattcagctggag

SEQ ID NO: 119346 - DNA, 90 bp, Homo sapiens
ggagactctccctggaaaacttcccttccctttcggtggattcaccaatgaacttgaagcatcctcatgacctagtcatattaatgagac

SEQ ID NO: 119347 - DNA, 90 bp, Homo sapiens
ctgagtggctctgaccagcgtggaagatgagagcagcctgaacttacactgtgaaaatcctctacggcagacacatgcaggccaacccag

SEQ ID NO: 119348 - DNA, 100 bp, Homo sapiens
tgcagttcttccggagtcagggcgctgagggagcgttgacagggaagcagccggatgtgcccaccagaagtatgtccgacaagcctggcagaaggcagac

SEQ ID NO: 119349 - DNA, 99 bp, Homo sapiens
aagaaaattttccttgacctttaggtgcttttatattcatctcaaaaacaaaattctgaactcaggacttggcaaaactggcatcaaatactcacaaca

SEQ ID NO: 119350 - DNA, 100 bp, Homo sapiens
gtggaaaggctctcagtgaaaaagagggtctccccagacacccgagcacccacccgcttcgtggatgatgaggagctagcgtatgtgattcagcggtacc

SEQ ID NO: 119351 - DNA, 50 bp, Homo sapiens
acctaacagtacaaaagtccagaggatttcaggtatgctgctgaaagtgg

SEQ ID NO: 119352 - DNA, 100 bp, Homo sapiens
tcctccggcagctggagatgtccgagcccaaggcaattgatcccaagttgtcgacgaccgacagggtggtgaaagaaaatatttacaccagcagctccag

SEQ ID NO: 119353 - DNA, 145 bp, Homo sapiens
cagcaagttggagcaaggagaagagccatggatagtagaaggagaattcctacttcagagctatccagaggctgtgggtaatattgtgaagttcttgggaatgcacccttgtgagaggtcagacaaagtgccggataacaagaac

SEQ ID NO: 119354 - DNA, 99 bp, Homo sapiens
ccacgaccatcaaatccgtgtcggagtccttacagccaagcttcttgaaaggcctgtctacacttgctgtcttccttcctcacctccaatttcctcttc

SEQ ID NO: 119355 - DNA, 96 bp, Homo sapiens
cttctgggtgtcactatggagctctcacatgtggaagctgcaaggtcttcttcaaaagagccgctgaaggtactttggaagttcgtcttatgggct

SEQ ID NO: 119356 - DNA, 100 bp, Homo sapiens
aggaggagctggagacagattgtaggaccgagcgcgggcaggcgggaggcaacggagctaccagccgatattaataaggcagcggaaagaagaaatatga

SEQ ID NO: 119357 - DNA, 100 bp, Homo sapiens
gagctgtagccactgtagcagcaagttccgatgaagttaaattccgtcaagatttaatgaatattgcgggcacaacattatcctcaaaacttcttactca

SEQ ID NO: 119358 - DNA, 100 bp, Homo sapiens
gccaataccaccatagaggatgaagacgctaaaggctttccatctgatggtcccctggtgtgtgccctggaacaggagcgaaggctccgcctccctccga

SEQ ID NO: 119359 - DNA, 75 bp, Homo sapiens
ggcagagctcatctgacgtggcatcagtggcagccgattaggaggcctggttacagtgttgtgcttctttttcaa

SEQ ID NO: 119360 - DNA, 75 bp, Homo sapiens
agtgaagaggatcttgaatttcttaatgcatccaaagccttctggcaaacatctgcagaaaaagaggcaatcaag

SEQ ID NO: 119361 - DNA, 75 bp, Homo sapiens
ccacgggccagccccgccgccctcgcaacctggcagccgccgccgtggaaggtgtggccgacgacgatgccctcg

SEQ ID NO: 119362 - DNA, 100 bp, Homo sapiens
aggacctgtacagggatgtcatgctggagaactacaggaacctggtctcactgggtcatgaactctgagagtttgagatgagcctctaaaagctgtatca

SEQ ID NO: 119363 - DNA, 51 bp, Homo sapiens
ggaagcatcctgcctcgtcatccagttggggttttaaattacctgaaagac

SEQ ID NO: 119364 - DNA, 98 bp, Homo sapiens
tgagaagttcaagctctacctgaccatcatcctgctcctgggtgccgtggcatgtcgatttgtccttcactacagctatctctgaagggcacaaatca

SEQ ID NO: 119365 - DNA, 49 bp, Homo sapiens
ctcctctgcattgccattgttctgagagtttcactctttttgcccaggc

SEQ ID NO: 119366 - DNA, 100 bp, Homo sapiens
ggctgctgcaggagccattttaggtgtcatggagaaactccagctgggcccagagattctgcagcgggaaaatccaaggcttatttatgccaggctgagt

SEQ ID NO: 119367 - DNA, 98 bp, Homo sapiens
cgaggcactcagttggaagagtccagcaaggattacacagaggactacattcaaacaggtcctgggcagctgtacgcctactcaacccggctgttcac

SEQ ID NO: 119368 - DNA, 74 bp, Homo sapiens
gacaatggaccaaagacgatcaatcaaattcgtcaagatgcagtaaaagttctgtacagagtaatgagatgtgt

SEQ ID NO: 119369 - DNA, 75 bp, Homo sapiens
gtggtggaagtgcggggctccaatggcgctttctacaagcactattcctgatcagagaactccagttgcttcaac

SEQ ID NO: 119370 - DNA, 75 bp, Homo sapiens
ccgggatctcaggtcctcgggggcggcggccacgccaaggacggagttcctggaataactattgctacagatatt

SEQ ID NO: 119371 - DNA, 100 bp, Homo sapiens
aaaactcatcgaacagctggagcaaggcgacgaaccttggagagaggagaacgaacatcttctggacctttgtccagcatgtagagcgcatgaagtacag

SEQ ID NO: 119372 - DNA, 83 bp, Homo sapiens
aggcatgaactggtgaaggggccgaagaaggttgagaaggctgaagggtatgtgattggcagctgtattaaacacattccaat

SEQ ID NO: 119373 - DNA, 100 bp, Homo sapiens
cccgtgtctccccgaacaccctatgggatgccatatcttggatggcaggattttcataatatatgtagtatgagttccacatcttggcctcttacccagc

SEQ ID NO: 119374 - DNA, 101 bp, Homo sapiens
ggggcaggggcggaggcggaggcagaggtggaggcgctttgaaaggtcatcatcagatttgaaatatttaaagtggatacaaaactatttcagcaatgcag

SEQ ID NO: 119375 - DNA, 89 bp, Homo sapiens
gcgccgctggacgctggtggggactcgctctcggcttgaccgcattcttcctcccagaacatccagtcatggataaaaatgagctggtt

SEQ ID NO: 119376 - DNA, 75 bp, Homo sapiens
gcccatcagaatggcagatggcttatgaaccacaggaacgtcctagagctgattgagttcttcgaggaggaggac

SEQ ID NO: 119377 - DNA, 120 bp, Homo sapiens
ataatgcaaaggaaaagaggactggagtggtttgtctgtgatggctggaagttcctctgtaccaggaaattatgatgtgatgaccccaatggttgatatacttatgaaactttttcgaaa

SEQ ID NO: 119378 - DNA, 95 bp, Homo sapiens
gcggcggctgccgcggcggtggcgacggccgcggggactcggagctgagaggagctgctgctcggaccagcgcgacctcaaaggaagaccttctg

SEQ ID NO: 119379 - DNA, 100 bp, Homo sapiens
ccaccagccagctcattgggaccattttcttctgtgtgggaatcactactttgctacagacaacgtttggatgcagagcagtcattatggcgaaccttgg

SEQ ID NO: 119380 - DNA, 76 bp, Homo sapiens
gctctaaagcacaagacctggatgtgtgacacacagttttggaaaaaggtttaaggagttcatgagtaaacatgtt

SEQ ID NO: 119381 - DNA, 109 bp, Homo sapiens
cacctgccaaagagatgctgcaccactcacttccagtggagacagggacagcgacttccttgcagcctcttctccgggtcttgccccagaagctgcgggcacatccacg

SEQ ID NO: 119382 - DNA, 90 bp, Homo sapiens
gccagatttggaaaaggctgcagcattttataagaatattctgggggcccaggggggtacatggtatggagtagacatcaacaacgagga

SEQ ID NO: 119383 - DNA, 100 bp, Homo sapiens
cctcaacgagatcttgggcaccgagagggactacgtgggcaccttgcgcttcttgcagtcggctgcgctgaacatcttaaagttgctgtctgagttggac

SEQ ID NO: 119384 - DNA, 74 bp, Homo sapiens
ctcaggagacacaggtgtggaaacaggtgtgtagaccacactccaaaactgaaactgtggatggcagccatgaa

SEQ ID NO: 119385 - DNA, 83 bp, Homo sapiens
cccattatggctgtaactggagatgacacagggcagcccaatggatccaatggtgatgaagagacctcagttgtatggcatgg

SEQ ID NO: 119386 - DNA, 100 bp, Homo sapiens
gtcgcctccaacacccgctgctgcccgcccgctgcctgcctgcctggcatctctctctcccgccgattccacgactcttctttgcgggagaacatacgat

SEQ ID NO: 119387 - DNA, 75 bp, Homo sapiens
caggaagccgtcttcgaactcaggagaagtgtcaggggaagctgatggagaatcgagctctggatccagggactc

SEQ ID NO: 119388 - DNA, 82 bp, Homo sapiens
aaggagctaaagcagcgtgcgttcagccctggggtacttcctatttaacagacattgtgtggtgggctggcacaatcgcaag

SEQ ID NO: 119389 - DNA, 75 bp, Homo sapiens
tcttctagaagacaattaaaataagacagaaaagatgggcaaccgctgaaaagagatggaataaactgagactgc

SEQ ID NO: 119390 - DNA, 75 bp, Homo sapiens
ttcctgcatggattgggagatactggtgacttttttgaacgaaccattctgtgcaacagccttgtgtggagttgt

SEQ ID NO: 119391 - DNA, 100 bp, Homo sapiens
attacaggctacaagacacaaagcattctttgtatgccaattaagaatcatagggaagagttgggagctgaaagtgccgacagcattggtgccgtgttaa

SEQ ID NO: 119392 - DNA, 99 bp, Homo sapiens
cgcggctggatgtggggctgcgccttctcgggggactcccagtacatcgtcactgatgaggacgatgtgcacagatgcggccgctgccaggcagagttc

SEQ ID NO: 119393 - DNA, 90 bp, Homo sapiens
ccccaagattccagatgttcctgtggaccccagtccaggtccatctgaactgtttactgtttgttcatcgattagcagaagagtccagga

SEQ ID NO: 119394 - DNA, 75 bp, Homo sapiens
ctggaatgtcattatcagacacaatgcgtgaagcctctgcgggccttcttttcgtcttatttgaagtcattgccg

SEQ ID NO: 119395 - DNA, 100 bp, Homo sapiens
ctaatgtctgcctgtttgtttttgattgtatctactttaatgatgtcagcttgatggacagcatgaaaatataaccactgctgccacagagattattgga

SEQ ID NO: 119396 - DNA, 51 bp, Homo sapiens
ggaaggtggagccaccagcctctccctgcaaaagctgatgaagcattgaaa

SEQ ID NO: 119397 - DNA, 50 bp, Homo sapiens
tccaagttcaaccaagccattgacagagcgggatgccaccagcttgtcca

SEQ ID NO: 119398 - DNA, 75 bp, Homo sapiens
gttcacgagagagtgagccaaagaaccccggcttcttggacacttaatgattgttggcaagaaatgtgctgctga

SEQ ID NO: 119399 - DNA, 104 bp, Homo sapiens
ggaaaaacagccaccttcagtatctcagtcctccagtgtttggatattcaggagatcgacaactgttaccaccgggcggccgagggccgcgcgcccaagatcga

SEQ ID NO: 119400 - DNA, 75 bp, Homo sapiens
cgtgaccgagagcgcgaatatcgtcatcgttagaaggcatcagcaggactcagacctctcagcagcgtgctctga

SEQ ID NO: 119401 - DNA, 51 bp, Homo sapiens
ctttggtccaacgttgttccaggtggtgaaattgcctctacctttgatcac

SEQ ID NO: 119402 - DNA, 100 bp, Homo sapiens
gtcctccactagcaacgatgttagttcttcagattttgaagaagggccgtcgaggaaaaggtacatctccgttcatggatgcattaacagccaatgggac

SEQ ID NO: 119403 - DNA, 75 bp, Homo sapiens
cttgatgaccccaaccagcgtttttgagaaggtgaatgaaaactttgccattgatttgatagcagagcagcccgt

SEQ ID NO: 119404 - DNA, 50 bp, Homo sapiens
gattgtgagctgaagctttctgaatcagtgtccacaggatgaaatgtccg

SEQ ID NO: 119405 - DNA, 90 bp, Homo sapiens
ggcttggacctccttgagaaggctgccgaaatgttatcgcagctcgacttgttcagatagctgatcagcttccttgggttttgctgatga

SEQ ID NO: 119406 - DNA, 100 bp, Homo sapiens
ctggtcgctgccggaaatggccaggtgctcttacagcctgttccaagtgtggcttaatccgtctccaccaccagatctttctccgtggattcctctgcta

SEQ ID NO: 119407 - DNA, 82 bp, Homo sapiens
ggagaagctgtctctgatccgcaagcatgctcagaccttcattgctctgtgtgccaccgagaaacttgcccaggccaaagaa

SEQ ID NO: 119408 - DNA, 98 bp, Homo sapiens
aaaatttgtatcctcagatgaaatggatttgcatcttgtaatgtgtttaacaaagccacgaataacctataatgtttctctgcaggtggatattgttc

SEQ ID NO: 119409 - DNA, 98 bp, Homo sapiens
ctgaggagacacaggctgacgaggaagctggtggtgttgatcactcctcaggtgtccagcctgctcagggtgtcaaattgagaaccaggtagatcccc

SEQ ID NO: 119410 - DNA, 100 bp, Homo sapiens
tgaacttttgcttactgaaagagcttatgtcaaccgacttgacctcttagatcaggggaggagcgcccccgggactccccgggcccggcggaggcccagg

SEQ ID NO: 119411 - DNA, 80 bp, Homo sapiens
gtctctttccaaatctccaggttttccctgcgctgggtaatcatgactattggccacagcttggtgctaacagtggtttg

SEQ ID NO: 119412 - DNA, 88 bp, Homo sapiens
ggcaccctggtgcccagccgggaactccccatcgcgttttgccagcgataatacgcctcaggatttttacctcctataactccaccag

SEQ ID NO: 119413 - DNA, 82 bp, Homo sapiens
aagcgagaagtcgcgggcccagcccacagcaggtgtgactccgccaggaacttggaatggctgaagactgtgaatgagagtc

SEQ ID NO: 119414 - DNA, 90 bp, Homo sapiens
tggacaggctcttacagtgcactcggcaggcagtacccctcttctctgtaatggtaactcgggatttgaaggacagagtcgctatgtacc

SEQ ID NO: 119415 - DNA, 75 bp, Homo sapiens
gctccttttacccatggaccaggagcaaagtttgcaggtactttagattgattgccgagcggggcagttttgtga

SEQ ID NO: 119416 - DNA, 100 bp, Homo sapiens
gtgtggcaagaaattcaaatcaaaagggacactgaaaagtcacaaactccttcacactgcagatggggagagaccattctaacacaggtaccgtccagac

SEQ ID NO: 119417 - DNA, 83 bp, Homo sapiens
agggctccctcgtgaagaacctgaaggacacactaggatttttacctcctataactccaccagaaaagttttttctttcccag

SEQ ID NO: 119418 - DNA, 100 bp, Homo sapiens
gtggccccagcccaggaacgaatctctcaggctgcatcaggatgaatgatgacccaagtatggaagaattacggctcatctctttttgcccaatgtgaag

SEQ ID NO: 119419 - DNA, 101 bp, Homo sapiens
ttccagtggatttccttgcggaaaggatgttggcggtccctgtgacctgtggagacacggccagatctgccctccatctctagtgatccctgaaaagttcc

SEQ ID NO: 119420 - DNA, 102 bp, Homo sapiens
gctggagcacaaaagagtctccgcggtggaggtctgcgttgctcttgcttttcctcgctggggtgtacggctgttgaagctcaaatccgaagttttggacag

SEQ ID NO: 119421 - DNA, 87 bp, Homo sapiens
ttgttattggagaaacatgcagattatatcgcatcctatggctcaaagaaagatgattatgtgctcctgacctctgataaagctgca

SEQ ID NO: 119422 - DNA, 87 bp, Homo sapiens
ggagatggtattggcccagaaatttcagctgcagttatgaagatttttgatgctgccaaaaaaaatgttcgttggtggcctgagctg

SEQ ID NO: 119423 - DNA, 100 bp, Homo sapiens
gccaaggtgagcggttcctggtagtaagcttgggaggaggaggaagccaagaatctggtgagcgaagccatcgcagctggcatcttcaacgacctgggct

SEQ ID NO: 119424 - DNA, 73 bp, Homo sapiens
tagcaccccgagaaccgtcagtttgagccagatgttccaaagaactactggttcagattttagctcttcccaa

SEQ ID NO: 119425 - DNA, 100 bp, Homo sapiens
tccaggaggagatcaaggagtacaagaaattacagaagacatccccgtgaagactttgaatatgaagactgtgtatgtttctgtgttaccaacaacagca

SEQ ID NO: 119426 - DNA, 100 bp, Homo sapiens
aagtaaaataaaagcaaaacaaaaaagaggcgaagatcgagtaggaactgcaggggaaatggaaagacctgaaggagaagaaggagaaggtggaggagaa

SEQ ID NO: 119427 - DNA, 100 bp, Homo sapiens
ggccgctgcccaagctggcgctgctgcctctgttgtgggtgcttttccagcggacgcgtccccaggagctgttgcgcagccattggtacctgtattgggg

SEQ ID NO: 119428 - DNA, 82 bp, Homo sapiens
ggaggacggctgggacagcgagcccttcaccctggtggagcgagacgccctgggcgctgcctatggcacagccaagagcggt

SEQ ID NO: 119429 - DNA, 100 bp, Homo sapiens
cgccgacttcgactcttggggccagctggtggaggcgatagacgagtatcagatgtggatccgatattgaatatctggacttctataagcctgtcgtgtg

SEQ ID NO: 119430 - DNA, 83 bp, Homo sapiens
gctgcctttgtgacgggatcgctttctcccatcgaaccttctagttgcttattgcagcaattctgtggtgttcttggtcacac

SEQ ID NO: 119431 - DNA, 80 bp, Homo sapiens
ccgtgctgcttatggcggcgctggagagggggcgctgagctgttggggtatttctttaaatccagaacaatggagccagc

SEQ ID NO: 119432 - DNA, 90 bp, Homo sapiens
ttggggtttccggctgcagggcggtaaggatttcaacatgcctctgacaatctctagtgttctcagaggcactgtgactgacttccctgg

SEQ ID NO: 119433 - DNA, 101 bp, Homo sapiens
gattgcaaagagttatggatattctggtggggagatgaacccaacctagtgggtgtaatacatcatgaactgcagggcatcaagcatgatggaaccatgtg

SEQ ID NO: 119434 - DNA, 96 bp, Homo sapiens
agctgacagccccagatagcaatgatgatgtgaaaacagaagctgtggctgtagacccagtgtaatcacaagcatccttgtaagtggcaaagaggc

SEQ ID NO: 119435 - DNA, 100 bp, Homo sapiens
gatatggccaggatgctatagcattgtcagtacgcgcatcgggaattccttcacaggcctgcgtctggatacgtgccagaggagatctggaagaaagctg

SEQ ID NO: 119436 - DNA, 101 bp, Homo sapiens
cgccagcctgcgaaggtggcggcgctgctgctcgggctgctcttggaggtcgcaatggaagaagagatcgccgcgctggtcattgacaatggctccggcat

SEQ ID NO: 119437 - DNA, 98 bp, Homo sapiens
cgcagaaggccggggccggccagaagcgggcggcgcgggggagatggttttgaggttttgctgaagatattcctgaagaatcatcccaggtgccacac

SEQ ID NO: 119438 - DNA, 95 bp, Homo sapiens
cccaccatatacacctactccccgattcaggcctgggcagcatggccgtattccggtcgggtctcctggtgctgacgacgccgctggcctcccta

SEQ ID NO: 119439 - DNA, 100 bp, Homo sapiens
gccgagccgggccgcccgggcgcagtctttaaccatggcgtccctcttcaagaagaaaaccgtggatgatgcctttgaagatgagaaacccccaaagaag

SEQ ID NO: 119440 - DNA, 100 bp, Homo sapiens
attttcaggaggaagcgatggcttcagacagcatatttgagtcatttccttcgtacccacagtgcttcatgagaggccccttcacagatgtagtcactac

SEQ ID NO: 119441 - DNA, 99 bp, Homo sapiens
agccaggagccggggcccgagccccgcccggcccgggccatgtcggtgggcgagctctacagccagtaagactttgaccccgacgcaggcttcagtgat

SEQ ID NO: 119442 - DNA, 96 bp, Homo sapiens
gctgggtggctcccacaagcacgccgtggatggtgctgtgaagaaactcacgaagctgtggaaagagacgccctgctggcggacttggagtctacc

SEQ ID NO: 119443 - DNA, 82 bp, Homo sapiens
tgggcggaggctacagcatcgtggcgctgggcaatgacatctacgtgacggtttcctgctctacgaaacgcactcttttgcc

SEQ ID NO: 119444 - DNA, 75 bp, Homo sapiens
cgtaccacctggatgttgtggagcctgtgtggtgcccctatctccttgttccaagggcctctcttgccttgaaag

SEQ ID NO: 119445 - DNA, 100 bp, Homo sapiens
ctttctcctaccccttgtcatgcagggtgtgagcagggctgagatgggcaccgcggatctggggccgtcctcagggttctgatgactgtcttgtgaaaat

SEQ ID NO: 119446 - DNA, 74 bp, Homo sapiens
tttgattctgattccgaggatgaagacagagcagcccccttacccaggaatggaacaacctccacaccatcctt

SEQ ID NO: 119447 - DNA, 76 bp, Homo sapiens
aagagggccaagggcaaaggccgagccaaaatgaagtttaatccctttgtgacttccgaccgaagcaagaatcgca

SEQ ID NO: 119448 - DNA, 75 bp, Homo sapiens
cctcttctgacctttcgccttaacagagcctttatggaagcagcaggacctttattgggcttgaggtcacttcag

SEQ ID NO: 119449 - DNA, 50 bp, Homo sapiens
gcgatgctgacgtgcaaaagcaggaaggatgccaattctgcgcttctcag

SEQ ID NO: 119450 - DNA, 99 bp, Homo sapiens
cggcgctcgagggaccatggccgatcctcgcgtgagacagatcaagatcaagaccggcgtggtgaagcggggcagatgatgatctatgcgaagtttgac

SEQ ID NO: 119451 - DNA, 75 bp, Homo sapiens
cccggcccggcccggccgccccgccgcccccgcggccccggccggaggagacagctctaagcgaaagacatgagg

SEQ ID NO: 119452 - DNA, 90 bp, Homo sapiens
cgaagtctaggttttcgagaaataagtatgctgtgcgcttcatccctcgggagaatggcgtttacctgattgacgtcaagttcaacggca

SEQ ID NO: 119453 - DNA, 83 bp, Homo sapiens
catgaactacaaccccggttgccgctttctcctctcctaaccgttaagtgcgctaaggatgagcacaagcctgggagatggca

SEQ ID NO: 119454 - DNA, 89 bp, Homo sapiens
ccagcactgtctccaccctagaggttgccaggatacatccaggcaacaaagactgcggttcctgttactcagcagcctcaaaaactcac

SEQ ID NO: 119455 - DNA, 75 bp, Homo sapiens
gtaccacaggagaatgaagatttggaaatgagggcaattcatgatgttaaagccacagatctgggattaggtaaa

SEQ ID NO: 119456 - DNA, 90 bp, Homo sapiens
aggagattctggggcagtatcaacggagtctccgggcaattaatggatgcctcgaagttgacgtacatatatattcagaaatgttttgcc

SEQ ID NO: 119457 - DNA, 75 bp, Homo sapiens
tggtggacgagttggagtcatctttcgaggcagggcaagaatcctttcgttccatcacaaggtcgtattacagag

SEQ ID NO: 119458 - DNA, 101 bp, Homo sapiens
ccccttcctgctagtcctggtggatctgcagtacgaaggttgcccgaagctcagcagagagtcggaggctgctttttaaacctgatgccacagatgaaaac

SEQ ID NO: 119459 - DNA, 100 bp, Homo sapiens
tttttgcctttgttgattaactggacaaattcaggtgtcatggagaaactccagctgggcccagagattctgcagcgggaaaatccaaggcttatttatg

SEQ ID NO: 119460 - DNA, 100 bp, Homo sapiens
aaggaaaggaaccatgggcactgcagggtgagaggccacgtcagagctgcccagtattttcatctcagcctagtgacgatgaatcaagtagtgatgaaac

SEQ ID NO: 119461 - DNA, 75 bp, Homo sapiens
ctggaaggcatcgtcgatcagatggtctggttcagagaaaattggcatgaagagctgcagcttatcttctggtgt

SEQ ID NO: 119462 - DNA, 99 bp, Homo sapiens
tcggcttctgagacggcggcagcagcggcattcaggttgcgagttataaggactcagcatcatgtagaagcacttgtggagcatcagaatggcaaggtt

SEQ ID NO: 119463 - DNA, 100 bp, Homo sapiens
aagttggcagcaggtctggtgtgctggtgtttggggcacgtccagcctctttggagagctgtaggtaaaacttgcctactgatcagttacacaaccaatg

SEQ ID NO: 119464 - DNA, 51 bp, Homo sapiens
cgggacggctttcatctggtcaatgcgtcagcatttatcccgtttgccaac

SEQ ID NO: 119465 - DNA, 74 bp, Homo sapiens
agattcttggataccacagtatcataaaattcctctaaatgcagcaaaatttggtttctctaatattactggaa

SEQ ID NO: 119466 - DNA, 75 bp, Homo sapiens
ttcacctgaggcacccgaagaagagaccatccatatttccagagccttgcttcctgttttacatcacaaatctaa

SEQ ID NO: 119467 - DNA, 85 bp, Homo sapiens
ctgcagggttgtcgagctgctctgcaggctgaactccagtgcacccagttagacttggagcggaaactcaagttgaatgaaaatg

SEQ ID NO: 119468 - DNA, 50 bp, Homo sapiens
ccgtggaggcagaggtggcatgggtgcctggctctctggctatgaaaatc

SEQ ID NO: 119469 - DNA, 82 bp, Homo sapiens
cttcaagagaaatggagcccttctccaagcaaaatgatgcttcaacacccaggccaggtctctgcctcggaagtgagtgctt

SEQ ID NO: 119470 - DNA, 126 bp, Homo sapiens
gggatttcctgcagaaagacttgaaggcgtatacaggaacaatattgatgatgtagtaagtatatattcttccaacttccatgcagtgaagagggaatcagacggggctcctggggatctcactag

SEQ ID NO: 119471 - DNA, 50 bp, Homo sapiens
ccaaagtgcccggacccaaaacaggaattgcagatctgatctcttctgaa

SEQ ID NO: 119472 - DNA, 100 bp, Homo sapiens
ctgggcagttggctgcgtcatttttgaactgcttaccttaaagaggacgtttgatgctacaacagtgtttaagaatgaaagcctcaacgcagaatcaaaa

SEQ ID NO: 119473 - DNA, 113 bp, Homo sapiens
catagtcaagcagggctacgtgaaaatccgcagcaggaagcttgggagaggtggagaagagcgagtacttgagaaagaagaggaagaagatgatgatgaagatgaagatgaag

SEQ ID NO: 119474 - DNA, 75 bp, Homo sapiens
aagaaagaaaactcggaaacaaccctaactcgcagatgaagggcgccctaatggagatcatccagctcgccagcc

SEQ ID NO: 119475 - DNA, 83 bp, Homo sapiens
ttttactgtcaagacatttcttcggcattctgcaacagttttgattacgaagatgcaggctaccagactgcagaacttgtaaa

SEQ ID NO: 119476 - DNA, 50 bp, Homo sapiens
tccttgccactgtcccttcaaagaagtctcctctgagcctccggcctcca

SEQ ID NO: 119477 - DNA, 90 bp, Homo sapiens
cggcctttgttctcatctcgctgcaggaggctaaagatatttgcgaggagcaggtcaacgaaagaccacagcaagattctttcattcgtc

SEQ ID NO: 119478 - DNA, 100 bp, Homo sapiens
cgaaggcaccgacgtcatcatgctgaccaccaatcagatccgtaaggtgtcgtgaaaactacccctaaaagccaaaatgggaaaggaaaagactcatatc

SEQ ID NO: 119479 - DNA, 83 bp, Homo sapiens
gccatggcataaggaactctatcccaggaatacagctttgcattaggtagagttggctttgtgggacacagctgggcaggaag

SEQ ID NO: 119480 - DNA, 100 bp, Homo sapiens
ccaacttctttggcaagtggacattttactggctcaagtgcattggatcgttgtgtgatggggataacagcagttgagattctaaacgcttgtgatgaag

SEQ ID NO: 119481 - DNA, 100 bp, Homo sapiens
tgtctttcaagaaaggagagaagatgaaagtcctggaggaagagcagagctgacatctgataaagacatgtaccttgacaacagctccattgaagaagct

SEQ ID NO: 119482 - DNA, 90 bp, Homo sapiens
cggaaacatggcactgttgcctatcagaagtcaattcaaaggacctgcccccagagagaggtcccatgggtccccgaggtcccccaggtc

SEQ ID NO: 119483 - DNA, 82 bp, Homo sapiens
ttctgaagaaggccggctacgtcagcaagattgtcggcaagtggaccaagaatcgccttcagccctgtctggtgcatccttg

SEQ ID NO: 119484 - DNA, 88 bp, Homo sapiens
gcggatctggaggagcagttgtctgatgaagagaagcagccgagaccgacccgcccgcccgcggccccgcagcagctccaagaaggaa

SEQ ID NO: 119485 - DNA, 83 bp, Homo sapiens
gaggaatttgtggctggctggatctctgcttaaagcttttcaagccaggccaagaagctgtgaagtaccagggtcctcgggac

SEQ ID NO: 119486 - DNA, 100 bp, Homo sapiens
gggacaacctgccgccccagcgcctcagaagagaggacgcggccgccccaggaagcagcagcaaactgttgggcgggagctgctgctccatctgattgac

SEQ ID NO: 119487 - DNA, 50 bp, Homo sapiens
catcatcgtggtagttattgtaaaccaagatcactccatggatgaaatga

SEQ ID NO: 119488 - DNA, 74 bp, Homo sapiens
agccgatccagcctgcggagcctgtggggcagggtgctctgtgctcacgcttcagtctgtgaatgtgctgcgca

SEQ ID NO: 119489 - DNA, 98 bp, Homo sapiens
tgaaacaagcaaccacctctggctagtggtggaactctgcacaggtatggaaaaattgtatctacaaaggcaattcttgacaaaaacacaaatcagtg

SEQ ID NO: 119490 - DNA, 101 bp, Homo sapiens
ctcttttgtctgcccctattgtaagtgcagatggaacacaacaggtgtgatgaatgcagactctgctaccattttggctgtttggatcctcctttgaaaaa

SEQ ID NO: 119491 - DNA, 82 bp, Homo sapiens
gtctgctttaaagcgcataagaatgtcctggcagcattcagccagtattttagcatgtacagcacactcctggctcataaaa

SEQ ID NO: 119492 - DNA, 100 bp, Homo sapiens
gaacccggcgagagtgattgccatttggctgaagtgtggtgtggctctggtgctggagaatctggtaaaagcaccattgtgaagcagatgaggatcctgc

SEQ ID NO: 119493 - DNA, 75 bp, Homo sapiens
cctcacttccctgtactctcatcgctctcggcctccgacacggaggttctgggggaagagaagctgaaggagata

SEQ ID NO: 119494 - DNA, 101 bp, Homo sapiens
agaggtccgagctttccgatatcaggagaggttcaaacatatccttgtagatggagatactttaagattaatactgaggaacacgtggatgcagctgatca

SEQ ID NO: 119495 - DNA, 99 bp, Homo sapiens
ccgagggccggtgtcggagaagactccagcgggaggaagaagaggcctttgccagcagtcagagcagccaaggggcccaatccctcacattctccaagt

SEQ ID NO: 119496 - DNA, 100 bp, Homo sapiens
acgaggagaagagccatggacatcatttgcaggtcatacctgcttggagatggggtcttgccatgttgcctaggctggtcttgaacttctgagctcaagt

SEQ ID NO: 119497 - DNA, 99 bp, Homo sapiens
cagaaacccaggaaatcgagactcatgactcccagagaggatggcatctagaagttgcatccttaatgtccagtcaaggagtggtgacaccagtgggtc

SEQ ID NO: 119498 - DNA, 100 bp, Homo sapiens
ggacgagtagccagtgaagataatgaatgtcgaatgtgactgactagcagcttcattttgaaataattcgtgtccagtccccggatggagtgaagcggat

SEQ ID NO: 119499 - DNA, 75 bp, Homo sapiens
atgaaaagagaaaaatctcagctattcggtcatatagagatgtcatgaaggaggcaggtggaagtcatcataaag

SEQ ID NO: 119500 - DNA, 50 bp, Homo sapiens
atggaacatcagcaatgcttctgctcagccctctcttcctgctatagccg

SEQ ID NO: 119501 - DNA, 90 bp, Homo sapiens
gtgttttgctaccgtgaccgtttagtacgctggggaggaggaggaggaagggagcggcagcagtgaaggatttgacccccctgccactga

SEQ ID NO: 119502 - DNA, 82 bp, Homo sapiens
gttggggtgagaccctcacttcatccgggggatatgagactttctactcggaatatcctgagtgttgcgtggatgtaaaacc

SEQ ID NO: 119503 - DNA, 90 bp, Homo sapiens
gtttggctgcccaggctcgcctcgactccaaatggttgaaaacagatatacagggaaatgaggcaagttatcctttggaaatgtgctcac

SEQ ID NO: 119504 - DNA, 100 bp, Homo sapiens
ggaagcctggttcagcccagttcacacataccctcttcttgccaccaggtctctaattaacagaagatggcaaagcccagccacagcagctatgtccttc

SEQ ID NO: 119505 - DNA, 90 bp, Homo sapiens
gtttccaagaacaactcctactccttagctttcctggcagggatgctgtatgattatgttgaaaggaaacgaaaagaaaattcaggagcc

SEQ ID NO: 119506 - DNA, 83 bp, Homo sapiens
ctgggaccgggacggcaaggagagggtgacaggtggcgggacaggcttcattgggacagccctaacccagctgctgaatgcca

SEQ ID NO: 119507 - DNA, 90 bp, Homo sapiens
gcacgtcgtgccaatggcccgctatgaggaggcaggagcgggccaggagctgctgggctggagcggcggcgccgccatgtccgacagcga

SEQ ID NO: 119508 - DNA, 75 bp, Homo sapiens
gctcgtgagtgcatggggtataaggctgctctttggcgtaaattgcaatcgattagggatcgtttctcagaatca

SEQ ID NO: 119509 - DNA, 82 bp, Homo sapiens
atgccaccatgtctctgaagcatctcaccaagaagctgctaaaccgggatatccaggctttatcctgtggataaacgcagag

SEQ ID NO: 119510 - DNA, 90 bp, Homo sapiens
cctcatggatcaactgataagttgccttatgtcaccatggggttaaagcacgaattgggagctctcagcgacatcaccagtcagcagcca

SEQ ID NO: 119511 - DNA, 82 bp, Homo sapiens
gggcggccagagcgccggcaagagctcggtgctggagaacttcgtgggccggtatcgagaaccttccctgcgaacttcagag

SEQ ID NO: 119512 - DNA, 100 bp, Homo sapiens
cagaagacagagggttttcttttgaggtgtgatgaatgcagactctgctaccattttggctgtttggatcctcctttgaaaaagtctcctaaacagacag

SEQ ID NO: 119513 - DNA, 87 bp, Homo sapiens
atttcggagcctttataagtcagtttttgagcagtcacttagtcaacaaggcaatggtggcttgctatccgggaaatggaacaggtt

SEQ ID NO: 119514 - DNA, 88 bp, Homo sapiens
ctgattacaagaatcctatagaccagtgtaataccctgaatcccttgagacatttgggaaatgatgaagtgcacattgtttggtcaga

SEQ ID NO: 119515 - DNA, 118 bp, Homo sapiens
aacttagccaagagtctgggtctccgggccaacctgagggagctcttgtccctggcaaagcgaaagcgcagtgactctgaggagaaggagccgcctgtgagtcagcctgcagcctcgt

SEQ ID NO: 119516 - DNA, 100 bp, Homo sapiens
cgataccgaagcgggctgtgtgccccttctccacccagaggtgctggctgccagctgctgcgccccccatgtagaaggtgcacctcctgggagcaggcac

SEQ ID NO: 119517 - DNA, 88 bp, Homo sapiens
tagatattcagaagaaggatgctgttaaaagtacctggagtagaacagaaaaattattatgtctgtgttcccttgggactcattggaa

SEQ ID NO: 119518 - DNA, 89 bp, Homo sapiens
cgcgccgacggctgctcaaacatcaggatcccaaaaggataatcacttacaatgaagccatggatagtccagatcaatgaaggaccaga

SEQ ID NO: 119519 - DNA, 80 bp, Homo sapiens
cgcgaaccctgctgggcctccagtcaccctcgtcttgcattttcccgcgtgcgtgtgcgtccgagctgggccacagcctg

SEQ ID NO: 119520 - DNA, 74 bp, Homo sapiens
gaagaggtcggcggcccctgcgggcgccagtcagctcctggctaaatacaaaagcttgcaatgggacaaagtac

SEQ ID NO: 119521 - DNA, 50 bp, Homo sapiens
gctcccatccctgcagcatgaacaaggatcgaatcatcaatttagttgtt

SEQ ID NO: 119522 - DNA, 83 bp, Homo sapiens
caaacctgtttagaaaataaaccaggtcatacagcatatttgacaataatcgccaggatcccacagggctgacagctgctctt

SEQ ID NO: 119523 - DNA, 90 bp, Homo sapiens
cgagaggagttactacttggagaaagccaaactagagaaggaaggtttggatcctgtgcactttacaggtccccgatgaaccaagagaac

SEQ ID NO: 119524 - DNA, 101 bp, Homo sapiens
aggagaagtcagagggacttcagcttaattttcagcaggaagagagttgtatgtacaacccaacaggcaaggcagctaaatgcagagggtacagagagatc

SEQ ID NO: 119525 - DNA, 100 bp, Homo sapiens
tgccgtgccacctgctgcacccacgaatctgcccacccctcctgtaacccagcctgtttcacttcttgaaattgcaggtgctgcagtgtctgaaatttcc

SEQ ID NO: 119526 - DNA, 75 bp, Homo sapiens
ccagaggttcacaaaacaagtgtagtagagacgagttgtactgctgtcacaggaaatggacgctggattacaagc

SEQ ID NO: 119527 - DNA, 74 bp, Homo sapiens
ggagtcagtcattttactgtcaagacatttcttcggcattctgcaacagccaccagctgaacaggccaaagcca

SEQ ID NO: 119528 - DNA, 96 bp, Homo sapiens
tcgcgccgctgctggttgctgtccctgctgtccaggtgctgtcatgatcctcttttatcttcctaatggtactgtcatattacacacgggagactt

SEQ ID NO: 119529 - DNA, 75 bp, Homo sapiens
taccaaattaggcctggacgaatacttggacaaaaagcttgtggtgaaggggggcaaaaaaaagaagcaagttct

SEQ ID NO: 119530 - DNA, 88 bp, Homo sapiens
tggtttcgggatctcggtgctgcagacggcgagacctcctgcacagctggagaggcagttgcatgaagatgaagagtttgccagaaca

SEQ ID NO: 119531 - DNA, 83 bp, Homo sapiens
tcagcactgactttcagctatggaatcgtctctctgccttctggggaaaagataacttttcttgatactccaggacatgctgc

SEQ ID NO: 119532 - DNA, 100 bp, Homo sapiens
gaggcacagagattcctgtaccgtgatgtgatgctggagaactttgcacttgtggctacactagagaatagtgacagtggtacaggaaagaaagaaaaag

SEQ ID NO: 119533 - DNA, 117 bp, Homo sapiens
ccgggcttttgctgatatgcatgcatgtaccgaccttctgaacaaggccaacacctatgcagacaagagtgagaatggtgaggcatatcagagaaagaaggcggcagccactggcct

SEQ ID NO: 119534 - DNA, 76 bp, Homo sapiens
gttcagcatccccaagcagggggagagcagatttactatgctgggcctgtcaataatcctgaatttactattcctc

SEQ ID NO: 119535 - DNA, 75 bp, Homo sapiens
tcagcagtgtgctacagtttttagggatgagagtccaatgaaagcaaacttccttcaaaacatgatagaagacag

SEQ ID NO: 119536 - DNA, 100 bp, Homo sapiens
tttctcctcggcactgtattctttacctgcttcccaatcccactgatgaggatcagcccatgctttaccactcctgaaggccctaaaccccgttccagat

SEQ ID NO: 119537 - DNA, 97 bp, Homo sapiens
ccaaatctcagcaacccctgtgcttctccccaggtccagccaatgcattcagaagccaaaatgaacacacgcaggacttgaaagatgttactaataa

SEQ ID NO: 119538 - DNA, 83 bp, Homo sapiens
tgtcgccccctcctcgtcgggaagaatcgtttggtctcctgccgtgcccggtgtcgtgaaaactacccctaaaagccaaaatg

SEQ ID NO: 119539 - DNA, 83 bp, Homo sapiens
cccagctcggcccgcgggggagccccgggagccgcacggggacggcaaaacagaacagaaaggcggagataaaaagaggggtg

SEQ ID NO: 119540 - DNA, 98 bp, Homo sapiens
tgacaggttgtgaggaccaagcacgcctcttcaaagacgagattatcaacgcctgatgactgtggcagaaggcatcaccacacttttgttcccatttc

SEQ ID NO: 119541 - DNA, 87 bp, Homo sapiens
agacaacaaccgaacatacccttctatccaggaaacaacagttccaggccaggtgcgatggctcatgcctgtcatctcaacactttg

SEQ ID NO: 119542 - DNA, 100 bp, Homo sapiens
cacacccttctcatggcaatcgagttgagtacttggatagacttatacctcaggtggaggaactgcaatgtctggtggagaacagaaaccagagaggtac

SEQ ID NO: 119543 - DNA, 74 bp, Homo sapiens
atgatgatgattttgagccatacttaagtagccagacaaatcaggttctgaagaaagtctccaaatacattcaa

SEQ ID NO: 119544 - DNA, 137 bp, Homo sapiens
cagaagcccccaagctgtccaagaagaagttgcgccgaatgaaccgcttcactgtggctgaactcaagcagttggagaccttccccagacgcctccaggggctgtcccagacccctctcttgccagtacagactctt

SEQ ID NO: 119545 - DNA, 75 bp, Homo sapiens
tttattgccttctgtggacctcattcaagagccagacttgaaagtgcatggcagggggcttgagatattcctttt

SEQ ID NO: 119546 - DNA, 100 bp, Homo sapiens
cagaaaagaaatggaagattggattgcagcattaaagactgtgcagaacagggagcactttgagagtatgaagatggtgatctgtcatcatggatcaaca

SEQ ID NO: 119547 - DNA, 75 bp, Homo sapiens
cggccgatgaagtgcagaggtttttttctggtgttggggatgtcctttgcactgaccctgaactgccagattgac

SEQ ID NO: 119548 - DNA, 82 bp, Homo sapiens
cagcgtagagtcgctggagcgggcggagctgtgcgagagcctcctcacttgggtgtttcatacaaagaatacaagtaactga

SEQ ID NO: 119549 - DNA, 100 bp, Homo sapiens
ggatcctgctggtgggagaacgacgtgtttgagatgaggtttgccaagatgccagatgagcccgtggaggcaccggcgctgcctgcccccgcggccccca

SEQ ID NO: 119550 - DNA, 100 bp, Homo sapiens
caacgtgtaatcagaaggcacagattagaggaaggaagagcactgccagtgaaagatgtagaagataaacctgaacaacaaaccagaacaagagagactg

SEQ ID NO: 119551 - DNA, 50 bp, Homo sapiens
cagatggtggctcccggagtccagaaaaccgtgaggacatactgaatgcc

SEQ ID NO: 119552 - DNA, 100 bp, Homo sapiens
aacacaggatacagacttcaaaacaatgagaacaacatttcatgtgtagaacggggctggtccactcctcccaaattgctgggattacaggcgtgagcca

SEQ ID NO: 119553 - DNA, 73 bp, Homo sapiens
accaacttccctctgcggccgtttgtcattcccttcctgaagtccaatggatgggaccccaatgaaatgttca

SEQ ID NO: 119554 - DNA, 75 bp, Homo sapiens
atcacaagctgcaccagcttctaaccgacctccacaaatgggaagtgttcctgtaatgacgcaaccaaccttaat

SEQ ID NO: 119555 - DNA, 96 bp, Homo sapiens
cccaagccccgcgttagcattcgcaagtccgtgcacgcactcctggctttaaagtttatacttgcatttgccatacctgataagccacggcatatc

SEQ ID NO: 119556 - DNA, 83 bp, Homo sapiens
gcctggaggacgccttatggagccagcatattccagagaggaggttcagatgagcccctgctgacttgagagagacagagaga

SEQ ID NO: 119557 - DNA, 100 bp, Homo sapiens
ggctgacaatccccttggcagatctgtccttaggaaagatatttaccagaaattgtctcctgcattccatcaagcactactctctttttgtcgaatgtca

SEQ ID NO: 119558 - DNA, 100 bp, Homo sapiens
tccctcctgagacatctttgctgcaagatcgaggctgtcctctggtgagaaggtggtgaggcttcccgtcatattccagattgtcagaagcttcagttct

SEQ ID NO: 119559 - DNA, 80 bp, Homo sapiens
gaggtcatcgaaggctaccgggcccagcacagccagcaccgcacgccctgcaagggagaagaagaagaggacagtgctcc

SEQ ID NO: 119560 - DNA, 83 bp, Homo sapiens
caccggaggacggctcagcggtctgatgcctggagcaccactgcagccagaaagcgaggtgagaagccctaccactgcaactg

SEQ ID NO: 119561 - DNA, 97 bp, Homo sapiens
tcagtgccaccgctctcacggcaggtggcacgggcgccaaggtgtgatccctcacatccacaaatctctgattggaaagaagggacagcagaaaact

SEQ ID NO: 119562 - DNA, 87 bp, Homo sapiens
tcagtgagtcatcgctgacagctgaggaagtctgcatccacattgcacataaagttggtgtacatgtaccagctcttccgcagcttg

SEQ ID NO: 119563 - DNA, 100 bp, Homo sapiens
gtgactcttctcaaatgccttctcatccccacataggcaagtgtccagagaatggctgggatgaaagtacacttgaactctttttacatgaacttgcaat

SEQ ID NO: 119564 - DNA, 100 bp, Homo sapiens
actttctgtctctatgaatgtgactaccctggttacctcatatagaaaatttgtcaaaggatctttacttgatatctcaaatggatagtgatcagttcat

SEQ ID NO: 119565 - DNA, 100 bp, Homo sapiens
atgaacgacaagaagctcatgagcagcctgcccaacttctgcgggatcttcaaccacctcgagcggctgctggacgaagtgtctttggtgcaacactaac

SEQ ID NO: 119566 - DNA, 75 bp, Homo sapiens
tgcctgccaaggattctgcctggccctgggaagagaagcctagatatctgccagctgaggtgggtgtcctggttg

SEQ ID NO: 119567 - DNA, 95 bp, Homo sapiens
tccctcgggacccaaggccacaaaggagagctccgtggagagaaggtggggtggaatggctgcaaataaaggataatgatttctcctatcgaccc

SEQ ID NO: 119568 - DNA, 100 bp, Homo sapiens
cctggggatatacatgcatgcaccaaaacgaggacagatgaacaggaagcggtgcaggaggttcctagagttgttcagaatcctccaaaaccagtcatga

SEQ ID NO: 119569 - DNA, 98 bp, Homo sapiens
ttctatttctctagctattgccttattttttctcatggatgttcttcttcgagtatttgtagaaggaactggtccctaggaaagaccttcttgtagaa

SEQ ID NO: 119570 - DNA, 74 bp, Homo sapiens
cagttccatcagctcagccaggtcttaaaattggagcctgcccctcggcccataagcccttgttgggaactgag

SEQ ID NO: 119571 - DNA, 83 bp, Homo sapiens
taccaccaccacaccagaaactagcaccagccccaaatttcgtatgttgagtctaaaaaggacagagtcacagtagtcttcag

SEQ ID NO: 119572 - DNA, 75 bp, Homo sapiens
gccatggccgccgccgatgccgaggtggcttctggcacagcagcttaattgaccggaacctcattgattattttg

SEQ ID NO: 119573 - DNA, 83 bp, Homo sapiens
aacgaggcaaggagctaaagcagcgtgcgttcagccctgggattcttctaacagagaaaatgccattgaggatgaagaggagg

SEQ ID NO: 119574 - DNA, 83 bp, Homo sapiens
cccccttccccacgcaaccccagatccatttacactttacagacggctgtcctcagcgaggggccgtgcacccgctcctgagc

SEQ ID NO: 119575 - DNA, 98 bp, Homo sapiens
tggaggtggatctgaagaacggatgtgaacaggaagtgctggtgtttcacaaccaagggaatgcatgcagtgggtcagtctgagatagtcattcttct

SEQ ID NO: 119576 - DNA, 100 bp, Homo sapiens
tgtgtctgcgctggacttctgccacagctactccatctgtgcagtttgacagtccagagtgggagaggactccaggctcagccaaggagctccggagacc

SEQ ID NO: 119577 - DNA, 100 bp, Homo sapiens
tgcggcggcgccggcctccggggagaaacggcacattgcaagcaacccgtgccttgatggtggttggcatcctcctgggagtgatagcaatctttgtggc

SEQ ID NO: 119578 - DNA, 75 bp, Homo sapiens
agaaacctggatctgcgatctgtttgtggctaccggctctctgaccagttccacgacatcctcattcgaaagttt

SEQ ID NO: 119579 - DNA, 75 bp, Homo sapiens
gtaaaaggccgcggcaggcgaagagagaagagaattcaaagaagctttttcactatttgacaaagatggtgatgg

SEQ ID NO: 119580 - DNA, 75 bp, Homo sapiens
atattaatgattataaccggagattctcagggcaacccagatctgtgggatgtgtgtgggctgaaattccgagct

SEQ ID NO: 119581 - DNA, 100 bp, Homo sapiens
ggaagtattgacggaaagcttgaattacctacatgcgcgagcttcggcctcggctctgtaccatgaagaagggccccagtggctatggcttcaacctgca

SEQ ID NO: 119582 - DNA, 100 bp, Homo sapiens
cggaacggcggcgacaagggtgttcccgaactagagtgggtgaggtcgcaggagctggtgcagccagtgtcatgtccgccctgactgacaaggccatcgt

SEQ ID NO: 119583 - DNA, 82 bp, Homo sapiens
cgagttcttcaagaaatgcagagtgatcccatctcaggagcacctgaatggtaccggtggcctcgtggtttgacaacatgag

SEQ ID NO: 119584 - DNA, 75 bp, Homo sapiens
gggagcgcggccgagtggggcgacgaggctgacggcggccaggacctgcttcgctgccgtgtcctgacttctgga

SEQ ID NO: 119585 - DNA, 92 bp, Homo sapiens
ctgatggtgatggagattttgatgtggatgatgccaaagttttattaggcaaggattactgcaaagtaatatttccatatgaggcacagaat

SEQ ID NO: 119586 - DNA, 82 bp, Homo sapiens
ctggagctgggtcagtccgccgctcaccccgcggccgcaccttcccgccttctcagtccctgagattctgcagctcagcgat

SEQ ID NO: 119587 - DNA, 100 bp, Homo sapiens
tacaatctgatgacctcaaagtagggccacaggtacagacttcagtacatgcagttatacttaagcatgaacattgacgacaaactggaaggattgtttc

SEQ ID NO: 119588 - DNA, 80 bp, Homo sapiens
tcttcgtagcacctttgctgtattcacacaccttcctcactctggcccccagaagcttctccacattgcccaggagctcc

SEQ ID NO: 119589 - DNA, 75 bp, Homo sapiens
cagaaacaaggtcgtcggctggcggagcggctttatggtttgaagtggtgaacatggatttttctcggcttcaca

SEQ ID NO: 119590 - DNA, 51 bp, Homo sapiens
ccgcagggttcggatgagaccaggtggagttggcatgaacttaacagcagc

SEQ ID NO: 119591 - DNA, 83 bp, Homo sapiens
gcatcagggaggctttcagccggagaagcgagtttcagctggagtgtacctcacagccttctaggatctccagagtggacagg

SEQ ID NO: 119592 - DNA, 98 bp, Homo sapiens
gctcttcacagatctcagagaaattggccatggaagctttggagcagtgtattttctctagaggacaaaatcccagtccttggcacaaactcaggaaa

SEQ ID NO: 119593 - DNA, 100 bp, Homo sapiens
tagctattgccttattttttctcatggatgttcttcttcgagtatttgtagaaggccgctgtgagcgcttgccttgccatgagaatcgggagtgctccaa

SEQ ID NO: 119594 - DNA, 75 bp, Homo sapiens
attggaacttcctgttctgatagcgtggaaggaatcaaacattttaagtccagtgcaggatggaacaaagaaacc

SEQ ID NO: 119595 - DNA, 101 bp, Homo sapiens
cagaaatgtacacacaggagagctggctgcagtaaaaatcattaaattggagcctgacagcaccagttgcccttgaagcagaaaacagaggtgaaatgaaa

SEQ ID NO: 119596 - DNA, 100 bp, Homo sapiens
ctgaggcccgtggaaggagtcaaacttgcgggaattttgcagaacaccccacacagtgcccacttttgttctgccagtttggagaccctgacacacccac

SEQ ID NO: 119597 - DNA, 75 bp, Homo sapiens
atggcagatgtatgggtgaagatccaagatgttctacaggtccctcttctgtgctgtcttcctgaagccatctgt

SEQ ID NO: 119598 - DNA, 100 bp, Homo sapiens
ctaccttgtatgcctcaatttgctggatttaagcactgctgcactttatgagaattttctagaaaccgataatgagggcaatggcattcttcgacgccgg

SEQ ID NO: 119599 - DNA, 75 bp, Homo sapiens
cggccatctggatcctggactccgtcgggctccgtgcggcgtaagactttgaccccgacgcaggcttcagtgatt

SEQ ID NO: 119600 - DNA, 83 bp, Homo sapiens
tcgaagaactcgagcgacagagacaagctgagcttgccgcacaaaaagctagagagtaggtcaagaagcaggtctcgatcccg

SEQ ID NO: 119601 - DNA, 100 bp, Homo sapiens
tgacaatgtagaggatgacttctctaatcagttacgaaataagcgggttttgaaaacaaaaaaaagaaggagtggaagagggggccaggatccaggcctc

SEQ ID NO: 119602 - DNA, 98 bp, Homo sapiens
ggaacctgggcgagcagcggcgggggcccgaggggcagagactccccctaatgggccagattgtggctatggctcctttcaccagcagtactggcttg

SEQ ID NO: 119603 - DNA, 51 bp, Homo sapiens
gtccagagctgaggactgcctgtttgcagatcatggaagggaagtggttgc

SEQ ID NO: 119604 - DNA, 98 bp, Homo sapiens
acttcggagtacctgcgctatgaagacacgcttcttctggaagaccagccaacagaaacttcagtgctctcaagaaggaaaatatttatgaaaacaat

SEQ ID NO: 119605 - DNA, 88 bp, Homo sapiens
ggcgcagcgcaaggagcgggaagtgctgcagctgcagaatggctttgactacttactaacatacagtgacaatccccaaacggtgttt

SEQ ID NO: 119606 - DNA, 96 bp, Homo sapiens
aaatgggtgctgtgtccccttcctgcatgtggcagaaagttgcaaagacatttatgcagtgtgtgattctttctaaaacaactccctggaagagag

SEQ ID NO: 119607 - DNA, 76 bp, Homo sapiens
aattacgaactcactgagctggaagtcattcaacgggaattgaatagcatgatccgctgggcccccagcgcatctc

SEQ ID NO: 119608 - DNA, 51 bp, Homo sapiens
cgagtcggacttcctcaacaatgcgatctaccttctgagatatcatccttc

SEQ ID NO: 119609 - DNA, 75 bp, Homo sapiens
gacgggacaaatggacctccgtgaaggcgtccgtcctgcgcatcgcagccggtctaattgaagccaacggagaac

SEQ ID NO: 119610 - DNA, 74 bp, Homo sapiens
gagatcatggggcccaagaaaaagcacctggactaactgtcaagtaatccacctctggctaccatccttattcc

SEQ ID NO: 119611 - DNA, 100 bp, Homo sapiens
caaaggatgtgcaagaacagcccaggctccggaagacagaagtacagagccagatggcagtgaggcagaaggcaaccagagtcccactctgtcacccagg

SEQ ID NO: 119612 - DNA, 51 bp, Homo sapiens
tgaacccgggaggcggaggttgcggcaacactggactatggaatgtattct

SEQ ID NO: 119613 - DNA, 100 bp, Homo sapiens
ctgggccgcccgtcgtacctgatggtaggaggcagtagttccccgcttcccttccgcgggagggagagttagatgatagtatttctgctgcaagtacttc

SEQ ID NO: 119614 - DNA, 89 bp, Homo sapiens
tgtcagacggggcagcaaccaggagattccctgggcctgcaggaagcccttccgcggaccgaaagtgaagctgtggtctaccaatctag

SEQ ID NO: 119615 - DNA, 100 bp, Homo sapiens
gccgctgccgctgctgctggtgttagcgctcagtcaagatatggtccagacctgtacatgaataactttggttagtcagagtgaaatattcaataatgag

SEQ ID NO: 119616 - DNA, 82 bp, Homo sapiens
agcaaggtcggcagagcaaggggcttacgcagaaggacctggccacgataagtttataccatggatagcacaaaggagaagt

SEQ ID NO: 119617 - DNA, 110 bp, Homo sapiens
aggataatattctctcattgattaatgtcaatggttggtcaaagaaaaagtgatgtatgaaaaagaggcaaaacaacaagaagaaaagattgaaaaaatgagagctgaag

SEQ ID NO: 119618 - DNA, 51 bp, Homo sapiens
ggaggtgctgccggactcggaaatggggtactactcagtcctctatccact

SEQ ID NO: 119619 - DNA, 100 bp, Homo sapiens
gaagcagtccactccaagaacattctcatcctacggattacgaggcagttgaagatgactttgtggaaatgcggaagaacgaccctcagagcatcactgc

SEQ ID NO: 119620 - DNA, 98 bp, Homo sapiens
agaagagttaaatgccctcaagtcgacaggggatgggaccctaggatttgcagatttacagaatggctgcacattaatggaaagagaagcataaacct

SEQ ID NO: 119621 - DNA, 82 bp, Homo sapiens
agctcccgaaagcgacgttcggccaccggaggagcgggagccaagcagacagcacccaagaaaacctcatttggctcgctga

SEQ ID NO: 119622 - DNA, 100 bp, Homo sapiens
ataagtgtggcctcgtcataggcaaaggagtatgctgctgctgttccgctttgcgtcctcgctacaaacgcctggtggacaacatattccctgaagatcc

SEQ ID NO: 119623 - DNA, 90 bp, Homo sapiens
catgtcaagtagagatttgctcaatgcattgaagtcagtcattaatgaccctgtgagccagtctacttgatgacttatacaagtatttct

SEQ ID NO: 119624 - DNA, 119 bp, Homo sapiens
aaggaatcaacatcagtgaggaggcactgaaccacctgggggagattggcaccaagaccacactgaggttgggagaagaacaatcaccaaaaatgcagagtggggagcgggcctgagtg

SEQ ID NO: 119625 - DNA, 97 bp, Homo sapiens
aggaagctgccttgtacccacatctcccgccagaaattccgggtagatatgcctggctcaggcagtgcattcatccccaccatcaacgccatcacga

SEQ ID NO: 119626 - DNA, 100 bp, Homo sapiens
acatgtggggcctgggaaatgaaagagcgccttgggacagggggatttggaaatgtcatccgatggcacaatcaggaccctgctgggatctttgagcttg

SEQ ID NO: 119627 - DNA, 75 bp, Homo sapiens
gaagtgtcctgcttagtagctggaaccaaatgtgacaaggtggaggatgcgctatcttatcttgaccaggtgaag

SEQ ID NO: 119628 - DNA, 104 bp, Homo sapiens
gaaaaactggagagcttcatcaaaaatagtgatagctttgataaaatcacttgatggctgccaggaaggcatttgacagatttttcatacactatccgtattgc

SEQ ID NO: 119629 - DNA, 74 bp, Homo sapiens
cggccagccgccccgtccgggagattagtttttagaggcatgtctatatctcgcccaaatgctgtggtcgggag

SEQ ID NO: 119630 - DNA, 90 bp, Homo sapiens
gtcaaggacccgccctccaagtacgtgattgaaatcccagtgacacccacaggccagtcggtgcccagctcccccagtatcccaggaacc

SEQ ID NO: 119631 - DNA, 74 bp, Homo sapiens
cccttcaaaaatttaaacaagaatccactgttgctactgaaaggtgggatgaagctctcttgactatgagtaaa

SEQ ID NO: 119632 - DNA, 100 bp, Homo sapiens
tttccaaaaacttgtagaaggttgtgaaaaaactactaggatcacgcggcatgtattgagtattctaccttgtaaatactgttatttgtatatactgtaa

SEQ ID NO: 119633 - DNA, 83 bp, Homo sapiens
ctacgagctgtttctcatctttatactcttccaggcgaacctcttcccggccgctctggtgcacttgggagccgaggagccgg

SEQ ID NO: 119634 - DNA, 109 bp, Homo sapiens
gaagtccagagctgaggactgcctgtttgcagggcttgataagatgatggtggataaggatggagatgtgactgtaactaatgatggggccaccatcttaagcatgatg

SEQ ID NO: 119635 - DNA, 76 bp, Homo sapiens
ggatgaacccacgcttgaggcctcttggcctcacatacagaagcagtaccaccctgttgtacatccactggaccta

SEQ ID NO: 119636 - DNA, 74 bp, Homo sapiens
tggacaggcagagtgctgatgtgaaaaataccacgacaaaaccaccctaactaactacagctgttgatctacct

SEQ ID NO: 119637 - DNA, 94 bp, Homo sapiens
ctcgatgggcagctcgcacttgctcaacaagggcctgccgcttggccgccatggcatcagatgaaggcaaactttttgttggagggctgagttt

SEQ ID NO: 119638 - DNA, 100 bp, Homo sapiens
ctcaatttaagcctgatctaacccctagaaacagggttctatggcctggatgagtctgacctcgacaaggtcttccacttgcccaccaccactttcatcg

SEQ ID NO: 119639 - DNA, 82 bp, Homo sapiens
cttcgcttggtgtcctcctggcctcagcaacctgacaattctgtcgtgtcccgacctgcctagagctggaacgttacctcca

SEQ ID NO: 119640 - DNA, 75 bp, Homo sapiens
agaacaagaggacaggaggtgtcgttccaggtcaaaatgcagatcttcgtgaaaacccttaccggcaagaccatc

SEQ ID NO: 119641 - DNA, 75 bp, Homo sapiens
gccaggaccccctgggaagcctagaaaaatgagacaacattttgctctgtcacccaagctgaactgaactgggct

SEQ ID NO: 119642 - DNA, 98 bp, Homo sapiens
tagacatggaattcctggatcaaatgtaccaaatatgccccaacagcggcaagaccagcatcatcagagtgccatgatgcacccagcgtcagcagcgg

SEQ ID NO: 119643 - DNA, 75 bp, Homo sapiens
gggaggatgttcagcagcgcggcagagtcatgggggattcctgagctgaaatgcagatgaccacattcaaggaag

SEQ ID NO: 119644 - DNA, 50 bp, Homo sapiens
ggctacgtgcgccagctctcccaggccgagagggtgacctctctgggcaa

SEQ ID NO: 119645 - DNA, 50 bp, Homo sapiens
tctcaacaccacggaattccatgcgggtcgttaaccaagctggcctacta

SEQ ID NO: 119646 - DNA, 108 bp, Homo sapiens
ctcccctccccctccagtccacgacgactggctgttgaccctgttcaggcctcggtgaagatttggtgcttccagatgtgagttatcaggtggaatccagtgaggagg

SEQ ID NO: 119647 - DNA, 82 bp, Homo sapiens
gaagttacggtttacagcgaagtccacccagcgtttccgagattaagcctgatcaagatgacaacctcccaaaagcaccgag

SEQ ID NO: 119648 - DNA, 128 bp, Homo sapiens
tgaagcggaagcacagtgccatcctggcatcccccaaccccgatgagaacagctcagcagctcctcctcctatagtggggacatcagcaggcaccacaacagcaccgcagaactgcagaaagctgagg

SEQ ID NO: 119649 - DNA, 100 bp, Homo sapiens
gcaagctgaagacatcaagaagatcttcgagttcaaagagaccctcggaacgtaagaatgattgatgttggctgatattggagtgctcattcacatgaag

SEQ ID NO: 119650 - DNA, 100 bp, Homo sapiens
ctgctggtattggctggctgatcactttttgttcaaaaggaggagctgttgacagtgtcttgaagaggatgacaataattggtgtaattttatccttccg

SEQ ID NO: 119651 - DNA, 75 bp, Homo sapiens
gtgcttcagcgggccaggaagcgcatccaggaggtttaagaattgtttaagctgcatcaatggagcacatacagg

SEQ ID NO: 119652 - DNA, 100 bp, Homo sapiens
cggaggcagaggtggaggcgctttgaaagcccaggatccggttgtggccgtggctgaggatggccgggagaagccgaagctgccgaaggagagagaggag

SEQ ID NO: 119653 - DNA, 97 bp, Homo sapiens
cttgtagaaggttgtgaaaaaactactaggatcacgcggcatgtattgaggatattgctgcatatcgtgccaagggcaaaagtgaagcaggaaagaa

SEQ ID NO: 119654 - DNA, 83 bp, Homo sapiens
ggtcaacaaggacaacaatgagatcgtggacaagatcatgggcaaaggacagatccagagtccctgcaggaagcatcacccag

SEQ ID NO: 119655 - DNA, 106 bp, Homo sapiens
gaggagaccccgcgcagtgctgccaacgccccggtggagaagctgaggcggctatgagaggttttcctccgagtacccagaattctgttctaaaaccaaggccctg

SEQ ID NO: 119656 - DNA, 83 bp, Homo sapiens
cgcggcccggggtgtcagtgtggaggagactgagactaatagggatgccaaaggaaaaatatgatcctccagatcctcgcaga

SEQ ID NO: 119657 - DNA, 50 bp, Homo sapiens
gcctacttctataaagtcatccaggctgatcagctgaccgaagaacagat

SEQ ID NO: 119658 - DNA, 75 bp, Homo sapiens
cagctttcacagtttgcgggactcagtcccatcactccaaggagagaagctgtaacatcttatgaagatcttgga

SEQ ID NO: 119659 - DNA, 103 bp, Homo sapiens
ctgctcactaccaagttcgtgtcgctgctgcaggaggccaaggacggcgttctggatctcaaagcgatcatgactgagagattgttaataaaagcattgagtg

SEQ ID NO: 119660 - DNA, 98 bp, Homo sapiens
caaagagatggagagagaggcggaggagaacgacctctcggaggaaagctggaacctatttgcctcagtcctatctgattcatgagcacatggttatt

SEQ ID NO: 119661 - DNA, 50 bp, Homo sapiens
gggtgaccaggagcccacagtgggcgaggatttcaaatatgcgtgcatta

SEQ ID NO: 119662 - DNA, 99 bp, Homo sapiens
ctacattccagttaagagcaacctgagcgatctgctagaaaaacttaaatgggcgaaagatcacgatgaagagctgtgtgttctcatttcacccaaaac

SEQ ID NO: 119663 - DNA, 75 bp, Homo sapiens
ggaatttcttcactttttaacggaccagttcagaatatttcttccccagaaagttctccagaaataaagagacgc

SEQ ID NO: 119664 - DNA, 100 bp, Homo sapiens
cataccgtgacagcccgcaggatcagcttttcctccgcaaccatgtctgacaaacccgatatggctgagatcgagaaattcgataagtcgaaactgaaga

SEQ ID NO: 119665 - DNA, 82 bp, Homo sapiens
gacggcgagcgcgagcggcgcgagaaacatccctacccaacagaggatgagaaaaaacagattgctgctcagacaaatttga

SEQ ID NO: 119666 - DNA, 50 bp, Homo sapiens
cttctctccagctccccatggagaagattggcacttctctgtttgatgaa

SEQ ID NO: 119667 - DNA, 95 bp, Homo sapiens
tgcagtggaggccatcaggggccttgataacacagagtttcaaggtaaaatgtcggttccaggaccttaccaggcggccactgggccttcctcag

SEQ ID NO: 119668 - DNA, 140 bp, Homo sapiens
gccggtctccgcggaaatgttgtccaaagttcttccagtcctcctaggcatcttattgatcctccagtcgaggtgctggagaatctggtaaaagcaccattgtgaagcagatgaggatcctgcatgttaatgggtttaat

SEQ ID NO: 119669 - DNA, 98 bp, Homo sapiens
gatcacatagctgaaatatcagctaagcttgtagcgataatggatagcttatttgacaagctgttatctaaggttttggcttggtttgaagaaggtga

SEQ ID NO: 119670 - DNA, 75 bp, Homo sapiens
gaaggacggtgagaaaggccagtacacacacaagatctaccacctgcagagagcagtctgaatgccagaatggat

SEQ ID NO: 119671 - DNA, 82 bp, Homo sapiens
accctcttcgcgggcgattcgcgtagcctcaggcaagtatatcgcgtcaacacagcgacctgacgggacctggcgcaagcag

SEQ ID NO: 119672 - DNA, 74 bp, Homo sapiens
ttcaataacaggtcattgccgagaaaaggaattgaggaagctcagataggaaaacgaggatacttaacacccac

SEQ ID NO: 119673 - DNA, 101 bp, Homo sapiens
gctgggggcgctggcgggcgttggcgtaggagatagggccagatttgagtgtgtgaatttttgagtgaaacctggaacccaaatgagaagaaatctgcaag

SEQ ID NO: 119674 - DNA, 100 bp, Homo sapiens
atgtggatttattaacacctcttgccactcagctgacatatgaaggactcattgatgaaatttatggcattcagaacatttaaaaaacatcggctttccg

SEQ ID NO: 119675 - DNA, 100 bp, Homo sapiens
catggctccctgcagtaccctttaacgggaatgacagaggaagaggaagacaaacttctggcactgaaagacttcatgatgaaatctaataaagcaaagg

SEQ ID NO: 119676 - DNA, 100 bp, Homo sapiens
ctgagtaagctgattgactacatctatactgctgaaatcgaggtgactgaagagaatgtccagaaacctgtttggaggttatggatgataaacccaatcc

SEQ ID NO: 119677 - DNA, 75 bp, Homo sapiens
cgggctcctgcgagaagcaagcggaacttcctgaggcctggccgtgcagtggggcgccatcggcgacgtgggcat

SEQ ID NO: 119678 - DNA, 87 bp, Homo sapiens
gcatggtccttagctagagacagaggcggaaaccagtacctccgacatgaagatgcagcctgagggaactggcatgatagatgaaga

SEQ ID NO: 119679 - DNA, 82 bp, Homo sapiens
gcgggatgtggcgactacgtcgggccgctgtggcctggtttcatgtccttagcaagctactgagtttcatggcacctattga

SEQ ID NO: 119680 - DNA, 50 bp, Homo sapiens
ggggaagccattccccaccccccaggtgccatgcctctgcaactcctcct

SEQ ID NO: 119681 - DNA, 50 bp, Homo sapiens
ggggtcctgaggagaactatagcagacagaatgttgctgcgggatgtaaa

SEQ ID NO: 119682 - DNA, 82 bp, Homo sapiens
agacgtcagaacgtggcttatgagtacctttgtcatttggaagaagcgaagagcaactcctggtcgactgattgaccacttg

SEQ ID NO: 119683 - DNA, 83 bp, Homo sapiens
cgtctttccgtcctctgaggcgacggccgcggctgcacagtgtaaacaggaacatcgataagtagtgtaaaaacttgcacaat

SEQ ID NO: 119684 - DNA, 111 bp, Homo sapiens
cttcggtggactccttcggcagtccacccaccgccgccgcctcccagttccagggtctccctccactgctgtagtaacccgggtccggggcctcggtggtgctcctgatgc

SEQ ID NO: 119685 - DNA, 82 bp, Homo sapiens
gaaggcttcaaaattgacactatgggaacctaccatggtatgacactgaaatctgtaacggcacagatagatcattatctag

SEQ ID NO: 119686 - DNA, 90 bp, Homo sapiens
agggccacagcagccaggcagcgggaccatgagcatgtgcagtctttgccaacaaaaaaaattaccaagaaacctattccagatgagcac

SEQ ID NO: 119687 - DNA, 100 bp, Homo sapiens
aactgggttcagaaccagtggtaattaccatcaatactatggaatgcattttgaaacttaaggatgggatacagggctgaataattctcatccttcaagg

SEQ ID NO: 119688 - DNA, 100 bp, Homo sapiens
aaggaattgcagtgtgattttctttccccctttaacttagaggaacgaggattatacagaaatttgaagcatgttatgttacccagagaactttccaaac

SEQ ID NO: 119689 - DNA, 75 bp, Homo sapiens
aaaattatcaacaccaaaaagctttctgctaggggtggatctccttacgtagcagccaaaataaatgaagcaaaa

SEQ ID NO: 119690 - DNA, 100 bp, Homo sapiens
agctgccgccgccgggactcccgtcccagcaggtggacgacatccttggagaaggcagcgacgacagcgacagcgagaagaggaggcctgaggagcagga

SEQ ID NO: 119691 - DNA, 100 bp, Homo sapiens
cttcaagatggcggtgcaggagtcggcggctcagttgtccatgaccctgaaggtccaggagtacccgaccctcaagaatagcctaacatggcagaccaga

SEQ ID NO: 119692 - DNA, 50 bp, Homo sapiens
ttacatcagcaccctcaaaacaggtacttgtcttgggccttagacacaaa

SEQ ID NO: 119693 - DNA, 76 bp, Homo sapiens
tgtttctggacgcggatttttggcctcatactctgttatagataaacaaggaaataatgaagatgtttcattttca

SEQ ID NO: 119694 - DNA, 100 bp, Homo sapiens
atcagagtcaccaaccccaatgccaggctgcgcagtgaagaaaatgagtggctggtcattgaccgcaaggtttacaacatcaccaaatggtccatccagc

SEQ ID NO: 119695 - DNA, 102 bp, Homo sapiens
cttggttggagatcatgaccaaatatgctgtgggagaagagtgtgacttcgagtccctgtacgagcggttaagtcagaggatgctggacatctcgggggacc

SEQ ID NO: 119696 - DNA, 100 bp, Homo sapiens
cgcggcggcaccgggaggccgggccgagcggattaaagcaaggagagccaatcatgactggcaaaacacagaccagcaacgtcaccaataagaatgaccc

SEQ ID NO: 119697 - DNA, 83 bp, Homo sapiens
tgtgtttctgagagcaaatgttacttgttccacgtttcttccatgtcaggaacgaatgcaggaatttgggaactgagctgtgc

SEQ ID NO: 119698 - DNA, 100 bp, Homo sapiens
gagcaaggtgcaagagtccacaaagggacctgatgaagcgaagatcaagatcgttctgaagtctccagcctgagttcagaggcccctgagacccctgaga

SEQ ID NO: 119699 - DNA, 101 bp, Homo sapiens
aatttgctagtaacgtcatggaggatgaacgacaggtatccatcacgaattgaaaaaattgactatgaggagggcaagatgttggtccattttgagcgctg

SEQ ID NO: 119700 - DNA, 85 bp, Homo sapiens
ggtccacactgcaatgtttttgtggaacatggaaacctggattaacaggacgaggcatgtatgaactgaaaccagaatgtgccaa

SEQ ID NO: 119701 - DNA, 75 bp, Homo sapiens
ccaaaccagtggtactggctagtggtgcagctctgagttctcccaaagagatgtatcggaacagtacaacatcta

SEQ ID NO: 119702 - DNA, 90 bp, Homo sapiens
ctgacgtgggaagccatggagcagatacggtcaagtcatcagcccacaaagtagcagtagtggcacggatctgacgggtgacaaagcagg

SEQ ID NO: 119703 - DNA, 83 bp, Homo sapiens
aacgagatgggggtgaagctggagatatttcgggaaggcaacagcccccaggggagcaaccagggagtcaaaatcacaccgga

SEQ ID NO: 119704 - DNA, 83 bp, Homo sapiens
ctaccttctggaagctactactacgtggtgcttggaaagaacacaccacagccatcagcactggaatgcaaagaccagaacaa

SEQ ID NO: 119705 - DNA, 100 bp, Homo sapiens
agacactccccagggcagaaatagcgaccatggcgagaaaagttgccagacggccagcattgccactgccagtgcatccgcccaggccaggaatcatgtg

SEQ ID NO: 119706 - DNA, 82 bp, Homo sapiens
cccgagtggcggacgggctcccgctggccgcctcgatgcaggaggacgaacagaaggggtagaagagccatccaaaaaacga

SEQ ID NO: 119707 - DNA, 101 bp, Homo sapiens
tcctgagtagctgggactgcagtatgttccagtaaaaggagaccatgtgattggcatagtgacagctaaatctggagatatattcaaagttgatgttggag

SEQ ID NO: 119708 - DNA, 98 bp, Homo sapiens
ctcaagatggcggacaaaacgccaggcggatctcagaaggccagttcaaagcatgctggactatgatacagagaacctgaactctgaagaaatctata

SEQ ID NO: 119709 - DNA, 75 bp, Homo sapiens
gccggggtcaccacgcctgccccagggaaccgcacaggaaggcagcaacaactcatctccagtggattttgtaaa

SEQ ID NO: 119710 - DNA, 51 bp, Homo sapiens
gttacctgttctctcaggagggtaagaatgattgatgttggctgatattgg

SEQ ID NO: 119711 - DNA, 99 bp, Homo sapiens
aattactacccaatcaaggaatgctgatcaaattccgaaatttttaacctctgaagctgtgccttcacatgatctaggacagcgttcagaagatggcta

SEQ ID NO: 119712 - DNA, 100 bp, Homo sapiens
ctagtggaagcggcaagcagagaaaacctgccaatcaagatgagtatgggtgaccaagaatatggcccaggtgaccaaagccctggacaaggccctgagc

SEQ ID NO: 119713 - DNA, 102 bp, Homo sapiens
tggaggagctacgccgggcctgccgaaaacccgactttccctcatggctggtcgtctccagactccacactcctagcaatctccctctccctctctttccac

SEQ ID NO: 119714 - DNA, 74 bp, Homo sapiens
ggagatacattaaatgcaatagcccttcagtactgttgtacgttatcaggaactgttgccgttattacatcaga

SEQ ID NO: 119715 - DNA, 80 bp, Homo sapiens
tccggacctcgttgaggtggagagcagcgtggggtgtcgtgaaaactacccctaaaagccaaaatgggaaaggaaaagac

SEQ ID NO: 119716 - DNA, 76 bp, Homo sapiens
ctctcctatgatggcagcgaaaacttatcacggttttggctccgagctctgtccagtggtgggagtattacatccc

SEQ ID NO: 119717 - DNA, 74 bp, Homo sapiens
cccgcgttcacagccccagcgcagaggctgaggggatctggcggtggagcgctaggatcagacgcccccgcgat

SEQ ID NO: 119718 - DNA, 113 bp, Homo sapiens
gtggccggcgcctcctcggagtccttggggacggagcagcgcgtcgtggggcgagcggcaggagccttcacgtaaatgggtccagtcatgcctcccagtaagaagccagaaag

SEQ ID NO: 119719 - DNA, 101 bp, Homo sapiens
catcttgtgggagcaaaaccaacgcctggctcggagcagcagcctctgagcgggctgacgcacgaggcacacaggaaggaggtggagcaggtgtatctgcg

SEQ ID NO: 119720 - DNA, 75 bp, Homo sapiens
tctaagctgaataaagctgttttggaactgtcaggtacctcaaagcattgtattgtaggaggcattgtggatgga

SEQ ID NO: 119721 - DNA, 96 bp, Homo sapiens
agtccagctctgtcatcactcaggcaccttccaccaaccgccagatcgggccatggccttacacaatatttcagcgaggctttgacctggttttgg

SEQ ID NO: 119722 - DNA, 75 bp, Homo sapiens
tggggataatgtggaagagatggactccatggtggctttctccatctctggtgaaagtagccaagtggtcatgat

SEQ ID NO: 119723 - DNA, 100 bp, Homo sapiens
tgagcgtcccggccttcatcgacatcagtgaagaagatcagagtaaacatcagtctccaaagataactacatcccttcttcccatcaacaatggctccaa

SEQ ID NO: 119724 - DNA, 100 bp, Homo sapiens
ttacgacgggttggggatggcgtgcagcgcaaccacgagacggccttccaagggcatcaagttatcagcagatgtcaaaccatttgtccccagatttgcc

SEQ ID NO: 119725 - DNA, 52 bp, Homo sapiens
aggggagtggcaggtgatcctcacaggctttcatgttactctgtgatcttct

SEQ ID NO: 119726 - DNA, 90 bp, Homo sapiens
gtcagtgtgaatttgtgacagctgcagttgctccccgcccccgagcagccgaggtggattctccacagttttcctcgtgcgtactcacgg

SEQ ID NO: 119727 - DNA, 82 bp, Homo sapiens
ggcgagcggctgtgtggatgtcggcgaagccgcgggcgagcgggagatacagatgacccaccaagaattactcagaaccctg

SEQ ID NO: 119728 - DNA, 100 bp, Homo sapiens
gcacaacgtgcctttgaagctgccgatgccagagccaggtgaactggaggagcgatttgccatcgtgctgccatcatcgtctacagactgccgtggacct

SEQ ID NO: 119729 - DNA, 100 bp, Homo sapiens
aatggaaagccagtaggacacgaaggtgtgcctggagaagttccctgtgatccagcacttcaagttcgggagcctgctgcccatccatcctgtcacgtcg

SEQ ID NO: 119730 - DNA, 100 bp, Homo sapiens
ggaagatggcggctgggttcaactcagatgaagtgattctgaagcccactggaaatcaactgaccgtggaattcctggaagaaaatagcttcagtgtgcc

SEQ ID NO: 119731 - DNA, 100 bp, Homo sapiens
ccgcagcctccgcggatccgggcccgctcggcccctcccatgctatggcattgctggttctaccaacgtgacaggtgatcaagttaagaagctggacgtc

SEQ ID NO: 119732 - DNA, 90 bp, Homo sapiens
agaaagtggctgacatggctaccaacacccgaggtgcctatgacagcatccggcatgcccatagccagtctgcagaggcagaacgtcgtg

SEQ ID NO: 119733 - DNA, 75 bp, Homo sapiens
tctccccaagctgcctaaattgaaaaaggtttcctatcctgggagcaggagagtgtgcctatttgaatgacaaag

SEQ ID NO: 119734 - DNA, 87 bp, Homo sapiens
agggatgataattgggcctccaagaatcctgtgaagccacctggcagctctttacaagcaccagctgatttacctttagctataaat

SEQ ID NO: 119735 - DNA, 98 bp, Homo sapiens
tgcagttgcttctctttgcctccaagaaagtccaatctgatgggcagattgtgcttgtagatgactgtgagggccccaaggctgttgcagctcctcga

SEQ ID NO: 119736 - DNA, 82 bp, Homo sapiens
ttgaagttagtgagaccaaaaacccaccaattctggacacattgggattaaaggagtcggagaagctggaaagtgtgaatgc

SEQ ID NO: 119737 - DNA, 100 bp, Homo sapiens
aacggcttcatcagcaccttgggaaaaggcgacggcggattgacagaagtatgattggagagcccacaaactttgtgcatacagctcatgttggatcagg

SEQ ID NO: 119738 - DNA, 75 bp, Homo sapiens
cgatgtttcaatattggaagcgctttgatttacagcagctgcagagagaagaagaaggaggttcctgctgtgcca

SEQ ID NO: 119739 - DNA, 88 bp, Homo sapiens
agcccccacccctctccgtccatggccccagatgacacttcagtgtttacaggcattggagtttttacatgctaatcaagtgatccac

SEQ ID NO: 119740 - DNA, 100 bp, Homo sapiens
gccaagaagcagtgcctgctgcggctgggggtgctgcgccaggtccagggagtcggtagtaagggatggcgggacgtcaccacctttttttcggggaaag

SEQ ID NO: 119741 - DNA, 101 bp, Homo sapiens
cctctcgctgcttcaggaggacctgcaggaggacgcagacggatgaagatgagaatgtgcctactgctcctgatcctccaagtcaacatttacgtgggcat

SEQ ID NO: 119742 - DNA, 75 bp, Homo sapiens
cgggcaatgtggttcccagtgacaccaacattctggacacgtgggcgggtagctctccagctggaagccttgctg

SEQ ID NO: 119743 - DNA, 95 bp, Homo sapiens
agctcccggactgactggctctgcccttccccatggacgaggagcaaatacgacatcctcatggagaagctttcggtcatgctgagcacacggac

SEQ ID NO: 119744 - DNA, 98 bp, Homo sapiens
cgccatgcccgggcagctgtgctgggagagaatgggcgggtgctggccgggcagaccctggctccagggttccttgaaaagaaaacaggtagttaacc

SEQ ID NO: 119745 - DNA, 98 bp, Homo sapiens
tctggtgtgggtttcccaagcaaggttccttggaagaagatgtctgcagaggaaaaccaattctgtgtcctcggaggaccacagcccagttgggcccc

SEQ ID NO: 119746 - DNA, 50 bp, Homo sapiens
gaagatgaagatgagaacattgaggttatgaagacagtatggagtttcca

SEQ ID NO: 119747 - DNA, 88 bp, Homo sapiens
gagctttttgcttagcactgaaaattctggataatggtgaatggctgaagaaatcaggggagaaacccctgcttggtggaagcctgat

SEQ ID NO: 119748 - DNA, 100 bp, Homo sapiens
gagtcatgagcgacagcggcgagcagaactacggcgagcggatcagagggatgaagagctgcccaccctgttgcattttgctgcgaagtatggactgaag

SEQ ID NO: 119749 - DNA, 100 bp, Homo sapiens
ttttacctgagaaatgctacgaccaacttttcgttcagtgggacttgcttcacgcatattgccaagtatctacaggcagaggcggtaaagaaagaccgac

SEQ ID NO: 119750 - DNA, 90 bp, Homo sapiens
ccctgccctacgtgtgtctgctcattgccatgctgttcttcatctacgccatcatcggcatgcagaacgcctgtaaaccttgcagtattg

SEQ ID NO: 119751 - DNA, 50 bp, Homo sapiens
gcgagcccgaggacatggagatggaagttggaatcgaagcctcttaaaat

SEQ ID NO: 119752 - DNA, 113 bp, Homo sapiens
gcagttcttgtttgtggatcgctgtgatcgtcacttgctcattgctatggacagtgctatcaccctgtggcagttccttcttcagctcctgcagaagcctcagaacaagcaca

SEQ ID NO: 119753 - DNA, 50 bp, Homo sapiens
attacgagctgcaggaggtgatcgtgatgtcttggcattgcccattttca

SEQ ID NO: 119754 - DNA, 100 bp, Homo sapiens
caggtcccggaaggtccttagggaggaccccagacaccggagactgggaaatgctcaccatctgctacctggatatgctgatgaccagtgaggagcgccg

SEQ ID NO: 119755 - DNA, 100 bp, Homo sapiens
acaatagaaactttcattacgtataggattattactaagactacacttgctgctttgaaggatgaagttgtatctgttgaaaatgaactctcagaattgc

SEQ ID NO: 119756 - DNA, 82 bp, Homo sapiens
ggccatcttcgggccccccaacacctactacgagggcggctacttcaaggttgagcttcagcgacagcgagagtgacaacag

SEQ ID NO: 119757 - DNA, 83 bp, Homo sapiens
accagacctacggagggagctggaaattcctgacgttcattgatctgcggagctggagtttgttcagatcatcatcatcgtgg

SEQ ID NO: 119758 - DNA, 75 bp, Homo sapiens
aaactgttcggacttccccgttagaactcgcgtttccacttcagagatctggttgaaacagttcctcaggctaca

SEQ ID NO: 119759 - DNA, 50 bp, Homo sapiens
cagacgcctcacttaggacaagaagccagttgagggaagttctccatgaa

SEQ ID NO: 119760 - DNA, 75 bp, Homo sapiens
actgagaattcttacaccttggctttttaagtctgttcggcacttgaagtactccttgtttaagaaatcactact

SEQ ID NO: 119761 - DNA, 98 bp, Homo sapiens
aaaagaccgtttgtgttttgtgatggaatatgttaatgggggcgagtctgaagtttcctggatccccaataaacattactctgggatttatggtctga

SEQ ID NO: 119762 - DNA, 88 bp, Homo sapiens
atgacgacatcacgcacaaggtgctcaggcagctgcattcagcctcagcggaggacacgcctgtggtgcagttggcagccgagacccc

SEQ ID NO: 119763 - DNA, 75 bp, Homo sapiens
cctcacccggcaagcctttgaaaacggcgttagaatggtactaggttttgacaagcttgcatcatgcgtgagtat

SEQ ID NO: 119764 - DNA, 90 bp, Homo sapiens
cccgcaagagcgagccgcctgccccggtgcgcagacagagctattccagcaccagcagaggctgaagccgacgtagcttctctgaacaga

SEQ ID NO: 119765 - DNA, 98 bp, Homo sapiens
ttctagcactcctgagtttgagccctatgagcagtggaacctagggtaaccaaggagcagtgaacagcagctactacagtagtggaagccgtgcatct

SEQ ID NO: 119766 - DNA, 88 bp, Homo sapiens
ggctcccgccgccacccccgccctcgccttcgcctccgcctccgctccagaacctgggtatcaacccagcaaacattggcttcagtac

SEQ ID NO: 119767 - DNA, 100 bp, Homo sapiens
cggaactcgaccggatccaacccagttagttacttcctgtctagagttgtagcttccacctggttttgtaagttacgacaatcctgtttcggcccaagct

SEQ ID NO: 119768 - DNA, 100 bp, Homo sapiens
gagacgaccggttcgtcgcctccttgcccgtgaccgtcgctagaactcagttgtgcgttgcggccagtcgccactgctgcctgccgaggaggaactgaag

SEQ ID NO: 119769 - DNA, 74 bp, Homo sapiens
ggcggaaccccttcgtgcacgagctgcgcctcagcgccctgcagaaggcccagatgaaggatttgggggcagag

SEQ ID NO: 119770 - DNA, 100 bp, Homo sapiens
ggaagataagctgaggcacttcagggagtgcttttatattcccaaaatacaggatctgcctccaggtctagatgttgatggaatatatcgagttagtggc

SEQ ID NO: 119771 - DNA, 82 bp, Homo sapiens
tttgaatatcgtaagcgcacgtttaaacatctcaagcatttctggattaaaagtggtgggggagtccctttctccagccttt

SEQ ID NO: 119772 - DNA, 116 bp, Homo sapiens
tgggctgtgtcatttgatgaggaaaaaaccaaatgatctctttatgaaaatgaaggcagccttaagtgccttgaaacaattttctgaacaaggactggatccaatcgatggagcaa

SEQ ID NO: 119773 - DNA, 100 bp, Homo sapiens
gagcagttgtatgtgtagaaagtgaaatcagaggagatgtaactatcggaatctgtctgctattcaggatagagaaatttgctgctattcaatttcttgc

SEQ ID NO: 119774 - DNA, 100 bp, Homo sapiens
gacaacatcgccctgtggatgactgagtacctgaaccggcacctgcacacctggatccaggataacggaggctggggtcaacatatttcactggcaccta

SEQ ID NO: 119775 - DNA, 100 bp, Homo sapiens
ggtccatcctcccccagtaatggaattgatatgggctacaatgggaataaaactccaagaagccaggtgttcaaggtatttttactgattgggaaggaat

SEQ ID NO: 119776 - DNA, 98 bp, Homo sapiens
gcacgcggtgcagggtaacatggcggatgcggaagccccaaacgtcttaaccggttccatcatcaactctaaaagtcccaggcttcatctaaatatta

SEQ ID NO: 119777 - DNA, 100 bp, Homo sapiens
ctgggaggagctgaagagcgagaaggagcagcgccggcggctggaggtctcctctgagcctccggcctccataagacccaaaacagatgacacctcttcc

SEQ ID NO: 119778 - DNA, 90 bp, Homo sapiens
ggaggaagcaggaggaagccgatcgaaaactcagagaggaggaagaagatggactgcggatgaggaagacagtgcagagcaacagcccca

SEQ ID NO: 119779 - DNA, 83 bp, Homo sapiens
cctgcggacctaactagctccaggttaggccgagctttgcgggaaagcagcgatgacattagcccagggaaggagagcctggg

SEQ ID NO: 119780 - DNA, 83 bp, Homo sapiens
aaaaaagttgactccagtggagaaactgagaagaaagatttcagagatcccaccaaatattttggttgtgagctgggagcaca

SEQ ID NO: 119781 - DNA, 75 bp, Homo sapiens
aggcagtttgacctggcctggcagtacgggccctgcaccgagttttcaggagttgaaaatgacaatgaaactgag

SEQ ID NO: 119782 - DNA, 100 bp, Homo sapiens
actccaaaacagtacagaggacccaggacacggatttcggcctggcccgggcctatggtgtcccagtaaagccaatgacccccaaggtggtcactctctg

SEQ ID NO: 119783 - DNA, 100 bp, Homo sapiens
gtgccggcagctctgggatgagctgggccggctggtgtctcactcaaccccaatccgctggcaccggggccaggaaccccaggcccgtcgtcacgggaac

SEQ ID NO: 119784 - DNA, 82 bp, Homo sapiens
tagtgattgtcagagcagggaaaatcacctttgcagaaaagattccagatgacctgaggaagagactaaatatagaaatgca

SEQ ID NO: 119785 - DNA, 87 bp, Homo sapiens
ccaggcgactgcctcatcttcaagtcaggatggctaaaggtgaccccaagaaaccaaagggcaagatgtccgcttatgccttctttg

SEQ ID NO: 119786 - DNA, 90 bp, Homo sapiens
tgcaagagcaacatctttcctcaccccaaggtgttggagcgggccggagagaagtagagtgggctgcgaggagaaggaaacaggcctttc

SEQ ID NO: 119787 - DNA, 100 bp, Homo sapiens
cgggctgtgatttacctgggtgagacagcttgagccccatcgtggattccaagacatccctgctgagagagccaaggttaccccacagcctatccagcag

SEQ ID NO: 119788 - DNA, 50 bp, Homo sapiens
atgaacagccaggatctcacataggtgacgcatccaaagaagacattgac

SEQ ID NO: 119789 - DNA, 82 bp, Homo sapiens
ggagactgaatcaaggtccagagaaggtggaggaatcctgatactgagcggttgattcttcaccacactgaaaccattagga

SEQ ID NO: 119790 - DNA, 100 bp, Homo sapiens
ttagaacgatgtgaacatcgaatcatggaatcccttgcatggctctcaaatgtttcatccatttgtggaccaaaagatggagttggtttttatttttaaa

SEQ ID NO: 119791 - DNA, 100 bp, Homo sapiens
cctccagtgtcccttcttccacatgaaaaggataaggttctgaagaaagtctccaaatacattcaagagcagaatgagaagatctatgctccacaaggcc

SEQ ID NO: 119792 - DNA, 48 bp, Homo sapiens
ccttagaggagccatttttccagccctgggcgctgcctatggcacagc

SEQ ID NO: 119793 - DNA, 75 bp, Homo sapiens
cttggaccctggaaaacctggccctcttcaatttctgacaaaagttccactggtgaatatgataaagctatccag

SEQ ID NO: 119794 - DNA, 87 bp, Homo sapiens
ttacagagaacctaagtctgtttgcaaagcacctgaactggcagacagtgatggaccagaatttaaaactattcatgacagtaccaa

SEQ ID NO: 119795 - DNA, 101 bp, Homo sapiens
caccaaccctgactgccaagagaagcttctgagagaggtagacgtttttaaggagaaacacagtgatcagcagctggactgtgccttggacctaatgaggc

SEQ ID NO: 119796 - DNA, 90 bp, Homo sapiens
aaaagatgactacaaacataggatgttttggcgagagatgtattcagtggaggaagctgggggcttggagtacccataatacagtgagcc

SEQ ID NO: 119797 - DNA, 100 bp, Homo sapiens
cttctgcatccttaactgagaatgagaaagaatcttcaagagggagacatagggaaaaggaagacataaaaatcactaaggaaagaactccagaaagtga

SEQ ID NO: 119798 - DNA, 100 bp, Homo sapiens
tccctgctcttccacttcaaggagacaacggccacacactgtggggtgttggagcgggccggagagaagtagagtgggctgcgaggagaaggaaacaggc

SEQ ID NO: 119799 - DNA, 82 bp, Homo sapiens
tgcttcggaagctagtttttcatctagtgaaggaagtcctttgtcaagatgatttgtcattaattcggaagaacagaatggc

SEQ ID NO: 119800 - DNA, 100 bp, Homo sapiens
ctgggacacacctccattggatttaaaagacagtcctcgtcagcactgactttcagctatggaatcgcttgccaattctgtaactccttgggatatcttg

SEQ ID NO: 119801 - DNA, 100 bp, Homo sapiens
gttcattctttaccacattttaagccagacctcgaagtagggggaaaactgcagtggaagatgaggacagcatggatgggctggagacaacagaaacaga

SEQ ID NO: 119802 - DNA, 90 bp, Homo sapiens
agatgatgaagagtatcaggaatttgaagagatgctggaacatgcagagtctgcacaaggactggtttggctgaaagacaaagaagcaac

SEQ ID NO: 119803 - DNA, 74 bp, Homo sapiens
gtcggaagggagcccaagctttgcagagtgggattttagtgtgcactgatgtgatggcccggggaattgatatt

SEQ ID NO: 119804 - DNA, 90 bp, Homo sapiens
gtccagcagatggcggatgccctgcagtacctgcagaaggtctctggagacatcttcagcaggacagaactgtaccgctctctttttggc

SEQ ID NO: 119805 - DNA, 100 bp, Homo sapiens
cggaggccaacggcttcgccgagcgccgcatcgacaagttcggcttcatcgtgggctcgcagggcgccgagggcgcctccctgcggtgtggccccccaag

SEQ ID NO: 119806 - DNA, 74 bp, Homo sapiens
tggggctccgggcggctgggaccggcctggggtagctgcgcagcaggtgcggtggatgatgtactggattgttt

SEQ ID NO: 119807 - DNA, 100 bp, Homo sapiens
ctgagttcaagaacatcacagtgagagaggaggaggaagccaagaatctggtgagcgaagccatcgcagctggcatcttcaacgacctgggctccggaag

SEQ ID NO: 119808 - DNA, 51 bp, Homo sapiens
actccagcaccgaaattgtggagatggcagtggcagcaccatgatgcaaac

SEQ ID NO: 119809 - DNA, 90 bp, Homo sapiens
gtctacgcagtctctgaacagagttcctgacctgtgggagagagagggtttccaggtttggaaggacacccaggattgcctggatttcca

SEQ ID NO: 119810 - DNA, 98 bp, Homo sapiens
agcttcattgttttcagctaacagtaaccccagaacccctgaacagtgcccaagtgttgtctctttgttgtcagagagttacaaccctcatgtgcgct

SEQ ID NO: 119811 - DNA, 75 bp, Homo sapiens
cccgtcagcatcccagccgtgctcacgtgcctccggagccagcgtggtggccatagacaacaagatcgaacaggc

SEQ ID NO: 119812 - DNA, 98 bp, Homo sapiens
ggaagatgaggacagcatggatgggctggagacaacagaaacagaaacgattgtggaaacagggctaccttttcatctctgtgttggtgaactcaaac

SEQ ID NO: 119813 - DNA, 58 bp, Homo sapiens
gtggtcattaagcggagatccgcttcgcagaatcaagaacggctatgtgcgtttaaag

SEQ ID NO: 119814 - DNA, 100 bp, Homo sapiens
tcctttcaggggtgaccacattcatctgggcatgcctgcagtactcttggcccatggacctgaaggagaagcacctgcctgctgagggatgcccaagaag

SEQ ID NO: 119815 - DNA, 100 bp, Homo sapiens
gaaaggttgtgatggcggctatagctgcatccgagtagccacgatggaggtgatgaacctgatggagcagcctatcaaggtgactgagtggcagcagaca

SEQ ID NO: 119816 - DNA, 75 bp, Homo sapiens
gtctaggtgagtcgcggtgggtcctcgcttgcagttcagcgaccacgatggttggcaatggctgataaatgacac

SEQ ID NO: 119817 - DNA, 101 bp, Homo sapiens
atcttcaggctggaacaaggagaagaaccatggagactggaggaagaattcccaagccagagctttccagaggagctctacggtgactttgaagacttgga

SEQ ID NO: 119818 - DNA, 82 bp, Homo sapiens
atcaaatggaaacccttaattcttacagccaagttctacttctgaatctatggatcaactactaaacaaaaatagagaggga

SEQ ID NO: 119819 - DNA, 100 bp, Homo sapiens
catccacacagtccgtgtgcggggaggacatcgtctccgcgctggaggaccgtctcaggcccctggtgcaggcagagttatctgtgctcgtggatgttct

SEQ ID NO: 119820 - DNA, 97 bp, Homo sapiens
gtcaggacgtctacctgtccaccattgtgaccgagcccacacatcttgctgacttcactcaagtgcaaaccattcagtattcaaacagtgaagacaa

SEQ ID NO: 119821 - DNA, 98 bp, Homo sapiens
ctggaggtggcaagaaggatgacaaggccaagaagacgctggagggaggctgttaggagggactctgagcttcacacctgtctgctgccatgggtgca

SEQ ID NO: 119822 - DNA, 75 bp, Homo sapiens
gggcggcccgctctgcacgcttgccagcgcggtgctcttcctaaggaatggaagcccagactgcctgggaggcag

SEQ ID NO: 119823 - DNA, 101 bp, Homo sapiens
tttcatgttttcctggaatatgatcaggataattcagtttgcctgttctgtatgcaagttccgtagctttgatgacgaagagatccagaagcatctgcaaa

SEQ ID NO: 119824 - DNA, 80 bp, Homo sapiens
ggtgggagccgtgctctacctctatccggttgaaatcacaaagattagacacctttttagataggtgttcttcagcacca

SEQ ID NO: 119825 - DNA, 112 bp, Homo sapiens
ccgggggtcgctggctctgctgctgccgccggcgaaggaggaggcgttgccgggtttctctagaggactttctaaagaaaattcagcgagtggattttgatatattccaccc

SEQ ID NO: 119826 - DNA, 98 bp, Homo sapiens
accgtttccccctgttgcagggttttgtttatataactcaagttgtttggctaaattcttcagggccatcgatgcacccctcggagctaatagcggag

SEQ ID NO: 119827 - DNA, 75 bp, Homo sapiens
ctgatgtggagagcttgctggtgcagtgcatattggataaaatgtcaagctgtcagctgaggtggagccatttat

SEQ ID NO: 119828 - DNA, 82 bp, Homo sapiens
agatgagaccgcaattcgagaatcaaagggccgggagcgatgctgccgcagcgggaaccgcaagagcttggtggtaggaacg

SEQ ID NO: 119829 - DNA, 99 bp, Homo sapiens
gttgaggcccttcttgtgtatctggagaaaatagagattgagcttctagagcctcagagatggaattcgccgttttgccgcgatttggcgttaacttat

SEQ ID NO: 119830 - DNA, 50 bp, Homo sapiens
cgaggaggtgcgcgagaagtacaaagctggcacacccataccgagcagcg

SEQ ID NO: 119831 - DNA, 90 bp, Homo sapiens
tatggcaaaagcccatacctttatccactctatggccttggagaactgccccaaggatttgcaagtgccggtggtggtgtgcacattgag

SEQ ID NO: 119832 - DNA, 75 bp, Homo sapiens
cgggccatggccgccgccgatgccgaggtatggacctgtctgccaatcaggacgaggagaccgaccaggagacct

SEQ ID NO: 119833 - DNA, 75 bp, Homo sapiens
agatttggaatttcagctccatgaaccatttcttctgtatagaaatgcaagctgaaagtgactattttaccccac

SEQ ID NO: 119834 - DNA, 101 bp, Homo sapiens
tttctaaagaagtctggcctctcggacattatccttgggaaggtttttcgttggaatatacgttgcacatttatggcgattctgagtgtgagggcagactt

SEQ ID NO: 119835 - DNA, 98 bp, Homo sapiens
taccaaaccatgtctggagtgaaggaggccgacttcaaggatcttgagactcaaccccatatgggagtggttttcagagacatttcagaaagtgaagg

SEQ ID NO: 119836 - DNA, 98 bp, Homo sapiens
agctacagctgcgggagagccgggtaccggccgtggaagcggccaccgactactgtcagcagctgtgccaggaatactcccccagttgcaagaggcgc

SEQ ID NO: 119837 - DNA, 100 bp, Homo sapiens
gcagccgagatgccgggggagcggggccttccacaccccctccgtgggtgtgtggtcgcaatggaagaagagatcgccgcgctggtcattgacaatggct

SEQ ID NO: 119838 - DNA, 75 bp, Homo sapiens
gctgcatgacagctatgactacgacctgcaggaacagatacactctgtgcagttttagagagagacacactcagt

SEQ ID NO: 119839 - DNA, 90 bp, Homo sapiens
gccgctgtgaggtgcgggcggcgggacaatcccctcgccggggcaccgtcatgtatgtaggagccttggtgttcacttctccaaagtccg

SEQ ID NO: 119840 - DNA, 50 bp, Homo sapiens
gtttccacagtgattgatgctgcctcagaagactgtgcagtctttgtaac

SEQ ID NO: 119841 - DNA, 100 bp, Homo sapiens
ggaatctgtcttggaggacatcagaagggagatacttcaggggattaccggaagattctgctgaagatctgtggtggcaatgactgaacagtgactggtg

SEQ ID NO: 119842 - DNA, 100 bp, Homo sapiens
gcttcggccccgcagctcggcttgctgcggtctcaggcccttccacctgcctcgtatccctgttgctgactccgtccaccctgttcctgttagatgagga

SEQ ID NO: 119843 - DNA, 75 bp, Homo sapiens
cagattaatcagggggagagcattacacatgtgattcgcctttgccagtctcatctcgtgtctgctttgttaagt

SEQ ID NO: 119844 - DNA, 100 bp, Homo sapiens
ggcttctcgggtgaagaactgccgtttgtggggttttcgtacagcaaggcactggggattcttggtagatctgaacaatgcagatcttcgtgaagactct

SEQ ID NO: 119845 - DNA, 75 bp, Homo sapiens
ttcaaaatttcaggtcttaaatctggatgtatgttgtgttcacagcgaaggtactcccttcagcctgtcccagaa

SEQ ID NO: 119846 - DNA, 74 bp, Homo sapiens
cttgccggcgtcaccgccgcggacttcgctttgggccatgaccagtccttcagtgaatctacagacctattttc

SEQ ID NO: 119847 - DNA, 75 bp, Homo sapiens
ctctttcctttccgtctggcggcagccatcaggcaagcacgaggagcggcaggacgagcatggctacatctcccg

SEQ ID NO: 119848 - DNA, 100 bp, Homo sapiens
ctctgagggagggtccgagccagccgctgttttgccggaggagcccctcaggccacatcgatgagtgtgctgaagggcgccattactgtcgtgaaaatac

SEQ ID NO: 119849 - DNA, 100 bp, Homo sapiens
tgtgggaccccagcccctctccagctcgaaatcgatcagctgctgctctctgaaaagccacagttgtgtcagctatgccaggaagacggcagcctaacaa

SEQ ID NO: 119850 - DNA, 100 bp, Homo sapiens
ggaggaaaacaacttcgagggcagaattacaggtccaccaggttgtggaaaaactcagttttgtataatgatgagcattttggctacattacccaccaac

SEQ ID NO: 119851 - DNA, 83 bp, Homo sapiens
agccatcaatgaggacaacagtgtggtgtccttgtcccagtgtttaactgctgaagagatcttttcccttcatggcttttcaa

SEQ ID NO: 119852 - DNA, 97 bp, Homo sapiens
cctgcttttttgagggaattgatgatgttcactggaaggaaaatgggacattagttcaagtagcaactatatcagattcaagtcaatctgaaagtcc

SEQ ID NO: 119853 - DNA, 83 bp, Homo sapiens
atccctttggtgaaatcctatttagcacagtttgcagctcgtgccatcatttcagagctgttgttctaccatctccagaggga

SEQ ID NO: 119854 - DNA, 89 bp, Homo sapiens
tgagtcaacaacggatgaaaatgaagacgacattcagtttgtcagtcaaatccagtttgctgatgacatgcaggagttcaccaaattcc

SEQ ID NO: 119855 - DNA, 100 bp, Homo sapiens
ctacaatccctcaaaaaagtgcttcagagtgagttttgtacagctattcgagagtgccaccgtgggccttaattgcaatagccatagtcgcagtcctttt

SEQ ID NO: 119856 - DNA, 100 bp, Homo sapiens
aagccaatactatggattctctggtagacatgccatttgctactgtagatattcaggatgactgtggaagcacggaatgttaacactggtgaattagcag

SEQ ID NO: 119857 - DNA, 101 bp, Homo sapiens
gaggaagcgcggctgctgtcgcccagcgccgccccgtcgtcgtctgccttcgcttcacggcgccgagccgcggtccgagcgaccatggccttgctgggtaa

SEQ ID NO: 119858 - DNA, 50 bp, Homo sapiens
ccggaccgggccgcgcacgccgcctcagggccttcctccggatgctcttc

SEQ ID NO: 119859 - DNA, 82 bp, Homo sapiens
gaccttttagaagaaaataagataaattcatcggtgaaattcgcttctggtaatactgtagctaatagatcagttaaagccc

SEQ ID NO: 119860 - DNA, 75 bp, Homo sapiens
aagcatcgttaaagtctctcttcaccctgccgtcatgtctaagtcagagacttattcgtctaatggaagagatca

SEQ ID NO: 119861 - DNA, 100 bp, Homo sapiens
ttagaactactagagaatcttaatcagctcatagccgttgacaaccaacttctgcatgtgaagatcagtgctaacatcttccgtacacttcctccaagtg

SEQ ID NO: 119862 - DNA, 124 bp, Homo sapiens
tgacagtacctgataattgatctccttcccatcagatttccaagggatcaaggtgccccggttctaaacaaccacaggtctctttttcagtcatgcaggagtcagtcgaagtgtggccataata

SEQ ID NO: 119863 - DNA, 99 bp, Homo sapiens
cttctatgtgctgtgtccggacaacggctgcggcgacaattttgtagcagaaggtcaagaaatttgtgtgattgaagccatgaaaatgcagaatagtat

SEQ ID NO: 119864 - DNA, 50 bp, Homo sapiens
gtgggcgtaggaccctccaagccaggtctgctggagtttgctggaggtcc

SEQ ID NO: 119865 - DNA, 51 bp, Homo sapiens
agttactctaacaagtctggagcattttgaaagcgaagcagaagccgtaga

SEQ ID NO: 119866 - DNA, 80 bp, Homo sapiens
ataagaaaacacatctttacacactaagtacaggtttgcagattccgccagcagcacagcaagctctacagatgagtggc

SEQ ID NO: 119867 - DNA, 100 bp, Homo sapiens
gttttgttaaatctacagatcactttgggaagcagtgacatccaacctgtatcaagtcttctaatctgtgaacatgcaaattcaacacccaacagcttcc

SEQ ID NO: 119868 - DNA, 95 bp, Homo sapiens
cgagcgctgctactctgaggcgtctgacctcaaggcagggcctggtcactgaccaagtctcactgcacgtgctagtggagcggcacctgcccctg

SEQ ID NO: 119869 - DNA, 99 bp, Homo sapiens
caaacatggcggtggactcggcgatggagctgttatttttagatacttttaaacacccgagcgctgagaccaccgctgaaacttcacttctacacagag

SEQ ID NO: 119870 - DNA, 75 bp, Homo sapiens
cggctcgacaggcggcgcgggcggcgaatggccaacatgcagggactggtggaaagactggaacgagctgtcagc

SEQ ID NO: 119871 - DNA, 100 bp, Homo sapiens
cctgaagacttggatgaaaatatggattacaggttgatgtgggaggatattgtacctgtggatgcatcttatgaagtaaaagaactatatgtgccagaaa

SEQ ID NO: 119872 - DNA, 100 bp, Homo sapiens
tagaaaataccaaaagagaaattttagcacaactccggacacttgttttccagtgtgatcttacccttaaagctattcgctttgtggtggaactcgtgtg

SEQ ID NO: 119873 - DNA, 82 bp, Homo sapiens
ctgaactccagcctgggtgacagacttcatctcaaatatatagcttctctgggtgctgctctgggccaccgtgttgggcttg

SEQ ID NO: 119874 - DNA, 98 bp, Homo sapiens
ccttcagccaaagaaacaagccgtggaataggtgtatcaagtaatggtgcaaagcctgaattgactgaaacctcctcccgttacgccaggaagatctc

SEQ ID NO: 119875 - DNA, 75 bp, Homo sapiens
ccgggccgcggcctccgagcgcgcgggatttgcagttcttgggatatgagtaagttcttgaacattcagtgtcaa

SEQ ID NO: 119876 - DNA, 100 bp, Homo sapiens
cttggccccgcgcagcgtctggtcactcgctctcctctggggactgcagagaagcaggacctcgggccatgggtggttccaggaaagaaatcactgaaca

SEQ ID NO: 119877 - DNA, 75 bp, Homo sapiens
tcgcaagaccttcaatatcaaaaatgactttactgaagaggaggaagcccaggagttcatgatcaagtgttgccc

SEQ ID NO: 119878 - DNA, 75 bp, Homo sapiens
gtgaaatgtttggatatatgaaattacatccagaggattttcctgaagaagtaccaaaagaattggtggagctcc

SEQ ID NO: 119879 - DNA, 75 bp, Homo sapiens
tgccagaacttggaatactctactggacaaacatttcctccaaggatcctaagcacttcaagtcagagaagacag

SEQ ID NO: 119880 - DNA, 82 bp, Homo sapiens
cgtgccaaagccgccccgaagaccaagccagccacaccgagcaaagacgagaatccaggacttgaatcgtatcttcccactt

SEQ ID NO: 119881 - DNA, 75 bp, Homo sapiens
aggacattcagtcagaagaaggctgctattgaaagagagtatgcacagggtgatcagcccatgacctaaacctcc

SEQ ID NO: 119882 - DNA, 75 bp, Homo sapiens
tttaacaaccagctgaccactgtccacaaccaggaggaggacttcatccaacccagcagccgagaagaggcccag

SEQ ID NO: 119883 - DNA, 100 bp, Homo sapiens
ctgttctctcggattatgaaagtgcagaagactcggaagtttttgaatctgaaaattcaagaaggtgaagctcacaacattttttgccctgcatatgatt

SEQ ID NO: 119884 - DNA, 90 bp, Homo sapiens
cactctttccgccctaatggaggtctccagtttcgaggccatgtggaagtgttacatcaccttttgcttggaaagatttactaagaagtc

SEQ ID NO: 119885 - DNA, 113 bp, Homo sapiens
ctccagatttttacccaactgcagaagttgaacaagaaattagaaggagggcagcagctttgtttttgggaggctgaggaaggaggatcatttgagcctgggaggttaaggct

SEQ ID NO: 119886 - DNA, 80 bp, Homo sapiens
cctgtaacaagagcatcacagccaaggaagccctcatctgcccaaccatccttcccctgcggagtatgtcgaggtgctcc

SEQ ID NO: 119887 - DNA, 100 bp, Homo sapiens
aaccttcctagtcagagaattcaactttcttcttttcttcattcatgaaaatgcagatccactgagaaagggaataagtccgatacatacttctgcatgt

SEQ ID NO: 119888 - DNA, 100 bp, Homo sapiens
cggaaggcttcaaaggctgtcgcaaggaggaagactgtgccctgtccacggtgcctcctgcatgtcctgctgccctgagctgtcccgagctaggtgacag

SEQ ID NO: 119889 - DNA, 51 bp, Homo sapiens
ctggcagcagagaccaccagaagggttaaacccatccagagtaatggctgc

SEQ ID NO: 119890 - DNA, 96 bp, Homo sapiens
caggtaggctgcgttgaggatctttgctcttccatccgcctttgatcgtcttcctcttcagccatccaggtgtcagcatttgcaggtatacaggaa

SEQ ID NO: 119891 - DNA, 98 bp, Homo sapiens
cagatccgcgtagtgaggaatcgtctccaccgtcatggggggcggagacctgggcagctgcaatgactctccgcacggtattattgtcattgcaagca

SEQ ID NO: 119892 - DNA, 77 bp, Homo sapiens
ggcccccccgcgccgaccgcgttcctatggacagacgcacagacacctgcagatgttaaggacatgttcacttccag

SEQ ID NO: 119893 - DNA, 51 bp, Homo sapiens
agctcgtagcctgccactccgtgcgcatgttatttgaaagcaattgagacg

SEQ ID NO: 119894 - DNA, 100 bp, Homo sapiens
taaaaacacttctctcagaaacagagcgggagatacagatgacccaccaagaattactcagaaccctgtgatcaatgggaatgtggccctgagtgatgga

SEQ ID NO: 119895 - DNA, 50 bp, Homo sapiens
ggggagtgctgatcaactaaaagaggtattcaagagacgatatttttact

SEQ ID NO: 119896 - DNA, 100 bp, Homo sapiens
ctgcacgtgagggaagcctttggccagaagatcggccacttccagggccgcctttttgcctatcctgacactcaccgccatcgcctgggacccaattatc

SEQ ID NO: 119897 - DNA, 96 bp, Homo sapiens
gtccccgagtgcggcagtaccgcctccttcccagccgcgcggcttcctccagacctctcggcgcggggaactactggagaccacgtgccgcctggc

SEQ ID NO: 119898 - DNA, 75 bp, Homo sapiens
ggggaccacagcatgcacttccttccagcagctacacaggcaagaaaactgatcagtgattttgccattatcttg

SEQ ID NO: 119899 - DNA, 95 bp, Homo sapiens
gctcagaggtgcttgtaccgtgatgtgatgctagagaacctggctctcatatcctcgctggatgtttctttctcagcaaaatagaggagaagctt

SEQ ID NO: 119900 - DNA, 100 bp, Homo sapiens
gccgccaccgtaaggctaggccgcgagcttagtcctgggagccgcctccgtcgccgccgtcagagccgccctatcagcaggaaccgaatattgtatctga

SEQ ID NO: 119901 - DNA, 75 bp, Homo sapiens
agatctttaccagatgttaggttagaaggatggtgagaacaagaccaagattggaaagccagcttcagaggaggg

SEQ ID NO: 119902 - DNA, 73 bp, Homo sapiens
ttcttttgacaatgatggaaaggtgcaaaatttccaatcaaatggacagctcctgaagctgcactgtatggtc

SEQ ID NO: 119903 - DNA, 100 bp, Homo sapiens
taactgtcctgagtgaatgaacacccattgactgaagtgagtgagaaagatcagtctaaagaaaaggagaagaaagtgaaaaaaacaattccttcctggg

SEQ ID NO: 119904 - DNA, 74 bp, Homo sapiens
tcgaatgcatcgcccctgccaacattgaagctgtggccgccaagaattcagaaggagctggcggacatcacttt

SEQ ID NO: 119905 - DNA, 75 bp, Homo sapiens
ggacattctgaagggaggcaaggaggcggactgagcgctcccaattggggtttggtgcacctcgatttggaggaa

SEQ ID NO: 119906 - DNA, 88 bp, Homo sapiens
acagatgtccaagctgccaaaggcagtcaaatgcttctcagactctctgtgacatagttaggctgggcagagaccagggcagtcagct

SEQ ID NO: 119907 - DNA, 50 bp, Homo sapiens
ccagtcaccctgaatgtcctctatggtccagacctccccagaatttaccc

SEQ ID NO: 119908 - DNA, 50 bp, Homo sapiens
ctgtggatgaatttgcttttctggaagtgcgattgtgccctgatcggatc

SEQ ID NO: 119909 - DNA, 82 bp, Homo sapiens
cccgccgctccttgggctacgcgtatgtgaacttccagcagccggcggacggaagctcttcgtgggcggtcttgactggagc

SEQ ID NO: 119910 - DNA, 100 bp, Homo sapiens
caggaggcagctgagaaatgctgtgtctgtggtcacttgattttggagaagggcctggtggggcagagcccgtggcttcaggagcagctgtctcagctgc

SEQ ID NO: 119911 - DNA, 51 bp, Homo sapiens
tcaggaaccaccagtgacagagacacagcattgttggttttgccatgtact

SEQ ID NO: 119912 - DNA, 100 bp, Homo sapiens
ctttggaaatgtgctcacactgcacttttaaatcaacttagagctgtgtttgatcaaattattgaacttcagaatgctcaagatgcaatatacagagctg

SEQ ID NO: 119913 - DNA, 51 bp, Homo sapiens
atggcggaagtaatgggatctataaagcctctgttgtcccatagagagttg

SEQ ID NO: 119914 - DNA, 82 bp, Homo sapiens
aaatcacaagattctctgccacaaaaaaatataataaggctgagtgcggagccaagggttatgagagaatttacaatgaaat

SEQ ID NO: 119915 - DNA, 82 bp, Homo sapiens
cggggacggcgaggccctcatgtaccacacgattagccgatgaattacatatgccatctctccctgaaatgatgtttggaga

SEQ ID NO: 119916 - DNA, 83 bp, Homo sapiens
aaaccaaggaacatttatttggggctttcaaggatttacaagaccagctagaggatatgatggaagatgcaaatgaaatccaa

SEQ ID NO: 119917 - DNA, 75 bp, Homo sapiens
aacatcgaccagaccatgctctccatcctgctcttcttccacaggaatcaagtactggaaatgtttgatcatgct

SEQ ID NO: 119918 - DNA, 98 bp, Homo sapiens
tgacctgcatgtactgggggattcgcagggaggatgtcgggacaccccggaagctgggaaatggttccttcaatggtgccttagctgctgttcctgtc

SEQ ID NO: 119919 - DNA, 100 bp, Homo sapiens
tgtgacctgcagatattgggagatccacagctaagacgccgggactccctggaaacctagaaatgcttgtattggttggtgatggtggtactggaaaaac

SEQ ID NO: 119920 - DNA, 103 bp, Homo sapiens
ctggaccaggaggaggttttcaggaccaaaattgtggaaaagtcactctggtgaaaggtgtagcagtcactcggcctacacccacagcatcgaccttgtgaac

SEQ ID NO: 119921 - DNA, 100 bp, Homo sapiens
agtgctcctgcggctgtatggagcgattttgcagatgtgccatttttgtgacaaggcctttatgaaccaagcttttctacaaagtcacattcaacgccgc

SEQ ID NO: 119922 - DNA, 100 bp, Homo sapiens
gcttagtatgtgtattcagacagagtcgctgccacaaaaagtccgattattttcattggtacaggggaacatatagatgactttgaacctttcaaaacac

SEQ ID NO: 119923 - DNA, 74 bp, Homo sapiens
gattacattaaaagaacgagaccaaattctgccgtcagttgctgcctctacagctcagagccctggaatgaact

SEQ ID NO: 119924 - DNA, 75 bp, Homo sapiens
gtggacagatctgagagatactgagctttgtgacaacaaactgtgctctgcagttttcatcccgtggaatccgac

SEQ ID NO: 119925 - DNA, 50 bp, Homo sapiens
ctgcaagtgagaacatatttaacagagcagttgaacaacagatggattgt

SEQ ID NO: 119926 - DNA, 75 bp, Homo sapiens
agaagggattgcccagtcagcaaaggttcagccctccaaggttatcttgacgaatcagattacaacccatctgag

SEQ ID NO: 119927 - DNA, 109 bp, Homo sapiens
atctggcatccaaatatccagattttaagcagcatgttcagataaatctgaatggaagagtgaggtgggtcatgataactgggtacgtggagttctgttccattctggg

SEQ ID NO: 119928 - DNA, 90 bp, Homo sapiens
aaagataggcggccatggtccaaccttgaagagtatccagtacaagattggatctacagaaaaaatctgaagcccttgaaagtatcaagc

SEQ ID NO: 119929 - DNA, 80 bp, Homo sapiens
ctgataatagctgggtgcttgctggctccgaggttttaaaatcaaagatgggaaaatcggagaaaattgcccttccccat

SEQ ID NO: 119930 - DNA, 50 bp, Homo sapiens
ggaggttcttcagtgtatgcctgggtgacagaacctttctggaaggttcc

SEQ ID NO: 119931 - DNA, 100 bp, Homo sapiens
ggtagaaaaatgaagagggtcctggtactactgcttgctgtggcatttggacatgctttagagagagaaagggctattgcaagacacgaagtccgagaaa

SEQ ID NO: 119932 - DNA, 75 bp, Homo sapiens
attgagcaggctgatctactgcaggaggttgctatcaagatcatagataagacccagctggatgaagaaaacttg

SEQ ID NO: 119933 - DNA, 100 bp, Homo sapiens
ggaaaacctgcttctccaggttcagacttatatgcttatggctgcctcttattatggttgagccccatatgggggttggcaggcagcagagaggcccctt

SEQ ID NO: 119934 - DNA, 100 bp, Homo sapiens
cgggccgctcctggaggaggaggtgggaggtttcccaggcagctgcagacttgaaacagttctgtctgcagaatgctcaacatgaccctctgctgactgg

SEQ ID NO: 119935 - DNA, 80 bp, Homo sapiens
gacgcgctgcctgggctccgcgcagccgcacccacatgcaggatctccaggaggtgacccaggaccttcattatgaaaac

SEQ ID NO: 119936 - DNA, 73 bp, Homo sapiens
gatctcagagcggtatccctgtctcagcgaagtggtgaaagagcatcaggaccagtcctgcctctgttgtaga

SEQ ID NO: 119937 - DNA, 104 bp, Homo sapiens
atttgtatagagatgtgatgttggagaactacagaaacctggtctccctaggtatataatgtttacatggcagggaggcagctgtgttctaagcggtaccggga

SEQ ID NO: 119938 - DNA, 82 bp, Homo sapiens
ctgtctacagagaaaaagaagatatgtatgacgagattattgagttaaagaaggaagctcttcgtgggcggtcttgactgga

SEQ ID NO: 119939 - DNA, 75 bp, Homo sapiens
ccgggaccccagcttttcagaactgcagggaaacagccatcatgagtgagtctgccaaaaaagaggtggttgctg

SEQ ID NO: 119940 - DNA, 82 bp, Homo sapiens
gaagctactactacgtggtgcttggaaagcaattaatggatgcctcgaagttgacgtacatatatattcagaaatgttttgc

SEQ ID NO: 119941 - DNA, 90 bp, Homo sapiens
atggcctcccccggcgggagcatagacgagagttaatttagtgaaagatgtgaaagtgaaagcttgtgaaagatgctgggattggcagcc

SEQ ID NO: 119942 - DNA, 100 bp, Homo sapiens
gacacgtacacagcaggactgagtgaagaagaacagctcgagagagcattacaagccagcctctgggaccgagctctgctctacaagcccattgaccggg

SEQ ID NO: 119943 - DNA, 100 bp, Homo sapiens
ggtgagtgccgggagctctgaggcaactccgaagtcaagcccgcactctgattacctttgctggaatgataccataccgaacgtctggggacaccaatgc

SEQ ID NO: 119944 - DNA, 100 bp, Homo sapiens
gtgtttcccacttcacgccgccaccgcttctggcaatctcagctgtcctgcttgggcaaggtcatccctgagctgaacgggaagctcactggcatggcct

SEQ ID NO: 119945 - DNA, 100 bp, Homo sapiens
cgacgaggaagaggaggtttctgagttgccgaacaagcaaccggaaaagcttaataggcaatgggcagtcaccagcattgcctcgaccacactcacctct

SEQ ID NO: 119946 - DNA, 101 bp, Homo sapiens
gcttggcctggtgggcccagtcctcggtgcggcgcggccagtttgggagagcccatggtgactgcgtgagtggagcccagctgtgtggatgccccagcatg

SEQ ID NO: 119947 - DNA, 48 bp, Homo sapiens
catggccttctacgttgtgaaaatggatgaaggtttaaggctcagaaa

SEQ ID NO: 119948 - DNA, 90 bp, Homo sapiens
ggcgggcccggcggccgcagcgaggagaagatctcggactcggagtctgatagtggagattctatagaagtttcaagaaacgttgaagag

SEQ ID NO: 119949 - DNA, 82 bp, Homo sapiens
cgggatgtggagcgggagggcctggactgggacctcattgtccgagttggagagtgctctgcagatggagccagctgccttc

SEQ ID NO: 119950 - DNA, 100 bp, Homo sapiens
cggcgagcaggagaggaggtcttccgggccgcggcctccgagcgcgcgggatttgcagggagaacgaggaaatcctggggaaagaggagaacctgggata

SEQ ID NO: 119951 - DNA, 83 bp, Homo sapiens
ctgctttccactcggctcctgtcgtccgttctctcaggctcccgttcagagcggttctggtgaggttggaaggatgcagccac

SEQ ID NO: 119952 - DNA, 100 bp, Homo sapiens
gtctggcactgactgtgttgctaaagaggccacagaggcagccaagtgtaacctgctggcagaaaaggtcatactttaaggagcccaagagctttataac

SEQ ID NO: 119953 - DNA, 101 bp, Homo sapiens
gaggactgtccctgagcagatttagctggcctgacgactccctggagcctttctttgactctctggtaaagcagacccacgttcccaacctcttctccctg

SEQ ID NO: 119954 - DNA, 88 bp, Homo sapiens
ccggcgtgccccaccatgtcagacgcagccgtagacaccagctccgaaatcaccaccaagatggactcaccctgtcacccaggttgga

SEQ ID NO: 119955 - DNA, 100 bp, Homo sapiens
ggtcttccaggtcttcctggtccaaagggtgagcccatcactttctgtgaggagagttttgtaaagcaccgctcaagcgtgatgaaacagttcctggaaa

SEQ ID NO: 119956 - DNA, 101 bp, Homo sapiens
gcgcgaccgccgaatcgctcctgcagcagagcaaattcaacacccaacagcttccttaatagcaaaggtagcaacagcccaggatgatataactggtgatg

SEQ ID NO: 119957 - DNA, 75 bp, Homo sapiens
ttcaaaggctgtcgcaaggaggaagtacagctttatggcggtcatccactttgcggggctcaaggccgtgggcga

SEQ ID NO: 119958 - DNA, 109 bp, Homo sapiens
tgagggcccgcgccgcatggaggccggctgaggagcgccgctgcctcgcctcggtcagctggccgccggcacctgtgagattgtgaccttggaccgggacagcagccag

SEQ ID NO: 119959 - DNA, 98 bp, Homo sapiens
tcgccttcgcctcctaatccctagccactatgttacagaatgtctgaaggggacagtgtgggagaatccgtccatgggaaaccttcggtggtgtacag

SEQ ID NO: 119960 - DNA, 100 bp, Homo sapiens
gaaggtggaatcacactgagtggaggtcaacgagcaagaatttctttagcaaggccggatcacctcaacagtcacgtcagacaagtgcactcaacagaac

SEQ ID NO: 119961 - DNA, 75 bp, Homo sapiens
atctgcagccctgggattggcgattgctggggcggtggcatttggcttagcagtgtctgcaaaaacgaatctttt

SEQ ID NO: 119962 - DNA, 100 bp, Homo sapiens
ctgtttggagatgtctggctctgtagtgggcagagtaacatgcagatgactgtgttacaggatcttaagattgaaagtgatgttcaagaaccaactgaac

SEQ ID NO: 119963 - DNA, 97 bp, Homo sapiens
gggaaatcgggctgaagcgactgagtccgcgatggagagtgtgaacatggctacgcctcttcattcccgtccatgccgagcccccgactgcagcatt

SEQ ID NO: 119964 - DNA, 90 bp, Homo sapiens
ggggccgcttgatgcgacgcctgattgttggaccttcagatggaagtagttacattatagattactatggaaccagacttacaagactga

SEQ ID NO: 119965 - DNA, 96 bp, Homo sapiens
caagagtccacaaagggacctgatgaagcgaagatcaaggatatgctgcaggctgctagtcattatcgccaaaatagaaactctttgtatagaaga

SEQ ID NO: 119966 - DNA, 90 bp, Homo sapiens
cgataatgcagttcttattactaggcacgtgtggttctcaaatataggcattctgatgggaacttgtgtgttaaagtaacagatgattta

SEQ ID NO: 119967 - DNA, 75 bp, Homo sapiens
cccgcccctcaaggacaacctcggcctgagacaccggaggaccgggtattagaaaactactcggatgctccaatg

SEQ ID NO: 119968 - DNA, 98 bp, Homo sapiens
gtgagactatcacctatcgccaagtggaaacttttgagaagaactttgaaagagaaacccataaaataagtgagcaaaatgatgctgataatgctagt

SEQ ID NO: 119969 - DNA, 83 bp, Homo sapiens
cggaaccgccacagcactcaaacgagccaaactcaggctgtaccttgagcagctcaagcaactggtgcccctgggccccgaca

SEQ ID NO: 119970 - DNA, 100 bp, Homo sapiens
cgggggctttcgcccgggtcctcctagaaattccccccgaagaagactcccccacatctggttacagaatgtctgaaggggacagtgtgggagaatccgt

SEQ ID NO: 119971 - DNA, 75 bp, Homo sapiens
ctggtactactgcttgctgtggcatttggacatgctttagagagaggcaagaaaactgatcagtgattttgccat

SEQ ID NO: 119972 - DNA, 74 bp, Homo sapiens
agtgccaagacttgattaaagtaattgaggattttccagcaaaggtggaggacttgaagtctcagctggtggcc

SEQ ID NO: 119973 - DNA, 100 bp, Homo sapiens
cgagaagcagccgcgctgcgccttccacactgtgcgctttattcaagcggagaaatgttgctacagcagaagaagaaacagaagaagaagttatgtcaga

SEQ ID NO: 119974 - DNA, 76 bp, Homo sapiens
agaaagcaggcgaacccgcggcgcaataacgatggcatccacagcgtcacggccttctgcaccctgcgtgtcacca

SEQ ID NO: 119975 - DNA, 74 bp, Homo sapiens
ctcgagcgctcaggatggaggaagactcgatccgcctgcctgcgcacctgcattccagactccatcatttctcg

SEQ ID NO: 119976 - DNA, 87 bp, Homo sapiens
gggaggtggtggagtgacctggccccagtgctgcgtccttatcagccgagccggttatcaatactctggctgaccatcatcatcgtg

SEQ ID NO: 119977 - DNA, 90 bp, Homo sapiens
ccgagaccgtgaccgagagcgtgaccgagagcgcgaatatcgtcatcgttagaaggttgtgttgctttctgccacaatgccaactgatgt

SEQ ID NO: 119978 - DNA, 73 bp, Homo sapiens
aaagactcagaaaacggcaataactgtggaggtttcattgtttgcggaacttttcaacgaaatgcttcaaaga

SEQ ID NO: 119979 - DNA, 75 bp, Homo sapiens
aaaaagaccactgaggagcaggtgcagagcaacagcgagctcgccatcctgtccaatgagcatggctcctacagg

SEQ ID NO: 119980 - DNA, 60 bp, Homo sapiens
atttatggctaaaaagggtagcttcagatacacacctgtggggcgttcatttttctccgc

SEQ ID NO: 119981 - DNA, 101 bp, Homo sapiens
agcccccagaaaggattgtgacatatcgttggacccagaattgagggagcaaagcttgtattggcttgcaattcagcagctgcctacagaccctatagaag

SEQ ID NO: 119982 - DNA, 100 bp, Homo sapiens
atcatgagcgatgttaccattgtgaaagaaggttgggttcagaagaggggttggccttcattccacgatgtgatcaattctgaggcaatcacattcacag

SEQ ID NO: 119983 - DNA, 100 bp, Homo sapiens
tccccgaccttgcctgaacaaggtctcctctgagcctccggcctccataagacccaaaacagatgacacctcttcccagtcccccgcgccttccgaaaag

SEQ ID NO: 119984 - DNA, 75 bp, Homo sapiens
cctgcttggccagcgacagatcctttgctgctctgtctgccggttcttgagcaggactctggactgtcttcacac

SEQ ID NO: 119985 - DNA, 75 bp, Homo sapiens
ttacatcttcctgaatcgagcagagaaactgaattgaatgatctggcacgggaccctccagcacagtgttcagca

SEQ ID NO: 119986 - DNA, 100 bp, Homo sapiens
ccagtccccagtgagggtgtacaaatacccctttgaattaattatggctacaccattcgcttttcacccaagatgatttgatgtcttataaaactctgat

SEQ ID NO: 119987 - DNA, 90 bp, Homo sapiens
agaaaatgcaaaaaaactaatggaattagcctgcaacatgaaggttgatgctatgaaactgggagtaaaggaaatgaagaaggcatacaa

SEQ ID NO: 119988 - DNA, 100 bp, Homo sapiens
ggaaaaacaacattgctacacatgctaaaagatgacagacttggacaacatgtcccaacattacatcccaagcccatggatttcagaaaattatctacat

SEQ ID NO: 119989 - DNA, 100 bp, Homo sapiens
catgtgattcagcctaatatctcataatggaggggaaagttccagtcgcagcgctgagaagcgatcagctgaagaagaagctgccgacctcccaacaaag

SEQ ID NO: 119990 - DNA, 100 bp, Homo sapiens
gaatctctggaacagtaccttttgaaaatggtaaacgcaaagcactgaagttgaattttgcaaatccacctttcaaatctacagcaaggtttactctgaa

SEQ ID NO: 119991 - DNA, 100 bp, Homo sapiens
gcctggtcaccagcttttcggaacagcagagacacagagggcagtcatgaggctcttgcagccaatgccggaacaggatttgctgttgctgagcctcaaa

SEQ ID NO: 119992 - DNA, 75 bp, Homo sapiens
caagataaagtgattttttgcctttgttgattaactggacaaattcaggatgctcgtcagaagttccgctctgtt

SEQ ID NO: 119993 - DNA, 96 bp, Homo sapiens
tctgagccgtctgtcctgcgccaaggtgccctacgagacgctgaacaaacgctttcgcgccgctcagaagaacattgaccgggagaccagccacgt

SEQ ID NO: 119994 - DNA, 75 bp, Homo sapiens
cgcagtggtcgcttcttctccttgataattgggaactgtgtctgtctcctggtcctaagctcagcacttcctgtc

SEQ ID NO: 119995 - DNA, 99 bp, Homo sapiens
cctccttgccaggccttcaaccactatctcagtgcaatgggactgatcctttgaaatactccagccatgactaaaagagaagcagaggagctgatagaa

SEQ ID NO: 119996 - DNA, 95 bp, Homo sapiens
gggttctccgggagagggggagtgcgcggcggccgcagctgccacaaaccaggggacggcaaaacagaacagaaaggcggagataaaaagagggg

SEQ ID NO: 119997 - DNA, 100 bp, Homo sapiens
ccgatgggaagtccttattattggccctccagatacactttagttggatggcaagcatgtggtgtttggcaaagtgaaagaaggcatgaatattgtggag

SEQ ID NO: 119998 - DNA, 75 bp, Homo sapiens
gcctggagaagaaagatgttttgcctactgttgatccggccaacccatggccagcacagacatgatggaataaag

SEQ ID NO: 119999 - DNA, 100 bp, Homo sapiens
cacttaatgactgtctcacattggccggcaacttgttccaggtaccatgaccagcaggacgtaactagtaactttctgggtgccatgtggctcatctcca

SEQ ID NO: 120000 - DNA, 74 bp, Homo sapiens
accgttcccccagccgggctgaacctgacgacccggcgacggcgacgtctcttttgactaaaagacagtgtcca

SEQ ID NO: 120001 - DNA, 83 bp, Homo sapiens
gagtgtggacgtgaacgggggtcctgagcctgccccagccagtaccagcgccgtgaataccctctaccatctgctttggtcag

SEQ ID NO: 120002 - DNA, 75 bp, Homo sapiens
tcagaaagccagtgttgatggctggtttgcagtaagcattggctactggcatgacccttacatacagcactttgt

SEQ ID NO: 120003 - DNA, 74 bp, Homo sapiens
ttcttcagaaagtgaacttggcattttagatctaattcaaatgcaaataatacggcactccgaacagacactaa

SEQ ID NO: 120004 - DNA, 83 bp, Homo sapiens
ctcttgggttttttgtggcttccttcgttattggagccaggcctacaccccagatgagcacctctgaggagttggatgaaatg

SEQ ID NO: 120005 - DNA, 98 bp, Homo sapiens
cagcatccccatgaggcccagcagccagcctggccaaagacagacgcttcagtctcaggtcatgaatatagggcaattaggacaattgttcaaagtag

SEQ ID NO: 120006 - DNA, 112 bp, Homo sapiens
ggaggttttggctctgcgtgagtgtggtctacgagctgtttctcatctttatactcttccagacctcctgccccccgaggtctgcagtctcctgaacccagcagccatctac

SEQ ID NO: 120007 - DNA, 75 bp, Homo sapiens
tgcaacccctctccttgatgccagctcactggagtatctgtttgctcagggtttttaatgaccacaacaagcaag

SEQ ID NO: 120008 - DNA, 82 bp, Homo sapiens
atttgacccaaaagtcaaagaaggcaacacgctgagagtgcctccggagccagcgtggtggccatagacaacaagatcgaac

SEQ ID NO: 120009 - DNA, 100 bp, Homo sapiens
gtggtgtgtggctgcggcctgggcaagagccgccgcggaccatgaggccaaacgtaccaagaaagtcgggatcgtcggtaaatacgggacccgctatggg

SEQ ID NO: 120010 - DNA, 82 bp, Homo sapiens
gactgtctagttgcaggaaaacaagctcagggcttccactgattctacattatggctccctacacaccttttctcactgaat

SEQ ID NO: 120011 - DNA, 75 bp, Homo sapiens
cttgatgggcaggacggcccgattccaactctgaaaggaattgtggtgcttggaataaacagagcttatggcaaa

SEQ ID NO: 120012 - DNA, 82 bp, Homo sapiens
ggcgcagaaaccccgttgacaaggcactgctttttcatgacggtgttggagagcacaatggctgaacaagtccttcctcagg

SEQ ID NO: 120013 - DNA, 51 bp, Homo sapiens
caaattgtcgccattaagaaaattgaaaatggaagccctgactgacaggga

SEQ ID NO: 120014 - DNA, 100 bp, Homo sapiens
gggattaatgctaaatttgtgaatgctgtgtatgataccttacttaatactgttgtaggtcataaagaaggtctggatgttatggagagagctgatcctt

SEQ ID NO: 120015 - DNA, 75 bp, Homo sapiens
aaccagctgaggtgtccgtaaagattccagagaagcctgtgaacaaaatacctctaacctatttggaaacagtgg

SEQ ID NO: 120016 - DNA, 87 bp, Homo sapiens
ctcgttccagttccagagaacgttcgagatctcgtgggtcgaaatcaagtagaacttcatggaggaacacggagtgacccaaaccga

SEQ ID NO: 120017 - DNA, 96 bp, Homo sapiens
gtttgcgtcctgcactgaaaggaaatgacggattttggccggtcactccgcgcaagtttgggttcctgttttagaactgccacctaagcccctctt

SEQ ID NO: 120018 - DNA, 100 bp, Homo sapiens
gtcctacgaaagcctggtccacgccgtggccggagccgtgggagggacattgcttgggcctccagactctgtggttgatgtggggagtacagaagtcaca

SEQ ID NO: 120019 - DNA, 101 bp, Homo sapiens
acggtctctgccagtataaatgcagtgacggtgagactgctgctcctcgggccattttgaccggccatgactatgaggtcacatgtgctgcggtgtgtgcg

SEQ ID NO: 120020 - DNA, 75 bp, Homo sapiens
ggcagcacgccgtcattgacatcaatgccttcccaggtaccactgatgaaattatgaccaggtgggcccgagtta

SEQ ID NO: 120021 - DNA, 100 bp, Homo sapiens
ggactgggatttggaggatttaatacacagcagcagcagcaaactacatgtgcagtctttgccaacaaaaaaaattaccaagaaacctattccagatgag

SEQ ID NO: 120022 - DNA, 100 bp, Homo sapiens
tgctgtcagtatcatattcatgaagttcctgtaggaactgaaaagaccagagaaagaattgaacggaaccccaagtttcacatgcctgaggatgtacgag

SEQ ID NO: 120023 - DNA, 82 bp, Homo sapiens
agagtcaccacaaggccaagggacttaaccaccaccatgtcgagcaaaagaacaaagaccaagaccaagaagcgccctcagc

SEQ ID NO: 120024 - DNA, 142 bp, Homo sapiens
cctgtcgctggagcacaaaagagtctccgcggtggaggtctgcgttgctcttgcttttcctcgctggggtgtacgagcgtttcccaaagtgtattctgcggaactagcacctactgtgttctcaacaccgtgccacctatag

SEQ ID NO: 120025 - DNA, 100 bp, Homo sapiens
atccatcactcggattggcaggacctggggccaaaagccaaggctgcaagatgaacaacgttaatgtggtatatacgccgtggtctaacctgaagaaaac

SEQ ID NO: 120026 - DNA, 82 bp, Homo sapiens
gccgcctctgtattacttaccagggttaaagcacgaattgggagctctcagcgacatcaccagtcagcagccaaagacctaa

SEQ ID NO: 120027 - DNA, 75 bp, Homo sapiens
cccctgtgctgttattgcacctgttcagcttgatgaatgtctgctcttatcgtgagaaagttgaggagtgcagag

SEQ ID NO: 120028 - DNA, 75 bp, Homo sapiens
atggaagcagctggcttcactgctcagtcaaataaagtgcccgtggtgcagccatcccatgcggtccatcctctc

SEQ ID NO: 120029 - DNA, 100 bp, Homo sapiens
gttccagcatattttgcgagtactcaacaccaacatcgatgggcggcggaaaatagcctttgccatcactgccattaagaaccagtctgggatcttgtac

SEQ ID NO: 120030 - DNA, 100 bp, Homo sapiens
cagatgaacgaagttatggcagagttagctaaagaactccctcaagtttcatttgtgaaggatatggctttagttgcccctgaagctccttcagaacaag

SEQ ID NO: 120031 - DNA, 87 bp, Homo sapiens
tacatattccagtaatggtggatgaagttgttcattgtttgtcaccacaaaaaggacaggacagagcgggatgccaccagcttgtcc

SEQ ID NO: 120032 - DNA, 75 bp, Homo sapiens
tcgtcgagaactcattactccaaagggtggtggtggtggaggtccaggagaagaatggggaatgcatcagcaacc

SEQ ID NO: 120033 - DNA, 98 bp, Homo sapiens
gacgtttgctttttcatcagccagtcagtattcaagtcaaacaacgttgaaatggattgggtgttgaagcatactggtccaaatagtcctgacacggc

SEQ ID NO: 120034 - DNA, 90 bp, Homo sapiens
tttaggatcttgttgaatccagtccagaacgccaatctgaattgccaacgcaaagcaaagcgagcttccccagtattctcagtgacccag

SEQ ID NO: 120035 - DNA, 100 bp, Homo sapiens
ctactcatccctttcactgaagaagtggggaaaacaaggctcagacagggacgtagacaagtttggcaacgagatcacccagctggcccggcccctgcct

SEQ ID NO: 120036 - DNA, 95 bp, Homo sapiens
cctgaacctggaagttgtgctttttaagactaatagggatgccaaaggaaaaatatgatcctccagatcctcgcagaatttataccatcatgtca

SEQ ID NO: 120037 - DNA, 87 bp, Homo sapiens
gacactaaagactttgtagccatcaacccgagtgcagtttcgatggaaaatgaaggaaacaatgtgatgagaaccattcatggggtg

SEQ ID NO: 120038 - DNA, 100 bp, Homo sapiens
agatcacagagaatatactgacggcataaaagggcagaaccatagcagggtgcgggagctgagcacataacgacttacacgttcaatactcacaaagccc

SEQ ID NO: 120039 - DNA, 83 bp, Homo sapiens
tctgagaactttgagagaccgaaaaagaaggacgtatgctctacaagacaatgcagatcttcgtgaagactctgactggtaag

SEQ ID NO: 120040 - DNA, 100 bp, Homo sapiens
atcgcttgtggcatcctgctagctgccctgcaggagccagatgaccaagatgctccagatgaacatgagtcgcctccacctgaagatgccccattgtacc

SEQ ID NO: 120041 - DNA, 50 bp, Homo sapiens
ccagaattcaattaaagtggctcaggcacgtctgagaatggtggatgtgg

SEQ ID NO: 120042 - DNA, 100 bp, Homo sapiens
ttgacttggatacgaacatgttatatgtatcgaaaagtatcctccttgcacacctcccgagttcagaggcagatggtggtctccgttcacgacttacccg

SEQ ID NO: 120043 - DNA, 74 bp, Homo sapiens
ggggtcctcagcgtggtctgcctgctgcactgctttggtattacaagtggataaataatgtgcactgctctgag

SEQ ID NO: 120044 - DNA, 90 bp, Homo sapiens
ccgttgtgtttgtgaaacagagaaagataggcggccatggtccaaccttgaagttctgccaaggaaagagaaaataccttttaatcccag

SEQ ID NO: 120045 - DNA, 90 bp, Homo sapiens
atttggagtgcctctgtcagataatgaggacagtgggacctagattagaccatgaacgagccaaggccaacagagcacttatggcaaggc

SEQ ID NO: 120046 - DNA, 100 bp, Homo sapiens
ggttgcctccgctccccatacggcggccccaggtgctggagaatctggtaaaagcaccattgtgaagcagatgaggatcctgcatgttaatgggtttaat

SEQ ID NO: 120047 - DNA, 100 bp, Homo sapiens
ggcgttcttccgctggctcagccgcaagtacccgtccatcatagtcaactgcgtggaagagaagatcccatgcgaggcccaagaaaactagaagtagtgg

SEQ ID NO: 120048 - DNA, 100 bp, Homo sapiens
aaatgtggatttggggtctgccttgactgttaccggctcaggaaaagccggccacgcagtggacaatggaaacttggtggacagtgaaatgaaatatttg

SEQ ID NO: 120049 - DNA, 90 bp, Homo sapiens
caccggttggcgagctttgcacagaccctacaggaaaccctgaaaggtgtcatggagaaactccagctgggcccagagattctgcagcgg

SEQ ID NO: 120050 - DNA, 83 bp, Homo sapiens
agcatactttggaccctgttttcagaaagcagtccaagtggtaagaagttcagaagcaagcctcagttggcaaggtacctggg

SEQ ID NO: 120051 - DNA, 99 bp, Homo sapiens
tgggaactggaggttttctcgagagaagaccaagaggtcggagaagaggtagaaaatgtggcagaggccataaaggagaaaggcaaagaggaacccggc

SEQ ID NO: 120052 - DNA, 89 bp, Homo sapiens
ccatttagcgtcagaaataagccgttttttgacatctgtacttcaagaaagtctgcgggccaggcatcgacatccgcaacgactatcag

SEQ ID NO: 120053 - DNA, 75 bp, Homo sapiens
tttggggcagaatacagagatatggaatcagcatggacaaggacagcccggaggtccaccaggacctgaacgccc

SEQ ID NO: 120054 - DNA, 100 bp, Homo sapiens
cgtcaaaaagcgtctaggatccggaacgctgctgtctggagggggcggcgcggcaggagcgcgttgagggactcttgccttgcgccatggactggcagcc

SEQ ID NO: 120055 - DNA, 110 bp, Homo sapiens
gaagagactttccgttacatgatatctggagtccatctttcaccatcttctcctgagattgtactggaccgtgaccactcttcttccattggctgcctctcttctgatgc

SEQ ID NO: 120056 - DNA, 90 bp, Homo sapiens
gtaatgagcgtcaaaattatccgaaaccgcctcactgggtggttatcactaggctaaaactggacaaagaccgcaaaaagatcctcgaac

SEQ ID NO: 120057 - DNA, 98 bp, Homo sapiens
gttccgttgcgcgccccggatgtggcgcggctgcgcgaggagcaggaaaagagttatcagttcagtggatggaatatcattacaaggatttccaagtg

SEQ ID NO: 120058 - DNA, 96 bp, Homo sapiens
aagtgatgagtgcctccaagttcaccttcaagaccccaccaacaactgaacgctttggtcaggctgctacaatggaaggaattggggcaattggtg

SEQ ID NO: 120059 - DNA, 80 bp, Homo sapiens
gctgcgggaccccgggcactgttgctgctgcgggagatgagacaaaaggacccagtgaaaggaatgacagcagatgacta

SEQ ID NO: 120060 - DNA, 75 bp, Homo sapiens
cggcgagaaggtggtgccccggagactccgggcactggggagcccagagttacggcagtcccagtcctactgcac

SEQ ID NO: 120061 - DNA, 98 bp, Homo sapiens
atgaagcaagtttacctaacacgtctttgcaaggacatatttgacagtgattggtacacttctcgaaatctaattgggggcgctgacatcattgtgat

SEQ ID NO: 120062 - DNA, 75 bp, Homo sapiens
ctgaactgactgccccgcatcaccggagcgtcccagctgcgaggagtaagagttccctatttcattgatttgaaa

SEQ ID NO: 120063 - DNA, 75 bp, Homo sapiens
ggctcttcccgcccgccttccgccgtctcttcgagttcttcgtgctgctcaaggggaacgcccttttgcttgtga

SEQ ID NO: 120064 - DNA, 51 bp, Homo sapiens
tggaggtggatctgaagaacggaaacgggcctgaatttgaagctaggatcc

SEQ ID NO: 120065 - DNA, 100 bp, Homo sapiens
ctccatttcacactgaattcaccattaaggaaatttccctggacctcaagaaaactagaggtggcgacagacaaagttgcagaaaagctgagctctactc

SEQ ID NO: 120066 - DNA, 96 bp, Homo sapiens
gaagatggtggcggctactcctcctggagcaggccgggctctcgccatgggtcactgtcgcctctgccacgggaagttttcctcgagaagcctgcg

SEQ ID NO: 120067 - DNA, 100 bp, Homo sapiens
agggccaggagaggagcactttgaggacatggcctccgacgaggacatgttggtgttcgaggaagagacattgttgttcttggtgtggagaagaagtcag

SEQ ID NO: 120068 - DNA, 75 bp, Homo sapiens
tgcaaggctggcgcgtctccatggaggtgtggatgaggtcaccattgtcaacattttgaccaaccgcagcaatgc

SEQ ID NO: 120069 - DNA, 100 bp, Homo sapiens
accatgtcggctttcgacaccaaccccttcgcggacccagtggatgtaaaccccttccaggaaaaacagcactggaggcaatgtttctataaatcaaaga

SEQ ID NO: 120070 - DNA, 90 bp, Homo sapiens
cttcaacacctggacaccttgttagatggaacctacaagcagatgccagaattccagaaaagttcagttcgaatcaagaaccctacaaga

SEQ ID NO: 120071 - DNA, 75 bp, Homo sapiens
tcccttcaaagatgtgagagagaaaagtgagtttattctgaagagcatccaggccaaatttgagtttcatcatgg

SEQ ID NO: 120072 - DNA, 90 bp, Homo sapiens
ttgagagcatttgagaaaccccctcaggtacagacccaggctcttcgagactttgagaagtgtgaactgaatgttactgaggatgctttg

SEQ ID NO: 120073 - DNA, 100 bp, Homo sapiens
gatgaaggtggaggcagcgcggctctcaggggcctcatccacatgctcacccacttggccgaggctctgcaccaggcccggctgctggccctcctggtca

SEQ ID NO: 120074 - DNA, 78 bp, Homo sapiens
gtgggaggagtacccgaccctgaagatgctcatggagatggtgatgaccaatctcgcccaagaacttcaaggtgaaaa

SEQ ID NO: 120075 - DNA, 82 bp, Homo sapiens
attgccagatatcccaggaaagtgcttcctgtgcttcccagaattccatcatctgactgccatcctagaaggcattctcatg

SEQ ID NO: 120076 - DNA, 75 bp, Homo sapiens
tgcttatggctataaaattacagatctcccttgagtttagaaatctggctgagaaataccaaacagtgattgccg

SEQ ID NO: 120077 - DNA, 100 bp, Homo sapiens
cagcttcgtagtgaagagaggcgtctacaagagcgattgctacacatggacagtgatgatgaaattcctatcagatgctgtacccctcaaggatttaaac

SEQ ID NO: 120078 - DNA, 115 bp, Homo sapiens
aaaaatcccatctaccgcaactctcagttcgagagtaaagttttcggctttgtgagaaaccttaccatcaaacacgatggccagcaacgttaccaacaagacagatcctcgctcc

SEQ ID NO: 120079 - DNA, 98 bp, Homo sapiens
cgctccctgtgcaagctgtccatgaaaccccttggtgaaggccctccagacccaaagttccatcaatggtgagcaccagcctgaatgcagaagcgctc

SEQ ID NO: 120080 - DNA, 75 bp, Homo sapiens
accgtcagcactcagcgcgggccgctggacccacaaaccgtggagaccaagaactggcacacggacgtgattgag

SEQ ID NO: 120081 - DNA, 50 bp, Homo sapiens
tgactgctcaggaagtaaaatcgtgatgtgaactccatgtatctgtcttc

SEQ ID NO: 120082 - DNA, 100 bp, Homo sapiens
ggcagcggcggcgcggaggcggctgaggtgcgagccgaaagaagacatagctcatccagcaagccgcctttggccgttcctcccacttcagtattttcct

SEQ ID NO: 120083 - DNA, 90 bp, Homo sapiens
ataataaaagttaaaacaattgctgcacgaaacactgaaattttggcaggtggttgaacagggtatgtttgtaaagcactgcaaagtaga

SEQ ID NO: 120084 - DNA, 88 bp, Homo sapiens
cttcccaagaaccttctggccaaggtgattcagattgcaacgtcatcctccacagctaaggaagaggtgaaaaacttcatcacccgag

SEQ ID NO: 120085 - DNA, 50 bp, Homo sapiens
gcaaacttgacactcaccctgaccggtgtctttccgatagccgttcctgg

SEQ ID NO: 120086 - DNA, 73 bp, Homo sapiens
tgatggcatgcctgtaaagaacttgcagttgaaggagtataacacagaatgcatctactcatgcctcgaaatc

SEQ ID NO: 120087 - DNA, 75 bp, Homo sapiens
tgcagaaagacttaaacctcatggccccaggtctcactatacagcttggcttgtggagatgttgaaggaaagttt

SEQ ID NO: 120088 - DNA, 80 bp, Homo sapiens
agtcaattgtgtactagcattccaagcttcttggacacttaatgattgttggcaagaaatgtgctgctgatctgggcctg

SEQ ID NO: 120089 - DNA, 83 bp, Homo sapiens
cgggcgacctgggcaccagcaggacccgaggccaggagccaggggcccagaaggctgatcagctgaccgaagaacagattgct

SEQ ID NO: 120090 - DNA, 82 bp, Homo sapiens
ctccgcctcgccgcagtcggggcagccgctcgcccctcttttccatgtatccgtccaggtctcggcgcggaagatggccggc

SEQ ID NO: 120091 - DNA, 90 bp, Homo sapiens
gccgattcctcctccttggtcgccgcgtccttggctggcgtgccagctgcgggccgtccagcggctgtgccacttctacagcgccgtcat

SEQ ID NO: 120092 - DNA, 100 bp, Homo sapiens
gaacagacacgggtgaatgctgctaaaaacaagactggggctgctcccatcattgatgtggtgcgatcgcaaccttggccatggaccagccggctggcct

SEQ ID NO: 120093 - DNA, 100 bp, Homo sapiens
tcgttagagtcttcctgcccaacaaacagaggacagtggtgtttggcaatcaactcattcctcccaatgcacaagtgaagaaggccactgtttttctcaa

SEQ ID NO: 120094 - DNA, 98 bp, Homo sapiens
tgcccgatggccctgggtcctcgctgtggggcaatccgggcttgcagacgagagcgcctggacaccggaaaaggcgattccctgagcgcctggagttg

SEQ ID NO: 120095 - DNA, 75 bp, Homo sapiens
aaggatcccagttttctctggatgacgtggtcgcgtggggcaggcagtggcgctgcgggccaaggccttcggctt

SEQ ID NO: 120096 - DNA, 100 bp, Homo sapiens
gcttctgagacggcggcagcagcggcattcagagtgatggaccagcacaaacttaccagggaccagtgggaggaccggatccaggtgtggcatgcggaac

SEQ ID NO: 120097 - DNA, 101 bp, Homo sapiens
gacagtgtaccgggtggcccgccacttcaccaaggccaagttgaccatccctatcctctatgtcaaggtgggtgccattccagccaatgcactggacgatg

SEQ ID NO: 120098 - DNA, 90 bp, Homo sapiens
gatggttgcacaacaatatcaatttattttataccactgaaccgtgcacttcaaaatggttaagatgacctttgaaactcacaactctac

SEQ ID NO: 120099 - DNA, 51 bp, Homo sapiens
gtccagcaaacctgcagaagtagtttccatcttgctgctgcaaaaggacac

SEQ ID NO: 120100 - DNA, 130 bp, Homo sapiens
cacaggcttccagtacgagctggttaggaggcacagggcgtcggacctgcacgagctgtctgtaagactttgaccccgacgcaggcttcagtgattgccgcggatcagaagcctgagcactttggctcga

SEQ ID NO: 120101 - DNA, 100 bp, Homo sapiens
gggtgcggctccaccccttccacgtcatccgcatcaacaagatgttgtcctgtgctggggctgacagtgctgtgctgtggctttcattgagaagctagac

SEQ ID NO: 120102 - DNA, 92 bp, Homo sapiens
tggccctggccctgatcatcctgctgggcttcgtccagatcgggaaggatgctgtgggccctgagggaaaggatcacagaggcgctgagccg

SEQ ID NO: 120103 - DNA, 75 bp, Homo sapiens
gagcgcccctcgccaccccgtgtcccaggcccggcctttctgacaagaggttggtggttctgtcagatgaaagca

SEQ ID NO: 120104 - DNA, 138 bp, Homo sapiens
gcagcctccgtcgctgtcgctgagagcctcacgagtcgaggtcctgcaggtggagctccggcagccgccctggtataagtgtgctagcggagtgtctagattgtcctgaattgaaagcaactgcagatgactttattc

SEQ ID NO: 120105 - DNA, 75 bp, Homo sapiens
cctgtgtccagcgctgccggagccgcctgagagaatagtgacagtggtacaggaaagaaagaaaaagaaaagaaa

SEQ ID NO: 120106 - DNA, 82 bp, Homo sapiens
tgtctgtggctctgcagagagaaggcatagactcccaggaatttgctgattcccttggaattccgtttttggaaaccagtgc

SEQ ID NO: 120107 - DNA, 75 bp, Homo sapiens
cgagataacgtagacagagctaaaaggattcaagatggaaaaggtgatgtaaccattacaaatgatggtgctacc

SEQ ID NO: 120108 - DNA, 74 bp, Homo sapiens
cctggagcctcagttggaagcagccgatccagcctgcggagcctgtggggcagtcccctgttttcatagcccaa

SEQ ID NO: 120109 - DNA, 99 bp, Homo sapiens
aactacagcaacttggtctcactggggcgaactttctgaccaagtatacaactacccagagggcctaggagaagtgctgtatagagagcagttcgactt

SEQ ID NO: 120110 - DNA, 100 bp, Homo sapiens
aaggcatcgtgtggcaggaaacagaagatgctattactataacaagcgcattctgcacaagaccaaggggaaacggttcacctacaagttcaatttcaac

SEQ ID NO: 120111 - DNA, 83 bp, Homo sapiens
gggggtgacagctccgggaccggccgaaaggcgaggaaccgggtcaggataaacatgaagaatattttgctgagaacttcggc

SEQ ID NO: 120112 - DNA, 75 bp, Homo sapiens
accggctgtatgattaggccacaatcttcaatgagtaaacatattcctgtgtgagcgccactttgaagggcatcc

SEQ ID NO: 120113 - DNA, 75 bp, Homo sapiens
agaaaaccttgcaacttacatggaaagcatgagactatatgctagagatgctggctcgtgatttcttagatgaat

SEQ ID NO: 120114 - DNA, 74 bp, Homo sapiens
ggagctgctcgacgaccaagaggcgaagagctccttcgagaactcatagaacggaagaccagctccttggatcc

SEQ ID NO: 120115 - DNA, 120 bp, Homo sapiens
gttcgattgactccgtccccaagatcctgtagccccacggacctggcgactccaccgtgttcgggaagtactgtgagagtcttgcctgttgccgcccactcagcacagccaactttggca

SEQ ID NO: 120116 - DNA, 75 bp, Homo sapiens
ccgaggtacgcaataggagtgtgtgcacgggactcattctcacagttccggtttgctgaggagaaagaatgggat

SEQ ID NO: 120117 - DNA, 80 bp, Homo sapiens
ccacagcctcccgcgcctcgctcagctccaacatggacatggatttgattgacatactttggaggcaagatatagatctt

SEQ ID NO: 120118 - DNA, 97 bp, Homo sapiens
cgcagggggacggggaccagcagctgtcgccgccgctctcagggctccacgtgttccccacgtttgtggcgtacgagctcacggtgctggtgttcct

SEQ ID NO: 120119 - DNA, 74 bp, Homo sapiens
gccgcttcgtcctctgcagtcaagacgctgggcgcgtcgaggactgggtggctgtgaaaaacaatatcgatgtc

SEQ ID NO: 120120 - DNA, 98 bp, Homo sapiens
tgaagaccgagtctggtccattgctatcagcccattactcagaatggctattcaagtggacaagttcaactttgagagtttcccggagtcccctgggg

SEQ ID NO: 120121 - DNA, 90 bp, Homo sapiens
aagctggatgagctgaggagagtgagcgtcccctatccaagtagcctgctgtcgcccagccgcgacgaagcttcacaaaagatgtctaag

SEQ ID NO: 120122 - DNA, 101 bp, Homo sapiens
cggacgtcatggctcagacccacatagttcaaggagcagggacaagttacaggaatgttctccaagcagcaatccaaaagagtctcaaggatccttcaaat

SEQ ID NO: 120123 - DNA, 100 bp, Homo sapiens
gctctgaagtggggtctctggattttaaagcctgcagagaaaaagaagccaaatgccacgagacctgtaacgcctccaaggggtatgatcacaaagcaag

SEQ ID NO: 120124 - DNA, 98 bp, Homo sapiens
cccaagaaaactcagaggcgacatgttagtacagcagaagagttaagtgggcagaccaacatccacctcagcaaaaacttcttcctgacgaatcgcgc

SEQ ID NO: 120125 - DNA, 95 bp, Homo sapiens
aattaccaagaggcagcaatctacctccagctcctcagtgggtagtgcacttccacgaagacgctgctgtgcatatattaccattggaatgatat

SEQ ID NO: 120126 - DNA, 74 bp, Homo sapiens
tagaaaatcataacaagcggttctctaccctgtaaagggatcgcttacacctgagacgaactacagaacagcac

SEQ ID NO: 120127 - DNA, 100 bp, Homo sapiens
catcttccccacacaatatatggtgagcaaggctctgccaacataaatgaccgcagcatgctgggaaagcgtgacagtgaaatggctgtcattgtgcaag

SEQ ID NO: 120128 - DNA, 50 bp, Homo sapiens
ggcgtgcaacatggggcttgagaaaggacaattccagggctttcgaatcg

SEQ ID NO: 120129 - DNA, 75 bp, Homo sapiens
gagaagaagacaatcgcagtggaaaactgagtgtgctggagaatctggtaaaagcaccattgtgaagcagatgag

SEQ ID NO: 120130 - DNA, 97 bp, Homo sapiens
gataacgacaagaaaaacaatcgcttcaatgatgggaaggtggatcccgccgggaggtactttgctgagtggtgagatcaagtcggtagatcccaga

SEQ ID NO: 120131 - DNA, 143 bp, Homo sapiens
cggggccgagcgccgcgcgtcccgagcatggcaggctccctgcctccctgcgtggtggactgtggcaccggggaaatcctcattgacgattcaatttgttgaaggccaatttgtggactcctacgatccaaccatagaaaaca

SEQ ID NO: 120132 - DNA, 95 bp, Homo sapiens
ttctgcgacttataaaggaccagacaaatcaaattagtggttttggactggacctcactgtgggaacaacaagatcaacaagaggagcaagaaca

SEQ ID NO: 120133 - DNA, 74 bp, Homo sapiens
atatcaacactaccaaaaataatccagtgatgtcattgcaagatcaggccttgaaccggggcattgctgctgtc

SEQ ID NO: 120134 - DNA, 100 bp, Homo sapiens
tgcacagttagacctctgtgaggatgaagatgtatctggtaaaatccagtacaaggaatatatcattgaaggatttgaaaacatgccagctgcatttatg

SEQ ID NO: 120135 - DNA, 100 bp, Homo sapiens
ggcttgaggacgaggcggcggccgcggggaggaggatgggggctaaccagttagtggtgctcaacgtgtacgacatggctttaatccagtgtgaccagtt

SEQ ID NO: 120136 - DNA, 90 bp, Homo sapiens
ttcatgatagtgaattcaaagaatatactacccgtacccaagctccgtctccatcatcaccagttccagtagtgaaaaacagaacccaac

SEQ ID NO: 120137 - DNA, 100 bp, Homo sapiens
ggagagactccttgggggtcgagcacataacggggttcgggtgtctcgtgtgtgaacatcacaggcctccccatggccacccatggaccagtcggcattc

SEQ ID NO: 120138 - DNA, 102 bp, Homo sapiens
tctacatgtaaaaggccactgactcctacttcctctgtatagagcaactgttgaactcagctgcctgtagcttagcagtgtctgcaaaaacgaatcttttcc

SEQ ID NO: 120139 - DNA, 101 bp, Homo sapiens
gcgggcgagggcagcgccctaagcaggagcctccatcgacctgcagaagacatcccacgattacgcagacaggaacactgcctacttctggaatcgcttca

SEQ ID NO: 120140 - DNA, 75 bp, Homo sapiens
ggcccggcgcggcccagcgccctcaggaatgtatacaaagactatcgcttccttgagctggcatgtgattcccag

SEQ ID NO: 120141 - DNA, 51 bp, Homo sapiens
agggcttcacctccaaggcggatcctcaggatgacgctgtcagtatagaaa

SEQ ID NO: 120142 - DNA, 82 bp, Homo sapiens
ttgaagattactggatgcacgtacagaatacattcagccgtcagatcatatctgaagatattagtgagctacaaaagaatca

SEQ ID NO: 120143 - DNA, 83 bp, Homo sapiens
ctggtatttcgaaggactctatccaacctattatatgctaactcaggtgagatggagccgctatagtcctgaattcaaggatc

SEQ ID NO: 120144 - DNA, 90 bp, Homo sapiens
gccccgacgaggaagtgtgaaaacgtttctggctccatccaagagcgccagcagccctgtggtggcgacgacgatggaccaggagccagt

SEQ ID NO: 120145 - DNA, 100 bp, Homo sapiens
ttcagaaacaagtgaggaccctgaagttgaggtgactattgaaggtgtacatgttcctggtgaaatggcaggacctgtcggagaaggtggtctaccggcg

SEQ ID NO: 120146 - DNA, 136 bp, Homo sapiens
agtgtggcatcacctacaagatggagaaggtttactccaccttgaaagataaggatgtggagctctacctgaaactgctcctagttccagcctcagtgaactgccttcgccttggctccatgaagtgcactctgct

SEQ ID NO: 120147 - DNA, 100 bp, Homo sapiens
caaggggcttacgcagaaggacctggccacgtgggtcctggccttcgagatcttcatccccctggtgctgttctttatcctgctggggctgcgacagaag

SEQ ID NO: 120148 - DNA, 75 bp, Homo sapiens
gttcgcggtcggccgccaccaggtcaccctggaagagtcgctggccgaagatggtagtgaaaacctttatggata

SEQ ID NO: 120149 - DNA, 73 bp, Homo sapiens
gacccgccttcacaaaataatgcaggtgatactgtgcttgtccaccgagttcacagttatttagagcgtcatg

SEQ ID NO: 120150 - DNA, 90 bp, Homo sapiens
gacatctacaggaaggtgcccaaggaccttacgcagccaacgtacaccggggccattaccccccatgggtgaggagggcaaccacaagcg

SEQ ID NO: 120151 - DNA, 100 bp, Homo sapiens
cgcagatgcgggccctgctggaccagctcatgggcacggctcgggacggacaagatcgcagaggaaggtgggcggcgggagtgcccagccgtgtgacagc

SEQ ID NO: 120152 - DNA, 82 bp, Homo sapiens
atcagcactaaacatcgtgggggatctcttacggaaagtagggttgctcaggtacctgaatattggctttgtgtctaaagtt

SEQ ID NO: 120153 - DNA, 75 bp, Homo sapiens
ttcggagaagcggctgtttggtcgctactatcgtgtggcattttatgggcagcttgacaaaagtaagctgaagcc

SEQ ID NO: 120154 - DNA, 98 bp, Homo sapiens
gttctgtaaacatccgagtgcccaacagacattttgctgctgctacaaagtaaaaatgcatttgcaaagggagaaaatgaaggccaaacagaagcagg

SEQ ID NO: 120155 - DNA, 94 bp, Homo sapiens
cagtaactgaacattggtctaaagtctttccaaaaggtcaaggttcacaaggccccttcacagatgtagtcactacaaatcttaaattgcgaaa

SEQ ID NO: 120156 - DNA, 82 bp, Homo sapiens
cgagacatcactggctacacatttccagcaggctgcagatacgagtggacaaagtgaattcaatgtgtacagtcaggaagtc

SEQ ID NO: 120157 - DNA, 74 bp, Homo sapiens
gcgaaacttagagaattactgcttagctccttgaggagaatgaccagctgatccgctgtattgtggagtatcag

SEQ ID NO: 120158 - DNA, 75 bp, Homo sapiens
gaccgctcctccaactaaccaccaacaaatggaattttcttgagcatgtttctaatcgttttgccattggaatcc

SEQ ID NO: 120159 - DNA, 75 bp, Homo sapiens
tgtggtgatggatgaggtggtgctgacaatcgagcaaggaaacctgggggcgtttatgcaatgagcctttggata

SEQ ID NO: 120160 - DNA, 95 bp, Homo sapiens
tgtgctcaagcatttcaacgtgcgtgtcacccacgcagacatcttcagccgctgccagctgagctgactgctgcccactttggaggaggcggtgg

SEQ ID NO: 120161 - DNA, 100 bp, Homo sapiens
ccaagatctacgccatgcactggggcacagactccaggtcttgggcgtctttggtactggcttttttaggggtctgcctggggattacccttgctgtgga

SEQ ID NO: 120162 - DNA, 85 bp, Homo sapiens
aaatgagggtgttgatttctccaaggatctgctgaaagagtcttttagtcctgctatacagctgcaccttgtacatcaagctcca

SEQ ID NO: 120163 - DNA, 100 bp, Homo sapiens
gggttctgccgcacggcatgggccggggcctcttgacccggaggccaggcacgcgcagaggaggcttttctctgggttggagcaaaacgtcccactcact

SEQ ID NO: 120164 - DNA, 80 bp, Homo sapiens
tgtggctgggaccggggcgaggtctgcagggtgtgccagtttgtgaagtgtggatatgcaggctctaactttccagaaca

SEQ ID NO: 120165 - DNA, 84 bp, Homo sapiens
gaaggcccgcagcaatgaaaacctcgacaaaatagatatgtctttggacaatgcagatcttcgtgaagactctgactggtaaga

SEQ ID NO: 120166 - DNA, 90 bp, Homo sapiens
ctgcacccacgaatctgcccacccctcctgtaacccagcctgtttcacttcttgaaggacagaataacgggctcccagattcacaagccc

SEQ ID NO: 120167 - DNA, 50 bp, Homo sapiens
gtgcgggctgctgctccagagggcggaggacataagcagctctatgacca

SEQ ID NO: 120168 - DNA, 80 bp, Homo sapiens
gtcatcaccgaccgccagacgggcaagtcccgcggctacggcttcgtgcgcgcggagccatggttatcatgtcggagttc

SEQ ID NO: 120169 - DNA, 88 bp, Homo sapiens
ctgtttctggcaaggcttcaataaaatttgtgctctacaaaaaattggaatgtctcgttttcagacgtatattacgtactttgtccgt

SEQ ID NO: 120170 - DNA, 75 bp, Homo sapiens
ggaaaccggtagcgcttgcagcatgtgagtccatgacagaagaaaccctgaaaagggcaaaggagattgggttct

SEQ ID NO: 120171 - DNA, 75 bp, Homo sapiens
ctccgcgcacatcactcccgagtggaggaagcaatacatccagtatgaggtattagaaaactactcggatgctcc

SEQ ID NO: 120172 - DNA, 90 bp, Homo sapiens
gtttcttcagtccctgatcagatcagaggagacagctggaaatgatccctattgttttgtggagtttcatgagcatcgtcatgcagctgc

SEQ ID NO: 120173 - DNA, 106 bp, Homo sapiens
gcagggcctgcagcgggagctggacggcgagcgcgagcggcgcgagaaaatgctgagccagggaggcggcccttccagcagccatgagggaaggacaggagatggg

SEQ ID NO: 120174 - DNA, 100 bp, Homo sapiens
ctgggatagattgcaccctggagaggaagtcaccaaagcagtacagcctctcttactgggaagaatcatagcttcctatgacccggataacaaggaggaa

SEQ ID NO: 120175 - DNA, 75 bp, Homo sapiens
atgttggatctacactttctcaagcactgtgatcttcaaataaaaattggaagctccaccacccaccccaggaca

SEQ ID NO: 120176 - DNA, 101 bp, Homo sapiens
cttctgtccaatcaggctttgcatcccgggacgcttccggttatggcgtcattatgcagccaggattccaaattacagaaatgcagtcattgtagctaagt

SEQ ID NO: 120177 - DNA, 100 bp, Homo sapiens
tgttccgagcggcggctccggggcagctccggcgggcggtattgccatcagagagtcagcaaaggtagttgaccaagctcaaaggagagtgttgagggga

SEQ ID NO: 120178 - DNA, 100 bp, Homo sapiens
ttcttgggtggttgtacattctctgagatctcagccctccggttcctgggcagagagaaagggtcggcactcttcaccctcccgagccctgcccgtctcg

SEQ ID NO: 120179 - DNA, 74 bp, Homo sapiens
ctcatgggaccatgaactttctagggttcccagttttccagacctgaagtgttttccaatcaaagcgaagagac

SEQ ID NO: 120180 - DNA, 75 bp, Homo sapiens
atggaaccaaagcggatcagagagggctaccttgtgaagaaggtggataatattaatgcagctgtgatggatttg

SEQ ID NO: 120181 - DNA, 82 bp, Homo sapiens
atggacacaagcctcattttggaatattgcaggctacagaacagctggtgaatgatatcctgagacaggctttggcagttgg

SEQ ID NO: 120182 - DNA, 71 bp, Homo sapiens
gtactccaacttctggtgtggaatgacttcccaggtttttgccaatccagaagactgtgtagcatttggca

SEQ ID NO: 120183 - DNA, 87 bp, Homo sapiens
ccagtaccaaaaacgtcaacaacagttttacggacccagatgatgtggtaccagttggccaaagaagagcctggtgttggtgcatgt

SEQ ID NO: 120184 - DNA, 100 bp, Homo sapiens
cccgacctcttaggcgccgggaccctcaggctcagatcagtggccgaggccccagaggttacagtcaaaatcatcttcgacaagcacaggtgactctcat

SEQ ID NO: 120185 - DNA, 74 bp, Homo sapiens
atttgctggatttaagcactgctgcactttatgagattggagcctccctctttgctagtaacattggaagtggc

SEQ ID NO: 120186 - DNA, 75 bp, Homo sapiens
gaacagaagaagaagaaccggaagaaactgtccgagaagcccaaagtggtccagctgctcacctgtgacctgcta

SEQ ID NO: 120187 - DNA, 100 bp, Homo sapiens
tcatgctggccaagaagatcatcattaaggacggaggcacggcaagaggcgcagatgttccagagattcctggagatcttactcttaagacgtgtggcag

SEQ ID NO: 120188 - DNA, 83 bp, Homo sapiens
gtggaagccccagcataaaggaaaatatcggctctgtgtttgggcagaagcagaccaagctccacgaagatctctgtgagaag

SEQ ID NO: 120189 - DNA, 100 bp, Homo sapiens
ttggctgctgccgacccaaggattataaggtatcagaagagcaaggtcaagaaaacccagcagaccacgatcctattcatgatcaaagctggtatttaga

SEQ ID NO: 120190 - DNA, 139 bp, Homo sapiens
gccagcatggccaccaccgccacctgcacccgtttcaccgacgactaccagctcttcgaggagcttggcaagtgctggcatcggccccaccattcagattggggaggagacggtgatcactgtggacactaaggcggca

SEQ ID NO: 120191 - DNA, 82 bp, Homo sapiens
acagcccagtgcttctgtctcgactgcactttgagaaggaatgggtaccacagaccatgtcatcgtcctggcgtccacgaac

SEQ ID NO: 120192 - DNA, 82 bp, Homo sapiens
agaggacgccttcaacaccaccttcatctccaccatcgcatgtagagcgcatgaagtacaggacaataaagcttcctacaca

SEQ ID NO: 120193 - DNA, 95 bp, Homo sapiens
atgcaagagctgcacaagtctctccggtgagagtagcatgtttgtctccaagagacgtttcattttgaagacatgtggtaccaccctcttgctga

SEQ ID NO: 120194 - DNA, 87 bp, Homo sapiens
cgaatatcgtcatcgttagaagtcgaggggagctgcagcgggagtcagacttcatggccagtgtagacagcagctggatctcctggg

SEQ ID NO: 120195 - DNA, 90 bp, Homo sapiens
caacactttgggaagtgaagttgggcggatcacttgaggaccctgatgcttggtgtgacctgagtaaatttgacctccctgaggaaccat

SEQ ID NO: 120196 - DNA, 100 bp, Homo sapiens
gcagaatgtgatttgcttgaagatatgaggtcaatgagctgaaggagaaaggcaacaaggccctgagcgtgggtaacatcgatgatgccttacagtgcta

SEQ ID NO: 120197 - DNA, 90 bp, Homo sapiens
gcccatttggagatcttgacaaagcctcttctgtttccaatggggtgagatcggactggaactgttcggctgcgaccagaaatttatttt

SEQ ID NO: 120198 - DNA, 149 bp, Homo sapiens
ctcggagtaggaagctcgggcgctccggctgtaaggagccgcggcggggggaaaatggagcccttcaccaatgatttgtcttcagcgaagcggaagtttgcagattccttaaatgaatttaaatttcagtgcataggagatgcagaaac

SEQ ID NO: 120199 - DNA, 100 bp, Homo sapiens
atctctgccaaccaagccatgaccacagatggccaaaaaggctttgaaatctgagtccgctgcctcaagtacagggaaggaagataaacagccagcacca

SEQ ID NO: 120200 - DNA, 75 bp, Homo sapiens
ggatggagtagatattaataccttacaagagactttgagaatcactacaagaaaaactccttgtggtgaaggttc

SEQ ID NO: 120201 - DNA, 97 bp, Homo sapiens
aaataatagctgtttgtattttggctgctgcaggagccattttaggaaagaccacagcaagattctttcattcgtctcctcctagcctgggggacca

SEQ ID NO: 120202 - DNA, 100 bp, Homo sapiens
tgagaaataaggacaaaagccaagaggaggacagttcgctacacagcaatgcatcgagaatgtttctccatcccagagagatgaagtaattcaatggctg

SEQ ID NO: 120203 - DNA, 83 bp, Homo sapiens
cctctcccctctttgacagcggtttgcatctgaacggaaactccagtaccacaaaaacatccagtacagacctttctgatatc

SEQ ID NO: 120204 - DNA, 80 bp, Homo sapiens
ggggaaccgccgccccggccggacctcgaccctgagctctatctcagtgtacacgcgttgacagaaggctacgttggggc

SEQ ID NO: 120205 - DNA, 75 bp, Homo sapiens
gcaccgccgaggactccagcacaccgagggttccccctaaaggactcaaaacgtctaatccaatggttaaaagct

SEQ ID NO: 120206 - DNA, 100 bp, Homo sapiens
gcagcccggggatccagcacgcaggtggccatgaacatcctcaacagcggccggttcagcatgggcagcgtcgtggctgggctgctcaagagattgattg

SEQ ID NO: 120207 - DNA, 100 bp, Homo sapiens
cagctgccctacgagtttttcagcgaagagaacgcgcccaagtggcggggactactggtgcctgcgctgaaaaaggaaaatggcaaatgcacgacagcgg

SEQ ID NO: 120208 - DNA, 90 bp, Homo sapiens
gctagtgtccgctctgctcggccgcgggctcccggaggactgcaggcccggcagatgtttgagggggaggtggccagcctggaggccctc

SEQ ID NO: 120209 - DNA, 75 bp, Homo sapiens
gggagaggtgccaagaagcagcggtacaccaccaaggatgacattgatcttgatgccttggctgcagaaatagaa

SEQ ID NO: 120210 - DNA, 120 bp, Homo sapiens
caacgtaacctcggcgccggtgacgtccctcccgctggtcaccactccggcaccagcgcttctctgaagtagctttggaaagtagagaagaaaatccagtttgcttcttggagaacactg

SEQ ID NO: 120211 - DNA, 73 bp, Homo sapiens
tccacactgcaatgtttttgtggaacatggctactgcagcactggggtgtcagttgttggtccgacccagaac

SEQ ID NO: 120212 - DNA, 50 bp, Homo sapiens
tttggatcatacagcagatgtccactttggagtttaacccttctgccaat

SEQ ID NO: 120213 - DNA, 101 bp, Homo sapiens
ttaacaagaaccgccatcccaatttcctggtggtggagaaggatacaaccatcaatgagatcgaagacactttccgcttgcttggctcaggaacaacagaa

SEQ ID NO: 120214 - DNA, 51 bp, Homo sapiens
tctacatctgcccgaccaacaagaggaaggactgactgcattgcacagatg

SEQ ID NO: 120215 - DNA, 100 bp, Homo sapiens
gacttgactggtcttacattgctgcatcaagaaacccaagctgctgagcaattttccagattattcaaagtatcaggatgggcatgtgaagtgactgacc

SEQ ID NO: 120216 - DNA, 100 bp, Homo sapiens
cgggaacaaagtcagatggacacttacacctcggatgaacaagaaagtttggaagagacgagttgtactgctgtcacaggaaatggacgctggattacaa

SEQ ID NO: 120217 - DNA, 98 bp, Homo sapiens
ggagagtcccgtattctcagagtaaaagttgtttctggaattgatctcgccaaaaaggacatctttggagccagctgttcttgaagactaattagtta

SEQ ID NO: 120218 - DNA, 101 bp, Homo sapiens
cgcagggcgacggccccacctccggccactgggacggcggcgcggagaaggcagttccttcctgtgtacagcccttctgaggaggagaagaggaaccccgc

SEQ ID NO: 120219 - DNA, 50 bp, Homo sapiens
ccgggatggagaaggaggaggaatcggttttaaaatcaaagatgggaaaa

SEQ ID NO: 120220 - DNA, 99 bp, Homo sapiens
gtttcttttgctcctctgatccagccctgccattcagagtcaggaaaatcaagacttgtccagttaccaactttcatcctttgaaacgtgtgctgaaaa

SEQ ID NO: 120221 - DNA, 82 bp, Homo sapiens
cctcggcttgcatttgtttctgctgaccgcgggccctgccctgggctggaacgaccctggacctccaggacgtagaggttga

SEQ ID NO: 120222 - DNA, 75 bp, Homo sapiens
cttactcccggggctccgtatgcaaggaagacattcacgatactgttcctaagagcatctgccccagtcaacttc

SEQ ID NO: 120223 - DNA, 96 bp, Homo sapiens
atcaaatggagccttatctcatagaggtgcttcctttcacaactttttccagagggcaggcgtcctagctccagttgctccatcccttgggccctc

SEQ ID NO: 120224 - DNA, 100 bp, Homo sapiens
cccccctcacccaggcccctgtcaagaaggtgccggtggtgcgagtcttcggagcgaccccggcagactcggggtctaaatgtgagaccaagaagttacc

SEQ ID NO: 120225 - DNA, 83 bp, Homo sapiens
tgaaaacattcagtggcccaatggcatcaccctaggccttcccttcttcttggtggtgttcttgagtaagataatctggactg

SEQ ID NO: 120226 - DNA, 51 bp, Homo sapiens
cttcctagagaagcgtttgcacaagatcctaatgtggctcttacttttctg

SEQ ID NO: 120227 - DNA, 90 bp, Homo sapiens
tcagcggtgggcagtcctagtccgaggtgccaccgtggaaggacagaatgataaagcttcaccaagaaggttgcccaggaaacgggcaca

SEQ ID NO: 120228 - DNA, 83 bp, Homo sapiens
agattgacgcggtgaactctgtccagttttcaaaccacacagcttccccgggcgctgcctggacaggcctgcctgcgtgctgg

SEQ ID NO: 120229 - DNA, 100 bp, Homo sapiens
atcctcctggccgtcctcctcacggtcctcctggctgtgctcatatacacctggccctgcctaagcctcagcagaacttgtaagcctaaactgaagagcc

SEQ ID NO: 120230 - DNA, 88 bp, Homo sapiens
cggcaaatattacacttctctccttgattttgcctaccattttacagtatttgtcttctattttggagcctttttattggaagcagca

SEQ ID NO: 120231 - DNA, 100 bp, Homo sapiens
acagttgtgttgtgccaatggtggagaagaaaacttcgggtcttgggcgtctttggtactggcttttttaggggtctgcctggggattacccttgctgtg

SEQ ID NO: 120232 - DNA, 74 bp, Homo sapiens
ttctctcccaatgggaccctggaggaatgtcagcaccagaccaagtctcctctgagcctccggcctccataaga

SEQ ID NO: 120233 - DNA, 74 bp, Homo sapiens
gaccatgttccgagcggcggctccggggcagctccggcgggcgactccagggattagagctcgatctgcaaggc

SEQ ID NO: 120234 - DNA, 96 bp, Homo sapiens
tgctgataatcggagcttggaattaccccttcgttctcaccattcagccactgataggagccatcgctgcaggccctcgggaccaaggatcacgtc

SEQ ID NO: 120235 - DNA, 75 bp, Homo sapiens
tggattttgatgatgatggagaagggaacagtaaatttttgagatataatgaagatctggaacttgaagatgcca

SEQ ID NO: 120236 - DNA, 75 bp, Homo sapiens
ctgggggccttcagagccgcaatcaagcagcctacccgtatattacaagaaatctcaagtcaaacactggaaaag

SEQ ID NO: 120237 - DNA, 97 bp, Homo sapiens
cgctcgcttgccctgattctctccgccctgcacttttgccagctgaaggtccaggtacaggtttgcagattccgccagcagcacagcaagctctaca

SEQ ID NO: 120238 - DNA, 100 bp, Homo sapiens
accagaggccgaactcgggttctgacaagatggccgggctgccccgcaggatcatcaagcacaaccagtgtctctgaagaagatgtctcaagtagatatt

SEQ ID NO: 120239 - DNA, 100 bp, Homo sapiens
ggaagcgagggcgtcgcagcagtgcgggatcgctagagagcaatgtggaaggccaagtgatccagttctaagtgtcatcttttattatgaagacaataaa

SEQ ID NO: 120240 - DNA, 82 bp, Homo sapiens
gtcgccctcgagatgattatcgtaggaggagtcctccacctcgtcgcagaacagaacatatcttccagtagcttcctgagaa

SEQ ID NO: 120241 - DNA, 74 bp, Homo sapiens
caagctccactgttcagatgcaaaggttcttctgtgtggcagttcagaatgatggatcaagctagatcagcatt

SEQ ID NO: 120242 - DNA, 90 bp, Homo sapiens
gtggattatgaaaaccctttaaagaagatgatggaagaatttgtaccccatagcaagattaaagagtctattgttggggaaatcagacgg

SEQ ID NO: 120243 - DNA, 100 bp, Homo sapiens
ggccacagtcctgggaagtcagatgggattgaaaggaggagtgctggcatctccatgactacctggtggacaccttgggcccctatgtgatcaatgtgac

SEQ ID NO: 120244 - DNA, 83 bp, Homo sapiens
cgcggattcgccgaggcaccgaggcactcagaggagggtcccctggaagtgacgctgactcagccagtgaggagcgggcctgt

SEQ ID NO: 120245 - DNA, 82 bp, Homo sapiens
cgccatcgagcgcccctccgagctggggttggacgctgccagtttgcacagcagcagcgtccgtctccaagagagtatgaag

SEQ ID NO: 120246 - DNA, 100 bp, Homo sapiens
cgcttgtcagtgtgatgaagattggcacccagagctccctctttgcccactagcagggcattagctggtgctgaagacagtggctgcttggcgagcctgg

SEQ ID NO: 120247 - DNA, 100 bp, Homo sapiens
ccagacaggcggcgccatcttcgaacttagacttccggaaggactttggcgaggagtggtggacatgacaacagagtcaactgcatacagtggcatcaag

SEQ ID NO: 120248 - DNA, 82 bp, Homo sapiens
aggtctatgagaacaagacggacgtcatcctgatcttggaactaggccacaagaggaagctgaatgaagaggacgccgccag

SEQ ID NO: 120249 - DNA, 100 bp, Homo sapiens
gagccggagctgggcgcggattcgccgaggcaccgaggcactcagaggaggttaaatgtaaacctaaagtgggttacatgaagaaacagccagacatcac

SEQ ID NO: 120250 - DNA, 82 bp, Homo sapiens
cagatgatgcggtggtgggggacctgccggcacgcgactccccccgggcccaaaaatgtggccccgtcccagagcaccaccc

SEQ ID NO: 120251 - DNA, 100 bp, Homo sapiens
atgaacttagcagcagctccactgaacagataaggagttgtctgctggttctcagcttgaagaagattctgcagtccttattgatcctttttcttggcgt

SEQ ID NO: 120252 - DNA, 100 bp, Homo sapiens
cccgtttctggctccgggctgagcttcctggagaagaggaaggtaaaataccatgaagattttgaaaaaacaaaggggagaggctttactcccgtcgtgg

SEQ ID NO: 120253 - DNA, 100 bp, Homo sapiens
gcggagtccaaaacaggcctaccaaagtgaaatttgtctgtcaaactccagcaattgctgacattgtaatcctggtcgatggttcatggagtattggaag

SEQ ID NO: 120254 - DNA, 82 bp, Homo sapiens
aacatggacaggaactgtggacagtgaagagaggcctctcccaaagcacctgcgcagatccaggatgagaagactgataaaa

SEQ ID NO: 120255 - DNA, 75 bp, Homo sapiens
gaagaagagtgtagttgagagctcggccccaggagccaataacctgcagccaatggagatcttcgtggatgatga

SEQ ID NO: 120256 - DNA, 96 bp, Homo sapiens
cacacggaaggaagccggccccctgcctgcccgcgcctagaccccattcacatggcggacaccgacctgttcatggaatgtgaggaggaggagttg

SEQ ID NO: 120257 - DNA, 90 bp, Homo sapiens
gacagcctcaaacaggagctggagcagctcaaagaggaccctgctttctcggctgtgattcacgacaaactccaggtccccaacaccatc

SEQ ID NO: 120258 - DNA, 100 bp, Homo sapiens
cgccatcgttgctgccttcttcgtcaagatgccttcaattaagttgcagagttctgatggagagatatttgaagttgatgtggaaattgccaaacaatct

SEQ ID NO: 120259 - DNA, 83 bp, Homo sapiens
ccgcaaccagagccgccgccacgccccctggccactgttctaggtgctgttgttctactaaacaaggaaacagtcaagagtca

SEQ ID NO: 120260 - DNA, 100 bp, Homo sapiens
cccctggaccccctgatggcccccaccttcccatccagacagccccgaagatttttggaggtgaaatcaagactcacatcctgctgttcttgcccaagag

SEQ ID NO: 120261 - DNA, 100 bp, Homo sapiens
cgccgccacgctgtgcttctcgcttcagaacattttctccaaaaaggcggcttacagggagaacacagttggcctccaccgtttctgccccacagaaaac

SEQ ID NO: 120262 - DNA, 76 bp, Homo sapiens
gattctttgatgtgttggggaatgacaggagacagaagagcctgcaagtgacaaaggaagtgaggcagaggcccac

SEQ ID NO: 120263 - DNA, 100 bp, Homo sapiens
ctggcagactacgccctggagtcaggagctctaggctacactgtctccagcttttccaatggctgccctggagagggcccacgattctcagctccccggc

SEQ ID NO: 120264 - DNA, 82 bp, Homo sapiens
ttagagcaagaggagcttcaagcattgcagatagagcaaggaggtgaactactgagttcttcattatgtctgatggagatta

SEQ ID NO: 120265 - DNA, 101 bp, Homo sapiens
caggttattccagtgggactcaaaatgccaactacccagtgagagctgcccctcctcccccagatcatcaatgggctgcgaaggtttgaaattgagtacca

SEQ ID NO: 120266 - DNA, 100 bp, Homo sapiens
cttagctgtgctcgcgctactctctctttctggcctggaggctatccagcattatgatgcatcattatcacagaagaaattcgtgtctatagcttttaag

SEQ ID NO: 120267 - DNA, 87 bp, Homo sapiens
cgaagaagcatcgttaaagtctctcttcaccctgccgtcatgtctaagtcagagaaaaagcttgtggtgaaggggggcaaaaaaaag

SEQ ID NO: 120268 - DNA, 85 bp, Homo sapiens
atttttggaaggatatagttgctgctatacaacacaattataaaatgtcagcttttaagggagtggacgcttctcttgtgagcca

SEQ ID NO: 120269 - DNA, 75 bp, Homo sapiens
aaacttcgctatcatggagatcagagagtctacagggagattgaacaggtgattggcccacatcgccctccagag

SEQ ID NO: 120270 - DNA, 75 bp, Homo sapiens
agattcttcatcttttagggaaagatagtgttcagttgctggagttgtatcccgcattttgtattcacaacggag

SEQ ID NO: 120271 - DNA, 50 bp, Homo sapiens
caaactcactgatgaaggactcaagcagtctcaggatgcaggaatcaaga

SEQ ID NO: 120272 - DNA, 100 bp, Homo sapiens
gacttcctcacccgcgcctgcgacctcgaccatcatggagcagttcaaccctagcctccggaacttcatcgccatggggaagaattacgagaaggcactg

SEQ ID NO: 120273 - DNA, 100 bp, Homo sapiens
ttgcagaaaatcctcactctgagtacggtctcacagacaacgttgaggaatgtatcctgtcaggtataatgtcagtgaatggcaagaaagttcttcatat

SEQ ID NO: 120274 - DNA, 100 bp, Homo sapiens
taccaggcccgggagcgcgatgtggagcgcttctttaagggctacgggaagatcctggaggtggatctgaagaacggtttctattccaaggacaatgaag

SEQ ID NO: 120275 - DNA, 71 bp, Homo sapiens
tggagaactctttagccgaatccaggatcgaggagaccaggcccagagcaagagaggcatcctcaccctga

SEQ ID NO: 120276 - DNA, 100 bp, Homo sapiens
gccgtggcgtcttggtgttctccacgctggttcgcagtactatactggcaattgctggagaagattttgcaattgttgcttctgatactcgattgagtga

SEQ ID NO: 120277 - DNA, 87 bp, Homo sapiens
atatcttgctggcatacacttgggattttggaattacagatgcaaagtataatggaaaagaaaatgaaaaccaagagaaatattgcc

SEQ ID NO: 120278 - DNA, 100 bp, Homo sapiens
atgtcctccatcgtgatgaaggcagagagcagagacatcccgatctggggaactgccgcagcgggaaccgcaagagcttggtggtaggaacgccctcccc

SEQ ID NO: 120279 - DNA, 74 bp, Homo sapiens
aacgtcattttcacccgcatggaaaaccaagtgcctgggttactaggtgtctttcagaagctgattgcatccaa

SEQ ID NO: 120280 - DNA, 101 bp, Homo sapiens
gcgggcggcatcggctgcgagctcctcaagaatctcgtgctcaccggtttctcccacatcgacctgtgggtgggaggacgctactcgctgtggtcggccat

SEQ ID NO: 120281 - DNA, 80 bp, Homo sapiens
ggtgcttccaactgcgggacaggaagtggccgtagcggcttgttggataagttaaatgctctgcgagaccttcatccatt

SEQ ID NO: 120282 - DNA, 98 bp, Homo sapiens
gcaagaaaaactgaaggagacagaagcagccatggaaaaattaatcaacagagtgggacctaatggtgagagcaatatgtcggacgccttggccaacg

SEQ ID NO: 120283 - DNA, 74 bp, Homo sapiens
tttagatgcactgttggcttgcgagacaaatatgtccaatatcagatggaaatgatgcggagccttcgccatgt

SEQ ID NO: 120284 - DNA, 75 bp, Homo sapiens
tgtcactggcccgctccctggcggtgcagagaccagcatccttggagaagactacagtggtagtggaggccgaag

SEQ ID NO: 120285 - DNA, 96 bp, Homo sapiens
tcatgaaccagatggactggctgtcttgggagtgtttttacagttgcctgagagcttagaggacgtggcaatgtacatctcccaggaggagtgggg

SEQ ID NO: 120286 - DNA, 75 bp, Homo sapiens
agccgtaccctctttagggtgcagtgttgaagactgggatagtttccaagctattttggatcatacctacaaaat

SEQ ID NO: 120287 - DNA, 100 bp, Homo sapiens
tcttctctgcaaaagaagagaatattatttattccttccttggtttggctcctcctccagactcaaagaaactccacttggagatgttggcagaccagcc

SEQ ID NO: 120288 - DNA, 101 bp, Homo sapiens
ggcagaggaccaacatgggcattttgtttatgagcaaggtggggatgcattccaaaggaactcagacagcaaaggaagagatggaaatggatccaaagcct

SEQ ID NO: 120289 - DNA, 76 bp, Homo sapiens
tcctacatctgagacatgggaaatatatggatttccatggtgtcagtgattcatattcctgataggacttataaac

SEQ ID NO: 120290 - DNA, 100 bp, Homo sapiens
gtgggaaactatagagtcaacactgcaaactcaagcactgatacgtccggagagcacttgacctgccttagaagtgaggaagggaaactgtctacctctc

SEQ ID NO: 120291 - DNA, 100 bp, Homo sapiens
cttgaattttctaaggtgtcattagggtatggtggctgtgtctggcagtttgtcagtgcttctggattccattatctgtgcccttggccccttggcatgt

SEQ ID NO: 120292 - DNA, 50 bp, Homo sapiens
tcctggccaccgactcctacaaggatcttttgccagaaatgagggcatac

SEQ ID NO: 120293 - DNA, 98 bp, Homo sapiens
tgagacacacccttacacggtgacttccgtgtcctgttgccatggaaacaccctcctggctgttcgatggtgattctgggggtccacttgtctgtaat

SEQ ID NO: 120294 - DNA, 100 bp, Homo sapiens
ggactccacctacagaaagttttccaccaaagtcacgctgaatacagtggggcaccaccaccgccccccgccccatcagtggcgggaccactggatgcag

SEQ ID NO: 120295 - DNA, 78 bp, Homo sapiens
aggaggccatcatcatgaaggacgtgcccgactggaagatttatggacaagaagttatcatgtaagtttgttgttgtt

SEQ ID NO: 120296 - DNA, 100 bp, Homo sapiens
ctttgacagatcttgtggaacattataagaagaatcctatggtggaaacattgggtacagtactacaactcaagcaggatgaagatttgataaagtggaa

SEQ ID NO: 120297 - DNA, 90 bp, Homo sapiens
atcgggctgaagcgactgagtccgcgatggaggtaatgtgaggctacaggagatgatggcaacaatgtgccaggaacgtggagcccggct

SEQ ID NO: 120298 - DNA, 100 bp, Homo sapiens
cggagaggacgatgatgactttgagaccaactttctgatcgatagaaacttccagggtcaaatacaacctgaactccctgtcacatgatacagccactgg

SEQ ID NO: 120299 - DNA, 50 bp, Homo sapiens
ctgcatcaacggcatctgtaagagctcaggccccggggcctccagcggca

SEQ ID NO: 120300 - DNA, 123 bp, Homo sapiens
gggcaaggtgatccagcaaggtcggcagagcaaggggcttacgcagaaggacctggccacggaaacatgccctgaactgtcacagaatgaaaccagcgctcttcagcgtcctgtgtgagatca

SEQ ID NO: 120301 - DNA, 101 bp, Homo sapiens
gtgtgaattctcctggatcttaccagtgcgttccctgcacagaaggattccgaggctggaatggacagtgccttgcgagtaaccagctcataaatcacatc

SEQ ID NO: 120302 - DNA, 100 bp, Homo sapiens
ccaatgggtattcagaacattttgtggaattcgtgaaacttgtccgtgccaaatttcctgaacacaccattatgacaagttttggtattgtcggctttcg

SEQ ID NO: 120303 - DNA, 107 bp, Homo sapiens
ccgcctggaccagctgctctccctctccatggtctgggccaaccatctcttcctaggctgcaggaattgaatgatctggcacgggaccctccagcacagtgttcagc

SEQ ID NO: 120304 - DNA, 83 bp, Homo sapiens
gactgcctggagcacctcatcgagtgtggcgcccacctgaacgcacaggataagaccgcgctgagcacgttcttccaagaaac

SEQ ID NO: 120305 - DNA, 101 bp, Homo sapiens
ccagcattttccaagtactgtaaattcctgtgcagaaggcatcgtcgtcttccggacagactatggtcaggtggtatggtcaggaaaaagactacaatgta

SEQ ID NO: 120306 - DNA, 75 bp, Homo sapiens
gagaacccagagaagaatgaggcctttctgatatcccgcccaggtacccgttccaagccctgccaccgcactacg

SEQ ID NO: 120307 - DNA, 82 bp, Homo sapiens
cttacagccgctcgtcagactccagcagccaagatggtgaagcagatcgagagcaaggtgacagaccatgccaccactgccc

SEQ ID NO: 120308 - DNA, 99 bp, Homo sapiens
ggattggagtgaaccggagaccccgaaaacggaagcgcagggagaaggaagaggtgtttgaaaaggatacaacttcagtattaaaggaggaacatgtta

SEQ ID NO: 120309 - DNA, 75 bp, Homo sapiens
tagagatgtgatgttggagaactacagaaacctggtctccctaggaaaaccagtgttctctggacatgaaaagca

SEQ ID NO: 120310 - DNA, 100 bp, Homo sapiens
caatcttaccagagggccctcaggagccaaaaacctgtatatcatctccgtgaaggggatcaagggacggctgaacagacttcccgctgctggtgtgggt

SEQ ID NO: 120311 - DNA, 100 bp, Homo sapiens
cacaccagcatgggagacattcacaccaaactttttcctgttgatgaatgatttgggaggggacttcaaaggagttggtaaaggctccttagctgctgat

SEQ ID NO: 120312 - DNA, 100 bp, Homo sapiens
gcgagggcctcggccatccaagggtctcccagaagtacatccaggaagccaggactatgggcagcactatccgccagcccaaactgtccaacctctctcc

SEQ ID NO: 120313 - DNA, 50 bp, Homo sapiens
gtcgacaggggatgggaccctagatttgggaatggatgatgaaggagatg

SEQ ID NO: 120314 - DNA, 100 bp, Homo sapiens
gcattctgatgcagcagagcttggaaggatgcttcagctcatcttaggctgtgctgtgaactgtgaacagaagcaagagcctgatttgaaaaagcggatc

SEQ ID NO: 120315 - DNA, 100 bp, Homo sapiens
ctgcagcccaggccagatgtgcggccactacacgcaggatgctttggagtctgcaatgaagaatggcctgtggggtcacgctctgctacttgcaagtaag

SEQ ID NO: 120316 - DNA, 75 bp, Homo sapiens
cagttacctccgtgtgtcacaggaagactcttcaaatcatgaaggacaggtggatcaatgcagggcatgaagaag

SEQ ID NO: 120317 - DNA, 83 bp, Homo sapiens
gccagggaaccctggtcaccgtctcctcaggtaaggctggcctctctgcagtcagaggtctgagctctgccatggggataggg

SEQ ID NO: 120318 - DNA, 74 bp, Homo sapiens
aaatgcatttgccttatacagctaaagccatggaaagttgctctaggtcgtaaccagcctttgaaaaaggagaa

SEQ ID NO: 120319 - DNA, 89 bp, Homo sapiens
gtgtttggtgtacccatgtgactaatttgtccaaagagagattttcagctgaactctcatctctcaacactggcaaatattcataagat

SEQ ID NO: 120320 - DNA, 98 bp, Homo sapiens
gtgaaacagagaaagataggcggccatggtccaaccttgaagaatgtccctcttccagtggaaagcccaaccatgcagacatcttgctcataaactta

SEQ ID NO: 120321 - DNA, 98 bp, Homo sapiens
tcggccagtcatgtatcaaagactgtttgttcaacatatctacaatctcggtactacaggtgcagcttcaagcttaggaccacccaccatgcctatcc

SEQ ID NO: 120322 - DNA, 78 bp, Homo sapiens
agcctgtctggaagttacttgtggacatggttggtgatgacaaaactgtgaagcagtggaaaatggatgggccaggct

SEQ ID NO: 120323 - DNA, 98 bp, Homo sapiens
gtggcctcgtgctggagcccggacgggcgccacattctcaacaccacggaattccatgacggcccccaagttacatgaactacctgctagactcacac

SEQ ID NO: 120324 - DNA, 75 bp, Homo sapiens
cctccccagcatgtcagcatgaccaagcgcctctactacctctggatgtggcccggtcggactaggacccgcggc

SEQ ID NO: 120325 - DNA, 100 bp, Homo sapiens
gcccagctgcgggaggaccggcaagtgcgtgtcctgctcttcagaagtggagtgaagggcgtgttctgtgcaggcatacccagatggaagtagcaaagaa

SEQ ID NO: 120326 - DNA, 50 bp, Homo sapiens
ccctttcatccctatgtggaaaacgctgtcaataccagcaaatatgcaga

SEQ ID NO: 120327 - DNA, 100 bp, Homo sapiens
tgtcctcatgatgtcctttctggaactgaaatttgtacatagattctaggcaaaatctccctccttcagtgatgccaccccctggttatcctcatatccc

SEQ ID NO: 120328 - DNA, 75 bp, Homo sapiens
ggcgctgagggagcgttgacagggaagcagccggatggctccatgttggctcaggcagacaagcttccaatgact

SEQ ID NO: 120329 - DNA, 100 bp, Homo sapiens
gttaaaatggatctgcctgataagacctggaactgagaacccaaacagagccttaagacctccagcttgactactcattaacagatgagttctgcagaaa

SEQ ID NO: 120330 - DNA, 82 bp, Homo sapiens
gaccctggagcctcagttggaagcagccgatccagcctgcggagcctgtggggcaggtttggaaggcgctttgagtccccgc

SEQ ID NO: 120331 - DNA, 100 bp, Homo sapiens
ggtgctgacgcagggccaggaggccggggggcggccaggggccgactgtgaagacaccccgaagttggagatcaaggtcactcccagtgatgccatagtg

SEQ ID NO: 120332 - DNA, 100 bp, Homo sapiens
gctacgagggcatcctctacaccatcgacaccgaaaactccaccgtagcccttgccaaagtatactgcattggaacaaaaactgaaaaaattgacggaag

SEQ ID NO: 120333 - DNA, 74 bp, Homo sapiens
aggattccaagtaactcttatttgaatgcttccaggaccactcatgatgtaccagtttcaaagaagtttcatca

SEQ ID NO: 120334 - DNA, 100 bp, Homo sapiens
tgatgcagtacattaatactgcttctaagacaatttccttgatagctgccgtgccagtactctattggctgagctcgatgatgatgaggacttacctgag

SEQ ID NO: 120335 - DNA, 75 bp, Homo sapiens
gccgcttctgtggccacggcagattttggatgccatgaatcgagactgtggaattccactcagtcatttgcaggt

SEQ ID NO: 120336 - DNA, 100 bp, Homo sapiens
tcgcatagatctttgctccatgctgaagaaaaaacaaagtaatggttattatcactgtgaatcttccattgtgattgttctaaggacatatggaattggc

SEQ ID NO: 120337 - DNA, 50 bp, Homo sapiens
cctggctcttctccacaaagacacggcgtgatggtgggcatgggtcagaa

SEQ ID NO: 120338 - DNA, 90 bp, Homo sapiens
gcttccattttccattattatgtggactaccggagcgacagcgcagtccaagaccttgcagtaaaggcatgacttcctggcaccacaggg

SEQ ID NO: 120339 - DNA, 75 bp, Homo sapiens
acagaggactaattttggcagttctaaatttgaatttgaggacttcttgatggagaccttcatcatgttcaagga

SEQ ID NO: 120340 - DNA, 50 bp, Homo sapiens
ataatcagaaggtggatcaagtggaaatttcgatttgcacactgatttgg

SEQ ID NO: 120341 - DNA, 76 bp, Homo sapiens
ctggcggactgccttctggtcaacctggcctacgagtcctccgtgaaatctgaaatagagtactatgctatgttgg

SEQ ID NO: 120342 - DNA, 141 bp, Homo sapiens
gagcagagaactcggcgccgccaaacagcccagctcgcgcttcagcgtcccggcgccgtcgcgccactcctccgaatgccttcaattaagttgcagagttctgatggagagatatttgaagttgatgtggaaattgccaaa

SEQ ID NO: 120343 - DNA, 74 bp, Homo sapiens
tctcttcttctgaaaaagagatcttggagattacctggggcaattgatgttatcggtcagactataactatcag

SEQ ID NO: 120344 - DNA, 76 bp, Homo sapiens
cagctggccgccgatattcaccaagcgcttcgctacaaggaaagaccacagcaagattctttcattcgtctcctcc

SEQ ID NO: 120345 - DNA, 74 bp, Homo sapiens
aatagtttctacctctggcttgatgatttgtcattaattcggaagaacagaatggctctctttcaacaattgac

SEQ ID NO: 120346 - DNA, 90 bp, Homo sapiens
ggtcgttttcccgtccccgagagcaagggtcccgggattcttgagctgtgcccagctgacgagcttttgaagatggcacaataaccgtcc

SEQ ID NO: 120347 - DNA, 51 bp, Homo sapiens
ccatggaataaagagctgtatttgatcaggaaccattggcactggcaagtg

SEQ ID NO: 120348 - DNA, 75 bp, Homo sapiens
agagccataaagaaagcaaagcgcagaaatgttggatttgaagtaaaaatccaggggcagaacaaggagatgttg

SEQ ID NO: 120349 - DNA, 96 bp, Homo sapiens
tttgtacccttggtgaccctgaaggacagtgggcctgattcgggaactggagcctctcctctgtcacagtgacaatccatctcagctcatctggac

SEQ ID NO: 120350 - DNA, 75 bp, Homo sapiens
gcgaggtccgcgcagcccagcgcagccatattctttggatgggaagagaccttgaaaggacctctagtttatcct

SEQ ID NO: 120351 - DNA, 100 bp, Homo sapiens
cctgaagaagaccgccactgccggagccatctcggagctcacggagagccgcctgaggagcggcacagctattgacctgttgtattggcgggacatcaag

SEQ ID NO: 120352 - DNA, 75 bp, Homo sapiens
cggcatctttggcttcagcgtgtcccgacttcactgaggatgtcaactgtgcttttgagttcctgctgaagctca

SEQ ID NO: 120353 - DNA, 75 bp, Homo sapiens
tccagatggcagccagtcagtggtggagcattcctgggagatggtcgggaagaagaagggagtctcaggccagaa

SEQ ID NO: 120354 - DNA, 100 bp, Homo sapiens
tgaccctcaaacagcagtatgatgaactggaggctgagtacgacagcctcaaacaggagctggagcagctcaaagagacttaatgaacaagccagtgagg

SEQ ID NO: 120355 - DNA, 100 bp, Homo sapiens
cttatcacaactctgtagaatgtttgcaaatgttaattaatgcagtgatgaaactacagaatctgtttgtagatgattcaggtcgatatttggctattca

SEQ ID NO: 120356 - DNA, 100 bp, Homo sapiens
actaagaatgaggtcaatgggaccagtgaagacattaaatctgaaggcgctggggctgtggagatccggagtcgccacagctcctaccccgcggggacgg

SEQ ID NO: 120357 - DNA, 74 bp, Homo sapiens
catcgtggctaaacaggtactgctggtatctgaagaagctgcacacgcaggagcgggcggtggaggaggtgaag

SEQ ID NO: 120358 - DNA, 75 bp, Homo sapiens
cagcggaagaccaaagaggatgagaaggacgacaagcccatccgaggctccctcaacctcctggtgcggtcccgg

SEQ ID NO: 120359 - DNA, 74 bp, Homo sapiens
cagcagccctccacccaggagtacgtgctgcatgtctacgtatgtccgtggttcagaccctgtattaaagcttt

SEQ ID NO: 120360 - DNA, 74 bp, Homo sapiens
cttgcacttgcactagcagcgaacgattcggatgtaatccctgttcattactacttaatacctccaccaacaaa

SEQ ID NO: 120361 - DNA, 98 bp, Homo sapiens
cccgacctcagatgctcccttctgctcctgacctgtcgcgaaatcgcctttcagaaattcctatagaagcatgtcactttgtttctctggaaaatctc

SEQ ID NO: 120362 - DNA, 50 bp, Homo sapiens
ttttgagtgcaactgccttccagaggaattacggaggttgagctggtccg

SEQ ID NO: 120363 - DNA, 82 bp, Homo sapiens
agcgggcggcttcctggcctgggcgctccggtggcggcggagctcaaactggaggattataaggatcgcctgaaaagtggag

SEQ ID NO: 120364 - DNA, 100 bp, Homo sapiens
gtgaggaattgagtggtggtagattgaaggccttcctggatgctctgcagaaccaggctgaggccagcagcaagatcatcggccagtttggagtgggttt

SEQ ID NO: 120365 - DNA, 49 bp, Homo sapiens
cacctcgagcggctgctggacgaaggtgctcctgacctctgataaagct

SEQ ID NO: 120366 - DNA, 75 bp, Homo sapiens
ctactctctctttctggcctggaggctatccagcgttgaattgaccaaagcaatggtgatggagaagcctagtcc

SEQ ID NO: 120367 - DNA, 80 bp, Homo sapiens
cccactctttccgccctaatggaggtctccagtttcgaacatggtccaagacaattcctgggaaagttcagttcttctca

SEQ ID NO: 120368 - DNA, 98 bp, Homo sapiens
cctgtgagccagttggagttgcggcggcgggaacgattgggctgagcagaggacgacatgttgcttttcgtggaggtactccaaagattcaggtttac

SEQ ID NO: 120369 - DNA, 88 bp, Homo sapiens
tcgcggcttcttcatgctttttcttctcaccatttctggccaaaactacaaacaagacttcgcagtttctccacagacactacccaaa

SEQ ID NO: 120370 - DNA, 100 bp, Homo sapiens
caattgaacccttgaatcagaaaggcaagaatgcctaccgcaggaatgggatggcttttctagcctgctgatgtgacaactgtgatgtgcctgcaacaac

SEQ ID NO: 120371 - DNA, 90 bp, Homo sapiens
gtggagcgcttctttaagggctacgggaagatcctggaggtggatctgaagaacggcacaacagctccagctggcagcatcacttcccgc

SEQ ID NO: 120372 - DNA, 100 bp, Homo sapiens
gaaacgggagtgaacggagagcgtagtgaccatcattgcaccaattccagctggacatcactgtgaaaatgggacgggataaagtccgagaaatgtttat

SEQ ID NO: 120373 - DNA, 98 bp, Homo sapiens
cccgcccgccatggcccgggactacgaccacctcttcaagctgctcatcatcggcgacagcggcatgatgacctgaaggagatgctggacaccaacaa

SEQ ID NO: 120374 - DNA, 98 bp, Homo sapiens
gccgagccgcgcagcgctgcgggggaggcgcccgcgccgacgcggggcccatggccaggaccaccagccagctgtttgtttcgacgccggaccgcgta

SEQ ID NO: 120375 - DNA, 98 bp, Homo sapiens
acgtggaaggaagttgctgcccaatgtgtccagttcttcgtgccatgaaggaggacagtgaaaaagttccgagcttgttaactgattatattctgaaa

SEQ ID NO: 120376 - DNA, 82 bp, Homo sapiens
agcctcctgagcagctgggactacaggcctccccaaagccagtcctgtgtcaccaatcaaaggaaaggaagccgtcagcaga

SEQ ID NO: 120377 - DNA, 100 bp, Homo sapiens
ctcagttctgcgctgctcccgttccccctccccagagcaagaattaaacaaccaccatgtcgagcaaaaaggcaaagaccaagaccaccaagaagcgccc

SEQ ID NO: 120378 - DNA, 82 bp, Homo sapiens
agtatttcaaccataaagacatcttaattgggcacgaaagagggcatcttctctgcattcagtttcatccaagtcattccgg

SEQ ID NO: 120379 - DNA, 100 bp, Homo sapiens
cccatcaagggaatgaacttcacattatacatgggaagctgttgataccaaaaataatgtactttataaaatcaacatctgtggaagtgtggatattgtc

SEQ ID NO: 120380 - DNA, 88 bp, Homo sapiens
ggctcccgggagacctcgctcatcgtcaccatccagggcagcggttcctcccacgatgggagcagcctcccagagtgggtgacagaca

SEQ ID NO: 120381 - DNA, 75 bp, Homo sapiens
ctgagaggttctgctcccatggctgccagaggaacccgaccagaacctgtccagccctgaggaggtgttccactc

SEQ ID NO: 120382 - DNA, 100 bp, Homo sapiens
ccgctgccgccggtgatctacaccatggagaacaagcccatcgtcacctcatgtagagcgcatgaagtacaggacaataaagcttcctacacatatcacc

SEQ ID NO: 120383 - DNA, 88 bp, Homo sapiens
aaggacaagcaggctgctgctaagtagtgggcagcagtcagtgacaggtgtaacctctgtggatgacagcaacagttactggaggata

SEQ ID NO: 120384 - DNA, 97 bp, Homo sapiens
ggggtcggggccggctgaccaggaacctgggcgagcagcggcgggggcccgaggggttcctgatgttattagcagcataaggcaattatctaaagcg

SEQ ID NO: 120385 - DNA, 99 bp, Homo sapiens
gcattgcagttggctgaaccttgtgtcaaccatccattccaggagccagctatctgaggatgcagagaatcaaatattaaagacaagtgtatggtacca

SEQ ID NO: 120386 - DNA, 75 bp, Homo sapiens
ctactgcccgcctgctgcctgttactgtgcacatgaacttgaacagatgcagctgattttagaatctattcctgt

SEQ ID NO: 120387 - DNA, 83 bp, Homo sapiens
ctttggaatcttttacttctcacttggacaagaactcaagagcagaatctccgacaatgcagatcttcgtgaagactctgact

SEQ ID NO: 120388 - DNA, 50 bp, Homo sapiens
caactatcttacaaagcacaggaaagaaccagacataagttcagaggaat

SEQ ID NO: 120389 - DNA, 100 bp, Homo sapiens
tctcagccctggatggtgaatttcagtcagcctcagaggttgacttctacattgataaggtttctctggaaacccccctggtaagtgtggaggaggcggg

SEQ ID NO: 120390 - DNA, 60 bp, Homo sapiens
gcaaagtgtccccggcaagaagattactcttgtctctgctgctcctgggaaagtgatttg

SEQ ID NO: 120391 - DNA, 82 bp, Homo sapiens
tgagccacagtgtgatcccagctttaaaggagatgcaggagaaaatacggcattgctagaccatccttcctgctgctgccca

SEQ ID NO: 120392 - DNA, 90 bp, Homo sapiens
gcctttgagcggactcccttttaagggggaggcccccgctgagatgggggcgctgctgctggagaaggaaaccagaggagccaccgagag

SEQ ID NO: 120393 - DNA, 90 bp, Homo sapiens
ccacggtgatgagccgggcctggcggacgcggcgccatcgcagtcaggtggctattatcatggaaaactaatttttcccagagaatttcc

SEQ ID NO: 120394 - DNA, 100 bp, Homo sapiens
tgagactttcacaataagagcagaggatggaacacttcagtgcattcaagttgtattccctgaatgactataaaccacccatttcgaaagcgaaaatgac

SEQ ID NO: 120395 - DNA, 82 bp, Homo sapiens
ctgatattgaagaggaagaactgaccagagctgatcccgagcagcgtcatgtacccctacaccatccggaagatgaagaacg

SEQ ID NO: 120396 - DNA, 90 bp, Homo sapiens
aaactgacactcgattcagctattggaaagtttttttaatgtggttggaacaactgaggacaatctctatgggaagcagaaggcaaggac

SEQ ID NO: 120397 - DNA, 50 bp, Homo sapiens
cccccgaagaagactcccccacatctggatgggcaaaacatgtagctgag

SEQ ID NO: 120398 - DNA, 100 bp, Homo sapiens
tgacgctgagcgaggcggagaaggtgtacatcgtgcatggcgtccaggggagggccccaaagctcatattcgtaagctggctgagtgcatccgctggtcg

SEQ ID NO: 120399 - DNA, 131 bp, Homo sapiens
gtatgataatcccaccaacaattccatgtccttgagagatgagcacaattacaccttgtccattcatgagtttgtgggcatcacctatgccctgaccgttgtgtggctcctggtgtttgcctgctctgctg

SEQ ID NO: 120400 - DNA, 101 bp, Homo sapiens
aaacaatagctcaaggaaacctttccaacacagatgtccaagctgccaatgtggcccagagttgctcagaattggagcagagcctgagacgtatctgcaga

SEQ ID NO: 120401 - DNA, 75 bp, Homo sapiens
gcagcagccatggaggacgagatgcccaagactctattggtatacgatagagagacaggaaagccaaagggttat

SEQ ID NO: 120402 - DNA, 90 bp, Homo sapiens
atcttgagcaccctctgctgcttgagccaggtcatcgcaagtttgacatccggtactctttgagcacatcaaattcttccattgccgctc

SEQ ID NO: 120403 - DNA, 74 bp, Homo sapiens
ttaagcagaatcctatggctactgttcaaaaggtgatgacctatcaacagccattctcaaacagaagaaccgtc

SEQ ID NO: 120404 - DNA, 100 bp, Homo sapiens
gaaacccagcttgatatgttgacggcaaatggatacatcttgttttttcatattacatctacaagaggggacaagtacctttatgaaccagtgtatccca

SEQ ID NO: 120405 - DNA, 100 bp, Homo sapiens
tgccaggccagctcgaagaaggcgagcagggtgcgggagagccccttgcagaagacgccgtacgagtctcaaatatctatcagtgtagaagagtgggaag

SEQ ID NO: 120406 - DNA, 90 bp, Homo sapiens
aagtctccctcaggatcagaccgtagcccttccggaaacctccatggctgcagtgcacctgccagcacaacacctgcgggggcacctgcg

SEQ ID NO: 120407 - DNA, 100 bp, Homo sapiens
tggtttgctctctggagacaaagtcaagccagtcctcatgaactcaaagctgcctcttgatgtcctgggcagggttatcaatactctggctgaccatcat

SEQ ID NO: 120408 - DNA, 100 bp, Homo sapiens
cagcattccatcttaagcaaccagaggaatatcattatctcaatcaggagcgcaagcctctcttcggcccggaaagatttaagttcgtgaatgcatacgc

SEQ ID NO: 120409 - DNA, 110 bp, Homo sapiens
attggtactaatttgtctctgattcagtgtccaagagttcagtttcagtgggtgggcctgatagtcctgattcagtggatcccgttgaaccaatgccaaccatgactgat

SEQ ID NO: 120410 - DNA, 102 bp, Homo sapiens
tggtttcggtgggaatgacaacttcggtcgtggaggaaacttcagtggtcgtggttccaatatcatttgtggatcgtgtttatggtgaatccaagttgggag

SEQ ID NO: 120411 - DNA, 98 bp, Homo sapiens
tgtggccctgggctttaccatctttgtggctgtgcttgccaggcctggctccatgccggtggtggtgtgcacattgagccccggtatagacagttccc

SEQ ID NO: 120412 - DNA, 74 bp, Homo sapiens
accaagagggtgttcgactgctagagccgagcgaagcatgtgaagttcatttccaatccgccctccatggtggc

SEQ ID NO: 120413 - DNA, 75 bp, Homo sapiens
tcgccccccggctgctggatttccagaagacgaaatacgcgagggttaccttcccgccaatgtagaccggagacc

SEQ ID NO: 120414 - DNA, 99 bp, Homo sapiens
gggaccggtgtctggcggatgcggtcgtgaagataggttgaaatcacaaagattagacacctttttagataggtgttcttcagcaccactgacaacacg

SEQ ID NO: 120415 - DNA, 75 bp, Homo sapiens
ggacgagaggatgcggagcccgcagaacctccacagtcaagaggacggttaatttggagtggcccctggagtcag

SEQ ID NO: 120416 - DNA, 100 bp, Homo sapiens
ctcagcgcagccgccgcccgcggagccagcacgaacgagcccagcaccggccggatggagcgtccgcaacccgacagtcggacatgatgtcacacctggt

SEQ ID NO: 120417 - DNA, 100 bp, Homo sapiens
ggcatcttctgcctcgtcctgacacccaccaggtatttattacagtatcaggagccaataccttgtgagcagttggttacagcgctgtgtgatatcaaac

SEQ ID NO: 120418 - DNA, 98 bp, Homo sapiens
ggccatcatcatgaaggacgtgcccgactggaagaatggcattgtgcccatcgtggagcctgagatcctccctgatggggaccatgacttgaagcgct

SEQ ID NO: 120419 - DNA, 73 bp, Homo sapiens
ctctcacccctgtgcgtgctgctctggagggaactcacaggcatccagaaatctcacaagcgaggaatgaaag

SEQ ID NO: 120420 - DNA, 100 bp, Homo sapiens
tgtgcctcttcatattggcgatcctgttgtgccacagtggctgccttcacagccagcgagggccacgcacatcccagggtagtggagctacccaagacgg

SEQ ID NO: 120421 - DNA, 90 bp, Homo sapiens
cttaaaagatgccacctctaagacttttatcggacgttttcgccgcatcatggactcctcacagaatgcttacaacgaagacacttcagc

SEQ ID NO: 120422 - DNA, 83 bp, Homo sapiens
gctggactcgggagtggtgaaacgcctgtacacgttggatgggaaacaggaattacatgaatgacagtcttcgaaccaatgtg

SEQ ID NO: 120423 - DNA, 100 bp, Homo sapiens
ggcttaattaactcatgtctctctctcttttctttcagtctgcaactgtgtctgatggcgtactatactggcaattgctggagaagattttgcaattgtt

SEQ ID NO: 120424 - DNA, 100 bp, Homo sapiens
aactccaacgtgttctccatgttcgaacagacccaaatccaggaatttaaggaggaattgaatgatctggcacgggaccctccagcacagtgttcagcag

SEQ ID NO: 120425 - DNA, 76 bp, Homo sapiens
catcaccaagctggaggtggacgccatcgtcaacgccgctgctgaaatagttcgagaaatcgaaaatatagagaag

SEQ ID NO: 120426 - DNA, 90 bp, Homo sapiens
gaaggcggaggaggacccggaggccgcggatagcgggggcaccctaggctgtgatcctggaactgaacatctgatgagtcaatacagggc

SEQ ID NO: 120427 - DNA, 75 bp, Homo sapiens
caaagctgtaaaaccagctatgaatcagaatgaagtccaagaaatcataggaaggaccatcgagacctgttcttg

SEQ ID NO: 120428 - DNA, 100 bp, Homo sapiens
cccatttcctgggaacaagctgacccttttgcggccgtggagaagtgtaaagatgcaggattggccaagtccatcggggtgtccaacttcaaccgcaggc

SEQ ID NO: 120429 - DNA, 98 bp, Homo sapiens
aaaatgctgttcgccaaaatggacagctggtcagaaatgattctctgtttatttatgaaacagagcatcataatggcatagcagagttactggaaata

SEQ ID NO: 120430 - DNA, 98 bp, Homo sapiens
ggacattgttgcccggtccctgtactcagaaaaagagcattccatggactttttgctatttcagtttggcctttgcacttttaagtatgactacacag

SEQ ID NO: 120431 - DNA, 75 bp, Homo sapiens
tggcggctctagggaccccccccgcgcctgcacttagccccgcgcccgagggtgagaactctgtctcagtcgacg

SEQ ID NO: 120432 - DNA, 100 bp, Homo sapiens
tcgcacctaaagtcgcacctgcggacgcacacaggaaacccggggatggcgtggagttctttgcccacatgcgcctcatgctgaagaagggggaaggcag

SEQ ID NO: 120433 - DNA, 107 bp, Homo sapiens
gctgcaggcgccgccgccggacgtcggcaacggagaaggagaaggaagccaacatccttttggagccatgaatattgtccgaactccatctgttgctcagattggaa

SEQ ID NO: 120434 - DNA, 100 bp, Homo sapiens
ccaagacggcgattactctccagacaactcagcccagccgggggacagggtcatttgcttacaggtatcacctgattttgatacagcagcaggaagcttg

SEQ ID NO: 120435 - DNA, 49 bp, Homo sapiens
ctgggtgcccacaatcatggaggaggggtaaagagtgtcactaaaatct

SEQ ID NO: 120436 - DNA, 98 bp, Homo sapiens
cctggcagaggatggagagactgtcgcaagggaagtgaaatcaaatacattgcccatctcgctgcagtctataagaagtagcctactgctaggcttca

SEQ ID NO: 120437 - DNA, 82 bp, Homo sapiens
tctccttcgctgtggcgggaagatggccggatttgaagggtggcccagttgaaatccttcccttcctctaccttggaagtgc

SEQ ID NO: 120438 - DNA, 101 bp, Homo sapiens
ctccccgccgctcccgggggccgtgacgggctacaataaggcagtggattggtgggcattaggagtgctaatctatgaaatggcagctggctatcccccat

SEQ ID NO: 120439 - DNA, 89 bp, Homo sapiens
aacttacccgagaacgtgcgggaagagaagatcatcgagcatttcaaacggaacctgggcaagtctggcctgcgggtctcctgcctggg

SEQ ID NO: 120440 - DNA, 75 bp, Homo sapiens
agtagacggtacagcgaaggcagagagttcagggtcatccgagagttggctgcgagggcgctgcacaacctggcc

SEQ ID NO: 120441 - DNA, 90 bp, Homo sapiens
cgcgagcggcgctaccgggagcgggagcagcagatcgaggagcacaggcaggtcctggtgatcttgtcccagctagagggcaacgccggc

SEQ ID NO: 120442 - DNA, 82 bp, Homo sapiens
ccgcgccccccgggacccccacgccgccgccaggttttacctcacaaaaactactacaagcaccaagctccctgatggaaag

SEQ ID NO: 120443 - DNA, 90 bp, Homo sapiens
ctccggggacccttccgtatctgcctaggcattttgctgtctcctcctaatacgataatgctcggaatatttttcaatgtccattccgct

SEQ ID NO: 120444 - DNA, 100 bp, Homo sapiens
gtgccatgattgtaaatttcctgaggcctcctcagccctgcagaactaatatgcttttaaggctattaaccagggtggccttacatcagtagctgtcaga

SEQ ID NO: 120445 - DNA, 75 bp, Homo sapiens
tcttcacccgcaccatgatcgttatgaatgatcaggtgttggggatgtcctttgcactgaccctgaactgccaga

SEQ ID NO: 120446 - DNA, 89 bp, Homo sapiens
ggaagaactcgtcatgctctttgtagcgtggtgcttctgttgctcacagattacctctctagtgacccttcagctgttaaccctggttg

SEQ ID NO: 120447 - DNA, 73 bp, Homo sapiens
tggctgacttctggctcacagtgacagccacagacgcggatagtggcccatttggcctcctctcctattcctt

SEQ ID NO: 120448 - DNA, 82 bp, Homo sapiens
gccagaccaagctgtgagatagtagatggcacccgagaagctagcaatagcgcagttgtgtagcagttgagtaatgctggtt

SEQ ID NO: 120449 - DNA, 100 bp, Homo sapiens
agattttccgctacgtcctgagcttcctgcggacgtccaagctgctgcttccggatgactttaagggctacaagaagcaggcagcactgaagctggggga

SEQ ID NO: 120450 - DNA, 93 bp, Homo sapiens
ggagctggacggcgagcgcgagcggcgcgagaaacggagctggagtttgttcagatcatcatcatcgtggtggtgatgatggtgatggtggtg

SEQ ID NO: 120451 - DNA, 90 bp, Homo sapiens
gtggagcagcagctccccacgctgcatcatgagtgcagccggctgcaggagcagctagcgcaggtgtctgtgacctttgaggatgtggct

SEQ ID NO: 120452 - DNA, 50 bp, Homo sapiens
gcccccacggttctgcttccaggatggcacatttcctagaggcagaatcc

SEQ ID NO: 120453 - DNA, 95 bp, Homo sapiens
ctcagttggaagcagccgatccagcctgcggagcctgtggggcaggtgtcgtgaaaactacccctaaaagccaaaatgggaaaggaaaagactca

SEQ ID NO: 120454 - DNA, 50 bp, Homo sapiens
cccatgaagccagatttctcccagatggcttggctggaggacaagcaaat

SEQ ID NO: 120455 - DNA, 90 bp, Homo sapiens
tgggaaggaggccgagccgggatctcaggtcctcgggggcggcggccacgccaaggacggacatcattcagtcgaggtttcacaaagaac

SEQ ID NO: 120456 - DNA, 100 bp, Homo sapiens
gagcggccgcgtttcggcctcagaactgcagtacagcaatggcgatcagaaggtagaacagctgtatggctgcacattcccatcctccaaagccgattta

SEQ ID NO: 120457 - DNA, 83 bp, Homo sapiens
tttgttaaggattccaagtaactcttatttggtagaaaatctggtgtattaactgtgaaaattttagagctgcatgaggaatg

SEQ ID NO: 120458 - DNA, 74 bp, Homo sapiens
gatttgttaaggattccaagtaactcttatttggtatcgagaaccttccctgcgaacttcagaggaacttccag

SEQ ID NO: 120459 - DNA, 100 bp, Homo sapiens
tagtcttgggactctggcccaggagggccaggaaggaatactgggagaatcttcggatagcctcaggccggccatacaacccttcaatgtcaaagccaga

SEQ ID NO: 120460 - DNA, 90 bp, Homo sapiens
ctgtgacctgtggagacacggccagatctgccctccagttttgattcccaccatggccatcacccagtttcggttatttaaattttgtac

SEQ ID NO: 120461 - DNA, 96 bp, Homo sapiens
tggccggagcccttgggtgaaattgttaggcgtggagagggagtgatgtcttccagactcggtgctgtacccgccatgcttttactgactctgcta

SEQ ID NO: 120462 - DNA, 87 bp, Homo sapiens
caaaccaagacacaatgcagattcttttccgacatctcagaagttgatccacctgaagaattaggagctagtatttctgtcacaaca

SEQ ID NO: 120463 - DNA, 101 bp, Homo sapiens
ccatccatcgcataagagcaaagaatactattgttgccacagggtaagccaagatgggtgcatacaagtacatccaggagctatggagaaagaagcagtct

SEQ ID NO: 120464 - DNA, 78 bp, Homo sapiens
cgacaccatgcatctcctcggcccctggctcctgctcctgggaagctgaagagggaactacccttttcattccgatca

SEQ ID NO: 120465 - DNA, 90 bp, Homo sapiens
gccgccgctctgccacggtctgcccacccaacgcgaagacggtaacccgtgtgactttgactggctttaccactcctgaaggccctaaac

SEQ ID NO: 120466 - DNA, 75 bp, Homo sapiens
gctcatctctgagacccggaggaggttcgaagctgagtatgtgacaggtgaactgtcacccctacaactcagctt

SEQ ID NO: 120467 - DNA, 75 bp, Homo sapiens
accaagtgcggacgctgtgcgagaagtatgtcagatgaagagcaagaaagtagttgtgatacggtggatggctct

SEQ ID NO: 120468 - DNA, 51 bp, Homo sapiens
gtcctcgcttgcagttcagcgaccacggacacagcattgttggttttgcca

SEQ ID NO: 120469 - DNA, 88 bp, Homo sapiens
ctgctcactaccgcgcccacgtgtcctgttgtgcttcattcccacaggccgcataagacaatatgtgcactcatttgtggacgtccaa

SEQ ID NO: 120470 - DNA, 125 bp, Homo sapiens
ttcccacttgattacccgttaagtcccccaaagatgagatttacctgtgagatgtttcatcccaacaacattcactactttcactgcctaagaatcctggaccttctcaaaggcacagaggcctc

SEQ ID NO: 120471 - DNA, 97 bp, Homo sapiens
agtctacccctcctgtcggggaggcaaggtggttttggaccagacaggcgtgtctaagtaatctgtaagtcagatgctccaacaggggatgttcttc

SEQ ID NO: 120472 - DNA, 75 bp, Homo sapiens
agatatggaattatttcgtgatatccaagaacaagcactgcagaatttctctgcaaagaatgtccaaaaattcat

SEQ ID NO: 120473 - DNA, 147 bp, Homo sapiens
tttgttggggagaagaggattggaggtgtcagtgttaaaggaacctctacaacgaaggtgaagccacggaagataaggctgaaggtgatgtggccgccctcaaccgacgcatccagctcgttgaggaggagttggacagggctcagg

SEQ ID NO: 120474 - DNA, 100 bp, Homo sapiens
caagaggtggaagaggacgggctttaggctggaagcgccttagaggagccatttttccaggtacaggtgaacaaaggcagagtaaactgtcaccccagat

SEQ ID NO: 120475 - DNA, 75 bp, Homo sapiens
aaatacttcatatttggcttcaatgtcatattttggatgtgttttcgcattataacaaggacctgttgacagagc

SEQ ID NO: 120476 - DNA, 51 bp, Homo sapiens
caaccttcgatctcctgacgacttggatcctagcatgactatacattgtga

SEQ ID NO: 120477 - DNA, 88 bp, Homo sapiens
tgggattaatgctaaatttgtgaatgctgtgtatgataccttacttaatactagtaacttcttacagaacttcctctctctagcattg

SEQ ID NO: 120478 - DNA, 90 bp, Homo sapiens
gttttgcagactgctgtaaatatatagctcagcgaggcatgaaaacagccctggaagtctgccctggcgcctgcactgagactaatccag

SEQ ID NO: 120479 - DNA, 100 bp, Homo sapiens
cgctgcccgcgcgcatctggctgcagctctgcggggcgcaggaggcggtgcacagcgccaagtattgctaccagtagtgcagtttcaaaggaactcacca

SEQ ID NO: 120480 - DNA, 89 bp, Homo sapiens
caagctttgtctccttcgacttggagtctttgtccaggacggtagcacaggcggagtgcagcggaggcccctgccgctgccgtcatgcc

SEQ ID NO: 120481 - DNA, 99 bp, Homo sapiens
cgccgcgtgtcctcggagcgcggtccctgtattggtctcctgctcctagagccttatgccagcctggaccatcttggaggcagtgtaggatcatggaag

SEQ ID NO: 120482 - DNA, 100 bp, Homo sapiens
ccgtcaagctggccaagcacaaagagcttgctccctacgatgagaactggttctacacgcgagctgtcaggatggctaaaggtgaccccaagaaaccaaa

SEQ ID NO: 120483 - DNA, 74 bp, Homo sapiens
gtgatctgcgctaggtggcatctcctctcacggatgcctcgggcgtctctggccgagcctctttttgtggaaaa

SEQ ID NO: 120484 - DNA, 75 bp, Homo sapiens
gcgcgccgccctctcgtcccactttccagggctgaagaagatgcagagcagcctgaagctggtggactgtatcat

SEQ ID NO: 120485 - DNA, 75 bp, Homo sapiens
gcagagccccagctcctgtctggtctgtgagatgtcctcactgtttcaggaggccagaagcggactcctagaaga

SEQ ID NO: 120486 - DNA, 50 bp, Homo sapiens
ggcgaggcctttcaccaagtccatgtagccggatcgagctgggagatgtg

SEQ ID NO: 120487 - DNA, 83 bp, Homo sapiens
cgtgagctgagggcgcagaggcaggcaggccctggccaacgtcaacattgggagcctcatctgcaatgtaggggccggtggac

SEQ ID NO: 120488 - DNA, 74 bp, Homo sapiens
aaaggatacggaggaagtgtggacagtggacctacatacaatggatatgttcaaggaatgagtgatttactttc

SEQ ID NO: 120489 - DNA, 100 bp, Homo sapiens
ttggcagtgccacgaccatctcgcactaccctgactacagctggagcgcccagaggcgagccctggtggaggaagagattggagctggagtgagccttcc

SEQ ID NO: 120490 - DNA, 97 bp, Homo sapiens
ccgagaaccgtcagtttgagccagatgttaacccagtatccactccagttgcacttcccacaccagctctttctccaagtttgatggctgatcttga

SEQ ID NO: 120491 - DNA, 90 bp, Homo sapiens
actgtgcagtatttccagtctgtctcaggtcagagtggggccggcaacaactgggccaagggtcactacacggagggggcggagctggtg

SEQ ID NO: 120492 - DNA, 95 bp, Homo sapiens
cccggacagtggcagtgaaacaggttgtgcccacgtgcctcagggccttggtagaaatggcccgggtagggggtgcctcctccctggagaatact

SEQ ID NO: 120493 - DNA, 100 bp, Homo sapiens
ctggagaggatgagttgccggcgcttgtccatggcaggctgagagcagagccccgtgtctgagagcaggtcaatgagctgaaggagaaaggcaacaaggc

SEQ ID NO: 120494 - DNA, 100 bp, Homo sapiens
cacacaccagtcggcagcctccctgataacaacgaacttgatgcaagtgataggtttgccaaggtcagacctctcatcatccggatgaactgcaatttcc

SEQ ID NO: 120495 - DNA, 100 bp, Homo sapiens
cacccgccgcggggaggaggagcgggcgagaagctgccgccgaacgacaggacgttggggcggcctggctccctcagtttggggattctcagcagttgcg

SEQ ID NO: 120496 - DNA, 60 bp, Homo sapiens
tccacgaggaggagtacctggaaattaggggagaaagggatgaggatgttggataagcag

SEQ ID NO: 120497 - DNA, 109 bp, Homo sapiens
cagatcctgagacccggacagtggcagtgaaacaggcagcctggcatcctcgctacaacctcattgttgtgggccgatacccagatcctaatttcaaaagttgtacccc

SEQ ID NO: 120498 - DNA, 75 bp, Homo sapiens
aaaggagtcgtgaagtttggctggatcaagggtgtattacctacagacctggtacctggatttttgcccgagatg

SEQ ID NO: 120499 - DNA, 51 bp, Homo sapiens
gaatgaagtggaaactcaattcaagggttatgtggtccgaatcagtggtgg

SEQ ID NO: 120500 - DNA, 75 bp, Homo sapiens
tggggcagatcctcttctggaggtgttacacataatattgcattacttcgagaggtgataatcaactcacgcttt

SEQ ID NO: 120501 - DNA, 100 bp, Homo sapiens
caaatggagctcagaaagctgtatggacctctgtgtggcaacatggccaacgccctggccagcgccacttgcgagcgctgcaagggcggctttgcgcccg

SEQ ID NO: 120502 - DNA, 82 bp, Homo sapiens
ctcgtgatggggctgatcttcgccaaactgtggagcctcttctgtaaccaaggttttaaaatcaaagatgggaaaatcggag

SEQ ID NO: 120503 - DNA, 83 bp, Homo sapiens
tgatcatgttgttgccgtgtgtgctggaaacaaaatattcatgctggatattgaggcacagaaaactgaatctgtagataacg

SEQ ID NO: 120504 - DNA, 75 bp, Homo sapiens
ggaagatcgcgatcctgggctaccggtctgtgggtattgccatcagagagtcagcaaaggtagttgaccaagctc

SEQ ID NO: 120505 - DNA, 83 bp, Homo sapiens
cagggacagtgggcagtgctcccggaacacaagctgtgaaacactaggtcaaaatgcagatcttcgtgaaaacccttaccggc

SEQ ID NO: 120506 - DNA, 75 bp, Homo sapiens
ggaggagtatgtcaagcgagccctgactccaaggggctctcgaacccggccgaggtggaggcgctgagggagaag

SEQ ID NO: 120507 - DNA, 98 bp, Homo sapiens
gactattttcacgttttaatgccgagagacagaccccgtgcggctgacacagctgtatgagcaggcccggtgggacctgctgctggaggagattgact

SEQ ID NO: 120508 - DNA, 89 bp, Homo sapiens
tgaaaacttcgaggcactcaagtcctggctcagcaagactctcgagcccatacctttccagctcacccccagggccttatggtcaagaa

SEQ ID NO: 120509 - DNA, 74 bp, Homo sapiens
ttaaagctgagctgcgaggaaaatggcggcgggagatgaagagcatgatctagaagaggatgagagtggcactc

SEQ ID NO: 120510 - DNA, 80 bp, Homo sapiens
ttcaagtgcctgcctctgccccttggtgggctgaagcttcatggaggtgaagaagctaagtctcagaaagataactcacc

SEQ ID NO: 120511 - DNA, 99 bp, Homo sapiens
gtaacctcagagatctgggcaggtgtggatgaggtcaccattgtcaacattttgaccaaccgcagcaatgcacagagacaggatattgccttcgcctac

SEQ ID NO: 120512 - DNA, 75 bp, Homo sapiens
ggcattgacatttaattttagggtcctttatatagaagggagagttcacatcgagttcacagagggcgaagacaa

SEQ ID NO: 120513 - DNA, 100 bp, Homo sapiens
tgcgtcaacgctagtgccgtcagccgcctgcgcgcctacctgctgccagcgccgccagctccaggacaacttgcctttgatgattttcaagagagttgtg

SEQ ID NO: 120514 - DNA, 100 bp, Homo sapiens
cgctgctgcacctggtgaaggaggtggtgaagaggccaccccaagtcaaagggggtgatgagggagagtggtgaatatcagtagtttgcagtgtttaagg

SEQ ID NO: 120515 - DNA, 98 bp, Homo sapiens
agagagggagagtgacagcagcgctcgatgaaggtcaccgtgtccaaagggggcgaccgggacagtgacgacgacagcgtcctcgaagccaccagctc

SEQ ID NO: 120516 - DNA, 50 bp, Homo sapiens
attactgcgagaacaactacatacagggcccacccaatgctaatgaagac

SEQ ID NO: 120517 - DNA, 100 bp, Homo sapiens
aaatctaaaaggcgcgagagaatggatgatagtagtaccacagagtattcagccatggcctcgctggctggtgggctggacgacatgaaggccaatctgg

SEQ ID NO: 120518 - DNA, 100 bp, Homo sapiens
cgccaccactggatcctccccttcgtgcaggctctgaaagcccgtatgacctccttccacaggttttttgcatgtctgacacccatgactccacctggac

SEQ ID NO: 120519 - DNA, 106 bp, Homo sapiens
ctgactgattatgaaagaagcagtagactggtatcaagaatcagtcaggcccagaagccatggcccactataagactgagcaggacgactggctgatcatctactt

SEQ ID NO: 120520 - DNA, 90 bp, Homo sapiens
gtcggaggcgatatttctaggggtgtacttgttggggtcaggatatgtgtcacaaagatgtctacacggaactgccagggaatggactca

SEQ ID NO: 120521 - DNA, 100 bp, Homo sapiens
ccttcgtccccgcagaggaccccccgacaccagcatggactgctgcaccgtactccaaagattcaggtttactcacgtcatccagcagagaatggaaagt

SEQ ID NO: 120522 - DNA, 114 bp, Homo sapiens
gtcgagcagttaggccgcgagcgactgcggcgccgagccggccaccaggaaaccctccccgaagaatgggtagaatcaatcatctgcgtggccctagtccccctccaatggctg

SEQ ID NO: 120523 - DNA, 100 bp, Homo sapiens
cgaggaggcagccaagctcgtagcctgccactccgtgcgtttggtgcacctcgatttggaggaagtagggcagggcccttatctggaaagaagtttggaa

SEQ ID NO: 120524 - DNA, 98 bp, Homo sapiens
ctagcacgtggaattcgcgaagctgccaaagccttagacaaagcctgccttctggtacaagatgcctgtggaatgttcggtgaagtgcacttggagtt

SEQ ID NO: 120525 - DNA, 110 bp, Homo sapiens
aggggcggcgcggcccggggtgtcagtgtggaggagactgaggagccatgtggctagaaatcctcctcacttcagtgctgggctttgccatctactggttcatctcccgg

SEQ ID NO: 120526 - DNA, 101 bp, Homo sapiens
atccttggtcaaatggatagccctacacagatatttgagcatgtgttcctggatgatgatgctgaagctatccttgctgcagacttcgaaattggtcactt

SEQ ID NO: 120527 - DNA, 120 bp, Homo sapiens
agagaaagaccgagtgctaaagaagcaggatgcattctacaaagaacagctggctagactggaggagaggatgctattaactgagtacttggatatgaaaaatactcgtacggcctctga

SEQ ID NO: 120528 - DNA, 50 bp, Homo sapiens
taaggtgtattcgcagcttaaatgctacaccacctgaaactcagcagtca

SEQ ID NO: 120529 - DNA, 74 bp, Homo sapiens
gctcagttcaaagacctgttcttaaaaaaaggcctctgtgtcctttgtcccaatagtaacaactccctcctggc

SEQ ID NO: 120530 - DNA, 98 bp, Homo sapiens
attgctaatggagacatcagaagcttaaaggaagcagaaaatgtgtggcggattactgggacagatggttgctccttgagggcaggacagttcttatg

SEQ ID NO: 120531 - DNA, 88 bp, Homo sapiens
cagctccaggtggggctgatccagcaggaaattcagttcatgaagataagaagtttcttgacaaatacatgccccagttcatgaaaca

SEQ ID NO: 120532 - DNA, 51 bp, Homo sapiens
ttcgactctgtgcgggactgctacgaagtgtatcgcattaagttcaaggag

SEQ ID NO: 120533 - DNA, 75 bp, Homo sapiens
tggtgaagttgaatctgcaaaacttattcgggataaagtagcaggtgtggatgaggtcaccattgtcaacatttt

SEQ ID NO: 120534 - DNA, 80 bp, Homo sapiens
ccacactcaagttctttcctgccagtgccgacaggacgcaggttcaggagaagtggcacctggtggaggacctgtcgcga

SEQ ID NO: 120535 - DNA, 98 bp, Homo sapiens
cgttgaggcccttcttgtgtatctggagaaaatagaggccgattcaacagtcattgagaagtggatggatggcgtgaaagacttcttaatgaaacagc

SEQ ID NO: 120536 - DNA, 83 bp, Homo sapiens
cgctgaagcgcgcgggcaaggaggtgctgctggaggcctctcaacattgcctacagccacatctacagctcctacaggaattt

SEQ ID NO: 120537 - DNA, 83 bp, Homo sapiens
gggatacagcagtttggtcaatattgtcttaacatgcttcaaataaatcaggccagataaacacttactgccagaacatcaag

SEQ ID NO: 120538 - DNA, 93 bp, Homo sapiens
gccggcttcaggaggcccaagacaccacagaagccctccgagcccaggtggtctacatagcctgctccttcaccacggtctggttgatttata

SEQ ID NO: 120539 - DNA, 75 bp, Homo sapiens
acaaaagaccgtttgtgttttgtgatggaatatgttaatgggggcgagcatcttcacaactatttcacagtgact

SEQ ID NO: 120540 - DNA, 100 bp, Homo sapiens
gctccgcggaagatgccggaccaagccctacagcagatgctggacaggttcttgggtgtctctggggagtccctgggccagaccttcctccagactccag

SEQ ID NO: 120541 - DNA, 101 bp, Homo sapiens
ctgaagaacaaccgcaggtcgaattgttcgtgaaggttgcaaaagcttctcatttcagagagatgccaggatcctaagtgcctgccaaacttaccaattct

SEQ ID NO: 120542 - DNA, 101 bp, Homo sapiens
ccctggtcttgctcggccgatgaagtgcagaggtttttttctgattactccaaaggtttcggcggcaaatacggtatcgacaaggacaaagtggataagag

SEQ ID NO: 120543 - DNA, 100 bp, Homo sapiens
ggtcctttatatagaagggagagtaggttataagcacatgtccttggccctgaataggactggcagaagcattgtgtactcctgtgagtggcctctttat

SEQ ID NO: 120544 - DNA, 100 bp, Homo sapiens
ttctgagattgcatcaggatattaatgattataaccggagattctcagggcaacccagatctgaagaaggtgtgcagcgggcccgggaggaggaggagaa

SEQ ID NO: 120545 - DNA, 75 bp, Homo sapiens
cgaccttctggtttgtaaagatgaaaatgggcagagaaagcaaccaggctacttctacaagtccgaacagccagt

SEQ ID NO: 120546 - DNA, 75 bp, Homo sapiens
gacagagtggagccatggctagaggttgtgaccgagattcccgacgagagagactgaggggaagagaggaaggag

SEQ ID NO: 120547 - DNA, 75 bp, Homo sapiens
cacctggcggtgcccgaggagtagtcgctggagtccgcgcctccctggagattcacggatccatccgggtggtcc

SEQ ID NO: 120548 - DNA, 50 bp, Homo sapiens
gctgagggcagccccgtccaggatgagcagcaccagcagtaagagggctc

SEQ ID NO: 120549 - DNA, 101 bp, Homo sapiens
gctgacaatcgagcaaggaaacctgggattggacaactgaatttaaaggcaagttaaagttcaatattttgaacaatgtttaaatcaagatgagcgagaag

SEQ ID NO: 120550 - DNA, 90 bp, Homo sapiens
tgctcctgctcatgatccacgtgttccgagaaaacgaagagcagctgttcaaagtggctgtatctgacagacccaggccttccagctccg

SEQ ID NO: 120551 - DNA, 75 bp, Homo sapiens
ggcaaccagctgcgtccagcaatctccagcctcagttacaggaatttggtcagtttagaggatttaataagtccg

SEQ ID NO: 120552 - DNA, 99 bp, Homo sapiens
agtagttcaggaggggagtctgatattgaagaggaagaactgaccagagctgatcccgagcagcgtcatgtacccctagtctcgctctgtcacccaggc

SEQ ID NO: 120553 - DNA, 82 bp, Homo sapiens
ttcagcctcctgcctgagcctcccaagtagctaggactagagggtgatcagcccatgacctaaacctccagacaaaataaaa

SEQ ID NO: 120554 - DNA, 75 bp, Homo sapiens
cgccgctgccccggctgcctcctccctgaggacatttgggcttccaggacagttttgtcacatcaggtgttttta

SEQ ID NO: 120555 - DNA, 83 bp, Homo sapiens
gtcggcgtgagcgtgaggtgtgggtgttcgtttctcaggtacatacctatgtcaacactacaggtgtgcaagaagagcggaaa

SEQ ID NO: 120556 - DNA, 137 bp, Homo sapiens
aaaaatcgtctgtctcctgttttctaggtggaaagaatctgatgagccttttaggcctgttcaggtctcacagatttcaagcctggctactggattggtgtccgctatgatgagccactggggaaaaatgatggcag

SEQ ID NO: 120557 - DNA, 105 bp, Homo sapiens
cctggcccgtcatggagatggaaaaggagttcgagcagatcgacaagtccgggagctgggcggccatttaccagaaactcatcgcatacgggcacatcactggca

SEQ ID NO: 120558 - DNA, 100 bp, Homo sapiens
ttcgactacttcaaccaggaggttttccgagacaacaacggcaccgcggtgagaagccctaccactgcaactgggacggctgcggctggaagtttgcgcg

SEQ ID NO: 120559 - DNA, 128 bp, Homo sapiens
gaaaaatcacgggctgtccaggaactgtcggaacagaaccaaaggctattggatcagctcagcaggtactttaggatggagctgatgcatgctgaaaaactgaggaaggagaaggaagaatttgaaaa

SEQ ID NO: 120560 - DNA, 98 bp, Homo sapiens
tcaggaggatggagctagttagctgtctgttgtctgtagcccagtgaacacttgtcctgctccttcacctttttcttgcatggagacagcaatgtttg

SEQ ID NO: 120561 - DNA, 50 bp, Homo sapiens
ctgccactgcgggggcaagacgaagcttttagaaattaactggacaggac

SEQ ID NO: 120562 - DNA, 75 bp, Homo sapiens
cttttgcttccaaatacaagctgtatagctgtcggaaaaggtaacagaagatggaactcgaaatcccaatgaaaa

SEQ ID NO: 120563 - DNA, 75 bp, Homo sapiens
cctgcccgcctgcggctgctccggatcacagattctgctggccatattctctactccaaagaggatgcaaccaag

SEQ ID NO: 120564 - DNA, 96 bp, Homo sapiens
gaaggacttcgactgctgttgtctctccctgcagccttgccacgatcctgttgtcacgagagaagtggatgggccctatacctccagccgtgaatg

SEQ ID NO: 120565 - DNA, 110 bp, Homo sapiens
gcaagcagtaataaagtctcccttaaaatgcaccctccttccacctggccaggaatcagcctgtggacatctctacagcaatgagtgaacgggcacttgctcagaaaaga

SEQ ID NO: 120566 - DNA, 100 bp, Homo sapiens
tggtgcgaggagaactactccgtgacctggtacatcgccgagttctaatcccaaggactgcagcaaagccaaaaagctggtgtgtaatatcaacaaaggc

SEQ ID NO: 120567 - DNA, 80 bp, Homo sapiens
ctcttccggatgtcccggagcaagttcttatcaggagaggatcaatggaagtgaaagcaaatgattttcattcaccttgt

SEQ ID NO: 120568 - DNA, 83 bp, Homo sapiens
gcgcagccccgcacggcccgggcccacgaatcccagtcagaagttccagcctgccactgttctctgatgccatgccagcacca

SEQ ID NO: 120569 - DNA, 83 bp, Homo sapiens
gacgttccatctgtggaaggacctaccaaccagcacttgcacctcctgcgccgccgccccccatccaaggatatgccttcaag

SEQ ID NO: 120570 - DNA, 83 bp, Homo sapiens
tggactattccctggctgcagccctcactcttcatggtcactggaactgtggctgcaccatctgtcttcatcttcccgccatc

SEQ ID NO: 120571 - DNA, 75 bp, Homo sapiens
gagaaactaccattttacttcaaaagacctcctattaatgtggacctgcgcgaagtctggctcaattatcctctc

SEQ ID NO: 120572 - DNA, 90 bp, Homo sapiens
tccagcagtgaaactagcagcattatgcagaaactgaagaaaatgagaagccgcatggatgaaaagctgagtcatcactagagagtggga

SEQ ID NO: 120573 - DNA, 83 bp, Homo sapiens
gtaaatgctgtcttttcccaaaagacaggctcttcacctgaagaatatgaacatcgacatttctgccttctcctgcattgctg

SEQ ID NO: 120574 - DNA, 82 bp, Homo sapiens
cctggagagccgcccagcagcacaacacagggaagcttggggaggacctatgatgcctactccactttctacctgaattcca

SEQ ID NO: 120575 - DNA, 83 bp, Homo sapiens
gaagtggtgagcctttttgtcactggcctgtggactttctcctcgagacattaccactattaaacttctcaatgaaactagag

SEQ ID NO: 120576 - DNA, 87 bp, Homo sapiens
cttaagagcaaaatgatttatgccagctccaaggacgccatcaagaagaagctgacaggggaagaatggctggtcaccacagtaggg

SEQ ID NO: 120577 - DNA, 101 bp, Homo sapiens
agagaataagatttttggaagaaaagattaaatgccttaatggataaagaaaaattggatgttaagattgaatattgtaactatgcaatggattcctcagt

SEQ ID NO: 120578 - DNA, 97 bp, Homo sapiens
aatggcgcagcatgattttgttcctgcttggctaaatttctcaacaccacagtcagctaagggtgactctggggggcccctgatctgcaacgggtac

SEQ ID NO: 120579 - DNA, 75 bp, Homo sapiens
ggcagcattaaaacttaagcaggtgaaagacccctgacaaaagacaatcatcttctgggtacatttgatctgact

SEQ ID NO: 120580 - DNA, 90 bp, Homo sapiens
tgaacaaactcgaagaacagctgtggaaagaagttgcaaaacactggtcatgttgtcataggaacaactggagaagaataaagtggacac

SEQ ID NO: 120581 - DNA, 75 bp, Homo sapiens
ttagttgatgatttagttgattctctgaagcagagtctccttggaggtgacatggatatgggcaacccaggaacc

SEQ ID NO: 120582 - DNA, 98 bp, Homo sapiens
aggccgtcaccttcaaggccgtcagacaaggtgagactgctgctcctcgggccattttgaccggccatgactatgaggtcacatgtgctgcggtgtgt

SEQ ID NO: 120583 - DNA, 100 bp, Homo sapiens
gaggtgaaccttcgaccttggacttctcagcctccagaatggagtacaagatcctcagcatgagagaattattactgtgtctactaatggaagtattcac

SEQ ID NO: 120584 - DNA, 100 bp, Homo sapiens
catgcaggtcaccctgaagaccctccagcagcagaccttcaagatagacattgaccccgaggagacgagctccaaacgagaatggaagccgctggaggac

SEQ ID NO: 120585 - DNA, 98 bp, Homo sapiens
cctgaagatgacccattatttccacctattgaagacgagttgtactgctgtcacaggaaatggacgctggattacaagcatggcagctcaggcagcag

SEQ ID NO: 120586 - DNA, 82 bp, Homo sapiens
gagcacgttcttccaagaaaccaacattcccaacagccaccaccaccaccagatgctcaccatggatgatgatatcgccgcg

SEQ ID NO: 120587 - DNA, 74 bp, Homo sapiens
aaaacggaggtgggagactgaaccatctccacatctagttgccccaggaaaaccagtagattcccagacatcgc

SEQ ID NO: 120588 - DNA, 82 bp, Homo sapiens
ccgggctcctcaggttcagacccgaccgttatccagtcggttcgtggagaggagagttgatattcactgatggactccaaag

SEQ ID NO: 120589 - DNA, 96 bp, Homo sapiens
gaagagcaacggagcttataacatatttgctaatgacagggaatcagttgaaaatttggccaagggtagacttaaagtctgaaacagaaggtttca

SEQ ID NO: 120590 - DNA, 75 bp, Homo sapiens
gacatttcttcggcattctgcaacaggggtcaggagagtgctggtattgtgactagtgatgggagttcggtgcca

SEQ ID NO: 120591 - DNA, 83 bp, Homo sapiens
atcaagctatggaataccctgggtgtgtgcaaatacactgtccagatgagttttgatcatcctgagaaaaatgggccttggcc

SEQ ID NO: 120592 - DNA, 88 bp, Homo sapiens
gaacttccctgtgtcccgcaatgccaacctcagcaccatcaagcaggatgtcagtgggggaggacccgcacgttcttacccagttgga

SEQ ID NO: 120593 - DNA, 74 bp, Homo sapiens
aagggccgaatgcgatcaaacctaatccgcgagacttgctaagggttcggtccgagcccggtgggaggctcccg

SEQ ID NO: 120594 - DNA, 90 bp, Homo sapiens
caactattcgcggagctggaatgactggcaacccaggatctgcatctccaatggatactgaggggtttggtgagctccttcagcaagctg

SEQ ID NO: 120595 - DNA, 100 bp, Homo sapiens
tgtccgcgaggatgcgtgttcgcgggtgtgtgctgcgttcacaggtgtttctgcggcagagctggaagtcgagtgtgctactcaactcaggagatttgga

SEQ ID NO: 120596 - DNA, 100 bp, Homo sapiens
tgtaaaaagagaacatgcattaacatcaggcacgataaaagccatgttgagtggcccagctcttttgaaacagatggtcaccatgtttagatattagcag

SEQ ID NO: 120597 - DNA, 98 bp, Homo sapiens
aggaaccacaagaaaatcaaaagaaacttttgcccttatcagtaacacctgaggtgtgtgaagtctataaacttcacagggagaccttttacttggca

SEQ ID NO: 120598 - DNA, 100 bp, Homo sapiens
cctcactgggacccccaggaggtgaccctgcagggagaagatgtcaaccggacactagaaggtggaaggaaacctcttcattatgcagcagattgtgggc

SEQ ID NO: 120599 - DNA, 95 bp, Homo sapiens
tgtctatgagagagaactgcaaactttccgagaatatggagatacaggtgaaatctgatcccacagccaacaaagattctggccaagagtcagag

SEQ ID NO: 120600 - DNA, 75 bp, Homo sapiens
gaaattgaccggatgccccagctcctggcctactactacaagtgtcacaagacaatgcagatcttcgtgaagact

SEQ ID NO: 120601 - DNA, 82 bp, Homo sapiens
cgccgcgcgaggaaatggccgaggggccggagccacaggagcatcagatccatgctgctgctgactcggagccccacagctt

SEQ ID NO: 120602 - DNA, 100 bp, Homo sapiens
agagatggcattacgaacctttggccacttgcaatggccaatgtacatggtggactatgccggcctgaacgtgcagctcccgggacctcttaattactag

SEQ ID NO: 120603 - DNA, 82 bp, Homo sapiens
cggcggggctgaggcggccgcggggcccgagcgcagggcagctggtggaatttttgaagaaaatggaatctcgaggccccct

SEQ ID NO: 120604 - DNA, 120 bp, Homo sapiens
agcagcagtggcaaccccgggggcagcagcaactgccggacgccctatcgcaagcaggtttcacatgcttacccaggaatgctccttgaaaagataatctcctcagacataagcctggcc

SEQ ID NO: 120605 - DNA, 51 bp, Homo sapiens
acaaagctgttgtctcagggagcacagaacaataccaagtttccaggcccg

SEQ ID NO: 120606 - DNA, 75 bp, Homo sapiens
accagttctattttgggacagggacaagtttgacggtcattccaaaattaaacaaccaccatgtcgagcaaaaag

SEQ ID NO: 120607 - DNA, 75 bp, Homo sapiens
cagaaggtgcaggaggtgctgaaggccagccctgggcgctgcctatggcacagccaagagcggtaccggcattgc

SEQ ID NO: 120608 - DNA, 101 bp, Homo sapiens
aaactgaatactccttccttcctccccacccattcctttaaatccggagggggaaaaaatcccaaggtctgcaaaggctctactacccgaaggatagtgcc

SEQ ID NO: 120609 - DNA, 100 bp, Homo sapiens
gcgcgccatcctgcaaaaccacaccgacttcaaggacaagggtgtccgcaatgttgccagtgtctgtctgcagattggctacccaactgttgcatcagta

SEQ ID NO: 120610 - DNA, 100 bp, Homo sapiens
tatgtaattaacggcaaaaaatggtggagcagtgaactattccatggcagtatatcttgtaaaacagttgtcctcaacagttcttcttcagaggttacga

SEQ ID NO: 120611 - DNA, 50 bp, Homo sapiens
atgttttcctgaaggccaagacccggctgtttgcagacaaggtcccaaag

SEQ ID NO: 120612 - DNA, 51 bp, Homo sapiens
gtgcaggggactctgtcacaatggcctgatatgaaggagtcacgcctcccg

SEQ ID NO: 120613 - DNA, 74 bp, Homo sapiens
acggagatggagacgctgcagtctcagaacatggttggtgcgggagaggtggatgaagacttggaagttgaaac

SEQ ID NO: 120614 - DNA, 83 bp, Homo sapiens
cccgagttcagggagcctgggctgcccctgttaaaagccaggccattgctcagccagaaactaatctggattcactccctctg

SEQ ID NO: 120615 - DNA, 83 bp, Homo sapiens
gttcattgtttgtcaccacaaaaaggacagatggaccacacatccccgacctacatgcttgctaacttaacccacttgcattc

SEQ ID NO: 120616 - DNA, 90 bp, Homo sapiens
ggcacattacaacttcaagaaaattacggtggtgccgtccgccaagaaaactgtcgctgaaaagcaggagaagagaaatcaggatcgctt

SEQ ID NO: 120617 - DNA, 80 bp, Homo sapiens
ctctgcgtcctcatcgggcttatgttcgaggatccaaactactggatacaggtgcatcgcttggaacatggagatggagg

SEQ ID NO: 120618 - DNA, 50 bp, Homo sapiens
aagcatttagagagcatcagcaatagatcaatgtgactctaagaacaaat

SEQ ID NO: 120619 - DNA, 101 bp, Homo sapiens
gagtgacccggcgggcgagctccgtgctgcatggaacggctgcagaagatttgtgacacagactatatccagtacccaaactactgttccttcaaaagcca

SEQ ID NO: 120620 - DNA, 75 bp, Homo sapiens
caagaacccccaggagcagaagtccttcttcgccaaatacgtgtcctgtggccaggcggaaagcagtgagaagcc

SEQ ID NO: 120621 - DNA, 100 bp, Homo sapiens
cggggcgccgcggccgggcgggcagcaaacatccagtcatggataaaaatgagctggttcagaaggccaaactggccgagcaggctgagcgatatgatga

SEQ ID NO: 120622 - DNA, 82 bp, Homo sapiens
gagctcaactccaaccacgacggggccgacgagacctcagcaagagtgagccatggagctacgtgtggggaacaagtaccgc

SEQ ID NO: 120623 - DNA, 100 bp, Homo sapiens
ggataatagtgctaattcctgaggacctgaagggcctgccgcccctgggggattagccagaagcagcaggagcagctccatatgtgcaggcatttgactc

SEQ ID NO: 120624 - DNA, 100 bp, Homo sapiens
aacctgtaacgtcccactggtttggacatattcctctcctgatctggcctcatctgttccagggaggtgggattgaaattgctggaatccacaaatacca

SEQ ID NO: 120625 - DNA, 75 bp, Homo sapiens
ccctcaccgggaggaagtggaacaaccaccatctgacctttagctcggcttattccaggggtgtgtttcgtcgag

SEQ ID NO: 120626 - DNA, 83 bp, Homo sapiens
atatataatgaagaagttcgtgaccttttgggcaaggatcagacacaaaggttagaggatatgatgtttcagcttctccgagg

SEQ ID NO: 120627 - DNA, 100 bp, Homo sapiens
ccgagagttatgtgcctgagctccaacagctcttcaaagggaaggaccgtagcatcctgagacattttgaattgacacttctcaagatttgactggatca

SEQ ID NO: 120628 - DNA, 100 bp, Homo sapiens
ggaacattatcacaaagctatcatcctgccaaactccaggctcagatgtcacaggaaactaaatatattttgccaactttggaaaaagaattattcttgg

SEQ ID NO: 120629 - DNA, 95 bp, Homo sapiens
gctccctggcggtgcagagaccagcatccttggagaagacaatgcagatcttcgtgaagactctgactggtaagaccatcaccctcgaggttgag

SEQ ID NO: 120630 - DNA, 100 bp, Homo sapiens
gcgatgtgcggaagggcacctccacccggaacaggaaatatagtggtcattatgattagctatccaaaaggaagagaaattttggagctggtgcaaaaag

SEQ ID NO: 120631 - DNA, 75 bp, Homo sapiens
tcttctcatcaattgaatgagtttttagcacagacgctccagagggatttacttaaactggtgaagtcatatcat

SEQ ID NO: 120632 - DNA, 90 bp, Homo sapiens
ggaatcattgtcttcctgtacggatgcgccaccatggatgaaaacatccccagacatgtcatgctgcccaaggacatagccaagctggtc

SEQ ID NO: 120633 - DNA, 97 bp, Homo sapiens
gccgccctcagccccggcgcagacatggacccctcgcgagccatccagaacgagatcagctccctcaaagatgaaggatttgggggcagagcacttg

SEQ ID NO: 120634 - DNA, 100 bp, Homo sapiens
ggagcactggaagtacgggcagttgcagtgttggagctaaagcaatgaatcgctccctggctaatgtgattcttggaggctatggcaccacttcaacagc

SEQ ID NO: 120635 - DNA, 75 bp, Homo sapiens
cggccatgggagatatcccagccgtgggcctcagctcctggaaggttacagattatgccattgccaggcgcatag

SEQ ID NO: 120636 - DNA, 90 bp, Homo sapiens
gaggatcgtggaggaggccaacaaggcttttgagtataacatgcagggacatcaaagacgtcagactggatggcgagtcccagtgaggcg

SEQ ID NO: 120637 - DNA, 100 bp, Homo sapiens
gaagtgcgcaaacttgacactcaccctgaccggaactggatgcatttcagccataccccattgaaatcgtgccagggaaggtcttcgttggcaatttcag

SEQ ID NO: 120638 - DNA, 74 bp, Homo sapiens
aacagtacttgggatcccccagttccaaagtgtcttaaagtggctgacaagattttgaaaaagaaagaataccc

SEQ ID NO: 120639 - DNA, 82 bp, Homo sapiens
tggagaatcttgtctttggcaaaggattccaagcaaagatcttccctgagaggcatgagccagaaggagagctctaagtctg

SEQ ID NO: 120640 - DNA, 100 bp, Homo sapiens
agcctcctgaatagctgggattacagatcattaaaatccgtgcccagacggaaggaatcaacatcagtgaggaggcactgaaccacctgggggagattgg

SEQ ID NO: 120641 - DNA, 75 bp, Homo sapiens
gaaatcgccaatgccaactcccaaaccatcatagcctttgcctgggaaccaaatggaagtaagtttgctgtgctg

SEQ ID NO: 120642 - DNA, 116 bp, Homo sapiens
aataaagctgttttggaactgtcaggtacctcaaagctgatgcagccaacacgaacggttgtcatgtgtaacacaactttcgatcaccgcgaaaacaccgtcctgggaaagcgtcc

SEQ ID NO: 120643 - DNA, 90 bp, Homo sapiens
ccagaagagtatgaacatccaaatccctggaaagagagtttccagcagttgtgactgcagatgagctgtggaaaggcgctttagcagaga

SEQ ID NO: 120644 - DNA, 75 bp, Homo sapiens
gtggagcccaaagacccctggagacatgccactgaggcggctcccagctgcgttggcgacatggccgacaccccc

SEQ ID NO: 120645 - DNA, 100 bp, Homo sapiens
gggagacggacgttgagagaacgaggaggaaggagagaaaatggcgtccacggaacgtgctggccaaagcgctctatgacaatgtggccgagtccccgga

SEQ ID NO: 120646 - DNA, 50 bp, Homo sapiens
aagcaaacgggaattctcgctcctcctgcatatgcccaagaggattggga

SEQ ID NO: 120647 - DNA, 75 bp, Homo sapiens
gcgccggccggctgcgaagacgcggtgggccgcccctccgatgctactatcattcacgatggccatgaggagaag

SEQ ID NO: 120648 - DNA, 75 bp, Homo sapiens
gggttctagcctctctgaagccctggacttgatcgagtcgtgtaaggcaaacattggtgggcaccgatcttcctg

SEQ ID NO: 120649 - DNA, 101 bp, Homo sapiens
caagcacttcctgccgcgggcggcgcgccgcagctgcccaggccggaccgggccgggcgcccgcagggagtaccctgacttctaccggaagctctacggcc

SEQ ID NO: 120650 - DNA, 73 bp, Homo sapiens
tgagtggttgtgtggtcgcgtctcggaaaccggtagcgcttgcagcatggaagcgagggatggaggttgtgca

SEQ ID NO: 120651 - DNA, 100 bp, Homo sapiens
gccgtgtacagtgctgcgattctggagtacctcactgcagagggccatgtgaaactttctgactttggtctttgcacaggactgaaaaaagcacatagga

SEQ ID NO: 120652 - DNA, 97 bp, Homo sapiens
gacttccttgcttctttggagaatgatatcaaaccagttttgatgatgatggttcagaatttcatgaacatatatttctggagaaacacctggagag

SEQ ID NO: 120653 - DNA, 83 bp, Homo sapiens
tggggattgacagccacgggaaggaaggtgctcgggtcttcggggcactgggtcccatcggtccctcctcacctgggctcacc

SEQ ID NO: 120654 - DNA, 75 bp, Homo sapiens
ctgtaaagtcaccaacgagatcttccgccactacgagtatcgtccttggagaagatggaagcggagaggcggccg

SEQ ID NO: 120655 - DNA, 100 bp, Homo sapiens
aaatagcagaagaataccatgaggtcaaaaaggaaatcaccctgcttgagcaaaggaagtgcaaatatatacagagcttcataatcagcccaagaccaca

SEQ ID NO: 120656 - DNA, 90 bp, Homo sapiens
ccgcctgctcagagaggatgtggagtaccgtcccctgcagagcatcctggccagaacaagccaaggagccaagacgagagggacacacgg

SEQ ID NO: 120657 - DNA, 100 bp, Homo sapiens
ggcggaagatggcggccggcgaaaggagctggtgcctgtgcaagttgttgagtgaacctccttggcctgggcgaagctgtgtggaccaagcaagtcagga

SEQ ID NO: 120658 - DNA, 127 bp, Homo sapiens
ttaagaattaaaagatgatgagaaataaggacaaaagccaagaggaggacagttcgctacacagcaatgcatcgaggcttctccagggaaagtgaccgaggcagtgaaagaggccattgacgcaggg

SEQ ID NO: 120659 - DNA, 98 bp, Homo sapiens
gacggccccggggagacggacgcgtttggcaacagcgagggcaaagagctggtggcctcaggtgaaaagaaatctactttcttcaatgtgttaaccaa

SEQ ID NO: 120660 - DNA, 100 bp, Homo sapiens
cagagaggggtgcggagcgggcggaagaggcgtctgtgtcgcagcttggtctcagaggagcatcgctgggggggacttgatctcatcttcatgccaggcc

SEQ ID NO: 120661 - DNA, 88 bp, Homo sapiens
ctgtcgcccgaggcggccgccgctgcaccttcaccgcgtacccgggacccgcccgcccgcgggagatgttctcagtgcagctgagtct

SEQ ID NO: 120662 - DNA, 100 bp, Homo sapiens
gggaagttcaggaaacatccaagaaaaatgtccttaaagcaattgagcaggctgatctactgcaggaggatagcattgggcagctggagaatgatctgag

SEQ ID NO: 120663 - DNA, 101 bp, Homo sapiens
gagcggatcttgcaggagatcgagagcaccgacaccgcctgtgtggggcccaccctccggtatgtcgagagtaccaacgtggcaattgcaaccgaggagaa

SEQ ID NO: 120664 - DNA, 100 bp, Homo sapiens
cccccctcacccaggcccctgtcaagaaggtgccggtggtgcgagtcttcggagcgaccccggcaggggatatcattttcaatgcccaatacccagaact

SEQ ID NO: 120665 - DNA, 100 bp, Homo sapiens
tgacacatactcgacaagatgtcaagcaagatgctctcactcttcccgagatactgcttcaagaactgggtcctggagatggtatcgtcatggcgttcga

SEQ ID NO: 120666 - DNA, 82 bp, Homo sapiens
ttgggtgaagtgaaatctttgaggctttatcctgtggataaacgcagagtgaacgagtttggggagtcctacgaggagaagg

SEQ ID NO: 120667 - DNA, 75 bp, Homo sapiens
gcttattgtcacattcttcttgggagttactatgtttgggagagcccatggtgactgcgtgagtggagcccagct

SEQ ID NO: 120668 - DNA, 100 bp, Homo sapiens
cagatggcgtcttccgtgggcaacgtggccgacagcacagaaacattgaatgaggaggataaagcaaagattgctaaaagcaagaagaagatgaggcaga

SEQ ID NO: 120669 - DNA, 90 bp, Homo sapiens
cttgttgtggatgaagctcacaggttgaaaaaccaaagctccctgctgcataagaccttgtcagaggtattggcatactccacacatctg

SEQ ID NO: 120670 - DNA, 76 bp, Homo sapiens
ccgaacccctcagtgccggatctgcttccagggcccggagcagctggccatgggcaagatgatggagcaggggccg

SEQ ID NO: 120671 - DNA, 100 bp, Homo sapiens
cctgtgtccaccaggccctgaagggcttcacgaccaaaggtgtcacctcagtctctcagatcttccacagcccagggaaagatcacatggagaagccaac

SEQ ID NO: 120672 - DNA, 100 bp, Homo sapiens
ctctcgttatctgacctcatggatgaacttcaggatgttcagctcacagagatcaaaccacttctaaatgataagactgtgccctgtccacggtgcctcc

SEQ ID NO: 120673 - DNA, 75 bp, Homo sapiens
gaggagttgagaacatctctgttgacattcattgtggtgaccctggcagcaaccccaacaaacgccagaggcagc

SEQ ID NO: 120674 - DNA, 50 bp, Homo sapiens
cctgtctggaagttacttgtggacatgcttcttggacacttaatgattgt

SEQ ID NO: 120675 - DNA, 51 bp, Homo sapiens
cagaagacaaagtcaattccatgactaaggactcacccaagctgggtctgc

SEQ ID NO: 120676 - DNA, 74 bp, Homo sapiens
ttcaggagtactggcggaggggctggacgttccacgccaaagggactttgaacatgtcggggatcgccctcagc

SEQ ID NO: 120677 - DNA, 100 bp, Homo sapiens
ttaccaattcaggcacccagtcaggtatggcatgaattgccttattcagtttgaagattttgccaatgtgaatgcatttcgtctcctgaacaagtatcga

SEQ ID NO: 120678 - DNA, 100 bp, Homo sapiens
ctatcagtttcctacagatgatgagtcggtggcagagatcaatggaaccatgaacagcccacccacctttgggttcctgttggacatcgatggagtgctt

SEQ ID NO: 120679 - DNA, 90 bp, Homo sapiens
ggattccatgtagagacccctggaggctggtgaatcaaagacttctggaagtacagtcacaagttgaagaattacaaaaatctttacagg

SEQ ID NO: 120680 - DNA, 100 bp, Homo sapiens
ctctgtcagtactatattggaaaaacctcaaaatatgatggtggttggacagtcagcatttgcagactttggtctcctaaaaacccagaacagaagatca

SEQ ID NO: 120681 - DNA, 100 bp, Homo sapiens
accagccccagggagcctgcaggaccccagcaccccactcctgaacctgaatgagcccctggacctggagtggaagatcatttatgttggctcggctgag

SEQ ID NO: 120682 - DNA, 83 bp, Homo sapiens
aggccgttctcgcgatgctgtcttacgtaaaggcatgacttcctggcaccacagggaaaatcgggtgcaagcccagaaactat

SEQ ID NO: 120683 - DNA, 95 bp, Homo sapiens
agcgcaaaagttctgaatggcatccgtcctaccggaaacctaggaaaagttagttgaatccatggacatgaaacccacagatatagagggttggc

SEQ ID NO: 120684 - DNA, 101 bp, Homo sapiens
actgaaggtgtgtgcaggcctctaaaggtcttatcgaatgttacttagcctccaacagtattcgagaagcaatggtaatggctaacaacgtttacaaaact

SEQ ID NO: 120685 - DNA, 99 bp, Homo sapiens
caggaacatccgccccaacatcatcctggtgctgacggacgaccaggatgtggagctggatcctatagcaatggaactcagcgatgcaaatctgcaaac

SEQ ID NO: 120686 - DNA, 82 bp, Homo sapiens
gcgttcaagcgaaaacatgaccgctgagcccatgaggcagggcaagaatcctttcgttccatcacaaggtcgtattacagag

SEQ ID NO: 120687 - DNA, 75 bp, Homo sapiens
gcagatcaaggcagtcgtcaggaactcaggatccgggattaaatctcttgatgaacagtgtgtggttggcaaaat

SEQ ID NO: 120688 - DNA, 144 bp, Homo sapiens
agaagagatcccttaggcaaagactgttgaaacccatgtgccaggaaaacttacctattgaagctgtttatcacagttttgatggcgacgactttgatgatgtggaggaggatgaagggctagatgacttggagaatgccgaag

SEQ ID NO: 120689 - DNA, 98 bp, Homo sapiens
aacgaggcactcagttggaagagtccagcaagtcagcagataagcagagagccctagaagaaaccaaagcctacaccacccaatccttagcaagtgtt

SEQ ID NO: 120690 - DNA, 101 bp, Homo sapiens
tgcttgaaaaccaactcagcgtgggtgactttgtaaaaatacagaaggcctttgagattatagatccagactcctgtgcctgaccactgcccatggccaac

SEQ ID NO: 120691 - DNA, 82 bp, Homo sapiens
ctgaataagagcatcaaccctgatgaagctgttgcttatggtgcagggagtggctgttctggggattgcccttattgctatg

SEQ ID NO: 120692 - DNA, 100 bp, Homo sapiens
agacctggtggaaaaggttgatctcatagacaagtttgtacatccaaaagaagatggcgaattagaagatggtgaaatagacgatgcaggatttgaagaa

SEQ ID NO: 120693 - DNA, 50 bp, Homo sapiens
aggatgggagaggccatggcaaagctgtgatgcagatccatccgccctag

SEQ ID NO: 120694 - DNA, 82 bp, Homo sapiens
cccattgctgcctggctggaaaagtgaacgaaccccacaagaattccatattggaggaagcgcaacaggaaaggagagaaga

SEQ ID NO: 120695 - DNA, 74 bp, Homo sapiens
gctcatgaagactgtgtaaataatatcaggtttgttaacactttgcataaagatgtcaacatctccctgagtac

SEQ ID NO: 120696 - DNA, 100 bp, Homo sapiens
tccggagagtggagaggaggcagtggccctggtggaagacttgcagaaagaacctggaagacagaggctggagagaatgtaactggtcactacatttccc

SEQ ID NO: 120697 - DNA, 75 bp, Homo sapiens
aaacattggaaaagaaatcctgataagaactgctttgaaggcgacatgccaattcatgaacttctcagcctttat

SEQ ID NO: 120698 - DNA, 87 bp, Homo sapiens
tccagtttgagaaacctggatctgcgatctgtttgtgggatcgcttacacctgagacgaactacagaacagcacgtaccagaggtgg

SEQ ID NO: 120699 - DNA, 100 bp, Homo sapiens
gcatttaggcaggtggctcccaaattaccggaaaggactgttcttgaggtattcagctacaaaccactgagtaagcaaaaatcagaggaagagctcaagg

SEQ ID NO: 120700 - DNA, 75 bp, Homo sapiens
gtggcaaccagatcggtgccaagggccggtgcataaacttctcccgagttccatctcagtaaaagggaagcagga

SEQ ID NO: 120701 - DNA, 100 bp, Homo sapiens
aggtttgaaacagatgcagaatccaaaggcagcgcaaaaaacagccaccgattttgctatgtctctgagctgcgaggtccagtggcattgcagagcacgg

SEQ ID NO: 120702 - DNA, 98 bp, Homo sapiens
gaaagttgagtctctcctgcgccgagccttcggggcgatgtgtagtgccttccatagggctgagtctgggaccgagaacccctgaacagtgcccaagt

SEQ ID NO: 120703 - DNA, 75 bp, Homo sapiens
ggagccgcatgactccccggtactggaggtgtacgtggccatctgcagtgagtgagatcattggccgagacctga

SEQ ID NO: 120704 - DNA, 150 bp, Homo sapiens
ggtgcattatcatccttctaaggtagcagcagctgcttcctgcttgtctcagaaggttctaggacaaggaaaatggggtcaactgtatttgttggtaacggaccaggggtttcttactgaagagaaagttgtttgggaaagcctacacaa

SEQ ID NO: 120705 - DNA, 50 bp, Homo sapiens
aaaacgtgactccccacaataagattacagtttaaagacaatttctgtga

SEQ ID NO: 120706 - DNA, 100 bp, Homo sapiens
gtccaacgtcggggaagttgtctggttcaagggcagcaggaaagacgagatcctgggcatcgccaacaaccgactgatccgcatcgacttggccgtgggc

SEQ ID NO: 120707 - DNA, 75 bp, Homo sapiens
aagacaaactgtatggtggagaaagaagtgggaaggatctgcgcgggatgcttgaagcccacatgcagagctaca

SEQ ID NO: 120708 - DNA, 82 bp, Homo sapiens
tctgcgttctgctcctactgcttcgcgtccagacagggggatatgagactttctactcggaatatcctgagtgttgcgtgga

SEQ ID NO: 120709 - DNA, 75 bp, Homo sapiens
tggaaggagactggatgatagaattgattctaacattttcagagaaccttttggaaagaacaagcctacttcaat

SEQ ID NO: 120710 - DNA, 82 bp, Homo sapiens
gtcccgaagccgatctctctctcgttcaaggaagcgcaggctgagaattccacaaggcatatgcccagttggtcgatcttgg

SEQ ID NO: 120711 - DNA, 82 bp, Homo sapiens
gccggatggacacccacaggtcggccctgcggacccggcaggtgactttggattttttatcaagcagaaatgcatcgaacaa

SEQ ID NO: 120712 - DNA, 82 bp, Homo sapiens
gggcgtccccggccgggacgcgggtcgcgtcgttgtcctccgcgagcgtccggattgcagatagcctgggctggaagctctt

SEQ ID NO: 120713 - DNA, 75 bp, Homo sapiens
cttccctgagtcctggcgtatctctctggattaatcgaattacagctgctagccaggaacatggactgaagtatc

SEQ ID NO: 120714 - DNA, 83 bp, Homo sapiens
gtggaggactacagagccggtgatatgatctgtcctgaatgtggcttggttgtaggagaaagttctgccactaatgaacccag

SEQ ID NO: 120715 - DNA, 100 bp, Homo sapiens
gctgaattacccatgctttaagaattgggatgggtccccagtgagctcctggattctgctgtggccataaaatgcagtaaaaacaaatccagttcccaag

SEQ ID NO: 120716 - DNA, 82 bp, Homo sapiens
gctcactgtcagcgcctggaaacttgctcacggtgctttcttctgcgacctggtactcatctacctcatcaaaaagagagag

SEQ ID NO: 120717 - DNA, 100 bp, Homo sapiens
cggagcaagcggagctcccccaagagccggaaaggaggtgtgattgcctatatcagttcttccagctcagcctcaagccctgcctcttgtcacagtgagg

SEQ ID NO: 120718 - DNA, 90 bp, Homo sapiens
cctggaaatgtatgaaatgagacaaagcgtttatatggttgccacacttgattgtagaacttgggaatcagtgaaacgtacaaccaggaa

SEQ ID NO: 120719 - DNA, 75 bp, Homo sapiens
ctggaagtcattcaacgggaattgaatagagagaactcgatgccaccgcaacggtattggcgaaccggcaggatg

SEQ ID NO: 120720 - DNA, 98 bp, Homo sapiens
gcggtgttcccggctccgtggggccgtcttcccggcgagtccgcgacggtcgccgcccacggcgagagctcacaatgtctctctgcaccaagctccat

SEQ ID NO: 120721 - DNA, 101 bp, Homo sapiens
actgtgaccacagcgaggatgcggggctggtctgcaccgctgctggagccagttctgcttctcggcaaggagcgatttgctggtgtagacatccgtgtccg

SEQ ID NO: 120722 - DNA, 99 bp, Homo sapiens
aagcacagctaggcagctggggaaaaggcagcagtggtggagcaaaggcaagtgagactgctcatctttgggtgaaaaattgtcgggatcttctgcagt

SEQ ID NO: 120723 - DNA, 75 bp, Homo sapiens
gctctcgaaacaagccaatggcaacctggggaacaagattgatcagggaccatgaaaagaaacttgtgcttcacc

SEQ ID NO: 120724 - DNA, 75 bp, Homo sapiens
tggcggcctgcgcagccacctcaagactctgatgccagtatggactggagatgatgggagccagttggatagccc

SEQ ID NO: 120725 - DNA, 50 bp, Homo sapiens
cctcaccaagttcctcatcacccaggaggaagttaacatccctaatagga

SEQ ID NO: 120726 - DNA, 86 bp, Homo sapiens
tgatctcttccaaagaatgccacagaatcaggggaggcatgcttcagggaaaccaggaacaactggtaactgtcatggaggaacga

SEQ ID NO: 120727 - DNA, 100 bp, Homo sapiens
atgacgaacacaaagggaaagaggagaggcacccgatatatgttctctaggccttttagaaaacatgaccatggcaaaagttataaccaccgtactgaag

SEQ ID NO: 120728 - DNA, 80 bp, Homo sapiens
aatggcagcaaggtgggcccggacggcacaccctacgttaccgtgctcaaggtcgcgtggggcaggcagtggcgctgcgg

SEQ ID NO: 120729 - DNA, 78 bp, Homo sapiens
gcggcgcggcggccccgggaccaaggagctggtcagtgagaaggtcggaggggccgaggggaccaagctggatgatga

SEQ ID NO: 120730 - DNA, 75 bp, Homo sapiens
aaaggtgctaatccagtggaaatcaggagagaaacgctgcagcagtgctgtgacctttcgcagctgtggttccga

SEQ ID NO: 120731 - DNA, 74 bp, Homo sapiens
agagccatcagaaccgccaccatgaagtggtccaaaggcaaagttcgggacaagctcaataacttagtcttgtt

SEQ ID NO: 120732 - DNA, 74 bp, Homo sapiens
cagaagcaaaggagaagatatatctaaaaggattttatgagggttatcctagaaggaaaacatcaccatggcta

SEQ ID NO: 120733 - DNA, 75 bp, Homo sapiens
cagccctatgctgtcagtgaattagcaggtatggagagtcggcttgactacactgtgtggagcaagttttaaaga

SEQ ID NO: 120734 - DNA, 97 bp, Homo sapiens
atgaagacctgtgttgatacctataccaaccgtttaagacccctgttcagattaaggaatttggtgcagtttcaaaagtagacttttctcctcagcc

SEQ ID NO: 120735 - DNA, 100 bp, Homo sapiens
ggacgcggccatcgtgggctacaaggactcgccctccgtctgggccgccgtccccgggaaaacgttcgtcaacatcacgaaactaatctggattcactcc

SEQ ID NO: 120736 - DNA, 75 bp, Homo sapiens
gagaggacagaggtgcctggggcaacctccaccttgacggttccagagttacactgttagaccttatgatagcca

SEQ ID NO: 120737 - DNA, 50 bp, Homo sapiens
tacgcctcctacgtttacctgtccatgctcaccatggatgatgatatcgc

SEQ ID NO: 120738 - DNA, 100 bp, Homo sapiens
agcaccggctccagtgggctctgaatgtttacccttgcggaagttgcatcacttaatgacattcagccaacttaccgaatcctgaaaccatggtgggatg

SEQ ID NO: 120739 - DNA, 100 bp, Homo sapiens
tttgccctgaacatcatgaattcccaagaaggagaagactcagcctggatttcaaaactgaacactgaagtggtttgcaacagttacctggctcttggcc

SEQ ID NO: 120740 - DNA, 98 bp, Homo sapiens
gtcgcagctccattaatgcaactaccattacactaaggtgtgcaactgaggaacatggctcaagaaactaatcacagccaagtgcctatgctttgttc

SEQ ID NO: 120741 - DNA, 100 bp, Homo sapiens
aaggaagcaattttacaagaaaagccatacttgttttctctggggtatgattctaatatggttttgatggacatgtttgatcaggatgacataggtttgg

SEQ ID NO: 120742 - DNA, 100 bp, Homo sapiens
agcaacgtcacgctcatcaccctgaactcggaaggtactccaaagattcaggtttactcacgtcatccagcagagaatggaaagtcaaatttcctgaatt

SEQ ID NO: 120743 - DNA, 100 bp, Homo sapiens
ggactttgaaaaggaagggaatgaagaggctctgcgtcgccagcgggagcaagaaattgcattaaggcgacagcgagaagaggaagaaagacagcagcaa

SEQ ID NO: 120744 - DNA, 90 bp, Homo sapiens
ggaagaagtggcagacttatcgaggaaattccactggaaccttaatggtttgcctgaatccatcattgcagctgcatgttcaagaagtgg

SEQ ID NO: 120745 - DNA, 96 bp, Homo sapiens
acccccaggaggtgaccctgcaggcactactgcagtcttcagttaagcaacaagtagaagctattgaaaaacagtacatttctgcaattgagaaac

SEQ ID NO: 120746 - DNA, 86 bp, Homo sapiens
gcgagtgggagcaccaggatctcgggctcggaacgagactgcacgggtggcccagttgaaatccttcccttcctctaccttggaag

SEQ ID NO: 120747 - DNA, 82 bp, Homo sapiens
gcaggtgaaagtgcagatcgccgtggccaacgcgcaggagctgctgcaggttacgggcaggacttgagtggcttcggacagg

SEQ ID NO: 120748 - DNA, 100 bp, Homo sapiens
cccatatgaaccagttaacagcagattgtcagatatattccgggtggtcccattcatatcagggagttctgggaaatcgttcattcatttacagatgaac

SEQ ID NO: 120749 - DNA, 50 bp, Homo sapiens
agacaggaggcagtagccaaacacccaggcatttcagtagaaccatggag

SEQ ID NO: 120750 - DNA, 80 bp, Homo sapiens
cctgaacttctcaggaagcagtactattcaagagtgagaaggcaaccaaagtgcaggacatcaaaaacaacctgaaagag

SEQ ID NO: 120751 - DNA, 82 bp, Homo sapiens
ctggacaggcagagtgctgatgtgaaaaataccacgacaaaaccaccctagatttacttcatttgggtcactaggtcacggg

SEQ ID NO: 120752 - DNA, 100 bp, Homo sapiens
taaacggggcaggatctgtgtcaaaagagcttctctccagagtagaaaggctggagctactcggccagggtttaagactttaaatgagaataaagggtgg

SEQ ID NO: 120753 - DNA, 50 bp, Homo sapiens
ctgagagatggctattatatccaagaggagaaggcagagcccccccaggc

SEQ ID NO: 120754 - DNA, 90 bp, Homo sapiens
gaagtaatctggaatcagaaagcactacgctaagattcagtggtcccaatttaaaggctattttattttcaaactggagaaagtgatgga

SEQ ID NO: 120755 - DNA, 87 bp, Homo sapiens
gctttgtcaacgggatctgggagtgacactgtgtctcagtttgaaactgaattctacatcagtggacttgcacctctctgtgatcag

SEQ ID NO: 120756 - DNA, 100 bp, Homo sapiens
gccgcgcgcccagcgacccggggcgcacgcggaggacgcgagggggacgctgcctggccgcggtacactgaggaggggacggctccgtcttcacattgtg

SEQ ID NO: 120757 - DNA, 82 bp, Homo sapiens
cagagaagtgcccgaggagagttaacaggttaaagatcgaggtccggaagccactaggagattttttaattggttttattgg

SEQ ID NO: 120758 - DNA, 90 bp, Homo sapiens
cacgccaagcacgtggtgggctatggccaccttggtcgtaatctgaaggagtggctgagggagcaattttgtgatcatccgctggagcac

SEQ ID NO: 120759 - DNA, 75 bp, Homo sapiens
attccagtttttattagaaaactccagcaaggacatgatgagctacattgggcccaagaggacagcagtggtgcg

SEQ ID NO: 120760 - DNA, 97 bp, Homo sapiens
gggaaatgcgtgcactgcgtccctctagagatcacgcgctgccccatgatcccgtgctacatctcctccccggacgagtgcctctggatggactggg

SEQ ID NO: 120761 - DNA, 82 bp, Homo sapiens
gcggacggcgacgcagcccgcggcagaagtgtttgaagatactgtggaggagcgtgtcatcaatgaagaatataaaatctgg

SEQ ID NO: 120762 - DNA, 100 bp, Homo sapiens
cgaggccaggtgaacgttaccggccccctgacctccagcagatccacacgtacaacaaataacactgtgactccaacctcacaacctgtgcgaaagtcta

SEQ ID NO: 120763 - DNA, 90 bp, Homo sapiens
tgggcatccaggtggacacagatggctctggtgcaccagggacctgtccctctgtcctacacggtcaccacagtgacgacccaaggcttc

SEQ ID NO: 120764 - DNA, 100 bp, Homo sapiens
gcgcttcgggagccgcggcttatggacaggcgacactaacaggtgaagatctcgggagaccatgactaagaaaagaattgctgtgattgggggaggagtg

SEQ ID NO: 120765 - DNA, 100 bp, Homo sapiens
cgcccctgtctcccgctccgcagccccgggcacggcggaggcagcggagccctgggccatcggagacatatactgcctggactgcctggctgatgtgagc

SEQ ID NO: 120766 - DNA, 83 bp, Homo sapiens
ccgagagcaggagctgaaagcctctaacacccacagatccctctatgactgcaatgtgagcaaaatgatgcttcaacacccag

SEQ ID NO: 120767 - DNA, 98 bp, Homo sapiens
ttttggggggaaactaggtcgatggtcggcggcgcccggatgggcagctgagtggccactgcctccaccatggctgaggctttctctaagacaacctc

SEQ ID NO: 120768 - DNA, 100 bp, Homo sapiens
gacattacgagaaatgttagagaagaaagacagctttgtggaagaggtaaggagtgccaatggaccgatgcctgcctgtctcatccctgtgcaaatggaa

SEQ ID NO: 120769 - DNA, 82 bp, Homo sapiens
caaagtgaagctggatttctcctgccaggagaatctcctgcaggatctcagtgatgggcggtagtcatggtttgtttggaaa

SEQ ID NO: 120770 - DNA, 83 bp, Homo sapiens
cgctgctggtcagccagttccgctcctgtcagggctgaagaagatgcagagcagcctgaagctggtggactgtatcatcgagg

SEQ ID NO: 120771 - DNA, 98 bp, Homo sapiens
ccggcttctgaataaattcactgaaaatgacagtgagaaggtggccaagactaagcagcagattgaggagcagcgggtgcaggtgcaggtggtggagc

SEQ ID NO: 120772 - DNA, 50 bp, Homo sapiens
acgggaccctgaagctgggatttagggcactgtgtttagtcttgagtcag

SEQ ID NO: 120773 - DNA, 88 bp, Homo sapiens
tgtctccagctgttagccagaagcctcccttccagtcagggccaagaaatatttttcttcatggccctgatcagcaagtaaaaatagg

SEQ ID NO: 120774 - DNA, 100 bp, Homo sapiens
ctgcggacagtgaaggaggaagctgagaagccagagagagaggccaaagagcagcaccagaagctgtgggaagaacaggccgcccgcctgaagaaactac

SEQ ID NO: 120775 - DNA, 136 bp, Homo sapiens
agacaaacagcccgcccgaccccgtcccgaccctggccgccccgagcggagcctggagtgtggacgaatgtggaacctcgctctgtggctgtgttcccttggcactccttagtccccttcctggcacccagccagc

SEQ ID NO: 120776 - DNA, 97 bp, Homo sapiens
agagaagaggaaaactctaccggtgcagatgcctggaatgatgtcgtcagtaatgcctggaatgatgatgtctcatatgtctcaggcttccatgcag

SEQ ID NO: 120777 - DNA, 82 bp, Homo sapiens
gtccacccaccgccgccgcctcccaggatgaaacgaggaggaagagatagtgaccgtaattcatcagaagaaggaactgcag

SEQ ID NO: 120778 - DNA, 75 bp, Homo sapiens
ggcctggagatggagttcgactgcgagggcctgagacggctgcttggcaagattccttttggttccaagtccaat

SEQ ID NO: 120779 - DNA, 100 bp, Homo sapiens
ggtctcccgccaggccgccgggagagcaagccctggaggttcactctttcaagaagtcgtgtgctgaggtgtaatgctacacaagtcagaggaaggaagg

SEQ ID NO: 120780 - DNA, 82 bp, Homo sapiens
tttgggaagtggagcaccgatgatgtgcagatcaatgacatttccctgcagtgatgcggctgactaagcctactttattcac

SEQ ID NO: 120781 - DNA, 88 bp, Homo sapiens
atcagcgccccggactgcaccagagccatggtcggacacattcagctaacgtattttagcaggtggagtgaggttgaagattcctgtg

SEQ ID NO: 120782 - DNA, 90 bp, Homo sapiens
ccaccatctccatcacccaccaacaacaccacaataatccacagccaaggatatgaacgagactgccaaacaagaagatattttggaatc

SEQ ID NO: 120783 - DNA, 75 bp, Homo sapiens
cagcccaagaaagaaatgaaggctaaatcacgttctaggtgaccaagaatatggcccaggtgaccaaagccctgg

SEQ ID NO: 120784 - DNA, 75 bp, Homo sapiens
gttattgataactatgtttatgaacataccctgcaagccctggatgaaaacatggacctcttggaaggtataact

SEQ ID NO: 120785 - DNA, 82 bp, Homo sapiens
ccgcagccaccactgccgtctatgaggccatgactgcaggtctgcgcaggcatggcactaagtgtcccatggcacatttggc

SEQ ID NO: 120786 - DNA, 96 bp, Homo sapiens
attcctttaagacaaaatttactcagccagtactacctggtttcatgctctacattaatcatactcctccaccactgtccaagagtaaggagagag

SEQ ID NO: 120787 - DNA, 75 bp, Homo sapiens
aatacattccagaaaatgtatcaaggtataaatgaccaaggattgtacagagttgtgggggtgagttcaaaggtc

SEQ ID NO: 120788 - DNA, 95 bp, Homo sapiens
tctacctaccaatcgtgaaaactatattcacagggtgattctgggggtccacttgtctgtaatggtgtgcttcaaggtatcacatcatggggccc

SEQ ID NO: 120789 - DNA, 87 bp, Homo sapiens
accgctgctggcagttttgccaggtgtttgttaccttggaggcaagtgaggcctatctggttggcctttttgaagacaccaacctgt

SEQ ID NO: 120790 - DNA, 90 bp, Homo sapiens
ccaatgctgaccaaggaggagcctgttccagaactgctggaagctgagccaaggccacctttgatgccatttctaagacctacagctacc

SEQ ID NO: 120791 - DNA, 89 bp, Homo sapiens
cccagttaagctgcgctccgggagagttgtggaaagtaaaaatgtagccctaccaaaaggaactattgtactggcttctccaggctgga

SEQ ID NO: 120792 - DNA, 99 bp, Homo sapiens
tggatacaagacaagtgtacaccaaatgtgaaggtgatgaggttgaagatctctatgagcttttgaaacttgttaagatacctgaaaaaagcggcagtc

SEQ ID NO: 120793 - DNA, 80 bp, Homo sapiens
ctcaaaggaacggagagaaccgggacccccctgcggggacccggaactggctacaggttcattttcctgacgacagcagt

SEQ ID NO: 120794 - DNA, 100 bp, Homo sapiens
gagacagccgacacagatacagcagaccaagtcatggcttccttcaagatcctggctggggacaagggcggcgactggcggcgcgatggacctgaccggg

SEQ ID NO: 120795 - DNA, 100 bp, Homo sapiens
ctggatttcacaccaagaaaatagttcgtggtcctgccagtgactgttaagtgggcagaccaacatccacctcagcaaaaacttcttcctgacgaatcgc

SEQ ID NO: 120796 - DNA, 98 bp, Homo sapiens
cctgaggccctggatagtgatggccaacaccccagatgcaagcgtggattgggtgtcaaaccagaagagaagtaaaattcaacaaaaatttatgtgtg

SEQ ID NO: 120797 - DNA, 74 bp, Homo sapiens
gcttcccctactgcgtggtgtggacgcccatcccggtgctcacgctgattcaccccaagagtggccgttcctac

SEQ ID NO: 120798 - DNA, 74 bp, Homo sapiens
ctgcctttccttccccctcggaaaatggttcccactgccgggcgaggtggagccgccaccaaaatgcagatttt

SEQ ID NO: 120799 - DNA, 100 bp, Homo sapiens
caggggaggaagccacctcgagatgtgcactgggaactacacctttgttccttacatgataactccacataacaaagtctactgctgtgacagcagcttc

SEQ ID NO: 120800 - DNA, 100 bp, Homo sapiens
tgacaaagttcctgctgatataaggttaacttccatcaaatctaccacactaagagttgaccagtcaattctcacaggggaaagctctggcaatttaaat

SEQ ID NO: 120801 - DNA, 50 bp, Homo sapiens
ggacgagtctgccggcagtggatataagtgtgaaatatgatttggcgagg

SEQ ID NO: 120802 - DNA, 100 bp, Homo sapiens
gcattctctggtcaccatcctcgggacctgggccctcattcaggcccagccctgtttcagtcattcagtcagtaccgctgtaagactgccaagaagtcag

SEQ ID NO: 120803 - DNA, 90 bp, Homo sapiens
ggatccttgagtgataaagaagtagagatatacgccagcggttaggaaaaagaccacattctccggaaaaggcttttagtagtaaccccg

SEQ ID NO: 120804 - DNA, 99 bp, Homo sapiens
gttgttctcataataattcagatggagaatatatggctggacagctagctgcttatggctataaaattacaggagattttagttcctaaaaatgggaag

SEQ ID NO: 120805 - DNA, 89 bp, Homo sapiens
tcgggagtacacagacatcatccgttgggacccctgattttagcaggatggcccaatggaatcagctacagcagcttgacacacggtac

SEQ ID NO: 120806 - DNA, 100 bp, Homo sapiens
gggagtggcgatgctgagacacatgttacagcttcagtgtaacgctcaggcgatgaccaccatacaacacacaggttgaatttttaggagaagaaggaac

SEQ ID NO: 120807 - DNA, 82 bp, Homo sapiens
ggagcggcgttggaggccaccgtttccagcagtacttctggaatagaaattctaaacattagcctgccgaacaactggattg

SEQ ID NO: 120808 - DNA, 100 bp, Homo sapiens
gtcacattctcaccagccactattgaaaacgaacttataaagttctgccgggaagcaagaggcaaagagaatcggttgggttttgccacattgatccgag

SEQ ID NO: 120809 - DNA, 118 bp, Homo sapiens
agtgggacaactttctggcttttgaaaggctccttcttcaggtcctttctgaaagatctgctactgaagtagacaacaattttagcaaaccacctccgtttttccctccaggagctcc

SEQ ID NO: 120810 - DNA, 75 bp, Homo sapiens
caacagggacatggccacctgggacgaaaagggtttagatgtagattctctggtcattgagcatatccaagtgaa

SEQ ID NO: 120811 - DNA, 100 bp, Homo sapiens
gccacagcgcggccttgcaggttccctgctacggtggagccttttgccagcttgaccgaggccgtgcggagctcagttccccgactgctcatcaaccggg

SEQ ID NO: 120812 - DNA, 100 bp, Homo sapiens
gcagctttcacaaatagtaccaaaggtcacataatgagtatgactcctgaacagcttcaggcttggcggtgggaaagagaaattgatgagagaaatcgcc

SEQ ID NO: 120813 - DNA, 100 bp, Homo sapiens
acttcaatgacctccccaactcgttgtttgcgtgcaatgttcaccagtcagtgtttgaaggagaagagagcaagtgtttctctcctgaggcaaagcccaa

SEQ ID NO: 120814 - DNA, 101 bp, Homo sapiens
cagtgggagagccgtacctatccttatcctggaaccccaatcactcagcgcttctcgcacagatgatcacggacgtgcagctcgccatcttcgccaacatg

SEQ ID NO: 120815 - DNA, 75 bp, Homo sapiens
ctcataacagttgatgaaaaattgatgccttcaattaagttgcagagttctgatggagagatatttgaagttgat

SEQ ID NO: 120816 - DNA, 75 bp, Homo sapiens
cggggaagcaaacggagtgtggaaatacgacctgacccattctgcctgatcaatgcaggagtcctgtacctctac

SEQ ID NO: 120817 - DNA, 100 bp, Homo sapiens
ggcctgcagccaaggaaggaggcctgcaaattcatgacaggattattgagcacgttcacgtccatgttcttcccaggaaggctggagactttcacaggaa

SEQ ID NO: 120818 - DNA, 50 bp, Homo sapiens
tttatcctcaagagtcagctggcagaacctggagctggttgaaaaaggct

SEQ ID NO: 120819 - DNA, 83 bp, Homo sapiens
atgcaaatatatagagcacctggaagcagtaacatgcaagctggacggcagtctggaaacgaccaatgagatcttggactctg

SEQ ID NO: 120820 - DNA, 75 bp, Homo sapiens
gttggatgcatattcaaaaaaactggctcagcctccaggaccctgctggttttgccttgctagccctgaagtgga

SEQ ID NO: 120821 - DNA, 82 bp, Homo sapiens
ggcgcgggaggtgttcgagaacgaccccgagacgggcctacttggaagtgcaccagcaggagcaagagaaactccaggggca

SEQ ID NO: 120822 - DNA, 100 bp, Homo sapiens
cttcaagaaagacttgatggtctggtagaaacaccaacaggatacattgaaagagggagacgtggtgggcggtccttcctgtgacacgacccttgagtga

SEQ ID NO: 120823 - DNA, 98 bp, Homo sapiens
cacagccggcagcccccctcccagtttgaacctctggacatgaagctcatgaggcagcacgctggctcttctcctgaacttcctcgcctgcctggcca

SEQ ID NO: 120824 - DNA, 74 bp, Homo sapiens
tgaaaaactagccaaaggtgaacctactgataggcttgccttttgtcactgctccgaataaatttgaagctctg

SEQ ID NO: 120825 - DNA, 88 bp, Homo sapiens
gtggtggcgcgcgccgtgtgcttggtctgcccaagatggaggtgtttcaggaatactacgggcttcctccaccccctggagccattgg

SEQ ID NO: 120826 - DNA, 74 bp, Homo sapiens
cctcccagtgacgggtctggagtgcgtgggggaccggctgttggcgggaataactcaagtcacctgtactggaa

SEQ ID NO: 120827 - DNA, 75 bp, Homo sapiens
cgagctctcctctgatggcaggacctgccaagatgttccaggtcatccagccagagcgtgcgctgtacatccagg

SEQ ID NO: 120828 - DNA, 100 bp, Homo sapiens
gttagaaaaactaggggaaaggaaaccatgcaacagtcaaccttctgagctttcttcagagacctcaggtcagataccaggcccaggttccatgatgccc

SEQ ID NO: 120829 - DNA, 83 bp, Homo sapiens
gagctgaccctgggagacatcgacgggaacggcaggagcagctgatgggatatcggaagagagggccgaagcccaaaccgcta

SEQ ID NO: 120830 - DNA, 83 bp, Homo sapiens
tggatagataccgaattcttatcacaaagagactccttcagggtgagcaaaggcctggaaacctgtatgcagttaaagaaaag

SEQ ID NO: 120831 - DNA, 90 bp, Homo sapiens
aatgccatcatggccatccgccggaaccgcgtggccctgaagggtggtacagaagttggtcctgccctttgggcgactgaactacctgcc

SEQ ID NO: 120832 - DNA, 98 bp, Homo sapiens
gaacatttccatcaaaccctgagagctttattaccagacatgatctttcagacagagatttgggattagaatctaccttaatatcgtcaaaacctcag

SEQ ID NO: 120833 - DNA, 75 bp, Homo sapiens
cgccgccaccgccacctgcgcggcagtcatcaaggacctcagcaatggagaatatccccatcatcacaactgtca

SEQ ID NO: 120834 - DNA, 51 bp, Homo sapiens
cgcctccatctgggccatggatggacctagaggatcaagacataatgggag

SEQ ID NO: 120835 - DNA, 83 bp, Homo sapiens
gatatcgacgtcgtgatccagaagtccagagctgaggactgcctgtttgcagtgcctccggagccagcgtggtggccatagac

SEQ ID NO: 120836 - DNA, 78 bp, Homo sapiens
tcctttttacctttggttcacaacatcatcaaatggtgttttgtccagtctgagtcctgtgaattcttccaaccatgg

SEQ ID NO: 120837 - DNA, 82 bp, Homo sapiens
ctgcttatggcggcgctggagagggggcgctgagctgttgggcttattttgggagaggccagccgccatgtcatgaagacac

SEQ ID NO: 120838 - DNA, 51 bp, Homo sapiens
tgttaacaatgcatccacagaggctcagatccacctacttggaaacatagt

SEQ ID NO: 120839 - DNA, 75 bp, Homo sapiens
ggccgagcaggctgagcgatacgacggagcctgttcctctcacgccctcacctggctgagccgcagtagttcttc

SEQ ID NO: 120840 - DNA, 100 bp, Homo sapiens
gggagtgcatcaaaggtgtgaacacaggtcaagagcaatctgaatccaaatgcaaaggagtttgttcctggggtgaagtacggaaatatttgagtagacg

SEQ ID NO: 120841 - DNA, 100 bp, Homo sapiens
ctggagcaaggcgacgaaccttggagagaggagaacgaacatcttctggacctttgtccagtgctcggccttgttctccccatgtgggccatagccctca

SEQ ID NO: 120842 - DNA, 90 bp, Homo sapiens
gtcgccgccatggcccgctggatcccgaccaagaggcagaagtacggggttgcaagtaactggcagaagttttggtgataaagattttcg

SEQ ID NO: 120843 - DNA, 100 bp, Homo sapiens
gaaggagcaatatgatgctgagttgcaggccctgagggagagtgtggaagaagcaaccaagatcggaagttgcacccatcaaatgggtcagattgccatc

SEQ ID NO: 120844 - DNA, 83 bp, Homo sapiens
gtaaaggccctactgaatgagctggcctccgtgaaggtgaatgaggatttcttcaagaagttcttatatgagccattgccagt

SEQ ID NO: 120845 - DNA, 100 bp, Homo sapiens
gaagatgaggaggtcgctgagagctgggaagaggcggcagacagcggggtgcagtagacattgttgcaatcatgatcggcaatctgaaaggcacaaaaat

SEQ ID NO: 120846 - DNA, 90 bp, Homo sapiens
cagatgctcccttctgctcctgcttgtcatcatggctgggacagtgctgcttgcctactacttcgaatgcactgacacttttcaggtgca

SEQ ID NO: 120847 - DNA, 90 bp, Homo sapiens
cggtggtgctggtggcggcggcgctttcggcgcgggcccgggccccgagcgcccgaacagctttaccactcctgaaggccctaaaccccg

SEQ ID NO: 120848 - DNA, 99 bp, Homo sapiens
aaggctgaagatttaagaactgaatgtgcaacttgcaagggaactggagacaatgaaaatcttgtcagagctcccagctcctccagcagccgacaggag

SEQ ID NO: 120849 - DNA, 82 bp, Homo sapiens
tagaagtcctagaagaaatttggagtgtgcgtgcgcgccgagcgtgcctccggagccagcgtggtggccatagacaacaaga

SEQ ID NO: 120850 - DNA, 82 bp, Homo sapiens
gaagataaagaccatccaacaacttctactctgacatcaagcagtatcgctctgaagacttgatgaaggtttgctgacaaga

SEQ ID NO: 120851 - DNA, 96 bp, Homo sapiens
ttgtatcagtaagaagggagcacggaacagattcaagctcaggtgtgtgtggctgctgtggtgccctacgccccaggtacaaaaggctggttgaca

SEQ ID NO: 120852 - DNA, 98 bp, Homo sapiens
attggtactaatggccaactcaagcatcaattcctgaagattgccaagcccctctccagcctcactccactgattgctgcagctaaggaggcaacaaa

SEQ ID NO: 120853 - DNA, 74 bp, Homo sapiens
gattatttgcaacagctcacgggagcaagaacgatgccttcaattaagttgcagagttctgatggagagatatt

SEQ ID NO: 120854 - DNA, 87 bp, Homo sapiens
agggtgagaggccacgtcagagctgcccagatgttcatcatcagaagcagcaccttggagaaaaacatttcagaagcaatgtgggca

SEQ ID NO: 120855 - DNA, 75 bp, Homo sapiens
tgctcattttggttctcagtttctacgagctggtgtcagatatgcaaaagttataagggagagggtcggcagcag

SEQ ID NO: 120856 - DNA, 98 bp, Homo sapiens
atttctttctcgctgatcgcctaacttctactgacgaagcttggaagttgcagaaggtaaagctacttcttcttctaatccaagcagcccagctccag

SEQ ID NO: 120857 - DNA, 100 bp, Homo sapiens
agtgtttccgtcagtacgcgaaggatatcggtttcattaagagacgagttgtactgctgtcacaggaaatggacgctggattacaagcatggcagctcag

SEQ ID NO: 120858 - DNA, 100 bp, Homo sapiens
ccaaaattattgaaaacactcgaaggggatcagtgtcgtttagggatgtgactgtgggcttcactcaagaggagtggcagcatctggaccctgctcagag

SEQ ID NO: 120859 - DNA, 100 bp, Homo sapiens
gccaaggctaaaagacgaaataccaccggaactggtcgaatgaggcacctaaaaattgtataccgcagattcaggtactgggcctaatcgctacgtgcct

SEQ ID NO: 120860 - DNA, 100 bp, Homo sapiens
gtgcagagctagttcctctccagctcagccgcttacagaatgtctgaaggggacagtgtgggagaatccgtccatgggaaaccttcggtggtgtacagat

SEQ ID NO: 120861 - DNA, 75 bp, Homo sapiens
ctggtggtgaatcctccatagtctggtgtcagttgtacccgaggcgttctcagcagcagcaagtacctgtggtgg

SEQ ID NO: 120862 - DNA, 75 bp, Homo sapiens
cagagatgacatgccagcccagactttcatgttgaaatcacaaagattagacacctttttagataggtgttcttc

SEQ ID NO: 120863 - DNA, 100 bp, Homo sapiens
gtcagccatgtgagcactgggggtggtgccagtttggagctcctggaaggaagcggtacctccggcggcgggcagctttgggacagctgaacaccatcct

SEQ ID NO: 120864 - DNA, 50 bp, Homo sapiens
caggagtcatcggacgccagaatctgggtgcttcaaggatgaccgcatcg

SEQ ID NO: 120865 - DNA, 74 bp, Homo sapiens
aggcactggaagaccacttcagcagtttcggacctatctctgaggggcctgcagttgccatcacccactgcaac

SEQ ID NO: 120866 - DNA, 75 bp, Homo sapiens
aaggctttagaaggttatatcacagaaatttgggggatgcatgcaacttttcccttgtctgaagtgataactctg

SEQ ID NO: 120867 - DNA, 75 bp, Homo sapiens
tttcagagatgagtatgcgctgtatagaccactgcaggtcctggctataagtcaccatggcacagcaagctgccg

SEQ ID NO: 120868 - DNA, 101 bp, Homo sapiens
ggggcagcaacggcgacatccagcaagggacttcatctgcagcatcctcaccattaaaaaaagaacagcccttatttactctacggcaggttgggatgatc

SEQ ID NO: 120869 - DNA, 90 bp, Homo sapiens
cttttctctacttgtgtcactaacggaccgtttatcatgagcagcaactcggcttctgcaggctccagcccccttttggacatcgttggc

SEQ ID NO: 120870 - DNA, 50 bp, Homo sapiens
caaggccaaccgcgagaagatgacccagggaaaccatctttgtatggcag

SEQ ID NO: 120871 - DNA, 82 bp, Homo sapiens
cttggatgaagaggatgaggaagcagacagcgatactgatgacattgaccacagagtttccaggcacttgggctggttggcc

SEQ ID NO: 120872 - DNA, 100 bp, Homo sapiens
cggagttcgggggatggcacagaatgggcatttaaatcaaacggtattgagatggattgggttatgaaacataatggtccaaatgacgctagtgatggga

SEQ ID NO: 120873 - DNA, 82 bp, Homo sapiens
gtcaaactcaaaatggcacctgttcctcttgatgattctaacagaatccagactccaaaatgatgcaaatcaacctgactgg

SEQ ID NO: 120874 - DNA, 100 bp, Homo sapiens
cgtattctctgaagcctggaaacgaggcactcagttggaagagtccagcaaggtatcagacttggtgataattctgaattatgaccgtgctgtagaagct

SEQ ID NO: 120875 - DNA, 89 bp, Homo sapiens
cagttgtccatgaccctgaaggtccaggagtacccgaccctcaaggtgtcgtgaaaactacccctaaaagccaaaatgggaaaggaaaa

SEQ ID NO: 120876 - DNA, 74 bp, Homo sapiens
cctggctgtcagcctggtgctcctctatctacacggaacttgttcgactgctggcatctgtctgcatgcaggtg

SEQ ID NO: 120877 - DNA, 75 bp, Homo sapiens
gagaagctgtcggagtcggtgctgatgaaggtggataaattagatgcttcagaatcactgagaaaagaagaagaa

SEQ ID NO: 120878 - DNA, 80 bp, Homo sapiens
gacctgctaacagaactggaccttttcgaaaataatgttgagtttccatgaagaacaggaagtactgccagaaactttcc

SEQ ID NO: 120879 - DNA, 75 bp, Homo sapiens
cgacatgagtgatgtggaggaaaacaacttcgagggcagagacttcagaaatgggcttgggaaccagctgagttc

SEQ ID NO: 120880 - DNA, 99 bp, Homo sapiens
ttcagactcagttagagacccttaaagaagtgtgggctgacatcatgagctcctccgtccacgctcaaaggtacaagggacaagctccagatctaattg

SEQ ID NO: 120881 - DNA, 90 bp, Homo sapiens
ctggtatcctgttccccaaagagaaatggacaggaggaaaggagacagaacattacctgtcagccattatatgagacagatactggaagc

SEQ ID NO: 120882 - DNA, 83 bp, Homo sapiens
agcagcctgaggcggctggcacagagcttccggcccgccatgcggaggcccgtggaacacagagcattcctaatgacagtcct

SEQ ID NO: 120883 - DNA, 50 bp, Homo sapiens
acattggccggcaacttgttccagggggagtttgttgcttgtctcctgtc

SEQ ID NO: 120884 - DNA, 129 bp, Homo sapiens
aaagggggtaacctagacctgaatgggcttgaccatctcacaactgctcgcgtgacgaccgcattcgtggcagcaactttcatcctttgaaacgtgtgctgaaaaagaagaatcagcaaatactactga

SEQ ID NO: 120885 - DNA, 87 bp, Homo sapiens
gacatcctggaagctgggaaatgcttcctgcctgacacagctcacttcaagaagtgcacaatgtcagaacgtggaattaagtgggct

SEQ ID NO: 120886 - DNA, 100 bp, Homo sapiens
ggagctctggatggagaggccccaaggggcatctcctcaggatacctacctggtttatattctaaatgaattggctggaaactcctttatgatattctgc

SEQ ID NO: 120887 - DNA, 100 bp, Homo sapiens
actgagatagaaggggaggggttacagactgtggtgcctacccccatcactgcttccctcagccataacagaaaagaaacatttgtttgcataggaattc

SEQ ID NO: 120888 - DNA, 75 bp, Homo sapiens
gcgcttcctgcgcatcgtctgcaagaccgcgaggcgagacctcttgcatttgttgctatcggggactacaatggc

SEQ ID NO: 120889 - DNA, 83 bp, Homo sapiens
ggcagacggattcatttagagctgcggaacaggacgccctctgattttccccctttctagggtgaggatggttctacacagcc

SEQ ID NO: 120890 - DNA, 83 bp, Homo sapiens
atgttcagcagttggacttaacgtatttcttgaggatgtacagttacccagcacgtgtacctcctcctcctcctattgctcgg

SEQ ID NO: 120891 - DNA, 100 bp, Homo sapiens
gatgctgatgattatcacccggaggaaaatcgaaggaagatgggaaaaggcataccgctcaatgaccagctgagtcagtgctgattctctcaaatagagc

SEQ ID NO: 120892 - DNA, 80 bp, Homo sapiens
tgtcttgagattatcatcggctgagggtggaagcggcccccgcagacgctcggcaggaacttgctactaccagcaccatg

SEQ ID NO: 120893 - DNA, 100 bp, Homo sapiens
ctgggatgccttcgcgtcttctcttccctcgggtgacttgaggagtcgatagcagcagttggtgacgagatggcactcagaaacggcgttgacgtaattt

SEQ ID NO: 120894 - DNA, 74 bp, Homo sapiens
cgacagcaggtcacagtggacgaggtgttggcggaaggtgctggagaatctggtaaaagcaccattgtgaagca

SEQ ID NO: 120895 - DNA, 75 bp, Homo sapiens
gcaaagcccatctggtccgccgagcaggctgcctctcccagggagccacttgaaccactgaacttcccagatcct

SEQ ID NO: 120896 - DNA, 100 bp, Homo sapiens
cttctctacgcagaacccgggagtaggagactcagaatcgaatctcttctccctccccttcttgcaccatcactcctgtagtgggtaagaagagaaaacg

SEQ ID NO: 120897 - DNA, 100 bp, Homo sapiens
gaaaatgccaacgccgtgtctgaagtggatatcacaggctaaaggagggggcagtccccaccatatttgagtctttctccaagttgcgccggacaaccaa

SEQ ID NO: 120898 - DNA, 78 bp, Homo sapiens
ccgcggttgccccattgcaaagtgggagacacttctaaaggaggcatagctaaagttactcaatccaacttgaagtca

SEQ ID NO: 120899 - DNA, 50 bp, Homo sapiens
agctgatcaaaccaaggatgggtgtggatgaggtcaccattgtcaacatt

SEQ ID NO: 120900 - DNA, 98 bp, Homo sapiens
caaataagctatatactttggttacctatgtacctgttaccactttcaaaatgtgaacacagcaggtgtgagatgtcatcttggaagacaggccttgc

SEQ ID NO: 120901 - DNA, 51 bp, Homo sapiens
ttgagaaaggtgaaccaactcaaactaagggccacgccaatattatctcct

SEQ ID NO: 120902 - DNA, 101 bp, Homo sapiens
tttcgcttcaccgagtgaccttgagcccagggcgacggtcagcttgttaattcctggctgcagttatttcaagtaccattggaagaggaaggacaacgtgg

SEQ ID NO: 120903 - DNA, 51 bp, Homo sapiens
tatctgtgcagccacgcaggcatccaggacttaaacaggcacaatcaaaac

SEQ ID NO: 120904 - DNA, 82 bp, Homo sapiens
aggcaacgacgttccatctgtggaaggacctaccaaccagcagcccctgtcaaagggaacaggaagcagtccacggagggtg

SEQ ID NO: 120905 - DNA, 100 bp, Homo sapiens
aggaatatcgatacaacaccaacagatgaagactggcccatttgcagagcactccaaccagctgtggaacatcagcgccgtcccttcctggtccaaagtg

SEQ ID NO: 120906 - DNA, 59 bp, Homo sapiens
cagaatacagagatatggaatcaggtcttgctatcacagatgaaattttgctgagtaag

SEQ ID NO: 120907 - DNA, 75 bp, Homo sapiens
cctattttactgataagaaaacacatctttacacactaagagtaccttagatccacagaagatgctcttgtcatg

SEQ ID NO: 120908 - DNA, 96 bp, Homo sapiens
cagttttcttcagaagaaggacttcggaatgcactacaacaggaaaatcatattatagatggagtaaagaccccatatcatgtgaacctcctcctg

SEQ ID NO: 120909 - DNA, 100 bp, Homo sapiens
ctcgctgttgctggtctctggctccctcctcccagggccaggcgccgctcagaacgattgaaaaggaagatcaggccaaccccaaagaagaagtgaccaa

SEQ ID NO: 120910 - DNA, 51 bp, Homo sapiens
gaagaccgaagcgttcgtatctggaaggtgctggagaatctggtaaaagca

SEQ ID NO: 120911 - DNA, 83 bp, Homo sapiens
agctcctcaagtgcaacaagtcccacttccgaaaccacaagtttgccgatgaactgtggctgcaccatctgtcttcatcttcc

SEQ ID NO: 120912 - DNA, 75 bp, Homo sapiens
agagggctgctcacaatttatatggccaacttgggtgactgtcgttcctacagttacgtgtgtggaatctccagt

SEQ ID NO: 120913 - DNA, 80 bp, Homo sapiens
aacacggatatcagcatcctgtccttgcaggactatcggacaaaacctttctgctgcagcgcttgtccattttcctcaaa

SEQ ID NO: 120914 - DNA, 50 bp, Homo sapiens
aaactaaagcaggccacttcaaagctgggagaaccaccacagacgacgag

SEQ ID NO: 120915 - DNA, 117 bp, Homo sapiens
cccaagtcctccttgcctgccgtgagcgatgcccgtagcgacctgctttcagccatccgtcaaggacactgtgtggcccaatctgaggtggtcaaggaaggttgctccatctacaac

SEQ ID NO: 120916 - DNA, 96 bp, Homo sapiens
tctccttttccctctccctttccctaaggatctggaaatagtatattcctatttacatggtatggaagccttatcaaacttgagggagcatcaact

SEQ ID NO: 120917 - DNA, 98 bp, Homo sapiens
cccgccgaattccgggagccggaccgggaccaggaccgggccccactttccagggaagatgatgacgacgatgaatgtggggaagagaagctgccctc

SEQ ID NO: 120918 - DNA, 82 bp, Homo sapiens
gatgagcctcccattctcccagacatggggaacagggtcacagctctcacccaggtgattatccagggttttcgaagttaca

SEQ ID NO: 120919 - DNA, 75 bp, Homo sapiens
accctcacggagctgggcgacgagctgaccctgggagacatcgacggaggacagtcagtgacccacaccggcctg

SEQ ID NO: 120920 - DNA, 100 bp, Homo sapiens
ccttctttcgatcagagatcggcggagaccctcgaagtgcgcaaacttgacactcaccctgaccggttatcccatcatcaggtagcaagttgaaacgacc

SEQ ID NO: 120921 - DNA, 83 bp, Homo sapiens
cggccgttttcatggctgcttaaaatggtctatggtctgtctcttgtactaatggtcacttgatgtgcgctggctgttttatc

SEQ ID NO: 120922 - DNA, 85 bp, Homo sapiens
ccagggcatcgtggatgcctacggcgtgggccgctaccaggaggtcaaccccgctctggccaggctgccgcacctctacaggaac

SEQ ID NO: 120923 - DNA, 74 bp, Homo sapiens
tgttccctgccactgtcttgttccgaggcggccccagaggggaggagccccagccccgcgacgaggaggaagcg

SEQ ID NO: 120924 - DNA, 101 bp, Homo sapiens
atgttggtgaactcgatgaacaccgtgaaagagttgctgccagttctcatttcagaaaaccatgagctgttttccaagagcttcatctccatggaagtgcc

SEQ ID NO: 120925 - DNA, 51 bp, Homo sapiens
ggaccagttcagcctattccttgttcaaataaaacctcaggtgtaccagga

SEQ ID NO: 120926 - DNA, 97 bp, Homo sapiens
gcacgggaacaagatctatgtcctgggttctcccatgggcaggtggtctctctggatgagctgcgccccttccaggacccagacctgagctccctgc

SEQ ID NO: 120927 - DNA, 75 bp, Homo sapiens
gctgaacatctttcagagttgtatccgatgacacagcaagaaggccctcaccagatgctgagcagatgccggcac

SEQ ID NO: 120928 - DNA, 100 bp, Homo sapiens
aaacaaggtgtctgcaggaccaacctctcctctggatgctctaggttatacattggctcttcaaagacgttcacctcatcagagaaatccctgactcctt

SEQ ID NO: 120929 - DNA, 100 bp, Homo sapiens
gatcgcaaatacctgaaagattgggcaagagaagaattcagaagaaacaaaagtgccaccgaagaggaaatgcttccagactgcacacttttacttagag

SEQ ID NO: 120930 - DNA, 50 bp, Homo sapiens
atcagtcaaggaagacccactggagaccctttggagtgaatcaacctgga

SEQ ID NO: 120931 - DNA, 100 bp, Homo sapiens
agcaaggccacgccggccgcgcgcgccagcaagaagatcctgctgcccgagcccagcttcgagagctgtgcccaggagtgaacaaccagccctacctctg

SEQ ID NO: 120932 - DNA, 97 bp, Homo sapiens
ccaggcccgcgccgccagtggagcccccgcgcgcccggccggcccggagcaccgagctcgcggcacggtaggagggccaattcctgtccccccagca

SEQ ID NO: 120933 - DNA, 101 bp, Homo sapiens
actgataacggagaatggaactgtatgccagcagcttgttgtacagtgcaaaaggcagttgaagaagaaaattgctgctttgggactattgatacctggtt

SEQ ID NO: 120934 - DNA, 100 bp, Homo sapiens
tgctcgggaagagggagagcaaacttggctcagcccaatgccttcaattaagttgcagagttctgatggagagatatttgaagttgatgtggaaattgcc

SEQ ID NO: 120935 - DNA, 95 bp, Homo sapiens
ttgcctcccaccgtgattctgaggcctccccaaccatgtgcaattgcctccggtgtggctgtctctgatggtgtcatcaaggtgttcaacgacat

SEQ ID NO: 120936 - DNA, 100 bp, Homo sapiens
ttcaagctttggccatcaatagctctgaggtgaaaagcatggcccagcacgtacataacatggacaaacgggacagttttcggaggactcgtttttctga

SEQ ID NO: 120937 - DNA, 136 bp, Homo sapiens
gtcaggactaagagaagtcacaaaacagcagatttcccaagagcagcggaaaatgatccagtcacagattcatgatgttgctatcaaaagttgagaaattgtcagaagaaatcatggagataatgcaaaatttaag

SEQ ID NO: 120938 - DNA, 100 bp, Homo sapiens
tgccgggcggggggcccgggttcgccgagccgcaggagagacacgctgggccgaccccagagcggcgctggacaggcctgcaggacaagctgaacaagag

SEQ ID NO: 120939 - DNA, 112 bp, Homo sapiens
acaaattgaaaccaggaacagagacctcctgtccgaaaataaccgccttcgcatggagctggaaaccatcaaggcaaactgtccttggaagaattcatcagaggtgccaaga

SEQ ID NO: 120940 - DNA, 96 bp, Homo sapiens
cagaagaaaatggatttcgttatatcccctttagaatatatcagcttggattccttagcaccaccacagctcagccagaacagaaggcctcgaatc

SEQ ID NO: 120941 - DNA, 96 bp, Homo sapiens
tcacccctgccaggactcctctgggcttgcagtcgctcccccgtacctctcctggccccctcagttctcccaggaccatggccaacctggagcgca

SEQ ID NO: 120942 - DNA, 75 bp, Homo sapiens
tgtggcttcatttcttctgtggccttcagcactgataagaatctattattgcattagtgccagcagtagttccca

SEQ ID NO: 120943 - DNA, 98 bp, Homo sapiens
tatgtttcttacaaagtggaggtttgtggcagccctgcatggagcaagtctgtcagcaccatctttctaacaactaccatgccggggatgaagcgaga

SEQ ID NO: 120944 - DNA, 50 bp, Homo sapiens
ccaaactgcaataagccgccttccaagatttgggaatggatgatgaagga

SEQ ID NO: 120945 - DNA, 90 bp, Homo sapiens
agcgaatcctaccttccaaacagggtgaatcaccaggattttcaactgagaaatttaagaataattgaacctaacgaggtgacacactca

SEQ ID NO: 120946 - DNA, 120 bp, Homo sapiens
caatcttcgcatgaaatggaagagagggtggtgcggatagcttgaggaagggactgttgacatttagggatgtggccatagaattctctctggaggagtggcaacacctggacattgcac

SEQ ID NO: 120947 - DNA, 100 bp, Homo sapiens
cctgctcagcttcaccatcgtcagcctcatgtacttcgcctttaccagggagtgcatccgccccaacccttttccccctcgtctcctgtgagaattcccc

SEQ ID NO: 120948 - DNA, 83 bp, Homo sapiens
gctgcttagacgctggatttttttcgggtagtggaaaaccaggtgtcccgacccaggctaagcttgagcatggctgagcagga

SEQ ID NO: 120949 - DNA, 75 bp, Homo sapiens
cctcagctccgagtccagggcgaggtcccccacggcccttcaggatgaaagctgcggtgctgaccttggccgtgc

SEQ ID NO: 120950 - DNA, 89 bp, Homo sapiens
agagaaagagcctccgtcaccacatagttgtactcgtaaaacaaggatcatcgatgttgtctacaatgcatctaataacgagctggttc

SEQ ID NO: 120951 - DNA, 96 bp, Homo sapiens
aagcgattctcctgtctcagcctctcaagtacctggaattacaggctaaagtaaataatgccagcctgattggactgggttatactcagacccttc

SEQ ID NO: 120952 - DNA, 100 bp, Homo sapiens
tggaggactgggtatcaatctcactgctgcagacacagagtggtgaaaggacataggaaggagtctggggaactgtactacagcattgaaaaagaaggcc

SEQ ID NO: 120953 - DNA, 100 bp, Homo sapiens
accccatcaagaacaccaatgatgccaactcctgccagatcattattccacagaaccaagtcaatcgaaagtcagctcagcaaaacccagcagctcagat

SEQ ID NO: 120954 - DNA, 100 bp, Homo sapiens
agagtatggagcctacgtagattcataaggaccgtataatagacgctggccccaaaggaaactactctcgatttatgaatcacagctgccagcccaactg

SEQ ID NO: 120955 - DNA, 50 bp, Homo sapiens
attcatcagcaaattgaacttctggaagtcccacagtgttttgttcgccc

SEQ ID NO: 120956 - DNA, 74 bp, Homo sapiens
ggagccggtgccgcagctgcgatggccgtggccgtggggagaccgtctgagagcgaagaggaactttactcctc

SEQ ID NO: 120957 - DNA, 100 bp, Homo sapiens
cgtggccttcagcacgttaatgcgttgaagatgaaatccactgaggagggaagtccagcaccctgtgtgccagtccagaactggcccatctgtagacccc

SEQ ID NO: 120958 - DNA, 83 bp, Homo sapiens
ggaagaaagaaggggcacgagtggccaagcccgtgcaccgttttttgtaagccgctgccatggcccagacactgcagatggag

SEQ ID NO: 120959 - DNA, 90 bp, Homo sapiens
ttctaatgaacccacagaatggactaaaggttgggtatctacagccattggttgctgttcaggtcagctttgctcctaacaacactggga

SEQ ID NO: 120960 - DNA, 75 bp, Homo sapiens
caagcgaatcgtcttctttagctgccgttccatcaggagggtgaggacaaaatcttcttaatcaacaagcttcac

SEQ ID NO: 120961 - DNA, 95 bp, Homo sapiens
tgttcaagataaagtgattttttgcctttgttgattaactggacaaattcagaacatctgctcaaattaatgaccatgggggatatgaagacccc

SEQ ID NO: 120962 - DNA, 103 bp, Homo sapiens
gcggcggcgccgggcccgggggtggtgacagcaggtctgaggtactaggttttgacaagcttgcatcatgcgtgagtataagctagtcgttcttggctcagga

SEQ ID NO: 120963 - DNA, 90 bp, Homo sapiens
tgaccgtgcgctgaccctgactcactccaggatgcagcaccgaggcttcctcctcctcaccctcctcgccctgctggcgctcacctccgc

SEQ ID NO: 120964 - DNA, 85 bp, Homo sapiens
tgactactggggccagggaaccctggtcaccgtctcctcaggagcaggccgggctctcgccatgggtcactgtcgcctctgccac

SEQ ID NO: 120965 - DNA, 99 bp, Homo sapiens
tgctcttccacttcaaggagacaacggccacacactgtgggattgagatggcacagaagctattgaactctgacctgggtgagctcatcaacaagatga

SEQ ID NO: 120966 - DNA, 75 bp, Homo sapiens
gaaggacatgaagactaccacatgatgatattcttactgattctccgggctctgcagctcttgacccggctggta

SEQ ID NO: 120967 - DNA, 97 bp, Homo sapiens
gcgggtgatgccgccacctccggcctcagcataagccgtggcttggcggccgagctgcaccccaagcatcgagagtaaacatgaggttacgatcctg

SEQ ID NO: 120968 - DNA, 83 bp, Homo sapiens
tcaaatccatcaagctcatcaaaagaaaccaaggtgtatgttggtaacctgggaactggcgctggcaaaggagagttagaaag

SEQ ID NO: 120969 - DNA, 75 bp, Homo sapiens
tgcaatagaagccctgattttggatccagaatcagcaagtgcagacaacttggagctctatgaaactctcaatga

SEQ ID NO: 120970 - DNA, 86 bp, Homo sapiens
tcgccttcgccctttccacctcgcggcagttcgccgtgctggtatagaggactctaagaagtggggcatgctgtttctggtgaacc

SEQ ID NO: 120971 - DNA, 101 bp, Homo sapiens
ggacatgggagctactgcaggctggaggcagacatgcccgatgagatcaacattgatgaattgttggagttagagagtgaagaggagagaagccggaaaat

SEQ ID NO: 120972 - DNA, 51 bp, Homo sapiens
gctccagccgaaggagaaggggggtggagccgccaccaaaatgcagatttt

SEQ ID NO: 120973 - DNA, 75 bp, Homo sapiens
ggaagatggcgcctgttgtgacagggagggtttgcatttgtgtatgaagctcaagatgtggggagtggcagagag

SEQ ID NO: 120974 - DNA, 100 bp, Homo sapiens
actgagcctggcgagtatcatcattgtggttgtcctcacagctgctggagtgtaataagtgccgaaacagctatcaccctgagtgcctgggaccaaacta

SEQ ID NO: 120975 - DNA, 100 bp, Homo sapiens
ttggggttcctgcggagaactgagctcacagatgcaaatggaggctttgaagacaagattcccaaaaggagattctctgagatgcaaaatgaaagacgag

SEQ ID NO: 120976 - DNA, 100 bp, Homo sapiens
cttcttttctccgcgggcgccgaccaggcctggctcgcgcctctcccaggacccgcctggctgcgagatatataaggagtcaggccagggcgggatgaca

SEQ ID NO: 120977 - DNA, 87 bp, Homo sapiens
atgaagcccatcaacaagtgcattgggaggaacgttgcccccaagtttcctggcagtgtgtgatactgaggaggtgagcttgtttct

SEQ ID NO: 120978 - DNA, 119 bp, Homo sapiens
gaaagctggccggggcctgggcctgagcatcgttgggaaacggcaagaggaggaacgacgtagaagagaggaagagatgatgattcgtcaacgtgagatggaagaacaaatgaggcgcc

SEQ ID NO: 120979 - DNA, 100 bp, Homo sapiens
ctgctggtgatcatgctaagggtcttcatataccacgattaacagagagacaaagcatggaggacacaagaatgggaggaaaggcggactctcaggaact

SEQ ID NO: 120980 - DNA, 75 bp, Homo sapiens
ctcagtacttgcaaaagcacttgaagtcattaaaccagctcatatactgctaaagctccatggaatagagattcc

SEQ ID NO: 120981 - DNA, 98 bp, Homo sapiens
aaggagtctatgtctgtgtagcaaggaattaccttggagaggctgtgagccacaatgcatcgctggaagtagccaagacggtctcgccacattgccca

SEQ ID NO: 120982 - DNA, 80 bp, Homo sapiens
gatcaagaagccggactacaaggtcgcctacgtgcagctggagatcatgaatcagacagataaaaatcaacaagaaatcc

SEQ ID NO: 120983 - DNA, 119 bp, Homo sapiens
agaaatgctaccgcagccatgaagaaccaggttgcaagatttaatgacctcaggtttgtcggtcgaagtggaagagggtgcttttcaggaaacaatgatcattttttggcaattaatca

SEQ ID NO: 120984 - DNA, 49 bp, Homo sapiens
attttctacaaggggaagaacactgacattcagtcccctgaagctgaat

SEQ ID NO: 120985 - DNA, 82 bp, Homo sapiens
gaaagaaatcctgaagttccctcacattagccagtgtgaagacctccgaaggaccataggtgctgccttcacctgcctggag

SEQ ID NO: 120986 - DNA, 100 bp, Homo sapiens
ctacagaagtgtgcatcccaaccttccttctgacaagtcccaggcaccaggatcatctacgaccgaaagttcctgctggagtgcaagaactcacccattg

SEQ ID NO: 120987 - DNA, 75 bp, Homo sapiens
gcaacgtccaagtctccgaacagagccacacgactcccgctggctcaatgaaaccagcctggacaccaagtctgt

SEQ ID NO: 120988 - DNA, 75 bp, Homo sapiens
cctttgtaaattgcaagaaagctctggagacttgtggcggggacctcaaacaggccctacagactgagaaggagg

SEQ ID NO: 120989 - DNA, 102 bp, Homo sapiens
ctaaaggagatggaagtgatgtaccatcatgggtagcctttgataaacaggttttttcgtgaaggtgggaatgtttagctcgggagagttgatttataagaa

SEQ ID NO: 120990 - DNA, 98 bp, Homo sapiens
cgcaggctgaccccgcagcggccgggctgtcgcggcccccacctcaggttcgttccaccagtcataaaccagatgaaatctatggcatgattgaaaga

SEQ ID NO: 120991 - DNA, 75 bp, Homo sapiens
ggatgaaatacatcgtgagaagagaggtgaggagcaaaagaagggatccacctattcagttccaaaatctaagga

SEQ ID NO: 120992 - DNA, 74 bp, Homo sapiens
acacctttcacagctatcagggaagttgatgctgatgtaacagttataggttctggtcctggaggatatgttgc

SEQ ID NO: 120993 - DNA, 96 bp, Homo sapiens
ccttgcacaacgaggacgccttccagcacggcatctgctttgaggccaagagagtaatgccttctagctttttcctgctgttgcggtttttcttga

SEQ ID NO: 120994 - DNA, 100 bp, Homo sapiens
gccgcttagattgggaggggaaagagcaccgaagaagcttcgaggatctgggctggttgatatgtgaagagccaacctgtcgcaatcgaactcgtcacct

SEQ ID NO: 120995 - DNA, 100 bp, Homo sapiens
gcctggaccagcttaatggttctggggtgtcacacctgctgccctacttctacctcctctacttcaccgcgctgctggtgcaccgtgaggcccgggatga

SEQ ID NO: 120996 - DNA, 100 bp, Homo sapiens
agtaaacggggctgctggtgggccgcgtcgaagacatggaccagggctacggagtcaaggcctggccgacaacaccgttattgctaaagtaaataatgtt

SEQ ID NO: 120997 - DNA, 82 bp, Homo sapiens
ctacggccctgtgggcctgggagctgcctctgaggaacacgccgcaggcataatcaccagcaacacccgggacaataatacg

SEQ ID NO: 120998 - DNA, 82 bp, Homo sapiens
ttgcaagcccagcttactcaggcacaggcagaacaacctgcacaggaaatgatttgcagctgagtgaatcaggaagtgacag

SEQ ID NO: 120999 - DNA, 99 bp, Homo sapiens
cttcaaccgtggaaaagccttcaaaagtacatagagctctttatagtaaagctcagatttcttttatccaagatattggaaggctccctctgaagcgac

SEQ ID NO: 121000 - DNA, 90 bp, Homo sapiens
gctgcagtcccgggacaggatgttctccaagttcacctccatcctgcagcacgccgtggaggcgactaagaaaaatggctttgtcagccc

SEQ ID NO: 121001 - DNA, 75 bp, Homo sapiens
cccaaggaggcttcaagacaaagggccccttacacaccagacaggaaggtggtttgaagttgacatttcagaagc

SEQ ID NO: 121002 - DNA, 76 bp, Homo sapiens
gaagtcggccagcctgagcaagcggaggacctacgccggcctggcaagctgcgaatattgtgcgtgctctggaact

SEQ ID NO: 121003 - DNA, 101 bp, Homo sapiens
ctcaaggcaagcctattgagttaacacctctgccgctgctaaaaggatattattgctggattcctatataccattttaatcttagctgtcttctatccatt

SEQ ID NO: 121004 - DNA, 80 bp, Homo sapiens
atgaagcgcttcctcttcctcctactcaccatcagcctcctggttatggtacaggcccaagaaacagatattttcaagaa

SEQ ID NO: 121005 - DNA, 82 bp, Homo sapiens
ctaagagatttcatttttaaaaatccggctatttctgaaatggtggcacatgaaagaatgccgggtctaagttgtagatttt

SEQ ID NO: 121006 - DNA, 50 bp, Homo sapiens
cacagctgttgccaatacacaatcagggaggcatttggctttattgaaag

SEQ ID NO: 121007 - DNA, 90 bp, Homo sapiens
agccaaaaatcaccaagtcctggaatacagattctgttcatcttgctctgaaattaaataattctgaactcatggggagaaaactcagag

SEQ ID NO: 121008 - DNA, 99 bp, Homo sapiens
aaactgaagattgtcatgattgtttatcctaatcccaatgctgaagtaagattgtcttggaaatactaagttgggtacggcttgttcagaagaaagata

SEQ ID NO: 121009 - DNA, 82 bp, Homo sapiens
gtgaacagttccagatgccggatctgtgtgctgaagagatcgctattattcttggaatctgaccaccaaatcccattgaatt

SEQ ID NO: 121010 - DNA, 90 bp, Homo sapiens
gaagctggtaagggaggcgtcgctgattccagagagctaaagccgatgatcttcataaacaatgaatggcatgattcagtgagtggcaag

SEQ ID NO: 121011 - DNA, 101 bp, Homo sapiens
cagaatccaagcggagagagtcagcctctggttcagactgcagtaaccaccttgccctttaaggtggtggtgatctcagccatcctggccctggtggtgct

SEQ ID NO: 121012 - DNA, 82 bp, Homo sapiens
caaaatctttgatgtgcgcaatggagggcagatccttatcgccgacctcagggggatgaatttttagatgtgatctactggt

SEQ ID NO: 121013 - DNA, 80 bp, Homo sapiens
gcggaggccgacaggattcgttggctgccgtccccgctgctgtgcattgggtctattctggataagcaggttttgtgaag

SEQ ID NO: 121014 - DNA, 100 bp, Homo sapiens
tgttgcgggcaccgcagtcgccgtgaagatggcgtctaccagccgatatttcacattttcaggaacaaaatgatttaaaagcattgctagaaaatctcct

SEQ ID NO: 121015 - DNA, 98 bp, Homo sapiens
gtgagtggctccagggacaggacggccaagataaacaggggtcacatgacgacagaagccaagagggctgcaaagatggaaaagaagatgaaaatttt

SEQ ID NO: 121016 - DNA, 101 bp, Homo sapiens
taaggagctgcagcagcatgtaaagtcagtgacagccccatgacacattcagctaacgtattttagcaggtggagtgaggttgaagattcctgtgacagcg

SEQ ID NO: 121017 - DNA, 98 bp, Homo sapiens
cctggatgccgtgttgggtttggttcggtgcttctccactctgcagtggctcttccgcttggacatcagcaggttcaggagaagtggcacctggtgga

SEQ ID NO: 121018 - DNA, 100 bp, Homo sapiens
ggagaagtaaggctgcctctggacggaggagtgaggggggcgaggaaacgcaattagtcagaagaagttgaaaaaatacgagaaagaatatcacaccatg

SEQ ID NO: 121019 - DNA, 101 bp, Homo sapiens
aagggaagtagtgtcctactcaaaggagacccagactcctcttgccacgcatcagtctgaagaacaggacgcaggccttgatgccctttcctctatcataa

SEQ ID NO: 121020 - DNA, 101 bp, Homo sapiens
ctggagaggggctcggcgcccggcggggactgcagccgtgctggtatagaggactctaagaagtggggcatgctgtttctggtgaaccagctgtttaaaat

SEQ ID NO: 121021 - DNA, 82 bp, Homo sapiens
cagaccctggagcctcagttggaagcagccgatccagcctgcggagcctgtggggcaggtggtgctgtggccatcccctcct

SEQ ID NO: 121022 - DNA, 100 bp, Homo sapiens
cagattcgcagtggtcgcttcttctccttgaacccagggaccatgggcgcctccaggctctataccctggtgctggtcctgcagcctcagcgagttctcc

SEQ ID NO: 121023 - DNA, 97 bp, Homo sapiens
cctgagcagcctggcctgccatgtccgggagaagacaaaaaaaccgggaagatcctgacggagttcctccagttctatgaagaccagtatggcgtgg

SEQ ID NO: 121024 - DNA, 137 bp, Homo sapiens
gaggaaataaaaacagaacaggaggtggtagagggcatggatatctctactcgctccaaagtgcaatgtgccaccccaagccctcccacctcccctgcttccccggctcctccagcaaaccccctgtcgtctgaatc

SEQ ID NO: 121025 - DNA, 100 bp, Homo sapiens
taacagacgaggaatcagctttgaagtgggagcccagttggaagcccgggaccgtttaaaaaactggcacgtctgagaatggtggatgtggtggagaaag

SEQ ID NO: 121026 - DNA, 83 bp, Homo sapiens
acttcattgctccttcaggacatgggaacttagtgatttggcccgtgaccctccagcacaatgttctgcaggtccagttgggg

SEQ ID NO: 121027 - DNA, 100 bp, Homo sapiens
aaggctttgagaaattttgagtcctcgagtgaatgggcggatctcatatcttcacttggcaaactcaacaaggataagttctgaacgtcgaaaagaaaag

SEQ ID NO: 121028 - DNA, 83 bp, Homo sapiens
ctgccaccgagccgggcccacctccccaccaaggaaggattttttatcaagcagaaatgcatcgaacaacgagaatcaagatc

SEQ ID NO: 121029 - DNA, 110 bp, Homo sapiens
gagaggagtgcctgagactaacagaactgctgggcgaatctgagcaccaactgcacctcaccaggatggagagcaatacatcatcatctttggagaatttagcgacggcg

SEQ ID NO: 121030 - DNA, 90 bp, Homo sapiens
aacaaaaccgagtcaacagggaagcagaggagaaccgggagccattcagaaaaggacagttttagaagacgacagaaagaaaaaagaaag

SEQ ID NO: 121031 - DNA, 82 bp, Homo sapiens
gtccgccgctcaccccgcggccgcaccttcccgccttctcagaatattccaacccgggaccggctagagggcatggcagcct

SEQ ID NO: 121032 - DNA, 75 bp, Homo sapiens
ttgatgggcacctcccgggacgatgtaggtgcaaaaaactacagacatctctgtgctgtttattacaacaagaat

SEQ ID NO: 121033 - DNA, 75 bp, Homo sapiens
catgccgctcaccgtagacgagttcctgcggatggtggatgcctgtgccagcttcctcactgaagccttgaaccc

SEQ ID NO: 121034 - DNA, 100 bp, Homo sapiens
gatttaaacaagagatttccacagaagcgatgactacctgtccctggagggttcccgctggccaccagccatcaggcaggccacacgctggaagtacacg

SEQ ID NO: 121035 - DNA, 100 bp, Homo sapiens
ctctgtgtggagatgcgacgaggacgatgactgcttagaccacagcgacgaggacgactgccgtgctggagaatctggtaaaagcaccattgtgaagcag

SEQ ID NO: 121036 - DNA, 96 bp, Homo sapiens
cggcggcgtcttatccaaccttgcgctgcatccgctcgacctcgtgaagatccgcttcgccggtatgatgatgtcaaacgtgatgctgatgctaca

SEQ ID NO: 121037 - DNA, 82 bp, Homo sapiens
attgacaacaaggctttatatgataccttctccacctttgggaacatcctctcttgcaaggctgagggtaaaaagctgggat

SEQ ID NO: 121038 - DNA, 50 bp, Homo sapiens
tggaggtgaagctgcggatcgcccaagagcttcatctttatgacggttgt

SEQ ID NO: 121039 - DNA, 98 bp, Homo sapiens
agcaacatttcccacaggacacgaagtttgtcggcccttgccttggcagagctgaggaatcccagtcagaagttccagcctgccactgttctctgatg

SEQ ID NO: 121040 - DNA, 96 bp, Homo sapiens
tcaacgacctggcggtggggctgcggcgcctgggactgcaccgcaccgagggcgagctccagagataattgacgaccttgccaacctagtggagaa

SEQ ID NO: 121041 - DNA, 98 bp, Homo sapiens
aactcatggaatatcctgcagaagaaaatggatttcgttatatcccctttagaatatatcaggatctgcaggcccaagaccgagctcaccgcatcggg

SEQ ID NO: 121042 - DNA, 75 bp, Homo sapiens
ataacggctgcacctggagattgacgcagagtgggcggcggtggtggcagtttggagcatgtgaacaccttgagc

SEQ ID NO: 121043 - DNA, 100 bp, Homo sapiens
cttgggacctgaacaaccagcagcgatacccaggctcttgcagccaatgccggaacaggatttgctgttgctgagcctcaaatcgcaatgttttgtggga

SEQ ID NO: 121044 - DNA, 83 bp, Homo sapiens
cgaggcccccctgaaccccaaggccaaccgcgagaagatgacccagtgggtgggaggacgctactcgctgtggtcggccatcg

SEQ ID NO: 121045 - DNA, 100 bp, Homo sapiens
ctgcagcagtcagcccaaaggaagctgcagggaagtcaacatttgtgaatatccttaaacaattgtgtgaagattgggaagtggttcctgaacctgttgc

SEQ ID NO: 121046 - DNA, 100 bp, Homo sapiens
tgacaactccgcagcaaacaactccgcaaacgaaaaagaacgacatgatgcaatcttcaggaaagtaagaggaccagtgtgcttttcttggagaaagaag

SEQ ID NO: 121047 - DNA, 100 bp, Homo sapiens
acccaatttgtgtcccttgggctggtgattctgctggaaatcctgatcagctgcttagcttttcagccgcaactttgttagcatgtaacttctaatgcca

SEQ ID NO: 121048 - DNA, 98 bp, Homo sapiens
gaaacagcccagcatgcccagggtgcaaaacctcaagttcaaccgcagaagaggtatgagtctaacatcaggagagtcaagccctacccgtcgagaag

SEQ ID NO: 121049 - DNA, 50 bp, Homo sapiens
tgggagggcacgaagcccccggcaaaggggaagctgctcgctgatctggc

SEQ ID NO: 121050 - DNA, 101 bp, Homo sapiens
atccagaaaattatcaacattctcacagacaagcatggagcctggggaaattctgcagtgagatatttcacattttcaggaacaaaatgatttaaaagcat

SEQ ID NO: 121051 - DNA, 75 bp, Homo sapiens
cgagaatgggaattctcttcactagaatatggagactgttcaatcaccagggtatacaaaactaggatatgctgg

SEQ ID NO: 121052 - DNA, 97 bp, Homo sapiens
gggaaaaatccagagaccccctgaagattcgggtatgttagagcccaccaaggaaccactgaaaccactttctgctgcagaaaaaatagcttccatc

SEQ ID NO: 121053 - DNA, 74 bp, Homo sapiens
ccagcctgtgctccagcagcagggatatattcagcagccatcaccacaggtccaacctaaacatgtgaaggaag

SEQ ID NO: 121054 - DNA, 100 bp, Homo sapiens
caagaacgggaacaaaactctgcgtgaatgcatctcagtccacgtggggcaggcaggtgtccagatgggcaatgcctgctgggagctctattgcttggaa

SEQ ID NO: 121055 - DNA, 82 bp, Homo sapiens
gctggaacatgcagagtctgcacaagttatcaatactctggctgaccatcatcatcgtgggactgactttggtggaagtcct

SEQ ID NO: 121056 - DNA, 116 bp, Homo sapiens
ggcgggtgcagaactacctgtacaacgtgctggagagaccccgcggctgggcgttcatctaccacgctttcgtttgactatattgtggagtatgactatgatgctgtacatgatga

SEQ ID NO: 121057 - DNA, 100 bp, Homo sapiens
ttagaggaattaaactttggccctgcgcctcgtccagcctaggttccacccttttctgggaacgatgagagccactcagagtgggtgtcttgtgtccgct

SEQ ID NO: 121058 - DNA, 75 bp, Homo sapiens
tccgagcaaacagaggcgctcatccacagagccacatctgttaggttagcactctacgtatatgaatatctgctc

SEQ ID NO: 121059 - DNA, 75 bp, Homo sapiens
ggaaattccacccgcgaagtccccttttggagatgcccttttcctttcagggagagtcccgtattctcagagtaa

SEQ ID NO: 121060 - DNA, 98 bp, Homo sapiens
gcaccgatcccaagttccagctagagaaggtgggcggcagcgccagcccggcgccccctcccagctcccagcggcgttgcttgagtccatggttgatg

SEQ ID NO: 121061 - DNA, 98 bp, Homo sapiens
ttactggttcaaagaactccggggaaactgggatagaacattttacattataagtagaaccctgggagccagaggcaaaccacagggaagctggaaaa

SEQ ID NO: 121062 - DNA, 74 bp, Homo sapiens
cctatccaagtagcctgctgtcgcccagccgcggaggtgtcattaacttgtcagtacctatagttctgactgcg

SEQ ID NO: 121063 - DNA, 90 bp, Homo sapiens
aactcaaggagcggaaagactagatgccgatccaaaagactttcagaaactcaccgcagctgacgataaaactgctcaggtagaagattt

SEQ ID NO: 121064 - DNA, 95 bp, Homo sapiens
ctccagggagtgctctgttcacggctccatcgctgttaaaagccttgagccgggccatgcttctcacatcttacctgcctcctcccttgttgaga

SEQ ID NO: 121065 - DNA, 82 bp, Homo sapiens
aggaaaggtgtgctgtgcctgaggccagctcttcctaaggaatggaagcccagactgcctgggaggcaggagacctcgtttc

SEQ ID NO: 121066 - DNA, 100 bp, Homo sapiens
ccaacaaggtgtcaatgtccagcactgtgcagggcagcaacatctttgagagaacggaggtcctggcagtgggcgacagatgcgaaagaaacgagttcca

SEQ ID NO: 121067 - DNA, 100 bp, Homo sapiens
gccaagctggcggccaccgcaggggccctccacattctggccgaatcaactggcagtataattgaagttctgagtaaaatagattcagaaggaggagttt

SEQ ID NO: 121068 - DNA, 98 bp, Homo sapiens
tgatgactctcaggacaaagcagtgctgaaaggtggtcctttctctgacagctacaggctctttcagttccattttcactggggcagtacaaatgagc

SEQ ID NO: 121069 - DNA, 100 bp, Homo sapiens
tgaagcagaagatcgaggacacgctatgtccttttggcttcgaggtttaccccttccaggcacgtgggaaaaagcgccagataggctggttcccagctaa

SEQ ID NO: 121070 - DNA, 87 bp, Homo sapiens
ggaagaggagctgctgaggatcgccaaaaagctggagaagatggtggccaggaagaacacggttccagcaacagatagaaatgcttt

SEQ ID NO: 121071 - DNA, 100 bp, Homo sapiens
ggatgttcagcagcgcggcagagtcatgggggctggactctgtgaagctgagcaggagcagatgcggaagatcctctaccagaaagagtctaattacaac

SEQ ID NO: 121072 - DNA, 89 bp, Homo sapiens
cgcggggccaggaagtcggagtttgagccccggaggcagagcggctgccatggttaccactacaacgacctggtgtctccacagtacct

SEQ ID NO: 121073 - DNA, 50 bp, Homo sapiens
tttgttataaactgctgaagaaggggacggtgctcattggttcagaacat

SEQ ID NO: 121074 - DNA, 73 bp, Homo sapiens
ccggccgcaaggccggggctccccgctgctctcgaaaagccgcagactcctgaggaagaagagattttaaaca

SEQ ID NO: 121075 - DNA, 100 bp, Homo sapiens
gtgactgatgaagggaaggaaatcatgtcaagcgaagccttgaaaaagctgccctgagacggtgtcccgccgaaagcctcgaagcggaggatccctgtgt

SEQ ID NO: 121076 - DNA, 98 bp, Homo sapiens
tctgaaagccgatgtggtcatcagtgcctttggttcagttctgagtgatcctaaaggtgtccaaggcagctgcagatttgatggcctactgtgaagca

SEQ ID NO: 121077 - DNA, 100 bp, Homo sapiens
atggccttggagaactgccccaaggatttgcaaggaacaagctgaaagctggatacctaatgtcagtggagtcttctgagtgtttcctggaagaagtcgg

SEQ ID NO: 121078 - DNA, 100 bp, Homo sapiens
gctggctgcccagcccaaaggcccatgaggggatgcagttatgggctctgtcgccgtggattctgaaaaagagttccacgtcctcccttatcgagtcttt

SEQ ID NO: 121079 - DNA, 98 bp, Homo sapiens
gtttacctggcactcctggacaggatggattgccagggcttcctggcccgaaaggagagcctgttttaggtagaggaatttcaggaagcattggagta

SEQ ID NO: 121080 - DNA, 101 bp, Homo sapiens
cgtagcagggataaaagaagatctcggtcaagggacaggaagcgtctgaggaaatgtgactggaaacagtaactccacgttcatctccagcgggcaggtga

SEQ ID NO: 121081 - DNA, 82 bp, Homo sapiens
aaaaagcagaaagtagatgaagatgagattcagaagatgcaatggtgtcggacggcatgacaggcagcaatcctgtgtcccc

SEQ ID NO: 121082 - DNA, 82 bp, Homo sapiens
gccgatccagcctgcggagcctgtggggcaggaagtgactttggtccagagacttctccagtcctgcaccttgaccacagtg

SEQ ID NO: 121083 - DNA, 75 bp, Homo sapiens
ctggaagagaagagggtggctaatgattaagatgagttcccacttgctcacctcttggagcctttccgacagtat

SEQ ID NO: 121084 - DNA, 101 bp, Homo sapiens
aaattcctggaaaaagaagtccaagaagcaaaaaagggactgctaagaagataccaccaggtcccccggcagagggcagtagagatggccggcccaaggcc

SEQ ID NO: 121085 - DNA, 101 bp, Homo sapiens
gacatgcgagcaatcttcaagcgctatgccaagaagcgaaatgtgctcattggccattcctacgggtctcggcgcggaagatggccggcggcgtggacggc

SEQ ID NO: 121086 - DNA, 76 bp, Homo sapiens
aagacaatatcatgcaagtgtggcaaatgaattcaattcgtcataatctgtccctacacagcaagttcattcgtgt

SEQ ID NO: 121087 - DNA, 75 bp, Homo sapiens
ggaagtgcagctgcctcagttcttagcgcaggacttaaccaccaccatgtcgagcaaaagaacaaagaccaagac

SEQ ID NO: 121088 - DNA, 51 bp, Homo sapiens
aaaatgtcaacaaattgatgggtatggctttgtaattgctgtcaccaccat

SEQ ID NO: 121089 - DNA, 96 bp, Homo sapiens
ggggaacagggtcacagctctcacccaggctgttggagagaaagtagtgagagatgcatttccggaagccattatcgtaaagccgtcggacatctt

SEQ ID NO: 121090 - DNA, 75 bp, Homo sapiens
cctggagccttccctcctcttcccagcaggccagctccctgcagcctggctgaccatgtttgatgctgtgctcat

SEQ ID NO: 121091 - DNA, 89 bp, Homo sapiens
ccgcggtaccatgaggcgccgatttattcaggagattgagcatgctctgggtcttggcccagccaaacagtgtcctcttcgagagtttc

SEQ ID NO: 121092 - DNA, 101 bp, Homo sapiens
cccgccgccgccgggcccggccacagcctgcagcggagcccacgagaggcagcgccatggcggagcagacctactcgtggctgacaaacgggctcatcata

SEQ ID NO: 121093 - DNA, 142 bp, Homo sapiens
gctccctgtatgcatggtgtggggttggtgtgattagcttcgcagtctggaaagctttaggagttcacagttctctgctggatgaaccgaatcctaacagtccagccaatagccaggcagcacagctttatcaggaaaacaa

SEQ ID NO: 121094 - DNA, 99 bp, Homo sapiens
tgctgggaaatctcctgctcgaaataggtttccaatacttatctacaggaatcgccatgaccccagctctgagggaggcaacagcaaagggtatcagct

SEQ ID NO: 121095 - DNA, 92 bp, Homo sapiens
ttcaacaagaatacctgccctccttgcaagtagctccagaaataattcagggacagagcagaatgggctgatatagatccggtgccgcagaa

SEQ ID NO: 121096 - DNA, 101 bp, Homo sapiens
ggcacttggagtccggacatctgaaacttgattgtgtaacatcgtcctttatccctgtcaagcctttcaacatgatggctcaaacagaacccacagtggag

SEQ ID NO: 121097 - DNA, 100 bp, Homo sapiens
taaagaaggaaaaaggaacgaacttcaaccagttgatcacagccgagttaaattgacattaaagactccttcacaagattcagactatatcaatgcaaat

SEQ ID NO: 121098 - DNA, 100 bp, Homo sapiens
gtggatggcgtggagatatggcgcaactgcggcgcatgcagagcaaagcggcagtccccggacagggatgggctctgaccaggaggacagcaagcccatc

SEQ ID NO: 121099 - DNA, 100 bp, Homo sapiens
aggaaaggacttaatcaggtttatgtgtcctaaaggtaaacattataccagtgattgccaaagcagatacggtttctaaaactgaattacagaagtttaa

SEQ ID NO: 121100 - DNA, 75 bp, Homo sapiens
gcgggcgcctgaaggagttgttgtctcggcagcgcccgcggagacgtgaagagaaaagtcctccatacattttct

SEQ ID NO: 121101 - DNA, 82 bp, Homo sapiens
acagcatccgggacctccagcgactcctggagatagactccggcgaagctgtgctcaggcccgggctggacgcagagccaga

SEQ ID NO: 121102 - DNA, 75 bp, Homo sapiens
cacaaatgctccttctcctggagacgcaactcaaggagatacttgagagggaccatgcccggctgaagccccgtc

SEQ ID NO: 121103 - DNA, 50 bp, Homo sapiens
gtttccgttaagctggacaacagattgagcagctgtatgtccggcaactg

SEQ ID NO: 121104 - DNA, 99 bp, Homo sapiens
ctgttaccactacggtgaccagcccagaaaaacctgctcctgattacaaggatatgtcgattgcagggaggcagaggaagaaatacaacaggatgtcta

SEQ ID NO: 121105 - DNA, 100 bp, Homo sapiens
aagcccagaccagtgcggtcctagccagagagaaaggacatttgccaacaatgagacacgaagcgcccatgcagtgttatccaagataaattctgtggga

SEQ ID NO: 121106 - DNA, 100 bp, Homo sapiens
cggggcagctggacgagctggagaaggccatcaccacgcagaacgtcaacaccaagtgcatcaccatccccagggatgttggtggtaaatgtaacgtgga

SEQ ID NO: 121107 - DNA, 82 bp, Homo sapiens
ctcgcgccggctatggccgtgccctggggctgagccctcagctggctggaggcgtgatcctgggtgtggccctgtggctccg

SEQ ID NO: 121108 - DNA, 83 bp, Homo sapiens
agacgagatcgccccgatagtttgagagtaaatgggttaccagaggaagagctaaggttaaagatcgaggtccggaagccact

SEQ ID NO: 121109 - DNA, 97 bp, Homo sapiens
cctgagctggcagtacctgaccactctctcccaggccaaacgtaccaagaaagtcgggatcgtcggtaaatacgggacccgctatggggcctccctc

SEQ ID NO: 121110 - DNA, 100 bp, Homo sapiens
aaagtcggccaagaaagacaaagacccagtgaacaaatccgggggcaaggccaaaaagaaggctttaaggagttttaagctgagtgtcactgtagacccc

SEQ ID NO: 121111 - DNA, 97 bp, Homo sapiens
aagatagccaaccaatgtgctattcaaactgccctgatgggcagtcaacagctaaaaccttcctcaccgtgtactgctgtaacagaagacaagtacg

SEQ ID NO: 121112 - DNA, 74 bp, Homo sapiens
tttgtatgaacaaaaccagtctgatgttgctatgctggaaaatgagaagaagaagcgtgaaatggcagagaagg

SEQ ID NO: 121113 - DNA, 90 bp, Homo sapiens
cgaattccaacttgtttcacgctatatcaggatgagataactgaaagggaagcagaaccatactataatgttctgaaggatctggaaaag

SEQ ID NO: 121114 - DNA, 100 bp, Homo sapiens
cctgcaggtggctgaaaatgtgtcctttgtggaggagtacagctaaaactgagcaagaggttgacattatattgccccagttctccaagctgacagtcac

SEQ ID NO: 121115 - DNA, 100 bp, Homo sapiens
ctggaggctgcggggccatcgctccagaggttgacggatatattcagacgttacgacacggatcaggacggctggattcaggtgtcgtacgaacagtacc

SEQ ID NO: 121116 - DNA, 73 bp, Homo sapiens
tggtcaggacctgctgcgctgtaagatcctgatgaaggatgatgagtttacacacctgtacacactgattgtg

SEQ ID NO: 121117 - DNA, 97 bp, Homo sapiens
gccatggcgccagcgctgtggcgggcctgcaacggactcatggccgccttcttcgcgctggcggccttggtgcagatgtgtcttgctgaatcagggc

SEQ ID NO: 121118 - DNA, 90 bp, Homo sapiens
gtgctgatgagttaggagaggtcatcaaagatgatatttggccaaacccattacagtactacttgactcccctggacccccaaaaggaga

SEQ ID NO: 121119 - DNA, 100 bp, Homo sapiens
gagcgagctgagtggttgtgtggtcgcgtctcggaaaccggtagcgcttgcagcatggaggaggaggaggaggcccggctggccagcatgcccgcctgga

SEQ ID NO: 121120 - DNA, 75 bp, Homo sapiens
gcctaaacctcagagtcctagatggatatgtgatttctcagaaggaaagagtaaagccaatcccagctgaaggaa

SEQ ID NO: 121121 - DNA, 100 bp, Homo sapiens
aggctttttttctccagccgagaggacgcggctgtgatatacgaaggcgaggattaaatccaccacacagggtgaaatctatctccatgacaacattcac

SEQ ID NO: 121122 - DNA, 80 bp, Homo sapiens
atccgtttgttcaggaaccaccagtgacagagttgactatagtcaatggggccaatggagccaagtgtatggaaacccac

SEQ ID NO: 121123 - DNA, 100 bp, Homo sapiens
ggggcctggagctggagcctggcgccgggctcttcgtggctcaggcggggggagcggaccctgacaagttccagggtgagaactctgtctcagtcgacgg

SEQ ID NO: 121124 - DNA, 100 bp, Homo sapiens
ctggttgtgattcttataccccaaaagtcatacagtgtcagaacaaaggctgggatgggtatgatgtacagtgggaatttcagattggaccttgtgaagg

SEQ ID NO: 121125 - DNA, 50 bp, Homo sapiens
aatccttccttgatgatgaagagatcttggagtctctgtggatcgttatg

SEQ ID NO: 121126 - DNA, 100 bp, Homo sapiens
aacaaactacccattttcttttttggaactcatgagacggatgaattgtaaaagcaacatcagcttgaccagtataaaattacagtggattgctcatctc

SEQ ID NO: 121127 - DNA, 83 bp, Homo sapiens
ggctgctggagcttgtcaccaccaggctgtgttatatgacatcatcctgaagaacttcgagaagctcaagaagcccaggggag

SEQ ID NO: 121128 - DNA, 75 bp, Homo sapiens
atactgaatgtaaaccctgcaggtttgggactgacaatagctgactaacatgtcctgagctgtgagagggcatag

SEQ ID NO: 121129 - DNA, 100 bp, Homo sapiens
gggcgtggcctgaggcttggataagtgggaaccatgacagtttgctctcaaggtggcagaacagaactatggaaaatctggttgagctgcacaacaaggc

SEQ ID NO: 121130 - DNA, 115 bp, Homo sapiens
tgaacttccctggtcgaacagttttttctaatggctattcaaggaaatttacatgccacttatgtgatagaagtttcacagagaagtgggccctgaacaaccacatgaaactcca

SEQ ID NO: 121131 - DNA, 100 bp, Homo sapiens
caggaagagctgagccgagagctgagcaaaacacggagtctccagcagggcccggatggcctccggaagcagcaccatagagacgggggttcaccatgtt

SEQ ID NO: 121132 - DNA, 73 bp, Homo sapiens
tcgcttcaaaaagtgtctgtctgttggaatgtcaagagatggttcttgggtgtctctggggagtccctgggcc

SEQ ID NO: 121133 - DNA, 82 bp, Homo sapiens
cgggagctcaaagtgtgccttctcggggactcgctcagcagcagcctgaaaacttgctacaagtatctcaatcagaccagtc

SEQ ID NO: 121134 - DNA, 80 bp, Homo sapiens
acatgttcacgcacgggatccagagcgccgcgcacttcgtcatgttcttcgcgccctgatgatgataattccgaagaagg

SEQ ID NO: 121135 - DNA, 85 bp, Homo sapiens
tgtgaatagagccagcaaaggaggtcttatctatgggaactacctgcattgttatagttttgccgctggactcttccctcccttc

SEQ ID NO: 121136 - DNA, 90 bp, Homo sapiens
gtgtcagaggtctcaagggatctaaaggtgaaaagggtcctgctggagagcgtggtgctccaggccctgcagggcccagaggagctgctg

SEQ ID NO: 121137 - DNA, 100 bp, Homo sapiens
ctaactctttcctgattggaggagacagcccagacaataaataccgggtgtttattgggcctcaggtcatactccctgtcacaaactccagctgaactaa

SEQ ID NO: 121138 - DNA, 98 bp, Homo sapiens
ctgctcttcctggagacctcagccctggactctaccaatgttgagctagcctttgagactgtcctgaaaggagaccagtatgatgtctgtgccatttg

SEQ ID NO: 121139 - DNA, 100 bp, Homo sapiens
agattatcatccctccattcctggcctatggcgagaaaggctatggttggatggcaagcatgtggtgtttggcaaagtgaaagaaggcatgaatattgtg

SEQ ID NO: 121140 - DNA, 53 bp, Homo sapiens
ggagttgccgcagccccaggctgagacagagagtgactcagacatctcctcta

SEQ ID NO: 121141 - DNA, 109 bp, Homo sapiens
cgaaggtgaagagttgtcccagctcggcccgcgggggagccccgggagccgcacggttaaaaatctgtaagagcctgattttagaattcaccagctcctcagaagtttg

SEQ ID NO: 121142 - DNA, 75 bp, Homo sapiens
ctcggggagtcctaccctatgtgggcaacctcatcaccaagaagattaagattgcggccctgcgcatgtatacta

SEQ ID NO: 121143 - DNA, 96 bp, Homo sapiens
agtgctgagtcagtgtgacagtccatatgtaaccaaatattatggatcctatctgaagcttctccatatacaacctcaactccaaacatcaacagt

SEQ ID NO: 121144 - DNA, 100 bp, Homo sapiens
ctgaggcggcgcggcagcggagggacggcagtctcgcgcggttgtggcagcactgcctgaaggtatgagaccagattctaatctttatggttttccatgg

SEQ ID NO: 121145 - DNA, 75 bp, Homo sapiens
cacatggaatgtagaagtcttgattgacgttcttaaagaactgtttcctccttatgcaactaatgaaattggcaa

SEQ ID NO: 121146 - DNA, 104 bp, Homo sapiens
gatcgtgaccgagaccgtgaccgagagcgtgaccgagagcgcgaatatcgtcatcgttagaaggtgtggcatgcagcattttggaaggaaaattgaagacgtgt

SEQ ID NO: 121147 - DNA, 80 bp, Homo sapiens
gctacggccccggctacgactacaacatggaagagaaggtgagaagttgtgaaacgctgaggctccagccctaagccagc

SEQ ID NO: 121148 - DNA, 52 bp, Homo sapiens
gttcctcccagctacgagctgccccagatgaccactgagcagtttacaggag

SEQ ID NO: 121149 - DNA, 75 bp, Homo sapiens
gatgttttgcctactgttgatccgaaccagacgtcctgggtcctctccagcatggcagccctctactggagggtg

SEQ ID NO: 121150 - DNA, 96 bp, Homo sapiens
cattgatctctgaagatatcaagtcatattatacagtgcgacagctagaattggaaaaccttacagctcaagctatccttccacctcaacctcccg

SEQ ID NO: 121151 - DNA, 88 bp, Homo sapiens
ggagctgggacgtggagtgcgatacgtgcgccatctgcagggtccaggtgatgggtgctggagaatctggtaaaagcaccattgtgaa

SEQ ID NO: 121152 - DNA, 50 bp, Homo sapiens
gagcccacgccgcgcctgcaggaggaaaacccgcctagtgccaagcaacc

SEQ ID NO: 121153 - DNA, 100 bp, Homo sapiens
tcgatctggagcttttcccctccccggctgagctgcccctcctggacctgatgaagctgtacgaaggcgccttcctgccgagttctcagtggccccggcc

SEQ ID NO: 121154 - DNA, 74 bp, Homo sapiens
cttaaaaatcaccagttactttaatgagaccctgatgctcccataagacagaaaatgccccttgatgatctgga

SEQ ID NO: 121155 - DNA, 78 bp, Homo sapiens
cggattgtactgtatggggactccaattgcttggatgacagtcaccgacagaaggaaactggcgatggaatatgagag

SEQ ID NO: 121156 - DNA, 90 bp, Homo sapiens
cggtacggacctgtgcaggtgaggacaggccaggactgtcaccagggccagagagaactaaagttcctgtgtatgctgagataacaccag

SEQ ID NO: 121157 - DNA, 90 bp, Homo sapiens
gggcaacctgatctcggctgtcggagtgggtgtcctcaagaaaggtgacttggtcctcgcggacgccagcaaactgccctatgatgtgac

SEQ ID NO: 121158 - DNA, 111 bp, Homo sapiens
ggggcgagctcttcctcaccgtgctcctcaatcctgggaaaccctcagtaaaaccagcccaggtcaaagcctcatcagtttctactaaggagtctccagcaagaaaggcgg

SEQ ID NO: 121159 - DNA, 75 bp, Homo sapiens
cgccgcagctcctcggacgcagagagcctccttttcacctgaccagaagaggctggggtgagtttcccgtcagag

SEQ ID NO: 121160 - DNA, 100 bp, Homo sapiens
tgcggaagctgggggtgaagcttgtgcagcgactggggctgacattcctgaagccgaaggtggcagcatggagacgaagggaacgtcatcgtttggaaag

SEQ ID NO: 121161 - DNA, 98 bp, Homo sapiens
acaagaagaaatggaacgagttaaagaggaaagttcctacatactggaatccaatcggaaggtgggtttggaggatttgggacaacatctacaactgc

SEQ ID NO: 121162 - DNA, 100 bp, Homo sapiens
gtgagatgtctccagcatttttacggacccaatcatgagcactgctttaataggaagggcgctatattcctcctcatttaaggaaccgagaagctactaa

SEQ ID NO: 121163 - DNA, 100 bp, Homo sapiens
cgcagctccacgcagcaagacccgcgccgccgggacccccaggacgacgtgtacctggacatcaccggtgccctacgagacgctgaacaaacgctttcgc

SEQ ID NO: 121164 - DNA, 83 bp, Homo sapiens
cttgccatctgcttatcaggacagaagatctggaccacggccaagctcacaaatcgggtgccagaaccctgtggagcatcatg

SEQ ID NO: 121165 - DNA, 50 bp, Homo sapiens
gtcgccatgggccgccgccccgcccgttgagccactgacaagactttaag

SEQ ID NO: 121166 - DNA, 91 bp, Homo sapiens
gagcttggttaacttgggagaaagtttcatctgtggatggagtattgacttcacagagaatgcagttgtcttgacttcaggtctgtctgtt

SEQ ID NO: 121167 - DNA, 82 bp, Homo sapiens
ccgggaccgccgccgccgccgccaccatggagtgctacctggagggtgaccagacgagcctgtaccacgcagccaaggggct

SEQ ID NO: 121168 - DNA, 75 bp, Homo sapiens
cagagcacttcttctgctctcactgcggagaggtgtttggtgcagaaggtttccttaatgacaacaaaaaaggga

SEQ ID NO: 121169 - DNA, 109 bp, Homo sapiens
cagatgtggaagtcatactcacagaaaagaaaggctggggcttgagagctgccaaagaccttccttcgcctgcgcgatgcaagacgggagaaaaggaggggcgtacgcg

SEQ ID NO: 121170 - DNA, 50 bp, Homo sapiens
cattttgggtgattttaaactaggtactccaaagattcaggtttactcac

SEQ ID NO: 121171 - DNA, 75 bp, Homo sapiens
tgcggtgctgctgagcttggcctcggcgtcctcgggccattgaacacccagttcgaaccaatcagattccacgtc

SEQ ID NO: 121172 - DNA, 97 bp, Homo sapiens
ctccggtcccgacacctagcctgcgtgtcatggagaaactccagctgggcccagagattctgcagcgggaaaatccaaggcttatttatgccaggct

SEQ ID NO: 121173 - DNA, 75 bp, Homo sapiens
ggaggccttgccgggccggaaggaacagacccctgtagcggacaattgcagcatgactttcccagggccctgatt

SEQ ID NO: 121174 - DNA, 100 bp, Homo sapiens
aagcatctgcagaggatggtcagtgtgccccaggtgaaggccagtgctctcaagggtgactgttggatctgtatggaactcatgtctacctcgtttgata

SEQ ID NO: 121175 - DNA, 100 bp, Homo sapiens
agtcccagatttttgctcattaacagaaaagaagaggagaatgctaagcagacattccaaaatatgcccggtgctatccgcccagctgctcctagaccac

SEQ ID NO: 121176 - DNA, 101 bp, Homo sapiens
acagttctaatgctcagttgctcctggactactgctcttccaaggggtataacatttcttgggaactaggcaatggttcaactactcaatttcatgctggc

SEQ ID NO: 121177 - DNA, 90 bp, Homo sapiens
atgtgctatgcctacatgaagcagcccagcgacttctccgtgtcccttaaagcgtcagggaagaacaaacacttcaaggtgcagctcgtg

SEQ ID NO: 121178 - DNA, 82 bp, Homo sapiens
aaacaaactttcagatcaatcacattgatgacacacttcaagttaagatcacagacaatgccctctccagagacttgttccc

SEQ ID NO: 121179 - DNA, 98 bp, Homo sapiens
acattccagttgaggcaacaggcaacaactgtcctccacatattgaaagtgttcatcaacttggctgcgaagttgttgtcttgctactggaacttaat

SEQ ID NO: 121180 - DNA, 75 bp, Homo sapiens
taatttggctagaggaccgcgcggaggcagcggggtgactttcggatggtggttggagaagataaaacaaaagtg

SEQ ID NO: 121181 - DNA, 98 bp, Homo sapiens
ttatgaagaaaatgggtttctagtaatcaaaaatcttgtacctgatgccgatattcaacgctttcggtcagccccagttgatgctgacagcaggaccc

SEQ ID NO: 121182 - DNA, 82 bp, Homo sapiens
agccgatccagcctgcggagcctgtggggcaggcaaatactgtggtctggggttgcaaatgaaccattcaattgaatcaaaa

SEQ ID NO: 121183 - DNA, 90 bp, Homo sapiens
ttgccaaatgcacagccaagcctagcagctcgggcaaggatggtggaggcgagaacactgaggagaggtacttggaaggctccatcgccc

SEQ ID NO: 121184 - DNA, 96 bp, Homo sapiens
agtgatcaaaaagagagtggttgtggctaaagaattacctccaaagccattgtcaagaccacagcagtcatctgcaccagtccagctgaactctgg

SEQ ID NO: 121185 - DNA, 100 bp, Homo sapiens
ttatataaagaagaccttaatcaaggaattttacaacagtttgaacactggcctcatatttgcacggtactcatgcccgactgtctaccaggcacacaga

SEQ ID NO: 121186 - DNA, 50 bp, Homo sapiens
ggacacttgagcaccaaaagtaatggttgtttacattcagagctctatca

SEQ ID NO: 121187 - DNA, 96 bp, Homo sapiens
gccatgaggccaaaggcagttgtattggaaaatttaaacctagctctgaattctgcctcagccattggttgtacagtggtcaacattggtgcatca

SEQ ID NO: 121188 - DNA, 80 bp, Homo sapiens
caagctacattccctccagctgctacccatttaccagaccggtggggaccaaggcatactgaacacattttttagcagct

SEQ ID NO: 121189 - DNA, 97 bp, Homo sapiens
accgagtgcttcctgagccccacctgattacatcaaccccagagccgtgcagctgggctcccttctcgtccgcggcctcaccactctggttttagtc

SEQ ID NO: 121190 - DNA, 98 bp, Homo sapiens
cctcctcccttagctccctgttcttgggtcccgaaacctttttctggcccagtaagactacactcctccaatcctaatttgtcaacactagattttgg

SEQ ID NO: 121191 - DNA, 100 bp, Homo sapiens
cggcagcgtcgtcgcttcactgtggctcatacatggtagttcttcctttgccagcaaacccaccacaccaactggattgggtggaggattcccgcctctc

SEQ ID NO: 121192 - DNA, 98 bp, Homo sapiens
gtgctgatcttcgatgagctctcggattccttatgcagagtggccgacttggtgtgatgaatgcagactctgctaccattttggctgtttggatcctc

SEQ ID NO: 121193 - DNA, 82 bp, Homo sapiens
gcccaccgcatccagcagattgccgagggtgaaaacaaatctctagaagatgacggtgttctttaaaacgcttcgaaatcac

SEQ ID NO: 121194 - DNA, 101 bp, Homo sapiens
gacttccagcctccagaactgtgattctggacaaggattaagaatgtggatcaagcaggttttaaatcaagatttaacattccaacacataaaaattattt

SEQ ID NO: 121195 - DNA, 100 bp, Homo sapiens
cggacgccggggagtacagctgcaaggccggggatcagcggctgtccttccacctgcacgtggcagattgacgagatgcctgaggctgccgtgaaatcaa

SEQ ID NO: 121196 - DNA, 82 bp, Homo sapiens
cgccttctgcctcagaacggcgtgactcggaggttgacatcatggacatatgtgagtccatcctggagaggaagcggcatga

SEQ ID NO: 121197 - DNA, 78 bp, Homo sapiens
aattatcagatctaccctcctgctatatgtcggatattgaatttgagttagatcagagtggagtggtaaaattttatg

SEQ ID NO: 121198 - DNA, 83 bp, Homo sapiens
ctctagcctgacaaatgcttgctgacctgggccagagctcttcccttacgcaagtgttggagagcacaatggctgaacaagtc

SEQ ID NO: 121199 - DNA, 98 bp, Homo sapiens
gtggatggcaatcatcagagaacgggggactccggggggcccctcgtgtgtaaggacgtagcccaaggtattctctcctatggaaacaaaaaagggac

SEQ ID NO: 121200 - DNA, 51 bp, Homo sapiens
ttttcttcagaagctggtcgccgccggcagatgttcgcacacaagccatgt

SEQ ID NO: 121201 - DNA, 98 bp, Homo sapiens
ctttaccaacgccatcaccgacctcatcagtgagctgtccctgctggaggagcgcttccgggccagtacacaacaggccggggctcctcaggagtggg

SEQ ID NO: 121202 - DNA, 90 bp, Homo sapiens
cggcggaggcgacggtggcggctctcggagccggcgcgaatccggcccccgcagcgggacccggaccatcatggagcagttcaaccctag

SEQ ID NO: 121203 - DNA, 100 bp, Homo sapiens
gctcaaacatcgcagaggccgactgggagagtgtctccagcatcctgcaagtggaataacttagcttgcacatgaatgcagtcatgcaaaccgttaggaa

SEQ ID NO: 121204 - DNA, 100 bp, Homo sapiens
tcctgggaaggtggagccaccagcctctccttgccacagatgaagatatccttgctaaaggaaaacagtccatcaggagtcaggctttaggaaatcagaa

SEQ ID NO: 121205 - DNA, 75 bp, Homo sapiens
cagggatgagtcatgtggcagtggaaaatgcgctcgggctggaccagcagtgagagatatgagtgagcatgtaac

SEQ ID NO: 121206 - DNA, 75 bp, Homo sapiens
aagtggtccaaacggcccggtcacctgagcaacccctctgcaggaaccgcagggtcctcactgagcagcgagtcg

SEQ ID NO: 121207 - DNA, 100 bp, Homo sapiens
cgtggaatctggggccttaaagccccttcgtctccccagcacccactctctgggggcaggtgggcccggtgacagtctgcgctcctcagaccaccggcag

SEQ ID NO: 121208 - DNA, 100 bp, Homo sapiens
aagaccattcttcaagtttgcaaaggatcacatcatggagatattttccacctatgggaaaattaaaatgattgacatgcccgtggaaaggatgcatccc

SEQ ID NO: 121209 - DNA, 51 bp, Homo sapiens
agaaaagctgttttaaagccagttttaaggaacaagagtttgttcagaaac

SEQ ID NO: 121210 - DNA, 100 bp, Homo sapiens
ttggtgatagacgatagagaaggaggatcaaaatcagacagtgaagatataacaagatcagcaaatctaactgaccagattcagaatggacagtttagaa

SEQ ID NO: 121211 - DNA, 75 bp, Homo sapiens
gggtttccaccccggcgggagctgtcaggttggctccgcaactgataaatttcaaacggaagagagtggcagcat

SEQ ID NO: 121212 - DNA, 90 bp, Homo sapiens
gacggtacttctgccactgctgctccgtggagatcgtcccgcgcctgccggttaatttggagtggcccctggagtcagtttcctacacca

SEQ ID NO: 121213 - DNA, 74 bp, Homo sapiens
acgggaaccacgcgagctgcagccagggtcgacaagaagatgctgaggaatacttaggcttcattctaaatgga

SEQ ID NO: 121214 - DNA, 142 bp, Homo sapiens
ggggcgggcggcatcggctgcgagctcctcaagaatctcgtgctcaccggtttctcccacatcgacctggagattgctgcgatgattgacactgagtttgccaagcagacctccctggacgcagtggcccaggccgtcgtgg

SEQ ID NO: 121215 - DNA, 82 bp, Homo sapiens
gatcgagaggatctggtgtaccaggcgaagctggccgagcaggctgagcgatacgacgcgtccgtgtgcctggccctgcgcc

SEQ ID NO: 121216 - DNA, 75 bp, Homo sapiens
ggtcagcccccctgcaagtcatccttgctctctacctcctgtggctgaaactaattctgaagcaagcccttatag

SEQ ID NO: 121217 - DNA, 100 bp, Homo sapiens
tgctctgcgcgctgaccggactggccctgctccgcgccgcgggctctttggccggagctcgaggccatgagcagatataccagcccagtgaacccagctg

SEQ ID NO: 121218 - DNA, 90 bp, Homo sapiens
cacagcaggctgagcagctgcaaacccccgaaaaagggagactgccagactcgggaggaggcagtggcgctcggcgtgggtctgtgcaac

SEQ ID NO: 121219 - DNA, 74 bp, Homo sapiens
ctcgggcgaggagaggaggtgaccccgcgaaaggttacttcctcagaatgttggcctcctgtatgttggaggtt

SEQ ID NO: 121220 - DNA, 98 bp, Homo sapiens
tgagggagaacacagaccctgccagtgagagaggaaatgccagctcttctcagaaagaaaagagcgtttcccaaagtgtattctgcggaactagcacc

SEQ ID NO: 121221 - DNA, 100 bp, Homo sapiens
cctgctaatttcctgttctggaatcgagagaagactcctcaacaagttgctgcaatgtctgtgtctaatctatcatgagatggggtctcactatgttgcc

SEQ ID NO: 121222 - DNA, 50 bp, Homo sapiens
acacctggatccaggataacggaggctggcacttgcacctcctgcgccgc

SEQ ID NO: 121223 - DNA, 100 bp, Homo sapiens
cagagatcaggccaagtttggaatcactggggcagggtgccatttgccgtgcctgacaaagtgctgtggccacagctgtgtgaggcgctcaacatgaaat

SEQ ID NO: 121224 - DNA, 100 bp, Homo sapiens
ccatctactctgcctccagtccaacaagccaacagccttcatacaagcaaaatgaagactttgactagggtccaaccagctttcttggactccgtactgt

SEQ ID NO: 121225 - DNA, 110 bp, Homo sapiens
tcgaatagattgttctatgaaaacaagcaaatcgagtgcacctgggatgacaaaaagtcatagtggtgtgacaatgatatcctgagagaagatgggaaagggctgcaagg

SEQ ID NO: 121226 - DNA, 105 bp, Homo sapiens
gagaccgtgaccgagagcgtgaccgagagcgcgaatatcgtcatcgttagaaggttattctggtacaagttaacccaggagaagcatttacaataagaagagaag

SEQ ID NO: 121227 - DNA, 74 bp, Homo sapiens
tctccttcgacttggagtctttgtccaggacgaaatcaatgtggactgaacataaatcacctgatggaaggact

SEQ ID NO: 121228 - DNA, 100 bp, Homo sapiens
aggtgccggtggtgcgagtcttcggagcgaccccggcagataaataggatttaccaatccttggatgaagtgcttgggaagtctttaagtgccataatca

SEQ ID NO: 121229 - DNA, 100 bp, Homo sapiens
agtcggcgtgggcgtttgaggaagctggaggacatatcagtggtgttcagcagggcctcctgggaaggtcgggctgacttctcccaggccgacgtgcacc

SEQ ID NO: 121230 - DNA, 151 bp, Homo sapiens
cccagtcagcccgtcttccttcccctcccttgcatgatggaaacaccatggctgcggcggcccagctctctctgacacagcatgcttttcacttccactgcatctctcgctggctcaaaacacgacaggtgtgtccattggacaacagaga

SEQ ID NO: 121231 - DNA, 75 bp, Homo sapiens
gactgtattgcagcaactggcaaatgagagactcctaaaggggaactcccctccagctgcgctgggaccccagga

SEQ ID NO: 121232 - DNA, 82 bp, Homo sapiens
tcagcctcctgaggagctgggattacaggtggaacacctgcagcaggagactgctgctctgaaaaagcaaatgcaaaaaata

SEQ ID NO: 121233 - DNA, 50 bp, Homo sapiens
attaacatcagcctctctgatcaaaggaatttagataatgggctgtgtgc

SEQ ID NO: 121234 - DNA, 97 bp, Homo sapiens
gaacgtccactgcgggccggcgaaagctgcggtgcagaggggcaggatgccgccgacccagccgacccacgggcagttcgcgctgaccaacggggat

SEQ ID NO: 121235 - DNA, 51 bp, Homo sapiens
cttggggagagttgctaggaaaatgggatcatagacggtatttctatgtaa

SEQ ID NO: 121236 - DNA, 100 bp, Homo sapiens
agccggcgctcgaagatgaaccctttgtggaacaccatggtcatcggaggctatgctgatggagagaggatggggaagcagaatagcaaactggcccctg

SEQ ID NO: 121237 - DNA, 83 bp, Homo sapiens
cggcgagcgcgagcggcgcgagaaatgggggcccctgaagccactgatggaagccacactaccggggcatcggaccatgaacc

SEQ ID NO: 121238 - DNA, 101 bp, Homo sapiens
gccgcattgtaccgccctggcctgcggctaaagaattacctccaaagccattgtcaagaccacagcagtcatctgcaccagtccagctgaactctggctct

SEQ ID NO: 121239 - DNA, 98 bp, Homo sapiens
tgggtttcagttcccagttgtatggctatgcacttcttgatgataagagcacttttgaagaaacgtgtccatactgtttccagctgttggttctggat

SEQ ID NO: 121240 - DNA, 90 bp, Homo sapiens
gaatcatattcatcatggacgtgatgttggtgtgttcacatttgatcatggcatgtgcacttcagaaggagatcacaacgcgttatcaac

SEQ ID NO: 121241 - DNA, 78 bp, Homo sapiens
taaaccatctgaattggctcaatgatgagaaaccacaacaaaggtgcttgcccatggctcctcgcttccctctgcctc

SEQ ID NO: 121242 - DNA, 100 bp, Homo sapiens
ccggagggcgtcaagcagcatgtgaaggagaccaagcttgccgaactaaagcaagaatgtcttgctcgtggtttggagaccaagggaataaagcaagatc

SEQ ID NO: 121243 - DNA, 50 bp, Homo sapiens
gaagcgactgagtccgcgatggaggaaaaacgtggtcttcgagaaatgcg

SEQ ID NO: 121244 - DNA, 95 bp, Homo sapiens
gtgggaataaatagagttcacgatcctgtaactgccaaacccaagttggttggagatgtggattttgaagataacaacgaacttgatgcaagtga

SEQ ID NO: 121245 - DNA, 75 bp, Homo sapiens
ccaaactccaccagccccgtgtccttcattgccacgtacagattctgcctgatcaatgcaggagtcctgtacctc

SEQ ID NO: 121246 - DNA, 98 bp, Homo sapiens
cctcgtcccggggcagcagcggctctcctgcgcacgccgagtcctactccagcggcggcggcggccagcagactaaatgtgttaaatgggcttgccaa

SEQ ID NO: 121247 - DNA, 75 bp, Homo sapiens
ctgtccaggaactgtcggaacagaaccaaaggctattggatcagctcagcaggaaccgagagctgcagatcatgc

SEQ ID NO: 121248 - DNA, 101 bp, Homo sapiens
aagtcatcacctcctgggatcagatgtgcattgagaaataaactatcaatcttgcccagactggagaaaggactgcagcaacaaccctgtttcagtattct

SEQ ID NO: 121249 - DNA, 75 bp, Homo sapiens
gccttattgaagagataggaactcttggttgggataacggccctgttctgtcattagctattagttctaatggag

SEQ ID NO: 121250 - DNA, 46 bp, Homo sapiens
ctcctgagtagctgggactgcagagacggggtttcgctcttgtgac

SEQ ID NO: 121251 - DNA, 100 bp, Homo sapiens
gtgtatcagggccaacagccagggacctgtatgccgccaggtcagcagaggcggaggcccgggctgtggatggccgaggagccgaactcgtgaagccacg

SEQ ID NO: 121252 - DNA, 83 bp, Homo sapiens
gctacacatgctaaaagatgacagacttggacaacatgtcccaacattacatcccaatttttggaagtaccagcacagtgacg

SEQ ID NO: 121253 - DNA, 75 bp, Homo sapiens
tttctaaagtgcagatttctgagctttcatttcctgcctgtaacacgtccaggccttcgcgtctcctgcgccagc

SEQ ID NO: 121254 - DNA, 97 bp, Homo sapiens
acctgtttttcttcctgtgcctgaacctctctttcgcttttgtggaactactctacggcatctggagcaactgaaaacaagcatcgttgtgggtcca

SEQ ID NO: 121255 - DNA, 99 bp, Homo sapiens
tccagtacatcccaactgagctggatcaatttggtgaggattcatcaacctccagtatgatgtctgtgaactttgatgttcaatcaaatcagagtgata

SEQ ID NO: 121256 - DNA, 89 bp, Homo sapiens
ggtgaaggtccggggcttgccctggtcttgctcggccgatgaagtgcagaggtttttttctgggtgaccatcgggatgaggaggaagag

SEQ ID NO: 121257 - DNA, 108 bp, Homo sapiens
gggcgcgtgggtgaggaaggtcaggtctagtgccggtggtggtgtgcacattgagccccggtatagacagttcccccagctgaccagatcccaggtgttccagagcga

SEQ ID NO: 121258 - DNA, 83 bp, Homo sapiens
gctgtgggcgctgctggcgctctggctgtgctgcgcgacccccgcgcatgtactatactggcaattgctggagaagattttgc

SEQ ID NO: 121259 - DNA, 73 bp, Homo sapiens
gaactgggcgacggagcctttgggaaagtgtacaagacctaaggattgtcttcggtctattatgagaagagtg

SEQ ID NO: 121260 - DNA, 75 bp, Homo sapiens
tcacaaaacagcagatttcccaagagcagcggaaaatgatccagtcacagattgctgctaaaattgattcaattc

SEQ ID NO: 121261 - DNA, 50 bp, Homo sapiens
agggcagaaatagcgaccatggcgagaagtccattggaatattaagccca

SEQ ID NO: 121262 - DNA, 88 bp, Homo sapiens
tgggaaagaaagatatagagacaacgactatgtccaattttcatgctcagtagaaaacccctttggtgaaacatttggaaaaatacaa

SEQ ID NO: 121263 - DNA, 100 bp, Homo sapiens
gaccgtggaagatttaacgaatggggttgtgatggcccaggttcttcaaaagatgttatcaatactctggctgaccatcatcatcgtgggactgactttg

SEQ ID NO: 121264 - DNA, 80 bp, Homo sapiens
ggaaacacccctaactctcccagagtgtcacaccctccgcagattgttctgcccattcataactgggaaccagaagagga

SEQ ID NO: 121265 - DNA, 83 bp, Homo sapiens
ccccaagagtgttgagcagcccatcgtgcttaaagaagggttttaaaatcaaagatgggaaaatcggagaaaattgcccttcc

SEQ ID NO: 121266 - DNA, 82 bp, Homo sapiens
ggggatagtgtcatcggttcggtaaagtttctgttctctggaatgttacgttcataacttactaaggattagtgtatatttt

SEQ ID NO: 121267 - DNA, 90 bp, Homo sapiens
caaatcccgccctgagccaggccgctccatgagtgctagcagtggcttgtcagcaagaggcaagtgaggcctatctggttggcctttttg

SEQ ID NO: 121268 - DNA, 100 bp, Homo sapiens
aggacagaggtgcctggggcaacctccaccttgacggttccaggttaaacccatccagagtaatggctgcggccttacccaggaccctgggggagttgca

SEQ ID NO: 121269 - DNA, 100 bp, Homo sapiens
gctgctgcaccggacgctgctcgctcatctgcctctgcgcgctgcagttggtgttggtaaatcatgcttattgctacagtttacagacaagaggtttcag

SEQ ID NO: 121270 - DNA, 100 bp, Homo sapiens
ctcgatgtgctctgcgtgttgctggagctggccacggtagtacggcggttctcccagaccggcatccaggacttcctgacactgacgctgacggagccca

SEQ ID NO: 121271 - DNA, 105 bp, Homo sapiens
gttcacgcggtcccgccggatcccgaagacgagggcctggaggaaacagacaatgcagatcttcgtgaagactctgactggtaagaccatcaccctcgaggttga

SEQ ID NO: 121272 - DNA, 100 bp, Homo sapiens
gcccgccctgcgccccgctctgctgtgggcgctgctggcgctctggctgtgctgcgcggcccccgcgcatggtccagccgccgcagggaatgacgccggt

SEQ ID NO: 121273 - DNA, 75 bp, Homo sapiens
gcttggttcaagccagatagcacctgaggacagaacatatcagaaagccttgagccgggccatgcttctcacatc

SEQ ID NO: 121274 - DNA, 96 bp, Homo sapiens
gaggaaaccagtagcagttctcaagagacctagccagctaagcagaaattgataggctcaccccaaaatatgcttttggggactgatttagcacct

SEQ ID NO: 121275 - DNA, 75 bp, Homo sapiens
accaatgagggagaagtatcggaagaaagcagttccaagcccgttttacggagaagacttttactgtgaaattcc

SEQ ID NO: 121276 - DNA, 100 bp, Homo sapiens
gatgagttgacaccttttgacatgagcatccagagtggaatgttggctgtccgtgaaaaccgctacattgtcctggccaaggacttcgagaaagcataca

SEQ ID NO: 121277 - DNA, 51 bp, Homo sapiens
gaaaaaatcccaaggtctgcaaaggacctgaacccgcggcgggacatctcc

SEQ ID NO: 121278 - DNA, 98 bp, Homo sapiens
tcacccacaaggaatgagagctgcctgcctgctgctgcttggagagccccagacagtcgcttgaagagctgccgggccgcaagtacagccctgggtac

SEQ ID NO: 121279 - DNA, 100 bp, Homo sapiens
ccagatgccgaagggaatccatttgatcattttagtgctggagaatctggatacgcagctccacctggatgatgccctccggggccaggaggacctgaag

SEQ ID NO: 121280 - DNA, 83 bp, Homo sapiens
tcaatatctgtcttcggtggactccttcggcagtccacccaccgccgccgcctcccagaatctgtgcggagaccctgggagaa

SEQ ID NO: 121281 - DNA, 98 bp, Homo sapiens
cggcggcagctggagacgctgagcgcccagcacttggagcgtgaggaaaatagcctaacatggcagaccagagacagcgctcactgtctacctctggg

SEQ ID NO: 121282 - DNA, 75 bp, Homo sapiens
gtgaagtggcaggaggaggaggaggggctccggctggtctgtggtgaggggagtgtgtggttgcactcaaatcca

SEQ ID NO: 121283 - DNA, 80 bp, Homo sapiens
accgagtgcagatacaactatactgtttgtaaaaggagaagacctattccatctgggctagcagttgtaaaaacaaagca

SEQ ID NO: 121284 - DNA, 82 bp, Homo sapiens
aacgtcgccccggtttgacgcacacggcaccaaactgtttttcccactcggctttcacgtttgggattgagagccacatcag

SEQ ID NO: 121285 - DNA, 51 bp, Homo sapiens
gaagaattcccaagccaaagctttccagcgagtaaccagctcataaatcac

SEQ ID NO: 121286 - DNA, 83 bp, Homo sapiens
tggtgccggtgggaactgaggaagcgcccaaggtcccaggtgtgacaccttcagcaggtctcagggaagatggcagccctagg

SEQ ID NO: 121287 - DNA, 51 bp, Homo sapiens
cagccatcatgtgtgtcagcatgagagtgcaaggatgatgctgaaaggaat

SEQ ID NO: 121288 - DNA, 75 bp, Homo sapiens
cgggcggccggtcgggcggggcggcggcgctgacagtcagaatctggagatgtgagtagaaacacggaactgaag

SEQ ID NO: 121289 - DNA, 90 bp, Homo sapiens
ctgccacgtccaagcaaaccgggaaaggagaggatcccggagccggtgtggatgaggtcaccattgtcaacattttgaccaaccgcagca

SEQ ID NO: 121290 - DNA, 96 bp, Homo sapiens
aaacagttccacttggagagaaaaaggcagcgcaagccaagagaaacagatgtccgccaattccaagcacaggagagaggctgaggcggagctgag

SEQ ID NO: 121291 - DNA, 75 bp, Homo sapiens
tggtttcttgatgctttggaaaaaattaaagcaattgggaacgaggctcgtggtcccaagaagcatctgaagcgg

SEQ ID NO: 121292 - DNA, 74 bp, Homo sapiens
agagaaaaaactgtggctgttggtttgtggaacagacagctccttctttattgtgcatacatagagacgtgaag

SEQ ID NO: 121293 - DNA, 73 bp, Homo sapiens
cagacccgaattcccagaacctttgaccgcttttgtggcctcatggatgtgtccatcgagatgccagaggagc

SEQ ID NO: 121294 - DNA, 90 bp, Homo sapiens
cgatacttcactcgctggtacaaaccgggtacatcaagagagtgtacacatgattgaagtcacaagtaatttgattaatgaaactctagc

SEQ ID NO: 121295 - DNA, 98 bp, Homo sapiens
ccatgctgtctctagactttttggacgatgtgcggcggatgaacaagcggcaggttaaacccatccagagtaatggctgcggccttacccaggaccct

SEQ ID NO: 121296 - DNA, 83 bp, Homo sapiens
cctgatcatcctgctgggcttcgtccagatcgggaagggtatcacctcttctgggctcaagatggacaacaagaagcgcctgg

SEQ ID NO: 121297 - DNA, 89 bp, Homo sapiens
aggccatgctccatttgggcattgacacccctacccagaacaacatctttaaggtcttcacacgctatggaaagtgctacacgttcaac

SEQ ID NO: 121298 - DNA, 75 bp, Homo sapiens
atgactcccagagaggatggcatctagaaggtgatctcaggcaatgaggaccctgagggagtggtgctgaaggac

SEQ ID NO: 121299 - DNA, 75 bp, Homo sapiens
ccgcagtccccccgttccctggaggtcctgtggaatgggtctaaaattcccaggactccacagctttgcaccaga

SEQ ID NO: 121300 - DNA, 96 bp, Homo sapiens
gctctgggacacacctccattggatttaaaagacagtcctcgtcagcactgactttcagctatggaatcggccctcgggaccaaggatcacgtcat

SEQ ID NO: 121301 - DNA, 51 bp, Homo sapiens
gactgcacttatggtggtggcgtgctgccagccttgccctggctctgaatg

SEQ ID NO: 121302 - DNA, 75 bp, Homo sapiens
cacagatgctatagtctggtatcaaaagaagaaaagtcctccatacattttctccccaattccattccttgggca

SEQ ID NO: 121303 - DNA, 75 bp, Homo sapiens
catctggataaattctcttcttatcatgtgaaaactgccttctttcacatggagtctagctctgtcgcccaggct

SEQ ID NO: 121304 - DNA, 96 bp, Homo sapiens
cacctgcatggctctggggaggaggaggaagaggaagaggaggatgacccacttgatattgatgatgttaagaagttcaaaccgggttacctggaa

SEQ ID NO: 121305 - DNA, 100 bp, Homo sapiens
cgccgaggaggccttcttccgtggggttagccagaactgatgtcatgtgaagagctacattcaatattacacttggtgctccaggctgggaatatcatga

SEQ ID NO: 121306 - DNA, 75 bp, Homo sapiens
gtctctcagtatcttggtagtggctgggtccgacattccactgcccttctcccaaaaagatgtcttttcgaaaaa

SEQ ID NO: 121307 - DNA, 102 bp, Homo sapiens
gccgcggctccggccctggccccgatggctctgtgcaacggagactccaagaatcttgtggaagaagaatgaagttgctgattatgaagctacaacattttc

SEQ ID NO: 121308 - DNA, 101 bp, Homo sapiens
ctttggcgacaatgttggcctgtctgcaagcttgtgcaggtcctaatctgcagctgattgagggagatgcaaagcagctggctggaatgatcacctttacc

SEQ ID NO: 121309 - DNA, 75 bp, Homo sapiens
tcatttctgtcagtgggattaaccatgatgtcacttcaggttataaaacatggaggctggctcagtggttcgagc

SEQ ID NO: 121310 - DNA, 50 bp, Homo sapiens
gttctcggtcaccatgtggtcctcaggacacaatgtttgcacgaggactg

SEQ ID NO: 121311 - DNA, 100 bp, Homo sapiens
ctggaccctgctcagaggactctatacagggacgtgatgctggagaattataggaacctggtctccctggggaagtgtttgtttatgtcagggctcagtg

SEQ ID NO: 121312 - DNA, 100 bp, Homo sapiens
ggggaagaggcccaccctggagtaaccctcactggagaatccagaggtacaccaggggttggaaaaaccacactaggcaaagaacttgcgtcaaaatcag

SEQ ID NO: 121313 - DNA, 82 bp, Homo sapiens
gaaacggagtctcggaagtgtagaaaataccagtgggaaaaggaagtgctggactccaagccccctgatccttgatcagaac

SEQ ID NO: 121314 - DNA, 60 bp, Homo sapiens
cctgaatgcccttttgcttgagttttttgctccactcaagcctgttagaatcaccatgga

SEQ ID NO: 121315 - DNA, 75 bp, Homo sapiens
attaccttttgtgtgactacaacagagatggggactcctatagtggttagcaggaagaagatgagccttaagtct

SEQ ID NO: 121316 - DNA, 51 bp, Homo sapiens
cctatcaagacctgtatccaggaaaagatctggggacagcagacagatggt

SEQ ID NO: 121317 - DNA, 88 bp, Homo sapiens
attaaaagagttcggcgaggaactccagaatacaaggtctttcatggtgctgattcagacatagaatggctacagaaagactttgggt

SEQ ID NO: 121318 - DNA, 75 bp, Homo sapiens
acaaccagctgaccactgtccacaaccaggtgatctgtgtccacgatgtctcatccatctaccgagtccccttgt

SEQ ID NO: 121319 - DNA, 51 bp, Homo sapiens
accaagaggcagcaatctacctccaggccatttgtgtaggaccagaaaaca

SEQ ID NO: 121320 - DNA, 100 bp, Homo sapiens
tgaagattaaaactgaagatttcctctggaagctaccacatgcaaacatacaagcagtctcacctcagaatgccagctgatgaagaccgagaggccgcga

SEQ ID NO: 121321 - DNA, 100 bp, Homo sapiens
agagttcaaggaggccttccagctgtttgaccgaacagtccttcagtgaatctacagacctattttctcaggagctcagcctggccttacttcagtgata

SEQ ID NO: 121322 - DNA, 100 bp, Homo sapiens
aatcgagaatggaaaggaatagacaggctacgcctggacaaatactatatgttccatgccattgcagtgtcaactaggcctcagttacttttcagtttgc

SEQ ID NO: 121323 - DNA, 75 bp, Homo sapiens
gataacactgtacaagctttcaaagtcaattttctcacccacggataataaatttgctacatgctctgatgacgg

SEQ ID NO: 121324 - DNA, 82 bp, Homo sapiens
aaaccgaagttggaagtgtctcttagcagcgcgcggagaagaacggggagccaggccgccatggcatcagatgaaggcaaac

SEQ ID NO: 121325 - DNA, 51 bp, Homo sapiens
agaagatcttccagagaataagaagcaggcattgagtattctgaaacattt

SEQ ID NO: 121326 - DNA, 88 bp, Homo sapiens
aaagaggaattatgccaaagcagtggaactactggtggaactagcttctctgcaggcggtggatgaattttattccaagatagaaggc

SEQ ID NO: 121327 - DNA, 100 bp, Homo sapiens
ctcctgtcctacttacaaggaatagtgttctaagaacggaagcatctgggctggatggaatttagcatcaagcagagtcccctttctgttcagagtgttg

SEQ ID NO: 121328 - DNA, 105 bp, Homo sapiens
caatgaggctccctgctcagctcctggggctgctaatgctctgggtctctgacaatgcagatcttcgtgaagactctgactggtaagaccatcaccctcgaggtt

SEQ ID NO: 121329 - DNA, 75 bp, Homo sapiens
cgtgtaccagtgtgtgttgatcttggcttgattcagtctgccttgtaacagaccatgctcgacagctgaccaagg

SEQ ID NO: 121330 - DNA, 99 bp, Homo sapiens
ggactggacggctgagctgggcatccgacacgtactgctggggaaagccatggaatttgtggatgtgactgagagcaatgcacgctgggtgcaagactt

SEQ ID NO: 121331 - DNA, 100 bp, Homo sapiens
atgtaaaactccaatcagataaattacaacacggatgtggcattatccaattggtttgctatttgatcttcttgcatcaagttcagctcttccttggaac

SEQ ID NO: 121332 - DNA, 100 bp, Homo sapiens
ctcctactcgaactcctacaactctcccgggggcgggggcggatccgactacaactacgagagcaaattcagctggaagggaagaggtttctagagctgg

SEQ ID NO: 121333 - DNA, 99 bp, Homo sapiens
ggaagagggcggcgacggtggtggtgactgagcggagcccggtgacaggatggttatgatgtgattgctcaagcccaatctgggactgggaaaacggcc

SEQ ID NO: 121334 - DNA, 98 bp, Homo sapiens
tgtgagccagttggagttgcggcggcgggaacgattgggctgagcagaggacgacatgttgcttttcgtggagattcttcgctgctgctgccttaccg

SEQ ID NO: 121335 - DNA, 98 bp, Homo sapiens
gcacagtcacagaattgagtgatttcctgcaggctatggaacacactgaagttcttcagcttctcagccccccagatgattcagtccctcaaggcgtt

SEQ ID NO: 121336 - DNA, 75 bp, Homo sapiens
caagcagctgcttgccggccccaacacggaccttgagtggaggtgcaacaaatgagaaattccaattggagattt

SEQ ID NO: 121337 - DNA, 100 bp, Homo sapiens
acttctgcctgctgttggcaaccctcctggactaggctgctcttgttaatcacatggatgttgaccctctttgcaagttcagtgcttaacctgaccgaac

SEQ ID NO: 121338 - DNA, 75 bp, Homo sapiens
ctgactttcagctatggaatcggtgaccgggctggtccacaagtgggcatggaccaaagacgacgtgatcctcca

SEQ ID NO: 121339 - DNA, 100 bp, Homo sapiens
ggattcctgcttcccatcttcatccagttcggcctctactctccccgaattgaccctgattacgtggaagcccttggagaccagctcttccaaagtcaaa

SEQ ID NO: 121340 - DNA, 100 bp, Homo sapiens
agtccggtcttgtcttccagacccggaggaccgaagcttccggacgacgaggaaccgcccaacatggcctcggagaccaagatcactccatggatgaaat

SEQ ID NO: 121341 - DNA, 90 bp, Homo sapiens
accatgtcagccttcccagtagctggaactacaggttcgaccttgaaactacaagagtgaatctgaaagttagttcaaaaagtcaaacgg

SEQ ID NO: 121342 - DNA, 100 bp, Homo sapiens
tctgtcgatgccctcagtgaagaactagtccagcttcgagcacaaggtgttggggatgtcctttgcactgaccctgaactgccagattgacaaaaccagc

SEQ ID NO: 121343 - DNA, 100 bp, Homo sapiens
ctgagcgtcccagtacactgacagagggtcagcagttcccagcgctcctcacggatccctctctctcgggccagggtggagcaggctcgccgcaagtcat

SEQ ID NO: 121344 - DNA, 50 bp, Homo sapiens
agggaccacactggtggtaagaggggcggcatggaagctcctgtcaggcg

SEQ ID NO: 121345 - DNA, 80 bp, Homo sapiens
gatgctgcagacactgaacgaggagccagtggggccctcctcgccaaagacagcctagagaggacggcaatgaagaagat

SEQ ID NO: 121346 - DNA, 90 bp, Homo sapiens
gttacctatgtacctgttaccactttcaaaataacaaatgtggcaattattttggatctatcacctgtcatcataactggcttctgcttg

SEQ ID NO: 121347 - DNA, 90 bp, Homo sapiens
agatgagctgtcctttcaggaaggagccattatttatgtcatcaagaagaatgacgatgaccaagattggagctggccgcctcatgggcc

SEQ ID NO: 121348 - DNA, 98 bp, Homo sapiens
gcccccggaaaacctaaccatgaagacttgaacttaatacagcaagaaagaccatcaagtttaccagtgtttaagatagaagtgctaatgaatggaag

SEQ ID NO: 121349 - DNA, 51 bp, Homo sapiens
cagcctcgcaagtagctgggattacagagctcagagttctacagagtcacc

SEQ ID NO: 121350 - DNA, 100 bp, Homo sapiens
cgctggccatttaggagctctgctcaaagccagacggtattgctattgattgacattcaagtctcttacatcaacaccaaccatgaagacttcattggct

SEQ ID NO: 121351 - DNA, 75 bp, Homo sapiens
ggcggtagcgcaggggagattacttttctggaagaggtcctgctgtactagccaccaaagcagctgctggtacta

SEQ ID NO: 121352 - DNA, 82 bp, Homo sapiens
ttcatttagagctgcggaacaggacgccctctgatgtacactgaggaggggacggctccgtcttcacattgtgcacagatct

SEQ ID NO: 121353 - DNA, 90 bp, Homo sapiens
atgaagtcgggtgatgcccgtgtggcgctgattggatttccctctgtggggagaaaacatggagatatgaatgactgtgtggagcagaac

SEQ ID NO: 121354 - DNA, 82 bp, Homo sapiens
attaggaactgttctgccggaatttgaaaagtgcctattcatgatgttgctatcaaaagttgagaaattgtcagaagaaatc

SEQ ID NO: 121355 - DNA, 75 bp, Homo sapiens
cccgatgtcccctccactcctgcagaacgtctgcagcctggtatagcccagcagtggatccagagcaaaagggaa

SEQ ID NO: 121356 - DNA, 90 bp, Homo sapiens
cgtcgacatgagtgatgtggaggaaaacaacttcgagggcagagaaattcagttcatgaagataagaagtttcttgacaaatacatgccc

SEQ ID NO: 121357 - DNA, 50 bp, Homo sapiens
gtcttcagcctgagacccatccctagagacagagttttgccatgctgccc

SEQ ID NO: 121358 - DNA, 83 bp, Homo sapiens
gggaggtggagcacctgaagagatgccagcaggacctgaaggagaagaaggagaaggtggaggagaaggcaagccggaaagag

SEQ ID NO: 121359 - DNA, 98 bp, Homo sapiens
cgcgatgctggaccagttgatgggcacctcccgggacgggaaacagtgcttcttagtcctacgtcagcagcagtttaatgtccaggctcttgtggcgg

SEQ ID NO: 121360 - DNA, 96 bp, Homo sapiens
gagaaacgtcgtgatttggagtattaagtctttcccgacttcagaagaaacacctacaacaggagaaggagtgcctcatgtccaagctggtggagg

SEQ ID NO: 121361 - DNA, 95 bp, Homo sapiens
tcactatctcctccctcttctcccgactatttggcaagaagcagatgcgcattttgatggctccagaaacatgacaaggaggactttcctgcctc

SEQ ID NO: 121362 - DNA, 82 bp, Homo sapiens
tggagtcgaaggccgtgaggtatttttctaaggaaagttcacatccttggctccttccaaaatatcaagatggcaagaactg

SEQ ID NO: 121363 - DNA, 98 bp, Homo sapiens
gaggtcaccatctccagcacacttggtcataatgctgagctccgtaccagacttacacggttacatcgataagtcgcagctgaccgaggacctgggtg

SEQ ID NO: 121364 - DNA, 75 bp, Homo sapiens
cctcagctgtgtcatctgcagcccctgctgttgctacaactcagcgagaatataaaaagctctttgaggaaaaca

SEQ ID NO: 121365 - DNA, 75 bp, Homo sapiens
accaaggacagagtcagtgatttccataaattgaagcaaacatgattatgatatgagggtggatgatttccttcg

SEQ ID NO: 121366 - DNA, 74 bp, Homo sapiens
tatggccctgtcggccaacagaaagtttgtccagaggggttgcgtttatccggtttgacaaacggtcggaggca

SEQ ID NO: 121367 - DNA, 88 bp, Homo sapiens
aaaacgtgggaaaactagagctgaaacaatgggacccatgggttgatccagatgcagaggtgtgccttcatgtactgaggcttgtcca

SEQ ID NO: 121368 - DNA, 98 bp, Homo sapiens
aacactgagaacaaagaacggaagtccttccagaaggagcttgtgatggacctgtatgaggctggagagaagaaatgggggacagatgaggtgaaatt

SEQ ID NO: 121369 - DNA, 82 bp, Homo sapiens
acagttgcgctggctcagcggggccggaacatggctgcgtccggtctggatggtgattgctcacaccaaagccttggacccc

SEQ ID NO: 121370 - DNA, 75 bp, Homo sapiens
ccgctacgggaagcaggcctcgccacaggaagtgggaaaactcttgcctttgccatcccaatgattcatgcggtg

SEQ ID NO: 121371 - DNA, 75 bp, Homo sapiens
aggaacagggcagacgttagcgtgagtgatcactctcaatcccgggctccaggcaggctggtccgtccaccccgg

SEQ ID NO: 121372 - DNA, 73 bp, Homo sapiens
tatcgacgtcgtgatccagaagtccagagctgaggactgcctgtttgcagatgggcactgtgccccgactgcg

SEQ ID NO: 121373 - DNA, 50 bp, Homo sapiens
cgcggctcccagccacaccaagttcagatctttatgtctgaagctgggaa

SEQ ID NO: 121374 - DNA, 100 bp, Homo sapiens
agcagtatggctctgggggccgtggaaaccgcaaccgagggaaccgaggcagcggaggtggtggtggaggtggagcccagtgacaccatcgaaaatgtga

SEQ ID NO: 121375 - DNA, 83 bp, Homo sapiens
ttcaatatcttcacccagcatggaaataatgcaaaaggtgtcccaaggctcctgaccagtgaacaaagatttgagaaagacag

SEQ ID NO: 121376 - DNA, 100 bp, Homo sapiens
gttacgcagcaaaccatccagaagactgaaactgttgaggagcccatggaggaagaagaagcagccaaagaagagaaagaagaatctgatgatgaagctg

SEQ ID NO: 121377 - DNA, 100 bp, Homo sapiens
ctatggcgctgtcaataaagaacggcagtttgaatcggtgctgaacagattcaagtcaatctgaaagtcccagccagccaagtgacgctgacattaagga

SEQ ID NO: 121378 - DNA, 75 bp, Homo sapiens
acagatgcccctgataaaggatacgttggactggaaggatcaccagcacatatgcggccagtcagcagctgtcac

SEQ ID NO: 121379 - DNA, 75 bp, Homo sapiens
acaaaccctttctatgtactgcgcctggatgtggccagatgatagtatttctgctgcaagtacttctgatgttca

SEQ ID NO: 121380 - DNA, 100 bp, Homo sapiens
ttccagaggggtgacagtgaaacgttcatgcatgggagatctcagaccagttgttacagatccggcaggatgtggagtcatgctattttgctgcacagac

SEQ ID NO: 121381 - DNA, 83 bp, Homo sapiens
agccgatccagcctgcggagcctgtggggcaggaaaatgtttataggaggccttagctgggacactacaaagaaagatctgaa

SEQ ID NO: 121382 - DNA, 90 bp, Homo sapiens
tgcacacccgcccctctcctgtgccagccaccaaccgctaaaatgcacgccatcatcgagcgcacggccagcttcgtgtgcaggcaggga

SEQ ID NO: 121383 - DNA, 75 bp, Homo sapiens
atcattgatgtggtgcgatcggacaaacagcatattctatggcctaaaagagcagattgtacagaaagctaccct

SEQ ID NO: 121384 - DNA, 100 bp, Homo sapiens
aagaacacagccttggaagaaatgagctggaaatatcgcgctcatctgtatagtggaggattacaagccaccgttctacgatgtggttcccaatgaccca

SEQ ID NO: 121385 - DNA, 75 bp, Homo sapiens
gtaatcctcttggaaagctggaaacatagtccgatggcaggagaggagaacttcaaggaagagctcagatcccag

SEQ ID NO: 121386 - DNA, 51 bp, Homo sapiens
cctgcgccggccttgcctcgggttcaccatcattaatagcaaacaaatggg

SEQ ID NO: 121387 - DNA, 98 bp, Homo sapiens
ccttgtacagggatgtgatgttggagaactacagccacctgatatcactgggtgaatacatcaagacctggaggccacggtacttcctgctgaagagc

SEQ ID NO: 121388 - DNA, 75 bp, Homo sapiens
ggtatccatggtgacaagagtcaacaagagcgtgactgggttctaaatggtcaaaatgcagatcttcgtgaaaac

SEQ ID NO: 121389 - DNA, 82 bp, Homo sapiens
cggtgctgctgagcttggcctcggcgtcctcggctggtcctttggggtcctgctctgggagatcttcacgctggggggctcc

SEQ ID NO: 121390 - DNA, 75 bp, Homo sapiens
atgatgattgatctggctgaagtagcagatctgtcactctgagaggagtgataccaatgaaaaaaggtcagttga

SEQ ID NO: 121391 - DNA, 97 bp, Homo sapiens
cggccgggggctcagagatccaagtgcgcgccctggcgggtccggaccaagggagaaacaaaggcagcgctgccctcgggggagcattggccctggc

SEQ ID NO: 121392 - DNA, 100 bp, Homo sapiens
ttcctaccttatgagctcggttttcttatgcttataagagtggaacagctggagaatgctggaggagaccttaaggatggccaccaccactatgaaggag

SEQ ID NO: 121393 - DNA, 100 bp, Homo sapiens
ttcactgctctgctgtctcctgcaagaactggctcaagaaatttgcctcgaaaaccaagaaaccacccctactcctaatcccccgactacagaagaggag

SEQ ID NO: 121394 - DNA, 98 bp, Homo sapiens
ttttgttttgaattgtgaaatacttccacctcttttagagaaaatgtttataggaggccttagctgggacactacaaagaaagatctgaaggactact

SEQ ID NO: 121395 - DNA, 100 bp, Homo sapiens
tttgagtgtcctattggactacagattagaggataataaagaacattcatttgagttgcaggaccagctctgccccctaattataaaagcagtagttcag

SEQ ID NO: 121396 - DNA, 90 bp, Homo sapiens
gcgaaacgaggaggagataacgcggccttgggctctgggtcccgacggcctacacatggggcgctgtgggcgccgtggggctggtgtggg

SEQ ID NO: 121397 - DNA, 100 bp, Homo sapiens
agtggtggtactgatggactgatccagggctggaataccactaatcccaacatcgacccctatgattcttatgataggagcatgctgctatgtggaatgt

SEQ ID NO: 121398 - DNA, 74 bp, Homo sapiens
accgcagtctcgactttcctgggctcaggctttcctcggagacgggtggcatggggagcagctagaacaatgca

SEQ ID NO: 121399 - DNA, 100 bp, Homo sapiens
ttgccagaccaggatctgtgggcgcggccaggctggaggactagggcggtggcagtggccaggtgctggagaatctggtaaaagcaccattgtgaagcag

SEQ ID NO: 121400 - DNA, 74 bp, Homo sapiens
gacagtcctcgtcagcactgactttcagctatggaatcgcaccctggaggagaagaggttctgctggaacaagc

SEQ ID NO: 121401 - DNA, 98 bp, Homo sapiens
tagtggctgggttactgatggattactgatggattcttctcagtctaccctgatgggagagtctgcatttccatcctccacgcgccaggcgatgaccc

SEQ ID NO: 121402 - DNA, 100 bp, Homo sapiens
agcaaccagtgagacaaagatgggcaaggctctgacaatccgggccagggttctccaaaaaatgtggaatcctttgcatctatgctgagacattctcctc

SEQ ID NO: 121403 - DNA, 83 bp, Homo sapiens
gaaggctccatatgaacaccttattattgatggtgccgccaagccagacgaactaggtctgaggtcacattgttgtggaagaa

SEQ ID NO: 121404 - DNA, 75 bp, Homo sapiens
gggacgctgctgcagcacctgcgccagggatccaggtccggcacgatcaagacccaggctacatgcatcacaagt

SEQ ID NO: 121405 - DNA, 51 bp, Homo sapiens
ccgggaccgtttaaaaaactggtttgatctgtggatgaaatgaatcatgat

SEQ ID NO: 121406 - DNA, 75 bp, Homo sapiens
ggtttcctttaagatcacgctgacgtcggacccacggctgccgtacaaagtaccatagcccagtggcgtaaagct

SEQ ID NO: 121407 - DNA, 78 bp, Homo sapiens
tccgttgcctgctcccggagggagacgcgctgccgaggagaacccagcggtgaatggataccacgcatcagggacccc

SEQ ID NO: 121408 - DNA, 85 bp, Homo sapiens
caaggccttagagaagaagtcggagttgaagcagctctaccagatccagcaagtcaccatgcctgcgggccaggacctcgcccag

SEQ ID NO: 121409 - DNA, 95 bp, Homo sapiens
ctctctgctgcggcgcggggaccgctgtgctctcggtggctgcaaaattcgggttcagggggactggatcagagagcgccgctttgaaatccctg

SEQ ID NO: 121410 - DNA, 50 bp, Homo sapiens
cagcttcttcgatttggatcccaaggtgaacctgccgctgctcaccctga

SEQ ID NO: 121411 - DNA, 125 bp, Homo sapiens
ggaagccatcacctggatgcctacgtgggaagggacctcgaatgtgggaccccagcccctctccagctcgaaatcgtgaaaggtgtagcagtcactcggcctacacccacagcatcgaccttgtg

SEQ ID NO: 121412 - DNA, 98 bp, Homo sapiens
aacacatgttttacagtggtgtaatagatgtaatcacaaagacatggaggccattcaatgtcccttcttcaggaatttggaaaaaggatggagagatc

SEQ ID NO: 121413 - DNA, 96 bp, Homo sapiens
ctgaggtgtccagttgcagcccatggagatccagttcaattatgaatctcaggaacaccaccttctgtcagctctattaccaggttttaaacttcg

SEQ ID NO: 121414 - DNA, 50 bp, Homo sapiens
cgaggcagctgtactaggactgggaacggactgggactcttcaattaatc

SEQ ID NO: 121415 - DNA, 100 bp, Homo sapiens
aaaaagctattttgggaagatgttccgaaccccaagaattgttcctgggcacaaggacttaattttcagaagcatgtcagtgaaaaaaccagtgaatcgc

SEQ ID NO: 121416 - DNA, 97 bp, Homo sapiens
gagatcacaagttgcatgttgactttaggggctgtgggacagatgatgtctaccatgttctacccactggtcacctttgtcctcctcctcatctgca

SEQ ID NO: 121417 - DNA, 96 bp, Homo sapiens
attgcagtgggggctgccagtgctaccctgagaaaggtggacgtgcacttttaaatcaacttagagctgtgtttgatcaaattattgaacttcaga

SEQ ID NO: 121418 - DNA, 98 bp, Homo sapiens
tctgaaaaaaagagaaacctgggtgaactttcacggacaacctcagaggacaacgaagtgttcggtgactctgacatcattagaagcatgccagaaca

SEQ ID NO: 121419 - DNA, 100 bp, Homo sapiens
agattagccagcagacccagctacgtggactagaggtgagcatgggtttatgcgtcttaggcattattgtgatggcgagcaccaattctctgatgtggac

SEQ ID NO: 121420 - DNA, 95 bp, Homo sapiens
atctgaaaatgcccctggggagacacatgcacaagacaaaaattggcaacttctccatcgtgcggcggcttggcgtgcaggagtgcattctcctg

SEQ ID NO: 121421 - DNA, 101 bp, Homo sapiens
ccaagagttggtgggagacgggtgaggtacaggctcagtctgcggccaagactccgtcctgcaaggtgactctcctattccatctgtttcttcgggatcat

SEQ ID NO: 121422 - DNA, 99 bp, Homo sapiens
agaagattatgacagattacgccccctatcctatccgcaaacagctggcctgctgtctgccttgggctccctgatattgatgatttggctgatggcaac

SEQ ID NO: 121423 - DNA, 96 bp, Homo sapiens
gggagagcctgttcttcgagacatcgtccagttcgtgcccttcaggaacttcaaacacgatgcagcatgtgacagaatctccttcctcgataaggc

SEQ ID NO: 121424 - DNA, 90 bp, Homo sapiens
gggggagattgccagctaaccctcaataagaaatgcacgcatttgattgttccagagccaaaggggtccacctctggaggtatgaaggag

SEQ ID NO: 121425 - DNA, 151 bp, Homo sapiens
gaggcaccagccgggtgggctttgcctcctgctgctgctgctctgccagttcatggaggaccgcagtgcccagggcataccagatactcccttcagtaaggacagaaatggtcatgtgaagcgacccatgaacgcatttatggtttgggca

SEQ ID NO: 121426 - DNA, 115 bp, Homo sapiens
tgaaggagaaaatgtataacgtcttgttgtttgttgatggagggtggatggtggatgttagagaggggctgagtgaataccagaggaacttcctgtggaaaaagtcttatttgtc

SEQ ID NO: 121427 - DNA, 82 bp, Homo sapiens
catgcgggagagagaatgagccagagggacacgctggtgcatctgtttgccggagggacacctgctccacttcaccttttgc

SEQ ID NO: 121428 - DNA, 76 bp, Homo sapiens
gagatctcccccttcttcaagacccacgagaccccaccaacaactgaacgctttggtcaggctgctacaatggaag

SEQ ID NO: 121429 - DNA, 100 bp, Homo sapiens
ggagctgaatccagaaaccagcacagactgtgacgtatgacctgtcagcctctacattctctcctgacggaagagtttttcaagttgaatatgctatgaa

SEQ ID NO: 121430 - DNA, 90 bp, Homo sapiens
ctaaactggaccatccggaagctgtgccacgcagcctttcttccatctgtcagacttctgaagacaagttggatggcttgaggactggta

SEQ ID NO: 121431 - DNA, 75 bp, Homo sapiens
acggcccctgggtccacgtggcgcgaaagtaggagctctggcttatcaggactccatagttctccaacagagaaa

SEQ ID NO: 121432 - DNA, 100 bp, Homo sapiens
tcagtgtctgaaagtgaactgccatgtgaagtctggctaccattccttcagtctctacagaggaattcttcagttggataaagtggacgtcatacctgtg

SEQ ID NO: 121433 - DNA, 87 bp, Homo sapiens
gtggcaacgttgctggtgacagcaaaaatgacccaccaatggaagcagctggcttcactgctcagaggccccacagtatcaaatatc

SEQ ID NO: 121434 - DNA, 90 bp, Homo sapiens
cagcagcaagttagtggattaaaatctcccaagaggaatgacaaacaaccagctcttcaggtagagtacagagagatggatgaaagcttg

SEQ ID NO: 121435 - DNA, 82 bp, Homo sapiens
cgctgctcccggaccgggccgcgcacgccgcctcagttttctttttaaaagcggaaggagagttttacatggaagtggctta

SEQ ID NO: 121436 - DNA, 100 bp, Homo sapiens
atagaaggtgctcttaatctgttacagtgtacatgggaaggcaggagtggtacgggtatcactttccggagctggtgaagatcatcaacgacaatgccac

SEQ ID NO: 121437 - DNA, 99 bp, Homo sapiens
gctccgtggaagcgtggccggcagcgtcccggacgaggaggcagcagaaatgaaagcagcaaatgaagcagaaggaaaagtagaatccgagaaggcaga

SEQ ID NO: 121438 - DNA, 100 bp, Homo sapiens
gtgattccctcgcctttcaagcacgcggacatcgtcaccaccactactcacaagactcttcgaggggccagaggcatttcatccttcatgaagccattca

SEQ ID NO: 121439 - DNA, 74 bp, Homo sapiens
ggggctctggtcccctcctcggtctcctctgagcctccggcctccataagacccaaaacagatgacacctcttc

SEQ ID NO: 121440 - DNA, 100 bp, Homo sapiens
gtggaggaaaacaacttcgagggcagaccatgaaccagagaatcagtcagagtgctccagtgaaacagccaccacccctggctccccagagcccacaggg

SEQ ID NO: 121441 - DNA, 89 bp, Homo sapiens
ggctgcgcgggttcccccgaagttcagatgccatggacaatattaccaggcagaaccaattctacgatacccaagtcatcaaacaagaa

SEQ ID NO: 121442 - DNA, 100 bp, Homo sapiens
agaggggtgaccagagagcccaacgcctggtgctcaagactttctccgaggccccgcagggtggagcccgtctgctcagggttgcaggcccagattctcc

SEQ ID NO: 121443 - DNA, 75 bp, Homo sapiens
attctacagagctggatattgaggggatcctgctaaagcggagcggcaagtccctgaacaaggagtggaagaaga

SEQ ID NO: 121444 - DNA, 100 bp, Homo sapiens
gtgaaacggagccagcggctgaggaggggccccagcagcccccgaaggccctatcaggacatggagtatgaaagacggttggttaatgaaaatgaagtta

SEQ ID NO: 121445 - DNA, 82 bp, Homo sapiens
ctatgagatgtcctatggcttgaacattgaaatgcacaagcaggtactccaaagattcaggtttactcacgtcatccagcag

SEQ ID NO: 121446 - DNA, 100 bp, Homo sapiens
atgaggacatgaataaagaccagatcttgctggaaaaagaagctgagatctttgcagattatcctgtggaaggaaaatgcctaaagtcaaaagaagccgg

SEQ ID NO: 121447 - DNA, 82 bp, Homo sapiens
gcggattcgccgaggcaccgaggcactcagaggaggggtgagcccctccagactccgaataggagatcaagagtttgattca

SEQ ID NO: 121448 - DNA, 100 bp, Homo sapiens
cgagatttgaaagagctcagacatctggtcaagagcaatctgaatccaaatgcaaaggagtttgttcctggggtgaagtacggaaatatttgagtagacg

SEQ ID NO: 121449 - DNA, 75 bp, Homo sapiens
ctcccattagaatatcagtatccacagaaggagcaaatacttcttcataaaatgatgcatcctgttgccagcagt

SEQ ID NO: 121450 - DNA, 51 bp, Homo sapiens
gttgccgggcgcgggcgagaaagttcccaccacagacattgagcctgtaac

SEQ ID NO: 121451 - DNA, 100 bp, Homo sapiens
ggtagcagtagtattggcattcccattgctgtgcctacaccttcgccacccactattggaccagggaactctaatgatccaggacaaagaagttaccctg

SEQ ID NO: 121452 - DNA, 100 bp, Homo sapiens
atgacgaagacatgacacttacaagatggacagggatgataattgggcctccaagaatcgttcctgcaatcccaacctgatgagctttattacacgcata

SEQ ID NO: 121453 - DNA, 75 bp, Homo sapiens
aacggttgtcaacaccatcacaggttttgatgtggccaagacaggtgatgctcgaattggatttgttggttttcc

SEQ ID NO: 121454 - DNA, 97 bp, Homo sapiens
tacagtgacagcacaggtcacagtaaggccaaaaatgtgcatactcacagagttagagagagggatggtgggtgaaaatcctatttataagagtgcc

SEQ ID NO: 121455 - DNA, 90 bp, Homo sapiens
aagtgaccagcgctaacgttgtcaaggacccgccctccaagtacgtggaatatcgttcagaaaaatctcttgaagaattgagtaaacttg

SEQ ID NO: 121456 - DNA, 75 bp, Homo sapiens
cttaaatgatgtattttgtgatcgcagcgatgaaagtgcagagcagagcgggcggaggaccccgggcgcgggcgc

SEQ ID NO: 121457 - DNA, 73 bp, Homo sapiens
aacggcagaccgtctcctgagcgccccaggtagaatttcaaatgttctgcaacctgtggtttgggtgtgagga

SEQ ID NO: 121458 - DNA, 100 bp, Homo sapiens
cggtacatctgaaagccgggaaatgggttctgatgactgtcttgtgaaaatatgggcaacagatgatgggaggttgttagctaccttaagaggacatgct

SEQ ID NO: 121459 - DNA, 72 bp, Homo sapiens
actcaggacggacaagcacagtcttcggaaggattcactccttctccagttgcacagccacacccttcagct

SEQ ID NO: 121460 - DNA, 96 bp, Homo sapiens
ctcagttggaagcagccgatccagcctgcggagcctgtggggcaggtgatgatgaacagtctacacagatggctgcaagttgggaagatgataaag

SEQ ID NO: 121461 - DNA, 128 bp, Homo sapiens
cagctgcagcgtgtagtgcgagtggggcggacgcgcgcagcccgcccgcccggcgaccagcaagcttagaccatgctcagcctccaagcagccttgtcatcgacaaagaatctgaagtttacaagatg

SEQ ID NO: 121462 - DNA, 100 bp, Homo sapiens
actccccatcctcagcaatcccatcaggtgttttggatctgaaatagctcaactcagtcaagaaaaaaggtatacatatgataaattgggaaagttacag

SEQ ID NO: 121463 - DNA, 75 bp, Homo sapiens
cgcggccagcggagccctgggctggggcaggagccggaacgggaggatgaaattgctactatggagtgcatcaac

SEQ ID NO: 121464 - DNA, 75 bp, Homo sapiens
gccgccgccaccactgccaccacggtcgcctgccacagtgattcgcctttgccagtctcatctcgtgtctgcttt

SEQ ID NO: 121465 - DNA, 101 bp, Homo sapiens
gcaaaatgctgagaatgattatattaatgccagtttagttgacatagaagaggcacaaaggagttacatcttaacacagatccaggatgagaagactgata

SEQ ID NO: 121466 - DNA, 50 bp, Homo sapiens
tttcaactccctacagttgtgccatgcgtgcaatatcagctacttagaag

SEQ ID NO: 121467 - DNA, 75 bp, Homo sapiens
taaaggccaagatccaggataaggaaggccaggagtggtggctcacacctgtaatcccagctctgggaggccaag

SEQ ID NO: 121468 - DNA, 100 bp, Homo sapiens
ctggtggttgctatggagtgccccctgatttacgaacagaactgagtaaaagaatagctccgtgttatcaagctgcaggacaagttcgagcatcttaaaa

SEQ ID NO: 121469 - DNA, 111 bp, Homo sapiens
gggtcccgcggctcccgcggcttccggcccactcagcgcctccagaggcctcagacaatgcagatcttcgtgaagactctgactggtaagaccatcaccctcgaggttgag

SEQ ID NO: 121470 - DNA, 74 bp, Homo sapiens
cagtacagatggaaaagttggctccaaagcttctgaaagaccatgcctcatccatgcctaacgcagagtcctgg

SEQ ID NO: 121471 - DNA, 75 bp, Homo sapiens
ccggagcccccagcgcagcggccgcggaggagacatcacagctttcccagatcgggaggaaaaatatggaatgtg

SEQ ID NO: 121472 - DNA, 100 bp, Homo sapiens
ccaccttctgccatctgactgtcctgctggctggtatatgccattgactgttactaatgtagtggtgaaagaaggaccagccacagaggtggatttttct

SEQ ID NO: 121473 - DNA, 100 bp, Homo sapiens
ggaatattggggggctcggctgcagacttggccaaatggacgggactattaagtactatactggcaattgctggagaagattttgcaattgttgcttctg

SEQ ID NO: 121474 - DNA, 76 bp, Homo sapiens
tgatgagccaatctttgttggcgagatatcaagttcaaaaccagcaatttcaaccgctcctgacatcactggccat

SEQ ID NO: 121475 - DNA, 75 bp, Homo sapiens
ggccttactccttcacagatcggtacaaagaggatggtgaagctttgctaattttgctaccctcagaaaaagcta

SEQ ID NO: 121476 - DNA, 82 bp, Homo sapiens
gtgctgtgcttggcgtgggtgcccagttcctggcccttggcactggtgaaggagtacctcctggcaactatgggaactatgg

SEQ ID NO: 121477 - DNA, 99 bp, Homo sapiens
aaatttcctgaagaactggaacacgtagaaagtgcaagcaaagagccagagcccagaggtggagcagttagggagggttgtggaactggacagtgacat

SEQ ID NO: 121478 - DNA, 80 bp, Homo sapiens
cgtcatcaccttattctggtcccgggcgatgacccaggatgcagccaggggccacgacatgcacggaggaccgcatccag

SEQ ID NO: 121479 - DNA, 100 bp, Homo sapiens
ggtgtcccttctggatggtactgatgttagtgtggacttgccatttcagagactcctccactctctgggaatgacacggactccctctcctgcgacagtg

SEQ ID NO: 121480 - DNA, 74 bp, Homo sapiens
ggattggggatgagtatgcggaggacagctctgatgaggaggggtccctgtgaaggtgaccaacgtcaaggatg

SEQ ID NO: 121481 - DNA, 100 bp, Homo sapiens
gcctgcacagccgcggcggcagcagcagtgagaggtggagtttgaggacgggtcccagctgacggtgaagcgtggggacatcttcaccctggaggaggag

SEQ ID NO: 121482 - DNA, 111 bp, Homo sapiens
tggaagagctccctgctgggcgatcttctctgtgctactgcaacttgctctgtgggattatcagaggtgccttggaaatgatgggaccatctagttgcaggaaaacaagct

SEQ ID NO: 121483 - DNA, 102 bp, Homo sapiens
tggggtttccggctgcagggcggtaaggatttcaacatgcctctgacaatctctagtgaatgttttaaaggaagttgggctactcacaagttactacataag

SEQ ID NO: 121484 - DNA, 112 bp, Homo sapiens
acagctcggcgctccttcccgctccctcacacaccggcctcagcccgcaccgtgtactaatggtcacttgatgtgcgctggctgttttatccacctactagcagatgcccgg

SEQ ID NO: 121485 - DNA, 76 bp, Homo sapiens
tttctggatgatgtaaaccttattctggccaacagtgttaagtataatgctacaccaaaattgcattgagccaaac

SEQ ID NO: 121486 - DNA, 115 bp, Homo sapiens
tggagagaacccagaagcctacaatgaagaactgaagaagctggagttgctcagacaggttgctgttgaagaaatctggttgcagaacaccacggattgaattggaagagatggg

SEQ ID NO: 121487 - DNA, 100 bp, Homo sapiens
caagcacgccgtgtccgagggcaccaaggcggtcaccaagtacaccagctcgaaggaagaggaagaacgtctgagaaataaaattcgagctgatcatgag

SEQ ID NO: 121488 - DNA, 83 bp, Homo sapiens
gtacggcaaaggcaagagtaacagcagcgccgtcccgtccgacagccaggcccgggagaagatggtgattgctcacaccaaag

SEQ ID NO: 121489 - DNA, 96 bp, Homo sapiens
ctgaacaaggccaacacctatgcaggattcgataccagcatcttgccaatttgcaaggactcacttggctggatgtttaacagacttgatacaaac

SEQ ID NO: 121490 - DNA, 104 bp, Homo sapiens
tggagtcagcagtggcaagttacttatcaagctgaaagacggcaggaaggatgtggatgctgcctacatgagcaaggtggagctggaggccaaggtggatgccc

SEQ ID NO: 121491 - DNA, 75 bp, Homo sapiens
agaagatgagcgaactcagggcattaaactcttgaaaaccaatgcggaaaacgccatgcggtacataaatgggac

SEQ ID NO: 121492 - DNA, 83 bp, Homo sapiens
atatgacctatgcagttcgaaaactggataacactaagtttagatctcatgaggaaagtgatgaagcattgggcccaacaatg

SEQ ID NO: 121493 - DNA, 82 bp, Homo sapiens
gaccgagaccgcggccgggaccgaggctgtggaaagtgaagaaggcattgaagatgactattttttggagaggcctgatgcc

SEQ ID NO: 121494 - DNA, 82 bp, Homo sapiens
cggcgagtttccgatttaaagctgagctgcgaggaaaatggcggcgggaggtgtcttcagtgccctgggtttgcctgtgacc

SEQ ID NO: 121495 - DNA, 75 bp, Homo sapiens
cggcgagcggacggctgcatttacggggtctcccggagggccagagtcgtctctggctgatgaacttgctcttgt

SEQ ID NO: 121496 - DNA, 101 bp, Homo sapiens
agtctctggaaagtacgaggagaatcctgggtttagccattgaggttgcagtgagccaggattgtgcgactgcactccagcctgggtgacagggtgaaacg

SEQ ID NO: 121497 - DNA, 50 bp, Homo sapiens
gactcagctctcggcctgctgatggactaatggctgaaggataaatcaac

SEQ ID NO: 121498 - DNA, 75 bp, Homo sapiens
caagccctttgccaccattccttcaaatgagggttttggccaaattgggcgagggcacaaaataaccacttaccc

SEQ ID NO: 121499 - DNA, 75 bp, Homo sapiens
gacacttccccttccccaccgaaccgcggttatcaatactctggctgaccatcatcatcgtgggactgactttgg

SEQ ID NO: 121500 - DNA, 51 bp, Homo sapiens
gttgtagacatggcggccatcagggtataacagctgcagcgatggctgagg

SEQ ID NO: 121501 - DNA, 75 bp, Homo sapiens
tgtggacagaggttattttagtatagagatttcactgtggggaaataagtgtgatctgtctctctcaggtggaga

SEQ ID NO: 121502 - DNA, 100 bp, Homo sapiens
cttcccagccttcagaaattgccggtctgggagttgggggcaaggagaagatcctgggctgtgcttcctggaagtggtattatccatttcattatgcacc

SEQ ID NO: 121503 - DNA, 83 bp, Homo sapiens
ccggcagaagccgcccatcatccacagggacctcaagcttcgagagctgtgcccaggagtgaacaaccagccctacctctgtg

SEQ ID NO: 121504 - DNA, 83 bp, Homo sapiens
gaaaatcatccatctaaagcaccagtaaaatatggtgaactcattgtcttaggggagcaatggaccacagaaattctgcattg

SEQ ID NO: 121505 - DNA, 80 bp, Homo sapiens
caagtgctcctttcttcacccagaacctgttgtggggagtaaggtcctcagaaacgtgaagaattatgatctctggagaa

SEQ ID NO: 121506 - DNA, 98 bp, Homo sapiens
ggaggtcgataagctggaactgatgcacgagctttcagatggagatctggatctggatcttgtttatgaggatgaagtaaatcagctcgatggcagca

SEQ ID NO: 121507 - DNA, 100 bp, Homo sapiens
gagcctcgcaagaacagcccacactgccatgaaggaactatcccatctggtcaaaatagtactggaaacgtacagatggtgcgtgagcagtacactacag

SEQ ID NO: 121508 - DNA, 100 bp, Homo sapiens
gtggagtttaagtctggagcaggcactgagctgtctgtgcgcggaaaacagttcctcctgaggatttcagagaagagctggacttcctggctgactctca

SEQ ID NO: 121509 - DNA, 100 bp, Homo sapiens
ctcgatgctggcctggagcagaaactgagctggaccactggagcctcggtgagggatccagagacaatggccccgatgggatggagcccgaaggcgtcat

SEQ ID NO: 121510 - DNA, 83 bp, Homo sapiens
gtgccacacactcggtcccgacatgatggcgagcatgcgagtggtgaagcaaattgtggctactaatttgccccctgaagatc

SEQ ID NO: 121511 - DNA, 98 bp, Homo sapiens
atgcttactgggcacctgctacgtgaccagcattgccgtagaccctgggaagcagcagtgaacaggacatggcggactcccgccgcatcaatgccaac

SEQ ID NO: 121512 - DNA, 51 bp, Homo sapiens
ccgggcgctggtctgctcccagccgacttgtgcaccatggacaattttgct

SEQ ID NO: 121513 - DNA, 97 bp, Homo sapiens
gagcctcagtttgtgcaggacaccgacatggaacagggactcactggggcaattttacccgaaacaaactgacgagtttgtctaggaaacatttccg

SEQ ID NO: 121514 - DNA, 100 bp, Homo sapiens
atgaaaaagatgagcaggaatgttttgctacaaatggaggaggaggaggacgacgacgatggggatatcgttcttggccaggctgactgagagatttgtg

SEQ ID NO: 121515 - DNA, 102 bp, Homo sapiens
gacttttgccagttagtagcccagaagcaaaagagacccacagatttggatgtagatacgttagccagtttacttactctgtatgaaaaagctgatatcaag

SEQ ID NO: 121516 - DNA, 83 bp, Homo sapiens
cctgtacagcctgcagaactgagggtgtgaagacagagaatgaccacatcaacctgaaggtggccgggcaggacggctccgtg

SEQ ID NO: 121517 - DNA, 100 bp, Homo sapiens
gaatatggaatccaagggggccagttcctgccgtctgctcttctgcctcttgatctccgccaccgtcttcaggccagtagccggatcgagctgggagatg

SEQ ID NO: 121518 - DNA, 82 bp, Homo sapiens
agccgccgtggagaaggaagaactgtgctgagggtgctttcttctgcgacctggtactcatctacctcatcaaaaagagaga

SEQ ID NO: 121519 - DNA, 90 bp, Homo sapiens
cctcaaccgtatttggggctgctcctggaggagctacgcaggacgctgaccggaaaggagattgagattgacattgaacctacagacaag

SEQ ID NO: 121520 - DNA, 87 bp, Homo sapiens
cctcggagcgcccggagccggaggcttgttagcagtggcacaagatcttacagaggatgaagaaacagtagaagattccataattga

SEQ ID NO: 121521 - DNA, 100 bp, Homo sapiens
gaaaccaggcacaattgtaaagggctggtcctatagtacccctcctcaggaatgtctccccagtgcaaggacaaagactgaagagactgctatattgatg

SEQ ID NO: 121522 - DNA, 75 bp, Homo sapiens
cagaagccgagttcaacatcctcctggccaccgactcctacaaggtggccctcatgacactgacgctcttcccgg

SEQ ID NO: 121523 - DNA, 100 bp, Homo sapiens
tgaaacaagatacacaaaatgcgctgaagttttgacaagcccatattacatggattatgtacatttggattttctgccaggcgtgtgttacagcagtttg

SEQ ID NO: 121524 - DNA, 98 bp, Homo sapiens
gttttttttcaccctgacttgtggaaccaatcctggtgccttgtccacattttgcgagagacaacagtaaaatactccaaaatacgttcttttcatgg

SEQ ID NO: 121525 - DNA, 82 bp, Homo sapiens
ggacgagggccagctgacggagatggtgcagaagatggaggaggttgaaatcacaaagattagacacctttttagataggtg

SEQ ID NO: 121526 - DNA, 82 bp, Homo sapiens
aagatgcctcgaactaaacaaattcatcccagaaatctaagaggaagctatgaagcagataacccagctcctaccagaggac

SEQ ID NO: 121527 - DNA, 100 bp, Homo sapiens
agcagccaagatggtgaagcagatcgagagcaagatgcacacttgactgaaggaggacagggaatctgaagactccggatgacatcagagctacttttca

SEQ ID NO: 121528 - DNA, 75 bp, Homo sapiens
tgactttcaacgggactattatgatagggaccacttcacacacccctttttcgcctccagagtagatggaaccgt

SEQ ID NO: 121529 - DNA, 100 bp, Homo sapiens
atttgctgggccgggtaccatggacgtgggcgaacttctgagctaccaggtggtcaaggtggtgggcagcaacatctcccacaagctgcgcctgtcccgg

SEQ ID NO: 121530 - DNA, 74 bp, Homo sapiens
gtccctatggagaaactgaggcatggagaggctgaagtcacacaaccacgaccacctgctgtgcctggatggag

SEQ ID NO: 121531 - DNA, 100 bp, Homo sapiens
gtgtggggtcgagcttcctgataacgaggctgtggagcagcacagttgaaggagaagagccaggcgtgcggagggaacttggggtccattgaagagctgc

SEQ ID NO: 121532 - DNA, 82 bp, Homo sapiens
cctgcagacccctggcttcctgcagtgtttcggcgatggcttgaactgggctggttgctccatcattgtcctgctgggccag

SEQ ID NO: 121533 - DNA, 76 bp, Homo sapiens
ctccctgaaatctggagtgaagaacgccgccatccagccaccattccaaggtgccgtgagcgatgtggagatgcag

SEQ ID NO: 121534 - DNA, 150 bp, Homo sapiens
ggtgggacaaatgggtgcaccccagagtaagtttggcctgccgcaagctcagcagccccagtggagcctctcacagttgtgtgctgagagtctgacctgatgagcttccagaccatcctgctgttgtgctggagggctggccaaaacctg

SEQ ID NO: 121535 - DNA, 95 bp, Homo sapiens
gggtggtataaaatggcggatttcgaagagttgaggggtcatgtaggtacaacagcaaccaagaagatcgatgtctacctccctctgcactcgag

SEQ ID NO: 121536 - DNA, 74 bp, Homo sapiens
cgaaatgctgtgccgtggggagggtatcaaaatgggaaatcgtgatgagaaccagagtataaaccaccaaatgg

SEQ ID NO: 121537 - DNA, 90 bp, Homo sapiens
ggcagaaccagtcccttgtgtatggcaaagtggatagcttctggaagattcagtacctctcgccagactctcacctggatcccagactcc

SEQ ID NO: 121538 - DNA, 96 bp, Homo sapiens
cctggacgacatcgacctgtccgccctgcgggtccagcctgatgagtgaagaggctaagcgaggagcacccaacccttggctctttgaggagccag

SEQ ID NO: 121539 - DNA, 96 bp, Homo sapiens
tatcccgtgtgaaccatcctaatattgtaaagctttatggagcctgcttgaatccagctcctgttctggatgtcagatatgcatctgcctcctgag

SEQ ID NO: 121540 - DNA, 76 bp, Homo sapiens
cacctagaagaggtgatgatagctttggagacagtatccacaagtgaaaatccacaactctgaagagaaactacca

SEQ ID NO: 121541 - DNA, 75 bp, Homo sapiens
cggatgccctgcagtacctgcagaaggtctctggagacatcttcagcaggtggtgagccggctgggcctggactc

SEQ ID NO: 121542 - DNA, 96 bp, Homo sapiens
aacccgttcttgcctcaggccagtcgcctccaggccaagagggatccttcacccgtgtctgaaaactttagaaactgttcctttggagaggaaaaa

SEQ ID NO: 121543 - DNA, 100 bp, Homo sapiens
tcccagcccactacctcatgggcccccaaacaaaggcgcagttccttgggctgagaaagtggaactccagagacactcctgaaattgtcctaagtcaaag

SEQ ID NO: 121544 - DNA, 74 bp, Homo sapiens
gagatggagggatccttctgagaagtgaagccatttggactttctggcactctttcttcagcagtgccactttc

SEQ ID NO: 121545 - DNA, 88 bp, Homo sapiens
gagtctgaggggttcgggcttgtcaggttctaggaagcggctcagccccagggcagcacatcagagacaccatggaacacagccattc

SEQ ID NO: 121546 - DNA, 80 bp, Homo sapiens
gccaaggaaaaactggagagcttcatcaaaaatagtgatagctttgataagccttgtttgtatgaagtccagcacatctg

SEQ ID NO: 121547 - DNA, 75 bp, Homo sapiens
gaggaatatactcatcatcagtctatttagaagaggtttctgctttgggacaaccatacatctaattccttaaag

SEQ ID NO: 121548 - DNA, 90 bp, Homo sapiens
gtccatcgtcatctgcagcgtcctgctgctgctctccgtggtggtgtaaggcaaacattggtgggcaccgatcttcctgttcattctgca

SEQ ID NO: 121549 - DNA, 90 bp, Homo sapiens
acaggatccgcccctggacatggaggagaaggtccgcttcaatgtctcgactgcattgtgagagtgaatctttcaagatggatctaatct

SEQ ID NO: 121550 - DNA, 100 bp, Homo sapiens
acatctattccctggcagcctcatccgagcttccccatgtctacatgagaaagcagagccaggtgtacggagaggacatggatttgattgacatactttg

SEQ ID NO: 121551 - DNA, 80 bp, Homo sapiens
gaagtccagagctgaggactgcctgtttgcagatggtcagtaggacagaaggtaacattgatgactcgctcattggtgga

SEQ ID NO: 121552 - DNA, 101 bp, Homo sapiens
tggcccgggctgtgagatgaatctctaatcggtggccgccagacacccgcggcgaaggcggctcgggctcgggctccggagaggcagatgcgaaccagaac

SEQ ID NO: 121553 - DNA, 82 bp, Homo sapiens
ggaaatggctgctgttgcttctgggccagaggaagagaatgagacaatgcagatcttcgtgaagactctgactggtaagacc

SEQ ID NO: 121554 - DNA, 48 bp, Homo sapiens
gcagaccctcgggatcgtcgctggggcataaggaaatggtggcaggca

SEQ ID NO: 121555 - DNA, 95 bp, Homo sapiens
tcgcatctccccgacaaacaccacgagaattccgcagcccacacgactaatagggatgccaaaggaaaaatatgatcctccagatcctcgcagaa

SEQ ID NO: 121556 - DNA, 101 bp, Homo sapiens
agcgatgtccccatccgccgccgagaggaggcctatgagaatcagcccgagaccgaggacgagaagaagcgctttgaggaaggcaaagggcggtacctgca

SEQ ID NO: 121557 - DNA, 75 bp, Homo sapiens
aaaccctgctgatgtcagtgttatatcctccaggaatactggccaggatgcagactcttcttattttaaaatctt

SEQ ID NO: 121558 - DNA, 83 bp, Homo sapiens
gctcagcgactgtttgatgacgtcccgcaggcaggaaaaatactattgtattacaaggctcggaccaaagacatcctgattcg

SEQ ID NO: 121559 - DNA, 75 bp, Homo sapiens
aggcagcaactgaggcagcggcaggctcaggtgcagccgctgctgcagtgagaagaggagtttgttactttaaac

SEQ ID NO: 121560 - DNA, 51 bp, Homo sapiens
atgaccatggaccacctcctagtaaggaagctatgaagcagataacccagc

SEQ ID NO: 121561 - DNA, 82 bp, Homo sapiens
ggagccgcgctacgtggtctccatggggaggaagcggggagaggtggtgagagatgacccctgttgaggatttcattggtgt

SEQ ID NO: 121562 - DNA, 80 bp, Homo sapiens
gacttaggctgaggccccaggaagaggtgtcattccacacatccacaaatctctgattgggaagaaaggacaacagaaga

SEQ ID NO: 121563 - DNA, 49 bp, Homo sapiens
agagaatgagatagccgtcctgagaaagcccactgctcagtggagcgtg

SEQ ID NO: 121564 - DNA, 74 bp, Homo sapiens
tgaacttcatcgtaaatatggaacagacttgagccggattgcccgtgaggcagaggctgccatctaccacttgc

SEQ ID NO: 121565 - DNA, 100 bp, Homo sapiens
gcggagacgaaggacgcagcgcaggttgtttgcatggaatagaggctgaggaggccccttctgagcagactctttctgcgcaaggagtgtcacaggccag

SEQ ID NO: 121566 - DNA, 75 bp, Homo sapiens
cgtggctggaggagcaaggcatgatcctgaagcagacgttctgcctacgaggacaagcagaaactcaagcggacc

SEQ ID NO: 121567 - DNA, 100 bp, Homo sapiens
gggcttcggcccccaccagagactcgctgcactgggtgttcaacagccatcactccttggagcatctcctaccatttatacacagcaaactgcattggca

SEQ ID NO: 121568 - DNA, 95 bp, Homo sapiens
cccagaccctggagcctcagttggaagcagccgatccagcctgcggagcctgtggggcagggcaacaggtttgtctatgctggctctaactcggg

SEQ ID NO: 121569 - DNA, 88 bp, Homo sapiens
tgctctcccacccacgcctcagcaacagccacccttgaataatcacatgatctcacagaggcctcgtggacagagagattcaagctat

SEQ ID NO: 121570 - DNA, 75 bp, Homo sapiens
cctcatctccactcagcgggcccagcagcagtgttgtactgctacttctataaacggacagccgtaagactaggc

SEQ ID NO: 121571 - DNA, 100 bp, Homo sapiens
aagttccctttcctgccaatattgggagtgttcctgtgtggctcctgctcctgctgtgtgtcgggcttattattgtgaccatcctgctgctccagagtgc

SEQ ID NO: 121572 - DNA, 100 bp, Homo sapiens
aagaaagtggtgaatcccctgtttgagaaaaggcctaagaattttggcattggtacgaagatgccctggtgctcctgctcacagaggtgttgaatcgaat

SEQ ID NO: 121573 - DNA, 60 bp, Homo sapiens
gcgggagccagcgagccacgggagcgagccaggttgtacatcctggagacctgaagaatt

SEQ ID NO: 121574 - DNA, 116 bp, Homo sapiens
aggagcaagagcaagatcaccgtgacatccgaggtgcctttctccaaaagaaaccagggtggttatgaccgctactcaggaggaaattacagagacaattatgacaactgaaatga

SEQ ID NO: 121575 - DNA, 100 bp, Homo sapiens
ctagtgcacaacttggccgggctcactgggctcctgcaccactgcctgtcagggtcctcactgagcagcgagtcgtcccccgtgtcctctccggccacca

SEQ ID NO: 121576 - DNA, 83 bp, Homo sapiens
ctgtggcatggcggacgaggggaagtcgtacagcgagtaatcaagtcagaggattatatgacttttatctgcctagagaagaa

SEQ ID NO: 121577 - DNA, 75 bp, Homo sapiens
tcgcggttgccaagcgctcggcgcttggcgctggcgctggccaaggcgttaccggtattgtaagaacaagccgta

SEQ ID NO: 121578 - DNA, 82 bp, Homo sapiens
ctacttcgaagactggcaagcacggccacgccaagtacttggaccatgagactgtttcagccactttcatcgacagcagtgg

SEQ ID NO: 121579 - DNA, 75 bp, Homo sapiens
gatggcggcatgagtatctgggatgtgaaggcctcaggcccaggcccaaggccaagtgagagagcccaggccaca

SEQ ID NO: 121580 - DNA, 105 bp, Homo sapiens
gcgaggcggggccgccggggccgccatggagcccgactcggtgattgaggacaagaccatcgagctcatggtctacatcatccgggtcacgtggtccagcggctc

SEQ ID NO: 121581 - DNA, 83 bp, Homo sapiens
tcctcctggccaccgactcctacaaggagccttcacgtaaatgggtccagtcatgcctcccagtaagaagccagaaagctcag

SEQ ID NO: 121582 - DNA, 76 bp, Homo sapiens
tatagcaaaagatttgatgaaagtacttcagggagtcaacggtgagtgttcccagctgttagatgaaaatctaaag

SEQ ID NO: 121583 - DNA, 95 bp, Homo sapiens
agaaggagctggcggacatcactttagaccctccacctaattgcaggtgctccatacttgcttgcagtgcctacgtggctctggctttgggtgat

SEQ ID NO: 121584 - DNA, 50 bp, Homo sapiens
tgaagatgaggcaaatataggggcatcagacaactgacatatatccacaa

SEQ ID NO: 121585 - DNA, 86 bp, Homo sapiens
catgccgctcctaagcctgcacagccgcggcggcagcagcagtgagagtaagactttgaccccgacgcaggcttcagtgattgccg

SEQ ID NO: 121586 - DNA, 75 bp, Homo sapiens
atccaagaaaaatgtccttaaagcaattgagcaggctgatctactgcaggaggtggctgaagccatactatttta

SEQ ID NO: 121587 - DNA, 83 bp, Homo sapiens
tcgcgacacccttgaagctgagaaatgctcagccctctcttcctgctatagccgagtgtaccaaagcctcgccaacctcattc

SEQ ID NO: 121588 - DNA, 87 bp, Homo sapiens
ttgatggtcgaggccatctcctgggccgcctggcggccatcgtggctaaacaggaccacggaggggtgatcgtgaacatcactgcca

SEQ ID NO: 121589 - DNA, 101 bp, Homo sapiens
actggatgtcaagcattgtgcatagttttcttcgattgttgcaacatcccttgcgaggtgtgggcccatcgctggatggatctgtcagaacacggctttgg

SEQ ID NO: 121590 - DNA, 75 bp, Homo sapiens
ggtccgtgcgcccagcgtcccagggcccaggccgagcagttggaggtccccctccccactaagtgcctctttgca

SEQ ID NO: 121591 - DNA, 82 bp, Homo sapiens
tcctggacttcgcctttcccgagccctggaggtggggagaaaagaatttggaatgatgggagatcatacaattaaaagtcag

SEQ ID NO: 121592 - DNA, 50 bp, Homo sapiens
gggaaaagcgaggcaaggcaggcggaatctggccaacctatttgtggaaa

SEQ ID NO: 121593 - DNA, 124 bp, Homo sapiens
gaactatcttggtgaagcagtgagtcgaaatgcgtctctggaagtggcatgcatccctcagcccatgaatactacgatccaaatgactacattggagacatccatcaggagatggacagggagg

SEQ ID NO: 121594 - DNA, 98 bp, Homo sapiens
tcaacgatacctattttctagtgctgagatcctgagacaatgagcaaatcatggaggaagataaaaaacatggtgcactggtctcccttcgtcatgtc

SEQ ID NO: 121595 - DNA, 122 bp, Homo sapiens
gccatgagccccccgctctgagggccccggcccctggatgcacagccccggcgctgacaatgcagatcttcgtgaagactctgactggtaagaccatcaccctcgaggttgagcccagtgac

SEQ ID NO: 121596 - DNA, 75 bp, Homo sapiens
ctccaacacgatcccggggctcaagtggcttaacaaggaatctggtggacagtaacaaactttggtgaaatttca

SEQ ID NO: 121597 - DNA, 100 bp, Homo sapiens
agaatctgatgagccttttaggcctgttcagagagacaagagagacacctccaacttcgacaaagagttcaccagacagcctgtggaactgacccccact

SEQ ID NO: 121598 - DNA, 74 bp, Homo sapiens
ctttctcaacctcatcttctgggcctttgaactggccacaggtgactatttgtttgaacctcattcaggggaag

SEQ ID NO: 121599 - DNA, 100 bp, Homo sapiens
gatggtggataagcccacccaggacctagatgtgaaggctggtggaggctgtgtaatgaccattggagaaatgctacgatcttttctcacaaaactggag

SEQ ID NO: 121600 - DNA, 100 bp, Homo sapiens
caagaagtggagcatcactgacggctatgtccccattctcggcaacaaggaagggaaaaggccgaggcatcagcgtgtgaagaccgcaaagacgatcccg

SEQ ID NO: 121601 - DNA, 75 bp, Homo sapiens
aattctggagacctgggtgtgggtcaagcaaccaggcttgcttccggcgtcatggctcaaagggccttcccgaat

SEQ ID NO: 121602 - DNA, 82 bp, Homo sapiens
gtgctcggtgtcggcagaggagaccgaaaagtggatggaggaggcgatgcacatgtctgcgctcctcagaccaccggcaggt

SEQ ID NO: 121603 - DNA, 75 bp, Homo sapiens
cacagttcctgggaaggtggagccaccagcctctccttggttctaaatccccttctggttcttatcttcatcccg

SEQ ID NO: 121604 - DNA, 90 bp, Homo sapiens
tgaagtgcccgttactgcttcagcaattctctaatgacaagcataattatttatctcagaatgattacggacctgaagccaaagaacaag

SEQ ID NO: 121605 - DNA, 83 bp, Homo sapiens
ggatgtggacgaaggggccgacctcctagactgcaaaattcaaaatggggctcaaggtattcgtttcatctacaccagagaag

SEQ ID NO: 121606 - DNA, 75 bp, Homo sapiens
acctatgacaagaaggtgaccatctacgaccccagaggtacaggtttgcagattccgccagcagcacagcaagct

SEQ ID NO: 121607 - DNA, 101 bp, Homo sapiens
acatgctccacagcccggaccctggggctccgtaggcaccaactgcaaggacccctccccctgcgggcgctcccatggcacagttcgcgttcgagagtgac

SEQ ID NO: 121608 - DNA, 100 bp, Homo sapiens
gcaaggtgatccagcaaggtcggcagagcaaggggcttacgcagaaggacctggccacggtgcatctgcagacgcagcaggaggtgaagctgcgcatgac

SEQ ID NO: 121609 - DNA, 100 bp, Homo sapiens
tagaccacaagttacctggcggggggatggacagttttttgctgtgagtgttgtttgcccagaaacaggttgaaggggcccggccaggactcggggaagg

SEQ ID NO: 121610 - DNA, 82 bp, Homo sapiens
gaaaccgacgcccatgggcgaaagggacctgctcaagttcactcagtcagcccaaggccaaccccactgtcactctgttccc

SEQ ID NO: 121611 - DNA, 75 bp, Homo sapiens
ctccccggtgcacccgcaacaggcgttttgcaatgcagatgtaggcctgggcagtttttaaagggaagtttaaag

SEQ ID NO: 121612 - DNA, 80 bp, Homo sapiens
caacgggcagtttgtcgaacgatgttggactcatagtcactgccagaaagatcatccccccgaaggagtggaagccgcgg

SEQ ID NO: 121613 - DNA, 98 bp, Homo sapiens
ggggccggcacatccaggccatcaggtgctggactatatggaagtacatgaaggactatttccccatctcgcacaaacatttcactgaagatattcaa

SEQ ID NO: 121614 - DNA, 96 bp, Homo sapiens
atgtaacaaatgtgatgacaagaaggagagatctctgctgcctgcattgaggggattctggactctacttataatatccctaactgctggattctc

SEQ ID NO: 121615 - DNA, 100 bp, Homo sapiens
aaccacatgattgggattgggccagtcttaaatatctacccatggaataaagagctgtatttgatcaggaaaacagttcctcctgaggatttcagagaag

SEQ ID NO: 121616 - DNA, 75 bp, Homo sapiens
gcaggtgttcaagtgcagggagttcccgttacaatcactagtgttgcaggagaatggggtactaagagaaaagca

SEQ ID NO: 121617 - DNA, 75 bp, Homo sapiens
ccgatactgagcttcttcctatttgccatgggtggacccccaaaagtacaagggcatatttaacggattctcagt

SEQ ID NO: 121618 - DNA, 100 bp, Homo sapiens
agaccagcctgggcagcatagttgggtgctgattgaccggagcggccgtcactttggtacaatcctcaattacctgcgggatgggtctgtgccactgccg

SEQ ID NO: 121619 - DNA, 74 bp, Homo sapiens
attttataatgataaaagatacccagaatgcagagatttgagcaggggacacccgttccagtgagatgcccgag

SEQ ID NO: 121620 - DNA, 83 bp, Homo sapiens
ccgaactccaagggacgacgctcgcggaagcagaggtttggggtcaccattggtatgttcctgctctctggagatccctgctt

SEQ ID NO: 121621 - DNA, 80 bp, Homo sapiens
gaagaaaattgcttctcgcatgattgaatgcctaagttgcaggaagaggcagaggaagaggaagaggaagaggacgtggc

SEQ ID NO: 121622 - DNA, 97 bp, Homo sapiens
aaacatctgcattcagctggtataattcatagagttggtcaaagaaaaagtgatgtatgaaaaagaggcaaaacaacaagaagaaaagattgaaaaa

SEQ ID NO: 121623 - DNA, 75 bp, Homo sapiens
gaagcctggatgaaatagatctctcggctctgagggttattctcgttcaagttaatccaggtgagactttcacaa

SEQ ID NO: 121624 - DNA, 89 bp, Homo sapiens
gagcaatgctgacctcggtttcctggacccattccgactcaggttcatcttccttcctgtacagtattttcaaacttcccagtcattaa

SEQ ID NO: 121625 - DNA, 75 bp, Homo sapiens
ctgggttgaagccctgaaccaagccagcaagatcacctccacaagaatcggaatgtcagttaatgctattcgcaa

SEQ ID NO: 121626 - DNA, 83 bp, Homo sapiens
cgctgcccagttgggagcccctacctctccaatccctgactctgcaatcgtcaatactcggccaaagcacccctacgcagaaa

SEQ ID NO: 121627 - DNA, 75 bp, Homo sapiens
tctgggaagaaagggacatcatggcttttgccaacagtccttgggttgttcaggaacttgtaatagctggcatcg

SEQ ID NO: 121628 - DNA, 75 bp, Homo sapiens
cggcagcggggtccgggtccggagcgccacaggtgatgttgcaaatgaagtggagactgaacaaatactctgcga

SEQ ID NO: 121629 - DNA, 82 bp, Homo sapiens
attacctggaacttcatcatcatctacttcacaggaattgccattttacctggagtagaacagaaaaattattatgtctgtg

SEQ ID NO: 121630 - DNA, 101 bp, Homo sapiens
ctacaaactgaagtgcaaggcactgcaggaggagaaccgcgacctgcgcaaagccagcgtgaccatccctggccccaaccctgagacctgtatgaaggtgg

SEQ ID NO: 121631 - DNA, 82 bp, Homo sapiens
agtgtggttcagggccagtgcatattagtggacagcacttagtagcttgcattgaaaggctctagttacagtggacttcttg

SEQ ID NO: 121632 - DNA, 88 bp, Homo sapiens
tcagttggaagcagccgatccagcctgcggagcctgtggggcagcaactggatgatgctcgcaacaaagctgacaatcaagaaaaggc

SEQ ID NO: 121633 - DNA, 90 bp, Homo sapiens
aatgaatgtgacagtgattatcatgaggaaagaacaattctccctatgtcgaggaaaccttcaattgtaacaaagtatgtagaatcagat

SEQ ID NO: 121634 - DNA, 115 bp, Homo sapiens
actggaccaagatcgagcccagcgtcaacttcctcaagtcgcccaaagaaggtgcttcctggaggggcctgccccactgttcctgtgctgagttccaggacagcctcaacttcag

SEQ ID NO: 121635 - DNA, 101 bp, Homo sapiens
gttctccgtctacaggattggaaatgcctttggtgtaagacaatgcaaggagctgtacctccaaccagttcagttcctcctgttgccggggccccatcggt

SEQ ID NO: 121636 - DNA, 100 bp, Homo sapiens
cgctgctgctgaggcggcagtgtcggcagtccaaccgcgactgcccgcaccccctccgcgggggtcccccagagcccagggtgacaagattattgatggc

SEQ ID NO: 121637 - DNA, 75 bp, Homo sapiens
tccgtcatgatcaacaaggccacgccctacaactacccaggaaacccctcctggagtttccccaaagccatggac

SEQ ID NO: 121638 - DNA, 99 bp, Homo sapiens
ccaaggttttctcacagaggaattttgattgatacatccagacattatctgccagttaagattattcttaaaactctgaaacctctgcgccatgagagc

SEQ ID NO: 121639 - DNA, 75 bp, Homo sapiens
gactccttcggcagtccacccaccgccgccgcctcccagttgaagaagctggatctggcagctgcggcagcacac

SEQ ID NO: 121640 - DNA, 75 bp, Homo sapiens
cagcaaaaactggagcagaaattggaggctcagcataggtgtcgcacctccttcttttgtagccattaaggcagg

SEQ ID NO: 121641 - DNA, 100 bp, Homo sapiens
gtgggttcttggtctcactgagttctagaatgaagctgcagaccctcgcagtgagtgttacagctcttaaggtttttcgttggaatatacgttgcacatt

SEQ ID NO: 121642 - DNA, 100 bp, Homo sapiens
atttattggaccaactggcaacagaaaatgaaaagtagtgtggcacagataaaaaacttcaccgcgtcgggagaggcggaggcgcggcgctgcgcccgac

SEQ ID NO: 121643 - DNA, 100 bp, Homo sapiens
tgctggaagggaaggaaaaacctgtatgtggaaccacctttataggtaaacattggaaactccatagaataaatcagtatttctacagaaaaatggcata

SEQ ID NO: 121644 - DNA, 78 bp, Homo sapiens
agaaaggagcaaatcatactctttccatcagtctcaacatagaactcttccaccaaagccacctaagccaatgacttc

SEQ ID NO: 121645 - DNA, 100 bp, Homo sapiens
tctgtccagttttcaaaccacacagggcagagcggcttgggtaaatccaccttaatcaacaccctcttcaaatccaaaatcagccggaagtcggtgcagc

SEQ ID NO: 121646 - DNA, 74 bp, Homo sapiens
ggaaccatcaaccagcaggccatggaccaacttcactatgaagagcgagctctgtatctcgaagcaataattca

SEQ ID NO: 121647 - DNA, 100 bp, Homo sapiens
aagaaagctttcaaagtcatgaacgaattaagaaggggctcagccatcgccaagatcgtgggtggcaatgcagcccagctggcacagtttgacccacggg

SEQ ID NO: 121648 - DNA, 98 bp, Homo sapiens
cagttcctggttcgcgtcctgatccccctgcactctgtcaagtcgctgtctgtcttccatgcccagctggtcctgtccttcctgcaccttcatcaatg

SEQ ID NO: 121649 - DNA, 98 bp, Homo sapiens
caaatatgaactatgataagctgagcagagccctgcgatactattatgacaaggcttgcattgatgacaatgttgatatggtgaagtttctggtagaa

SEQ ID NO: 121650 - DNA, 100 bp, Homo sapiens
gtttgaagtcaacattcgatttattggaggcctacttgcagcatattacctatcaggagaggagtttggaaattttagcattcaggtgccaggaatgcag

SEQ ID NO: 121651 - DNA, 100 bp, Homo sapiens
gttcgggccggctgtcctggcgcggtatgagggtgctggttgatgctcgagagaagcttcatattccctggggagacaactcaaaccaacaacatggaga

SEQ ID NO: 121652 - DNA, 51 bp, Homo sapiens
gcattggcgaccagcgcttcacggttttcctttggaatatggataaataca

SEQ ID NO: 121653 - DNA, 82 bp, Homo sapiens
tggaggcctgggaagccaacgaccacacgcacaggaggccactgtctgcagctcccgtgaagatgtccactccagacccacc

SEQ ID NO: 121654 - DNA, 98 bp, Homo sapiens
cgtgaccgagagcgtgaccgagagcgcgaatatcgtcatcgttagaagaaagggagttctgggaattatgtaacaagtgtaatttgatgagaccaaag

SEQ ID NO: 121655 - DNA, 78 bp, Homo sapiens
agaaggcaagccggaaagagcgaaagaaagaagtggtggaggagatgaatgccctgagaggccaggtgggtggagatg

SEQ ID NO: 121656 - DNA, 101 bp, Homo sapiens
tgaggagttgctggccaaaggggcctgtgtacttgctgtagatgaaaatgggctacaatagaagtatctcccgaacagaaacgataatacgatttgctttc

SEQ ID NO: 121657 - DNA, 100 bp, Homo sapiens
acctatgtacctgttaccactttcaaaactgtacaggaagaggcacatacaaagaaaagaatccccgaaagggcggtttgtgatgctcctgccatcgtca

SEQ ID NO: 121658 - DNA, 100 bp, Homo sapiens
aagatctgcagtgagcaaagagagctgccctgggcacgctggacttcagcctgctgtatgaccaggagaacaacgccctccactgcaccatcaccaaggc

SEQ ID NO: 121659 - DNA, 100 bp, Homo sapiens
cctcctggccgacccagccttcatccgggcctgggtgggcggggtcggcaactacaagttaggtggtgaatcagaaatcctgcaccatgagaagcagtac

SEQ ID NO: 121660 - DNA, 80 bp, Homo sapiens
actgctgaaataatgtttgagtccttcaatgttccaggcttgtacattgctgtgcaggaaatggatcagacaatggctgc

SEQ ID NO: 121661 - DNA, 100 bp, Homo sapiens
catgctcaacttcggtgcctctctccagcagactgcggttaaacccatccagagtaatggctgcggccttacccaggaccctgggggagttgcagctgta

SEQ ID NO: 121662 - DNA, 100 bp, Homo sapiens
agcgtgaactgattattggtgaccgacagactgggtggattcatacgacgtgactgtggacgaggaactgggcgagatccagctggtcagaatcgagaag

SEQ ID NO: 121663 - DNA, 75 bp, Homo sapiens
aaagataaatccaaatactgcatatcagaaacaacaggtggacttaaatgaagaagaaactatattgatcatcag

SEQ ID NO: 121664 - DNA, 100 bp, Homo sapiens
cagcaagaaaaggccaagatgatgaagtgagaacgttgatggcaaatggcgccccattcaccacagactggtttgagttcctgagatctagttggtgaga

SEQ ID NO: 121665 - DNA, 73 bp, Homo sapiens
agaaggaagatggcggatctggaggagcagttgtctgatgaagagaagttgctctcaccagaagatttagtga

SEQ ID NO: 121666 - DNA, 73 bp, Homo sapiens
tgctttgtgcagaaaggaatcaaaagaatatttagaatgcaggatggagagagatgggatctcactatgttac

SEQ ID NO: 121667 - DNA, 98 bp, Homo sapiens
ccgggcctctccggagaagagaggctgcagcaggccttcgtcaagatggttggacaccacgtcgccttcctggaagcagacgtgcttcaggctgagcg

SEQ ID NO: 121668 - DNA, 88 bp, Homo sapiens
tgtgggcgcggctgcggtttaacccgcggtggcggcggcgacggcggccctggcagaagtgaccggggaggtgcgtcctcatcatggg

SEQ ID NO: 121669 - DNA, 83 bp, Homo sapiens
gagcggacgggccatacccaataaccaggtgcttggcaaaatcgagcgggccattggacggggaggtttactgcatcgacgcg

SEQ ID NO: 121670 - DNA, 82 bp, Homo sapiens
tggcgccgaagcaggacccgaagcctaaattccaggagggattttttatcaagcagaaatgcatcgaacaacgagaatcaag

SEQ ID NO: 121671 - DNA, 75 bp, Homo sapiens
attttggaaagagaagatgctcggctgatgataagagatgctgcctatttctataagcgaagccagtgctacaaa

SEQ ID NO: 121672 - DNA, 90 bp, Homo sapiens
ctcaggccagtcgcctccaggccaagagggatccttcacccgtgtctggtattgttgcagcatctggcagtgagactgaggatgaggaca

SEQ ID NO: 121673 - DNA, 100 bp, Homo sapiens
ttctgcccggcgcttcggcccgggccgctcaggtgcagcggatgtcaatttggatatatcaaagcctttgaaagcaaacctgagtttcaccaaactggat

SEQ ID NO: 121674 - DNA, 100 bp, Homo sapiens
gattccagagagcggcggaaaggataagcctcgacttagaagctaccgagttaccctaagaaaggtgctccaatattacctcaaggattacagcctgaac

SEQ ID NO: 121675 - DNA, 100 bp, Homo sapiens
acacttctgatgacacctttattttaaaagctgatgttccaagttggaagatgctggctcaagtagtttagataatctactaagtagatacatctcaggc

SEQ ID NO: 121676 - DNA, 60 bp, Homo sapiens
taaggcgtgagcccccaagatttcacggaatcatattgacaggtcatgaaaatgagacca

SEQ ID NO: 121677 - DNA, 100 bp, Homo sapiens
gagggagacgcaggaagcgatgaaagagatgtctgcatatattcgactttatgggagaaaatttagcaaagaagatcatgttctttttattaagttattg

SEQ ID NO: 121678 - DNA, 83 bp, Homo sapiens
aggagatgcacacggcactcgagtgtgaggtgaccctggcaaagatgagagtgcacatttcgtcctgcctgaaggtccaggag

SEQ ID NO: 121679 - DNA, 51 bp, Homo sapiens
ttctgcaaagattgggtttttgaatttccaaggcaggaaaggtaaagagac

SEQ ID NO: 121680 - DNA, 100 bp, Homo sapiens
tgaagaagcatcaagacagtgaacctggcttctgtatttaccatgtacctggagcattggtttggcagctgaaccaggttgttttccagattggtacatg

SEQ ID NO: 121681 - DNA, 88 bp, Homo sapiens
tacggcacttggcgtaaagccgcttccctcaagagtaactacaatggtgggggaaaagtagctccagctcaaccatctgaggaaggac

SEQ ID NO: 121682 - DNA, 82 bp, Homo sapiens
aaagaaaccgcaaaaccaaaaccagatcctttcaaaggctgcaggccaacttcaccatccgggaagatgccaaccccagctc

SEQ ID NO: 121683 - DNA, 100 bp, Homo sapiens
gttcaatacacctcccacctgtcctcaggcatatcaaaggtgtttctaactggggaggctatgccctggcctgcgcactctacatcctgtactcatgtgc

SEQ ID NO: 121684 - DNA, 100 bp, Homo sapiens
ctctgctcattggggcgttgaggaatgtccggtctgtgctacgacagcaaaatgttccaggtgcatcaggtgctctgcatccccagctggatggcaaaat

SEQ ID NO: 121685 - DNA, 90 bp, Homo sapiens
cgaacgagtgacattggctgacatcacagttgtctgcaccctgttgtggctctataagcaggtttcccagttcatggcgtgtgaggagct

SEQ ID NO: 121686 - DNA, 86 bp, Homo sapiens
cagcttcttcccctacgagcacagctacatgtggtggctcagatgaacgggaccgggttcagaagaaaacgttcaccaagtgggtc

SEQ ID NO: 121687 - DNA, 75 bp, Homo sapiens
atctgcctgggcaagttcaccttccctgggatgtccctggacaagagatacaactcgtcaacgaatcaaattcag

SEQ ID NO: 121688 - DNA, 90 bp, Homo sapiens
tattttttctcatggatgttcttcttcgagtatttgtagaaggctgctgctggacacccactcgctgaagatggtcctgctcgatctccc

SEQ ID NO: 121689 - DNA, 97 bp, Homo sapiens
tttgcctgaatacatgatttaaacaagagatttccacagaaggtgcatgtttgcctacaagctgggtctgaatgacttgccccagtcagtcgccttt

SEQ ID NO: 121690 - DNA, 80 bp, Homo sapiens
ggacaacttgcgagccatggggctggcggatgcgtcgggtgaaggcctcccccgtcgccgcgcggcttcccggagccgac

SEQ ID NO: 121691 - DNA, 100 bp, Homo sapiens
tggacaacatgtcccaacattacatcccattgatcatggccttgccaggttggtgacagtatattgtgagcatggtcataaagctgccaaaatcaacccc

SEQ ID NO: 121692 - DNA, 100 bp, Homo sapiens
cgcctgtgtggcaagagtagaaggagcatcgatgcaggtgaatgaaaactttgccattgatttgatagcagagcagcccgtgagcgaggtggagactcgg

SEQ ID NO: 121693 - DNA, 48 bp, Homo sapiens
cgagaaccgtcagtttgagccagatggcaggccagaaagcagacccag

SEQ ID NO: 121694 - DNA, 83 bp, Homo sapiens
cccggcccggcagcgacatggaagacaatgcaggaatcacatgaacctgtccatccacagataaagtggtaaagaaactgccg

SEQ ID NO: 121695 - DNA, 97 bp, Homo sapiens
acaaggcgttcaagcgaaaacatgaccgctgagcccatgaggccaaggcaggtgaagcaccaactgagaaccctgctccacccacccagcagagcag

SEQ ID NO: 121696 - DNA, 75 bp, Homo sapiens
tagcaccagttggtgtaggagttgagacctacttcacagtagcgtgtgctcgcccactgatatcggtgtactccg

SEQ ID NO: 121697 - DNA, 90 bp, Homo sapiens
caaggatgcaccaagctcgaaagcgctatcgagatcgcctgcagtacttccgggaccatgccatcatctgtgcgatctctgcggtggacg

SEQ ID NO: 121698 - DNA, 100 bp, Homo sapiens
gggggacaagtcggcgccccagagcggacgagaatgtcgtactctcaggaggctccaccatgttcagggatttcggacgccgactgcagagggatttgaa

SEQ ID NO: 121699 - DNA, 101 bp, Homo sapiens
ctttcgcaacatcaagggagttttccggggccctctcagcaagaacgggaacaaaactctgatgctgaaattttcttctaaggagaaatatcccttattta

SEQ ID NO: 121700 - DNA, 75 bp, Homo sapiens
cgaggccctgctgcacgacctcagctcccagaggatcaccagcgtgggtccccgttctccgtgtcctgctgtccg

SEQ ID NO: 121701 - DNA, 90 bp, Homo sapiens
actttttctactccagtggcgagaaggttggatacactccagattggatatttctgctgagaaatgtaatgcgaatcagtccagatcagg

SEQ ID NO: 121702 - DNA, 87 bp, Homo sapiens
aacacctcaggacacggcctacaacaccaagagaattccttttgatgtagaaactcagagttgacaggaccttaaaagtcaccccac

SEQ ID NO: 121703 - DNA, 100 bp, Homo sapiens
cgagtcaacaaccgcttcgagctggccaggtcagagcagcccaccatgggatggggagggggtggaggctgcaccccgcgcccacccatccaccagcagc

SEQ ID NO: 121704 - DNA, 100 bp, Homo sapiens
ctagtggggcgtacgggcctcttttgaaagcctgagttacgatgtattgagcgcgtcgtatgcggccagcactaaggctggagtgcaatgacgcaatctc

SEQ ID NO: 121705 - DNA, 83 bp, Homo sapiens
cgccgaggcaccgaggcactcagaggagatgaaggtcaccgtgtccaaagggggcgaccgggacagtgacgacgacagcgtcc

SEQ ID NO: 121706 - DNA, 75 bp, Homo sapiens
ggacaatggtcaccgtctcttcaggccaggtcagagcagcccaccatgggatggggagggggtggaggctgcacc

SEQ ID NO: 121707 - DNA, 75 bp, Homo sapiens
gaagacacacccccaatagtgtcacaatttcccgaacatccatgatagcagtcttctgtaaatcgaacttttcaa

SEQ ID NO: 121708 - DNA, 100 bp, Homo sapiens
cactactaggcaaataaaattttggaccattaacttaaagacgagaatacatggttcaaaccttgtactactcagctgatcacaagctgcttgatgggaa

SEQ ID NO: 121709 - DNA, 87 bp, Homo sapiens
aatgactttactgaagaggaggaagcccagaccaagctccacgaagatctctgtgagaagaggacggctgccacccttgccacccac

SEQ ID NO: 121710 - DNA, 75 bp, Homo sapiens
gtggcaaggggctctacggatcctacagctcccaggagccccggctcacacagtcgacaaaagaaaacgtttttc

SEQ ID NO: 121711 - DNA, 82 bp, Homo sapiens
gaagagaaagcacaaagcatggagaccctccctccaggaggagaaagtgcaggccatgccacttcctctcaggagcctagtg

SEQ ID NO: 121712 - DNA, 96 bp, Homo sapiens
tttaggcatatgtatgtgtttggagacttcaaagatgtattttttccaagagataacttcaccaagatgtccagtgataggcaaaggtccgatgat

SEQ ID NO: 121713 - DNA, 75 bp, Homo sapiens
atcatgacattgtagtacagtatccaagtggcaataggttgtatcagagtaagatggacggtagctttgattgtg

SEQ ID NO: 121714 - DNA, 50 bp, Homo sapiens
ctcaggaatcatgggctatcaaaggtcaaaatgcagatcttcgtgaaaac

SEQ ID NO: 121715 - DNA, 100 bp, Homo sapiens
gggagggagagcggcctcctcctccctggtggggcctgtctgggtgaagcccctctgttcccggttatgaagacagtatggagtttccagaccatagtag

SEQ ID NO: 121716 - DNA, 75 bp, Homo sapiens
caagattgccacttgatgccgccaaacgtgtgatgaatgcagactctgctaccattttggctgtttggatcctcc

SEQ ID NO: 121717 - DNA, 75 bp, Homo sapiens
ggagataccatgtcctgtttctcggaacagcaacaattgtgttaaatgaactcaactggacaagtgccttagatg

SEQ ID NO: 121718 - DNA, 100 bp, Homo sapiens
ctgaggagtcatggaagagtttttaaaccagcatccgcacttccactaatagccaagtagacaagctgaccctgtcagggagtgacagcgtcatccttgg

SEQ ID NO: 121719 - DNA, 96 bp, Homo sapiens
ccgctacgagctggctttaatcctgaaagccatgcagcgggatcccatgacagattctgttgtcacgtctccttacagagtttgagcggtgctgaa

SEQ ID NO: 121720 - DNA, 99 bp, Homo sapiens
ggcccagcgtctccgatgacactggggccggtgagcccaacttcgatggcctggagagtaatccatacagaagccggaagcagcgccaggagtgggagg

SEQ ID NO: 121721 - DNA, 87 bp, Homo sapiens
tggagagcctgcaggacggcgcggcagagtccccgtacgcctacagtaacggacactcatgaggaccatgatacttccactgagaat

SEQ ID NO: 121722 - DNA, 58 bp, Homo sapiens
gctacttcatattttggaaagcagtttttaagacaaaaaaacgtttcttcatttcaac

SEQ ID NO: 121723 - DNA, 101 bp, Homo sapiens
gcgaggacggcggcggaccggggcagccccgcgccctggccagtcctgaagattttcctcagataatctttcatctctttgttcctgagactatatattag

SEQ ID NO: 121724 - DNA, 100 bp, Homo sapiens
gggaataaccctgcagaaaatggagatgccaaaacagaccaggccgcattgacaggaagattgagttccccctgcctgatgaaaagacgaagaagcgcat

SEQ ID NO: 121725 - DNA, 100 bp, Homo sapiens
ctgaacatgcacccccagcagccaccagcaggatgtgggctctcttgatgagaagatgaagagcttggatgtgaatcaggactcggagctcaagttcaat

SEQ ID NO: 121726 - DNA, 113 bp, Homo sapiens
ggagacatcagagaaagcagaaaaacaccaggctactgcaggagtagggctgattggagccattgtacagtgtcgggaacataccaggacactgagaatagtgtcatgtcata

SEQ ID NO: 121727 - DNA, 100 bp, Homo sapiens
caggagcttcgggacagcctgtccctggtgctgaaccgcctgcgtccagttgccagcgggggtgggaaagcccaaccgggctccccttggtggcggagca

SEQ ID NO: 121728 - DNA, 90 bp, Homo sapiens
ggaaagcgccgagatgacgggctttctgctgccgcccgcaagcagagtctgcgctcctcagaccaccggcaggtgaacagcctgatgcag

SEQ ID NO: 121729 - DNA, 85 bp, Homo sapiens
agaatttccctttcaacaacccctggctcaaaccacacactccattaataaggtttcctgacagaagagacaatcctaaacccaa

SEQ ID NO: 121730 - DNA, 82 bp, Homo sapiens
gcaggacagggtgcgcgctggtggagcaaccatgtccaagggacctgcagttggtattgatcttggcaccacctactcttgt

SEQ ID NO: 121731 - DNA, 83 bp, Homo sapiens
ccttaagtgaaagaagtggaaacacccctaactctcccagaacaaaatccagtctcatagcagaggagaatataatgtttaca

SEQ ID NO: 121732 - DNA, 83 bp, Homo sapiens
cgtcaagctccatccctttgggcagacagcccatggcacagatgtgaagttcatttccaatccgccctccatggtggcagcgg

SEQ ID NO: 121733 - DNA, 82 bp, Homo sapiens
ggaggatgcggacgcggaggccgcctggggtagcggcggcgggagtcctggcgctctgcagatcgcaccccctccctccctg

SEQ ID NO: 121734 - DNA, 75 bp, Homo sapiens
cggagtgggccgcttcaagaccaagtgagaagccctaccactgcaactgggacggctgcggctggaagtttgcgc

SEQ ID NO: 121735 - DNA, 73 bp, Homo sapiens
tgctctgcgatctgccgatccagactctgttccagcctcagacaggtgcctatcagaccctggccaaagagtg

SEQ ID NO: 121736 - DNA, 74 bp, Homo sapiens
acaacttccagctggagagcgtcaacaagctgtaccaggacgaaaagatcatcaatgctgtggtactgttgatt

SEQ ID NO: 121737 - DNA, 83 bp, Homo sapiens
tcctcctagaaattccccccgaagaagactcccccacatctggtttccccctttctagggtgaggatggttctacacagccac

SEQ ID NO: 121738 - DNA, 75 bp, Homo sapiens
cctcctccgtgcggagaagaagctgcggccgcacctggccaagccatggccatgcagaaaatctttgcccgggaa

SEQ ID NO: 121739 - DNA, 98 bp, Homo sapiens
gaagtgacagcagatttgctggatacgtgacatcaattgctgcaactgaacttgaagatattaatgctgaactgttgtttcggccaactgctctttca

SEQ ID NO: 121740 - DNA, 132 bp, Homo sapiens
ccaaaatggcgaccggcaactactttggattcacccacagcggggcggcggcggcggcggctgcggcccaatataggccatcaagccctgtcgtcctatgaccaacaatgctggcagacttttccactaccg

SEQ ID NO: 121741 - DNA, 100 bp, Homo sapiens
ggtaccaggctgtcctggccaacctgctgctggaggaggataacaagttttgtgcagattgccagtctaaaggaaatctggcattttttaaagtttgcgc

SEQ ID NO: 121742 - DNA, 75 bp, Homo sapiens
ccgcttcctggagttcacgactctgagtgctgaggacgggaggggcaagctgcggccaaccaaggccaagagcga

SEQ ID NO: 121743 - DNA, 83 bp, Homo sapiens
atcacctttcctgctgtcagtgcacttgtttcacgaactgctgatgctgatcaacagggcagaagctcctcctggggtagaga

SEQ ID NO: 121744 - DNA, 83 bp, Homo sapiens
ctgtagtcctgttcttctggctctaagatctgaatgttgtgaccactaatttgctgggctcaaaatgcagagaactcaaagat

SEQ ID NO: 121745 - DNA, 96 bp, Homo sapiens
gcggcgcgaccaggccgggcacctccgagcgcaaggacagcgcgaggtccgcgcagcccagcgcagccatcgggctgacgcacgaggcacacagga

SEQ ID NO: 121746 - DNA, 83 bp, Homo sapiens
gcgccccttccgcaagctcaacgcgtttggcaacgctttcctcaacagatggagtctgcgcgcaaggcttgggaaaactcccc

SEQ ID NO: 121747 - DNA, 100 bp, Homo sapiens
aacacagctcgacagtacgcctacttctataaagtcatccagctgcccatgatggggggagctttcatggactcgcccaacgaggacttcagcaccgagt

SEQ ID NO: 121748 - DNA, 100 bp, Homo sapiens
tccgggagcctagatcctgtgctttactctgaagactctgaggatgaggatgatgaccttcagtatgccgatcatgattatgaagtaccacaacaaaaag

SEQ ID NO: 121749 - DNA, 101 bp, Homo sapiens
ttgggtttagcaaaagttcatctccttctgcatccttaactgagaatgagaaccgcatgcacgagtctctcatgctcttcgactccatctgtaacaacaag

SEQ ID NO: 121750 - DNA, 100 bp, Homo sapiens
cttgccgcacaaaaagctagagaggaaaaatcgcagccctcagagagtcgctggctgaagtatctagaaaaggactcccaagaactggagctggaaggaa

SEQ ID NO: 121751 - DNA, 75 bp, Homo sapiens
cccacccgcatgctctttgtcactccccggcggcagcacgaaagtaccatatccagacaaagacggtagctcagt

SEQ ID NO: 121752 - DNA, 100 bp, Homo sapiens
ggaccgcggggcgctcatctggctctgctacgacgcgctggtgcacttcgcgctgggtatcactgggatacatcagattggatgccaagcgttcctctgc

SEQ ID NO: 121753 - DNA, 98 bp, Homo sapiens
caagatgtattgcaggggaatctgaatgtatcctgtcaggtataatgtcagtgaatggcaagaaagttcttcatatggatcgaaacccttactacgga

SEQ ID NO: 121754 - DNA, 75 bp, Homo sapiens
cagcaggagatacggaccctggaggtcagttgctccgattaaaaatgtttcgagaagatcatgggtcgtggatga

SEQ ID NO: 121755 - DNA, 100 bp, Homo sapiens
cggagtatctggcctccatcttcggcaccgagaaagacaattttggaaagacatcgttgatgataatgaagttcgtgacctcatttctgacagaaacaag

SEQ ID NO: 121756 - DNA, 82 bp, Homo sapiens
gaagttcagcccagaggagaaactcgctcgccttcagaagacaggtggatcagtacaagggaaagcgggatttggagtcact

SEQ ID NO: 121757 - DNA, 75 bp, Homo sapiens
cggagcagcaaacgcagagacaaaagaaacgggccccgactggtgagaagccctaccactgcaactgggacggct

SEQ ID NO: 121758 - DNA, 87 bp, Homo sapiens
gaagatggtgaaggagctggagaagcacggagttcgggggatggcacagaatgggacctgaattggtagttaagaagttacgatatt

SEQ ID NO: 121759 - DNA, 97 bp, Homo sapiens
agagagtgcaggtcagaaaataaaggagctgctgtctggaattggcaacatctctgagagggccaattcctgtccccccagcagcatggcatcgtgt

SEQ ID NO: 121760 - DNA, 98 bp, Homo sapiens
agctagagctgggcgctccggaaaggctattacttttgtcacacagttgcagaggcagtgttaacatcccaactgaaagcacatcaagagaaaccaaa

SEQ ID NO: 121761 - DNA, 100 bp, Homo sapiens
tgcttcccaatcccactgatgaggatcagcccatgaagcctccccagctttctgaggatgatatctggctaaaaagcgagggagacaactatagtgccac

SEQ ID NO: 121762 - DNA, 76 bp, Homo sapiens
agtgggctgctggaggagctggccaggaacggtgcctttgaacccttgtgcactttttagttagatctttattaac

SEQ ID NO: 121763 - DNA, 75 bp, Homo sapiens
ccgccggaggaaacgctgtcactgtggaaacggagtttcctttaacagtgtttacactcagatttggagagtcct

SEQ ID NO: 121764 - DNA, 51 bp, Homo sapiens
gggacctgcccgcctgcggctgctccggaaacagatgattatgctgagatt

SEQ ID NO: 121765 - DNA, 100 bp, Homo sapiens
gtctactgcgggctggtccgggctcctcaggttcagacccgaccgttatccagtcggttcgtggagaggagagatcacaaaatttgtccaggatagacat

SEQ ID NO: 121766 - DNA, 82 bp, Homo sapiens
gaagagatgagtttgtttacagctgttgtcctggtatctgcaggacatggatttgattgacatactttggaggcaagatata

SEQ ID NO: 121767 - DNA, 100 bp, Homo sapiens
ctgctgtctgtgaattctttttgaaagctgcctgcggcaaagggatgaaggtggctggagaagaggaccagctgaggaatcttcaagctggagagactca

SEQ ID NO: 121768 - DNA, 90 bp, Homo sapiens
atctgcagccatttatattgcttaggctactggcaagtgtcaattgaggagggagagaggaaagccaaagagctgaatgttatgtttatt

SEQ ID NO: 121769 - DNA, 136 bp, Homo sapiens
gtgggtgcccgcgaaccaacggttagcggtggcaggggctgactgagagcgtctgcttgcctcttagcaaatatccggctgtgatcaatgatatttcattctggttgccctctgagaattacgcagaaaatgattt

SEQ ID NO: 121770 - DNA, 83 bp, Homo sapiens
ccgtctggccgccggccacctggtccagctgcccgcaggggtggagcaggccgggctctcgccatgggtcactgtcgcctctg

SEQ ID NO: 121771 - DNA, 97 bp, Homo sapiens
gaggagcgacgaagagtactacgccaaggaggtttacaaaatagacatgccgcccttcttcccctccgaaaagaaggtgttcgccagcctcccgcag

SEQ ID NO: 121772 - DNA, 80 bp, Homo sapiens
caatttgctggatttaagcactgctgcactttatgagattgaccccaaagttgcatttcctcgtcgagcgcaacccaagg

SEQ ID NO: 121773 - DNA, 101 bp, Homo sapiens
aaatgtttttctgttttgcctgaatacatgatttaaacaagagatttccacagaagcaatggctgccatccggaagaaactggtgattgttggtgatggag

SEQ ID NO: 121774 - DNA, 75 bp, Homo sapiens
ggagcgcgctccatttacctgctggttacctcgtgaggcgcctcaggcagactgccagattcacttacagcccca

SEQ ID NO: 121775 - DNA, 100 bp, Homo sapiens
cggagcgtgccctcgccgctgctctggccctgccccatctcccagtagcttcctgcccagcccctcaccgcagccctcccagagcccagtgacggcgcgg

SEQ ID NO: 121776 - DNA, 97 bp, Homo sapiens
aagaatctcgtgctcaccggtttctcccacatcgacctgaattttcaagaaatgattcctgcctttggaattttcagactgctgatcatcatcctga

SEQ ID NO: 121777 - DNA, 100 bp, Homo sapiens
tatgcttttgatcacttccccaagaagctcactcccaaaaaagatttctcgtcactgtatatatgccttatttcctgggtccatgggaagcatgagtctg

SEQ ID NO: 121778 - DNA, 100 bp, Homo sapiens
ctgaatactccttccttcctccccacccattcctttaaatccggagggggaaaaaatcccaaggtctgcaaaggtttattttcttgaaaaggctccaggc

SEQ ID NO: 121779 - DNA, 100 bp, Homo sapiens
ttcaaatgtgtgcagaaggaggtcctgccgtccatgcggaagatcgtcgccacctggatgctggagaattcagaaggagctggcggacatcactttagac

SEQ ID NO: 121780 - DNA, 100 bp, Homo sapiens
cctgccccgccctggggacgaagagctgcagctcctcctgtgcggcaaaagatgatggaagcattgctgttgcccttggttatactgcacatctggtctc

SEQ ID NO: 121781 - DNA, 98 bp, Homo sapiens
gaagaggaacggggacgggagcctgctctacagcgtggtcaacacggccgagccggacgctgatggcccagctgatccacgacaggaacaccgcgtcc

SEQ ID NO: 121782 - DNA, 100 bp, Homo sapiens
gcaattgatcccaagttgtcgacgaccgacagggtggtgaaagcttgcagaccaggattctataaagcttttgctgggaacacaaaatgttctaaatgtc

SEQ ID NO: 121783 - DNA, 100 bp, Homo sapiens
gtggaacgtcttcttgtcacatgggggtaataggccactggtgctgaattttggaagttgtacctgaccttcatttatgttcaaatttgaccagttcaag

SEQ ID NO: 121784 - DNA, 50 bp, Homo sapiens
tctacaagatgatgcagggaggaggtctacaaggaagtcttcacgaggag

SEQ ID NO: 121785 - DNA, 100 bp, Homo sapiens
aagatgaaggtggtaatcctgacgaaattgaaattacctccgagggaaacaagaaaacatcaaagaggtctagcaaaggactatttaagaaacaactgag

SEQ ID NO: 121786 - DNA, 75 bp, Homo sapiens
gttcccgcggcagcacggaggcctggaggctggccacagctgagaccgtgtatgacatcctgtccccggcagccc

SEQ ID NO: 121787 - DNA, 90 bp, Homo sapiens
gggcaaaactcctttgagaaaggctaatcttcagcaagctattgtcacacctttgaaaccagctgttaaacgtttaatgaaagaagcggc

SEQ ID NO: 121788 - DNA, 98 bp, Homo sapiens
gcgagttcgcggagcgcggcgccagaaaggttccagcaacagatagaaatgctttaagttcactctggggaaagctggcctctgaaatcttaatgcag

SEQ ID NO: 121789 - DNA, 98 bp, Homo sapiens
actcttccagagcaagctaaactgctaaaatacaggtatcaggatgaagatacacctcctcaagagcatatttccccacaaatcacaaatgaagtgat

SEQ ID NO: 121790 - DNA, 98 bp, Homo sapiens
gcaagaacagctaaaatgaaagccatcattcatcttactcttcttgctctcctttctgtaaacacagacctctgtgagtgaaagccttcagagggaag

SEQ ID NO: 121791 - DNA, 99 bp, Homo sapiens
attcatgttacatcccctatgttggaaacaaggagggcagattcattccgttatcctaaaacagatgaagttgcggagaataatgaacatgatgtcact

SEQ ID NO: 121792 - DNA, 75 bp, Homo sapiens
tgctgctgctgctgcttcgcggagggtgtccgcaatgttgccagtgtctgtctgcagattggctacccaactgtt

SEQ ID NO: 121793 - DNA, 75 bp, Homo sapiens
cattctcatatttcaccaataaagtattctgaagaagccaataatctcattgaagaatgtgaacaagctgaacga

SEQ ID NO: 121794 - DNA, 100 bp, Homo sapiens
gcctggacgaggaaggcgatgactcagatggggtcatccaccggctgcccatgcccaacctgaaggacgagctgcatcactcaggatggaacacctgcag

SEQ ID NO: 121795 - DNA, 134 bp, Homo sapiens
ttcatggaaagtaggagacaagtgtatggcagtctggagtgaagatggacagaactgctgctggagtttgaatcgaaaatgcggaagagggagcacgaattccgtctgcaggctgacaacatgagcaacacagc

SEQ ID NO: 121796 - DNA, 75 bp, Homo sapiens
agtccttggggacggagcagcgcgtcgtggggcgagcggcagagtgaagacatttccacctggacacctgaccat

SEQ ID NO: 121797 - DNA, 90 bp, Homo sapiens
caacaccgtgctgtccgagaacgccagagggagccccagactctggtaaatgctctgcttcctcctgcctggatacttctaatgaccctg

SEQ ID NO: 121798 - DNA, 100 bp, Homo sapiens
ctaggagcctggggttcggcgctatggaggagctcgatggcgagccaacagtcactctatcatggtgaacttacttcagattgtgcgggaccactgggtt

SEQ ID NO: 121799 - DNA, 74 bp, Homo sapiens
ccgctgctcaagttccagatttggtataagcagtttagccaaattttgaagaacattggagaaaatgaaggtgg

SEQ ID NO: 121800 - DNA, 87 bp, Homo sapiens
gaaccatcttcctgcacacagccaaagtctgcaaaggcagctggctaagagtcttgggcaggctggtgaaattgagcctgaaacaga

SEQ ID NO: 121801 - DNA, 100 bp, Homo sapiens
cgctccgctcgtcccgctcgtcatggcctacccgggatacggaggagggaattcaacagtcatgagcagagctgaaaattttaaacaagttgagtacctc

SEQ ID NO: 121802 - DNA, 123 bp, Homo sapiens
gtttctgctgttgtagcacagatttatgtaatgtcaactttactgagaattttccacctcctgacacaacaccactcagatgagaaatactacttacggtcacttggagaagaccctagaaag

SEQ ID NO: 121803 - DNA, 118 bp, Homo sapiens
aacagaaacatagagaggaactggagcaattgaagctgactactaaggagaataaggtggtagaggacattgaatacctgaagttcgataaagggccgtggctcaagcaggacaatcg

SEQ ID NO: 121804 - DNA, 100 bp, Homo sapiens
agagataaaccaccgcttacagatattggatggtgtatcaagagctggagctgctttttttaacgaagttcgaaatgcagtatttggcaaggtagcccag

SEQ ID NO: 121805 - DNA, 101 bp, Homo sapiens
caagatgatgataatactcagaatcaggagaaggaaatgctgcttagattaaatgcgttgttgccctgccaaggtaaccctgctggggtcagttatcttca

SEQ ID NO: 121806 - DNA, 88 bp, Homo sapiens
caccgacaagatcaccacggacgagatgatcaaacgcctgaaggacattcggaaattctttggagtaataccaagtggaaagaaactt

SEQ ID NO: 121807 - DNA, 51 bp, Homo sapiens
tgaatttccatgtcaacatagtccaggaagaaaggcgaaggttgaaaaatg

SEQ ID NO: 121808 - DNA, 74 bp, Homo sapiens
gccaggactgggatgcagcgtcctctagtttgcctatctggggcgcctggctcacgaggttggctggaagtacc

SEQ ID NO: 121809 - DNA, 50 bp, Homo sapiens
gtccgtgtcaccgccggaacctggcgcagcaaccatgtccaagggacctg

SEQ ID NO: 121810 - DNA, 83 bp, Homo sapiens
cacactgggaaacatcattaaatcgcagaagtcaattcatctggaaagactatctctgagtcagacttaaaccactctttttc

SEQ ID NO: 121811 - DNA, 90 bp, Homo sapiens
cttgccctcatcctggttctggaatcctcagttcaagatgcatcaatctcaaataattctacaagtaaaaggaaatctgagtctgccact

SEQ ID NO: 121812 - DNA, 100 bp, Homo sapiens
cagaaccagatccgggagcacgtcatcgccatcgaaggtgcccctttcggctcctccattgcccccacggccagatctgccccccaggaagcccagaaat

SEQ ID NO: 121813 - DNA, 100 bp, Homo sapiens
atctacaaccttctcattcagacacacggcttaagcaggtaaagcagtcactgtgaagaaaataacattttaagaaacttttctgtcacaattgatagag

SEQ ID NO: 121814 - DNA, 100 bp, Homo sapiens
aagctgctcagagtctcaatgaacttgcttcaaggttactgactttttatgatgtttggtggctatgagactatagaagcatacgaagatgatctttatc

SEQ ID NO: 121815 - DNA, 82 bp, Homo sapiens
ctccgagcgagcgagcggcgcccagcccagcgcctcggccgaacccctccgcagcagagagttaagaaagacgtggacaagg

SEQ ID NO: 121816 - DNA, 88 bp, Homo sapiens
ccccacttccctgcactctcatcgctctcggcctcggcctcggcctccgacacgattgacgagatgcctgaggctgccgtgaaatcaa

SEQ ID NO: 121817 - DNA, 100 bp, Homo sapiens
agcagcaagaaaggcatttgaacgatgcagtgaaggtgttttcttactgacgacatttcctcgtcctgtgactgtggagcccatggaccagttagatgat

SEQ ID NO: 121818 - DNA, 83 bp, Homo sapiens
ccctggagctggtgcacaggttccaggtccggcctctttggcctacccccgttggctccgctgccccaggtcgatgagtcccc

SEQ ID NO: 121819 - DNA, 98 bp, Homo sapiens
gaacctcaggacctgacccaaccactgtctacgtggacatgagagccctgagacacgacagtcagaatctggagatgtgagtagaaacacggaactga

SEQ ID NO: 121820 - DNA, 100 bp, Homo sapiens
cagaaggactgcctcactgagcaaccaagatgagtggaccaagatctcaggatccaagtttaaaaagaaatggtgtaaaagttcctggtgaatatcgaag

SEQ ID NO: 121821 - DNA, 75 bp, Homo sapiens
ttgcgctggaccgtcgccttgctcctcgccgcggcggggactgcagactgttggagcagaactactgagaaaaac

SEQ ID NO: 121822 - DNA, 82 bp, Homo sapiens
tgtcaacgtggtcgagtttcaccccaacgagtacctcctggcctccggcagctctgacagcggaagaccctgaagaccctgc

SEQ ID NO: 121823 - DNA, 90 bp, Homo sapiens
gccagattcacagatttattgtgaacactctgaaagacggaagatttccacaagacggcaccctatgtcgtcactggcagcgtagatcaa

SEQ ID NO: 121824 - DNA, 82 bp, Homo sapiens
tgagagcaaaatctacaagatgatgcagggaggaggtccgcgggagagctgtggggcttggtgagtgtttcgtggcctctcg

SEQ ID NO: 121825 - DNA, 95 bp, Homo sapiens
agaactagctgctgctaatcaggaggtgtgaagatgccttaagaaaaaataagagcttaattgggccggatcaaaaggagtatcaaagggaactg

SEQ ID NO: 121826 - DNA, 99 bp, Homo sapiens
ggtatctttaagagcagcttattccaagctttgctaggactgttctgatggctacatgtgcaaaatacactttcaaattaagaatgggtctgtgatgtc

SEQ ID NO: 121827 - DNA, 100 bp, Homo sapiens
agtctcaggcctttagtgatgatgaacaatgctaaagtagctgtgctaggggcctctggaggcatcgggcagccactttcacttctcctgaagaacagcc

SEQ ID NO: 121828 - DNA, 100 bp, Homo sapiens
tacaaaccaccctctcctgaccctgaagaactgtggtgcaaagacggaggaccactccaactcagaccagaaagccctcggcatgatggggctggtgcgg

SEQ ID NO: 121829 - DNA, 75 bp, Homo sapiens
tctagaagacctcaccttgggggagatcgaggtcatgattgcaggcctctactgcagcggctgggtgaagagagg

SEQ ID NO: 121830 - DNA, 105 bp, Homo sapiens
aattaatgaagctgtacctcaggtgaagttttatgaagagaaatatggctacacacacctttctgcaggagagctgcttcgtgatgaaaggaagaacccagattc

SEQ ID NO: 121831 - DNA, 100 bp, Homo sapiens
ctcatcatcccccccgacgccgtcgcggtggactgcaaggcagacatctggtccctgggcataacagctattgaacttgcaagaggggaaccacctcatt

SEQ ID NO: 121832 - DNA, 83 bp, Homo sapiens
ccgcggcgccatattgcggccctcagcggccgcgaccgagtcatggctgagacctacggccaaggcagaggcttcctcaggag

SEQ ID NO: 121833 - DNA, 99 bp, Homo sapiens
ggcgcagacgcgggcgagctgcggctcggacgccagcggacacgcgggcgagggactttgaacatgtcggggatcgccctcagcagactcgcccaggag

SEQ ID NO: 121834 - DNA, 100 bp, Homo sapiens
tggcgccctacagcctactggtgactcggctgcaggtattagaaaactactcggatgctccaatgacaccaaaacagattctgcaggtcatagaggcaga

SEQ ID NO: 121835 - DNA, 76 bp, Homo sapiens
gtcagccatgaacggatggatgtgatgcctgctagccaaaagggatctaaaatgtccactgaggcacaaagagttg

SEQ ID NO: 121836 - DNA, 87 bp, Homo sapiens
caagaaagacaaagacccagtgaacaaatccgggggcaaggccaaaaagaaggttcagagaagattcttcatgggaaatcaagttct

SEQ ID NO: 121837 - DNA, 75 bp, Homo sapiens
ctccatattctcaggcacagagaaagcttgaattcggagtgatttaccactgcacagaggagcggctgtacacgg

SEQ ID NO: 121838 - DNA, 74 bp, Homo sapiens
ctgcggagcatgtcgaccccggcccggaggaggctcatgcgggatttcaagcgttgatattcactgatggactc

SEQ ID NO: 121839 - DNA, 100 bp, Homo sapiens
tgaaaaccaaggtaccttggatgccccctggaaaatcatctgcccggcctgtgggatgcaagtgggaggcagaagacaaggcagatgtgttgaataaaga

SEQ ID NO: 121840 - DNA, 100 bp, Homo sapiens
tatctggctcagaactatgatctccagcggcgccatgagcaaatgaaaaagaatttggaagcacagcacaaagaattggaggaaaaacgtcgtcagttcg

SEQ ID NO: 121841 - DNA, 75 bp, Homo sapiens
cataggagtggagaacatgcacaagcacgtgccttaacacctcaaactgcagaaacagatgccattcggtttttg

SEQ ID NO: 121842 - DNA, 130 bp, Homo sapiens
gagcttcagtagcaaataaggacatcatctgctataacctacaagcagttggacagattatggtgacaagctgaacatggagctgagtgagaaatacaagctggacaaagagagctacccagtcttctac

SEQ ID NO: 121843 - DNA, 75 bp, Homo sapiens
cactcacacgacgtgcgctatgggtcaggaaacagtgacattcaaggatgtggccatggactttacaccagagga

SEQ ID NO: 121844 - DNA, 97 bp, Homo sapiens
tacaacaggaaaatcatattatagatggagtaaaggatgaaacaagtgaagatgctaactgtcttgctttgagtggacatgataaaacagaagcaaa

SEQ ID NO: 121845 - DNA, 100 bp, Homo sapiens
aggcaggttcggctggaaggaaccgctctcgcttcgtcctacacttgcgcaaatgtctccgcttcaaaagcagtggactgtcttttggattcaaagtggg

SEQ ID NO: 121846 - DNA, 75 bp, Homo sapiens
tcttgatctccgccaccgtcttcaggccaggtgtcgtgaaaactacccctaaaagccaaaatgggaaaggaaaag

SEQ ID NO: 121847 - DNA, 96 bp, Homo sapiens
gagcggccggagtcagcgatggtgcccggcgaggagaaccaactggtcccgaaagagagtgaaccagaggaaatgcctccagaagcaaagatgagg

SEQ ID NO: 121848 - DNA, 90 bp, Homo sapiens
gagagaggagaacgaacatcttctggacctttgtccaggatggtgccatgacaatggtgtgaactacaagattggagagaagtgggaccg

SEQ ID NO: 121849 - DNA, 51 bp, Homo sapiens
gcccgaagccttcctttatcgctttcagctgaagtgagtagtgaatatagt

SEQ ID NO: 121850 - DNA, 80 bp, Homo sapiens
tttctggggcaaaaacattcaagaatgagagcgagaacacctgtcaagctgttccccagggtgaagcctcaaaggagtaa

SEQ ID NO: 121851 - DNA, 100 bp, Homo sapiens
tcgacggaggccggggcctcaccaggaaagtggtttccacttcaagcgtgacccttttgcctgtgggatgagctccagcatggggtgaggtacagaagag

SEQ ID NO: 121852 - DNA, 80 bp, Homo sapiens
gaaggatgcagagagaaaggagaggttattcacagtcctatggtggttatgagaatcaaaagcagagctcatatagccag

SEQ ID NO: 121853 - DNA, 51 bp, Homo sapiens
gagctggatccggcttccggaaggcgaacctcttcccggccgctctggtgc

SEQ ID NO: 121854 - DNA, 100 bp, Homo sapiens
ggatcctacgtgcatgaagatggacgaggtcctgtacagcatcgccgagaaggtctcctctgagcctccggcctccataagacccaaaacagatgacacc

SEQ ID NO: 121855 - DNA, 74 bp, Homo sapiens
caacacagatgtccaagctgccaagtcaactgcaacttggcctcttgatccaccaaaggatgagaaacaagggt

SEQ ID NO: 121856 - DNA, 75 bp, Homo sapiens
aacccttgatcctcctcctaattgcaggcccacagcagcagaacttttaaaatgcaaattcttccagaaagccaa

SEQ ID NO: 121857 - DNA, 101 bp, Homo sapiens
ctacgaagacgatgtggaggagcttgggctgaacttcactgtggtgaacaatgacctgggagaggcgcagctaagtttggtgcgaacgccattctgggggt

SEQ ID NO: 121858 - DNA, 100 bp, Homo sapiens
aacatcaccttctccctcaatgctgacgatgagaacccggtggctgctggcagcggaatcccccagatcaagtgcttcctcaacggggtgaagatccccc

SEQ ID NO: 121859 - DNA, 75 bp, Homo sapiens
ctgcctttttccgctgtaaataattaagaagaccaagtagcatccaagagttctaaagttcctgttgcttcagac

SEQ ID NO: 121860 - DNA, 78 bp, Homo sapiens
ccaggacacccctgaagccgagaaatggcaattaagttggaatatgcaaggttggttaagttggcccaagaagacacc

SEQ ID NO: 121861 - DNA, 102 bp, Homo sapiens
agaagctggagaataattttgatgacatcaagcacacgactcttggtgagcgaggagctctccgagaagcaatgagatggactagaggcttttaccagattt

SEQ ID NO: 121862 - DNA, 75 bp, Homo sapiens
ggaatatatcctgactgattgtagctacagcaagctgggtagcaggcagatccaaaggatatcatgaagtttcca

SEQ ID NO: 121863 - DNA, 103 bp, Homo sapiens
taattgatgtgccatccaccggagccccttcaaaaaagttccatgccattgcagtgtcaactaggcctcagttacttttcagtttgcccaaattgagcccatc

SEQ ID NO: 121864 - DNA, 96 bp, Homo sapiens
cggcgatgcactaggcctcgctcagggcggctgccccgggacccgcagcatgacgtatcccagactttactcaaggcaacactggacagtgttgta

SEQ ID NO: 121865 - DNA, 75 bp, Homo sapiens
ccctgagagctttattaccagacatgatctttcagaaagtttcctacactactgaggtttaggggcactgtgaag

SEQ ID NO: 121866 - DNA, 75 bp, Homo sapiens
gccagcagggagcagctcttgtacctgtatgccaggtacaaacaggttgatgccggcccaggatggatcagacct

SEQ ID NO: 121867 - DNA, 101 bp, Homo sapiens
atttcagtggaataaatggcgtccaaagtcacagatgctatagtctggtatcaaaagaaggtttttgattggtcaaggagcacatgtaggggctgtcaaca

SEQ ID NO: 121868 - DNA, 101 bp, Homo sapiens
actgggtgattcacgtgtgcccaggccctgaggtgggccggacctgggagtggcagggggggccctcagcctcttggccttgaacgggctgttcatcttga

SEQ ID NO: 121869 - DNA, 75 bp, Homo sapiens
cttcgaaccatggaccaggccctcaagtccctgatggcctcagaggaggaggtgcgtgccctggaggaggccaac

SEQ ID NO: 121870 - DNA, 90 bp, Homo sapiens
gtggcatcctgaagttaatggttctatgaaacagtgtatcaaagtgtggactgagtcttcgagtgcttcgactgaccatgatcccctggg

SEQ ID NO: 121871 - DNA, 75 bp, Homo sapiens
cctcgggtctcgggggccgctctgggatcccggccaccagcaattgtccgtttcccgcatgaaaattacttaaac

SEQ ID NO: 121872 - DNA, 50 bp, Homo sapiens
gcagctgctgagttctcggtgaagacctaatctgggagcctgcaagtgac

SEQ ID NO: 121873 - DNA, 100 bp, Homo sapiens
tccatgagaaaaagcttggagataaagttgctttttactgggaagctgtgattaagcactcattggtgcataaagtattcttggacttttttacctatgc

SEQ ID NO: 121874 - DNA, 75 bp, Homo sapiens
gcacatcactcccgagtggaggaagcaatacatccagtatgagttcttcgtgccatgaaggaggacagtgaaaaa

SEQ ID NO: 121875 - DNA, 111 bp, Homo sapiens
ccaggaggaggtggagggcgagctggctgagctggccatgggctttctgggcagcaggtgtatggaatgattcggttctcaggcaccacaggccagatgtctgacctgaac

SEQ ID NO: 121876 - DNA, 75 bp, Homo sapiens
gtcctcgacctcagttgccacgtgcacatgctggtgccttccagctggagcagttcagcatggagagcccatcag

SEQ ID NO: 121877 - DNA, 100 bp, Homo sapiens
tagggaaagtgaggcagctgcaaggagggcggcgggactgcactcgagtgtccagacctgctcgatgcatccgcacttccactaatagccaagtagacaa

SEQ ID NO: 121878 - DNA, 100 bp, Homo sapiens
tgcccccccttccccacgcaaccccagatccatttacactttacaggattcaactaatgaaactactgcccattccgatgctggcagcgagcttgaagaa

SEQ ID NO: 121879 - DNA, 90 bp, Homo sapiens
aaaccgaaagccagtggtcatgaagataaaaccggatatcaacatggcaggagagcccaaaccatacagaccaaaacctggaaacaagag

SEQ ID NO: 121880 - DNA, 75 bp, Homo sapiens
tcatgagaccagtgcccatgaaggtcagactgaggaaacatgttcaaccaaatggcaaagtgggtgaaacaggac

SEQ ID NO: 121881 - DNA, 100 bp, Homo sapiens
ttccgtaacatccaggttgatgaagctaatttattgacttggcaagggcttattgttcctgctgaccggttccctgatgtgttacctgcttctgctactg

SEQ ID NO: 121882 - DNA, 97 bp, Homo sapiens
gtaataagttggtggacgctggggaagagtgtgactgtggtactccaaagaattcaagccaggaagaagcagcaatctgtcttctggattaaaactg

SEQ ID NO: 121883 - DNA, 87 bp, Homo sapiens
ttggaccaagagaacaatgggaaccagtctttcaaaataggatggggaggcacgtgagagggatgaaatccggcatgacaggcgaaa

SEQ ID NO: 121884 - DNA, 75 bp, Homo sapiens
atttcattagcctcagaacgatatgataaagacgatgaagccccctctgatggatcgaatcatcaatttagttgt

SEQ ID NO: 121885 - DNA, 50 bp, Homo sapiens
atgtcatcaagaagaatgacgatgtcattgaaattatgagactatcattc

SEQ ID NO: 121886 - DNA, 75 bp, Homo sapiens
ctggacaaaggagagaatgggactctcaggatgggaaggccattgtgactatgtggtgattacagttgtcttact

SEQ ID NO: 121887 - DNA, 75 bp, Homo sapiens
cagcctcccaagcagttgggaccacagatgccacttcaaatgaacaacaagagcttttctgtcagaagttgcagc

SEQ ID NO: 121888 - DNA, 75 bp, Homo sapiens
agttattaaccagccatattacaactatgagaatcctgaggttggcttgaagcctgtgtggtatagtcccaaagt

SEQ ID NO: 121889 - DNA, 90 bp, Homo sapiens
cgacaggcgcctccggcccatttacggtttctacgataaagacagttcagggtggagttctagcaaagataaggatgcgtatagcagttt

SEQ ID NO: 121890 - DNA, 75 bp, Homo sapiens
ccaaggtgcaggagaagcgcccgccgccctggaagaagaggactgcaggcctgagtgttccttccagcatgtcgg

SEQ ID NO: 121891 - DNA, 87 bp, Homo sapiens
gggaacgaggggtgaagcggcccaggtgagggtgctggagaatctggtaaaagcaccattgtgaagcagatgaggatcctgcatgtt

SEQ ID NO: 121892 - DNA, 74 bp, Homo sapiens
tgggagccgcaccacctaacgctggccgacaacagcctggcgtccgccacggtccagccgccgcagggaatgac

SEQ ID NO: 121893 - DNA, 82 bp, Homo sapiens
agagctctcctccttcttcctcaactatctcgctgacacgcaggaccaagaatcgccttcagccctgtctggtgcatccttg

SEQ ID NO: 121894 - DNA, 82 bp, Homo sapiens
gaacaaagtcatcaagctagtggacatcacggacatccagaagcagcccctgtcaaagggaacaggaagcagtccacggagg

SEQ ID NO: 121895 - DNA, 75 bp, Homo sapiens
gcgaatggagcaggggcgcgcagagctaaagttgcagacaagatccagctcatcaataatatgctggacaaagtc

SEQ ID NO: 121896 - DNA, 90 bp, Homo sapiens
gtgatcctttgctattagcaataataccaaaatatcttcgtgcttccatgactaacttggtcaagaggtacttggaaggctccatcgccc

SEQ ID NO: 121897 - DNA, 100 bp, Homo sapiens
ctcctccgcctctgatgcagaatttgatgctgtggttggatatttagaggacattatcatggagagaactcgatgccaccgcaacggtattggcgaaccg

SEQ ID NO: 121898 - DNA, 100 bp, Homo sapiens
agaagttcaagctctacctgaccatcatcctgctcctgggtgccgtggcatgtcgatttgtccttcactacaggtgtccaggatgtggaggtgcacttgg

SEQ ID NO: 121899 - DNA, 100 bp, Homo sapiens
cggcgagtcgggctctggaggaaaagaaagggaccagttactctccacaagaaaattcacacaaccacagtgctcttcatagttcaaattcacattcttc

SEQ ID NO: 121900 - DNA, 100 bp, Homo sapiens
gaggaactaaggcggaggaactgagacgtttcgaattccaggggaacgcccttttgcttgtgactggcagggctgcgacaagaagttcgcccgctccgac

SEQ ID NO: 121901 - DNA, 75 bp, Homo sapiens
ctttgacctcttcgatgtgcgagactttggaaaggtccggcccggagcggccatgtcccacggccccaagcagcc

SEQ ID NO: 121902 - DNA, 100 bp, Homo sapiens
gccctgctccatggacagtggactctgctccaggccctgcaagagatgaggtggccacaaagcgggcacaggcctggtgctacagcaaaaacaacattcc

SEQ ID NO: 121903 - DNA, 100 bp, Homo sapiens
gggtggagatcaagctggaacaggagttccgatcgacccggtaccaagaaggggagtgcccgcggcaggtgagcgagtgctgtgctttcatgggcctctt

SEQ ID NO: 121904 - DNA, 90 bp, Homo sapiens
gaagaagttgagcctgatgaagaagaagtgtgaagatgccttaagaaaaaataagagcttaattgggccggatcaaaaggagtatcaaag

SEQ ID NO: 121905 - DNA, 100 bp, Homo sapiens
gaaaaatctcaaggaaaagtattgcaagcaacagtagtcgctgttggatcgggttctaaaggaaagaccccaccaacaactgaacgctttggtcaggctg

SEQ ID NO: 121906 - DNA, 100 bp, Homo sapiens
cccactgtggctcttcacatgatggaactgtttgacacaactgtagagcagctgtatagcatcttcactgtaaaggagacagtgacaataccctcccctc

SEQ ID NO: 121907 - DNA, 98 bp, Homo sapiens
gggagttcagcttttagagcaggtgtatgatcttttggaggaggaggatgaatttgatagagaggaccggccagccttgcagctgtatgatccaggag

SEQ ID NO: 121908 - DNA, 100 bp, Homo sapiens
acggctttagcggtgtcttttgcggaaaacggacgatgtattactaagctggaaaacatggggtttcgagtgggacaaggattgatagaaaggtgagcag

SEQ ID NO: 121909 - DNA, 133 bp, Homo sapiens
cccgttcttgcctcaggccagtcgcctccaggccaagagggatccttcacccgtgtctggtgctggagaatctggtaaaagcaccattgtgaagcagatgaggatcctgcatgttaatgggtttaatggagag

SEQ ID NO: 121910 - DNA, 82 bp, Homo sapiens
ccagcaccatggggaagcgggacaatcgggtgctccctcgtgaaagatgcttctgttcctctgattgatgttacaaacctcc

SEQ ID NO: 121911 - DNA, 98 bp, Homo sapiens
acgttctgtactgtccaagtcagttcctgggtacaagagtcaactactggattttctgtctggcaaacagtatgcagtaggtgatgaaactgatcttt

SEQ ID NO: 121912 - DNA, 146 bp, Homo sapiens
aaaacgtagggaccacatcaaagacagctttcacagtttgcgggactcagtcccatcactccaaggagagaaggccttcctgatgcgcttgcctgctccctggtctctctgcatggggaaggagtgttcccagcttgcaaactcca

SEQ ID NO: 121913 - DNA, 97 bp, Homo sapiens
cgaagtcgtggaggtggcgaaacgaggaggagataacgcggccttgggctctgggagtggagcttggtttcgggatctcggtgctgcagacggcgag

SEQ ID NO: 121914 - DNA, 98 bp, Homo sapiens
ctgaagatgggaccctcacctgcagtgatcctggcatctggacttccttccccgcggttcaggaatcgtcacccggcggcctctcattctgcagctca

SEQ ID NO: 121915 - DNA, 100 bp, Homo sapiens
gtctctctgctgcggcgcggggaccgctgtgctctcgaaggcaattctcaagttcaactactcagtgcaggaggagagcgacacttgtctgggaggcaaa

SEQ ID NO: 121916 - DNA, 80 bp, Homo sapiens
caaaagccaagaggaggacagttcgctacacagcaatgcatcgagtactatactggcaattgctggagaagattttgcaa

SEQ ID NO: 121917 - DNA, 96 bp, Homo sapiens
ttacaacattaatcagatactgcatttaagtgatgaatcaccaacaccagcagcagatggcccccagtaccctgagccagcagaaccaccccactc

SEQ ID NO: 121918 - DNA, 75 bp, Homo sapiens
cttgggtgtgctgacgagcagggtggcctccggtgtggctgtctctgatggtgtcatcaaggtgttcaacgacat

SEQ ID NO: 121919 - DNA, 98 bp, Homo sapiens
agaagatgaccacagagcagaactgctaaaacagctgggagactacagggcagcaattccatttccgtgagggcgtttctagatgaagatgacatgag

SEQ ID NO: 121920 - DNA, 98 bp, Homo sapiens
aaagcgtggcagcgcaggcgcaagcgcagagagcggaggcggtggtggtggcggccgctggccagttattctaccttgtaaatactgttatttgtata

SEQ ID NO: 121921 - DNA, 100 bp, Homo sapiens
ggtgtcattgggtttcctggaatgcaaggacctgaggggccacagggaccaccaggacaaaagtttgaaattggcacaatggaagaagctggaatttgtg

SEQ ID NO: 121922 - DNA, 90 bp, Homo sapiens
agaacaccgctttctccaccagcatcaacgagcaagccacccgaggggactgcctggccttccagatgcgagctgggttgcttccctgag

SEQ ID NO: 121923 - DNA, 97 bp, Homo sapiens
ttgaattacaaggaaagaagatcaagctacagatatggaagtacatttgaagaacgcaagtagagggagtgcaggaaacaagaactacaggatgtag

SEQ ID NO: 121924 - DNA, 96 bp, Homo sapiens
atgatgaagcggagaggaccaaggctgaagctactatccctttggttcctgggagatacaagttgtgcaaagtgaggaagattactgtgggagtga

SEQ ID NO: 121925 - DNA, 75 bp, Homo sapiens
tggagagggcaacgtttggattgcaaagtcatcagccggtgccaaaggccagaagcctgtcttagatgttcatgc

SEQ ID NO: 121926 - DNA, 89 bp, Homo sapiens
gcccagcccatttcattcacagcaggatggcagtttgtggggacattcatggacaattctttgatttgatgaagctctttgaagtcggg

SEQ ID NO: 121927 - DNA, 101 bp, Homo sapiens
gacgtggctattgtgaaggagggttggctgcacaaacgagcacatgattaagtaccggtacatcccgttcacacatgggaagagaaggtacagaggcaagg

SEQ ID NO: 121928 - DNA, 50 bp, Homo sapiens
gcctagcggagccgggactggagcccaccttgggacaccttgactccaag

SEQ ID NO: 121929 - DNA, 83 bp, Homo sapiens
ccagttcgtggcctgttaccacgagctagtgttggagtgcaccaagaaatggacttttcttggtagagatggaaatccaaata

SEQ ID NO: 121930 - DNA, 51 bp, Homo sapiens
gggaggtggaacgggccgaactgcaggttgcagtgtaggattttggaagtc

SEQ ID NO: 121931 - DNA, 75 bp, Homo sapiens
cgggaccaggaccgggccccactttccaacgtcctggggtagaaacagcttccagcaacacccatggcaattaac

SEQ ID NO: 121932 - DNA, 82 bp, Homo sapiens
caaaagaaatagcaagaactgaggagcaccaggagacgcaactcatcggagttatgcccagccaagtcttcagtatatccag

SEQ ID NO: 121933 - DNA, 74 bp, Homo sapiens
ccgagtggtctaaggcgccagactcaagcactgccagtgaaagatgtagaagataaacctgaacaacaaaccag

SEQ ID NO: 121934 - DNA, 93 bp, Homo sapiens
tactggggccagggaaccctggtcaccgtctcctcaggtcagcccaaggctgccccctcggtcactctgttcccgccctcctctgaggagctt

SEQ ID NO: 121935 - DNA, 50 bp, Homo sapiens
cagcatccccaagcagggggagtgccaaacccaagtctgaaatccacgtg

SEQ ID NO: 121936 - DNA, 82 bp, Homo sapiens
ccggagctgcctggaggcggccgcactcggcttgcgcgatctctggcctcttcaactgcatcaccatccaccctctgaacat

SEQ ID NO: 121937 - DNA, 100 bp, Homo sapiens
ctctgctggctgcggcgggagctggacgcgggaggaggcggcggcggcgggcccccagatgccgacggccctctctacctcccctacaagacgctggtct

SEQ ID NO: 121938 - DNA, 78 bp, Homo sapiens
ccggatgagtacgataccgaagcgggctgtgtgccccttctccacccagagaaagaaggggatcaacctgaaagagtc

SEQ ID NO: 121939 - DNA, 132 bp, Homo sapiens
tcaccctctgccgagtctcaatatctgtcttcggtggactccttcggcagtccacccaccgccgccgcctcccagctcaccatggatgatgatatcgccgcgctcgtcgtcgacaacggctccggcatgtgc

SEQ ID NO: 121940 - DNA, 102 bp, Homo sapiens
aacgcttccaagcattgctattacaactgtaagccaggagtgttacagaatgtctgaaggggacagtgtgggagaatccgtccatgggaaaccttcggtggt

SEQ ID NO: 121941 - DNA, 82 bp, Homo sapiens
tggtctcaggcaaggtggggactgggcacatcatcaatacgtggccacagatgtctttaattccaaaaacctggccgttcag

SEQ ID NO: 121942 - DNA, 90 bp, Homo sapiens
cccctggccaaggtcatccatgacaactttggtatcgtggaaggactcatgactggtattgctcgagttccacttgctggagctgccggg

SEQ ID NO: 121943 - DNA, 93 bp, Homo sapiens
tactgctccagtttgagcggttggtggtgctggattacatcatccgcaacactgagcatccacaatgggtaccccagcctcggtggtcagtga

SEQ ID NO: 121944 - DNA, 100 bp, Homo sapiens
gccgccgccggcccggacatggccgccaacatgtacagggtcggaggagggtgaggacaaaatcttcttaatcaacaagcttcactccatctacgagagg

SEQ ID NO: 121945 - DNA, 100 bp, Homo sapiens
gagcgggcgaggtggcggcggcggcggagcgggagcgggtaccgggcgcgggcagagcgcggcggcgcggagtcgcctcaagaaaggccgggctctcggc

SEQ ID NO: 121946 - DNA, 99 bp, Homo sapiens
gcgttgcgtctaaaaaggcgaaagccttgaggttgaaggtgggacgagcctaatgaagtggttttgctgatttgggaaaataaagactatggatcaact

SEQ ID NO: 121947 - DNA, 75 bp, Homo sapiens
ctcaaagacaagaggagacactgagggaacaaacacttctggatgcatccggcacacgtgtttcacgttgacagg

SEQ ID NO: 121948 - DNA, 75 bp, Homo sapiens
aaatgtttgacgacactgatggtttgaattcctggaaaactcaagcaattcgtatttgacttacattctggaaaa

SEQ ID NO: 121949 - DNA, 100 bp, Homo sapiens
tggacctgttgaactatcagtacttggacaagatgaacaacaatatcggcattctgtgctacgaagtttggtgccctggttgtcagatgttggaaagcag

SEQ ID NO: 121950 - DNA, 74 bp, Homo sapiens
tcaaaaatagtgatagctttgataattcatttgatgaatacagttcagaacttaaatctggaaggttggaatgg

SEQ ID NO: 121951 - DNA, 75 bp, Homo sapiens
ttatgccaggactcactttttccaatgaactcatcagcagagatgaaacatttctcttgggaagttgtgcatctg

SEQ ID NO: 121952 - DNA, 100 bp, Homo sapiens
aaactggagagcttcatcaaaaatagtgatagctttgataagcaccagtctgctgagtggcggtcgtgaatctgtacttgtagagtggcgcgatgcaaca

SEQ ID NO: 121953 - DNA, 100 bp, Homo sapiens
cctgggtccacgccgagggcaggacgaacttcaccaggtcttgaggaccggcccagctcaggctcctggggcagcggcgaccagagcagctcctcctttg

SEQ ID NO: 121954 - DNA, 75 bp, Homo sapiens
gtgtttgctctcatgaacatgcaatgagaagactgatcaatctgccaagggaagagatggtgttgagtggaaaat

SEQ ID NO: 121955 - DNA, 88 bp, Homo sapiens
aacaagaaaacatcaaagaggtctagcaaagggcctgtgtttggaagcaaagataacttccacggcttagccatcttcctggacacct

SEQ ID NO: 121956 - DNA, 83 bp, Homo sapiens
atccagcctgcggagcctgtggggcaggatccctctgtgacccagctgaccaacgccccgcagggcggcctggcggaattcaa

SEQ ID NO: 121957 - DNA, 83 bp, Homo sapiens
agacaattgtggcagagttaattctggtggtacactgaggaggggacggctccgtcttcacattgtgcacagatctgaggatg

SEQ ID NO: 121958 - DNA, 100 bp, Homo sapiens
tgaccgctcaagagattctacatcagtttggtttcactcagaccgattcgcttcaagctcagcttatcaatatgggtgttattcctaccttagtgaaatt

SEQ ID NO: 121959 - DNA, 75 bp, Homo sapiens
gggtccacaagaccttcaagtttgtcgtcgtcggggtcctgctgcagggagtgcatccgccccaacccttttccc

SEQ ID NO: 121960 - DNA, 50 bp, Homo sapiens
ggaaggcatcctgcagtattgccaagaaaaatgaccatggttgacacaga

SEQ ID NO: 121961 - DNA, 75 bp, Homo sapiens
ctccatgatgcctacatgttctgcatcattgacaagtcattggaaaattgtgaggccgtgccccacagagccacc

SEQ ID NO: 121962 - DNA, 90 bp, Homo sapiens
acgacctagtatttgaatttgctagtaacgtcatggaggatgaacgacagtgaaggagaacgacctgctcagaatgagaagaggaaggag

SEQ ID NO: 121963 - DNA, 83 bp, Homo sapiens
gaggcgagtccggtctcaaaatggagctgctgcggactctggagcgtgagaaccagcgcctggaggctgtcctggcgtggcgg

SEQ ID NO: 121964 - DNA, 95 bp, Homo sapiens
tgagaaaccatacaagctgtgtttttcagaagaagtgaagtcaagatgaagaaccatttgcttttctggggagtcctggcggtttttattaaggc

SEQ ID NO: 121965 - DNA, 98 bp, Homo sapiens
cacagtctacaatatcatcaccaattttatgcgaacccgggaagaaggcatgttatttgaaagcaattgagacgcaaccgaactttgcagtagcttgg

SEQ ID NO: 121966 - DNA, 78 bp, Homo sapiens
agatggctgcgctgttgctgagaatttttccctagattggtgtaaacagccagacgtgggccttcccaaacccgacct

SEQ ID NO: 121967 - DNA, 75 bp, Homo sapiens
tggacaccgggcgcaggagggcagcaccagaggccagtggcactcccagctcgaaccaggaagacagcgcttcca

SEQ ID NO: 121968 - DNA, 83 bp, Homo sapiens
cagtgggagagcgaggcctgagcctctgcgtctagcaaaatgatgcttcaacacccaggccaggtctctgcctcggaagtgag

SEQ ID NO: 121969 - DNA, 74 bp, Homo sapiens
taaattcaaggtcaagagctcgcctctgattgagaagcttcagtcagaaaaagtggacagggcagtgctgaagg

SEQ ID NO: 121970 - DNA, 82 bp, Homo sapiens
atactccctctggaataccttgggcattgctgaatatgaaaaggttttaaaatcaaagatgggaaaatcggagaaaattgcc

SEQ ID NO: 121971 - DNA, 82 bp, Homo sapiens
gggccgcgcctggcacgatcgcccgtcggggacctggagccccggacagagagggtacggagatacaagggcctcatggact

SEQ ID NO: 121972 - DNA, 98 bp, Homo sapiens
cgtaccctgtgcgttagtcaccagctgctcctccgtcttctcaggagaccagctggtccaacacgtgaagccctccaatatgctagtaaacacaagag

SEQ ID NO: 121973 - DNA, 74 bp, Homo sapiens
cgtccatgcggaagatcgtcgccacctggatgctggagtcaccttcaggccattcagaggaggaaagagagggg

SEQ ID NO: 121974 - DNA, 150 bp, Homo sapiens
gcggcggaaaacaggctactcctttgtaaattgcaagaaagctctggagacttgtggcggggacctcaaacaggagtccatagaggccactgtattctattgaagaacatgtctaacagtaacactactcaagagaccctggaaataatg

SEQ ID NO: 121975 - DNA, 95 bp, Homo sapiens
cgctgagtggtttttcggatcatgtctggtggctccgcggattataacaggtttggtgcacctcgatttggaggaagtagggcagggcccttatc

SEQ ID NO: 121976 - DNA, 50 bp, Homo sapiens
cccccgcccccgttccatccacggtctcggtccagctcgacttccagctc

SEQ ID NO: 121977 - DNA, 100 bp, Homo sapiens
ctgggatttttgagctggtggaagtggttggaaatggcacctatggacaagtctataagtttcactgttacatgccttgaagtgatgaggaggtttctgt

SEQ ID NO: 121978 - DNA, 100 bp, Homo sapiens
atttagagctgcggaacaggacgccctctgatgtgccagatgccagttttagattctggctccaccactgacacagctgggtgaccttgatccagtccct

SEQ ID NO: 121979 - DNA, 51 bp, Homo sapiens
gacgactatgacctcgagtctgacatggaagaatcctgtaagtacaatccc

SEQ ID NO: 121980 - DNA, 100 bp, Homo sapiens
ggattatccggagccaaggtccgctcggaccgtggctgagcatggagctgtccccccgcagtcctccggagatgctggaggagtcggattgcccgtcacc

SEQ ID NO: 121981 - DNA, 100 bp, Homo sapiens
cggagctgcagcccgagcgcggtggtgccctcagccccgtcctcttgtcctcctcagcctcgttttcggctttgtgagaaaccttaccatcaaacacgat

SEQ ID NO: 121982 - DNA, 118 bp, Homo sapiens
tcacttgtgatgccctgactgagctgctggctaagatcaccaacacagacgtgaccatgcatggaattttggagagaagcaaattttgcaaagatatgacggtaaagtatgactcaag

SEQ ID NO: 121983 - DNA, 75 bp, Homo sapiens
gctaagactccaggacacccctgaagccgagaaatgcattgtcctacataatggtagaggacgaactggcacttt

SEQ ID NO: 121984 - DNA, 82 bp, Homo sapiens
ttgtgaaacagagaaagataggcggccatggtccaaccttgaagattacatcgtcagcccaaacatctccttgcatttttgt

SEQ ID NO: 121985 - DNA, 50 bp, Homo sapiens
aaaacctcgctccggaaaggggacacctgaatttcgctaaggagtttgtg

SEQ ID NO: 121986 - DNA, 101 bp, Homo sapiens
tcttttgaaaggtgtactgcaaggaacaaaatgtttgtaaattctccttttaccaagcctggcaatcggtaccattagtggccatgcccgacactgcccag

SEQ ID NO: 121987 - DNA, 78 bp, Homo sapiens
tcatcctgtccatcgtgtgcctgatgatcacgcagctggctggcttcagtggaccagcagcgtctatcccagactacc

SEQ ID NO: 121988 - DNA, 76 bp, Homo sapiens
ctcaggggttggaaagtcttgccttcttcttaggtttgcattggcagatatccctgttacaatctgtacatatcca

SEQ ID NO: 121989 - DNA, 82 bp, Homo sapiens
aggattccaagtaactcttatttggctctccgtgtgaaatggtcccatctcagactgccctgggtagacctagactggctca

SEQ ID NO: 121990 - DNA, 107 bp, Homo sapiens
ccgcgcgctgagggtctcggggcgggcgccgcgggacctctccgggccatgggcacttccgttccggcgcccctccggtcatcaacccgctgggcaccagcttcccg

SEQ ID NO: 121991 - DNA, 100 bp, Homo sapiens
ttggggtctctatctgggagctgggccagggcctggactacttctacgacctgctctagacatatctgaagagatggattaagaatgctttggattaagg

SEQ ID NO: 121992 - DNA, 88 bp, Homo sapiens
aagggcaaccaagagagccccaaagccactggagtctttaccacacgtcaagtttacccatgggggaactggttccagccaaaccgca

SEQ ID NO: 121993 - DNA, 74 bp, Homo sapiens
ctccgccagatccacgccaaccacgagggacgcatggaatacctcgtgaaatggaagggatggtcgcagaagta

SEQ ID NO: 121994 - DNA, 90 bp, Homo sapiens
cgctccggtcctgccccgaactgcccacggccggcagcgcttccactgctgaatgccatggtggcaaaactggggaaccgggaggaccca

SEQ ID NO: 121995 - DNA, 75 bp, Homo sapiens
atgtgaaactgctttctaaaacaccagaactcaacctggtgttcatcagtaatgggtcattaagtgatgttgtga

SEQ ID NO: 121996 - DNA, 76 bp, Homo sapiens
cagaaaaccaaacaccacatgttgtctcttagaagtgggagctgaacggaaatgggtcctgatgaatatgaagaga

SEQ ID NO: 121997 - DNA, 100 bp, Homo sapiens
caaggcccctagaaaggttggagctgccgccgcctgcagtcggtgaccgcgcgactcggcgcccgcccgcgtactatactggcaattgctggagaagatt

SEQ ID NO: 121998 - DNA, 90 bp, Homo sapiens
caacccgttcttgcctcaggccagtcgcctccaggccaagagggatccttcacccgtgtctgcatcctgaggttagcattacacttctcc

SEQ ID NO: 121999 - DNA, 75 bp, Homo sapiens
tgagtacctgaaccggcacctgcacacctggatccaggataacggaggctggggttgcttttgtaatgaagaagc

SEQ ID NO: 122000 - DNA, 90 bp, Homo sapiens
gaatgacatcagccagtgtggaagaagggactgtgctgtcaaaccatgtcaatctggtgaatcgaaacgcatcaccctggtcctccagca

SEQ ID NO: 122001 - DNA, 90 bp, Homo sapiens
aactcttcagtgttggctgataaaattgccctgaaactggttggtgaagaaggatttgtaggtctgctcaccaggtggccagataccgcc

SEQ ID NO: 122002 - DNA, 75 bp, Homo sapiens
atttttccccaattcagcagagaatattttcaaggggggccaccagcttgggctccccacggagggcagcaagtg

SEQ ID NO: 122003 - DNA, 98 bp, Homo sapiens
gcggctccctgctgcttccgagcctagccgcctggccttcggcatttgcaggcagtgaatgtggtggaggcacttcaggaattctggcagatgaagca

SEQ ID NO: 122004 - DNA, 100 bp, Homo sapiens
cggcaggggcggcggcggcgacggccggaggtgtacgtattaaaggtggaagaaggtccatatctttttctgtgggtgcttcaagtgttgttggaagtgg

SEQ ID NO: 122005 - DNA, 52 bp, Homo sapiens
ccttcatcccctatcttgtcgtcaagcgatgtgcattttgtaagcactttgg

SEQ ID NO: 122006 - DNA, 75 bp, Homo sapiens
cacccaccaacaacaccacaataatccacagccaaggcttataacccacaccatggataacttattggactttgc

SEQ ID NO: 122007 - DNA, 75 bp, Homo sapiens
ctggcggagcagaacggattgcaggacaatgcagatcttcgtgaagactctgactggtaagaccatcaccctcga

SEQ ID NO: 122008 - DNA, 75 bp, Homo sapiens
ggatcccggccaccagcaattgtccggaagagaggatggtgatgcaccggttacaaaagatgagaccacctgcat

SEQ ID NO: 122009 - DNA, 58 bp, Homo sapiens
gggcaagataattagcagtaatatagtttctgctgcagaaccttggcctgaaaatgct

SEQ ID NO: 122010 - DNA, 75 bp, Homo sapiens
cgcgagtgaggaaaggaggtactgtaggagcctcctcaacaagcccaagagtgagatgaccccagaggagctgca

SEQ ID NO: 122011 - DNA, 83 bp, Homo sapiens
agcagttctgtgtatccaacattaatcagaaggtgaagtttcaggtcaaaatgcagatcttcgtgaaaacccttaccggcaag

SEQ ID NO: 122012 - DNA, 100 bp, Homo sapiens
agaaagtaatattgcttactatgagtctatatatcctggggaatttaagatgccaaagcagctcattcacatacagcggaccatggctaaacctcctgga

SEQ ID NO: 122013 - DNA, 50 bp, Homo sapiens
agcatgtggagtatgaggtttccagccagacagccaccgcactgtgttcc

SEQ ID NO: 122014 - DNA, 100 bp, Homo sapiens
agaatttcacgagacttttgactgtcccattaaaaaggccaatgatgaggccaatcagagtgatacaagtgtctccttgtcagaacccaagagcaaaagc

SEQ ID NO: 122015 - DNA, 74 bp, Homo sapiens
agtttgtcattaaacccatcgacaagaaggcacctgtgaccaagaatatggcccaggtgaccaaagccctggac

SEQ ID NO: 122016 - DNA, 51 bp, Homo sapiens
cgagagcttcaaggacgcagccacagagaagattaagattgcggccctgcg

SEQ ID NO: 122017 - DNA, 102 bp, Homo sapiens
ggaatcacgacccctccctgccatgtatccgcagggcagacatccgacaatgcagatcttcgtgaagactctgactggtaagaccatcaccctcgaggttga

SEQ ID NO: 122018 - DNA, 100 bp, Homo sapiens
gtgccccagctcggccccggacggcccggctgctgtgcagagaggaggccgagtcgcaatcatttggggaagaatctacagttgctgatggacagagtgg

SEQ ID NO: 122019 - DNA, 75 bp, Homo sapiens
cggatcgaccggagcagagagctggcgagcaagatgacgacaacccccccgtgtcttttgtgaagttctccccga

SEQ ID NO: 122020 - DNA, 100 bp, Homo sapiens
cggcggtcgacatgttccaggtcccggatagcgagggcggccgcgccggctccagaataacctgggtatcttgtggtctgaaagagaagaaattgaaact

SEQ ID NO: 122021 - DNA, 151 bp, Homo sapiens
caggaaatgggaccaaccttgatgaatatgtggctttggtggatggggtattcttgaaccaggtcatgctccaaatttgttgacctcctgtactggagagacattaagaagactggagtggtgtttggtgccagcctattcctgctgcttt

SEQ ID NO: 122022 - DNA, 83 bp, Homo sapiens
agaaaggatccacagctgatgctgctgacctccggggccgcactgccctccaccgcgggcctggagatgcccaaagatgagct

SEQ ID NO: 122023 - DNA, 75 bp, Homo sapiens
ccgggaccccagcttttcagaactgcagggaaacagccatcatgagcagcagccgctcttctaaaacattcaaac

SEQ ID NO: 122024 - DNA, 75 bp, Homo sapiens
gtcaactctaccatgtgctagagacagccaacaaaatattcatggttcttgagggattaatgaaaatcaagttcc

SEQ ID NO: 122025 - DNA, 96 bp, Homo sapiens
cagacctgctgaatgcactgaagacagtaattaatgatccttcgtgtactattgactggaagaaaggaaagaatgttactgtcaaaaccatcaaga

SEQ ID NO: 122026 - DNA, 90 bp, Homo sapiens
tttccttgcaaaagttcacaaaattgatcctgatatcattgtgattgtggacaaagccctagaagagccaaagtatagctcactgtatgc

SEQ ID NO: 122027 - DNA, 50 bp, Homo sapiens
gaaaaagttcttgggacaaacttcatttgcaatcagccatgactgccttt

SEQ ID NO: 122028 - DNA, 83 bp, Homo sapiens
ccgaagttggaagtgtctcttagcagcgcgcggagaagaacggggagccagagagaactcgatgccaccgcaacggtattggc

SEQ ID NO: 122029 - DNA, 75 bp, Homo sapiens
caaagagcccctcatcgagctcttcgtcaaggttcagtggtcacctcacaatgagactattttagcttccagtgg

SEQ ID NO: 122030 - DNA, 51 bp, Homo sapiens
gccgagtatgaaagtcaagtcaaagacggatgtcttaaaatgggatctcat

SEQ ID NO: 122031 - DNA, 100 bp, Homo sapiens
tggtagaatccattggctctgaagtggggtctctggaacagaaactgttcatacttggtgcgctgtggactcttgtgataattaaccaagagtagctcta

SEQ ID NO: 122032 - DNA, 117 bp, Homo sapiens
cgcacgccgcgcccgcgcccccgctccgccgcggagtttctgcatgactgtcacaaagatgttgccatcccaacattacctcccacttcactgaccagtgccactactgaccatcta

SEQ ID NO: 122033 - DNA, 100 bp, Homo sapiens
tgaagagtgacttgtttctggatgattctaagaggtctgatgctacaggacttggtttcagctaagctgatttcagattacactgttaccgagatccctg

SEQ ID NO: 122034 - DNA, 75 bp, Homo sapiens
caaaaccaacaagactacgggcttcaagatcaactttctgacagagaataagtcgcgctttcttcctcaaacttg

SEQ ID NO: 122035 - DNA, 75 bp, Homo sapiens
ctcggatagtgggctctgtagaattcgacagtatgggaaacactactatgaagtatcctgtcatgaccaagggtt

SEQ ID NO: 122036 - DNA, 100 bp, Homo sapiens
ttatgcaagttgccgaatcagtacagcgttcacaagacttcatcacctctttgtacatcttctgcaattactcgatgtgttcagagcaacattgttttgt

SEQ ID NO: 122037 - DNA, 83 bp, Homo sapiens
aagatgaagaaacccagcttgatatgttgacctgcaggctgggacaatgaaaagaaaatagctattttacatgaaaattttac

SEQ ID NO: 122038 - DNA, 100 bp, Homo sapiens
tcagggtcagcatccactcctcaagaggagcagaccaaagaggtgattacagtggcgagatcttgaacaactgctgcgtcatggagtaccaccaagccac

SEQ ID NO: 122039 - DNA, 99 bp, Homo sapiens
acctcggaggtcgtcccaagcccctacccgggcggcccctgcgccccccagagctcagtgtggaggctgctggccctgccatctgtaagaagatgtcat

SEQ ID NO: 122040 - DNA, 100 bp, Homo sapiens
gatgcagatgcccctcctccaccagaggactgggaggagcatgtcaacaggaagatgagaatgtgcctactgctcctgatcctccaagtcaacatttacg

SEQ ID NO: 122041 - DNA, 100 bp, Homo sapiens
cacagggggagttctggacttttatgtgttcttggggccgactccagagcttgtcacccagcagtacactgaggaaggtgtcttgctgcaggtaactaat

SEQ ID NO: 122042 - DNA, 88 bp, Homo sapiens
gctgcgctctgcccggcgagtcgggctctggaggaaaagaaagctttggcgctgaccacaatgctgagcaggaagcagcagctgcagg

SEQ ID NO: 122043 - DNA, 100 bp, Homo sapiens
tgcactctgcgctttgagctactgggctgtgagctgaacggaaaatatgttgtgttcttcttttaccctcttgacttcacctttgtgtgccccacggaga

SEQ ID NO: 122044 - DNA, 100 bp, Homo sapiens
tgcggttccaacatggcggagctgacggtggaggttcgcggctctaacggggctttctacaaggaactaagcgtcttgtagaaggaactattaatccagg

SEQ ID NO: 122045 - DNA, 75 bp, Homo sapiens
ccaagatgcggatccgggcctttccgaagttgattcaagtcagttgagacgccagttgtgtggaggaagtcaggc

SEQ ID NO: 122046 - DNA, 90 bp, Homo sapiens
ccgcgccctcggcctgcacggttacagctcttttgaggaagcttaagcagcaatccagggaaagtgttgaagaaaaacgacctcgattat

SEQ ID NO: 122047 - DNA, 50 bp, Homo sapiens
tctccttatgctgggtgaaaacaaagaaggagttgagccttccaagaaga

SEQ ID NO: 122048 - DNA, 100 bp, Homo sapiens
ggctgccgtacgtggccctcgatgtgctctgcgtgttgctggatggtatagctgcatgctgggaaagaaatgcagcctggcgcctctgaaggaggagctt

SEQ ID NO: 122049 - DNA, 75 bp, Homo sapiens
gacattacttcaggacaacctcttgggcagggctggagcattggatttgctaaaggagcttaagaatattcctat

SEQ ID NO: 122050 - DNA, 117 bp, Homo sapiens
ggggtcgctgggtccctcctccggcttcccgcaatgaggagggcccttcacagaaccgggaccagcatctcagacatgtcgaaaaagatgttttgatccctaaaataatgagagaaa

SEQ ID NO: 122051 - DNA, 100 bp, Homo sapiens
cttcagctccagctccgctctcttcggctgccccaatccccggcagctctctcagattctgaaggaagatttccattaggtaatttgtttaatcagtgca

SEQ ID NO: 122052 - DNA, 98 bp, Homo sapiens
acgaaagcctacaaaagtgtggagaggttccttcaggaggatcaggtttccactgtatccaaaaggaggggagaagttgcagtttgattatggtgtct

SEQ ID NO: 122053 - DNA, 99 bp, Homo sapiens
cggacgaggggagccaagctggagtttacacaggcaaactgtcagaaaagagtagcctgggctgtctggaaatctgagagtctcgctctgtcacccaag

SEQ ID NO: 122054 - DNA, 82 bp, Homo sapiens
gtggaagcgaagccgaaaaaggcagcagcgaaggtggaagatgcaatgctgatgtttgataaaactaccaacaggcacagag

SEQ ID NO: 122055 - DNA, 51 bp, Homo sapiens
gctgtggaaagaagttgcaaaacactggatgtgtgacagtgcggaagaggg

SEQ ID NO: 122056 - DNA, 74 bp, Homo sapiens
atcctatggctcaaagaaagatgattatggaacacatgcccactttggaggaattctttgaagaagccattgaa

SEQ ID NO: 122057 - DNA, 97 bp, Homo sapiens
agccatgccgcccggaggccacacccgggggaggagcctgcggacgcccagtcgggtggagcacgccaggtcacggcagttgcacaacagaatcaag

SEQ ID NO: 122058 - DNA, 100 bp, Homo sapiens
ccttcatcacagacaacagcctggtggcagcgcacaagctccgggtggataaggcagctgctgcagcagcggcactacaagccaaatcagatgagaaggc

SEQ ID NO: 122059 - DNA, 85 bp, Homo sapiens
agcacacactatggcgctgaaacggattaataagggacttgccatgaggtgttgaagccttgtttcactgagttggagagactgg

SEQ ID NO: 122060 - DNA, 100 bp, Homo sapiens
ggttccaaagggggagatatcatgctctggaattttggcatcaaggacaaacccaccttcatcaaaggggggataaaaacattcagatggcagatcacag

SEQ ID NO: 122061 - DNA, 101 bp, Homo sapiens
tgagaaagcaggggacatcgcactcctgtatctccaagagatagaaaggatttgcttggaacggtagaagaaatccttccaagcctctcagaaaatatcag

SEQ ID NO: 122062 - DNA, 90 bp, Homo sapiens
gagcaaccagaaccggagcatggaggcgcacaacatcctcagtgatcagggccaaagcggtcagtgagaaggaagtggactctggaaacg

SEQ ID NO: 122063 - DNA, 100 bp, Homo sapiens
gatgaagaaaggaaggaacctgggatggttgtgagggaagggacaagaagatactgccctggttaaccttgattttcacacaaaagaagtcattacaaac

SEQ ID NO: 122064 - DNA, 75 bp, Homo sapiens
cagccacatactatccgtttgttcaggaaccaccagtgacagatacctgtttgaaaatggtagaatagataacat

SEQ ID NO: 122065 - DNA, 74 bp, Homo sapiens
tcacggaatctcgggtcttctgacgtgccgggcgggaaggtacggggctgatgttgacgtcaaccaccacctga

SEQ ID NO: 122066 - DNA, 134 bp, Homo sapiens
ggacgacaacgagcagctcatcacccagtacgagcgggagaaggcgctgcgcaagcacgctgaggagtacaagttgtgcaaagtgaggaagattactgtgggagtgaagggaatccctcacctggtgactcatg

SEQ ID NO: 122067 - DNA, 100 bp, Homo sapiens
ccctccagccttcgagtcgttcttgctcttcgagggcgagaatgctgtgctgtggctttcattgagaagctagacgcccagtctttgaatctaagtcagg

SEQ ID NO: 122068 - DNA, 100 bp, Homo sapiens
ctacaccgctgtggcccagactgtgaacctgctggccgagtggctcattcagacaggtggtggaggtggatacagcagtcggagaacatctggcagagac

SEQ ID NO: 122069 - DNA, 75 bp, Homo sapiens
acctctcctcttcgtctccgccatcagctcggcagtcgcgaagcagcaaccatgcaaaatgatgcttcaacaccc

SEQ ID NO: 122070 - DNA, 90 bp, Homo sapiens
gttcatgaagctgaggaggggagtaaattgaaaatattggggccatttagtaacttctttgcaaggaaaatgtttataggaggccttagc

SEQ ID NO: 122071 - DNA, 100 bp, Homo sapiens
ttccttgacctttaggtgcttttatattcatctcaaaaacaaaattctgaactcaggacttggcaaaacaccttccaccatgaccacctcagcaagttcc

SEQ ID NO: 122072 - DNA, 100 bp, Homo sapiens
aggacaccgacatggaacagggactcactgggggaattcctcctgatcagcagagactgatctttgctggcaagcagctggaagatggacgtactttgtc

SEQ ID NO: 122073 - DNA, 96 bp, Homo sapiens
cgggggtgatgatatccgcccagacactgactggcagagtcctggtcaacattggcatcctcatcgctgtgaccagagtcatctcacagatcagcg

SEQ ID NO: 122074 - DNA, 101 bp, Homo sapiens
aagaagcgtgcggggaccgatggtggggatcaggaggcctggcagaaaggagtcctgtttgcttctgggcagaacttggcacgccaattgatggagacgcc

SEQ ID NO: 122075 - DNA, 90 bp, Homo sapiens
tgcagcaatccctttgagtttccaagtcaggatatgtgcctttcagctttaaagagaattgaagcgtgtgaaggcaaagaagaatgctgc

SEQ ID NO: 122076 - DNA, 96 bp, Homo sapiens
actctgctacctgctttacaggaattatttaattctcacaacagccttctgaggaagaagagtgacaggaccaccctagattcacaggaaggggac

SEQ ID NO: 122077 - DNA, 50 bp, Homo sapiens
tctgatgaagaagttattcaagatgaatgtgacagtgatgataacatggg

SEQ ID NO: 122078 - DNA, 101 bp, Homo sapiens
agagaggcggaagaggaggcctgatggggaaactggaggcgaccagtgcccagaatatcgagttcctacaggtgattgccaagagggaggaggcaatccac

SEQ ID NO: 122079 - DNA, 75 bp, Homo sapiens
cccaccatgtcagacgcagccgtagacaccagctccgaaatcaccaccaaggccaggtcagagcagcccaccatg

SEQ ID NO: 122080 - DNA, 98 bp, Homo sapiens
aaggaatgaccctagccagactcagggatcaaagagcaaacagattcagtggcctgcattgagagaaaaggaacagttccgtaagctctttattggtg

SEQ ID NO: 122081 - DNA, 74 bp, Homo sapiens
gcaagcaggtagcgccgctgctgaagagtttccaaggagagattcgggaactggagcctctcctctgtcacagt

SEQ ID NO: 122082 - DNA, 83 bp, Homo sapiens
gcccttgccttgagtcagtgcgccgctctccagcccgcttgaacgaaaaggcaacagatggctccctgcaaagtgaggattgg

SEQ ID NO: 122083 - DNA, 95 bp, Homo sapiens
ggcaactatgtttggatgttggatctacactttctcaagcactgtgatcttcaaatgtacaacttggccaagtagaaatcaaatgccccatcaca

SEQ ID NO: 122084 - DNA, 100 bp, Homo sapiens
acatgaagacagttcctgtcataccttttaaaggtctttggtagaagagtttagaaagacactctgtgctttatggcaaggcagccagactgcatttagc

SEQ ID NO: 122085 - DNA, 103 bp, Homo sapiens
caaggaaatctcttgctgatataagatttgatgaaattaaacttgtccagataaaagttctccagcatttggctcaaggccccaagggcacatgtgacaagaa

SEQ ID NO: 122086 - DNA, 116 bp, Homo sapiens
ccagataaaaggggtctctgcgtctgtagttcatttgaccaaacgcattccaagaatcaagcactacaaagtgatgagcgtaggacaaaactacactattgaactggaaaaacctg

SEQ ID NO: 122087 - DNA, 48 bp, Homo sapiens
taaagagacgcacttatagtcaagagataaatttgcgcctcattttgg

SEQ ID NO: 122088 - DNA, 98 bp, Homo sapiens
aaagatgtgtcatatcatgtgccctctatgaggagttttggattaagggtcaacatatttcactggcacctattcacaagcttgaagaagctctgtat

SEQ ID NO: 122089 - DNA, 51 bp, Homo sapiens
gttgcgcgaggaaaatgcgggacgcccagatgatagtatttctgctgcaag

SEQ ID NO: 122090 - DNA, 96 bp, Homo sapiens
gtcgaatgaggcacctaaaaattgtataccgcagattcagagtcttgctatggagatacacttcaattcctacttcagtggaagagtcgggaaaga

SEQ ID NO: 122091 - DNA, 100 bp, Homo sapiens
gctaaatggttacaagatgagatgtttcactcagactttcagcatcataacaaagcccttgctgttatggttgatagttaatgttctcctcagaggtgga

SEQ ID NO: 122092 - DNA, 95 bp, Homo sapiens
cccagctaaagcagacggctcgcactgcgacccgaagggcgtccccctggataccagtaaactgtccactgaccagcggttacccccatacccat

SEQ ID NO: 122093 - DNA, 75 bp, Homo sapiens
ggttttagccctgagtcaacacaaatttgccagtttttcagaagaagtgaagtcaagatgaagaaccatttgctt

SEQ ID NO: 122094 - DNA, 95 bp, Homo sapiens
gtccgaggtgccaccgtggaaggacagaatggtggagccccctgagctgcccgctgatctgcagcactggatctcctacaacgaggccagcagcc

SEQ ID NO: 122095 - DNA, 83 bp, Homo sapiens
ccaagagtagctggtttggcttgagagaagccaaggacccgactcagaaacccagattattttcgaaataccagtatttcgac

SEQ ID NO: 122096 - DNA, 99 bp, Homo sapiens
cgatggaggagtggactattcctttgaatgtattggtaatgtgaaggtcatgattctttcttgtggagaagttattcatgtgaagatccttggaatttt

SEQ ID NO: 122097 - DNA, 83 bp, Homo sapiens
cctgtgaccagtgtggggaaaagaattctctggtggttgagatcccgccatttcggaatcagaggataaccagccccgttcac

SEQ ID NO: 122098 - DNA, 82 bp, Homo sapiens
cgatcttgggacccaccgctgccctcagctccgagtccagggcgagattgagatggccatcctgcggttcccttacgagtcc

SEQ ID NO: 122099 - DNA, 104 bp, Homo sapiens
cttcgaggccagcgtggccctgctggaggcctcgctgaggaacgacgccgaggaagctgtcaataccagcaaatatgcagaaagctatcggatccaaacctatg

SEQ ID NO: 122100 - DNA, 82 bp, Homo sapiens
tggccttgcagatcaccaacctcttgaccaggacctgggtctaccaaggagttgatcaagtccatcaatgaaaagtttgctg

SEQ ID NO: 122101 - DNA, 82 bp, Homo sapiens
gtgcaggcaggcgctgagaaggacgcgcagtccatctctctcagggtgcatctgagaaagacatcgtgcactctggcttggc

SEQ ID NO: 122102 - DNA, 89 bp, Homo sapiens
cttacgtctgcggaagtgcagctgcctcagttcttagcgcaggatgtacagttacccagcacgtgtacctcctcctcctcctattgctc

SEQ ID NO: 122103 - DNA, 100 bp, Homo sapiens
caggccttgtgcctccaaggaaaatccacctcgcagcttgtaaatctacagggggcttggagtacccataatacagtgagcccaccttcctggtccccag

SEQ ID NO: 122104 - DNA, 75 bp, Homo sapiens
cgtctctctgctgcggcgcggggaccgctgtgctctcgctgatcatcctggccaatggtgggccccaggccctcg

SEQ ID NO: 122105 - DNA, 100 bp, Homo sapiens
gctccagcgcgggtcggagtctgggggttcgcgcccgccgacccgcgccctgctccctctcagcacctgggcggacgctttggctagatcagagtctaag

SEQ ID NO: 122106 - DNA, 88 bp, Homo sapiens
tgccccattctgagagcagcagcctggctcctggtggctccagcagcagaacctaaaggcagacccagaagagctttttacaaaacta

SEQ ID NO: 122107 - DNA, 50 bp, Homo sapiens
ggctgctattgaaagagagtatgcacaggacttgaactgccatgtcctct

SEQ ID NO: 122108 - DNA, 82 bp, Homo sapiens
caccaagtaggactgatcaggtcttacaattctaaaaccatgacctgtgctatggaaagggcaaatggaatggagctggatg

SEQ ID NO: 122109 - DNA, 90 bp, Homo sapiens
atgccaatctgccttcatcccttcgccgtgtgaattcctttcaggttatagctcagcaagtgtcagataaacacttggaagagggtcggc

SEQ ID NO: 122110 - DNA, 100 bp, Homo sapiens
cagtgactagtaatggagaagttgatgactctcgtgaacatagctttaatagggtgttgtcagtgctaaagcattcattgctgtcttttaagagacgaag

SEQ ID NO: 122111 - DNA, 100 bp, Homo sapiens
cagtgggtccactggtagcccccacccctctccgtccatggccccagatgacacttcaggaagtgttttagatcacagtttggaaagcctcatccaccgc

SEQ ID NO: 122112 - DNA, 75 bp, Homo sapiens
ggaggcgaattttcagttgataggccattgcaatcatggaagtagctcacggcaaagatcatccatatatttctg

SEQ ID NO: 122113 - DNA, 75 bp, Homo sapiens
cggggaaagcggaaggaatgtcgcgtggtaagaatgattgatgttggctgatattggagtgctcattcacatgaa

SEQ ID NO: 122114 - DNA, 90 bp, Homo sapiens
agtttggagccccggagtggggtgtcggcgcctcattcgggtggagctgagccggagacagtgacatattcgatgccatgttccctgtca

SEQ ID NO: 122115 - DNA, 75 bp, Homo sapiens
gtcagaagcatttgacgagctgctagccagcaaatattgctgccaaaatcgctgccccacttaccaaggtcgatg

SEQ ID NO: 122116 - DNA, 101 bp, Homo sapiens
atacaaaccagaccaccttcataattggagaaacaccaaaaggaatccgcagtttcaccagtgatcattaaagaatgggcagcttacaaaggaaagtctcc

SEQ ID NO: 122117 - DNA, 78 bp, Homo sapiens
gcaccaacggcaccaactattcgcggagctggaatgactggcaacccaggctgtgggtgagcgtggaggatgctcaga

SEQ ID NO: 122118 - DNA, 101 bp, Homo sapiens
gcaaaatttgccgaacgagggttcgcagaaaggtggggcagagctcatctgacgtggcatcagtttcatcgcaaaccagaaaaggttagaaatcatcaacg

SEQ ID NO: 122119 - DNA, 100 bp, Homo sapiens
tcttttgccaagagtgtgataggttatggaggttttgatgactatggtggctataataattacggctatgggaatgatggctttgatgacagaatgagag

SEQ ID NO: 122120 - DNA, 75 bp, Homo sapiens
ttgtttgtggatcgctgtgatcgtcacttgaaactatgttccaacttcctgtcaacaatcttggcagtttaagaa

SEQ ID NO: 122121 - DNA, 90 bp, Homo sapiens
agagggcccacacgactagaaggacgactgcctggcgcgatacaaaaatttacatggacacagaacagtatgaagaagcagtacgagact

SEQ ID NO: 122122 - DNA, 106 bp, Homo sapiens
caagaggacggagccccgggttgggcaagcctggaggactccccagagaagcagccaccacctccaacaagcacaagccatggattgaggcagagtaccagggcat

SEQ ID NO: 122123 - DNA, 74 bp, Homo sapiens
ttctatttccaaagtatgttgcacccaggtttaccgacaagactgtgaaactttcgggatggtggtgaaaatgc

SEQ ID NO: 122124 - DNA, 75 bp, Homo sapiens
tgcaggacacgaagctgcatgtgtttgacgcaaatgatgaggagtctgatgaggaagctgtgaagaaaaccaaca

SEQ ID NO: 122125 - DNA, 75 bp, Homo sapiens
acgtctgccgctgccaccggcgcgcccgaggaaagaatatggcaaagctgatgcaagatgggtttattttgatcc

SEQ ID NO: 122126 - DNA, 100 bp, Homo sapiens
tggaagtcattcaacgggaattgaataggagccaaaaacctgtatatcatctccgtgaaggggatcaagggacggctgaacagacttcccgctgctggtg

SEQ ID NO: 122127 - DNA, 100 bp, Homo sapiens
gaaaaatgtactctgacctgaatcctgaattttccttgatggtcaaaagattaaggtgaatgaaatcctgtgccgttcttcagtctggagtgccttcaaa

SEQ ID NO: 122128 - DNA, 99 bp, Homo sapiens
ttcgagacttcagtatcctcatcaacttgataaaggtgacaaaaggtgagacactcacctagaacagtgccgtgctgctgctgggaagttgctttacac

SEQ ID NO: 122129 - DNA, 74 bp, Homo sapiens
tcgcctgctgctggctcctcactggaacccagtgacaatggacctctttttactgaattaaagttctaccaacg

SEQ ID NO: 122130 - DNA, 100 bp, Homo sapiens
agagattcatctttcatgcagtgacatgttgataaaaaatgatgccccctccatcccatcggaagaggaaggaacaaaaggtcccggaccccccggatct

SEQ ID NO: 122131 - DNA, 50 bp, Homo sapiens
cactagaatttcaagtcttcagaaacagtatggcagttaaacagggaaac

SEQ ID NO: 122132 - DNA, 100 bp, Homo sapiens
caggatggaggtggcggtcgcggcggcgggccgagccctgcggcgggcgggagaacctcaaccagaacccgcggacgctgctgcccaagttctatgggct

SEQ ID NO: 122133 - DNA, 100 bp, Homo sapiens
tgcagctacgaggaggccttcgaggctctggagtcctccacggctacgtctctagtgatccctgaaaagttccagcatattttgcgagtactcaacacca

SEQ ID NO: 122134 - DNA, 100 bp, Homo sapiens
acgtggtagaagctggctaacctccacttccacattccagcccaagggaaagtccaaggacttaaccaccaccatgtcgagcaaaagaacaaagaccaag

SEQ ID NO: 122135 - DNA, 100 bp, Homo sapiens
ccggctctcggtccgggacgtgcgcttccccacgtcgcttgggggccacggcgcggacgccatggacactcatgaggaccatgatacttccactgagaat

SEQ ID NO: 122136 - DNA, 50 bp, Homo sapiens
aagcgactttggtgagactctgcatcagtgagcctccttcagctcccatc

SEQ ID NO: 122137 - DNA, 74 bp, Homo sapiens
gcacccctgagcagcctggcctgccatgtccgggagaagacatggagcggtgcatgggtgccatgcaagagggg

SEQ ID NO: 122138 - DNA, 98 bp, Homo sapiens
ccttcgctttcatccacaagatccggcccatagccgagcagactggcatctgtaaggtgcggccgccgccgaacgtccccacaatcggtgtcattgcc

SEQ ID NO: 122139 - DNA, 104 bp, Homo sapiens
aaccccttcatgcccaaatcccggaaactccagcgtgtctccagccgtgggcgaactttctgaccaagtatacaactacccagagggcctaggagaagtgctgt

SEQ ID NO: 122140 - DNA, 98 bp, Homo sapiens
gtgcccgaactggccagactcctggagatcgacccgtacttgaagccctacgccgtggacttccagcgcaggtggtttcagacaccctcacaggtttt

SEQ ID NO: 122141 - DNA, 90 bp, Homo sapiens
ctcagttggaagcagccgatccagcctgcggagcctgtggggcaggtcttgagagctgatgacaataacatgggcaatggctgctctcag

SEQ ID NO: 122142 - DNA, 99 bp, Homo sapiens
ctactgtgcgctgtgctgggcgctgtcatgatcgtgatggtgccgtcgctcatcaagcagcaggtccttaaggatgaaattgattctgcagtaaagatg

SEQ ID NO: 122143 - DNA, 75 bp, Homo sapiens
gggaccacggtcaccgtctcctcagcgtctggatggttccatcaagggagaaatccgaaaacaggcactggacca

SEQ ID NO: 122144 - DNA, 100 bp, Homo sapiens
ccagccgcggggtggagcccgccgtgcccaccggccaccctccccggtgctaccaccaccgcgcaggttggtcaaagaaaaagtgatgtatgaaaaagag

SEQ ID NO: 122145 - DNA, 82 bp, Homo sapiens
ggaattctcggctggagagcagaagaccgaaaggagtgcgccggtctcggggaaatgcccggttccttcgtgcccacggtca

SEQ ID NO: 122146 - DNA, 75 bp, Homo sapiens
ctgaagaacagtgctcccagcaagcgagagattgcccagctcaagaaccaggcagtgggacctggtggtgtcaac

SEQ ID NO: 122147 - DNA, 100 bp, Homo sapiens
ctgcacttcgcattttggcattgacatttaattttagggtcctttatatagaagggagagtagatgcaagtgctgctggaccaggcgggctgctgtatcg

SEQ ID NO: 122148 - DNA, 80 bp, Homo sapiens
ttcaaggagaggcccagcatatacaaaggcatggaagtatgaaaatgaggaagaacttgtcgcttttcctaagcattagt

SEQ ID NO: 122149 - DNA, 100 bp, Homo sapiens
gggggtaaaagagatcaccgacaagatcaccacggacgagatgatcaaacgcctgaaggctatggtgaactaaacggtaatgctggagaaagagaaatat

SEQ ID NO: 122150 - DNA, 100 bp, Homo sapiens
cctcttctgtctgctgtctatgagggtcatgtttcctgtgtgaaattgcttctgtcaaagattacataccggttacggcacctccttcgtgcaaggtgtg

SEQ ID NO: 122151 - DNA, 96 bp, Homo sapiens
cttaactgccgaaggaaaatgtcactgtcccattggccatattttagttattcattttggacctggagaaagttcttcagaagatgctgtcatgat

SEQ ID NO: 122152 - DNA, 76 bp, Homo sapiens
ggaaattcagcctcaaaaccgtcctgctgcttgctgaccaaatggagaactttgaggtctttctttcatttgaaga

SEQ ID NO: 122153 - DNA, 101 bp, Homo sapiens
agtgctgctgttgcttcccgtgtagagatggcccactgcgtgaccttggttcagctgtccatttcctgtgaccatctcattgacaaggacatcggctccaa

SEQ ID NO: 122154 - DNA, 100 bp, Homo sapiens
gcttatcctgtgggggccgccgggctgcggcaaggtgtacattccaagcagagtggccctcatccttcagaatgtggatctgccgaattgaagaggcctg

SEQ ID NO: 122155 - DNA, 75 bp, Homo sapiens
ggctatgtgcacccagatgagttcttccagtcccctgaggtgatggcagacctaatctgggagcctgcaagtgac

SEQ ID NO: 122156 - DNA, 100 bp, Homo sapiens
cacagtcagcgccgaaagttgtgctaaaaagcaccaccaagatgtctctaaatgagcggttggatggcaagcatgtggtgtttggcaaagtgaaagaagg

SEQ ID NO: 122157 - DNA, 100 bp, Homo sapiens
ccatggacatcatttgcaggtcatacctgcttggctctgctttcccagcacgctgcctcaccaagaaagaatccagagaaggactggtggacttggaatg

SEQ ID NO: 122158 - DNA, 75 bp, Homo sapiens
ctggataaactctctcctcaaggtgtcacatttgaagacgagcactgaggatgaggaaccaactgaagaatatga

SEQ ID NO: 122159 - DNA, 83 bp, Homo sapiens
aagcacacactatggcgctgaaacggattaataagaaaccaccatcatgggttcgggtcccatagaccccaaagaacttctca

SEQ ID NO: 122160 - DNA, 90 bp, Homo sapiens
ggaagacgtcgctggtgctgcgctactgcgagaacaagtttaacgacaagcacatcaccactctgcaggctgccctgaggatctgtgttt

SEQ ID NO: 122161 - DNA, 82 bp, Homo sapiens
cgcgcagccacctggagaaggcgaaggaagaatcctgctcaaaaatgaggtgaattaatacttgggcgctcaggaaccctgg

SEQ ID NO: 122162 - DNA, 83 bp, Homo sapiens
ccctttaagatatgtgcaggatcaagttgcggcaccttttcagcgattctcaaagttggattggtggaaacaatgaaccattg

SEQ ID NO: 122163 - DNA, 51 bp, Homo sapiens
ccttcccgagtcgagagaacgtgcaggtgtgtgtgtgcaggccacagcagc

SEQ ID NO: 122164 - DNA, 95 bp, Homo sapiens
gaattcccaagccagagctttccagcacaacattctgaaattttttggttattgtaatgatgttgatcgggagttgagaaaatgcctgaagaatg

SEQ ID NO: 122165 - DNA, 100 bp, Homo sapiens
agcagcagctccagcaggcgctggctcctgctcagatctttccctagatcattctgacctagttgcagagttgttgaaggagctgtctaaccataatgag

SEQ ID NO: 122166 - DNA, 80 bp, Homo sapiens
ttccaaagcaatagctgatggaagaggagctccagcagcagcagttcctctttagagagcaaagaccacctacaggcacc

SEQ ID NO: 122167 - DNA, 100 bp, Homo sapiens
aaatggcgccctacagcctactggtgactcggctgcaggaaggaaaatcacctcggcagtgtttgaaggaaggatactgcaactctttgaagtacgcatt

SEQ ID NO: 122168 - DNA, 75 bp, Homo sapiens
aacttctacaagaaaacttacaaacaaccccatctccagacaaagcggctgagccagaggccaactgcagaggaa

SEQ ID NO: 122169 - DNA, 95 bp, Homo sapiens
ctaacaggatattcctcatgacattgctgtctgaattagcagcagcctctgtcaccatccaaagattacaacccatgaaaccattgaatttgtgc

SEQ ID NO: 122170 - DNA, 75 bp, Homo sapiens
gctgcaacctttagactaatgactgtccgaaacatcgcctccatctgtaatatgtggaagagaaagccaataccc

SEQ ID NO: 122171 - DNA, 90 bp, Homo sapiens
gccacatcctcatcaagttcgtcccctgtcctgccatctgctctgaggctttctcgcttgtctctcacagtgttgtactgctacttctat

SEQ ID NO: 122172 - DNA, 98 bp, Homo sapiens
gaacgactgcggcgcgctgctggacgaagagctctcctccttcttcctcaactatctcgctgacacgcagagttgtctgctggttctcagcttgaaga

SEQ ID NO: 122173 - DNA, 74 bp, Homo sapiens
taggcgtcagcgggggaacagctagcggcaagaatgaactaaaattgtcggtggtttctttgaaagaaatacaa

SEQ ID NO: 122174 - DNA, 98 bp, Homo sapiens
cctgcacaagcagccccgcttctgggctagcatgatggaggcagccatggtgctcatcggggactcaggcgtgggcaagagcaacctgctgtcgcgct

SEQ ID NO: 122175 - DNA, 75 bp, Homo sapiens
ggagtgtgcgtgcgcgccgagcggagggtgtgaagacagagaatgaccacatcaacctgaaggtggccgggcagg

SEQ ID NO: 122176 - DNA, 82 bp, Homo sapiens
gggaaatggctgctgttgcttctgggccagaggaagagaatgaggtcaaaatgcagatcttcgtgaaaacccttaccggcaa

SEQ ID NO: 122177 - DNA, 100 bp, Homo sapiens
gggccttgataacacagagtttcaagggtaaaggatttagaggataaacttcactctgtgcagctaaccaggaagaaggaagaggaaacatttaagagga

SEQ ID NO: 122178 - DNA, 100 bp, Homo sapiens
gaccaagttccggccagttcgacctcgaggatccagaggtggagacggctggcgcccatgcggctctacacgctctccaagcgccactttgtcctcgtgt

SEQ ID NO: 122179 - DNA, 74 bp, Homo sapiens
cagtggtcgcttcttctccttggaatcatgtggatcctctcagctccatgaaaatagtggttctcctgaaactt

SEQ ID NO: 122180 - DNA, 74 bp, Homo sapiens
ggaagctgacagagatacctacagacggagtgctgtgccacggtgtccgcaatgttgccagtgtctgtctgcag

SEQ ID NO: 122181 - DNA, 82 bp, Homo sapiens
ttctcagagctgcccctggacgaccaggtcatcctgctgcgggcagatgccgacaaaaggatcaaggtggcgaagcccgtgg

SEQ ID NO: 122182 - DNA, 100 bp, Homo sapiens
cccagggcaagccccgctccggccaacaatgactgtgaagtgctgaccacactcaccccagacactggccgtatcctgtccaagctacatactgtccaac

SEQ ID NO: 122183 - DNA, 100 bp, Homo sapiens
attcgcatccaaaatggaatccgagacagaaagaggaccttaggttttcctttggaatatggataaatacaccatgatacggaaactagaaggacatcac

SEQ ID NO: 122184 - DNA, 99 bp, Homo sapiens
ggatcggggacccgctgatcttccagctcccctcacccaacgtcgtgttcgagaacttgtcttggacaattgcaaatcaaatgatggaaaaattgaggg

SEQ ID NO: 122185 - DNA, 101 bp, Homo sapiens
cccggacagtttcgactacgtgaaggccctgcggcagcgcatcgcggagaccagattgcattctcacaacacaatacaatcatggaccttgtgcagttttt

SEQ ID NO: 122186 - DNA, 51 bp, Homo sapiens
tcataccttaatgatgaaccaccagaagaaatggcaagatattcttaagga

SEQ ID NO: 122187 - DNA, 75 bp, Homo sapiens
tcagtccctgctctgtgcgcgcctccatctgggccatggatgggtatcttgagaattacaaatgctatagaaaaa

SEQ ID NO: 122188 - DNA, 101 bp, Homo sapiens
gtccaaatgaattatgtcagcaacgtatccaagaaaaggcgacggcggattgacagaagtatgattggagagcccacaaactttgtgcatacagctcatgt

SEQ ID NO: 122189 - DNA, 131 bp, Homo sapiens
gagggagacaaagcagcgcccgtctgcttcgggcctctggaatttagcgctcgcccagctagccgcaggtgtcatggagaaactccagctgggcccagagattctgcagcgggaaaatccaaggcttattt

SEQ ID NO: 122190 - DNA, 98 bp, Homo sapiens
gaggatttagttcaaatttgtggtgcagccgatggaattcggctctataattcactgaagtcaaggcgcctgatcacagattcaaaagttaaattaaa

SEQ ID NO: 122191 - DNA, 83 bp, Homo sapiens
gaaggactggggccacgtggagctgctggaggaagccttgaagaaccaatgtactgatgtggggattaaagagggtccacttt

SEQ ID NO: 122192 - DNA, 100 bp, Homo sapiens
cagagtccccgtacgcctacagtaacggcttgttgattggtgctggctgtgccctctaccccttgggctgggacagtgaggaagtccggcagacttgtgg

SEQ ID NO: 122193 - DNA, 74 bp, Homo sapiens
aaactgtcccgggtgggaagaggaacagcctatgtgggcttccacggaggtacaggtttgcagattccgccagc

SEQ ID NO: 122194 - DNA, 101 bp, Homo sapiens
agagccctgacttcctggacatcaccaaccccaaagccgtgaaacatgacagctgccctacaggcagctctgaagaacccccctatcaacaccaagagtca

SEQ ID NO: 122195 - DNA, 96 bp, Homo sapiens
ctcgcactctgttcttccgccgctccgccgtcgcgtttctctgccgacccagatccccagagaggtggccctggacctggagtcaggaggcggtgt

SEQ ID NO: 122196 - DNA, 89 bp, Homo sapiens
ccaggctcatcctgtccatcgtgtgcctgatgatcacgcagctggctggcttcagtggaccactctcggagagtcctgcctctctgccc

SEQ ID NO: 122197 - DNA, 90 bp, Homo sapiens
actggcattggaacttcctgttctgatagcgtggaaggttatcaatactctggctgaccatcatcatcgtgggactgactttggtggaag

SEQ ID NO: 122198 - DNA, 75 bp, Homo sapiens
ggcagaaaaagaggctaaaactcaggctatacttttggagatggttatcaatactctggctgaccatcatcatcg

SEQ ID NO: 122199 - DNA, 74 bp, Homo sapiens
aacggggtgctggagtccgaagctgggcaaccccaggctctggaaagagccagacttctcagaggtcagtctgt

SEQ ID NO: 122200 - DNA, 83 bp, Homo sapiens
ctttctggcctggaggctatccagcgtcgggaaagaggttaaagaagacacgcaagtatgatatcatcaccactccagcagag

SEQ ID NO: 122201 - DNA, 100 bp, Homo sapiens
ctgaaccgcatcttttcctcttctgaacatgcacccccagcagccaccagcagtttgcagacctgacagacgctgctgcccgcaacgcggagctgctccg

SEQ ID NO: 122202 - DNA, 100 bp, Homo sapiens
gccttgctgtgctacaaccggggctgcggtcagcgcttcgatcctgagaccaattccgacggttgtatccacgccatgcaagtgcgctcaacaaccttgg

SEQ ID NO: 122203 - DNA, 95 bp, Homo sapiens
ccgagcccagcgagcttgacaacccctttcagtgcacagtgacttgtggccgagggttacggtaccgggttgttctgtgtattaaccaccgcgga

SEQ ID NO: 122204 - DNA, 101 bp, Homo sapiens
cacggaagcatggtgaaaactatagtgtggactacctgacagatgttttgctctccaatcctgaagtcaaaatggaatgcatctctgctcttcctctgggc

SEQ ID NO: 122205 - DNA, 80 bp, Homo sapiens
agatccatgagtacaatcaggacctgatccgcaaggtacatgtcccagagcaagcacacggaggcccgggagctcatgta

SEQ ID NO: 122206 - DNA, 98 bp, Homo sapiens
aatcaggaacttttacaaagccagctgactgaaaaggactctatgattgaaaatatgacgcagtaaaacgcaggactcttcccgcttggattcgcgaa

SEQ ID NO: 122207 - DNA, 98 bp, Homo sapiens
gcagctgcaccccaccttgatccagcggacttacgggacggagctgaccaccgagagcccactgtgggtcggcgcctggtgggtcggcttcctgggct

SEQ ID NO: 122208 - DNA, 74 bp, Homo sapiens
aagacgttggctttggtttgaggaggctgaggagagtcatcttagtgggatttggggaagcaacagggctgtgt

SEQ ID NO: 122209 - DNA, 88 bp, Homo sapiens
aaacgttttcctgcccacagggtaattttagcagccaggtgccaatattttcggaactagtttcagaaggaccagttccctgggtttc

SEQ ID NO: 122210 - DNA, 101 bp, Homo sapiens
acaggggagtgcaagcagcttccaagccctcaaagtttgaaaggcaaaattctagtgaaggtatgtcgagagtaccaacgtggcaattgcaaccgaggaga

SEQ ID NO: 122211 - DNA, 50 bp, Homo sapiens
gcaagtgaaactcctctagatgttatgatgggactcaatttaaagccaat

SEQ ID NO: 122212 - DNA, 51 bp, Homo sapiens
gcctgacctcttacttcctgtggcggaagcgagagagtgagagtgaaagtg

SEQ ID NO: 122213 - DNA, 86 bp, Homo sapiens
aaggatcatgtctgcgagccaggattcccgccctgggcgctgcctatggcacagccaagagcggtaccggcattgcggccatgtct

SEQ ID NO: 122214 - DNA, 100 bp, Homo sapiens
ggtcgcaagacacagagcagtgggcctgggctgcagaagaatatggatatcaaagtattgcagagtgccttagcagccatccgacatgcccgctggttcg

SEQ ID NO: 122215 - DNA, 97 bp, Homo sapiens
ggaagaaaatatagcagatatggaaggtgcactggattaaagcctgtggtttccacagaagcaccacctatcatatttgccacaccaactaaactga

SEQ ID NO: 122216 - DNA, 98 bp, Homo sapiens
ccgccgagtcctagcgcctggcctgcgcgccgctgcccgcgccacaggttcaccaagttgaagagtcttaacctttccaataatcatttaggggactt

SEQ ID NO: 122217 - DNA, 100 bp, Homo sapiens
gtctggttagaccccaatgagaccaatgaaatcgccaatgccaactcccgatctgtgccagttcagaagcaggcgagcctcttccctgatgaaaaagaag

SEQ ID NO: 122218 - DNA, 135 bp, Homo sapiens
ctctcctcttcccgtctcccagcgtggatgagggcgcctgcagatcccggctagggcacggaccgcctaggccgagaggaattccagggaagaaatgtggtacaatcatacttacagcagaggaattaaactgtt

SEQ ID NO: 122219 - DNA, 100 bp, Homo sapiens
gtgctggtagctgacgggcgagaaggcctcgtgcaagcgattataagcgccatggctatggctagtgttaaattgcttgccggtgttttaagaaagccag

SEQ ID NO: 122220 - DNA, 75 bp, Homo sapiens
tcatattgaagaaactgttagacttcattttgaagacaggtggtggcattgggggacgtgccggatggtacggtg

SEQ ID NO: 122221 - DNA, 82 bp, Homo sapiens
catcctgccgtccttctccactttcgccagcccgtgccgcgagcgcggcctgcaggagggaagcagtttaagtgcacggtgt

SEQ ID NO: 122222 - DNA, 100 bp, Homo sapiens
ggaccactggagcctcggtgagggactccgccgtggtcatggaggagggaagtccgggcgaggttcctgtgctggtggagcccccagggttggaggacgt

SEQ ID NO: 122223 - DNA, 86 bp, Homo sapiens
ccagcacccgcctgccaggcgctcgggggccgaactggccctggactacctctgcagggcgtgatggtgggcatgggtcagaagga

SEQ ID NO: 122224 - DNA, 75 bp, Homo sapiens
gatgctattgagttaaatgcagccaattatacagtgtgaacatttccccagaggagctcaaaatggagttgccgg

SEQ ID NO: 122225 - DNA, 100 bp, Homo sapiens
tcagggatgggaaagtgtacattcaccatatgtcacccactggaggcttgacacaactctcatagactttactgacatgaagtgccaacgaggggatcta

SEQ ID NO: 122226 - DNA, 80 bp, Homo sapiens
ccgccgctgcgggcccgctccgacgcggaagtatttggcatgatcattactatcggccagtctatcgtgtatgtgatgac

SEQ ID NO: 122227 - DNA, 100 bp, Homo sapiens
caaatgaattctataagaccattccccggttttattataggcaacctgataacattgtttatgtgatggatgcctccattgggcaggcttgtgaagccca

SEQ ID NO: 122228 - DNA, 90 bp, Homo sapiens
ctgaaagctagaagaaaaggtgtacttgcaagaaacctcaggacttgagtaacagcaacatgattctacgggaaaatgtgggccccctcc

SEQ ID NO: 122229 - DNA, 98 bp, Homo sapiens
gcaaaatattcaggagaccgtcgttgccttgtatttccagagaacagacaaagaaacagccttggtataatagcacgttagcatcaagacgaaaacga

SEQ ID NO: 122230 - DNA, 100 bp, Homo sapiens
ccattcagatgggatctttccggatcaatccagatggcagccagtcagtggtggagagtctcacattcccagtcaggaggtcccaggcacccaggtggga

SEQ ID NO: 122231 - DNA, 100 bp, Homo sapiens
cgctgtgtggttgcaacggagataaattcccggaaccgcgattcggcgtgtcagacctccgtgctgcacatgtgctccctcttccacgcgttcatctttg

SEQ ID NO: 122232 - DNA, 115 bp, Homo sapiens
gagaccaaatttgagatgatcaaacttatagatattgcacgacagactgcacagggcatggatgagaaagatcagtctaaagaaaaggagaagaaagtgaaaaaaacaattcctt

SEQ ID NO: 122233 - DNA, 75 bp, Homo sapiens
attgccaaggctggcattccgggtgtggatgaggtcaccattgtcaacattttgaccaaccgcagcaatgcacag

SEQ ID NO: 122234 - DNA, 98 bp, Homo sapiens
cagaagctctttgtgtatgaccttcacgcagtcaagaacgacttccagttttttgtagcatcagatccaacagttaaaacagatcgactgtggcacga

SEQ ID NO: 122235 - DNA, 75 bp, Homo sapiens
cacgtgtcaacaagaatgccttctgattctgatgattctttgaccaaaaaagcccggattgcatttctacaaggc

SEQ ID NO: 122236 - DNA, 100 bp, Homo sapiens
gagtgcagagccgcctttccagcatgcaggggctgctcaggtactccaaagattcaggtttactcacgtcatccagcagagaatggaaagtcaaatttcc

SEQ ID NO: 122237 - DNA, 96 bp, Homo sapiens
aggctgaggagaaggaggagcgggccgtggaggcttcgccgcctagagacctgtcggccatggagcctaatgatagtaccagtaccgctgtggagg

SEQ ID NO: 122238 - DNA, 100 bp, Homo sapiens
tgcaaacagtggttctgctggattgataaacccagctgctacagggagaaacaaaggcagcgctgccctcgggggagcattggccctggcggaacgcagc

SEQ ID NO: 122239 - DNA, 90 bp, Homo sapiens
cttggcgaggtcctcactcagctgtcctccaggttcaaacctcgagtccctgtgatcaaggtgtggacattgcaagcagtttgctccgga

SEQ ID NO: 122240 - DNA, 75 bp, Homo sapiens
aaatggggctctgtcactttaagtacagctggagcctggtctgcaagaagaatctggacagtaccactgtggccg

SEQ ID NO: 122241 - DNA, 75 bp, Homo sapiens
aagacgacgggcagccccggactctgccaaaaatgaacctgtgggaaagaaaacctctgacaaaagagacagtga

SEQ ID NO: 122242 - DNA, 90 bp, Homo sapiens
ggagacgggagtattatgaaaagatcgtcagcctcactctgggtgaaataatcaaaggtgtgaatagctcagatccagtcctatgtttcc

SEQ ID NO: 122243 - DNA, 100 bp, Homo sapiens
ggaggaggggtgtttctggccacgtgcttcaacgctctgctgcccgctgtgagggaaaaggccgccatggcatcagatgaaggcaaactttttgttggag

SEQ ID NO: 122244 - DNA, 80 bp, Homo sapiens
tttattcatcgactcagtcagtctcttggtttggtctctaaaagtaaaggggtcaaagaattgactgtagatccaactgc

SEQ ID NO: 122245 - DNA, 100 bp, Homo sapiens
aacctgatgccagccatctgtcaaggaagacaggaagtaacagtgcaggctcagttcacgcaaagaatctgctccacaagttttgcttccagaagaagag

SEQ ID NO: 122246 - DNA, 75 bp, Homo sapiens
actggttccatcgtatggctcatggtgtgatgaatgcagactctgctaccattttggctgtttggatcctccttt

SEQ ID NO: 122247 - DNA, 74 bp, Homo sapiens
ctctgtgaagagaaagcaaagtcctattccaacagtcatgagcaatgaagttggagcagaggctgaaaacacag

SEQ ID NO: 122248 - DNA, 75 bp, Homo sapiens
atcttatctacgaaatgattcagatttgttcccgacaaggagttttctggttcagaccgtagacagagaggccga

SEQ ID NO: 122249 - DNA, 75 bp, Homo sapiens
gggaggtgccagcccgcgaatccggccggaggtattgttggtgaggctgatgaaaatggagaagattactatctt

SEQ ID NO: 122250 - DNA, 97 bp, Homo sapiens
aaagttttcagcctcatccagcaggcggtgacccgctaccggaaggccatcgccaagctcttctgttagaaatagtatctttgttttcctttgctgt

SEQ ID NO: 122251 - DNA, 100 bp, Homo sapiens
cgacagtgactaccatgacgaaaacatgtactacagccagtcttctatgtttccacatcggtcagaaaaagatctgcagaagaaagatcagcaactggag

SEQ ID NO: 122252 - DNA, 51 bp, Homo sapiens
aggggggttgttttgatgaaagtgaaagtttacttcaacttcagtggaagc

SEQ ID NO: 122253 - DNA, 90 bp, Homo sapiens
aagtcatcccaaatatggttccatccctaaacttatacagctgaagccatttattggtatcttggatggttaacatctaaatgcttaatt

SEQ ID NO: 122254 - DNA, 100 bp, Homo sapiens
caagaaaaaaaccacaaatgtttttctgttttgcctgaatacatgatttaaacaagagatttccacagaaggatcctggtgcacctgagccgtggagggg

SEQ ID NO: 122255 - DNA, 50 bp, Homo sapiens
ccgcccccggggaggggccgtcctgcagagagacaagagagacacctcca

SEQ ID NO: 122256 - DNA, 100 bp, Homo sapiens
gacctgaagaagatgaacaagcgccagggaatggcatttactttacaagaacgacaaatgcttggtcttcaaggacttctacctcccaaaatagagacac

SEQ ID NO: 122257 - DNA, 100 bp, Homo sapiens
gagcaggctgagcgatacgacgttggttagtctgctgctaattggaattgctgcgtggggcattggcttcgggctgatttccagtctccgagtggtcggc

SEQ ID NO: 122258 - DNA, 82 bp, Homo sapiens
aaagagttccttgctcatctaaaagaggcaatcaccgttcagtatgaagtgctcctttgtgtacaagatcatgatgatccag

SEQ ID NO: 122259 - DNA, 90 bp, Homo sapiens
catggcccactgcatccgcctggcgctcatccgcttccacgtcaaggtgaatgaaaactttgccattgatttgatagcagagcagcccgt

SEQ ID NO: 122260 - DNA, 83 bp, Homo sapiens
accaacattcccaacagccaccaccaccaccagatgatcgcaagcaggactggtcagaccatgctatttggtgggaacagaag

SEQ ID NO: 122261 - DNA, 95 bp, Homo sapiens
cagggaaaatcctgaggaagatgaagaccagagaaaccctgcaaaggagtccctagagacacctagtaatggactggggttttaaggggtgtggc

SEQ ID NO: 122262 - DNA, 90 bp, Homo sapiens
ggagcagcaaacgcagagacaaaagaaacgggccccgactgccttttaggtgtccctattgcatatgataacatcaaagttgtgggagag

SEQ ID NO: 122263 - DNA, 90 bp, Homo sapiens
tgtttccccagaggctgttgcagaacctcctcagccaacggcagctccactcgcgccggacacagggagcagcgagcacgcgtttcccgc

SEQ ID NO: 122264 - DNA, 82 bp, Homo sapiens
cacgaggagcggcaggacgagcatggctacatctcccggtgcttcacgcggaaatacactgatgctattgctgagattagag

SEQ ID NO: 122265 - DNA, 100 bp, Homo sapiens
ttggaaccatctacggtgacctgaaagtgggggatcaggtctggctgtttattgatgagggtaagaaggtggatggctctgtaaatgcctatgccataaa

SEQ ID NO: 122266 - DNA, 100 bp, Homo sapiens
cggtgctactcaaggcccgggaagatgaaggatttgggggcagagcacttggcaggtcatgaaggggtccaacttctcgggttgttgaacgtctacctgg

SEQ ID NO: 122267 - DNA, 88 bp, Homo sapiens
aacaatgagatcgtggacaagatcatgggcaaaggacagatccagggcagctggtggaatttttgaagaaaatggaatctcgaggccc

SEQ ID NO: 122268 - DNA, 98 bp, Homo sapiens
aaaataataagtttatttgttatgacggagactgccatgatctcgatgcacgttgtgagagtgtatttggaaaagtatgacatgatgggaagaaatca

SEQ ID NO: 122269 - DNA, 75 bp, Homo sapiens
tcagaaagaacttagagagtgcactgagattcggtaacccccttctggtccagtctattatcctcccagtccaca

SEQ ID NO: 122270 - DNA, 82 bp, Homo sapiens
agaatagacctgaagacaaaaatccagaagtacaagcagtctggtacaggtttgcagattccgccagcagcacagcaagctc

SEQ ID NO: 122271 - DNA, 90 bp, Homo sapiens
caccatcaacaaagaagaccacacactgggaaacatcattaaatctgccggtggtggtgtgcacattgagccccggtatagacagttccc

SEQ ID NO: 122272 - DNA, 83 bp, Homo sapiens
accgcaggtcgaggacggtcggactcccgcggcgggaggagcctgttcccctgaggtttctgagtcccttcaacatgatcctg

SEQ ID NO: 122273 - DNA, 82 bp, Homo sapiens
atcacagacaacagcctggtggcagcggaatcagagatcattgatttcttcctgggggcctctctcaaggatgaggttttga

SEQ ID NO: 122274 - DNA, 75 bp, Homo sapiens
aaatgtaattcaggttacgtggtacaagatgagcaattcttaggttttggctcagatgaagaagtcagagtgcga

SEQ ID NO: 122275 - DNA, 118 bp, Homo sapiens
caacttttttcgaaagctgggtttcccgggagatcccaggcggtgacagagtggagccatggctagagggggatatgagactttctactcggaatatcctgagtgttgcgtggatgta

SEQ ID NO: 122276 - DNA, 144 bp, Homo sapiens
ctctcagcagacctggcgcactgcccccgagaaggccggagagaccggtgggtccgctgacacacaccagattgttaaaggaaatgggctggcaggaagacagtgaaaatgatgaaacatgtgctcccttaactgaggatgaaa

SEQ ID NO: 122277 - DNA, 97 bp, Homo sapiens
aagccgtggaataggtgtatcaagtaatggtgcaaagcctgaaagccacctgagctgaagattcccttgagaacaagtactgtcctgtggtttcatg

SEQ ID NO: 122278 - DNA, 82 bp, Homo sapiens
cgcgctggtgcagccaccctcgctccctctgctcttcctcccttcgctcgcaccatggactggagactgatgcatgaggggg

SEQ ID NO: 122279 - DNA, 50 bp, Homo sapiens
agaagatggaaaaaacttgtttaatgggaaaaactggtctacttcctgga

SEQ ID NO: 122280 - DNA, 75 bp, Homo sapiens
aagctggccgagcaggctgagcgatacgacgcattttgaaagcgaagcagaagccgtagaatcagcggcgagcct

SEQ ID NO: 122281 - DNA, 100 bp, Homo sapiens
gaaacatattccgtggtgtatctgtacagcagtttcctcatccctgcagctgtgtttgaacagatcagaatcaagctttgcgactctgtctgggtagcac

SEQ ID NO: 122282 - DNA, 90 bp, Homo sapiens
gacccatatgccaacccacctaactacggaaaacctgatcccaaaattattgaaaacactcgaaggacggagtctcgctctatcgcccag

SEQ ID NO: 122283 - DNA, 82 bp, Homo sapiens
gaccctcaacttggctactccctgccttgtgtggaatgtgacagtgatgataacatgggtgccaaaaatacttcaataggag

SEQ ID NO: 122284 - DNA, 82 bp, Homo sapiens
cagagagggaagagattcagccagcacactcctcgcgagcaaggccctgaaaaggagcctttaaaagtcaattctactccat

SEQ ID NO: 122285 - DNA, 83 bp, Homo sapiens
cggccggcggcggcggcggcggcggcggcggcgcaggcgcttaaattcctagcgaagtgccgtaagaaaaagaaactatttgc

SEQ ID NO: 122286 - DNA, 100 bp, Homo sapiens
cccggcccctcaaagcagaggtgaccttgccctcatcgagagcgcacacaagacgccactgtaaaaggatgctagacatgcagctgaagaagagatttat

SEQ ID NO: 122287 - DNA, 108 bp, Homo sapiens
tgacgcccccctcccgcccggaaagctgcccagccaccagcaaccccccaggttctggctccttggcagcaatggctgtatttgaagataagtttaggccagacatgg

SEQ ID NO: 122288 - DNA, 83 bp, Homo sapiens
aatcgtatcgtatgtccgctatccagaacctccactctttcgcaaattgtggctactaatttgccccctgaagatcaagatgg

SEQ ID NO: 122289 - DNA, 100 bp, Homo sapiens
aggagatcactgccctggcacccagcacaatgaagatcaagatcctcctggccaacttcttggcccagacagaggccctgatgaggggaaaatcgacgga

SEQ ID NO: 122290 - DNA, 83 bp, Homo sapiens
cggctggagagcagaagaccgaaagctcaccatggatgatgatatcgccgcgctcgtcgtcgacaacggctccggcatgtgca

SEQ ID NO: 122291 - DNA, 90 bp, Homo sapiens
tcaagatggcggacaaaacgccaggcggatctcagaaggccagttcaaaggaacttgaaatgcaggctcgagctcatggactttccctta

SEQ ID NO: 122292 - DNA, 74 bp, Homo sapiens
ctggagcataatgaagtggaaccgtgagcgcagtgtcacccgcaactacctagactggctcacgtccatccctt

SEQ ID NO: 122293 - DNA, 82 bp, Homo sapiens
tgaactgaagaagcttgggctcacttccacaaatgatggaggtttgcttctgaataacccttcggcattagctatgcatgag

SEQ ID NO: 122294 - DNA, 82 bp, Homo sapiens
cccctgtgtggccaagaagctggtgtgcggagatgaaggtactccaaagattcaggtttactcacgtcatccagcagagaat

SEQ ID NO: 122295 - DNA, 50 bp, Homo sapiens
atttaacagaagataatccaaatctttcttctctcctgcgctatggtgga

SEQ ID NO: 122296 - DNA, 82 bp, Homo sapiens
ggaccaagggaagtgtcttcacaaagatgaggctggctacagcaaacatcattcaagatgtccagcaaagggagcagcacag

SEQ ID NO: 122297 - DNA, 100 bp, Homo sapiens
aagacacagtctccatcatcccagagtgcctggaagagctgggatgtctggttgagtcctatggcatgaatgtttgccaaccaaccccaggaaaagcctt

SEQ ID NO: 122298 - DNA, 51 bp, Homo sapiens
ggaaaagatgcttctgggaacaagcaagccaaggaaatggtgttagagtta

SEQ ID NO: 122299 - DNA, 82 bp, Homo sapiens
agatcctcaagaagaagaagttgcgaaggatccccaacggggaggccaacgtgaagaagacccagatgatgtggtaccagtt

SEQ ID NO: 122300 - DNA, 97 bp, Homo sapiens
tgaaagaggccgtggagcagtttgaatcgcaagttgacatgaagacaatggagactgcagagaaactggctagatttgttgctcaggtgggaccaga

SEQ ID NO: 122301 - DNA, 100 bp, Homo sapiens
gagctgtcagttttctgtggatgaaggggcacaagttgaccagtctgtcttcgaggagctcatcaagggtcatctcccagagctggcagagcacatgaac

SEQ ID NO: 122302 - DNA, 49 bp, Homo sapiens
cgcagacctttctccaagaggagctggtattccctctcgagtggtttcc

SEQ ID NO: 122303 - DNA, 90 bp, Homo sapiens
cgcaaccattgacgccatgtcgggttattcgagtgaccgagaccgcggccgggaccgaggttaccggtattgtaagaacaagccgtaccc

SEQ ID NO: 122304 - DNA, 83 bp, Homo sapiens
ccgtggatccgctggagcggagccggccgtacgcggtgctgcgagggcagaacctgggtgaaatgacaatggatgctctgttg

SEQ ID NO: 122305 - DNA, 90 bp, Homo sapiens
tcttttgtttgacaaaatgcctgaagttataactattcatttgaagtgctttgctgctagtggtttggaactttccgcctctatcgggag

SEQ ID NO: 122306 - DNA, 100 bp, Homo sapiens
cgcacagcaagtcacccgaacaccattcacagtttgtaacagacgtggatgaagaatagctctgcagcttcagaacttgatgatgatgttccaaaagcaa

SEQ ID NO: 122307 - DNA, 101 bp, Homo sapiens
gccatgatggctgtgggcggtaaacgcggttagtgcaagcatctgggccatcttcaatgttcaaaccttgtactactcagctgatcacaagctgcttgatg

SEQ ID NO: 122308 - DNA, 50 bp, Homo sapiens
atgatcgtcatgggacacagaagacaccccgaagttggagatcaaggtca

SEQ ID NO: 122309 - DNA, 88 bp, Homo sapiens
aatccatttaagtttaatggagataacgaaggaggcccaacttcattcaataaggagcctgacggatttatcccagacggtagaacaa

SEQ ID NO: 122310 - DNA, 100 bp, Homo sapiens
ggaaatctggactctttgcctgtttggatagccgctactggcgccggtggaatcggttctgcagaaggaagtgccgcgccgcagtcaagtctaatgtctt

SEQ ID NO: 122311 - DNA, 83 bp, Homo sapiens
ttgttaaggattccaagtaactcttatttggttgtggacctggcctattagcagatgccaagatgcgggtatttgaacgttca

SEQ ID NO: 122312 - DNA, 80 bp, Homo sapiens
cgccccgcccggcagcgagcggcgccttccaactccggcttctaccctcctcatctttggaagttgtcccagaagcagcc

SEQ ID NO: 122313 - DNA, 83 bp, Homo sapiens
tcaaggattcggagaaaggtctctacaggtccctcctcgttagtatagtggtgttggagaaggcttctggtgaaggatttggc

SEQ ID NO: 122314 - DNA, 75 bp, Homo sapiens
ctcagcgtcgctggcagccgctgtacttggtcgggaaagaggttaaagaagacacgcaagtatgatatcatcacc

SEQ ID NO: 122315 - DNA, 110 bp, Homo sapiens
tcgggaagccggcggaccgcgtcctgcgccggagcaggttttgggtcctgctcctcggtggtgttccttcttagacaacttgaccgaagaattagaagagaatccagaaa

SEQ ID NO: 122316 - DNA, 117 bp, Homo sapiens
gctgacaagctggtccgtgatatttatggaggagattatgaaagatttggtttgccaggttgggctgtagcatctagcatcagacaacagtcagcgctttcgagaaacctgttttgc

SEQ ID NO: 122317 - DNA, 75 bp, Homo sapiens
caacaaggcttccctgtgcatcagcaccaaaagtgccactgattaatgaacttgaatcagcaatacatcagctgt

SEQ ID NO: 122318 - DNA, 100 bp, Homo sapiens
ttgtggaaacgtctccaggttacaaacccagatctcacacaagtggtcagtttggttgtggaaaggcccaagtctgttttggtggtctgagaggaaaaaa

SEQ ID NO: 122319 - DNA, 74 bp, Homo sapiens
gcccgggcggggagggcatgttccgtggcctcgcccaggccgacggctatcatggtgaacttacttcagattgt

SEQ ID NO: 122320 - DNA, 83 bp, Homo sapiens
ggaggagctccccagctggtggctggagcgaccccttgttctttggtggcgctgtgtgtcccggcatggatatccggaacaac

SEQ ID NO: 122321 - DNA, 51 bp, Homo sapiens
gcaggaacagagtttgtagctgattccaacaatgtctcacccatcttggct

SEQ ID NO: 122322 - DNA, 88 bp, Homo sapiens
caaatgacagtggatcatttgaagatgcttcaggcaacagggggtaaaggccttcagaacaacctgtcccccaagacaaagggcactc

SEQ ID NO: 122323 - DNA, 101 bp, Homo sapiens
ggagcccatggaatcggtcctggaggacaggtatgggcactaggaaaagacttcttccatcaagcttaattgttttgttattcatttaatgactttccctg

SEQ ID NO: 122324 - DNA, 74 bp, Homo sapiens
tttctttctcagaaagcagaggctcagagcttggagacagacgaggtctctttattactatccacgatcgaggg

SEQ ID NO: 122325 - DNA, 75 bp, Homo sapiens
gacagtgaagagaggcctctcccaaagcacctgcgcagtgaattttgaagattgcaccggtcgacaaaggacagc

SEQ ID NO: 122326 - DNA, 74 bp, Homo sapiens
attcagccagcacactcctcgcgagcaagatctctggaaacatggctacagaacatgttaatggaaatggtact

SEQ ID NO: 122327 - DNA, 100 bp, Homo sapiens
aagctgtgtgcattagtacaaatgtctctgttggatgaacccaatcccaatagtccagcaaacagccaggctgctcagctgtaccaggagaacaaacggg

SEQ ID NO: 122328 - DNA, 82 bp, Homo sapiens
ctcggagaaacaggcgccgcgggctccgcgcccggccggacccgggcccgagagagtcacaccccaaagcctctttattctt

SEQ ID NO: 122329 - DNA, 83 bp, Homo sapiens
gctcaaggacacggtctacaccgacttcgacggagtctgctacaccatttttgatttgggcttccgctttgatgtggcatggt

SEQ ID NO: 122330 - DNA, 101 bp, Homo sapiens
aggaccacggcagggagcctcctcaagtgggaaccactgagattaactcattatccgttggcagcaactgaaaaagactgtggatgacctgcaggccaaac

SEQ ID NO: 122331 - DNA, 100 bp, Homo sapiens
gttctggcagattctggaaactgtacattgaagcagagcactgatgtcagtgcgttagtagaagaaatccagaaggcagaacctctactcacagcttcac

SEQ ID NO: 122332 - DNA, 50 bp, Homo sapiens
ccccctccctcatacaactggacacggttcggagatgatcgagacgcagg

SEQ ID NO: 122333 - DNA, 100 bp, Homo sapiens
gagtaactgtcccctctgactaccatttctaaggtttgctttaagaaatagtgctcccttcagaatggaagaatttatctgcctcttatttgatgtggat

SEQ ID NO: 122334 - DNA, 75 bp, Homo sapiens
tgcaggtattggttggaagagaatctgagtacaaacaggagcgagcccagggcgtggtgctgaaagtgctcacaa

SEQ ID NO: 122335 - DNA, 114 bp, Homo sapiens
tttatcacactgactgcttcacctgcgactcgtgtggggtcaccagtcgttggcacaccaagaagctgccccgcaagacccaccgaggcctgcgcaaggtggcctgtattgggg

SEQ ID NO: 122336 - DNA, 74 bp, Homo sapiens
ggaattcttccagtttctttatcctaaaactggtgtaacaggggatgacagcatgggaggcaatggctccacat

SEQ ID NO: 122337 - DNA, 99 bp, Homo sapiens
caaattatgctgcagcatattgtactggcctgctgctggcccgcagggttgttcggaatcctataattgaaaaacagtaaagatggaaaaccagttatt

SEQ ID NO: 122338 - DNA, 96 bp, Homo sapiens
gctggagcgggcggagctgtgcgagagcctcctcacttgggtgagcacctgcggatctgtccccagggctacacctgctgcaccagcgagatggag

SEQ ID NO: 122339 - DNA, 98 bp, Homo sapiens
atgctatgtgagatcttgaaagtgggcgagttgccacagaagttgggcctcattgggcctccaccacctccactgtcatcagatgaatgggagaaggt

SEQ ID NO: 122340 - DNA, 74 bp, Homo sapiens
cggagcgcggagcccggctcccgcaccatggaggaggacgacagctacggtttgtttctgcgtcacatgatctt

SEQ ID NO: 122341 - DNA, 75 bp, Homo sapiens
cggcacagcagatcaacaagctggaggagctgtggaaggttgtaacctccatttctgacatccccactggtattc

SEQ ID NO: 122342 - DNA, 87 bp, Homo sapiens
caaatccagcagggaggtccagatgaaaaagaaaagactaccgcactgaaaggctctcaaaattagagagatgtgtaattgtccacc

SEQ ID NO: 122343 - DNA, 50 bp, Homo sapiens
acccgtactgggcctactctgatatgaattgagaattcgttatttgccaa

SEQ ID NO: 122344 - DNA, 98 bp, Homo sapiens
gaccaccagccacacatccagattaaaagccaggaagcacagcaaacgtcgagtgagagatgccatggacaatattaccaggcagaaccaattctacg

SEQ ID NO: 122345 - DNA, 82 bp, Homo sapiens
gagagaccagacctgcaagctctttgacacacagcagttcttgtcaggcagaagctcctcctggggtagagacagatcttat

SEQ ID NO: 122346 - DNA, 88 bp, Homo sapiens
tagtattgatgaaaagagggactgccataacattcccaaagaaccaaatctgtttcttccatgtctgagtttgaaagtttgctcgact

SEQ ID NO: 122347 - DNA, 50 bp, Homo sapiens
cctggatgatgaggaggaggatgaggatgaggaggattactacgaggatg

SEQ ID NO: 122348 - DNA, 82 bp, Homo sapiens
ccaactctgctcatgatggcatctgggggagcgcgggagccctggaggggaagcgctgataaagcagtttgtgtccgacgtg

SEQ ID NO: 122349 - DNA, 89 bp, Homo sapiens
atcctgctgggcttcgtccagatcgggaaggctgcatttagttcactggaattctgtgaaataccaaaattacaaggaagctgtcgtgg

SEQ ID NO: 122350 - DNA, 90 bp, Homo sapiens
caggagtttcctgtgtccagcgctgccggagccgcctgaggaaggatttgatgccctggatccctttattcccatcctggtttccaacta

SEQ ID NO: 122351 - DNA, 74 bp, Homo sapiens
gctctgggccttgaacattccgaaactgtcaagattggcaagatgcttcagaatccatctgagtttgcacagtc

SEQ ID NO: 122352 - DNA, 74 bp, Homo sapiens
cgagaagtccccgaccgactggtatggcctcacaagtcttggtctacccaccatatgtttatcaaactcagtca

SEQ ID NO: 122353 - DNA, 50 bp, Homo sapiens
agattcgcagtggtcgcttcttctccttgctcgcagattcactggtgccc

SEQ ID NO: 122354 - DNA, 75 bp, Homo sapiens
ggatatttaagtacaatggtgggcttaattttagcagatataatttctacagtagaatttaatcattctggagaa

SEQ ID NO: 122355 - DNA, 98 bp, Homo sapiens
cagaacgttgcaaactctggaaaaaaacttgggaattcctgcccctagaggagtgttactttatggtcctccaggtactggaaaaacaatgatcgcca

SEQ ID NO: 122356 - DNA, 75 bp, Homo sapiens
attccaccacaagaatggttctgcccagaaagccagttacttttgaggacaaacggaaagccaactatgagcgag

SEQ ID NO: 122357 - DNA, 98 bp, Homo sapiens
ggaaatggcacctatggacaagtctataaggtgcgagaagatgtactaaattcattgaataacaactttcttcaaacgctaaatcaagcttggaatga

SEQ ID NO: 122358 - DNA, 100 bp, Homo sapiens
catggaaccagcagcaaagaagtgctatctggaaagagaggaggaagttaagtcttcagagcctactgaggatgtggagcccaaagaggctgaagatgat

SEQ ID NO: 122359 - DNA, 74 bp, Homo sapiens
aagaagccaaagaactggctaggcaaataagctttaagggattttgcttgcccaaagaatttatggaagattca

SEQ ID NO: 122360 - DNA, 88 bp, Homo sapiens
agagggtatgcatttatcaccttctgtggaaaggaagctgcacaggaagccgtgaaactgaatcctcactatggatgggctcattgag

SEQ ID NO: 122361 - DNA, 100 bp, Homo sapiens
ctggggaaaataatccagagatttccacagaaggactgggatgatacaccttttccacagggaattgagttgggtgtcaaattgagaaccaggtagatcc

SEQ ID NO: 122362 - DNA, 100 bp, Homo sapiens
gcaaagaatggaaatgagaaagaagttaaggagtatgcccaagttttccgtgaacatgccaacaaattgattgaggagatctattgggaaactgattata

SEQ ID NO: 122363 - DNA, 71 bp, Homo sapiens
caggtcaccatgggccacctcttccagaagctggagtggaagctggacacactatgtgacttgtatgaaac

SEQ ID NO: 122364 - DNA, 97 bp, Homo sapiens
actccgctacacccctgaagtggggaaatggttggtcaaagaaaaagtgatgtatgaaaaagaggcaaaacaacaagaagaaaagattgaaaaaatg

SEQ ID NO: 122365 - DNA, 80 bp, Homo sapiens
aagactgtctgccgagttctcacgtgcccatcagtgacagcaagtccattcagaacccatgcagaatgccaccaagtatg

SEQ ID NO: 122366 - DNA, 75 bp, Homo sapiens
tctgtatggcacagaagaatatttggaaagagttcctagagagagaagacaaagacagtctgtgttgcaaaagaa

SEQ ID NO: 122367 - DNA, 50 bp, Homo sapiens
ccggccgcgcccgcggaaccagaccaggaaagaccacagcaagattcttt

SEQ ID NO: 122368 - DNA, 130 bp, Homo sapiens
gctaagacaccccggaaacctaccgtgaaaaaagggtcccaaacgaaccttaaagacccagttggggcctttcagacatcccaggtgaagccatggtgaagctctactgccccaagtgcatggatgtgta

SEQ ID NO: 122369 - DNA, 98 bp, Homo sapiens
ccgggacttcctctttcctcacctgcgggaggagatcctcagcggcgccttgcggagggaccccagctcggggcccccagttcccgccccagacctct

SEQ ID NO: 122370 - DNA, 112 bp, Homo sapiens
tagtctcgggatgccgtccgaagtcggcgacagcggccggggcgcaggcgcccgtgcggaatggcaggttgttgcttagaatatgctaccatgttggataaagaagccaaac

SEQ ID NO: 122371 - DNA, 50 bp, Homo sapiens
gagttcccaattaacaatgaagcaggctgaccggttccctgatgtgttac

SEQ ID NO: 122372 - DNA, 97 bp, Homo sapiens
aacgttcgaagaatgacagcaagccctactgagcgtgctcccctctgagactggagtgagagggtcttctgatgacaaagccgaggcacagacatta

SEQ ID NO: 122373 - DNA, 82 bp, Homo sapiens
tggggctggaaattgcgctggaccgtcgccttgctcctcgccgcggcggggactgcagcatcccagccatcactcttccacc

SEQ ID NO: 122374 - DNA, 83 bp, Homo sapiens
tttctgctgtatgcaagttttcacttatctcgaaagcctatcagcatagttaagcaagagtgagccatggagctacgtgtggg

SEQ ID NO: 122375 - DNA, 101 bp, Homo sapiens
atgaggtgatggcaacggccaacttcggcaagatccagatcgggatttacgtggagatcaagcgcagcgatggtgagcgagtgctgtgctttcatgggcct

SEQ ID NO: 122376 - DNA, 77 bp, Homo sapiens
gatggtgcccggcgaggagaaccaactggtcccgaaagagctcagagtcaagatctccactgaagttggcatcacaa

SEQ ID NO: 122377 - DNA, 100 bp, Homo sapiens
gaaagttttcagcctcatccagcaggcggtgacccgctaccggaaggccatcgccaaggtgtcatggagaaactccagctgggcccagagattctgcagc

SEQ ID NO: 122378 - DNA, 99 bp, Homo sapiens
tgcgctcgcacctgaggcagtccctgctgtgcacctgggggtacaggttcttgggtgtctctggggagtccctgggccagaccttcctccagactccag

SEQ ID NO: 122379 - DNA, 99 bp, Homo sapiens
caaattgcttggagaacttcatacacttcgagatcagcatcttaacaattcatcatggaacattattacagcagccagacgatcatgcagctactacat

SEQ ID NO: 122380 - DNA, 50 bp, Homo sapiens
ccggccaccagcaattgtccggagtcttttagtcctgctatacagctgca

SEQ ID NO: 122381 - DNA, 107 bp, Homo sapiens
cggttatactcgggcagagaaagagtgcaagatagaatatgatgatttcgtagagtgtttgcttcggcagaaaacggaattgaatgatctggcacgggaccctccag

SEQ ID NO: 122382 - DNA, 75 bp, Homo sapiens
atctacatcagctcgtgcccgtcttattgatcctggctttggaatatataagaataacctgggtatcttgtggtc

SEQ ID NO: 122383 - DNA, 75 bp, Homo sapiens
tcggaaacgcggcgcggccggctgccggaaaagtaaagctaaaacattttgagaaatttcaggatacagcagaag

SEQ ID NO: 122384 - DNA, 97 bp, Homo sapiens
gagaggcccagctttggaggcaaacgtgaggctggaccgactgtcggaggcagccaaggtgaacacagacgctatgcgctcagcgcaggaggagata

SEQ ID NO: 122385 - DNA, 83 bp, Homo sapiens
atcctgacctctctgatgagatggatcggaggatacgaagcgttttcggcttcctgcccggagctgtgcagcaaacagtcgac

SEQ ID NO: 122386 - DNA, 50 bp, Homo sapiens
gagtccccaggaaagcgcctggacgcaggctgaagctcagggccctgtct

SEQ ID NO: 122387 - DNA, 74 bp, Homo sapiens
acactgggagagcttagtctactggagaagctaaaacttacttatgaggaaaagtgtgaaattgaggaatccca

SEQ ID NO: 122388 - DNA, 51 bp, Homo sapiens
gcattgagggaagagtctgccaagattttgggaaccagtaggacattgaca

SEQ ID NO: 122389 - DNA, 75 bp, Homo sapiens
gtggccgcactgggaccccggaatcccgcgcgctgcccacgattcgcttctgagagacggggtcttcctgtgttg

SEQ ID NO: 122390 - DNA, 89 bp, Homo sapiens
ctgcagcgggagctggacggcgagcgcgagcggcgcgagaaaccgctgccatggcccagacactgcagatggagatcccgaacttcggc

SEQ ID NO: 122391 - DNA, 100 bp, Homo sapiens
gaaaaatggcgactgtggcagagttgaaggctggtgtctttcctgaagactatcttcccgtctcaaaatggacatgatggatccacggatgtacagcaga

SEQ ID NO: 122392 - DNA, 107 bp, Homo sapiens
gagctgggcgcggattcgccgaggcaccgaggcactcagaggagatctggtggctggacccagagctgacctatggctgcgccaagcccttcgtcttcacccagggc

SEQ ID NO: 122393 - DNA, 50 bp, Homo sapiens
tactgattggaactgttaaaaggcaaagacggagtctcgctttgtcgccc

SEQ ID NO: 122394 - DNA, 118 bp, Homo sapiens
ggacttgcagaagtaccacaacagggacacctggttccagctgcagcacgtggacgctgactcggaagtgcagaggtattgtggccagtattttggttttcttatgttttggagtcac

SEQ ID NO: 122395 - DNA, 75 bp, Homo sapiens
ttggattcagagcatacccgccgcaagtctattatcctcccagtccacaacgctgaaccgtggctggacgaatgt

SEQ ID NO: 122396 - DNA, 100 bp, Homo sapiens
gcataaatggaagcagggtaccgcaactcttgatgtttcagtgagctttaatggaggaaaatctgtcatttcaggatcattaattgtcacagccacagaa

SEQ ID NO: 122397 - DNA, 100 bp, Homo sapiens
tgggagaatatttaatggaaaatcgcttggttaaaacctgacacttttaacagaaatgggacgtcggtcatcagatactgaagaagaaagcagaagcaag

SEQ ID NO: 122398 - DNA, 100 bp, Homo sapiens
tttttcggatcatgtctggtggctccgcggattataacagctgtttttggaaggaagaaagatggaaagcggtgcagttctgctggaatccaaatcctcc

SEQ ID NO: 122399 - DNA, 83 bp, Homo sapiens
ctgagcgaagcccacaaccccgccgggcacatgtgaaaggtcgacactcaaagggggtggcaaagacagtaacaaagcagcga

SEQ ID NO: 122400 - DNA, 75 bp, Homo sapiens
gtaagcacagtagaactgctgcatctgcaacaacagcaggacctgctgaagttcccatgatgtcacccaatggat

SEQ ID NO: 122401 - DNA, 90 bp, Homo sapiens
gtgaaactgaaggacaacgagaagaaccggaagctctttgaccttctggatgtccttgagttcaaccagcatcgccctgagcaactggtg

SEQ ID NO: 122402 - DNA, 83 bp, Homo sapiens
tgagcgtgcgcgcacgcgccgacagacagcgccgttccagccctcgcccgatgcacggcagaaagatgaaggtcttagaatca

SEQ ID NO: 122403 - DNA, 97 bp, Homo sapiens
gctgttgaatatgctccagattatcaaagcttttggactgaacggaaaacagttcttccttcaaagcatgcagtacctgaagtaatagaagactttc

SEQ ID NO: 122404 - DNA, 75 bp, Homo sapiens
tggagttttctacactgtttgtcgagatttgaaagagctcagacatctgggtttttaatgaccacaacaagcaag

SEQ ID NO: 122405 - DNA, 100 bp, Homo sapiens
gcaaaccacactaacatattactggcatcttcaatctgaagatgctgtggacaattatcgagatagactaacagaataccccttctacacacccagctgg

SEQ ID NO: 122406 - DNA, 74 bp, Homo sapiens
ctccgaccagtctgggggcgctggcggcctgcgcagccacctcaagggaactctaatgatccaggacaaagaag

SEQ ID NO: 122407 - DNA, 100 bp, Homo sapiens
agggcatgtgctaactaccagacgatgaaagaacatttcctctagtttctggataatgagcaggcacacagatgcctgaggaagtgcaccatggagagga

SEQ ID NO: 122408 - DNA, 100 bp, Homo sapiens
cgtcatgctctttgtagcgtggtgcttctgttgctcacaggtgctgtcctggagccgagagctgccttgcgcttggcgcgccctgcacacctccccggtc

SEQ ID NO: 122409 - DNA, 97 bp, Homo sapiens
acttggagagagagaagtgactttagttcatgtgacagactggatagagaagaaactggagcaagagtttcaggtggcctatcctagagaatgtttt

SEQ ID NO: 122410 - DNA, 100 bp, Homo sapiens
ctcatctttgtggtcgtgtttttaaagtaggagagcctacatattcttgcagctgcacagaagagatcacagaaggagtctggaatagaaaggctaacag

SEQ ID NO: 122411 - DNA, 50 bp, Homo sapiens
acctggatctgcgatctgtttgtggaaccccagcatgttaattgaacttg

SEQ ID NO: 122412 - DNA, 74 bp, Homo sapiens
cagccagcgcagcgacggggcgctgcctggcccaggcgcacacggaagtggccctatgatgccaagtagagaaa

SEQ ID NO: 122413 - DNA, 75 bp, Homo sapiens
ctcggcccggacccatgcagcttgggcccgcatcatcgcttgttcgggtcatcgagcagctcggtgggaagcagc

SEQ ID NO: 122414 - DNA, 100 bp, Homo sapiens
tgggcagtggttgccgacatcctgctgttggccttgattgtggctcagcatcgtgatcgttccaatgtcctgtctggcattaagatggcagccctagaag

SEQ ID NO: 122415 - DNA, 122 bp, Homo sapiens
atcacctgtctggagcaaggaaaagatccctggaatatgaagagacacagtatggtagccacacccccaggctctggcgttacgacgtattctgtacaccctggcacagtccaatctgaact

SEQ ID NO: 122416 - DNA, 100 bp, Homo sapiens
gcaccccccgccgacaaggaggattgaccgactcatcagtcacggggccgacatcctgaagcctgtaatgctcaggcagggagaaaaggaggcagtgggc

SEQ ID NO: 122417 - DNA, 100 bp, Homo sapiens
ggttgaaaggttttggttatgctgaatttgaggacctggattccctgctcagtgccctgagtctcaatgaagagactgcttttcaggaagccttggacgc

SEQ ID NO: 122418 - DNA, 101 bp, Homo sapiens
ttgctattacaactgtaagccaggagtggttcacagcatgtccgcctcggcccctgctgcggagggggagggaacccccacccagcccgcgtccgagaaag

SEQ ID NO: 122419 - DNA, 51 bp, Homo sapiens
ggcacatgtacgggaaggacaaagtgggaaaatgtttcaacgtgcgcaaga

SEQ ID NO: 122420 - DNA, 82 bp, Homo sapiens
aggctggaagatttgccgggaaggcaaggacagaataacgggctcccagattcacaagccccaccaagaggatcaccccagg

SEQ ID NO: 122421 - DNA, 100 bp, Homo sapiens
agctgtgtacagcaatggctgaggaattgaatgctgtcattgtttccattgatgccctgcaggagtcattaaatcaaaacttcatgctgatcatcaccca

SEQ ID NO: 122422 - DNA, 100 bp, Homo sapiens
acagactcaagaggctcggagaaccagcttggtttgaccttgtctgtgtcaatgcgtggatgctggacctcacccaagccatcctgaacctcggcttcct

SEQ ID NO: 122423 - DNA, 98 bp, Homo sapiens
ctgacacaaaaagttcaagctggtgcctatcctacagaaaaggacgaaaaggaggttgtgctaaagggaaaggaggatcgatgcacatgtatgccaag

SEQ ID NO: 122424 - DNA, 100 bp, Homo sapiens
acaatgactttgagccctaccttactggacagtcaaatcaggtttgttcggacagtgttaccattttctcaggaatttcaaagagataagcagcctaatg

SEQ ID NO: 122425 - DNA, 100 bp, Homo sapiens
gctgaatggaggccagatagtaccatgatagctgtatcactcatgtgctcctcggtgcagaaggccttgtttgaggaggaggaccacgtcaagaaactgc

SEQ ID NO: 122426 - DNA, 100 bp, Homo sapiens
acagctaagatgccaggaccacctggaagcctagaaatgtgcagctgtctgcttcagaaagtgagggctccaggaatgaggagaatcttcaagaacttcc

SEQ ID NO: 122427 - DNA, 82 bp, Homo sapiens
gctggtgaggctgggctgcggtggagcctcggcagagggaacggagtacgagagggcctccaaagtggaccagtttgtgacg

SEQ ID NO: 122428 - DNA, 127 bp, Homo sapiens
atcatatttgatgaggtggatctgacagatgccagcgtagctgaatccagtaccaaaaacgtcaacaacagttttacggccatgttcgagctggtcacttccgaggcgtcctactacaagagtctga

SEQ ID NO: 122429 - DNA, 100 bp, Homo sapiens
ctcgctctcctctggggactgcagagaagcaggacctcgggccatgggtgaaaaggtgtttgtatctctctatggagctgccatagacatgaatataagg

SEQ ID NO: 122430 - DNA, 75 bp, Homo sapiens
ttcagcccatccttattgaagatcttctgccaactgcatccagtggaactaaagccgttccaggattatcaaaaa

SEQ ID NO: 122431 - DNA, 87 bp, Homo sapiens
tcgcagtggtcgcttcttctccttggatacaacttcagtattaaaggaggaacatgttacaacctttgaagatgaaggatcctatat

SEQ ID NO: 122432 - DNA, 74 bp, Homo sapiens
ctactcggagggcgagcggacctccctggagaagaattcaaagaagctttttcactatttgacaaagatggtga

SEQ ID NO: 122433 - DNA, 50 bp, Homo sapiens
ggcggctggactaaacaggtcacctgcagcaattctgtggtgttcttggt

SEQ ID NO: 122434 - DNA, 75 bp, Homo sapiens
tttcaagaaaggagagaagatgaaagtcctggaggagtggcatccttagctgggcctggagggcaagtggaaata

SEQ ID NO: 122435 - DNA, 114 bp, Homo sapiens
ggtttgctgagctggttggccctgtgatccctcaagactggtccacggagtgtatgaccacaaacagccatcaagcacaacctccaagagggaaaacatttctccagattatcc

SEQ ID NO: 122436 - DNA, 82 bp, Homo sapiens
gtaagaagaggtcccaatcccccactctttccgccctaatggaggtctccagtttcgcttgatggaccagacaaataggatg

SEQ ID NO: 122437 - DNA, 75 bp, Homo sapiens
gggaaactgagagttcccaattaataatgaagcagatggagtcgggtggtacagttttgagtaccaactggtctg

SEQ ID NO: 122438 - DNA, 74 bp, Homo sapiens
cgaggcggaccctgaagcggaccccgaggaagttggtccaggcgcaatgttcagcgtatttgaggaaatcacaa

SEQ ID NO: 122439 - DNA, 100 bp, Homo sapiens
aaccgggagccggagatccaggaaacgctccagtccgagcactttcagctctgcaagcttcacgaggctgacattgtggtcctaggctcacctaagccag

SEQ ID NO: 122440 - DNA, 51 bp, Homo sapiens
ttcctataaatctcgcccaaacaggaaagggtttggaaatcccttgtctcc

SEQ ID NO: 122441 - DNA, 82 bp, Homo sapiens
tgcccgggccgggagctgggcagcctcctctattggcccaggaagcccacccagccccgccacgcagagcccagaaggaaag

SEQ ID NO: 122442 - DNA, 119 bp, Homo sapiens
cagccgagtctgacggcgccggttcgctgcccggtccgcccgcggtgagaggtactccaaagattcaggtttactcacgtcatccagcagagaatggaaagtcaaatttcctgaattgc

SEQ ID NO: 122443 - DNA, 100 bp, Homo sapiens
aacaggccgccgcgcgctgcgcgccggacccgctgcccctgccggcccggccgggtcgggcggcccagacaaatttacatgtattggagaccagaccaga

SEQ ID NO: 122444 - DNA, 99 bp, Homo sapiens
ttcataatggagctactgtactggctattggaaggaggagattctgaagataaggagagatcccactggcattgttggtggtaggcctgggcgggggca

SEQ ID NO: 122445 - DNA, 75 bp, Homo sapiens
attgtggaagtacgtttatgtgaggaataaacatggtgtgtctcgaaagaagattgctcagatgttggatcgtta

SEQ ID NO: 122446 - DNA, 100 bp, Homo sapiens
cggagctgcagtcggcactgctactgcgaagacagctggcagattactcttgtctctgctgctcctgggaaagtgatttgtgaaatgaaagtagaagaag

SEQ ID NO: 122447 - DNA, 100 bp, Homo sapiens
gaatggcatccatttactctgaggaaggcaacattgaacatgccttcatcctctataacaagtatatcactgcacttacatttcaatcgaccaagttcca

SEQ ID NO: 122448 - DNA, 98 bp, Homo sapiens
gaaaaggagaactataattctaggaagtggtcacaaaggaaaagctactattagaattgttggactaaatgctcttccttcagaggattatccggggc

SEQ ID NO: 122449 - DNA, 82 bp, Homo sapiens
ggcaaaactgcgctttctggctgaggagcacctgtgattacagaggaaaccacccttcaactggaagatatcattaaacaga

SEQ ID NO: 122450 - DNA, 118 bp, Homo sapiens
cggatgagtacgataccgaagcgggctgtgtgccccttctccacccagaggtactaggttttgacaagcttgcatcatgcgtgagtataagctagtcgttcttggctcaggaggcgtt

SEQ ID NO: 122451 - DNA, 85 bp, Homo sapiens
ttctgcaggaagcctttttggtggcatggtcctcaagaagttcctaaaagaacaccttccaccatgaccacctcagcaagttccc

SEQ ID NO: 122452 - DNA, 75 bp, Homo sapiens
ggcatttacagaaagagtcaacagcagtggcaacagactacaaactcacacatacggtgtcccatttaaaacgta

SEQ ID NO: 122453 - DNA, 80 bp, Homo sapiens
ctccagcgctgcctggaggagaatcaagagctccgaggcgagtatagtgttggaaacaagcaccgtgatccctttgaagc

SEQ ID NO: 122454 - DNA, 98 bp, Homo sapiens
cggagctccagcagccgggaacagctggtaatcttcagcaagtactgcaactccagcgacatcatggacctgttctgcatcgccaccggcctgcctcg

SEQ ID NO: 122455 - DNA, 101 bp, Homo sapiens
cccaacacccccgcccacttctcgtttgcctcctcccgaaggtctctaccttgacagacctccagccgtacatgcgacagttcgtggctcacctgcaggag

SEQ ID NO: 122456 - DNA, 50 bp, Homo sapiens
cctaaagtcgcacctgcggacgcacacagaaggaggcccaagttgcagcc

SEQ ID NO: 122457 - DNA, 83 bp, Homo sapiens
gtgcttcttttcagtgccagtccatccatcacgaccacatttgtcatgatgacagtgacaagccaagaaaaccatgtgggaaa

SEQ ID NO: 122458 - DNA, 100 bp, Homo sapiens
cactgccaaaatgcagctcttacagaaatgtgtcttgttgcatttggtaatttagcagaacttgtttcctattctgtgaaacagaagacattgtgatgga

SEQ ID NO: 122459 - DNA, 90 bp, Homo sapiens
tctaaggagaccacccgttataatcatcccaagcccaacttgctgtatcagaagtttgtgaaggtggcactgctctgtgggcccccgggg

SEQ ID NO: 122460 - DNA, 97 bp, Homo sapiens
aattcagcctgagaaaatccagcagtttccatgatgatcattttctctctcgaatacgtgagaaagaggtctaccctgaactgcagatcaccaatgt

SEQ ID NO: 122461 - DNA, 100 bp, Homo sapiens
ttcaacattgccaccatcatcaaggacggggagcgggcgacggcattagcaggcaccaagccgtacatgggggaggagccccagccccgcgacgaggagg

SEQ ID NO: 122462 - DNA, 87 bp, Homo sapiens
atcgtcaagtctcccagcgaccccaagcaataccggaccagatggcctttgaggatgtggctgtgtacttctcccaggaggagtggg

SEQ ID NO: 122463 - DNA, 83 bp, Homo sapiens
caagaccagcaggaggaatctcctttgcatgtgggctcgggatgagtttgaaggcctcttcaagcagccagcagaaaatgtca

SEQ ID NO: 122464 - DNA, 75 bp, Homo sapiens
gtgatcgcggcccggcagaccgagggcaaagggtcatcacactgaaacggtgttcaaccgggttttgccagggcc

SEQ ID NO: 122465 - DNA, 74 bp, Homo sapiens
tcccaaacctgaaggacttcatctcccgatttgaggtgctaaaatgatgtattttctggacaagtcaaggcagg

SEQ ID NO: 122466 - DNA, 88 bp, Homo sapiens
cgcgaaccgcagtatcatgctggccaagaagatcatcattaaggacggaggcacggcattggaacctgcttttggaaaaatttcacct

SEQ ID NO: 122467 - DNA, 49 bp, Homo sapiens
caattattgaaagaatccccccatattggctccaataattgtggatact

SEQ ID NO: 122468 - DNA, 117 bp, Homo sapiens
gtggaggtggtttcggtgggaatgacaacttcggtcgtggaggaaacttcagtggtcgtggtggcaattttggaggtagccccggttatggaggaggaagaggaggatatggtggtg

SEQ ID NO: 122469 - DNA, 100 bp, Homo sapiens
ttcaagagaaatgatagttcacagtgtagatgacttcagttcagctttaaagatttccacaagacggcaccctatgtcgtcactggcagcgtagatcaaa

SEQ ID NO: 122470 - DNA, 100 bp, Homo sapiens
aagtcgggaccatcgtcgtgaggatcgtgtgcattacaggagtcctccacttgccactgggggaacactgtgaagaacatgttgcttttttcaaacagat

SEQ ID NO: 122471 - DNA, 75 bp, Homo sapiens
tgaaagaattccagccggtctttaaaatgaaggaacacctcatcaaaatgcagaagcagaaactgcagatgcccc

SEQ ID NO: 122472 - DNA, 83 bp, Homo sapiens
ccttcggcagtccacccaccgccgccgcctcccaggtaccccctgtaccggctgggtggcccacaacttcgggtgttccgaac

SEQ ID NO: 122473 - DNA, 51 bp, Homo sapiens
gcagaagcacaaggctggcttccttgacaactccgaagtcaagcccgcact

SEQ ID NO: 122474 - DNA, 101 bp, Homo sapiens
cttgtacctcctgcaacccagaaccctggctgaccactttgaaggaggatgctccagcagcttaatcttctccatacagagctggctaaacagttggcaga

SEQ ID NO: 122475 - DNA, 75 bp, Homo sapiens
gaaatggtgcttgggaaattgtccactgggaaaaggtctacatgttcaagtgcgtgtggcggtgctacagattga

SEQ ID NO: 122476 - DNA, 82 bp, Homo sapiens
atatggtgcagaaggtgcacagccacagcgccgagatggagggcgtgatggtgggcatgggtcagaaggattcctatgtggg

SEQ ID NO: 122477 - DNA, 75 bp, Homo sapiens
tgctacatgtacgtggacttatatcagaccagtgtggatcttcaagaatcatttgtttcctgaggttataggcgg

SEQ ID NO: 122478 - DNA, 100 bp, Homo sapiens
gtctgagggtagcagctcgaaagtagaagaagtgattttcttccacccccacctccacctctagatgattccagtgcccttccatctatctctggaaact

SEQ ID NO: 122479 - DNA, 100 bp, Homo sapiens
ggcgcggacctctactctctctgctctgatgctatgacagctgccctcaaacgcagggttcatgacctggaggaagcaaaccagtccagctacgggggcc

SEQ ID NO: 122480 - DNA, 100 bp, Homo sapiens
aaaaaagttgactccagtggagaaactgagaagaaagatttcagaggtcacttcatcctggcccaggtactgcagctccaaatcgtggggattctgtaag

SEQ ID NO: 122481 - DNA, 98 bp, Homo sapiens
ggaaattgaacaagcgtcacttgacaagcctatagaatcgggcatcttttatgaccaagactgtccagtaccaaaatgagctacataaattcctaatc

SEQ ID NO: 122482 - DNA, 98 bp, Homo sapiens
gccgagggacaccgcagtatgaggcagagcgggaatgcatatcagtccacgtgggccaagcgggagttcagattggcaatgcctgctgggagctcttc

SEQ ID NO: 122483 - DNA, 88 bp, Homo sapiens
tcggcgggagccctcgcgacgcgcccggcccggagcccccagcgcagcggccgcggtaggtgagctcgtgaaacaatatgaagaggag

SEQ ID NO: 122484 - DNA, 80 bp, Homo sapiens
acgccctggtgctcaccaagcaagaaactatgttccaacttcctgtcaacaatcttggcagtttaagaaaagcccggaaa

SEQ ID NO: 122485 - DNA, 99 bp, Homo sapiens
gcgcgaatatcgtcatcgttagaagatgaaacgactacaaagtgccatgacagaaggtggtgtggttctacgggaacctcagagaatctatgaataaat

SEQ ID NO: 122486 - DNA, 100 bp, Homo sapiens
ccttcagaaaaagcatccccgaggaggaagacgaatcgttaaacatcttaggtcagatctgtctcgtaactgtgtaatcaaggaactagcaccacaacag

SEQ ID NO: 122487 - DNA, 100 bp, Homo sapiens
gaaatcagggagctcttaacccagtttgaaacgtaactggttccctgaccaggtggccaaggtggaatacgtcaggaagaagccaaaattaaaagaagtc

SEQ ID NO: 122488 - DNA, 82 bp, Homo sapiens
tggggttgtgatggcccaggttcttcaaaagattcatgtctcacaagagaacagcgagtacggatcttaagcaactgaacca

SEQ ID NO: 122489 - DNA, 88 bp, Homo sapiens
gagtgatttgcgccatcatcctcatcatcatcataggtggagccgccaccaaaatgcagattttcgtgaaaacccttacggggaagac

SEQ ID NO: 122490 - DNA, 80 bp, Homo sapiens
tgtcgcgggccggccccgcggggagcgcccccggcgcgatgcccttcaggaaagggatggtctcactgtgttgctgatct

SEQ ID NO: 122491 - DNA, 100 bp, Homo sapiens
ggcgggtgtgagagtccgtaaggagcagcttccaggatcctgagatccggagcagccggggtcggagcggaaacgactccggagatcagcacatgctcgg

SEQ ID NO: 122492 - DNA, 82 bp, Homo sapiens
cttcgagttcttcgtgctgctcaagctgtggcggggccttcgtgggcccgcgatgccaggaccccaacccgtgcctcagcac

SEQ ID NO: 122493 - DNA, 100 bp, Homo sapiens
agccttgacctcccagaccgagatgctcagggcccaagtaagtggagccaaggcaaagagggaccactgtgctcatggacccatcgctgccttccaagga

SEQ ID NO: 122494 - DNA, 101 bp, Homo sapiens
tgccgccggacgcctccattgtttgaccacaacaagggccggattctcacccagacgaagttatacggaagcgtctcctcattgatggagatggtgctgga

SEQ ID NO: 122495 - DNA, 96 bp, Homo sapiens
ctccgcttcctctcctaggcgacgagacccagtggctagatgtccagctcgccgctgtccaagaaacgtcgcgtgtccgggcctgatccaaagccg

SEQ ID NO: 122496 - DNA, 100 bp, Homo sapiens
ggcgcagtgggcaccgtgggccgactgaacatcacggtggtacagctggctggaggcgtgatcctgggtgtggccctgtggctccgccatgacccgcaga

SEQ ID NO: 122497 - DNA, 50 bp, Homo sapiens
gggacagccagccagcagcaggagggtacatggtgcagtggccgggagca

SEQ ID NO: 122498 - DNA, 75 bp, Homo sapiens
gctgtcatcacaaaagagttgattgaaattatctctggtgctgcagctctacccttggcttctgcgttcgaagag

SEQ ID NO: 122499 - DNA, 90 bp, Homo sapiens
cgggagaggctcaagcgggacctgttccagtttaacaagaaatgactgctgtccatgcaggcaacataaacttcaagtgggatcctaaaa

SEQ ID NO: 122500 - DNA, 90 bp, Homo sapiens
gcagaagagccaagaaggaagcgccgagtagtcaccaaggcctataaggaagacaatggtgtaaaattggttgatcctttgggtgaaatg

SEQ ID NO: 122501 - DNA, 50 bp, Homo sapiens
ctgcagtcccacatcgaaggctgggaggtcaacgtattgaaacttactgt

SEQ ID NO: 122502 - DNA, 89 bp, Homo sapiens
ccagtttcctggatggaccaagcatgcagcagaactgattaaaacagtggcatctcgctatgatgaatatgttaatgtgaaggattttt

SEQ ID NO: 122503 - DNA, 100 bp, Homo sapiens
ggacatcggcttctgcctggtgctctgcgtcctcatcgggcttatgttcgagaattgcaaccttgccaatggacctgatcggttttggttatgcagccct

SEQ ID NO: 122504 - DNA, 88 bp, Homo sapiens
gagattcagtatcactcgctcccttgatgatcttgagaatgtttcatccatttgtggaccaaaagatggagttggtttttatttttaa

SEQ ID NO: 122505 - DNA, 100 bp, Homo sapiens
ctgcagaagtttgttcaaaacaagtggctgattgaggtaaaataccatgaagattttgaaaaaacaaaggggagaggctttactcccgtcgtggacgatc

SEQ ID NO: 122506 - DNA, 100 bp, Homo sapiens
tttacaatgctccagagactggcaatcagacgatacagatggcaaattttggctcccagccaacctctgataaaccctcccagcggccatcagagagcac

SEQ ID NO: 122507 - DNA, 75 bp, Homo sapiens
ttcaaacgctcttcaggcgcagtgtgcgttcagctgtgtcagctaatggattctgaaaccttccttgtatccctc

SEQ ID NO: 122508 - DNA, 83 bp, Homo sapiens
gaggtgccggtggccgcgctcggacccgcaattctgtggtgttcttggtcacacatttatggagtttctgaagggcagtggag

SEQ ID NO: 122509 - DNA, 75 bp, Homo sapiens
aagattcttccaaggaaccagtgcgaagctatgggatgtgcagcagcagaaacggcttcgaaatatgaccagtca

SEQ ID NO: 122510 - DNA, 90 bp, Homo sapiens
tgaaaatgttgcttcatatgagtgtgatgaatgcagactctgctaccattttggctgtttggatcctcctttgaaaaagtctcctaaaca

SEQ ID NO: 122511 - DNA, 90 bp, Homo sapiens
gactaggccccgccattttggatccgctgacagatgtccagctcgccgctgtccaagaaacgtcgcgtgtccgggcctgatccaaagccg

SEQ ID NO: 122512 - DNA, 113 bp, Homo sapiens
ggctgctttacggcaacagagtgaaggatttggttcacagagaagcagacgagttcactagacaaggactcgctgattcttgagaagagtcaaaactggagctctcaaaaaat

SEQ ID NO: 122513 - DNA, 90 bp, Homo sapiens
tccaggatatactggtaatatagctaaggcctcatgtggaatgcagcctctgagaaaagcacttctcaccactcaaaacccaccgaagca

SEQ ID NO: 122514 - DNA, 76 bp, Homo sapiens
cctccaactacagggaccgcacgtgagaaagatcagtctaaagaaaaggagaagaaagtgaaaaaaacaattcctt

SEQ ID NO: 122515 - DNA, 51 bp, Homo sapiens
ggaatatcgatacaacaccaacagatgcagacagacatgctgaactatctg

SEQ ID NO: 122516 - DNA, 73 bp, Homo sapiens
caaatgctccttctcctggagacgcaactcaaggtcatcatcagatttgaaatatttaaagtggatacaaaac

SEQ ID NO: 122517 - DNA, 105 bp, Homo sapiens
cgcgctggtgcagccaccctcgctccctctgctcttcctcccttcgctcgcaccatgccttatgccagcctggaccatcttggaggcagtgtaggatcatggaag

SEQ ID NO: 122518 - DNA, 98 bp, Homo sapiens
gcggccgctcagtaacacgtccccaggagactcgcaggagcaacacgtgatgtgtctacttatcagggaacattttagtggacaaaccaaatgaccaa

SEQ ID NO: 122519 - DNA, 97 bp, Homo sapiens
ctttcttccagcttctgctgtccttctttgtggagagcaagggaactctaatgatccaggacaaagaagttaccctggagtatgtatcaagcctgga

SEQ ID NO: 122520 - DNA, 100 bp, Homo sapiens
tgtccaaggagctccacagcaccccaaacgggctgagctcagagtccagccgcaaaaccaaggacatgatccacatcgcggacaccaaggtcgccaggcg

SEQ ID NO: 122521 - DNA, 75 bp, Homo sapiens
gaggtggatgtgacccaaggagagtgctacccggtgtactggaaccgagcagtctcacaggtgctggacagcctg

SEQ ID NO: 122522 - DNA, 75 bp, Homo sapiens
ccaaggtggaggaaggcctgcgagaaggacagtaagaggtgaaaggtgtagcagtcactcggcctacacccacag

SEQ ID NO: 122523 - DNA, 100 bp, Homo sapiens
caatagcatacattatgctgccgcctatgggcacaggcagtgtctggaattgctattcctctacacagccgactagttatgatcagagcagttactctca

SEQ ID NO: 122524 - DNA, 85 bp, Homo sapiens
ggtcccgcggcgagcgagctcctgaggttctctacttaaaagacaatgactactgatgaaggtgccaagaacaatgaagaaagcc

SEQ ID NO: 122525 - DNA, 90 bp, Homo sapiens
gggctgaaaggcccggcagctcccctcaccccaggtcctgatccggttccccatgcagaggaacttggtggtgatccccaagtctgtgac

SEQ ID NO: 122526 - DNA, 75 bp, Homo sapiens
tagatgttaaggacatctgcaaatctttcaccaatgtggtgaaggcatttgtgatcctggcctcgcagttcctat

SEQ ID NO: 122527 - DNA, 100 bp, Homo sapiens
gcactgatggatgagattaacttcatgaagatgttctttgatgcggagctgggccagctccagacccaggccagcgacacgtctgtggtgctgtccatgg

SEQ ID NO: 122528 - DNA, 82 bp, Homo sapiens
aaacttcaacagaatgtggcaaccagctactcccgagcccggagaggacccacgcgtgacccgggccaagtacttcattcga

SEQ ID NO: 122529 - DNA, 51 bp, Homo sapiens
atccacttagacaatggaagagggacagctggcctgaagctcagagccggg

SEQ ID NO: 122530 - DNA, 75 bp, Homo sapiens
caggtcctcccaggcaggagtgcggagagcctgccctgccctctgcttctggccctcgggaccaaggatcacgtc

SEQ ID NO: 122531 - DNA, 82 bp, Homo sapiens
tttacaatgctaccctgctttttctggtgtcctgaacctggaagttgtgctttttaagaatccaaaggactgcatgacacac

SEQ ID NO: 122532 - DNA, 83 bp, Homo sapiens
tgtggagttcttgaagcaactaagattacaccaggaagcaaggcggcagctgccaacctgtgtcctggagatgtcatcctggc

SEQ ID NO: 122533 - DNA, 107 bp, Homo sapiens
aagtttcacatccttgtctgtgaagctaaactcaatgctgctgtgtgggaagaagatttgtaaagaaaactcttagagttcaaagaggccttttcattgtttgaccg

SEQ ID NO: 122534 - DNA, 106 bp, Homo sapiens
tggagaaacagtataacaatgatgacccccacctcagcgagataggaccctgcttcctagagcacgtcctgcaaccctggttccagtctggcaagcattgtagacc

SEQ ID NO: 122535 - DNA, 100 bp, Homo sapiens
aaaggtcccactgcagccctccaagcaggtgtggcagtgtggcggcagcatggaggtgctgccctgctcccgcgtggcccacatcgagcgcaccaggaag

SEQ ID NO: 122536 - DNA, 75 bp, Homo sapiens
gcaacgggctgctctacgccggcttcaaccaggaccacgttgtcgccgtgatcctgaaggcgctgacctacgacg

SEQ ID NO: 122537 - DNA, 100 bp, Homo sapiens
ggggtattcttgaaccaggtcatgctccaaatgatcttatggttggtgatgaggcaagtgaattacgatcaatgttagaagttaactaccctatggaaaa

SEQ ID NO: 122538 - DNA, 75 bp, Homo sapiens
acttggggagcccagaagctgccaccgaaccaagcctaattcagtggtttgagacagcaccaagtcggacctgcc

SEQ ID NO: 122539 - DNA, 121 bp, Homo sapiens
ggtagacctgtgggcacggacgcacgccactttttctctgctgatccagctccttgctcggattgaacgtatggaaaggcggatgcagctggtaaagaaggataacgagaaagaaaggcac

SEQ ID NO: 122540 - DNA, 87 bp, Homo sapiens
ttgagaaggctgaggaactcagcaaccagctagctactcgagaggcctggtactgtggcgctccgtgaaattagacgttatcagaag

SEQ ID NO: 122541 - DNA, 74 bp, Homo sapiens
tcttcctgtcagtctgcagctactcaggaaattatcagttcattgcctagcatagtaaatgacaaatatggaag

SEQ ID NO: 122542 - DNA, 100 bp, Homo sapiens
gtggccctcagggcatccccgttttcggtcttgggcgtctttggtactggcttttttaggggtctgcctggggattacccttgctgtggatagaagcaac

SEQ ID NO: 122543 - DNA, 75 bp, Homo sapiens
gggagaggctgctgtggaggctgaggaggcggcggcggagatctgggcaaaatttggtttctctaatattactgg

SEQ ID NO: 122544 - DNA, 98 bp, Homo sapiens
gaaaagtattgcaagcaacagtagtcgctgttggatcgggttctaaaggaaaggctgttcttgccttagctgcatcttggacctcaagacaagtagga

SEQ ID NO: 122545 - DNA, 135 bp, Homo sapiens
ccagaacctcttgttcctcctgtcccaaaagaccatcctgctctcaactacaacatcgtttcagggccaatgaacttccggcagaactaaccaaaaatgaacgtatattgcgtctcctgagaagtaaagaaggtc

SEQ ID NO: 122546 - DNA, 82 bp, Homo sapiens
gtaactggccgctaatggaactgaagacagctgggcctaacaagtgcccaggtgactcagatctctggaaacatggctacag

SEQ ID NO: 122547 - DNA, 75 bp, Homo sapiens
tccagatcagctgaatcagagtttgcattgttaacaaggttagctttgtacatagcatctcactttgcacaacaa

SEQ ID NO: 122548 - DNA, 101 bp, Homo sapiens
aacaaccttctgtgagcctagggacccatttctcctcctttgacagggacatcagtggagccttctcagacccacaggtggaacaatccaaagttttaatc

SEQ ID NO: 122549 - DNA, 97 bp, Homo sapiens
gagaactctaccctggaggagattctggggcagtatcaacggagtctccgggtgtaaacaggaacatcgataagtagtgtaaaaacttgcacaatga

SEQ ID NO: 122550 - DNA, 90 bp, Homo sapiens
acggcggcggccgaaagcggagagatgctgggcgtggcggccgggatgacccacaggtttgtctacagattttgagcgttcgaagttgac

SEQ ID NO: 122551 - DNA, 50 bp, Homo sapiens
agatccaccatctgcttcaacgcgctggataaaacaagccttagaagaag

SEQ ID NO: 122552 - DNA, 100 bp, Homo sapiens
cggcagatatccgtgaaggctctagagtttatgtggccgaggcagacaagtggaattaggccttgctgcaggggacttcatttccttctcagtactggac

SEQ ID NO: 122553 - DNA, 119 bp, Homo sapiens
tgtggaaatgatttcctcaggactccagattatctacaacactgatgaggatcacctgctgttaccagctaccacccataacaagaccacaagaccaaaaatgtcaattgtgttaccag

SEQ ID NO: 122554 - DNA, 100 bp, Homo sapiens
ctcctgtgctgcgaccactgcccggctgccttccacctccagtgctgacgctccacactcatgctcagagcagcattattcacagcagccaggaggggga

SEQ ID NO: 122555 - DNA, 101 bp, Homo sapiens
caagacttgtgagtgtgatgatcgccgctgtgaagacctcgatggtgtggtctgtggagcttttacaaagttgatcacagtaaatggacaagaatatcatc

SEQ ID NO: 122556 - DNA, 99 bp, Homo sapiens
cagaacccgaggctggggacagcgacaccgagggggaggacattttcaccggcgccgcggtggtccaaaaaagggagacgctgtccccgctgtgcctca

SEQ ID NO: 122557 - DNA, 74 bp, Homo sapiens
gcgcaaacttgacactcaccctgaccggtctcagccaatttcttctccagtcatcctccagtttggtcatgcag

SEQ ID NO: 122558 - DNA, 100 bp, Homo sapiens
ggctgctgtctgcgcttgaggacttggaggtcctgtctagacttacagccagctggcccaccccatccagcaggccaaggcactgggtctccagttccat

SEQ ID NO: 122559 - DNA, 96 bp, Homo sapiens
cagatcaccgtccaggagtggtcggacagaaagtcagctagatcctccaaaactggacaagccaaggcatctgtagccaaagtaaacaaatctaca

SEQ ID NO: 122560 - DNA, 74 bp, Homo sapiens
aagagggagttaaggacattccaggcagaggcaagggccaaaagagaaacattggctactttgacaaccttaaa

SEQ ID NO: 122561 - DNA, 88 bp, Homo sapiens
tgtggacggcgcacttcgtttggatcagcattatcctgtagcgtgggtaaatacgatggtttttgactttaaaggacaattgagaact

SEQ ID NO: 122562 - DNA, 75 bp, Homo sapiens
ggaaacaatggcatttacagaaagagtcaacagcagtggcaacaggtgaaaggtgtagcagtcactcggcctaca

SEQ ID NO: 122563 - DNA, 101 bp, Homo sapiens
ccccggggcaggtggctgcatagtcttggcggagtttccctgaaacctgggctcttgaagacgcatcactggagcagatggataatggagactggggctat

SEQ ID NO: 122564 - DNA, 100 bp, Homo sapiens
ccaagaagcatctgaagcgggtggcagctccaaagcattggatgctggataaattgaccggtgtgtttagaaaggagttcatgaaggcagaaatgcctgg

SEQ ID NO: 122565 - DNA, 82 bp, Homo sapiens
agagtcacacacggtcctaagagctgggcaccaggaagcgaaggctggaagaggagttgtacgcatgtcagagaggttgcag

SEQ ID NO: 122566 - DNA, 60 bp, Homo sapiens
gagagaggaattcctcaagacaccattccaggtgactctgacatcattagaagcatgcca

SEQ ID NO: 122567 - DNA, 101 bp, Homo sapiens
ctacatcctgcgggtgcctttgaaaatcaacgacaacttgagcacagcggttaagaagattgtctaccaaatatagaacagaaaagatatatcccacagcc

SEQ ID NO: 122568 - DNA, 97 bp, Homo sapiens
gccagcatctggccgagaagcttttgaacctatgtatatttacatcaggtccacgtgaacttgctgctcctggaggcgcgcatgcaagccgctctgc

SEQ ID NO: 122569 - DNA, 96 bp, Homo sapiens
ctccagaggaaaataaggaaatgagatattacatgcttcaaaggtgaaggttgctatccttaaatacatagaaactctggccaaacagatggatcc

SEQ ID NO: 122570 - DNA, 114 bp, Homo sapiens
gttcaagaaggaagtgtatcttcatacatcaccacacctgaaagcagttggttgaatctggcgatgtggaacccatggatatggagggctgactatatacaccatgttttttcc

SEQ ID NO: 122571 - DNA, 90 bp, Homo sapiens
tacagatactttgaagtagaagaagctgatgaacaaagggaccccggtgaaacagtaggtggagatgagattgtgatggtcatcaaagac

SEQ ID NO: 122572 - DNA, 100 bp, Homo sapiens
tggaattctgccaccctgaggatcaaagccatctgcgtgagagcttccagcagtttctgccactgccttctacaaagcacaacctgtaattcagttcatg

SEQ ID NO: 122573 - DNA, 75 bp, Homo sapiens
ccgagaaggtggacgtgctggtgtctgagtggatggggacctgcctgctgggatcgcttacacctgagacgaact

SEQ ID NO: 122574 - DNA, 96 bp, Homo sapiens
gttggagccgtctgcaaagtgtccccggcaagaagggagtaccctgacttctaccggaagctctacggcctcttggacccctctgtctttcacgtc

SEQ ID NO: 122575 - DNA, 100 bp, Homo sapiens
gaccgagaccgtgaccgagagcgtgaccgagagcgcgaatatcgtcatcgttagaagaggaagaatacaagcgattgagtgaagcactagcagaggatgg

SEQ ID NO: 122576 - DNA, 50 bp, Homo sapiens
gaaggagactggatgatagaattacctagaggatcaagacataatgggag

SEQ ID NO: 122577 - DNA, 73 bp, Homo sapiens
cggcctcctcagtgcgaagaagctgcagccgcacctggccaagggtggtaataagctgcagtcaacaggaaat

SEQ ID NO: 122578 - DNA, 100 bp, Homo sapiens
gaagatgcccatgattcagaggccaaagtggcgagcctgagaggaatggagttacaggggtgcgccagaaatcccatgctgttggcccccaggaaatccg

SEQ ID NO: 122579 - DNA, 87 bp, Homo sapiens
cgtccgccgattcctcctccttggtcgccgcgtccttggctggcgtggacccagacatggagctgcgggaagaagcctggtctccgg

SEQ ID NO: 122580 - DNA, 100 bp, Homo sapiens
agccctgcagactgtccgcctggagcgttacaaggccttctacattaccgctccaggtccagttcctgttccaggtcccaaaagccatccttctgcatcc

SEQ ID NO: 122581 - DNA, 90 bp, Homo sapiens
tgagaatttatcctcaagagtcagctggcagcggcgtcttcgacatcttcggaacattgctgcccggaacattgttaatagaaatggcca

SEQ ID NO: 122582 - DNA, 90 bp, Homo sapiens
tggccgacttcgatgatcgtgtgtcggatgaggagaagtgatgcagccaacacgaacggttgtcatgtgtaacacaactttcgatcaccg

SEQ ID NO: 122583 - DNA, 82 bp, Homo sapiens
gaccgcgcgcagggcctgcagcgggagctggacggcgagcgcgagcggcgcgagaaagcagtataccttaaatggcaagaag

SEQ ID NO: 122584 - DNA, 83 bp, Homo sapiens
ggccaagggaccaaggtggaaatcaaacttgctatagcccaaggtggaacaatccagatttctaacccaggatctgatggtgt

SEQ ID NO: 122585 - DNA, 73 bp, Homo sapiens
accgcatcaagagcttcaagaacaagggccgcgatgtggaaactgaaagagcatattccttttgtggaactat

SEQ ID NO: 122586 - DNA, 100 bp, Homo sapiens
cgagactttcaaagatggaatcacaaacggcgcacattggtatgatgtggaagccttgaaaagatcttttgaggtcgaggaggtcgagacacccaactcc

SEQ ID NO: 122587 - DNA, 50 bp, Homo sapiens
cacctacgcgggacagttcgtgatggagggtccagattttggctatgtaa

SEQ ID NO: 122588 - DNA, 100 bp, Homo sapiens
aggcagcgggctttgccagcaaaaccgaaacaggtatttgactggaatggttgacaaaaggacgcttgaaaagtatgaaagagaagctaaagagaaaaac

SEQ ID NO: 122589 - DNA, 100 bp, Homo sapiens
gccgggtggaccctgaggtccttcacagcctgcagcatgccaatgaagatgtggaaagaatgttactaggaaacaagtgtgatatggacgacaaaagagt

SEQ ID NO: 122590 - DNA, 50 bp, Homo sapiens
ggaggacagctctgatgaggaggaggcatacacggaatacctgaggagca

SEQ ID NO: 122591 - DNA, 51 bp, Homo sapiens
ctcggggacctggagctgacgcctaggcccaagggatgcagacagtgatga

SEQ ID NO: 122592 - DNA, 90 bp, Homo sapiens
agctccttcagaacaagccagaagagtttttcaaacctacgacccagaagtgctgcaggtggagaaattttcagcctgtgtttacctgag

SEQ ID NO: 122593 - DNA, 97 bp, Homo sapiens
ccctgccgaaaccaggccacgtgcctcgaccgcataggccagttcacctgtatctgtatggcagttcaggcttcagagagcccctgacgcctgcagg

SEQ ID NO: 122594 - DNA, 100 bp, Homo sapiens
ccccagtgccggggagggttctgctgcttcgaaagctggtaaggcctgagttcgatcctttggtacagaagacagaccgacagatcgtccaataccacct

SEQ ID NO: 122595 - DNA, 95 bp, Homo sapiens
tcaagtacattagattcgctggctgttatgatcagcacaaccttgttgcatgccagataaatgatcagcatggagatatggaccaaaaggaacga

SEQ ID NO: 122596 - DNA, 50 bp, Homo sapiens
ctggccctggactacctctgcaggtctgttctcagagcgatgggccgcgg

SEQ ID NO: 122597 - DNA, 100 bp, Homo sapiens
aaggatgaatcccagtccctgttacggatttgtaggatcactgggtaccatcatcataaaatgtaaagattttcgaattattcagttggatattcctgga

SEQ ID NO: 122598 - DNA, 150 bp, Homo sapiens
aacgtagggaccacatcaaagacagctttcacagtttgcgggactcagtcccatcactccaaggagagaagagagacaagagagacacctccaacttcgacaaagagttcaccagacagcctgtggaactgacccccactgataaactct

SEQ ID NO: 122599 - DNA, 100 bp, Homo sapiens
tacaaatcacacgcataatggatgaaaggaaccgacaggtaaatgagctggatggtatcccgttgatcctggacaactgcaacatcagtgacagtaaccc

SEQ ID NO: 122600 - DNA, 100 bp, Homo sapiens
gcacaagaacctggcttttagctgaactaaggagaaagtcctacaacagtttggcgtgcaacatggggcttgagaaaggagatgtctctgagttgacggg

SEQ ID NO: 122601 - DNA, 75 bp, Homo sapiens
gagaatttttccaagttacagctacctaggtacatggaaaacttggggatttcacaataatttcttggacaataa

SEQ ID NO: 122602 - DNA, 99 bp, Homo sapiens
ctgaggatgctcaaagggtttttcgggaaaaagcacctgacttccttcctcttctgaacaaagaccatgaagattatgacccacaaactgtgaggctgg

SEQ ID NO: 122603 - DNA, 75 bp, Homo sapiens
ggaacaagatcggcaagccccacactgtcccttgcaaggtggttatcactaggctaaaactggacaaagaccgca

SEQ ID NO: 122604 - DNA, 90 bp, Homo sapiens
tgctaagggccacggatgtccatcccctccaggctgaagccgacgtagcttctctgaacagacgcatccagctggttgaggaagagttgg

SEQ ID NO: 122605 - DNA, 51 bp, Homo sapiens
tttgaactactgccggagcttctgccagaactccatccggcacaacctgtc

SEQ ID NO: 122606 - DNA, 98 bp, Homo sapiens
cgcagttcccgggccagcctggggcggccggccaggaaccacccgttaaggaggaacaggaattaagcctttcctggaacgctttggagagcgttgtc

SEQ ID NO: 122607 - DNA, 74 bp, Homo sapiens
caaatcgtgacaccatgaaagtcctctttggacatctaactaaattcctagaggggagtgcctgcgagcctcgg

SEQ ID NO: 122608 - DNA, 83 bp, Homo sapiens
aattttctgaaacgccacaaaaagaaatgcatcttcctgggcacggtccttggagtgttatagttttgccgctggactcttcc

SEQ ID NO: 122609 - DNA, 96 bp, Homo sapiens
atggaggctgagcatttattcagatacagtttatgtaacttgatggaagaaaatggaattactccaaaaagacaagtgctcaagcagcaaaatcct

SEQ ID NO: 122610 - DNA, 100 bp, Homo sapiens
caagaaaaacaatcgcttcaatgatgggaaggtggatcccgccgggaggtactttgctggcacagactgccaaggctgggggcaacatatctgtatcaaa

SEQ ID NO: 122611 - DNA, 50 bp, Homo sapiens
ctgagtttgattgaggctaccccggaggaggatttgatgaagatgttaaa

SEQ ID NO: 122612 - DNA, 101 bp, Homo sapiens
cccgcctacatgagaaaaaggagcattctacagcaggtgaaaatcctatttataagagtgccgtaacaactgtggtcaatccgaagtatgagggaaaatga

SEQ ID NO: 122613 - DNA, 98 bp, Homo sapiens
ctttgccagcagagaagatggctgctgtaagatcatcctgccactcagagagatctgccgccgccttaatggggtccggttcaccagctgcaagagcg

SEQ ID NO: 122614 - DNA, 80 bp, Homo sapiens
ggtgatgtgacctgttcacgcaggggaaacttgaacattcgcaggtcagatttaatgtactacaatatgttgtcccagaa

SEQ ID NO: 122615 - DNA, 90 bp, Homo sapiens
gaattcagcctcagtgatgtccatgagtcatccgtccttggctcaggatttggagagcttgcaccaccaaaaatggcaaacatcaccagc

SEQ ID NO: 122616 - DNA, 78 bp, Homo sapiens
tgacaagtgatgagaagctgtcggagcttcccaagcgcaaatctgtccaaggctgcctggggagcattggagaagaat

SEQ ID NO: 122617 - DNA, 151 bp, Homo sapiens
tgctgcaggcggtgggcattgttggcgccatcatcatgccccacaacatctacctgcactcggccctggtcaaggtctctggacctctgactgacactgtgcctgcccaggtccctgtatgcactgccacagtgccctgggccccatgtcc

SEQ ID NO: 122618 - DNA, 83 bp, Homo sapiens
atgatctatgacgccgagaagcagaggccccgagcctgcctgctccgcttcagcggactctcgctggtctacctgctcttcct

SEQ ID NO: 122619 - DNA, 96 bp, Homo sapiens
aaggaacgaggcaaggagctaaagcagcgtgcgttcagccctgggggcgtctctggccgagcctctttttgtggaaaacgacagcagcagcagtgg

SEQ ID NO: 122620 - DNA, 83 bp, Homo sapiens
tcggcgctgccgtctctggaggagtactggcaacaggagaatgcagttgaaactaattttgtggatagagaaactgttggaac

SEQ ID NO: 122621 - DNA, 82 bp, Homo sapiens
gcttcaagccccgcgagtcgcatctgctcaacgacgaggacctgacgcagattatgatgcatcattatcacagaagaaattc

SEQ ID NO: 122622 - DNA, 49 bp, Homo sapiens
attgacaaaatctgctggacaaagtaggggtcccacggctgggtggtcc

SEQ ID NO: 122623 - DNA, 90 bp, Homo sapiens
cgatattgatattgaagcaatgcttgaggctccttacaagaaggcctgtctcctccctcctacacatttccagctcctgctgcagttatt

SEQ ID NO: 122624 - DNA, 96 bp, Homo sapiens
acttcgcattttggcattgacatttaattttagggtcctttatatagaagggagagtagggaagctgacagtggcacaaatcaaggcaggttacca

SEQ ID NO: 122625 - DNA, 75 bp, Homo sapiens
ctccttcgaggaacagagaaaatgaaaccagcagacagaatttgtcagcaaatggagctgctcctggtgaacaag

SEQ ID NO: 122626 - DNA, 115 bp, Homo sapiens
tcagttggaagcagccgatccagcctgcggagcctgtggggcagattatcaacgcctgatgactgtggcagaaggcatcaccacacttttgttcccatttcaatggcaacatgtt

SEQ ID NO: 122627 - DNA, 100 bp, Homo sapiens
tcaagagcttcaagaacaagggccgcgatgtggaagttcgatacaagaggctgttttcctagcgtggcttgctgcctttggtaagaacatgtcgtccatc

SEQ ID NO: 122628 - DNA, 100 bp, Homo sapiens
ggtggagagggattcgtggtgaaggtccggggcttgccctggtcttgctcggccgatgaagtgcagaggtttttttctgcaccactgccggaactgtggc

SEQ ID NO: 122629 - DNA, 100 bp, Homo sapiens
acaagatcccgccgcggtggctgaactgtccccggcgcggccagccggtggcagctgttaaacgtttaatgaaagaagcggcagaattgaaagatccaac

SEQ ID NO: 122630 - DNA, 74 bp, Homo sapiens
gcgctcagcccccggatcagcctgcctctgggtgccacacctccctggatgatccaagatgaagaatacattgc

SEQ ID NO: 122631 - DNA, 50 bp, Homo sapiens
ggtctcatcgggaggaaatggagatggactcaccctgtcacccaggttgg

SEQ ID NO: 122632 - DNA, 90 bp, Homo sapiens
ccagggatgactacaggttgggggagccccgagagcaagggagatcatccccccgaaggagtggaagccgcggcagacgtatgatgacat

SEQ ID NO: 122633 - DNA, 75 bp, Homo sapiens
tcctcaaggccaaagacatcagtccctgcactaggtcagacaatcccctttggggtacaggaaacaaagcaggag

SEQ ID NO: 122634 - DNA, 90 bp, Homo sapiens
acttggagtccggacatctgaaacttgactgctggcataggagcatctgctcacttggttaacttcaaaggaacagatacagtagcagga

SEQ ID NO: 122635 - DNA, 83 bp, Homo sapiens
tgctctcgccccaacccgcgcgccagccactgaggcggctcccagctgcgttggcgacatggccgacacccccagagatgccg

SEQ ID NO: 122636 - DNA, 74 bp, Homo sapiens
agcctcccgagtggctgggattacagaaatttggagacagacaacttgtcacgcatacagggaaaatgacattt

SEQ ID NO: 122637 - DNA, 50 bp, Homo sapiens
tgcaacactcctctacagtttgagttggtcgcattatgtttcagctcttc

SEQ ID NO: 122638 - DNA, 90 bp, Homo sapiens
catacaatgtggctgtcggcagagctggtagagataagccaatggacacgtcagtgttatctgaagaaggaggagagccttttcagaaga

SEQ ID NO: 122639 - DNA, 98 bp, Homo sapiens
gtcctcggcgccgccctgcgtggagccgccgccggccacccggggacgtccagatcggtgacatcgtcacagtgggcgagtgccggcctctgagcaag

SEQ ID NO: 122640 - DNA, 76 bp, Homo sapiens
gcggagatgcctctttttgccaccaatcccttcgatcaggatgttgttgcacaatatccttttgaagaccataacc

SEQ ID NO: 122641 - DNA, 97 bp, Homo sapiens
gaagagcaaccgaggtttcaatctgcggtcagttgctgataaagaggccattgcaaatttcacaaatcagaagaacatcagcaatccacctgatatg

SEQ ID NO: 122642 - DNA, 74 bp, Homo sapiens
tgaagtggcctatcccaggacaggtggcactctttcaggtgctgggtcttcagctctaaagaggccatttgaag

SEQ ID NO: 122643 - DNA, 75 bp, Homo sapiens
cacagggaagaaagcgatttcctccgcctcttccaaagcggcccaagtctgttttggtggtctgagaggaaaaaa

SEQ ID NO: 122644 - DNA, 98 bp, Homo sapiens
gagctcttcttcatcaacatgtggcagaagcctcccctggtgaagacacaaactgtcaccatctcagataatgccaatgctgtgaaaagtgaaatccc

SEQ ID NO: 122645 - DNA, 100 bp, Homo sapiens
cgctggagagatggcaccggcctgaggtcaaggagaaattgaactaaactctcctttgaagactgtaaaataccatgaagattttgaaaaaacaaagggg

SEQ ID NO: 122646 - DNA, 50 bp, Homo sapiens
tcttgactccgctgctcgccatggtttggtgcacctcgatttggaggaag

SEQ ID NO: 122647 - DNA, 100 bp, Homo sapiens
cggcgagcagtctcaggcctttagtgatgatgtggacagtttgcggttgtgaagaaatgccgtgagaaaagcaccggcctccagtatgccgccaaattca

SEQ ID NO: 122648 - DNA, 75 bp, Homo sapiens
ggcccttttggggaacacaccgtgaacgccagttggattgcagttcaggctgatcagctgaccgaagaacagatt

SEQ ID NO: 122649 - DNA, 97 bp, Homo sapiens
cgctgattacagctggaaacaattgatttgctcttacgtatttgtgtgacttgactcttcaaacacaaaggatcactactcttggaatcaaagataa

SEQ ID NO: 122650 - DNA, 83 bp, Homo sapiens
aagagatctcagcgctcaccgacttctctggaaacttggctgtaacttcaaaagaagatttgattctttatttctggactgca

SEQ ID NO: 122651 - DNA, 101 bp, Homo sapiens
gtcttgcctgtgtcccacttgttcgcggcctataggtgttccattgcctaaagaggagaacatttctgctcccttgatctccagctccccagtgaaggcag

SEQ ID NO: 122652 - DNA, 100 bp, Homo sapiens
gggcgagacctccagagcgcaaggccggcgggagaaaagctgaggaagtgggaaatctgtggctggagctcagcagggcacagaccatcatgaaggctcg

SEQ ID NO: 122653 - DNA, 99 bp, Homo sapiens
gtcctttcctgatatcctcacacttcctcctggatgatggcatggaggatgtttcgtctgaactcactttctgctttggcagaactggctgtgggttct

SEQ ID NO: 122654 - DNA, 83 bp, Homo sapiens
atcccagacctaagtttgaagattggctttgtaacaagcgtccagaggaccagaggttaatttattctgggaagctgttgttg

SEQ ID NO: 122655 - DNA, 50 bp, Homo sapiens
tgaatttgcaaaacttactgtaggtgtgatgaatgcagactctgctacca

SEQ ID NO: 122656 - DNA, 99 bp, Homo sapiens
ttcctgggattgaatgctggtgggaagtctcaggaggcccaggtgctgaaacaattggcagagaagagggaacacgagcgagaagtccttcagaaggct

SEQ ID NO: 122657 - DNA, 98 bp, Homo sapiens
ctcagagtaactgtcccctctgactaccatttctaaggcttcaggcagtgatgtgtatcatcagtactatcatggagtcctgcccctccacctccagc

SEQ ID NO: 122658 - DNA, 97 bp, Homo sapiens
atcacagaaagaatgtgaaaaggtttgcgctcctggttactcactataaacaatatccacccaacacaagcaaagtttattcctactttgaatgccg

SEQ ID NO: 122659 - DNA, 90 bp, Homo sapiens
ttacatcttgcatcctcaagcgtgtatcccctactccgtgttgctgaaagacctggagatgcggaatctccgggaactagaagaccttat

SEQ ID NO: 122660 - DNA, 83 bp, Homo sapiens
cgcagcacttggagcgcagaaccggccgcgcccgccgccttgctccgaaccttcagctttttgggctttgagattgtgagacc

SEQ ID NO: 122661 - DNA, 80 bp, Homo sapiens
ttccggtaggagctgtaatcaattgtgctgacaacacaggatgccttgaagttcatgcacatggggaagcggcagaagct

SEQ ID NO: 122662 - DNA, 98 bp, Homo sapiens
ctgacattcaaggatatttatctaaaaattcttcttttgagtgccagtaaaggaatgtttacccttgcggaagttgcatcacttaatgacattcagcc

SEQ ID NO: 122663 - DNA, 74 bp, Homo sapiens
tgactgcacttcttttttgagaaaggaaggaatatatcctgactgattgtcgaccagatgaaccgcattgtgga

SEQ ID NO: 122664 - DNA, 100 bp, Homo sapiens
cttaaactcttggcatttggctttgcctttctggacacagaagtatttgtgacagtgttcggctaatgaatgagttcactaatatgccagtacctccaaa

SEQ ID NO: 122665 - DNA, 75 bp, Homo sapiens
cagctgaggaagtctgcatccacattgcacataaagttggctcaaagatttggaaagagacagcttaacagaaaa

SEQ ID NO: 122666 - DNA, 75 bp, Homo sapiens
ttttcctgcatggattgggagatactgggacagcggggattttcagtttgattgacaccctgtggcccccagcga

SEQ ID NO: 122667 - DNA, 90 bp, Homo sapiens
ttgcaattcaaccccaagttcatgacttttgccagtgcgtgttccaacatgagtaagagggaccatctcctcatgaacgtcaaatggtac

SEQ ID NO: 122668 - DNA, 91 bp, Homo sapiens
ctgaggtgctcatggtggaggtagagaacgttgtccacgaggacttccaggtcacggaggaggtgaaatagggacggggtttcaccgtgtt

SEQ ID NO: 122669 - DNA, 51 bp, Homo sapiens
aataaccgtccccgccagtcagaagttgagaatgatcaagtctcggcctct

SEQ ID NO: 122670 - DNA, 50 bp, Homo sapiens
ttcgcctccatctgtaccatgggatcgcttacacctgagacgaactacag

SEQ ID NO: 122671 - DNA, 102 bp, Homo sapiens
ggagaagctgtctctgatccgcaagcatgctcagaccttcattgctctgtgtgccaccgggggatatgagactttctactcggaatatcctgagtgttgcgt

SEQ ID NO: 122672 - DNA, 100 bp, Homo sapiens
gtgaccgtggtgatagtgaagatggctgtcttgagagaatcactgcttgtgcaatgactatgaataagtacgtagaagaaaatgtatctcagaaatccta

SEQ ID NO: 122673 - DNA, 101 bp, Homo sapiens
tggccatgtagaagttgatgaatcaagaggaatgcacatctgtgaagatgctgtaaaaagattgaaagctccctctgcctttgaagagaaggccattgaga

SEQ ID NO: 122674 - DNA, 87 bp, Homo sapiens
tggcaaatgtaaaaagaagaattgcacttacacacaggctgctgatactttggctgtgaggcaaaaaaggagaatttatgatatcac

SEQ ID NO: 122675 - DNA, 96 bp, Homo sapiens
tattaattatccattaacactcaagcctttctacatgagggataatgaagatggccctcagcacacggaatactcccccagttgcaagaggcgcag

SEQ ID NO: 122676 - DNA, 75 bp, Homo sapiens
gtaaaagaaagagacttttttctaaagaattgacttctgacagctctctccatggaaggaggcggcggccgcgat

SEQ ID NO: 122677 - DNA, 100 bp, Homo sapiens
tttaattctggaattctagagcctaaagagcaggaatcatggactgtgatagatggggtctcactatgttgtccaggctgacctggaactcctgggctga

SEQ ID NO: 122678 - DNA, 75 bp, Homo sapiens
cagcgccgtgtggcacgacacaaaaatcagtttttgaatcagagccgacaggcacttgaattgaaaatggaaaac

SEQ ID NO: 122679 - DNA, 100 bp, Homo sapiens
gctccagtgtcccacttgcatcaagctgggcatccagggctcgtacttctgctcgcagtgtgccacctgggcttgaaggcatgaaggaacaggacctgtg

SEQ ID NO: 122680 - DNA, 82 bp, Homo sapiens
cacgcaaccccagatccatttacactttacacaagagtgagccatggagctacgtgtggggaacaagtaccgcctgggacgg

SEQ ID NO: 122681 - DNA, 75 bp, Homo sapiens
ggcacatggcccaggcagaccttgcagtcaaaatgtgagaagggtgttatgtctctagtgaatgtcaggaactgt

SEQ ID NO: 122682 - DNA, 83 bp, Homo sapiens
gggaggtggggccgcctttgtgatggagcatttgaagatgaagagcttgagcagcgaggtgcagccggagactggggagagcg

SEQ ID NO: 122683 - DNA, 122 bp, Homo sapiens
gccgcggggaggacatggccgcgcacaggccggtggaatgggtccaggccgtggtcagccgcttcgacgagcagacctctgtgagtgaaagccttcagagggaagctgctaagaagcaggcc

SEQ ID NO: 122684 - DNA, 100 bp, Homo sapiens
gtctcccactgaaggcatccgtggttgtttttaaggagatctattgggaaactgattataaccactcgggcaccatcgatgcccacgagatgaggacagc

SEQ ID NO: 122685 - DNA, 100 bp, Homo sapiens
accagcaccagcaagcggcattggctgcgggacatgggcggctttgccatctggtgcaagaaggccaaggccccgaggccagtgcccaagccccgaggtc

SEQ ID NO: 122686 - DNA, 100 bp, Homo sapiens
atggaagactaccaggctgcggaggagctgagtcagtgctgattctctcaaatagagcttgaaggataaatcttcatttttgtttcaacaaaacttcgaa

SEQ ID NO: 122687 - DNA, 100 bp, Homo sapiens
catggagaagccacccagcctcggtgaccaggagactcggcgcaaggcccgagccctgggcgctgcctatggcacagccaagagcggtaccggcattgcg

SEQ ID NO: 122688 - DNA, 97 bp, Homo sapiens
caagaatgtgcttaagaagttcatctgcatatctgaccttcgggcccaacccttcctttgaagaaaggaaacagttgggcttgccccaccagagacg

SEQ ID NO: 122689 - DNA, 90 bp, Homo sapiens
ctgccttccggggacagccagccctcgctggaccagaccatggccgcggccttcggatgtcctcggctgtgtctgtgtgaaccctgggcg

SEQ ID NO: 122690 - DNA, 74 bp, Homo sapiens
ggcggcttgggcagcccgcgggcgcctcaggtttattgttggccaaaaccaggctttgattgaaccaggatgaa

SEQ ID NO: 122691 - DNA, 100 bp, Homo sapiens
tggatgtcttgaagaatttggggtaaagatcctgcctttgcaaggaccgcagctgaatgcacagctagaaggttggctttcacaagtacagtctacaaaa

SEQ ID NO: 122692 - DNA, 95 bp, Homo sapiens
tttagtatgttgaactggaaatataggacatgcgtttgagatctactgtgagcccaaggatgtgaccttctcttggattttcctgattattatga

SEQ ID NO: 122693 - DNA, 98 bp, Homo sapiens
tgctccaaaacctaagtacaacccatacaaacaacctggaggtgaggttcctccaactcctctgccaaccaatgatgttgatgtgtatttcgagacct

SEQ ID NO: 122694 - DNA, 88 bp, Homo sapiens
gggagtcgcggaacagcaggcccgagcccaccgcgccgggccccggacgccgcgcggaaaaggtcctgaatgttcccagaactacaca

SEQ ID NO: 122695 - DNA, 100 bp, Homo sapiens
ccagcatgtatcagccgaggtggagctgcggggccctggcatgaaagaatggcttcagttctgtgcaggccacgcagttacagaccacacaatctgttga

SEQ ID NO: 122696 - DNA, 98 bp, Homo sapiens
ctgggcccaactgtgaccgatttaaactgcacataccatatgctggagagacattaaagttacgaggatgtcgtccaggaaagattgtgcagatgact

SEQ ID NO: 122697 - DNA, 49 bp, Homo sapiens
gaccccagagaggcgctggacagggcctgagttccctggcggaagaggc

SEQ ID NO: 122698 - DNA, 99 bp, Homo sapiens
cgtgcaccttcgcaagaagcaccagttcaagtggccctcagggcatccccgttttcggctctttgccatcggctcccagctgtctcctgaacagggaag

SEQ ID NO: 122699 - DNA, 100 bp, Homo sapiens
atgtgaggtgtgcctttcaccttctgccatgattgtgaagcctccccaccacatggaacggtggcgacatgtctaagaatgtgagccagtcacagatggc

SEQ ID NO: 122700 - DNA, 100 bp, Homo sapiens
tggatccatttccatcggtccttacagccgctcgtcagactccagcagccaagatggtgaagcagatcgagagcaaggtggtgaaggcatttgtgatcct

SEQ ID NO: 122701 - DNA, 75 bp, Homo sapiens
ccacccgaatccccgggacagatgctcaagctcagcctctgcaggtgtgcgagcaggattgcttctgcaacaaaa

SEQ ID NO: 122702 - DNA, 83 bp, Homo sapiens
cggctatcccaccatcaagttcttcaggaatggagacacggcttcccccaaggaatatacagacttcccaagtaagaagcgga

SEQ ID NO: 122703 - DNA, 100 bp, Homo sapiens
cgtgctggcaggaaaggagtggacacagtagccatgaagctcatgactgctctggtgaatgttgccttaaacctcagtattcatcaggataatacccaga

SEQ ID NO: 122704 - DNA, 75 bp, Homo sapiens
cgacaggacgttggggcggcctggctccctcaggtgacctggaactcccctcggtactgacatgatgacagtgtg

SEQ ID NO: 122705 - DNA, 99 bp, Homo sapiens
gtgctgcgaccactgcccggctgccttccacctccagtgctggcacgtgacacaagctgacctcaagagctccacgttttggcttcgagcaagttttgg

SEQ ID NO: 122706 - DNA, 82 bp, Homo sapiens
agagcgtgaatttgcctcggggacgcctctccaggaggataagatcaatgccctcattaaagcagccggtgtaaatgttgag

SEQ ID NO: 122707 - DNA, 101 bp, Homo sapiens
ggccgcgctatgccccgccccctccccagccccagacacggaccccgcaggattcttctgatgtagagcgactggaaagattcttcgactcagaagatgaa

SEQ ID NO: 122708 - DNA, 100 bp, Homo sapiens
gccactggtgccagccggcgtcatgttagccgcttgcaagacccttcaagaagtaacacagctatcacaagaagcacagagaatagttgagaaacttgaa

SEQ ID NO: 122709 - DNA, 100 bp, Homo sapiens
ccagatgactggtgtagaggaagtaacacaggctgaagccgacgtagcttctctgaacagacgcatccagctggttgaggaagagttggatcgtgcccag

SEQ ID NO: 122710 - DNA, 86 bp, Homo sapiens
acctgcccggtgcccgaggaggcagccaagctcgtggcctgcctctgcgtgcgaagctcttcgtgggcggtcttgactggagcacg

SEQ ID NO: 122711 - DNA, 100 bp, Homo sapiens
caggagaaaatttcagagctgcaaaattatcaggtggaggagaagatcaagcagacccaccgtaagtacctgctgcaggagcagctaaagatcatcaaga

SEQ ID NO: 122712 - DNA, 97 bp, Homo sapiens
ggatagctccctcctggaaaaggagctggatggcctgttggaaatcaaccgcatgacccacaagctgctgagccggtacctgacgctggacggcttc

SEQ ID NO: 122713 - DNA, 100 bp, Homo sapiens
ctgggccgccagcctcggcaccgtcctttcctttctccctcgcgttaggccaaagaagcccaggatgacctggtgaagaccaaggaggagctgcacctgg

SEQ ID NO: 122714 - DNA, 75 bp, Homo sapiens
cgggagttcaagaagaacactccagaggattgtcagctgacctctgtcctgtgtgcccagtggccccaggtgacg

SEQ ID NO: 122715 - DNA, 98 bp, Homo sapiens
agtattaaagtcacttgaagaaaaatatgtggctgttatgaagaaattacagtttggtacaggtttgcagattccgccagcagcacagcaagctctac

SEQ ID NO: 122716 - DNA, 100 bp, Homo sapiens
cgcatcatgccagggagccaagcgtcctgcccggccggactttgaacatgtcggggatcgccctcagcagactcgcccaggagaggaaagcatggaggaa

SEQ ID NO: 122717 - DNA, 90 bp, Homo sapiens
ctcgtaccaatctctctgtctttaaaagatgaggtgacttggtgattttcctggaaaattatagatgtcacagctatcatttacgtcgca

SEQ ID NO: 122718 - DNA, 98 bp, Homo sapiens
ggagcaggagcttcaggttgtccgagcatctgggaaggaactctaatgatccaggacaaagaagttaccctggagtatgtatcaagcctggatttttg

SEQ ID NO: 122719 - DNA, 83 bp, Homo sapiens
ggttctggaatcctcagttcaaggtatcatgaactgatcactaaatatgggaagttggagcctttggcagaagtggacctaag

SEQ ID NO: 122720 - DNA, 76 bp, Homo sapiens
tccggggacccttccgtatctgcctaggcattttgctgtctcctcctaatacgcaccacagagaccttcagattgg

SEQ ID NO: 122721 - DNA, 90 bp, Homo sapiens
tcttgtcactttagccactgctactacaggtattgacctgatggacatggcttcggacatcctgcagcccaaaggagatgatgtggcccg

SEQ ID NO: 122722 - DNA, 100 bp, Homo sapiens
gatcccttggcgtacacggtgtgcaaggggagtcgtggcgtcgtctgcgaccgctgccttctcggaaaggcctaaagaatgtatttgacgaagcaatatt

SEQ ID NO: 122723 - DNA, 75 bp, Homo sapiens
caacttcgccaccctgcggtggattgactacggcaaagtggccactcaggttctggaggacacgtgccggcggca

SEQ ID NO: 122724 - DNA, 99 bp, Homo sapiens
gcagaacgaattcagtgatatcattaagtccagatctgaccagcatctcagacatgtcgaaaaagatgttttgatccctaaaataatgagagaaaaggc

SEQ ID NO: 122725 - DNA, 75 bp, Homo sapiens
gctcctccgggtgctgggcatcatgtgtcggtgctgaccggcatcatcaagatcagcctgaagacgctgctggag

SEQ ID NO: 122726 - DNA, 100 bp, Homo sapiens
ggagcgctccatctcttatcctggataaagccctacaaaaacggcctactaccaggttgaattctcttacccgcccctgattccaggagatggacatgac

SEQ ID NO: 122727 - DNA, 100 bp, Homo sapiens
acctcctagagaccaggctgccatcatgctctggaagcttgtggagaatgtcaagtacgaagatatctatgaggaatgtatcctgtcaggtataatgtca

SEQ ID NO: 122728 - DNA, 101 bp, Homo sapiens
cttccattcatcagcaaacacatcggatcgatgctacgctaacctatcgggttctctctccgcgcgttcagatataagagttcggaccgcccagcacacaa

SEQ ID NO: 122729 - DNA, 101 bp, Homo sapiens
ggacagaggtgcctggggcaacctccaccttgacggttccagtgaagaatgcaaattgcacatcagattttgaggaatactttgccaaaagaaaactggag

SEQ ID NO: 122730 - DNA, 75 bp, Homo sapiens
caagatatactactaactttgaaatggaataaggttaatgttgaagaaggaaaatgcggaagtcgtcatttgaca

SEQ ID NO: 122731 - DNA, 100 bp, Homo sapiens
cctcgaaaaaaagatggagccctgcatatgattggctctttagctgaaatacttctgaagttcgaagcattcagcaaacaatggcaaggcagagccacca

SEQ ID NO: 122732 - DNA, 75 bp, Homo sapiens
tcatccacgacccgggccgcggcgcgcccctcgccaaggtggctatggcggttccagcagcagcagtagctatgg

SEQ ID NO: 122733 - DNA, 98 bp, Homo sapiens
atacctcgtatgcaacctcaggcttcagccattgtggaagctgatcgaggaagcctaagcaggctctgtgaagtgggaatagtggtatttgagtcaag

SEQ ID NO: 122734 - DNA, 75 bp, Homo sapiens
ccggccccgcgcctggacgccgctgacggccccgagcacggccgcccggccacgaaagagaactgccgtcctgat

SEQ ID NO: 122735 - DNA, 100 bp, Homo sapiens
gcggggggtccgcgcacccagctttgctgactggaaataccggcatgcaggattgatggccttatctgccattggtgaagggtgccaccagcaaatggaa

SEQ ID NO: 122736 - DNA, 100 bp, Homo sapiens
gcatcttccgggaacgggacgagttcgtcatccgtgctgaggacatcccttccctcaagagaatttagattcacgtcagaagttcccattcgacttgatt

SEQ ID NO: 122737 - DNA, 98 bp, Homo sapiens
gcacagaacggacttttcgtgtcccgctgtaaggaaacaagatggtccttaaaaccgaagaggaggacggttgattacgaagcctcagagcccttgtt

SEQ ID NO: 122738 - DNA, 89 bp, Homo sapiens
ctgaagttggatggtctgttagaagaaaatatgtactttatgaaaaatcgtgcccggaggcaaggtattaacttaaaacttctacccaa

SEQ ID NO: 122739 - DNA, 100 bp, Homo sapiens
gagtcttcatgtggacagtctcagggacaccatgtagagaattttggtctcgattcagagtaatcaagtcagaggattatatgacttttatctgcctaga

SEQ ID NO: 122740 - DNA, 90 bp, Homo sapiens
actgaaggctcatcatgatattgtacgatttctggtacagttagatgactacagcctccaccaggcggtgtgaagatgcctaatgtaccc

SEQ ID NO: 122741 - DNA, 75 bp, Homo sapiens
ctcgcttgcaacatatcaccatattattcgcctgtttgatcaacctggaatcctacggcccctgaatattttggc

SEQ ID NO: 122742 - DNA, 95 bp, Homo sapiens
tgatgcgctgcagccagctggcccccagggccctgcagggagtcgagctctccggcctctcagccgccatcagccacttcctgaactgcttcctg

SEQ ID NO: 122743 - DNA, 100 bp, Homo sapiens
gagaagccggtacaggtgccctgcggacacgtactggagttccatagactttctgaagaaaacactttgttgaaaaacgatctgggaagggttcggcaag

SEQ ID NO: 122744 - DNA, 90 bp, Homo sapiens
ctctcatcaaaacaccagagcgactttcattagaaggagagcgacagcccaagtcaccagaccgagacatgggtgcccggcaccgcgccc

SEQ ID NO: 122745 - DNA, 82 bp, Homo sapiens
agccgcggcggcagcagcagtgagaggtatcaacttgaactgaaggatgactacatcattagaactaatcgactgattgaag

SEQ ID NO: 122746 - DNA, 100 bp, Homo sapiens
gggagacttccacggcctgcaggggctgaggaagctgccctcgaaaccctccagaagacatctgtcctgcagaggccctaccactgcgaggcctgcggga

SEQ ID NO: 122747 - DNA, 100 bp, Homo sapiens
gcagctagcaaggtgacccatgcattggttaatatcaggaagcatccaggatgtgggaacattgtgacatttgcacaatttttatttattgctgtggaag

SEQ ID NO: 122748 - DNA, 90 bp, Homo sapiens
cagagcgcagctatcggtgctttgcagggcaacgggcatgaggaggtagttgcatgcgcctgggatggacagacatatatcattgatcac

SEQ ID NO: 122749 - DNA, 100 bp, Homo sapiens
gggtctatttgaagaaatgaagaaaacagcaaacaacaatgctgtacagggaggtggggaagacagggctccagctaccacaggacgggctctgggtata

SEQ ID NO: 122750 - DNA, 100 bp, Homo sapiens
attggatttgccagggcatgtagctctccaggcttgcaagcgattaccaggacaacaacaggctggagttgttgcccatcctcctgcagtgcctccaaga

SEQ ID NO: 122751 - DNA, 71 bp, Homo sapiens
cagaaaatggacatccctttccttggggaaatgcccgcagaggccaaggagcgggagctggaactgaagaa

SEQ ID NO: 122752 - DNA, 90 bp, Homo sapiens
tagagatgcagccacggaaaccgtgacaactgccatgtcacaagaaaatacctgccagtcaacaggaaagaccacagcaagattctttca

SEQ ID NO: 122753 - DNA, 80 bp, Homo sapiens
ccattttcataaagaaccacatccgtttccccaaattcaacttctccaagccccgtctgaggtctggcagtcagagacag

SEQ ID NO: 122754 - DNA, 74 bp, Homo sapiens
tgagcgcctccagcgagaagttgagggagaaaggcgggcccgggaacaggaggctgaacagtacccagggggag

SEQ ID NO: 122755 - DNA, 100 bp, Homo sapiens
tctgctcttcagtacaatcctgacagtttattctgcgttgtagcagcatttggctgtttctactactgaatgaatctttgaaaagctggtaaaagacatg

SEQ ID NO: 122756 - DNA, 83 bp, Homo sapiens
aagagattacaagagatgaaggagaaaagggaaaatctttcccccaccttgaggctgaggttctggaccacagcaagaaccct

SEQ ID NO: 122757 - DNA, 75 bp, Homo sapiens
ctgcttcctgcttccacttccgtgaccgttagggacaagacaggtagaaaatctggtgtattaactgtgaaaatt

SEQ ID NO: 122758 - DNA, 75 bp, Homo sapiens
acagaaccgtcccaaaatatggcaaagaaacctattctgagtggagcccacagtgaccatctccccatccaggac

SEQ ID NO: 122759 - DNA, 75 bp, Homo sapiens
aatgactgggatatttactactgggccacaggtttttcgttggaatatacgttgcacatttatggcgattctgag

SEQ ID NO: 122760 - DNA, 90 bp, Homo sapiens
aattttgtggccttagctacaggagagggaaagaatatggcaaagctgatgcaagatgggtttattttgatccaaccattgtgtctgtgg

SEQ ID NO: 122761 - DNA, 98 bp, Homo sapiens
cttctccagcaagtgcatgcgcgccatggtctcagtcagcatgtctatgagcagttcctgctgcagcttcagttgattatggaagattcccacaagag

SEQ ID NO: 122762 - DNA, 97 bp, Homo sapiens
catcatcaaaattgttccagaactgcagtgaactctttaaaacacaggtagttgatgtcacttggcgatattcctgcaaacatgaagaggtgattgc

SEQ ID NO: 122763 - DNA, 100 bp, Homo sapiens
aaaacattcaagttgagcagatgacaaaacttcaagccaaacatcaagcagaatgtgatttgcttgaagatatgaggttgacctgacagttcaagaaaag

SEQ ID NO: 122764 - DNA, 83 bp, Homo sapiens
cgccttgctcctcgccgcggcggggactgcagatttggtgttgtactgcgaggcattcctgaccacctacaggaccttcatct

SEQ ID NO: 122765 - DNA, 82 bp, Homo sapiens
gggcagattagcgacatccgagtgcagaacctgcaagatcatgcatgccccgcggtccagggacaggttcacagcgccgtcc

SEQ ID NO: 122766 - DNA, 83 bp, Homo sapiens
cgggaacaaatactactacatcccgcagtacaagaactggagaggtgaaaggtgtagcagtcactcggcctacacccacagca

SEQ ID NO: 122767 - DNA, 101 bp, Homo sapiens
ggcgccaccccgcggtcatcggtcaccggtcgctctcaggaacagcaggtgctggagaatctggtaaaagcaccattgtgaagcagatgaggatcctgcat

SEQ ID NO: 122768 - DNA, 75 bp, Homo sapiens
aaaaggtccaaactcctatctccttacagcccgcagacacaagggcacacgtgtttcacgttgacaggtttgctt

SEQ ID NO: 122769 - DNA, 114 bp, Homo sapiens
gcaaacccttctagacagccggggagtgttcctcgacatgtttctccagtgacacctcccagagaagtttgacttctgacagctctctccatggaaggaggcggcggccgcgat

SEQ ID NO: 122770 - DNA, 100 bp, Homo sapiens
aagaagccattgctcttagcaggaaggacaaaactattcaacatgtggaagtattttgttatgccagaggacagttatgggatggatgggaaggttaatc

SEQ ID NO: 122771 - DNA, 100 bp, Homo sapiens
gccgtcctgcggaaccgctggctgtcagacagcttcaaggagacgctggtgcccctgggtgaactgaccaagcacagcacatcagcggtggatctatcca

SEQ ID NO: 122772 - DNA, 78 bp, Homo sapiens
cacagatagatttggctttttacagctttgaagacaagattcccaaaaggagattctctgagatgcaaaatgaaagac

SEQ ID NO: 122773 - DNA, 75 bp, Homo sapiens
gctaaatgaagacagagaagtcaaaaatgctgaaatcctcagaatgaaggtctgggacctgcgccagaacaagct

SEQ ID NO: 122774 - DNA, 50 bp, Homo sapiens
gaacttccgtgccccccaccctcaccaagaaacagaccagtggtatggag

SEQ ID NO: 122775 - DNA, 80 bp, Homo sapiens
cccagtcccaggacgtggcgcgggtctccagtgcttcagaccaaactgcagctggaatacccagtacagttctgcttact

SEQ ID NO: 122776 - DNA, 100 bp, Homo sapiens
cttctgcgagaggaacaagaccaatttcttcaacggccgagatggacgaaaaaatgtggttccttgtgttctctctgtaaatggggacctagaccgaggc

SEQ ID NO: 122777 - DNA, 90 bp, Homo sapiens
gcggaagaagatggcgctcaccaggacaaggagactggctttcacagaggtttgggttgggttcagttttcttcagaagaaggacttcgg

SEQ ID NO: 122778 - DNA, 89 bp, Homo sapiens
ggcagtatgattgaagtttctaagccagggaggccacggagaagatggtatctatgaagccaccaggtttccaggcatccctggctaga

SEQ ID NO: 122779 - DNA, 90 bp, Homo sapiens
aagaggtccaaaggcttctaagcatgcgggagaagaagggcagcacattccccctgttcccaggtgggtccagagatgtcgcctgggagc

SEQ ID NO: 122780 - DNA, 99 bp, Homo sapiens
agtcagttttgaaggagaggggtcttaagaagattagattgggaatagaagacttcaggcccgcatagctcataggatacaagaactggaaaatctgcc

SEQ ID NO: 122781 - DNA, 100 bp, Homo sapiens
ttggtgggattctgctcgtgttccaaatcatcgcctttctggtgggaggcttgattggcttccatctgtatcacaagttgcccacaatagtgcctgagag

SEQ ID NO: 122782 - DNA, 99 bp, Homo sapiens
ggacctcctgggaggcgaggacggtctctgccagtataaatgcagtgacgagctgcatcctgtggccctataacactcttctccaaaaggacctgccag

SEQ ID NO: 122783 - DNA, 100 bp, Homo sapiens
ggaaatctgcttaaagatcttgcagctttatgctcggaaaaaggaaggaccgcaagatggcactgatccagatgggctccgtggaggaggcggtccaggc

SEQ ID NO: 122784 - DNA, 100 bp, Homo sapiens
aactgattgactgggctggcgttaactgtgcggaggcagggacagtatgatttggtgaaatgcctggctcctattcgagaccccaagaccgagcaggatg

SEQ ID NO: 122785 - DNA, 100 bp, Homo sapiens
gagcccacggacaccacctcaacggagacccggtgagcctccattgataaaaggttggcttccttatcttggagtggtcctgaacttacgaaaagacccc

SEQ ID NO: 122786 - DNA, 98 bp, Homo sapiens
gcggttttggtgaataacatcaccacaggtgagaggctcatccgagtgctgcaagatcatccaattatgatgggttttgaaccccttgtgaaccagag

SEQ ID NO: 122787 - DNA, 74 bp, Homo sapiens
tggaaatcctaatgacagtctccaaattcgcctccatctgtaccatgcctaatgacagtgaagtggacatgttt

SEQ ID NO: 122788 - DNA, 82 bp, Homo sapiens
ctgaaaggaataacaaggcttatctctaggatccataagggtccttttgtacaagtggatgaactgatggaaattttccgaa

SEQ ID NO: 122789 - DNA, 95 bp, Homo sapiens
atctttccaggaggctttggagcggctaaaaacctgaggtgcttcccaaggaccgtagatgcctctctagagcatgagctcaggcaagagtgccc

SEQ ID NO: 122790 - DNA, 76 bp, Homo sapiens
tgctttgggaaatcttgtgtcagatctagctggacttggttttctggatatgccgcagaaggatccgtgccagaag

SEQ ID NO: 122791 - DNA, 75 bp, Homo sapiens
cacggacagactcatggggaagggccaggtccaggacctgctgaagctcacacccgtggaccacccagactgcct

SEQ ID NO: 122792 - DNA, 51 bp, Homo sapiens
cagttcgctacacagcaatgcatcgagggagttctgggaaatcgttcattc

SEQ ID NO: 122793 - DNA, 83 bp, Homo sapiens
gtggtgctgttttctgccggctgtaaagtcatcacctcctgggatcagatgtgcattgaggaggaggacttcatccaacccag

SEQ ID NO: 122794 - DNA, 100 bp, Homo sapiens
ttcgaggccaggggcttttctaccaggattctggggtgtttctcctcctttcctccctcccagatcttctcacggatccagccagtccgctctgaccccg

SEQ ID NO: 122795 - DNA, 99 bp, Homo sapiens
caatatgttaaggatacctgtaagaaaggccttagtaggcctttctaagtctcctaaaggatgtgctctctgatgtaaaggatggagtaaatcaagcag

SEQ ID NO: 122796 - DNA, 83 bp, Homo sapiens
caagaggaccaggagcagaagaggaagaggtttactcctggcttgggggcattaggaagcactggaggctcttcgggaactaa

SEQ ID NO: 122797 - DNA, 100 bp, Homo sapiens
tgagagtccgccgccaacgcgcaggtgctagcggccccttcgccctgcaggtgtacaagggagaagaagccacattccaaatctcaggcctccagaccaa

SEQ ID NO: 122798 - DNA, 95 bp, Homo sapiens
gtatgtctgacagtggatcacaacttggttcaatgggtagcctcaccatgaaatcacagcttcagatcactgggggcagtacccaaaggaaacgc

SEQ ID NO: 122799 - DNA, 82 bp, Homo sapiens
cctcatttgaggagtgggaacaggcttcggcgaacacaaagctctctatcaatatcagctcacatcattgaaaagataattt

SEQ ID NO: 122800 - DNA, 80 bp, Homo sapiens
ccagctggaaccctggggactacgacgtccctcaaaccttgcttctaggagataaaaagctgtttgcagacaaggtccca

SEQ ID NO: 122801 - DNA, 96 bp, Homo sapiens
caatccctctgggagtcaccacatcagatacatcctactcagatatggctgctggatcagaggctgccagaggaacccgaccagaacctgtccagc

SEQ ID NO: 122802 - DNA, 75 bp, Homo sapiens
aaggaattagcagaagacattatgtcagatcacccggaagttcaggctgaattctgaaggcaaacttgagcagac

SEQ ID NO: 122803 - DNA, 83 bp, Homo sapiens
ctggaatccttaaagccatgtccaagctttgacagatccaaatgcttctgctgcccagcaggctgttctccagcagcacatca

SEQ ID NO: 122804 - DNA, 100 bp, Homo sapiens
atttcccggaaggttaacagcccccttctcagttttcctgaacatccagtcatggataaaaatgagctggttcagaaggccaaactggccgagcaggctg

SEQ ID NO: 122805 - DNA, 100 bp, Homo sapiens
cgccctggcggagaagactcgaacggctcccacagccgggcgttgggggaaaggtgggatatgagcctcttcctccaacaataggacgaaatatttttgg

SEQ ID NO: 122806 - DNA, 75 bp, Homo sapiens
tagagaatgagatagccgtcctgagaaagcgatcagtgggtgaccgcggctgcgagggactttgtcatccgtcct

SEQ ID NO: 122807 - DNA, 75 bp, Homo sapiens
aagatggtgtcctggatgatctccagagccgtggtatatgcctcttcatgttcgacgcagtagtgacccagctct

SEQ ID NO: 122808 - DNA, 98 bp, Homo sapiens
gaaaggcagccgcggatcgccgcgctcagcgacaaacaagctttccttaaagtttcccatgtctcaatggactcctgaatataacgagctctacacct

SEQ ID NO: 122809 - DNA, 83 bp, Homo sapiens
gcaagatggacggtttcgccggcagtctcgagttccgtgcccctctgtgcagctgtggcaggggatcatagcagcaggctatg

SEQ ID NO: 122810 - DNA, 100 bp, Homo sapiens
caagcctgtaggatccactggcgtcatcaagtcaccaagctggcaacggccaaaccaaggaggtgtcatggagaaactccagctgggcccagagattctg

SEQ ID NO: 122811 - DNA, 75 bp, Homo sapiens
gagggagggtccgagccagccgctgttttgccggaggagcccctcaggcccctgtgcacgtcgggcgtagttcgg

SEQ ID NO: 122812 - DNA, 145 bp, Homo sapiens
agaattttgccttcatgatggacctccttatgcaaacggtgaccctcatgttggacatgctttaaataaggctaaaataaatgaagctgtagaatgcttactgtccctgaaggctcagtataaagaaaaaactgggaaggagtac

SEQ ID NO: 122813 - DNA, 90 bp, Homo sapiens
tcttctttataaaagcaaccattgtcttaagcattatgcacctcagtgggataaagaaatgcttccagactgcacacttttacttagagg

SEQ ID NO: 122814 - DNA, 101 bp, Homo sapiens
caagagactgcctcagtttgatgacgatgcggacactgcgatagggtctcaccatgttgcccaggctggtcttgaactcctggactcatcctaaagtgctg

SEQ ID NO: 122815 - DNA, 90 bp, Homo sapiens
gctcacctgtgacgatgagccagagacctacgtggcagctgtgaaaaaagccatttccgaaggcggtggatgaattttattccaagatag

SEQ ID NO: 122816 - DNA, 75 bp, Homo sapiens
tgcaccctccttccacctggccaggaatcagctaagaatggagcaacaggcgtggagttggacattgagtttact

SEQ ID NO: 122817 - DNA, 75 bp, Homo sapiens
tcccgcagccgctcatcaaccacgcgcccaggattaaactgcaaatatctcatgaagctgctgcctgtatcactg

SEQ ID NO: 122818 - DNA, 100 bp, Homo sapiens
ctactagcaagattcaaagataaaactcctgcccctcttcaacacctggacaccttgttagatggaacctacaagcagggtctgaaaagccctcaagaaa

SEQ ID NO: 122819 - DNA, 90 bp, Homo sapiens
gaagtactgagcctgttggaggaactggcccggaaacaggaggacacaccaatgggaatcccaatggggaagtcgatgctggtgcttctc

SEQ ID NO: 122820 - DNA, 98 bp, Homo sapiens
catcaacacgccagccctgctgggtacagaagtgcaggtggatgacatcaagcgggtctactcactcttcctggacgagtcccgctccacgcagtaca

SEQ ID NO: 122821 - DNA, 100 bp, Homo sapiens
caaagacagtgaagaactcgagccacatgaaatgaagatcacctctgcctatctacaggacattgagaatgcctataagaaaacctttctccctgagatg

SEQ ID NO: 122822 - DNA, 75 bp, Homo sapiens
tgactggccggaccctgcccctggcggagaatttagcttgggttaaatcatataacatctgctttgaattggaag

SEQ ID NO: 122823 - DNA, 111 bp, Homo sapiens
tatttggagttcttacaacatggcagacattgacaacttagaccatgctcagcctccaagcagccttgtcatcgacaaagaatctgaagtttacaagatgcttcaggagaa

SEQ ID NO: 122824 - DNA, 75 bp, Homo sapiens
caaaactcctctctatagtcaactccttcaagcatataagtggtcaaacaaggtcgcccggctcatggagatggg

SEQ ID NO: 122825 - DNA, 98 bp, Homo sapiens
caacactaaaccacaaatatacaacaaggccattttctcaaacgagagtcagcctttaacgataccatgtttgtgtggaagtgccccgtgtttgctat

SEQ ID NO: 122826 - DNA, 82 bp, Homo sapiens
aggaaagtggctgcagtgacacagatatatttttgccatcatggatcagtttggagatatattagaaggtgaagtggaccat

SEQ ID NO: 122827 - DNA, 75 bp, Homo sapiens
gttcaccagggcttactcgctaaagatgcatcgcctaaagcatgaaggaatagccaggccagaagaaggaaggcc

SEQ ID NO: 122828 - DNA, 96 bp, Homo sapiens
cgggaactcagagtcaaagaagaaaccgtgctcagaaactagccagattgaagtggacagaggactgcagaaaatcaacctatcctccttcaggac

SEQ ID NO: 122829 - DNA, 102 bp, Homo sapiens
agaagctttgaagcttgatgtctactgttttgaagcgttcgatcttttaacatcacatcacatgctgacagcacaagaagaggagaaggcagagccccccca

SEQ ID NO: 122830 - DNA, 90 bp, Homo sapiens
cggggggcggctctgcgctggccgggggcgcgggcggcggcgccggcaggaagctgagacgttacaacaaagattagaagacctggaaca

SEQ ID NO: 122831 - DNA, 100 bp, Homo sapiens
cagttgctggatatccaagcctctcagcttcggagaatggagtcttccatcaatcatatctcacagcaagccagggctgagcaggaagaagaattcatta

SEQ ID NO: 122832 - DNA, 83 bp, Homo sapiens
ctcacaatgaggctccctgctcagctcctggggctgctaatgctctgggtctctggtattccaataactgtaccacctccagg

SEQ ID NO: 122833 - DNA, 75 bp, Homo sapiens
taggaacaccctcatcatctacctggacaaggtggtgatctttgtgaagtctgtgcagcggtgcattgccttggc

SEQ ID NO: 122834 - DNA, 100 bp, Homo sapiens
cccagggcaagccccgctccggccaacaagcctgtaggagctgtccaggccatctccaaccatgggagtgaggcacccgccctgctcccaccggctcctg

SEQ ID NO: 122835 - DNA, 97 bp, Homo sapiens
gtatatgctgttcatcttcaattcaatcttctttaccaattttggatccatacagagtggcttttcatggcctgccactgaaaatcaagaaagaacc

SEQ ID NO: 122836 - DNA, 83 bp, Homo sapiens
ctcgggtcctcgcacaccatcctgactcggtgaaatacctggagtgctcagctctcacccagagaggcctgaaaaccgtgttc

SEQ ID NO: 122837 - DNA, 100 bp, Homo sapiens
gatcatctcagacgaatcagtggaagaagagggcattgaggaagggcactgcacttggctgtgattcatcagcatgaacccttcctggattttcttctag

SEQ ID NO: 122838 - DNA, 83 bp, Homo sapiens
tgatcatcctgctgggcttcgtccagatcgggaaggacagaatgttgctgcgggatgtaaaagctcttaccctccactatgac

SEQ ID NO: 122839 - DNA, 50 bp, Homo sapiens
ccaatctggataggcttctgtcagatggtctcctatggacagaagtgcgg

SEQ ID NO: 122840 - DNA, 50 bp, Homo sapiens
tcctacgaaagaaagctcatcgaggctgaccaactgactgaagagcagat

SEQ ID NO: 122841 - DNA, 75 bp, Homo sapiens
gaggagcagaatttactacagcatgtgatttcaggctctccgtgtgaaatggtcccatctcagactgccctgggt

SEQ ID NO: 122842 - DNA, 100 bp, Homo sapiens
ctaagatggcgactgtcgaaccggtgaaggtgctaaaggagaagatagaagctgagaagggtcgtgatgccttccccgtggctggacagaaactcatcta

SEQ ID NO: 122843 - DNA, 100 bp, Homo sapiens
taccttttgagctgggaaaactgtttcagttgcagactttaggcctgaaagctgatacgcctcctcctgcctatatgccacctgatgatcagatgggtca

SEQ ID NO: 122844 - DNA, 80 bp, Homo sapiens
ctcgcgctactctctctttctggcctggaggctatccagcctgccaccacctgtgaccccgtggtggaggagcatttccg

SEQ ID NO: 122845 - DNA, 100 bp, Homo sapiens
cctgatcgactccagcatcatgattacctcccagcatgatgccttcttctgtagagtgggcgctttgcagaatacgtgttgaatgaaatcactgatctag

SEQ ID NO: 122846 - DNA, 100 bp, Homo sapiens
ctctacctcagtgtccatgatgaggaccgagatgccctgcgttctgaactcacggtggctgctgcagtcctggtgctgttggtgattgtgatcatctcac

SEQ ID NO: 122847 - DNA, 98 bp, Homo sapiens
tggctttgagcccctcacaccctggatccttgacctactaccttgatgacttacaagccctcaaggggaagcattttctcctggactccttgatgccg

SEQ ID NO: 122848 - DNA, 75 bp, Homo sapiens
agagagccagcaatgcctccatgaacaatctcacccaattactctgctcaggtatcacagatgtcgtaagaatct

SEQ ID NO: 122849 - DNA, 83 bp, Homo sapiens
ctttacccagaaaacaagaaaaattcactgtggtccagaagcagatatcggtgaggtacatgtgaagattttttggcagctta

SEQ ID NO: 122850 - DNA, 75 bp, Homo sapiens
ctcagacctgccaatttaccagagataattgataacaccctgtaacagctgagatgattgccgccgtggacacag

SEQ ID NO: 122851 - DNA, 101 bp, Homo sapiens
gtgaattttcagctcgtttccttttgaagctgcccgtagatttcagcaatatccccacataccttctcaagactttaagaaagaaaggccttaatggttgt

SEQ ID NO: 122852 - DNA, 82 bp, Homo sapiens
ggcatggccgggatcattaagaagcagatcctgaaacacctgtcccgattgacgtgagtgaattcagatataactcaagctt

SEQ ID NO: 122853 - DNA, 75 bp, Homo sapiens
tggcggagaggacctccaacctgctggagatcagggtgctgcagccagtgacgccaagtccagtgaaaggcaaag

SEQ ID NO: 122854 - DNA, 100 bp, Homo sapiens
ctgggatggggttactgagccggctgtggcgactcacctacccgcgggctgtggtagctaaagttgcagacaagatccagctcatcaataatatgctgga

SEQ ID NO: 122855 - DNA, 75 bp, Homo sapiens
gttccatacatgtagatggtcagcgaggaggggtttttagaacttcagccataaaaatgggcagaattttccttg

SEQ ID NO: 122856 - DNA, 88 bp, Homo sapiens
atcctactggacatgtcagtgtcctttcacacccatgtgaaagagtgcaagccctggctgaggccaatgctgtgaagctccacagagc

SEQ ID NO: 122857 - DNA, 100 bp, Homo sapiens
gcgggccggggacctgcatgtgtgtgcgcgcgaaggagcggaagaatggcagtgctcaaactcaccgaccagatccagggcctggagcaaagagcggatg

SEQ ID NO: 122858 - DNA, 82 bp, Homo sapiens
tcggcggctcagttgtccatgaccctgaaggtccaggagtacccgaccctcaagggccatgatccaaaggaaccagagcagt

SEQ ID NO: 122859 - DNA, 100 bp, Homo sapiens
gcaaacgagaattaaatgccgagaaggccagtacgttgaaaacgaggcccactgcgactttgtgaagctgcgggagatgctgattcgggtcaacatggag

SEQ ID NO: 122860 - DNA, 100 bp, Homo sapiens
cctccaggacagcacctagtcgtggccggaggagtctcagagctgtcagaaaggttatcaatactctggctgaccatcatcatcgtgggactgactttgg

SEQ ID NO: 122861 - DNA, 90 bp, Homo sapiens
caaaagactgctaaagtgagagtgaccaggcttgttctggatccctatttattaaagggtctccgtctctccaccgggggcttcatcctt

SEQ ID NO: 122862 - DNA, 50 bp, Homo sapiens
attggccaagacgatcaccaaacaggtggattctccacagttttcctcgt

SEQ ID NO: 122863 - DNA, 75 bp, Homo sapiens
gcctcaggcgtgcgcggacggtgtgcggggtgcaaatagctatgggcaacttggcctcggccataaggaagatgt

SEQ ID NO: 122864 - DNA, 88 bp, Homo sapiens
cgctggaagggatgtcgtctcagcagtgctcgggcgcaggaattgatgagtgccatcagaaagctgtatcatgagctgcctgcacttc

SEQ ID NO: 122865 - DNA, 101 bp, Homo sapiens
aggaactgtcggaacagaaccaaaggctattggatcagctcagcaggagatcctgcagatcattcagctggacctagacctgaagtttaagaccaacatcc

SEQ ID NO: 122866 - DNA, 100 bp, Homo sapiens
tgatctccggcgcgggcactgctttccactcggctcctgtcgtccgttctctcaggctcccgttcagtgagtccattcttgcacaccgagaaaatatgcg

SEQ ID NO: 122867 - DNA, 75 bp, Homo sapiens
tgaagagtttgagaacattcgaaaggacctggaggaggcggcgacggcggcggcggggggagaggaagagaaaga

SEQ ID NO: 122868 - DNA, 75 bp, Homo sapiens
aagcccctctggcccaaaggctggatgcaggccagggagccgatatgtggatttactcccttgatggaagcagct

SEQ ID NO: 122869 - DNA, 75 bp, Homo sapiens
gcgagatgctgcagatgccgttaaacaaatcctggaggcagttgctgtgtttgatcagtatgtaaagaccagggc

SEQ ID NO: 122870 - DNA, 100 bp, Homo sapiens
atatgctatgtcttaagagaaggggctaatgccacaagtgatatgttctattttgcagttgaagatggtggtatggctgatggcaagcattgtacttttc

SEQ ID NO: 122871 - DNA, 75 bp, Homo sapiens
gcactcttcaacttcaccactcaaggaaaatcctgccttgcttcgttgggcctatgcaagaacaataaatgtcta

SEQ ID NO: 122872 - DNA, 82 bp, Homo sapiens
ctggagcctcagttggaagcagccgatccagcctgcggagcctgtggggcagatcctgaggaggatgaaggggctggccctg

SEQ ID NO: 122873 - DNA, 96 bp, Homo sapiens
tgctgtgggcgctgctggcgctctggctgtgctgcgcggcccccgcgcatgatgagctgcttcagaaagagcaaaactattcagatgacgtcttgg

SEQ ID NO: 122874 - DNA, 51 bp, Homo sapiens
ctcccaagtagctaggagtacagcccacagaacttaattgcccaatctcag

SEQ ID NO: 122875 - DNA, 83 bp, Homo sapiens
ctacggacaagacctccaccacgcagagaatccagcctgtgaaacagattcagatagttcaagttcatcgtcttcctcttcat

SEQ ID NO: 122876 - DNA, 98 bp, Homo sapiens
gcgactccggagacagcccaaatatcctcggaagagcgctcccaggagaaacaaggatctggacaactctcctctgtccccaccttcaccaaggacca

SEQ ID NO: 122877 - DNA, 96 bp, Homo sapiens
ggcacacaccccccgacaggcacgcacacccaccccacagtgcccggctcggctgcgtccacctggaaggccgctgtggtggaaggatgtttgact

SEQ ID NO: 122878 - DNA, 50 bp, Homo sapiens
gcgtggagatatggcgcaactgcggcgcgctctgtgtgctccgggatgga

SEQ ID NO: 122879 - DNA, 80 bp, Homo sapiens
aaaaataccacgacaaaaccaccctaaaaaggtggacaagtcctattttcaagagaagatgacttttaacagttttgaag

SEQ ID NO: 122880 - DNA, 75 bp, Homo sapiens
tgctggcaagaatctccagtttttgacgggggccattcagcaactgggtggggtgcacagcgacttcaccgcggc

SEQ ID NO: 122881 - DNA, 101 bp, Homo sapiens
ggaggtggtagagggcatggatatctctactcgctccaaagacggagtctcagtggcgtgatcctggttcactgcaacctctgggccccccccaacccact

SEQ ID NO: 122882 - DNA, 98 bp, Homo sapiens
cggattcatttagagctgcggaacaggacgccctctgataacccttaggagaaatcttgagagtggacagcaattgtgaagatcgccagagagttctg

SEQ ID NO: 122883 - DNA, 75 bp, Homo sapiens
gaatgccaacacagaaaccttgccatcaggggccaggaaggaatactgggagaatcttcggatagcctcaggccg

SEQ ID NO: 122884 - DNA, 100 bp, Homo sapiens
gttcaccaagcagatccagcagctccaaggtatggacctgtctgccaatcaggacgaggagaccgaccaggagaccttccagctggagatcgaccgcgac

SEQ ID NO: 122885 - DNA, 99 bp, Homo sapiens
caagaagattatgacagattacgccccctatcctatccgcaaacataccaaatatgccccaacagcggcaagaccagcatcatcagagtgccatgatgc

SEQ ID NO: 122886 - DNA, 88 bp, Homo sapiens
tgggccgccgagctggacccggaccggttttgggttctgcggggagtgtctccagccctgcctgcaggtgccatccccgctgtgccca

SEQ ID NO: 122887 - DNA, 75 bp, Homo sapiens
tcgcccgccaccctgcgctgccgccgctctgaggagttaaagccctcccaggcccaatacttcaaagcatcctac

SEQ ID NO: 122888 - DNA, 122 bp, Homo sapiens
cccgggcccatgcccgtgtgccccctgccatcgtgcagatgctgctggtgctgcaggctgtgagaagacatttatcacagtgagtgccctgttttcccataaccgagcccacttcagggaac

SEQ ID NO: 122889 - DNA, 100 bp, Homo sapiens
aggagacccaaggaacagtgccaagttagatgccgattacccacttcgagtcctttattgtggagagatggggcttcctcatattgcccaggctggtctt

SEQ ID NO: 122890 - DNA, 100 bp, Homo sapiens
aaacctctccaccctcagtgacccggtgcagctagaagtccatatcgctattgtggacgatgaaaggctctctgcagaggagatggatgagaggaggcgg

SEQ ID NO: 122891 - DNA, 87 bp, Homo sapiens
cgtttttacccggccaaagtcactgctgttaacaaggatggtctgccatcatggatgttctcgcagaagcaaatggcacctttgcct

SEQ ID NO: 122892 - DNA, 82 bp, Homo sapiens
cttcgctctttgcatcttaactgcagatcaggatcctcatgaccagccaaagagaagaagaattaggaagcataaatcaaag

SEQ ID NO: 122893 - DNA, 90 bp, Homo sapiens
atgacctcattcatggcaaaaatgaactattccatggcagtatatcttgtaaaacagttgtcctcaacagttcttcttcagaggttacga

SEQ ID NO: 122894 - DNA, 80 bp, Homo sapiens
gacaaaggtgatcctggtatttcaagcattggtcttccaggtcttcctggtccaaagctggatgaaaaagaaagtcggcg

SEQ ID NO: 122895 - DNA, 100 bp, Homo sapiens
cagacatcagctacagatatatcttcagcaggatcaaggtgaaaaggagaaccccatgcgggaacttcgcatccgcaaactctgtctcaacatctgtgtt

SEQ ID NO: 122896 - DNA, 75 bp, Homo sapiens
ctccatttggcctgaagcctcgatcaggtgatcgccatgatcaaaggcctgcaggtgctgatgggcaggatggag

SEQ ID NO: 122897 - DNA, 51 bp, Homo sapiens
cctgagacggtgtcccgccgaaaggtttttgtcatccattggagggacact

SEQ ID NO: 122898 - DNA, 75 bp, Homo sapiens
tgacaatcttttagaaccaacaagggtctcaatgcccacagaaaatattggtacatcaggaacgtctctatcaag

SEQ ID NO: 122899 - DNA, 97 bp, Homo sapiens
agaatattggtcaagttgctgaccttgaatgcttttttaggaccaaaggatatatttccttactcagaaaataaggaaaagtatggcaaaccaaata

SEQ ID NO: 122900 - DNA, 101 bp, Homo sapiens
acgcgctaaggcaaagcacctgaaaaatatgtcgtaactgcaagtgtggccaagaagagcatgatgtcctcttgagcaatgaagaggatcgaaaagtggga

SEQ ID NO: 122901 - DNA, 90 bp, Homo sapiens
gcgacagtgcccaggggtctgagtctcacagcttgtaaagagcaaaatatgctgtgaattccatcaagaagaaagtcaacgacaagaacc

SEQ ID NO: 122902 - DNA, 75 bp, Homo sapiens
tcatccgagcctttgatttgagtgggtcatttcattagagaaattgaaggattttggtgagtgtgtgattgccct

SEQ ID NO: 122903 - DNA, 100 bp, Homo sapiens
ctgggagatggaacatagcacgtttctctctggcctggtactggctacccttctctcgcaaggagttcatgatcaagtgttgcccacaccaaatgcttca

SEQ ID NO: 122904 - DNA, 74 bp, Homo sapiens
tgaccttctagtcatgaccaggaccagggcagcactcctcctgttcacagggagttctgtggaaccaggcaccg

SEQ ID NO: 122905 - DNA, 74 bp, Homo sapiens
agcaagttcctgcttctgggacagctctactgacggtgaccaagaatatggcccaggtgaccaaagccctggac

SEQ ID NO: 122906 - DNA, 50 bp, Homo sapiens
caacgcgggcatcgccttcaagggtgaccctggcagcaaccccaacaaac

SEQ ID NO: 122907 - DNA, 100 bp, Homo sapiens
gtatctaaaaaagcaggaggcaagaaaggggcccggaaatccaaggcatcagtgtcattcaaggacgtgactatagaattcacccaggaggagtggcagc

SEQ ID NO: 122908 - DNA, 100 bp, Homo sapiens
ctgctattgaaagagagtatgcacagaaaagggagacccttatgtttgaaaaagattgtgccactaaactaaaggagaagcagctctttaagatatttcc

SEQ ID NO: 122909 - DNA, 80 bp, Homo sapiens
agcttctagttggcaatggggccgatgtcaatatgaaggagtatgctgctgctgttccgctttgcgtcctcgctacaaac

SEQ ID NO: 122910 - DNA, 98 bp, Homo sapiens
tagaccagtgtaataccctgaatcccactggtcgaattgacaaatcttaccctacagtatgtggccacacaggaccagtgctggacatagactggtgc

SEQ ID NO: 122911 - DNA, 100 bp, Homo sapiens
gggagcctattccagaaatcacttggaaaagagctgtggatggcttcacgttcactgaaggcgataaggaggcccaggcatatgcagatgacaacagctt

SEQ ID NO: 122912 - DNA, 98 bp, Homo sapiens
tgtccccatccgccgccgagaggaggcctatgagaatcaggcatagcgcgctggctaggactccagtaccgtgaagggaggcagtgagagcagacatc

SEQ ID NO: 122913 - DNA, 74 bp, Homo sapiens
agaatctctcaaagaagcttatcatatggaggtcatgcaagacaagataatctgccttccgaaaagagtgcagc

SEQ ID NO: 122914 - DNA, 98 bp, Homo sapiens
gtacacctcatccctgtacgggtgcctggcctcgcttctgtcccagaaagaccacagcaagattctttcattcgtctcctcctagcctgggggaccag

SEQ ID NO: 122915 - DNA, 90 bp, Homo sapiens
cgcaaacagaatcgcgtttggctgtgctggtatgccattgcattggccttaagggaaaagcagcgtgtaatatttaccagcccaattaag

SEQ ID NO: 122916 - DNA, 75 bp, Homo sapiens
gccaaccgcgagaagatgacccagccgggtgttcccagacaaagaggtcatgctggatgctgccttagcgctggc

SEQ ID NO: 122917 - DNA, 98 bp, Homo sapiens
gctgtttcagagcgtttgggtcctctgaggccccttgaccagggccgcctgggcagaatgtcacgatggacgagggcggcacgcccctgctccccgac

SEQ ID NO: 122918 - DNA, 75 bp, Homo sapiens
gcctgcgcgggcccgaggccggaggaacccggactccggcgtagcgtgaatggtagtgtctagaaagggtatgtc

SEQ ID NO: 122919 - DNA, 75 bp, Homo sapiens
gtggcgcctaaagtctgagagagggaagtcgcctctgtgctcgtggattctgaagagccagtctttgaggctgtc

SEQ ID NO: 122920 - DNA, 80 bp, Homo sapiens
cctggacgccgctgacggccccgagcacggccgcccggccacgaattcagcttagagaactatcaacacaggacaatgca

SEQ ID NO: 122921 - DNA, 96 bp, Homo sapiens
tgcagagcacacctggccaatcatgacgagctcatctccaaggactggaaggatcaccagcacatatgcggccagtcagcagctgtcaccgtccag

SEQ ID NO: 122922 - DNA, 97 bp, Homo sapiens
gaactgcgcagacctggtggaggtgttaaatgaaagggaaagtgcagtgttgcccttctgaatgagacagaatcagtattgtcatatcttgataagg

SEQ ID NO: 122923 - DNA, 75 bp, Homo sapiens
ctgggcgtggccaagcaggacacggtgcgcgtggccttctgctccggatttcctgagaagataacagtgaaacag

SEQ ID NO: 122924 - DNA, 50 bp, Homo sapiens
gagagaaggaaattagtgatgatgagacggggaagcggagccaacatgcc

SEQ ID NO: 122925 - DNA, 87 bp, Homo sapiens
gagcccgccgcgctggtagcgcctgtgggccaaagctgaccaactcccccaccgtcatcgtcatggtgggcctccccgcccggggca

SEQ ID NO: 122926 - DNA, 75 bp, Homo sapiens
acaggcttgtccatctgtaacttcattaaggatgcgctaatgcagctcgccaaagctgtggcaagtgctgcagct

SEQ ID NO: 122927 - DNA, 90 bp, Homo sapiens
cagctggagcaagaagaggacctgtgcagggcagagcaggaggccccccgaggttgggggccgtcccgctcctaaggcaggaagatggtg

SEQ ID NO: 122928 - DNA, 50 bp, Homo sapiens
ctcgtccaacgtcggggaagttgtctgactccccatccccaggatgtcaa

SEQ ID NO: 122929 - DNA, 51 bp, Homo sapiens
cccaatcccgaccagaaggactctgacgacttaattcagtgcacaaatgag

SEQ ID NO: 122930 - DNA, 74 bp, Homo sapiens
aaggacgagctgatcaagtatatgactgaagaaggctggcagtgatggtgaaagcataggaaactgcccctttt

SEQ ID NO: 122931 - DNA, 100 bp, Homo sapiens
ccgactcagcctcttcagcgacctgcccgagaccaagatcactccatggatgaaatgacagctgtggtgaaaattgaaaaaggagttggtggcaataatg

SEQ ID NO: 122932 - DNA, 75 bp, Homo sapiens
attcatcaaaagcaacaaacatcgtatgatcatgtttttagatgaacttggggcctccgaccagggagaccttcc

SEQ ID NO: 122933 - DNA, 75 bp, Homo sapiens
tgaagaaatttgtgtggagcgaggaaaggtgtgctgtgcctgaggccagtctcgtttcctctcagtccatccacc

SEQ ID NO: 122934 - DNA, 49 bp, Homo sapiens
gaaaaagcactgactgctctgcttaatttggcctgtcactgctcctcat

SEQ ID NO: 122935 - DNA, 75 bp, Homo sapiens
caggcctgcgtccgagtctccgccgctgcgggcccgctccgacgcggaagaggctgggaggcggcagaatgcagc

SEQ ID NO: 122936 - DNA, 100 bp, Homo sapiens
atcttgcggcaacgcccccgggacatgcatcgtcccctggactctctcaagaccagctgaagcagtgtttctcccggcagcccactgaacccaaggacac

SEQ ID NO: 122937 - DNA, 139 bp, Homo sapiens
gtggctttgatgaggacgcggagccgcggcggagccggaggaagctgatggtcatcttttccaacaaacggggattcagcgtccgatcctttggaacagggactcacgtgaagcttccaggaccagctcccgacaagcc

SEQ ID NO: 122938 - DNA, 75 bp, Homo sapiens
tttggaatgaatttggaatcttcccttgaagagctgggaaggatgagttcttgcagcaacgtctgtgggtccagg

SEQ ID NO: 122939 - DNA, 100 bp, Homo sapiens
aatttttacaaaatttgatgaagtccagaaatctggaaacatgatacaatctgcaaatgccagctgtctgttaccaggcaatcacgaagaagttgaaaat

SEQ ID NO: 122940 - DNA, 75 bp, Homo sapiens
cgggtggccaaattccgtcctggctcattaactgggccgccaaggcgaaggaggtggaggagaccatcgagggca

SEQ ID NO: 122941 - DNA, 100 bp, Homo sapiens
tccagacccaatggaacatcagcaatgcttctgactctcagcgttctcatctctcttccttcaccatgaagctgatggacaaattccactcacccaaaat

SEQ ID NO: 122942 - DNA, 75 bp, Homo sapiens
tgggcttgaagacccagaagatgacatatgcaaggagcagctccccgagtcagcctatatgcaccagctcttggg

SEQ ID NO: 122943 - DNA, 96 bp, Homo sapiens
cagagacctacgtggcagctgtgaaaaaagccatttccgaagaacatatgcagtaatgtcacctcaaaagagagttaagaacgtccaggcacaaaa

SEQ ID NO: 122944 - DNA, 78 bp, Homo sapiens
tactttaagatgttgtttgtccatcagaccagctgagaagagccctaacccgagcctgttgcatctctgtggctccct

SEQ ID NO: 122945 - DNA, 100 bp, Homo sapiens
gaacgacacacatgttagagcccttctgaaaaaccaggagatgttgcgttgagtgcagagttcaggtaagattctgggggcaactgctgtgtttccagta

SEQ ID NO: 122946 - DNA, 50 bp, Homo sapiens
cggaggtctccgccggctcccggattgcagagggaatggcatacatcgag

SEQ ID NO: 122947 - DNA, 115 bp, Homo sapiens
ccaaattgaggcggagaaaattgaaaaaagaagaaaaactgaattggaaatttttattcgggtattctctactgccgctgatggtcaaacgcaagtggaaattaaagtgtgtcag

SEQ ID NO: 122948 - DNA, 103 bp, Homo sapiens
ctgcgagctcctcaagaatctcgtgctcaccggtttctcccacatcgacctgagtgcgcccccacccctgtgtccaagtggccgcactccagacctgaaggct

SEQ ID NO: 122949 - DNA, 75 bp, Homo sapiens
gagtggaaagctctatgcggagtacgtctgggtcacctaggcctgcagggaccctctttgcaagttcagtgctta

SEQ ID NO: 122950 - DNA, 75 bp, Homo sapiens
agattatacggaaccagaagcagattgccaacattgaccgtattacaaagaatgtatcctgtcaggtataatgtc

SEQ ID NO: 122951 - DNA, 75 bp, Homo sapiens
ttgatctaaaacagagaaattcaacaattgaagctgctaaccttgcagggaagaaggagaaagggccaacccctg

SEQ ID NO: 122952 - DNA, 98 bp, Homo sapiens
gaagtcggggggcacgcagctgaagctcatcatgaccttccagaattacgggcaagcgctgttcaaacccatgaagttgttcctcaaagtcattcaag

SEQ ID NO: 122953 - DNA, 100 bp, Homo sapiens
gtcatacaccagtactaccaaggacagcttttttcctgcaaggcgaatctttctgcattgaatttgaagatttctgaacagaaggaaatattaataaaag

SEQ ID NO: 122954 - DNA, 60 bp, Homo sapiens
agaagtttgtgaactcaactggctatttgacagagcggggatctgatgagcttctttctt

SEQ ID NO: 122955 - DNA, 100 bp, Homo sapiens
cagtattacctggtagctccagagctggaagttgaagaattcaatggtgaactgtcacccctacaactcagcttgcaaccagccctggccaccagtttcc

SEQ ID NO: 122956 - DNA, 82 bp, Homo sapiens
tctggtctgtgctcgacacctcaaactctttatgggtgcatgtttttcaaaagtttttaatgggtgtcccttgaaaattcac

SEQ ID NO: 122957 - DNA, 96 bp, Homo sapiens
ggcagagagacgccacacagccaccagccgcagcaccaggatcagccgtaagttcatcatcgccaacgctcgggtggagaactgcgccgtcatcta

SEQ ID NO: 122958 - DNA, 83 bp, Homo sapiens
ggatagggctgacgctgctgctgtgtgcggtgctgctgagcttggcctcggcgtcctcggccgccgccatgtctgcgcatctg

SEQ ID NO: 122959 - DNA, 75 bp, Homo sapiens
gacgtcgtgtcgagttcccaaaaagctccgcaggggctgtagggagatgaggaaaatgaggcccaaagaagtgat

SEQ ID NO: 122960 - DNA, 100 bp, Homo sapiens
ttcctgcccacaaggagttagcgacctactgggtatccggctgctttgatgaacctgggagccattctgcacctcaatggcagactccagaaggccgagg

SEQ ID NO: 122961 - DNA, 75 bp, Homo sapiens
agaacctttgacttggtgttgaaagtgaaatgtcatgcctctgaaaatgaagtgaatggtagtgtctagaaaggg

SEQ ID NO: 122962 - DNA, 98 bp, Homo sapiens
ccgccgcccctgttgcgatggcgcagaaaccccgttgacaaggcactgctttttcatgacggtcgcaatggaagaagagatcgccgcgctggtcattg

SEQ ID NO: 122963 - DNA, 49 bp, Homo sapiens
gctggatcatcaagtagccgaagccatgcctttcttggacatccagaaa

SEQ ID NO: 122964 - DNA, 109 bp, Homo sapiens
gatttcttccaaggaaccaaggcggccctggctgggggaaccactatgatcacagatataatttctacagtagaatttaatcattctggagaattactagcaacaggag

SEQ ID NO: 122965 - DNA, 75 bp, Homo sapiens
gatgcttttgatatctggggccaagggacaatggtcaccgtctcttcaggtccttccgaaactgtcatcttccat

SEQ ID NO: 122966 - DNA, 99 bp, Homo sapiens
cctccttgatgaagctcaaaggtgcctgtatcatgatgtgatgctggagaacttttcgcttatggcctcagtaggttgtggccatggaacagaggatga

SEQ ID NO: 122967 - DNA, 74 bp, Homo sapiens
gaagagagaggcctctggtccacggactcagccgaggaggtacatcaggaacgtctctatcaagaatacaattt

SEQ ID NO: 122968 - DNA, 105 bp, Homo sapiens
ctcagcccttggtggtccaggtcttcatgctgctgtgggtgatattactggtcctgggtctcggcgcggaagatggccggcggcgtggacggccccatcgggatc

SEQ ID NO: 122969 - DNA, 90 bp, Homo sapiens
ggcggcgagagatggtcaggtctggagctcgaccgggccagatctaccttctgagatatcatccttcttcagggagataaggaaaaaaag

SEQ ID NO: 122970 - DNA, 151 bp, Homo sapiens
atccagccttgaagatgcacaagaggaaaggacccccgggacccccgggcagaggcgccgcggccgcccgccaggagagggactctgtcctccaaaacccctaaagaacccaaggctaggagacttctatggggacccccagagttccatg

SEQ ID NO: 122971 - DNA, 100 bp, Homo sapiens
ctggggctcgccttgtatctcaacaccctgagtgcggatttctgctatgatgacagtatctggagtccatctttcaccatcttctcctgagattgtactg

SEQ ID NO: 122972 - DNA, 99 bp, Homo sapiens
ccaggctcggaggaaccggcagctctccacgcccctgcccgaagcctgacccgactgcctctctcagtgagcgaaaccccaaagagtcaggtagggacc

SEQ ID NO: 122973 - DNA, 100 bp, Homo sapiens
caggagcagcttgaccgcatcgtgaaggaatctggaggaaagctgaccaggcggcttgtgaacagtcagataacaacgaacttgatgcaagtgataggtt

SEQ ID NO: 122974 - DNA, 78 bp, Homo sapiens
gcgcgcaccatgggggagaaacccgggaccagaattcagcttagagaactatcaacacaggacaatgcaagcccatga

SEQ ID NO: 122975 - DNA, 82 bp, Homo sapiens
ggaagctactactacgtggtgcttggaaagggtcctgcagttctgagcttgggttccctttgcctggacaccaaccaagccc

SEQ ID NO: 122976 - DNA, 83 bp, Homo sapiens
gactgggaccgggacctgctgctggacccggcctgggagaagcagcagcgcaagataacgaaggaggcccaacttcattcaat

SEQ ID NO: 122977 - DNA, 100 bp, Homo sapiens
tagggagtccatggccagaaaacttttggggatcttacacatttgttccatggcttctcagctttaaaaggggaagtgccctagaagaaaaagagaataa

SEQ ID NO: 122978 - DNA, 100 bp, Homo sapiens
cctgtccagcatcaatgaggagatcacaccccgacggcagtccatgacggtgaagaagggagaggagtacgagagggcctccaaagtggaccagtttgtg

SEQ ID NO: 122979 - DNA, 98 bp, Homo sapiens
ctgctgcctctgcgggctctgcctctgctcttcaacctgatcaaggtggttccatcaaggtcctaatccctacaatggagcacaggactggatttact

SEQ ID NO: 122980 - DNA, 96 bp, Homo sapiens
gagaagaaggccacgtcgagccacttcagtgcgagcgaggagtccatggacttcctggataagagcacagcaagcaacccagtgatagcagcccag

SEQ ID NO: 122981 - DNA, 100 bp, Homo sapiens
acagacccaagcatgtcggaacaggattggtcagctatccagaatttctgtgagcaggtgaacactgaccccaatggcacgccatggtcatcgattctcg

SEQ ID NO: 122982 - DNA, 90 bp, Homo sapiens
tgcacagctaagatgccaggaccacctggaagcctagaaatgagcctgccaggcagcatcactaaagcaggagacttccttgaagccaac

SEQ ID NO: 122983 - DNA, 80 bp, Homo sapiens
tcagccatctgcggaggtcaaggtagattttcgttccgtcacccaggctggagtgcagtggtgtgaccttggcttgctgc

SEQ ID NO: 122984 - DNA, 100 bp, Homo sapiens
ttctttctcgctgatcgcctaacttctactgacgaagcttggaagttgcagaaggttgaaggtcgaggagctggaaggcgagcggagtcggctggaggag

SEQ ID NO: 122985 - DNA, 98 bp, Homo sapiens
tgtgccctggcactgagcggccgcggccatggcgtacgcctatctcttcaagtacatcataatcggcgacacagagcctgatccggggatggcctctg

SEQ ID NO: 122986 - DNA, 99 bp, Homo sapiens
ttcgagaggaggcagattcccctctacatagacgacaccctgacgctgtgagccgtgagctttgaggcggtgggatgtgtcagcagaatgtctcctgcc

SEQ ID NO: 122987 - DNA, 100 bp, Homo sapiens
cgacagtgaaaccctttgccatcgacatatttcctgtcaccaacaaagatttcagactcaaaagcctcgaaagtttgactgtgaacttccagatatttca

SEQ ID NO: 122988 - DNA, 100 bp, Homo sapiens
ctactccacatagaccatccactgcctcagggtcttcagtggtaacagccagtgtgcaggaataagacgagttggaagaagacctgatcaacaacttcag

SEQ ID NO: 122989 - DNA, 98 bp, Homo sapiens
ccgaagtcaccgtgatcctgttagatatcgaaggtaccacaaccccgattgctttcgtgaagtacggcaagaagaagctgaaatacctgccctacaat

SEQ ID NO: 122990 - DNA, 90 bp, Homo sapiens
gcgattctttggcttccatcccatttatagcctgacttcctcctccacccctccatgagactaggccacatgcagccccggattgtgctt

SEQ ID NO: 122991 - DNA, 97 bp, Homo sapiens
gatggcctcgctggacagcgacgaggagacggtgtttgagtcccggaatctgagatggcagtgtgtgcagatgttgaaaagagtgagcgagttgttg

SEQ ID NO: 122992 - DNA, 74 bp, Homo sapiens
gcccaagccctggtgtgccggcacctaggccgaggttcaaaatcaaaggaagcccagaagggaggtcattttta

SEQ ID NO: 122993 - DNA, 82 bp, Homo sapiens
tcctcccttcgctcgcaccatgattctgaaagtcaagaagacatcatccggaatattgccaggcacctcgcccaggtcgggg

SEQ ID NO: 122994 - DNA, 50 bp, Homo sapiens
ccaggaggccaggggtgtcgccatgcccctggcaaccactaatctgcttt

SEQ ID NO: 122995 - DNA, 83 bp, Homo sapiens
tacaccaattacacctttgatttcaaagtagctacagcaagctgggtagcaggcagatccaaaggatatcatgaagtttccag

SEQ ID NO: 122996 - DNA, 100 bp, Homo sapiens
agccaacaggccagcagcggcggaaacaccagatcacatatcttattcatcaggttggacgcacttttggatattttccaaaagatttaatccaggtagt

SEQ ID NO: 122997 - DNA, 100 bp, Homo sapiens
caggagggccagctcatgcccaggtgtacaaagataatcaatgctgattcggaggacccaaaatacattatcaacgtaaagcagtttgccaagtttgtgg

SEQ ID NO: 122998 - DNA, 100 bp, Homo sapiens
aaagctgaagaaggcgtcagcagaggggccactgctgggccctgaggctgcaccaagtggcgaaggagccggctccaagctggagatggagctgaagatg

SEQ ID NO: 122999 - DNA, 87 bp, Homo sapiens
ctctgtctgcctgtgtccctgaccatggctccctgcagtaccctttaacgcattggattaaattgtgctttgggtgcagctgaaatg

SEQ ID NO: 123000 - DNA, 82 bp, Homo sapiens
accatccatactgtgtaggtgcagccagatccagcagtacttctggaatagaaattctaaacattagcctgccgaacaactg

SEQ ID NO: 123001 - DNA, 50 bp, Homo sapiens
cgttgcggccagtcgccactgcttaacggcacagccaacaagatgaacgg

SEQ ID NO: 123002 - DNA, 100 bp, Homo sapiens
agatcctggtgtcgccatgggccgccgccccgcccgttggttcattctggccaaccgcctctacccagtgtctgcccggcactggtttaccatggagcgc

SEQ ID NO: 123003 - DNA, 50 bp, Homo sapiens
tttacctcgctgaccctatgaagaattggaggcatatgctggagttatca

SEQ ID NO: 123004 - DNA, 100 bp, Homo sapiens
ccgggagagggggagtgcgcggcggccgcagctgccacaaaccagatgcctgtgaggagccaccaacatttgaagctatggagctcattggtaaaccaaa

SEQ ID NO: 123005 - DNA, 101 bp, Homo sapiens
cctgaaggacttcctgcccaaggagtatgtgaagcagaagggagagcgtaagatcttccagggtcctggtcctggacaaaggagtagtagctgaatttgat

SEQ ID NO: 123006 - DNA, 75 bp, Homo sapiens
ctgagagatgttaaccaaattcgagaccaagagcgcgcgggtcaaagatgatccagatcctgatgatggatttaa

SEQ ID NO: 123007 - DNA, 83 bp, Homo sapiens
cccgcgcagccccgcacggcccgggcccacgttgtctgcagagtgagattatggcgaagcattttattctttttacaaacctg

SEQ ID NO: 123008 - DNA, 101 bp, Homo sapiens
agctgaaccaagaaaaccttatcagcactatttgaaacttttatctcatctggcttggcgcctgaggttctcccattaggatctaagcctttcccacgtta

SEQ ID NO: 123009 - DNA, 76 bp, Homo sapiens
gccgaggagacgcgggccttcgagcagctcatgaccgacctcaccctgtcgcggggaatgtggtgagcaacttggg

SEQ ID NO: 123010 - DNA, 100 bp, Homo sapiens
tgatgatgtgcgggttcaggaggtacccaaactgaagcgggacctggacttcaccatcgacctggacttcaagggccagctgtgcgagctgtcctgctcc

SEQ ID NO: 123011 - DNA, 100 bp, Homo sapiens
gaggacagaggcgcggtcatcagatgaggagaatgggccgaagaaattttggaatccataagagccaaaaagggagacattgataatgttaaaagcccag

SEQ ID NO: 123012 - DNA, 83 bp, Homo sapiens
cgctctgggtctccaggcccgcgaccgtccgccagtcgtcccgaggctatggtgaactaaacggtaatgctggagaaagagaa

SEQ ID NO: 123013 - DNA, 50 bp, Homo sapiens
ttcctctccagctcagccgcgtaggatggcccaacagcaggccttgaggt

SEQ ID NO: 123014 - DNA, 90 bp, Homo sapiens
ccggccctgagctcccggcggcgcaggtatcatgatattagctggtttgacatcaagtcatttgtgagtcatcagatcttctcctgaaaa

SEQ ID NO: 123015 - DNA, 75 bp, Homo sapiens
cttactcttcttgctctcctttctgtaaacacaggtgagggtcccgatgtcctggtgtacagcttggactttggt

SEQ ID NO: 123016 - DNA, 111 bp, Homo sapiens
gagccagccgctgttttgccggaggagcccctcaggccaatatgacagatacctagcatctagcaaaataatggcagctgcttaccttgaccccaacttgaatcacacacc

SEQ ID NO: 123017 - DNA, 75 bp, Homo sapiens
gggactctgcctcgtgccgctgagcctggcgcagatcggagcagtgaggagaatgaataccttccaagaccagag

SEQ ID NO: 123018 - DNA, 90 bp, Homo sapiens
ttgtattgagaacaatatagatttgcaggttatgggtgctacatgtgtgctttcagagcagtagtgtgaggaagcttggagtgggatggc

SEQ ID NO: 123019 - DNA, 75 bp, Homo sapiens
gcccacagatgatagccaagagaggcgtgacacgggcagttgacctgtgtgcagccccaggcagctggagccagg

SEQ ID NO: 123020 - DNA, 100 bp, Homo sapiens
tcactgtggcccacatcgtggtggaggcggcctctctggcagcagacatcagccacgcatctgaccttgttgccaaggccacctttgatgccatttctaa

SEQ ID NO: 123021 - DNA, 100 bp, Homo sapiens
aggtagttcagtttgagacaatcaatttgaactctgcatcttcatggtttacagaaattggtgcagaactgataaatttcaaacggaagagagtggcagc

SEQ ID NO: 123022 - DNA, 82 bp, Homo sapiens
gttgctgatcgcctgggtggttgttggcgtgtccctgcagcgaaggatcctgcaaaatgatgcttcaacacccaggccaggt

SEQ ID NO: 123023 - DNA, 100 bp, Homo sapiens
actccaagcaagatctcagtcagagtaggaaataattttcacaaccttcaagaaattcgggtaaagtgttgagagaggagaaccagtgcattgctcctgt

SEQ ID NO: 123024 - DNA, 90 bp, Homo sapiens
cgtaagaagaggtcccaatcccccactctttccgccctaatggaggtctccagtttcgccccaacagtacttaccgatgttgatcctaaa

SEQ ID NO: 123025 - DNA, 82 bp, Homo sapiens
cgccaccacccactccggacacagtttgtttcgacgccggaccgcgtaagagacgatgatgttgggcacggaaggtggagag

SEQ ID NO: 123026 - DNA, 100 bp, Homo sapiens
tcgcgcccctggtcctgctgctcggggtccgcgcggcctccgcggagccaggccagaagcggactcctagaagaggggagcagcaaggatggaatgacag

SEQ ID NO: 123027 - DNA, 98 bp, Homo sapiens
agggccggcgcggcgatgatgaacaggttccgaaagtggctctacaaacccaagagctttcagcagaggccaaggcagcattgcttgaatttgaagaa

SEQ ID NO: 123028 - DNA, 96 bp, Homo sapiens
acctaactacggaaaacctgatcccaaaattattgaaaacactcgaaggtgccctctggtggtcagaagatgctgtgctgtctcgttaggatgaat

SEQ ID NO: 123029 - DNA, 98 bp, Homo sapiens
agcgagtgtggagagaggtacagccctcggcctacaagctctttagacctttccaaagtgaaactgatgagatttgatgatccactgttggggcctcg

SEQ ID NO: 123030 - DNA, 100 bp, Homo sapiens
tacagccccgacgtgtactgctccaagtacaacgaagccaccggcgtgtgccccgacggcgacgacatctggaatcaagagacccatggcatctgaggtg

SEQ ID NO: 123031 - DNA, 90 bp, Homo sapiens
ccactgccaaaatgcagctcttacagaaatgtgtcttgttgcatttggtaatttagcagaacttggatcaccccttctgtgtcattctct

SEQ ID NO: 123032 - DNA, 74 bp, Homo sapiens
ccaattttgctaactttgcacatttcaacagtcatgcagaagaacatgagctgcctgtggacatggaaaccatc

SEQ ID NO: 123033 - DNA, 115 bp, Homo sapiens
agcctaggttccacccttttctgggaacgcatccgtgtcattctggaccttactcccaactaccggggtgagaactcgtggttctccactcaggttgacactgtggccaccaagg

SEQ ID NO: 123034 - DNA, 83 bp, Homo sapiens
aggaaatctggccgccgccgccgcgagcgctcccggtgagaagccctaccactgcaactgggacggctgcggctggaagtttg

SEQ ID NO: 123035 - DNA, 100 bp, Homo sapiens
gccggagcgcgagcagagcggagacccccaggtcctgcgggcgcggtaagtaaggaggtctctgtaccatggctcgtacaaagcagactgcccgcaaatc

SEQ ID NO: 123036 - DNA, 82 bp, Homo sapiens
ccagaagtccagagctgaggactgcctgtttgcagtattggatgaacgaatatacctcatccattggaattggagtttttca

SEQ ID NO: 123037 - DNA, 88 bp, Homo sapiens
cttgcagaaatcacattggaccctcctcccaactgtagatctgcgatttccttctggttggctgtcctgcgtgggtgccaagttccac

SEQ ID NO: 123038 - DNA, 100 bp, Homo sapiens
ggaattttgaagtacaccgtggtgacattgtatcattggtgtagacacagcatcatctctacccataaaagatggcattctgcaagactgagaagatgcc

SEQ ID NO: 123039 - DNA, 103 bp, Homo sapiens
ctttgacgccctggtgaagatgggggagctggccagcgagagccagggctccaaagaactcggttgtgttaattctgccatcacattctcacatggcagaaac

SEQ ID NO: 123040 - DNA, 83 bp, Homo sapiens
cctgcccggtgcccgaggaggcagccaagctcgtggcctgcctctgcgtgcactgccaggaactcctgccaccgccaccggct

SEQ ID NO: 123041 - DNA, 93 bp, Homo sapiens
ggggagctgactccattgcatgtgggaccttcagccgtgaactggaaattatggaagtggaaattacaatgattttggaaattataaccagca

SEQ ID NO: 123042 - DNA, 76 bp, Homo sapiens
tgggaatcggtcgcctggaggaccagtatttcccatggaggccatccagactgaggaagacccggaaacttagggg

SEQ ID NO: 123043 - DNA, 75 bp, Homo sapiens
tagtatctgcacatacctcagcgggaaaaacagtatgcgccgaggcaacacacaagtttgctgattgcaaagcaa

SEQ ID NO: 123044 - DNA, 100 bp, Homo sapiens
tcatgaagctgaggaggggagtaaattgaaaatattggggccatttagtaacttctttgcaaggcctctggctgtacctggcagggagcagcctgccctg

SEQ ID NO: 123045 - DNA, 83 bp, Homo sapiens
gggccaacagcggcctctagtgtctggaggaggaagtgtcagcgctactgccgcagaggagaggagacgccgtgagcgggacg

SEQ ID NO: 123046 - DNA, 100 bp, Homo sapiens
ggagctctacacgtatcctcctgcctagcgcaggcactgaaagtaaggcaagcagatatcaccagagagactgttcagaaaagtgtctgtgttctaagca

SEQ ID NO: 123047 - DNA, 100 bp, Homo sapiens
tcgacacgagacgcttctcggcagacgcagctcgattccagggctgatcccttatccaacatggttctaaccttcagtactaaagaagatgcagtttcct

SEQ ID NO: 123048 - DNA, 73 bp, Homo sapiens
gccctcctgcagtgaccagtaatggcactttacactcggatttaagcgagagcctcactggttcccaggacat

SEQ ID NO: 123049 - DNA, 75 bp, Homo sapiens
ggagtgaagaacgccgccatccagccaccattccaaggaggagcacactgtctcaacccctcttttcctgctcaa

SEQ ID NO: 123050 - DNA, 75 bp, Homo sapiens
tctcctaggggcaaagggaaacaccgcaacccagatggcccaggtcagttccagaacttctccctccatgaccca

SEQ ID NO: 123051 - DNA, 90 bp, Homo sapiens
tcctgttccgcttctcagaggacgccttcaacaccaccttcatctccaccatcgcaacccaaggagatctgtgcgctggttgggttctgt

SEQ ID NO: 123052 - DNA, 100 bp, Homo sapiens
accattcatagcagtcttgaaggcagaatattactgaagaatgatcctgttcaacctcctagtgcctctactgaattattcctcttttaaatggttaatg

SEQ ID NO: 123053 - DNA, 73 bp, Homo sapiens
gcgcaggagcggccgcgtttcggcctcagaaatttgcttgctgaaaatggtcgattaagcaatacccaaggag

SEQ ID NO: 123054 - DNA, 100 bp, Homo sapiens
tggaatacaagggcctcagggccggctaccactgcggctactgcgattccaaggagggcaaagcgtcctgcggaagctcttcgtgggcggtcttgactgg

SEQ ID NO: 123055 - DNA, 74 bp, Homo sapiens
cctgcttctgggacagctctactgacggttttaaaatcaaagatgggaaaatcggagaaaattgcccttcccca

SEQ ID NO: 123056 - DNA, 98 bp, Homo sapiens
ctgccttcatcttgaaagaaaagccgtgctatcaagactaatcaggaccttctcccagaaactccatggacgcacattttctacaatgatttttgggg

SEQ ID NO: 123057 - DNA, 100 bp, Homo sapiens
cctttatttcctgctgatgaattgtatggaatagttggtgctaaccttaagaggagctttgatgtccgagagctggagcagttcagcatggagagcccat

SEQ ID NO: 123058 - DNA, 97 bp, Homo sapiens
ctttcctctatcataagtcgccaaaaacaaatggggcaggaaattgggaatgaattggatgaacaaaatgccaaagattgctgaggaaaacttaacc

SEQ ID NO: 123059 - DNA, 98 bp, Homo sapiens
gtggagctggagcagatcccccagccggctgagacagatttacagccagttacttactcagaacctgcattttggtgttcgatagcatattatgaatt

SEQ ID NO: 123060 - DNA, 98 bp, Homo sapiens
gtggttcacccgctgccgggcaccgaggaccagctcaatgacagctgaattcttgccgccaggatggggaaacagaacagcaagctgcgcccggaggt

SEQ ID NO: 123061 - DNA, 106 bp, Homo sapiens
aagaggcgaaaggaagcaagcagttcagaagagccaaggaataaacatgcaatgaacccaaaagggtactgggcctaatcgctacgtgcctctttggctatgatgc

SEQ ID NO: 123062 - DNA, 50 bp, Homo sapiens
ggcggcgcctcaggcacctcggcccggcgtggggtagagcagcggctgcc

SEQ ID NO: 123063 - DNA, 100 bp, Homo sapiens
gagagagtccgggagcccgagcttgagcttgtagaaacttcattaaaaggagaaattgcctttgatcccagaagcgcctattatttgtggtttgtgatgg

SEQ ID NO: 123064 - DNA, 98 bp, Homo sapiens
gcagcccgggcccaggccccggcagcgcctgggacaaggacactgccttaggaaaaccacgagaggtgtttcgacttcctacagatttgacagcatgt

SEQ ID NO: 123065 - DNA, 101 bp, Homo sapiens
gtaggactgatcaggtcttacaattctaaaaccatgacctgtaatttacatagtacatgacgaagttaaggataaagcttttgaactagaactcagctggg

SEQ ID NO: 123066 - DNA, 100 bp, Homo sapiens
ccactccccccagagccgacctgcagcaaataattgtcagtctaacagaatcctgtcggagttgtagccatgccctagggtgtggatgaatggaacatag

SEQ ID NO: 123067 - DNA, 76 bp, Homo sapiens
acctcatttgtctacaccatcaaggaggaaggcctggttcttcaaggtctggtgagctgtaccttctttctggcag

SEQ ID NO: 123068 - DNA, 100 bp, Homo sapiens
gaaacaaaaacatccattactatttcatggccctgaagaatgatgaggtgccttatgcccgctcagaggcccacctcacagagctgctggaggagatatg

SEQ ID NO: 123069 - DNA, 95 bp, Homo sapiens
tcgaggcaccatgggcgcgtgtggacgaaatgaggggctacgcggagaagatcccagatgcagtgactggttactacctgaaccgtgctggcttt

SEQ ID NO: 123070 - DNA, 101 bp, Homo sapiens
ggccagtgccagtacttgggcttgccagtggcggattacttcaagcagtggattaatctgaaaaaggcaaggtgcccggcgacgactgcccgctggtgtgg

SEQ ID NO: 123071 - DNA, 75 bp, Homo sapiens
gagcatccccttagcagcagcctctgttatgtgtctcggtaccacgtgaaagactcctcacgccacgtcatccta

SEQ ID NO: 123072 - DNA, 74 bp, Homo sapiens
agagaggttacagcttagcttccaggatgatgagccaagattgacagacacctaatattcatgacttgagaata

SEQ ID NO: 123073 - DNA, 82 bp, Homo sapiens
accaactattcgcggagctggaatgactggcaacccaggttttgggatttgagattgacgcggtgaactctgtccagttttc

SEQ ID NO: 123074 - DNA, 100 bp, Homo sapiens
gtccgtgtgcggggaggtaacaagaaataccgtgccctgaggttggacgtggggaatttctcctggggctcagagtggcaaacttgaagataaatctttt

SEQ ID NO: 123075 - DNA, 50 bp, Homo sapiens
cagtcggccaagaagccctgcccagaatgtgacagtgatgataacatggg

SEQ ID NO: 123076 - DNA, 90 bp, Homo sapiens
gccattggcttctcatggatgccctggtacctgacagtgtaaagaaggagctcctacaaagaataagaacattccttgctcagcatgcca

SEQ ID NO: 123077 - DNA, 75 bp, Homo sapiens
atttggacttgatgaagaagatgaagatgaggatgaggatgaaggttttgagaacagagtgctgttttagagctg

SEQ ID NO: 123078 - DNA, 80 bp, Homo sapiens
cggcccgcctccctggccggggcgcagttcggaggttcaggtgcagaggccaagaccgttttgcccaagaaggagaaaat

SEQ ID NO: 123079 - DNA, 75 bp, Homo sapiens
tctcgccctgcccttcaaacgtcggtacgagaagatcgagatcatgccagaggctccctggccatgaaggtctgc

SEQ ID NO: 123080 - DNA, 100 bp, Homo sapiens
ttcccagccgctgggaagcccctagacgcgccgaggggccgggctacgagcggctgaggtgccaatgaactggctgtgcagaaagcaaaggcagaaatca

SEQ ID NO: 123081 - DNA, 90 bp, Homo sapiens
ctttaatattcctgccatcacaaaagctggacaagcgaagggctacttctacaagtccgaacagccagtccagcaaaatgaacagcattg

SEQ ID NO: 123082 - DNA, 75 bp, Homo sapiens
gtgcggtctgccaggagctgcggccccgtccggcccgggctgcatcatggataccgacttatatgatgagtttgg

SEQ ID NO: 123083 - DNA, 100 bp, Homo sapiens
atttggaggataccagacaacagctcttggcagccagaagcagccaggctaaggccattaacaccctggagactcgggtcattcccaaaagcaagttcgt

SEQ ID NO: 123084 - DNA, 75 bp, Homo sapiens
gacagcgagtcggaggaggacgaggacttggaaggtactccaaagattcaggtttactcacgtcatccagcagag

SEQ ID NO: 123085 - DNA, 50 bp, Homo sapiens
gggcactgttgctgctgcgggaggctttagtcaacaatcccaaaattgaa

SEQ ID NO: 123086 - DNA, 75 bp, Homo sapiens
ccgaacgatgtgcgagaactgcgcagacctggtggaggtgttaaatgaaacagccgctcttctaaaacattcaaa

SEQ ID NO: 123087 - DNA, 74 bp, Homo sapiens
gccgaactccaagggacgacgctcgcggaagcagaggtttggggtgagcatgggtttatgcgtcttaggcatta

SEQ ID NO: 123088 - DNA, 125 bp, Homo sapiens
tctccagccggccccccacctccccccggagccaggctggtttcggaaatgcccttacagcagcaggtgctggagaatctggtaaaagcaccattgtgaagcagatgaggatcctgcatgttaat

SEQ ID NO: 123089 - DNA, 97 bp, Homo sapiens
ctctgactctggctctgctgatgaggttgatgaatttgaaatccaaggtttccttaatgacaacaaaaaagggagtaatcctacccactgtaagagt

SEQ ID NO: 123090 - DNA, 82 bp, Homo sapiens
aggggaccaagctggagatcaaacgggagcttatccgcatgccaaagatggggaagaccatccacaaatatgtccatctgtt

SEQ ID NO: 123091 - DNA, 82 bp, Homo sapiens
atgcgtcgtcggcctctgggcagcaggacatggatttgattgacatactttggaggcaagatatagatcttggagtaagtcg

SEQ ID NO: 123092 - DNA, 90 bp, Homo sapiens
caaggcactgctttttcatgacgaccctacagcttggggcctgggctcctctgaccatcctcattgagaaaggaaagtgagtccagagaa

SEQ ID NO: 123093 - DNA, 100 bp, Homo sapiens
ttaccttttctcagaatcaccagccttcttcagcaccacctttttggggaagatttacctagctgccaggttgggataattcttcactattccacccttg

SEQ ID NO: 123094 - DNA, 50 bp, Homo sapiens
cccaccggctcagaaccaaaaccaggagatcctgctgggccgtggcttca

SEQ ID NO: 123095 - DNA, 83 bp, Homo sapiens
gtgactgctcaggaaattttccaagacaagaaatctactttcttcaatgtgttaaccaatagtcaggcttcagcagaaaactt

SEQ ID NO: 123096 - DNA, 101 bp, Homo sapiens
gaaaacgtagggaccacatcaaagacagctttcacagtttgcgggactcagtcccatcactccaaggagagaaggctgaccggttccctgatgtgttacct

SEQ ID NO: 123097 - DNA, 75 bp, Homo sapiens
ttcctcaactatctcgctgacacgcagatgacgacaacccccccgtgtcttttgtgaagttctccccgaacggca

SEQ ID NO: 123098 - DNA, 90 bp, Homo sapiens
aaacatcctgaaaaattcaacagcagctgtcacgggaagtctttttaggataaacgtaggcctgcgtggcctggtggctggtggcataat

SEQ ID NO: 123099 - DNA, 110 bp, Homo sapiens
tatctgtcttcggtggactccttcggcagtccacccaccgccgccgcctcccaggggccaaaccagtgctcctgccacctctctggctgccccctagagcctgcccatcc

SEQ ID NO: 123100 - DNA, 100 bp, Homo sapiens
gcaatgccaacctcagcaccatcaagcagcgccctcacaaagccaatgctgaggagatgaccaagtaccacagcgatgactacattaaattcttgcgctc

SEQ ID NO: 123101 - DNA, 51 bp, Homo sapiens
cttctggagagctgaccaaacactaagggccaggggttatcaccatgcaag

SEQ ID NO: 123102 - DNA, 100 bp, Homo sapiens
cggctataataatagcaaacatcgatggcctactggggataacattcatgcagaacatcagattggtgaggaaatgagccagaacagtttcataaaacag

SEQ ID NO: 123103 - DNA, 100 bp, Homo sapiens
gaccggaggctctggatggaagccatggatggccgggaacctgtaaattaaaagatcttgggaacttggttctccgaccttttgggctctccacggaaaa

SEQ ID NO: 123104 - DNA, 75 bp, Homo sapiens
tttcgacatgggcggagttctcattccttctccagggagagtcgctgcagaattggcagagggggtcgatttggg

SEQ ID NO: 123105 - DNA, 100 bp, Homo sapiens
gagtgcagcaggacactatcctggccgagggccttcacttcagggtattggaactgatgagtttactctgaaccgaataatggtgtccagatcagaaatt

SEQ ID NO: 123106 - DNA, 75 bp, Homo sapiens
agctggaggattgtaaatgcaccaatcagcatgctgtgtctagctcaagccagattctactgcaactgaaagagc

SEQ ID NO: 123107 - DNA, 95 bp, Homo sapiens
agccctttgatgaccgcagcaggtaaggttgataacggcaaaacaaaggatctatatcgcgacctgataaacatctttgacaaactcctgttgcc

SEQ ID NO: 123108 - DNA, 75 bp, Homo sapiens
tgaggccggagaaaactattccaagacagagcgggatgccaccagcttgtccaaagggaagttccaggagctcct

SEQ ID NO: 123109 - DNA, 75 bp, Homo sapiens
cggacggctgcgtcgcccgaggcgaggaggagcgctggcgactgagtcccagaagaccattgtgttgcacacact

SEQ ID NO: 123110 - DNA, 96 bp, Homo sapiens
tcctggtatggaaacctaggcccgcgagtgcccgggcccagcccggcctagttcaggttcgagaacttgtcttggacaattgcaaatcaaatgatg

SEQ ID NO: 123111 - DNA, 100 bp, Homo sapiens
gccagtggggcattccaggcaaggtgattttatcaaatgtgtggaacagaaggtatttgtaggcaaaataccaagggatttatatgaggatgagttggtg

SEQ ID NO: 123112 - DNA, 82 bp, Homo sapiens
gagagctccagtgagtccagctcctctgacagcgaagactccgaaacaggtcttgggcgtctttggtactggcttttttagg

SEQ ID NO: 123113 - DNA, 90 bp, Homo sapiens
ctatatgaacaatccgtctggatcacggatgtaggaagtgctttgctgcaagataacatcgctgatgctgtagcttgtgcaaagagggtt

SEQ ID NO: 123114 - DNA, 95 bp, Homo sapiens
gtctcgctccgtggccttagctgtgctcgcgctactctctctttctggcctggaggctatccagcgatgccttccgcgccttccaccctgacctg

SEQ ID NO: 123115 - DNA, 100 bp, Homo sapiens
agcgggagcccggccggagctgggtctggagacgccgtggcagcctgaacggagtgtgcgacggattgggaggactggagaactgggtctgggccgagga

SEQ ID NO: 123116 - DNA, 89 bp, Homo sapiens
aattcttcagcacaattgtggtggatgccattgatgtgttgaagtccaggtttacaaagagttccatggggagtcctttgacaagacca

SEQ ID NO: 123117 - DNA, 75 bp, Homo sapiens
tcagaaaacagaattacttggaggagaaaggatccagagaatcacccgctgatggtttttgcccaggcctgaaac

SEQ ID NO: 123118 - DNA, 82 bp, Homo sapiens
gttgtaatcagctgaggccatgtcaggagacggagccacggagcaggagccctggtggaccaaggcatcttcgaagagctca

SEQ ID NO: 123119 - DNA, 50 bp, Homo sapiens
tgataacagtaactgccataaagcaggtgtctggagtagatttgcagaat

SEQ ID NO: 123120 - DNA, 82 bp, Homo sapiens
accctcagtacgccacctactattacccccagtatctgcaagccaaggtgtcgtgaaaactacccctaaaagccaaaatggg

SEQ ID NO: 123121 - DNA, 83 bp, Homo sapiens
ctactaccccgcagttcccggacatgatcctctccgcctctcgagccgcttacaaacacgcagatggcaagaagattgatggc

SEQ ID NO: 123122 - DNA, 82 bp, Homo sapiens
gcaactgctcatcctggcctacgtcatcgggtgtggacactgccagcggctgcagccgacttggaatgacctgggagacaaa

SEQ ID NO: 123123 - DNA, 98 bp, Homo sapiens
gccgcaccaggtcttgtagcagcgcctcctcggatcagttccatgacaagaccccttatacgattatgtttggtccagataaatgtggagaggactat

SEQ ID NO: 123124 - DNA, 74 bp, Homo sapiens
aggaaatctctccaaccaggaacaaacacctgccttgcaatattagaactgataaatttcaaacggaagagagt

SEQ ID NO: 123125 - DNA, 90 bp, Homo sapiens
gaacatcagtgaagtcctggcggtcatggacactctcgtctctgttgctgctcgagaggtgccgtggccagcacagaagtgaagatgaag

SEQ ID NO: 123126 - DNA, 90 bp, Homo sapiens
gatgaagatccaacccaagggcaagggcatcctgggaaaaggctgtggctgcaggtcaaggcactgctcgtcatcctccgagtcctcctg

SEQ ID NO: 123127 - DNA, 101 bp, Homo sapiens
cggcagctgagacggccttggccggcagatccagttcctaatggtttgcgagctttgccagttttctatgcctgcacagttggaataaacctcttttccat

SEQ ID NO: 123128 - DNA, 76 bp, Homo sapiens
aacaacatttgtcaaccatccacaagggtcccagtcctatgaggatatgagaggaatcctgtatgcagccccccag

SEQ ID NO: 123129 - DNA, 75 bp, Homo sapiens
aaccttgtgggatgtgaaaactctgttactgaagatgttggtcaggcgtcatttaaatattttcagtcagcagag

SEQ ID NO: 123130 - DNA, 98 bp, Homo sapiens
gcttggtgtcctcctggcctcagcaacctgacaattctgtcgtgtcccggctagcttgtcactttctgcaaaggtttccctcagggagcctcctgctg

SEQ ID NO: 123131 - DNA, 83 bp, Homo sapiens
ctcggcccgcgggggagccccgggagccgcacggcagcgcccggttaccacatggccaagctgatcatcaagttggtcacctc

SEQ ID NO: 123132 - DNA, 74 bp, Homo sapiens
agagcctgaggaagctgaagcagaggtttcccagatgttttctggcaaaggccttcctgcatttatgaattctc

SEQ ID NO: 123133 - DNA, 71 bp, Homo sapiens
ggagaaaaacggccaagaggcagacctaggaaatgggctgaactccagtgcacccagttagacttggagcg

SEQ ID NO: 123134 - DNA, 100 bp, Homo sapiens
cgctgcttgcattcttatttagaggatatccatttggggatgaagtctactttgacagctagcaaggcgacatgcaactgttgttgaatgatgacagcaa

SEQ ID NO: 123135 - DNA, 100 bp, Homo sapiens
cgggaaccgagtacagcgtcgggcgggggacagctcacatgtagagcgcatgaagtacaggacaataaagcttcctacacatatcaccaggaggatctct

SEQ ID NO: 123136 - DNA, 100 bp, Homo sapiens
aaattgggaacattatcacaaagctatcatcctgccaaactccaggctcagatgtcacagcgggaaccacatcttcaagggccgtgctgccggcatagca

SEQ ID NO: 123137 - DNA, 83 bp, Homo sapiens
ggaggatgtgactaagatgtttaaagcagaaggacctgctgaagttcccatgatgtcacccaatggatccattcctcccattc

SEQ ID NO: 123138 - DNA, 99 bp, Homo sapiens
cccccaccaagccccagagctgggagtgggcaggacggggcaggtattgttgcagcatctggcagtgagactgaggatgaggacagcatggacattccc

SEQ ID NO: 123139 - DNA, 98 bp, Homo sapiens
aacgtcaactattacaatcgcttgtacaaaggagagtttaaacagccaaaacagttcattcatattcagcttgcccagaagattgttgccacaaggaa

SEQ ID NO: 123140 - DNA, 83 bp, Homo sapiens
ttaagagagctctggacaagctggaatgcatccaagagaatccctcaacatgctggttttgattcccaccatggccatcaccc

SEQ ID NO: 123141 - DNA, 74 bp, Homo sapiens
aagctcgtagcctgccactccgtgcgccccagcccacgcagcaggaggacacactgccgaagggaccagttgga

SEQ ID NO: 123142 - DNA, 100 bp, Homo sapiens
gtatgaacgcacaggccgtcgctatgagcgggaccaccctgggcacagcaggcatcggagccttgaaaagatcttttgaggtcgaggaggtcgagacacc

SEQ ID NO: 123143 - DNA, 75 bp, Homo sapiens
taaggctgaaatcattgaagtgcttggagtgcagaactgaaagaggcaaatttagcgatcaacccagcggccttg

SEQ ID NO: 123144 - DNA, 98 bp, Homo sapiens
tcagaatgatgggcctgtgaccatagagctggaatcgccagctcccggcactgctacctctgacccaaagcaggatgaatttcatcctttcatcgaag

SEQ ID NO: 123145 - DNA, 75 bp, Homo sapiens
cgcgaggcggcgcactcgacggctgactggagcagcggtaaagccagaagatacctgaaattcctgcagatgttg

SEQ ID NO: 123146 - DNA, 76 bp, Homo sapiens
aaatggcacttcattggccacctacagaaacaaaatgtcaacaaattgatgggggcgtggttgctctccagaccct

SEQ ID NO: 123147 - DNA, 82 bp, Homo sapiens
tgcggcgggagcgggggctgcaggctgagtatgagacgcaagtcaaaggcttgggcactgtttaaaggaaagttccgagaag

SEQ ID NO: 123148 - DNA, 100 bp, Homo sapiens
cgctgtgaccctgggagattactaccagggccggaggattaccatcaccggaatgcaggtcagctctgcggacgctcggctcatggtctttgacaagacg

SEQ ID NO: 123149 - DNA, 100 bp, Homo sapiens
ttcttcagcatcttcacaaaagtatacgtcatgtaaagctttcatttccaacctgaacgaaatgaatgattacgcagggcagcatgaagttatctccgag

SEQ ID NO: 123150 - DNA, 75 bp, Homo sapiens
gtcgcggagccggagggcgggaggaacatgacatcgcggaggttcttgctggtgtgaaatgactgagtacaaact

SEQ ID NO: 123151 - DNA, 75 bp, Homo sapiens
tcctgatgccaacagtgtaccagcagggcgttggctatgtgcccatcacagctgagatgccgcggcagtttccca

SEQ ID NO: 123152 - DNA, 101 bp, Homo sapiens
ctaccatgacgaaaacatgtactacagccagtcttctatgtttccacatcggtcagaaaaagatgaaaatgttggggcttttcaggaagcataataagatt

SEQ ID NO: 123153 - DNA, 50 bp, Homo sapiens
ccggaggattaccatcaccggaaacgtggacgaatgtcgcgagcgaggcc

SEQ ID NO: 123154 - DNA, 90 bp, Homo sapiens
tacctcggcaaattccgacgtcttgaagacttccgagtagatatgcctgaaaacttcatgcctcctgttcccatcacatcaccaatcatg

SEQ ID NO: 123155 - DNA, 51 bp, Homo sapiens
ccagacggctgcccttcaagtaccagaggtcaggagaaccactactacatt

SEQ ID NO: 123156 - DNA, 101 bp, Homo sapiens
cggcggcggagaagcagctcgccagccagcagcccgccagccgccgggagcaataatgacgatgaggacctgacaccagagcagaaggcagagcgtgagaa

SEQ ID NO: 123157 - DNA, 100 bp, Homo sapiens
agagacctgagcagctctgcaaggttctaacagagtcgggtttctccattcaaggacatgattttatgcttctctgaagaggattggtcccttctagatc

SEQ ID NO: 123158 - DNA, 101 bp, Homo sapiens
ggcgagaggcggcgccgctcccaagatgtcgcagacggccatgtccgaaacctacggcacgtgtggttctcaaatataggcattctgatgggaacttgtgt

SEQ ID NO: 123159 - DNA, 85 bp, Homo sapiens
cggttaagagattcttatttctttacctgtgagtgccaggagtgtaccaccaaggacaagtgggttgccagcgttgatgtggtgg

SEQ ID NO: 123160 - DNA, 75 bp, Homo sapiens
acgttgaagctgcagtcggagcttggcgttgaaaagaataaatccaccagtaccccaacttctccggggccccgg

SEQ ID NO: 123161 - DNA, 90 bp, Homo sapiens
tcgaatctgagcaaaggcacgggcagccggaaggacaccaagatgcggatccgggcctttccgggatgtcctttaactccattgcctcca

SEQ ID NO: 123162 - DNA, 51 bp, Homo sapiens
ctggcctggaggctatccagccatggacaccacgttgctgaaaacatgctt

SEQ ID NO: 123163 - DNA, 96 bp, Homo sapiens
tctaaatttcggtagccatggcacaagaatataatgccttcaattaagttgcagagttctgatggagagatatttgaagttgatgtggaaattgcc

SEQ ID NO: 123164 - DNA, 75 bp, Homo sapiens
acaccaatactgttgcagattgaattcctagaggacctgtgcaacaacctcttgaggatcgaatcttcactcccg

SEQ ID NO: 123165 - DNA, 75 bp, Homo sapiens
ccagggttctttggggcccgaggctgctgagcttcgtgcttatctgaaatctaaaggagctgagatttcagaaga

SEQ ID NO: 123166 - DNA, 91 bp, Homo sapiens
cacctacagccccgacgaacatttctgggtgacactcaacaggattcccgaccaagatcactccatggatgaaatgacagctgtggtgaaa

SEQ ID NO: 123167 - DNA, 96 bp, Homo sapiens
gtgggcgatgggcccgtggacatgcgcacctcacacaggtagttggcaaaaaaggagaaagccactaaggtacaaaagacactggacaaccatatt

SEQ ID NO: 123168 - DNA, 76 bp, Homo sapiens
ctctggccgacgagtggagaaaaggaggccgagcgtggcagcctcggcgcgggctcgctgtgcaggcggaggcggg

SEQ ID NO: 123169 - DNA, 75 bp, Homo sapiens
tccgcacaggcctgctgaactgggtgctttatatagggtgcatgtttgcctacaagctgggtctgaatgacttgc

SEQ ID NO: 123170 - DNA, 105 bp, Homo sapiens
ggcagagccgggggagcccagcccagccagcctccaggaaccatcactgttgctggaggcacctgacaaatcctagcgaatttttggagcatctccacccaggaa

SEQ ID NO: 123171 - DNA, 82 bp, Homo sapiens
cttcttgcatgaaactggaggagcaatggtgtatggtgttgacagctcttctaccacaagcagtgcttctccaatgcccaac

SEQ ID NO: 123172 - DNA, 89 bp, Homo sapiens
ggcggttcatgttcatggaggagggtgccaacaagacggtggagccgagagctggacctgaatccagtttggccctgaggctggtgaat

SEQ ID NO: 123173 - DNA, 75 bp, Homo sapiens
ggaaacgactcctcggccgagctgagtgaggaagatgttaccgagtacttcagtgaattccttagtgcaggggaa

SEQ ID NO: 123174 - DNA, 103 bp, Homo sapiens
gcccgcccaccagttcgcccgtccccctgccccgttcacaatgtttggtgcacctcgatttggaggaagtagggcagggcccttatctggaaagaagtttgga

SEQ ID NO: 123175 - DNA, 106 bp, Homo sapiens
agctgtgctcgcgctactctctctttctggcctggaggctatccagctttttgaaatcatgaatcctgtttatagtcctggatcttctggggttccctatgcaaat

SEQ ID NO: 123176 - DNA, 51 bp, Homo sapiens
catgtactcgggagccggccccggtccagcctgatgagtgaagaggctaag

SEQ ID NO: 123177 - DNA, 50 bp, Homo sapiens
tacttacatctaaagagctagggaggtgaaatgacaatggatgctctgtt

SEQ ID NO: 123178 - DNA, 98 bp, Homo sapiens
caagctaatggatggttccttgcaaagggcacgtatagcattggtaaagaacgatcgtccagtggagactgtgatcaaccactctatgattgtcctat

SEQ ID NO: 123179 - DNA, 83 bp, Homo sapiens
attttgaatcacccagataaaggggtaccaaagtctgatctcttgcacaccaaatcattaaggggccataaagactgctttga

SEQ ID NO: 123180 - DNA, 75 bp, Homo sapiens
aaagctacaatcatgccacgggggccaacacttggacatgtcttgaaacagttgcctccaacccaggaatgcctg

SEQ ID NO: 123181 - DNA, 100 bp, Homo sapiens
ccggacgtcggcaacggagaagatcgggcccagcacaggcagcgtcagtgcaaacttcccccaccccgccttccacccatgtgtgtcaaccctaccccag

SEQ ID NO: 123182 - DNA, 90 bp, Homo sapiens
accaagaggtggttaaagccatattggagtagcgaggaatctgattccaagcaaaaaccagatccagaatataagaagtttttagaaacc

SEQ ID NO: 123183 - DNA, 100 bp, Homo sapiens
cccgaagctcaacacaaagctgaagtctacacgaagcaggcactcaaggagttgcccctggtcctgtaattggacttcaggcaccatctactggtcttct

SEQ ID NO: 123184 - DNA, 89 bp, Homo sapiens
tccctctgatcgagcggctggggacccctcagggaaaggcgtaggaggaggagcaggagttcttccagatcgccaagaacatcaaaaac

SEQ ID NO: 123185 - DNA, 50 bp, Homo sapiens
gcggatacgacccatgaaccggcgaggcccgatgagagaaagggaaagtt

SEQ ID NO: 123186 - DNA, 100 bp, Homo sapiens
ctggatgtcaaccacttcgccccggacgagctgacggtcaagaccaaggatggcgtggtggagatcaccggtcccaatgccatttcggtgagcctgtccc

SEQ ID NO: 123187 - DNA, 50 bp, Homo sapiens
ccgccaccggccgcttctgtcctcgctcaccatggatgatgatatcgccg

SEQ ID NO: 123188 - DNA, 100 bp, Homo sapiens
gttgagactatcagtatagaagcatgcgctgtcccaaatccgctgttactatgagaaatgaagagctgcttttaagggagtgaactactttatgtccaag

SEQ ID NO: 123189 - DNA, 80 bp, Homo sapiens
gttctgggaagatggcgaaggtctcagagctttacgatgtcacttgggaagatcaccgaagtggccttggagtacaacaa

SEQ ID NO: 123190 - DNA, 100 bp, Homo sapiens
ctcctcgccagcagccgtccggagccagccaacgagcgcatcctgaggttagcattacacttctcccagtggagcccatgacttctgatcaggacgctaa

SEQ ID NO: 123191 - DNA, 83 bp, Homo sapiens
ctggcacagtggagaaaccgcctcgaaaacggagaagcagacgccgggaggctctgctcccgcccaggtggtgcacacccagc

SEQ ID NO: 123192 - DNA, 100 bp, Homo sapiens
gcctcgtggtctaaagcttcggcacaagggcccaactggaattccacttacggaatattgaaggatgtttgttccaagatctctaaaaatcaagaggaat

SEQ ID NO: 123193 - DNA, 101 bp, Homo sapiens
gagagatgttatcatgagggaattccggtcagggtcaagtcgtgttctgatcactactgacttgttgatctgtagaaacttccagtgtgtagatgcttctg

SEQ ID NO: 123194 - DNA, 100 bp, Homo sapiens
gaaaatcaatctaaacatttgtgggaagttgtattcatcaataatgaaatgctgactaaggaacaagactctaaaatagagctcaagcttgagaagagag

SEQ ID NO: 123195 - DNA, 109 bp, Homo sapiens
aggaactccaaagacattgtcaaccgattctattcagtaccaccttcagatggaggataagaatggacgtggtctggaactgaaagtgatgcgtatttctgagttatgc

SEQ ID NO: 123196 - DNA, 82 bp, Homo sapiens
accgtagggcccgtgggggcttcacgcctggcaggcggccggccagccacacccactcgcccgggtctatggccacggtcgg

SEQ ID NO: 123197 - DNA, 80 bp, Homo sapiens
catttgtgatgatagccagtcccgagagccagttccagtgtctcgccccatcctcaccctcagggttcccagggcccagg

SEQ ID NO: 123198 - DNA, 75 bp, Homo sapiens
cttcaccctgccgtcatgtctaagtcagagtatcccatgttccgagcccctccaccactgccccctgtgtactcg

SEQ ID NO: 123199 - DNA, 110 bp, Homo sapiens
gaaagctggtaatagatgtctgacaaactaaagaaagacttgtgttacgttcaaaccttgtactactcagctgatcacaagctgcttgatgggaacctactagatggaca

SEQ ID NO: 123200 - DNA, 90 bp, Homo sapiens
acatcatccagtggcagacactgaaaataactctcgtgctcattcccccatgatcgccgtaggaagtgatgacagtagccccaacgcaat

SEQ ID NO: 123201 - DNA, 100 bp, Homo sapiens
gaagcaacagagaatcaatttggatcggcttatcataaccagcactttgatatgcctcatgatattgttgcatctgaagatgggactgtgtacattggag

SEQ ID NO: 123202 - DNA, 74 bp, Homo sapiens
attgattaagtcttttatccgagacctgtctctctacctccagcacatccggagcgtttcccaaagtgtattct

SEQ ID NO: 123203 - DNA, 103 bp, Homo sapiens
ccaaaacctattacgaactcaaaagtcaaccgctgaagagcagatcgcccaggaccacaccgcagcgtaactgcaggcctctcagcgaaaaagggggaaagca

SEQ ID NO: 123204 - DNA, 74 bp, Homo sapiens
gcccggcggcgtggaccacctcccggtgaagatcctgcagccagtgttgatcaaattcttggaaaagggcaaat

SEQ ID NO: 123205 - DNA, 97 bp, Homo sapiens
ctcaggacaacccagatgtgcaacaaagtgcgatgcgtcgagggcgaggcccccagcagtgagactggcacatccctggacagcccctcagcctacc

SEQ ID NO: 123206 - DNA, 80 bp, Homo sapiens
aataaagaagtggagcgtgtcctgaaggagttccaccaggccgggaagcccatcggggtttggaaatcccttgtctccag

SEQ ID NO: 123207 - DNA, 74 bp, Homo sapiens
ctcagcctcccaaggagcgaggaccacagggcggcgactggcggcgcgatggacctgaccgggctcctgctgga

SEQ ID NO: 123208 - DNA, 100 bp, Homo sapiens
gattgccgcctggtacaggagatatgcggtaaatacggcatcatctgcatggaggatttgattcatgagatctatactgttggaaaacgcttcaaagagg

SEQ ID NO: 123209 - DNA, 75 bp, Homo sapiens
tccatgcgcagtcatgagtcgcttcaagtttatcgaatcctcactatggatgggctcattgaggacattaagcat

SEQ ID NO: 123210 - DNA, 74 bp, Homo sapiens
tggagccctgggcgcgggggcggcgtgtcaggtggttgcggagctgggacgcatggaatacctcgtgaaatgga

SEQ ID NO: 123211 - DNA, 51 bp, Homo sapiens
tgacctgtaaatcatcctttaggttcctaagtggtagcagagatggaacag

SEQ ID NO: 123212 - DNA, 75 bp, Homo sapiens
gcctacccgccggcccgcgggtctacttcctcaaagaatcattgatcagcgattcgagaaggtttcctactttgt

SEQ ID NO: 123213 - DNA, 100 bp, Homo sapiens
agtggtgtctacacttataaaaggattcatccaaccatcatttctgagtcattccagaaggccctggaaaagggcattgaaatcttgactgacatgtctc

SEQ ID NO: 123214 - DNA, 100 bp, Homo sapiens
gaatatacttatgtattagatattcgacattcttctataatgtcacgtgaactggaaatttcagtttattggcgtgattggcggtctctgtgtgctgtaa

SEQ ID NO: 123215 - DNA, 85 bp, Homo sapiens
tgcatctcttcccactatctgctaggaaacacgagggtgaatattggcttggaaatgataaaattagccagcttaccaggatggg

SEQ ID NO: 123216 - DNA, 100 bp, Homo sapiens
ggagaactggtcgccatcaagaaagtattgcaggacaagagatttaagagtgatggtgatgattttaattacatcattgcatttttccttggaacagcag

SEQ ID NO: 123217 - DNA, 74 bp, Homo sapiens
cgctccgtgcctgcgaggagtatctgcggcagcatgacaaggagacggtggctcagggagtaaaggaaggccag

SEQ ID NO: 123218 - DNA, 98 bp, Homo sapiens
tatagcacagatgaagacgaagttgatggcctggagaagaaagatgttttgcctactgttgatccggagttccaccatcttcctctgaagacgtagcc

SEQ ID NO: 123219 - DNA, 83 bp, Homo sapiens
cctcggacaaggcttttgaagactggctgaatgatgacctcggctcctatcaagggggtccccacggagtctggaccatggag

SEQ ID NO: 123220 - DNA, 74 bp, Homo sapiens
aagaccttcaacttgatcccggctgttggtttggatgcatctgctcagactacttctcatgaactcaccattcc

SEQ ID NO: 123221 - DNA, 74 bp, Homo sapiens
gaagtcccacagaagctacagctgccaggtcacataatgagtatgactcctgaacagcttcaggcttggcggtg

SEQ ID NO: 123222 - DNA, 74 bp, Homo sapiens
gccggcttggcgtgaccctcgcctgatccaggagttcatgatcaagtgttgcccacaccaaatgcttcatccag

SEQ ID NO: 123223 - DNA, 100 bp, Homo sapiens
cttctgataactcaggatttacttgaaatgaaaggagattccaacctacttcaggtatatgccctcattttgcttaagacctctggccagagcagggcat

SEQ ID NO: 123224 - DNA, 88 bp, Homo sapiens
agaggagatttcaagatgcggttcgactccgagggaggttcttcacgtacggtaattttccattagaacagcatctgaaacaaattca

SEQ ID NO: 123225 - DNA, 99 bp, Homo sapiens
gtcatggatctggaagctgagggcacgtgtttgcggttcagccctttgatgaccgcagcaggcatccgtgtcattctggaccttactcccaactaccgg

SEQ ID NO: 123226 - DNA, 96 bp, Homo sapiens
gccgccgcgacagcagcagccatggaggacgagatgcccaagactctataatatcgtctactgcattatttttggctgcaaaagtggaagaacagg

SEQ ID NO: 123227 - DNA, 100 bp, Homo sapiens
gaccagcgtcacgctgctggtggcccgggtcttccagaaggctgtagaccagagtatcgagaagggatcagagaaggctgaagaaggtggagaaactgag

SEQ ID NO: 123228 - DNA, 98 bp, Homo sapiens
atagttcaccccagagcattttagatgatgttgccatgtgcaccaattccagctggacatcactgtgaaaatgggacgggataaagtccgagaaatgt

SEQ ID NO: 123229 - DNA, 50 bp, Homo sapiens
tttttgaaagctgcctgcggcaaagctcttcctgctgcccacattcctgc

SEQ ID NO: 123230 - DNA, 98 bp, Homo sapiens
tttaaagatatcagcctgtctgactacaaagagttggatgcactaggtgatgagcttctggctgatgaagacagttcttatttggatgaggcagcatc

SEQ ID NO: 123231 - DNA, 98 bp, Homo sapiens
tatttaacccccctccaaaaagttccctctcccagcctgtgctgactcagccatcttcccattctgcatcttctggagcatcagtcagactcacctgc

SEQ ID NO: 123232 - DNA, 100 bp, Homo sapiens
actggatcaaggacagacagctcaccaaccgtgacagcaccatactggaacttcaaaaagttctgaaaacatgttggactgatcctttgaaatactccag

SEQ ID NO: 123233 - DNA, 82 bp, Homo sapiens
gtttacgttattatcaacacaggaccaggccaagtttcttcctaacagtggtgattctactctggccatgtgtgcccgtgac

SEQ ID NO: 123234 - DNA, 86 bp, Homo sapiens
agactacttctactccaccaggaagggctccaacaaaagaatcctctgaagaggagtatgactctggagttgaagaagaaggatgg

SEQ ID NO: 123235 - DNA, 83 bp, Homo sapiens
cttcgagcagcctctcgccatttcccggcacttgcacctcctgcgccgccgccccccatccaaggatatgccttcaagcctcc

SEQ ID NO: 123236 - DNA, 100 bp, Homo sapiens
cacttttgtgtccaggcataagaaatttgacgctcaaagcttggattctgccgtgccactcacgaatggcgacacagaagacgatgctgacaaaatgcac

SEQ ID NO: 123237 - DNA, 74 bp, Homo sapiens
tgggtcgcagttcttgtttgtggatcgctgtgatcgtcacttgtgtacagctgcagctatcaaggctataagag

SEQ ID NO: 123238 - DNA, 121 bp, Homo sapiens
gcaggagcgcggagccgcgagccccgagccccgagcccggcgcctggctgagtagtcggatcatgctaaaaggagataatattactctgctacaaagtgtctccaactagaaatgatcaat

SEQ ID NO: 123239 - DNA, 82 bp, Homo sapiens
ctaggccaacaccagctttaaatagtggaggcggaaactctctttaagaactgtgacctgatgtggaagcagagcatatgga

SEQ ID NO: 123240 - DNA, 80 bp, Homo sapiens
tccgccactcatcaccaatgtcacgtaatctcaggggcgatataatcaatgaggtggtcctaaagttgctcaaggctgga

SEQ ID NO: 123241 - DNA, 74 bp, Homo sapiens
aaatgctccttctcctggagacgcaactcaagaacaagaggaaagtatggggaaggagccaagcaggagacgtt

SEQ ID NO: 123242 - DNA, 100 bp, Homo sapiens
ggaaaaaagagaggatttgcttttgtaacttttgatgatcatgatacagttgataaaattgttggtggtgaggtggagagtgggtggcgatcgcttccag

SEQ ID NO: 123243 - DNA, 100 bp, Homo sapiens
gctcacctgtgcgggatggaacaaaagatccacagaccagcatggctgccactgctgctgtgagtcccagtgactacctgcagcctgccgcctccaccac

SEQ ID NO: 123244 - DNA, 75 bp, Homo sapiens
gaagaagcaacacgcaaacgagagctgaggctaatgaaaaacagagaccttgtacacagacagacggctagtgca

SEQ ID NO: 123245 - DNA, 74 bp, Homo sapiens
ccaatcccaggaggaaaaacgaaatgatggaagaattgcatagcctggacccacgacggcaggaattattggag

SEQ ID NO: 123246 - DNA, 75 bp, Homo sapiens
aactcgggtcgcccccaccattatttcggtggtacagaagttggtcctgccctttgggcgactgaactacctgcc

SEQ ID NO: 123247 - DNA, 100 bp, Homo sapiens
ttcaggacctcatcaagatgatctttgatgtggaaagtatgaagaaagccatggtggagtatgaggtattctctactgccgctgatggtcaaacgcaagt

SEQ ID NO: 123248 - DNA, 82 bp, Homo sapiens
gggtggtccaaaagagatgccagaatttaacacgtgaactggagaatggggaaaaacagcaactgcagatgttggatcgact

SEQ ID NO: 123249 - DNA, 97 bp, Homo sapiens
gacctgagagtactcatggaaaaggagttccctggatttttggaaagcaaatcatggaggaagataaaaaacatggtgcactggtctcccttcgtca

SEQ ID NO: 123250 - DNA, 97 bp, Homo sapiens
gcccagttcgctagtcaaacctgtgagttcaacatgatagagcagagtggaccaccccatgaacctcggcccatcatcctggatccggccgacccca

SEQ ID NO: 123251 - DNA, 80 bp, Homo sapiens
gagttcaacatgatagagcagagtggaccaccccatgaacctcggtgttcaggcgcttcgtggaggttggccgggtggcc

SEQ ID NO: 123252 - DNA, 98 bp, Homo sapiens
aagcccatgcgggaccagatcatccgcgtgaagcggttcagcagactgtacaggatctttttggcagagccccaagtaaagctgtcaatcctgatgag

SEQ ID NO: 123253 - DNA, 82 bp, Homo sapiens
agagtcttaaaatcctgctctggccggattccagactcgtgggggaaaggctggctatgtcttgcccagccacgtgactgag

SEQ ID NO: 123254 - DNA, 100 bp, Homo sapiens
tatgacactggaggcctcagcatcaaagggaagctgcatcttcctcccgtgaggctggccgagctccacgctgatctgaagatacaggagagggacgaac

SEQ ID NO: 123255 - DNA, 100 bp, Homo sapiens
aatatggcagtataaatggagcaacaaggctgactataagaggggaaggattaatgcagtatcgaatggacaagtccgaggtgatagttacagtgaaggt

SEQ ID NO: 123256 - DNA, 98 bp, Homo sapiens
ctgcaccatgagcgtcccggccttcatcgacatcagtgaagaagatcaggtgtgactgcacagaaaagttacaaaacaaatttgactttttgcgctca

SEQ ID NO: 123257 - DNA, 100 bp, Homo sapiens
gtgactttcacttccagccagctgtgaagaaggacatagtggaagatgaagatgatgactttctgaaaggcgaagtgccccagaatgataccgtgattgg

SEQ ID NO: 123258 - DNA, 96 bp, Homo sapiens
ggctcgccttgtatctcaacaccctgagtgcggatttctgctatgatgacaggtaaagaggatgaatatccaaagaagcccttggggcagcttcca

SEQ ID NO: 123259 - DNA, 119 bp, Homo sapiens
caggatctgtatgatgactttgaatgggtgcatgttagtgctcaagagcctcattatctaccacccgagatgccccaagcactgctcagcacgcaggcatgtgaggaagctgggcttaa

SEQ ID NO: 123260 - DNA, 100 bp, Homo sapiens
aacctttgagctgcggaccccgagtccagcgggcggcgggaggatgcatttccccggattgctcccatccgagcagctgaatccctgcacagccaacccc

SEQ ID NO: 123261 - DNA, 75 bp, Homo sapiens
gaccctgaagctggtcgtcaaaagtattctgacaagtccctgtacacccagctgtgcttttaccggtacattttt

SEQ ID NO: 123262 - DNA, 74 bp, Homo sapiens
ttcaagaccctacccgcttcactggcaccatgaaaccagtcctgatccaggaaaatgtctctccattacggttg

SEQ ID NO: 123263 - DNA, 75 bp, Homo sapiens
ctcaacgccactcatcagattggctgccagtagtccttagccaggatggaggctgttgtgaacttgtaccaagag

SEQ ID NO: 123264 - DNA, 100 bp, Homo sapiens
accaggctaccatggtctacaagactctcttcgctctttgcatcttaactgcaggagtcagaaataccatcagaggaggggtactgtgactttaatagta

SEQ ID NO: 123265 - DNA, 75 bp, Homo sapiens
cctgcatctgccaacaagactggaagcaggctaccaagcagtttctcgaagagattaacaagtggacagttcagt

SEQ ID NO: 123266 - DNA, 100 bp, Homo sapiens
tggcccctcgcacttgtcgcatccctgggctctgcggagaaggaacccgagcagcccccggccctgtggaggaagctaccggctctctgaccagttccac

SEQ ID NO: 123267 - DNA, 110 bp, Homo sapiens
aaaacacaataggctacttcaaatctgaactgtctgcagatgtggatcccgaatcctgcgagaagtagcccaccatgacgaagctgcctttgcttttatcgctttgcaaa

SEQ ID NO: 123268 - DNA, 124 bp, Homo sapiens
aaaagtagaaggaaaaacagaacgttgcaaactctggaaaaaaacttgggtttgcagaccggggacacagtgtagttggtgtggaaatcagtgaacttgggatacaagaattttttacagagca

SEQ ID NO: 123269 - DNA, 82 bp, Homo sapiens
ggcgatccgggcgctcgagacttaccagagccacaagatgatagaggtactgacaacaactgactctcagaaactgctacac

SEQ ID NO: 123270 - DNA, 74 bp, Homo sapiens
tcccacttgttcgcggcctatagaaggagatccggttggcagctaaaccgcgctgggaacaggggcctgagtcc

SEQ ID NO: 123271 - DNA, 82 bp, Homo sapiens
ccacagacacagccggggtcgggagccgcccggggcagggctcgggagagcgggtgaggaattttaaattggaacaagagca

SEQ ID NO: 123272 - DNA, 75 bp, Homo sapiens
gcgcaaccagccttctagggcggcggagccctggaagaaagcgggacttttcccctgttccttggagtcagtatt

SEQ ID NO: 123273 - DNA, 82 bp, Homo sapiens
atcatgtctgcgagccaggattcccgtgggtaattccagaattgattggccataccattgtcactgtattactgctcatgtc

SEQ ID NO: 123274 - DNA, 83 bp, Homo sapiens
catgaaatggaaatacagctgaaagatacctgcctagagctggaacgttacctccagagcgagccctgctatgtttcagcctc

SEQ ID NO: 123275 - DNA, 98 bp, Homo sapiens
cggtgctcagagccttcccttgtcggagccggctcggggacgcagagactgcagctgccatcgaagaggagtagacgtcccgtcaaatattgcaaaaa

SEQ ID NO: 123276 - DNA, 82 bp, Homo sapiens
agtacgacctgcagggccagccctacgctggagcagatccgcagggacatccgagacttccggtctagcgcggggctggaca

SEQ ID NO: 123277 - DNA, 82 bp, Homo sapiens
gtgaaaccaacagccagtgatatgctatacatgaatgagtccctggaacgccagatgcgtgaaatggaagagaactttgccg

SEQ ID NO: 123278 - DNA, 74 bp, Homo sapiens
agagtcattcctgcctttgagcggactcccttttaagaccatatactccttgacgacagggactaccaccttca

SEQ ID NO: 123279 - DNA, 75 bp, Homo sapiens
ctgagcggagcccggtgacaggatggtttactcctggcttgggggcattaggaagcactggaggctcttcgggaa

SEQ ID NO: 123280 - DNA, 75 bp, Homo sapiens
ctccacaactctaagaagctttgtgcttagatgagtacgaagatgatgaagcagggcagaaagagcggaaacgag

SEQ ID NO: 123281 - DNA, 74 bp, Homo sapiens
tggacgccatcgtcaacgccggtccctgtgcgttttattgcgacctgccggtgggaactttgtctccgagtcgg

SEQ ID NO: 123282 - DNA, 96 bp, Homo sapiens
tctctttctccacccatcccgagaacaccacccacacagaatatgcctatgggtcctggagggatgaatcagagcggccctcccccacctccacgc

SEQ ID NO: 123283 - DNA, 83 bp, Homo sapiens
aagaagatcatcattaaggacggaggcacgtgattatgagcaaccactggaggtgaagaacaacagtaatctgcagagaatgg

SEQ ID NO: 123284 - DNA, 75 bp, Homo sapiens
tctttcaatggggtcttccagcccccagtggctgggaactttgtggggaagtcatctacaataagaccgaccgag

SEQ ID NO: 123285 - DNA, 100 bp, Homo sapiens
cctggctcggagcagcagcctctgaggtcatcatcagatttgaaatatttaaagtggatacaaaactatttcagcaatgcagacaattaagtgtgttgtt

SEQ ID NO: 123286 - DNA, 100 bp, Homo sapiens
gataattaaagagtaaagttgtgctcaacggtccaggagagcctcagattattttttgtagaagtgaagctgcacatcaaggagtaattacctggaatcc

SEQ ID NO: 123287 - DNA, 75 bp, Homo sapiens
gtcgataagctggaactgatggaggaggaagccaagaatctggtgagcgaagccatcgcagctggcatcttcaac

SEQ ID NO: 123288 - DNA, 50 bp, Homo sapiens
tcgcccagctgtacatgatacaggatgccgaggaatgtgacagggctggg

SEQ ID NO: 123289 - DNA, 75 bp, Homo sapiens
attcgcagtggtcgcttcttctccttggatatatcccctggggcagctggtggggctgaagatggtttctttgtg

SEQ ID NO: 123290 - DNA, 75 bp, Homo sapiens
atcatcgacatggccctgagtgaatacccagaaaatttcataatttaacacgtgaactggagaatggggaaaaac

SEQ ID NO: 123291 - DNA, 90 bp, Homo sapiens
cacgaccaggccgtgcaggcgctgaagcgcgcgggcaaggaggtgctgctggagggtccaagaatgcctcaggatggatcagatgacgag

SEQ ID NO: 123292 - DNA, 123 bp, Homo sapiens
gaaactggctgcagcagagcgagtacttcgttccaacatggacatcctgaagccaatcctggtgctggaaatcatccagtacattcactaccacatgaacagcattacagaaaccacagccca

SEQ ID NO: 123293 - DNA, 74 bp, Homo sapiens
gagaagcaggataatgaaacatttggatttgaaattcagaatccgaatcggaaggtgaggaaaattaaatggct

SEQ ID NO: 123294 - DNA, 100 bp, Homo sapiens
tgtctttgtgtcctgagatcaaatggcacttcattggccacctacagaaacaaaatgtcaacaaattgatgggttacctgtgcatgacagatgagtggtt

SEQ ID NO: 123295 - DNA, 83 bp, Homo sapiens
gagagggagaacacagttggagaaaatcggcagctgagacggccttggccgggtcagcagcctctggacccgtgaaagagctg

SEQ ID NO: 123296 - DNA, 102 bp, Homo sapiens
ttcgctccgagccccggccgcctgtccgtcgatgcaccgaaaaggtgatgggcagaatctgtttacgaaagacgtgacagtgatcgagggagaggttgcgac

SEQ ID NO: 123297 - DNA, 75 bp, Homo sapiens
acctttcacagctatcagggaagacctcgaagtagggggaaaactgcagtggaagatgaggacagcatggatggg

SEQ ID NO: 123298 - DNA, 104 bp, Homo sapiens
gttaagagactccactgaggtcacacagccgacaatgcagatcttcgtgaagactctgactggtaagaccatcaccctcgaggttgagcccagtgacaccatcg

SEQ ID NO: 123299 - DNA, 92 bp, Homo sapiens
tactggggccagggaaccctggtcaccgtctcctcagagccatccaaaactctgtttgtcaaaggcctgtctgaggataccactgaagagac

SEQ ID NO: 123300 - DNA, 90 bp, Homo sapiens
ggtggtagagggcatggatatctctactcgctccaaagaagatgaattgaatcttctggttattgtagttgatgccaacccaatttggtg

SEQ ID NO: 123301 - DNA, 51 bp, Homo sapiens
ggtctctggagacatcttcagcaggatttcagatgcatgccaggtttccac

SEQ ID NO: 123302 - DNA, 98 bp, Homo sapiens
gactgcaaagatggctctgacgagccaggtacaggtttgcagattccgccagcagcacagcaagctctacagatgagtggctctttggcatttggtgc

SEQ ID NO: 123303 - DNA, 81 bp, Homo sapiens
tgctcggaaccttgtttactaattgtttttcacgactgaaaacaacatagcaaaataagccaagatgtctgtggatccaat

SEQ ID NO: 123304 - DNA, 100 bp, Homo sapiens
cgaatccctaacaggagggctggctggttctaagggggctgatccaccggaagctcataaaatggtgagagaagcaaatatcaagcaggcaacagcagaa

SEQ ID NO: 123305 - DNA, 101 bp, Homo sapiens
cgtgagcgacgcagaagacgggtgatttctgcatttccatctgaggactcacggcagctgtgttctgatttcgtactactgctggggctgccacctcctcc

SEQ ID NO: 123306 - DNA, 100 bp, Homo sapiens
ccaggatctcgggctcggaacgagactgcacggtaactcaactggacccaaataaatcattattggaggtaaagttgttccctcaagaaacccttttcct

SEQ ID NO: 123307 - DNA, 96 bp, Homo sapiens
gactcacacctccttgtgataacggacaatcaggaaatggaagaggcagaaatccaggcagaacttgaacgtttggaaagagtcagaaatcttcac

SEQ ID NO: 123308 - DNA, 100 bp, Homo sapiens
ctggaaggaagagatggagctgacgctcgtggggctgcagtactcgggcaagaccaccttcgtcaatgtcatcgcgaaaatgacagatggcgagacctgg

SEQ ID NO: 123309 - DNA, 49 bp, Homo sapiens
aggagtccctagagacacctagtaatgcaataccaagtttccaggcccg

SEQ ID NO: 123310 - DNA, 82 bp, Homo sapiens
cattgacgccatgtcgggttattcgagtgaccgagaccgcggccgggaccgaggcacggggtcactctggtgcccattgagg

SEQ ID NO: 123311 - DNA, 100 bp, Homo sapiens
cggtgccggagagccacgcatgcgcactgcgcccctggaccagccgagctgcaaggcgctgtacgacttcgagcccgagaacgacggggagctgggcttc

SEQ ID NO: 123312 - DNA, 100 bp, Homo sapiens
gcagctggagagaatcaacgtctactacaatgagtcatcgtgttaaatgtgcacagtactggccaacagatgaccaagagatgctgtttaaagaaacagg

SEQ ID NO: 123313 - DNA, 101 bp, Homo sapiens
cggggacaggcatcgtggggatcttggcagcgctgcaggaccaagctccacgaagatctctgtgagaagaggacggctgccacccttgccacccacgagct

SEQ ID NO: 123314 - DNA, 83 bp, Homo sapiens
cccccctacccacgctgaacgagagggacacggagcaggtcactgcagccagaggggtccagaagagagaggaggcactgcct

SEQ ID NO: 123315 - DNA, 75 bp, Homo sapiens
tcggcttccatgcatccctaccagcgcacttgttgggccttcggagctccccacagcgtctgctgtggcccctgg

SEQ ID NO: 123316 - DNA, 50 bp, Homo sapiens
gaagtatcacaccacacgtaaggagccagatgaccaagatgctccagatg

SEQ ID NO: 123317 - DNA, 50 bp, Homo sapiens
aatgatcttagttctggaataatcctctggaccttctccatctacctgga

SEQ ID NO: 123318 - DNA, 90 bp, Homo sapiens
gggtgtttttccgtaagcatactcagggtgtccgcaatgttgccagtgtctgtctgcagattggctacccaactgttgcatcagtacccc

SEQ ID NO: 123319 - DNA, 88 bp, Homo sapiens
accggccgaaaggcgaggaaccgggatcgcttacacctgagacgaactacagaacagcacgtaccagaggtggaagtccaagtcaaac

SEQ ID NO: 123320 - DNA, 75 bp, Homo sapiens
gagaccaagaggagcgccttccccagttcaaacacactccaccaggtggcatcatacctctgcttgttgccaact

SEQ ID NO: 123321 - DNA, 100 bp, Homo sapiens
ccaaaatggggattacagagtataacaatcagtgccgagcaattgtgatgagatattctgctgagtggaaggaggagatgttaaagtaacccatcttgca

SEQ ID NO: 123322 - DNA, 90 bp, Homo sapiens
ccagagagacgccctcctccattctcttaggctccaaccaaggctctgaaatacctcagggactttttcagcgtgatgctccagtccgca

SEQ ID NO: 123323 - DNA, 132 bp, Homo sapiens
atccatatgtatagtggtcaaagccatccatgacctctcaactaggctgctcccagaagtggtgactgcttagaaaactgcacagcatctgatgaaattagcgaataagaacatcaaccatgtcttacactc

SEQ ID NO: 123324 - DNA, 99 bp, Homo sapiens
cgtgggccaaacctgcgcccgtggaggggcgcgcagagggcaccgggcgccgggagcaggcggcgcagcaccaggaccttttaccaatttgaggctgcg

SEQ ID NO: 123325 - DNA, 75 bp, Homo sapiens
tttgggaccttgaacaaggcaaatatggttttggaaaaccagtagattcccagacatcgcgaagtgaatctgaaa

SEQ ID NO: 123326 - DNA, 83 bp, Homo sapiens
ggtgagtcgcggtgggtcctcgcttgcagttcagcgaccacggagagccttatagatgcaagtgaagacagccagctagaagc

SEQ ID NO: 123327 - DNA, 116 bp, Homo sapiens
gtggtggatgcggccaactccaatgggcctttccagcccgtggtccttctccatattcgaggagagattcacccaggatacacaacctcactatatctattcaccccgtgaaatga

SEQ ID NO: 123328 - DNA, 98 bp, Homo sapiens
cagatgccagcgtagctgaatccagtaccaaaaacgtcaacaacagttttacgggagtggacatccgccataacaaggaccgaaaggttcggcgcaag

SEQ ID NO: 123329 - DNA, 101 bp, Homo sapiens
cttgacctcaggaccctacccagggttctagaaatccaggcaggcatctatcttgaaggaatttagataatgggctgtgtgcaatgtaaggataaagaagc

SEQ ID NO: 123330 - DNA, 101 bp, Homo sapiens
catttgaagacgttccttgaggaggtttgaaaaaggaaccttctgaccagcctcatgggctcctcagagcaggaggatggggaggagagccccagcgacgg

SEQ ID NO: 123331 - DNA, 100 bp, Homo sapiens
ctgtgcggagactgggcggccggccgacccttcctgtcgctgacggcgactgcgggaggccagtggattgtattacacagagcatgaatatacttcttta

SEQ ID NO: 123332 - DNA, 100 bp, Homo sapiens
caggctggtttcggaaatgcccttacagcagcagtactatactggcaattgctggagaagattttgcaattgttgcttctgatactcgattgagtgaagg

SEQ ID NO: 123333 - DNA, 83 bp, Homo sapiens
cgggccgtgtccgccgcggccctgcgaggtccgaggggtttacccaaggtccagcctagcccctaggcaccatgtcggacagt

SEQ ID NO: 123334 - DNA, 75 bp, Homo sapiens
cgggccgggactggtgcgcgagggatccggaacatggtggcggtgctggaagtcatctccagcctggagaaatac

SEQ ID NO: 123335 - DNA, 100 bp, Homo sapiens
tcccttgatccgggagtctttccactggggtgctgataagactgtgaaaggcccagatggactgaccgcctttgaagccactgacaaccaggcaatcaaa

SEQ ID NO: 123336 - DNA, 74 bp, Homo sapiens
atttgttaaggattccaagtaactcttatttggcagtacttaattttcctaaatattgtgaacccgtggttaaa

SEQ ID NO: 123337 - DNA, 100 bp, Homo sapiens
ctccgtcgctctgtgacctgctggcattgaatgatttatagctaagactccaggacacccctgaagccgagaaatggttatgaagacagtatggagtttc

SEQ ID NO: 123338 - DNA, 97 bp, Homo sapiens
aacggggaagtcacccagcccccaaggattctgggggaggcctcaggtctcctctgagcctccggcctccataagacccaaaacagatgacacctct

SEQ ID NO: 123339 - DNA, 75 bp, Homo sapiens
ggatggagttgcaggtgtccagcggttggagtaatagatttttccctctaccttaaggatgtgcaggatcttgat

SEQ ID NO: 123340 - DNA, 74 bp, Homo sapiens
tgtgcaagatttgcatgaccatggacagaaatatgtcatcatcttgatccagaagcttggaagctgtattacag

SEQ ID NO: 123341 - DNA, 75 bp, Homo sapiens
cgtggccgcggccgtctcgtaggcagcggaggaggagaaagagatggacctcccggactcggcctcgagggtctt

SEQ ID NO: 123342 - DNA, 99 bp, Homo sapiens
ggcacacatggttaaggaacaggaggaaaccattcagagatggaggcccattgaggcttctctgtcctccacggggaacagcattggcctaaacctgca

SEQ ID NO: 123343 - DNA, 75 bp, Homo sapiens
cggctctcttatggcgaatgcaacccgaagagagagtgagctgaagtcacctgggagcccccctggacctgagct

SEQ ID NO: 123344 - DNA, 74 bp, Homo sapiens
atgcactttctcaaaccaaggctgctgtctgaggaaaaaaaacctgtcccctggtgcggtggaatcggatgtga

SEQ ID NO: 123345 - DNA, 75 bp, Homo sapiens
gctacctgcagcgccgtgtggcacgacacaaaaatcagggttccgagtctgaggaagacataaccttgtgcctgc

SEQ ID NO: 123346 - DNA, 75 bp, Homo sapiens
cagtgacttaaatagaccactggaagatgactgtcaagttttagaagagaaagggagtttcgtgctccaactttg

SEQ ID NO: 123347 - DNA, 100 bp, Homo sapiens
ggttacaggccagtggaggcttgaacccaggtactccaaagattcaggtttactcacgtcatccagcagagaatggaaagtcaaatttcctgaattgcta

SEQ ID NO: 123348 - DNA, 98 bp, Homo sapiens
cggcaatgccgccatccgggagaagctggcctgggccaaggctcccagccccattgccaataccttcctccactatcgaaccagcaaggtgagggtgc

SEQ ID NO: 123349 - DNA, 129 bp, Homo sapiens
gtgaagttcgtctagagaaacagtggtcaaaacaagttgttccttttgtttatcaaactattgtcaagaattaaacatgtggacatgaaccaaaagagcatattatggagtgcactgaaacagaaagct

SEQ ID NO: 123350 - DNA, 101 bp, Homo sapiens
ctggctctggcaccatgaacctcggaggcagccttaccagacaggccccagaggtgatccgaatgcaggataacaacccattcagtttccagtcggatgtc

SEQ ID NO: 123351 - DNA, 87 bp, Homo sapiens
tgattgaaattatctctggtgctgcagctcttgacttatcagatgccctggtcatcttccagctctatgaaaagatcaaagttcctg

SEQ ID NO: 123352 - DNA, 75 bp, Homo sapiens
atgcatgcccattgttggcaaaggtcatcgtattgaggaagttcctgaacttcctttggtagttgaagataaagt

SEQ ID NO: 123353 - DNA, 80 bp, Homo sapiens
aaaccagaaaacgtgttgctggcatcagcagacccatttcctcagggagaggctgtcgatgctgaggcacgagagaattt

SEQ ID NO: 123354 - DNA, 100 bp, Homo sapiens
ggactcagcggtagcaacctcgccccttgcaacaaaggcagactgagcgccagagaggacgtttccaactcaaagttatgaagacagtatggagtttcca

SEQ ID NO: 123355 - DNA, 100 bp, Homo sapiens
tttgtttccccagaggctgttgcagaacctcctcagccaacggcagataatgctcggaatatttttcaatgtccattccgctgtgttgattgaggacgtt

SEQ ID NO: 123356 - DNA, 75 bp, Homo sapiens
gagggatccttcacccgtgtctgtttgcccagtatgcggagatcgtccacttcaccctcccagatgggactcaga

SEQ ID NO: 123357 - DNA, 82 bp, Homo sapiens
ggaagcggcggcggcggcgccgggcccgggggtggtgacagcaggtctgaggctgctgtacaggacagattgaatgagcaag

SEQ ID NO: 123358 - DNA, 100 bp, Homo sapiens
agttgtcgacgaccgacagggtggtgaaaggcgcatattaaatttcctattgactacccctattcaccacctaccttcagattcttgaccaaaatgtggc

SEQ ID NO: 123359 - DNA, 100 bp, Homo sapiens
gcgcagaagccgagccgcgaggagcgcactccgtggccccgatggagcggtacaaagtatctccagatgaaatggccactgcttgatgtccaggcaggga

SEQ ID NO: 123360 - DNA, 136 bp, Homo sapiens
gacttggaagcaatgtttgaacaaactcgaagaacagctgtggaaagaagttgcaaaacactgggaatggttccccaaggtgaggccaactttgctccatctctaagccctgggagctccatggtgccgatgccaa

SEQ ID NO: 123361 - DNA, 90 bp, Homo sapiens
cctacagaaacaaaatgtcaacaaattgatggagacgtgtacagtggccccccgtgaaagacagaattgtggttttcctggtgtcacgcc

SEQ ID NO: 123362 - DNA, 101 bp, Homo sapiens
tggatatagcacaccatccccagccaggctgaacccatcagaaccactgtcttccagtaccccgtgggctggccaccagttcaggagctgcctccatccct

SEQ ID NO: 123363 - DNA, 87 bp, Homo sapiens
gagagcttgggagactgagacaacagatgggaataactgggaacacaagtccatttggacagccctttagtcaagctggagggcagc

SEQ ID NO: 123364 - DNA, 98 bp, Homo sapiens
agcagtacaaggtgcacctggacctctgggttaaggacatccaggcctgctcggccgcctggaaggctgacggcgtgtgctccaccgtggccggcagt

SEQ ID NO: 123365 - DNA, 104 bp, Homo sapiens
gccaagtgggacaactttctggcttttgaaaggctccttcttcaggcttatgcaagcaaagatctggaggagcagttacggtctgtgtccagtgtagatgaact

SEQ ID NO: 123366 - DNA, 78 bp, Homo sapiens
aagattgcaactttgagtcagacctgtaggcctgatagactgattaaaccacagcagcttcatggagtttggccacaa

SEQ ID NO: 123367 - DNA, 75 bp, Homo sapiens
gcctacgccatccagctgtgcataggagtccatagaggccactgtattctattgaagaacatgtctaacagtaac

SEQ ID NO: 123368 - DNA, 76 bp, Homo sapiens
atggaattgcggaagtgctgcaatcatccgtaccttatcaatggtctggatgtaccgactgcttttggaataaaaa

SEQ ID NO: 123369 - DNA, 100 bp, Homo sapiens
cggaaacgccgaggaacccggctgaggcggcaggctatgtcttgcccagccacgtgactgaggagatgctatgggagtgcaagcagcttggggctcactc

SEQ ID NO: 123370 - DNA, 139 bp, Homo sapiens
ctttatttcctgctgatgaattgtatggaatagttggtgctaaccttaagaggagctttgatgtccgagagccctggtccagcgcctccctctctcagcatggacgaggagagcctggagtcggccttgcagacctacc

SEQ ID NO: 123371 - DNA, 73 bp, Homo sapiens
cagcagctgcatttagttgcgctttcctgcctgcttctagcaacatgttggcagataaattgaacatgactcc

SEQ ID NO: 123372 - DNA, 82 bp, Homo sapiens
agcagccgatccagcctgcggagcctgtggggcaggttgcctgtgatttgcttcggaggattattcgtatcttgaatctcag

SEQ ID NO: 123373 - DNA, 82 bp, Homo sapiens
ctgaggcccttggtaacctcgtggaggggatggatttccataagttttactttgagaatcatgtggacgagtgctcactagc

SEQ ID NO: 123374 - DNA, 97 bp, Homo sapiens
tggccccgtgtcctgcaggtattgggagatccacagctaagacaccgggacctcctggaagccaaaaatgggcatcgagcgcctcaaacgaaagaac

SEQ ID NO: 123375 - DNA, 76 bp, Homo sapiens
agctgtgaaaaaagccatttccgaagggacacttagtcggtctggatgaaccagcttcgggagctgggcaagaagc

SEQ ID NO: 123376 - DNA, 95 bp, Homo sapiens
ctacacgccgccgcttgtgctgcagccatggaatgggtccctattatccagcaggacattcagagccagcggaaggtgaaaccgcagccccctct

SEQ ID NO: 123377 - DNA, 74 bp, Homo sapiens
tggcacctggcgcccagcgcgcccgtggccgctgccgcctccgccccagggaatgcagagagcaaccaatgtca

SEQ ID NO: 123378 - DNA, 98 bp, Homo sapiens
cctttgcctacccaaaccgcccagatgtcttagtgctacaggccaaccccttcaaggagcgaatctgcagggtcttctccacatccccagccaaagac

SEQ ID NO: 123379 - DNA, 100 bp, Homo sapiens
cggcgctggagagggggcgctgagctgttggggtgacaaacagcatgtttggtgcttcaagaaagaagtttgtagagggggtcgacagtgactaccatga

SEQ ID NO: 123380 - DNA, 76 bp, Homo sapiens
gccacgcgggcgagcggctgtgtggatgtcggcgaagccgcgggcgagagaaagcatgggattatggcaaccacag

SEQ ID NO: 123381 - DNA, 100 bp, Homo sapiens
cagatcttggtcttgcctgcgatttttccaaaaagaagcctcatgcgagtgtatttgcttgtaaatgcatcacgaagaggcagcccagaatgaagaaagc

SEQ ID NO: 123382 - DNA, 82 bp, Homo sapiens
cgcgacctccaaggatgcccgtgagcctgttgtcggggccaggtgcccgtggttgacacgagctgtgtccccagctgttccc

SEQ ID NO: 123383 - DNA, 100 bp, Homo sapiens
tgagctcgtcaagcagctgtcggccaagctcatcgccaacgtgcctggaagcagcgagccctttatgacgcaaggacagatgcccaacagcagcatgcag

SEQ ID NO: 123384 - DNA, 75 bp, Homo sapiens
ggagcatttccacactgagaaggggacagtaggatctcttctctgaaagctgaattaactagtcaggaatcgcag

SEQ ID NO: 123385 - DNA, 74 bp, Homo sapiens
aagccctgggtcgcttggaagaagccaagaattccttgtgtggatatcagatccggatggaatctcgagcttgt

SEQ ID NO: 123386 - DNA, 75 bp, Homo sapiens
agaccaggctccttggtgagaagaccaccacagcggcaggagtatatcaggcgacagctagaagaggagcagcgg

SEQ ID NO: 123387 - DNA, 90 bp, Homo sapiens
gattatgacagattacgccccctatcctatccgcaaacacagcaacaactccaggcccagcatttatcacatggacatggtctccccgta

SEQ ID NO: 123388 - DNA, 96 bp, Homo sapiens
ctaacaaggccaccattggtgtggggctgggcctgccatcattcaaaccagggctctgcagccagatggaacagctggagcaagagaaccagcaac

SEQ ID NO: 123389 - DNA, 100 bp, Homo sapiens
gctaatcagagaagcggcgttctggaggtggaatccagcactacgccctgccctctactgactggaggcaggcctctgcctactttagaagttaaaccac

SEQ ID NO: 123390 - DNA, 100 bp, Homo sapiens
ggcctggtgacatcaacctgcaggatgagatatgtaactggttcatcaatgcccggcggcggcttctcccagacatgcttcggaaggatggcaaagaccc

SEQ ID NO: 123391 - DNA, 100 bp, Homo sapiens
tggccagactgacacccataccttttgggcttcagaatgcagtgttttcgacagaaagaatttactttcaggttttcttacctaaagggagcaaagagaa

SEQ ID NO: 123392 - DNA, 80 bp, Homo sapiens
cggcggggtccgggccggagtacgtcgttcccgctgcgctaggggaagcgggcagggtggcccagttgaaatccttccct

SEQ ID NO: 123393 - DNA, 88 bp, Homo sapiens
ccccggtctatgccaggcgcatctcagttttcggctttgtgagaaaccttaccatcaaacacgatggccagcaacgttaccaacaaga

SEQ ID NO: 123394 - DNA, 74 bp, Homo sapiens
tgaaggctgcgagggactaagagcagaggccagtgtcgttattatccttgtggagtaatagaatcaatactgcc

SEQ ID NO: 123395 - DNA, 50 bp, Homo sapiens
ttgctaagtgtgggaattttagctaaaaattccgggtagatatgcctggc

SEQ ID NO: 123396 - DNA, 51 bp, Homo sapiens
tccaaactgtggacctctgggaagaaactaatctggattcactccctctgg

SEQ ID NO: 123397 - DNA, 75 bp, Homo sapiens
cagattcgcagtggtcgcttcttctccttgactctgaacaggaagtgcctcctggaaccacagagtcggttcagt

SEQ ID NO: 123398 - DNA, 101 bp, Homo sapiens
ccgacccttaccctcagcgagagaagtaaccgcaatgaatcgctccctggctaatgtgattcttggaggctatggcaccacttcaacagctggtggaaaac

SEQ ID NO: 123399 - DNA, 100 bp, Homo sapiens
aatgaagaaattggaggaggtgcagaaggtggacagggtaaaagaaagagacttttttctaaagaatgtgattgtgtccaggggggggcgctttctggaa

SEQ ID NO: 123400 - DNA, 100 bp, Homo sapiens
gagcgtcccccggagagggtccgtgtactaatggtcacttgatgtgcgctggctgttttatccacctactagcagatgcccggctgaaggaggagcaggc

SEQ ID NO: 123401 - DNA, 75 bp, Homo sapiens
tggccgtccgggaggatgggggaactgtgggcgtcttctctccaaagaaggcccatggacagaccttcacgttcc

SEQ ID NO: 123402 - DNA, 98 bp, Homo sapiens
caggccccgccgaggcggccaggttagtgcagcagaaatggaatctagttcatcagactactataataaagacaatgaagaggaaagtttgcttgcaa

SEQ ID NO: 123403 - DNA, 83 bp, Homo sapiens
cgcagggcctgcagcgggagctggacggcgagcgcgagcggcgcgagaaagtgaaaacttttggcccgtttggaagcggcagc

SEQ ID NO: 123404 - DNA, 100 bp, Homo sapiens
caagctgcggaggcagggcagtgtggtgtccagccggatccagcatctctccaccatcgactacgtggaggacggggcaccctttggagaagaaccccag

SEQ ID NO: 123405 - DNA, 75 bp, Homo sapiens
gatcctttgcaccctgcttggagacggacttgcttccgattcgccttttacaagtccacctctcagagaagaaat

SEQ ID NO: 123406 - DNA, 100 bp, Homo sapiens
ctcctgtaggtaatgctgctgtatcctcagttgactcattcactcaggaaaatggttctcctgaagaacatgcaatctatgtttgggatcatttcatagc

SEQ ID NO: 123407 - DNA, 74 bp, Homo sapiens
gcctcgactccaaatggttgaaaacagatatacaggatggatagaatgacagaagatgctcttcgcttgaatct

SEQ ID NO: 123408 - DNA, 75 bp, Homo sapiens
aaatggatttacagcagatgatatcaacaaggaattcgaatttagagtttaatttctcagagcattctctccagg

SEQ ID NO: 123409 - DNA, 121 bp, Homo sapiens
ccaagatcgagcccagcgtcaacttcctcaagtcgcccaaaggtgagaagccctaccactgcaactgggacggctgcggctggaagtttgcgcgctcagacgagctcacgcgccactaccg

SEQ ID NO: 123410 - DNA, 75 bp, Homo sapiens
tgtgatgccctgactgagctgctggctaagatcaccaacacagacgtggaaggtgtcttgctgcaggtaactaat

SEQ ID NO: 123411 - DNA, 100 bp, Homo sapiens
aggtgacttcaagggatggccggctcctctccaccgtcatccgtgccttggacacaccgaggtgaatttgacaggcaagaagatgacattcacttagtga

SEQ ID NO: 123412 - DNA, 82 bp, Homo sapiens
tgataaggaaagtactgtccaaatgaattatgtcagcaacgtatccaaggttgttgatcattatgaaaatcctagaaacgtg

SEQ ID NO: 123413 - DNA, 99 bp, Homo sapiens
cttaatagtgagtcttccaaccagagcttgtgtagcgtcagatccttgagtgataaaggagtagagcaaatcgctttcaaaaacctggtacagagaaat

SEQ ID NO: 123414 - DNA, 100 bp, Homo sapiens
ccaagttagatgccgattacccacttcgagtcctttattgtggagtgttctaagaacggaagcatctgggctggatggaatttagcatcaagcagagtcc

SEQ ID NO: 123415 - DNA, 100 bp, Homo sapiens
aagaagcaagagttgacattcctcctcttatgagaggtttaacctgggctgctcttctgggagttgagcctcctgctcttcatggatgaagcagacgcct

SEQ ID NO: 123416 - DNA, 75 bp, Homo sapiens
ttatttatgaccttttctatggaaaggatgccaaagaagagtgaatggcccacaaagagcctggtagcacatacg

SEQ ID NO: 123417 - DNA, 83 bp, Homo sapiens
cgtcggcgaatgcaattaggaactgttctgccggaatttgaaaagtgcctgtcgaggggtaacatatctctttcctattcaag

SEQ ID NO: 123418 - DNA, 100 bp, Homo sapiens
atcccgacctggactcagacaaggtcctgcatctccagtatggaatgtatgtttggccctgtgctgtggtcctggcccagtacctttggtttcacagaag

SEQ ID NO: 123419 - DNA, 83 bp, Homo sapiens
gcgaggtggcgtccggcgctgccaggatccgcggggagaccttgggcatcatcggacttgccaggactaaaagaagtggtaga

SEQ ID NO: 123420 - DNA, 75 bp, Homo sapiens
gagatttattcgtaatgcgactcaaagctgcacggcagtctgtttatgagattatatagaagctgaaagttctta

SEQ ID NO: 123421 - DNA, 76 bp, Homo sapiens
tggacttccacttcgatatttcggagaatacagctacctacccaggcaatatgaagattttatttgtagaacctgc

SEQ ID NO: 123422 - DNA, 82 bp, Homo sapiens
ggcgctggccggatggaaatcctaatgacagtctccaaattcgcctccatctgtaccatgatggcggctcagcggcagcggg

SEQ ID NO: 123423 - DNA, 82 bp, Homo sapiens
ctgcgcgcggcgcgagggaggctacacgtgcgtctgccgcccgcgcttcaccggtgacgcggcgcacggcgcggatggtggc

SEQ ID NO: 123424 - DNA, 100 bp, Homo sapiens
gaaatcttggagaagggtctaaaggtactggagattgagagcagttggcttctggaggtggctccccattattataaggccaaggagctagaagatcccc

SEQ ID NO: 123425 - DNA, 98 bp, Homo sapiens
cttctctactgatggcagtgttttagctgctgggagagaagatgactgaggaggaggtggagaccgttctggcaggacacgaggacagcaacggctgc

SEQ ID NO: 123426 - DNA, 90 bp, Homo sapiens
tggaattcaatccttcagatcatcctcgggccagcacaatattcctcagtaaatctcagacggacgactgcaaaattcaaaatggggctc

SEQ ID NO: 123427 - DNA, 50 bp, Homo sapiens
ctcatgttttggctttggggctagggacagcggggattttcagtttgatt

SEQ ID NO: 123428 - DNA, 101 bp, Homo sapiens
aaacaccattccagaaaatgggattgcccaccacgataatgcagttcttattactaggccgaatacatcaagcaatggtaacatctttaaatgaagataat

SEQ ID NO: 123429 - DNA, 80 bp, Homo sapiens
ggattcaggagtacctggagaaagctttaaacaagaccaagaatcgccttcagccctgtctggtgcatccttggcagaaa

SEQ ID NO: 123430 - DNA, 119 bp, Homo sapiens
ggttattcttaatcctgtaaatacgaatctttccaaaggagatgcccggtgttagtggtgtgtttcactgtttttggaggactcatggcttttaactacaatcgggcattccaggtgtg

SEQ ID NO: 123431 - DNA, 76 bp, Homo sapiens
tcactaagcgggatcttgccctcagtgaaggagatattcacactttgatatgaatgccacaatacgaaggattgac

SEQ ID NO: 123432 - DNA, 90 bp, Homo sapiens
acgggggccgccgcagcaccatggcgaccaccgtcagcactcagcgcgggccgtggtaagcatccgtggcattcaagacgaagatccccc

SEQ ID NO: 123433 - DNA, 75 bp, Homo sapiens
ccgccatgcaaggctggcgcgtctccatggagaagcaatatccaaggcagtgtcatctgcaacaatgctgtgatc

SEQ ID NO: 123434 - DNA, 100 bp, Homo sapiens
ctactcagtccctctttgccaggtgtcatggagaaactccagctgggcccagagattctgcagcgggaaaatccaaggcttatttatgccaggctgagtg

SEQ ID NO: 123435 - DNA, 75 bp, Homo sapiens
cctccctcatcaactccctccggaggcagcacctcaggaaaggttatctgtgctacaattgcatttggaatgggg

SEQ ID NO: 123436 - DNA, 76 bp, Homo sapiens
tcgcggaggcaaggccgaggataaggagtgaatcagctgcacttcatccccgtggacctgggcgcccccatcgtgc

SEQ ID NO: 123437 - DNA, 82 bp, Homo sapiens
gcaggcagaaggaccccttacagcggcacacaagccatgccccctcttttctctttgggataccaccagtgccgctggaact

SEQ ID NO: 123438 - DNA, 89 bp, Homo sapiens
cacaggctgagctccctgaaccaggtgattgatgagatttatcgtgtgttgagatatgtcaattctaccagagcccctcaacgagctca

SEQ ID NO: 123439 - DNA, 89 bp, Homo sapiens
caagtctgaagttttacaggaatctattagaaaacaaagtgtcaattatttcaagaattaccatagactgtgggctgtttagtgccatg

SEQ ID NO: 123440 - DNA, 128 bp, Homo sapiens
acgggcgcagcttcgcggcgcggggcgcccggcaccgccaactgcgagctcaagccccaatgccgcagaatggaattcggcattgttcctacacagcttctcggcaacatctctatgttgataaaaat

SEQ ID NO: 123441 - DNA, 51 bp, Homo sapiens
gtagaaacaccaacaggatacattgaaagaggaagaacttgtcgcttttcc

SEQ ID NO: 123442 - DNA, 50 bp, Homo sapiens
agcaagcatgcagcttactgcttgaaagggcgtggactccctggtgctag

SEQ ID NO: 123443 - DNA, 73 bp, Homo sapiens
acaaggcggtgcattctggacctggcacatcagtgggccataggaaaaggatacagagtagagtttcatgaac

SEQ ID NO: 123444 - DNA, 120 bp, Homo sapiens
gaaaacatcatcgttttgaagagttctgcgttttgccagtcacctctcaactgtgtgccaaagatcaccggcgtaatcaacccagcgttggacaaatactttccgtcagactctggagtg

SEQ ID NO: 123445 - DNA, 110 bp, Homo sapiens
aaattcatcaaggagctcatcaaggacgggaagtcactcataagcgcgctcaagaatgccttcaattaagttgcagagttctgatggagagatatttgaagttgatgtgg

SEQ ID NO: 123446 - DNA, 100 bp, Homo sapiens
ttgcgcaaaaacaacagacagccctatgctgtcagtgaattagcagacacctgctggctccctggacactctctgctctgcccctggcagcactgtcacc

SEQ ID NO: 123447 - DNA, 82 bp, Homo sapiens
aaaacagaatgctaccaaagcaagaattccattttatggaagtgagaaagatcagtctaaagaaaaggagaagaaagtgaaa

SEQ ID NO: 123448 - DNA, 100 bp, Homo sapiens
tctcgcggtttccccgccgcccacccggacgccgacgaaagccagcgagctcctcagcctcaggtattgttgcagcatctggcagtgagactgaggatga

SEQ ID NO: 123449 - DNA, 100 bp, Homo sapiens
tgcaaatgaagctctcgaggctgctaagagactaagtaagactgtgccaaaatcccaaacttcagttgaaaaatagcccaccatatatacttgatatttt

SEQ ID NO: 123450 - DNA, 51 bp, Homo sapiens
gagaaagaagtgataggagggctctgtagggccatgaagcccccaggagga

SEQ ID NO: 123451 - DNA, 75 bp, Homo sapiens
gaaggagagtggagtggcccaccacctgaatgcagagggtcccgcgatgtcagcctagcgaaggcagacgctgct

SEQ ID NO: 123452 - DNA, 75 bp, Homo sapiens
tgaaggaggacgagccgtggtacgaccaccaggacctccagcaaggcaaatgaagaggattcttccagttctcta

SEQ ID NO: 123453 - DNA, 100 bp, Homo sapiens
agggaccgatgcctccaacacagctatgcagttccaaagaggtgtttgaaagctcgagaacattttggtacagtaaaaacacatctaacatctttgaaga

SEQ ID NO: 123454 - DNA, 97 bp, Homo sapiens
cagaaacttgtcagataagtggagcctctttggaccgagatcccttcagaagtacgattctgctgtgttctcatttcacccaagacctttggctaga

SEQ ID NO: 123455 - DNA, 87 bp, Homo sapiens
tgatcgaggttgtttgcaacgaccgtctggggaagaaggtccgcgttaaatgcaactgcttccagctgccatggtgatgccacccca

SEQ ID NO: 123456 - DNA, 100 bp, Homo sapiens
cagattccagcttcggaacaagagaccctggtgaccatcttggtgctgcagggccggctggatgaggcccgacagatgctctccaaggaagccgatgcca

SEQ ID NO: 123457 - DNA, 99 bp, Homo sapiens
gcgccggctccgggcccggccagtacctgcagcgcagcatcgtgcccaccatgcactaccaggacagcctgcccagtttgtgaagcctggagctgagaa

SEQ ID NO: 123458 - DNA, 89 bp, Homo sapiens
ggagaaccgggtgcttcaccaggaacttcagggttactacgacaatgccgacaagctccacaaggatgtgatggtggcaggtgggatgg

SEQ ID NO: 123459 - DNA, 100 bp, Homo sapiens
tcgggggcggcggtggcgccggcggcgggacaggagttcaaagaaggacgcagagccagccacacagccccacaggtcctctttagccacagggaacctc

SEQ ID NO: 123460 - DNA, 100 bp, Homo sapiens
cgtgttgaccggtttggttgaagttggagaagtatccaatagggatattgtagaaactgtctttaacctggaggagcaaatggacagtgacattgtcatt

SEQ ID NO: 123461 - DNA, 82 bp, Homo sapiens
ggagcggcaggtcctcccagaccccgaggtgctggaagctgtgggggacaggcagataacgaaggaggcccaacttcattca

SEQ ID NO: 123462 - DNA, 100 bp, Homo sapiens
atggtgcgacctcagactgatccctctacttcattcgcgcttctctcagtatgtgcccggcacagatttgagtcggagatgcatttagaagatactacca

SEQ ID NO: 123463 - DNA, 51 bp, Homo sapiens
tcaagcttctcgccagcattgtgagagcttttctggaaaaagaagaaaagt

SEQ ID NO: 123464 - DNA, 90 bp, Homo sapiens
tgtctccttctcttcctcagggctcccgtgtctgctcgccctccgacgctgctcaggcaatgcatgaaccattgcaaacttggcaagatg

SEQ ID NO: 123465 - DNA, 100 bp, Homo sapiens
cattggaccacacaaagtcttactgtgccggtggtggtgtgcacattgagccccggtatagacagttcccccagctgaccagatcccaggtgttccagag

SEQ ID NO: 123466 - DNA, 135 bp, Homo sapiens
gaacgacttttaactttcattgtcttttccgcccgcttcgatcgcctcgcgccggctgctctttccgggtaaaataccatgaagattttgaaaaaacaaaggggagaggctttactcccgtcgtggacgatcctg

SEQ ID NO: 123467 - DNA, 119 bp, Homo sapiens
atcctaatgacagtctccaaattcgcctccatctgtaccatgggaaggtggccatccagaaggaggacttgcagaagtaccacaacagggacacctggttccagctgcagcacgtggac

SEQ ID NO: 123468 - DNA, 90 bp, Homo sapiens
gctttcaatcaacccaaggtgatgcttttgctacgacctcattttctgctggaactgatgacacagtttatctctttgttgtaaaccacc

SEQ ID NO: 123469 - DNA, 90 bp, Homo sapiens
gcccagcaatcacagaagccgacaaggcgttcaagcgaaaacatgaccgctgagcccatgagactgcctgcgctgctgacttaaggcccc

SEQ ID NO: 123470 - DNA, 75 bp, Homo sapiens
ggcagccaagctcgtagcctgccactccgtgcaaatggtggagtcaatgaagaaagtagcagggatggatgtgga

SEQ ID NO: 123471 - DNA, 51 bp, Homo sapiens
gcgtatagtaaggctgcaacagttactaattaaacatgtggacatgaacca

SEQ ID NO: 123472 - DNA, 100 bp, Homo sapiens
ggtctccgtgcagcccaacttccagcaggacaaggtggcttgctttggtgaaggtattcatacagccttcctaaaggcaatgctttccacaggatttaag

SEQ ID NO: 123473 - DNA, 82 bp, Homo sapiens
cgggtttgccgccagaacacaggatttttagactctgaggagcagttggagctaatccacattatggaaatggaaaccaccg

SEQ ID NO: 123474 - DNA, 75 bp, Homo sapiens
ctcccagcccctccaaagatttactttcccatccgtgactcctggaatgcagaatgatctctgcctttcacaaag

SEQ ID NO: 123475 - DNA, 100 bp, Homo sapiens
cgaccttccttcgagtctgtttatccgttgcagcctcccttccccacgacggggcgcctctgcaactcacaattgtaaaccatggctgtgtggatacaag

SEQ ID NO: 123476 - DNA, 80 bp, Homo sapiens
ggagagacaggcggtggatcagataaagagccaggagcagctggttttttattggcacctcagtctcaacattttctttt

SEQ ID NO: 123477 - DNA, 100 bp, Homo sapiens
cccacgcagcagggaggtgaagcagtaccaggaccatctgaacaccagggaaaatgggaagtccctctgcctaaagtacgtgcccagggagaaacagaag

SEQ ID NO: 123478 - DNA, 100 bp, Homo sapiens
cgagcgcagtgcagcgcagccgcggggagcgaggagcgcgcggagccggccatgggcaagtcagatgccaattctcggaagcaagaagcagagtggaaag

SEQ ID NO: 123479 - DNA, 83 bp, Homo sapiens
caccgtcaccaacgacaacgacctcagctgcgatcccgagggcaacatccttcgagaccggttcaagagcttccagaggagga

SEQ ID NO: 123480 - DNA, 96 bp, Homo sapiens
gttcatgagtggaatccatgtttctggacgcggatttttggcctcatactctgttatagataaacaagataccatgctgtgaagtccaggccacat

SEQ ID NO: 123481 - DNA, 100 bp, Homo sapiens
gattggtctgggtacctggaagagtgagcctggtcaggtttaccaaagatgcaggtcattaggaactattctggaacaccacccccagctctgcatgaag

SEQ ID NO: 123482 - DNA, 96 bp, Homo sapiens
caagctataaagaggaagcatgctgtcctatgtcagcaaaaactggagcagaaattggaggctcagcatagtcttgttactacagctataattcaa

SEQ ID NO: 123483 - DNA, 98 bp, Homo sapiens
tgacgcactgtgactccagccagagcccccccacgcatcgtcatcagacagtgaggaggacccagaagccttggagaagcagaagaaagtgcggccca

SEQ ID NO: 123484 - DNA, 100 bp, Homo sapiens
tgatgaggacgcggagccgcggcggagccggaggaagctgatggtcatcttttccaagcttccccaccatcctcacccgtggtcctgtactagtcctggc

SEQ ID NO: 123485 - DNA, 83 bp, Homo sapiens
cggatgagtacgataccgaagcgggctgtgtgccccttctccacccagaggattcctacaggaagcaagtagtaattgatgga

SEQ ID NO: 123486 - DNA, 82 bp, Homo sapiens
taaagtcgagtatctggtgaagtggaaaggatggcccccaaatgcgtgtgctaagctcaggtctgagcacggtggatcccat

SEQ ID NO: 123487 - DNA, 101 bp, Homo sapiens
aagagaaagtaacaagaatcattcttgcagcatttcgtgtacaaacccgtagtgctgatgaaccaatgacaacatttgttgtctgtaatgaatgtggaaat

SEQ ID NO: 123488 - DNA, 75 bp, Homo sapiens
gcctgatctaacccctagaaacagttttctggatatgccgcagaaggatccgtgccagaagcaagcctgtgagat

SEQ ID NO: 123489 - DNA, 50 bp, Homo sapiens
cgctgaggctcagagatgggtggagacttaattcagtgcacaaatgagat

SEQ ID NO: 123490 - DNA, 50 bp, Homo sapiens
ctccaccatccggccctacctagagcagcctagggcctaggcccgggcca

SEQ ID NO: 123491 - DNA, 90 bp, Homo sapiens
aaactctttggatccaactctgatgttaaggacatgttcacttccagatctctcaaagctgttcagaacccttatggatgttcccaccgt

SEQ ID NO: 123492 - DNA, 98 bp, Homo sapiens
ggctaccgacaggctctacagctccgcagaattcaagcctgtgaacttatgaatcaaggcatcttggccctggtcagctccattggctgcacgtcagc

SEQ ID NO: 123493 - DNA, 80 bp, Homo sapiens
gcggcggcggtggaggagccggagcataatgaataccctctaccatctgctttggtcagggtgccgctcgaggatttaaa

SEQ ID NO: 123494 - DNA, 80 bp, Homo sapiens
aaaaataaagaagaggctgcagaatatgctaaacttttggccaagagaatgaagaggaggaagaaggtgggaaaggtgaa

SEQ ID NO: 123495 - DNA, 76 bp, Homo sapiens
agctgtccagtcatgtctgcaggtccgaggaaacctgtccagtttaagtcgtcttggtctgagatataacagactg

SEQ ID NO: 123496 - DNA, 100 bp, Homo sapiens
gccagagacttcacagtttctgctctgcatccgtacccttccgaagagcagaagaaacagttagcgcaagacacaggacttacaattctccaagtaaaca

SEQ ID NO: 123497 - DNA, 83 bp, Homo sapiens
atgagatgatcttccggggaacaggagcactgatatttgtcattgactcacagagtcttttattcaaaacttcagcgttctct

SEQ ID NO: 123498 - DNA, 100 bp, Homo sapiens
gagcccatggcagctccagcctctgcctcccagaaactcaggaatgggtaccacagaccatgtcatcgtcctggcgtccacgaaccgagctgacattttg

SEQ ID NO: 123499 - DNA, 101 bp, Homo sapiens
gccgtggctgcgctctcttccctctgctgggcgtcctgttcttccaggcctttaaatctacaagacagcagccttcccgaaatgtcactactaagaattat

SEQ ID NO: 123500 - DNA, 74 bp, Homo sapiens
tgcaggtctctgtcgagcagcggacgccggtctctgttccgcaggatggctgaccggttccctgatgtgttacc

SEQ ID NO: 123501 - DNA, 87 bp, Homo sapiens
agcaccagatgcttcgggacctcataaaggaaagcttcctgcctgacacagctcacttcaagaagtgcacaatgtcagaacgtggaa

SEQ ID NO: 123502 - DNA, 100 bp, Homo sapiens
agctgttcgacttcgatgatttactgaaatttgatgacctagatggaacacatgctctgatgggccgacagctgcagaaggacctggagagcgtcagtcg

SEQ ID NO: 123503 - DNA, 74 bp, Homo sapiens
atttagcgcatcatgtgatccggtgttcacttggcaagaagagtgcttcaattagaaaaacaaaactcgctgat

SEQ ID NO: 123504 - DNA, 100 bp, Homo sapiens
gcgcccggagcaagcggagctcccccaagagccggaaagagctcttcagtatccccatcagccagtttccgaggtgctgagaagcacagaaactccgcag

SEQ ID NO: 123505 - DNA, 98 bp, Homo sapiens
aacgaagaagctttcagactacgtggggaagaatgaaaaaaccaaaattatcgccaagattcagcaagtgaccctgctggactttggtgcaagccggg

SEQ ID NO: 123506 - DNA, 50 bp, Homo sapiens
atttgaccaaatttctggaagaggacttaaccaccaccatgtcgagcaaa

SEQ ID NO: 123507 - DNA, 74 bp, Homo sapiens
gagccgacaacgccttcatgctgctcacgcaggttcctggtagagttacacagttgtgccgccagtatagcgac

SEQ ID NO: 123508 - DNA, 90 bp, Homo sapiens
ggatttggtttcagcatgtccttctctgaatgatgaatacttttactactgtgacaacattaacgtttgctgctttgtggtgcacaagcg

SEQ ID NO: 123509 - DNA, 75 bp, Homo sapiens
aagtcaccctgacacatctcagttcatcttcctcaaaactatgcgaggtgctcctggagctgttggtgggaatat

SEQ ID NO: 123510 - DNA, 90 bp, Homo sapiens
ggctgctgtctctattctctcggcctgtcagcaaatattacagcgtgaaataaattcccagtatttttcaagattatgtaaaaggagttg

SEQ ID NO: 123511 - DNA, 100 bp, Homo sapiens
accaggccctgaagggcttcacgaccaaaggtgtcacctcagtctctcagatcttccacagcccaggtagcacagagctgacaggcagcacgaatctgat

SEQ ID NO: 123512 - DNA, 100 bp, Homo sapiens
gttcttggcaagagaggcatcctccttgaagtatttggctgaggagttttcaatcccatgccctctggtggtcagaagatgctgtgctgtctcgttagga

SEQ ID NO: 123513 - DNA, 50 bp, Homo sapiens
gtttactccatgcagttgtcaggaggtgtgatgaatgcagactctgctac

SEQ ID NO: 123514 - DNA, 83 bp, Homo sapiens
ggctcacttgcatgtatttggaacaaaaaaaggagatgcctggcagccccgctctctgcaggtggcccagttgaaatccttcc

SEQ ID NO: 123515 - DNA, 50 bp, Homo sapiens
ccgcggttcggccgcgccggccgaatgaagaaggagccccacaggaagga

SEQ ID NO: 123516 - DNA, 135 bp, Homo sapiens
agaaaactagtatataaaaataaacaaaaagtccttgaagctttacagttaatttaggtgctgggagaccgtgaagtgcaaagcagatggagtccaggccctcggggagacagcacgccagtgagggagatggag

SEQ ID NO: 123517 - DNA, 84 bp, Homo sapiens
ctctacttgttccaaaggaaaatcctggcagaggacaagtttacaggtacatacattacacccctatttctacaaagcttggct

SEQ ID NO: 123518 - DNA, 100 bp, Homo sapiens
tggaggcgtcgggcgtgagcggaaatgaggaggagatggtggaggaggctgaagccaaaactggacaagccaaggcatctgtagccaaagtaaacaaatc

SEQ ID NO: 123519 - DNA, 97 bp, Homo sapiens
tgaagcctgagtatgatgcggtggtgataggagcagaagcctccaagtacgagctaggtggtcttctggagggctagcccagtatttctacaaaaaa

SEQ ID NO: 123520 - DNA, 98 bp, Homo sapiens
agagccaagcaaagaaccatcttcccccagcgcccagctccgggatctagacacacatcagataaaagtggaaccagtcgctctggccccgagtccag

SEQ ID NO: 123521 - DNA, 115 bp, Homo sapiens
cccaaattgcccaggcattgctggggtcagaagagaggaaagtggaggtcacctactatcacaaaaatgggagaaacaaaggcagcgctgccctcgggggagcattggccctggc

SEQ ID NO: 123522 - DNA, 100 bp, Homo sapiens
ggggggtgcatgggccccatctggtccagttactatggaaactgccgttctctcctggagcaacaagggagcagtgggcaactgcgtcaccaccatggtg

SEQ ID NO: 123523 - DNA, 100 bp, Homo sapiens
ctaccacctagaactggattgtgcgctggatgaactgcagctttgcaagaattgcttttacttgtcaaatgctcgtcctgacaactggttctgttatcct

SEQ ID NO: 123524 - DNA, 88 bp, Homo sapiens
ttcaacaccaccttcatctccaccatcggttatgaagacagtatggagtttccagaccatagtagacatttgctacagtgtctgagcg

SEQ ID NO: 123525 - DNA, 75 bp, Homo sapiens
caaaccaaggatctggggatcttcgcactatcccaaggcagtcttgattgatatggaagaaggggtagtgaatga

SEQ ID NO: 123526 - DNA, 104 bp, Homo sapiens
cgcgagcgaggcgccctagacatcttctccctcccttgcctcagaggactactgagcccagccaggctgtatgccattgctgccaaagaaaaagatattcaaga

SEQ ID NO: 123527 - DNA, 94 bp, Homo sapiens
cgtcagcctcccgccggccgtctccttaacaccgaacaccgtgctgactgggttacttttttaaacactaggaatggtaatttctactcttctg

SEQ ID NO: 123528 - DNA, 75 bp, Homo sapiens
cggccaggaggccatctggcagcgggcagcctggcatcctcgctacaacctcattgttgtgggccgatacccaga

SEQ ID NO: 123529 - DNA, 100 bp, Homo sapiens
caggtctggtgttccttacggccctctcaggtgccgacttcctggtgacggaggtggaaaatggtggctccttgggcagcaagaagggtgtgaaccttcc

SEQ ID NO: 123530 - DNA, 83 bp, Homo sapiens
atagatattcagaagaaggatgctgttaaaagtcgggaacatgccctgtgtgccgccgtcatttcccacctgcggttattgaa

SEQ ID NO: 123531 - DNA, 75 bp, Homo sapiens
gctgatcttgaaggtttacacttgtcaacttcctcttcagtcatcagtaatggcaccttgaaaattatcgaccgg

SEQ ID NO: 123532 - DNA, 100 bp, Homo sapiens
cggcggaacccgtgggcctgtggactgcagcctcggcggtcagcaggatagctagcggccaggagaaatacagtggaaaatgcaaaacaacgaaattata

SEQ ID NO: 123533 - DNA, 100 bp, Homo sapiens
gtgaaggctgttagtcgccgcgtggtttcatggccccctgaacagggcggatgcagagagcctcctgtccctctgcaaggaaggcagctacctagtgcgg

SEQ ID NO: 123534 - DNA, 87 bp, Homo sapiens
gaatcctctaaaggccccatacaatgaagtagacattggtggaaacatttagttaaagctgaagctcaacaaagatatagtgatctc

SEQ ID NO: 123535 - DNA, 73 bp, Homo sapiens
ggtgtgcctcggcagccttgcgctgctctaatggtccggacttccgtgttgcccaccagaagtatgtccgaca

SEQ ID NO: 123536 - DNA, 100 bp, Homo sapiens
gccgcaccaggctcatcctgtccatcgtgtgcctgatgatcacgcagctggctggcttcagtggaccagctgagtcatcactagagagtgggaagggcag

SEQ ID NO: 123537 - DNA, 100 bp, Homo sapiens
agcttcggaacaagagaccctggttgaccccctgtttacagtgccagcgccaccaccgccgatttccagcagtctcacgcctcagattctaccctcctac

SEQ ID NO: 123538 - DNA, 83 bp, Homo sapiens
ctggaatgaaatcttccaagtccaaggatgtcttgaggcagccctaggtgaggccaagaagcaacttcaggatgagatgctgc

SEQ ID NO: 123539 - DNA, 100 bp, Homo sapiens
gggagatccacagctaagactccaggaccctctggaagcctagaaatggagcgctatagttatgtctgcccagatttagtaaaagaatttaacaagtatg

SEQ ID NO: 123540 - DNA, 75 bp, Homo sapiens
agaactacagcaactttgtgtcaccgggtttaccattgcttgttcagagaacaattgcgagaactattgtgttac

SEQ ID NO: 123541 - DNA, 100 bp, Homo sapiens
gaagaaaccgttcctagggatgcccgcgcccctcggctacgtgccggggctgggccggggtacgacgagcatgtaatcagcccaaaggaatttgtgcacc

SEQ ID NO: 123542 - DNA, 98 bp, Homo sapiens
ctcctccctcttctcccgactatttggcaagaagcagatgcgcattttgatggactcagcccacctgcacccaggtgaaataaacagctttattgctc

SEQ ID NO: 123543 - DNA, 76 bp, Homo sapiens
cggaggtcaagtcttcatcatcagtgtggagactcatgctgtagagagacgagttgtactgctgtcacaggaaatg

SEQ ID NO: 123544 - DNA, 50 bp, Homo sapiens
gggaactcaaacagcagatgcaggtacgacagtgccagcccacagggcca

SEQ ID NO: 123545 - DNA, 98 bp, Homo sapiens
tgaagctccgttgactaccgtggagagatcataatttggggttcaagattccagaatcctggtaattgatgtccacccgagaaatccctgcagatgtt

SEQ ID NO: 123546 - DNA, 74 bp, Homo sapiens
caactgttggcccagctccgaaacctggacaacgcggtcctcatcggtgctggagaatctggtaaaagcaccat

SEQ ID NO: 123547 - DNA, 95 bp, Homo sapiens
gatccagaaggagctcaccattggctcggcagacctcaacaccaacatcgaggatgaaggcagctccttctatggggtctccagccagtatgaga

SEQ ID NO: 123548 - DNA, 101 bp, Homo sapiens
gacagagatggcgagcgcccggattggggatgagtatgcggaggacagctctgatgaggagtgcaagaagaaacacacgctgctgtgccccgactttgccc

SEQ ID NO: 123549 - DNA, 75 bp, Homo sapiens
accatttaaaacaggtctaaaggcctcattgctacgatttcagagtaccctggtaatagctgagcatgcaaatga

SEQ ID NO: 123550 - DNA, 88 bp, Homo sapiens
atgcgggacttcagtcctagtggcattttcggagcgtttcaaagagcacttttccagccattaactccaggctctcgagaatttgaag

SEQ ID NO: 123551 - DNA, 75 bp, Homo sapiens
cagtttctggaagaagaagaagagcatgatcggcatgtccaccaagggcgaccattgacgaggtggagacggacg

SEQ ID NO: 123552 - DNA, 98 bp, Homo sapiens
tgatatcccagttggagagggaagaaaagctttggatgaaggagcttcaaacccaaagaggggaggagttgtgtggggtaatgacaatctcggactct

SEQ ID NO: 123553 - DNA, 75 bp, Homo sapiens
cagaaccctgctcctcaccccacagctttttacctgcacctactcagctatctcaggaccagcttgaggctgaag

SEQ ID NO: 123554 - DNA, 75 bp, Homo sapiens
gaacggggcgcacttcgacccggaagtttacctagacaagaataattgtgtgcccaagaagatgctgcagctggt

SEQ ID NO: 123555 - DNA, 90 bp, Homo sapiens
ttttaattggcatgctagtggctgttgttgccttattgatctgcagacagaaagtgagacgctggtcactctgtgtcactatgccacttc

SEQ ID NO: 123556 - DNA, 100 bp, Homo sapiens
ctccacttgcccgcttccacccggaaagccccccaggctgagtgcggcatgatctccatcaccgaatggcagagctcactcgaaagtttggcataactac

SEQ ID NO: 123557 - DNA, 100 bp, Homo sapiens
aggagcagaacttggaccagacctacttggatgatgaaactatgttccaacttcctgtcaacaatcttggcagtttaagaaaagcccggaaaactgtgaa

SEQ ID NO: 123558 - DNA, 74 bp, Homo sapiens
tacgtccagatggcgagtccaaaggaggtgctgggagaccgtgaagtgcaaagcagatggagtccaggccctcg

SEQ ID NO: 123559 - DNA, 83 bp, Homo sapiens
tgaaattcttacaagtggaaatatacccccaaattatcaatacacttctttgtgatattggccacagtgaagaaaaactgggc

SEQ ID NO: 123560 - DNA, 50 bp, Homo sapiens
gggggaaaaaatcccaaggtctgcaaagactttgtgtggacagtaatgac

SEQ ID NO: 123561 - DNA, 100 bp, Homo sapiens
aaaaaagcctggtgagactttcttcatgtgttcctgtagctctgatgagtgcaatgacaacatcatcttctcagaaggggttgcagatggtgtaggaggc

SEQ ID NO: 123562 - DNA, 90 bp, Homo sapiens
tagggtcctttatatagaagggagagtaggtatgagtcgtcatccgaggactccagcacagcagagaacatctcagacaacgacagcaca

SEQ ID NO: 123563 - DNA, 74 bp, Homo sapiens
ctcggtgctggagaacttcgtgggccgtaatctatgccagcaattatgacaatgttagcagaccatgcagctcg

SEQ ID NO: 123564 - DNA, 83 bp, Homo sapiens
aaattctgccgaaaggactgaggaacggtgcctggaaaagtgtttcaggctgcatgtaccaagtagttcagacgattggctcg

SEQ ID NO: 123565 - DNA, 75 bp, Homo sapiens
cggcaggcagtcacaagcagcagaacttcgggttgtgttcttccagagagcaaagccctgaggactggatttccc

SEQ ID NO: 123566 - DNA, 101 bp, Homo sapiens
cagataccgtttgacaccaccaatcttatgccttcattcatccggcatggtccaacaattccaagacgaactgatatctgtcttccagattcaagccctaa

SEQ ID NO: 123567 - DNA, 100 bp, Homo sapiens
ccctcgaactttaaagtccgcttctttgtgttaaccaaagccagcctggcatactttgaagatcgtcatgggagcagcccgacggccatggaggctgaag

SEQ ID NO: 123568 - DNA, 100 bp, Homo sapiens
gacgcagcagtgagaagctggttaggaagctgaagggaggaagttcacgagagagtgagccaaagaaccccggctgggacgatgccggagtgtgaaggag

SEQ ID NO: 123569 - DNA, 98 bp, Homo sapiens
aaaacaacctgcccgaagacagtaccagctggaggatgagtctgcgcatttggatgaaatgccactaatgatgtctgaagaaggctttgagaatgagg

SEQ ID NO: 123570 - DNA, 90 bp, Homo sapiens
attttaggccaaggagctactgcaaatgtctttcgtggaagacataaggtttcaggtacgttcaccaactttctttcaaaaatcccggga

SEQ ID NO: 123571 - DNA, 90 bp, Homo sapiens
ctatgtttgggatatcaagagtataatgtctatggtgaagtcttttgtacagtggttaggaaaaagtgttaatcgaagcttacaagaaat

SEQ ID NO: 123572 - DNA, 151 bp, Homo sapiens
aatcctagccatgataccttcatggtgtcactgaatccaggaggagacccttctacgcctggttacccaagtgtcgatgctgtcttcgcagtgccatgcctacaatggcaagcgtgaagctgtctacacttcatcccattgtgaatcatcc

SEQ ID NO: 123573 - DNA, 75 bp, Homo sapiens
ccaagccgccgcgtaggagcgtgcgttcgggccctcttctcccacctgttcggaccagaggagcgagagcagcaa

SEQ ID NO: 123574 - DNA, 75 bp, Homo sapiens
atgaaggtggcattttttggcagagatgcccgagtggtaaaagacatggcaacaggaaagtctaagggatatggc

SEQ ID NO: 123575 - DNA, 75 bp, Homo sapiens
gtcgaatccagtagaaaactggtcaaggaagcttcttccgtgtgtgctaagatcgtgcagctcctggggcagaat

SEQ ID NO: 123576 - DNA, 115 bp, Homo sapiens
cgagagacacgaggagcaaagcaagtgaaggcacagacgcacgggacaggagagcctgggcaagactggagaggctgaaggtgatgtggccgccctcaaccgacgcatccagctc

SEQ ID NO: 123577 - DNA, 100 bp, Homo sapiens
acatcctttgactggttagccaggttgaaatcacaaagattagacacctttttagataggtgttcttcagcaccactgacaacacggttctgacagtatt

SEQ ID NO: 123578 - DNA, 101 bp, Homo sapiens
ccagtctcctgtccgagtctacaagtacccgtttgagctggtcatggcgaacaagttgaaatcatcgcagaaggataaagttcgtcagtttatgatcttca

SEQ ID NO: 123579 - DNA, 75 bp, Homo sapiens
gccaataccaccatagaggatgaagacgctaaaggtgacttaagagattaaaattaatttggttgctgttggttc

SEQ ID NO: 123580 - DNA, 100 bp, Homo sapiens
cagcagcaactactgcactaccagaccaccaagcagaacctctggtgtatctgtccctgcttcggatgtacctgtcgccccccagcattcactgcctggg

SEQ ID NO: 123581 - DNA, 100 bp, Homo sapiens
gggagagtggatttccgaagctgacagatggcaagggggccaggccaaccaccccacagcagccgtggtgacggagaagcagcagatgctggagcagcac

SEQ ID NO: 123582 - DNA, 100 bp, Homo sapiens
agaatgtcagtgattgttcgcactccatctggaaagttacgactctactgcaaaggagctgaccagcagagagaagagattccatcttccagaggttgcc

SEQ ID NO: 123583 - DNA, 50 bp, Homo sapiens
taccggaatacgtgcggctggtccagaatgacagggtccagaaactggcg

SEQ ID NO: 123584 - DNA, 100 bp, Homo sapiens
ccgccgcctgcttcctctgctcgcggttagcccgtcagtccctgctctgtgcgcgcctccatctgggccatggatgggacatgatccacatcgcggacac

SEQ ID NO: 123585 - DNA, 100 bp, Homo sapiens
actaggcatcattgtgaaagaattgactggtgacatgcagttgtccaaaagtgaaattttacgaactcaggtgttccactgtgtccactttgagtgtcca

SEQ ID NO: 123586 - DNA, 75 bp, Homo sapiens
tttattgcagagatcttcaaaccaggctaaaagagatgctaagagaatgcctgcaaaagaagtcaccattaatgt

SEQ ID NO: 123587 - DNA, 100 bp, Homo sapiens
cctgagtcactgcctgcgcagctccggccgcctggctccccatactagtcgccgtatttgattttcatcaagcagctgatggtatccaggaacaacagag

SEQ ID NO: 123588 - DNA, 99 bp, Homo sapiens
ccatggccagaaaacttttgggccgagagacacacaagattgcagtattttatgttgctgaaggacaagaagacaaacactccattctcaccaatacag

SEQ ID NO: 123589 - DNA, 50 bp, Homo sapiens
tggactttgggcgtcccattgccatggtcttaaacgaatatttccacaat

SEQ ID NO: 123590 - DNA, 59 bp, Homo sapiens
tgtacctccttcatggacatgctgaagctttcaaatctgtacctgttgatgagagaacc

SEQ ID NO: 123591 - DNA, 71 bp, Homo sapiens
ccactctggtctgtggcgggtgtgctgcatcgaaggtatgctccagaatcactgacagagagcaagttttc

SEQ ID NO: 123592 - DNA, 74 bp, Homo sapiens
gagcggggccttccacaccccctccgtgggtgtgtgatcctgggcgcagtgatcctgggcttcggggtgtggat

SEQ ID NO: 123593 - DNA, 96 bp, Homo sapiens
cggcgtagaatctgagctgcagctggatgctgacaaatatgagaatgatccagaattagaaaagatccgaagagagaggaactactcctggatgga

SEQ ID NO: 123594 - DNA, 98 bp, Homo sapiens
ggccagtctgcacccaagaggtggaagaggacgggctttaggctggaagcgccttagaggagccatttttccagagtgcgatgacatggatcctgcgg

SEQ ID NO: 123595 - DNA, 98 bp, Homo sapiens
agcagcagcctccgccaccccctccgcccagcagcagtatggcttccagtacccccttgccatggcagcaaagtgtcaagggggtgcaagtggaggag

SEQ ID NO: 123596 - DNA, 89 bp, Homo sapiens
gacatcactaacgccttcaggaggaacccacacatatgccccatggtgtggtcactgcaaacagttggctcccatttgggataaactgg

SEQ ID NO: 123597 - DNA, 83 bp, Homo sapiens
cgtggtggtcggatttcaccacaagaagggctgccagggtcatggaggacgctggcggcggcgaggagaccccggccccggag

SEQ ID NO: 123598 - DNA, 100 bp, Homo sapiens
ctatccatctctcgaagacttgaagggcatgaccattcggcccctggtagacctgttggctgtgaagaaaaagcaagagacgaagcgctccatcaacgaa

SEQ ID NO: 123599 - DNA, 100 bp, Homo sapiens
agtgaaggcaagagctgatttggcctctgtgctcccctccgcaaggggatcgttttctccagcagaacagtacacaagactctggactacaggaaagtga

SEQ ID NO: 123600 - DNA, 75 bp, Homo sapiens
gttctcaaagaggttcttttcagagcacagcatgaccttcctcttgatgttgctgctcatcttcttctacatttt

SEQ ID NO: 123601 - DNA, 83 bp, Homo sapiens
tgtcgcgttacgggcggtacggaggaggttttggctacgggcctccacctccaccgccagatcagtttgcccctccgggggtt

SEQ ID NO: 123602 - DNA, 75 bp, Homo sapiens
agaagcaagagatgcttcaaactgaaggcagccagcttgaattcggagtgatttaccactgcacagaggagcggc

SEQ ID NO: 123603 - DNA, 51 bp, Homo sapiens
agactgcagttctctatccttcacacagatagaagagcgagcagaattttt

SEQ ID NO: 123604 - DNA, 100 bp, Homo sapiens
cgagcggggggagtggggaggaggggggtcggccgccgcagccatggaggccaactggaccgcgttcctgttccagagagcagtcctacatggaaagtgt

SEQ ID NO: 123605 - DNA, 100 bp, Homo sapiens
gacctgaagaatgtcaaatccaaaatcggatcaacagacaacatcaaataccagcctaaaggggggcaggatgaagatttgataaagtggaaggcactgt

SEQ ID NO: 123606 - DNA, 75 bp, Homo sapiens
aaaggccagtgactaccaacgtttggaccagaaggtctcagtggcccttagcagcagctccattcgtgtggccat

SEQ ID NO: 123607 - DNA, 90 bp, Homo sapiens
gggcgacccagcccccgcccgcagcctggacgacatcgacctgtccgccctgcggtctgaagatgatgagaaactgaaaaagaggaagga

SEQ ID NO: 123608 - DNA, 98 bp, Homo sapiens
atccccccaccgtttccccctgttgcagggttttgtttatataactcaagttgtttggctaaattcttcagagtgcagtgaatagaagacacttctct

SEQ ID NO: 123609 - DNA, 75 bp, Homo sapiens
tagagtcgctggagcgggcggagctgtgcgagagcctcctcacttggagttgcatgctgagaatttgaaaaatga

SEQ ID NO: 123610 - DNA, 82 bp, Homo sapiens
ctagaggggattgcagaatctccaacaactttacagtgcccagcgcctcaagttccggctgaacctgtatgagttgaaggaa

SEQ ID NO: 123611 - DNA, 102 bp, Homo sapiens
aacgcagagacaaaagaaacgggccccgactggtgacttaagagattaaaattaatttggttgctgttggttctgaacaaataatgagttcttttatttgag

SEQ ID NO: 123612 - DNA, 75 bp, Homo sapiens
ataatttaatactaaagatgggcccagtggataagcggaagtgtgaacacagcaggtgtgagatgtcatcttgga

SEQ ID NO: 123613 - DNA, 101 bp, Homo sapiens
cggttgtaagcagtgaagccaagggaaacactactatgaagtatcctgtcatgaccaagggttatgcagggtcgggtggtctaccatgcaggcctctttgg

SEQ ID NO: 123614 - DNA, 80 bp, Homo sapiens
gatgtcctccagttgttttctgggaatggtttctctggaaacccccctggtaagtgtggaggaggcgggacactctgacc

SEQ ID NO: 123615 - DNA, 100 bp, Homo sapiens
ggcgagccctggtggaggaagagtttcctcactgcttggaggaagatgagaattctcagaggtccttatgctgccctttttgctgcagtcttgacatctt

SEQ ID NO: 123616 - DNA, 90 bp, Homo sapiens
aggaaatagtggcaggtgacagtctgcatgtgcagttttcaggaatgggtaccacagaccatgtcatcgtcctggcgtccacgaaccgag

SEQ ID NO: 123617 - DNA, 100 bp, Homo sapiens
atgaaaccagcattgtgtctggtggctatgggggctctggtgatggactcatccccacaggttttaagctctgcagcgtcactccctggctctgaactcc

SEQ ID NO: 123618 - DNA, 98 bp, Homo sapiens
tgggcatccctctgggccaggacgccgaggagctccagaacctgggtatcaacccagcaaacattggcttcagtaccctgactatggagtctgacaaa

SEQ ID NO: 123619 - DNA, 75 bp, Homo sapiens
ccgaaatagctgacacactaggggctgtggccaagcagggtgagtgagatcattggccgagacctgagtggcttc

SEQ ID NO: 123620 - DNA, 100 bp, Homo sapiens
aggccagcagctgcaggacctcaagacacctgggcagacactgcaaggccttcagtatcgtcttccagaaggctgtggagagggctgctcctgacgaaag

SEQ ID NO: 123621 - DNA, 82 bp, Homo sapiens
gaagacgctttacccgactctttgggccgttatctcacggaaatcctcattgacgattcaatttgttgaaggccaatttgtg

SEQ ID NO: 123622 - DNA, 78 bp, Homo sapiens
ggaaggcactcaaaagtggggggcaggaaaggaaaaactggtctacttcctggattgttctttctagtcgaagaattg

SEQ ID NO: 123623 - DNA, 75 bp, Homo sapiens
aggaactggaccagccagcagcctctaagagctcctagacgggaacttaggctgcggaactatgtcccggaggat

SEQ ID NO: 123624 - DNA, 100 bp, Homo sapiens
cggagcctgagcaaggagcgggtccgtcgcggagccggagggcgggaggaacatgacatcgcggagtgtaagaagaagcttgggaagctgccacctcagt

SEQ ID NO: 123625 - DNA, 74 bp, Homo sapiens
acaagatggacaccgcggaggaaggcaacatattgctgaacgttctgattccacccaatatgccatgtacgcga

SEQ ID NO: 123626 - DNA, 51 bp, Homo sapiens
acacagctgctgtagaagccaaacaagtggatcctccaggtcctattgaca

SEQ ID NO: 123627 - DNA, 75 bp, Homo sapiens
aggcgaagctggccgagcaggctgagcgatacgacgcacgaggtagaactaacattgaacttagagagaaattca

SEQ ID NO: 123628 - DNA, 100 bp, Homo sapiens
caagaagttgcagctgattaaggactatcgggagaaagtggagtccgagctgagatccatctgcaccacggtgctggaagcagacagtatgagcatgacc

SEQ ID NO: 123629 - DNA, 99 bp, Homo sapiens
tcgacagaagtttgagcgtttatcaaggaactaagttttaatggcaaacctacagcttacttaagatatccctccagagagagagcaaggcaattgtac

SEQ ID NO: 123630 - DNA, 75 bp, Homo sapiens
cgggaacagctcttgaggagtgagactgcaggagatgtgggccgtacctggagtagaacagaaaaattattatgt

SEQ ID NO: 123631 - DNA, 98 bp, Homo sapiens
aacaaaacattcatggagggggaagttggagatgcttgatgctgcaaagaacaagatgcgagtgaagatcagctatctaatgattgccctgacggtgg

SEQ ID NO: 123632 - DNA, 88 bp, Homo sapiens
ggtttcccaagcaaggttccttggaagaagatgtctgcagagagacggggtctgactgtgttacccaggctggtcttcaactcttggc

SEQ ID NO: 123633 - DNA, 100 bp, Homo sapiens
tcagaataaaggaaagacctcagagtgttctcactcgatcaagtcatccgccaaagaagcctgtccagtttggaactgttcctctcctgtgcacagaaac

SEQ ID NO: 123634 - DNA, 74 bp, Homo sapiens
gtgtgcaatgccccgggctgtggacaggctttcctcggagacgggtggcatggggagcagctagaacaatgcag

SEQ ID NO: 123635 - DNA, 101 bp, Homo sapiens
agctctgcagctcagccaatcagtgacatcattggacgagattgaggagctgcgggccgagatgctggagatgcgggacgtctatatggaggaggacgtgt

SEQ ID NO: 123636 - DNA, 100 bp, Homo sapiens
actcgctacgcgggtcttgcgagatatctggccgcctctgccgcagctggaggtagctttggatatgttaaatcctcatgttactttgcctgttttttac

SEQ ID NO: 123637 - DNA, 100 bp, Homo sapiens
atttttggcagatggtatgggaacagggaattgcaattatagcaatggtgacagcagaagagattcgttatttcacccaccatagtgtaaaatatttctg

SEQ ID NO: 123638 - DNA, 75 bp, Homo sapiens
ttccaggggctctgggagtggctgccagatatggccgcgtggaaagtgtcaaaattcttcccaagaggggatctg

SEQ ID NO: 123639 - DNA, 80 bp, Homo sapiens
ggtattatggtctgggtgatgatcatcatggtgattctggtgctgggctacgaggccatgtggaagtgttacatcacctt

SEQ ID NO: 123640 - DNA, 100 bp, Homo sapiens
ccatgttcttctccgcggcgctccgggcccgggcggctggcctcaccgcccactgggaatcccagtcagaagttccagcctgccactgttctctgatgcc

SEQ ID NO: 123641 - DNA, 80 bp, Homo sapiens
aaaagacttattgatctccatacaaatgttgccactgctgttttagaacatataaagagatcctgaaggagctagacgag

SEQ ID NO: 123642 - DNA, 82 bp, Homo sapiens
taaagaacaaagacttaaggaacagcttggcgctcaacccttcagtttggaaacctgcagaattatgattgccatgttggat

SEQ ID NO: 123643 - DNA, 100 bp, Homo sapiens
tggatctacagagcgaacgggagaaccctctgcttcctcagattcaactgggaaggcacacgaagtattatgcttagagatgctcactttgctcctggaa

SEQ ID NO: 123644 - DNA, 75 bp, Homo sapiens
ccctgacctggaacctctgggagggctgcagagaagctgacctggttacaactcatgaattgggacataattttg

SEQ ID NO: 123645 - DNA, 83 bp, Homo sapiens
cagctgagcacggaggggataggcacggacgcaacacttttggaacttagacgctaaattcagaaggagctggcggacatcac

SEQ ID NO: 123646 - DNA, 97 bp, Homo sapiens
cgccgccgcgcctgcgcagaaggccggggccggccagaagcgggcggcgcgggggagatggcaggtgctgtaaaggattatattaagatgatgcttc

SEQ ID NO: 123647 - DNA, 50 bp, Homo sapiens
aggcgtgtgtcactgcgcccagacgcaaaatcgaatgaagctaatggccg

SEQ ID NO: 123648 - DNA, 100 bp, Homo sapiens
gcgtgcactccgcacctcggggacattattgcgcgtggaacggctgcttttggaagactaatagggatgccaaaggaaaaatatgatcctccagatcctc

SEQ ID NO: 123649 - DNA, 82 bp, Homo sapiens
cgtttgccattttcttatggagaactgtccttgttgacgtgatgcctgggccacggcaggagctgctctgtgccttctggaa

SEQ ID NO: 123650 - DNA, 100 bp, Homo sapiens
agcagctgctcaatgctcggacacagccatctgtgagaaagacacactgcagtggaaggaaacacaaagagaatgtgaaagactattatcagaaatggat

SEQ ID NO: 123651 - DNA, 83 bp, Homo sapiens
ctccattggatttaaaagacagtcctcgtcagcactgactttcagctatggaatcgatagccgcaatggctgaaaatggtgat

SEQ ID NO: 123652 - DNA, 83 bp, Homo sapiens
ggggacggggaccagcagctgtcgccgccgctctcagaatattgaaggatgtttgttccaagatctctaaaaatcaagaggaa

SEQ ID NO: 123653 - DNA, 111 bp, Homo sapiens
tggatgctagagtgagtgtgcccacctgcgtaagggggcagagacaggtggccactaacacggacaccagccgaaatgccggaaatgcggtcctgtttgagacagtactca

SEQ ID NO: 123654 - DNA, 83 bp, Homo sapiens
tgaaattcagtttgatgacattggagatgatgatgaagatattgatgacgtgacttaagagattaaaattaatttggttgctg

SEQ ID NO: 123655 - DNA, 73 bp, Homo sapiens
tattattttattccaagaaagatcaggttctaaattgggttagggaacaacctgaaaaggaaccggaattgca

SEQ ID NO: 123656 - DNA, 75 bp, Homo sapiens
cggcgacggcatttaacaaggcggtgtggtttactccatgcagttgtcaggagactgcctctgtcaccgggtccc

SEQ ID NO: 123657 - DNA, 88 bp, Homo sapiens
acgcccagaataaagccaagctcatctctgagacccggaggaggttcgaagctgagtatgtgacagatcaggcctttgtgacactaac

SEQ ID NO: 123658 - DNA, 98 bp, Homo sapiens
aagactggtccacggagtgtatgaccacaaacagccatcaaggcaagataacccctgtgacagaaggctactgttgctgtaacaaagggcatacatac

SEQ ID NO: 123659 - DNA, 83 bp, Homo sapiens
gggaagccctagtggatgagaatcttcaagtgtccccgttggatgaaaaatctgacaaacagtatgctgaaaattatacaaga

SEQ ID NO: 123660 - DNA, 73 bp, Homo sapiens
ccagagatccaaagagcccttcgagcaccacgcgtggatgacatccactttctggtgcttcagaacctgatcc

SEQ ID NO: 123661 - DNA, 100 bp, Homo sapiens
tggatattgaaatggacagtggagatgaagcctaagaatatgatcagttgaatggcggtggggacgtagcaatgcttgaacttacaggacagaatttcac

SEQ ID NO: 123662 - DNA, 82 bp, Homo sapiens
gctcaagttgctactcgggacgctgcacctcccgcgccgcacggtggacgagatacagatcacttggattcagtcgagtttg

SEQ ID NO: 123663 - DNA, 75 bp, Homo sapiens
gcttcccgacgctgagggcagccccgtccagggaggtggtccaggccacgctggtggtcctggccttggccatgg

SEQ ID NO: 123664 - DNA, 100 bp, Homo sapiens
cagggaacctgttcagcctgacccaggagggggctcccttgtgccgcatcatagccaagagaggcggcatgggtttccggaagttctcccccttcctggc

SEQ ID NO: 123665 - DNA, 97 bp, Homo sapiens
caccctccaactttgcgacggaaatgtgtcatcgaaagccagccttgaaaagatcttttgaggtcgaggaggtcgagacacccaactccaccccacc

SEQ ID NO: 123666 - DNA, 100 bp, Homo sapiens
ccgagctgaggcggtcgcggccatgaagacgaagggaacgtcatcgtttggaaagcgtcgcaataagacgcacacgttgtgccgccgctgtggctctaag

SEQ ID NO: 123667 - DNA, 100 bp, Homo sapiens
aaaggagcagccctggtgtcacctatcagtaaaagccaaagaagcctaaagccccagacaatccatttcatggcattgtttccaagtgttttgagcctca

SEQ ID NO: 123668 - DNA, 95 bp, Homo sapiens
cccctgggacaagacttctccactgaattgctctccagaaacatgacaaggaggactttcctgcctcttggagatcagaggaggaaatggcagca

SEQ ID NO: 123669 - DNA, 82 bp, Homo sapiens
gcgcgcagggcctgcagcgggagctggacggcgagcgcgagcggcgcgagaaagttggtgaaaaccctgtgtccttggagaa

SEQ ID NO: 123670 - DNA, 98 bp, Homo sapiens
gggcccgggcatggtggtctggggcaacgcggaagtgacctacggcatgatgagctccaatgtgtactactacacccggatgatgtcacagctcttcc

SEQ ID NO: 123671 - DNA, 139 bp, Homo sapiens
cgagccgccaccgcaggtcgaggacggtcggactcccgcggcgggaggagcctgttcccctgagatttatccacctatcaatgtgctgccctcactatcacggttaatgaagtctgctattggagaagggatgaccagg

SEQ ID NO: 123672 - DNA, 83 bp, Homo sapiens
aacgccccggtggagaagctgagggaaattcaactactgaggaggttacggcacaaaaatgtcatccagctggtggatgtgtt

SEQ ID NO: 123673 - DNA, 97 bp, Homo sapiens
agcggggcggcggcggcggcggctgcggcccaatatagtttggtgccctggttgtcagatgttggaaagcagtaggacggaacatactcttcgtggt

SEQ ID NO: 123674 - DNA, 99 bp, Homo sapiens
aaggaacttgcagaaatcacattggaccctcctcccaactgtaggtggatttgccgctgcagtcaccacccctctagacgtggcaaagacaagaattac

SEQ ID NO: 123675 - DNA, 75 bp, Homo sapiens
gccatgcccgtgtgctgcaggagatagaggctcacatcgagggcatggaggatgggctgaggaagctgccctcga

SEQ ID NO: 123676 - DNA, 83 bp, Homo sapiens
gagcaaggtgcaagagtccacaaagggacctgatgaagcgaagatcaaggtggtgtaaattggtccaatgtaacttgccaggc

SEQ ID NO: 123677 - DNA, 82 bp, Homo sapiens
gtgccttttggctgtgcgaagcctccgcaggtacctgcaccagtcaggggccctgaccatggaggccctggaggacccttcc

SEQ ID NO: 123678 - DNA, 89 bp, Homo sapiens
gagatgcagagggaggaaatacagaagctgatgggccagatacatcagctcagatccgaattacagctgcccgtggagccccacctctg

SEQ ID NO: 123679 - DNA, 100 bp, Homo sapiens
cgcagtcagccggggacctcgtccgagcccacccgcctttggagatcagctggacatcatctccatggcggagacaaccatgatgccagaggagattgag

SEQ ID NO: 123680 - DNA, 98 bp, Homo sapiens
gctagtgctggaagagaatggactgaacaggagacccttctactcctggaggaccctgatgctcccataagacagaaaatgccccttgatgatctgga

SEQ ID NO: 123681 - DNA, 82 bp, Homo sapiens
atccgccgcccgtccacacccgccgccaggagcgggacggtatgcgggccatcctggggtcctacgacagcgagctgacccc

SEQ ID NO: 123682 - DNA, 100 bp, Homo sapiens
aggaggccttccagctgtttgaccgaacaggtcggcacagacgcaacccagtctcctcccacctccgagagtgcagtgtcctgaatggagaaccccagca

SEQ ID NO: 123683 - DNA, 100 bp, Homo sapiens
agatgtgacactgaagtgggccacccaacttccccacattcctgtagcagtaagagtgggctgtttgcagtgtgatgaatgcagactctgctaccatttt

SEQ ID NO: 123684 - DNA, 100 bp, Homo sapiens
gcgctgaggtgctgggacagccatggtttcagacggagatcatgaatcagacagataaaaatcaacaagaaatcccatcataccttaatgatgaaccacc

SEQ ID NO: 123685 - DNA, 96 bp, Homo sapiens
ttttcctgttatttctgtgcttccacttaaggttttgcaaggatttgaagcattcattaccatctggacttggtctctcagaaacccaaattacat

SEQ ID NO: 123686 - DNA, 100 bp, Homo sapiens
gtcccggggccgacccggcccgtagtgtggaagcagcttcagtactatactggcaattgctggagaagattttgcaattgttgcttctgatactcgattg

SEQ ID NO: 123687 - DNA, 98 bp, Homo sapiens
cacggaggataaagtcagccatgtgagcactgggggtggtgccagtttggagctcctggaagacatgcgtcgggatgtccaggaaatttttcgcatga

SEQ ID NO: 123688 - DNA, 83 bp, Homo sapiens
cagcggctacgcggtgcggtacttgaagcccgacgtgacccagacctggcgggttatcaacgaaacttctcagcatcacgatg

SEQ ID NO: 123689 - DNA, 100 bp, Homo sapiens
ctggagcaagaagaggacctgtgcagggcagagcaggaggccccccgagcttgcccagtttcgacaaagaaaagctcagtcggatgggcagagtccttcc

SEQ ID NO: 123690 - DNA, 82 bp, Homo sapiens
tccttcggcagtccacccaccgccgccgcctcccagagtcatcttagtgggatttggggaagcaacagggctgtgtggggta

SEQ ID NO: 123691 - DNA, 88 bp, Homo sapiens
ctatggtgacagactatggggcctttatcaaaatcccaggctgtcggaagcaagcattcctctgaatattgatttgctgaatagccca

SEQ ID NO: 123692 - DNA, 100 bp, Homo sapiens
cttcttgtcctcaagtgatcctcccaccttagcctcctaagtagctgggaccacaggtgcagcggaactgctgcctgacgctctgcaacttcagcatccc

SEQ ID NO: 123693 - DNA, 100 bp, Homo sapiens
ctcctgagtagctgggactgcaggcctttcccctggtttgatctgactgctgtgcaactcaaggaaactccgtttagccagcatctctcaagtagtcctg

SEQ ID NO: 123694 - DNA, 75 bp, Homo sapiens
cggggatgtctttggcccagagctggacaccctcctggactcgctgggcactgtccggggagccacgggcatctt

SEQ ID NO: 123695 - DNA, 100 bp, Homo sapiens
ctgaagtcatgtttgccatgaagcagtttgagcagaacaagttgaaatcatcgcagaaggataaagttcgtcagtttatgatcttcacacaatctagtga

SEQ ID NO: 123696 - DNA, 100 bp, Homo sapiens
tcacagcacagttcctgggaaggtggagccaccagcctctccttgattatagtgggaccagtctcattaggttgaatctacagcctatgttggtgttaac

SEQ ID NO: 123697 - DNA, 75 bp, Homo sapiens
gacgtgctgttcgaggatgtgtacgagctgtgcgaggtgatcggaaagtttggtttaagaataaaagggccagat

SEQ ID NO: 123698 - DNA, 100 bp, Homo sapiens
tcctccttcgccgccgcgcacaaccgcacgtgcagagaaaatgctgctgtgaagacccaattaaagctttcacataaatgaagctacagctatcatgatt

SEQ ID NO: 123699 - DNA, 83 bp, Homo sapiens
tcgcgaggttcgagtgttgcagagcctgcggggcaagatctgcttgggcactgtttaaaggaaagttccgagaaggcatcgac

SEQ ID NO: 123700 - DNA, 100 bp, Homo sapiens
ccaagttgggggctcagaggggagtcatcatgagcgatgttaccattgtgaaagaaggttgggttcagaagaggggagatttcttctatcttacaggaac

SEQ ID NO: 123701 - DNA, 100 bp, Homo sapiens
ggcacctgctggacgcccgggggccaagaaggttcttgggtgtctctggggagtccctgggccagaccttcctccagactccagcccacctcttcggagc

SEQ ID NO: 123702 - DNA, 51 bp, Homo sapiens
aaagaaatccaacttaccttgtcacaacacggaggtagtcacgtttcccgg

SEQ ID NO: 123703 - DNA, 75 bp, Homo sapiens
gacggtgacacgcttccctggattggacaatgcagatcttcgtgaagactctgactggtaagaccatcaccctcg

SEQ ID NO: 123704 - DNA, 100 bp, Homo sapiens
taccaagccgagggcaactttggaggccccctggaaggctttaggatccaggtcaaaatgcagatcttcgtgaaaacccttaccggcaagaccatcaccc

SEQ ID NO: 123705 - DNA, 76 bp, Homo sapiens
cggtcatccacctgctgcagatggggcaggtgtggagctcaatctgaaattgaagtgtctgtctctgcaaggaata

SEQ ID NO: 123706 - DNA, 80 bp, Homo sapiens
gatttcagaagaggaagcacataactttacagatggcttcagcctgcctgcattgaagatgagccctcgctgtgctaatc

SEQ ID NO: 123707 - DNA, 100 bp, Homo sapiens
ttgaatgccaagcagaaaattacctaaatgcactctttcgaaagaaagtacctggtgtgtaagaggaagctggagagtaagaaggaagccctgctgatcc

SEQ ID NO: 123708 - DNA, 101 bp, Homo sapiens
gcgccggcaggggctgccccgcgctcggtcccctggcggctccagccgcgggtcaccctccgtcaggcctcaggagtgcaagtagctgatgaagtatgtcg

SEQ ID NO: 123709 - DNA, 132 bp, Homo sapiens
ataaagccaaagatactacttcagcagttttgattcagcagactccagaggtgatcaaggtcagatgtaccaacagtaccagcaacaggccggctatggtgcacagcagccgcaggctccacctcagcagcc

SEQ ID NO: 123710 - DNA, 74 bp, Homo sapiens
ggaagccacctatagagagagaagaacaccggctcccattctggttaaagatgcccatccagggaggacttccc

SEQ ID NO: 123711 - DNA, 75 bp, Homo sapiens
cgcagttcttgtttgtggatcgctgtgatcgtcacttggatcaaaatacttgctggatggtggactcagagacca

SEQ ID NO: 123712 - DNA, 75 bp, Homo sapiens
acacctctctactatataacgactatacacagaatgggattttacatatgctggacagaaataagagaatcaagc

SEQ ID NO: 123713 - DNA, 100 bp, Homo sapiens
tctcccataggcactcagtcaagggcttctaccactgctgatgcaaaaccacaaagggacctacctgagccaccgtcctagccaagcgagcaaacctgca

SEQ ID NO: 123714 - DNA, 89 bp, Homo sapiens
gctccctgcgtttcgggtggggccgcgcaggcaaggacaaggccacagagtcggggtcttcacgagttgcatgctgagaatttgaaaaa

SEQ ID NO: 123715 - DNA, 98 bp, Homo sapiens
ttattgaaacattaaatgacagttcacataagaagttcttcgatgtatctaaacttggcaccaagtatggacaaagcaggacctcataaggaaatcta

SEQ ID NO: 123716 - DNA, 97 bp, Homo sapiens
cagcacttctgggacgcacagagaccgtgaagattccaagttcaggagaactcgaccgctgggacatttttctgatgatcattgctggcatgaagct

SEQ ID NO: 123717 - DNA, 50 bp, Homo sapiens
ttatcatgtggcagaagcactatggttttctttagaacgtcagacttggg

SEQ ID NO: 123718 - DNA, 122 bp, Homo sapiens
ggaagaccgcgcgcagggcctgcagcgggagctggacggcgagcgcgagcggcgcgagaaagggtcgggccccggctcagtggtcccaggcagctcgggtgtcggaacccccagacagttca

SEQ ID NO: 123719 - DNA, 74 bp, Homo sapiens
ccgagacgcactgggggccggatgggctcgtgcaatccgcttcagacaggatggtaacgaagccgtcggaggat

SEQ ID NO: 123720 - DNA, 100 bp, Homo sapiens
cagattgagccgagttgtcgccccgctgggagaagtgaccctcctgcgcctggaattacatgaatgacagtcttcgaaccaatgtgtttgttcgatttca

SEQ ID NO: 123721 - DNA, 74 bp, Homo sapiens
cagaaactagcaccagccccaaatttcgaactctaatgaatcattgattgaccagcactattttaccagttgga

SEQ ID NO: 123722 - DNA, 100 bp, Homo sapiens
ataccttttctatatggattacaatttgatcgctgggaattctccaccttaaagaagggtcatgatcagagttcgactcttgcccaacactctgttgaac

SEQ ID NO: 123723 - DNA, 144 bp, Homo sapiens
ccaagttgggggctcagaggggagtcatcatgagcgatgttaccattgtgaaagaaggttgggttcagaagaggggtgctggagaatctggtaaaagcaccattgtgaagcagatgaggatcctgcatgttaatgggtttaatg

SEQ ID NO: 123724 - DNA, 96 bp, Homo sapiens
aatcccctgctgttaagccttcgatttgaagggagaagttatagcactggataaaatcttcaacaaagtagaaaaaatcaaacagaatgccttatt

SEQ ID NO: 123725 - DNA, 74 bp, Homo sapiens
gttgctcctattgcaacaacaaactcagacaaaatgctaagaagtttggaatcaggttccaatttcgccccttt

SEQ ID NO: 123726 - DNA, 99 bp, Homo sapiens
atggagtcttccagttcatctaactcttatttctccgttggcccaaccagtcccagcgctgtcgtgctcctctactcgcaatggcaccagcatgatatc

SEQ ID NO: 123727 - DNA, 99 bp, Homo sapiens
ctggggccttaaagccccttcgtctccccagcacccactctctgggggcaggtgggcccggtgacagtaagactttgaccccgacgcaggcttcagtga

SEQ ID NO: 123728 - DNA, 99 bp, Homo sapiens
cgcactactggcccctgatccggttcttggtgcccctgggcatcaccaacatagccatcgacttcggggagcagaaccgagattaagcgtagctcctga

SEQ ID NO: 123729 - DNA, 50 bp, Homo sapiens
gcccgtcaagctgcacctgacaggcgaaggaggtggaggagaccatcgag

SEQ ID NO: 123730 - DNA, 95 bp, Homo sapiens
gggacagtggcggatgtgcactgctacaggactctactatggaggtcactctgtgagactgctgggtcagaaaaaggataatggaaggcggcttg

SEQ ID NO: 123731 - DNA, 100 bp, Homo sapiens
tgaggctctgcggctggtccaggccttccagtacacagacgagcatggggaagctgctcctgctaaggccaagccggctgaagctcctgctgctgcagcc

SEQ ID NO: 123732 - DNA, 82 bp, Homo sapiens
gggtgtccaagttccggcacaccgaggctcggccgccccgccgcgaggttctgcggggagtgtctccagccctgcctgcagg

SEQ ID NO: 123733 - DNA, 140 bp, Homo sapiens
gagagaccccgagtcccccggagtccgactcgctacgcgggtcttgcgagatatctggccgcctctgccgcagctggagaaatggtggagtcaatgaagaaagtagcagggatggatgtggagctgacagttgaagaaag

SEQ ID NO: 123734 - DNA, 78 bp, Homo sapiens
taacatcgcagtgctgctcgcgggtctggctagtcaggcgaagtttgcagcattcccatggtttggcatggacatcgg

SEQ ID NO: 123735 - DNA, 100 bp, Homo sapiens
ccagcatttcatccctcgtcgaaaggattggattggcatctttagagatggtcgtttgaagccaggagatcaacttgtctcagtcaacaaggaatctatg

SEQ ID NO: 123736 - DNA, 75 bp, Homo sapiens
acggggagggatttttttctattttccctacgaaaaacagatctttttaagagatgacggatcctttctgcgttg

SEQ ID NO: 123737 - DNA, 100 bp, Homo sapiens
atgccttagaagaaacaattcttcgacatactctccagcttcaagttttctccaatgaccattgacggaatgaccagtttggctggaattaatatccctg

SEQ ID NO: 123738 - DNA, 75 bp, Homo sapiens
ttcgaaccatggaccaggccctcaagtccctgatggcctcagaggaggaggcctcccagtagcattggatgcagg

SEQ ID NO: 123739 - DNA, 100 bp, Homo sapiens
acagcgccggtcaacatcgcggtcatcaagtactacgcaaacatgcagatctttgtgaagaccctcactggcaaaaccatcacccttgaggtcgagccca

SEQ ID NO: 123740 - DNA, 83 bp, Homo sapiens
ccgcccgaccccgtcccgaccctggccgccccgagcggagcctggagatgtgaagttcatttccaatccgccctccatggtgg

SEQ ID NO: 123741 - DNA, 100 bp, Homo sapiens
gtcctaccatgtcagccttcccagtagctgggaccacagcgggccaatccgagcctacatccttgcccacaaggatgccatccagctctggaggacgctc

SEQ ID NO: 123742 - DNA, 75 bp, Homo sapiens
gccttgatacccattaccactgcctcctttattgcagcaggaatttgccaaatttgtatcctactgtggggcttc

SEQ ID NO: 123743 - DNA, 98 bp, Homo sapiens
aaacgcctgtgttccaccgttcaccatcgaggtgaagcaatctgcacatcgtgctgccacacgaggcttcattcgttatggctggcgctggggttgga

SEQ ID NO: 123744 - DNA, 82 bp, Homo sapiens
ggaacccgagctggagctgaagcgcaggctgcggggcgcggagtcgggagatgcctgaggaaacccagacccaagaccaacc

SEQ ID NO: 123745 - DNA, 75 bp, Homo sapiens
cacaccagtggggcagtgcctcgaggcattcgacttacagcagtgtgcggccagccagcagaggggtgactcaac

SEQ ID NO: 123746 - DNA, 89 bp, Homo sapiens
tttttcatgacctttctcatctgactcgtgatctgcccatcttgttactccctagcagtgtggtaaggagttcatgatcaagtgttgcc

SEQ ID NO: 123747 - DNA, 75 bp, Homo sapiens
cgctgccagctgacccccaatgacagcagtcctgcgttaactgcggccgggaggctatgagcgagtgcaccggct

SEQ ID NO: 123748 - DNA, 100 bp, Homo sapiens
ggacgggccaacgccgtggccagctccactgagagaaccccaggtctggagcccggcactgtggtcataacagagcaggcagtggatacctgcttcaagg

SEQ ID NO: 123749 - DNA, 74 bp, Homo sapiens
tatcatccagaattgcagaaagacatgcttcattgtaatatgtgcaaaaggaacatgtttgacaagctgaaccg

SEQ ID NO: 123750 - DNA, 100 bp, Homo sapiens
cctgcgtcccgccaccggccgcttctgtcctcgatcgaaaagtatcctccttgcacacctcccgagttcagaggcagatggtggtctccgttcacgactt

SEQ ID NO: 123751 - DNA, 75 bp, Homo sapiens
tgggcagcctgctggaccctgccaagaagtcgcccatcgcagcagctcggttgcatgagcccgagaagaatgcca

SEQ ID NO: 123752 - DNA, 80 bp, Homo sapiens
tgaaaattctttgaagaatgtgagagctacaccttctaccatgaggcttccaaggctggaatgcaatggcgcaatctcag

SEQ ID NO: 123753 - DNA, 98 bp, Homo sapiens
cggcggcggcggcagcgacagcagcagcagcagccagtattcgggaaaggcagacagattcctcgaggtctgaacaagaaccactgacgcagaacgtg

SEQ ID NO: 123754 - DNA, 100 bp, Homo sapiens
tggatctgccgccgggttgctgtgcgactattctccgggagccgtccgtgtcaccgccggaacctggcgcagtgccaccatggcaactgcaccatacaac

SEQ ID NO: 123755 - DNA, 100 bp, Homo sapiens
ttccacagccaagtgcgggagtccacgaaagaagattggcccatgcacaagctggaatgttctcccatggttgtttttggggaaaactggaatccctcgg

SEQ ID NO: 123756 - DNA, 83 bp, Homo sapiens
caaagagcttgctccctacgatgagaactggttctacacgcgagctgtgtctccagaacgctatagctatggcacctccagct

SEQ ID NO: 123757 - DNA, 106 bp, Homo sapiens
tcattttcacctcgcgtcgcgcccgggaggaaggaacgaggcaaggagctaaagcagcgtgcgttcagccctggggctgaccaactgactgaagagcagattgcag

SEQ ID NO: 123758 - DNA, 75 bp, Homo sapiens
caaaggctattggatcagctcagcaggtgggctcgggatgagtttgaaggcctcttcaagcagccagcagaaaat

SEQ ID NO: 123759 - DNA, 83 bp, Homo sapiens
ttgggagagacgctctgaactgactgccccgcatcaccggagcgtcccagctgcgaggagagttttccgtctgatgaaggttg

SEQ ID NO: 123760 - DNA, 89 bp, Homo sapiens
acaagtgaatgcagtctttccagaatcaaaagcagacctcattttgattgtagtagcagtggagaaaggtcccccttctgggaaagacc

SEQ ID NO: 123761 - DNA, 100 bp, Homo sapiens
ccaagtggatgaactgaatatctggatgaggacaagatctgtggggagagactgtaagcttaatcttctccatacagagctggctaaacagttggcagac

SEQ ID NO: 123762 - DNA, 98 bp, Homo sapiens
ataccgcagaccattgtaattcatggccatggatcatctgcagtcattcattgcagattgtgatcgtagaacagaagtggccaagaaaagattagcag

SEQ ID NO: 123763 - DNA, 80 bp, Homo sapiens
ctctgccagcttcacacttggccccggcaaactccccatccagctccaggttttgggatttgagattgacgcggtgaact

SEQ ID NO: 123764 - DNA, 85 bp, Homo sapiens
tatctgtcttcggtggactccttcggcagtccacccaccgccgccgcctcccagggaacccaccaagaccaacctggtcacattc

SEQ ID NO: 123765 - DNA, 100 bp, Homo sapiens
cccgcagccgccacctacccagtgaccatgatagtactatactggcaattgctggagaagattttgcaattgttgcttctgatactcgattgagtgaagg

SEQ ID NO: 123766 - DNA, 100 bp, Homo sapiens
ggagccagagacttcaattgatgaattcctaggacttccggcactgcaacatggtgctggagaacgtgaaggagatgtggactgaggtacccaagagtgg

SEQ ID NO: 123767 - DNA, 100 bp, Homo sapiens
ccgggccagcggctgcggtcgggccaaggttccgcgccgggcgtggacggtgtggggcggtcccggccccgcaggctggtccagggaccctcatcatggc

SEQ ID NO: 123768 - DNA, 50 bp, Homo sapiens
gagagcagctgctcatcaaagcctcgaattttggagagtaaaaggctgaa

SEQ ID NO: 123769 - DNA, 75 bp, Homo sapiens
ggcgctgagaggggctgcggccggagcgggcggctgagacaaaggcgacgccagagactgctgctactttgaaac

SEQ ID NO: 123770 - DNA, 80 bp, Homo sapiens
tgaagagtggctggttgctgcgacagagtatcgagaaccttccctgcgaacttcagaggaacttccagctgatgcgagag

SEQ ID NO: 123771 - DNA, 74 bp, Homo sapiens
gaaggcagatcgatggccgagtgctcgagcattgcagtgtcgagatggctatgaaccctgtgtaaatgaaggaa

SEQ ID NO: 123772 - DNA, 100 bp, Homo sapiens
ttcggttgtcgcccgttggccgcgcggcgccgcgctcggcggccgccattgcaggtcttgggcgtctttggtactggcttttttaggggtctgcctgggg

SEQ ID NO: 123773 - DNA, 75 bp, Homo sapiens
gctgtaccagtacctgctgtgcctggggatgcccccggccctgtgcattgtgtctgcacatcaccgaacgatgag

SEQ ID NO: 123774 - DNA, 90 bp, Homo sapiens
aagattgaaaccagcaggaaggaagatgtctctcagaaacaaaggttatgatgtgattgctcaagcccaatctgggactgggaaaacggc

SEQ ID NO: 123775 - DNA, 100 bp, Homo sapiens
ggaaaaggctaatggcacaactgtccacgtaggcattcaccccagcaaggatcctggtggacctgctgaagctgaacgtggcccccctcgccgtcttcca

SEQ ID NO: 123776 - DNA, 82 bp, Homo sapiens
aaaccttagtttttgaacaaagaaaatcagatggagttcacacgatatgacatgtctacatttattaggcggtatagtagat

SEQ ID NO: 123777 - DNA, 82 bp, Homo sapiens
cccagagccacttctcaccgagatgattcatgaatcgtgatgagaggagatggattgaaaagcagaacagagcaacaagagc

SEQ ID NO: 123778 - DNA, 50 bp, Homo sapiens
agaagatcatcgagcatttcaaacggttggattcagatgccgaggacaca

SEQ ID NO: 123779 - DNA, 100 bp, Homo sapiens
ggaaagggggccttgttgagtccgccaggctgtgggtgagcgtggaggatgctcagatgcacaccgtcaccatctggctcacagtgcgccctgatatgac

SEQ ID NO: 123780 - DNA, 100 bp, Homo sapiens
aaagaaggcaaggagagaatgtatgaagaacagtcacaggacaggagaataaacttaacacccttaaagacggacactccaccaagttctgtaccaacca

SEQ ID NO: 123781 - DNA, 99 bp, Homo sapiens
aaccatctggggaaaaggcaaaaatcccatctaccgcaactctcagttcgagagtaaagcaaattgtggctactaatttgccccctgaagatcaagatg

SEQ ID NO: 123782 - DNA, 90 bp, Homo sapiens
catggacctgcctttctcctcctccccaagtcgcagtgccactgcaagcccacaggtatgatctcgtgaaaccttgagagaaactgaatg

SEQ ID NO: 123783 - DNA, 98 bp, Homo sapiens
ttatggtgcatacttggctcagatggatggtgacagttctacaacagatgcttctcaactaggaatctctgcagactatattggaggaagtcattatg

SEQ ID NO: 123784 - DNA, 90 bp, Homo sapiens
gtaaattcactccatcgaatcatcaccaatcactgactcatatattgaagtccttgatggttcccgtgtccaccctgagacttatgagtg

SEQ ID NO: 123785 - DNA, 83 bp, Homo sapiens
cacctactgacattgaagaagggatgagagtggggagtcagtggatcggtggggaaaatgctgcttaccctgggccctgggct

SEQ ID NO: 123786 - DNA, 113 bp, Homo sapiens
cccagattatgcttttggaaaatgagaacaaaaatttaaagaaagatttgaagcactacaaacaagcagctgaagagagatcatcattgcctgaatttagctttgtgactgca

SEQ ID NO: 123787 - DNA, 97 bp, Homo sapiens
ggagtctatgtctgtgtagcaaggaattaccttggagaggctgtgagccacaatgcatcgctggaagtagccatatgccgagattttgctgtcctgg

SEQ ID NO: 123788 - DNA, 109 bp, Homo sapiens
gcaagatggcactcaacatgaacaactacaaaggctatgaaaagaagccctattgtaatgcggtttgtgtttagtgaatcagagggatctgcattagaacagtttgaag

SEQ ID NO: 123789 - DNA, 82 bp, Homo sapiens
cgcctcttggtttgcgtcctgcactgaaaggaaatgacggattttgtggaagttaaacgagctgagcctcgggacagcaaga

SEQ ID NO: 123790 - DNA, 90 bp, Homo sapiens
gccggttctgcaccatcttcaggtcctactccaggggcgctcaggactgaagcttcaagatggctgaccaggaccctgcgggcatcagcc

SEQ ID NO: 123791 - DNA, 82 bp, Homo sapiens
gccttcgtgcgcttcgaggacccccgctgtccctttccccccaacacatcgcttgacatctgaagaagtatttgatttggat

SEQ ID NO: 123792 - DNA, 96 bp, Homo sapiens
aggaagtcattcgcttccagaagaatcatggcacaagcccccctccatgcgcctgaaggcccgacccagcagccctggcttttccgtgcttacctg

SEQ ID NO: 123793 - DNA, 82 bp, Homo sapiens
cggcggccgcggcctccgcaagccgattgtcactgctgttccaagggcacacgcagagggatttggaattcctggagagttg

SEQ ID NO: 123794 - DNA, 100 bp, Homo sapiens
aatagagtacattgaagctcgggtcctgcattcagctcttttcacatttgatttgattgaaagtgttctagctcgagtggaagaactcattgaaataaaa

SEQ ID NO: 123795 - DNA, 102 bp, Homo sapiens
gtgtacgtgcttggaaagacgtttcttctcttggcaagagagctctgcatcaatgcgccggccataggtggtacagaagttggtcctgccctttgggcgact

SEQ ID NO: 123796 - DNA, 82 bp, Homo sapiens
gcggatgtcggcgaagagttcaaccagagctcctaccctatctgggaggacttcaactccaaggccacgaagctgcattccc

SEQ ID NO: 123797 - DNA, 75 bp, Homo sapiens
cctttctggacacagaagtatttgtgacaggtatttctttaaatccagaacaatggagccagctgaaggaacaga

SEQ ID NO: 123798 - DNA, 109 bp, Homo sapiens
aatggacaccttctaagagtttggcgagtcagtgactgaagcgcccgtccattccaaggagtgcctgtgaagaaaacggggtattgccctgaggcttatattctgcctc

SEQ ID NO: 123799 - DNA, 100 bp, Homo sapiens
gcctcggccacccagccgtctcctgtgaaggccatatttgataaacaggaacttgagggattgtgggactttaccaaatcggtttgtaataacacctaga

SEQ ID NO: 123800 - DNA, 100 bp, Homo sapiens
tggggatgcaaggtccaaatctcagcaacccctgtgcttctccccaggtccagccaatgcattcagaagccaaaatggtccagtccaggtgcagcagcaa

SEQ ID NO: 123801 - DNA, 97 bp, Homo sapiens
atatttgcagccagtactctatatgaacaatccgtctggatcacggatgtaggaagtgcaactgctccaaggatagatgatgaaatcccccctccac

SEQ ID NO: 123802 - DNA, 100 bp, Homo sapiens
ggcgtccctgagagaaattacggaagatccatccaaaagctatgtgaaattacgagactttgtgcttgtgaagctttgtcaagatttgccctgtttttcc

SEQ ID NO: 123803 - DNA, 100 bp, Homo sapiens
atctccatcacccaccaacaacaccacaataatccacagccaagcacttaaatatagatccggtggtatggatgagaaaacaattgctttacttgttgct

SEQ ID NO: 123804 - DNA, 74 bp, Homo sapiens
cctcctcgccagcagccgtccggagccagccaacgagcgcttctacagatgacagtgcagctgagaagaaaggg

SEQ ID NO: 123805 - DNA, 90 bp, Homo sapiens
tgtgaggcccgccgctcgcatgagcacctcatacggctgcttctggagaagttcctgtaaccagcacagtgcctgattcatgaattaaag

SEQ ID NO: 123806 - DNA, 82 bp, Homo sapiens
aagaagatcttcgagttcaaagagaccctcggaacaattaaacaaccaccatgtcgagcaaaaaggcaaagaccaagaccac

SEQ ID NO: 123807 - DNA, 100 bp, Homo sapiens
gggagcttcaggctcgctccgtgcggcagttccgccgagcatcctggggcctccaagcctccgataagctcctccagtatgacatcacgcatcttgctac

SEQ ID NO: 123808 - DNA, 96 bp, Homo sapiens
caaaccaggagattgcgagggagcgatgcggtgcagcgcgggccgcctgggcagaatgtcacgatggacgagggcggcacgcccctgctccccgac

SEQ ID NO: 123809 - DNA, 100 bp, Homo sapiens
gctccttctacctgcagtcaaagcctgattacatcaaccccagagccgtgcagctgggctcccttctcgtccgcggcctcaccactctggttttagtcaa

SEQ ID NO: 123810 - DNA, 101 bp, Homo sapiens
cgccgccgaagaagcatcgttaaagtctctcttcaccctgccgtcatgtctaagtcagaggcctgccagctgcccctgttttcttacatcgtggagcgcct

SEQ ID NO: 123811 - DNA, 98 bp, Homo sapiens
gttttaagaaagtggacaaagagaggagtcaggtattgttgcagcatctggcagtgagactgaggatgaggacagcatggacattcccttggaccttt

SEQ ID NO: 123812 - DNA, 100 bp, Homo sapiens
ccgggggcgtctttcagagcattacgatgagcagcaccagcagtaagagggctccgaccacggcaacccagaggctgaagcaggactaccttcgcattaa

SEQ ID NO: 123813 - DNA, 90 bp, Homo sapiens
ggagtggagcttggtttcgggatctcggtgctgcagacggcgagacctcctgcacagattgacttgatgcaaaacatcacaaaggctcca

SEQ ID NO: 123814 - DNA, 83 bp, Homo sapiens
gaaaacaacttcgagggcagacctgacatttaccccggtaactgctgggcatttaaaggctcccaggggtacctggtggtgag

SEQ ID NO: 123815 - DNA, 87 bp, Homo sapiens
ttgcctttgggactctgaaggctgaagctgtctgaaaacgtggtgaaccgcatgaaggagcccagctctccaccccctgctcccaca

SEQ ID NO: 123816 - DNA, 100 bp, Homo sapiens
caggatccaagtttaaaaagaaatggtgtaaaagttcctggtgaatatcgaagaaaggagaacggtgtctctcaggcagctgcagagcttcaacagtact

SEQ ID NO: 123817 - DNA, 75 bp, Homo sapiens
ggtcccctcggctggacagctcgccctgttcgctctgggcctgacggagatggcggtcttcagttgtgaggccca

SEQ ID NO: 123818 - DNA, 100 bp, Homo sapiens
ggctagtacgcgaattggagaaaaagttcagtgggaagcatgtcgtctttatcgctcagattcgacttccacctgaagtaaatcggatattgtatataag

SEQ ID NO: 123819 - DNA, 75 bp, Homo sapiens
gcgggagaggcgagctcgcgatgagtggtctcggcaggctcttcgggaaggttggctctgaaaacccaccattaa

SEQ ID NO: 123820 - DNA, 75 bp, Homo sapiens
ccgcagtgattgaagctttgataaatgaaatcttcctaagtataggtgctggagaatctggtaaaagcaccattg

SEQ ID NO: 123821 - DNA, 73 bp, Homo sapiens
cgagcggaactggagaaagctgaggaaatttggagagcttgtaatgaccaaagaatcaaaggccttgatggga

SEQ ID NO: 123822 - DNA, 74 bp, Homo sapiens
tattgaaatggacagtggagatgaagcctaagaatatgatcaggcccgccagctcatcctgcagtatggcttga

SEQ ID NO: 123823 - DNA, 115 bp, Homo sapiens
agccgttcttggtttcaggcccgcactcgacagccaccgccgcccccaacgtccatgcctgaattttaccaaatgttgcaagaactctggagttcttatggtagtaaaatgccgg

SEQ ID NO: 123824 - DNA, 100 bp, Homo sapiens
cgtggagtgacggtcacaccgcggcggtgactgtggggatcatgttgttataatgaacacaagacacattgcattttctggaaacaaatgggaacaaaaa

SEQ ID NO: 123825 - DNA, 100 bp, Homo sapiens
gcagagccgtgcatggggctgctccccaggacctgagcaggaacctggagttttcaggtgccgacgccaccgccgagcccatgatcctggaacagtacgt

SEQ ID NO: 123826 - DNA, 83 bp, Homo sapiens
tgagcccagtatgggaaagatctaccttctggaagctactactacgtggtgcttggaaagagtgctgatggcagagattggtg

SEQ ID NO: 123827 - DNA, 80 bp, Homo sapiens
gccatggaagatgcagccgcgccaggggacgaccgaggcggcacacaggacttccttgtgaaacctcctagtagaaaaag

SEQ ID NO: 123828 - DNA, 51 bp, Homo sapiens
gagaattataggaacctggcctccctggatatctcttccaaatgcatgatg

SEQ ID NO: 123829 - DNA, 97 bp, Homo sapiens
gataggcctgtgacgaaggtgctaccatcgtgagagtaaggtggaatgaatcttacttgttgaatatcttctggttactagttggattcatttgtga

SEQ ID NO: 123830 - DNA, 101 bp, Homo sapiens
ctcaggcagccccggccgggccgcccgggtccccggcagcggggtaggatggcgctaaagcggatccagaaggaagcatcggagagcaagagacaggtcca

SEQ ID NO: 123831 - DNA, 75 bp, Homo sapiens
cgacactgccagctggaaccagaccatacctggaatcatttttctgataatgaggcagagcgggttaaaatgatg

SEQ ID NO: 123832 - DNA, 98 bp, Homo sapiens
cctgggttgcttctggcggccctggtgttgctgctgtcctccttctccgttccaaagaactactggttcagattttagctcttcccaagttgtgaaaa

SEQ ID NO: 123833 - DNA, 50 bp, Homo sapiens
ttctgtcttgtgatccattgcctgatacactctgtgcagttttagagaga

SEQ ID NO: 123834 - DNA, 80 bp, Homo sapiens
gaccggtgctggcgagacctcacctgcatggacttccactatgaggacttgaaagaggagattgatattcgactctccag

SEQ ID NO: 123835 - DNA, 74 bp, Homo sapiens
tacaaccttcgatctcctgacgagttcttgtctgtcgcccaggctagagtgcagtggcaccatcagaggctcac

SEQ ID NO: 123836 - DNA, 88 bp, Homo sapiens
ctcggccgatgaagtgcagaggtttttttctgacgctgctgtcttgacctcacccccagcccctgctcccccggtgacccctagcaaa

SEQ ID NO: 123837 - DNA, 101 bp, Homo sapiens
tagagttcagcttccaaagagatacagggcagaggaaaatgcaagaagactgatggagcaggcttgcaatattaaactctgcaagtgagtctggttctcaa

SEQ ID NO: 123838 - DNA, 75 bp, Homo sapiens
tgggacccaccgctgccctcagctccgagtccagggcgaggaagagcctaggctggatgtcttgatcaataacgc

SEQ ID NO: 123839 - DNA, 100 bp, Homo sapiens
atatactttggttacctatgtacctgttaccactttcaaaagcactgcctccttacctgtgaggaatgcaaaataaagcatggattaagtgagaagggag

SEQ ID NO: 123840 - DNA, 141 bp, Homo sapiens
gtccgtggccttcgcgtctgcccggccaagaggcaaaggggaggttacgcagcaaaccatccagaaggttggtgttcgaggaagagacattgttgttcttggtgtggagaagaagtcagtggccaaactgcaggatgaaag

SEQ ID NO: 123841 - DNA, 100 bp, Homo sapiens
tttgtgaaactgctttttgaaacagagaaaatagatatagtactacattttgccgcacaaacacatgtaggagagaagcctcatcagtgccaagtctgtg

SEQ ID NO: 123842 - DNA, 101 bp, Homo sapiens
ctcgccgcccagctcacgccgcgcccgcgctcccaggctccggagccatggagaagctaagcgggcatcagtttgagaactactccttcaagatttcctac

SEQ ID NO: 123843 - DNA, 74 bp, Homo sapiens
ggaagatcttcaaatgggcattcacaaggttactcactataaacaatatccacccaacacaagcaaagtttatt

SEQ ID NO: 123844 - DNA, 80 bp, Homo sapiens
cagaccctggagcctcagttggaagcagccgatccagcctgcggagcctgtggggcagattcttgtagacactgtttggg

SEQ ID NO: 123845 - DNA, 74 bp, Homo sapiens
aagaagcttgggctcacttccacaaatggaggagagagcgatggcttttttcacccagaaggccagccccagcg

SEQ ID NO: 123846 - DNA, 75 bp, Homo sapiens
ttccaaggcagcttctgatgatggcagcttaaagagttccaggtgaagatcatgacggagaaggaactcctggcc

SEQ ID NO: 123847 - DNA, 100 bp, Homo sapiens
ccgactgccatcgcccggcccggccgcgcccgcggaaccagaccaggtggaatgaggtaccatctactgtctccagaggaccgagaagaacttgtagatg

SEQ ID NO: 123848 - DNA, 83 bp, Homo sapiens
tcttgattttaaggacaaaagtgctgaggatgctaaagctatttatgagtgatgcagctaattgccccagtttggaaaacatg

SEQ ID NO: 123849 - DNA, 99 bp, Homo sapiens
agagactccaatcgacaagaagctggaaaagaatgatgttgtccttaaacaacctacagaatatcatctataacccgtgagaaggcaaccaaagtgcag

SEQ ID NO: 123850 - DNA, 76 bp, Homo sapiens
cccaagtacatatcctgtaagaccagaattgcaaggccaggctcttcgatacttggcagaatgccgtgcaaacaga

SEQ ID NO: 123851 - DNA, 90 bp, Homo sapiens
ttgagagcacagcatgaagaaaatattaaaaagttagcagaccagtttttagaggaacaaaaggttcctaaaagtaaagctttagaggcc

SEQ ID NO: 123852 - DNA, 83 bp, Homo sapiens
caaggagctcattaaggacggctctctgctcattggggcgttgaggaaaaacctcggatcaattctcagctggtggcacaaca

SEQ ID NO: 123853 - DNA, 100 bp, Homo sapiens
tattgcccaggcagtgctctgggcaggaatgaaggcaacatctttcctaaccctgaagcgacttttgtcaaggaaataaaccagcctggacaccaagtct

SEQ ID NO: 123854 - DNA, 96 bp, Homo sapiens
cagcttcaagcttaggaccacccaccatgcctatccagatgagacgtgcaggtaccatcaggaagcagcgggataagctgataaaggaaggaaagt

SEQ ID NO: 123855 - DNA, 95 bp, Homo sapiens
gaccaccgtgaacggacagtcccccccagttgttttttgaggacagcattgatgatgccaagtactgtgggcggctctatggcttaggcacagga

SEQ ID NO: 123856 - DNA, 100 bp, Homo sapiens
aacacttccctcaagtttttccttaataagccgatgcttgccgatgttgtcttcgaaattcaagtttcagacccaaagtttacgcctatcagacctacac

SEQ ID NO: 123857 - DNA, 74 bp, Homo sapiens
catggatttagatacacaggatatattcagcacgtcagctaactgttcagatgatgcaaaatcctcagattctt

SEQ ID NO: 123858 - DNA, 51 bp, Homo sapiens
cagtctttgctacgtacagcaaaagtccagttacaacacagggatcacaac

SEQ ID NO: 123859 - DNA, 111 bp, Homo sapiens
ccggcccccgagagccgccgacatgaagaaagacgtgcggatcctgctggtgggagaacctgaagaagcatctgtagggaatccagaaggagcgttcatgaagatgttaca

SEQ ID NO: 123860 - DNA, 75 bp, Homo sapiens
ctgaagaagcaaacggattttgatctcttcaagaaaatgaggaggaggagattgggaacctagagcttgcctggg

SEQ ID NO: 123861 - DNA, 82 bp, Homo sapiens
cgactcttctgacctccgcgcgacgtacccgccgccgccgttggctggagtgatgtcttggcattgcccattttcaagcagg

SEQ ID NO: 123862 - DNA, 75 bp, Homo sapiens
gtcggaagaagcagacccagaaggctgacaagctccatgagaaatatggacagacttcttagacttggaggaggt

SEQ ID NO: 123863 - DNA, 75 bp, Homo sapiens
gagcactgcaagcttgagcaccagcagaatgattacggacctgaagccaaagaacaagatgcgctagtggacaga

SEQ ID NO: 123864 - DNA, 83 bp, Homo sapiens
ccacagttcctaccttatgagctcggttttcttatgcttataagagtggaacagaaaggaaggcagaggaagccacggccact

SEQ ID NO: 123865 - DNA, 97 bp, Homo sapiens
tgaaaaagtatcgtcgagaagcctatcatcgattgctggactcgctgaagagagactacgcaggaaagccccagccacccatcaaatcagagagaag

SEQ ID NO: 123866 - DNA, 90 bp, Homo sapiens
ctgtgatgtgaaacttcagtatgcagtccctatcatcagccagcagggggaggatcctcctttgtatttggaactggaccctcagcacca

SEQ ID NO: 123867 - DNA, 75 bp, Homo sapiens
gacttcatgctcggcgccaaagatgggaaaactgacaaccatgcctgcaggtctgatatatgcatctgtaagtgt

SEQ ID NO: 123868 - DNA, 92 bp, Homo sapiens
gagctgggcgcggattcgccgaggcaccgaggcactcagaggaggtgctcttacagcctgttccaagtgtggcttaatccgtctccaccacc

SEQ ID NO: 123869 - DNA, 50 bp, Homo sapiens
agtcctctcagcccacttgcacgtacaagccagctgccatgttgtgagca

SEQ ID NO: 123870 - DNA, 74 bp, Homo sapiens
cccaccgccgccttcttggcgcgaccccaacccagccccactggaggagagcaggagtgttcagaagcaaatga

SEQ ID NO: 123871 - DNA, 100 bp, Homo sapiens
agcttccaggacatcaagcccatgcgggaccagatcatccgcgtgaagcgaacctaaaggcagacccagaagagctttttacaaaactagagaaaattgg

SEQ ID NO: 123872 - DNA, 98 bp, Homo sapiens
tccggcagtaactggctctccggggtgaatgtcgtgctggtgatggcctacgggagcctggactgaccactgagcagatgctgagaaaagaccagaag

SEQ ID NO: 123873 - DNA, 90 bp, Homo sapiens
ctgagcgcaccctggaccccaactcagccttcctgcataccctggaccagcagaaacctagagtgatgggcttaggtcacgagcaaggat

SEQ ID NO: 123874 - DNA, 89 bp, Homo sapiens
aaagggaccacggtcaccgtctcctcagaaagttcaggagccctggaaaggagaaggaataagacggcaggaggaagagagagagaggg

SEQ ID NO: 123875 - DNA, 100 bp, Homo sapiens
cagaaattgactgcactctggtggctaacagatgacagtcatgtccctttccagggacctcaaggacgactttcacagtgacacggtactctccatctta

SEQ ID NO: 123876 - DNA, 75 bp, Homo sapiens
tttctgttcactgtaaaaagaaacacaagcgagaggaggaggaggatgatgagattgccatatgaacttcaggac

SEQ ID NO: 123877 - DNA, 100 bp, Homo sapiens
tgcccaccacgataatgcagttcttattactaggttaatggtgcaatgtaagaaacctttaaaagtttctgatgaattagtgcagcaatatcaaattaaa

SEQ ID NO: 123878 - DNA, 100 bp, Homo sapiens
aatgtgttccatggtcaaaaaatggcagctacatcttcaaacgactcaagttccttggaaataaagaactctctcagggtctctcgttgctattcctggc

SEQ ID NO: 123879 - DNA, 75 bp, Homo sapiens
tacccatctttactggcatcctaaagccatcactggtgcaagctatatttaacggagatcctgatgaagttcgag

SEQ ID NO: 123880 - DNA, 74 bp, Homo sapiens
ctaggctaccttgctgatgacctcacatggtgtggtgaattcaacacttccagcatagaatgtcaagctaacca

SEQ ID NO: 123881 - DNA, 83 bp, Homo sapiens
ccttcatagggacagccgcccctggtgcacacaccctcgtattctcctgcccttccccagcagtcttatagctggatcagcta

SEQ ID NO: 123882 - DNA, 100 bp, Homo sapiens
ggcggtgagcgcgagggaggctactgagaagcccggcgacggaggaacgcaggtctgctgccagagctggggttctcttcttcctgacgaccaaccagtg

SEQ ID NO: 123883 - DNA, 100 bp, Homo sapiens
ttccggccctgggatgtcacgaatgaactctggaagcccagccagggacaatgcaccttcacagagattctgcactaatctgagtgaaggtctaaggttt

SEQ ID NO: 123884 - DNA, 100 bp, Homo sapiens
gatttgcattgccgaggacgggaccccagggcagcgaagcaggtggcgacatgtctaagaatgtgagccagtcacagatggcaaaattgaaccaacaaat

SEQ ID NO: 123885 - DNA, 90 bp, Homo sapiens
gaaggaaagagctcaaagatttggtttgaatgtctcttcaatctccagaaagaaagtttcctacactactgaggtttaggggcactgtga

SEQ ID NO: 123886 - DNA, 100 bp, Homo sapiens
tctccgcgttcccagcccgggtccccgcgttcacagccccagcgcagcgagggcggcactgctcacaggacggctacccatccgcaatggcttctacacc

SEQ ID NO: 123887 - DNA, 90 bp, Homo sapiens
ctggtccagctgcagccactgacaggttgttcctcaaagtcattcaagctgtactcgccgaaggagcccccgaacggcaacgcctttccc

SEQ ID NO: 123888 - DNA, 100 bp, Homo sapiens
cggaaaatctactgcgtggcttgtcaggaactcgactcagacgtggataaagataatcccggtcagtcatatcatttggatcaaaaaatagaacaatcgg

SEQ ID NO: 123889 - DNA, 100 bp, Homo sapiens
cttcttgaatttctctctgtaaaggaggtgagcgtccctatcaatgtccttactgtgaaaaaggattcagtaaaaatgatggactgaagatgcacattcg

SEQ ID NO: 123890 - DNA, 100 bp, Homo sapiens
ttcgatgcacaggagtggccgttatggaacgcagattgaaaaggaagatcaggccaaccccaaagaagaagtgaccaaggaggagtttaaactgaatgaa

SEQ ID NO: 123891 - DNA, 100 bp, Homo sapiens
aaccacacttcgagaatcactgttataatgtacagcagaactgcatgatcagtggggagcaagtgcatatcctgggctgtgaagtgagcgaggaagagtt

SEQ ID NO: 123892 - DNA, 50 bp, Homo sapiens
tggtgaaatggagaggctggtcgcccaagagcggttggttccccgaggcg

SEQ ID NO: 123893 - DNA, 75 bp, Homo sapiens
gcgcacgacgagtactggcatgcgcacgtggacaaggctaagtcctatcagccatggaaacaccattgctctctt

SEQ ID NO: 123894 - DNA, 83 bp, Homo sapiens
gggacagaggcaccaaggacctccaagacaggttaatttggagtggcccctggagtcagtttcctacaccatccgaggcccca

SEQ ID NO: 123895 - DNA, 106 bp, Homo sapiens
ctgtgggagctgccggtggagccggccgagcggaggcctgagtgcacccgctgcagtggccacagatgtctttaattccaaaaacctggccgttcaggcacaaaag

SEQ ID NO: 123896 - DNA, 100 bp, Homo sapiens
cgcagtggtcgcttcttctccttgggtgcgctggctctggccctgcctgtgggttccggtgtggtgcagtcgctggcctaccacccaacagagccctgcc

SEQ ID NO: 123897 - DNA, 50 bp, Homo sapiens
caacagagtgatggagaaaggttcgaaggagctgagtctccccagaagag

SEQ ID NO: 123898 - DNA, 75 bp, Homo sapiens
ccacgtcaatctcacggtgcggcgtaaagtggtttttgcggggcaggattatttgttgcctgaagcagaagaaat

SEQ ID NO: 123899 - DNA, 100 bp, Homo sapiens
cggtgcctgagctgagtgaggccgaggccgggaggccgtgcccggagatctttaaatggatgagatggctaccactcagatttccaaagatgagcttgat

SEQ ID NO: 123900 - DNA, 101 bp, Homo sapiens
agagggtgagatggatgagtccagcattctaagacgaagagggctccaggtactaggttttgacaagcttgcatcatgcgtgagtataagctagtcgttct

SEQ ID NO: 123901 - DNA, 83 bp, Homo sapiens
tggtcatacaccagtactaccaaggacagcttttttcctgcaaggtctgcctcagccacctccctgacgctgtcccactgtgt

SEQ ID NO: 123902 - DNA, 83 bp, Homo sapiens
ctgggccgccgaatctccggccgaagagcggcggcggcagcggcggtgagaagccctaccactgcaactgggacggctgcggc

SEQ ID NO: 123903 - DNA, 90 bp, Homo sapiens
tgcagctctactctggacacctgcaggtgagtaatagctctggagagacccttggagctgacagtgacttgagcagcaatgcaggtgatg

SEQ ID NO: 123904 - DNA, 75 bp, Homo sapiens
gcgaccgcggcgcgagtcaccatgaataatcatgggccagactgggaagaaatctgagaagggaccagtttgttg

SEQ ID NO: 123905 - DNA, 74 bp, Homo sapiens
gtttgaccgcgttgacgacggctcgcagagtatgggaggacatggctatggtggagctggtgatgcaagttcag

SEQ ID NO: 123906 - DNA, 75 bp, Homo sapiens
aactgggctgggtagagatcaacagcagttcaaggacttaaccaccaccatgtcgagcaaaagaacaaagaccaa

SEQ ID NO: 123907 - DNA, 98 bp, Homo sapiens
cggaatgctgcccgatggccctgggtcctcgctgtggggcaatccgggcttgcagacgagcctgacatttaccccggtaactgctgggcatttaaagg

SEQ ID NO: 123908 - DNA, 101 bp, Homo sapiens
gtcttctccctcgccagctgggcattcccatcaagagcaccatggacaaccccaccaccacccagtatgccagcctcatgcacagcttcatcctgaaggca

SEQ ID NO: 123909 - DNA, 99 bp, Homo sapiens
atccgcctgttcttcatatcattgaaccacatgaggttaggttggatcacaatggaaaatttttgaatgcagatgttcaaggaattcattctgagaatg

SEQ ID NO: 123910 - DNA, 100 bp, Homo sapiens
cctggccccactcctcttcctattattggaaatatgctacagatagatgttaaggacatctgcaaatctttcaccaatagcatgtttgtcaacagacccg

SEQ ID NO: 123911 - DNA, 75 bp, Homo sapiens
gccaagcagaaaaagcgagtgatgatccctgtgcctgcagctgctgaatgccatggtggcaaaactggggaaccg

SEQ ID NO: 123912 - DNA, 75 bp, Homo sapiens
gagccacgcaggatctcacagctgcagtctaatagtaacacagagttgcaggggctctcattgctgacttcttgt

SEQ ID NO: 123913 - DNA, 75 bp, Homo sapiens
gcaaaccccgaggcggatcgcgtggagtgaaggtcgtaccgcggcgcccactgaggcggctcccagctgcgttgg

SEQ ID NO: 123914 - DNA, 75 bp, Homo sapiens
tacagccacctgatctcactggcagaaggtgatttactacctctgcatcttattgaaagatccagtggaaccaca

SEQ ID NO: 123915 - DNA, 99 bp, Homo sapiens
ccatctaaaatacgaaggtttctggctggactggtgtcgttcagtatttctacattgaagactggcaattcgttaatgattatcgacatcctgtcagtg

SEQ ID NO: 123916 - DNA, 100 bp, Homo sapiens
ctccctcggtttgcctactgaagagcttatcagagctctacttgggaaacttttccagaagcctgttaaaagcaaggtctccccacaagcaacttctctg

SEQ ID NO: 123917 - DNA, 97 bp, Homo sapiens
tgacatttaattttagggtcctttatatagaagggagagtaggtgggcttggtgcttgcatttcctgcgttgcagtgtcaggatttttcagggatca

SEQ ID NO: 123918 - DNA, 100 bp, Homo sapiens
ggaaaatgcaagaagactgatggagcaggcttgcaatattaaaatatttgatttaatggatgccaaagcacgtgctgattgcatcaaagaaatagatctt

SEQ ID NO: 123919 - DNA, 100 bp, Homo sapiens
gaagttctcgaatcattctttgtacagaaattgaaaggcttcaaagctagcagatttaccggaacattccaggatttttacgtacacttatggatgccct

SEQ ID NO: 123920 - DNA, 100 bp, Homo sapiens
tttcatctgtagcattcaagacttcaaactggaaaagaatacttgagatccatttgtaaggaaagaaaaggaagcaacaacataatgcccagagttggag

SEQ ID NO: 123921 - DNA, 82 bp, Homo sapiens
ggacgaaggtactcgcagcacttggagcgcagaaccggccgcgcccggggaacgcccttttgcttgtgactggcagggctgc

SEQ ID NO: 123922 - DNA, 100 bp, Homo sapiens
cttgaggcgaatggccgaatctctccgctgttttggaaagaagtgaggtttagacttctccatgttaaccatgagcgtgacactttcccccctgaggtca

SEQ ID NO: 123923 - DNA, 74 bp, Homo sapiens
cttacagacgctgccagcatcgccgccgccagagctgaaggtcaggccaggacagtgagacctgactccttgct

SEQ ID NO: 123924 - DNA, 75 bp, Homo sapiens
ggaaatggatcggatgggagtcatgacactgcaaacggggattcagcgtccgatcctttggaacagggactcacg

SEQ ID NO: 123925 - DNA, 51 bp, Homo sapiens
cactgatgaggatcagcccatggtgcaaattgagcatgacccagaattaga

SEQ ID NO: 123926 - DNA, 98 bp, Homo sapiens
tgggtcggtggcggaggctgaggagaaggaggagcgggccgtggaggcttcgccgcctagggcaggatggcagcagatgaaagctcacagaacacttt

SEQ ID NO: 123927 - DNA, 100 bp, Homo sapiens
tcctattcgggcatcttggctcctccttgactaataatcacaagaagttgtcagaatttggaattagaaatggcagccggcttcaagcagatgacttcct

SEQ ID NO: 123928 - DNA, 101 bp, Homo sapiens
cttatttctaatgagggtcatattaaactgacggattttggcctttcaaaagttactttgaatagagttatacatgggaagctgttgataccaaaaataat

SEQ ID NO: 123929 - DNA, 100 bp, Homo sapiens
cgctgagcgaggcggagaaggtgtacatcgtgcatggcgtccaggctttgatgagaaatccagaagaaagagtgtatgaaagaaaaagatgacatctatg

SEQ ID NO: 123930 - DNA, 83 bp, Homo sapiens
gaggcaggaatggccccgaggcctccgaccgccgcgccccaggtaagtaaggaggtctctgtaccatggctcgtacaaagcag

SEQ ID NO: 123931 - DNA, 90 bp, Homo sapiens
ccccgggacacgcaggaacggctccagcatcaagatccgtctgacaggtctcctaaaaacccagaacagaagatcattaagagagtgatt

SEQ ID NO: 123932 - DNA, 75 bp, Homo sapiens
attgggagatccacagctaagactccaggaccctctggaagcctagaaatggtctgggacctcagtgacattgac

SEQ ID NO: 123933 - DNA, 75 bp, Homo sapiens
ggagccttgatgccggaggggacagtgggagtgctgctgtatggacctccaggcactgggaagacactgttggcc

SEQ ID NO: 123934 - DNA, 82 bp, Homo sapiens
agcttcgcggggatcctgctggactgcacgaaaaagacttctgcacggacctggccgtctccagtgccaacttcattcccac

SEQ ID NO: 123935 - DNA, 90 bp, Homo sapiens
caggaaagtgcaggttctgggaagtctcggtgggttccccgcaaaatcaggtgtcagcttcctctggtgcaaccagcaagtcttccagta

SEQ ID NO: 123936 - DNA, 59 bp, Homo sapiens
cgtggtggtcggatttcaccacaagaagggctgccagttactccacaggatccgctgaa

SEQ ID NO: 123937 - DNA, 98 bp, Homo sapiens
ttgcttggatgacagtcaccgacagaagggtgctggagaatctggtaaaagcaccattgtgaagcagatgaggatcctgcatgttaatgggtttaatg

SEQ ID NO: 123938 - DNA, 76 bp, Homo sapiens
tcaggcttctctcctagtgtacagtgcccaaatgatgggtttgggccggaagcagctggaaaagactcagaaatct

SEQ ID NO: 123939 - DNA, 76 bp, Homo sapiens
caaattttgctactgtcagatggattgactatggaaaagttgccaaattgtacaagccagctgccatgttgtgagc

SEQ ID NO: 123940 - DNA, 100 bp, Homo sapiens
cttttcacagcatcagcagtcatctcactagttatgttcaaaaaaggagcatgataaagatccagaaagcttttttaaggtattaatgcatcttaaagac

SEQ ID NO: 123941 - DNA, 98 bp, Homo sapiens
aaggactttattcggaagcttctggttaaagagacccggtgtggatgaggtcaccattgtcaacattttgaccaaccgcagcaatgcacagagacagg

SEQ ID NO: 123942 - DNA, 100 bp, Homo sapiens
tgacatcagagctacttttcaacagccttctcaattttctttctcagaaagcagaggctcagagcttggagacagacgaaatgcactcggtgatggaaag

SEQ ID NO: 123943 - DNA, 82 bp, Homo sapiens
atcggaagcttctgccataacccggacaacggttttaaaatcaaagatgggaaaatcggagaaaattgcccttccccatggc

SEQ ID NO: 123944 - DNA, 82 bp, Homo sapiens
ctttgaagtgggagcccagttggaagcccgggaccgtttaaaaaactgggttcgtgggcccccaagaaggagccgtacgccc

SEQ ID NO: 123945 - DNA, 100 bp, Homo sapiens
tcatccttaaaggggtcatactgctgtggctctgtttctcagtactttgaagttataactaatctgcctgaagacttctcatgatggaaaatcagccaag

SEQ ID NO: 123946 - DNA, 101 bp, Homo sapiens
tggtatcaggactttggttatgttggatgaacaaggagataagtatgctgtgcgcttcatccctcgggagaatggcgtttacctgattgacgtcaagttca

SEQ ID NO: 123947 - DNA, 82 bp, Homo sapiens
cgtcagcctcccgccggccgtctccttaacaccgaacaccgctactgcagcactggggtgtcagttgttggtccgacccaga

SEQ ID NO: 123948 - DNA, 80 bp, Homo sapiens
gcagcccacgctcatgatcgacttcctcacccgcgcctgcgacctcgggaaggtggccatccagaaggaggacttgcaga

SEQ ID NO: 123949 - DNA, 50 bp, Homo sapiens
gataatgaccctaaccgtgggaatcaggttgaacgtcctcagatgacttt

SEQ ID NO: 123950 - DNA, 100 bp, Homo sapiens
tacagatctggcagaaaactgtgaaggaggctcatttgacaaattgttgacctcctgtactggagagacattaagaagactggagtggtgtttggtgcca

SEQ ID NO: 123951 - DNA, 74 bp, Homo sapiens
agcagtcatctggttactttaggtcatcaccgagtggtcttctcacatcatccttcaggcagcaccaagagtca

SEQ ID NO: 123952 - DNA, 97 bp, Homo sapiens
gaagagcctggttacagtttcgactcctctctgcaagtgaataggcccagaaagaataatccagaatggctactctgatctatgttgataaggaaaa

SEQ ID NO: 123953 - DNA, 100 bp, Homo sapiens
tttcctatgaggaatatggtcatcttcagcatttaaatcaaacggtattgagatggattgggttatgaaacataatggtccaaatgacgctagtgatggg

SEQ ID NO: 123954 - DNA, 97 bp, Homo sapiens
aaattcctactgtccggctgcgcggctaccgtggccgagctaggtgacttcatggtcatgacgattttcttcaatgtgagcaggcggtttggctatg

SEQ ID NO: 123955 - DNA, 100 bp, Homo sapiens
ctccttgagggaggagattcagcccggcgatattgtcattattgatcagttcattgacaggattactacagcatcccatttcccacacccactactccgc

SEQ ID NO: 123956 - DNA, 90 bp, Homo sapiens
gaaataaggacaaaagccaagaggaggacagttcgctacacagcaatgcatcgagaacattaaccaggtggtatttgttggaaatttctt

SEQ ID NO: 123957 - DNA, 100 bp, Homo sapiens
cggacagatgaagctccccaaggagctgcaggtagttttgcagaagtgcaaagtcaagtctctcttgcacagtcctggagactacatcctcttaagtgca

SEQ ID NO: 123958 - DNA, 90 bp, Homo sapiens
agatggacagtatgatgttatgtttatcggaacaggaacacagcctattggatccctaggctcaatatgtcctaatagttatggaagtgt

SEQ ID NO: 123959 - DNA, 82 bp, Homo sapiens
gcggcggcaccaaggcccccaagccctccttcgtgtcgtacgtacgccctgaggtgattgaattactcagatatgaagatca

SEQ ID NO: 123960 - DNA, 74 bp, Homo sapiens
tgctgtagaaagcttaaacttccaggatgtacagttacccagcacgtgtacctcctcctcctcctattgctcgg

SEQ ID NO: 123961 - DNA, 75 bp, Homo sapiens
cggggcccaggccgggagccgaccggcacagcagaaaatatttacaccagcagctccagttcataccaataaaga

SEQ ID NO: 123962 - DNA, 74 bp, Homo sapiens
tgcagccgcacctggccaaggactgcaaaattcaaaatggggctcaaggtattcgtttcatctacaccagagaa

SEQ ID NO: 123963 - DNA, 100 bp, Homo sapiens
gccaacgatgaccagtccaggcccagcctctcgaatgggcacacctgtgtagaaggaacccagccagccggcggaatgcaagcagcagtaggaagcggag

SEQ ID NO: 123964 - DNA, 82 bp, Homo sapiens
gaccccaagagtgttgagcagcccatcgtgcttaaagaaggctattactataacaagcgcattctgcacaagaccaagggga

SEQ ID NO: 123965 - DNA, 83 bp, Homo sapiens
ctcgcagtctccccaggtccgcccagcagccgcgcttcagccagggttattttggagctgttggagcactccttgagctgttg

SEQ ID NO: 123966 - DNA, 75 bp, Homo sapiens
tggacatatccattttgataatgtcagtgtggtatctctacaggtacgttgaagatggagaacaactgatgtcaa

SEQ ID NO: 123967 - DNA, 90 bp, Homo sapiens
actacatggcatctaccatagggctcttagaacaagctctggtgattgaggaacagctgcgccgggctgcttacttgaacatgtcagaag

SEQ ID NO: 123968 - DNA, 75 bp, Homo sapiens
aacgtcattcattctcgatgtcgtgctaaatcatttcggtgtctgaactgctcagcttcgcaagtctgctctcag

SEQ ID NO: 123969 - DNA, 73 bp, Homo sapiens
ggcccgtgctggaaaagtgagaggtcagactcctaagacacttaaagaatcctgtaatagcacagaagatcca

SEQ ID NO: 123970 - DNA, 116 bp, Homo sapiens
ggactctctaggctgccgggcgctggtcgtcagcgccgaggctgggctgaggcgccgcggtaccatgaggcgccggggactcattctcacagttccggtttgctgaggagaaagaa

SEQ ID NO: 123971 - DNA, 100 bp, Homo sapiens
aatggccgagccatggggaatatgaggaagacctactggagcagtcgcagtgagtttaaaaaaaataggaaggttgttgattactcacagtttcaggaat

SEQ ID NO: 123972 - DNA, 50 bp, Homo sapiens
cctgctcctgctcatggacgacgcatctgcatctgggaccgacctcctgg

SEQ ID NO: 123973 - DNA, 96 bp, Homo sapiens
tgcgggagtgccctgctctggcctcgcttgttgctcttcggggactccatcacccagtttaatggatcgagaagtggcgttgcttgctgaaatgga

SEQ ID NO: 123974 - DNA, 73 bp, Homo sapiens
ctcccctgagctccaggaagcacgttctctacgtggagcacagatcgggcccgggacacccagacagatgaga

SEQ ID NO: 123975 - DNA, 100 bp, Homo sapiens
gtcgcatcgttcctggccagttcttagctgtggatcccaaagggcgagccgttatgattagttgcgtaggaggctctgtctggtatcttgaaagaagaac

SEQ ID NO: 123976 - DNA, 82 bp, Homo sapiens
gaacagccggcagctgagcctggtggcctccgttctcttggcccagaattaaatgtgagggagtctgacgtaagagtttgtg

SEQ ID NO: 123977 - DNA, 83 bp, Homo sapiens
gcaagctgagcgagctgtcagagcccggggacggcgaggccctcatgtaccacacgaatgttgtaccatctttgggtaggcag

SEQ ID NO: 123978 - DNA, 74 bp, Homo sapiens
ctgtggtggacgttcggccaagggaccaaggtggaaatcaaacggtgatcagcccatgacctaaacctccagac

SEQ ID NO: 123979 - DNA, 75 bp, Homo sapiens
aagctctgagcggagttgtgttcttccccagtgacaaccatgagtggaaaaaactaattatggttcagcactggc

SEQ ID NO: 123980 - DNA, 50 bp, Homo sapiens
attgtcagtcagcaaactccacaaagtgaagccatgtccctggagggaga

SEQ ID NO: 123981 - DNA, 74 bp, Homo sapiens
cttgtttgccacaggaaccatagagggaaacactactatgaagtatcctgtcatgaccaagggttatgcagggt

SEQ ID NO: 123982 - DNA, 100 bp, Homo sapiens
gcttcagcgttctgtggttgtcaacaggtggctatggaccgccccctgcaggaagaggagcccccccgccacccccaccgttcacctcctacatcgtgtc

SEQ ID NO: 123983 - DNA, 48 bp, Homo sapiens
tggagcccctgctttccactgagggtctcgctgttggagttggatttg

SEQ ID NO: 123984 - DNA, 100 bp, Homo sapiens
agccccagctgagccgagggctcgcactcttctggtctcccaggcccaacccacctgaaggtatctgcccaaactggaacttatgctgtagacatttctt

SEQ ID NO: 123985 - DNA, 100 bp, Homo sapiens
gcaacttcaagtagtggaaggagtacagggaagtctataagctttgcaacagaattacagagtatgattgcagagctggaaaagtctgtgcccaatcaac

SEQ ID NO: 123986 - DNA, 75 bp, Homo sapiens
ggaggcggcccgcttcctggaatggcaagcgcagcaacaacagagagcacgtgggactggtgattgcagctggaa

SEQ ID NO: 123987 - DNA, 90 bp, Homo sapiens
tggaagctcaaggcatcaaagctgacagagaaactgttgcagtgaaggatgagaacaagttgagcagtgccaacggccatgaagaacgta

SEQ ID NO: 123988 - DNA, 98 bp, Homo sapiens
gtagccccgccgccgcgcacctgccttcgctcccgcaccgatggcccactgcgtgaccttggttcagctgtccatttcctgtgaccatctcattgaca

SEQ ID NO: 123989 - DNA, 83 bp, Homo sapiens
ctagaaactcgctctaaagacggaaccgccacagcactcaaggcgaccattgacgaggtggagacggacgtggtggagattga

SEQ ID NO: 123990 - DNA, 83 bp, Homo sapiens
ttaccacagtcaaagcaacagaaacaaaagcaggcaaatggagtcgttgggaatttatgggctcaaagaatttattcatctct

SEQ ID NO: 123991 - DNA, 72 bp, Homo sapiens
cgtctgctcttctgcctcttgatctccgccaccgtcttcaggccagaacactgatatttgcatttaatgggg

SEQ ID NO: 123992 - DNA, 100 bp, Homo sapiens
attctgatcatcctcactggacgccacaggggcaagcccttcagatatttcaacactcctctcagcatcctccacttcccccatctctccaagctgaact

SEQ ID NO: 123993 - DNA, 74 bp, Homo sapiens
ttaaagctggtctgttctaactgagccaccagctgaacaggccaaagccagactacagctggttcttgaagctg

SEQ ID NO: 123994 - DNA, 75 bp, Homo sapiens
aactccagatatctacctaattgattgctacctgaacgacctggagcgtattgcacagagtgactacatccccac

SEQ ID NO: 123995 - DNA, 46 bp, Homo sapiens
attctgtgggcttccgcgaagatcccaatgaagatacagaatggaa

SEQ ID NO: 123996 - DNA, 73 bp, Homo sapiens
ggacaaacctcagccctaacggtggtggagaacccaaagatacagaagatcattgagacactgacacagcagc

SEQ ID NO: 123997 - DNA, 96 bp, Homo sapiens
cctggcagcatggctcagactgcatgacaggtgaccaagggtgtctctctgctgctgtctgtgcttcgggatcctgccctccagaagtcctccaag

SEQ ID NO: 123998 - DNA, 106 bp, Homo sapiens
caatatctgtcttcggtggactccttcggcagtccacccaccgccgccgcctcccagctgtcgcctggttgggcccggaaatgggacgtcgcgctttctcagggag

SEQ ID NO: 123999 - DNA, 98 bp, Homo sapiens
tgttgccggagctgagaccgggcggccacagtccgcagggatgaacctcgagttgctgggggcagccattttggggggtgctgatggatacctgcggg

SEQ ID NO: 124000 - DNA, 100 bp, Homo sapiens
gctcacaccaattgatagagtgtttactagacttggtgcctcagacagaataatgtcaggcagtcgtcttttaactggttccagctatttgcaactctgg

SEQ ID NO: 124001 - DNA, 117 bp, Homo sapiens
gaatatcagacaatgcgagagagtcagctgcaacaggaagacccaatggatagatacaagctctctgacacagctggctattctagtcccagaagaaagaggagagacttgctgaag

SEQ ID NO: 124002 - DNA, 87 bp, Homo sapiens
ccatactgaggaggaaaattataatgtggttgcaccaggctgtctttcacaatccagctgagatctgtatctgtggacctgaatgtt

SEQ ID NO: 124003 - DNA, 74 bp, Homo sapiens
aggaaggtgaccatgtttctcagacacattcatttttacaccccagtttagaaaccagtcccataactgatact

SEQ ID NO: 124004 - DNA, 55 bp, Homo sapiens
attcgctcccagagcagctgcggccaggtggcaaagcaaagctatattcaagacc

SEQ ID NO: 124005 - DNA, 100 bp, Homo sapiens
tatatcatcagttcgaagagcagcattggaaactctgtttacgttattatcaacacaggaccagaaccttctgaggaaaggaggccatacagaaattgaa

SEQ ID NO: 124006 - DNA, 90 bp, Homo sapiens
ttaaagggcaagaacgtgcggatttatcaaatagccttgaggaaatatatatccacccacacagaatatgcctatgggtcctggagggat

SEQ ID NO: 124007 - DNA, 75 bp, Homo sapiens
gccgctgccgcctccgccccaggttctgaaatttcctcaacagaccctccactgagtgttacagaatctaccctt

SEQ ID NO: 124008 - DNA, 101 bp, Homo sapiens
aggggctccgggtcttccagagcgtgaagatcaagatcgaccagagtctcactgtcgcccaggctgcagtgcagtggtgccatcacgcgtcactgcaacct

SEQ ID NO: 124009 - DNA, 101 bp, Homo sapiens
tcttgccgatgtggtggacacactgaaacagaagaagcttgaggaaatgactcggactgaacaagaggggtcccgggattcttgagctgtgcccagctgac

SEQ ID NO: 124010 - DNA, 50 bp, Homo sapiens
gatcctgggaattgagaagcttcagcagggtctcactctgtcgcccaggc

SEQ ID NO: 124011 - DNA, 100 bp, Homo sapiens
caccacccatgaggacgtggaggtgggaaggtgtgtccggaggtttgcaggggtgcagtgtgtctggtcttatgagcgttccctgctggctgtggtggag

SEQ ID NO: 124012 - DNA, 100 bp, Homo sapiens
ctgaagaaggaatataatgcattacatcaaagacacactgaggctctaagtatgcagtcatctccaaatggccagtttgtagcgccaagtgatattcagt

SEQ ID NO: 124013 - DNA, 82 bp, Homo sapiens
tttcaaacagtgtcaatacaaagatactctccccaagcataatttaccctcaaaacaaggatggtgaaccagaatacaatcc

SEQ ID NO: 124014 - DNA, 100 bp, Homo sapiens
cgttatttctaacaccactggctacaatgatcgtgctgtattggagagagaagtccaaaaccgaccagagggcaaagtgttggagacagttggtgtgttt

SEQ ID NO: 124015 - DNA, 74 bp, Homo sapiens
gtagttctggagatggagcgagctgtgccgctcgcggtgcctctgggtcaggttgcagtccatgagctgggaaa

SEQ ID NO: 124016 - DNA, 100 bp, Homo sapiens
gcggagaggcgggcgggaggccgttttcaaaccagaagaactacgacaggcactgatgccaactttggaggcactttaccgtcaggatccagaatccctt

SEQ ID NO: 124017 - DNA, 97 bp, Homo sapiens
cccccttctttcgatcagagatcggcggagaccctcgaagtgcgcaaacttgacactcaccctgaccggccatcaaaccttcttctggaccaaagca

SEQ ID NO: 124018 - DNA, 83 bp, Homo sapiens
acagaacctagcctatcagctggggctggatgagtgatgaaacaagtgaagatgctaactgtcttgctttgagtggacatgat

SEQ ID NO: 124019 - DNA, 74 bp, Homo sapiens
ctggcctgctgctggcccgcagggactacaaatccctccaggatatcattgccatcctgggtatggatgaactt

SEQ ID NO: 124020 - DNA, 97 bp, Homo sapiens
ctgggccgcaatggacaagctgaagaaggtgctgagcgggcaggacacggaggaccggagcggcctgtccgagtcctcaaccactgaagaagaagct

SEQ ID NO: 124021 - DNA, 101 bp, Homo sapiens
aggaaaatcatattatagatggagtaaagccggaaatcactgtggaaaatcttcccagttatttcagacttcagaaaccattattgattttgttcagtgat

SEQ ID NO: 124022 - DNA, 75 bp, Homo sapiens
agcacctagtcgtggccggaggagtctcagagctgtcagaaagggatcgcttacacctgagacgaactacagaac

SEQ ID NO: 124023 - DNA, 90 bp, Homo sapiens
ttggcaaggacttaatttatacactttattattggaaatcttcaagttcaggaaaggattactaccaaagtggaagaatgcttttgcgaa

SEQ ID NO: 124024 - DNA, 100 bp, Homo sapiens
tcagtgaacagacacgggtgaatgctgctaaaaacaagactggggctgctcccatcattgatgtggtgcgatcggaagttggaaatctgtatgacatgtt

SEQ ID NO: 124025 - DNA, 100 bp, Homo sapiens
gcagggtgcgggagagccccttgcagaagacgccgtacgagaccagcatctcagacatgtcgaaaaagatgttttgatccctaaaataatgagagaaaag

SEQ ID NO: 124026 - DNA, 99 bp, Homo sapiens
tctacattcttctggagcatggacaagcgaatttcagtcagtctaagggagaacattgagcaattcttcaccaaatttgtagatgaggggaaagccact

SEQ ID NO: 124027 - DNA, 99 bp, Homo sapiens
acctgctgtacaccctcaacaaacaccagcgctttgggttggacgtgataagtatgagcctgcagctgtttcagaacaaggtgataaaaagggcaaaaa

SEQ ID NO: 124028 - DNA, 99 bp, Homo sapiens
gaagaagctgaggatgaagaagatgttctttatagctccaagctctacagattcttcaaatatattgagaatagggatgttgcaaaaacagtgttaaag

SEQ ID NO: 124029 - DNA, 96 bp, Homo sapiens
cttgttgtctttgatactacattacaagcaattgagagatttgagttggagaagaaggctttaagagagaaaactcgcagcagtccagaagacaaa

SEQ ID NO: 124030 - DNA, 75 bp, Homo sapiens
ggcctgccgttggctatagcaaatgccccaggcctgtgatacttgggctgtgatcctctagagccagcttggact

SEQ ID NO: 124031 - DNA, 82 bp, Homo sapiens
tccgatttaaagctgagctgcgaggaaaatggcggcgggagatggtcagtaggacagaaggtaacattgatgactcgctcat

SEQ ID NO: 124032 - DNA, 82 bp, Homo sapiens
aaggacttaatttatacactttattattggaaatcttcaagttcaggaaagatctttgtggagttcacctctgtgtttgact

SEQ ID NO: 124033 - DNA, 50 bp, Homo sapiens
ctccctggaaaacttcccttccctttcgaaccgccaagacccattgctcc

SEQ ID NO: 124034 - DNA, 51 bp, Homo sapiens
cccggcgcccgcgccatgcggcgggagagtggaatgcagtagccctctggg

SEQ ID NO: 124035 - DNA, 82 bp, Homo sapiens
gaaaaattatgtgcaagctgatgaagattgtagacatgggtcctgcagttctgagcttgggttccctttgcctggacaccaa

SEQ ID NO: 124036 - DNA, 51 bp, Homo sapiens
ggccagcctccgagccgggtggacacagaaaggcttcccaactgatgcaac

SEQ ID NO: 124037 - DNA, 73 bp, Homo sapiens
cccaatcccccactctttccgccctaatggaggtctccagtttcgaaaaagcttgtggtgaaggggggcaaaa

SEQ ID NO: 124038 - DNA, 90 bp, Homo sapiens
tctccaaataccagctcgacaaagatggggttgtcctctttaagaaggatgacgtcatgatgccccagcgggtgaggctgcaacacgagg

SEQ ID NO: 124039 - DNA, 76 bp, Homo sapiens
agaactacagaaacctggtctccctagtttctcaagtcaaagaaggccctgtcctagcaactagttcaggagctgg

SEQ ID NO: 124040 - DNA, 100 bp, Homo sapiens
gtgaccggatctcagcccaggacgccaagcaagcagatcttcgcaaatactgtggacaatgcccgcatcgttctgcagattgacaatgcccgtcttgctg

SEQ ID NO: 124041 - DNA, 100 bp, Homo sapiens
agcgcctgtttgaatcaatgctcagcgagtgtcgggacgccatccaggtggttcgggaggagctcaagccagatcagattctgtttctggcgtctgcata

SEQ ID NO: 124042 - DNA, 100 bp, Homo sapiens
gccccagcgcctggtgctgcagtgtcaattctttgtgatgatgtcaccacaagaagtactgcagggaggaagccagcgctcaattgcccctaggactcac

SEQ ID NO: 124043 - DNA, 80 bp, Homo sapiens
cattaattttgtccttggacgatttgagcatattgaagatgaaccaaaaacttttgctagaaaatcagcttttacgagag

SEQ ID NO: 124044 - DNA, 83 bp, Homo sapiens
gcgacagcagccaggagtcatgagcgacagcggcgagcagaactacggcgagcgggaaagatgaatgggagggctgattttcg

SEQ ID NO: 124045 - DNA, 74 bp, Homo sapiens
gctgctgctatgaatatgggtcgaccattccaaaaaaatcgagggagcactatgtctgcggaagtccccgaggc

SEQ ID NO: 124046 - DNA, 90 bp, Homo sapiens
tattttttaagtcacagaattcttgaacactatgtggctgccgtgtaagagtggaactgtcgaatggtgaaaaaagaagtagaaatcgtg

SEQ ID NO: 124047 - DNA, 83 bp, Homo sapiens
cgggggccgctctgggatcccggccaccagcaattgtccgtactgccaaatctgtcgaaagggagataatgaagaactgcttc

SEQ ID NO: 124048 - DNA, 82 bp, Homo sapiens
attgccatcccatgcaacaacaaggctgtctgtccccagaccccagagcacgtccggcaccaccatgactgggctgttgaag

SEQ ID NO: 124049 - DNA, 82 bp, Homo sapiens
tcctcggcactgtattctttacctgcttcccaatcccactgatgaggatcagcccatgatggcagttgaattcctgcatgaa

SEQ ID NO: 124050 - DNA, 75 bp, Homo sapiens
gaaacagatacagagatgtaagcccatagcccagcattacatcaacatgcccgtgcagttcaaaccgaagtccgc

SEQ ID NO: 124051 - DNA, 82 bp, Homo sapiens
ctgggggccttcagagccgcaatcaagcaggggatttgggagcagcttgtcttacacaaggacgaaggaaaaggtcagggat

SEQ ID NO: 124052 - DNA, 83 bp, Homo sapiens
acctacagctgcattcactgcagagctcacttggccaatcatgatgaactaatttccaagctccagggttccttgaaaagaaa

SEQ ID NO: 124053 - DNA, 100 bp, Homo sapiens
ggctacgccagcggcgtcgagaggaccatcctgggtgctggccctgtgctggagacctacgtctaccagtggccctggacgctcctgctcctggctgtca

SEQ ID NO: 124054 - DNA, 100 bp, Homo sapiens
gagaaaatacaaggagctggacatcgagcctgagggaggggaaaggcgcaggtgcaagaagaaacacacgctgctgtgccccgactttgcccgcaggggg

SEQ ID NO: 124055 - DNA, 100 bp, Homo sapiens
gcccagccgctcgcaggcgccgcacggagttgcgtcccggggacttggggccgcagggaggctactgcagcactggggtgtcagttgttggtccgaccca

SEQ ID NO: 124056 - DNA, 98 bp, Homo sapiens
tttgtggggctgaatccgcccgggctacgctcctccatcacgtggccactccccacctgtcctgcctttgtgtgcctctgtgtctttgctgggtggcc

SEQ ID NO: 124057 - DNA, 75 bp, Homo sapiens
agcagatggcagagaaaaaccgcagagacgctgagacctggttcctgagcaagatgatgtgcgaggtgatgccga

SEQ ID NO: 124058 - DNA, 100 bp, Homo sapiens
ctgcgtgtggcctccgagcagtcctctcagcccacttgcacgggcctgactggacctactggagctgtgggacttcctggaccccccggcccttcaggcc

SEQ ID NO: 124059 - DNA, 100 bp, Homo sapiens
gtggatgtcagcaacctgcagtcattcttccgggcctccaaggaacttaagcaaaggaccgccgggagagcctgcccacctccccaccctggacgccggg

SEQ ID NO: 124060 - DNA, 150 bp, Homo sapiens
ggaaggttctttgcggatcatccggaatggaattggaatccacgagcatgccagcattgacttaccaggcatcaaaggacccagagttcaacaatacagatcagattgacctgtatgatgatgtgctgacagccacctcacagccctcag

SEQ ID NO: 124061 - DNA, 75 bp, Homo sapiens
accaagccgaggactgcggggtccggtgtccacgcagagaaatcttactgatgaggggcagcagtattgttgtag

SEQ ID NO: 124062 - DNA, 100 bp, Homo sapiens
ccaaaaatacaccagctccaaaaccactcgcatctgagcctgccgatgacactggattctttctactaatccagatacttgttgaagtgctgactagttt

SEQ ID NO: 124063 - DNA, 75 bp, Homo sapiens
tgcggctggtccaggccttccagtacacagacgagcatggggaaggatcgaacagaggctgcaaatagaataata

SEQ ID NO: 124064 - DNA, 83 bp, Homo sapiens
gcaaccgcagcgtcggcgcccgcggccccggcagctggagcagatccgcagggacatccgagacttccggtctagcgcggggc

SEQ ID NO: 124065 - DNA, 51 bp, Homo sapiens
atccagcctgcggagcctgtggggcagaacaatgagatggtggagctacag

SEQ ID NO: 124066 - DNA, 97 bp, Homo sapiens
agtatgcctgggtcccgccgggtctgaagcctgaacagttctggacacagctgggcaggaggaattcagcgccatgcgggagcaatacatgcgcacg

SEQ ID NO: 124067 - DNA, 75 bp, Homo sapiens
aacgaggtggccgaatcttccttcaggatatcaaggacaaaatgtttcacttttgggtaaatacattcttcatac

SEQ ID NO: 124068 - DNA, 75 bp, Homo sapiens
ccgagataatgaccccaatgactacgtggagcaggatgggccggagccagttcttggaggagactctgcacaggg

SEQ ID NO: 124069 - DNA, 75 bp, Homo sapiens
gcaattcgagaatcaaagggccgggagcgatgcttgctgatgaccgtatggcactggtgtcaggcatcagcttag

SEQ ID NO: 124070 - DNA, 98 bp, Homo sapiens
cgcagcccgggcccaggccccggcagcgcctgggacaaggctttcatgagaaggacaagaagccatattgccgaaaggatttcttagccatgttctca

SEQ ID NO: 124071 - DNA, 97 bp, Homo sapiens
ctttgagagcaagcatcctaagactccacttcctccagaattagctgatgttcaggcataaggttgtttacaggtgaccaagaatatggcccaggtg

SEQ ID NO: 124072 - DNA, 83 bp, Homo sapiens
cttccctcctcgaactgctgagggagctgtcaatctcatctcaaggtagcagcagcagcagcagcagcagcagcagcagcagc

SEQ ID NO: 124073 - DNA, 100 bp, Homo sapiens
tgtcacagcaatgggctaaagcctctggaagaggtgaagttgggaaactgcggattgccaagtatgcttcagaagtgtccttctgttgatgacttcgtaa

SEQ ID NO: 124074 - DNA, 50 bp, Homo sapiens
tcccacctgtcctcaggcatatcaaaggaactctagccaagaaccacggc

SEQ ID NO: 124075 - DNA, 100 bp, Homo sapiens
caacaatgagattagaagtgtgaaaagattgcagctgctaccagaatcttttatttgcaaagagaaactagatgttcctcctgctgatcaagagaagctt

SEQ ID NO: 124076 - DNA, 75 bp, Homo sapiens
cttggagaggccgagggtttgatgaaggtggaggcagcgcggctctcagaggagcaggagcggcttcgcttggag

SEQ ID NO: 124077 - DNA, 90 bp, Homo sapiens
tgctgaagtggtttttcctaatggaaaatcacatacctttccagggttatggttttgtgaaattcacagatgaactggaacagaagcgag

SEQ ID NO: 124078 - DNA, 85 bp, Homo sapiens
gggcagtgtcggaggccagcggggccggaagcggcggcgcaggtgggaggaggagctcgccaagcgcatgaaccttcagaccatg

SEQ ID NO: 124079 - DNA, 75 bp, Homo sapiens
gaccctcctgagacgttctgtgcaatgaggaagctcaccagtgtgggaaggggcttctcatccactgccaggctg

SEQ ID NO: 124080 - DNA, 51 bp, Homo sapiens
tagacaagtttgtacatccaaagctaatggaggttggcaggatgctactac

SEQ ID NO: 124081 - DNA, 150 bp, Homo sapiens
attatagatactctaacgccaaggtcagctgctggtacaagtacctccttttcagctacaacatcatcttctggtgggttgtcttctggcctcagagtatcccttatcagaaccttgggcccctgggccccttcactcagtacttggtgg

SEQ ID NO: 124082 - DNA, 75 bp, Homo sapiens
ggagatgtccggggacctggaggagggcatgctggccgtggcctcagtcaccttctgctgaacagctccaccttg

SEQ ID NO: 124083 - DNA, 83 bp, Homo sapiens
ccgagacctcagttcccggcggctcttgcggggcacagacaatgcagatcttcgtgaagactctgactggtaagaccatcacc

SEQ ID NO: 124084 - DNA, 74 bp, Homo sapiens
ctggattacacacagcaagttcctgcttctgggacagctctactgacgggggtgacaggtgctttgacagtttt

SEQ ID NO: 124085 - DNA, 83 bp, Homo sapiens
ctgatttcctgcttctccttttcatgagtgttcctgtggtctctgcacctcctttctgtgctggagaatctggtaaaagcacc

SEQ ID NO: 124086 - DNA, 89 bp, Homo sapiens
ttcatagttgactccacagatccgggggtccccagccccaccccagccccaaaggaggctgttcgagagggacgtcctccggagccaac

SEQ ID NO: 124087 - DNA, 82 bp, Homo sapiens
gtccggagccagccaacgagcgcaattctgtggtgttcttggtcacacatttatggagtttctgaagggcagtggagattac

SEQ ID NO: 124088 - DNA, 100 bp, Homo sapiens
aagaaatgccggctgcggaggaggatggactcggggagaaagaacaggccgcgtgtcatggagaaactccagctgggcccagagattctgcagcgggaaa

SEQ ID NO: 124089 - DNA, 74 bp, Homo sapiens
aacctttatagctggagtttatcagattacacagatgaatcttgcactttcaagatatcattgcgaaatttccg

SEQ ID NO: 124090 - DNA, 83 bp, Homo sapiens
cgccaccctgcgctgccgccgctctgaggagttaaagatgatatcatcaagttgaatcgaaaggaagggaagaagcagaattt

SEQ ID NO: 124091 - DNA, 98 bp, Homo sapiens
tgacatccagcgacaaggactttagggacttgccatgaggtgttgaagccttgtttcactgagttggagagactggacctaaatggcgcagcatgact

SEQ ID NO: 124092 - DNA, 90 bp, Homo sapiens
ctttttttctccagccgagaggacgcggctgtgatatacgaagatttatcagcaagactgttgaacgcataactgcccaagatgcctgtc

SEQ ID NO: 124093 - DNA, 99 bp, Homo sapiens
tgactgagaagatggagagggagagggcccagttgctggaagagcaagagaagaccctcactagtaaacttcagatggagtctcactctgtcgcccagg

SEQ ID NO: 124094 - DNA, 100 bp, Homo sapiens
tggccacgctcttccagacctggatggtgcccgctgtgcgtgtggacttctacaatgcagacgagctcaaggccactggagaatgcacggcaaccgtggg

SEQ ID NO: 124095 - DNA, 82 bp, Homo sapiens
cgtccaccggcggctccgcaagaagtaccgagaagctttcggaaaatgtgattgatcgaatgaaggaatcctctccatctgg

SEQ ID NO: 124096 - DNA, 82 bp, Homo sapiens
gttgaacatgtggaaggtgcgcgagctggtggacaaagcgtacatggactatatcgcacaacaggtgctagttttgagaagg

SEQ ID NO: 124097 - DNA, 75 bp, Homo sapiens
cggcgagcccttgggccgcgtctcctttgaggttgctccttcaggctggctacgacccagagctccgggacgggg

SEQ ID NO: 124098 - DNA, 90 bp, Homo sapiens
ctttcaccttctgccgtgattgtgaggcctcctcagccacgtggaactgtccatactgtggaagtatgactgttcccaaagaactcttgt

SEQ ID NO: 124099 - DNA, 73 bp, Homo sapiens
caaacaaggagagcctactgagcagcctgagtggcccattgcagatgcaaaggctcctgagaagcgggcctca

SEQ ID NO: 124100 - DNA, 106 bp, Homo sapiens
ggcgagcagcagttgagcgagcccgaggacatggagatggaaggtcaaaatgcagatcttcgtgaaaacccttaccggcaagaccatcacccttgaggtggagccc

SEQ ID NO: 124101 - DNA, 100 bp, Homo sapiens
agctgcctcagttcttagcgcagcaaggtgtccctgccttcactgtgctccaacctgaaggtcccctggcagtgctgagggaccgagcccagcagatctc

SEQ ID NO: 124102 - DNA, 75 bp, Homo sapiens
cgggacccggttccccggcccacagtgggggtgtgcaaacccgagagaactggggggctagagagctgaaggaga

SEQ ID NO: 124103 - DNA, 88 bp, Homo sapiens
acgagctagtgttggagtgcaccaagaaatgacctgcctagagctggaacgttacctccagagcgagccctgctatgtttcagcctca

SEQ ID NO: 124104 - DNA, 99 bp, Homo sapiens
ggatttggcacttctttactgaaggtttttgccaatccagaagactgtgtagcatttggcaaaggagaaaatgccaagaagtatcttcgaacagatgac

SEQ ID NO: 124105 - DNA, 100 bp, Homo sapiens
atctggccgccgccgccgcgagcgctcccgcaaattcaacacccaacagcttccttaatagcaaaggtagcaacagcccaggatgatataactggtgatg

SEQ ID NO: 124106 - DNA, 51 bp, Homo sapiens
gttcgccagtgggttgacacagataaactgattattgatgagaagaagtat

SEQ ID NO: 124107 - DNA, 100 bp, Homo sapiens
cgacgatgccctggcctctaagggagctctgtttctcaaggtgaagagcgattatatgttagagatagctgatcaagtggaccaggaaattgctttgaag

SEQ ID NO: 124108 - DNA, 90 bp, Homo sapiens
cttggtgcggcgagccgagcgaggcagctctgagccgcgcggtgtcgtgaaaactacccctaaaagccaaaatgggaaaggaaaagactc

SEQ ID NO: 124109 - DNA, 98 bp, Homo sapiens
acttcttgctcatttctgagtattgtctttatatcctgacactatgaatgctacttggatgcctcttaagccttttttccggctgctgaacttgcgca

SEQ ID NO: 124110 - DNA, 100 bp, Homo sapiens
ccccaccctcatcacccagcagctccagctcccggaagtccagcatgtgcaggttccccttctactttgaactgaagatcgccttcgtgatatggctgct

SEQ ID NO: 124111 - DNA, 100 bp, Homo sapiens
caaggactttgtcaggctgaagaagatcccgacatggaaggagatggcgaaaggatttaagaggggtgcagatcccggaatgcctgaaccaactgttttg

SEQ ID NO: 124112 - DNA, 50 bp, Homo sapiens
cacagtggtggtggtgggggtagcaggtgactctgacatcattagaagca

SEQ ID NO: 124113 - DNA, 88 bp, Homo sapiens
gagcttccgcgccgcccgcacgcgcgacctacctgggcgctccgcgcccccggatgctgcaggttgtctgcattcaaaagagcattct

SEQ ID NO: 124114 - DNA, 117 bp, Homo sapiens
ctatatactttggttacctatgtacctgttaccactttcaaaagtcacggtctagatcacattctcgatccagaggaaggcgatactctcgctcacgcagcaggagcaggggacgaa

SEQ ID NO: 124115 - DNA, 100 bp, Homo sapiens
gccataaaaatagcagatatatctggcctaccatccttctgctgctgaaccaatgccaacaggttcaagaacatgaagactcgggtgactcagaagtgga

SEQ ID NO: 124116 - DNA, 100 bp, Homo sapiens
ccgggcagctagcagggcgcttcggaaatgcaatgctggattctttcacaccctgtcgggagaatgtgtgccctgcgactgtaatggcaattccaacgag

SEQ ID NO: 124117 - DNA, 90 bp, Homo sapiens
ggatcctctggccagctgactgcacttcttttttgagaaaggaaggaatatatcctgactgattgtggtgaggatccaggaaagccaagc

SEQ ID NO: 124118 - DNA, 90 bp, Homo sapiens
tcctggtagagccggccgagctgaggcggtcgcggccatgaaggagctttcaagttgtggatggaataaaaaagaaaaatatagttctgc

SEQ ID NO: 124119 - DNA, 80 bp, Homo sapiens
tgaaatgacaacgtcaaccctccaggttcctgcacttggccatcatccatgaagaaaaggcactgaccatggaagtgatc

SEQ ID NO: 124120 - DNA, 74 bp, Homo sapiens
ggtgaaactgggcaagaggccccagcccgtgaaaagtgaggtgccagaaccctgtggagcatcatgaactggga

SEQ ID NO: 124121 - DNA, 75 bp, Homo sapiens
tgcagtccaggctgaagacagagggctctgatctgtgcgacagactggagccagacggactgctggtgtgggtcc

SEQ ID NO: 124122 - DNA, 100 bp, Homo sapiens
ctggtgttctctagtttgcctaagtagaatttacatgggaatgcactctattctggtggcagaaagagcactctattattggaataatgaatacatcatg

SEQ ID NO: 124123 - DNA, 75 bp, Homo sapiens
tgagcagcggctcctccagtgaaaggagcagcacttcaggagatgagacaaaaggacccagtgaaaggaatgaca

SEQ ID NO: 124124 - DNA, 100 bp, Homo sapiens
cccgctcgtcatggcctacccgggatacggaggaggggatagtggccaaagcctccaagaacctcatgtccacgcaaagcttggggattgtatttggacc

SEQ ID NO: 124125 - DNA, 95 bp, Homo sapiens
tgatgtgggctgccgccctatattttttcttccagaatctcagcagctgggaggagtctcaggagcaggggctgcggcagaggctgctggacgag

SEQ ID NO: 124126 - DNA, 100 bp, Homo sapiens
ggcgagtccccagcagggcccctgggctcccggaaggtgaaaggtgtagcagtcactcggcctacacccacagcatcgaccttgtgaacccagcgacctg

SEQ ID NO: 124127 - DNA, 104 bp, Homo sapiens
gagaaattctcatgatagcttccaagggacaaggtgtcaacaatgtgccggtttgtggagaaaaacagcgctttgagaagttgatggaacatttcaggaatgaa

SEQ ID NO: 124128 - DNA, 98 bp, Homo sapiens
accgaccggcctcgagcgccccggcgggaggggttccagcgttcctgaaaatgatcgattggcttccatagctgctgaattgcagtttaggtccctga

SEQ ID NO: 124129 - DNA, 74 bp, Homo sapiens
aaggaccatgctgtttttactcgctttatttgaaggtagacgcatcgaatttgcagaacaaataaataaaatgg

SEQ ID NO: 124130 - DNA, 100 bp, Homo sapiens
ggaggggcgaaggcgggcggcagaggcgatcaggcaccccccgagcccagctccacacaccgttcctggatctcctctccccaggcggagcgtgcccctg

SEQ ID NO: 124131 - DNA, 75 bp, Homo sapiens
gtgaacgcctctgtgtttgaaacaaacattcgaggacgagattgaggagctgcgggccgagatgctggagatgcg

SEQ ID NO: 124132 - DNA, 114 bp, Homo sapiens
ctcttcatcatcttgctctggcggacgctcaagtacctgtggaccgtgtgctgccactgcgggggcaagacgaaggccctccttcagtcacccaggctggaatgcagtggcgcc

SEQ ID NO: 124133 - DNA, 83 bp, Homo sapiens
gctatgataactcctgctctccgagaagcccttactaaacaaggcatgacagcaagcgctgtggcggctttgatcctcatgac

SEQ ID NO: 124134 - DNA, 74 bp, Homo sapiens
ttattcaccatcaacaaagaagaccacacactgggaaacatcattaaatcacgctgaccggaaaggagattgag

SEQ ID NO: 124135 - DNA, 87 bp, Homo sapiens
tatggaagcagaagaagctgaggatgaagaagatgatttgatgcagtttgatgataaaggaaacaagaccaatataccagacaagga

SEQ ID NO: 124136 - DNA, 51 bp, Homo sapiens
ggccgtggagcagtttgaatcgcaaggctccagatggaccctgggaaggac

SEQ ID NO: 124137 - DNA, 100 bp, Homo sapiens
caaggacatcaggacaccgggagtgggagagattggactgggagactcagcaggcactcaaggagttgcccctggtcctgtaattggacttcaggcacca

SEQ ID NO: 124138 - DNA, 80 bp, Homo sapiens
aggaataagataagagctgcctctgctgtaggcccagatagctaataaccgaacacctggaagatggacccagcggtact

SEQ ID NO: 124139 - DNA, 82 bp, Homo sapiens
ggagcgccggccgcaccaccgccctctggccgttgcctcaccggagtgaagacatttccacctggacacctgaccatgtgcc

SEQ ID NO: 124140 - DNA, 100 bp, Homo sapiens
atgggaaggaggccgagccgggatctcaggtcctcgggggcggcggccacgccaaggacgggaaaccaacatgtctgacaaaagtgacttaaaagctgag

SEQ ID NO: 124141 - DNA, 90 bp, Homo sapiens
actctaattgcctcctgatagcacacagaaaggggtgataatgagaagcaatggactagaggattcaagtggaagagtcttcatcacccg

SEQ ID NO: 124142 - DNA, 74 bp, Homo sapiens
ctttgaaaggcctgtctgttcgttgtcgccttctaagggggcaatggcggcttcctgtgttctactgcacactg

SEQ ID NO: 124143 - DNA, 96 bp, Homo sapiens
gagggcaaacctgtgaacccacccgagagcaacaaagcaggcgactacagccacgtgaagtgagctccagtgctgtgaatctctgcttaaagcacc

SEQ ID NO: 124144 - DNA, 88 bp, Homo sapiens
agattcgcagtggtcgcttcttctccttgacgtcgagcagagtatggggctgatgaacagcggggcagtgtacgctctctgggactac

SEQ ID NO: 124145 - DNA, 99 bp, Homo sapiens
agaacggcgacctcaagaagcagctccacgaaaggcagccgcggatcgccgcgctcagcgacaaacaagggtattccctcagcggatactacacccatc

SEQ ID NO: 124146 - DNA, 82 bp, Homo sapiens
tgccgagcccactcgagccgcagccatgtctggggacgaggtattagaaaactactcggatgctccaatgacaccaaaacag

SEQ ID NO: 124147 - DNA, 75 bp, Homo sapiens
aggatcaggagatggctcgagacctcgtaggtctataagaaggagaaagctcgagtcatcactgaggaagagaag

SEQ ID NO: 124148 - DNA, 90 bp, Homo sapiens
gagagagcttgggagactgagacaacaggaccgtcctccttctaatatttggaagaaaatagatcaatccagggactataaaaatggcaa

SEQ ID NO: 124149 - DNA, 100 bp, Homo sapiens
gatcctgtgctttactctgaagactcctccatttatcttaaagaaattggacagcatatgaagacaggacatcacatatgaatgcacgatatgaagagcc

SEQ ID NO: 124150 - DNA, 100 bp, Homo sapiens
ggagacagtggatgcccagcatgtgaaggcctgggtgtctgacatccaagaatgcctgagcccaggagtcacctaaggtcctgcgagtacaagggtcgac

SEQ ID NO: 124151 - DNA, 100 bp, Homo sapiens
aaggtcatctcggagactagaggctggataccaaatagcagtggaaaccgtggcccaccctcaggaccctcaccacccatcagagaagcctgtcattcac

SEQ ID NO: 124152 - DNA, 101 bp, Homo sapiens
ggcggctgatggcggatcaggatcggaagcctgcgtaactttctcccttgatccgggagtctttccactgggaacacgagctgaacaactactcatgcaag

SEQ ID NO: 124153 - DNA, 82 bp, Homo sapiens
tttgtggaagatggcgcctgttgtgacaggggagatgcagttaaagacttgatgcttcgctttctgggtgaaaaagctgcag

SEQ ID NO: 124154 - DNA, 75 bp, Homo sapiens
gcaagtattgctgtgggtgctgggacttcccgtccgcggcgtggagggtatctcgggggagctttgtgccttgat

SEQ ID NO: 124155 - DNA, 82 bp, Homo sapiens
tggctggcttcagtggaccataattcgccaaaatgacgaacacaaagggaaagaggagaggcacccgatatatgttctctag

SEQ ID NO: 124156 - DNA, 82 bp, Homo sapiens
ggggagagttgggagaggctttgctgctgaggaaatttatttggtagattgaagggttgaaaggaggagcaggaggtactga

SEQ ID NO: 124157 - DNA, 100 bp, Homo sapiens
aatgcagagctttgtgagataccacccacttctgatacaaagtcagatactgcaacagtgcagcgtaagtatgcacagatgaagatggaactaagccgag

SEQ ID NO: 124158 - DNA, 87 bp, Homo sapiens
cctgtgcaaggacctcagcagcttggacacagcccactgcagaggttcatcatgcctagtggcgtataagaagaccccgccaccggt

SEQ ID NO: 124159 - DNA, 100 bp, Homo sapiens
ccgcgggggagccccgggagccgcacggtgcagtagacattgttgcaatcatgatcggcaatctgaaaggcacaaaaattctgcaatctattcaaagagg

SEQ ID NO: 124160 - DNA, 90 bp, Homo sapiens
gctgaacaggccaaagccagactacagctggttcttgaagctgctgtatgccaccacgggctgttccctgaccctgcaccatacggagaa

SEQ ID NO: 124161 - DNA, 75 bp, Homo sapiens
aagattactatcactaatgacaagggatcacccggaccttttgacaggggacctgactctcaatgacatcatgac

SEQ ID NO: 124162 - DNA, 100 bp, Homo sapiens
aagctgcagaagaaggcgcgcaaagctccggtgtcggcgggtggcgcggcgcccccggagggggccatatctaacggggtttacgtactgccgagcgcgg

SEQ ID NO: 124163 - DNA, 100 bp, Homo sapiens
agacggtgaggtcagcttcacattctcaggaactctccttctttgggaataaaattgaagggtgtttttcttagagaacatcatttgtcatatttatttg

SEQ ID NO: 124164 - DNA, 100 bp, Homo sapiens
accatgccagaccgtggaagatttaacgaatggggttgtgatggcccaggttcttcaaaagatgtcaaaatgcagatcttcgtgaaaacccttaccggca

SEQ ID NO: 124165 - DNA, 83 bp, Homo sapiens
cccgcagccgccacctacccagtgaccatgataggaaaattgcctaagaattatgacccaaaagttaccccagatccagaaag

SEQ ID NO: 124166 - DNA, 100 bp, Homo sapiens
taaccagaaggatggggatggctgcactgtcctgcacgtcgtcgctgcccactccccaggatacctcgttaagcggagactcatgcatctgtatgccgtg

SEQ ID NO: 124167 - DNA, 75 bp, Homo sapiens
ccttcctctgcaccaagcggaagatgatggagaaggatgaaactgtgagtgactgctccccacacatagccaaca

SEQ ID NO: 124168 - DNA, 100 bp, Homo sapiens
tggcccaagacggggtccccgagtggttccatggtgcaatctcaagagagtgaaaggtgtagcagtcactcggcctacacccacagcatcgaccttgtga

SEQ ID NO: 124169 - DNA, 83 bp, Homo sapiens
gtccgggaggcgcttccacctctccaccaccgaccgcgtcatcaaaggtactgatgctttgggttggaaaaaattgtacacag

SEQ ID NO: 124170 - DNA, 100 bp, Homo sapiens
tggcacctgcgcgaagctggccaaagcctgcccagacggctcacctgtgcgggatggaacaaaaggtccaaagaggactggtgatctacgtgtgcttttt

SEQ ID NO: 124171 - DNA, 75 bp, Homo sapiens
ctggacaccaaatacccgtacggaaacccagcgtttgctggcagaaccagttcctggcatcaaagccgaaccaga

SEQ ID NO: 124172 - DNA, 100 bp, Homo sapiens
ccgcgccatcgagaccctctcggtcaggtagcattggtgctgcagatagtcctgagaactgggagaaagtctgggacaactggaggctgctgacaatggc

SEQ ID NO: 124173 - DNA, 75 bp, Homo sapiens
agaatccaccaccacccatcaattttcaggcccctgagctctttactacagaaaaagcatggaaagctttggaga

SEQ ID NO: 124174 - DNA, 100 bp, Homo sapiens
ctgtcttgaccaattttgaagtaaaaggtattgaaatggctaaagaaagtccttcaagaagtatagatgtgaagctattaagtacctcacagaagctctt

SEQ ID NO: 124175 - DNA, 139 bp, Homo sapiens
agcccccaaggcccttcggcgggcccctgctgaaagaccggcatgccctattctgtgggcttccgcgaagtatctcagatgaagacatcatcaacattactcttcctactggagtccccattcttctggaattggatga

SEQ ID NO: 124176 - DNA, 100 bp, Homo sapiens
cggaaatgtagccagtggggccgccagaagcctggaatggtcccccctccgccgggagaagaaagccagacggtcatccttccacctggctggcagagct

SEQ ID NO: 124177 - DNA, 73 bp, Homo sapiens
ccatgactttcgggaaactgcggatgtcattgccaaggattatgatgttgatgaagaggacatgatgaatcag

SEQ ID NO: 124178 - DNA, 97 bp, Homo sapiens
tgctgcatcaagaaacccaagctgctgagaacccaaagattggatcttctgagaacatcagagaaagactgtccttaccatccacaccacagcaaaa

SEQ ID NO: 124179 - DNA, 74 bp, Homo sapiens
ccttctgctgtgaaactatttggcaagaggctggaggtatgatctcgtgaaaccttgagagaaactgaatgacg

SEQ ID NO: 124180 - DNA, 75 bp, Homo sapiens
ctgtcagcttcgaccagccccctgaaggcagtcatctgccctgttacaacaagaacctcagtgtcaaccccaaga

SEQ ID NO: 124181 - DNA, 100 bp, Homo sapiens
cgaaaatggagcacgtccaggctgaccacgagcttttcctccaggcctttgagaccaaatgatttctcagtatcactaaaagcacaagggaaaaacaagc

SEQ ID NO: 124182 - DNA, 104 bp, Homo sapiens
cgcctaacttctactgacgaagcttggaagttgcagaagttttctggatatgccgcagaaggatccgtgccagaagcaagcctgtgagatacagaaatgtttac

SEQ ID NO: 124183 - DNA, 76 bp, Homo sapiens
tgggccctgtgaccagctgcactggtttcgtggaagctctgcaagatttgaagggtcccttaatatggaccttaat

SEQ ID NO: 124184 - DNA, 74 bp, Homo sapiens
taaggattccaagtaactcttatttgcttctcaataggtttggcatggacaagatctatgaaggccaagtggag

SEQ ID NO: 124185 - DNA, 100 bp, Homo sapiens
aacgccgaatggcatacaattagaagctgagaaaaaagcattctctgaaaaccttgatcctgaggttaaagtattgcacaatcagctggtccttttccac

SEQ ID NO: 124186 - DNA, 148 bp, Homo sapiens
gaagaggaagaggccttggtccaacacaaattgcctccttatgtctccaacatggaccgcctgggggactcggaacttttttccagaaaggaggagtcaaggaagcccttagtgaacgagaactcttcaatgctgtttcaggcttaaa

SEQ ID NO: 124187 - DNA, 117 bp, Homo sapiens
taccgagatgcggttttcctcgcagaacgcctttatgcagaagagttacactgttagaccttatgatagccaagataacgagtgatgagccactcaccaaggatgacatccctgtgt

SEQ ID NO: 124188 - DNA, 100 bp, Homo sapiens
cttcatcctggcactcaccgtcctctctgtctgtgccatcgccaccaatggagccgtgcaggggggcggagcctactttacctaatggtgtcctcagttg

SEQ ID NO: 124189 - DNA, 75 bp, Homo sapiens
ggagctcaggcaatttgtaaaaagcaggtcttaaaacattttggaaaaagttgaagctctccttttctaccctcc

SEQ ID NO: 124190 - DNA, 73 bp, Homo sapiens
gtccccgtctccagttcagggcaagaagagtccgcgactcctgctatgactttgcagccgtcctggagtggtt

SEQ ID NO: 124191 - DNA, 90 bp, Homo sapiens
aatgagatcaagaaagagaatggagaagtaaagattttgctgaaaagtgctggagaatctggtaaaagcaccattgtgaagcagatgagg

SEQ ID NO: 124192 - DNA, 75 bp, Homo sapiens
attctgatttgctgccttatctttctgactctaagtggcattcaagggaatgggtactgttcaaaaaggaatgcc

SEQ ID NO: 124193 - DNA, 82 bp, Homo sapiens
atgtagtacttgagtgttttcatttgcggagagctccctggtgactgccagcccaattggaatcgaagcctcttaaaatggc

SEQ ID NO: 124194 - DNA, 96 bp, Homo sapiens
cagaccccgagcgcggccgcggacgaagatggcgaccgccatgtacttggagcactatctggacagcctccggtgtggctgtctctgatggtgtca

SEQ ID NO: 124195 - DNA, 97 bp, Homo sapiens
caagtaatttgctttttaagtggagaaatatggctgacaggagcttcaggatggttcgtactaagacatggaccctgaagaagcactttgttggcta

SEQ ID NO: 124196 - DNA, 92 bp, Homo sapiens
ctgcagagccagaagggagtgcagggaatcatcgtcgtgaacacagaagcggccctccaggcactgaagcgtaagaagaggtatgagaagca

SEQ ID NO: 124197 - DNA, 101 bp, Homo sapiens
ttagctccagttcgctctagcagacaagatcagatccacagactatatcatcatgtacatagaaaaatccaaaggattctgcaaaaaagctactagaacca

SEQ ID NO: 124198 - DNA, 75 bp, Homo sapiens
gcctttctcattattataggctccctcctgctgtcaggctacatcagcaaagggttgtggacatcggatacccaa

SEQ ID NO: 124199 - DNA, 75 bp, Homo sapiens
accagtatttaggaagctgtcctggctcagatggctcggtcatcacggaaccagtggctctgaatatcagcgtcg

SEQ ID NO: 124200 - DNA, 100 bp, Homo sapiens
gatgagcctgcagagcgcgcagtacctccggaagcaagatttccagatgtagcaaatgggtttattgaggaaataattcattttaagaattattatgatc

SEQ ID NO: 124201 - DNA, 99 bp, Homo sapiens
gcgagctgcttccgaaggctgaccgagtgcttcctgagccccaatcatgctgaactccttgcataagtatgagcctcgaatccacatagtgagagttgg

SEQ ID NO: 124202 - DNA, 110 bp, Homo sapiens
acagatgccagcgtagctgaatccagtaccaaaaacgtcaacaacagttttacggtcatcatcagatttgaaatatttaaagtggatacaaaactatttcagcaatgcag

SEQ ID NO: 124203 - DNA, 74 bp, Homo sapiens
tgttctgcacctcaggagggaattcagcctcagtgatgtccatgagttgccttgttgaaggggatgctaaagaa

SEQ ID NO: 124204 - DNA, 83 bp, Homo sapiens
agggggaaggttattagacttcatcggcggaagcaggacaacatatcagctgactggaaataccggcatgcaggattgatggc

SEQ ID NO: 124205 - DNA, 49 bp, Homo sapiens
tgaacattgaaatgcacaagcagcctgacatttaccccggtaactgctg

SEQ ID NO: 124206 - DNA, 97 bp, Homo sapiens
agctggggaaagaggaacaagtggggacataagccttttaacaaggaactctttttacaggccaagaggaacccctctcccagatcactgcctactg

SEQ ID NO: 124207 - DNA, 80 bp, Homo sapiens
ggaggcttactgcaagaagtatgagcagctcaagatgccagcctggcggtctcattcagccagccaatcatgtattgcca

SEQ ID NO: 124208 - DNA, 75 bp, Homo sapiens
gcacatggcccaggcagaccttgcagtcaaagctctgtgtgctccgggatggagcaggtgtgcagagggtgagaa

SEQ ID NO: 124209 - DNA, 83 bp, Homo sapiens
gtagagagagagaaactcactccccgagtccccgaccctccccaagcaagaggcttcgtgacggagttatcagagacattgag

SEQ ID NO: 124210 - DNA, 100 bp, Homo sapiens
ccgggccgcggatccccaagcccgccacgccgcccagcccggccccgcccgcgccggaagagccacgccggtcattttatgccacctgaaaaagtacata

SEQ ID NO: 124211 - DNA, 73 bp, Homo sapiens
tctgcagtctgtggtgtgtttgctgttcccaggcatccgtgtacaagatttgcagagaaatgtatgacgatgg

SEQ ID NO: 124212 - DNA, 75 bp, Homo sapiens
gcgcgattcgcggcagcgccccgatggaacctcctggtcctgtgagggagaatgaagttgaagaggtaaaagagg

SEQ ID NO: 124213 - DNA, 98 bp, Homo sapiens
ctaaggccgcgttggggtgagaccctcacttcatccggaagcagaacatcagagagccatgcagagacgtgctatccgtgatgccaaaacacctgaca

SEQ ID NO: 124214 - DNA, 98 bp, Homo sapiens
gacgacctgctacaacagaacagtggtctcggaaagagggtcgtggtcccgcacggatgcgcttgttgggagaaaccttggagattcacggcaaggcg

SEQ ID NO: 124215 - DNA, 75 bp, Homo sapiens
cctctgcccccccttccccacgcaaccccagatccatttacactttacaatgccttcaattaagttgcagagttc

SEQ ID NO: 124216 - DNA, 100 bp, Homo sapiens
cgagcacccgcctccgggcatcttcaactgttcgatacaagaggctgttttcctagcgtggcttgctgcctttggtaagaacatgtcgtccatcttgcca

SEQ ID NO: 124217 - DNA, 83 bp, Homo sapiens
gacagcgcgcacttcacccgcagttggagccttcacgtaaatgggtccagtcatgcctcccagtaagaagccagaaagctcag

SEQ ID NO: 124218 - DNA, 98 bp, Homo sapiens
acgccgcgcagctacctcatgactattgcaccacgcccggggggacgctcttctccaccacaccgggagaaagtgaagtcactgcttttgctgtcttg

SEQ ID NO: 124219 - DNA, 100 bp, Homo sapiens
tttgctcgcctggtcaactataacaagatggtcttctgtccctactacgatgcaatcctgatgggagattttgataagatctggcgagaacactgtgagg

SEQ ID NO: 124220 - DNA, 127 bp, Homo sapiens
ggaggaagccgactgctgcctggtctgcaaagaagtcctttcaagtctctaggactggactcttcctaagcaagtccggtgcccccgggagtagtcagaaagtctcgtcgtggccgtaggagaaaat

SEQ ID NO: 124221 - DNA, 100 bp, Homo sapiens
caaggacggcgttctggatctcaaagcggtgaccaagaatatggcccaggtgaccaaagccctggacaaggccctgagcaccatggacctgcagaaggtc

SEQ ID NO: 124222 - DNA, 111 bp, Homo sapiens
gaatgtcagaagagcaagaaacagaagcttttgtagaggaacctagtaaaaagggagcacttaaggaagaattcctgaatttgacaacttgtacctggatatgaatggaat

SEQ ID NO: 124223 - DNA, 98 bp, Homo sapiens
cgcggagatctctctcatctcgctcggctgcgggaaatcgggctgaagcgactgagtccgcgatggagggtgattctgggggtccacttgtctgtaat

SEQ ID NO: 124224 - DNA, 75 bp, Homo sapiens
ctggcccctgtttaccactgtctccattactttgaacttttgaagcttaccctgaaagaagcagatcccagttca

SEQ ID NO: 124225 - DNA, 100 bp, Homo sapiens
atctggggactgcctttaccaacaagactaaaagattacttggaagaatataaattccagatcggcttcaccaccgaccctcggatggcccgctcctccc

SEQ ID NO: 124226 - DNA, 100 bp, Homo sapiens
gaatcaggaaaaagcaccattgtgaagcagatgaagttccatgcaggtgatgaacaagacccggcgcatcatggagcagggcggggcgcacttcatcaac

SEQ ID NO: 124227 - DNA, 82 bp, Homo sapiens
ggatagacaataccacaacaacacattttgcagagaaggtggtcttctgccctgttaaagaagccctggaggtggactggag

SEQ ID NO: 124228 - DNA, 99 bp, Homo sapiens
ggtgttctggtgcacccccagtgggtcctcacagctgcccactgcatcaggaaatatggatcagaaactttcgaagttggtagaagagctcacaacttc

SEQ ID NO: 124229 - DNA, 100 bp, Homo sapiens
cttggagttcgcctcagacgcggtggagccgccggagtctgagaagcaggggaaatgctgtctgtagctgagcacttcctggagcagcagatgcacccaa

SEQ ID NO: 124230 - DNA, 75 bp, Homo sapiens
aaacttccgtgttctagtgaaacagaagaaggccagctttgaggaagcatttatgacattaacagagaacaggac

SEQ ID NO: 124231 - DNA, 75 bp, Homo sapiens
gttcctcttacccagcaaaaagctgtgatggaatctgaaatgaagtttgacaaggaccatgatggactcattgaa

SEQ ID NO: 124232 - DNA, 80 bp, Homo sapiens
cctccgccaccgccgacagcgcgcatcctccgtgtccccgctccgccgcccgagcagtcctgatcctggaggccatcgag

SEQ ID NO: 124233 - DNA, 134 bp, Homo sapiens
ctggcaacaccacttgacagagaattaagtgtatggcacaacataacaatcattgctactgaaattaaaatgagccgtcagactgctacagcattacctaccggtacctcgaagtgtccaccatcccagagggt

SEQ ID NO: 124234 - DNA, 74 bp, Homo sapiens
agcacatacgcttttcaaaaggtcatgcacttacagctaaagccattaaggctacccacctttctgttctgaga

SEQ ID NO: 124235 - DNA, 120 bp, Homo sapiens
cggggcctttttgacagcttccgccgggactgcctggccgacgtggacaccaagacagcatcgcacagaattattttaaaaaaaagcagtgatccaagcaattgaattggaagcactctg

SEQ ID NO: 124236 - DNA, 98 bp, Homo sapiens
gacagatcaccccacctcttggctggatagcagtgagattcacttcaaagtgaaaatgacaacacatctcaagaaactcaaagaatcatactgtcaaa

SEQ ID NO: 124237 - DNA, 76 bp, Homo sapiens
ggggagctgaggctgaaatctgatgaacgactttcgaagtaaaatgcaatcaatatttccaacaattcccaagaac

SEQ ID NO: 124238 - DNA, 96 bp, Homo sapiens
atgcttcagtgcgcaggaagtggggcagctgcgggcgctgcgtgccgtgttccggagccagcagcagacatgcaagaaagcacttcagccaagcag

SEQ ID NO: 124239 - DNA, 99 bp, Homo sapiens
cagtctacgtgcaaccaccattagaattgacttgtgatcagttcacctttgaatttatgacggagtttaagagagctgtgaaagtagcaacaggacaag

SEQ ID NO: 124240 - DNA, 75 bp, Homo sapiens
ttggcaccatatactactttttccagaattcatacaaagagtggaattgcaacccagtgaagaagttacctggaa

SEQ ID NO: 124241 - DNA, 98 bp, Homo sapiens
caccaccaccatctccatcacccaccaacaacaccacaataatccacagccaaggtgatcatggagctcagcttggtctccatggggctggtggtgat

SEQ ID NO: 124242 - DNA, 50 bp, Homo sapiens
aaaacattggaattctgcttatctaggagttcatgatcaagtgttgccca

SEQ ID NO: 124243 - DNA, 76 bp, Homo sapiens
ctttttcgtttttcggatgatgccttcaatactacctttatttccaccataggagggccaaacatgtgggctatta

SEQ ID NO: 124244 - DNA, 75 bp, Homo sapiens
ccgaaccgtgaagggctggaggccccggcggctagcaattaccagctctggctgggtcgccacaacttgtttgac

SEQ ID NO: 124245 - DNA, 75 bp, Homo sapiens
tatgatagacacaatgcagaggtagcagcctttcacttggacagggatgcttcctttggaaattgcacttacaat

SEQ ID NO: 124246 - DNA, 100 bp, Homo sapiens
cgctatcacagctgctgcaatcgcttgggagagctcctgggccacccctcctttcaggtcaagaacatccagtcatggataaaaatgagctggttcagaa

SEQ ID NO: 124247 - DNA, 50 bp, Homo sapiens
gttcgggtttttctagaacacggaggctctccctgcatgtcctatccagg

SEQ ID NO: 124248 - DNA, 98 bp, Homo sapiens
gagccgggttgggggagcggctcgtggagtgaagatagtgatccggggagacaggaacacgggcaagacagcgctgtggcaccgcctgcagggccggc

SEQ ID NO: 124249 - DNA, 100 bp, Homo sapiens
cctggtccagctctcaggacaagaacaaagtgtgctggagcttactccacgggaacagcctctagataatctgagttgttgaaaatacgaagcctgttac

SEQ ID NO: 124250 - DNA, 90 bp, Homo sapiens
gtctgacatttcttttgtgcaagatgagcctcaagtgcttctgcattacaattcaaatgtaccagctgtccaggctccttcatgactatc

SEQ ID NO: 124251 - DNA, 100 bp, Homo sapiens
ccaccatgggctgcctggacctgcccggagagattggcctggggtacatcatctaaagatcctaggattgctgcaggtcagcagtctccactggaaaaaa

SEQ ID NO: 124252 - DNA, 73 bp, Homo sapiens
tctgctcagaagtgccattctattggagagacaggtgatctgtgaaaatggttcgctattcacttgacccgga

SEQ ID NO: 124253 - DNA, 142 bp, Homo sapiens
tgccattctctgaagtgattaattggaaccaagctgccgtcataggcgatgagagattgttattacaggtggctgctacaccccatgtaaaaagcggaaaataaaatgaagattttccagcgcaagatgcggtactggttgc

SEQ ID NO: 124254 - DNA, 88 bp, Homo sapiens
agtataacttggaccagtttactccagtaaaaattgaaggttatgaagatcagattgactttgaagatgtgattgcagaaccagaagg

SEQ ID NO: 124255 - DNA, 82 bp, Homo sapiens
cttcctgtcgctgacggcgactgcgggaggccagggagtggagcttggtttcgggatctcggtgctgcagacggcgagacct

SEQ ID NO: 124256 - DNA, 100 bp, Homo sapiens
ctaccatgacgaaaacatgtactacagccagtcttctatgtttccacatcggtcagaaaaagatgtgtgtgatctgtatgatggactttgtttatgggga

SEQ ID NO: 124257 - DNA, 82 bp, Homo sapiens
cccggacgaaggtactcgcagcacttggagcgcagaaccggccgcgcccggcttgggcactgtttaaaggaaagttccgaga

SEQ ID NO: 124258 - DNA, 75 bp, Homo sapiens
gaggaccagtgggaggatggagcagaggacattctagagaaagccgagcccaggaagtgcgtcccctccgtggtc

SEQ ID NO: 124259 - DNA, 75 bp, Homo sapiens
ccagttagtggatatagcacaccatccccagccagtgacttaagagattaaaattaatttggttgctgttggttc

SEQ ID NO: 124260 - DNA, 100 bp, Homo sapiens
atgcaccgagtccagcccaggaaaatggagaggtttgttatccaggcataagaccaagaaattatcttcagaaaaggacattcatgaaatcagtttatcc

SEQ ID NO: 124261 - DNA, 101 bp, Homo sapiens
agcagttaccttgcagagatgatggaggcttggagtacccataatacagtgagcccaccctcgtggtccccagacatttcaggaggtcgggaaatttttaa

SEQ ID NO: 124262 - DNA, 50 bp, Homo sapiens
ggttgatcgtggattatttgagaataaccgacggagcccgggcagggaca

SEQ ID NO: 124263 - DNA, 88 bp, Homo sapiens
ctgtgctgccacaccctccagtagtgtctagttctggctcctaccagagagcttgcccagcaagtacagcaggtggccgatgactatg

SEQ ID NO: 124264 - DNA, 82 bp, Homo sapiens
cgctcctaagcctgcacagccgcggcggcagcagcagtgagagtttggtgccctggttgtcagatgttggaaagcagtagga

SEQ ID NO: 124265 - DNA, 75 bp, Homo sapiens
ccggccggtccctcgcctcccggccgagctgacggttctgcggggagtgtctccagccctgcctgcaggtgccat

SEQ ID NO: 124266 - DNA, 100 bp, Homo sapiens
ggtggttgggccccatcactcccatcatcaacttgtgccaccctgacatcgtccgatctgtcatcaatacctcagtactacgagatgtcctacggcttga

SEQ ID NO: 124267 - DNA, 99 bp, Homo sapiens
ggccaagatgtctgacatggaggatgatttcatgtgcgatgatgaggaggactacgacctgatttgtcccatcagatgaaaagaagaaacaaggttgtc

SEQ ID NO: 124268 - DNA, 100 bp, Homo sapiens
ttgaagaattgtctgaaagaaaatatggacactgcccatctctaagataagaacctggaaaggggactctgttggccattggaaattgcagaataatgtc

SEQ ID NO: 124269 - DNA, 75 bp, Homo sapiens
atcagaatgccaaatgtgtttgcatgctggtgattcgcctttgccagtctcatctcgtgtctgctttgttaagtt

SEQ ID NO: 124270 - DNA, 100 bp, Homo sapiens
tgcccctccggcctcgccatgaggctcttcctgtcgctcccggtcctggtggtggttctgtcgatcgtcttggaagggtgtaccagtgatggcaataaga

SEQ ID NO: 124271 - DNA, 100 bp, Homo sapiens
gccggcccggcggctgctgctgctgctgacgctgctgctgcccggcctcgggatgaggacggggacttggttgccttttccagtgacgaggaattgacaa

SEQ ID NO: 124272 - DNA, 83 bp, Homo sapiens
agggtttccaccgttcgttcaaggcatgtcaaaggccgtgtgctggtggctctggcggacgggaccctggccatcttccaccg

SEQ ID NO: 124273 - DNA, 83 bp, Homo sapiens
cggaacccgagctggagctgaagcgcaggctgcggggcgcggagtcgggaggcgtcccacagggagagtgaggaggccctgca

SEQ ID NO: 124274 - DNA, 100 bp, Homo sapiens
gttaaggattccaagtaactcttatttgagacacttttttcaaaacttaggatctattttaacgtatgccttcttgggaactgccatctcctgcatcgtc

SEQ ID NO: 124275 - DNA, 75 bp, Homo sapiens
attcgcagtggtcgcttcttctccttgtcaacgttggtgaggactgtccagtattcgatggcctgtttgagttct

SEQ ID NO: 124276 - DNA, 75 bp, Homo sapiens
ccgagtggtctgccgagaagccagtcacgccgggagctggtacacagcctcaggggaagatgatgacgacgatga

SEQ ID NO: 124277 - DNA, 75 bp, Homo sapiens
aaattcctatcactaaaggatttcctaagactcccaacctgatgaaatctcagagaagagcccagaaaatcaagg

SEQ ID NO: 124278 - DNA, 100 bp, Homo sapiens
aggcagcagcgacgctgcccaaaaggctgtccggcccagctcaacattggcaatgtgctccctgtgggcaccatgcctgagggtacaatcgtgtgctgcc

SEQ ID NO: 124279 - DNA, 82 bp, Homo sapiens
catctatcagcaggctccgggctgaagattgcttctcttctctcctccaagtacctggagtagaacagaaaaattattatgt

SEQ ID NO: 124280 - DNA, 116 bp, Homo sapiens
gcgaggattaagtttaagacttcgcgagaacagaatttcttttggcacctcctctccgcgcgttcttgggatcgtcagtatttaaacagatcacatcatgcgtgagtacaagctag

SEQ ID NO: 124281 - DNA, 75 bp, Homo sapiens
gtaccggctctcgcacgactgcatctctctctgcatccaggcgcagaaagacgagaatccaggacttgaatcgta

SEQ ID NO: 124282 - DNA, 102 bp, Homo sapiens
tgctgatcgcctgggtggttgttggcgtgtccctgcagcgaaggatcctggagaactacgatgacccgcacaaaacccctgcctccccagttgtccacatca

SEQ ID NO: 124283 - DNA, 106 bp, Homo sapiens
attgacgccatgtcgggttattcgagtgaccgagaccgcggccgggaccgagggtgctgcagggtgcacagctgatcgccgtggcctcctcggaccccgcggcggc

SEQ ID NO: 124284 - DNA, 75 bp, Homo sapiens
ccctgcagtacctgcagaaggtctctggagacatcttcagcagggatgctgagaacttgctggagtcacagccac

SEQ ID NO: 124285 - DNA, 100 bp, Homo sapiens
caggggcagagggaccactctgacagggcttttttgaagaagaagaaggtaaagagtatatttataaagagcctaagctgacaggtctgtccgagatttc

SEQ ID NO: 124286 - DNA, 116 bp, Homo sapiens
gagaatttaacaaccttttggtcatggggactgatagaaggtttgatgaatggacgtgatgctgaatccaggcagtgccacttcgaatgttgctatttctgtggatcagagacaag

SEQ ID NO: 124287 - DNA, 73 bp, Homo sapiens
aggacgctgatggaggaggaccctgaaaaatacgaggaacttcttcagatcatgctcagtggtgccggtgccc

SEQ ID NO: 124288 - DNA, 83 bp, Homo sapiens
agacacgcttcacatacactacacggagaaaagccttacagatgctcatgggaagggtgtgagtggcgttttgcaagaagtga

SEQ ID NO: 124289 - DNA, 83 bp, Homo sapiens
ctgcggcagaagccgagttcaacatcctcctggccaccgactcctacaagtgtctccagaacgctatagctatggcacctcca

SEQ ID NO: 124290 - DNA, 98 bp, Homo sapiens
actgacgaccgaaacaagatgtcagtgaaggaccatgaaaaagctgaatttgaggtacatgaagtatatgctgtggatgttctcgtcagctcaggaga

SEQ ID NO: 124291 - DNA, 100 bp, Homo sapiens
taaagccatttgaaaagttcttgctgaagctagaagggcaattactggatggaatgatattccagatgctttgctgactaatgttgaccagattgtccag

SEQ ID NO: 124292 - DNA, 100 bp, Homo sapiens
tctgattaagcagttttacagtcttttggtgttcaaagctgaaacaggagagaaacttctagaaatcaaggctcatgaggatgaagtgctttgttgtgca

SEQ ID NO: 124293 - DNA, 89 bp, Homo sapiens
acatctctagataacagtctgcactttcacccgtttcagtccgggaccatgtctggagaactaccaccaaacattaacatcaaggaacc

SEQ ID NO: 124294 - DNA, 100 bp, Homo sapiens
gcctcccagagtgttgggattacagcggctccagcaggagaaccatgagctccggcgaggcctggcagcccgaggagccgagtgggaggcccgggccgtg

SEQ ID NO: 124295 - DNA, 100 bp, Homo sapiens
ctaagggatccagcagtccaaagcctcttacagcctggggagtgcgagagaaacccagccgaagcatttaaaagagtcactcaagggaaaggattaatgc

SEQ ID NO: 124296 - DNA, 83 bp, Homo sapiens
attcctctggctttatattccaacccttcagtgtttgtagataagttagtatcaagctacaagcaggggggtgtcgcctctgg

SEQ ID NO: 124297 - DNA, 145 bp, Homo sapiens
tttttttttgcggaacctgaaaaattcaagaagttgaaaaacgcttttcacgtcacctggagagatgcacagaatggaggctccagagtgaaattaatgacactttgtcgatgaagatcttgattgtgacctctgtggaaaatga

SEQ ID NO: 124298 - DNA, 90 bp, Homo sapiens
tgaggatccagaaaccgccccagcgatggaagaggatcaggagctggagagccatgaagtcggggggcacgcagctgaagctcatcatga

SEQ ID NO: 124299 - DNA, 98 bp, Homo sapiens
cttgtttgctagacaccggaccaaaatgaggcgtaagaaacgctttgcaaagcaagggatcccaacggcttcaatgactggaccttctccactgtgcg

SEQ ID NO: 124300 - DNA, 90 bp, Homo sapiens
cacagaaaagccaccgagggctacagcctcgggaaaagtcaccaggagactaaagtccatcaaaaacatccagaaaattaccaagtctat

SEQ ID NO: 124301 - DNA, 100 bp, Homo sapiens
cctggctgggattcctacacaatgcgttgcctggctccacgccctgctgggtcctacctgtcagagccccaagattttacatcctgaagtccaaactcta

SEQ ID NO: 124302 - DNA, 101 bp, Homo sapiens
gcttctgtatacctgagggaaactgcctgggctcaggagttctgaatgtcagcatctgcaagaatgtggtaaatgagaatgtcagtctcgtgatctcgcgg

SEQ ID NO: 124303 - DNA, 50 bp, Homo sapiens
gcgcgagggccctgggcaaggcccgacagatgtctttggtggacttggga

SEQ ID NO: 124304 - DNA, 100 bp, Homo sapiens
agcgttatatggccagcattttcccattgaggtgcggcattatttatcccagtggattgaaagccaagcatgtttcttcagatggaggtactgagccctc

SEQ ID NO: 124305 - DNA, 100 bp, Homo sapiens
agccatcggaaatttccgaggccagtgaggaaaagaggcctcgtccctccactcctgctgaggaagatgaagacgggcagcaggatgggtgtggaagcag

SEQ ID NO: 124306 - DNA, 75 bp, Homo sapiens
tacgccaaggaggtttacaaaatagacatgccgcccttcttcccctccgaaactaaaccatttacttctaaagtg

SEQ ID NO: 124307 - DNA, 100 bp, Homo sapiens
cacaatacctaaccaagacagtcagttaggcaaagagaacaaactatattcacctgccaggccatcaccatcgaggctgagccaagagctgatggcagcc

SEQ ID NO: 124308 - DNA, 100 bp, Homo sapiens
gcagtgtgcagcctggattttctttgctaaggagttggtaatgcttctcttagaatataatgctgatactactattgttaatgggagtggacagacagca

SEQ ID NO: 124309 - DNA, 100 bp, Homo sapiens
aatttgtcttgatgggctacagttagagtctgaagttgttaccaatggtgaaactacatgttcagaaaaattttgatttggctgctgggctgctaccttg

SEQ ID NO: 124310 - DNA, 97 bp, Homo sapiens
agccctgtggccacctctgctgctgtgtggtgcgaggctgtgagcagggctgtgggacagatgatgtctaccatgttctacccactggtcacctttg

SEQ ID NO: 124311 - DNA, 100 bp, Homo sapiens
actgtaagatcacaagcctgtatgtggaatgtaggtcgttcttccctctttccaatagatgatggcttgcttgatgatggtcacagtgatcaagttggag

SEQ ID NO: 124312 - DNA, 90 bp, Homo sapiens
gtggaaataattaatgaccgaacagaaacccctcctcccctagcttcactcaatgttagtaagctatcagaggactcctgaaacctggag

SEQ ID NO: 124313 - DNA, 75 bp, Homo sapiens
cgcaaggcctgaggcccagcacagaagaaagatctgtcagatcctttcaatgacgaagaaaaggaaaggcataaa

SEQ ID NO: 124314 - DNA, 100 bp, Homo sapiens
gatgcgctgagccctacaacacccccagcggccgccggctcccccacgaggtgtcatggagaaactccagctgggcccagagattctgcagcgggaaaat

SEQ ID NO: 124315 - DNA, 82 bp, Homo sapiens
tggaaaatgcgctcgggctggaccagcagcactctcgagtggaccctgaggagctcttcaccaagctcgaccgcattggcaa

SEQ ID NO: 124316 - DNA, 82 bp, Homo sapiens
tacctgtgagatgtttcatcccaacaagacgaggtcttgctacattgtccaggatggagaagtaggaattcttaaggatatt

SEQ ID NO: 124317 - DNA, 96 bp, Homo sapiens
ctgacccggtctggcttgttcgggctcagcggccgcgaggccgcagctcccgcagagcatcctggccagaacaagccaaggagccaagacgagagg

SEQ ID NO: 124318 - DNA, 99 bp, Homo sapiens
atgtacccccagtacacttactactatcctcattatctccaaaccaaggaacctctggcgggaggtgacccgatacctgcggctgggggacattgacgc

SEQ ID NO: 124319 - DNA, 82 bp, Homo sapiens
ccagttccagccttgtgacagtgatactaggaggaagaaggtgggaaaggtgaaaagaggaagagagaaacagatgatgaag

SEQ ID NO: 124320 - DNA, 100 bp, Homo sapiens
cacggccactggccagaggtacttcctcaagtggggaccaaggcatactgaacacattttttagcagctgggcaacaacagatatcagaaaacacctgcc

SEQ ID NO: 124321 - DNA, 100 bp, Homo sapiens
gccccgcagggcgatggacggccgaaccccgcgcccgcaggacgccccagccagggcctattccactagaagcaagatggctgaactcaatactcatgtg

SEQ ID NO: 124322 - DNA, 100 bp, Homo sapiens
tgccagtggatctccagacactttactaccatcagccagtgatgaccccgaagacagacatttaccactgtgttggttttcaatcgaaatgatgtacata

SEQ ID NO: 124323 - DNA, 102 bp, Homo sapiens
gccaagaaaaattaaagaagatgatgctccaagaacaatagcttgccctcataaagtatggaacgccgtggactccgggcactgcctgcagacctactccct

SEQ ID NO: 124324 - DNA, 101 bp, Homo sapiens
tgtcagtggagaagaccagcaagcgtggcggcaagatcatcgtgggcgacgccacagagaaagggacctggctgcaggtgctggagaccatcggtgtgctg

SEQ ID NO: 124325 - DNA, 90 bp, Homo sapiens
cactgattgttttaactgtctgcctatagcagccattgtggatgagaagatcttctgttgtcatggagatatattcgactttatgggaga

SEQ ID NO: 124326 - DNA, 83 bp, Homo sapiens
gaaaaagagggttgtccccaaaaagcctcccccatcaccccaacctacaggttccggaagatctcaaagagttccagaccaca

SEQ ID NO: 124327 - DNA, 51 bp, Homo sapiens
caagaatgaagtggacatgcagggctgacaggacaactggatcagtttcat

SEQ ID NO: 124328 - DNA, 82 bp, Homo sapiens
agccatggctgactttactacctggaagacccatctgcttacttcagatagccaaggagagttggtcaaacgccatgctggg

SEQ ID NO: 124329 - DNA, 75 bp, Homo sapiens
catcctggttctggaatcctcagttcaagaacccagcttagactagaaagtctagaagacacacacataatgaag

SEQ ID NO: 124330 - DNA, 75 bp, Homo sapiens
cagctgcctacagaaccgtcccaaaatatggcaaagaaacctattctgagatatgtgccactgtttccaactttt

SEQ ID NO: 124331 - DNA, 100 bp, Homo sapiens
cgtaccccgggcagtttttgtggatctggagcctacggtcattggtattgcactatgtggagaaacccagcacatttatcagtgacatcatcaactgcgg

SEQ ID NO: 124332 - DNA, 100 bp, Homo sapiens
ggaacttcctgttctgatagcgtggaaggctatagaaagcgcaattggtggtaacgcttatcaacacagcaaagtgaaccagtggaccacaaatgtagta

SEQ ID NO: 124333 - DNA, 82 bp, Homo sapiens
ggagattccacccaaacttgctggtcactgggaggctgaagctcagggccctgtctgctctgtggactcaacagtttgtggc

SEQ ID NO: 124334 - DNA, 75 bp, Homo sapiens
acgaagagctctcctccttcttcctcaactatctcgctgacacgcagctgtgagtacccaggaagctgcaccgtg

SEQ ID NO: 124335 - DNA, 75 bp, Homo sapiens
tcaccatggtagagcagcagatctctaagctgaagaagaagcaggctttatttcaggctggagaacttaaatggg

SEQ ID NO: 124336 - DNA, 82 bp, Homo sapiens
cgcctgaggaccggcaacatggtgcggtcggggaataaggaactgtggctgcaccatctgtcttcatcttcccgccatctga

SEQ ID NO: 124337 - DNA, 100 bp, Homo sapiens
cttatcccagagctttgctacattggaacagggccgcctctcaaggtacatcaggaacgtctctatcaagaatacaatttcagcaaggctgagggccatc

SEQ ID NO: 124338 - DNA, 50 bp, Homo sapiens
tgaagtggtgtctacacttataaaagtatctgcccaaactggaacttatg

SEQ ID NO: 124339 - DNA, 50 bp, Homo sapiens
tgcacgaccagctgaaccgcctcaaggcttggccttcgtgcctctgcaga

SEQ ID NO: 124340 - DNA, 90 bp, Homo sapiens
gccgtcctagccgctgctgtcttcgtgggaggcgccgtgagttcgccgctggtggctccggacctttccagctcacccccagggccttat

SEQ ID NO: 124341 - DNA, 75 bp, Homo sapiens
ccatattctggtgtaactgtggacatcaccattcaggaaggtgaccaagaatatggcccaggtgaccaaagccct

SEQ ID NO: 124342 - DNA, 50 bp, Homo sapiens
agcggcgagcagaactacggcgagcgggaacaagatcactcaaggtgaag

SEQ ID NO: 124343 - DNA, 98 bp, Homo sapiens
ttagaaagaaaacgacgagaaccagagaggagacgactttcttctccaaggttcaaaaaggcatttgaatctgagccaacactacagtcaggaattaa

SEQ ID NO: 124344 - DNA, 99 bp, Homo sapiens
attatgctgccgcctatgggcacaggcagtgtctggaattgggaagtcgagataacatgagtattgtactagtttgcttttcaaatgctcccaaggtct

SEQ ID NO: 124345 - DNA, 100 bp, Homo sapiens
agttcaatttaatggcaagtgagatgattgcactcaacagatctttaccagatgttaggttagaaggttggggaatggcggtcaatgtgtattctacctc

SEQ ID NO: 124346 - DNA, 122 bp, Homo sapiens
gaagcaggcagcggcagagagggaatggtgcaggcaggcgctgagaaggacgcgcagtccatctctctcagccaatcctgaggcaaaagaaacattttaattcactgcacattccaaaagcc

SEQ ID NO: 124347 - DNA, 100 bp, Homo sapiens
ggatcaggagatctgatcctgattgcagaaccttccctgattacagaatcttgggtgatgccactgttacaatatctcatcgatatactcccaaagagca

SEQ ID NO: 124348 - DNA, 74 bp, Homo sapiens
ttgggagtatctccgtattctggagcagtatttcatgaagatgggggtgagaaaagagacagatttaagagaca

SEQ ID NO: 124349 - DNA, 100 bp, Homo sapiens
ggtctgctggtgggactcaatgttctcgatgccaatctctgcttgaaaggagaagacttggattctcagacatcacggctgcagccctggctacgggtgc

SEQ ID NO: 124350 - DNA, 82 bp, Homo sapiens
cgagcggctgctgagcgtgcagcaggatttcacctccgggtgaatgaaaactttgccattgatttgatagcagagcagcccg

SEQ ID NO: 124351 - DNA, 75 bp, Homo sapiens
ggtgctgcggccacacaccggcaacgcggtcacggcccagcgcgttcgcttccaggtggttcacttatttttaac

SEQ ID NO: 124352 - DNA, 98 bp, Homo sapiens
accccttcaccaaggagactgctatttcatgcttggaatcctgttcacgatgctggtatttggaccagcctgcgggtttatcctgggctctttctgta

SEQ ID NO: 124353 - DNA, 75 bp, Homo sapiens
cagagctgaggtacttcgtgaagccacctgaagaggagactttgtcccaagcccctgagagtgaggaggaacaga

SEQ ID NO: 124354 - DNA, 88 bp, Homo sapiens
tacaatgaagtatatgcagaggaggtcccacaggctcctgccctggactaccgaggacggaaagacggcagaagatcttgctagatcg

SEQ ID NO: 124355 - DNA, 90 bp, Homo sapiens
acatcctgaccaagcccgatccaagaaccttctggactaatgatgatccaggaacaggatctggacttggcacatttcttttaaaggtgc

SEQ ID NO: 124356 - DNA, 73 bp, Homo sapiens
gttcgcgggtgtgtgctgcgttcacaggtgtttctgcggcagagcggcactgcagaggtggagctgaagaagg

SEQ ID NO: 124357 - DNA, 74 bp, Homo sapiens
tgggctacagtgaatcaactagcatctgtgtatgggtttcgacagaccatgatgaaattgagaatgtggccaaa

SEQ ID NO: 124358 - DNA, 100 bp, Homo sapiens
gattagttggattttcacgtgctcttgctaaagaggtagcaagaaagaaaattagagtgaatgtagttgcaccaggcacttctggatccagctgtgtgat

SEQ ID NO: 124359 - DNA, 83 bp, Homo sapiens
taaccttctcaacgcctggaggacgccttatggagccagcatattccagctgcggttggatttctcacgatgtccagtgttat

SEQ ID NO: 124360 - DNA, 98 bp, Homo sapiens
ctgtcgccgctgctgggagatgggcctactcgcccgccaccctgcgctgccgccgctctgaggagttaaagtcactcagcctctgaagaagcttcggg

SEQ ID NO: 124361 - DNA, 100 bp, Homo sapiens
ccgaagagcttctgtcgccgctctaggaactgataaatttcaaacggaagagagtggcagcatttagaaagaatctaattgaaatgtctgaactggaaat

SEQ ID NO: 124362 - DNA, 50 bp, Homo sapiens
tggaagtcgcctggtgtgaactgcaggtgttggagcgggccggagagaag

SEQ ID NO: 124363 - DNA, 51 bp, Homo sapiens
cagaggaccatgtgatgcacctgctccagcagcagcagcagcagcagcagc

SEQ ID NO: 124364 - DNA, 80 bp, Homo sapiens
ccgagtcgcgcggaggcggaggcttgggtcttccgtgtgtgctaagatcgtgcagctcctggggcagaatgaggtggact

SEQ ID NO: 124365 - DNA, 100 bp, Homo sapiens
ccttcttgagtcgtggggctggcttcttcatctgggttgacttgagaaagtgtctttaatgttatagagctactcagagttgctgtttctccttgagatg

SEQ ID NO: 124366 - DNA, 97 bp, Homo sapiens
aatcccagatttgttgccataatcatagaggcaagtgggggaggagcgttccttgtcctccctctgcacaagggatcagagaaggctgaagaaggtg

SEQ ID NO: 124367 - DNA, 83 bp, Homo sapiens
ccatgagcgagcgcctccgtcccagggggatatgagactttctactcggaatatcctgagtgttgcgtggatgtaaaacccat

SEQ ID NO: 124368 - DNA, 97 bp, Homo sapiens
agctgaccaggaagacctactaacatccagtcatggataaaaatgagctggttcagaaggccaaactggccgagcaggctgagcgatatgatgacat

SEQ ID NO: 124369 - DNA, 100 bp, Homo sapiens
tcatgtttcctgtgtgaaattgcttctgtcaaaggttgtgtgtagtggtgtagccactacagggacagcctggacccatgggcacaaagaagcaaaacag

SEQ ID NO: 124370 - DNA, 113 bp, Homo sapiens
tgatgcttttgatatctggggccaagggacaatggtcaccgtctcttcagacccctttgctgatgcaagtaagggtgatgacctgcttcctgctggcactgaggattatatcc

SEQ ID NO: 124371 - DNA, 83 bp, Homo sapiens
cttggactgagtcctgcaggacacaggcatttccggagagttcttttgaagtcacttcagaaggatctacatgaggaaatgaa

SEQ ID NO: 124372 - DNA, 100 bp, Homo sapiens
ccaagagactgcttttgagtgacatttatttagcagctagtaacttcacttatttcagggaggaagaacgtgcaaaacgtgaggagctagagcgaatact

SEQ ID NO: 124373 - DNA, 75 bp, Homo sapiens
ctgaggcaccacgtctctaccgagcacaaactccacgaagccaacgcccaggctcgtggtcccaagaagcatctg

SEQ ID NO: 124374 - DNA, 90 bp, Homo sapiens
gaaaagcctctgggagcagaagggaggctccaagacctcatcaacaattaaggtcaatgtgacggtggactacattagaccagccagccc

SEQ ID NO: 124375 - DNA, 90 bp, Homo sapiens
accgtcctctctgtctgtgccatcgccaccaatggagccgtgcaggggggcggagcctactttcttcagattattaaggaatcccagcag

SEQ ID NO: 124376 - DNA, 75 bp, Homo sapiens
tacttcacattttccccaatatatggttgaagcactggacaatgccacatactttgtggatggtgtgggtcttgg

SEQ ID NO: 124377 - DNA, 74 bp, Homo sapiens
agctctttgcatccggagagtggacaagaaaaatagctgcaatctccatggcctctaagataacagacatgcag

SEQ ID NO: 124378 - DNA, 152 bp, Homo sapiens
gcgatgccgctcggcctggccgccccccgcgagcaccgcgctgcagacgaagcccgcgcgtgatcccgctccgggtgacattcccagaacctggaggccaggctatgacacagagtcaatcaataaccagggagatctgtgatatagcccag

SEQ ID NO: 124379 - DNA, 83 bp, Homo sapiens
cttcggtggactccttcggcagtccacccaccgccgccgcctcccaggcatctcctggaaggacaaggttgcagaccttcggt

SEQ ID NO: 124380 - DNA, 83 bp, Homo sapiens
aaacgatccgctcccaaaacggctgaaagtttagaagagaagaatatggctaaaattcatcgtggtcagctggagaagttgaa

SEQ ID NO: 124381 - DNA, 95 bp, Homo sapiens
catggcgttcctcaaactccgtgaccagaaatctcctgcaaagaagctgagccatgcaattagtaaatctttggggtgtgtacccacgagagaac

SEQ ID NO: 124382 - DNA, 83 bp, Homo sapiens
gatcatcctgctgggcttcgtccagatcgggaaggcctgcctgctccgcttcagcggactctcgctggtctacctgctcttcc

SEQ ID NO: 124383 - DNA, 50 bp, Homo sapiens
gcggcggcgagggtggtggcgggtttgaaagtattcttgaagggctgttt

SEQ ID NO: 124384 - DNA, 90 bp, Homo sapiens
cagctccgcccgcagccgccgcggaccaggcaggggaccctcacaatgatcccaatgctcagggggatgccttcaagactctcttcgtgg

SEQ ID NO: 124385 - DNA, 134 bp, Homo sapiens
tggggcccaaggtccgcaagtgcctggccaacggctcctggacagatatggacacacccagccgctgtggtctcctctgagcctccggcctccataagacccaaaacagatgacacctcttcccagtcccccgc

SEQ ID NO: 124386 - DNA, 136 bp, Homo sapiens
attgagatgatccttacggaaaaggaacagattgttcctaaaccagaagaggaggttgcccagaagaaaaaggaggaagatgaagattttgaagaagaaagtgatgatgatgatactgcagctcttcttgcagaac

SEQ ID NO: 124387 - DNA, 100 bp, Homo sapiens
agacgccattatcctctgtttctctgctgcaccgacctcgacgtcttgcctgtgtcccacttgttcgcggcctatagtcgtgagatggagaataaagaaa

SEQ ID NO: 124388 - DNA, 87 bp, Homo sapiens
acgctccaagaggctcctcagtgtgggcgagtaaaatgccctgcgtgtgagaagcaggtgttggagcgggccggagagaagtagagt

SEQ ID NO: 124389 - DNA, 73 bp, Homo sapiens
cacagcaaatggggaggagaatggagcacatactatagcaaataatggcccttgtttaggctctcggaaacca

SEQ ID NO: 124390 - DNA, 75 bp, Homo sapiens
accagtgccgcaaggagttcacaggagttgtatcccgcattttgtattcacaacggaggctccgaccttgagcgg

SEQ ID NO: 124391 - DNA, 88 bp, Homo sapiens
gccccggcggcgcccgggcccacgcggaacgacggggcgaggaagagagaagggcacagttacctaagtatcaacgtaatcttcctcg

SEQ ID NO: 124392 - DNA, 96 bp, Homo sapiens
ttgccatgaggcgaggctagggaggacctcacttccccggggtgtaataatgttaactgaggcttagcgcagatatgaatgctgatgtggtatgtc

SEQ ID NO: 124393 - DNA, 75 bp, Homo sapiens
ttgtccctgtttccatcttcattgcacacaggttcagtgtctgtggtcagatatcaatcattcgcttccccgaca

SEQ ID NO: 124394 - DNA, 98 bp, Homo sapiens
acagcaatatctctgggctttcacagagagaggatgcaagccatggagaaacagattgccagtttaactggccttgttcagtctgcgctttttaaagg

SEQ ID NO: 124395 - DNA, 100 bp, Homo sapiens
tgaagatgaggttgaaaaacctgacttttatcatcatattgataatctcaggagaactctatgcagaagattctacaggaaaatgtgggccccctccacc

SEQ ID NO: 124396 - DNA, 75 bp, Homo sapiens
gtcagaaacacaaagcagcccaaccaaaggaaagatgtgtcatggcaatgctgagaaggaggatcagggatgaga

SEQ ID NO: 124397 - DNA, 97 bp, Homo sapiens
tattggagccaggagcctgccatgagctattgtacagggggatacgctggaagacatttacaaccaagtgaaacagatcatagaagaacaatctggt

SEQ ID NO: 124398 - DNA, 82 bp, Homo sapiens
gaacatctccgcaacaagacagaggatctggaagccacagtcacttttcaataggatggactttgaagacttggggttggta

SEQ ID NO: 124399 - DNA, 105 bp, Homo sapiens
ttaaggattccaagtaactcttatttgcaggggaaatgctgtctgtagctgagcacttcctggagcagcagatgcacccaacagtggtgatcagtgcttaccgca

SEQ ID NO: 124400 - DNA, 75 bp, Homo sapiens
tcagcctcaagccgctgctcttcgattgtaaaccatggctgtgtggatacaagctcagcagctccaaggagaagc

SEQ ID NO: 124401 - DNA, 95 bp, Homo sapiens
gtggaggtggtgcctctggcagtgacgaggacgaagtgtccgaggtattatagctgcaaatgtccttgtattctgtttatggagagtaccttctc

SEQ ID NO: 124402 - DNA, 100 bp, Homo sapiens
cgggaagtcactcataagcgcgctcaagacatcaagatggtgctcatgtggaccagtggtgacgccttcaagacggcctacttcctgctgaagggtgccc

SEQ ID NO: 124403 - DNA, 94 bp, Homo sapiens
cttgcctgtgtcccacttgttcgcggcctatagttgcagagtgggcaggatcttaagacccgataggtgcagaacccatctggacacggagacc

SEQ ID NO: 124404 - DNA, 100 bp, Homo sapiens
ctgaaactgaggatgcagaaggcgctgaacaggcagtaatcaggaaacccaggcccaacggcaggtggatgcaagaagaaatgttccccaaaacgaccca

SEQ ID NO: 124405 - DNA, 74 bp, Homo sapiens
ccggttccccggcccacagtgggggtgtgcaaacccgagagaactgggatttgttaaggattccaagtaactct

SEQ ID NO: 124406 - DNA, 99 bp, Homo sapiens
aatagaatcctgcaaacttgtgagagacaaaattacagctccagggttccttgaaaagaaaacaggtagttaacctatctcctgccaacagcaagcgac

SEQ ID NO: 124407 - DNA, 74 bp, Homo sapiens
ctttttcagggactatggcagttccaagaggaaatcagcagatatctggggaagatgaagtagagtgctctgac

SEQ ID NO: 124408 - DNA, 74 bp, Homo sapiens
agaggagcggaaggcagtgggtgtgaccaaaagtgccatttgttaaaggacacattcagctaacgtattttagc

SEQ ID NO: 124409 - DNA, 50 bp, Homo sapiens
ggaaccgtctttttcgctggtgaggctatcaatatgacggctgaagaaac

SEQ ID NO: 124410 - DNA, 90 bp, Homo sapiens
cagagctgtgggctgtgttccacaagttcaaagaaagtgaagtcactgcttttgctgtcttggatcaagaccagaaagaaattattgata

SEQ ID NO: 124411 - DNA, 90 bp, Homo sapiens
ctgtcactggacgccaaggagttttcggtggctcagctgggaccatggccaacctggagcgcaccttcatcgccatcaagccggacggcg

SEQ ID NO: 124412 - DNA, 51 bp, Homo sapiens
ggccaatgccaatgatgtggaaacaggacatgatccacatcgcggacacca

SEQ ID NO: 124413 - DNA, 94 bp, Homo sapiens
cacacccaatggacagcatgcctcaccaagtcacatgacaagcacgagtaaccagctcataaatcacatcgaacagtttttggatactaatgaa

SEQ ID NO: 124414 - DNA, 90 bp, Homo sapiens
cagacgttgattcacacaaccgagcagcactgtcagcagatgtcgaataaagactctgctgggccgctcagccatgcctgagggagccca

SEQ ID NO: 124415 - DNA, 100 bp, Homo sapiens
atctggtggtcgtgaaactgcttcccgaggagcattggaagagtaattcttcaatccagtgttcagagctgtaaaacatctgaacctaacatttctggca

SEQ ID NO: 124416 - DNA, 100 bp, Homo sapiens
tggcaattttggagaattacgattaggatggcccaacagcaggccttgaggttccgaggtccggctcccccaccaaatgcagtgatgcgaggcccaccac

SEQ ID NO: 124417 - DNA, 101 bp, Homo sapiens
agaagaacaagccagaaaaacatttgagagagccatgaaactggaacaggagtttactgaacatttcacagggtgtcagatgcctgatacattcaattcat

SEQ ID NO: 124418 - DNA, 100 bp, Homo sapiens
cgaggattctgctcatgggactccggcgcagcggcaagtcctccatccagaagaatgccagctgatgaagaccgagaggccgcgacccaacacctttgtc

SEQ ID NO: 124419 - DNA, 50 bp, Homo sapiens
gtgaatttccatgtcaacatagtccagggtctcactctgttacccaggct

SEQ ID NO: 124420 - DNA, 83 bp, Homo sapiens
ctttcacgaaggcaccgacgtcatcatgctgaccaccaatcagatccgtaagtgaatttgctggacacgtcgaccatccacgg

SEQ ID NO: 124421 - DNA, 75 bp, Homo sapiens
tgatggctgtcgtcccggcgtctctctcaggacaggacgtgggagccctatgagtttgtctctctggaatggctg

SEQ ID NO: 124422 - DNA, 100 bp, Homo sapiens
ctctgcagtttccagcaaaatggaatggaagttggatacactttgtgacttgtacgagacactgaccattacacaggctgttatttttctcaatacgagg

SEQ ID NO: 124423 - DNA, 83 bp, Homo sapiens
tggcttcctgcttatgtggtgcagttctactaatagtatagataacgaaggaggcccaacttcattcaataaggagcctgacg

SEQ ID NO: 124424 - DNA, 100 bp, Homo sapiens
ggctggagtctggaaaaccacgcgggaggaggttgtggggatatggacgagcatccgaggcccccgggatgggaatggctacatcagcgccgcagagctg

SEQ ID NO: 124425 - DNA, 75 bp, Homo sapiens
ggatgaaaaagactgattggctcttcctcaatgcttgtgtggtcattgaagtcaacaagagagacatagtcttcc

SEQ ID NO: 124426 - DNA, 112 bp, Homo sapiens
ggagtgctcgctcgcgcctcctaaagctctcagccgagcgcgccgagacccctcagggcggccggttagaaaacgaaaagctgcttgagagcaaagcctgcctacaggattc

SEQ ID NO: 124427 - DNA, 96 bp, Homo sapiens
gcatcacagaagctggaagttctgatgttccactgaaatcacaatggaaagtcttgacttgactggactgcatcaaaacatgtaaacaaggacctc

SEQ ID NO: 124428 - DNA, 51 bp, Homo sapiens
gccacctgcaaccacactgtgtttgtcgctgatggcatcttcaaagctgaa

SEQ ID NO: 124429 - DNA, 75 bp, Homo sapiens
accttcccaggaagccagagccacacacaccatcatggtcctggtgaaggtaggcaatgaagttgctacaggaac

SEQ ID NO: 124430 - DNA, 110 bp, Homo sapiens
ctggtgcagccaccctcgctccctctgctcttcctcccttcgctcgcaccatgagcctggagacacaggccccatccttcccaatggggacacttcagggagcggctctc

SEQ ID NO: 124431 - DNA, 100 bp, Homo sapiens
accgcaccatcggcaagggcaacttcgcggtggtcaagcgggccacgcacctcgtcaccaaggccaaggtgtggtttcagaaccgaagagccaagttccg

SEQ ID NO: 124432 - DNA, 82 bp, Homo sapiens
gtcactcccaccacccaccagggcccctggtttttagaacttcagccataaaaatgggcagaattttccttgatcatatcgg

SEQ ID NO: 124433 - DNA, 100 bp, Homo sapiens
cctgctggtgttcgcccacgaccatgtgtaaacaggaacatcgataagtagtgtaaaaacttgcacaatgaaatccgaagccaaggatggagaggaggag

SEQ ID NO: 124434 - DNA, 98 bp, Homo sapiens
gcagtaccagacctgggaggagttcagccgcgctgccgagaagctttacctcgctgaccctatgaagatacaaggcagatccaaccatccccaccgtg

SEQ ID NO: 124435 - DNA, 83 bp, Homo sapiens
cttctcatcccaaaacaatgcctttgcacaaaataaaccaactggctttggcagttgctccttgagggcaggacagttcttat

SEQ ID NO: 124436 - DNA, 83 bp, Homo sapiens
atgatcggcatgtccaccaaggcaggtttacccaaggtccagcctagcccctaggcaccatgtcggacagtgatctaggtgag

SEQ ID NO: 124437 - DNA, 74 bp, Homo sapiens
cagggagtgctctgttcacggctccatcgctgttagtaagaatgattgatgttggctgatattggagtgctcat

SEQ ID NO: 124438 - DNA, 100 bp, Homo sapiens
ctgtttcagagctggtgtgcgctattatgtaagagacatggctccttactatgaagccttgtgcaaatccctcgactggcagatagacgtggacctactc

SEQ ID NO: 124439 - DNA, 75 bp, Homo sapiens
cgggagaactcactgaggatgaggtttttcgttggaatatacgttgcacatttatggcgattctgagtgtgaggg

SEQ ID NO: 124440 - DNA, 76 bp, Homo sapiens
caaaaaaggctaagcaagcatctaaaaagactgcaatggctgctgctaaggccaaggaccccttcgctcacctgcc

SEQ ID NO: 124441 - DNA, 88 bp, Homo sapiens
attggaaaagaaatcctgataagaactgctttcaacatggccaatctttcctaagctgctcagcttacaagaaaaggaatcatactgc

SEQ ID NO: 124442 - DNA, 100 bp, Homo sapiens
tccttccagtgccctcttcaacagacagccagaatgatgaggagcgggaaggcctcctgcaccctggagaccgtgtgggaagacaagcacaagtatgagg

SEQ ID NO: 124443 - DNA, 51 bp, Homo sapiens
tggagacacggccagatctgccctccagagaagatggtataaactggtcca

SEQ ID NO: 124444 - DNA, 75 bp, Homo sapiens
cctcaggcgtgcgcggacggtgtgcggaaaaacacaccttgactttagtcagatacatcactgtctgttaaagga

SEQ ID NO: 124445 - DNA, 80 bp, Homo sapiens
tgtcggcaaggggttgtcaccggcttccgcatccaagatgaagactcctcttttgacttggactatgactttcaacggga

SEQ ID NO: 124446 - DNA, 82 bp, Homo sapiens
gatcatgtctgcgagccaggattcccggaacccaagacagaccaggatgaggagcattgccggaaagtcaacgagtatctga

SEQ ID NO: 124447 - DNA, 82 bp, Homo sapiens
ggaaacacctctacctcctgcgaggcctcccgggctccgggaaaactacactggccaggccaccagcttgggctccccacgg

SEQ ID NO: 124448 - DNA, 75 bp, Homo sapiens
ccggcggtactatgtcaacacgaccaccaatggggtgagtcaggtgctgggaagacagaaaatacaaagaaagtt

SEQ ID NO: 124449 - DNA, 74 bp, Homo sapiens
ggctggattttgatgatgatggagaagggaacagtaaatttttgagaatgaagaagcagtacgacgtctcatct

SEQ ID NO: 124450 - DNA, 75 bp, Homo sapiens
tcgcgacggccaaaaggagcggcgcggtcttcgtggtgttcgtggcagccaaaacctattgatgtacaagtcatt

SEQ ID NO: 124451 - DNA, 83 bp, Homo sapiens
ctgggggcgccgcccgcgcccgggaccgacccctctgctcgcggccgcgcctttgaggttcagcagctggacatggagaacca

SEQ ID NO: 124452 - DNA, 83 bp, Homo sapiens
gggaagttaatgtttacggcgaagtctactcaacgtttccaaggttttaaaatcaaagatgggaaaatcggagaaaattgccc

SEQ ID NO: 124453 - DNA, 75 bp, Homo sapiens
gctgaagaagcagttctacaaggcgagccagaaatactacccgccggactttgacccatcaaagatccccaaact

SEQ ID NO: 124454 - DNA, 98 bp, Homo sapiens
gcgggccagcgcaccggtcccccagcggcagccgagcccgcccgcgcgccggtgaagaggaacagatgctgccatgaaaggggtttcctagaaagtgg

SEQ ID NO: 124455 - DNA, 50 bp, Homo sapiens
cagcatcaagatgatttatggtaataagcatccacccaacccaccagtat

SEQ ID NO: 124456 - DNA, 83 bp, Homo sapiens
atgaggctccctgctcagctcctggggctgctaatgctctgggtctctgatgtcatgtggcctgtgttttggaccgtggttcg

SEQ ID NO: 124457 - DNA, 75 bp, Homo sapiens
gttttttgcagaagaatattatcccttctcagaggcctcccagtagcattggatgcaggaaaaaatacattgacg

SEQ ID NO: 124458 - DNA, 90 bp, Homo sapiens
ctgggatgatacaccttttccacagggaattgagttgattagcctgaggcctgctcagtcgttcctaatgaataaaaatcaagtgccaaa

SEQ ID NO: 124459 - DNA, 74 bp, Homo sapiens
tgggagcaccaggatctcgggctcggaacgagactgcacggttgatgccggcccaggatggatcagacctgtga

SEQ ID NO: 124460 - DNA, 97 bp, Homo sapiens
ccgtaaagtggttggttgcagttgtgtagtagttaaggtgtcctgcttcaatgagttagaggtctgtatccatcctgatggcgtcatcccagtgctg

SEQ ID NO: 124461 - DNA, 101 bp, Homo sapiens
gttgtctgccttgggtttcctctgcttactgtggatggccccagaggggattgttttaagaaaatggcagacaaaccagacatgggggaaatcgccagctt

SEQ ID NO: 124462 - DNA, 83 bp, Homo sapiens
gccggacagggccgcctgtcgccgggccactgcagaacaaattagacttgcacagatgatttcggaccataatgatgctgact

SEQ ID NO: 124463 - DNA, 84 bp, Homo sapiens
ctgctctgcctaagtgtactccagtgtgagatcaaggtggcccagcccaaagaagtctatcagcagcagcagtatggctctggg

SEQ ID NO: 124464 - DNA, 96 bp, Homo sapiens
gtgcctttcattatgtgctgtggagggaaaagttcagaagatgccactgatgatatctcaatgttgagaatgacagaagaccatgtgcttcccgag

SEQ ID NO: 124465 - DNA, 90 bp, Homo sapiens
gaactattgtactctaagtcaggaaatattaagacgaccaatagttgcctgtgaacttggcaggcgcgggtttaagtggacgccaggtgc

SEQ ID NO: 124466 - DNA, 100 bp, Homo sapiens
taagaatggctgtagaggaacttcagtctataataaagagatgtaatgaccagtccatgggtgagatgcagataatcggaggcgatgatctttcaacgct

SEQ ID NO: 124467 - DNA, 80 bp, Homo sapiens
ttccttatgctctctaatacccagttcatagagaatgatattaatgcacacgcctgtgttactggtaaacccatcagcca

SEQ ID NO: 124468 - DNA, 98 bp, Homo sapiens
caggaatttctattggaatactgggctgctatgtctcaggagtattttacgcattttattgtaataacctgtccctttccccccaacacatcgcttga

SEQ ID NO: 124469 - DNA, 100 bp, Homo sapiens
gggcactcagagagaaggcatgtctttggggagtcagatgagcccgagatgatcggccactacctgggcgagttctccatcacctacaagcccgtaaagc

SEQ ID NO: 124470 - DNA, 100 bp, Homo sapiens
ctgatagtagtcaagacacctcactctgctctccagtgaaacaaactcatattgatattaattccaaaatcagactccccatccccaggatgtcaacctc

SEQ ID NO: 124471 - DNA, 96 bp, Homo sapiens
tgctcatctgcagaattgtcaagatctcttccgttccctgctggcagttcatcagctggatcagccacatggtggccttactggacaaagaccaag

SEQ ID NO: 124472 - DNA, 75 bp, Homo sapiens
aacatgtggttcaagaaccttgacaagctcatccggctggtaaatgcgcagttcccagaaatgaatgctatgatc

SEQ ID NO: 124473 - DNA, 74 bp, Homo sapiens
gctgtagaaagcttaaacttccagatatgaagaagctgaagtccggaaaaaacttgaggaaaaagacaggcagg

SEQ ID NO: 124474 - DNA, 100 bp, Homo sapiens
caccagcacagcaaacccgccgggatcaaagtgtaccagtcggcagcatggctgtggaacaactactttcacctggctgttgctttccttactcaagagt

SEQ ID NO: 124475 - DNA, 75 bp, Homo sapiens
gcaggaatcaatccattcaatgatcttagcaaagcaatgtctcaagatggtgcttctcagttccaagaagtcatt

SEQ ID NO: 124476 - DNA, 100 bp, Homo sapiens
ccatggagcccgactcggtgattgaggacaagaccatcgagctcatgtgcctccggagccagcgtggtggccatagacaacaagatcgaacaggccatgg

SEQ ID NO: 124477 - DNA, 100 bp, Homo sapiens
ctagcgcgacccgactcttaagttttcttttcctctccagaggggccgattagggagaggttcgccatcggtggtgtgaactcattgttaagcacaagtt

SEQ ID NO: 124478 - DNA, 95 bp, Homo sapiens
aggatgacgaagatgatgaggatgacgatgacgatgaggaagatggcctatggatttgtcaactattaagaaaaacatagaaaatggactgatcc

SEQ ID NO: 124479 - DNA, 89 bp, Homo sapiens
tgggcactcagcaccctctgcttaccacagccagattttaggtgatgggcaagtcagaaagtcagatggatataactgatatcaacact

SEQ ID NO: 124480 - DNA, 75 bp, Homo sapiens
gggaactgaggaagcgcccaagaactaaagatgactcagagccatctggagaagaaacagtagaaaggacaagga

SEQ ID NO: 124481 - DNA, 75 bp, Homo sapiens
gcgttgatatcggtggtaacgacggcctcagcaggcggggaagatgaaagggttccttgcattgactccatggag

SEQ ID NO: 124482 - DNA, 75 bp, Homo sapiens
ctgaaatcactgcaccttaaaaacaaaagattgagctgcactgtattccttttcaccagtgatcattaaagaatg

SEQ ID NO: 124483 - DNA, 82 bp, Homo sapiens
ccagcatttgccatcttcaagtttgttcagcaattctgtggtgttcttggtcacacatttatggagtttctgaagggcagtg

SEQ ID NO: 124484 - DNA, 82 bp, Homo sapiens
tttggaaacaaagactttcaggccctacctatactagctagaatccagggcctgaaaacccagaatgaacttgtgtccatcc

SEQ ID NO: 124485 - DNA, 75 bp, Homo sapiens
cttttcaccaaggaactggtgctgcagcgagaggctaggcagctggaagagaaagaccgagtgctaaagaagcag

SEQ ID NO: 124486 - DNA, 100 bp, Homo sapiens
gttggtgtgattagcttcgcagtctggaaagctttaggagttcacagttccccagaagaccatgtctgtgttgagctgtatctgtgaagccaggcaagag

SEQ ID NO: 124487 - DNA, 83 bp, Homo sapiens
caggccaataacctgctgatagagcctgctcgcattgaggaggaagaggctgagacccgtgctgaatttgcagagagaacggt

SEQ ID NO: 124488 - DNA, 100 bp, Homo sapiens
gattgtcacctttgctgcaaaaaattacggagagacaagagagacacctccaacttcgacaaagagttcaccagacagcctgtggaactgacccccactg

SEQ ID NO: 124489 - DNA, 51 bp, Homo sapiens
aggctggcaggcaacaccttagggtggtgtcacacaaaattggactgtgtc

SEQ ID NO: 124490 - DNA, 100 bp, Homo sapiens
gagtaaccaaccctttttttgctaagacactccagcactggccacacattattcgaataggagaccttaaacctacagggcagtaaacggctttgacccc

SEQ ID NO: 124491 - DNA, 100 bp, Homo sapiens
aaaaacaaagaaatctccaggttcaggatgcattcttgcccactgtatgggccttggtaagactttacagattgtccccagctacggaaaacaagctccg

SEQ ID NO: 124492 - DNA, 100 bp, Homo sapiens
ctccccaaccccaccatcccaccaaagggggctgctgaccgagagagctcactcagccagggccgttgctccagggagaactgcaaatatcttcatccac

SEQ ID NO: 124493 - DNA, 101 bp, Homo sapiens
gctttttcaagcgaagcatccgccgcaacctcagctacacctgccggttcggagtgttcagtggacacacgcttggcagtgtaatttccacagatcctctg

SEQ ID NO: 124494 - DNA, 97 bp, Homo sapiens
tgctcatgaaccacttggcaaagtgaagctttgttctaagaatatttgtttcatctagtttatgagtccaaatgatatagactgtaaatgtcacagc

SEQ ID NO: 124495 - DNA, 98 bp, Homo sapiens
ctggaggagcctctggatcgggtattcattcctgatggtagtgggcagcagtcagtgacaggtgtaacctctgtggatgacagcaacagttactggag

SEQ ID NO: 124496 - DNA, 75 bp, Homo sapiens
tcgtttttcggatgatgccttcaatactacctttatttccaccataggtactccaaagattcaggtttactcacg

SEQ ID NO: 124497 - DNA, 100 bp, Homo sapiens
ccagcccccaagagccgccgggcccaccgttcaacttctgctgactctgcttcctcctccgatacttcccgcagtcggcaagttaggaaatcaacattga

SEQ ID NO: 124498 - DNA, 75 bp, Homo sapiens
caaacgtttcctggtgctaaatccaattaaacgcggcactctagaggaatatggaaggagactgtccctctgact

SEQ ID NO: 124499 - DNA, 106 bp, Homo sapiens
taaagtgaaaatcatgttagactcatctaatcttcaacatcagaagatccgaatgtccctggtagaaccacagttctgcttgagatttcaagaattttgaatactg

SEQ ID NO: 124500 - DNA, 104 bp, Homo sapiens
ggtcgtgctttcggtccccgccgaagtcaccgtgatcctgttagatatcgaaggaaaatgtttataggaggccttagctgggacactacaaagaaagatctgaa

SEQ ID NO: 124501 - DNA, 75 bp, Homo sapiens
ggaagtcatttctactggacttcatgcttagatacatgtataacaagagtaaacatcagtctccaaagataacta

SEQ ID NO: 124502 - DNA, 83 bp, Homo sapiens
gtttcattgatctagaagagtatattgaaaggatctatgtttatgaaaataaaaaggaagcattgcaagctgtcaagatgatc

SEQ ID NO: 124503 - DNA, 76 bp, Homo sapiens
actcaagggcatgggcagcggccagttgcactggggcagcacctactccgtgtcagtggtggagaccgactacgac

SEQ ID NO: 124504 - DNA, 78 bp, Homo sapiens
aactctggagaatttgctgaacatctttatctcagtggttggaggcaaagtaaagaagcccggtaaacgtggtcggaa

SEQ ID NO: 124505 - DNA, 73 bp, Homo sapiens
ttcggctcatcatatcagagctgaggaatcaatatgttccctacttcagcaaagcgtggcagcgtgtgataca

SEQ ID NO: 124506 - DNA, 83 bp, Homo sapiens
aacgaatacggcgacgacatgtatgggccagaaaaggaattttcaacgtccggttcatctaatacagacactggtaaagttac

SEQ ID NO: 124507 - DNA, 74 bp, Homo sapiens
gtttctttcttaaaggactgatttttagaactccacatttgagcttcctgcctgacacagctcacttcaagaag

SEQ ID NO: 124508 - DNA, 74 bp, Homo sapiens
tttgccgacccggatctcaacaatcccttcaaggagtcttttagtcctgctatacagctgcaccttgtacatca

SEQ ID NO: 124509 - DNA, 75 bp, Homo sapiens
gaggcctccatgacccccgatgccaaacacctgtggctggacggcccacctccatggagacggcccacggcctcg

SEQ ID NO: 124510 - DNA, 100 bp, Homo sapiens
gaagtttttggatggcaacgagctcaccctggctgactgcaacctgttgccaaagttacacatagtacaggtcaagtctggcaccatctttgacaacttc

SEQ ID NO: 124511 - DNA, 100 bp, Homo sapiens
cttgtggacattgatgatatatttgttgggaaagagggaacaaggatgaatgtcaaagatgtgaagatttttcaagaggtaaaaagtagtgatattgcca

SEQ ID NO: 124512 - DNA, 100 bp, Homo sapiens
ttgcaaaccacactaacatattactggcatcttcaatctgaaacctgtggatttttgtatctaagtttactgaatttgatgcaagaaaattacataaatt

SEQ ID NO: 124513 - DNA, 95 bp, Homo sapiens
aagagctgatgaaacaatggcaaggcggcgactggcggcgcgatggacctgaccgggctcctgctggacgaagaaggcaccttctccctcgccgg

SEQ ID NO: 124514 - DNA, 100 bp, Homo sapiens
ctggcaacgaaaatgagcctcgcgaggccgacaagagccacccggagcagggcgcaccctacgacgcgcacaccaccggcatgaccggcgccatcagcta

SEQ ID NO: 124515 - DNA, 80 bp, Homo sapiens
gcaaaggtcatctaatctttaaaagacctgcctagagctggaacgttacctccagagcgagccctgctatgtttcagcct

SEQ ID NO: 124516 - DNA, 100 bp, Homo sapiens
gaactgaatgatgtggttatcaccatcccactcccctccctacaccatcatcaccttccccttcctgtttgctgtgatgttcggggatgtgggccacggg

SEQ ID NO: 124517 - DNA, 50 bp, Homo sapiens
acttctccaaaaagattcagcagggtccagtgtccatcaaagtccaggtg

SEQ ID NO: 124518 - DNA, 75 bp, Homo sapiens
gccgcccagccgcgccccagccagccctgcggcagccatgaaccagagaatcagtcagagtgctccagtgaaaca

SEQ ID NO: 124519 - DNA, 117 bp, Homo sapiens
gcatattagcgctagccctgcagacagaggtgtgctgacgacctgctacaacagaagggatcttctctggatcaagcaatggtggtgaaaaatgtttcgcaagggcaaaaaacgaca

SEQ ID NO: 124520 - DNA, 75 bp, Homo sapiens
attcggtgcgggtctggctgggcaagcactacaagaagcaatggctgccatccggaagaaactggtgattgttgg

SEQ ID NO: 124521 - DNA, 127 bp, Homo sapiens
agctacatcacagccctgttaaaggatggctttggctttgcagacagcacagtcttacagttggattggatgctgctggcaagacaaccattctgtataaactgaagttaggggagatagtcaccac

SEQ ID NO: 124522 - DNA, 100 bp, Homo sapiens
cctcagtcctgctctgaagatcctgccctgccctggtcatccactccggggactacttcctgtttgagtccgacagtgaggaagaggaggaggctgttcc

SEQ ID NO: 124523 - DNA, 100 bp, Homo sapiens
catgcagacatctccaactgtgggaactctttccagcttgtgtctgctgttgggtagatcaattgacttgaacagactcattacccagcgcatctctgcc

SEQ ID NO: 124524 - DNA, 145 bp, Homo sapiens
atgtttagattgctaatggctagcaaaaaagatgatccgggtataataatgaagttaaaagagcagcactccaaggccataggaaaaggatacagagtagagtttcatgaacctgaaacttggtggaaatttgatcctgaagaat

SEQ ID NO: 124525 - DNA, 82 bp, Homo sapiens
cccggagcaagcggagctcccccaagagccggaaagtttgaaggaagaaagtactgtgaacatgactttcagatgctctttg

SEQ ID NO: 124526 - DNA, 88 bp, Homo sapiens
caatcacagaagccgacaaggcgttcaagcgaaaacatgaccgctgagcccatgagttgttgacctcctgtactggagagacattaag

SEQ ID NO: 124527 - DNA, 103 bp, Homo sapiens
cacctcctcgcgtccgtaatcagtgacgaggtccgctacgtaaatccctttgcggcgggttcacagccaggaaatcgtgcagtgaacctgtcccctccggtca

SEQ ID NO: 124528 - DNA, 75 bp, Homo sapiens
cacctcccacctgtcctcaggcatatcaaagtgtttcaacaaaagacagccagaagacaatctgatgatgacaag

SEQ ID NO: 124529 - DNA, 95 bp, Homo sapiens
cgtttgaaggcttccacaccctctactccaggccttggaatggatggctttggccaaccagttggcattcttggacgccctgccacagcatatgg

SEQ ID NO: 124530 - DNA, 87 bp, Homo sapiens
atatttctctgcgtgggcagaagatgatcatatgcttatacagaatgaatattgtaatggagtcagtggatcggtggggaaaatgct

SEQ ID NO: 124531 - DNA, 75 bp, Homo sapiens
gtgtgtctggttaccccgaccttctgtgaaggatctagtgaaaagccatttgatgtatgcggtcagagaagaagt

SEQ ID NO: 124532 - DNA, 83 bp, Homo sapiens
acgctgtaaggccaaaacgaggatttgtgttgtgaggtcggtggatctggaaatagtatattcctatttacatggtatggaag

SEQ ID NO: 124533 - DNA, 100 bp, Homo sapiens
gaaggagaatgtaaaattgcattgctccatagcaggctggccagaacctcgtgtcacgtgttgataaaaatggtgatgtgtgcatttctattcttcatga

SEQ ID NO: 124534 - DNA, 76 bp, Homo sapiens
cttcggtggactccttcggcagtccacccaccgccgccgcctcccaggtaaggggcctggataccaagaagtgact

SEQ ID NO: 124535 - DNA, 100 bp, Homo sapiens
gaaatccaaggacttcaagaaccacgtgatcaagtaccttgagacactcctttactcacagcagcaggcctccaccatggacagaggccaggccctgccc

SEQ ID NO: 124536 - DNA, 50 bp, Homo sapiens
cgccgaggcgattcccgcccaggattacctcaacctctcttggaactcaa

SEQ ID NO: 124537 - DNA, 83 bp, Homo sapiens
gtttagagagtgcttccccttgccgagcactgggcctttggcacaaaccaagaagattatgcaagttacattatgaacggtat

SEQ ID NO: 124538 - DNA, 130 bp, Homo sapiens
ctcttctccaagtgaagacaactggttgaaggggaccaggaggttggacacagaccattgcaatggaaatggttactataacaacagtaccaaggtggctgtgaaaaccctgaagccaggaactatgtct

SEQ ID NO: 124539 - DNA, 73 bp, Homo sapiens
ggaagggccaggatcgcgatcaatggttacctgtgcatgacagatgagtggttctctgagtatgtctacgaag

SEQ ID NO: 124540 - DNA, 73 bp, Homo sapiens
tagccttcacagagagtccagttgccaagaggagaaggcagagcccccccaggctatgaatgccctgatgcgg

SEQ ID NO: 124541 - DNA, 75 bp, Homo sapiens
gcacgacgatgaggtgacagtcacgattaacagccatgcaacagaatggagtcccagccacccaggagaggatgc

SEQ ID NO: 124542 - DNA, 101 bp, Homo sapiens
ctcgcttcagtcagtcgggccgcgccgcgcctcagctctggtgtcgtgaaaactacccctaaaagccaaaatgggaaaggaaaagactcatatcaacattg

SEQ ID NO: 124543 - DNA, 90 bp, Homo sapiens
gtcaggccgcgacgagggcgctgaggaaggtgggagtcaatcattttgacaagtctcctgaaaggaacagctagcaggaactgaaacctt

SEQ ID NO: 124544 - DNA, 75 bp, Homo sapiens
aggacagaatcaccagcactggctgaagacttttgcagctccagagatcggttgtctgccaagaatcagaccttc

SEQ ID NO: 124545 - DNA, 74 bp, Homo sapiens
ttcagagagcaactatcctccccagagcatgcttgagaagggaggataaaaactttcagaatgagcaaaacacc

SEQ ID NO: 124546 - DNA, 49 bp, Homo sapiens
cgacgagcttgttttgtcccggactcgctgcagatctgggacacggccg

SEQ ID NO: 124547 - DNA, 99 bp, Homo sapiens
atcttcctgcgcctcctgcctgagctgcacaaaacagagatgcagaggatgctatttatggaagaaatggttatgattatggccagtgtcggcttcgtg

SEQ ID NO: 124548 - DNA, 75 bp, Homo sapiens
tttgagaaaatggacgctgacatcaatgtcacaaaagcggatgttgaaaaggaatcagagatcattgatttcttc

SEQ ID NO: 124549 - DNA, 101 bp, Homo sapiens
gctgcccttgggcgcgcagatacccgcggtgcaccgcctgctgggagcgccgctcaagtggacagaggactgcagaaaatcaacctatcctccttcaggac

SEQ ID NO: 124550 - DNA, 90 bp, Homo sapiens
aaacaaccgagcaagacaagccactccgacaaggtcaccatggctgttattggctcccttgctgtccccagctgttccccaggtcacctc

SEQ ID NO: 124551 - DNA, 75 bp, Homo sapiens
gctgaggaaagcaggaggaggtggcggcggcgggaagatggccggagttaagatgagtccagcgaagtgcctaga

SEQ ID NO: 124552 - DNA, 82 bp, Homo sapiens
gaaaaacgtgtgggtacgaccttgatcatgtatcagttggaggacttggagacagcttctatgagtatttgctgaaggcctg

SEQ ID NO: 124553 - DNA, 100 bp, Homo sapiens
attctgacaaaacagatacagactggagggctcgtcctgctacagacagctttgatgactacccacctagaagagaaccgtgggtaccgatggatgtggc

SEQ ID NO: 124554 - DNA, 124 bp, Homo sapiens
gaggccgtccagcagatggcggatgccctgcagtacctgcagaaggtctctggagacatcttcagcagggggccgaaggccagagaccaggatttggctacggaggcagagcgtccgactataa

SEQ ID NO: 124555 - DNA, 98 bp, Homo sapiens
ggaaagctctctccttttctgccacccgagatcttccagaagcttcagggggcagagtcacaaagctgtaagaaacggagtctcactctgtcgcccag

SEQ ID NO: 124556 - DNA, 128 bp, Homo sapiens
gtctcccctgaagaggcagtgaaatggggtgaatcatttgacaaactgctttcccatagagattactgatctctcattacccaactatctgatggcatcttcggttggactgcttcctacccagcttc

SEQ ID NO: 124557 - DNA, 100 bp, Homo sapiens
tgcggcgacgacagaacccgagagcgttcattccgggggcacaccctctcagcggggctacttcagtcagggggatcaaagatactttattgaaccttta

SEQ ID NO: 124558 - DNA, 74 bp, Homo sapiens
agaacattttcaacaagacccatcggactgacagacgtggccgctttggagagtcagcctttattaggattcac

SEQ ID NO: 124559 - DNA, 90 bp, Homo sapiens
gagctggagacggtcgtagctgcggtcgcgccgagaaagaaagaagatgctgatatgctacaacacggatgaacctggaggacgtggtgc

SEQ ID NO: 124560 - DNA, 99 bp, Homo sapiens
agcctcccaagtagctggcattacaggtatgtcggggagctgatctctgatgctgaggctgatgtgagagaggatgattcttacctcttcgacttagac

SEQ ID NO: 124561 - DNA, 100 bp, Homo sapiens
gaggaggatgaggcaccattccaggagagtgtgtagaccacactccaaaactgaaactgtggatggcagccatgaaggaagatcccacagtctcagccct

SEQ ID NO: 124562 - DNA, 100 bp, Homo sapiens
ctgctcctggagacagctgccccgagggtctcctccagtagacggtacagcgaaggcagagagttcagctatgacatggtgcattacggccactccaacc

SEQ ID NO: 124563 - DNA, 75 bp, Homo sapiens
atttcgtgaaagggttcttcagcggggtttggtggccagaatttattataaggccaaacgtaccaagaaagtcgg

SEQ ID NO: 124564 - DNA, 75 bp, Homo sapiens
aatttcttcagactgcaatcatctggatgaaaaagaaagtcggcgtctgttccaacagatcctttctggtgtgga

SEQ ID NO: 124565 - DNA, 50 bp, Homo sapiens
atttacatggaagatggcttaataaaaatctccaatgaaaactatgttcc

SEQ ID NO: 124566 - DNA, 75 bp, Homo sapiens
ctggtggcgaaggtcaaggccacaaagacaaacagggcgagtggataagaactacccactggtcactgggcacac

SEQ ID NO: 124567 - DNA, 89 bp, Homo sapiens
gtggctatgaacccagaggtcgtggaggtggccgtggaggcagaggtggcatggggtcttgagtcaccacgtccgaatataattcttgg

SEQ ID NO: 124568 - DNA, 101 bp, Homo sapiens
ctgaggaaccatgtctccatccccgaccgccctcttctgtcttggaaacttggatttaactggccagaagcaggtattcaaagcagagaacaatccctggg

SEQ ID NO: 124569 - DNA, 90 bp, Homo sapiens
gccgggcgacctgggcaccagcaggacccgaggccaggagccaggggcccagaagttccaagagcctctgagttcctgccttttttcatc

SEQ ID NO: 124570 - DNA, 75 bp, Homo sapiens
agttcattttatgtgggaggatgttcagcagcgcggcagagtcatgggggcaagactcgtggctgtgacccatgg

SEQ ID NO: 124571 - DNA, 100 bp, Homo sapiens
tataaatctgatgactcatatctgcaaagaacagaccgttcagtatatactaactatggtggatgatatgctgcagattccacctgctcctacgaagccc

SEQ ID NO: 124572 - DNA, 76 bp, Homo sapiens
cccgttcgccaccaattatgggagggctggccaacttctgctacagacgactcaccataccttcagagtgttattt

SEQ ID NO: 124573 - DNA, 100 bp, Homo sapiens
aatcttgtaccagactccagactccctggtctactggaccatcgcctgtggtgtccttgaatggccattttggacaaaactggttgtggtagccattggc

SEQ ID NO: 124574 - DNA, 100 bp, Homo sapiens
taaccctgagacaaccacttctggtggttgccactcacctgaggatgtacctggagtacaagagggtccctaacagcagaccacctgaatatgagttctt

SEQ ID NO: 124575 - DNA, 100 bp, Homo sapiens
ctaaacttcaccaaataatagctgtttgtattttggctgctgcaggagccattttaggtactatcttggtcgtcggatgtttattgttatttctgagcca

SEQ ID NO: 124576 - DNA, 75 bp, Homo sapiens
cacagatgtccaagctgccaatttattgagagaacattcaattgatggcactggctgggctcccacaagaacatt

SEQ ID NO: 124577 - DNA, 75 bp, Homo sapiens
catggtggccgccaggggcagataatctataactgagtaaccagagagcacagagaaatgctggtgaaactggcc

SEQ ID NO: 124578 - DNA, 74 bp, Homo sapiens
ggcaatgtgaaatcagataaacttaggcgtatttgggagcccacatacacgtattttgaccaacgtgatttagc

SEQ ID NO: 124579 - DNA, 101 bp, Homo sapiens
tcggagctttcgtcacctgtccttctacattttcgatagagacgttttccggagggattccatcatagatggccgccaagaacgagtcatgtttgacaaaa

SEQ ID NO: 124580 - DNA, 100 bp, Homo sapiens
tggaggagacgtgcagctacgaggaggccttcgaggctctggagtcctccacggctacgatgagcagcagctgctcagggctgagcagggtcctggtggc

SEQ ID NO: 124581 - DNA, 87 bp, Homo sapiens
acaccatccaagcagccaggcagtatcgggagcaggaaagccagtgttgtggaccctagcacagagaggctgacccgcggctgattg

SEQ ID NO: 124582 - DNA, 74 bp, Homo sapiens
cgcggcacctgcgaagatgcttccctgtgcaagagttagcagacttgaagaaagagaagcagaactgaagaagg

SEQ ID NO: 124583 - DNA, 80 bp, Homo sapiens
gctttggccatgtggttccccagaaggtatctaccaaagatctttcggaatgaccgatattgtactccaagatacttgga

SEQ ID NO: 124584 - DNA, 100 bp, Homo sapiens
gctcaacatccgcagcatcttctacgtgcccgacatgggcaattgaaggaacagactaaaaatcgtgtcctggaaggaaactacaggtactaccagggat

SEQ ID NO: 124585 - DNA, 90 bp, Homo sapiens
ccgccggcttgccacagtccacatgtcccggagtgttcctgatccaagcagaaccctgttatttgaagagcctgagaaatcttatcccgt

SEQ ID NO: 124586 - DNA, 105 bp, Homo sapiens
ctgtacttctcgagcttctcagtcagtcctgcctcatcccagccatgtcatcttatctacgaaatgattcagtgccgcagaatggaattcggcattgttcctaca

SEQ ID NO: 124587 - DNA, 98 bp, Homo sapiens
gttacttaaaaaaattgctgagaaagatgatgatctaaaacgaacagccaaaagatatgaagaaatccttgatgagctagagttaatgccaaagacag

SEQ ID NO: 124588 - DNA, 76 bp, Homo sapiens
tcaacaagcccaactgcatcatgggagaaaactggttgtcctggatgtttgaaaagttggtcgttgtcatggtgtg

SEQ ID NO: 124589 - DNA, 75 bp, Homo sapiens
acccggaaagaggctttgagagagtgggaagcacagttgcagccccaacctgtttgtccagaatgtcttcgtgga

SEQ ID NO: 124590 - DNA, 75 bp, Homo sapiens
tgtaaacaactagagaagattggacagcaggtcgacacaaaagatacagatattgtggatgaagccatctattac

SEQ ID NO: 124591 - DNA, 74 bp, Homo sapiens
tgaggacattgtggagagaaacatccgaattatgtgctgtaaatgcattgatggaaaaaaagtgggtaaagaac

SEQ ID NO: 124592 - DNA, 75 bp, Homo sapiens
cgtgtcagccaagtccccccaacactgcatggagcggatccagctttggacatcagacagtgcaggagaagaatg

SEQ ID NO: 124593 - DNA, 84 bp, Homo sapiens
tgactacctgctgtacaccctcaacaaacaccagcgctttgggtactccaaagattcaggtttactcacgtcatccagcagaga

SEQ ID NO: 124594 - DNA, 83 bp, Homo sapiens
ctttctccgcgcgctcggctgcgctgggcgggccccagatctgactgcagccatgagcagcaatgagtgcttcaagtgtggac

SEQ ID NO: 124595 - DNA, 98 bp, Homo sapiens
tggtggctttcttggtgtacttttcatgtctaaaatgtatcatgatattagctggtttgacatcaagtcatttgtgagtcatcagatcttctcctgaa

SEQ ID NO: 124596 - DNA, 80 bp, Homo sapiens
aaaagccaagaggaggacagttcgctacacagcaatgcatcgaggaatccaggtaaaaatggcttgtctaatagctgcat

SEQ ID NO: 124597 - DNA, 83 bp, Homo sapiens
gccggcagctggcgctggggatccctgctcttcgctctcttcctggctgcgtccctagacctcctgccccccgaggtctgcag

SEQ ID NO: 124598 - DNA, 98 bp, Homo sapiens
tgatgcgagtggccaatgaggagtcagagcacaatcaagagatgaagaaaatgtgggagctatgaatcagtatagaacaagaactctgagtatcactt

SEQ ID NO: 124599 - DNA, 83 bp, Homo sapiens
cagagacatgctgaaacatcgaagacaatgcagatcttcgtgaagactctgactggtaagaccatcaccctcgaggttgagcc

SEQ ID NO: 124600 - DNA, 83 bp, Homo sapiens
cggagcgcggtccctgtattggtctcctgctcctagagatagcagaccccacgttagctgaaatgggaaaaaacttgaaggag

SEQ ID NO: 124601 - DNA, 90 bp, Homo sapiens
gttctccctgcagcagtcagcccaaaggaagaactgataaatttcaaacggaagagagtggcagcatttagaaagaatctaattgaaatg

SEQ ID NO: 124602 - DNA, 100 bp, Homo sapiens
gaggactacagagccggtgatatgatctgtcctgaatgtggcttggttgtagacaatgattgaagctcacgttgatgtcaagactaccgatggttacttg

SEQ ID NO: 124603 - DNA, 101 bp, Homo sapiens
cacgcagctgaagctcatcatgaccttccagaattacgggcaagcgctgttcaaacccatgaatacctggagtagaacagaaaaattattatgtctgtgtt

SEQ ID NO: 124604 - DNA, 80 bp, Homo sapiens
aagatgtaacagatgaaattttgaaacttggtttattttcaaacagttggactaaatgctcttccttcagaggattatcc

SEQ ID NO: 124605 - DNA, 51 bp, Homo sapiens
ggagttgatgagaaaggaccccagctgttgcagaagaaaaccccagccaag

SEQ ID NO: 124606 - DNA, 101 bp, Homo sapiens
tcgtgtgattgactttgatgagaacactgctctggatgatgcagaagaggagtcctttaggaagagtcccctttacttggtaaatcacggcgagagtggac

SEQ ID NO: 124607 - DNA, 97 bp, Homo sapiens
atgaagccagtcctgacaatgggcagaacgaattcagtgatatcattaagtccagatctggtgaccattgtgaggtagatattttgttctaattttc

SEQ ID NO: 124608 - DNA, 73 bp, Homo sapiens
tcgcggacgggttgtgcctggaggtggaggggaagctgaacccaaagtgcagcctggtgtagccatgcaggaa

SEQ ID NO: 124609 - DNA, 100 bp, Homo sapiens
ttcgggccgagatgtctcgctccgtggccttagctgtgctcgcgctactctctctttctggcctggaggctatccagcgggactgtgaccctcctgggaa

SEQ ID NO: 124610 - DNA, 80 bp, Homo sapiens
tattcagaagaggacacagccatgcagatgactccttttcccacccagtgggagacactaaactcaaaccagatattctg

SEQ ID NO: 124611 - DNA, 89 bp, Homo sapiens
atgacagacttggacaacatgtcccaacattacatcccactgtgagccgtgagctttgaggcggtgggatgtgtcagcagaatgtctcc

SEQ ID NO: 124612 - DNA, 100 bp, Homo sapiens
ttaacattcccagctatgccggaggaaccaacttctgggggggtaccaaggaagatgatggcgtccccctggataccagtaaactgtccactgaccagcg

SEQ ID NO: 124613 - DNA, 75 bp, Homo sapiens
aaggattccaagtaactcttatttggcccgacaacaagctcaaatacgtcaccaaatggcagaggacagcaaagc

SEQ ID NO: 124614 - DNA, 82 bp, Homo sapiens
ccatggaggacagcagccgagtgtcccccagcaagagcaccagcaacatcaccagttggatacactccagattggatatttc

SEQ ID NO: 124615 - DNA, 86 bp, Homo sapiens
ctgtagagaggaccccggtacatctgaaagccgggaaatgttcaggacctcaaggggctcggctatgagaaggggaagcctgtggg

SEQ ID NO: 124616 - DNA, 75 bp, Homo sapiens
ggtgatgtggcagaattggaactaaaacttgataagatcacaaaatttgtccaggatagacatagagctagaaga

SEQ ID NO: 124617 - DNA, 100 bp, Homo sapiens
ggaacgtcatggacttcgtggtcgtcctcacagggtacatgtcccagagcaagcacacggaggcccgggagctcatgtactcgggagccctgctcttctt

SEQ ID NO: 124618 - DNA, 82 bp, Homo sapiens
gttgtttcaagaaatgaaaatgaagggcgccctggaataggttcgccgaagagagagcacgagtacacgagacaggattgag

SEQ ID NO: 124619 - DNA, 50 bp, Homo sapiens
gcgccgtcgcgccactcctccgatgtcctgttggataaacgttttcgagc

SEQ ID NO: 124620 - DNA, 82 bp, Homo sapiens
gagatgcctttgcttcagggtcagatgacgctacgcgctggccgcgcgccgaacccgagtccggcggcaccgacgacgacct

SEQ ID NO: 124621 - DNA, 75 bp, Homo sapiens
tgaggcctcccaccaaaaccaagcactgacatgccactcatggcactgggcgtccctttcagcaagacgatggct

SEQ ID NO: 124622 - DNA, 75 bp, Homo sapiens
gaagaaatgccaaatgattcagtccttgaaaacaaggatctgtgccagttcagaagcaggcgagcctcttccctg

SEQ ID NO: 124623 - DNA, 100 bp, Homo sapiens
ccagaagaagggaaggcgcgagtgaggaaaggaggtactgtagcaatgaagttgtgaggagtgacttgaagaagctgccagcccttcccacccaagccct

SEQ ID NO: 124624 - DNA, 74 bp, Homo sapiens
gccacctggcattgaggccagtcctgacaaaatgcttcaggtggataattactgtaccttcctcatggaaaaag

SEQ ID NO: 124625 - DNA, 80 bp, Homo sapiens
agtcacccaaacaatcggctgagaatgagaagagaaaaatgttcgttggtggcctgagctgggatactagcaaaaaagat

SEQ ID NO: 124626 - DNA, 80 bp, Homo sapiens
aaatctcctgacagtgttaatggaagtgaaccaagcattcctcagactcaccccacacagaccgcgtttctctccagtgt

SEQ ID NO: 124627 - DNA, 90 bp, Homo sapiens
cgcggaacatcccagaggccagcatcaacatgtatataatgtttacatggcagggaggcagctgtgttctaagcggtaccgggagtttgc

SEQ ID NO: 124628 - DNA, 100 bp, Homo sapiens
gaacagggttcctggggcatcgacgatctccatatttcattgcaaggactttccttatcccagttgattgtgcagaatacactgcctgtcgcttgtcttc

SEQ ID NO: 124629 - DNA, 83 bp, Homo sapiens
ggaaaaggcaaaaatcccatctaccgcaactctcagttcgagagtaaagggagggacattgcttgggcctccagactctgtgg

SEQ ID NO: 124630 - DNA, 96 bp, Homo sapiens
cccggtttgacgcacacggcaccaaactctccagggcccacaacggcagtgtcctacatgtcggtgaaatgtgtggatgcccgtaagaaccatcac

SEQ ID NO: 124631 - DNA, 100 bp, Homo sapiens
aggagtgaggccgcaggagaccttcccgacgacccctgctccggcggggaagtgagcaaggttatatatgccgcaattttacagggtcttctgctttgct

SEQ ID NO: 124632 - DNA, 80 bp, Homo sapiens
ctgggagattactaccagggccggaggattaccatcaccggaaagcctgtggggcccggatagtcagccgaccagaggaa

SEQ ID NO: 124633 - DNA, 75 bp, Homo sapiens
ctatcagatgaccttacagacaaagcagagggacagggaggtcaaccagctgaagcagtgggtcaccacaatgat

SEQ ID NO: 124634 - DNA, 138 bp, Homo sapiens
gtgggaagccagccctgtctcgagtgcccttcctggaaggtgtgaacggagactctgactacaatggctcagatgagtatctcagagtcctcaacgtgggtgtggccgaggtgaagaaatccttcctggggcccttgt

SEQ ID NO: 124635 - DNA, 75 bp, Homo sapiens
ctgtggtagagagaaaaatcctggatctgtatgctttgagcaaggccatttcataattctgaatcatgtctgata

SEQ ID NO: 124636 - DNA, 100 bp, Homo sapiens
tttttgaatatgaacctggcaagtcatcaattcttcagcatgaaagaccagtatgcaccttccaaacgatggcatatagacacaattatgcgtgttttga

SEQ ID NO: 124637 - DNA, 100 bp, Homo sapiens
gattattgaagtagatcctgacactaaggaaatgctgaagcttttgcaccaaccatgtgcctagagctaactgtgttaagaagagcatgcttcaagtggc

SEQ ID NO: 124638 - DNA, 82 bp, Homo sapiens
atcccctggatgggggaccacaagatcctcatcgacagggggatatgagactttctactcggaatatcctgagtgttgcgtg

SEQ ID NO: 124639 - DNA, 100 bp, Homo sapiens
tgggttctctctctagagcaaacccttacaaacatttcaatgaccctggttcaccatgttttaaccgtagagacggggttttaccgtgttagccaggatg

SEQ ID NO: 124640 - DNA, 100 bp, Homo sapiens
cagcaaagtgaattgcagagtcagactggtcgaattgacaaatcttaccctacagtatgtggccacacaggaccagtgctggacatagactggtgcccac

SEQ ID NO: 124641 - DNA, 115 bp, Homo sapiens
atccccaccctggccgtgctggtcatgcaggatcccagcatgaaccttcagggaattcctggggaagtcggagcctgagcaccagcactgagcctggccgtgggaaggaagcatg

SEQ ID NO: 124642 - DNA, 96 bp, Homo sapiens
gcgacgcccggcgcgagctcaagctgctgctgctcgccggcacagtcttcactaccgtagaagaccttggctccaagatactcctcacctgctcct

SEQ ID NO: 124643 - DNA, 98 bp, Homo sapiens
cgccgccgggctcggggcctccgcagcgacaacatggaggccgtgaagaccttcaatagcgagctatttgtcgtagatgtccagacaagccagatcac

SEQ ID NO: 124644 - DNA, 100 bp, Homo sapiens
attttagggtcctttatatagaagggagagtagatgagtttggtgctttggaaagtgtgaaagctgctagtgaactctattctcctttatcaggagaagt

SEQ ID NO: 124645 - DNA, 121 bp, Homo sapiens
tctgtgtcaccagcctggaccccgacacgctgcctgctgttgccacactcctcatggatgtcatgtcctacttcaatggaggcggatttccctgactgaagaccatgttgcaggcccacag

SEQ ID NO: 124646 - DNA, 97 bp, Homo sapiens
ctgggatcagagcctgataatttggtgattacgtggaaggaagaggtgaaaaacttcatcacccgagagaacctggaggcacgggtggaagcagcat

SEQ ID NO: 124647 - DNA, 75 bp, Homo sapiens
atgctgggcatctggaccctcctacctctgaatttaagaagaggattacctcaggttccttacttcagtctctat

SEQ ID NO: 124648 - DNA, 75 bp, Homo sapiens
gctgccgttaaggaccgttacgtttcccggaactgcatgaacttgcccccagacaaggtccagctgctgagccag

SEQ ID NO: 124649 - DNA, 100 bp, Homo sapiens
cctggggatcgctacggaccttaaaatacccgcaacagccccttcgtcccaatggttagcaggaagaagatgagccttaagtctgaacgccgaggaattc

SEQ ID NO: 124650 - DNA, 78 bp, Homo sapiens
gctttttggaacagcccgagatacacacttctgaagtttataggttaaacttagaacaaggacgatacctgaatcctc

SEQ ID NO: 124651 - DNA, 50 bp, Homo sapiens
gccgtcccaacatcacaaaaagatcctggccaatttggagcaaggcttag

SEQ ID NO: 124652 - DNA, 75 bp, Homo sapiens
agggccccgcccagtgtcccaaggccaggaggaaccagtgtgactccatgctgctcagaaaccaacagctgtgct

SEQ ID NO: 124653 - DNA, 75 bp, Homo sapiens
gtataagtatttggctcttaatatgcattatgtagcttaggcctgggggagcccatccaggaacatgcagtccca

SEQ ID NO: 124654 - DNA, 98 bp, Homo sapiens
agcgcaaggtcgccctcaaggccatgatcaaaacaaaaatggctacaaacttcctagcacatgagaagatctggttcgacaagttcaaatatgacgac

SEQ ID NO: 124655 - DNA, 100 bp, Homo sapiens
cagaaccaactcggatattgttgagtcactcagcctctgaagaagcttcgggttcagactcaggcagtcagtcggaaagtgagcagggaagtgatccagg

SEQ ID NO: 124656 - DNA, 75 bp, Homo sapiens
cgcgtccgccgattcctcctccttggtcgccgcgtccttggctggcgtgtgctgcagggtgcacagctgatcgcc

SEQ ID NO: 124657 - DNA, 100 bp, Homo sapiens
agcatgatgtcctatgagggagacggtggggaggcttcccatggtttggaggatagcaacatcagggcaagtgtccagagaatggctgggatgaaagtac

SEQ ID NO: 124658 - DNA, 80 bp, Homo sapiens
cctccacatcgccttttgccacctttccctttatttccggaggttctctacttaaaagacaatgactactgatgaaggtg

SEQ ID NO: 124659 - DNA, 82 bp, Homo sapiens
ctcatgttctgggacttaggagggcaggaagagctgcagtctttgtgggacaaggagcttactccacgggaacagcctctag

SEQ ID NO: 124660 - DNA, 98 bp, Homo sapiens
gagagaggcaccgggatcgtgaccgagaccgtgaccgagagcgtgaccgagagcgcgaatatcgtcatcgttagaagagatggagtttcaccatgttg

SEQ ID NO: 124661 - DNA, 82 bp, Homo sapiens
agctgaggagactccggcgctcgccatggccgacgaaaagcccaaggtcacaccgacaaatctgaagcgggtttgccagggg

SEQ ID NO: 124662 - DNA, 100 bp, Homo sapiens
ggcactggcacgggactcttgtcaatgatggcggtcacagcaggtgccgacttctgctatgccatcgagatttggagtccaggaatgagactaagcattt

SEQ ID NO: 124663 - DNA, 74 bp, Homo sapiens
atttcatgaatttcaagagagtaccattggggggttatatcctgtgttgtgacctcatggtttaagtgggaata

SEQ ID NO: 124664 - DNA, 75 bp, Homo sapiens
tgctagacgacctggagcgtctgtcaggctaggaggagggggaggagagctggtagacgttacatccaagaggaa

SEQ ID NO: 124665 - DNA, 87 bp, Homo sapiens
tagatgaatcttctgaattaagagttttggatataccaggacagatacaaactggactctcaggacaaaacgacaccagccaaacca

SEQ ID NO: 124666 - DNA, 90 bp, Homo sapiens
aactgttcatcctcacctatgcaaagaaagggaagctattgctgggattttgaggagggctgcgaataaaggagaccaaggaagtttatg

SEQ ID NO: 124667 - DNA, 88 bp, Homo sapiens
ttgatttgatgcataaaggcagctttgaaacagcaaaggccggcgtgtgcagccccagtggtcccctcctgctgggacccagccatgc

SEQ ID NO: 124668 - DNA, 96 bp, Homo sapiens
atccgtgtccgtgtaaagggtggtggtcacgtggcccagatttatgctcaacgggacccaggtggagtctgtacagctcaaagtcaacatagcccg

SEQ ID NO: 124669 - DNA, 100 bp, Homo sapiens
ggaattaagtgagagagatgccatctacaaagaattctccttccacaattttaatcaggttacgagaagtttctgagaagctgaacaaatataatttaaa

SEQ ID NO: 124670 - DNA, 50 bp, Homo sapiens
ctctgaagaggtcaaagaaacgtggatcctgataacttaagtgactctct

SEQ ID NO: 124671 - DNA, 75 bp, Homo sapiens
caatgatgattgcagaattcacatatttgctcaacaaaatgatcagatctggaatatgaagaccacagaatgttc

SEQ ID NO: 124672 - DNA, 100 bp, Homo sapiens
ttttcagtgccagtccatccatcacgaccacatttgtcatgatgacagtgacaagggactttcagttaccttgatgatgtcccatttaagacaggagaca

SEQ ID NO: 124673 - DNA, 99 bp, Homo sapiens
gaaggaggtcctgccgtccatgcggaagatcgtcgccacctggatgctggaggccaacgtggaacctgttgtgccgtcagaggcttcagagccggtgcc

SEQ ID NO: 124674 - DNA, 98 bp, Homo sapiens
actaaggacgagctgatcaagtatatgactgaagaaggatatccgacatgaagccagtgacttcccatgtagagtggccaagcttcctaagaacaaaa

SEQ ID NO: 124675 - DNA, 82 bp, Homo sapiens
atggagcccatcagaatggcagatggcttatgaaccacaggttcatccctgagtccccccgatggctcatctctcagggacg

SEQ ID NO: 124676 - DNA, 90 bp, Homo sapiens
caagcggaaggtgatgcccaagatggaccagcaaatccagtttgctgatgacatgcaggagttcaccaaattccccaccaaaactggccg

SEQ ID NO: 124677 - DNA, 98 bp, Homo sapiens
ctctatggcctgcaggaagcgctggaaatagccagagagatgatgtccaacatcacagtcacatacagagatggccgagtggcacagctggagcaggt

SEQ ID NO: 124678 - DNA, 90 bp, Homo sapiens
attcaccaaataagctatatactttggttacctatgtacctgttaccactttcaaaatgaaatcaaatacattgcccatctcgctgcagt

SEQ ID NO: 124679 - DNA, 100 bp, Homo sapiens
ttgtgaggaaagcagagagatacagccttcccatagtgaacctcaagaaacgctatgtattagaggaagctgagcaactggagcctcgagttagtgctct

SEQ ID NO: 124680 - DNA, 82 bp, Homo sapiens
gcgcctcccgcctcctgccgcagcccggtgacttaagagattaaaattaatttggttgctgttggttctgaacaaataatga

SEQ ID NO: 124681 - DNA, 101 bp, Homo sapiens
tgatctgtaatgttcaggccatggaagaaatgatgatggaaatgaagtataataccaagaaagccccacttgtattgaaatggctgatggcaagtgcagga

SEQ ID NO: 124682 - DNA, 90 bp, Homo sapiens
ggctcttcttcgggatcactggattgctgacggcagccctctcaggcaaactaggcgtggcaactgctggctgcgtgaatgaagttacag

SEQ ID NO: 124683 - DNA, 83 bp, Homo sapiens
aagtgaaacctccgggtggacattcccctcagttaagtgggcagaccaacatccacctcagcaaaaacttcttcctgacgaat

SEQ ID NO: 124684 - DNA, 74 bp, Homo sapiens
agccaacttgcgcttgtggcagtggcaaggttgagtccggcagcgtcttctcttgagggagcaatttggagaag

SEQ ID NO: 124685 - DNA, 90 bp, Homo sapiens
ccctgcctcccctgcgtcccgccaccggccgcttctgtcctcggactctgtctactagtgacgatgtcgaagacagggaaaatgaaaagg

SEQ ID NO: 124686 - DNA, 101 bp, Homo sapiens
cgcgggcgagcggctgtgtggatgtcggcgaagccgcgggcgagaattatatccagatcgagagacagaagattctgaaagggttcaatgaaatgagagtc

SEQ ID NO: 124687 - DNA, 75 bp, Homo sapiens
atgctcttcaggatagtatcttggccagggaactcaaacagcagatgcagttcctgagggaagacctcaattacc

SEQ ID NO: 124688 - DNA, 75 bp, Homo sapiens
aaatgaaagtctttccaatgcagacccaccgtgcggaggtcgtttgaattccaaagatgctggctatatcacctc

SEQ ID NO: 124689 - DNA, 100 bp, Homo sapiens
aaagctgtttctggaatcacccctagatctttcttgaagacttgaattagattacagcgatggggacacagaagctggcgttgcagacggggcgtgaacc

SEQ ID NO: 124690 - DNA, 101 bp, Homo sapiens
gcgtgaccccgacggctgcttctggattgagaggatccagaatccagatctctggaatagctaccaggcaaagaaaaaaactatggatgccaagaatggcc

SEQ ID NO: 124691 - DNA, 94 bp, Homo sapiens
cttggcatttggctttgcctttctggacacagaagtatttgtgacaggaaaaccagtagattcccagacatcgcgaagtgaatctgaaattgtg

SEQ ID NO: 124692 - DNA, 98 bp, Homo sapiens
aagaagtggaacttgcctgtttattttcaaataaggctgtcttttgaagaagatcagaatggggaagagttttgtaaattagccatttaaaaacaatc

SEQ ID NO: 124693 - DNA, 75 bp, Homo sapiens
ccgaggaattggccttctctagaagactctttttctcttcagcaacgggtagcagaattggaaaaaattaatgca

SEQ ID NO: 124694 - DNA, 76 bp, Homo sapiens
tgcaaagcgaggctgaagaaggccaaggctgcagaagccaaagccacgccaagaccgaggataggtgtggccattg

SEQ ID NO: 124695 - DNA, 82 bp, Homo sapiens
agaacaacggaggcagaggagctgaagactccagtatgcaactgactacaaggagagtgtacttcatggagggatccagctc

SEQ ID NO: 124696 - DNA, 74 bp, Homo sapiens
gatatatgttctctaggccttttagaaaacatggtattgatgaagatgaccctactgctgatgataccagtgct

SEQ ID NO: 124697 - DNA, 99 bp, Homo sapiens
ctttggattttggacctctggatagtagatcaggaagctattttgccagccacttcattatgggaggagagaagtttgactcaactcatcctgaaggtt

SEQ ID NO: 124698 - DNA, 96 bp, Homo sapiens
cccattccttcacagggaccctagccagggacttgccatgaggtgttgaagccttgtttcactgagttggagagactggacctaaatggcgcagca

SEQ ID NO: 124699 - DNA, 100 bp, Homo sapiens
gctttagcatggcaacaatctcttagtgccattccacagattttgaagtacaccgaaactggcttgctatcactcacagtttgccaatatcacagtggta

SEQ ID NO: 124700 - DNA, 100 bp, Homo sapiens
gtacctggagatgtgaattccataaaaatggaagcatctaagaggcagtgaacactggcgcccacagggagtaccctgacttctaccggaagctctacgg

SEQ ID NO: 124701 - DNA, 100 bp, Homo sapiens
ccgaggcccctatggcagatttgaaaattcacccttgtagagtcattcctgcctttgagcggactcccttttaagtccaaaagaaactcttccttcaaaa

SEQ ID NO: 124702 - DNA, 75 bp, Homo sapiens
cggggacagcagccggccagccggggggcactgcccgcccgggctctggaagtgctctctggcgtggtggtcata

SEQ ID NO: 124703 - DNA, 90 bp, Homo sapiens
cgagtgggctcggttcgagatggagcgggcgcactgggaggtggaacgggccgaactgcagatgcatttgctaaaaagtgaaacatcagt

SEQ ID NO: 124704 - DNA, 100 bp, Homo sapiens
gaaattctattgagaacatagccaatgagactgtgaacgtgctgtggaatatatggacaatcctccaaacacagactgtttgacttagaatcttcccttt

SEQ ID NO: 124705 - DNA, 100 bp, Homo sapiens
tggcctggagtccgcggctggccgcgtgagtaggttcgtgctggccgtgggcagcgccgtctttgatgccatgttcaacgggggaatggccacaacatcc

SEQ ID NO: 124706 - DNA, 100 bp, Homo sapiens
ctggaagtgaaagtccgattgtagtggtgctcaggagcaccttctgctccatcattgctcagctcacagaggagacccagccgctatttgagaccacgct

SEQ ID NO: 124707 - DNA, 100 bp, Homo sapiens
ctgcgggagtcaagcccctccaggagcggactgaaggccccgcaggtgaatggagagtagcagccggggcccaggtatggcatttcaaatatagatacaa

SEQ ID NO: 124708 - DNA, 96 bp, Homo sapiens
cgtttgagtgtgctcagatatcggtttggagagaagatggcttttatccctcagaacctgtttttgttccagcaccaggaaccaatgaagaagatg

SEQ ID NO: 124709 - DNA, 76 bp, Homo sapiens
ggcacagccacctttataacaaccgctatgctggtcaccattactttaagtactgcaaaatctcagcattggctct

SEQ ID NO: 124710 - DNA, 100 bp, Homo sapiens
ccacagccttgttcatcggctcccagagaaaaatcggcagatgttacagctgctcatgaaccacttggcaaaaccattcctcaagaattttgtatccaag

SEQ ID NO: 124711 - DNA, 102 bp, Homo sapiens
aaaagggtgaaggaggcgaattttcagttgataggggccctcctcgccaaagacagcctagagaggacggcaatgaagaagataaagaaaatcaaggagatg

SEQ ID NO: 124712 - DNA, 83 bp, Homo sapiens
ctcagaatcgaatctcttctccctccccttcttgatcaatgtccgagttaccaccatggatgcagagctggagtttgcaatcc

SEQ ID NO: 124713 - DNA, 83 bp, Homo sapiens
aaatgctgtcccaaccttactgggtcattgctttagtgatggatatatttacagatgtggacattttcaaagaaatcgttgag

SEQ ID NO: 124714 - DNA, 99 bp, Homo sapiens
ggatcttaaagaactagagagactagagaggatgcaagccatggagaaacagattgccagtttaactggccttgttcagtctgcgctttttaaagggcc

SEQ ID NO: 124715 - DNA, 75 bp, Homo sapiens
ttggcaacatgttagctttgaagtggatcctaccagaggtctgcggggtttccgagaggctcgccgggatttctg

SEQ ID NO: 124716 - DNA, 74 bp, Homo sapiens
gcaaagtcatgggagcagagctcagacatgttctcaccacccttggtctcacactctgaggatgactgtctagc

SEQ ID NO: 124717 - DNA, 98 bp, Homo sapiens
cttgttgaaatccgaaatttcttgggtgaaaaatatatccgcagggttcggatgagaccagagctaaaaaagtccctgtacgccatcttctcccagtt

SEQ ID NO: 124718 - DNA, 75 bp, Homo sapiens
caggaaggactatcacatcgaagagggtgaagaggacaatacatggcttgatatacaacgccctgaagctcttca

SEQ ID NO: 124719 - DNA, 51 bp, Homo sapiens
accgccaagtcggccacctggacgaacttccagcactatgttgaataagag

SEQ ID NO: 124720 - DNA, 100 bp, Homo sapiens
ccaccccaagtacaggattggagtgggggcacccgtgtacatggccgccgtcctggaatacctgacagccaagaaggatcaagaaggtggagaagaaaag

SEQ ID NO: 124721 - DNA, 87 bp, Homo sapiens
gcttttactcctacctgtgtaccgagccaggtcgcaatggaagaagagatcgccgcgctggtcattgacaatggctccggcatgtgc

SEQ ID NO: 124722 - DNA, 105 bp, Homo sapiens
gagaagtaacggtggagctaagtagccaaggattctggaaaactggcatccgttctgatgtctgtcaggtgaccaagaatatggcccaggtgaccaaagccctgg

SEQ ID NO: 124723 - DNA, 50 bp, Homo sapiens
accagccttagactatttttcaaacagagtgacagttcatttagattctt

SEQ ID NO: 124724 - DNA, 100 bp, Homo sapiens
ccgccggctctcgggagcgcaacactgcagcggttaagaagattgtctaccaaatatagaacagaaaagatatatcccacagccactggagaaaaagaag

SEQ ID NO: 124725 - DNA, 75 bp, Homo sapiens
agacgctgccagcatcgccgccgccagctgggagtgtccactcgccttccaccagcatggcaacgtcttcacagt

SEQ ID NO: 124726 - DNA, 100 bp, Homo sapiens
gccatggcggccgccctgggagcgagcggaggagcaggcgccggagggaaatcctcattgacgattcaatttgttgaaggccaatttgtggactcctacg

SEQ ID NO: 124727 - DNA, 100 bp, Homo sapiens
cctggtcaatgatttcctcctccgggtgtgcgacagaggaggcctaccagaaactggccagcgagaccctggaggagctggactggtgtctggaccagct

SEQ ID NO: 124728 - DNA, 95 bp, Homo sapiens
ttaatgtcttctgtactagtggggtagagcgggaactgggggctctgctcattatagttgcccacggcctccagtcaatgaaatttccggccaat

SEQ ID NO: 124729 - DNA, 74 bp, Homo sapiens
gccagtgggttgacacagatttcgatcctttggtacagaagacagaccgacagatcgtccaataccacctcgag

SEQ ID NO: 124730 - DNA, 100 bp, Homo sapiens
gagctatcagctggtgtagccagttgcttttgccaagagtaagttatttgacgttggtaactgacaaagtgaaaaagcactttcagaaggttatgagaca

SEQ ID NO: 124731 - DNA, 127 bp, Homo sapiens
aggagtagtcggcggtggcggcggcaccaaggcccccaagccctccttcgtgtcgtacgtacgccctgagatggaggaaaggaagtgctgtccatgcaccagattctcctgtacttgttaaggtgca

SEQ ID NO: 124732 - DNA, 90 bp, Homo sapiens
gcaccgaggccagcaagacgctgcccgccatcgaggtgaaaatccccagcaaggaggaagaggcagatatgtcctcacccacacagcgaa

SEQ ID NO: 124733 - DNA, 100 bp, Homo sapiens
gtcaagacccccaaggacaaggaggaaattgtgatctgcgatcgagcctcggtcaaggaggatgaccatgaaagctgtggttctaattctaccaaccgta

SEQ ID NO: 124734 - DNA, 74 bp, Homo sapiens
accacgccatggagaagatggaagagtttgtgtacaaggcttgcccagagccggcaacagcaacaaaatgtgga

SEQ ID NO: 124735 - DNA, 90 bp, Homo sapiens
gaacttcaagcagaaagtggtagcgctgctgcggaggttcaaagtgtccgacgagatttgttcccgacaaggagttttctggttcagacc

SEQ ID NO: 124736 - DNA, 98 bp, Homo sapiens
tgccggggtttaagggccaggaaaggaagcattcagggaatttaggtgtagccagaagaaaatcagacactcctagaatatgcagagaaatggaaaac

SEQ ID NO: 124737 - DNA, 75 bp, Homo sapiens
gagacgtttttcagaatggagaatctgcaactcatcataatcctggcaaaattccactgaaggagcctctgtgcc

SEQ ID NO: 124738 - DNA, 98 bp, Homo sapiens
ccaaagtggtgtgcttctaccggaggcgggacatctccagcaccctcatcgccctggccgacaagcacgcaaaagaaaggtgagcagccaacaggcca

SEQ ID NO: 124739 - DNA, 100 bp, Homo sapiens
aatgcctggaccctgcccagcagaatttgtatagagatgtgatgttggagaactacagaaacctggtctccctaggtgactcctgcacctgcgccggctc

SEQ ID NO: 124740 - DNA, 100 bp, Homo sapiens
tggtaaatagagggttcgttcccaggaagaaagtgaatcctgaaacccggcagaaaggccagattgaggtggtgccttctgcctctgccctgatcatcaa

SEQ ID NO: 124741 - DNA, 75 bp, Homo sapiens
aaagtggtgaatcccctgtttgagaaaaggcctaagaattttggcattggaacgtcaaggtcgtgggaaataaaa

SEQ ID NO: 124742 - DNA, 74 bp, Homo sapiens
gaattggatacaactcaactgggactatctagtcaacaggttttggcacagagcaggcgccctatggaatgcag

SEQ ID NO: 124743 - DNA, 98 bp, Homo sapiens
cttcgtctccgccatcagctcggcagtcgcgaagcagcaaccatgaatccggacaatcagatagttcaaaccagcaaggagatgcggacatcaaacca

SEQ ID NO: 124744 - DNA, 75 bp, Homo sapiens
actctctctttctggcctggaggctatccagcctatatgttctcctttcagccaagacctttcaccagtgcaggg

SEQ ID NO: 124745 - DNA, 100 bp, Homo sapiens
tactttgcaaaggccttggagagcccagagcgacccttcctggccatcctgggcggtttccaggagactgacaaggcgtggcatgggggatgtctggcgc

SEQ ID NO: 124746 - DNA, 99 bp, Homo sapiens
attgccgtcgacggcgagcccttgggccgcgtctcctttgagaggccccacagtatcaaatatccgcctggctggattagagtatgttctgcacttcac

SEQ ID NO: 124747 - DNA, 101 bp, Homo sapiens
gatcatcaggaaaaggatccagcttccttctgaaaaggcgatcttcctgtttgtggataagacagtcccacagtccagaggctacgggcgcacctacttca

SEQ ID NO: 124748 - DNA, 98 bp, Homo sapiens
tctctgtcagaggaagatcccttgaggcgtgcaaagactccagaattggaggcatgatgaagactctgctgctgtttgtggggctgctgctgacctgg

SEQ ID NO: 124749 - DNA, 75 bp, Homo sapiens
ttcagaaccaccatctgaaattagcttaaaaaatgatctaggtctggagggtgagcgacctgcgagactcacaag

SEQ ID NO: 124750 - DNA, 100 bp, Homo sapiens
tggaagggaggagactcctgaccctcagaatggcctggaacgaatgcttaaaacgtactccagcacctcctccttctctgatgcaaagagccagaaagac

SEQ ID NO: 124751 - DNA, 98 bp, Homo sapiens
gggaagtgcttggggatggagtgcctccaaaggttgctgagacattgaaaagtggcctgacaatggtagggaaagtggtgactcagctgacaggcaca

SEQ ID NO: 124752 - DNA, 75 bp, Homo sapiens
catggatttagtggacggcatctttttgaaccaaattatgctgcaaatttggtgttggtattaggagatctgcac

SEQ ID NO: 124753 - DNA, 100 bp, Homo sapiens
ccacttaaaacctgaaaacattggaccacacaaagtcttactgggacccagatggaaggatgctcttagatatttttgatgaaaatcttcaccctctttc

SEQ ID NO: 124754 - DNA, 96 bp, Homo sapiens
aacaactggctggaatattgcaggtgcctttagaggttcagattcagaacaagaaagtggacatctctaaggtctcctccaagtgtgggtctaagg

SEQ ID NO: 124755 - DNA, 100 bp, Homo sapiens
cttttcctcagaactactatattcagtggctaaatggctccctgattcatggattttgggctcgtgaagtaggtaaaatgattggactagaacatcctct

SEQ ID NO: 124756 - DNA, 90 bp, Homo sapiens
gcagaagccagggcagctgaaagacagagaccttcagtgtcagatcatataccctcgccagcagctgctgaccctccgagagctagagat

SEQ ID NO: 124757 - DNA, 100 bp, Homo sapiens
cacgcagaggacgccggaacaccctggaagccgagaaatgccgctgccatggcccagacactgcagatggagatcccgaacttcggcaacagcatcctgg

SEQ ID NO: 124758 - DNA, 83 bp, Homo sapiens
gttgtactcatagattgtgtaggcgttggtcttctgatagcaactttaatgtggtttttagaacttcagccataaaaatgggc

SEQ ID NO: 124759 - DNA, 50 bp, Homo sapiens
aatatttcgagcagtttggcaaggtatgtgaggagcagcgctgtgaggag

SEQ ID NO: 124760 - DNA, 105 bp, Homo sapiens
cgcggccgctcgcgcctctcgatgggcagctcgcacttgctcaacaagggcctgccgcttggctcagctgtcgcaggccctggaggagctgggaggccagaaaca

SEQ ID NO: 124761 - DNA, 100 bp, Homo sapiens
tgggcgacctgcaggcagcaccggaggcccaggtctccgtgcagcccaacttccagcaggacaagatcgacgacatcgcggatggcgccgtgaagccccc

SEQ ID NO: 124762 - DNA, 75 bp, Homo sapiens
tgcggtttttgggctgtgttgacatcaaggatctaccaggccctagactggagctggttacagacggaagaagaa

SEQ ID NO: 124763 - DNA, 98 bp, Homo sapiens
gcaacacgagcatggcatggccccgcaggtcttcacccaggccctggagtgcatgcgcaggtgctggagaatctggtaaaagcaccattgtgaagcag

SEQ ID NO: 124764 - DNA, 90 bp, Homo sapiens
cttcaaaattgacactatgggaacctaccatggtatgacactgaaatctgtaacgatcagtgctaacatcttccgtacacttcctccaag

SEQ ID NO: 124765 - DNA, 100 bp, Homo sapiens
gaaaatggccagcattttccaagtactgtaaattcctgtgcagaaggcatcgtcgtcttccggacagactatggtcaggcttcagggatgacttcttagg

SEQ ID NO: 124766 - DNA, 90 bp, Homo sapiens
gttgagcactacagacctcacagtgccaaatggagctggaagcagtccagtgggcctatatgaacccaatagcaatggcgagatcaaggg

SEQ ID NO: 124767 - DNA, 90 bp, Homo sapiens
cttggatattccagtcgatgtatttgtacaccaaatcctgtttgaccaaactcagagatcaattaaggcacagcttcagaactttgttaa

SEQ ID NO: 124768 - DNA, 101 bp, Homo sapiens
ccactttctcggcgccgcggctcttttctaaaagtataacccagcagccaactggcttcatgcgcgctccactcggaaaaagcggtgcccctatacaaaac

SEQ ID NO: 124769 - DNA, 71 bp, Homo sapiens
aacaaagacctcgcggaggaaggcctgaggtcctttcgagactgctggggaacctggtggtgaagaacaag

SEQ ID NO: 124770 - DNA, 99 bp, Homo sapiens
ctggccggcgctgaggatgaactggcgggtgtggacgccactacagttcatcaacatcaactacgtccctctgaaggacaagatccagaagctttatga

SEQ ID NO: 124771 - DNA, 90 bp, Homo sapiens
caggctccagttgtccgcggttcctcctcctgtcgctgcccgtgtgattactgagactcaggccccttcacagatgtagtcactacaaat

SEQ ID NO: 124772 - DNA, 100 bp, Homo sapiens
cgacgtcggggccgagctaacccggcctctggacaagaatccacagactttctattatgctgttgctgtggtgaagaaggatagtggcttccagatgaac

SEQ ID NO: 124773 - DNA, 100 bp, Homo sapiens
ggcgtctgtgggcaaaacttcaatcctggagcagcttctgtatgggaaccatgtagtggctcacagcgctccttcaccactattacccaattgagatcga

SEQ ID NO: 124774 - DNA, 90 bp, Homo sapiens
atcattcacaaagggaaaactacagccaccacacacaagagctcacaatgtctctctgcaccaagctccatgactcaggatttgcctgga

SEQ ID NO: 124775 - DNA, 96 bp, Homo sapiens
aaaaatcaatgtcagcccaacaacttacagaatgtttctccatcccagagagatgaagtaattcaatggctggccaaactcaagtaccaattcaac

SEQ ID NO: 124776 - DNA, 75 bp, Homo sapiens
ctaatctgatcgggtcttccttcatgaggactcagagagagtaatgataattaccggaccaaacatgggtggaaa

SEQ ID NO: 124777 - DNA, 76 bp, Homo sapiens
tgtccaatcttgaagaaaggctccgtgcatgcatgcaaaaactagacttctgctggatgtgtctaggagattggaa

SEQ ID NO: 124778 - DNA, 100 bp, Homo sapiens
aaaacatcttgatctggagaaaaactggatgttggtagaaaaagcaagagtttgttatatagcaggtttggacagaggagccaaaggccaaatttccact

SEQ ID NO: 124779 - DNA, 98 bp, Homo sapiens
ttcagcagaagaaacacttcctataaatctcgcccaaacaggaaaggtagtgggcagcagtcagtgacaggtgtaacctctgtggatgacagcaacag

SEQ ID NO: 124780 - DNA, 100 bp, Homo sapiens
gagcctagggacccatttctcctcctttgacagggacatcagtggagccttctcagacccacaggtgcatgtgagggaaccctggcttgttcaacctgtc

SEQ ID NO: 124781 - DNA, 75 bp, Homo sapiens
gacgcggccctggcgcccgccctgcgcactcaccatggcggttaagaaatatcctctcagttgtcggtactgatg

SEQ ID NO: 124782 - DNA, 76 bp, Homo sapiens
tcttgacgaggctgcggtgtctgctgctattctccgagcttcgcaatgattgaagaatgtcccggattccactggg

SEQ ID NO: 124783 - DNA, 83 bp, Homo sapiens
gtttgcatatatcaactgtggccttaatgagcatgttgacagcatcgatgctagacagacagaagcagacaatgatccaacag

SEQ ID NO: 124784 - DNA, 75 bp, Homo sapiens
agttgaaaaacgcttttcacgtcacctggagagatgcacagtttgaccctgggaacacaggctacattagcacag

SEQ ID NO: 124785 - DNA, 75 bp, Homo sapiens
cccgagaaccgtcagtttgagccagatggtacctgcacatgttgttctttgtcagtgctgtcaagtgtgtgccag

SEQ ID NO: 124786 - DNA, 100 bp, Homo sapiens
gatgggttttaactacagacccagtctctgccaagttccatcttagcccacatccagaagcaaaagcacttcaatgagcgagaagccagccgagtggtgc

SEQ ID NO: 124787 - DNA, 49 bp, Homo sapiens
agaaagctgtatggacctctgtgtggagccatcatcaaccactttaacc

SEQ ID NO: 124788 - DNA, 75 bp, Homo sapiens
ctagaaatgaatgtttccatctcttcagagatgaaccaggttgccgaggagcccaagtagaagaaatatggagtt

SEQ ID NO: 124789 - DNA, 82 bp, Homo sapiens
tcggcccggacgcgcccgcgcccccgcggctggagggtggtttacccaaggtccagcctagcccctaggcaccatgtcggac

SEQ ID NO: 124790 - DNA, 75 bp, Homo sapiens
agcacttcttctgctctcactgcggagaggtgtttggtgcagaagttggtaaacctcacaaatgtggatattgtg

SEQ ID NO: 124791 - DNA, 50 bp, Homo sapiens
gaaagctgccaaaagtgacatgcagagacggggtttcgccatgttggcca

SEQ ID NO: 124792 - DNA, 83 bp, Homo sapiens
agacaaggttcaaaaactaagcatccagaggccctgagcagctttcagcactggagttgcagagtgggcaggatcttaagacc

SEQ ID NO: 124793 - DNA, 100 bp, Homo sapiens
gttggctttcaaagaatgtactcgacaccttgcggttagcatggcctcattgaaagaactagatcaaagactctttgaaaattacatcgagttgaaagca

SEQ ID NO: 124794 - DNA, 75 bp, Homo sapiens
ctggagcctcagttggaagcagccgatccagcctgcggagcctgtggggcaggaacctacaagcagcaattggcg

SEQ ID NO: 124795 - DNA, 83 bp, Homo sapiens
ctggtgcccgccattctggacaccgcccatcagtacagcatccagactcaagaatgaacaatccgtcagaaaccagtaaacca

SEQ ID NO: 124796 - DNA, 75 bp, Homo sapiens
cgcctggcctgcgcgccgctgcccgcgccacaggaaaagagcactggttgccattggtacccatgatttggacac

SEQ ID NO: 124797 - DNA, 104 bp, Homo sapiens
agagctgctaaaaattactgcggtgaacaggtagaaaattatggcatgccgtttagcagaactgaagatgggaagatttatcagcgtgcatttggcggacacag

SEQ ID NO: 124798 - DNA, 83 bp, Homo sapiens
gactcgactaagagaattaaccagctcctttggtgaagattaaacagagcttaacaaaactgaagcaagaaactgtagagatg

SEQ ID NO: 124799 - DNA, 88 bp, Homo sapiens
cgttcttccgctggctcagccgcaagtacccgtccatcatagtcaactgcgtggaagagaaggtcctcagaatggttggaatgaccct

SEQ ID NO: 124800 - DNA, 99 bp, Homo sapiens
ttcttggtgaagtcggccagcctgagcaagcggaggacctacgccggcctggcgttacagtgtttctgccacctctgtacaaaagacaattttacttgt

SEQ ID NO: 124801 - DNA, 100 bp, Homo sapiens
tggcagcaatgaggaaggcgcttccgcggcgactggtgggcttggcgtccctccgggctgaggcagcatggcgggagctggaggccgagcgggcccagct

SEQ ID NO: 124802 - DNA, 101 bp, Homo sapiens
ttcccggagttcagccgccgcctcatcaaggacctggagagcatgttcaaactgtaagaagaaagcagcggcattgttcgacagccaggccccaatttgcc

SEQ ID NO: 124803 - DNA, 90 bp, Homo sapiens
tgggtacaggtataatgttaatcaacttggtgatgcccatgactggaaccagaacagaggagatctgcccaaggagaatccatatgagga

SEQ ID NO: 124804 - DNA, 60 bp, Homo sapiens
tacctatgtacctgttaccactttcaaaaaagttggtgagatggcaaagcagtatataga

SEQ ID NO: 124805 - DNA, 100 bp, Homo sapiens
acgacatggaagaatttttgcaacgcgccaaatctaaactgcttcttccagaccagctggtcttgcttctggagcatctcttggagcagaagactctgag

SEQ ID NO: 124806 - DNA, 100 bp, Homo sapiens
atctggcccaggtactggcctatctcctccgcaggtatgaaaatgaaagtcttcagaatggaaggaagtcaactgaatttccaagaaaaatacgtgaaca

SEQ ID NO: 124807 - DNA, 100 bp, Homo sapiens
tcacatgtgactctgctcagaagtgccattctattggagagacagttgacggactggacaaagcttctatagcaaactcagatggccccacagcaggttc

SEQ ID NO: 124808 - DNA, 74 bp, Homo sapiens
tgcctccggggacaagaaactagagcaaataaccgttttgaaattgcagtttgaagagaacacatgaagaagag

SEQ ID NO: 124809 - DNA, 72 bp, Homo sapiens
tcctcaacgaatacggcgacgacatgtatgggccagaaaaggtccaagccttgtcatcggccagtaagtttg

SEQ ID NO: 124810 - DNA, 100 bp, Homo sapiens
gggcggcccctggagatgattgagccgcgcacgctacagtacaagatcaccggcgtaatcaacccagcgttggacaaatactttccgtcagactctggag

SEQ ID NO: 124811 - DNA, 75 bp, Homo sapiens
gtctcctacctggatggcaaagggaacctggcacctcaaggatcgggggaaatggagaagcacctgctgctcctc

SEQ ID NO: 124812 - DNA, 90 bp, Homo sapiens
tactacaggactgcggacaagggctggcaggagagaacattgaaagtattctctaagctatttgaagagagtgactaaatgcacctgggt

SEQ ID NO: 124813 - DNA, 100 bp, Homo sapiens
acatttgctcctgaagaaatttctgccatggttctcactaaaatgaaagaaaccgctgaggcttatttgggaaagaaggctggaagattatatctggatc

SEQ ID NO: 124814 - DNA, 98 bp, Homo sapiens
gaggccattcatagagctgtggaattcaatcctcatgtgccaaaaatgggcttaggtcacgagcaaggatttggagccccttgtttaaaatgcaaaga

SEQ ID NO: 124815 - DNA, 50 bp, Homo sapiens
atagactccatctatccatatgagatgagatcgtggggctcaccagcgtc

SEQ ID NO: 124816 - DNA, 90 bp, Homo sapiens
atcccaaagacttttactgaaaattccttatggatctctgagaaggcgcagcgttgaaaggatgcctttgaagatgagaaacccccaaag

SEQ ID NO: 124817 - DNA, 50 bp, Homo sapiens
cggagatgcctggaatacagtaagtggtgccaccgaacatcgcagaactg

SEQ ID NO: 124818 - DNA, 95 bp, Homo sapiens
ttgaagaagctattaaaaatgtgaacacagcactaaatacaactcaggtttttgtggaaactctggataagtgtttcgaaaatgtgtgtgaattg

SEQ ID NO: 124819 - DNA, 97 bp, Homo sapiens
caagggcagcttcccgctggatcacttaggtacaggtttgcagattccgccagcagcacagcaagctctacagatgagtggctctttggcatttggt

SEQ ID NO: 124820 - DNA, 95 bp, Homo sapiens
ctcttaaagcagctgacttcccagcagcatgcgattcttattgaccttgtttggatttaggtggcgagtagaaaaagaagtaatttcaggaaaag

SEQ ID NO: 124821 - DNA, 75 bp, Homo sapiens
accaatgagcattatggctcctgctccaactgtatgaagtcttacagttctgttggctgtcaccagaaaagagac

SEQ ID NO: 124822 - DNA, 50 bp, Homo sapiens
aggagaggagggaactgcggagcggactgccaaggaaatctgatgtggaa

SEQ ID NO: 124823 - DNA, 59 bp, Homo sapiens
ttcgaaaacttgctttcccacactaagtggaagtagtagtcatgctcatgtaaactcca

SEQ ID NO: 124824 - DNA, 100 bp, Homo sapiens
aagcaaagcattttaaatgccatatatgtcacaagaaattgtatacaggacctggcttagctattcattgcatgcaggacttgaaaatactggaaatctg

SEQ ID NO: 124825 - DNA, 102 bp, Homo sapiens
cagtgagggtgtacaaatacccctttgaattaattatggcttttggaaattttagcattcaggtgccaggaatgcagatgggacagccagtgccagaaacag

SEQ ID NO: 124826 - DNA, 89 bp, Homo sapiens
gcctcgctgcggcggcgactgagccaggctgggccgcgtccctgagtcccagagtcggcgcggcgcgacggttgatgatgaagcgccgg

SEQ ID NO: 124827 - DNA, 80 bp, Homo sapiens
gctccttgggctacgcgtatgtgaacttccagcagccggcggacggtccctgtgcgttttattgcgacctgccggtggga

SEQ ID NO: 124828 - DNA, 126 bp, Homo sapiens
gagacacagtgtcagaattacaaggtgagatcagccgcccggccaagctatcttctcgctagcagggaacacaacagtagatgagttaatgatgagactcatggctgcaatggagatcttcacagc

SEQ ID NO: 124829 - DNA, 75 bp, Homo sapiens
aatgaagccgcggaccctcgaggtctccgtgttggtcctcttcgccctggccttcctcacctgcgtcgtcttcct

SEQ ID NO: 124830 - DNA, 75 bp, Homo sapiens
tgctactcgggacgctgcacctcccgcgccgcacggtggacgaggaggacacgctctcttcatgggccatgcccg

SEQ ID NO: 124831 - DNA, 83 bp, Homo sapiens
cccttatcccggagagctgacaatgatgaatctcatgggtaattccagaattgattggccataccattgtcactgtattactg

SEQ ID NO: 124832 - DNA, 75 bp, Homo sapiens
agccagtactctatatgaacaatccgtctggatcacggatgtaggaagtggcttcagggatgacttcttaggggg

SEQ ID NO: 124833 - DNA, 137 bp, Homo sapiens
cagacagccaaacgaatgttgagccttcttggtattcttaagtacaaaccttcaggaaatgccacagatatgtgacaaacagcatgtttggtgcttcaagaaagaagtttgtagagggggtcgacagtgactaccat

SEQ ID NO: 124834 - DNA, 82 bp, Homo sapiens
caggctaccatccatgtccctgcccagcacctgaactcctggggggaccgtcagtcttcctcttccccccaaaacccaagga

SEQ ID NO: 124835 - DNA, 101 bp, Homo sapiens
gaggagctcagcatggtcatcctgctgccggatgacattgaggacgagtccacgggcctgaagaagatgatgattattctccaccgtctaagagaccaaag

SEQ ID NO: 124836 - DNA, 90 bp, Homo sapiens
gtacatcatttcatgtcatcctgttggcactgatgaagaacccttacagaatgaagttgagagcgtcacagggatgcttaacgaggccga

SEQ ID NO: 124837 - DNA, 100 bp, Homo sapiens
aggtgccacccgaggagttccgcccctttctggcaaagatgagggggattcttaagttctgggaggtgatcagtgatgaacatggcatcgaccccaccgg

SEQ ID NO: 124838 - DNA, 101 bp, Homo sapiens
gtctgatgccagtgccaatgagacattgcctaagatactgagccatatcgccccagcattttgcatgagcagctgtagcttcgtagtggaaaaatctaaag

SEQ ID NO: 124839 - DNA, 74 bp, Homo sapiens
tcgtagctgcggtcgcgccgagaaagatgtacattgaagatgtcagtttctacatgtgggaagtagacattgaa

SEQ ID NO: 124840 - DNA, 51 bp, Homo sapiens
tgttactccattgctgaggagtgattactgacagccctgtcctaggagcac

SEQ ID NO: 124841 - DNA, 100 bp, Homo sapiens
atatctcaaaaggtgatctggacaaaggaacaggtatctcagactatcttgctaatcatggccggttaaatgagtctgaagccaggcgaaaattctggca

SEQ ID NO: 124842 - DNA, 50 bp, Homo sapiens
gaaaatgccaaggtcgcttccttcagtgtcttctcagaaacaaccagctg

SEQ ID NO: 124843 - DNA, 100 bp, Homo sapiens
cacaaagggaccttcctagctctgactgaaccacggagttgaccactgaaaaacacacatactatctgactgcagattctcccaatatattggaagagtg

SEQ ID NO: 124844 - DNA, 97 bp, Homo sapiens
agcccttgaacagctatgcatgctgcttttgatgtctgacaacgtggatcgttgttttgaaacactataggcaataatggagaccagtcccacaaga

SEQ ID NO: 124845 - DNA, 74 bp, Homo sapiens
catggagggccccgacgatagcgaggtcacctttgcattgcactcaggccacttggatgttgtagcattgctca

SEQ ID NO: 124846 - DNA, 51 bp, Homo sapiens
tggagatcaagcgcagcgatgtttaagcggctgcagggcaagaggaaccga

SEQ ID NO: 124847 - DNA, 75 bp, Homo sapiens
ctatgaacagcttaagcacttttaccgaaaaccttctccccaggtagttggcaaaaaaggagaaagccactaagg

SEQ ID NO: 124848 - DNA, 51 bp, Homo sapiens
ttggcacctatgcgcctgcagagattggagctggagtgagccttccaggaa

SEQ ID NO: 124849 - DNA, 100 bp, Homo sapiens
aatagggtgaaatctgccattgccaggcagggaggacttgtggacctgctgtgctctggccaagtattttatttcgtccctaaacattctaactatccac

SEQ ID NO: 124850 - DNA, 100 bp, Homo sapiens
caagcgactgcaggcagaagctgagacggctaagttcaactttgtggggaaacttttgggtccacgtggcaattctctgaagcgtttacaagaagaaacc

SEQ ID NO: 124851 - DNA, 80 bp, Homo sapiens
cgatccagcctgcggagcctgtggggcaggaccgccgggagagcctgcccacctccccaccctggacgccgggcgcgtcc

SEQ ID NO: 124852 - DNA, 117 bp, Homo sapiens
tgcaaactgcgcccattttgtggggctgaatccgcccgggctacgctcctccatcacgtgacccgtccaagaagcagggaccatggctggaggaagaagaagaagcctatggatgga

SEQ ID NO: 124853 - DNA, 101 bp, Homo sapiens
ctgagaagtgaggagcctctccgcccggcagccaccccatctgggaagtcttcagcatcaggggattttcagagtgtctggttcccaggtggaagtcaatg

SEQ ID NO: 124854 - DNA, 96 bp, Homo sapiens
cggggacattattgcgcgtggaacggctgcttttggaagatatgaggccccaggattcctggcgaggtcctcctccccttttccagcagcaaaggt

SEQ ID NO: 124855 - DNA, 90 bp, Homo sapiens
tgttaagcacaagttcacgaaagcctacaaaagtgtggagaggttccttcaggaggatcaggttttaaatgcacagagagcaggatacaa

SEQ ID NO: 124856 - DNA, 75 bp, Homo sapiens
acttttcttcagaagctggtcgccgccggcagatgacatcatggattcatcccttacccgccggggacagatctg

SEQ ID NO: 124857 - DNA, 51 bp, Homo sapiens
cccagaatttgaactggccctttgcagcagtggacgtcagctcagcgaggt

SEQ ID NO: 124858 - DNA, 82 bp, Homo sapiens
ttccagcctgcttgactttgaaaatgatttaattgaatcaagctgcaaagtaactaggaagattttcagtcaatgacttatg

SEQ ID NO: 124859 - DNA, 98 bp, Homo sapiens
ttggatgacttggtcaagcagtatgaaagcgaatctgtgaagctctctgtcaggtgatgatccaatgccctttgacattaaagctgagatgacactga

SEQ ID NO: 124860 - DNA, 75 bp, Homo sapiens
caacatggcagacattgacaaacattagatcagcaacagttcttcacagaggaagaactaaaagaatatgaaaat

SEQ ID NO: 124861 - DNA, 82 bp, Homo sapiens
tccagcaagacttcgtgatttttaacagagaaaagcactaggaagcttttattttcttcatgagtccttaaaaaacatctac

SEQ ID NO: 124862 - DNA, 100 bp, Homo sapiens
cggcgactgggtccgggaccggcgtcagggacacggggtgctgcgctgcgccgacggctccacctacaagatgagcagcaccagcagtaagagggctccg

SEQ ID NO: 124863 - DNA, 82 bp, Homo sapiens
ccagcagccaagccggggcagtttcagtctccaccccaaatgcagtttcactgttacatgccttgaagtgatgaggaggttt

SEQ ID NO: 124864 - DNA, 83 bp, Homo sapiens
tatggaagaagccagcagaggaactccttaaggatgcatctcttcagcccccagagcgactggaacatcggctgaagcattct

SEQ ID NO: 124865 - DNA, 100 bp, Homo sapiens
gggctcggttcgagatggagcgggcgcactgggaggtggaacgggccgaactgcaggcaatggtggcttgctatccgggaaatggaacaggttatgttcg

SEQ ID NO: 124866 - DNA, 90 bp, Homo sapiens
cgtgggaggatggggtgggtgtgcctgcctgtgagtttgggggttctgtggacaatcacaatgggaatccaaggagggtctgtcctgttc

SEQ ID NO: 124867 - DNA, 75 bp, Homo sapiens
ctctgtaacacccagctaccagtgagaaagatcagtctaaagaaaaggagaagaaagtgaaaaaaacaattcctt

SEQ ID NO: 124868 - DNA, 83 bp, Homo sapiens
ttcgccaagagaagaatctaacaaacggcaaagaacttactgattcttgaggtcctggcattgatgtgcctgctccagacatg

SEQ ID NO: 124869 - DNA, 100 bp, Homo sapiens
ttccatcagccgccttcatcaaatcaaacagaattttagatgcattgaagttatctacagaggacatcctcactctgaagataacacacatggctagtgg

SEQ ID NO: 124870 - DNA, 83 bp, Homo sapiens
acgcttcgctggccatttaggagctctgctcaaagccagacggagaagacagactgctgctttggacctgttggtaatgatgg

SEQ ID NO: 124871 - DNA, 90 bp, Homo sapiens
cagatggggaggacagtctagagagaaagcctcgtcacgtgttcaatatgctaaagaagtatgtccgcgcagaacagaaggacagacagc

SEQ ID NO: 124872 - DNA, 83 bp, Homo sapiens
catggttaaggaacaggaggaaaccattcagagagctccttaataagcatttatagtcagtttttggcagcaatagaatcact

SEQ ID NO: 124873 - DNA, 100 bp, Homo sapiens
gagagcagagaactcggcgccgccaaacagcccagctcgcgcttcagcgtcccggcgccgtcgcgccactcctccgattctggaggctggaagtccaaga

SEQ ID NO: 124874 - DNA, 76 bp, Homo sapiens
cattaacggagatgatgccgaaaacgcaaggccgaagccaaagccaggtgaattatgtaacctcattacgctggat

SEQ ID NO: 124875 - DNA, 87 bp, Homo sapiens
tgaagatgaacggatacggatgatgtgatgctgatccttcagccttagccaactatgttgtagcactggtcaagaaggacaaacctg

SEQ ID NO: 124876 - DNA, 51 bp, Homo sapiens
gagccgcagcacgagctcaaattccgagggttaccttcccgccaatgtaga

SEQ ID NO: 124877 - DNA, 82 bp, Homo sapiens
tggagcctcttctgtaaccaagaaagctgtatacctgcacaagtggtggctgccattgatgtcaacactgtcgctaatgaag

SEQ ID NO: 124878 - DNA, 100 bp, Homo sapiens
gtgtactagccaaggagttgaagtttgtgactttgatatgcaggacaggtgggctatctgattgctgggatgaaagatgtcactgaagcgcaaataggag

SEQ ID NO: 124879 - DNA, 75 bp, Homo sapiens
aagcgaagccttgaaaaagctgccctgagacggtgtcccgccgaaagcccgtgatgctgatgagcgagagaagtg

SEQ ID NO: 124880 - DNA, 100 bp, Homo sapiens
caagaatgtttttgaccagaaaaccgacaaccttcccagaaagtccaagctcgtggtgggtggaaaagtgttcgccgagaaactggcgatggaatatgag

SEQ ID NO: 124881 - DNA, 108 bp, Homo sapiens
gctgcctgcctgcctggcatctctctctcccggtttcttgagtacaggcgatcaggctgcaaaggggaactatggactccttgatctcatacaagctttaagatggac

SEQ ID NO: 124882 - DNA, 90 bp, Homo sapiens
gaaaactgaagatggcaaagtagaaaaacactatctcttctatgacggagaatccgtttcaggaaagccctggtacctgacagtgtaaag

SEQ ID NO: 124883 - DNA, 76 bp, Homo sapiens
catttccttcgtacccacagtgcttcatgagaggtgaagctcgtgtgtggagtgccacggtacaatcagacgacag

SEQ ID NO: 124884 - DNA, 111 bp, Homo sapiens
tggtgcgttctgagccgtctgtcctgcgccaaggatgatcacggacgtgcagctcgccatcttcgccaacatgctgggcgtgtcgctcttcttgcttgtcgttctctatca

SEQ ID NO: 124885 - DNA, 90 bp, Homo sapiens
cccaggagagtgacagcagctttctggtcaaggtatgttgagtctaaaaaggacagagtcacagtagtcttcagcacagtgtttaaggat

SEQ ID NO: 124886 - DNA, 100 bp, Homo sapiens
ctatattcaaaaattctaggaccaaaacctcagggatgaccctgaaaatgataacagtgaattacccaccgcaaaggagtatttccgagatctctaccac

SEQ ID NO: 124887 - DNA, 101 bp, Homo sapiens
aaaagctgcacttgaggcccagaatgcactgcacaatattaaaactttacctgggcttcaggaagtggcccgcatcgtgggcaactctggcctcaacatct

SEQ ID NO: 124888 - DNA, 96 bp, Homo sapiens
aaaaccccagtggagtttggaacttgcacggaagggaacagttttctgagtttaaccagtaatgccattcagttgccaatctcaagcaaagcaaac

SEQ ID NO: 124889 - DNA, 101 bp, Homo sapiens
tacagggcagaggaaaatgcaagaagactgatggagcaggcttgcaatattaaagtcccctgaagtcatgggttgctggctcctgctcagagtgacagcac

SEQ ID NO: 124890 - DNA, 75 bp, Homo sapiens
gccccgcaaccctccctcccggctcctcggagcggccgccgggcagcgatacgtaggtaacctttccagagatgt

SEQ ID NO: 124891 - DNA, 98 bp, Homo sapiens
ccaaacccaaattcttcgttctgtgcggcgacctcatccacgccatgccagatgtccggtctgtgctacgacagcaaaatgttccaggtgcatcaggt

SEQ ID NO: 124892 - DNA, 100 bp, Homo sapiens
gaggcccttggtaacctcgtggaggggatggatttccataagttttactttgagaatcgatcaatctccccatccagacctactctgccctcaacttccg

SEQ ID NO: 124893 - DNA, 87 bp, Homo sapiens
ctcagttggaagcagccgatccagcctgcggagcctgtggggcaggccctgggctgcatcttgtacctgctgtgcttccggcagcac

SEQ ID NO: 124894 - DNA, 58 bp, Homo sapiens
gaaaatcttggggtatcgcacatttttataaagtcctgatgaagttgtagggccagaa

SEQ ID NO: 124895 - DNA, 74 bp, Homo sapiens
ccagggtccctgaagagggaagacacgcggaaacagcactatcctgaggagcgacatgtggttgaacgccatgg

SEQ ID NO: 124896 - DNA, 101 bp, Homo sapiens
ggaccctctggagacccctatcaaggatggcatcctctaccagcagcatgtcaagtttggcaagttctatatccatttacagtcccaaggagaatccaaat

SEQ ID NO: 124897 - DNA, 90 bp, Homo sapiens
ataattatgactatgaaaatggctttgcaattggcctcatgcattgtgcgtcagcagcaatgtttatggtgaaaaatggcaacgggaccg

SEQ ID NO: 124898 - DNA, 88 bp, Homo sapiens
cctggagatggacctgtgatctggataaaatttgatgctgggactctccttcttagtacacaccgactgatttggagagatcagaaaa

SEQ ID NO: 124899 - DNA, 90 bp, Homo sapiens
ggctgaccccgcagcggccgggctgtcgcggcccccacctcagatttccacaagacggcaccctatgtcgtcactggcagcgtagatcaa

SEQ ID NO: 124900 - DNA, 96 bp, Homo sapiens
ccctcacaccctggatccttgacctactagtcggggtatgataggtcggggaagagggggctttggaggccgaggccgaggccgtggacgagggag

SEQ ID NO: 124901 - DNA, 50 bp, Homo sapiens
aagaggaataagcagacctacagcactgtgcagaggcctgtgacagagct

SEQ ID NO: 124902 - DNA, 82 bp, Homo sapiens
atcgggctgaagcgactgagtccgcgatggaggtgcctggaatacttattaagaaacgatgcaaatccagggatccgtgata

SEQ ID NO: 124903 - DNA, 83 bp, Homo sapiens
ctttggtggaatgactcctgcaggagcactggacacaatgtaccagtatcacacagatcagcaagttgctcggatggaaaaac

SEQ ID NO: 124904 - DNA, 75 bp, Homo sapiens
aacctcagaggacaacgaagtgttcggtgaatggtgatattccccctcggttaaaaaagagtgctcatgaaatca

SEQ ID NO: 124905 - DNA, 101 bp, Homo sapiens
gcaggctccctgcctactcccccaccggggatttcaggtcgcaatggaagaagagatcgccgcgctggtcattgacaatggctccggcatgtgcaaagctg

SEQ ID NO: 124906 - DNA, 100 bp, Homo sapiens
gcatttatggattctatgatgaatggaattgatgttgatgctgaaaattgtgcagtgtgtattgaaaatttcaaagtaaaggatattattagaattctgc

SEQ ID NO: 124907 - DNA, 100 bp, Homo sapiens
tcataaccttgaatggcgactagatgtacagcacttcaaatgcttcaccttcagaaggcgcaccactagcaggaagttatggatgtactcctcattcatt

SEQ ID NO: 124908 - DNA, 98 bp, Homo sapiens
tgcgagccatggggctggcggatgcgtcggggagtgtgaaaccaagattgcacaagagatagccagtctttcaaaagaggatgtttccaaagaagaga

SEQ ID NO: 124909 - DNA, 88 bp, Homo sapiens
catggacattggagagagtggtattatggtgtaaacaacgattctttggagattttggtcctaaaaacagattctcaggatcttgttg

SEQ ID NO: 124910 - DNA, 96 bp, Homo sapiens
gcctgagcccgtgcctgtcttcagatcttcacagcacagttcctgggaaggtggagccaccagcctctccctggtaagaatgattgatgttggctg

SEQ ID NO: 124911 - DNA, 100 bp, Homo sapiens
ggccgtggctcccgccaccgcaaggaggtggactacagcgactcactgacggagaagcagtggctcaagtgtcttcctggctacaatggtgataactgtg

SEQ ID NO: 124912 - DNA, 100 bp, Homo sapiens
aaccacctttatctcttccatttgatcaccatggcacacatgcttcagatactacttacagtagacacagaaattgtatgctgctatgcatgaacctgat

SEQ ID NO: 124913 - DNA, 83 bp, Homo sapiens
aaacaatggcatttacagaaagagtcaacagcagtggcaacaggggcccaaatcccagcaaagtgctacagcagttgttggtg

SEQ ID NO: 124914 - DNA, 98 bp, Homo sapiens
aggagaacctgaaggctgcgcaggaggagtatgtcaagcgagccctggttcttatagagactgctaagaagctaggactccggtgccactcaaagggg

SEQ ID NO: 124915 - DNA, 75 bp, Homo sapiens
gcagcatgttcagataaatctgaatggaagagtgagctattgacctgaaaagtggttctggaaaagtgtaccaag

SEQ ID NO: 124916 - DNA, 75 bp, Homo sapiens
tcaggatggaggaagactcgatccgcctgcctgcgcacctgcaattggagcgttattcagtatattaatgtctta

SEQ ID NO: 124917 - DNA, 83 bp, Homo sapiens
ctttgaactggaccccgcgagcaccagagtcggcgtaactatcgcctgacaggaaaaccgtgaggacatactgaatgccggtg

SEQ ID NO: 124918 - DNA, 97 bp, Homo sapiens
tccggccgcggccagcggagccctgggctggggcaggagccgcacggatgtatttcaaagattgggctcaaattcagctctgactacttcaaatata

SEQ ID NO: 124919 - DNA, 75 bp, Homo sapiens
ggatccacctggagctgaggaaccggaccccggcagctcaatggctgccatccggaagaaactggtgattgttgg

SEQ ID NO: 124920 - DNA, 82 bp, Homo sapiens
tcccgtcccggggagcccctaggcccgggtcccggatccccgcgcacccggccagctaccagagattcactgactgctataa

SEQ ID NO: 124921 - DNA, 74 bp, Homo sapiens
agacacatatggggagttggaattcaagaatgatgaaactgtagcagcccgacggccatggaggctgaagagac

SEQ ID NO: 124922 - DNA, 83 bp, Homo sapiens
gggtctcgggggccgctctgggatcccggccaccagcaattgtccgacctccttaactacgtgttttgctcaagaaacttttg

SEQ ID NO: 124923 - DNA, 100 bp, Homo sapiens
cgccaaacagcccagctcgcgcttcagcgtcccggcgccgtcgcgccactcctccgaatccaaacaccatctggcactgtctgtgaagaggctttggcag

SEQ ID NO: 124924 - DNA, 75 bp, Homo sapiens
tgtacaagttacagtcatagcagtacccgagatggaagacgcgacagactctgatgccagtatggactggagatg

SEQ ID NO: 124925 - DNA, 76 bp, Homo sapiens
cgacccggtaccaagaaggggagtgcccgcggcagagagcttggagataattctggtggctgtgtggagtatgtgt

SEQ ID NO: 124926 - DNA, 100 bp, Homo sapiens
tgcattcagcgagcccaccagaacacctgctggagccagttctgcttctcggcaaggagcgatttgctggtgtagacatccgtgtccgtgtaaagggtgg

SEQ ID NO: 124927 - DNA, 75 bp, Homo sapiens
tctccctcctgggtttcggagacattttggtgccagggacactggcccagggagagctgaatgagatgaggaccc

SEQ ID NO: 124928 - DNA, 90 bp, Homo sapiens
tctcattccatcttcattcatgactccagacaggcaccgaccgtcacgagctaacttcctggaagagctttccgtctattttcaaattct

SEQ ID NO: 124929 - DNA, 90 bp, Homo sapiens
gtggaattcaccgggagagatagcatcacctgtctcacgtgccaggggacaggctacattccaacaggggatgccaacagacagatcagc

SEQ ID NO: 124930 - DNA, 75 bp, Homo sapiens
gcttgaaatgctacatttccaaggttccttcaatggtgccttagctgctgttcctgtccaggacctgggctccac

SEQ ID NO: 124931 - DNA, 109 bp, Homo sapiens
gccctcccccctcctaggcgggagggggggtggtgcgcacgcccccgaggacgcagacaatgcagatcttcgtgaagactctgactggtaagaccatcaccctcgaggt

SEQ ID NO: 124932 - DNA, 90 bp, Homo sapiens
acttaaatgaagccactgattagcaatttaaagatcctctccaagaagtccatccactactgggtgtgaagggggatggcaaatccaaga

SEQ ID NO: 124933 - DNA, 123 bp, Homo sapiens
ccacgtcgccacctacggcccgagacacaccaggccggcaggctgagaaaagcgagaccgcgtgcgaggaccggccctcagtctccgaggaggatctcaaggtcctgttttccagcaatgggg

SEQ ID NO: 124934 - DNA, 83 bp, Homo sapiens
gttcacgcacgggatccagagcgccgcgcacttcgtcatgttcttcgcgccctgctgtttgcagacaaggtcccaaagacagc

SEQ ID NO: 124935 - DNA, 87 bp, Homo sapiens
cattggaaccgggagaagccgcactccactctgactcccaggacgggcaccaggtcctgcaaccctggttccagtctggcaagcatt

SEQ ID NO: 124936 - DNA, 88 bp, Homo sapiens
aggcatctgtgggatctgtaatagaaattgaatggtagtgtctagaaagggtatgtcccttcaagagagaggtgccaatgtccaaccg

SEQ ID NO: 124937 - DNA, 100 bp, Homo sapiens
cagacttcttagacttggaggaggtatgcctggactgggccagctggtgctgggccccagtggtgtgctgcaagggatccgccctgggaagtgctacgtg

SEQ ID NO: 124938 - DNA, 101 bp, Homo sapiens
tctagctttgtaggagcatggcttggagcacttcctattccactggattgggaaagaccatggcaggagccagatgaccaagatgctccagatgaacatga

SEQ ID NO: 124939 - DNA, 100 bp, Homo sapiens
gctcctgaagtgatcaactatgagcccatcggctacgccacagacatgtggagcatcggggtcatctgctacatccttgatctctagtaactaccagacc

SEQ ID NO: 124940 - DNA, 76 bp, Homo sapiens
tcggactatttgtagtcatgtacagaacatgatcaagggtgttacactgatacacatatgggaagcctgtccctgg

SEQ ID NO: 124941 - DNA, 82 bp, Homo sapiens
caaaagcaaagacccctcggggctgctcatctctgtgatcagacctagaggatcaagacataatgggagcatttttagacaa

SEQ ID NO: 124942 - DNA, 83 bp, Homo sapiens
ccaaactgtcacagaaagagctgttaacacttcctagataacggatccctgcatgtcactgagtccaccatgctttacagaag

SEQ ID NO: 124943 - DNA, 75 bp, Homo sapiens
gtggagacctccacaaacgcagtcatcagacaaagatcattccactcagcctgggacgatggggaggaaaaaaat

SEQ ID NO: 124944 - DNA, 98 bp, Homo sapiens
gacctcattttctgctggaactgccggttgttatgacaatggaaaacactatcagataaatcaacagtgggagcggacctacctaggcaatgcgttgg

SEQ ID NO: 124945 - DNA, 75 bp, Homo sapiens
atctacagaaacacatcagaactcatacaggtggtgaaggagcaggttatgagagcacttacaaccaagcctagc

SEQ ID NO: 124946 - DNA, 90 bp, Homo sapiens
gttgctacaatttcaggaagaagtttttggcaaacatgtcagcaatgcaccgctcactaaactgccgaacatccaccagtggtgtggttc

SEQ ID NO: 124947 - DNA, 75 bp, Homo sapiens
caggagctcagcatgggcagcccgggacctgtgaccaacaaggccaccaaggcagaggaagcggctgctgagatt

SEQ ID NO: 124948 - DNA, 76 bp, Homo sapiens
gtgatttgcttgaagatatgaggaagtcgagggaccgaacggactgtagtaatggataaatccaaaggggtgcctg

SEQ ID NO: 124949 - DNA, 100 bp, Homo sapiens
aagaactcctctcttgtgcagattgtggcagtagtggccttccggagcagtactacagcctcacctggttcctgagccccatccttggcctcatcttcac

SEQ ID NO: 124950 - DNA, 88 bp, Homo sapiens
gtgttgaaaccagcctcaagtttcacctatcctcactgatccgtggacttctgtatgatcaggccaatccggagccggcaacaactgg

SEQ ID NO: 124951 - DNA, 90 bp, Homo sapiens
tggtggtcctccaccagacagtgtgtactctggcgtgcaacctggaattggaacggagacccgtttgatggagctgcaccgccagtggga

SEQ ID NO: 124952 - DNA, 97 bp, Homo sapiens
ggggagcgtccggagctagctggatcctctaggcaggccacaagggcagccattactcagcactgcactgaccttgggaatttgctgggcaaggaaa

SEQ ID NO: 124953 - DNA, 82 bp, Homo sapiens
ggggagtaaattgaaaatattggggccatttagtaacttctttgcaagaacaccttccaccatgaccacctcagcaagttcc

SEQ ID NO: 124954 - DNA, 108 bp, Homo sapiens
ccggaggcccggccacctctgagaagggagacgacgctgctgggtccgctgagcggggcgacccgagttgggatgaatgggttccggagagcagagtactcaaatacg

SEQ ID NO: 124955 - DNA, 83 bp, Homo sapiens
caggtgtggtgccggtgggaactgaggaagcgcccaagttattgccttgtctgtcaagatccgcagttatgaagaacacttgg

SEQ ID NO: 124956 - DNA, 75 bp, Homo sapiens
cgatgaagtgcagaggtttttttctgaacgacaccgtaactatccgcactagaaagttcatgaccaaccgactac

SEQ ID NO: 124957 - DNA, 100 bp, Homo sapiens
tactttaagaaggataaagtaaatggagacaagctgtggttggttcttgagatttgaaaaatgtgtgagtgctaaggaagctttggagactgatctttat

SEQ ID NO: 124958 - DNA, 75 bp, Homo sapiens
ggagggatgggaggaggacactgtactaggttttgacaagcttgcatcatgcgtgagtataagctagtcgttctt

SEQ ID NO: 124959 - DNA, 100 bp, Homo sapiens
tggaaatggctgcaggttcagagttgcaaaagcttctcatttcagagagatgccaggatcctaagtgcctgccaaacttaccaattctaaggaataagtg

SEQ ID NO: 124960 - DNA, 100 bp, Homo sapiens
gagacgagaagcctgaaaagtcgcagcgagctggagccgccggaggaatcacactgtcagagtacttccgtgacatgggctatcatgtcagtatgatggc

SEQ ID NO: 124961 - DNA, 91 bp, Homo sapiens
tggagatcagtgcctggttccaggaggccataggcttcattggctttgaaatcaacttcatcaagtctcagagcagcaacatgctgacgcc

SEQ ID NO: 124962 - DNA, 80 bp, Homo sapiens
ttgttaaggattccaagtaactcttatttgtgatgtcttggcattgcccattttcaagcaggaagattccagccttccat

SEQ ID NO: 124963 - DNA, 121 bp, Homo sapiens
tacttctacgccaatgaggccaagtgcgacagccacatggagacattcttgcgctgcatcgaagcctcagggaagtaccactgcccagtgctgtttaccgtgttcaccaacaacacccaca

SEQ ID NO: 124964 - DNA, 88 bp, Homo sapiens
cacaataaaggtgctaagaaagagaatgtaagacaggaaaataattaaatattcttaccgagggtaacaaggattaccatctacagac

SEQ ID NO: 124965 - DNA, 75 bp, Homo sapiens
tgacaaactctggagtaattggagccaagaaatgagtataggtgtgtcacggggtcccagccctgtcagccttgg

SEQ ID NO: 124966 - DNA, 74 bp, Homo sapiens
cagagccagatgatccacaggatgctgtagtagcaaatcaggtattactgtctctaagccagacctgatcacct

SEQ ID NO: 124967 - DNA, 75 bp, Homo sapiens
cctggacctgctcttccagctggagctgagtcgcaccacccgagaggaagtttggcgtggtggtggttggtgttg

SEQ ID NO: 124968 - DNA, 74 bp, Homo sapiens
gagttgggaggacccgggacaccgcacagccgggaaatgccagagactgctgctactttgaaacgtacgataga

SEQ ID NO: 124969 - DNA, 133 bp, Homo sapiens
caacttcggcaagatccagatcgggatttacgtggagatcaagcgcagcgatggccgagacgcatccagagctttcgtgaccggggactgttctgaagcaggcctcgtggatgacgtatccgacctgtcagcc

SEQ ID NO: 124970 - DNA, 73 bp, Homo sapiens
gcaagagatggaaaattgttgcctgaagaataccaaggaggatcttttagggcggcgactggcggcgcgatgg

SEQ ID NO: 124971 - DNA, 89 bp, Homo sapiens
gggacacagcgggtcaggaaagattccgaacaatcacgacagcgtactacagaggagccatggctgaagccgacgtagcttctctgaac

SEQ ID NO: 124972 - DNA, 74 bp, Homo sapiens
cagagaatgacgatgacgtctaccgcagcctggaggagctggccgatacggcaagaagaagctgaaatacctgc

SEQ ID NO: 124973 - DNA, 74 bp, Homo sapiens
ataggcaacaagatgatgagggcgcggcagtatccttggggcactgtgcaggggtttggagaacattgattaag

SEQ ID NO: 124974 - DNA, 80 bp, Homo sapiens
tcacaccccaacgtggtgaatctgcacgaggtgcatcacgaccagtctattatcctcccagtccacaacgctgaaccgtg

SEQ ID NO: 124975 - DNA, 100 bp, Homo sapiens
tgcttctgcctaagaagaccgagagtcaccacaaggccaagggcaagtgatttgacaggtgtcgtgaaaactacccctaaaagccaaaatgggaaaggaa

SEQ ID NO: 124976 - DNA, 76 bp, Homo sapiens
gccaagtttgactttctcaccagaaaggaaaggttatttgtcaatgaagaaaatgttaatgagtttcttgaagagg

SEQ ID NO: 124977 - DNA, 100 bp, Homo sapiens
cagaagtgttccacgtttcagaggcaggactggtgctctggatggctgaggttttaatgtgactggatgtcccttggagtagctcccaggctgtgctctt

SEQ ID NO: 124978 - DNA, 80 bp, Homo sapiens
tgcttcagccgcagtcgccactggctgcctgagaaagtttcctacactactgaggtttaggggcactgtgaagcaaaagc

SEQ ID NO: 124979 - DNA, 90 bp, Homo sapiens
cgctcttgctcctctctccttggcctctcctgggatcggcccaaggccagttctccgcaggtcttgggctggcacgaagagctgcccggc

SEQ ID NO: 124980 - DNA, 96 bp, Homo sapiens
gccccggctcagggtcccccttcctggtggctgtgaaggcctatatgaacccaatagcaatggcgagatcaaggggtccaatccagtcttcagggc

SEQ ID NO: 124981 - DNA, 74 bp, Homo sapiens
tcctaccaggtcacacactgttgcagcgcagttcatcattcccctgcatattcttttcctgctgctatccagag

SEQ ID NO: 124982 - DNA, 100 bp, Homo sapiens
gctgcaggtcctggatttatttctcgattcgctgtcggaggagaatgagaccctggtggagtttgctattgccttgttatcagctacagctctgaattat

SEQ ID NO: 124983 - DNA, 74 bp, Homo sapiens
aaattggacaatggctctttagagagttatctgagtgatgaatttttagatgtgatctactggttccgacagat

SEQ ID NO: 124984 - DNA, 71 bp, Homo sapiens
aaactggatgtgaaaacaaagtcttgcagtggcgtggtccagtccaggtgcagcagcaaggagaacattct

SEQ ID NO: 124985 - DNA, 90 bp, Homo sapiens
cgtcgacgccatcatgaccacggcccagagaacgtctgcttcatcttccctcagtttttataccagttcttctgtgggttttcacaacag

SEQ ID NO: 124986 - DNA, 76 bp, Homo sapiens
cgaggattggccggctggccaacttcggagatgacttcctgaagccacagatcatcacccagccagaaaccaccat

SEQ ID NO: 124987 - DNA, 75 bp, Homo sapiens
tggacatccagattttctattgtgccagacctgacgaagagccttttgtgaaggccaataacggaaaactgcctg

SEQ ID NO: 124988 - DNA, 75 bp, Homo sapiens
tcaccacgcagaacgtcaacaccaagtgcatcaccatccccagggggatctttggatgtatataggaaaatgcca

SEQ ID NO: 124989 - DNA, 99 bp, Homo sapiens
tatacagggacgtgatgctggagaattataggaacctggtctccctggttgactagataacgaaggacaatgcatatatacaaaattgctgtattgcct

SEQ ID NO: 124990 - DNA, 98 bp, Homo sapiens
tctgaagacagtgccccgccatgaccctctcaaccctctgtgtcctggggccatccgagccaacggagagacagtgacaataccctcccctcccttgg

SEQ ID NO: 124991 - DNA, 98 bp, Homo sapiens
ctggattcgtggcgccacaagctcattcactgtgtagcaagaagaattttctgcgaaagaaccttcttacaccttttccaagaaaagatcctggattg

SEQ ID NO: 124992 - DNA, 100 bp, Homo sapiens
ctaaagtaccacttactcaagcaacacgtggtcctcaggtacagcagccacctccttccaacagggaagaaggagaaagggccaacccctgaagaagcaa

SEQ ID NO: 124993 - DNA, 83 bp, Homo sapiens
cttcctctaggctccccgaacctacggacaagacctccaccacgcagagaatccagcctgggggatatgagactttctactcg

SEQ ID NO: 124994 - DNA, 75 bp, Homo sapiens
atgggatagcgttgcaaatccttaaaagagtcttaacgatctgcaactatgtgggaccagcaaaggttattgttc

SEQ ID NO: 124995 - DNA, 98 bp, Homo sapiens
cggcatccgcgccggcctcgtccagaacgtggtcagcaagatatggaggccacatttgcagagtatgaagaatggtcagaagacccaataccagagtc

SEQ ID NO: 124996 - DNA, 100 bp, Homo sapiens
tggctcccaagaagtccgagacacgcggtgaggcggcgacgggctccggactggtcgaattgacaaatcttaccctacagtatgtggccacacaggacca

SEQ ID NO: 124997 - DNA, 96 bp, Homo sapiens
cctggcgcgatgcgtcaagtacactgaaattcatcctgagatgagacaatgcagatcttcgtgaagactctgactggtaagaccatcaccctcgag

SEQ ID NO: 124998 - DNA, 100 bp, Homo sapiens
ggaagaggaagctactgagtggcaacacaaagccaagtcctgtatctgccatgtctgtggcgtccacctcaacaggctgcattcctgcctctactgtgtc

SEQ ID NO: 124999 - DNA, 106 bp, Homo sapiens
cgggtctcgttactcggcggtcaggagcgggccctcccttaggtgcgccccccgccagggggggccctcagcctcttggccttgaacgggctgttcatcttgattc

SEQ ID NO: 125000 - DNA, 76 bp, Homo sapiens
gtgcctttggaatttgtacagcaggattacggggcgctgaaagacatcgtgatcaacgcaaacccggcctcccctc

SEQ ID NO: 125001 - DNA, 97 bp, Homo sapiens
ccaagcctgctacacgcttgatgtggaaatcccagtatgttccatatgatggaatcccatttgttaatgcagaggaactggggagtgatgaagatga

SEQ ID NO: 125002 - DNA, 95 bp, Homo sapiens
gtagcctattggaggaaaacacaccaagtgtttctgaaagatctatccagcactccgatggccagcaacaacaccgccagcatagcacaagccag

SEQ ID NO: 125003 - DNA, 97 bp, Homo sapiens
ctggctgttatgtacgcaggagccctgtatgatgagattcgtcagtttcgcaaggcctgtggggaggctcatcttaaaactatattagcgacaggag

SEQ ID NO: 125004 - DNA, 100 bp, Homo sapiens
gggttgaggcgattccagagagcggcggaaaggataagcctcgacttagaagctaccgagttaccctaagaaaggactcagaattcatgattgaagaaat

SEQ ID NO: 125005 - DNA, 75 bp, Homo sapiens
tggatcgctgtgatcgtcacttggaaagtggagaatgaggacatgaataaagaccagatcttgctggaaaaagaa

SEQ ID NO: 125006 - DNA, 106 bp, Homo sapiens
tacaaaactggagattactggcgtctcttggttccaggaacttataaaatcacagcatctgctcgaggttctgatacaacaccccttttaaatggatcaagccaag

SEQ ID NO: 125007 - DNA, 74 bp, Homo sapiens
aaatatatccgtaggaatggagagggaccggatctcaggttattaacacggggatcaaagtctggtgtagaaat

SEQ ID NO: 125008 - DNA, 100 bp, Homo sapiens
ccaaactcttgccctttgagggaccagaccagaggtcaggcaaggactcggaggcctgggttcccgactcggaggagaggctgatcctgcgagaggagtt

SEQ ID NO: 125009 - DNA, 83 bp, Homo sapiens
ggccgagggtggccctaggggcagcgagcaagacagcaagcagatgaaggatttgggggcagagcacttggcaggtcatgaag

SEQ ID NO: 125010 - DNA, 100 bp, Homo sapiens
tgggaagaagttcagagctacatcaggaagagaacagcggaacatgaggcagcacagcaagacatggagcagagtaaccctgcctacaccatcagtgctg

SEQ ID NO: 125011 - DNA, 80 bp, Homo sapiens
ccagcctgcggagcctgtggggcaggttttgaacgaagaatgtgatcagaactggtacaaggcagagcttaatggaaaag

SEQ ID NO: 125012 - DNA, 51 bp, Homo sapiens
caaggatggagatcctaggaaagcctgagacagctgcctgtgtgggactga

SEQ ID NO: 125013 - DNA, 98 bp, Homo sapiens
gggatcccccagttccaaagtgtcttaaaggctaaactgctcttttcagatggagaaaaagtaatacccagattgacccatgagcttccaggaataaa

SEQ ID NO: 125014 - DNA, 96 bp, Homo sapiens
cctcaagtacagggtcatcaagggcaatatatcagctacttcagtgggctgctatctggctccatcagaatgaacagcagccctctcttcctgcac

SEQ ID NO: 125015 - DNA, 100 bp, Homo sapiens
agcaggaacaagagaggtcaggtggtggggaccagaggtggctttcgtggttgcacagtttggctaacaggcccagttctggtgatgatttcacttttga

SEQ ID NO: 125016 - DNA, 100 bp, Homo sapiens
ttgaccaatccagtgtgcacagaggtaggagaaaaaattgcccttagccgaagagttgaaaaacactggcgggaagctgtgattaagcactcattggtgc

SEQ ID NO: 125017 - DNA, 83 bp, Homo sapiens
cccgggaggaaggaacgaggcaaggagctaaagcagcgtgcgttcagccctgggacatgggaaagcggaaccaccaaaaggag

SEQ ID NO: 125018 - DNA, 76 bp, Homo sapiens
aatatacagaaaccacttagtagtgtccaggaaaatatacagcagtgaagtggatcctaaagagaggatagcacgc

SEQ ID NO: 125019 - DNA, 98 bp, Homo sapiens
gttttgagaacagagtgctgttttagagctggcagcagcatctcagcccaagagaaggttatcaatactctggctgaccatcatcatcgtgggactga

SEQ ID NO: 125020 - DNA, 98 bp, Homo sapiens
tgaccagtcccggaagagagctggggatgagttggcttataaccagcatctcagacatgtcgaaaaagatgttttgatccctaaaataatgagagaaa

SEQ ID NO: 125021 - DNA, 100 bp, Homo sapiens
ggaccgctacgacgcggcgcgcgccaagatcgccgccaacctgcagtggatctgcgccaaggcctacggccgaggtctcctctgagcctccggcctccat

SEQ ID NO: 125022 - DNA, 51 bp, Homo sapiens
aagacaacttcctcaccagcaccttacaggaaacctatgagaatatcccag

SEQ ID NO: 125023 - DNA, 50 bp, Homo sapiens
tactggctgagggcagagactctcccggtgacttaagagattaaaattaa

SEQ ID NO: 125024 - DNA, 83 bp, Homo sapiens
ctcgctgcctggaccgggtctgagcgcggctgcccaggttgacctttctgcgggagggaagtcccacctggccatcgtgcaga

SEQ ID NO: 125025 - DNA, 80 bp, Homo sapiens
gaagaccccggcgctggtgaacgacaatgcagatcttcgtgaagactctgactggtaagaccatcaccctcgaggttgag

SEQ ID NO: 125026 - DNA, 83 bp, Homo sapiens
gaatataatgcattacatcaaagacacactgaggagtatccaacccttacaaccttcttcgaaggagaaataatcagcaaaaa

SEQ ID NO: 125027 - DNA, 100 bp, Homo sapiens
attagagattgtgaagaagaatttcgatctccgccctggggtcattgtcagtgaagcagccgacacgagtcgttgttcataaaacagcttttgaaagttg

SEQ ID NO: 125028 - DNA, 100 bp, Homo sapiens
ctcattaagtaaaactcaagatgtttaccatgacaagtcccctcctggtatcttgctgaactttgacctggaccggggcgtgtttccagtagtcatccag

SEQ ID NO: 125029 - DNA, 74 bp, Homo sapiens
gcgacctggaagtccaactacttccttaagatcatcgggaggaagttgccttgtactgtgccaaatatcttcct

SEQ ID NO: 125030 - DNA, 96 bp, Homo sapiens
tctgcacttcgcattttggcattgacatttaattttagggtcctttatatagaagggagagtagagttttcaaaaggccatgggacttaagaagac

SEQ ID NO: 125031 - DNA, 97 bp, Homo sapiens
aggcaaaaggtagccctggagagacgcaaacatgcagatctttgtgaagaccctcactggcaaaaccatcacccttgaggtcgagcccagtgacacc

SEQ ID NO: 125032 - DNA, 98 bp, Homo sapiens
cgtttcaaggttaattcgaaagtcttgtggaagatctggaagaaacagctacgttttgcaagaactagtggagacagagcgtgactatgtgcgggacc

SEQ ID NO: 125033 - DNA, 100 bp, Homo sapiens
agatgctggtcttaccacttatcatctccagtcttgtcacagctcctcaagagttactgatctatgaaatggcagagaatggaaaaaattgtgaccagag

SEQ ID NO: 125034 - DNA, 89 bp, Homo sapiens
atcctgttacatacatttcagaaacagcactattcctgatcagagaactccagttgcttcaacacacagtatcagtagtgcagccaccc

SEQ ID NO: 125035 - DNA, 100 bp, Homo sapiens
acaacctgacacagccaattatacatcgtgacttgaacagagactaaggtgtcagtatgttcttcaagctgctctgctcctgggcccaagctattctcct

SEQ ID NO: 125036 - DNA, 89 bp, Homo sapiens
tcaccacggacgagatgatcaaacgcctgaaggacttccaatagtagtcagacattatcatcctgtcatactatggagccatgtacatc

SEQ ID NO: 125037 - DNA, 75 bp, Homo sapiens
gagggctgcaaggtgggaagtgaagtcagtgcctcagttgctgcatatagcactttctacattgtgggtttaata

SEQ ID NO: 125038 - DNA, 106 bp, Homo sapiens
gcctcgtggtctaaagcttcggcacaagggcccaactggaattccacttacggtgttgcctcagcttctcaaagtttctggtgtttatgaagatccataacagctg

SEQ ID NO: 125039 - DNA, 100 bp, Homo sapiens
caggcacccgccaccatgcccgactaaataggtacccaagatattgtatttggagaagtagatcggtgagcaggggagcagcgtttgatcccccctgcct

SEQ ID NO: 125040 - DNA, 100 bp, Homo sapiens
atgcccaagaagggggaccttggcctttctaaaaagtggagcacatgatccagaagaaccaatgtctcttcaccaacacccagtgtaaggtttgctgcgc

SEQ ID NO: 125041 - DNA, 75 bp, Homo sapiens
gttagaaaggctcaacgagaacaagctatcagaccaagttttacaggaaaactccagtgattttcaatcaaacat

SEQ ID NO: 125042 - DNA, 75 bp, Homo sapiens
cgcggctctccaagttctaccagccctacgccttgaaccggggcattgctgctgtcaaggaggatgcagtcgaga

SEQ ID NO: 125043 - DNA, 75 bp, Homo sapiens
caagaagtttgtgagcaacataaccagggtgttaatctttatgtgaaaaatcttgatgatggtattgatgatgaa

SEQ ID NO: 125044 - DNA, 100 bp, Homo sapiens
tagatgactgccagaagctcatagaacacggagtcaacactgcagaggacttagtccgagaaggtgttggggatgtcctttgcactgaccctgaactgcc

SEQ ID NO: 125045 - DNA, 82 bp, Homo sapiens
ggagctgcagtcggcactgctactgcgaagacagctggcagggacccagacatggagctgcgggaagaagcctggtctccgg

SEQ ID NO: 125046 - DNA, 82 bp, Homo sapiens
aagtcgagtatctggtgaagtggaaaggatggcccccaaaactgattcttgctattccaaatcctcttccacgttgacagcc

SEQ ID NO: 125047 - DNA, 50 bp, Homo sapiens
tctcggcttgaccgcattcttcctcccagtgaaactgatgaaagttgtaa

SEQ ID NO: 125048 - DNA, 75 bp, Homo sapiens
tggaaccttcgggcaaacaggattccacagtgtcctctggaaaatggtttttcttcccccagtccctcagctgct

SEQ ID NO: 125049 - DNA, 100 bp, Homo sapiens
cggagccggagaccctcccttgaaaccggcactgggacttctcgatctctggaggcacctgttgcaagtgacagttaccttatcccatatcacacaactg

SEQ ID NO: 125050 - DNA, 82 bp, Homo sapiens
tctgtgtggcttcaagagactgatcaaattgtgagaggaaaacagcctacccgtcccaccaggatatttgcgatatactcca

SEQ ID NO: 125051 - DNA, 74 bp, Homo sapiens
cccaggccccgccgaggcggccagataacgaaggaggcccaacttcattcaataaggagcctgacggatttatc

SEQ ID NO: 125052 - DNA, 100 bp, Homo sapiens
cagcggtgtcgtggccgtgttgctgatcgcctgggtggttgttggcgtgtccctgcagcgaaggatcctggacccgtgcatctcttccgactctcgggca

SEQ ID NO: 125053 - DNA, 83 bp, Homo sapiens
ctgcgggcgccttgcaaggaacacccggcagagcccacatccacgggagctggccatacagtcaggtggttccaaggaagaaa

SEQ ID NO: 125054 - DNA, 90 bp, Homo sapiens
ccgcggggacagcagccggccagccggggggcactgcccgcccgggctctggggccaactcaccctatgcagcacagcccaccagctacg

SEQ ID NO: 125055 - DNA, 90 bp, Homo sapiens
tttccaaagcactgcgtgctgatgaaaactactacaagatgctgtgagagaagtaaggaaatattcctcagttcataccattgagaagag

SEQ ID NO: 125056 - DNA, 74 bp, Homo sapiens
tctgccagtgagcctcaggctttaggaactgaagagaatgatatggaacctagcaaagctgttccactgaatgc

SEQ ID NO: 125057 - DNA, 100 bp, Homo sapiens
caaacactgctttcagtgcaagattccacctgctcctacgaagcccgactttgatggtcctcgagagaagatgcagaaactgggagaaggtgaagggtct

SEQ ID NO: 125058 - DNA, 97 bp, Homo sapiens
ctccaatgggcctttccagcccgtggtccttctccatattcgaggtaagttctcttctacgctgtatgagactggtggctgtgatatgtcacttgtg

SEQ ID NO: 125059 - DNA, 75 bp, Homo sapiens
gttggaatgctcttttaccgatgctttaacatacagccactaggtgtcagcttcctctggtgcaaccagcaagtc

SEQ ID NO: 125060 - DNA, 98 bp, Homo sapiens
ggaaagctgaaatccttcgcccggaaattcatcaagtcagaagagatcaattctacagaaatttccagtggttctgttgaggctttatggaattcagc

SEQ ID NO: 125061 - DNA, 83 bp, Homo sapiens
cgtgccctactctgccccgggggagaggttaaagatcgaggtccggaagccactaggagattttttaattggttttattggag

SEQ ID NO: 125062 - DNA, 50 bp, Homo sapiens
cgggctcccagctgcccacctcataggtccgcgggagagctgtggggctt

SEQ ID NO: 125063 - DNA, 100 bp, Homo sapiens
ggaggaggaagtaggggtgcacctcagcactatcccaagactgctggcaacaggtgaacacacagtgttcatcccctcaggaggacacagcttttgaggt

SEQ ID NO: 125064 - DNA, 74 bp, Homo sapiens
ttccagcttcggaacaagagaccctggatgctttcattggatttggaggaaatgtgatcaggcaacaagtcaag

SEQ ID NO: 125065 - DNA, 50 bp, Homo sapiens
cgcctctccaagaccatccctggctgctgatagcctgggctggaagctct

SEQ ID NO: 125066 - DNA, 124 bp, Homo sapiens
accattgctgaacggagaggtagccatgatgccccacttggtgaatggagatgcagctcagcaggtaacaccatgttgttgagagtgttacctgctgtgtatgaaaagcagcctcagccaatta

SEQ ID NO: 125067 - DNA, 98 bp, Homo sapiens
gaggcccctatggcagatttgaaaattcacccttgtagagtcattcctgcctttgagcggactcccttttaagggccttcatcctagaataatcactg

SEQ ID NO: 125068 - DNA, 75 bp, Homo sapiens
cgagtttgaagagttccctgccgaaggcttcttctcatatcggtaattccactcaggccactgtgagggatgcag

SEQ ID NO: 125069 - DNA, 101 bp, Homo sapiens
aagtcgagactactggccgaaggggcgtctgcggctctccgccgtccccagccctgcctctccctgggctctgcatccgcacttccactaatagccaagta

SEQ ID NO: 125070 - DNA, 82 bp, Homo sapiens
gcaagaagtgaatccccccaaccagcaccagactggggctcccagaggccatttcatagggattatatgcgtcaggcaggag

SEQ ID NO: 125071 - DNA, 100 bp, Homo sapiens
ctgggagaccgtgtggaacgatgccaaagaattgagctgaagcagggctacacatttttcatcccttccgttggtgacaaagttcctgctgatataaggt

SEQ ID NO: 125072 - DNA, 60 bp, Homo sapiens
tcccacctgctcctccagcgcaccaggatgaatttcatcctttcatcgaagcacttctgc

SEQ ID NO: 125073 - DNA, 83 bp, Homo sapiens
gctggggctggtgcaactttcagaagtggtcccagatgccatggacaatattaccaggcagaaccaattctacgatacccaag

SEQ ID NO: 125074 - DNA, 100 bp, Homo sapiens
tatgccaactttgtgacaactcatcagggaatgcagagagcaaccaatgtcacctaccaagcccatcatgtcagcaggaacaagagaggtcaggtggtgg

SEQ ID NO: 125075 - DNA, 83 bp, Homo sapiens
tggaaatatataatgaagaagttcgtgaccttttgggcaaggatcagacacaaaggttagagatcgtgaaccttatagaagaa

SEQ ID NO: 125076 - DNA, 100 bp, Homo sapiens
gctggtacttcggggggctggcctcctgcggggccgcctgctgcacgcacccgctggacctgctcaaggcccgggttcgagagctcgaagaacagtgccg

SEQ ID NO: 125077 - DNA, 50 bp, Homo sapiens
ttcggtgcctctctccagcagactgcggcacttccgttccggcgcccctc

SEQ ID NO: 125078 - DNA, 50 bp, Homo sapiens
gaaaaggacgcaaagttctccggcgaggatgaatttcatcctttcatcga

SEQ ID NO: 125079 - DNA, 82 bp, Homo sapiens
agaaagtactaaagaatctaaatcatcatggaaaagagtttcttttgggaggcctgaagctgcccagcaggcattccaaggc

SEQ ID NO: 125080 - DNA, 74 bp, Homo sapiens
gaataccactattccaaccaagaagagccagtcgtcattgaattttgagaagcattctgaaaactttgcatgga

SEQ ID NO: 125081 - DNA, 76 bp, Homo sapiens
ggattgtcactccaacctcttttcgctggtctcctctgagcctccggcctccataagacccaaaacagatgacacc

SEQ ID NO: 125082 - DNA, 100 bp, Homo sapiens
ggaaatcatgtcaagcgaagccttgaaaaagctgccctgagacggtgtcccgccgaaagattttcgacaatgaagccaaagacgtggagagagaagtttg

SEQ ID NO: 125083 - DNA, 100 bp, Homo sapiens
ggggccccggggcctcctcccactctgcctcctggccttctgcctggcaggcttcagcttcgtcagggggcaggttacgaagtgacagtgctggtgcggg

SEQ ID NO: 125084 - DNA, 100 bp, Homo sapiens
aataggtgtatcaagtaatggtgcaaagcctgaagtgaggtcccagcttgaagagaaagaaaacaagaagttccctgtgtttaaggccgtgtcattcaag

SEQ ID NO: 125085 - DNA, 100 bp, Homo sapiens
gccccggccacctcggcctcttcctgttgcaccaggttcttcgaaaactgaagcagatgttgaacaacaagccttgctatacatcctgacaaaattagga

SEQ ID NO: 125086 - DNA, 83 bp, Homo sapiens
ctgtgacctgacctacgagcaccagaggaacatggacagcaagctggccctgacaatgcagatcttcgtgaagactctgactg

SEQ ID NO: 125087 - DNA, 95 bp, Homo sapiens
cagcaccttccgctcagtcctcggcgcccgcctgccgcctccggagcgcctgtgtgggaatgtatcctgtcaggtataatgtcagtgaatggcaa

SEQ ID NO: 125088 - DNA, 74 bp, Homo sapiens
tccggatcaatccagatggcagccagtcagtggtggaggtcagaagttgagtagcaggggcctaggagggctcg

SEQ ID NO: 125089 - DNA, 89 bp, Homo sapiens
tgcatctgaactgtttcctgctgttgtgaagaatgtggccagtaaaaatattgagaaaccgaaccctcaccaaacagatctgcttgcac

SEQ ID NO: 125090 - DNA, 100 bp, Homo sapiens
ccgcatggagccccgggcggcggacggctgcttcctgggcgacgtggtgagacggtttaagcggaagcatcttactgccattgactgccagcatttggct

SEQ ID NO: 125091 - DNA, 100 bp, Homo sapiens
tggagagaccatacacaatgtgagaacccagagaagaatgaggcctttctgagacgagttgtactgctgtcacaggaaatggacgctggattacaagcat

SEQ ID NO: 125092 - DNA, 75 bp, Homo sapiens
actgcagactcgtgcccaatcccgaccagaaggactctgacgatgtggatgagtgtgagacagaggtgtgtccgg

SEQ ID NO: 125093 - DNA, 100 bp, Homo sapiens
gcgggccggggacctgcatgtgtgtgcgcgcgaaggagcggaagaatggcagtgctcaaactcaccgaccaggcagaaatactcagtgtcctcagtcaca

SEQ ID NO: 125094 - DNA, 99 bp, Homo sapiens
ggtcgcgtctcggaaaccggtagcgcttgcagcatggaagatgatgagaagcttattgaggaaatccagaaggaggctgaagaggaacagaaaagaaag

SEQ ID NO: 125095 - DNA, 100 bp, Homo sapiens
cttgaaggcaggcacatttacatctatgtgccagctattcctgcaccaactgacctgaagttcactcaggtcacacccacaagcctgagcgcccagtgga

SEQ ID NO: 125096 - DNA, 90 bp, Homo sapiens
tgttaacagactgcttttacacctacgtgcttgctcggggctgaaggtgacagtgccatcacacactgtccatggcgtcagaggtcaggc

SEQ ID NO: 125097 - DNA, 51 bp, Homo sapiens
cctgaggcctccccagccatgcagaactgctggagtgcaatggcgtgatct

SEQ ID NO: 125098 - DNA, 98 bp, Homo sapiens
gagcagccaggccagggcggcagcaccagcgccttcgagcagctgcagaggtcccgggaggttcccctgaaggatgctaaggaatacgctgaatccat

SEQ ID NO: 125099 - DNA, 75 bp, Homo sapiens
gcacggcatcgggggcctggactgcacggcccggcagcaggcatgtcgggccccaggcctgtggtgctgagcggg

SEQ ID NO: 125100 - DNA, 100 bp, Homo sapiens
ttcaactacgaatactaagaacccaggttgactatagtcaatggggccaatggagccaagtgtatggaaacccacaacagtatggacagtatatggcaaa

SEQ ID NO: 125101 - DNA, 71 bp, Homo sapiens
gcagcggagagcgagagaggggagcaggatcagattttattaagacctctactggaaaagaaacagtaaat

SEQ ID NO: 125102 - DNA, 100 bp, Homo sapiens
aacatcaccatgctggtcagcttggtcatgatctaccagttcattgttcaggtccttgaatgggcaagagggcacatgaagtacggcgtcctccacattc

SEQ ID NO: 125103 - DNA, 100 bp, Homo sapiens
ccggaccttcaagactgtctttgctgagcacatcagtgatgaatgcaagaggcgtttctataagaattgaggcgagcaccgtcaggagcgcagagatcgg

SEQ ID NO: 125104 - DNA, 97 bp, Homo sapiens
gggcggtgatgtttggcagggagttctgttacgccatggaaaccgctctggtcacaccaatactgttgcagattggctgtgggtgagcgtggaggat

SEQ ID NO: 125105 - DNA, 82 bp, Homo sapiens
gggcttcgggggcattacccaactgcaaaattcaaaatggggctcaaggtattcgtttcatctacaccagagaaggcagacc

SEQ ID NO: 125106 - DNA, 100 bp, Homo sapiens
tcctgctcctgctcatggacgacgttcatctttgtcatgcctcctgtggaggcacctcccccttccctgcatgcctgccacccacctccttggctggccc

SEQ ID NO: 125107 - DNA, 98 bp, Homo sapiens
gtccgacctgatgtcaagaaccaggatgatgacatggatatccgtcagtttgtccacatcaaaaaaatttcctcctctgatgctcctcttcagccttt

SEQ ID NO: 125108 - DNA, 73 bp, Homo sapiens
cccccagaaaggattgtgacatatcgttggacccagaattgagtgttcttggggaagatcccgactaagccat

SEQ ID NO: 125109 - DNA, 151 bp, Homo sapiens
aaagaagccagaaaatattatcaaccctttgagaacacgacacaacgaactttatattttaccacttccttgaatagagtttggagcctcttccatcaagtggacctgattttggaggattaggagaagaagctgaatttgttgaagttga

SEQ ID NO: 125110 - DNA, 50 bp, Homo sapiens
taaaatggctgaggagagagtcgcgacggatggccaggccatgttatggg

SEQ ID NO: 125111 - DNA, 82 bp, Homo sapiens
agctctccgggttccccggctcgcggggcccggcgaagggcaggtgatgtgtccaatctagatcccaacttctcatttgaag

SEQ ID NO: 125112 - DNA, 82 bp, Homo sapiens
ctttctggcctggaggctatccagcaccatggtgaatccgggcagcagctcgcagccgcccccggtgacggccggctccctc

SEQ ID NO: 125113 - DNA, 100 bp, Homo sapiens
gccatggagaagctgcggcgagtcctgagcggccaggacgacgaggagcagggcctgactgcgcagatatgtgctgattagaaggctcacttgtgcagtg

SEQ ID NO: 125114 - DNA, 80 bp, Homo sapiens
attcgatggacatggacatgagccccctgaggccccagaactatcttttcggcaagtgaaccggagcaaacgacttccga

SEQ ID NO: 125115 - DNA, 75 bp, Homo sapiens
ctcaggacggacaagcacagtcttcggaaggctttaccaagttttggagggagagaataagaaaaaagaattgtt

SEQ ID NO: 125116 - DNA, 90 bp, Homo sapiens
agaatgctcttcaggatagtatcttggccagggaactcaaacagcagatgcaggtgatctgtgaaaatggttcgctattcacttgacccg

SEQ ID NO: 125117 - DNA, 100 bp, Homo sapiens
agggagagagggagagtgacagcagcgctcggacccttgaacatctgtgaagaaatgactattctgcatggaggcttcttgctggccgagcagctgttcc

SEQ ID NO: 125118 - DNA, 83 bp, Homo sapiens
gccaagggacaatggtcaccgtctcttcagaaatgaagctgttgtcatttctggaaggaaactggcccagcagatcaagcagg

SEQ ID NO: 125119 - DNA, 82 bp, Homo sapiens
ggtactacacaaccgtctccagccttggtctgagtggactgtcctgcaggagaactacgatgacccgcacaaaacccctgcc

SEQ ID NO: 125120 - DNA, 100 bp, Homo sapiens
tgggcatttatgtgggtgccaaagtcttcctcatctacgagatgcctgaggaaacccagacccaagaccaaccgatggaggaggaggaggttgagacgtt

SEQ ID NO: 125121 - DNA, 90 bp, Homo sapiens
cacagctaagacgccaggactccctggaagcctagaaatgatgctgggctcttgcactgtttggtggaaatggtgagacaggatttgagc

SEQ ID NO: 125122 - DNA, 90 bp, Homo sapiens
acagaattacagagtatgatctggaaactgacaaactagctctcccgatgagccccagcccgcttagcccgagccccatccccagcccca

SEQ ID NO: 125123 - DNA, 100 bp, Homo sapiens
tgatgactctcgtgaacatagctttaataggctgagatctgtatctgtggacctgaatgttgatccctcgcttcagattgacatacctgatgcgctcagt

SEQ ID NO: 125124 - DNA, 100 bp, Homo sapiens
tccgtctgcacaacgaccgggtgtactatgtgagtgccccgactcggcttgcaagcaggacctgctggcctacctgcaacgcatcgccctctactgccac

SEQ ID NO: 125125 - DNA, 100 bp, Homo sapiens
agtccagaaaacacataaacacctgggtagctgaaaagacagaaggtctgccagcttacatttacccaaactgtccattactggaacctatgatctgaag

SEQ ID NO: 125126 - DNA, 100 bp, Homo sapiens
agaagagagcctaactgaaaggaagagggagcagagcaagaaaaaaaggaagacgatgacttcagggttacaagtgtataacaagtgttggaagtttgag

SEQ ID NO: 125127 - DNA, 75 bp, Homo sapiens
attttctctgcgttctgctcctactgcttcgcgtccagacagattttcagctgaactctcatctctcaacactgg

SEQ ID NO: 125128 - DNA, 75 bp, Homo sapiens
atttagtgacttgaacaacctaccaagtgatgtgatgtgttctgagctggatgccgggttccagaatcgctgcac

SEQ ID NO: 125129 - DNA, 100 bp, Homo sapiens
ccgagagccgcgagcgcccggccgaacccgcgatggaataatgcccagcggcccgccaggtcccgcatatgggtgattttggaagcattcatagacccgg

SEQ ID NO: 125130 - DNA, 83 bp, Homo sapiens
atcagactgaccgtgtcttacatcagttcagagagggtaacaagatgctcaactatagtgctcccagtgcagggggttgcctg

SEQ ID NO: 125131 - DNA, 95 bp, Homo sapiens
cgattctcagggattgatcgcctcttcagtcctcctgcatatgcccaagaggattgggagtggaatggacaccagcagaagcaccacagttattc

SEQ ID NO: 125132 - DNA, 100 bp, Homo sapiens
accgtggggagttggctgaaggacttggggagcccagaagctgccaccgaaccaagataaaccctaatggcaggccgaagtggtttcttggctacgggag

SEQ ID NO: 125133 - DNA, 101 bp, Homo sapiens
ggtgcagaaataccagtccccagtgagggtgtacaaatacccctttgaattaattatggctgtgcaatggatgagcttcatagtctggatccaagaaggca

SEQ ID NO: 125134 - DNA, 75 bp, Homo sapiens
tttcaagtattggtcttaaaacagtaattggagaacttcctccagcttccagtgttttgtttggctatgccacca

SEQ ID NO: 125135 - DNA, 100 bp, Homo sapiens
gctgacgctcgtggggctgcagtactcgggcaagaccaccttcgtcaatgtcatcgcggttgcctgcctgattcgagttccatctgaagtggttaagcag

SEQ ID NO: 125136 - DNA, 97 bp, Homo sapiens
aatggttcacggctgacacatttggcatagatacctcgcagtctttagctctcatggattgggagctgggaaaggaatgagaagacagaagtcagag

SEQ ID NO: 125137 - DNA, 83 bp, Homo sapiens
gaagcttctgcaacaggaggacattgaaaataagatggaacccatccacataagtggagcagcgtgacttcattggagtggac

SEQ ID NO: 125138 - DNA, 82 bp, Homo sapiens
tgctccaggaatgggacctcgagtcactgtgggctgaaatctctttaatgatggagggaagcaggcagacgcgagtgtctcg

SEQ ID NO: 125139 - DNA, 82 bp, Homo sapiens
gcagggcctgcagcgggagctggacggcgagcgcgagcggcgcgagaaagaatgtatcctgtcaggtataatgtcagtgaat

SEQ ID NO: 125140 - DNA, 144 bp, Homo sapiens
agaagtacagggagcgagagctggagaagctgggattggagattccacccaaacttgctggtcactgggagacctgcaatgcttcttttgccacccgagaccgtctgcgctcccacctggcctgtcatgaagacaaggtgccct

SEQ ID NO: 125141 - DNA, 82 bp, Homo sapiens
tcatgtcctcattcgtcagtatcctctcctctctgaatctcaaacaaggtccccttcccctgagcccatctacaatagcgag

SEQ ID NO: 125142 - DNA, 100 bp, Homo sapiens
ccgccagctccagagccacgtacgtgaatgatttgggaggggacttcaaaggagttggtaaaggctccttagctgctgataaggttgttgaagaaataag

SEQ ID NO: 125143 - DNA, 50 bp, Homo sapiens
aggctagtgccgagctagaccacaagagtctgtagaagaggcgacaccag

SEQ ID NO: 125144 - DNA, 83 bp, Homo sapiens
gcagagccgagtgcagaagatctgggtgcccgtggaccacaggccctcgttgcccagattgtccacaggatgaaatgtccgag

SEQ ID NO: 125145 - DNA, 83 bp, Homo sapiens
gctccgtggccttagctgtgctcgcgctactctctctttctggcctggaggctatccagcacatccccgattgaaagaaccag

SEQ ID NO: 125146 - DNA, 82 bp, Homo sapiens
gacagcacctcatcccctggatgggggaccacaagatcctcatcgacagccgagcctcttgaagccattcttacagatgatg

SEQ ID NO: 125147 - DNA, 100 bp, Homo sapiens
atctgtatgcataatatggaatgttcttaacccagaagtagctgaatgtgttactccattgctgaggagtgctgtgtgtgccactgaggtttttaaaata

SEQ ID NO: 125148 - DNA, 101 bp, Homo sapiens
cctgcaggcacagttgccgattacagagttctaaagttcctgttgcttcagacaatggatgagcaatcacaaggaatgcaagggccacctgttcctcagtt

SEQ ID NO: 125149 - DNA, 75 bp, Homo sapiens
caaggagctaaagcagcgtgcgttcagccctgggatatggccgcgtggaaagtgtcaaaattcttcccaagaggg

SEQ ID NO: 125150 - DNA, 75 bp, Homo sapiens
cggctactacttaataatgacaatctcctcagggaaggggcagcacatttttatggaaacgagccctcaaagatc

SEQ ID NO: 125151 - DNA, 100 bp, Homo sapiens
ggacatgtccatgtgacacacgactgctcatacaagcggagcagacttaaactcatcactgctatatatgcagattatgcccggagtttgaagaacctcg

SEQ ID NO: 125152 - DNA, 58 bp, Homo sapiens
cggcagctggatgaagttgtgtcagagaatcaaaggcatgggaggttgatacctgccg

SEQ ID NO: 125153 - DNA, 100 bp, Homo sapiens
agtagcatctcctccttcagctaccgggagatcttgcgggaaaaggagagctcggctgttccagccaggcgacctgtccttcgacaacagtgacctggtg

SEQ ID NO: 125154 - DNA, 100 bp, Homo sapiens
tccgttctggaaaggcacccatccttattgctacagatgtagcctcccgtgggctagtttgtgaatagcacaatggaagaagctggactttgtgggttaa

SEQ ID NO: 125155 - DNA, 49 bp, Homo sapiens
ggacacccctgaagccgagaaatggctgagagcacagacaaaacaacaa

SEQ ID NO: 125156 - DNA, 100 bp, Homo sapiens
cagacgaagacagtccctggatcaccgacagcacagacagaatccctgctaccagtggttcccctctctcagcgaagtggtgttcttgaatggtgcacag

SEQ ID NO: 125157 - DNA, 80 bp, Homo sapiens
gtcctggcggtttttattaaggctgttcatgtgaaaggctttcagtccagtgtaaagctgttggagcgcgggagcaaagg

SEQ ID NO: 125158 - DNA, 101 bp, Homo sapiens
cagaaattctggaacacctatatggtaaaataccatgaagattttgaaaaaacaaaggggagaggctttactcccgtcgtggacgatcctgtgacagagag

SEQ ID NO: 125159 - DNA, 75 bp, Homo sapiens
gtgagacatgtctgagactcctgctcagtgtagcattaagagagccagctgctccccgggaacaacttcaccaat

SEQ ID NO: 125160 - DNA, 100 bp, Homo sapiens
ccccttgtcagccagggctgaacccccgcagattgaaatcatggcaggtccagaaagtgatgcgcaataccagttcactggtattaaaaaatatttcaac

SEQ ID NO: 125161 - DNA, 108 bp, Homo sapiens
gatggtgaagaagcaggtgcttatgatggacctaggactgctggtactccaaagattcaggtttactcacgtcatccagcagagaatggaaagtcaaatttcctgaat

SEQ ID NO: 125162 - DNA, 83 bp, Homo sapiens
ccagctcgcccagctcgcccagcgtccgccgcgcctcggccaaggtcaaaatgcagatcttcgtgaaaacccttaccggcaag

SEQ ID NO: 125163 - DNA, 75 bp, Homo sapiens
cgcagcgtgagcgccccgcagcccgctcaggaccaggtgacagaactgggccgtatagccagccactactacatc

SEQ ID NO: 125164 - DNA, 100 bp, Homo sapiens
agagcattgaggaggctgtggctctggtagaacacttgcagagggaatctggtcaaacatggaatggggtctctaattaacagaagatggcaaagcccag

SEQ ID NO: 125165 - DNA, 100 bp, Homo sapiens
ctgcaccactggcatggatggcggcatgagtatctgggatgtgaaggatgtagagtcctacattcatcgatccgggcggacaggcagagctggaaggacg

SEQ ID NO: 125166 - DNA, 100 bp, Homo sapiens
gggggcggcgtgcggcctagcgtctcaggcagctgtgttactggagcaggaacgacagcaggagattgccaagatgggcaccccagtccctcggccccca

SEQ ID NO: 125167 - DNA, 98 bp, Homo sapiens
gatgaacagactagccactttgcattgactggaaacaatggcatttacagaaagagtcaacagcagtggcaacagtcgtcctcttgagttctggcgcc

SEQ ID NO: 125168 - DNA, 102 bp, Homo sapiens
gtgcagctcgtttctcagagccggcggatgttcatgggcagcaccatcgagccagaagcagtatttgtcctggcactatgtcgtccgaggcccagagatgac

SEQ ID NO: 125169 - DNA, 110 bp, Homo sapiens
gcgggccggggccacgctcagcgccgagggcgagatcgtgcagggtgaatcatttgatgtaaaagacttgactccataatctgcatctgtcctaatgctgtcatctggag

SEQ ID NO: 125170 - DNA, 90 bp, Homo sapiens
ttggtggagaaggctatctcaatttcatggcacttttccagccattaactccaggctctcgagaatttgaagatgttgtaaatattctcc

SEQ ID NO: 125171 - DNA, 100 bp, Homo sapiens
gaaaggatgacatatttttggacctgaaacagaaattctggaacacctatatggagccagcaccgctctttgaccttgccatgcttgccttagatagtcc

SEQ ID NO: 125172 - DNA, 74 bp, Homo sapiens
aattcgcaacccatacagtgaatccatttaaggtacttccgaagatcccagtttacagcgatcagtttcggttg

SEQ ID NO: 125173 - DNA, 90 bp, Homo sapiens
ggagtacaagggctatctggtatctgtagatggctacatgaacatgcaggaaacccagcgtttgctggcagaaccagttcctggcatcaa

SEQ ID NO: 125174 - DNA, 100 bp, Homo sapiens
ggaggaggaagaatatgaagaggaggaggaggaggactatgacgaggaggaggaagagtccagtgaagtctcgcccaagaacttcaaggtgaaaatgatc

SEQ ID NO: 125175 - DNA, 143 bp, Homo sapiens
cgcagccgagcggccgtgggcccgggcggcgggcggagacgtgggcgccctccccgccaaggcccgtgcgaggtgtgccaggtcagtgcccagcagccagtccaggcagagctcatgctcaggtaccaacagttgcagtcccg

SEQ ID NO: 125176 - DNA, 83 bp, Homo sapiens
agaacatggaggatcgtcaggctctaaacaaaattctggtgtggttcctcagagtgcaccaccagtgccaacagcctcttccc

SEQ ID NO: 125177 - DNA, 88 bp, Homo sapiens
gccgtacgcggtgctgcgagggcagaacctgggatgcgccaatcccctgggcctgaagaataacagcatccctgacaagcagatcacg

SEQ ID NO: 125178 - DNA, 76 bp, Homo sapiens
ctcaccccagaggaaagccaggcccgtctggggatgacgcggcatggcaagaactgcaccgcaggggccgtctaca

SEQ ID NO: 125179 - DNA, 88 bp, Homo sapiens
gggccctgcccctacatttggagcctggacacgcagtacagcaaggttgaaaggattgttgacaaaaggaaaaataaaaaagggaaga

SEQ ID NO: 125180 - DNA, 82 bp, Homo sapiens
aaccattgacgccatgtcgggttattcgagtgaccgagaccgcggccgggaccgagggagtgtggccatctggggccgtgtg

SEQ ID NO: 125181 - DNA, 82 bp, Homo sapiens
tgcggcgcggggaccgctgtgctctcgcttcctgcctgacacagctcacttcaagaagtgcacaatgtcagaacgtggaatt

SEQ ID NO: 125182 - DNA, 76 bp, Homo sapiens
gttccatctcccaacttgtccatggctctggaacttcatccattctctatgaaacctcttctgaggcgggcgatgg

SEQ ID NO: 125183 - DNA, 97 bp, Homo sapiens
gcctcagcctcttgagtagcctgagtagctgggactaaagaggcacagagctttggcctgctggatcccaaactctgctacctgctggatggaatcc

SEQ ID NO: 125184 - DNA, 100 bp, Homo sapiens
gcttctgcaacttcatgcatttgaagcccatttccagagagctgcggcgggagctgtatggccgccgtcgcaagaagcacgtggactccctttaatccag

SEQ ID NO: 125185 - DNA, 90 bp, Homo sapiens
agatcaccaatatccgacctagctttggaattgaatgatctggcacgggaccctccagcacagtgttcagcaggtcctgttggagatgat

SEQ ID NO: 125186 - DNA, 96 bp, Homo sapiens
cgcgggcaggagcctggcgaggatgcaccttcccctgccttggaaagttacagaatgtctgaaggggacagtgtgggagaatccgtccatgggaaa

SEQ ID NO: 125187 - DNA, 97 bp, Homo sapiens
tagaaacatgtgcaacgagttactgccgataatgaaacctcatgagctatttatgaagaaattgatgctcaccagcacaaaggagctcaaaatgatg

SEQ ID NO: 125188 - DNA, 51 bp, Homo sapiens
gatcaaaacaagccctccaggaactcactgtgacaccatcgccacaacagg

SEQ ID NO: 125189 - DNA, 97 bp, Homo sapiens
caaccagtcaaccagccattgctgtttactggatacctggaatgtatcctgtcaggtataatgtcagtgaatggcaagaaagttcttcatatggatc

SEQ ID NO: 125190 - DNA, 98 bp, Homo sapiens
ttggaagcacactgtgtagaatttctcaccaaacatcttagggcagataatgcctttatgttacttactcagagtgaagtcaccctgctgagaaatga

SEQ ID NO: 125191 - DNA, 51 bp, Homo sapiens
ggacagtggacctacatacaatgctcagcgacatgtcctcacctacatgga

SEQ ID NO: 125192 - DNA, 95 bp, Homo sapiens
catatggcagcagcctggacctcagcactggcaggtgctccagaggctggtggacctgagcggaggctgggacgccctggtgggccccgggccct

SEQ ID NO: 125193 - DNA, 71 bp, Homo sapiens
cgattcctcctccttggtcgccgcgtccttggctggcgtgtatcgagaaccttccctgcgaacttcagagg

SEQ ID NO: 125194 - DNA, 100 bp, Homo sapiens
ccgaggaagctaaggccgcgttggggtgagaccctcacttcatccgaatttacatagtacatgacgaagttaaggataaagcttttgaactagaactcag

SEQ ID NO: 125195 - DNA, 87 bp, Homo sapiens
aaggccgggacccggttccccggcccacagtgggggtgtgcaaacccgagagaactgggaatgtcgttgtctgctgggtcttcccct

SEQ ID NO: 125196 - DNA, 100 bp, Homo sapiens
ctccaatgcaatgctgtttgccctgaacatcatgaattcccaagaaggagacaagttggatggcttgaggactggtactaaaaggaaacgtgactgggag

SEQ ID NO: 125197 - DNA, 100 bp, Homo sapiens
accttcacagacacttcaacgtggaaaattcttcggggaaaagttcgaggtcaggaaaatggattggatggcaccaagagtggagggccttctggaagag

SEQ ID NO: 125198 - DNA, 82 bp, Homo sapiens
gggaagacgccctggtgctcaccaagcaaggggaggtcatcaaggcttgggacattgccatagccaccatgaaggtggggga

SEQ ID NO: 125199 - DNA, 126 bp, Homo sapiens
gctggggtcgcgctggctcggactccgctccccgccccgccgcggccatggaggacgagcggaaaaacggagcctacgtgatggtcctttctgccggatctgccatgagggagcgaacggggagtg

SEQ ID NO: 125200 - DNA, 101 bp, Homo sapiens
cccgatggccccgaccgcgtgctggagctcttcgacccacccaagtgagttattctccccacctcagaagtaccagcttttggtgtatcatgcagattctc

SEQ ID NO: 125201 - DNA, 83 bp, Homo sapiens
tccttgtttgcacggagcagcaaacgcagagacaaaagaaacgggccccgactgcaaaatgatgcttcaacacccaggccagg

SEQ ID NO: 125202 - DNA, 75 bp, Homo sapiens
cctgatcatcctgctgctccccggaagtgctcttacagcctgttccaagtgtggcttaatccgtctccaccacca

SEQ ID NO: 125203 - DNA, 75 bp, Homo sapiens
gagtgtccatccccggcccctcccaccagaagcccatggttccaccccgatgcaggtggtcacgtgcttgacgcg

SEQ ID NO: 125204 - DNA, 100 bp, Homo sapiens
catggctcagcggatggtctgggtggacctggagacattcacggcatggtgtaactcccacctccggaaggcggggacacagatcgagaacatcgaagag

SEQ ID NO: 125205 - DNA, 75 bp, Homo sapiens
agccttcaatgtgtcctacaccaggcagcccccaaatcccggcccaggatcgaatcatcaatttagttgttggca

SEQ ID NO: 125206 - DNA, 100 bp, Homo sapiens
caccgcctcctacctgaggctctgggcgcttagcctggctcacgcacgtgacagagctgaatgaacctctctccaatgaagatcgaaatctcctctctgt

SEQ ID NO: 125207 - DNA, 100 bp, Homo sapiens
tcaccattggctgggaaggaaaaacagaatcagctgttccctgcgaaaggtctacttccccagcaggacagcatcattctcctatatcttctagacatca

SEQ ID NO: 125208 - DNA, 73 bp, Homo sapiens
ggatgatgaaattggagatggaaccacaggagtggttggtgctggagaatctggtaaaagcaccattgtgaag

SEQ ID NO: 125209 - DNA, 107 bp, Homo sapiens
aggaatgcagtcagtctgttgatgaaactatctatcatggtgaacttacttcagattgtgcgggaccactgggttcatgttcttgtccctatgggatttgtcattgg

SEQ ID NO: 125210 - DNA, 96 bp, Homo sapiens
ccgtcgctgtcgctgagagcctcacgagtcgaggtcctgcaggtggagctccggcagccgccctgatctgccgacaccccaggccatcgagcccca

SEQ ID NO: 125211 - DNA, 50 bp, Homo sapiens
cccaggagtcctgaccagagagcaggtctcctctgagcctccggcctcca

SEQ ID NO: 125212 - DNA, 74 bp, Homo sapiens
caagtttcgaggcaaatacctctccattatgcccctcgttctgacacagaccttagagatgagagagaactttc

SEQ ID NO: 125213 - DNA, 100 bp, Homo sapiens
gaaactattcagacagcggcttctctgttggcctctcaggtgaccaagaatatggcccaggtgaccaaagccctggacaaggccctgagcaccatggacc

SEQ ID NO: 125214 - DNA, 73 bp, Homo sapiens
tgaggagaaagcggcgcgcggagactccgtgggaaggaggcttgtttaaactacggatgcttttcaaagatga

SEQ ID NO: 125215 - DNA, 96 bp, Homo sapiens
tggagtatctggacctgtacctgatgcactggccttatgcctttgattgctgatcttatctgaagcagcagatcagtgggatgagggagactgttc

SEQ ID NO: 125216 - DNA, 75 bp, Homo sapiens
ccaggccgccgggggcctgctgcgcccggagcagctggctgctgccaaggcccaacaggagcaggagctggcggc

SEQ ID NO: 125217 - DNA, 75 bp, Homo sapiens
agcaacatctttgagagaacggaggtcctggcaggtataatttttgtagcagcgacactgtggaagaaaacgtct

SEQ ID NO: 125218 - DNA, 89 bp, Homo sapiens
ttgattatttaggaattcctctgttttatggatctggtctgactgaattcaagggaagaagattcatgatgttgctatcaaaagttgag

SEQ ID NO: 125219 - DNA, 98 bp, Homo sapiens
aatgatcatgccccagcaccaaaggcaaggatttggacggtttctcattgatttcaagaaaatattctctttggaatgggaaatcctctgcttgacat

SEQ ID NO: 125220 - DNA, 100 bp, Homo sapiens
agaaaatgaaaccagcagacagaatttgtcaggtaaaataccatgaagattttgaaaaaacaaaggggagaggctttactcccgtcgtggacgatcctgt

SEQ ID NO: 125221 - DNA, 95 bp, Homo sapiens
ggccacaagacatttcctgctcggaaccttgtttactaattatatgcaatatgatgaggatgatgatgaaatcaccccggatttgtggcaagaag

SEQ ID NO: 125222 - DNA, 75 bp, Homo sapiens
ggcgccgccgcagccggagcggctcccgggccctgggccgccgccggccaggtcatggcaaaaccccaaaagatg

SEQ ID NO: 125223 - DNA, 100 bp, Homo sapiens
ttcactttggacacgtgagtcagaggaaaatctacctgatttttataatgactggatgttcattgctaaacatctgcctgatctcatagagtctggccag

SEQ ID NO: 125224 - DNA, 100 bp, Homo sapiens
gcagtggtcgcttcttctccttggatccaaggagctggttctgctggttggaccaaacctcgtgagccagccacccctgacccaaatgaggagagctctg

SEQ ID NO: 125225 - DNA, 74 bp, Homo sapiens
gactacccagggagaggaattacgggaacagaaagaaaagtccgaaagagctgttaatggccagccaagacccc

SEQ ID NO: 125226 - DNA, 100 bp, Homo sapiens
aatgctccgttgagagacgcggctttcggcaagaactggattcgtggcgccacaagctcattcactgtgtaggaggaacagcacagcatgctgggctctg

SEQ ID NO: 125227 - DNA, 82 bp, Homo sapiens
ctcccggagggagacgcgctgccgaggagaacccagcgggtgagaagccctaccactgcaactgggacggctgcggctggaa

SEQ ID NO: 125228 - DNA, 98 bp, Homo sapiens
gaaaacacagagccaccctggaaagggacccagtcgcagagcgcaccccactggggacccccagctcagccatgctggcctgtctgcagaggacccag

SEQ ID NO: 125229 - DNA, 75 bp, Homo sapiens
cgggaggaaggaacgaggcaaggagctaaagcagcgtgcgttcagccctggggctggggaataactacatcactg

SEQ ID NO: 125230 - DNA, 75 bp, Homo sapiens
agcagtatgccgcctccctgggtctaggtctgtgcagacttttgcagacaaatcaaaacaagaagctctgaagaa

SEQ ID NO: 125231 - DNA, 100 bp, Homo sapiens
gccggagacggtcgggtttgccagggccgggcgggaccgcggggaccatggcggagccgcctcgggagcagagcccctggtgcctgcgcaggatgcgtcc

SEQ ID NO: 125232 - DNA, 96 bp, Homo sapiens
cgtggcgcctcctgtctgtggatgggaatttcttagccataggctcacatgacaactgcatctatatatatggcgttagtgacaacgggaggaagt

SEQ ID NO: 125233 - DNA, 83 bp, Homo sapiens
caccgctgccctcagctccgagtccagggcgagcctcaggcccagagccagcacgagacatccgctgcgagttctgtggtgag

SEQ ID NO: 125234 - DNA, 82 bp, Homo sapiens
tgaaggccgaggccaagatggcggtgctgtcagggctgggttacgacccctacaaccctgagctgcccaagccccccgcgca

SEQ ID NO: 125235 - DNA, 100 bp, Homo sapiens
cgaatgtattcttggaatgcctcttctgtgatgtgaaacttcagtatgcagtccctatcatcagccagcagggggagttttgatggcgacgactttgatg

SEQ ID NO: 125236 - DNA, 76 bp, Homo sapiens
gcgcttaagtatttccacaagcgtttcccggagcacagggcagcggagatccgacgaagttatacggaagcgtctc

SEQ ID NO: 125237 - DNA, 100 bp, Homo sapiens
cagaatcaggggaggcatgcttcaggtgtgttcatcctcgaggtggtgtgattcagagtgtttcttcatggaagcatggctcgggcacgcagtatgttag

SEQ ID NO: 125238 - DNA, 104 bp, Homo sapiens
tgaagagcgacaagccgctggcagccgcggatctcaccgccgctcaggcggagctggagtttgttcagatcatcatcatcgtggtggtgatgatggtgatggtg

SEQ ID NO: 125239 - DNA, 98 bp, Homo sapiens
ttacaagatggacagggatgataattgggcctccaagagatgaaaactttgacctgtcaaaaagactgagtgagaacgaaattatatgtaatgctctg

SEQ ID NO: 125240 - DNA, 100 bp, Homo sapiens
acctcaactggggtcagaaggacctctaccgagatgtgatgttggagaactacaggaacatggtcttgctgggaagtgacctcacaatgactcaagctac

SEQ ID NO: 125241 - DNA, 95 bp, Homo sapiens
actactagtcggccgaactccaagcgtgaccagctttctgttgggaacactcaaagttatttctcaaactctgaggctgcggagttcacacattg

SEQ ID NO: 125242 - DNA, 101 bp, Homo sapiens
gctattccggcgcctccactccgtcccccgcgggtctgctctgtgtgccatggacggggtcctggcggcagagaccacgtcccagcaggagcggctgcagg

SEQ ID NO: 125243 - DNA, 80 bp, Homo sapiens
attgaatagatgtctccctattgatatctcccggggccaattcagcatctctacctggccatcctaacaaggtgatttgt

SEQ ID NO: 125244 - DNA, 71 bp, Homo sapiens
ttcgcagtggtcgcttcttctccttgaggaggaggtggaggaggaggaggatggagagctgcccaagacag

SEQ ID NO: 125245 - DNA, 83 bp, Homo sapiens
tgaagcgactgagtccgcgatggaggttatcaatactctggctgaccatcatcatcgtgggactgactttggtggaagtcctt

SEQ ID NO: 125246 - DNA, 76 bp, Homo sapiens
ggatcagaaacaggccatggagggacaggatccggaggcgccagctcaaccggcactgtgtttagtcttgagtcag

SEQ ID NO: 125247 - DNA, 92 bp, Homo sapiens
ggggcctggcccccgggactccctgtgccttgcttggagctgacgccgacgggaccatggccaacctggagcgcaccttcatcgccatcaag

SEQ ID NO: 125248 - DNA, 83 bp, Homo sapiens
cggcgggctggagacatggaccgcggcgagcaagacctgcctagagctggaacgttacctccagagcgagccctgctatgttt

SEQ ID NO: 125249 - DNA, 90 bp, Homo sapiens
gcaaaatgactccagtcgaggcagttctgtctcttcgaatcttcaggtggatggaagtttgcttagttgaagaattgccaccaaccactg

SEQ ID NO: 125250 - DNA, 80 bp, Homo sapiens
accaatgctgaagtcaagctgcaggcgtgagtgcatctccatccacgttggccaggctggtgtccagattggcaatgcct

SEQ ID NO: 125251 - DNA, 100 bp, Homo sapiens
gtcatggcggaggggacggcagtgctgaggcggaacaggccgggcaccaaggcgcaggttgccaagagggtgatcctgttgtcgggcacaccagccatgt

SEQ ID NO: 125252 - DNA, 98 bp, Homo sapiens
ctcttctaagctgaataaagctgttttggaactgtcaggtacctcaaagcgtaagctatgtggttgatgttgcagaatgatgagccggaggacttcgt

SEQ ID NO: 125253 - DNA, 83 bp, Homo sapiens
gttggaattacagacatgggccactacacctggcgatctgtgtcttatacgttacagaatgtctgaaggggacagtgtgggag

SEQ ID NO: 125254 - DNA, 100 bp, Homo sapiens
agcctttggggcaccacagagatgcggccttctttgaatcctggggggagccagtcatctgatgtggtgcttttgaaccactggaaagtgaggaattttg

SEQ ID NO: 125255 - DNA, 76 bp, Homo sapiens
gctcaaagctgctgccgccccttgggctaaaagttactccacaggatccgctgaacataggatgttgccacaaaat

SEQ ID NO: 125256 - DNA, 82 bp, Homo sapiens
gctgcgcggcggggctgaggcggccgcggggcccgagcgcagactccgtgggaaggaggcttgtttaaactacggatgcttt

SEQ ID NO: 125257 - DNA, 109 bp, Homo sapiens
gacgacggtccctcagcccagccaccatgagcaccaagcagatcacttgcaggaacaagactgccaatggagactgccgcagagacccccgggagcggagccgcagccc

SEQ ID NO: 125258 - DNA, 100 bp, Homo sapiens
tgacaacgccttacccttcgctcccagcccaggctccaggaggccagagctctactgaagcggcggcggccccgggggccagggggccggggactactga

SEQ ID NO: 125259 - DNA, 100 bp, Homo sapiens
ttgtactgggatgtgatgctggagaattatggaaatgtgacctccctaggatgtggtaccacagattgtcccacctacacagcaggcttcaggacttgct

SEQ ID NO: 125260 - DNA, 100 bp, Homo sapiens
aatctgtcaatcaccttgttaaagagaaactgttcaggttccattatcaaaacgagcaaaatttgttggacctggtggctataacttaaaaaaacttcag

SEQ ID NO: 125261 - DNA, 120 bp, Homo sapiens
gatgataatcacagcgggactcttggcctgtccctcacatccgatgcaccctttttgtcagattatcaggatgaggacgaaatctcacaaaactgtcccttatcttcagtcacatgctgg

SEQ ID NO: 125262 - DNA, 90 bp, Homo sapiens
aggacaggtgccggagcagctcgtgcagctaagcagccaactgcagaaacgtcagacagtggtgaccgaggattttagccacttgccccc

SEQ ID NO: 125263 - DNA, 100 bp, Homo sapiens
gtgatggactcgcagccagtcagatgtacagtccgcagggcatcagtaacggtgtgctgctgaggactgtcttggaccctgtcactggggatttgtctga

SEQ ID NO: 125264 - DNA, 75 bp, Homo sapiens
cggcgagagatggtcaggtctggagctcgaccgggccaggtaaaaatgtctccatcgtatcatcagtccaaaggg

SEQ ID NO: 125265 - DNA, 119 bp, Homo sapiens
aaggaaggcttcgagaagattagcaaaggtgctaatccagtggaaatcaggagaggagggaaaacccctgatcctaaaatgaatgctaggacttacatggatgtaatgcgagaacaaca

SEQ ID NO: 125266 - DNA, 75 bp, Homo sapiens
tatgctgaacggtgcagcagtgatggatgcagctcttctgttgatagagtatgctcaggtaatcaaaatgttggg

SEQ ID NO: 125267 - DNA, 90 bp, Homo sapiens
gtttctaggaaaggccggacaccaggtgggaatggaagtggccccacatctcaaagaaaccctaaataagaacttttttgacttcctcct

SEQ ID NO: 125268 - DNA, 100 bp, Homo sapiens
aaagcaagtgaatacgagtcagaaggagtccaacctataccttctcagggaggcaaactagaaatagctggcactgtggttggccattgggctgggagca

SEQ ID NO: 125269 - DNA, 98 bp, Homo sapiens
agagggagagcaagaccatcatgctgcgcggccttcccatcaccatcacagagagcgatctgcagcttatcttctggtgtcccttataccaagcaatt

SEQ ID NO: 125270 - DNA, 98 bp, Homo sapiens
attcgatggacatggacatgagccccctgaggccccagaactatcttttcgtgggtaattccagaattgattggccataccattgtcactgtattact

SEQ ID NO: 125271 - DNA, 75 bp, Homo sapiens
gcggaagtgcagctgcctcagttcttagcgcaggtgcctgattattacaaaataattaaaaatccaatggatttg

SEQ ID NO: 125272 - DNA, 75 bp, Homo sapiens
agagaaggcactcaagtttatggtaaacctagcctttaagcaacctggaaagaggctagaacaccaaggaattag

SEQ ID NO: 125273 - DNA, 100 bp, Homo sapiens
ggcctgggagcttgctgcagcttcaggttggagtgggtggagatcatcgaaccgcgcacccgcgagcgcatgtacgccaacctggtcaccggtgagtgcg

SEQ ID NO: 125274 - DNA, 83 bp, Homo sapiens
ccaccggctcagcctcctgaaggagcacgcgaccagagtctcactgtcgcccaggctgcagtgcagtggtgccatcacgcgtc

SEQ ID NO: 125275 - DNA, 90 bp, Homo sapiens
gccgtggaggcttcgccgcctagtgctcttaaagttccgtacagataaaggaagagatcccagttctgatacatatgaggaagattctga

SEQ ID NO: 125276 - DNA, 51 bp, Homo sapiens
cacactgcaatgtttttgtggaacatgtgaaaatgcctcgtgtaaaagcag

SEQ ID NO: 125277 - DNA, 75 bp, Homo sapiens
acgcggctcggcaccgacctggatgatccaccaacacattctcagccagacagtgatgatgaagcagaagaaata

SEQ ID NO: 125278 - DNA, 90 bp, Homo sapiens
ggaaaaatgcacttatgctgataaatatacccaaacaccctggagacgaattcctagccctaatttgtttagaactgtaatatgcacagt

SEQ ID NO: 125279 - DNA, 99 bp, Homo sapiens
tcgactgttctgtttgaggagctctgtgctttatcatagaaatggatctggtcctggacccaagccagaagcctctgcaaagcttccttccagacctgc

SEQ ID NO: 125280 - DNA, 100 bp, Homo sapiens
tttacttcatttatttcattgtataacacatctatgaagatggcagttgaattcctgcatgaactgaatgttccatttttcaaagttggatctggagaca

SEQ ID NO: 125281 - DNA, 75 bp, Homo sapiens
tgaagctgctgctgggcatcgccttgctggcctacgtcgccttggaggccatagtggagtttgactaccaggccc

SEQ ID NO: 125282 - DNA, 50 bp, Homo sapiens
gtctgatccttttgttggcaatacaaactggactctcaggacaaaacgac

SEQ ID NO: 125283 - DNA, 100 bp, Homo sapiens
ggagtcagggatggctctttctcagagaccttttaatcaaagtgaagtttggggaaagcattgaggacttgcacacctgccgtctcttaattaaacagga

SEQ ID NO: 125284 - DNA, 100 bp, Homo sapiens
agactggcagaagtttggatggatgaatttaaagatttcttctacatcatatccccaggcttctggctgtgatgggtcggagattcctgatgaagtgaag

SEQ ID NO: 125285 - DNA, 133 bp, Homo sapiens
ctgtatgctgtgagggaccgtgaaatgtttggatatatgaaattacatccagaggattttcctgaagaaggcaatgaagggctattggcctgtcagctgctcccatccatcccctgcttactgcattgccgag

SEQ ID NO: 125286 - DNA, 75 bp, Homo sapiens
agaccgcaccacccgcctctgggccccagacaggatgaaggtttaaggctcagaaaggtagcacattcggataaa

SEQ ID NO: 125287 - DNA, 115 bp, Homo sapiens
ccccacaccaccgcactgtcgctgcccgcctgccctgaggagtccccgctgcttgtaccaggaagagcgccggtcagtaaagcacatcctcttttcggcctggccagaccatcag

SEQ ID NO: 125288 - DNA, 100 bp, Homo sapiens
actgctttccactcggctcctgtcgtccgttctctcaggctcccgttcagacaggtgatttggcttctgcacagttaggaggagcaccaaaccgatggga

SEQ ID NO: 125289 - DNA, 90 bp, Homo sapiens
cccagctcggcccgcgggggagccccgggagccgcacgatgccatggacaatattaccaggcagaaccaattctacgatacccaagtcat

SEQ ID NO: 125290 - DNA, 82 bp, Homo sapiens
cagaggacgccggaacaccctggaagccgagaaatggtcacacagcggcagtgataaagagcacagggatgtggagagatct

SEQ ID NO: 125291 - DNA, 100 bp, Homo sapiens
aacagcacagagctagatatgacggactttgttttccaagctgcagtaccaaagattgtgaatcggcacggtcctgaggcagacaggcatttattacgct

SEQ ID NO: 125292 - DNA, 101 bp, Homo sapiens
tggaaagaatccagcatgaatattattgaactggagattcctgaccagaacattgatgtagaaggaacggcagagtcgaaacaaacaatgagggcgaacca

SEQ ID NO: 125293 - DNA, 82 bp, Homo sapiens
gggaaccctggtcaccgtctcctcaggagggccctcctggacccgggagcggaccctggtggcggtgaagcccgatggcgtg

SEQ ID NO: 125294 - DNA, 100 bp, Homo sapiens
gcggcagcagcaggctgcaacggagaaggggctccctgtgtctaggtcgtttgggaaacgccttggagagtcaagaataaatttgcaggtcaaacaatgg

SEQ ID NO: 125295 - DNA, 90 bp, Homo sapiens
gggaggaaggaacgaggcaaggagctaaagcagcgtgcgttcagccctgggtgccctctggtggtcagaagatgctgtgctgtctcgtta

SEQ ID NO: 125296 - DNA, 100 bp, Homo sapiens
ctttctctcgatgaggataacatccctccagaagatgatgtcagtattgaatatggtggtgaggcgtgaccctggcaacactgaacctgtgaaagccaag

SEQ ID NO: 125297 - DNA, 90 bp, Homo sapiens
ggattcgcagggaggatgtcgggacaccccggaagctgggaaatgctcatgatggagcagtccaagaagtcctccctcatggtggcccgc

SEQ ID NO: 125298 - DNA, 82 bp, Homo sapiens
ctgaccacagtgctcaccacccaccaccactgattttggctatggaaaggggaaatgttctaagcagagcccgtcaggagcc

SEQ ID NO: 125299 - DNA, 83 bp, Homo sapiens
atgtgtatccatggagacaagagtcaaccagaaagagattgggtacttaatggtttcagaaaacaaaaggcgatacacaaggg

SEQ ID NO: 125300 - DNA, 83 bp, Homo sapiens
atggcgcagaaaccccgttgacaaggcactgctttttcatgacgatgtgaagttcatttccaatccgccctccatggtggcag

SEQ ID NO: 125301 - DNA, 75 bp, Homo sapiens
ccgtgtgaaataagagaactgagccaccagaaagaccacagcaagattctttcattcgtctcctcctagcctggg

SEQ ID NO: 125302 - DNA, 135 bp, Homo sapiens
cttgagattagccaaggagctaggattggagacctacaaagtgaatgaggttgagcgtctgatccaccatgtaaagggggcagctggcattttatgctatgtgggagcctatgtcttcatcacttatgatgacta

SEQ ID NO: 125303 - DNA, 75 bp, Homo sapiens
cgtgtgaaccatgtgactttgtcacagcccaagatagttaagtgggctcgagatgtctttttaatgctaaagaag

SEQ ID NO: 125304 - DNA, 100 bp, Homo sapiens
cttggaattggactgtgggcatggaatgaaaaaatcactggggtgatcctgctggctgttggagtctggggcaaacttactctgggcacctatatctccc

SEQ ID NO: 125305 - DNA, 101 bp, Homo sapiens
caagtgatcctcctgcttggacctcccaaagcgctgggattacagcctcttagcaatgcataccacgagttagcacaagtgtattcaaccaacaacccctc

SEQ ID NO: 125306 - DNA, 100 bp, Homo sapiens
atccatgctcagagatgccaagaagaatctagacagacaggcctttctagctgccatgtcctgtggagagcctggcatgaacagaggccttgcggagaac

SEQ ID NO: 125307 - DNA, 100 bp, Homo sapiens
cagcaagttgtggaacttctacaggaacgggtctctaattaacagaagatggcaaagcccagccacagcagctatgtccttcagcagctaaacaaccaaa

SEQ ID NO: 125308 - DNA, 82 bp, Homo sapiens
ctcaggacccctgctacgtggagaaaacctcggataaggttttaaaatcaaagatgggaaaatcggagaaaattgcccttcc

SEQ ID NO: 125309 - DNA, 98 bp, Homo sapiens
aaaaattcttcagattggaaaataccacaggatggagactacgagtttgaaccttgggtaatgtggaacatgggaaccaatgtcagatgaaattgatg

SEQ ID NO: 125310 - DNA, 100 bp, Homo sapiens
ccggcgcgatgcccttcaggaaaggaactgtggctgcaccatctgtcttcatcttcccgccatctgatgagcagttgaaatctggaactgcctctgttgt

SEQ ID NO: 125311 - DNA, 100 bp, Homo sapiens
ccgtgacctggggatcgctacggaccttaaaatacccgcaacagccccttcgtcccaaccattcaaactcctccccacgacactctgaagcagcgacggc

SEQ ID NO: 125312 - DNA, 100 bp, Homo sapiens
cttcttcggaaacgcgttcatcgtgtctgccatccccatctcatgttggcagataaattgaacatgactccagaagaagctgaaaggtggattgtaaatt

SEQ ID NO: 125313 - DNA, 100 bp, Homo sapiens
aggtgaagagttgtcccagctcggcccgcgggggagccccgggagccgcacgatgtccctggtagatttgggaaagaagcttttagaagcggcacgagca

SEQ ID NO: 125314 - DNA, 104 bp, Homo sapiens
aggaatcgtatcgtatgtccgctatccagaacctccactctttcgggcggcgactggcggcgcgatggacctgaccgggctcctgctggacgaagaaggcacct

SEQ ID NO: 125315 - DNA, 100 bp, Homo sapiens
tcaaaaccagcatcgagatgtagttcctgagcatgaggctcccagcagtgaggtctctgttctaggatgtcccgacccagtggtgcatgagatcgcctat

SEQ ID NO: 125316 - DNA, 82 bp, Homo sapiens
tatggcggcggaggaggaggaggtggactctgccgacaccggagagagggtctccaactgaattccttgaagagaaaatggc

SEQ ID NO: 125317 - DNA, 96 bp, Homo sapiens
ggcagatgagctcatcaatgctgccaagggcctgttgcagcaggttcagggtcctcggctgccctggacgcggctcctcctgttgctgctggtctt

SEQ ID NO: 125318 - DNA, 100 bp, Homo sapiens
cggacatcactttagaccctccacctaattgcaggtgtccagagagtggacgaaggtgggtggaacactgtacaaggggccaagaacagtcgggtactgg

SEQ ID NO: 125319 - DNA, 50 bp, Homo sapiens
cgggacacctggaagccgagaaatggactcagtgacctttgaggatgtgg

SEQ ID NO: 125320 - DNA, 74 bp, Homo sapiens
gaacatcctctccgtgcagccctacagccaagaatgggagctgcagctccccttccaccccccggggaactgaa

SEQ ID NO: 125321 - DNA, 100 bp, Homo sapiens
gtctgtgtggatagcaactatcagttaatctggggcgctgggaccaagctaattataaagccagcgacgagtagaacagcccctctatggtttagatggc

SEQ ID NO: 125322 - DNA, 102 bp, Homo sapiens
cgcagtcagctgcgtgattcccgtgattgcgttacaagctttgtctccttcgacttggagtctttgtccaggacggtgcagattcactttataggaacagct

SEQ ID NO: 125323 - DNA, 100 bp, Homo sapiens
cgctcgccgagccgggccgcggcgccgagtcgaacggggagccgagctggagctgccgcggcgcagccaggtgtacatcggtgagctcccgcaggacttc

SEQ ID NO: 125324 - DNA, 80 bp, Homo sapiens
taatggaagatttcgatcagttagggtcaagagcaatctgaatccaaatgcaaaggagtttgttcctggggtgaagtacg

SEQ ID NO: 125325 - DNA, 98 bp, Homo sapiens
gttccggttgaaatcgatggaactatacatcaggactctgcacttgtccaagagaagaatccagagaaatcagagcaggtcaaatagttctaaaagcc

SEQ ID NO: 125326 - DNA, 83 bp, Homo sapiens
gccgggagtcgctgggtgcgtggggctgcctcgccgcgtctcgccacgatgcctgctctgtgcctgtatctgagatcatcgcc

SEQ ID NO: 125327 - DNA, 80 bp, Homo sapiens
ggtccgacccgcgaacccctctgggatccccgccgctctgtctacaacccgaggagccttcacgtaaatgggtccagtca

SEQ ID NO: 125328 - DNA, 80 bp, Homo sapiens
caggagaagtcaatacctaccagatccagaagattcccagagagacgagttgtactgctgtcacaggaaatggacgctgg

SEQ ID NO: 125329 - DNA, 97 bp, Homo sapiens
cgccgccccagcctggcgggagaaggaggaggagcagcaggcctccgggcccggcgccgccgcccgcaggtgtcctgatggcaaatttcaagggcca

SEQ ID NO: 125330 - DNA, 100 bp, Homo sapiens
tcatcatgaccttccagaattacgggcaagcgctgttcaaacccatgaagagattacctggggcaattgatgttatcggtcagactataactatcagccg

SEQ ID NO: 125331 - DNA, 100 bp, Homo sapiens
tttttctgttttgcctgaatacatgatttaaacaagagatttccacagaagagacggtaaagaacaggtccaagaaaagctcaaagaaagcaaataccag

SEQ ID NO: 125332 - DNA, 83 bp, Homo sapiens
gagttcgaggccctgcggagctgcttcgccgctgcggctccccacaggtgcaggaagccgccgcccagccatggacggggagg

SEQ ID NO: 125333 - DNA, 51 bp, Homo sapiens
gggacgggtttagcggcagcctcttcgatgaccgcacctcgagcaggagtg

SEQ ID NO: 125334 - DNA, 50 bp, Homo sapiens
actctctctgtcagaaaaatgataaaagaatcagagtgtctcaacccttg

SEQ ID NO: 125335 - DNA, 90 bp, Homo sapiens
gagctcaggaaggaaggagcacccagaagcagggacagggagctggttggggaggaccagaaatcagcctcgctcaaggagcacccccgg

SEQ ID NO: 125336 - DNA, 101 bp, Homo sapiens
cagaaactgaaagaagccaacaagcagcagaacttcaacacagggatcaaggactttgacttctggctgtctgaggtggagcccagtgacaccatcgaaaa

SEQ ID NO: 125337 - DNA, 90 bp, Homo sapiens
acaggagttcatctacccggagaagcaggagccctactcggcaggagcgggacggtatgcgggccatcctggggtcctacgacagcgagc

SEQ ID NO: 125338 - DNA, 100 bp, Homo sapiens
gttctatttctctagctattgccttattttttctcatggatgttcttcttcgagtatttgtagaagggtatttcagttactaactgatctgaaagagcag

SEQ ID NO: 125339 - DNA, 99 bp, Homo sapiens
cccagaagaatttcaacaatctctatggcaccaaaggtcctgcaaccctggttccagtctggcaagcattgtagacctggctgctgaagactgacgggg

SEQ ID NO: 125340 - DNA, 74 bp, Homo sapiens
ggcagtttcttcgaggacctcagcaaggaaactactttgcttcgcactttttcatgggaggagagaaattcgac

SEQ ID NO: 125341 - DNA, 75 bp, Homo sapiens
gtctgaagactaacattttgtgaagttgtaaaacaggatctgcctacaaactggtttgctactttaccaactggt

SEQ ID NO: 125342 - DNA, 98 bp, Homo sapiens
aggaggagctctacgtccgcgtgcagaacgggttccggaaggtccagcagaatggggaaatggagagagaacctgaaagagccccaaactcgaggacc

SEQ ID NO: 125343 - DNA, 75 bp, Homo sapiens
attgacgccatgtcgggttattcgagtgaccgagaccgcggccgggaccgaggagtaactggaatgagattgttg

SEQ ID NO: 125344 - DNA, 100 bp, Homo sapiens
ctccttcgtggggctcatcgtgatcccggcgacatactacctctggccccgagatcagaatgccgatttgggaatggatgatgaaggagatgatgaccca

SEQ ID NO: 125345 - DNA, 95 bp, Homo sapiens
aaggacgagtcgttcctgggcaagctgggcggcaccctggccaggaagcggagggcgcgcgaggctctgcttatgataatgtcaacaaagttcga

SEQ ID NO: 125346 - DNA, 90 bp, Homo sapiens
ccgggagctggtacacagcctcagtgctgggctttgacaaacttcctctgtggggtaccatcctcatctcggtgggatgtgcagttttct

SEQ ID NO: 125347 - DNA, 90 bp, Homo sapiens
cgctggactgcaaaccgagctcccgtctgccttgcagacatgtcatgctgcccaaggacatagccaagctggtccctaaaacccatctga

SEQ ID NO: 125348 - DNA, 74 bp, Homo sapiens
gacgctgagggcagccccgtccagggctcaaaactgaaggagatctttgacaagatccacagcctgctctctgg

SEQ ID NO: 125349 - DNA, 75 bp, Homo sapiens
cctcaagtgcttctgcattacaggaggtcttcacttcagaaatccaagactcatattcatccagcttggtgtcaa

SEQ ID NO: 125350 - DNA, 75 bp, Homo sapiens
gtttggtctcctgccgtgcccggtgcacattcaggttcccgagcacaaacatcaagataacgttcactgccctgt

SEQ ID NO: 125351 - DNA, 115 bp, Homo sapiens
gttcagttgcaaaaagaaactggagccaccatcaagctgtctaagtccaaagatttttacccagaactgataaatttcaaacggaagagagtggcagcatttagaaagaatctaa

SEQ ID NO: 125352 - DNA, 87 bp, Homo sapiens
gggcctcttccgcaccgaccccgaggccaaggtacttacactgtgaaattttatgatggagtagttcagactgtcaaacatattcat

SEQ ID NO: 125353 - DNA, 85 bp, Homo sapiens
taccctaaagtcaccacctgctgcttttctggagcgcttaccagatgtgcaagacatcatcacaaggaatcagaaggctggtgtg

SEQ ID NO: 125354 - DNA, 100 bp, Homo sapiens
acaaagggtggatgaaattgatgctgctattcagagatcacaacagactggaaagctacccttgaggagaataggttgaattctgaaaaagatcgagcta

SEQ ID NO: 125355 - DNA, 50 bp, Homo sapiens
taatgctggcaaagtggaaaaatgtgcgcctcgagctgtggcaggttttc

SEQ ID NO: 125356 - DNA, 90 bp, Homo sapiens
ggcaagatcaagcactggaaccgcttccgagaccgtgagtgcatctccatccacgttggccaggctggtgtccagattggcaatgcctgc

SEQ ID NO: 125357 - DNA, 50 bp, Homo sapiens
cctcagcccatttttcatttgcacggagttgctgatagtccaactccacc

SEQ ID NO: 125358 - DNA, 82 bp, Homo sapiens
cgctgaatgggctgaaggaggaggacaaagagcccctcatcgagctcttcgtcaagtttgcccgaccatctgtaagtcacac

SEQ ID NO: 125359 - DNA, 95 bp, Homo sapiens
ctgggatgcagaacatgagtattcatacgaagaccaccagcggctatgcaggagcaagaagatttgtgaccttggattttgggaggcctatattg

SEQ ID NO: 125360 - DNA, 75 bp, Homo sapiens
gagcttggtttcgggatctcggtgctgcagacggcgagacctcctgcacaggtgagcacctgcggatctgtcccc

SEQ ID NO: 125361 - DNA, 75 bp, Homo sapiens
gtgggattcggcctgagaacctcaagcagggagaagaaggaagttgtggaagaggcagaaaatggaagagacgcc

SEQ ID NO: 125362 - DNA, 82 bp, Homo sapiens
gcagcttcaggacgctgtgaattcggtgcccctgggcgctgggattgctctagcctgtaagtataatggaaaagatgaggtc

SEQ ID NO: 125363 - DNA, 50 bp, Homo sapiens
catctcattctccagggatcagtgctgcatcttcctcccgtgaggctggc

SEQ ID NO: 125364 - DNA, 75 bp, Homo sapiens
ggagcagccctggtgtcacctatcagtaaaagtgatttcctgaaggaaatataatgatctgttcatcgaagtaga

SEQ ID NO: 125365 - DNA, 83 bp, Homo sapiens
tgaggacgttcccttcacggagaaagattttgacccagcagagctccccctgacagaccgcgaggtagagatcctaaacaaga

SEQ ID NO: 125366 - DNA, 100 bp, Homo sapiens
gacctgcttttcggttccgggtcttggccccgtccttacctcacagtgtcagcaaagaagccttaaacagtaaaaatcctcaactccataaagaagatga

SEQ ID NO: 125367 - DNA, 101 bp, Homo sapiens
catggcgaagcacgagcagatcctggtcctcgatccgcccacagacctcaaattcaaaggcaattaagttggaatatgcaaggttggttaagttggcccaa

SEQ ID NO: 125368 - DNA, 72 bp, Homo sapiens
ccaaatgaaattaatcctcctccacatacaatggaagcaattttggaggtggtggaagctacaatgattttg

SEQ ID NO: 125369 - DNA, 100 bp, Homo sapiens
acaggcattttacccagccgcacgcccaggatttcttgcgtgcagtttgtgaagaaaaaattagccctggacacatccaacgtgatggtgaagaagcagg

SEQ ID NO: 125370 - DNA, 100 bp, Homo sapiens
ctcctccccatttccgcgctcccgggaccatgtccgcgctggcggttctaatacccgatttacaattacattgaactacaaggatcccctcactggagat

SEQ ID NO: 125371 - DNA, 114 bp, Homo sapiens
gccgccttttcagaagcggctgcgcacggactgctggagatggtggagtccgtcaaaaagttggagaagatgagggatcatgaacgaaaggaagaaacttttaccccaatgccc

SEQ ID NO: 125372 - DNA, 75 bp, Homo sapiens
ttggtttaatatctgattgggacaacattcagacccatttccagtcatgaatcaatgaactgagccatgttcaaa

SEQ ID NO: 125373 - DNA, 82 bp, Homo sapiens
cgacaagtggaggcgccgctctagcggccgggactctgaactatggcgacacgatgaggcgagtggtacgacagagcaagtt

SEQ ID NO: 125374 - DNA, 75 bp, Homo sapiens
gaccttggactatgggatggaccagggtctcatgttccggtgcagcgccagctgttgtgaggacagccaggcctc

SEQ ID NO: 125375 - DNA, 99 bp, Homo sapiens
acctatcgattacacagttctggatgatgtgggccatggtgtcaagaaacttgtggtggagaatgttgatgtgttaacacaaatgaggaccagctttga

SEQ ID NO: 125376 - DNA, 90 bp, Homo sapiens
aattcaagaagttgaaaaacgcttttcacgtcacctggagagatgcacagggctcacgagcagctaaatgtgaaacatgaaccactccag

SEQ ID NO: 125377 - DNA, 75 bp, Homo sapiens
gctgaaccctccttctcaatcttggaacagcacccccttctttaagaaatcctaagtaatgcactgaagagagga

SEQ ID NO: 125378 - DNA, 100 bp, Homo sapiens
cccagccaatcctggagctgctgttgcagcacttgttccccaaacaagtgctcctacattctggtggatggtcaaaccggagagaatgacatgaacaaac

SEQ ID NO: 125379 - DNA, 50 bp, Homo sapiens
gggaactggatgtcagcaagaatggtatttcaggacagccaggagggggc

SEQ ID NO: 125380 - DNA, 98 bp, Homo sapiens
taagtgatgtccaggaaggaggaggaataatatttatggagcatatattatggaacacaaagaggactgtcagaaggacgtagaaggcacggttttac

SEQ ID NO: 125381 - DNA, 100 bp, Homo sapiens
cctagggggcaatcccctgttccggatggagttcctggggcgctggttcagcgcgggcctcgcctccaactcgagctggctccgggagaagaaggcggcg

SEQ ID NO: 125382 - DNA, 82 bp, Homo sapiens
ggctcacgctgagagggacacgcagtgacgagcggccgaagcagctttgcggagcatcagatccatgctgctgctgactcgg

SEQ ID NO: 125383 - DNA, 100 bp, Homo sapiens
caaagttaaccctgctaaccttagcagaagaaaggacggtagacctgcccaagtctcccaagatgattcctccccggggctgtgcttatgtctgcatggt

SEQ ID NO: 125384 - DNA, 98 bp, Homo sapiens
ctggtacaagaaggaggatcgcccatcaaatacaacaaagatggcagtgttgccattgccagtaagccaagagagaactgataaatttcaaacggaag

SEQ ID NO: 125385 - DNA, 82 bp, Homo sapiens
ttgagagtgggaacatgacgcagagacgtctcccacaacctgctccgggcgctggacgttgggctcctggcgaacctctcgg

SEQ ID NO: 125386 - DNA, 83 bp, Homo sapiens
tctgggtgcccgtggaccacaggccctcgttgcccagatgctccccacaggtgcaggaagccgccgcccagccatggacgggg

SEQ ID NO: 125387 - DNA, 82 bp, Homo sapiens
cgccagcgcctcagctctgtggaggagcagcagtagtcggagggtgcagttttcggctttgtgagaaaccttaccatcaaac

SEQ ID NO: 125388 - DNA, 50 bp, Homo sapiens
ataccgcagaccattgtaattcatgagttcaatgttggccagtatcgccg

SEQ ID NO: 125389 - DNA, 76 bp, Homo sapiens
acttcaaacattcgtctcggaaaccccgcctcttacagtcacgagcaagacactaagggcgactaccagaaagcgc

SEQ ID NO: 125390 - DNA, 83 bp, Homo sapiens
ccaggcctgacagctctgcggctcgggccctgagacaccattcgcttttcacccaagatgatttgatgtcttataaaactctg

SEQ ID NO: 125391 - DNA, 100 bp, Homo sapiens
cccaccgccgccttcttggcgcgaccccaacccagccccaagagcagagctgacatctgataaagacatgtaccttgacaacagctccattgaagaagct

SEQ ID NO: 125392 - DNA, 82 bp, Homo sapiens
cgagcgcgagcggcgcgagaaagatattagaaatggctactccccagtcaattttcatctttgcaatctgcattttaatgat

SEQ ID NO: 125393 - DNA, 74 bp, Homo sapiens
ttgaccaccccgccctaggccgacccggcggacgcggcgtctggtgagaagccctaccactgcaactgggacgg

SEQ ID NO: 125394 - DNA, 141 bp, Homo sapiens
aggaagcaaaacaattggccgctaaacttgcatatcttcagatattatcagaagaaacctcagtggaatatcttatcaaattaggcaatacagaatgtcatcctgaacagtttttggaaagaagatcaaaattagataaac

SEQ ID NO: 125395 - DNA, 88 bp, Homo sapiens
aataccaacaggctctagccaacatgcagttacaacagcatacagcatttctcccaccagccccccgaatccaagcccaacttcaccc

SEQ ID NO: 125396 - DNA, 90 bp, Homo sapiens
cgactctccaagagggaggtgtccagtctgctaagctacacacagttaagctcaaatcttcgtcatgtgagagtatttgaaatggacata

SEQ ID NO: 125397 - DNA, 82 bp, Homo sapiens
tcaagcctgacttctagccaagtggcacccctagctgttcctggaaggacctgaagaccatgaccaatttctacctggtcct

SEQ ID NO: 125398 - DNA, 74 bp, Homo sapiens
aaaagatacgaggctctaggagaggtggatcttcttgttccaaccaaagtgactggcatcattacacaaggagc

SEQ ID NO: 125399 - DNA, 75 bp, Homo sapiens
ttctgcagtccctcgtccagccacccccagatgactgtccaagtgcctccaaagtgtacaaagcatcagattcag

SEQ ID NO: 125400 - DNA, 75 bp, Homo sapiens
caagcctggaacatcacatctgtacgttgcaatctgtggatcagctacgaggattaacctccatttcagctaatc

SEQ ID NO: 125401 - DNA, 75 bp, Homo sapiens
cggcgagcggttccttgtgggctaggcgccatgtcagaaccggctggggatgtccgtcagaacccatgcggcagc

SEQ ID NO: 125402 - DNA, 100 bp, Homo sapiens
gcagtttgaacaggggaagatccagctgaacaaggagtgtcctacctgccgaaagaagctggtgtccaagcgatccctacggccagaccccaactttgat

SEQ ID NO: 125403 - DNA, 73 bp, Homo sapiens
tcaactctctcccttaagcactgggatcaggtatgatgactatgattatggagaagttaatcaattacttgaa

SEQ ID NO: 125404 - DNA, 73 bp, Homo sapiens
gagtataaaggatgggttttaactacagacccagtctctgccaaatttgaggcttaagcaacttcttccgggg

SEQ ID NO: 125405 - DNA, 100 bp, Homo sapiens
gctcggaggaatctcagtagggacaacaggcaggagaattatgggagcgcatttccccagggatggaagagtgtagaaagtgtcccaaagttggtgtctg

SEQ ID NO: 125406 - DNA, 96 bp, Homo sapiens
atcgaggatttggcgctgcagaaccagatccgggagcacgtcatctccatcgagggaagctcttcgtgggcggtcttgactggagcacgacccaag

SEQ ID NO: 125407 - DNA, 75 bp, Homo sapiens
tatgcttcgtttttcgccgtcatgggcgcctcggccgccatggtcttcagcgactgattcttgctattccaaatc

SEQ ID NO: 125408 - DNA, 83 bp, Homo sapiens
gtccagggcagctagggcctgggccgcggttcggccgcgccggccggtgctggagaatctggtaaaagcaccattgtgaagca

SEQ ID NO: 125409 - DNA, 97 bp, Homo sapiens
tcccagctacctgcagtggccaccatgtcttgggtcctgctgcctgtactttggctcattgttcaaactcaaggacaacttgcctttgatgattttc

SEQ ID NO: 125410 - DNA, 101 bp, Homo sapiens
cggacctcctcctctaccacccccaatcgaaagttaaacacagtgggaatatcacttttgatgagattgtcaacattgctcgacagatgcggcaccgatcc

SEQ ID NO: 125411 - DNA, 101 bp, Homo sapiens
aatttgccagttgaagatatacagatacttatccgctttttccccttggagtcctggcagattggcaagatagggacggtcatgacttttttatgattggg

SEQ ID NO: 125412 - DNA, 107 bp, Homo sapiens
gtggttgtcctcgatgtgctcgatgaggtcggccagggtggggaagtggagtccgcagcccccgaatcggcagatacagatccacgggttttagaaaaacaagaatt

SEQ ID NO: 125413 - DNA, 83 bp, Homo sapiens
tgtccagccacgtcgctttgttttcccacgctaggagctaccacaacagatgtcacacaccaagccctacatcaggaagaagg

SEQ ID NO: 125414 - DNA, 100 bp, Homo sapiens
agatgtgctgctgttactggaaagatttttacctcattacttcaagggcgtgctcagtatctacaaagacccagcctgcttgaatttcttgaaactgtgc

SEQ ID NO: 125415 - DNA, 76 bp, Homo sapiens
ctgtgtgtttgttcatcagactcttcaccagcttcttctcagcctgttgataaccatgttagcccatcttccttct

SEQ ID NO: 125416 - DNA, 100 bp, Homo sapiens
ttcatatcattgtcttccacagatgtgtcaccaaaccagctcaaccagaacgtaagttctttccaaagaaaatttgttggtgaggtgaagaggtgtgaag

SEQ ID NO: 125417 - DNA, 50 bp, Homo sapiens
ctgccggaatttgaaaagtgcctaatttacatagtacatgacgaagttaa

SEQ ID NO: 125418 - DNA, 97 bp, Homo sapiens
cccggcctacctcttcctctggcccgaagccttcctttatcgctttcaggttttgacacaagggcgcatatcttcaaagcacctagtacctcctacc

SEQ ID NO: 125419 - DNA, 100 bp, Homo sapiens
gagtatttcaaccataaagacatcttaattgggcacgaaagagattgtagaaggcatgaaacaaaaaatgtggagtattgaaaatattgccttcggttct

SEQ ID NO: 125420 - DNA, 100 bp, Homo sapiens
gctgacgtggagcggtacatcgcctcggtgcagggctccaccccgtcgcctcgacagttgttgacctcctgtactggagagacattaagaagactggagt

SEQ ID NO: 125421 - DNA, 96 bp, Homo sapiens
agctccaggagttcgtctcttacgtctgcggaagtgcagctgcctcagttcttagcgcagggacaggagagagtggcaagagtacgtttatcaagc

SEQ ID NO: 125422 - DNA, 100 bp, Homo sapiens
gtttgaaaaggcatttctcctagctgttgacgttggtgctcgtgacctctttatgggcttttttccagacttcaagctcccattccaacagtaagagctt

SEQ ID NO: 125423 - DNA, 100 bp, Homo sapiens
ccagagcgtggagcgctgcgcggcgcggcggccgggccctcgagacggggacgaacatccagtcatggataaaaatgagctggttcagaaggccaaactg

SEQ ID NO: 125424 - DNA, 74 bp, Homo sapiens
agaattcggtttgtaggtcgtcagaaagagattgggaaaatgaggtacgttagtgttcgcgattttaaaggcaa

SEQ ID NO: 125425 - DNA, 96 bp, Homo sapiens
gctcaacgagctgctggaggacgagggccagctgacggagatggtgcagaagatggaggaggtggacccccaaaagtacaagggcatatttaacgg

SEQ ID NO: 125426 - DNA, 82 bp, Homo sapiens
attcagccagcacactcctcgcgagcaaggtgattgaattactcagatatgaagatcatcatctaggttttgtgtaaaaggc

SEQ ID NO: 125427 - DNA, 75 bp, Homo sapiens
cgggaagcgtcgggattaggtgaaagtgtgatgaatgcagactctgctaccattttggctgtttggatcctcctt

SEQ ID NO: 125428 - DNA, 83 bp, Homo sapiens
gcttaagcacttttaccgaaaaccttctccccaggtgcagcggaactgctgcctgacgctctgcaacttcagcatccccgagg

SEQ ID NO: 125429 - DNA, 75 bp, Homo sapiens
caatagatcgagcctgcagacaagaaacattcgtttatgagatggtagacgaagttcctgatggagctgtaaagc

SEQ ID NO: 125430 - DNA, 100 bp, Homo sapiens
gacagtacgcctacttctataaagtcatccagctcatatgttagatttgatatcattcgaaggatcctaaccaaggtttttggatgcagcatagtcatgg

SEQ ID NO: 125431 - DNA, 75 bp, Homo sapiens
actgctgcaggcatcagatggcattcatcactggactcctcccaaaggtcacccctcctaatttctcagtgtcac

SEQ ID NO: 125432 - DNA, 75 bp, Homo sapiens
atgaagtgcgtaattacctgagttgtgatgttgaagagcacaaagttatcattgttgggctggataatgcaggga

SEQ ID NO: 125433 - DNA, 82 bp, Homo sapiens
ctgaggccggacggggcggacggcgacgcagcccgcggcagaagacaaatttacatgtattggagaccagaccagaagccct

SEQ ID NO: 125434 - DNA, 90 bp, Homo sapiens
caacctctctacgccaaagaaatccagtcccgaccaattttaggtgatgggcaagtcagaaagtcagatggatataactgatatcaacac

SEQ ID NO: 125435 - DNA, 100 bp, Homo sapiens
gcctggtcctcagtgactgtgccaccagccatgggagcctgcgcatccaactgctgcataacataaaggtcactgacccccagctgctggaacttggcct

SEQ ID NO: 125436 - DNA, 75 bp, Homo sapiens
tcatttaccaccaatgggaacatgcacaggcacgtgacacaagctgacctcaagagctccacgttttggcttcga

SEQ ID NO: 125437 - DNA, 112 bp, Homo sapiens
aacgtgttggaccttccggagcttctcagaagacagagggttttcttttgagggaggttcccctgaaggatgctaaggaatacgctgaatccataggtgccatcgtggttga

SEQ ID NO: 125438 - DNA, 90 bp, Homo sapiens
agcaggaatgcttactgttgcgtggttcgttattaacaggaatcccagtcagaagttccagcctgccactgttctctgatgccatgccag

SEQ ID NO: 125439 - DNA, 90 bp, Homo sapiens
cgtacctttaccacatagacaaaggacatggatttgattgacatactttggaggcaagatatagatcttggagtaagtcgagaagtattt

SEQ ID NO: 125440 - DNA, 100 bp, Homo sapiens
cttccaagtgaccctcttcgctgtgaatgagttcattctccttaacctgctaaagaaaccagactgtgatgactgggagagcgggctgaatgcaatggag

SEQ ID NO: 125441 - DNA, 100 bp, Homo sapiens
ctttgaagcttgatgtctactgttttgaagcgttcgatcttttaacatcacatcacatgctgacagcacaagaagggaagaaggagaaagggccaacccc

SEQ ID NO: 125442 - DNA, 101 bp, Homo sapiens
caagccgccgcctcgacccagggcccgcgggccaggagagcgctcggcggagaatctggacgaggctagagaacagaaagaaaagagtcctccagaccagc

SEQ ID NO: 125443 - DNA, 100 bp, Homo sapiens
cgcagccgcggctctgtgttttgagagtgcaaacttaattcagtgcacaaatgagatgaatgtgaacatcccacagttggcagacagtttatttgaaaga

SEQ ID NO: 125444 - DNA, 93 bp, Homo sapiens
tcctcaactttctgggcgttcatgatcctggccagcctgctcatcgcctactgcacaaattgtggctactaatttgccccctgaagatcaaga

SEQ ID NO: 125445 - DNA, 98 bp, Homo sapiens
tctaccagatcaacgtcctccgggaccggagtcagaaccctccgcagagtaaagggcaagttaaagtcttcagagccctgtatacgtttgaacccaga

SEQ ID NO: 125446 - DNA, 97 bp, Homo sapiens
gagaaagcagacatcccggccaagtatgcggaggaatagccaggtctggctgggtcggcacaacctgtttgagcctgaagacacaggccagagggtc

SEQ ID NO: 125447 - DNA, 100 bp, Homo sapiens
tataaacctgtcactgattttttccttcaacttgtggatgcaggcaaggtggatgatgccagagctctcctacaggaaaaacgtggtcttcgagaaatgc

SEQ ID NO: 125448 - DNA, 82 bp, Homo sapiens
ttggagacagattcgcagtggtcgcttcttctccttggcctgatcttttggccagaaggagattaaaaagatgcccctcaag

SEQ ID NO: 125449 - DNA, 117 bp, Homo sapiens
agctcatccagtgtattgtgtttggccctcttcgagtgagtgagagacagatactgggtcgtcaggatggagttttgcaagactgggtcattgacgattgcattggtaactggtgga

SEQ ID NO: 125450 - DNA, 110 bp, Homo sapiens
aacgaaaacgtagggaccacatcaaagacagctttcacagtttgcgggactcagtcccatcactccaaggagagaagttggtgcttcccgtgctgctgttgatgctggct

SEQ ID NO: 125451 - DNA, 83 bp, Homo sapiens
ctgcactgaaaggaaatgacggattttattctggattttggactggctcggcacacagatgatgaaatgacaggctacgtggc

SEQ ID NO: 125452 - DNA, 150 bp, Homo sapiens
gcaaatactggaagaacctcacctttgtctccccgatctacggggctgacatcagcggctctttgtatgatgacacccagaccgtcatgtacgaccttgtatcggagctgcacgctcagcacgaggagctggaggcccgcctggccaccc

SEQ ID NO: 125453 - DNA, 50 bp, Homo sapiens
gaaacattcgtttatgagatgaaatgagccgtcagactgctacagcatta

SEQ ID NO: 125454 - DNA, 90 bp, Homo sapiens
cggctgagaccccgcagcctggaggagggctgtccggggctttgggatgacccctccggcgaaggtgtcctgccctcggcccgcggccca

SEQ ID NO: 125455 - DNA, 100 bp, Homo sapiens
taagtgttcgctacgcggggctaccggatcggtcggaaatgccccgtcgcagaatttagtctcaaaggaaacttcaaccacagcactgcaggcctctgtt

SEQ ID NO: 125456 - DNA, 96 bp, Homo sapiens
gtcagccggaccccacctggacggctggggccacttgtggtcgccgggaggagttggcctgggccctgccctggagttttgtattgctgtcaaccc

SEQ ID NO: 125457 - DNA, 96 bp, Homo sapiens
cggcgtctccggggaaagccgtggccccgagggcggatccgaggtggatgctctccgattgcgtttggaagagaaggaaaccatgttgaataaaaa

SEQ ID NO: 125458 - DNA, 72 bp, Homo sapiens
ggaccgcagcgtcaatgacttacgccaagaagagtatcagatacacaccggacttcaacattctatcataag

SEQ ID NO: 125459 - DNA, 101 bp, Homo sapiens
gcctggtaccgtcgaggtcagtcatcgttacccgcagcggcgccattttgcccaaaccggtgaaagtactccaaagattcaggtttactcacgtcatccag

SEQ ID NO: 125460 - DNA, 99 bp, Homo sapiens
gtgggaacatgacgcaggtgcaggtgtctcttctcgccctggcggggaagatcgacgacatcgcggatggcgccgtgaagcccccacccaacaagtacc

SEQ ID NO: 125461 - DNA, 119 bp, Homo sapiens
tgcccccgacagcttctgcttccgggtcacgccttgacagcggctttcaacccccacctcagcccagcaattcgattgttctctggggccggactgagaaatgcctgaaggagacgacg

SEQ ID NO: 125462 - DNA, 74 bp, Homo sapiens
atacccgcaacagccccttcgtcccaaagaggagtctgcaatgccgagtggaggaaggaggaaccggagtgtga

SEQ ID NO: 125463 - DNA, 101 bp, Homo sapiens
ggagccgtgggcgctcggtgcccgggccgggcagcatctgtgagcgggtaactccccggctatcccatgccaactcagcagtggtgctttcagcggtaaaa

SEQ ID NO: 125464 - DNA, 94 bp, Homo sapiens
ggcctcccgcccgccgcgctccagatgaagtgtgagcactgcacgcgcaagccgcggcgagtcctttgcacatgttggcaacacacgcatccgc

SEQ ID NO: 125465 - DNA, 83 bp, Homo sapiens
aaaagtgaagaaagtgatcataggagaaaaccatttcaggtatccaaaccttgaaacctttgctctagatgtcaggcttgttt

SEQ ID NO: 125466 - DNA, 100 bp, Homo sapiens
aacaacaccagaagaaattgccaacccttgcagaacagtccaggctctgcagacagcatcccacctgtcccagcaggctgacctgaggagcatcgtggag

SEQ ID NO: 125467 - DNA, 100 bp, Homo sapiens
cttgatggtatccattacctccatgcaaattgggtgcttcacagagacttgagaaccatggagtctggcagtaccgccgccagtgaggaggcacgcagcc

SEQ ID NO: 125468 - DNA, 100 bp, Homo sapiens
cttgcagaacattctgaaaatgtgcatatttcaggagtgtcaactgcttagaccatgctcagcctccaagcagccttgtcatcgacaaagaatctgaagt

SEQ ID NO: 125469 - DNA, 50 bp, Homo sapiens
gtttagccaacccaaattaccttaattattgcattctcacaacacaatac

SEQ ID NO: 125470 - DNA, 100 bp, Homo sapiens
gatatatttgggaaatatggacctattcgtcaaatcagagtctaaaccaggtggacaggtgaaatgtcagtatatctctgctgtggataaagttatattt

SEQ ID NO: 125471 - DNA, 98 bp, Homo sapiens
gaccgtcttggggacctggccttgttactagagaccctgaatggcagccagattctgtcatgacctgcctggcgatcattaccgtgatttcctgtctg

SEQ ID NO: 125472 - DNA, 142 bp, Homo sapiens
agtgtccgttgcttcccgtccgtgtcgcggccctgcggttggcggcctcctcgtggagcggagcaagggtgccaagtcctgccctgccaacttcttggcagctgccgacgacaaactcagtgggttccagggggacttcctg

SEQ ID NO: 125473 - DNA, 74 bp, Homo sapiens
gtggagcaccgatgatgtgcagatcaatgacatttccctgcagctgtttctggcaaagcctgccgtgtcttaca

SEQ ID NO: 125474 - DNA, 100 bp, Homo sapiens
aggtgcgggcgcggctggcggccacgcaggtttcagaagcaggcaacaggaacaagatgtgaactgtttctcttctgcagaaaaagaggctcttcctcct

SEQ ID NO: 125475 - DNA, 100 bp, Homo sapiens
gcagccgcgcctgcagaccggcctcgcggagcccgcgcgccgagccccacggaagacaggcgcgatgatggactccccgttcctggagctgtggcagtcc

SEQ ID NO: 125476 - DNA, 99 bp, Homo sapiens
tggcatttgtgaaggaggctgaggctttgattgagcgtggacaggctgagcgacttcgaggggaagaagcccggtttgaagaacataagaatgaaaagg

SEQ ID NO: 125477 - DNA, 100 bp, Homo sapiens
ctctactcctgggctcaagcagtcctcctgcctcagtctcccaaagtgctggaattacaggggtggaatggagaatataaagcagcacaccttcaccttg

SEQ ID NO: 125478 - DNA, 74 bp, Homo sapiens
gacgaagttcatcttagatactgaaatgcacactgaaactaagaaaaatggctttgtcagcccaacagataccc

SEQ ID NO: 125479 - DNA, 100 bp, Homo sapiens
acctctagcagaacgtcgaggactactccagaaagtttttgtacagttcacaaagatgtccaaaactaatggcttatcagaagatttgatatggcactgt

SEQ ID NO: 125480 - DNA, 83 bp, Homo sapiens
tgagaggagaagatcaagaggtggagctggttgtagattatttttccaagagataacttcaccaagatgtccagtgataggca

SEQ ID NO: 125481 - DNA, 75 bp, Homo sapiens
ataaagctaggtcgtcccactgttccgtgtatcacttggataaggacactgcccatctctaagataagaacctgg

SEQ ID NO: 125482 - DNA, 50 bp, Homo sapiens
gggagaacctgcggcggccggagcggatggaaagagatgctgcatttaca

SEQ ID NO: 125483 - DNA, 100 bp, Homo sapiens
ctgtttgagaaaaggcctaagaattttggcattgagccaaggagcaataactgaacgtttaagaagcttcagtatgcatgatttaacaactatccaaggt

SEQ ID NO: 125484 - DNA, 82 bp, Homo sapiens
gcgttgcggcgaaaggaacggctgaaggccctacgggagaaaaccgggcgcaaggcataatcaccagcaacacccgggacaa

SEQ ID NO: 125485 - DNA, 83 bp, Homo sapiens
ccagagagcgtcatggacctggacctgtcatttactccatcctttatagtgatgctacaggacgaagaggaatggataaaaac

SEQ ID NO: 125486 - DNA, 100 bp, Homo sapiens
agacaggcggcgccatcttcgaacttagacttccggaaggactttggcgagggatgtacagttacccagcacgtgtacctcctcctcctcctattgctcg

SEQ ID NO: 125487 - DNA, 49 bp, Homo sapiens
cgccgccgcttgtgctgcagccatggctttaaggagttttaagctgagt

SEQ ID NO: 125488 - DNA, 83 bp, Homo sapiens
cgactttcccgccgagggcccggaccccgaatatgacgaaacacagtgctctgtgcctatacagtgtacggataaaacagata

SEQ ID NO: 125489 - DNA, 106 bp, Homo sapiens
atgatctgtacatagattttggtggaaagtttcattgtgtatgtagaagaccagaagtggatggagaagcctgccttctggtacaagatgcctgtggaatgttcgg

SEQ ID NO: 125490 - DNA, 51 bp, Homo sapiens
gagcgtctccggctgcacagcgctcaggcacggatgggcagaagcctttgc

SEQ ID NO: 125491 - DNA, 90 bp, Homo sapiens
cgagaaggtgtccgaggcccgcaaaagtttatgaactgacgttacatcatacacagcaccaagaccacaatgttgtgaccggagccctgg

SEQ ID NO: 125492 - DNA, 90 bp, Homo sapiens
gtctgctcggagatcatttgggagatccaagagattcagtatcactcgctcccttgatgatcttgaggtgtctggaaatgaagtatggaa

SEQ ID NO: 125493 - DNA, 100 bp, Homo sapiens
gaaagaagttgcaaaacactgggacccggtcagcccaaggagcaggggtccagcagctctgcggaggcatctggaacagaggaggaggaggaagtgccca

SEQ ID NO: 125494 - DNA, 82 bp, Homo sapiens
gcacgtcacagctctggattaccttgcaccttatgccaaggaagtactgtgagagtcttgcctgttgccgcccactcagcac

SEQ ID NO: 125495 - DNA, 75 bp, Homo sapiens
tggagcctcagttggaagcagccgatccagcctgcggagcctgtggggcagaaggaggcccaagttgcagcccgg

SEQ ID NO: 125496 - DNA, 83 bp, Homo sapiens
gaaggagcggcacaggcgccagggcaggagccttcacgtaaatgggtccagtcatgcctcccagtaagaagccagaaagctca

SEQ ID NO: 125497 - DNA, 75 bp, Homo sapiens
aggaggttcttcagtgtatgcctggtgcattgtcctgttttcacttttggcatgggtttatgctgagcctaccat

SEQ ID NO: 125498 - DNA, 75 bp, Homo sapiens
gccgctacatactcatcatggggctcctgtacaagatggcccactgcgtgaccttggttcagctgtccatttcct

SEQ ID NO: 125499 - DNA, 90 bp, Homo sapiens
ggcgaggcagggccagcagcaggcgggagcacccaccaaggctccggatgtgttccccatcatatcagggtgcagacacccaaaggataa

SEQ ID NO: 125500 - DNA, 74 bp, Homo sapiens
cacgctcaccaactacaaagccttcagccagttcatgagttcacagacgaggagaccgaggcccagacagggga

SEQ ID NO: 125501 - DNA, 83 bp, Homo sapiens
gtggggagaagcatcatggttcaacggacacagcaggtcaggagagattcaacagcattacctcagcttattacagaagtgcc

SEQ ID NO: 125502 - DNA, 82 bp, Homo sapiens
cggacctgtggctgctgctgttgcgtagcgtcgactccttcgagaagcaacaatgcagatcttcgtgaagactctgactggt

SEQ ID NO: 125503 - DNA, 100 bp, Homo sapiens
ccctcctcctccagccgcccgcttcctccttgccaggagtactatactggcaattgctggagaagattttgcaattgttgcttctgatactcgattgagt

SEQ ID NO: 125504 - DNA, 74 bp, Homo sapiens
tctccgtgtagaactccttggagagcagcagtgttgtactgctacttctataaacggacagccgtaagactagg

SEQ ID NO: 125505 - DNA, 75 bp, Homo sapiens
gtcagcctcagcccccatggctgcaggcatcattgcgctggccctggaagccaaccgattacacctcaacaagaa

SEQ ID NO: 125506 - DNA, 112 bp, Homo sapiens
tcatcgtctcctgtgttaatgatgaacccctcttcacggcagaccaggaggagatgttaaagtaacccatcttgcaggacgacattgaagattggtcttctgttgatctaag

SEQ ID NO: 125507 - DNA, 90 bp, Homo sapiens
cgatgatcgtgtgtcggatgaggagaaggtctgccatcatggatgttctcgcagaagcaaatggcacctttgccttaaaccttttgaaaa

SEQ ID NO: 125508 - DNA, 102 bp, Homo sapiens
cgtgttctcagactcggcctctgtggtcgcgcctctcgctcctggctccgaagacaactttgccaggcaccaccctggacgtggtggaggtggagagctatg

SEQ ID NO: 125509 - DNA, 83 bp, Homo sapiens
tggaaaacatatccattaaatgggcatttgcaagtgaggaagcagcacaaccctgggttttagataatttctaacagagaggc

SEQ ID NO: 125510 - DNA, 74 bp, Homo sapiens
aggattaacactgcagagtaatggcgggcgctaatattgacacctgctcagaagaccagaggaccccgttgatg

SEQ ID NO: 125511 - DNA, 96 bp, Homo sapiens
aatatctggagccatccaacatttagctgggatgaaagacagcaaggactactgttcgaagatttttggaagaatactgagaacggcataaagtga

SEQ ID NO: 125512 - DNA, 100 bp, Homo sapiens
ggctccacgacttactctctacccttggcagattcagaatggacagtttagaagaacctcagaaaaaagtctttaaggctcgaaaaacgatgagagtgag

SEQ ID NO: 125513 - DNA, 74 bp, Homo sapiens
ccgcagggttcggatgagaccagctttcaccaacaatcaccagtggtttacacaacattgcaaggagcattgaa

SEQ ID NO: 125514 - DNA, 74 bp, Homo sapiens
agatctgtgcaccattaatgtgagtggcctgaagttctccaagtggaagatagatgataagcctgtaaaaattg

SEQ ID NO: 125515 - DNA, 75 bp, Homo sapiens
cttcggttcgggtgcgctgctcaaggacacggtctacaccgacttcgacggaggctactcacagtcgaactacaa

SEQ ID NO: 125516 - DNA, 100 bp, Homo sapiens
aagagaagcataaacctatcttctttcattatggagggaggtttggcagatggagaacctgatcgaacttcggtgccacgtgtgaggtggtgctggcccc

SEQ ID NO: 125517 - DNA, 78 bp, Homo sapiens
tgggcgtaggaccctcccagccaggaaggaactgcaggagctgcagaatctttacaaacagaacagtacacatacagc

SEQ ID NO: 125518 - DNA, 82 bp, Homo sapiens
ttctgaacatgcacccccagcagccaccagcaggtactgctataaccagaatttggtagaaaaaggatttacttgttggggc

SEQ ID NO: 125519 - DNA, 100 bp, Homo sapiens
gctgtgacgcgcgcgccggagcggggtccgatggttctcgaaggcccgcggcgccccgtgctgcaggatgtacagttacccagcacgtgtacctcctcct

SEQ ID NO: 125520 - DNA, 100 bp, Homo sapiens
gtctctagtggcggaagccttcgtctcccagattgcaggttctgccacttgctgggaaaacagcaacagaaggatattaaggagccacccctataattta

SEQ ID NO: 125521 - DNA, 82 bp, Homo sapiens
atcctaactatgatgatgaccagaatgagtccctggaacgccagatgcgtgaaatggaagagaactttgccgttgaagctgc

SEQ ID NO: 125522 - DNA, 98 bp, Homo sapiens
tagaatgaagctgcagaccctcgcagtgagtgttacagctcttaaggccccttcacagatgtagtcactacaaatcttaaattgcgaaatccatcgga

SEQ ID NO: 125523 - DNA, 100 bp, Homo sapiens
acctgcagaaggtctctggagacatcttcagcagagatcctgatcaaggtgcaggtgtatgtgagcggggagctggtgcccctggcccgggcctcagtgg

SEQ ID NO: 125524 - DNA, 124 bp, Homo sapiens
atgaacatgcctccattcacctgtgggacctgctggaagggaaggaaaaacctgtatgtggaaccacctatttgttgttggggatagataaggaaagaagaaaaaggctctggtgagaaaccca

SEQ ID NO: 125525 - DNA, 73 bp, Homo sapiens
aggaagtgtatcttcatacatcaccacacctgaaagcagggacttaagtcacaacagattatctttcatcaag

SEQ ID NO: 125526 - DNA, 71 bp, Homo sapiens
taggagggcaggaagagctgcagtctttgtgggacaagacctgcgaccgcatcaagcagtccgccagcgga

SEQ ID NO: 125527 - DNA, 50 bp, Homo sapiens
cttccagtagctccaaggaggttaagcttctcggacaaactatttagtgg

SEQ ID NO: 125528 - DNA, 75 bp, Homo sapiens
gacaagtttgcagatcgggagcgcaaggtcgccctcaaggccatgatcaaaacatcgccaaactgaggcagcaac

SEQ ID NO: 125529 - DNA, 99 bp, Homo sapiens
agaccacttaagcaaacttaatataccagacactgcaactgctctctctccagatcggattcaaccgcacatcatgacagatgttccggctacatttac

SEQ ID NO: 125530 - DNA, 50 bp, Homo sapiens
gggaaaacttgctgcggttgctcaagatcctgtttgaccaaactcagaga

SEQ ID NO: 125531 - DNA, 88 bp, Homo sapiens
tccgagaagaacctctacgccgacatcgacgccgcgtggcaggcgctgcgcacccgatttgcttgtaaatgcatcacgaagaggcagc

SEQ ID NO: 125532 - DNA, 75 bp, Homo sapiens
aaaaaaagcagagaggagcggggagcaatgcaggtctaaagacattgccctcacagagtgaaatgatggcagaaa

SEQ ID NO: 125533 - DNA, 100 bp, Homo sapiens
caatgcgagagagtcagctgcaacaggaagacccaatggatagatacaaggctgtttgtactgatggcaagctcttcaaccacttagagactatttggcg

SEQ ID NO: 125534 - DNA, 83 bp, Homo sapiens
gatctttctccgtggattcctctgctaagaccgctgcaaaatgatgcttcaacacccaggccaggtctctgcctcggaagtga

SEQ ID NO: 125535 - DNA, 51 bp, Homo sapiens
atatatttaacccccctccaaaaagtatccgttacagcactgatgtgagtg

SEQ ID NO: 125536 - DNA, 98 bp, Homo sapiens
acttccacaacctgctgcgcttctggcagcagcactacctgcacaaggacaaggacagcacctgcctagagaacgtgttgggatggccaccaactggg

SEQ ID NO: 125537 - DNA, 75 bp, Homo sapiens
aatggcagtgatgatggagctcagccctccacctccacagcaaggcgcacagaacatcagctgaagcaatttacc

SEQ ID NO: 125538 - DNA, 99 bp, Homo sapiens
agcacggacatgacccagccactgagtgcctacttcatcaactcctcgcataacacctatctcactgggactcggagatcatgcagcagaagcagaaaa

SEQ ID NO: 125539 - DNA, 101 bp, Homo sapiens
aggaatatgacgacggcgagaagcccctccatgtttactactgtttgtgcggccagatggtcctagtgctggagaaagtggctcatgccaaagaagaaaac

SEQ ID NO: 125540 - DNA, 73 bp, Homo sapiens
cggaatgtcatccagcgagtgattagagtgaagacatttccacctggacacctgaccatgtgcctgccctgag

SEQ ID NO: 125541 - DNA, 100 bp, Homo sapiens
cttgagaagagagaaccactaaagggcagagcaaagactccagtaacactcaagcaaagaagagttgagcacaatcagttgtggaatacagactcacgtt

SEQ ID NO: 125542 - DNA, 75 bp, Homo sapiens
gctacccaccagcatcctccaaagcactgaacgcccggcccaggtgaagcaatgttcatggctcccgctcagatg

SEQ ID NO: 125543 - DNA, 75 bp, Homo sapiens
ggctgcctgctctggaagacagcgacggggcgcttcaaagagcaacttatgactctcatctctgctgcacgagaa

SEQ ID NO: 125544 - DNA, 100 bp, Homo sapiens
gagaggttccgtcagtgtctgatgtcagatttatctcatgctgtgcagggggagcagggcgaggacggcaaggctgaggggccccctgggccacctggag

SEQ ID NO: 125545 - DNA, 83 bp, Homo sapiens
cccagcttttcagaactgcagggaaacagccatcatgaggtgcctggaatacttattaagaaacgatgcaaatccagggatcc

SEQ ID NO: 125546 - DNA, 74 bp, Homo sapiens
cgggagttacaccgccaccgccaggtcctaaaaacatcctgagtttctttggcctgccagaaagtcaccttcct

SEQ ID NO: 125547 - DNA, 90 bp, Homo sapiens
gtgcagctgcctcagttcttagcgcagcctccagggtcgtatagacctccccctcctatgggcaaaccaccaggttcaattgtaagaccc

SEQ ID NO: 125548 - DNA, 75 bp, Homo sapiens
gctcagaggagatgcaccggctcacggaaaatgtctataagagtgtgaacatggctacgcctcttcattcccgtc

SEQ ID NO: 125549 - DNA, 90 bp, Homo sapiens
ggtggagttgctgcccttccggagtccgccccgtgaggagaatgggatcgcttacacctgagacgaactacagaacagcacgtaccagag

SEQ ID NO: 125550 - DNA, 113 bp, Homo sapiens
ggcgagatgggcaagcccaggaacgtggcgctcatcaccggtatcacaggccaggatgacagtgatgggattccgtggtcagaagaacgggtggtacgtaaagtcctttattt

SEQ ID NO: 125551 - DNA, 73 bp, Homo sapiens
cggcacagctccgaccgcgaggacgacttctccgcagggcttccagtttccaaacctgagagctacaacttgg

SEQ ID NO: 125552 - DNA, 100 bp, Homo sapiens
gcggcacggctacatcaagggcatcgtcaagcctgcctagggtagttaaaagacgagtgaatgctctcaaaaacctgcaagttaaatgtgcacagataga

SEQ ID NO: 125553 - DNA, 90 bp, Homo sapiens
ggcatcctgtgaggcctgcaaagccttcttcaagaggaccatccagggggcatatgggggcctctcagaccgcccctcggcatccatctc

SEQ ID NO: 125554 - DNA, 102 bp, Homo sapiens
cattgggaggtacagcgccttcagccagacagaatgtgtggaggtgcaaggtgcctgtgtagatcatcctagaatacctgtgtggtgctgtccttcctcaag

SEQ ID NO: 125555 - DNA, 90 bp, Homo sapiens
ctccttcatcagccacttgtcgggcgatgtcgcaagcagcttcattgacttcctgcccctaaaatggggaacacgggtctggctgagaga

SEQ ID NO: 125556 - DNA, 90 bp, Homo sapiens
aagtacctgccagagaacgacctgaaggcgccttctgcggcaggcggacagatcctcggcgcggcagggccggggcaagctggacgcagc

SEQ ID NO: 125557 - DNA, 97 bp, Homo sapiens
ctctgacctgcaggtattggcgatccatagctaagacgccaggtcccccggaaacctagaaatgcactgttggtcaccgcaggcctgtcttcctatt

SEQ ID NO: 125558 - DNA, 98 bp, Homo sapiens
actgaggcgcggtggcctgagcccggccgccatcgatgaccccggtcgcggacttgcttcaggctggccaccccccggctcagaatggaatgcctcca

SEQ ID NO: 125559 - DNA, 100 bp, Homo sapiens
gaacagacaacaatagtaatacactcttacccttacaggcgcagttgtgtagcagttgagtaatgctggttagctgttaaggtggcgtgttgcagtgcag

SEQ ID NO: 125560 - DNA, 151 bp, Homo sapiens
ggattgctactgcacggtgaacctggaccaggaggaggttttcaggaccaaaattgtggaaaagtcactctggacatggatttgattgacatactttggaggcaagatatagatcttggagtaagtcgagaagtatttgacttcagtcagc

SEQ ID NO: 125561 - DNA, 100 bp, Homo sapiens
cagtagccttgatagattatattccagaaaaatcagaaagcagcttgttcatcataaacaggtccgtttattaatggttagtcgaatggctaaaccagag

SEQ ID NO: 125562 - DNA, 98 bp, Homo sapiens
tttcggaacccgcaccaagctctgctccacactgccaaccggccagaggacgagtgtgggtatcagctttcccagcctgacgctgcctccaggctgga

SEQ ID NO: 125563 - DNA, 128 bp, Homo sapiens
gccgaagtcagttccttgtggagccggagctgggcgcggattcgccgaggcaccgaggcactcagaggagagttgtctgctggttctcagcttgaagaagattctgcagtccttattgatcctttttc

SEQ ID NO: 125564 - DNA, 83 bp, Homo sapiens
cttccagtacccccttgccatggcagcaaaaagctggaggatcaggagcagcgggcccgacagctcaaggagaggctgcgcag

SEQ ID NO: 125565 - DNA, 51 bp, Homo sapiens
tctgtcctcctactcggacccgcaggaccactatgagacctcagtccttct

SEQ ID NO: 125566 - DNA, 82 bp, Homo sapiens
ctggagagcctgcaggacggcgcggcagagtccccgtacgcctacagtaacgcattttgaaagcgaagcagaagccgtagaa

SEQ ID NO: 125567 - DNA, 76 bp, Homo sapiens
gtgctgtttgtagagatgacaacactgataaaatccactcattgctgatatcagttttagagaatgtggcgtggag

SEQ ID NO: 125568 - DNA, 83 bp, Homo sapiens
cttggggcatctgatcctaattcccttgctgatgatattggctgtattcatcaccaaagaaaaaacttacaccaatgcagaaa

SEQ ID NO: 125569 - DNA, 101 bp, Homo sapiens
tctggaaggaagagatggagctgacgctcgtggggctgcagtactcgggcaagaccaccttcgtcaatgtcatcgcgctgcgtgcccagatgcgcgacctg

SEQ ID NO: 125570 - DNA, 100 bp, Homo sapiens
ctcgaggacgctggagcccagcaagatacttggcatatcgaaattttatgattgacacgtatcgtctaaacccccaagagtatttaactagcactgcttg

SEQ ID NO: 125571 - DNA, 50 bp, Homo sapiens
aaagaatgaacactgtccttcaaaacgaaatgaagaagcagtacgacgtc

SEQ ID NO: 125572 - DNA, 88 bp, Homo sapiens
agagaatctctgaggtccccaggagagcctgcctgcacggaagagacgcctcctcgcactgctgtctgctgtgcggatcaacggggat

SEQ ID NO: 125573 - DNA, 75 bp, Homo sapiens
catgctcagcaggagcttcatcaacgatatatgtcagatctaaagtgtatcctactcagtacatgtatctgaaga

SEQ ID NO: 125574 - DNA, 51 bp, Homo sapiens
gggggatgtgagcgctgagcccttggcagctctggcaggctgccctgagca

SEQ ID NO: 125575 - DNA, 100 bp, Homo sapiens
cgaggctgcggtgtctgctgctattctccgagcttcgcaatggctattttggcattctgctggatatatgttcgtaaataccaaagtcggcgggaaagtg

SEQ ID NO: 125576 - DNA, 51 bp, Homo sapiens
tgttcttcgtaggcggagtcgccgagtcgacagtactacgcttacctcacc

SEQ ID NO: 125577 - DNA, 109 bp, Homo sapiens
tgaaaaaggagaatggggatttaaagcactgaaacaaatgattaagattaacttcaagttgacagaagcattaaaatgcgtggctcaggctagcaagaacagatcactg

SEQ ID NO: 125578 - DNA, 80 bp, Homo sapiens
ggagaggctgtgagccacaatgcatcgctggaagtagccagtatggagcagtttcagcaggaatgttatgtgcccttacc

SEQ ID NO: 125579 - DNA, 100 bp, Homo sapiens
gaatacgttgagtttggctctggaaggaatatgagggaaggcttatgagatcacgtatgtgaggctgaagttccacaccagtcgccctgagagctttgcc

SEQ ID NO: 125580 - DNA, 82 bp, Homo sapiens
gccggaggtcatactgcatcagaaccatgaagaaggacatggatttgattgacatactttggaggcaagatatagatcttgg

SEQ ID NO: 125581 - DNA, 100 bp, Homo sapiens
caccaacagtactcggtctatagtattgtgcctcagtcttggtctccaaatcctacaccttactttgaaacaccactggaacttcatgcccacttgaatg

SEQ ID NO: 125582 - DNA, 97 bp, Homo sapiens
ggagccaggggcccgagggcggggaccggcggcgctggaggagcgaggcagctgtactaggactgggaacgggttgaaaggattgttgacaaaagga

SEQ ID NO: 125583 - DNA, 100 bp, Homo sapiens
ggagaactacagccacctgatatcactggggtggatccatgctgtgctcacttctcaggactgtatggcttttggggggaacttcctgcacaaccttaac

SEQ ID NO: 125584 - DNA, 96 bp, Homo sapiens
cccaaggaggagcagcagcaggccctggagcagttcgccgccgctgcagcgcacagcaccccggtgcggagggagtccacaagccctagccatgcc

SEQ ID NO: 125585 - DNA, 90 bp, Homo sapiens
cacagaatggcagccacattccagcttccagggcaccagggcctggggttgcccctgaaggcagccggatgccggagcccacctcatcac

SEQ ID NO: 125586 - DNA, 100 bp, Homo sapiens
ctctgctgcctgcattgaggggaagttctactacatcaccctgctacgagaccccgtgtcccgctacctgagcgagtggcggcatgtgcagaggggtgcc

SEQ ID NO: 125587 - DNA, 99 bp, Homo sapiens
agattaacctggagttaaggaacagatccccggaggaggaaatcagtgacccggagatcctggatctggtccatagtgcccttggaaggatgaccgtgg

SEQ ID NO: 125588 - DNA, 95 bp, Homo sapiens
agatgggtcaccagcagctgtactggagccacccgcgaaaattcggccagggttctcgctcttggttatcttgacgaatcagattacaacccatc

SEQ ID NO: 125589 - DNA, 90 bp, Homo sapiens
ccggacggtacttctgccactgctgctccgtggagatcgtcccgcgcctgccgtcgctggacgggcagaacatctacaacgcctgctgca

SEQ ID NO: 125590 - DNA, 75 bp, Homo sapiens
ccattatatgctggaatggttccttaaagatccccagcaggccctcaaggagctggctaagatgtgtatcctggc

SEQ ID NO: 125591 - DNA, 51 bp, Homo sapiens
cgccactgccgcaggaggcgtgagggcaagaatatcacggcatgggcatga

SEQ ID NO: 125592 - DNA, 87 bp, Homo sapiens
agcaccaggagacgcaactcatcggggacaggctggcctgacatggaaggtgaaacaaggcagcagcccctgcctccaggagaactc

SEQ ID NO: 125593 - DNA, 95 bp, Homo sapiens
cggagacctacctgcggcgtcggcagctgctgctccgaggtgctcttacagcctgttccaagtgtggcttaatccgtctccaccaccagatcttt

SEQ ID NO: 125594 - DNA, 98 bp, Homo sapiens
caggttcccatggttgccggctcccctctcaggacaacccagatgtgcaacaaagtgcgatgggttacacatcattttggaatgactgtatatcatct

SEQ ID NO: 125595 - DNA, 152 bp, Homo sapiens
ttagaggcttcacaaaaagaggaaaacagttcctctcctttgaaacaaacctcactgaaagcattaaagctatagctaaatctgcttcgtaatgttgatgctaacaacactgagaatagcactactgtgaagaattctagtttgttgagtgg

SEQ ID NO: 125596 - DNA, 82 bp, Homo sapiens
cggcgggacaacgcctcctcacttgctcctctacggtctcggcgcggaagatggccggcggcgtggacggccccatcgggat

SEQ ID NO: 125597 - DNA, 88 bp, Homo sapiens
tcaccgcgggcgccaatggggagcagaaggactcggacacagaaatgtcctggccccgtacgcggtgccctcggagctggtgctggtg

SEQ ID NO: 125598 - DNA, 75 bp, Homo sapiens
gaaaaaacgccagccaagaagcatgtgcgactgcaggagaggacagacatggtggttctgattgcctgggagata

SEQ ID NO: 125599 - DNA, 100 bp, Homo sapiens
tgtcatgttgtcttactggtccacctaaatatggaagatacggtggacaggttcctgtatcacatgcggctctccgatgacacccttttggacatcatga

SEQ ID NO: 125600 - DNA, 100 bp, Homo sapiens
ccgcgtccgccgattcctcctccttggtcgccgcgtccttggctggcgtcccttcctggatctggagagagcagctgctgctgccccaccacctgccagg

SEQ ID NO: 125601 - DNA, 87 bp, Homo sapiens
aacgcagatcagaggtagtcggacctttcccgctggcgcgcagcctcagctagatgaaggtcaccgtgtccaaagggggcgaccggg

SEQ ID NO: 125602 - DNA, 95 bp, Homo sapiens
taccatgtcaccctcaaaagagtccagattcaacaggctgccaataaaggagcaagatggctagggggtgttatgaaaagaagagaccaaataca

SEQ ID NO: 125603 - DNA, 75 bp, Homo sapiens
aaatccgtgtcggagtccttacagagcaaacgaggcccctgagagctccacctagttcacaggataaaatcccac

SEQ ID NO: 125604 - DNA, 51 bp, Homo sapiens
aagaatgaagccgcggacccttgcgagacagggtcttgctatgttgcccag

SEQ ID NO: 125605 - DNA, 100 bp, Homo sapiens
tgcggaggaaggactcctcgctctatatagatttgaacatggaattcaatccttcagatcatcctcgggccagcacaatattcctcagtaaatctcagac

SEQ ID NO: 125606 - DNA, 48 bp, Homo sapiens
cacaaattgagcattatggctcatctgcatggcctgtatgagaagaaa

SEQ ID NO: 125607 - DNA, 82 bp, Homo sapiens
tggacacactcagcattttgaggtataatgggtctctcccaaatggcgatagaggaaggaggaaaagtaggtttgctttgtt

SEQ ID NO: 125608 - DNA, 99 bp, Homo sapiens
ctgggactttcttcgttgccatgaggaaagaattctccgaggtttcaatatggtgttcctgctacctcccacctccctcctccctcatcacacatgcaa

SEQ ID NO: 125609 - DNA, 100 bp, Homo sapiens
cggccaaagcagtacagctgggatcagcgcgagaagattactgattttgggcactccaagattttgggagagacctctctcatgagaaccttatgtggaa

SEQ ID NO: 125610 - DNA, 98 bp, Homo sapiens
tggcaagcctatggactcaaaggctatcctggtgcagattcactttataggaacagcttcagcttcagtgatgaaaaactgaattctccaacagactc

SEQ ID NO: 125611 - DNA, 90 bp, Homo sapiens
agcctgcagtctcagcgaagctcacagcagaccctcagtgcagacgcaagcgtgaacacccttcctgtagtggtctccagagagccctcg

SEQ ID NO: 125612 - DNA, 82 bp, Homo sapiens
tgcgcacgcgcatctgacggttgtctcggttactcatgttgggttcaatatacggagagtgccctgtgccaaagccacgagt

SEQ ID NO: 125613 - DNA, 51 bp, Homo sapiens
agatgaagcaaggcccaatgacccaggcgagtattgggaaagggtcgttgt

SEQ ID NO: 125614 - DNA, 98 bp, Homo sapiens
agtcaagatctcgttccagttccagagaacgttcgagatctcgtgggtcgaaatcaagggtgaggacgcttgagcggaagttagaagcaaaaatgatc

SEQ ID NO: 125615 - DNA, 90 bp, Homo sapiens
ctctcctgggaccctccaagagcactagtgtctagaaggcactaaggtattaaaggtggaagaaggtccatatctttttctgtgggtgct

SEQ ID NO: 125616 - DNA, 83 bp, Homo sapiens
caaggagctaaagcagcgtgcgttcagccctggggttcaagaagacgtggaagctgcgggctctgaaggaaggcaagacaagc

SEQ ID NO: 125617 - DNA, 106 bp, Homo sapiens
gcctggagcacggagaaccattaatcatctctaaggtagctacagcaagctgggtagcaggcagatccaaaggatatcatgaagtttccagggcctttggaaaacc

SEQ ID NO: 125618 - DNA, 97 bp, Homo sapiens
acctctacttagctcagcaattcttaccttgaaactggccaagaagcggaaagagaccatgagcagcacccgacaggagatgactgtgatggtgaac

SEQ ID NO: 125619 - DNA, 100 bp, Homo sapiens
attccttattcacttgtcgccttacttcctgcttaagccagcacagaagtgtctggagtggttgattcacagagttattgatttaggagtcatgactcca

SEQ ID NO: 125620 - DNA, 89 bp, Homo sapiens
taccatcactggatctgctgccagcattagcctggctcaatatctaatcaatgtcaggggctcgggggatcctggcaaaaagaaacagc

SEQ ID NO: 125621 - DNA, 100 bp, Homo sapiens
tcatagaaacacaggctggtgatgtgtctgcttacattccaacaaatgtcatttccatcactgacggacagacaaatggaatcctgtgctgaacccgaat

SEQ ID NO: 125622 - DNA, 50 bp, Homo sapiens
caccgcagagccggcgcctcctcggcaggctggagcgcagtggcgcgatc

SEQ ID NO: 125623 - DNA, 50 bp, Homo sapiens
gccgcctagagtggttcagccacaaggagttcctctgtgacgagggtgca

SEQ ID NO: 125624 - DNA, 109 bp, Homo sapiens
cgtgctcaccggtttctcccacatcgacctggtggccacagggcagccccatgagggctccagctactcttcgaggaaggactgtcagatggctctgaagcgagtggac

SEQ ID NO: 125625 - DNA, 50 bp, Homo sapiens
cagacaacagcctggtggcagcgtgttctacgcagaaatagaagagctga

SEQ ID NO: 125626 - DNA, 90 bp, Homo sapiens
ggaaattcttcaggatcaattacatgtttgcaaaatggatggtcagcacaaccaatttgcattatggaggagagtacctgtggagatata

SEQ ID NO: 125627 - DNA, 101 bp, Homo sapiens
aggtccttttctacaaatatcagagccatggctcaggtactggaggcgcaaagaaggcatcagaaggagaaatctggcatcatacctacctcaccgacgcc

SEQ ID NO: 125628 - DNA, 74 bp, Homo sapiens
ccacctacctgcacccgctcagcgagctcctgggcatcccgctggaccagctggtgctcaagaccgaatcggct

SEQ ID NO: 125629 - DNA, 100 bp, Homo sapiens
ggaaagttgcacagccacagacttctcagcacagagtggggactgccttccattgtgaagtctgatgacatggaagcttaccggacccagaactgcttcc

SEQ ID NO: 125630 - DNA, 82 bp, Homo sapiens
ccgcgagcacagagcctcgcctttgccgatccgccgcccgtccacacccgccgccaggttgggttaacggcatggagaacag

SEQ ID NO: 125631 - DNA, 87 bp, Homo sapiens
tgggtaaaagtagagaaggatcaaggacggatgatgaagtagtacagagtgaaaagttggaagactgttcacgcaagttaataaaag

SEQ ID NO: 125632 - DNA, 77 bp, Homo sapiens
gctggctaagatcaccaacacagacgtgtttggaaattttagcattcaggtgccaggaatgcagatgggacagccag

SEQ ID NO: 125633 - DNA, 88 bp, Homo sapiens
atgccctgcagtacctgcagaaggtctctggagacatcttcagcaggagtgtggccatctggggccgtgtggtatttgccactcagga

SEQ ID NO: 125634 - DNA, 100 bp, Homo sapiens
acttgtgtgtcaactagtgatggaaccagaatagaaagggatgatgcaagtacgtttactgcaactttttacagatgtggcaactggagaaatgtccagg

SEQ ID NO: 125635 - DNA, 80 bp, Homo sapiens
ggaaacttgccttatcaccttcttgcttgcagaaggaacccagccagccggcggaatgcaagcagcagtaggaagcggag

SEQ ID NO: 125636 - DNA, 98 bp, Homo sapiens
cggtcctgtttcgacagcgaacatgtcgcggcctgtcaggatcaccccttctgtgtcattctctgaggaaaacaagttcttctcaaggaggaaagtct

SEQ ID NO: 125637 - DNA, 100 bp, Homo sapiens
taaaaattatttatccaacagctcctcccagagagtgggttaatcgagccccatctattcattttctgagagtgttaatctgtctgaggctactaatgag

SEQ ID NO: 125638 - DNA, 58 bp, Homo sapiens
actacatggcatctaccataggggggtctcgccaactcctgggctcaagtgattctcc

SEQ ID NO: 125639 - DNA, 100 bp, Homo sapiens
cgcgtctctctgctgcggcgcggggaccgctgtgctctcgggaaaatactctgcataccttaaaacaacggcagctgacttcttacgttggaagtgttcg

SEQ ID NO: 125640 - DNA, 100 bp, Homo sapiens
cagggcaggagctcacttcccagtgcctgggctcccagagagccttcatgaaggaaggggacgtgaccttggacccggacaccgccaaccctgagctgat

SEQ ID NO: 125641 - DNA, 84 bp, Homo sapiens
gctggcagccgcggatctcaccgccgctcagggccctgggaggagcggggacactgaggacctctctccaaattggcctctcaa

SEQ ID NO: 125642 - DNA, 127 bp, Homo sapiens
agaaacggaaagaaaggaaggaacaagaggcctgtgttaagtcctgttgatgttaagtcctgttgagagcaccagggcccagatattacactgtcaaaactttacaagttaattgaagagtcttgtc

SEQ ID NO: 125643 - DNA, 101 bp, Homo sapiens
ggtgtatcagtacaaaggcatggggctgtccatgggcaccatgatctgtggctgggataagagaggccctggaatgatgagaagacagcagctgattacaa

SEQ ID NO: 125644 - DNA, 75 bp, Homo sapiens
ctgtttgacgtggacgggaccctcacgccggctcgccaggccgacttaacattacctatcccatgctgttcaaac

SEQ ID NO: 125645 - DNA, 97 bp, Homo sapiens
tcgactgaatccaggctgtttctatcgtttacgagtttactgcatcagtgatggaggacagagtgcggttgctccttgagggcaggacagttcttat

SEQ ID NO: 125646 - DNA, 96 bp, Homo sapiens
cgaagcccgcgcgtgatcccgctccgggactccatgttttcgttggccctgaaatgccttatcagtctgtccaccatcatccttttgggcttgatc

SEQ ID NO: 125647 - DNA, 74 bp, Homo sapiens
cacagcggcagctccagcccggcccggcagcgacatggaagattcactggatgaaagaaagataaaaggggtca

SEQ ID NO: 125648 - DNA, 100 bp, Homo sapiens
ccttctctcacaacctcagccagctctacttcacagcaggattcatcacagacgccaaggagcaagtcctcgccaacctcgccaacttcgcttatgaccc

SEQ ID NO: 125649 - DNA, 74 bp, Homo sapiens
tcggcagtcgcgaagcagcaaccatgaaagcagaagccactggagaaaaacggccaagaggcagacctaggaaa

SEQ ID NO: 125650 - DNA, 80 bp, Homo sapiens
tgagctgccggcattgccgggcaccctgctgcggagcagacgtgaagcacagacgcagtcttcagcaaggaagtgctggg

SEQ ID NO: 125651 - DNA, 83 bp, Homo sapiens
catccgagagcccggactggagggactactggcattcagtgatgtggtcatagaattctctccagaggagtgggcatgcctgg

SEQ ID NO: 125652 - DNA, 83 bp, Homo sapiens
gctttcctgagcggtggttcccatttccttatccatgccatcctaatgagtgtgaagtggtatttcactgtatttccctaatg

SEQ ID NO: 125653 - DNA, 125 bp, Homo sapiens
gctaaccacgaaagaggaatcgatgctcagcttttagttgcacttcctaaaggatgaccagtgtcccagtgaaggaacgagtgaaggtgtctcagaactggagactggggcgctgccgagagggg

SEQ ID NO: 125654 - DNA, 90 bp, Homo sapiens
ctttccggcatcagtgtggacattgaccccactggactgcagtcacagtggactcccaaggggcagctctgcttatgataatgtcaacaa

SEQ ID NO: 125655 - DNA, 100 bp, Homo sapiens
ccaggactgatgcagatgcccctcctccaccagaggactgggaggagcatgtcaacaggtgaatctggattgggaaagtcgacattaatcaactcattat

SEQ ID NO: 125656 - DNA, 82 bp, Homo sapiens
ttttggacctgaaacagaaattctggaacacctatatggtggtccgtactgagaagaacagtttgaacaaccgattcttacc

SEQ ID NO: 125657 - DNA, 89 bp, Homo sapiens
ttatcctaaaactggtgtaacaggttgcctgggcttctggttcctcttcagattacattgggagatatttacacacaacttaaaaatct

SEQ ID NO: 125658 - DNA, 80 bp, Homo sapiens
tctcacctgaggtgaaccttcgaccttggacttctcagcctccagaatgggagaaacacatctcatctttcctaaaaaag

SEQ ID NO: 125659 - DNA, 83 bp, Homo sapiens
gctgtgtggttgcaacggagataaattcccggaaccgcgattcggcgtgtcagggtggactccattatgctggtggaagaggg

SEQ ID NO: 125660 - DNA, 110 bp, Homo sapiens
atacatgaacttcaagactgtgatgctaatgtttttattgctctttatcagtctattttgggagaaaaggtaccagttatagctgaggtggtaccagtttaagaagtgag

SEQ ID NO: 125661 - DNA, 90 bp, Homo sapiens
cagacgaagacagtccctggatcaccgacagcacagacagaatccctgctaccataagtgaaaatggtgatcacctaagcacatggatga

SEQ ID NO: 125662 - DNA, 96 bp, Homo sapiens
tttctgcacaacgctggaaaatttgatgcccaggagtgtgaaaccaagattgcacaagagatagccagtctttcaaaagaggatgtttccaaagaa

SEQ ID NO: 125663 - DNA, 76 bp, Homo sapiens
ggttctgccttctggacaatctttccggcctaaagatattggaagacctaaggctgaagttgctgcagaatttcta

SEQ ID NO: 125664 - DNA, 87 bp, Homo sapiens
gagtatggctgcagaggatccatctgtcttagcaaggctgtcatcacattaacccagtatccactccagttgcacttcccacaccag

SEQ ID NO: 125665 - DNA, 100 bp, Homo sapiens
gctaaagtttgctcgaagccttcagtccgttgcagagatccaaaaggtaattctggcacttggagactatatgggagccacttgtcatgcctgcattggt

SEQ ID NO: 125666 - DNA, 100 bp, Homo sapiens
cggatctggacacccagcggtctgacatcgcgacgctgctcaaaacctcgctccggaaaggggacacctggtatctcagatgaagacatcatcaacatta

SEQ ID NO: 125667 - DNA, 82 bp, Homo sapiens
gttgaaccagctgtgggagaaggcccagcgaagctcaggccccggggcctccagcggcaccagcggagaccacggtgagctc

SEQ ID NO: 125668 - DNA, 100 bp, Homo sapiens
gcagcgctgtatcgtgtcgccggcagggaggcatagcgcctctctgatcttcctgcatggctcaggacccagatgatgtggtaccagttggccaaagaag

SEQ ID NO: 125669 - DNA, 98 bp, Homo sapiens
tcttcaaagcatttgttcagatcttcagtactggccagatggccgccaagaacgagtcatgtttgacaaaattacatctcgaatccagaagctttgtt

SEQ ID NO: 125670 - DNA, 73 bp, Homo sapiens
gctgcgaaagctgccaaaagtgacatgcaggtgggctgcaagctgagcctggtcttcctgcagtactgcatca

SEQ ID NO: 125671 - DNA, 82 bp, Homo sapiens
cgaagatgagaagaggttgttgttggagaagcaggctggcggaaacccttgccctgggcgctgcctatggcacagccaagag

SEQ ID NO: 125672 - DNA, 98 bp, Homo sapiens
ggaaatcccatcacctcagctaaccagaccgaagaagagaattggacggccgatggtggcctctcctaaccagagggacaaatcagctgcagagaaga

SEQ ID NO: 125673 - DNA, 75 bp, Homo sapiens
ggagcttccagaggaccggaacacttgcctttgagcgggtctacactgccaaatatggtccggaaaaagaacccc

SEQ ID NO: 125674 - DNA, 98 bp, Homo sapiens
atccctcaagactggtccacggagtgtatgaccacaaacagccatcaaggtgttgctctcttgccattcgtggatgagcgaaggctacgagctgccct

SEQ ID NO: 125675 - DNA, 82 bp, Homo sapiens
ttgctcaacttcctgatagatgtacactgaaaactggacattataacattaagtcaaaatgcagatcttcgtgaaaaccctt

SEQ ID NO: 125676 - DNA, 100 bp, Homo sapiens
atccgggaggtcaacgaggtcatccagtgaacagagtatctgccaagcccgggcttccgtgatggtctacgatgacaccagtaagaaatgggtaccaatc

SEQ ID NO: 125677 - DNA, 100 bp, Homo sapiens
agtttcaagcctgagtgtgaagattgaggttcagcaacatcagatgaccatgaatttgatccatcagctgacatgctggttcatgattttgatgatgaac

SEQ ID NO: 125678 - DNA, 90 bp, Homo sapiens
actggacattctaactcgcctgccagagagtgtggaaagactcacaggcgtgagcatctcccagaaccacatccctgtgtttagtcccgc

SEQ ID NO: 125679 - DNA, 75 bp, Homo sapiens
ctggtcccagaagatggcggaggcggggaaaatgcatccgatgcagatttatggctcctgaacagttgcactgta

SEQ ID NO: 125680 - DNA, 100 bp, Homo sapiens
cctcctgccagaactacttcctcatgattgtttcaggtgtggatgtggaagcagccaagcgggcagaagaggaattgctccttcatgacacgaggtgctg

SEQ ID NO: 125681 - DNA, 73 bp, Homo sapiens
gcgacaggacagttgtaaacggcatcatcgcaaccgtcgtggtcaggtgtaccttccggtttcccagcacggc

SEQ ID NO: 125682 - DNA, 80 bp, Homo sapiens
atcagacagaacagttaatcctcaatttaagcctgatctaacccctagaaacagatctacacacaatgagctggaaaaga

SEQ ID NO: 125683 - DNA, 82 bp, Homo sapiens
ggaccggcatgctggggcaggagggcagccgcgtgtcagccgcttacaaacacgcagatggcaagaagattgatggcaggag

SEQ ID NO: 125684 - DNA, 101 bp, Homo sapiens
ggaaggccgtgttgtttgtctacctgggactaggtgaggacgcttgagcggaagttagaagcaaaaatgatcaaggaggaaagcgactaccacgacctgga

SEQ ID NO: 125685 - DNA, 100 bp, Homo sapiens
gcgagtcgggctctggaggaaaagaaagactgggctggcttagatgaagatgaagatgcacatgtctgggaggataattgggatgatgacaatgtagagg

SEQ ID NO: 125686 - DNA, 98 bp, Homo sapiens
gcgggagcccgaggctgagactcaccggaggaagcggcgcgagcgccccgccatcgtcccggttctgccggagacttccatttggcctcaatgtgaaa

SEQ ID NO: 125687 - DNA, 50 bp, Homo sapiens
gacatatcttgtcatatgatagcgacatctagactaagagaaagaggctg

SEQ ID NO: 125688 - DNA, 100 bp, Homo sapiens
gacctctacctggagcatttgctgcagaagcgtagtcggccagagaaatgaaagctcattagcatctacactgaagacgctcctgttcttcacagcttta

SEQ ID NO: 125689 - DNA, 75 bp, Homo sapiens
ctcggctgcgggaaatcgggctgaagcgactgagtccgcgatggaggcgctgttcttgctggctggtgccccagg

SEQ ID NO: 125690 - DNA, 100 bp, Homo sapiens
gcaggactacgagtgcaggagccataatgtcgacctgccggagtcgaggattccagggtcgaacactcgatgtgctggtggacggacagccatgtgaccg

SEQ ID NO: 125691 - DNA, 114 bp, Homo sapiens
gccttgggcgggagctgagcaaagtgatcattgttgacaattcccctgcctcatacatcttccatcctgagaatgcattgcatgatatctcagaatcggaatttctaactgaag

SEQ ID NO: 125692 - DNA, 75 bp, Homo sapiens
ctgacaggggggcctggccgcgcagccgtggtgctcatcggggactcaggcgtgggcaagagcaacctgctgtcg

SEQ ID NO: 125693 - DNA, 88 bp, Homo sapiens
agggcggcggcggcggctgcggtcgaagaaggggacgccgacaagctcatgatggagcagtccaagaagtcctccctcatggtggccc

SEQ ID NO: 125694 - DNA, 74 bp, Homo sapiens
catgcttagcattcgagagaacaaaattaaacaactacctgctgaaattgacggaagtgaaaatgtgacaggat

SEQ ID NO: 125695 - DNA, 100 bp, Homo sapiens
ctctgaagcctcctcgccgccgtttctgagaaggctgaagtggagagatcgcctgagcccaggaggtcaaggctacagtgagccgtgactgcaccactgc

SEQ ID NO: 125696 - DNA, 100 bp, Homo sapiens
cttggcggcgcccggagccggcgtggcgctcatcgagggacgcccggcccaagtggctgacgtgatggcagacagggttccccgctgcccggtctgcacc

SEQ ID NO: 125697 - DNA, 90 bp, Homo sapiens
agtagagagataacaaaagctgctcagagtctcaatgaacttgatgaggaagccaaggcccagcagagctgagatgtgactgcagagccg

SEQ ID NO: 125698 - DNA, 100 bp, Homo sapiens
ttacaaaaaatgcaaccgctggttcagacagtactatactggcaattgctggagaagattttgcaattgttgcttctgatactcgattgagtgaagggtt

SEQ ID NO: 125699 - DNA, 96 bp, Homo sapiens
taacttttgatgatcatgatacagttgataaaattgttgccttgttagatgacttggataaagaactaaacaactacattatgcgatgtagagaat

SEQ ID NO: 125700 - DNA, 90 bp, Homo sapiens
aagcctcacttgctggtcctcaacaagatggacttggcggatcttacagagcagcaggctcttcgtcagattgggcagaggacgataagc

SEQ ID NO: 125701 - DNA, 50 bp, Homo sapiens
ggcagcatgggtcgggagtcacggtcaactttgtagtgtgccaactcttt

SEQ ID NO: 125702 - DNA, 100 bp, Homo sapiens
acaaggagggcatgatcaacctcgtcatgtcctacgcggacactcatgaggaccatgatacttccactgagaatacagacgagtccaaccatgaccctca

SEQ ID NO: 125703 - DNA, 98 bp, Homo sapiens
ttttgacgaaattgatggtctggctccagtacggtcaagcaggcaagatcagattcacagcatgttggcagataaattgaacatgactccagaagaag

SEQ ID NO: 125704 - DNA, 75 bp, Homo sapiens
acgcattgccgccggtcctgaccaccgtgaacggacagtcccccccaggtgagaagccctaccactgcaactggg

SEQ ID NO: 125705 - DNA, 100 bp, Homo sapiens
ggggatggctctgaaacagaaaccacctctgccatcctcgcctcagtcaaagaacaggttcagcagactgtacaggatctttttggcagagccccaagta

SEQ ID NO: 125706 - DNA, 75 bp, Homo sapiens
atcttcagtggattacctgaactgaaggatcctcatccccgaaattcctgtggagtacaatgtcttactcaatga

SEQ ID NO: 125707 - DNA, 100 bp, Homo sapiens
cacttcattggccacctacagaaacaaaatgtcaacaaattgatggcaaacggggattcagcgtccgatcctttggaacagggactcacgtgaagcttcc

SEQ ID NO: 125708 - DNA, 85 bp, Homo sapiens
ccaacatgggtgtctgggttttgactgcctaagagaagggctcctgctgaagctaccctttctggactccccccccagactccca

SEQ ID NO: 125709 - DNA, 75 bp, Homo sapiens
tagcatgaggaagagtcaggggcacagagagatggagagagacctagttaggtggttcatcagagtgtcgcacag

SEQ ID NO: 125710 - DNA, 83 bp, Homo sapiens
gagattccttgcagagacagctcaacacggcacttccacagattgttttacaaggacatgctacaagagtaactgctaaatct

SEQ ID NO: 125711 - DNA, 87 bp, Homo sapiens
tttaacctatgtcttacaaaggcccaaagagaagaagaaggaggttcctgctgtgccagaaacccttaagaaaaagcgaaggaattt

SEQ ID NO: 125712 - DNA, 76 bp, Homo sapiens
acgtgggcggtgggccccagccccacagaccagcccagcattcagagacggggtctcactatgttgcccaggctgg

SEQ ID NO: 125713 - DNA, 50 bp, Homo sapiens
ctgtcatgagaagtggcgatcaaaattggaaagctgtgtgaagagacaaa

SEQ ID NO: 125714 - DNA, 82 bp, Homo sapiens
ggagctgcagtcggcactgctactgcgaagacagctggcagtactatactggcaattgctggagaagattttgcaattgttg

SEQ ID NO: 125715 - DNA, 82 bp, Homo sapiens
agctggaggagtaccgcagggaggtggagaggaagcagaagggctctgaagttcgatcctttggtacagaagacagaccgac

SEQ ID NO: 125716 - DNA, 83 bp, Homo sapiens
ggaggaaaggtttacaagcaggccacgattgaatctctgaaggtggaatgaatcttacttgttgaatatcttctggttactag

SEQ ID NO: 125717 - DNA, 100 bp, Homo sapiens
actggtgctgatattaaaatctcaggcataaaatttgttcagcatgatgctgtagagggaatcttaagagacgaaaccagacagagggtcaagtttacag

SEQ ID NO: 125718 - DNA, 100 bp, Homo sapiens
gtcggcgctgcggggccgcgggggtcggcaggaattgatggcgagaaggagcacgccaatgccaagaagatcctgctggagatgggggagttctttcaga

SEQ ID NO: 125719 - DNA, 101 bp, Homo sapiens
gcccggcgccgccactgccgcagccaggagatggttcgggcctagcggagccgggactggaggtctctgtcactgcgcgggaagatgtgcccacctttggt

SEQ ID NO: 125720 - DNA, 95 bp, Homo sapiens
gtgcagccgaggtcttcgggaattccagcgagggcagtaccaagaagcaagagagacctatcttgatctggatagtaaagtgaggactttaaaaa

SEQ ID NO: 125721 - DNA, 75 bp, Homo sapiens
tgaggccgcggagcgccagctcaatgaagattctttctactaatccagatacttgttgaagtgctgactagtttc

SEQ ID NO: 125722 - DNA, 75 bp, Homo sapiens
caacgagtactgtgggcctggagccaagcccctcttcaggagtaaggcagctgacacacaagagttcaggaccaa

SEQ ID NO: 125723 - DNA, 75 bp, Homo sapiens
gttcttcatcctttacgagcacggcctcttgcgctacgccctggatgagatggaacctcggagagctgatagatc

SEQ ID NO: 125724 - DNA, 83 bp, Homo sapiens
cccagtgacgggtctggagtgcgtgggggaccggctgttggcgggattatatctgtccaagatgcgagtctggttttatcgag

SEQ ID NO: 125725 - DNA, 100 bp, Homo sapiens
ccgcatcaacaagatgttgtcctgtgctggggctgacaggttatcactgagtcctgaagtcctagatttgaccagtaactctctcaagagagatgtgtcc

SEQ ID NO: 125726 - DNA, 75 bp, Homo sapiens
aacggacgctaagcggggtaggggaagatcagcttgaacgggtctttttacgacttggccatgctgaaacagatg

SEQ ID NO: 125727 - DNA, 75 bp, Homo sapiens
gcaatatgtctattctaaggaccagctgcagactttctcagaggagggtcccgggattcttgagctgtgcccagc

SEQ ID NO: 125728 - DNA, 100 bp, Homo sapiens
ttaaaaaatttattaaaggaagcacacctaagctcccctcccacccggtcactccgtccagcaagcacgcagacagcaagcccgcgccgctgacgcccgc

SEQ ID NO: 125729 - DNA, 82 bp, Homo sapiens
gcccccggggcaagagcaggagcccggcaccccccgccgacaaggaggggacccagacatggagctgcgggaagaagcctgg

SEQ ID NO: 125730 - DNA, 100 bp, Homo sapiens
ggcggccgaagacactgcgactccggagacagcccaaatatcctcggaagagcgctcccaggagaaacaaaacaccttccaccatgaccacctcagcaag

SEQ ID NO: 125731 - DNA, 101 bp, Homo sapiens
taaagtgaaacattcagcatccctgtctggtatgccttctcggaaacccagcgtttgctggcagaaccagttcctggcatcaaagccgaaccagatgagag

SEQ ID NO: 125732 - DNA, 73 bp, Homo sapiens
gaagcgactttggtgagactctgggcctggagattgtgaacccacaggcggcagagaagaaggtggctgaggc

SEQ ID NO: 125733 - DNA, 90 bp, Homo sapiens
ggaaattgaagataaaatgaaagggttcagcttcaaagaagacactttgctgttgatagctgaggaggagatgttaaagtaacccatctt

SEQ ID NO: 125734 - DNA, 74 bp, Homo sapiens
cagctccgctctcttcggctgccccaatccccggcagctctctcaggtgtgatgaatgcagactctgctaccat

SEQ ID NO: 125735 - DNA, 51 bp, Homo sapiens
gcagagatcaatggaaccatgaacggtttggagaacattgattaaggaagc

SEQ ID NO: 125736 - DNA, 100 bp, Homo sapiens
tccgtgtctctggattcaagtcccaggagtcctgaccagagagcagcctacaaggagaagatgaaggagctgtcggtgctgtcgctcatctgctcctgct

SEQ ID NO: 125737 - DNA, 100 bp, Homo sapiens
gtggatgccaagaccaaattagaggctcaggtcacattcactaaatgtctatatgcacaattggtgcaacaaaggtttgtgccagaccggcggagtggat

SEQ ID NO: 125738 - DNA, 74 bp, Homo sapiens
tggctccgtctgttggggggcgaacacgccgcggtcctcgtcgtggacactgatgaaattcaagttaactatcc

SEQ ID NO: 125739 - DNA, 75 bp, Homo sapiens
tacacacagcccactccaatacagtgccaggctcggcatggctgcccggggccacagctggccctgcctgcagca

SEQ ID NO: 125740 - DNA, 75 bp, Homo sapiens
ggaggaccttggagtccagcactctgcatgtgactccccgcagcctggacagagagctgcaaacatgattccggc

SEQ ID NO: 125741 - DNA, 100 bp, Homo sapiens
tcacgccgaggcccattttccagacgaccacgacgaggccggggtcacccctgggcgctgcctatggcacagccaagagcggtaccggcattgcggccat

SEQ ID NO: 125742 - DNA, 100 bp, Homo sapiens
tgagccttgagcagaggaacctatacaaagaagtgatgctggaaaatctcaggaatctggtctcattgggaaccctaaggactctgcaatatgaataatt

SEQ ID NO: 125743 - DNA, 83 bp, Homo sapiens
tggggatcgctacggaccttaaaatacccgcaacagccccttcgtcccaagtcatcatcagatttgaaatatttaaagtggat

SEQ ID NO: 125744 - DNA, 75 bp, Homo sapiens
gacttcccagccttcagaactgaatgtggggtttccatgatcgggacttgatgctgcggaaagctttgtatgcac

SEQ ID NO: 125745 - DNA, 74 bp, Homo sapiens
gccacagacagcagcgcagtaccaccttccagagatgctttcatgagaaggacaagaagccatattgccgaaag

SEQ ID NO: 125746 - DNA, 83 bp, Homo sapiens
cctggtgctgctgatggaggcggtggccgtgctcgtcgggcccccttcgggagcaattctgtggtgttcttggtcacacattt

SEQ ID NO: 125747 - DNA, 98 bp, Homo sapiens
ccgggcgctctcgcttcagtcagtcgggccgcgccgcgcctcagctctgcacttttcaggattagaagaggctgtgtatagaaacatacaagcttgca

SEQ ID NO: 125748 - DNA, 100 bp, Homo sapiens
gtggcacattttacagaataagtcagatgactttctgttgaatgagagccacaagtctgaatttatagagctgaggaagtggctgaaagctaggaagttt

SEQ ID NO: 125749 - DNA, 95 bp, Homo sapiens
gaggacctgcaccgccaagccaagctcaacctcaaatcagtactgagggcacacggaccctgactactcggctgcctatgtcgtcatagaaactg

SEQ ID NO: 125750 - DNA, 83 bp, Homo sapiens
gtcggcgcctcattcgggtggagctgagccggagacagcccgagcgggaagaagttccgcagcaagccgcagctggcgcgcta

SEQ ID NO: 125751 - DNA, 75 bp, Homo sapiens
tggagagggagaagagcattgagatcgagaacctgcagaccaggcacttccgttccggcgcccctccggtcatca

SEQ ID NO: 125752 - DNA, 98 bp, Homo sapiens
gtgggattttgggactcgcctttgccctggcaaacactggaatcctactttttctggtaacgccatcctctgaaaatcctaatggtgctacttctagt

SEQ ID NO: 125753 - DNA, 83 bp, Homo sapiens
cgaagaccagccagaccatggagctcgcccccaacttccagggctatgactttgcagccgtcctggagtggttcgcggagcgt

SEQ ID NO: 125754 - DNA, 100 bp, Homo sapiens
ctcagatgaccggcaaattgtggacactccaccgcatgtagcagctgggctgaagaatgagtccctggaacgccagatgcgtgaaatggaagagaacttt

SEQ ID NO: 125755 - DNA, 100 bp, Homo sapiens
ggtgtgagctgcctgaaaatgcactcggatgccgccgctgtcacctccacctcagatatatgacaagcagttggatgaaagagaacacacaattgaagaa

SEQ ID NO: 125756 - DNA, 75 bp, Homo sapiens
actgatgaggatcagcccatgtttcagctcctggcatcagctctattcaaatctggttcagattttacagctctg

SEQ ID NO: 125757 - DNA, 100 bp, Homo sapiens
aaacagtagaagattccataattgaggatgaagatgatgaagccgaggtagaagaagatgaacccacagatttggcccaagtctgttttggtggtctgag

SEQ ID NO: 125758 - DNA, 75 bp, Homo sapiens
ctcatttccatcatttcctgctaagccaaacagagaaggaaattggatacactcacatgaaaatagcggaaggag

SEQ ID NO: 125759 - DNA, 98 bp, Homo sapiens
atctcagcaatgggcactaccggggcattaaaggagtcttcaggggacccctgtgcaagaacggatctccctctccgagtatcaaagttagctggctg

SEQ ID NO: 125760 - DNA, 83 bp, Homo sapiens
cttctcggcgctgccgtctctggaggagtactggcaacaggtgagccagccatgagagggtatcttgtggccatattcctgag

SEQ ID NO: 125761 - DNA, 100 bp, Homo sapiens
ttgttgcggaataattccatccaaaaccggcagctgttagccgagcaactccagatgaagatgagtgagcgggccgcctcgctgagcaccatggtgcccc

SEQ ID NO: 125762 - DNA, 101 bp, Homo sapiens
gtcatcacgcagaaggggtgaaagagactcggtgacagatacagtctcaaaccatgaattatgtgggacagctggctgggcaggtgattgtcactgtgaag

SEQ ID NO: 125763 - DNA, 90 bp, Homo sapiens
gtgcaggtgcaggcctctcagctttcctccctgccacaggtctgtgggctgcatcatgggggagctgttgaatgggtccccccttttccc

SEQ ID NO: 125764 - DNA, 119 bp, Homo sapiens
ggctgacctcgctgtacgccgagcacccaggcgactgcctcatcttcaaggtgcccgtggttgacacgagctgtgtccccagctgttcccgtctacaatggcatcatcttcctctttgt

SEQ ID NO: 125765 - DNA, 101 bp, Homo sapiens
cgctccagaagcttcactttgtttttcccctacatcctgctgctctttgcgatcctcctgtacctgcccccgctgttctggcgtttcgcagctgctcctca

SEQ ID NO: 125766 - DNA, 100 bp, Homo sapiens
gcatgttgagtgagcaagtgaagaccaatattcaacaggcagcataagatgcacatttttctgctctggagccgggaatgaaatattcttgagttcttac

SEQ ID NO: 125767 - DNA, 76 bp, Homo sapiens
aggagtttttgttcagggaccagcggaacgaggctttctgtcgttaatagggctacggtgttcagtatgattactt

SEQ ID NO: 125768 - DNA, 100 bp, Homo sapiens
tgggcgtcaacgccgtatccagcgactacgcggccgcggagacctacctgcggcgtcggcagctgctgctccgaggagccaagccgccatggcctaccac

SEQ ID NO: 125769 - DNA, 75 bp, Homo sapiens
gcatgatccagaggctgagatctgagatcgaccatgtcaagaagcagactcagtggagaaggagttggaccagtc

SEQ ID NO: 125770 - DNA, 75 bp, Homo sapiens
aacttgggaataaaaagtattgtaacagctgaagtgtcttcaatgcctgcttttccttgtagaaaaagaagacat

SEQ ID NO: 125771 - DNA, 89 bp, Homo sapiens
aggggttgttttataaactgcctggccgaatcagccttttcacgctcaaggtccagcaccatgtgctaggtcactcccagcgcgaggcc

SEQ ID NO: 125772 - DNA, 100 bp, Homo sapiens
catgaaaacccgcagtggcatgcaggaactagaggctgctatccagccagatactagcctggtgtcagtcatgactgtgaacaatgagattggagtgaag

SEQ ID NO: 125773 - DNA, 133 bp, Homo sapiens
ggagaatgtgagaaaagggggaaaatgcccaggaggaagcaggagcagcccaagcgccttccctcacaaatgcttcggttacccacagtctttcgccagatgagaccggtgtccagggtactggctcctcatc

SEQ ID NO: 125774 - DNA, 75 bp, Homo sapiens
gaatccccttcaccagcaccgaagcctagaaaagtagagttatctgaatcggatgttcagcccacaagagcttac

SEQ ID NO: 125775 - DNA, 82 bp, Homo sapiens
caaggagctaaagcagcgtgcgttcagccctgggatgaggaaaatgaggcccaaagaagtgatgccacttggttaaggtccc

SEQ ID NO: 125776 - DNA, 100 bp, Homo sapiens
ctgatttgcaagatctggtcaaatttcagccatcagcaagtctgtaactggttcatcaacgcccgccgcaggctcctccctgacatgctgagaaaggatg

SEQ ID NO: 125777 - DNA, 82 bp, Homo sapiens
caaagtaaatgctgtcttttcccaaaagacaggctcttcacctgaaggtttgaagactgcttcattctgcctctagtaccag

SEQ ID NO: 125778 - DNA, 96 bp, Homo sapiens
tctctggaaagtacgaggagaatcctgggtttagccattgagattgtgccttataacctgcctttgcctgggggagtggtgcctcgcatgctgata

SEQ ID NO: 125779 - DNA, 96 bp, Homo sapiens
cagagggcgggggtcctcgccgggaccctcctgtgggcccaggggagcaggacatcgagactttacatggctctgttcacgtcacgctgtgtggga

SEQ ID NO: 125780 - DNA, 98 bp, Homo sapiens
gtctgactatttctgaacaacaagcagagttgattcttcaaagtatgaagtgtaacagaacagactttaccacctgaaactgctgcttcaagttcaga

SEQ ID NO: 125781 - DNA, 100 bp, Homo sapiens
taaaggaacagccttccagcccggccccagtgaacggctgaagccgacgtagcttctctgaacagacgcatccagctggttgaggaagagttggatcgtg

SEQ ID NO: 125782 - DNA, 90 bp, Homo sapiens
tggagccagaacaggcaaatccccaggcatgatgcggcagcttaacatcaatggagctctgtatgtggattgtttgctacatgaggagaa

SEQ ID NO: 125783 - DNA, 75 bp, Homo sapiens
cttccaacaccagtggaagatgatcacatcccagatgttggagtccggggtgacctggtctcagtgaagaaatct

SEQ ID NO: 125784 - DNA, 83 bp, Homo sapiens
cacctacgtcccgctgccgtcgccgccgccaccatgcccaagagaaagggccatgatccaaaggaaccagagcagttgagaaa

SEQ ID NO: 125785 - DNA, 50 bp, Homo sapiens
gccatttagtaacttctttgcaagggactttgaatccaaagcaaaccatc

SEQ ID NO: 125786 - DNA, 75 bp, Homo sapiens
tttggctttgcctttctggacacagaagtatttgtgacagattctacaagggggttgctcctctctggatgagac

SEQ ID NO: 125787 - DNA, 100 bp, Homo sapiens
ggacaagctggggcaacctggacgagctggggcaacctgatctcggctgtcggagtgggtgtcctcaagaaaggacgtggatgctgcctacctgaacaag

SEQ ID NO: 125788 - DNA, 100 bp, Homo sapiens
ggaccgtccacccctccgcgctggcggtgtggacgcggaactcagcggagaaacgcgattgaggccagtccctgagacgaataggaccttgtccctggat

SEQ ID NO: 125789 - DNA, 88 bp, Homo sapiens
atcgatattttgtcgaagaaactgtggaagtcattaggaacaatggtgcaaggcaaatgttctgaaaaagactctgcatgggaatggc

SEQ ID NO: 125790 - DNA, 90 bp, Homo sapiens
cagattggtggtgaattcagcaacactcctgaccaagcccctgagcacatcagcaaacctccagggtcgtatagacctccccctcctatg

SEQ ID NO: 125791 - DNA, 75 bp, Homo sapiens
gacggattcatttagagctgcggaacaggacgccctctgatgcatggctctgtgagcgctgatgaggctgcccgc

SEQ ID NO: 125792 - DNA, 75 bp, Homo sapiens
acccagcatttcatccctcgtcgaaaggattggattggcatctttagaacatccagctctgtcacccaagctgca

SEQ ID NO: 125793 - DNA, 75 bp, Homo sapiens
ctccaactgtgggaactctttccagcttgtgtctgatttcctcctctgatgctcctcttcagcctttggtatcct

SEQ ID NO: 125794 - DNA, 73 bp, Homo sapiens
gctcgtcagactccagcagccaagatggtgaagcagatcgagagcaagtggccaacagtgttgcaaacaggaa

SEQ ID NO: 125795 - DNA, 100 bp, Homo sapiens
cgtgaccagccggctgggctcggtattccccttcctgctagtcctggtggatctgcagtacgaagtactgtaagattgatgttaaaggcatggtgttcac

SEQ ID NO: 125796 - DNA, 82 bp, Homo sapiens
gacaagaacttcacgcgggagcagaaactatgttccaacttcctgtcaacaatcttggcagtttaagaaaagcccggaaaac

SEQ ID NO: 125797 - DNA, 100 bp, Homo sapiens
ttaccagctcacctctcaccgcgcatgtttggaggacaaggtggagcagacacctcgcagtcaacaagacccggcaggaccaggactccccgcacagtct

SEQ ID NO: 125798 - DNA, 100 bp, Homo sapiens
tccatcctggagacagtcactgctgtggctgcgggaaagcctctctcttgcccaaaccacgatgggaatatcactttgggaagcagtgacatccaacctg

SEQ ID NO: 125799 - DNA, 90 bp, Homo sapiens
ggagattgtgtctcccttgtccatgcagtatggccgccaagaacgagtcatgtttgacaaaattacatctcgaatccagaagctttgtta

SEQ ID NO: 125800 - DNA, 100 bp, Homo sapiens
ggcttgctcaaagcccggcaggagaggaggctggccgagatcaaccgggtctccagaaatgctttgggttcatctttcattgctgcaaggaacttccatg

SEQ ID NO: 125801 - DNA, 100 bp, Homo sapiens
gaactaagccgcaaagaaatcttcagtggattacctgaactgaaaaacccaaacctttcgggtgaccgtgatcttgttcgtctttttttgcgatcaccag

SEQ ID NO: 125802 - DNA, 107 bp, Homo sapiens
agcctgtccagtttggaactgttcctctcctgtgcacagaaacaagtctctacaaggaagataacggactgtaaaattctataaagcaaagctacacatcacttgac

SEQ ID NO: 125803 - DNA, 82 bp, Homo sapiens
ggtgacaagaacggcggtacccgggtggttaaacttcgcaaaatgaatttaattccttttcgaccttcaatccagttccaag

SEQ ID NO: 125804 - DNA, 100 bp, Homo sapiens
cttaaaataattgggcagaagagaagcagtgaaggagtgcagaggcatcacctgaaagaggcaccttccactagcaacagtctccccaggcacaacacag

SEQ ID NO: 125805 - DNA, 82 bp, Homo sapiens
atcatgtctgcgagccaggattcccgaaagaagcttccggttctgaggtcctggaggtgccatttccctctctgttgaagca

SEQ ID NO: 125806 - DNA, 100 bp, Homo sapiens
tgactgtagctgccttgcccatgctgaagcagagcaatggaagcattgttgtcgtctcctctctggctggacaggcgacactaacaggtgaagatctcgg

SEQ ID NO: 125807 - DNA, 100 bp, Homo sapiens
ccggcttccagatcaacctcaacccgctcaaggagccactcggcttcatcaaggtcctcgagtggccccattgacaaaccttcagattctctcagtatag

SEQ ID NO: 125808 - DNA, 104 bp, Homo sapiens
ggctctgggatttcaccgtaacaaccctcgcattgaccttcctcttccaagctagagaggtcagaggagtagagacggggtttcaccatgttagccaggatggt

SEQ ID NO: 125809 - DNA, 75 bp, Homo sapiens
atatgctaagaaagaatcttgtcactttagccactgctactacaggttatgatgtgattgctcaagcccaatctg

SEQ ID NO: 125810 - DNA, 75 bp, Homo sapiens
aagtgcagctgcctcagttcttagcgcagagtcattcttatagaagagcatcagaggaagataaaaaagaatcct

SEQ ID NO: 125811 - DNA, 75 bp, Homo sapiens
tcatgctggccaagaagatcatcattaaggacggaggcacgacagaagccctgggggatgcggaggaagatgagg

SEQ ID NO: 125812 - DNA, 83 bp, Homo sapiens
cgggacggacggtgatggtggtcgccgcggcggcgtgtgcgcccctcagatgtcaagccctccaacatcctagtcaactcccg

SEQ ID NO: 125813 - DNA, 97 bp, Homo sapiens
gtgttttggttttgatatggattatacccttgctggcactacctggcagcaccatctaaacctgtatcatctgctgtggtcccagttactcaggagg

SEQ ID NO: 125814 - DNA, 100 bp, Homo sapiens
ccacctggtttcaagaccctacccgcttcactggcaccatgctggcctcggaccccgccctgcgcagcaagctggtccgcctgtcctccgactctttcgc

SEQ ID NO: 125815 - DNA, 90 bp, Homo sapiens
acagctagaattggaaaaccttacagctgcgctgaacatcttaaagttgctgtctgagttggaccaacaaagtacagagatgccaagaac

SEQ ID NO: 125816 - DNA, 100 bp, Homo sapiens
gggacgcggcggcggcgttgacaatggttatcctacgcggagagccaggtaccaatgggtgcgctgcaatccagacagtaattctgcaaactgccttgaa

SEQ ID NO: 125817 - DNA, 100 bp, Homo sapiens
gctatggtgctgagtttcctggtagagccggccgagctgaggcggtcgcggccatgaagactttgagaatcactacaagaaaaactccttgtggtgaagg

SEQ ID NO: 125818 - DNA, 75 bp, Homo sapiens
tgcaaaagtggtgcgcataggcaagtcatttatgaaggagtctggccgggaccttcaacagtatcagagtcaggc

SEQ ID NO: 125819 - DNA, 50 bp, Homo sapiens
ccaagggctccacacaccaagaccaaggttaacacagaaatctgcctcct

SEQ ID NO: 125820 - DNA, 100 bp, Homo sapiens
ggaagccagagaccaacgagatcctgcacatgtctttatgtccctaagtgccagctctcccctaaaagttccagctcatctcgcctggcctccccctgag

SEQ ID NO: 125821 - DNA, 97 bp, Homo sapiens
aaaaactgccagtatcttctaaacctggtaaaatttcacggcaggatcctgttacatacatttcagaaacaggttgcaccattactcagacttctaa

SEQ ID NO: 125822 - DNA, 100 bp, Homo sapiens
ccaccacccacgttacctacttcaggggatgtttcagcagcccctgagaaggaagaggaggaagctgagggcccgctgagggcgcaggacctgagggagt

SEQ ID NO: 125823 - DNA, 80 bp, Homo sapiens
gcaccggctggctgaggaaatcgcctcccgagaagaagttgaggcgctatacctcctgccccccgaggtctgcagtctcc

SEQ ID NO: 125824 - DNA, 75 bp, Homo sapiens
atgccgctcctaagcctgcacagccgcggcggcagcagcagtgagaggtccggcctctttggcctacccccgttg

SEQ ID NO: 125825 - DNA, 75 bp, Homo sapiens
ctttgatttgtttattgagtgccagcccggttcccggacagatgtccagctcgccgctgtccaagaaacgtcgcg

SEQ ID NO: 125826 - DNA, 100 bp, Homo sapiens
gaaagttctcttcaccaaggagactgcaggctacctcaggggccgtccccaggacactgtccggatcttccctccctggagtgagctgagtcgacagaaa

SEQ ID NO: 125827 - DNA, 75 bp, Homo sapiens
gggactctgcacactcttcggcctgacgcccaccctcaatggcggttcctggtccagaactttacacagaaaagg

SEQ ID NO: 125828 - DNA, 100 bp, Homo sapiens
cgcgctcagtgcggctgcgccggccggtagctgcagctggagcagtggcgtttggaggagactcgtgacaaccatgagtggaaaaaactaattatggttc

SEQ ID NO: 125829 - DNA, 100 bp, Homo sapiens
ctcagcccgggcaccctccaggagggtgtggatgtggaagcagccaagcgggcagaagaggaattgctccttcatgacacgaggtgctggctgaatgggg

SEQ ID NO: 125830 - DNA, 75 bp, Homo sapiens
ccctgatgaattcaatcaattctttgtgactcctcgatcttcagttgagctgagatctgtatctgtggacctgaa

SEQ ID NO: 125831 - DNA, 100 bp, Homo sapiens
tatgtcagccaaagctactcctactcatctattttgaataaatcagaaactgctgcggttggatttctcacgatgtccagtgttatctccatgtctgccc

SEQ ID NO: 125832 - DNA, 74 bp, Homo sapiens
tcatattctctgacctggactacatggggctgaaggtgatgtggccgccctcaaccgacgcatccagctcgttg

SEQ ID NO: 125833 - DNA, 82 bp, Homo sapiens
gagcagcgccagcggccgagcgggcggcttcctggcctgggcgctccggtggcggcggagcatcatggcagaacaggatgtg

SEQ ID NO: 125834 - DNA, 100 bp, Homo sapiens
taagttggtgatcattgaaggagacttggaacgcacagaggaacgagctgagctggcagagtcactggatctcgctcttatctcccaggttggagtgcag

SEQ ID NO: 125835 - DNA, 96 bp, Homo sapiens
ctggagagatcattgatacaggatctgattatgaagatcaggtctataacttgacccaggagttcttccggcacgataaaccagtcaatgctgaaa

SEQ ID NO: 125836 - DNA, 75 bp, Homo sapiens
acgtgcagacatctacaaccttcgatctcctgacgagtggctgactgttcttgggatgaaacaataaagatctat

SEQ ID NO: 125837 - DNA, 80 bp, Homo sapiens
gcggcagctgcagtgacatgtccagcatgaatcccgaatagtggtataagttgaaatccaaaccaggaaagaaggacaag

SEQ ID NO: 125838 - DNA, 82 bp, Homo sapiens
caagaaggcaacgacgttccatctgtggaaggacctaccaaccagttgtcgagatgtccacagaaggaggatttggtggtac

SEQ ID NO: 125839 - DNA, 97 bp, Homo sapiens
aagccaggctttacttccacctgggaatctggccagagaagctgaaccttattcacagtgaaatcagtaatttagccggctttgaggtggaggccat

SEQ ID NO: 125840 - DNA, 82 bp, Homo sapiens
cgcccagggaaggcatttccagcccgcccacccaggctgctttcacagaggaaggcatttgctggctttcccaaggcaagaa

SEQ ID NO: 125841 - DNA, 100 bp, Homo sapiens
ctggatggcagatggggggaccccggtacggacctgtgcaggtgaggacaggccagcaagtctggaaaagtttgaaattccagtaaaaattcgtttgagt

SEQ ID NO: 125842 - DNA, 90 bp, Homo sapiens
ccgcttctaagcgtgtctgatcctttcattcctcttcaagtacctgatgcaccaggaggaaatgagtctcaaccagacagccaggaagac

SEQ ID NO: 125843 - DNA, 82 bp, Homo sapiens
cagagaccttgagggatatctttcttcactcctcttcacttcttcaggaagccctaagtaatctaactgcattgaccagtga

SEQ ID NO: 125844 - DNA, 82 bp, Homo sapiens
aaccaaaggcaccggccttgatgaggcaatggaatgggtgttgatgatgccttctatacattagttcgagaaattcgaaaac

SEQ ID NO: 125845 - DNA, 90 bp, Homo sapiens
cccccacccgggctcggcgggggagcgactcatggagctgccgtaagtcaccaccaagtaagcgaagaaaattagagaaaccgagaaaac

SEQ ID NO: 125846 - DNA, 100 bp, Homo sapiens
tccgagcggcggctccggggcagctccggcgggcgtatgacatcgttggacactctggagatggctacaacattggtctggttccaatgaacaaaatccc

SEQ ID NO: 125847 - DNA, 74 bp, Homo sapiens
tggacgccaaccagctccgcgagctgcccgaggtaaaatctgtaaaaactgggtcagttttttggacaatgtgc

SEQ ID NO: 125848 - DNA, 100 bp, Homo sapiens
gcgggggtgctgcagaggacacgaggcggcgggctggagacatggaccgcggcgagcaaggggagctatccagtttgggaagatttcataaacaaagcag

SEQ ID NO: 125849 - DNA, 100 bp, Homo sapiens
cccgaggcggccgccgctgcaccttcaccgcgtacccgggacccgcccgcccgcgggagtgtgttttatggaccatgtgctgctatgtatgcctgaagaa

SEQ ID NO: 125850 - DNA, 75 bp, Homo sapiens
cgtggagagcgactcagggacaaaatgctcagagcccgggcgctgtggaagagattctagaccgggagaacaagc

SEQ ID NO: 125851 - DNA, 50 bp, Homo sapiens
agtgcggaagaggatttacaaggagctataaccttcaacaactagtactg

SEQ ID NO: 125852 - DNA, 95 bp, Homo sapiens
gtgggaagcatgtcgtctttatcgctcaggcctgtggaggctcaatccagaccagtgtgaatgctctgtcagcagatgtgctgggtcgatgccag

SEQ ID NO: 125853 - DNA, 105 bp, Homo sapiens
ccacccaccggcccaccctacatttagcgcatcatgtgatccgggtactccaaagattcaggtttactcacgtcatccagcagagaatggaaagtcaaatttcct

SEQ ID NO: 125854 - DNA, 129 bp, Homo sapiens
ggagaaaccccgggtccggcgagaggggctgtgacagtcggagtcccaagctgcggttcggctgctgccgagcttcctgcctgacacagctcacttcaagaagtgcacaatgtcagaacgtggaattaa

SEQ ID NO: 125855 - DNA, 89 bp, Homo sapiens
atcgcgcacacacccggagtggccgcagatctgagccacatcgagaccaaagccgctgtgaaaggattcactccttctccagttgcaca

SEQ ID NO: 125856 - DNA, 80 bp, Homo sapiens
ggcacccagacaggtggcgaaggcagaggaaagtcccgggcccagagcccggccagcaggagcagttggtcttcggcagc

SEQ ID NO: 125857 - DNA, 46 bp, Homo sapiens
tccagccgaaggagaaggggggacttggatgttgtgggtgatggta

SEQ ID NO: 125858 - DNA, 100 bp, Homo sapiens
tctcgctctgcctctccctctgcctctgcctctgcctggccgcggctctgggaagtgcgcagtccggaggtatttaactgaaaggaatatctgcttcact

SEQ ID NO: 125859 - DNA, 97 bp, Homo sapiens
ggactggaagtcacactgcggcgctgaggatcctgtggaggagaccatcgcagcccgcagtccaccgggatcagagcttcacttaccagtataagat

SEQ ID NO: 125860 - DNA, 75 bp, Homo sapiens
ctcttttgtctgcccctattgtaagtgcagatggaacacaacagttgcagatctgatctcttctgaacacctcat

SEQ ID NO: 125861 - DNA, 90 bp, Homo sapiens
ccgagtttgcgactcgcggaccggcgtccccggcgcgaagaggctggactcggattcgttgcctgagagacacctatggctgccgatgaa

SEQ ID NO: 125862 - DNA, 97 bp, Homo sapiens
tgctggctgcaagaagatctttgggagcctggcatttctgccggagagctttgatgggtgaggaaaatagcagctgaatactatgacaacctccctc

SEQ ID NO: 125863 - DNA, 90 bp, Homo sapiens
ctgaactcaggacttggcaattggaaaatggatataccttatttgattatgatgttggactgaatgatataattcagctgctagttcgcc

SEQ ID NO: 125864 - DNA, 100 bp, Homo sapiens
ttttccccaggcaaggattccggagagaggatcaggtgttttcaggttaaccgtcagacggtcctaaaatctctacacttgccaaaaaacaacagtcttt

SEQ ID NO: 125865 - DNA, 82 bp, Homo sapiens
ccttgagtcagtgcgccgctctccagcccgcttgaacgtttaaaattggtggtgaatggtggacatggatcgattataaccg

SEQ ID NO: 125866 - DNA, 83 bp, Homo sapiens
tggctgggggaaccactatgatcacttccgacttcgactccttaccttaaaagatgctggagtcatatgtaactccaatttta

SEQ ID NO: 125867 - DNA, 98 bp, Homo sapiens
attacaatttgactgaagaacagaaggcgatcaaggccaagtatccgccagtcaataggaagtacgagtgattcgctaaatattgtaatggatcaagg

SEQ ID NO: 125868 - DNA, 101 bp, Homo sapiens
aatgaacatttggaggatgaaaacttccaaacatctacaactcctcagtttctacagcagtataatcactacaaatccaatgtggagattttcaaattgca

SEQ ID NO: 125869 - DNA, 100 bp, Homo sapiens
cagcttcagctccagctccgctctcttcggctgccccaatccccggcagctctctcaggttccagcaacagatagaaatgctttaagttcactctgggga

SEQ ID NO: 125870 - DNA, 100 bp, Homo sapiens
aaactcttcaacactgttattgtaaacaaagccaccagagaaacggcggagaacaattgaggatttcaacaaattctgcagttttgttttggcatatgct

SEQ ID NO: 125871 - DNA, 98 bp, Homo sapiens
ttcctcaaatgcaaccagaactgcctgaagaatgcggggaatcccagagacatgcgccgcttccagaaaccagcctggacaccaagtctgtgtcagaa

SEQ ID NO: 125872 - DNA, 100 bp, Homo sapiens
aaattagtttggcgctatggatttcaatccctccgtatgcacatgtgggtagaggacgtgttagacaagttcatgagcagcagccgctcttctaaaacat

SEQ ID NO: 125873 - DNA, 101 bp, Homo sapiens
tgtgtccccttcctgcatgtggcagaaagttgcaaaggaggcaagtgaggcctatctggttggcctttttgaagacaccaacctgtgtgctatccatgcca

SEQ ID NO: 125874 - DNA, 100 bp, Homo sapiens
ctgccttgtcagtggagaagaccagcaagcgtggcggcaagatcatcgtgggcgacgccacagagaaagggcctgtcgggaagcctctggtttcttttca

SEQ ID NO: 125875 - DNA, 49 bp, Homo sapiens
ggctaaatggctccctgattcatggttaatgttcgtgaagaaattgaag

SEQ ID NO: 125876 - DNA, 98 bp, Homo sapiens
cgccatcgagcgcccctccgagctggggttggacgctgccagtttgcacagcagcagcaggaacgaatgcaggaatttgggaactgagctgtgcaagt

SEQ ID NO: 125877 - DNA, 51 bp, Homo sapiens
ctacgccaacagatatgggaggataacggcaaaagcttctatcatttttgt

SEQ ID NO: 125878 - DNA, 74 bp, Homo sapiens
gaggattcagatgactacgatggagaagaatatgatgtggaagcacatggtgatattgaggcatggagtgacac

SEQ ID NO: 125879 - DNA, 88 bp, Homo sapiens
gacgagctgatggcttcgctgtcggatttcaaggttgacaaggtcacaggcaggtttaatggccagtttaaaacttatgctatctgcg

SEQ ID NO: 125880 - DNA, 83 bp, Homo sapiens
agctcattaaggacggctctctgctcattggggcgttgaggacggacaaggcaaaatctcagcaagttcggacctctagtaca

SEQ ID NO: 125881 - DNA, 95 bp, Homo sapiens
tggaagtacgggcagttgcagtgttggagctaaagtgattttacaacgagatgctgctctccatagggatgctcatgctgtcagccacacaagtc

SEQ ID NO: 125882 - DNA, 82 bp, Homo sapiens
tgtgcagaccgggcgagcagagtaagaagcagtagaccaaattttggtacaattgaatcacactgcagcagaattcaccctg

SEQ ID NO: 125883 - DNA, 83 bp, Homo sapiens
ggaaccctggggactacgacgtccctcaaaccttgcttctaggagataaaaagtatctcgcacctgaggtgcttcataagcag

SEQ ID NO: 125884 - DNA, 100 bp, Homo sapiens
cttttctgaaacagccaaatgtcaggccatgaagaagaatgttcttcggaaagtgcaacatcaagatgctttgcagatctctgatgtggttatggcctcc

SEQ ID NO: 125885 - DNA, 50 bp, Homo sapiens
tggttgacccgggcagcggagagaggagcagtggcatgtgtataatccag

SEQ ID NO: 125886 - DNA, 80 bp, Homo sapiens
ccagtgcagcgcggagtgggcgatgccagcgtgccagcatttgacattgtgcagcaaagaaatggttatggagaagccca

SEQ ID NO: 125887 - DNA, 99 bp, Homo sapiens
ggatgaagattcaccaaataagctatatactttggttacctatgtacctgttaccactttcaaaaagtatgctcaggtaatcaaaatgttgggaaatgg

SEQ ID NO: 125888 - DNA, 74 bp, Homo sapiens
aagacatccacagcagtgtttctcgggttggaaaagccattgataaggcctcccagtagcattggatgcaggaa

SEQ ID NO: 125889 - DNA, 100 bp, Homo sapiens
gccaagccggggggaccagaggcccccgaaactgaagctccacagggcattccagagctcattgaggcatttttagatgaattcactaactggtcaagaa

SEQ ID NO: 125890 - DNA, 75 bp, Homo sapiens
ttgccggctgtctgatgaagagcagcgagaatggcgcgttttgacagtgtttcctgccttgctgactcttcttcc

SEQ ID NO: 125891 - DNA, 82 bp, Homo sapiens
agcggcagctgaggagactccggcgctcgccatggccgacgaaaagcccaagtatgagcccagaggacctggtcggcccttg

SEQ ID NO: 125892 - DNA, 50 bp, Homo sapiens
aagatggcggctgggttcaaggtgtgtccgcagccggccaggtggtatcc

SEQ ID NO: 125893 - DNA, 100 bp, Homo sapiens
cgacctcgggcgccccgccggtcacctccgcgcggacaccagatgaaggatttgggggcagagcacttggcaggtcatgaaggggtccaacttctcgggt

SEQ ID NO: 125894 - DNA, 75 bp, Homo sapiens
gcggtggcaccgggatcggttgccttgagcctgagtttgctctccaaagctcggggaattgattccagctctgtt

SEQ ID NO: 125895 - DNA, 82 bp, Homo sapiens
cgatgctcttcttggaaaaccagatccagaaactggaggagtcccgctcgaagctagggcacaggagctgcaagttttgacg

SEQ ID NO: 125896 - DNA, 100 bp, Homo sapiens
tgctgaggccgggccggccgcccagacgctgcccgcgggcccggccacggcggagccaagttggagagaggcgatttcctctcagaagagtggagggagc

SEQ ID NO: 125897 - DNA, 100 bp, Homo sapiens
gttaatctggtatcaccagcacaatgcagccggtggtcctgcagttgaaataactggaaatgatgaataccagtcctatcagattttattgctccaactt

SEQ ID NO: 125898 - DNA, 87 bp, Homo sapiens
ggcgagcagaactacggcgagcgggcttgaaactgttacaatatggctttccttggactcttctctttgctggttctgcaaagtatg

SEQ ID NO: 125899 - DNA, 83 bp, Homo sapiens
caggcgctcgctgcttaccaagagggtcgccgcaccccaggatggatcccccagaggtcaaaatgcagatcttcgtgaaaacc

SEQ ID NO: 125900 - DNA, 75 bp, Homo sapiens
aagatttttaatcactgcttcacagggagaaacaaaggcagcgctgccctcgggggagcattggccctggcggaa

SEQ ID NO: 125901 - DNA, 82 bp, Homo sapiens
caggccaagagggatccttcacccgtgtctgttcaaagaggaaatctcccggaggtttaaggctcagcaggatcagctggtc

SEQ ID NO: 125902 - DNA, 75 bp, Homo sapiens
aatgaagacttgaggcgaatggccgaatctctccgagatctgaaactggacaatgtcctgttggaccacgagggt

SEQ ID NO: 125903 - DNA, 100 bp, Homo sapiens
agatggtgaacaccatctgtgacgtcctgcaggaacccgaacagttccccctggtgcagggagtggccatagctgaactcacgggaatcaaatggcgtag

SEQ ID NO: 125904 - DNA, 80 bp, Homo sapiens
ggaccgtggcagcaagatggtctccgagatctacctgacacggctgctggccaccaagggcacactgcagaagtttgtgg

SEQ ID NO: 125905 - DNA, 74 bp, Homo sapiens
aggctcctgccctggactaccgaggtgctggagaatctggtaaaagcaccattgtgaagcagatgaggatcctg

SEQ ID NO: 125906 - DNA, 83 bp, Homo sapiens
agcgcccctcggcgccccgccaagggcgcagattctttctgtacggtaaggctggcctctctgcagtcagaggtctgagctct

SEQ ID NO: 125907 - DNA, 111 bp, Homo sapiens
cccctctccgtccatggccccagatgacacttcagataacaacgaacttgatgcaagtgataggtttgccaaggtcagacctctcatcatccggatgaactgcaatttcca

SEQ ID NO: 125908 - DNA, 75 bp, Homo sapiens
caccatcaagctgtctaagtccaaagatttttacccaggggtctcctgctgccagctaagtgtgggagaacttgt

SEQ ID NO: 125909 - DNA, 100 bp, Homo sapiens
aattaactcatgtctctctctcttttctttcagtctgcaactgtgtctgatggcggtctcaccaacggctttgggggtgcgaggagcgagcaggagccgg

SEQ ID NO: 125910 - DNA, 98 bp, Homo sapiens
ggcgaggccggacgcacctctgtttgggggtcctcagactgcttttcaggaagccttggacgctgcaggtgataaacttgtagtagttgacttctcag

SEQ ID NO: 125911 - DNA, 100 bp, Homo sapiens
ccagcacagctcaggccagttcgtcggctgccagcaacaatcaccagggtgaaaatcctatttataagagtgccgtaacaactgtggtcaatccgaagta

SEQ ID NO: 125912 - DNA, 50 bp, Homo sapiens
aaagccgccacctgaccatcaacagcgtcaccctttacaccagaaagctg

SEQ ID NO: 125913 - DNA, 74 bp, Homo sapiens
cgtgggactcagcagccttggtgctcaggtgccagatgcaaaggatacttttgtggaactctatgggaacaatg

SEQ ID NO: 125914 - DNA, 116 bp, Homo sapiens
gctctttgaagttgggttcaggagtgtagaattggcaaagttattgccagcttcctgtttgaaggatgacctctaggaagaaagtgttgctgaaggttatcatcctgggagattct

SEQ ID NO: 125915 - DNA, 83 bp, Homo sapiens
cgcgcgcagggcctgcagcgggagctggacggcgagcgcgagcggcgcgagaaagatgaaacgaggaggaagagatagtgacc

SEQ ID NO: 125916 - DNA, 90 bp, Homo sapiens
attccaagtaactcttatttggttatcttagatatgagaacaaatacaatctgttggaaccctatggaagctttcatttttacagcagca

SEQ ID NO: 125917 - DNA, 74 bp, Homo sapiens
ggagcctcaagtaaaacaagtttttcaaagcctaccaaaatctaccacggtgtgaacacatgaacagaagacga

SEQ ID NO: 125918 - DNA, 98 bp, Homo sapiens
ggagattctcagtgaaggaaatgaagtccgtgttgtctacatctactggcctaacaaaaacagtgtataatccagctgctttgaaggctgcacagaaa

SEQ ID NO: 125919 - DNA, 75 bp, Homo sapiens
ggaaatgggacatttgagtgtggcgcgtgcagtttgcagaaaaaacttcagcatgtgccaggaacacaacctcac

SEQ ID NO: 125920 - DNA, 82 bp, Homo sapiens
ccaaaccttggaaagtacgatacctcggaatatacagaactggatgacagtaacttcgattggacttgtccaaatactcaga

SEQ ID NO: 125921 - DNA, 51 bp, Homo sapiens
tggatgatgccaaagttttattaggtggaagattgctctgctgtgaatcgt

SEQ ID NO: 125922 - DNA, 90 bp, Homo sapiens
cggcgcgggcgccggcgaggagagcccgcggctgcaggtacaccaggggttggaaaaaccacactaggcaaagaacttgcgtcaaaatca

SEQ ID NO: 125923 - DNA, 100 bp, Homo sapiens
gaaggtggctgctgcgaagaagatgcccacagatgcctaccatcccatcataaccaacctgacagaagagagaaaaaccttccaaagtcccggagtgata

SEQ ID NO: 125924 - DNA, 100 bp, Homo sapiens
cacccatctgaagggaggaaatagtggcaggtgacagtctgcatgtgcagttttcaggattacggggcgctgaaagacatcgtgatcaacgcaaacccgg

SEQ ID NO: 125925 - DNA, 90 bp, Homo sapiens
gaggaggtggacgcagagcagctgatccaggaagcctgtcggagctgcctggagcagggatccatatggctttggagacagtcgagattc

SEQ ID NO: 125926 - DNA, 75 bp, Homo sapiens
ggctactctgcctcggggacgaaagcagatgcctggaatgatgtcgtcagtaatgcctggaatgatgatgtctca

SEQ ID NO: 125927 - DNA, 83 bp, Homo sapiens
cagcgagccagcgagccgccgacccgccgagcaaaatgatataattggtgattacaactttcctctataaattaactcttgac

SEQ ID NO: 125928 - DNA, 75 bp, Homo sapiens
atgaaggcgatgatacctctaagattaatactgaggaacacgtggatgcagctgatcaggaggttatcttgtggg

SEQ ID NO: 125929 - DNA, 99 bp, Homo sapiens
gctgaatttggcaggaaataatcttaagtccacaagaatcggaatgtcagttaatgctattcgcaagcagagtacagatgaggaagttacatctttggc

SEQ ID NO: 125930 - DNA, 82 bp, Homo sapiens
ggacaccagccgtgtgcagcctatcaagctggccagggttgaaatcacaaagattagacacctttttagataggtgttcttc

SEQ ID NO: 125931 - DNA, 109 bp, Homo sapiens
gcctccacgtctggaataatgggtactctttcctcgtggaatttgaagattctacagataaatcaggactctcacagaaggaggaagaggaggacacttttattgaaga

SEQ ID NO: 125932 - DNA, 75 bp, Homo sapiens
cccaggcacagccgacgccgcgggacagagtttcactcctgttacccaggctggaggacaatgatgtgatctcgg

SEQ ID NO: 125933 - DNA, 98 bp, Homo sapiens
tagactatggtgaatacatggataaaaataatgtgaggcgacaagcaacaacaatcatagctggtgcaagtgaaagtgtaggaaaacatatgcttgaa

SEQ ID NO: 125934 - DNA, 75 bp, Homo sapiens
acactatttatatcaacaacctcaatgagaagatcaagaaggatgacatctccagttacagcccgaacactggaa

SEQ ID NO: 125935 - DNA, 96 bp, Homo sapiens
cagacgaagacagtccctggatcaccgacagcacagacagaatccctgctaccagcagctgagtatgtcccagagaaggtgaagaaagcggaaaag

SEQ ID NO: 125936 - DNA, 100 bp, Homo sapiens
caggaacctgctttctctcgatgaggataacatccctccagaagatgttcacagccatgaatgaaccacagtgcttctacaacgagtccattgccttctt

SEQ ID NO: 125937 - DNA, 100 bp, Homo sapiens
gattgccagggcttcctggcccgaaaggagagccttatccctctgaagaagatatgatcgaatgggccaagagggaaagtgagagagaggaagagcagag

SEQ ID NO: 125938 - DNA, 50 bp, Homo sapiens
ctttttgaagcctttgcaaaaattcgacggaggcgccttgcacgacttgc

SEQ ID NO: 125939 - DNA, 97 bp, Homo sapiens
gctcgggtcgttgtggtgcgctgtcttcccgcttgcgtcagggacctgcccgactcagtgattcttggtgccaccattgagaactccaggattgtcc

SEQ ID NO: 125940 - DNA, 90 bp, Homo sapiens
ggcggccaaggacctggccgacatcgcggccttcttccgatccgatctgcttggctttgaggaagagtggcagtactgcctcactgcata

SEQ ID NO: 125941 - DNA, 50 bp, Homo sapiens
aaggattccaagtaactcttatttgttagggcctagtcaaaattttgaag

SEQ ID NO: 125942 - DNA, 100 bp, Homo sapiens
ccggggacactcactttgacgatgaggagacctggacttttgggtcaaaagccctggactttgtctcacaagatgaaatgttgacgcccctggggagatt

SEQ ID NO: 125943 - DNA, 82 bp, Homo sapiens
cacctccggaccgagggacgcggcggacaaggcaaaatctcagcaagttcggacctctagtacaataaggcgaacctcctct

SEQ ID NO: 125944 - DNA, 100 bp, Homo sapiens
aaaccatcagctattgaatgaccgggattcatcagatgacagagtttcttcaaaggaacataaagttgataaaaatgaggctttttcttcagaggattct

SEQ ID NO: 125945 - DNA, 90 bp, Homo sapiens
attgttgcggtgcgctggagccggccatttcataattctgaatcatgtctgataacggagaactggaagataagcctccagcacctcctg

SEQ ID NO: 125946 - DNA, 101 bp, Homo sapiens
gaccccctagaagcctagaaatgatggaacttgctaaggaagaaaagtgtgaatttctgccattcctgtccccacggaaggttatagtaaaaggtgggaga

SEQ ID NO: 125947 - DNA, 88 bp, Homo sapiens
gccattgccattccctgtcctggcccccttcagcaaccctggacataccgagggattgcatatgttaaatggaaattttataaagaag

SEQ ID NO: 125948 - DNA, 100 bp, Homo sapiens
ctcttcctgagcaagaaattaaaacactggaagaagatgaagaggaactttttaaaatgatggaagggggagagctgtttgacaaagtggtggggaataa

SEQ ID NO: 125949 - DNA, 101 bp, Homo sapiens
gagctgcgtgagaacccgcccatgaagccagatttctcccagatgatgaggagtctgatgaggaagctgtgaagaaaaccaacaaatgtgtactagtctgg

SEQ ID NO: 125950 - DNA, 83 bp, Homo sapiens
cgtgctaatggtggaaacccacaacgaacttcagcgagagggaagcatcgagactctgagtaacagctcaggctccaccagcg

SEQ ID NO: 125951 - DNA, 75 bp, Homo sapiens
accatgtgctagagacagccaacaaaatattcatggttcttgaggaattaagtagactggctggacagattcgaa

SEQ ID NO: 125952 - DNA, 95 bp, Homo sapiens
ctcagtgccctcaaggctcggaagaatgtggagagttttctagaagcctgtcgaaaaatgggggtgcctgaggttctgcggggagtgtctccagc

SEQ ID NO: 125953 - DNA, 83 bp, Homo sapiens
gtcttcatctttacagaggaatagtctacaaaggaagacttgtaacctggagaagaggtgttcaggcgcttcgtggaggttgg

SEQ ID NO: 125954 - DNA, 89 bp, Homo sapiens
cttagtgcctcatttcggagcctttataagtcagtttttgagcagtcacttagtcaacaaggtcaaaatgcagatcttcgtgaaaaccc

SEQ ID NO: 125955 - DNA, 99 bp, Homo sapiens
tgccaccaccctgatctaagcccttatcatctgcttgaatcactgatcgtgtgggtggacgagttgccacatttcgcaaaggaaactatgtagctgatc

SEQ ID NO: 125956 - DNA, 100 bp, Homo sapiens
gggaagagaagatcatcgagcatttcaaacggtttgtgtaaatcgtgaatgtgtagaatcaaggataattaaggcttcagcacatgtttgttcacaacag

SEQ ID NO: 125957 - DNA, 76 bp, Homo sapiens
tcgtgtgcgctcagtgcttccagcagttcccagaaggactcttctatgaggctgacgttcctcagggagtgattcg

SEQ ID NO: 125958 - DNA, 100 bp, Homo sapiens
tcctggctcctcagtctgagcggcagccagtgtgccctgctttacaccagctgtgcagggcagcgtcggctccgcatccataatctggccctgaactgct

SEQ ID NO: 125959 - DNA, 75 bp, Homo sapiens
caggtagccccgccgccgcgcacctgccttcgctcccgcaccgagaccagcatgctgatgatgtcaaagaagact

SEQ ID NO: 125960 - DNA, 100 bp, Homo sapiens
agccgcccaccggtttttctgccacttttgcaagggcgaggtcagccccaaactaccgggaatgggtactgttcaaaaaggaatgccccacaagtgttac

SEQ ID NO: 125961 - DNA, 100 bp, Homo sapiens
tcaggccaaactggtaaatgacgaaggggcttcttccagagccaaggaggaagggttgtccggttcttcgtgccatgaaggaggacagtgaaaaagttcc

SEQ ID NO: 125962 - DNA, 132 bp, Homo sapiens
ccgcgtcgcggtggtggactctggaggtggagccttgcccggcgagacgttgaggaatgttccggagaatcacagcagctgccactaggctgttccgcagtgatggctgtggcggcagtttctacaccctgg

SEQ ID NO: 125963 - DNA, 97 bp, Homo sapiens
tgcagttccacctcccagattccctagttactatctctaagcactgaagtcggtgtttggagaaaaggactcagcctgattacatcaaccccagagc

SEQ ID NO: 125964 - DNA, 74 bp, Homo sapiens
gatcgctgtgatcgtcacttgctgctgtggcaccgcgcccagtatgagccgctcttccacatgctcagtggccc

SEQ ID NO: 125965 - DNA, 74 bp, Homo sapiens
gaaaatcggtgaagagaggttttgaattcacgcttatggtagtggggggcaagcgcgatgaagagctggttctg

SEQ ID NO: 125966 - DNA, 83 bp, Homo sapiens
gcggaccccgcatcttcgccgtctggaaaggcggctatgagaggttttcctccgagtacccagaattctgttctaaaaccaag

SEQ ID NO: 125967 - DNA, 100 bp, Homo sapiens
gatgctgactgggacagcgttctgtcatctcagcaaagaatggtctcccgcctgccatgcagaaagtcatgtataagggactcgtccccgaggataaaac

SEQ ID NO: 125968 - DNA, 100 bp, Homo sapiens
ccgcatgctctttgtcactccccggcggcagcacgaaagtaccatcacccaactggtcagctaactttgatgtcccaatggaaacaacccacggtgctcc

SEQ ID NO: 125969 - DNA, 96 bp, Homo sapiens
tcagaatgacaacaagcccgaattcacccaggaggtctttaaggggtctgtcatggaaggtgctcttccagggcccttatattctcaagaccgaat

SEQ ID NO: 125970 - DNA, 100 bp, Homo sapiens
ctttcctaccgcaccacgggctccacctacctgcacccgctcagcgagctcctgggcatcccgctggaccaggggatgtggagacgctggtagcggggcc

SEQ ID NO: 125971 - DNA, 90 bp, Homo sapiens
ggaaaggactccggaaaggccaagacaaaggcggtttcccgctcgcagagagccggcttgcagagaatgtaactggtcactacatttccc

SEQ ID NO: 125972 - DNA, 75 bp, Homo sapiens
tgtagtgtatgcctcgtttgttgggaacctactgatgaaccttggctgaagtttctctttggctcatcagccacc

SEQ ID NO: 125973 - DNA, 76 bp, Homo sapiens
gcaagattcttctgaattgtgctgccttggccaaaagaggtgtgattgaccgatgggagcttctccaggcccaggc

SEQ ID NO: 125974 - DNA, 101 bp, Homo sapiens
ctgacctcgccccagttccagcaggcccctacaaaggcttcagagtagatatctctgccaacatgaggacagaaggactggtgcgaccccccacccccgcc

SEQ ID NO: 125975 - DNA, 75 bp, Homo sapiens
gcgtccctggagcggccgccttccagcaaggtagaagatagcaccatgccgattcgtcgaactgtgaattctacc

SEQ ID NO: 125976 - DNA, 83 bp, Homo sapiens
gtctgcgcttccccatggggctggcctgcggcgcctgggcgctctgagatattggctccaataattgtggatactatgactta

SEQ ID NO: 125977 - DNA, 100 bp, Homo sapiens
cggagctgaccccggaggaggagcagattccaacaatgtctcacccatcttggctgccacccaaaagcactggtgagcccctcggccatgtgcctgcacg

SEQ ID NO: 125978 - DNA, 97 bp, Homo sapiens
agaggaagagaagatgaaggaagactgtctgccgagttctcacgtgcccatcagtgacagcaagtccattcagaaaaacttgaagattgtgacagaa

SEQ ID NO: 125979 - DNA, 98 bp, Homo sapiens
tgggcggtttttgtcttttgatttcaagagttaggagctcgagaaccgtttggcaatatgtacgacgcggatgaggagtggcagaatttagtgacatt

SEQ ID NO: 125980 - DNA, 101 bp, Homo sapiens
ttcttctatttcttgtggatattatggctaataacacaacaagtttagggagtccatggccagaaaacttttggggttcgagaacttgtcttggacaattg

SEQ ID NO: 125981 - DNA, 100 bp, Homo sapiens
gtttgcgctgccatccgcaaaggctttctcgcttgtcaccttgccatgtggaagaaactgggcgggaggcagcaccgggctcttgatggacttggcagcc

SEQ ID NO: 125982 - DNA, 75 bp, Homo sapiens
tccggagtcagtcattttactgtcaagacatttcttcggcattctgcaacagtttgctaatccagactttacaca

SEQ ID NO: 125983 - DNA, 96 bp, Homo sapiens
gaggcgtttctgtacatggattatctggtatgccattgcattggccttaagggaaaagcagcgtgtaatatttaccagcccaattaaggctctgag

SEQ ID NO: 125984 - DNA, 75 bp, Homo sapiens
ctcaagtgcaacaagtcccacttccgaaaccacaagtttgccgatggcagcacagactatttcttgagcagtggt

SEQ ID NO: 125985 - DNA, 85 bp, Homo sapiens
atgaagttgaggaaaagacaatctctatttggcacgtgcttcctgatgacaagcatgacgacagagatgatggtgtggattattg

SEQ ID NO: 125986 - DNA, 80 bp, Homo sapiens
cagttggaagcagccgatccagcctgcggagcctgtggggcagttaaagaagagtgtaagagtcctaaagctgagtgttg

SEQ ID NO: 125987 - DNA, 75 bp, Homo sapiens
cctggatagcagaagggaaccagcagagacgagacgaggtgtttaaaagacacaatcccagcacggctgaggagc

SEQ ID NO: 125988 - DNA, 88 bp, Homo sapiens
cgaggacttctaccgctgcggctactgcaagaacgagtcgggcagccgctccaatgcatgcagcagattggaataaatatgatgaccg

SEQ ID NO: 125989 - DNA, 98 bp, Homo sapiens
gtggtggtcggatttcaccacaagaagggctgccagtgcacttacatttcaatcgaccaagttccaaggacctatgccataatgataagcagacccgc

SEQ ID NO: 125990 - DNA, 75 bp, Homo sapiens
ttcatctacaacccgcgcttctggccgcgggaaggagaggaagtcctgacggccacgctggatctggaggacgtc

SEQ ID NO: 125991 - DNA, 75 bp, Homo sapiens
gcgtgaccgagagcgcgaatatcgtcatcgttagaagggccagatgcagatggctggagatgggtgcagatccca

SEQ ID NO: 125992 - DNA, 100 bp, Homo sapiens
ggaggagcgcaggccggccgactcggctcagctgctcagtgacaaccatgagtggaaaaaactaattatggttcagcactggcctgagacagtatgcgag

SEQ ID NO: 125993 - DNA, 100 bp, Homo sapiens
gtgcactcagctgtggacgttcccaccattcaagaggggaatgaatccatagttgcaaaaactacagtgactgttcccaatgatggcgggcccatcgaag

SEQ ID NO: 125994 - DNA, 100 bp, Homo sapiens
cctgcctgctgatgagctacgccaacgacgccttcccagaggaatacgtgcccactgtgtttgaccactatgcagaaactcgtttccagatcgaccctaa

SEQ ID NO: 125995 - DNA, 100 bp, Homo sapiens
cccaacccgatcttggccgcctctcccgcggccccattttccttcgaaggagggaaggatctatcttgggatcccatggctttctttactgggctctggg

SEQ ID NO: 125996 - DNA, 100 bp, Homo sapiens
agtgagaaggtgctcgaccctgccagctctgactttaccaggcactggcttactcgggtgctcttaccttctagtcacttgccccatgggaatggaatga

SEQ ID NO: 125997 - DNA, 90 bp, Homo sapiens
attcttgcgctgcatcgaagcctcagccttcagtgcagtcctacagggcagcctcttcgggcagctgggcaccatgccctccacctacag

SEQ ID NO: 125998 - DNA, 80 bp, Homo sapiens
aaacgaagtcgtggaggtggcgaaacgaggaggagataacgcggccttgggctctggaagcggggagaggtggtgagaga

SEQ ID NO: 125999 - DNA, 75 bp, Homo sapiens
aatttgaaccatgtttggattgaagccgcctctgtattacttaccaggtttacccaaggtccagcctagccccta

SEQ ID NO: 126000 - DNA, 75 bp, Homo sapiens
ctctaatggccttaaaaagaaaagtctagatcacagtggggctctaggagacaccattcgcttttcacccaagat

SEQ ID NO: 126001 - DNA, 100 bp, Homo sapiens
tccccctcggaggcggcgggcggaggcggcggtatgacgccgtgcccatccagtccagcgtggtgttatgttcctgcccatccccatcaatggtgaggac

SEQ ID NO: 126002 - DNA, 100 bp, Homo sapiens
cccagctccaggccctgcgacagaaggaagtagacttctgcatctcactgcttcgggaacggggcgtccccctggataccagtaaactgtccactgacca

SEQ ID NO: 126003 - DNA, 119 bp, Homo sapiens
aatgcctgcggctgctgcgcaggtaccggctctcgcacgactgcatctctctctgcatccaggcgcaggtttcattgtttgcggaacttttcaacgaaatgcttcaaagagattttggt

SEQ ID NO: 126004 - DNA, 113 bp, Homo sapiens
tgcagttctggaagcaagaatttatcaaaggaaagatggatccagacaagaatgtgacagtgatgataacatgggtgccaaaaatacttcaataggagaagaatttatatcca

SEQ ID NO: 126005 - DNA, 75 bp, Homo sapiens
aggatcagatgataaaccactacgcccgggctggctcctttaccacaaagctcagaggatgaaacaggaaactga

SEQ ID NO: 126006 - DNA, 75 bp, Homo sapiens
ggggatggttccatcatggcgtcaatgcaggtaccttaacatggggaatcttcttaaagttttgacatgcacaga

SEQ ID NO: 126007 - DNA, 99 bp, Homo sapiens
aattgttttgctgcgcagtacagcaacagtggatgttcaagattaagattagagtcaagttgtgtgattaagacaggggaactgtgtcaatctgacaga

SEQ ID NO: 126008 - DNA, 100 bp, Homo sapiens
tctgcttgctgtggaaggcaatctttttgaaataaagaaacttcgagaactggaaggctatgataaggttatcaatagtctggctgtctatcgtcatcgt

SEQ ID NO: 126009 - DNA, 75 bp, Homo sapiens
cgcaaacttgacactcaccctgaccggatttttctcaggagcacatggatgaagtatgctcctcgcagcttctaa

SEQ ID NO: 126010 - DNA, 74 bp, Homo sapiens
agcaagtgcgcggttggggccactgcgaggccgttttagacaggggttgatttgactaaagacaacatggcact

SEQ ID NO: 126011 - DNA, 51 bp, Homo sapiens
taaactctctgttaaaccaagtacaggtttgcagattccgccagcagcaca

SEQ ID NO: 126012 - DNA, 106 bp, Homo sapiens
gtaccggctctggaaaatccgcaagaccatcatgcagatgatcaagcggtgctgattcacgagagtggaagcctccagagcttggggctttctggctgctcttcat

SEQ ID NO: 126013 - DNA, 100 bp, Homo sapiens
aggtggtccgggaccctcctctccagatggatgtggcctccatcctacatctcaataggaaattcgtagacatgaacagcgcctaaaagaacttgcaaag

SEQ ID NO: 126014 - DNA, 75 bp, Homo sapiens
gtcaaggcgaatatttaacttatatctgcctgtcaggcacatctactatgcttcttactagaataaactgtgcag

SEQ ID NO: 126015 - DNA, 74 bp, Homo sapiens
gtgaacacacagtgtggatatgatgtcaggattcagtacggcaagaagaagctgaaatacctgccctacaatca

SEQ ID NO: 126016 - DNA, 98 bp, Homo sapiens
ccgtattttctactagcgtggaggaacggaggaagaatccattcacactccccaaaccagggctctgccagcagacagccttggcacacaggcacaag

SEQ ID NO: 126017 - DNA, 97 bp, Homo sapiens
ggagactgtgcctgccgtccctacagtaggcgtttccctttttggggatatggatgaagcaagaatgggaccagcagtgccaactcttgggcgtcct

SEQ ID NO: 126018 - DNA, 96 bp, Homo sapiens
tggatatctgtcattcagcatcatgagaatcgtggagatgtttaaggattacccgccagccataaaacccgtggaccgggagcccgtggaccggga

SEQ ID NO: 126019 - DNA, 100 bp, Homo sapiens
cgtgtgctaataaatgtgtcttctgttggcggtggagctgatcagaataatgttcagcatcaaccccctggagaacctgaaggtgtacatcagcagtcgg

SEQ ID NO: 126020 - DNA, 101 bp, Homo sapiens
cgaggagaatggagaccaaacctgtgataacctgtctcaaaaccctcctcatcatctactccttcgtcttctgggatcctttcaagtatagctatccacca

SEQ ID NO: 126021 - DNA, 80 bp, Homo sapiens
cgcaggcccagatgcgcgcgatgctggaccagttgatgggcacctcccgggacggtgacttaagagattaaaattaattt

SEQ ID NO: 126022 - DNA, 76 bp, Homo sapiens
tcttgtaatgtgtttaacaaagccacgaataacctataatgaaattgcatctgatggtctcaagggtcgtgtgttt

SEQ ID NO: 126023 - DNA, 50 bp, Homo sapiens
caggaactctacaacccaatccaggacccagatgatgtggtaccagttgg

SEQ ID NO: 126024 - DNA, 98 bp, Homo sapiens
gacaccccgaaagccggaaaacgctctctgatccttctgacttaccaaggaatgccttcagaatttttaccattcttgtggaatttttatgtattgag

SEQ ID NO: 126025 - DNA, 101 bp, Homo sapiens
agttttatgatttcttcagatatgtcgaaatgtcaacatttgacatagcttcagatgcatttgccacattcaaggcatcttctcaggcagaggtgcaacct

SEQ ID NO: 126026 - DNA, 75 bp, Homo sapiens
cttttactcagagtttgaaggttgtgaccaaaagaggctccgatgagctctgtgaaaatgttacagcctcgtctc

SEQ ID NO: 126027 - DNA, 82 bp, Homo sapiens
gacagaggttattttagtatagagcaaaagatacagatattgtggatgaagccatctattacttcaaggccaatgtcttctt

SEQ ID NO: 126028 - DNA, 50 bp, Homo sapiens
tgacgcttctcactcacgtgtgaaggtggtgatctttgtgaagtctgtgc

SEQ ID NO: 126029 - DNA, 100 bp, Homo sapiens
cactgtggccgcggcttcaccagcgccaccaactataagaatcacgtgcgcatccacacaggtggccagcgtgaggaagaccacggtcctggatgtcatg

SEQ ID NO: 126030 - DNA, 83 bp, Homo sapiens
gctgaacgtggacagcctcatcacccggctgctggagggtgaaatgacaatggatgctctgttggctcgattgaaacttctga

SEQ ID NO: 126031 - DNA, 83 bp, Homo sapiens
ggggcgctcatgtggatcatgctcatcctggtcggcctgggatttccctttatcatgatgccacagggcccagtgggctccgg

SEQ ID NO: 126032 - DNA, 100 bp, Homo sapiens
tcagaccctcccgcagttgaacatcatgaaacatgaggaagaaggagaaagggccaacccctgaagaagcaatacagaaactgaaggagacagagaagat

SEQ ID NO: 126033 - DNA, 100 bp, Homo sapiens
ggcccaggcccgaggggtgaggcccaggccactccggagcgcgcgctgttcccgcgaagcgagtcgccgtctcgtacttctcggacaaactatttagtgg

SEQ ID NO: 126034 - DNA, 51 bp, Homo sapiens
gacaagacacttttcagaaagacagccttatgattctgcagatgactggtc

SEQ ID NO: 126035 - DNA, 90 bp, Homo sapiens
gagcctgggaggccggccggtgccagcacctttcggcttctgagacggcggcagcagcggcattcagttacatgggaataggactctcgg

SEQ ID NO: 126036 - DNA, 98 bp, Homo sapiens
tggagaacttcaggaacctgctgtcagtgggttcttggagtgtcaatgttttaataccagtacacaattaaatctgtggtgaagtcattttctaagtg

SEQ ID NO: 126037 - DNA, 96 bp, Homo sapiens
agcacgatcccaccgcacgttcagaagtcgggatatttggccttgacattaaaggcagagactgtggcaatgaggcagctaagtggttcaccaact

SEQ ID NO: 126038 - DNA, 51 bp, Homo sapiens
gccagatcaaggtcttctgtgacaaggtggagccgccaccaaaatgcagat

SEQ ID NO: 126039 - DNA, 95 bp, Homo sapiens
cagcacctttcggcttctgagacggcggcagcagcggcattcagcatataggttgctgtagatgaatgttcttagctgtcatgtttaaaaatact

SEQ ID NO: 126040 - DNA, 83 bp, Homo sapiens
gcccggcggcgctccaggtgctgacagcgcgagagagcgcggccctcaggagcaaggcggctgatcagctgaccgaagaacag

SEQ ID NO: 126041 - DNA, 50 bp, Homo sapiens
aagtctgtcagcaccatctttctaacagtcctatggcagcgtatacaaag

SEQ ID NO: 126042 - DNA, 98 bp, Homo sapiens
tgtatatgatcatgcgcaccttggccatgcttgccagaaggtcagtttgaaagatcgtgtcttctccagcccccgaggcgtggctgccaaggggaagg

SEQ ID NO: 126043 - DNA, 98 bp, Homo sapiens
accatcgtcaagaccatcatcactttcattgtctcggacgtgcggggcctgggcctcccggtccgcaagcagatgcgagaagatgaccgtgtggcaat

SEQ ID NO: 126044 - DNA, 80 bp, Homo sapiens
tccgtcctctgaggcgacggccgcggctgcacaggtggttgtgggaagagaagtttgcagaactgaaatggaggtcagag

SEQ ID NO: 126045 - DNA, 80 bp, Homo sapiens
ccgactactacgccaaggaggtcacccgcgtgctaatggtggaaacccacaacggttaagaatgtctgaggggtcaggcg

SEQ ID NO: 126046 - DNA, 75 bp, Homo sapiens
atgtgagcaaactatgtataggaattccaaagcccataactccatcatcacttggaagtactttcttgtggctgg

SEQ ID NO: 126047 - DNA, 100 bp, Homo sapiens
ggcccccactaaggatcgcccagaggatgcggctggaggcaacgcagctggaaggggttgcccgaaggatgacggtcatttcttcagatagctccccagc

SEQ ID NO: 126048 - DNA, 82 bp, Homo sapiens
accataataatgaatgactatccaaaattcaaggaaagtgatgaagcattgggcccaacaatgatgagttggaatgcagttg

SEQ ID NO: 126049 - DNA, 50 bp, Homo sapiens
tattatggctgcactggagaagcagttatacttaagcatgaacattgacg

SEQ ID NO: 126050 - DNA, 100 bp, Homo sapiens
catgtatggagaatggctggtctcctactcccagatgcatccgtgtcagcaccaagtatagatgagaaagtagatcttcattttattgcattagttcatg

SEQ ID NO: 126051 - DNA, 98 bp, Homo sapiens
aggagccatcctgcccgcggggatcccgtcagccgttactccacaggatccgctgaacataggatgttgccacaaaatctacctcgtgtatttttctc

SEQ ID NO: 126052 - DNA, 89 bp, Homo sapiens
gtctcttacgtctgcggaagtgcagctgcctcagttcttagcgcagcaaagagaaaccaacctttggaaagttgagtataaacaaaccg

SEQ ID NO: 126053 - DNA, 87 bp, Homo sapiens
aacagtgacgtgttctccaaataccagctcgacaaagatggggttgtcctctttaagaagcaagagtgagccatggagctacgtgtg

SEQ ID NO: 126054 - DNA, 100 bp, Homo sapiens
ctcaagatcgacctacatcagaggaacttttaaaggcaaggagcaaactttcccagctgcatgaaagccgccaggaggcccacaggagcctggagcagta

SEQ ID NO: 126055 - DNA, 75 bp, Homo sapiens
ctccccagccatgtggaactgtcagtactgcatgcccgaggagggggtcccgctgacccccaaagccaacctgct

SEQ ID NO: 126056 - DNA, 87 bp, Homo sapiens
agattttgctagagctgaaggctgtgataatgaggaagatcttcaaatgggcattcacaagtgggagattttgataagatctggcga

SEQ ID NO: 126057 - DNA, 116 bp, Homo sapiens
ggggatttctcctcctaatctgggcctcttgtcatggttactgaaagtccctcgtttgctctcaccagccttcctggaaatgtggactcttgaaagaaaagctcccgtgctcttga

SEQ ID NO: 126058 - DNA, 75 bp, Homo sapiens
tccggaagtgcatgttggatgcagccctcgcaacgctcaacactcatgggaaggaaagaacatggcctgtgtgca

SEQ ID NO: 126059 - DNA, 98 bp, Homo sapiens
ccgtggcggagaaagcgctgcaggaataccgcaaaaagcaccgactggggcagcacctactccgtgtcagtggtggagaccgactacgaccagtacgc

SEQ ID NO: 126060 - DNA, 80 bp, Homo sapiens
cctaaagtctgcgaggaggaagtcgcctctgtgctcgtgagtccagggatctaaggagtgtggccatctggggccgtgtg

SEQ ID NO: 126061 - DNA, 76 bp, Homo sapiens
gatttaaaagacagtcctcgtcagcactgactttcagctatggaatcgcctcttccttggttgtgccactactgag

SEQ ID NO: 126062 - DNA, 75 bp, Homo sapiens
acagtcctcgtcagcactgactttcagctatggaatcggatgaagccccacccgcccttcaggatgccagccttg

SEQ ID NO: 126063 - DNA, 82 bp, Homo sapiens
gcctttgccccaatcttgtgtgggcactgaagggggactacaggttcgagagatgttgcttcagagtgtgaagtcaaatgca

SEQ ID NO: 126064 - DNA, 75 bp, Homo sapiens
ccagccaggccctgcctccagctgggctgagccctctgtttacagatgagaaaactgaggcacagcaaggctaaa

SEQ ID NO: 126065 - DNA, 75 bp, Homo sapiens
gcaaggtcgccctcaaggccatgatcaaaacctggagcaggctctgcggctggagcctggggagctggagacgca

SEQ ID NO: 126066 - DNA, 87 bp, Homo sapiens
ctcggcactgtattctttacctgcttcccaatcccactgatgaggatcagcccatgggagaagctcagtgggtgaacggaggacatt

SEQ ID NO: 126067 - DNA, 83 bp, Homo sapiens
cgacgtcttgcctgtgtcccacttgttcgcggcctatagctggagaagaagcaggcgctccctccattccagccacagatcac

SEQ ID NO: 126068 - DNA, 76 bp, Homo sapiens
ctcaatgaaggttgatttcatcagactaaaaagttacagggaacttataatcaaaactgtattaagctcggcaaga

SEQ ID NO: 126069 - DNA, 75 bp, Homo sapiens
gatgggaagttacggtttacagcgaagtccacccagcgtttccgagttactccacaggatccgctgaacatagga

SEQ ID NO: 126070 - DNA, 100 bp, Homo sapiens
aggagttgctgcttttccaggaatgaaagacattcaggatcaacttgaacgaatatttctggtgtatgcaacagcgttattgcaacaggctaacgaaaac

SEQ ID NO: 126071 - DNA, 50 bp, Homo sapiens
actcctgagagccatcttcaaaggcttcaatgttagctgcagaaaatgac

SEQ ID NO: 126072 - DNA, 75 bp, Homo sapiens
tgatacagcaaggagggctcttgcaaggattcaagggctctgtgcagtctttcaccccctctccagtggagtacc

SEQ ID NO: 126073 - DNA, 82 bp, Homo sapiens
aacaaaccagatgtcagtctgcagggaggaatgcaggctcaggttggaatgccaggaagtggaccagtgtccatggaacggg

SEQ ID NO: 126074 - DNA, 88 bp, Homo sapiens
aaacgccgacaggggagggccttcttgactcacccagcaaaaccatgtctattaaagaaagaaaaacctatacctgctgaacgccacc

SEQ ID NO: 126075 - DNA, 100 bp, Homo sapiens
gtggaccacgtgtttactttcaccattttggataataggatatggtttcggaactttcagtcaattcagatttggaaaactaaaaagcagcaaaaaaggg

SEQ ID NO: 126076 - DNA, 50 bp, Homo sapiens
ccccaggggaggcacagtgtctgctgatgttacttatgaggtgctttcag

SEQ ID NO: 126077 - DNA, 75 bp, Homo sapiens
acatttctttgtggtttatctaaaaaccaaagccgctcctgacatcactggccataaacggagtgagaacaagaa

SEQ ID NO: 126078 - DNA, 82 bp, Homo sapiens
cgaaaaccacccagattggatgcctgctgcgcttggagccgaacctgcaagcccagggcgtctctggccgagcctctttttg

SEQ ID NO: 126079 - DNA, 75 bp, Homo sapiens
ctttcaatgacaaaaagtttgtcattaaacccatcgacaagaaggcacctaaggtcagtgcaccagatattctga

SEQ ID NO: 126080 - DNA, 98 bp, Homo sapiens
gaaaaacggggactatggggagaaaaaagattcagattacgaggattatggatgaacgtaacagacagacccctttgctgatgcaagtaagggtgatg

SEQ ID NO: 126081 - DNA, 90 bp, Homo sapiens
ctacacaatgcgttgcctggctccacgccctgctgggtcctacctgtcagagccccaagacgtggtcccatctggatgaggaccagcagg

SEQ ID NO: 126082 - DNA, 83 bp, Homo sapiens
ttgaccggatacttacagatgtaaatgttggtttaagaattgtttaagctgcatcaatggagcacatacagggagcttggaag

SEQ ID NO: 126083 - DNA, 101 bp, Homo sapiens
acatctatacccatctggtcaaatctctgcaggaatcagacagttcttcaccaaaggacatggatgaaaatgaaagcaaccagtctctgatgacaagcagc

SEQ ID NO: 126084 - DNA, 96 bp, Homo sapiens
cagtgcttgctgctttttctaactatttcaagatgatatttattcaccaaacaagtttgtcagggagccactggtgatgtggatggggcacagatt

SEQ ID NO: 126085 - DNA, 100 bp, Homo sapiens
cctattccactggattgggaaagaccatggcagattttgaagatgtaactgagtttctggaagaggtcattgaagccttgatattggatgaggaagttag

SEQ ID NO: 126086 - DNA, 82 bp, Homo sapiens
aagttcagagctacatcaggaagagaacagcggaacatgaggcagcacagcaaggcatgttatttgaaagcaattgagacgc

SEQ ID NO: 126087 - DNA, 75 bp, Homo sapiens
cggtgtaaatgttgagcctttttggcctggcttgtttgcaaagggttgttacaagttgagttgaaaacaagaaaa

SEQ ID NO: 126088 - DNA, 75 bp, Homo sapiens
cacctcagtcctaactgtagggaaggaagccttggacggagtaaccaagagcccagaaaagcgctcttctctccc

SEQ ID NO: 126089 - DNA, 83 bp, Homo sapiens
ccttggcggcgcgagcaggaagatgcggcattccaaaagaactcactgtcctgattgggatagcagagaaagctggggacatg

SEQ ID NO: 126090 - DNA, 77 bp, Homo sapiens
cggcagccaccccgtctgggaagaatccagaaacgttttggaccaccacaggaatgtttccccaggaattcattatt

SEQ ID NO: 126091 - DNA, 111 bp, Homo sapiens
cccccgcttgctcctcgctgaccccatcactgtgcaagctggggctgcagctcctgcccctcctaaagctgaagccaaagcgaaggctttaaaggccaagaaggcagtgtt

SEQ ID NO: 126092 - DNA, 96 bp, Homo sapiens
taccatgacgaaaacatgtactacagccagtcttctatgtttccacatcggtcagaaaaagatgttcaaaccttgtactactcagctgatcacaag

SEQ ID NO: 126093 - DNA, 98 bp, Homo sapiens
gagaccacatccatggtttctatgcccctctatgcagtcatgtatcctgtgtttaatgaggtgtacccttcagccaagccaatgatcaaattccaatc

SEQ ID NO: 126094 - DNA, 100 bp, Homo sapiens
ggccggaccgaaggtgcggcggcggaggggagccagggcgccccagcaggttcgagaacttgtcttggacaattgcaaatcaaatgatggaaaaattgag

SEQ ID NO: 126095 - DNA, 83 bp, Homo sapiens
cgacgagtacgactacctattcaaaggcctggtctccaagtcctctcctaagaagcctcgtggacgtaacatcttcaaggccc

SEQ ID NO: 126096 - DNA, 82 bp, Homo sapiens
tggggaacctgctcaaagccctgggtcgcttggaagaagccaaggtgggcggcaccttccgcatgttcctgctgttcgccgt

SEQ ID NO: 126097 - DNA, 75 bp, Homo sapiens
cggaaggcctcccggcgctcttcctcccggagtatggtgaccaagaatatggcccaggtgaccaaagccctggac

SEQ ID NO: 126098 - DNA, 89 bp, Homo sapiens
gccagttccactaccgaagatgtcaggaggcggcctggaccctgtctattatcctcccagtccacaacgctgaaccgtggctggacgaa

SEQ ID NO: 126099 - DNA, 83 bp, Homo sapiens
gaccctggagcctcagttggaagcagccgatccagcctgcggagcctgtggggcaggtgacagagctgaatgaacctctctcc

SEQ ID NO: 126100 - DNA, 83 bp, Homo sapiens
gtcccagaaacgtcactatcaagaagagagaacgacatcacgcctgtactggaccacaccttctgcgtggaacacaacgcctt

SEQ ID NO: 126101 - DNA, 99 bp, Homo sapiens
tctgctgcaccgacctcgacgtcttgcctgtgtcccacttgttcgcggcctatagacctgcgaccgcatcaagcagtccgccagcggaaccaagcggcg

SEQ ID NO: 126102 - DNA, 75 bp, Homo sapiens
cctcatctatatcctttggcagctcacagtgtcaacctgtgtctgctgctgactggtccaaggatattcgaactt

SEQ ID NO: 126103 - DNA, 82 bp, Homo sapiens
cggctatgtcgatcgaaatcgaatcttcggaacctctggtgccccggggagcccccaaacaccccctgagcgtcatgactct

SEQ ID NO: 126104 - DNA, 75 bp, Homo sapiens
caaaggacccagtcctcccaatgaaattttttacacaacctgaaaaggagatacttgagagggaccatgcccggc

SEQ ID NO: 126105 - DNA, 83 bp, Homo sapiens
aagctgcctggagtcaaggaagctcctgttcgacacagtggagaccatgggaaaagactatttgtcatcagaccttctagatt

SEQ ID NO: 126106 - DNA, 80 bp, Homo sapiens
gccggacggcgcgggcgccggcgaggagagcccgcggctgcaggttgacatcatggacatatgtgagtccatcctggaga

SEQ ID NO: 126107 - DNA, 100 bp, Homo sapiens
cccaggtcgcagcagcgtgtcgcctccggggggcgtagcaaggacaatcatatcctgattcagcccttcctccacaaaggcaagacagattttgttctaa

SEQ ID NO: 126108 - DNA, 99 bp, Homo sapiens
gctcagagtctcaatgaacttggttcttgggtgtctctggggagtccctgggccagaccttcctccagactccagcccacctcttcggagcagctctgc

SEQ ID NO: 126109 - DNA, 96 bp, Homo sapiens
caagaaggaggtcagccgggtgctgtgcaagcggtgcggttcatcatgcctagtggcgtataagaagaccccgccaccggtccctccacgcaccac

SEQ ID NO: 126110 - DNA, 73 bp, Homo sapiens
tctgaaggcatttgctgttggtgtccagcaagacttggcagatgaacttgctcttgttgatgtcatcgaagac

SEQ ID NO: 126111 - DNA, 74 bp, Homo sapiens
gcgtccggaggaggagaagcggcggcgccgggaagcaggtgttcaggcgcttcgtggaggttggccgggtggcc

SEQ ID NO: 126112 - DNA, 82 bp, Homo sapiens
gcgctccttcctgcgtgagttccacaagcaattctgtggtgttcttggtcacacatttatggagtttctgaagggcagtgga

SEQ ID NO: 126113 - DNA, 100 bp, Homo sapiens
ctccacttctatggtgagagagaggagtgcatcaaagattactcccaggtttgacagactgcaccaccaccgcctgtgctgatgcaccatggagagtcct

SEQ ID NO: 126114 - DNA, 75 bp, Homo sapiens
tgaggataatggtatcatcaaggccttcagaaacatccctggacccagtggtcttcagcgtgtagtaaaaccaac

SEQ ID NO: 126115 - DNA, 75 bp, Homo sapiens
tggggaccctgagatcgtcaagtctcccagcgaccccaagcaataccggtacgtgaacacactcctgaaactcat

SEQ ID NO: 126116 - DNA, 82 bp, Homo sapiens
cgaacctgcctggctagccggcgacttgagtgacgattatttctcaaactctgaggctgcggagttcacacattgaaatctg

SEQ ID NO: 126117 - DNA, 75 bp, Homo sapiens
ttgccaagaagaacgacattcccttcgagctgcgcatcgtggatctgattaaagatttcttcagaggccccacag

SEQ ID NO: 126118 - DNA, 90 bp, Homo sapiens
catctgtccagatgggtccagaaagccaggcatggaaggatgcagaaacgtgacgagcaatgatgaacacctggaatggataaaagtggc

SEQ ID NO: 126119 - DNA, 100 bp, Homo sapiens
acctttactgtgcagctcctgaaaggagagacacttgtgaacattcaagtgaagcaaaagcctttcatgattatgagatcatgaatcagacagataaaaa

SEQ ID NO: 126120 - DNA, 100 bp, Homo sapiens
gaggaaattacagagacaattatgacaactgaaatgagacatgcacataatataggtgggactcttccctggacactgtgttgagttaattaaccaaaaa

SEQ ID NO: 126121 - DNA, 83 bp, Homo sapiens
cagttgttggggttggtgctgttggcatggcctgtgccatcagtatcttaatgaaggtgaaatgacaatggatgctctgttgg

SEQ ID NO: 126122 - DNA, 100 bp, Homo sapiens
atccacgcctttcagccaaatgccagactgattgtcatgctcagggaccctgtggagaggtgctggtaaaccgcctatgtttggtgattatgaagctcag

SEQ ID NO: 126123 - DNA, 98 bp, Homo sapiens
acatctgtatctgggtcctggcctcaggcgttggcgtgcccatcatggtcatggctgtgacccgtccccggggtcatagtaatgggagctaccaatcg

SEQ ID NO: 126124 - DNA, 100 bp, Homo sapiens
cagggagcggacgctcggggcacctgcgtccagcgagaggagcgcggcagggggccgggggcccaggaacaagcacatcatgattgacttggggactggc

SEQ ID NO: 126125 - DNA, 50 bp, Homo sapiens
ggggaaccatggctgccccgagagataagagtgcccaggagtggaatctg

SEQ ID NO: 126126 - DNA, 75 bp, Homo sapiens
aatggcactcagcagcaagcacagagtatgaccaccactattaatgagaaagatcagtctaaagaaaaggagaag

SEQ ID NO: 126127 - DNA, 82 bp, Homo sapiens
aggaattgggtaaaagagaagtcacaattcctccaaaatatagggaactattggctgtagaggaggtaagaaaggagcagta

SEQ ID NO: 126128 - DNA, 82 bp, Homo sapiens
cctgagggtgccttcgttccccccgagttcgacgtgaccgggaacacctttgaggtcatcatcagatttgaaatatttaaag

SEQ ID NO: 126129 - DNA, 75 bp, Homo sapiens
ccgggcgagcgggtgcgtctgccgcagagtcggcacctgaaggacatggagggaactgctcgcagaaagaagaag

SEQ ID NO: 126130 - DNA, 74 bp, Homo sapiens
tgaaagaggaggtggcagagctcgaggaaccttttttcgaattagaggcagaggaagagccagaggagtttttg

SEQ ID NO: 126131 - DNA, 96 bp, Homo sapiens
gaaggagttcttggacctcgagcagagtgggactcttctggaagtcggcacctatgaagttccacccaatctgactgttccacaggaaaaatcacc

SEQ ID NO: 126132 - DNA, 100 bp, Homo sapiens
gcccgcctcgccgaggaggccttcttccgtggggttagccaggagtctttgttgctggctatgaaagcctgaaaaagaatgaaattcttcatctgaaatt

SEQ ID NO: 126133 - DNA, 75 bp, Homo sapiens
gacggcggcagcagcggcattcagcggacaaggcaaaatctcagcaagttcggacctctagtacaataaggcgaa

SEQ ID NO: 126134 - DNA, 98 bp, Homo sapiens
cttcagaaagtgcatgtaggcaaccaggacaaactcactgatgaaggactcaagcagacagagattgcgaagagactgaacacaattttagcacagat

SEQ ID NO: 126135 - DNA, 96 bp, Homo sapiens
gaagtaccgcgagcaaggagcgcggaatcggggagcgtccggagctagctggatcctctaggcagacaatggcgatgaccactcagaaggaggcct

SEQ ID NO: 126136 - DNA, 100 bp, Homo sapiens
cgcaggtcctcgcggtgcgcaccgtttgcgacttggtcatagcaaatgacagaagtcccttggtgggcaaaattcactgggagaaaatggttaaaaaggt

SEQ ID NO: 126137 - DNA, 71 bp, Homo sapiens
gacggagtcggcgagcccccgcggcgacaggtgacctgaaacatatcacgaagctgaaaccttggggcctt

SEQ ID NO: 126138 - DNA, 88 bp, Homo sapiens
agcttctgaaccatccacacatcataaagctttaccagctccaaagacaacaggccctccctctgccctcccgtctgtgagctccctg

SEQ ID NO: 126139 - DNA, 100 bp, Homo sapiens
caagcagttcagaagagccaaggaataaacatgcaatgaacccaaaaggattcgattgaatagactattgaccattgatacagatttgttggagcaacag

SEQ ID NO: 126140 - DNA, 87 bp, Homo sapiens
cctgctgaatcacacgccgccatccgggaggcccagggaagacaagttggatggcttgaggactggtactaaaaggaaacgtgactg

SEQ ID NO: 126141 - DNA, 100 bp, Homo sapiens
ttattggagaaacatgcagattatatcgcatcctatggctcaaagaaagatgattattttcagctcctggcatcagctctattcaaatctggttcagatt

SEQ ID NO: 126142 - DNA, 111 bp, Homo sapiens
atatctccattcccctccctgccaacccctgatgacctctcttcaactttcggtgattcgcaaggggtggctcaccatcagcaacattggcatcatgaaaggcggctcgaa

SEQ ID NO: 126143 - DNA, 75 bp, Homo sapiens
cggcagcgacggcaccatgtcagacaaggaaattactcatgatgtcaaagaagaggaggaggcagaagaggccgc

SEQ ID NO: 126144 - DNA, 100 bp, Homo sapiens
gagacatcttccctgtgggctggtgttccttgactggagacaacctgcagcctcctggcaccaaagggccgcgatgggcctcttggaacattggtgtgtt

SEQ ID NO: 126145 - DNA, 100 bp, Homo sapiens
aattatttttgtggaaagaagatacacagcagttgtcttaaacagtgaaacaaagagtcctcttcgtggaaaagaaaaaaatacgctccctttaaacggt

SEQ ID NO: 126146 - DNA, 100 bp, Homo sapiens
ctgacgctgcagtggactgagggacactctggcgacacacctaccacgggctatgtgatcgaggcccggccctcagtggcttttcatggcctgccactga

SEQ ID NO: 126147 - DNA, 83 bp, Homo sapiens
cggtaggagcctccgtgcggagaccactgttcaaggccacaggtgctgccttcacctgcctggagactgccttccgcctggac

SEQ ID NO: 126148 - DNA, 90 bp, Homo sapiens
gtggggatctctgaaattactcaggagaaaatgctgagaagcttctgcagttcaagcgttggttctggtcaatagtagagaagatgagca

SEQ ID NO: 126149 - DNA, 50 bp, Homo sapiens
ctggcaaagtggaaaaatgtgcgggttctgagcaaggttcaaccagtcaa

SEQ ID NO: 126150 - DNA, 75 bp, Homo sapiens
ctcctacacttcctatttatgagaatgcagtaatagtggccttgtcttcaaaatcatgggatgtagagactgcaa

SEQ ID NO: 126151 - DNA, 83 bp, Homo sapiens
caagaattcatctctgaagttacagattcttcgttcatggagggaatatgacctggcagtaatgattataaattatgggaaaa

SEQ ID NO: 126152 - DNA, 90 bp, Homo sapiens
ggcggctcagttgtccatgaccctgaaggtccaggagtacccgaccctcaagctgattgctgaggaaggggtggacagcctgaatgtcaa

SEQ ID NO: 126153 - DNA, 83 bp, Homo sapiens
ccggagtgagcggagtagcgagtcggcaacccggagacctgcctagagctggaacgttacctccagagcgagccctgctatgt

SEQ ID NO: 126154 - DNA, 99 bp, Homo sapiens
gaggctgttgcagaacctcctcagccaacggcaggtatttagtcttcctgcagatcaaaagggatctctaccatggccgactcctctgtaaaacatcgg

SEQ ID NO: 126155 - DNA, 82 bp, Homo sapiens
tgaagagcgacaagccgctggcagccgcggatctcaccgccgctcaggaagactgtgcagtctttgtaactgatgaagagca

SEQ ID NO: 126156 - DNA, 80 bp, Homo sapiens
cattttcctgatgaaaatgttggaagagatgtctttggtggacttgggaaagaggttgctagaagcagcaagaaaaggcc

SEQ ID NO: 126157 - DNA, 98 bp, Homo sapiens
ttccatgctatcagctttttaggcgcctccttggcattataacaaaaaaagatatcctccggcatatggcccagacggcaaaccaagaccccgcttca

SEQ ID NO: 126158 - DNA, 100 bp, Homo sapiens
ctccgaagctctttggacctagcaggttcggcggccggggtattttgattccgttcaagctaaagaacagcgaaggcaacagagattacgcttacatacg

SEQ ID NO: 126159 - DNA, 95 bp, Homo sapiens
tgcgacgtggtaaagaaataaggcgagtacacaagcgaagactttccagctcagagagtgaaggtgagaaaaactggaagcttgaagaccatggt

SEQ ID NO: 126160 - DNA, 96 bp, Homo sapiens
acgcaagcccacggggagcagagcagcaactcacccagcacacaaaatggatctcttacgggtcaacatatttcactggcacctattcacaagctt

SEQ ID NO: 126161 - DNA, 76 bp, Homo sapiens
aggaggttttccagatcagtgacaaccatgctggtttgcttcagactgtctgctcctctgacaaacgaattgcctg

SEQ ID NO: 126162 - DNA, 82 bp, Homo sapiens
tcgtggacgtcactggccctggtggggattgacagccacgggaaggagccagggagtaacgaagagatcaaagagttcgccg

SEQ ID NO: 126163 - DNA, 112 bp, Homo sapiens
ggacatctgggggccacaaatgctccttctcctggagacgcaactcaagcctcctgacaaggtgatccgggcgggccccgcaggaattttatcccctcaccggcctcacact

SEQ ID NO: 126164 - DNA, 75 bp, Homo sapiens
gccggactcaaccgcgtaaaagtcgcttatgatgaagctacagatgaatttgcttcttacttcaacaaacagact

SEQ ID NO: 126165 - DNA, 101 bp, Homo sapiens
acccctcggcccgacgcacccacgcccctcaccccccgagagccggtactccaaagattcaggtttactcacgtcatccagcagagaatggaaagtcaaat

SEQ ID NO: 126166 - DNA, 78 bp, Homo sapiens
tagaccatcaacagtttgactacataataaggatgatgaattgtactctacaggaaagtcttaatagacatcgatact

SEQ ID NO: 126167 - DNA, 100 bp, Homo sapiens
cctgatcagagtgtaaagcgggaactccaggttgttagtcatgtcgatgtcaacacaccagcattattaggggatagttcctatgtgaaagatcgctggt

SEQ ID NO: 126168 - DNA, 82 bp, Homo sapiens
ggtctgctcgggggtctacttcgaggcaaacggggattcagcgtccgatcctttggaacagggactcacgtgaagcttccag

SEQ ID NO: 126169 - DNA, 117 bp, Homo sapiens
gcgtgtctaggtgagtcgcggtgggtcctcgcttgcagttcagcgaccacgaggctgacccgcggctgattgagtccctctcccagatgctgtccatgggcttctctgatgaaggcg

SEQ ID NO: 126170 - DNA, 100 bp, Homo sapiens
gagtccgcgctggaccagctcaagcagttcaccaccgtggtggccgacacgggcgacttccacggttggtcaaagaaaaagtgatgtatgaaaaagaggc

SEQ ID NO: 126171 - DNA, 100 bp, Homo sapiens
agcgctgccggagccgcctgagatattatgcctggtgatcctgatctgcttcagtgcctccacaccaggctactcctccctgtcggtgattgagatgatc

SEQ ID NO: 126172 - DNA, 88 bp, Homo sapiens
agccgagcccgcccgcgcgccggtcaaaatgcagatcttcgtgaaaacccttaccggcaagaccatcacccttgaggtggagcccagt

SEQ ID NO: 126173 - DNA, 100 bp, Homo sapiens
gagctgagctggatgtccagtggtggctacggaccacaacatggataacacgtcaactgtgctgcgggagtggctggtggccgtgaagagtttgtaccat

SEQ ID NO: 126174 - DNA, 75 bp, Homo sapiens
ggtcctttatatagaagggagagtagcctggcgctggccaacaatagcaccctcaccattggcaccatcgatgag

SEQ ID NO: 126175 - DNA, 75 bp, Homo sapiens
gctggggccctggcactggggctctggttttgcacactagggaccaagaagccctcggggacactgctgagaaaa

SEQ ID NO: 126176 - DNA, 82 bp, Homo sapiens
gggacctgccggcacgcgactccccccgggcccaaagtcgcaatggaagaagagatcgccgcgctggtcattgacaatggct

SEQ ID NO: 126177 - DNA, 101 bp, Homo sapiens
tggacctcctgggaggcgaggacggtctctgccagtataaatgcagtgacgggagcatgataaagatccagaaagcttttttaaggtattaatgcatctta

SEQ ID NO: 126178 - DNA, 100 bp, Homo sapiens
tctttatatgttacaagttaaatatttgctcaaccagagaggtgagagacttcagaggctgccctttcttttcatctgctgcttgtgaaaggaaaacatc

SEQ ID NO: 126179 - DNA, 99 bp, Homo sapiens
cggaatggaggcatgcggaactcacccaacacctcgcctaagctgatgagcaatgtgtattcctccatcatatgctgaccttggcaaagctgccagaga

SEQ ID NO: 126180 - DNA, 100 bp, Homo sapiens
ctactgtgcgctcgatccagcaccatggggaagcgggacaatcgggtggttggcgtgcagtggtgtgatctcagctcattgcaacctctgcctcccggac

SEQ ID NO: 126181 - DNA, 82 bp, Homo sapiens
cggcggcgcagttgcgagtgcaggacagaactgtaccgctctctttttggccagctccaccctcccgacgaaggccacgggg

SEQ ID NO: 126182 - DNA, 80 bp, Homo sapiens
gcaaccgaaaaggagagtttcctgacagtgatgtgtgttctgaaattgtgaaccatgagtctagtacttaatgatctgct

SEQ ID NO: 126183 - DNA, 100 bp, Homo sapiens
gagagaggcaccgggatcgtgaccgagaccgtgaccgagagcgtgaccgagagcgcgaatatcgtcatcgttagaaggctggaggcaaagctggaaagga

SEQ ID NO: 126184 - DNA, 74 bp, Homo sapiens
cggatccgatcccgctctgcacattccaaaggcagtagtattattgattccacagaatacagccaacctccagg

SEQ ID NO: 126185 - DNA, 50 bp, Homo sapiens
gcccagtcctcggtgcggcgcggccagctcattggaggtgaagtgctccc

SEQ ID NO: 126186 - DNA, 83 bp, Homo sapiens
ccagcctgtcgtgatcgacaaccagaaaaatatggctcaggagactaaccagaccccggggcccatgctgtgtagcacaggat

SEQ ID NO: 126187 - DNA, 82 bp, Homo sapiens
gggagctgcaggaggaaggtgctgtggggggagatgtgaagttcatttccaatccgccctccatggtggcagcggggagcgt

SEQ ID NO: 126188 - DNA, 51 bp, Homo sapiens
gctgtggaaagaagttgcaaaacactggctctgcttatgataatgtcaaca

SEQ ID NO: 126189 - DNA, 75 bp, Homo sapiens
tctgcgccgccggcaccatgaggaactgcaagcacatgttgaccagataactgaaatggcagcagtaatgaggaa

SEQ ID NO: 126190 - DNA, 148 bp, Homo sapiens
cccgggtgcagactctgcgtgtccccccgtggcgcacaagcatgtaggtgccagaactcaccgccagagcctgtccagggaccttgacccagcccctctcagcagacgcttcatgataggaaggactgaaaagtcttgtggacacctg

SEQ ID NO: 126191 - DNA, 96 bp, Homo sapiens
tccgccagtcaataggaagtacgagtgtgactaaagatgtgattaaagagattgaagactttgacagcttggaggctctgcgtctggaaggcaaca

SEQ ID NO: 126192 - DNA, 107 bp, Homo sapiens
ctggaggacgagggccagctgacggagatggtgcagaagatggaggagtttggtgccctggttgtcagatgttggaaagcagtaggacggaacatactcttcgtggt

SEQ ID NO: 126193 - DNA, 100 bp, Homo sapiens
agcaatgaatgagcgttccagcttctccgagttagtccttgaccactagtttgatgccatctccattttgggtgacctgtttcaccagcaggcctgttac

SEQ ID NO: 126194 - DNA, 98 bp, Homo sapiens
tttaagatgccaaagcagctcattcacatacagccttccaggtggttcacttatttttaacactctgcagcagcagcaacagcagctctcccagttta

SEQ ID NO: 126195 - DNA, 100 bp, Homo sapiens
tcgtcggaccctttggggctcagtggagaaaccgaaacttcattgccccttcaatgtgggaatccagccagaccctattcttggacagcatcagtgaaag

SEQ ID NO: 126196 - DNA, 74 bp, Homo sapiens
aaaagaagaagcggaaacaacgttctcccgcaaaagtccggtttatcactaaaatatggcatcctaatattagt

SEQ ID NO: 126197 - DNA, 49 bp, Homo sapiens
tgcaacagctcacgggagcaagaacgaatttcgctaaggagtttgtgat

SEQ ID NO: 126198 - DNA, 76 bp, Homo sapiens
caacatccagaacttccagctgcccccagatccggtccgacaaagacaatgacatccccatccggtacagcatcac

SEQ ID NO: 126199 - DNA, 90 bp, Homo sapiens
atggagcctacgtagattcataaggtgctggagaatctggtaaaagcaccattgtgaagcagatgaggatcctgcatgttaatgggttta

SEQ ID NO: 126200 - DNA, 90 bp, Homo sapiens
tctttgttgccctctcctgctttggctccatgaacggtggtgtgtttgctgtctccaggtacacaggcacccccacttcacacagctacc

SEQ ID NO: 126201 - DNA, 82 bp, Homo sapiens
cgtctgccgcccgcgcttcaccggtgatggctggaccggcggaggaggcgggagcccattgtcccgagagcctgtggcctct

SEQ ID NO: 126202 - DNA, 75 bp, Homo sapiens
cgcctggctcggagcagcagcctctgagggcacctggacgatgacggattaccgcacgggttctgcacagtcacc

SEQ ID NO: 126203 - DNA, 87 bp, Homo sapiens
cattgcaaaggaaggacaaaacctgaaagagctatatttggtgtcctgtaaaatcacagattatgatctctctactttagttagaag

SEQ ID NO: 126204 - DNA, 83 bp, Homo sapiens
tgtcaagctggcgcgccagagcggcatcgaggtccggcctctttggcctacccccgttggctccgctgccccaggtcgatgag

SEQ ID NO: 126205 - DNA, 101 bp, Homo sapiens
taagctttgaaaccacagaagaaagtttgaggaactactacgaacaatggggaaagcttacagactgtgtggagtcagcattggtaatagtgctgtgctgc

SEQ ID NO: 126206 - DNA, 50 bp, Homo sapiens
ccgggagttacaccgccaccgccaggtcaaaatgcagatcttcgtgaaaa

SEQ ID NO: 126207 - DNA, 51 bp, Homo sapiens
caaaatgtcaacaaattgatgggattcgctaaatattgtaatggatcaagg

SEQ ID NO: 126208 - DNA, 96 bp, Homo sapiens
gcagtggcgcctaaagtctgagagagggaagtcgcctctgtgctcgtgagtgcatggggtataagtgtgttctaggtcagtggcttcaaagactcc

SEQ ID NO: 126209 - DNA, 83 bp, Homo sapiens
aagaggaggatccacctggagctgaggaaccggaccccggcagctaaggacagaataacgggctcccagattcacaagcccca

SEQ ID NO: 126210 - DNA, 101 bp, Homo sapiens
tcacattcccgtccgacgaggatatcgtgtctggagcagtggagcccaaagacccctggagacatgatggactcaccctgtcacccaggttggactgcact

SEQ ID NO: 126211 - DNA, 75 bp, Homo sapiens
ggacagtggagaaggcccagccaatgaagatgaagacataggagacatcaaggagcacgtgaaacagctagagaa

SEQ ID NO: 126212 - DNA, 101 bp, Homo sapiens
ctttattgtgaacaggtagagtacctgttgttgcagagttattttctgagtcagtttcagagaaatggtcaatgcatggtttgctgagagagttcacacca

SEQ ID NO: 126213 - DNA, 82 bp, Homo sapiens
ttggagaagcaacttttattgctagaatggcccaatatagctttgacaaaatatgaacatcgacatttctgccttctcctgc

SEQ ID NO: 126214 - DNA, 75 bp, Homo sapiens
gccatcttcaaagcctttgctatgatcattgacaaactggaagaggagtttgggctttgcaaaactgagaacaaa

SEQ ID NO: 126215 - DNA, 100 bp, Homo sapiens
cgccatgtccacgttcaggcaggaggacgtggaggaccattatgagatgggggaggagctgggcaggagcagtgaggagaatgaataccttccaagacca

SEQ ID NO: 126216 - DNA, 75 bp, Homo sapiens
taagaagatcatcatgaaatggagatgtgggaactggccagaaggcttctccagctcacacaactccacagaccc

SEQ ID NO: 126217 - DNA, 83 bp, Homo sapiens
ccaccaccaccatctccatcacccaccaacaacaccacaataatccacagccaagagtatcagctctttgccttcattagtca

SEQ ID NO: 126218 - DNA, 97 bp, Homo sapiens
ggatcctgtagaaattcaaaccctagtgaataaagccaagagagaccttggagtaattcgtcgacagggattcgggttcgtaactttcgagaatagt

SEQ ID NO: 126219 - DNA, 100 bp, Homo sapiens
ctctcctggtccagctctcaggacaagaacaaagtgtgctgaattaaacaaccaccatgtcgagcaaaaaggcaaagaccaagaccaccaagaagcgccc

SEQ ID NO: 126220 - DNA, 98 bp, Homo sapiens
tcacagcccgttcggggcagagatgaagaacaggatgatattgtttcagcagatgtggaagagaacatccatgatagcagtcttctgtaaatcgaact

SEQ ID NO: 126221 - DNA, 80 bp, Homo sapiens
ggattccaagtaactcttatttggttcagaagaagaacccagtcctgttttgaaaactttggaaaggagtgccgctagga

SEQ ID NO: 126222 - DNA, 75 bp, Homo sapiens
taccgcctgcgggcgctgggcgagcggcacaccatggacctcactgtgggtgtcgtgaaaactacccctaaaagc

SEQ ID NO: 126223 - DNA, 75 bp, Homo sapiens
tataaattatgatctacctaccaatcgtgaaaactatattcacaggtatcttcaaagaacagtaaaacatccaac

SEQ ID NO: 126224 - DNA, 88 bp, Homo sapiens
tgcacaaggagctgcccagctttgtgggggatgtgggctctcttgatgagaagatgaagagcttggatgtgaatcaggactcggagct

SEQ ID NO: 126225 - DNA, 90 bp, Homo sapiens
tggagccggaagatttctttcatcattggtcggcataaagttcgaacgccgccgctgcccagcagatcccgatctcccttcacacatctc

SEQ ID NO: 126226 - DNA, 97 bp, Homo sapiens
ggaggaggattcgcagttcaacatcaagtctgcgggccaggcatcgacatccgcaacgactatcagcagctgaagcgcctggagaactgcacggtga

SEQ ID NO: 126227 - DNA, 82 bp, Homo sapiens
gacaagccgctggcagccgcggatctcaccgccgctcaggaatgattacggacctgaagccaaagaacaagatgcgctagtg

SEQ ID NO: 126228 - DNA, 50 bp, Homo sapiens
gcagcaaactcttcaggacaagccatacacactgctgctatggatatgct

SEQ ID NO: 126229 - DNA, 98 bp, Homo sapiens
gacggcgagatggcggccgccgggaccttcctgcacccgttcccgagcgaaagctttcgagaggcccgtgccatgagaccgcctggggtgagcaaggc

SEQ ID NO: 126230 - DNA, 83 bp, Homo sapiens
gacgaatgtgaagaaatgttgaaactatttaaagaggttgctagcttacagatggagtctcccaggcgggaatgcaatggtgc

SEQ ID NO: 126231 - DNA, 100 bp, Homo sapiens
ttccagaacatctgggagaatatttaatggaaaatcgcttggttaaaacctgacacttttaacaggagtgaaacacaaatcttttctaacggctgaggac

SEQ ID NO: 126232 - DNA, 74 bp, Homo sapiens
tggaatctcacccatcagacaagggaagcaaaggcgaatgctccttgtgttatatttattgatgaattagattc

SEQ ID NO: 126233 - DNA, 110 bp, Homo sapiens
tgcttggtgtcgtttttccttgagctgaacgtcttgcaacagtggccgcacgcatagggcacattaaatgatcgcacgaatgcaattgattttctaatggataggaataa

SEQ ID NO: 126234 - DNA, 96 bp, Homo sapiens
taccctcttcttcttctgcaacacggccactgtgtacaagatatgtgcctggatgcagctcacctccggtctcctctgagcctccggcctccataa

SEQ ID NO: 126235 - DNA, 90 bp, Homo sapiens
ttgtccaggcgggcctcccgtttctggctccgggctgagcttcctggagaagaggaaggtattagaaaactactcggatgctccaatgac

SEQ ID NO: 126236 - DNA, 100 bp, Homo sapiens
agcacagggtgtccctgaagtgccgcaggcagctccgtgtggaggagctggagatgtataaatcaaagccattctgtgaaaaactgctttcctgggtgaa

SEQ ID NO: 126237 - DNA, 74 bp, Homo sapiens
agacggtcagagtccaaggtccgggtatcttaccagattgctacctgttctgatgacaatacactaaaaatctg

SEQ ID NO: 126238 - DNA, 82 bp, Homo sapiens
tgaccgagagcgtgaccgagagcgcgaatatcgtcatcgttagaagagagaactcgatgccaccgcaacggtattggcgaac

SEQ ID NO: 126239 - DNA, 102 bp, Homo sapiens
aatcgaatctcttctccctccccttcttggctgacaaaccaagaggatttgccagaggtcttgatcctgaaagaataattggtgccacagacagcagtggag

SEQ ID NO: 126240 - DNA, 82 bp, Homo sapiens
aactagttgatgttggttcagactcgctcagccttaaacttgcaaaaataattctagcaacatatctgaagagatggattaa

SEQ ID NO: 126241 - DNA, 98 bp, Homo sapiens
gatatatgttctctaggccttttagaaaacatgggtcgacaagaagatgctgaggaatacttaggcttcattctaaatggacttcatgaggaaatgtt

SEQ ID NO: 126242 - DNA, 74 bp, Homo sapiens
atgtgatgttggagaactatagcagcctagtgtcactgggagcagattctggccagatttctgaagaaacatgg

SEQ ID NO: 126243 - DNA, 100 bp, Homo sapiens
agcccgacggcaccctcgtctccttcaccgccgacttcaagaagatccctcatccacctacatcaggcaactggagagcaaagtgaggctgctggagggt

SEQ ID NO: 126244 - DNA, 75 bp, Homo sapiens
ctgaacattactcttccagaagagcaatttttccagctagtcaaattacgaaagcttggacttagtgataatgaa

SEQ ID NO: 126245 - DNA, 50 bp, Homo sapiens
gttggaggcaagctgctgtccagcattcctctgaatattgatttgctgaa

SEQ ID NO: 126246 - DNA, 75 bp, Homo sapiens
aacaagactgcccacctccacaagggcttcctggccctctaccaaaccgtgggacgactgggtttggattcagaa

SEQ ID NO: 126247 - DNA, 83 bp, Homo sapiens
ggaggtggcagccatctccttctcgattcttcgctgctgctgccttaccgccgagaaccaccacccgccaggcgtcttgcggc

SEQ ID NO: 126248 - DNA, 74 bp, Homo sapiens
cggatcacggtgagggaaagatgagcgaggagacggcgacttctgacaacgactggtagcagtgtttgatgagc

SEQ ID NO: 126249 - DNA, 98 bp, Homo sapiens
gtgggtgtcagtggcgcaccatctgaaaacaacatcatgcagtggaatgcagttatatttggtttcaccagtgatcattaaagaatgggcagcttaca

SEQ ID NO: 126250 - DNA, 74 bp, Homo sapiens
aaatgtgaatgttggaccccaaatggccctggccaacgtcaacattgggagcctcatctgcaatgtaggggccg

SEQ ID NO: 126251 - DNA, 90 bp, Homo sapiens
agtgatgctttatattaactgcaaagtgaatggacatcctgtgaaagcctttgttgactcagggggcaatggcggcttcctgtgttctac

SEQ ID NO: 126252 - DNA, 50 bp, Homo sapiens
tccgtctcaagactgtgaaaccagagataatcattcaggtcttcgtgagc

SEQ ID NO: 126253 - DNA, 101 bp, Homo sapiens
gcctttcccacccaaggacgccgtcagtcctttcagcttcagcctgctcaagaactgcagcattgcagccgccaagacgctccgggaggaagcctggcggg

SEQ ID NO: 126254 - DNA, 98 bp, Homo sapiens
tttctggtcactccccaggattatgcgcgcatgccagagagtattggtggatcttttggtatctttgatgagttcaagaacatgttcagaagagctaa

SEQ ID NO: 126255 - DNA, 98 bp, Homo sapiens
ttttatttggcagatctgaagggaaagctccagatactagcctgctgaattagccaccaagtacgcaaacttttcagagggagcttgcaagcctggct

SEQ ID NO: 126256 - DNA, 115 bp, Homo sapiens
tggatgtggaattctccgtccctttccagggagggaacaaagcccacagcaccggacttaaccaccaccatgtcgagcaaaagaacaaagaccaagaccaagaagcgccctcagc

SEQ ID NO: 126257 - DNA, 115 bp, Homo sapiens
ggatcgtgaccgagaccgtgaccgagagcgtgaccgagagcgcgaatatcgtcatcgttagaaggatcaaaaccattcaagtgcaagatatgccattttgcaacagctcagcttg

SEQ ID NO: 126258 - DNA, 75 bp, Homo sapiens
cagcacctttcggcttctgagacggcggcagcagcggcattcaggctggcagtgatggtgaaagcataggaaact

SEQ ID NO: 126259 - DNA, 100 bp, Homo sapiens
gttctctgctctggacttgggaggctccgttgcctgctcccggagggagacgcgctgccgaggagaacccagcggccggaagaattaacctcgagtctgc

SEQ ID NO: 126260 - DNA, 75 bp, Homo sapiens
ggagcccagttggaagcccgggaccgtttaaaaaactgtcctgaggctttctaccaatgcaggccagtggaagga

SEQ ID NO: 126261 - DNA, 98 bp, Homo sapiens
gactgcctcactgagcaaccaagagtgacagagctgaatgaacctctctccaatgaagatcgaaatctcctctctgtggcctacaagaatgtggttgg

SEQ ID NO: 126262 - DNA, 101 bp, Homo sapiens
gaaaagagcaaattgttacaattggaaataaacctgtggagactatcggttttgactctattatgaaacagcaaagaaggtgatgctctcttacacaacct

SEQ ID NO: 126263 - DNA, 100 bp, Homo sapiens
cctggcgcggaacggtcgtggagaagaagagctgctgatgaggactgggacagctgggaagttatcaattccaaaccagatgaaagacccaggctcagcc

SEQ ID NO: 126264 - DNA, 100 bp, Homo sapiens
agctaaagctaccaaagacgtagaaagaaatcttagcagtggatccaaacttctacagcaaaaacttacttcttttaggaaagacatacttgaaactaca

SEQ ID NO: 126265 - DNA, 86 bp, Homo sapiens
gcctacttcaacatcgagttcacacgctgccacaagaggaccggcttctccaccacccccccccagctgtcttcgcttcgtccaga

SEQ ID NO: 126266 - DNA, 89 bp, Homo sapiens
agggaggcagcagtggcagtccatcgaggggaccaaactctccatcacccaggggaggctgccggcgtggaccgcgggaaggcggggct

SEQ ID NO: 126267 - DNA, 100 bp, Homo sapiens
ctgcagagcgcgcagtacctccgggaatttgccaaagagagagagagagtggagaaccgaagggctttcatgaagctgcggcgccagcagcagattgagc

SEQ ID NO: 126268 - DNA, 75 bp, Homo sapiens
actggcaaaggtgcttcggggacattccaggatcaagaattggttaaaatagttggaatacgatatgaagttggg

SEQ ID NO: 126269 - DNA, 90 bp, Homo sapiens
gccgccccgtcgtcgtctgccttcgcttcacggcgccgagccgcggtccgagcatgtgaaactattgaaccttcctgctagcctccggcc

SEQ ID NO: 126270 - DNA, 76 bp, Homo sapiens
gggtccctgaagagggaagacacgcggaaacagcatctagcctgattccaactcaaacaacgataacagctggaat

SEQ ID NO: 126271 - DNA, 51 bp, Homo sapiens
aaaaccccaaaagtgtacataagatgctggcatcaccatctacatcaggtc

SEQ ID NO: 126272 - DNA, 112 bp, Homo sapiens
ccatgttgcaggcccacagctgcctacagaaccgtcccaaaatatggcaaagaaacctattctgaggtacctaaaacagatccaggacctgcccccaactggcctccctgag

SEQ ID NO: 126273 - DNA, 82 bp, Homo sapiens
cgcgaaccgcagtatcatgctggccaagaagatcatcattaaggacggaggcacggatgatcggctgaatgtaacagaggaa

SEQ ID NO: 126274 - DNA, 75 bp, Homo sapiens
cggcgacggcgcggaggccccgggcgcggcgcagtgaaggagaacgacctgctcagaatgagaagaggaaggaga

SEQ ID NO: 126275 - DNA, 50 bp, Homo sapiens
cagaaacaaaatgtcaacaaattgatggggatttcagtcataatcggttg

SEQ ID NO: 126276 - DNA, 83 bp, Homo sapiens
gaaatttgcccgctaacaggccatctgtgtgagaaaccaaggtgtatgttggtaacctgggaactggcgctggcaaaggagag

SEQ ID NO: 126277 - DNA, 95 bp, Homo sapiens
tctgagactgcagctgctatgttaagaaaacataccaatattgttgcacagactaggactgccaaaaagagcaagatcctgtccaaggaagaaca

SEQ ID NO: 126278 - DNA, 100 bp, Homo sapiens
ggcgcagtacaccaacgcggtgcgcgaccgggagctggacctccgggataaaccgagaaaactggtgtacaatagagccatgccctgatgcagcatctct

SEQ ID NO: 126279 - DNA, 75 bp, Homo sapiens
atgaagagcctagcacctcttatactgatgacttggcctttaccctggaagagagacagcaattgaacattcatg

SEQ ID NO: 126280 - DNA, 98 bp, Homo sapiens
ctcaggatgtcggggttcaggctgctctagccaagagcttagaagatgctctgaggcaaactgcaagtgtcactctgcaggctattgcagctcagaat

SEQ ID NO: 126281 - DNA, 98 bp, Homo sapiens
ccacccctaaaagcacctggccccgctacagcaaaccagggaagaaggagaaagggccaacccctgaagaagcaatacagaaactgaaggagacagag

SEQ ID NO: 126282 - DNA, 100 bp, Homo sapiens
cgaaagtgaaaacaaacgttattccagccacacatctctggggaatgtttctaatgatgaaaagtgattctcatcagttccgtgtaatggcagctgtcct

SEQ ID NO: 126283 - DNA, 89 bp, Homo sapiens
aaaaatccacgatgtcatccagcagctccccccaccacactacagatggagtttcactcttgtctcccaggctggagtacaatggcatg

SEQ ID NO: 126284 - DNA, 100 bp, Homo sapiens
cctgtctctgccctcctggcgggcccggcggctctcactatccagtaagactttgaccccgacgcaggcttcagtgattgccgcggatcagaagcctgag

SEQ ID NO: 126285 - DNA, 100 bp, Homo sapiens
atagccatcgacttcggggagcagatttcagccttccaagttctgatgtaacaaacaacttaaaacccagtcttcatccacagatgaacttgctagcctt

SEQ ID NO: 126286 - DNA, 90 bp, Homo sapiens
ctgacctcggtttcctggacccattccgactcaggttgtctgcattcaaaagagcattctattaaagctaccttaatttggcgcttattt

SEQ ID NO: 126287 - DNA, 100 bp, Homo sapiens
cggagtcctgttccaccttcagagcgtcacggcgtacgccctcatggggaaaatctccccggtgactttcagagagtcacaccccaaagcctctttattc

SEQ ID NO: 126288 - DNA, 75 bp, Homo sapiens
cccacccaacgcgaagacggtaacccgtgtgactttgactggatttttaaagagcgagaagaagatttgaggcgt

SEQ ID NO: 126289 - DNA, 83 bp, Homo sapiens
ggagctggggcgacgaggcgattgcgggggcctgggctaggactaatttattattgtgcaactgccagtcctgcgcattccag

SEQ ID NO: 126290 - DNA, 76 bp, Homo sapiens
ttccgaggaagctaaggccgcgttggggtgagaccctcacttcatccggttgttcctggtcattgagtacgtcaac

SEQ ID NO: 126291 - DNA, 100 bp, Homo sapiens
aggaagtaaaatggcggacctggcgaacgaagctcctgcccctcctaaagctgaagccaaagcgaaggctttaaaggccaagaaggcagtgttgaaaggt

SEQ ID NO: 126292 - DNA, 100 bp, Homo sapiens
aactgaccgaattaaaatttatacttcgcaaaactcagcaattttttgatgaggaacgtcaaggtcgtgggaaataaaaggcagttctacacagactgca

SEQ ID NO: 126293 - DNA, 123 bp, Homo sapiens
aggaagtactgagcctgttggaggaactggcccggaaacaggaggacgtggtctttgggaagaagcttcctgcctttgccaccatccccatccaccagctgcagcatgagaagaaatatgata

SEQ ID NO: 126294 - DNA, 82 bp, Homo sapiens
gagccacacatccccgaccacttgcggcctgagtatgctttagatagtgacgggggcagagagctggactgccagctgtgcg

SEQ ID NO: 126295 - DNA, 50 bp, Homo sapiens
tattcctcatgacattgctgtctgaaaaattggaagctccaccacccacc

SEQ ID NO: 126296 - DNA, 98 bp, Homo sapiens
ctctctgctgcatgcactattgctgtaaggtgtgggttgctgaccgaggaaataaaagaatccaagtatttgataaagacactggggagtggttagga

SEQ ID NO: 126297 - DNA, 75 bp, Homo sapiens
agaacagagaagggagctctatagtcggagtggagaactgcaagcatctggaatcaagagacccatggcatctga

SEQ ID NO: 126298 - DNA, 74 bp, Homo sapiens
tctcctacggattctggacttgccagccccacaatcatgcctccctattccctgagacacaacagtattgaaat

SEQ ID NO: 126299 - DNA, 75 bp, Homo sapiens
ctgcgcgcaggctgggctgcaggctctcggctgcagcgctggatgctgcctcgaactctgtcactgagaccccac

SEQ ID NO: 126300 - DNA, 100 bp, Homo sapiens
ggttgaagtgatgcacaccaccaacattcttggcattacgcaggccagcaactcccagctcaatgcaatgagccatcacattggagaatcagctggtgat

SEQ ID NO: 126301 - DNA, 100 bp, Homo sapiens
ctgccttgctgcaagaaggccgtgtgcgaggagtgcctcaaagtctacctgagcgcccaggtcctcagaatggttggaatgaccctccagctttgaacag

SEQ ID NO: 126302 - DNA, 50 bp, Homo sapiens
tctggaggagccttctcaagaacagagagcatgcaagcggcaagatgtcc

SEQ ID NO: 126303 - DNA, 100 bp, Homo sapiens
gcaactgtgggcgacataaatacagaggccagtaatagtagccatgagtctcgtattggtctagctgaggggttggaatccgagaagaaggcagttatac

SEQ ID NO: 126304 - DNA, 97 bp, Homo sapiens
acgtggcatgttaccactgtgaggtctcctcaggaagatgaaccctcccttgcagaagcgggagctgccccagagagtctgtgtgagatgaagacag

SEQ ID NO: 126305 - DNA, 50 bp, Homo sapiens
gggcaaagcccaacaccttcccccactgtgggaggcgaaagtgcaacaag

SEQ ID NO: 126306 - DNA, 49 bp, Homo sapiens
gatcttcattgctttcctctggactttgtgtgttttaatagaaaagttg

SEQ ID NO: 126307 - DNA, 101 bp, Homo sapiens
gttcccgggccagcctggggcggccggccaggaaccacccgttaagcacactgatttatgtcagtacatggacaagcaccctggggggctgcatccagata

SEQ ID NO: 126308 - DNA, 98 bp, Homo sapiens
tctagagctttggaaggctgaatgcactaaacatgaagagcttgaaagcgaagttcaggaagagtgacgtagacgttacatccaagaggaaataatcc

SEQ ID NO: 126309 - DNA, 100 bp, Homo sapiens
atgggtccgtggtcgtttgtttctccaaggtttgaaaagcagctggcctgcaagcctacaacacagcagtcccctcaggatgagcaggaaaagctcttgg

SEQ ID NO: 126310 - DNA, 100 bp, Homo sapiens
atggctgtcagtaccttccgaaagctgaacagatggagtcggataactgttcaggaggagatgatgactggacccatctgtcttcaaaagaagtggaccc

SEQ ID NO: 126311 - DNA, 50 bp, Homo sapiens
ggaactggatgtcagcaagaatggtgtcatcaatcttacagaagaagtgc

SEQ ID NO: 126312 - DNA, 100 bp, Homo sapiens
agctgatgtatacacgtttaatttttctaaagagtcttgttatttcttctttgagaaaaacctgaaagatgtctcagctcccttctgttgccacatttgg

SEQ ID NO: 126313 - DNA, 100 bp, Homo sapiens
taatggaagaagatgaagatgcttacaagaaacagttctctcaatacataaagaacagcgtaactccagacatgtgaatgaactcattcttaaacagaag

SEQ ID NO: 126314 - DNA, 83 bp, Homo sapiens
accagattctgcgcgtcaacgacaaatccctggcccgggtgacccacgcggaggccgtcaagttccaaagaactactggttca

SEQ ID NO: 126315 - DNA, 100 bp, Homo sapiens
ggtaacggcccagaagcccaccgccgtgaacggctgcgtgaccggaatacctccacgggcccattcccgagattctagtgattctgctgatggacgggcc

SEQ ID NO: 126316 - DNA, 90 bp, Homo sapiens
tcaagttaatcatcagactgtgactattgggaagaagttacctgcaactacagcaactccagactcatcaaaaacagaaatggacagcag

SEQ ID NO: 126317 - DNA, 99 bp, Homo sapiens
agtcgggctctggaggaaaagaaaggttccttctgatgatgggcgtgcttttctgctgcggagccggcttcttcatccggaggcgcatgtaccccccgc

SEQ ID NO: 126318 - DNA, 100 bp, Homo sapiens
attggaaactctttgggaaagccactcgaaaagatggagtgaaggtacctgagcgcaggaaccatggtcttcattgctgcctcagcattagcggaagtgc

SEQ ID NO: 126319 - DNA, 133 bp, Homo sapiens
agcctcagaagaaagacgttcaacgacttactggggagagaaagaaaaggaacgggagctgagagagggctctgaactcctacttcgagcctccggtggaggagagcgccttggaacgccgacctgaaaccat

SEQ ID NO: 126320 - DNA, 99 bp, Homo sapiens
ccaaggtgctgagccggcgcggggtcggcgctgggctggaggcggcggagcgcgagagcttcgagcggactcagtggtacatgatcagcattgtccaca

SEQ ID NO: 126321 - DNA, 88 bp, Homo sapiens
gcgctggagaaatacaacatagagaaggacattgcggctcatatcaagaagattgcagcaggagagaagattcctttgagccaggaag

SEQ ID NO: 126322 - DNA, 80 bp, Homo sapiens
agaaggcttggcctacatctggatgccaacaccagatatgagcaccgaaggttgaaaatgaatatggcagctactttgcc

SEQ ID NO: 126323 - DNA, 75 bp, Homo sapiens
gaggattcagggaataggagctggggagcccttctgcgccacaggggccaactcaccctatgcagcacagcccac

SEQ ID NO: 126324 - DNA, 101 bp, Homo sapiens
catccttattgctacagatgtagcctcccgtgggctaggaatgggtaccacagaccatgtcatcgtcctggcgtccacgaaccgagctgacattttggacg

SEQ ID NO: 126325 - DNA, 75 bp, Homo sapiens
tactactatcctcattatctccaaaccaagatacgaggaggaaagctcatgatcacttacacccgtaaaagtgac

SEQ ID NO: 126326 - DNA, 75 bp, Homo sapiens
aattaaagagtaaagttgtgctcaacgttcacttcttcaactgagatggacatgatataatctccattgagtcaa

SEQ ID NO: 126327 - DNA, 100 bp, Homo sapiens
ggacccactatcagatcactaagaacagactgtaccgggaaaatgactgcatgttcccctcaagctcccagggttgctagagctccttgtagaatatttc

SEQ ID NO: 126328 - DNA, 75 bp, Homo sapiens
ggaaagcgaccccggggtcttcaccgagctcattaaaggattcgtgaaatacgagcggattaagttcctggtcat

SEQ ID NO: 126329 - DNA, 75 bp, Homo sapiens
tctcagcaactttgccaccagcagccacaacagatcagacatccggctccgggttcgagcagagtactgcgagca

SEQ ID NO: 126330 - DNA, 75 bp, Homo sapiens
atgatgagaggatgtggtggtctactctgatgtcaatcttgagggctaggctggagtaaaagggacattgggaag

SEQ ID NO: 126331 - DNA, 76 bp, Homo sapiens
gccgccgcgggctccggggggcggaaagatctaggagagagggagaaattgatgctgccagaaagaggggacagtt

SEQ ID NO: 126332 - DNA, 100 bp, Homo sapiens
cagtaatggtggatgaagttgttcattgtttgtcaccacaaaaaggacaggaaagatatgatccgccaaatgatgattaaaatatttcgctgcattgagc

SEQ ID NO: 126333 - DNA, 122 bp, Homo sapiens
ttttcgacgcctccgccgccgcctgaggaggcgagctagccgggagttacaccgccaccgccaggggtattccctcagcggatactacacccatccatttcaaggctatgagcacagacagc

SEQ ID NO: 126334 - DNA, 101 bp, Homo sapiens
cgcagagcaccaggcccaccgtgaaagatagctgatcagcttccttgggttttgctgatgacacaagagagctttgcctgaagatggaaacactggagtca

SEQ ID NO: 126335 - DNA, 100 bp, Homo sapiens
ggtggtgccgcgctcctggccccgcgcgggcggacggcggaggcgcctcccaggaatatatgcagaacatgtcctgcggcccaagaatcttggacttgca

SEQ ID NO: 126336 - DNA, 148 bp, Homo sapiens
ggggagcctcaaggcccacccaaagccttgggcagctgctatgtgggcaagaggctgcctccaccatattagagctctggcccctcctcaggccgaatggatcagcttccccagaagaatctcctgcgactacaccctgctggctctg

SEQ ID NO: 126337 - DNA, 75 bp, Homo sapiens
ttactacctgaagatcaactactcctgcgaggaaaaggttaaagaattgcccacccttaaggatatggactttct

SEQ ID NO: 126338 - DNA, 107 bp, Homo sapiens
cgaacgcttcgctggccatttaggagctctgctcaaagccagacggcattgtttccaagtcgtacgagtgccgtctaaagggacaaggagccaccttcgtggagaca

SEQ ID NO: 126339 - DNA, 74 bp, Homo sapiens
cacagtcaagacgatcatagtcactgtgcaactgcagatagaagacctgactcgtaaactgcgcacaggagacc

SEQ ID NO: 126340 - DNA, 101 bp, Homo sapiens
tttgaagcgcttcaaaggaccggacccagagaagaggaaaactctaccggtgcagaagaatggttgagaccggtgatgagaaaagagaagcaagtgttagt

SEQ ID NO: 126341 - DNA, 75 bp, Homo sapiens
gcgacctccaaggatgcccgtgagcctgttgtcggggccagaaagtttcctacactactgaggtttaggggcact

SEQ ID NO: 126342 - DNA, 90 bp, Homo sapiens
atggacaagcttaataaaataaccgtccccgccagtcagaagttgagttttcatatgagtccaacaagcaatgaagacctcaggaaaatc

SEQ ID NO: 126343 - DNA, 76 bp, Homo sapiens
caaacatgttttatcaatgcagctaagaactgaaggcagaagctagtctaatggaccagatgagtagttgtgatag

SEQ ID NO: 126344 - DNA, 96 bp, Homo sapiens
cagggttcgtggataataaactcaagcagcgagtcatccagcctgatgtgtgagaagcggatattggcggcagtgaccagtgcgggacaccccttc

SEQ ID NO: 126345 - DNA, 100 bp, Homo sapiens
tagccagagaacagccctccatcttgcagcccagaagggctatggaacacacctgatgaatcatttgaaagaatatcacataaagcatgacatcctgaac

SEQ ID NO: 126346 - DNA, 51 bp, Homo sapiens
agcaaagaggagctgatagcggagctgcagatgaagactggcccatttgca

SEQ ID NO: 126347 - DNA, 87 bp, Homo sapiens
actttgtaatccggatccaggatggtactggtgatgatgaacagtctacacagatggctgcaagttgggaagatgataaagttacag

SEQ ID NO: 126348 - DNA, 74 bp, Homo sapiens
tcacacaggatccgcccctggacatggaggagaaggtccgcttcaaatctacgaactgcgtgtgatggagacca

SEQ ID NO: 126349 - DNA, 75 bp, Homo sapiens
atggctaatgaaagcctggaagaacattagaaccaccatgaggaggactcatctgatgatgtgagaagagttcag

SEQ ID NO: 126350 - DNA, 75 bp, Homo sapiens
gatgggaaaccacgcaggcaaacgagaattaaatgccgagaaggccagtacgggtatcagcatggaagccatgag

SEQ ID NO: 126351 - DNA, 116 bp, Homo sapiens
ccgccccgcgagcacagagcctcgcctttgccgatccgccgcccgtccacacccgccgccaggctggggccgggctggcggggccctcccgactgacttccccttgcagaacccag

SEQ ID NO: 126352 - DNA, 82 bp, Homo sapiens
gtccgtccgccgccaccacccactccggacacagactcggtgaaatacctggagtgctcagctctcacccagagaggcctga

SEQ ID NO: 126353 - DNA, 90 bp, Homo sapiens
gatgagcctgcagagcgcgcagtacctccggaaatctgaaatagagtactatgctatgttggctaaaactggtgtccatcactacagtgg

SEQ ID NO: 126354 - DNA, 100 bp, Homo sapiens
tctttttggactgggaatcatatcagtttagaacagaagaaattgatgctgtgtttcatggtgcagtttggccccaggtggttgtgtcaaaccgattggt

SEQ ID NO: 126355 - DNA, 75 bp, Homo sapiens
tgacgggtctggagtgcgtgggggaccggctgttggcgggtcattagtaattatcagcactttagatgggagaat

SEQ ID NO: 126356 - DNA, 76 bp, Homo sapiens
agagtggctatggtgggcaaactaagccgattttccggaaaaagtggccataaaatgcagtaaaaacaaatccagt

SEQ ID NO: 126357 - DNA, 75 bp, Homo sapiens
cagattccaaaggcacaggaagaagcttgcagatcctgtttgaccaaactcagagatcaattaaggcacagcttc

SEQ ID NO: 126358 - DNA, 90 bp, Homo sapiens
gcgcaacaggtgcccggcttgcagcgctgggtgcggcggctggaggcggagctgcaacgctacaggtttcgcgtctcgcatcttcccaga

SEQ ID NO: 126359 - DNA, 83 bp, Homo sapiens
cgcgggtctgtcatcatgtcgcgttacgggcggtacggaggaggcctgaggtcctttcgagactgctggggaacctggtggtg

SEQ ID NO: 126360 - DNA, 76 bp, Homo sapiens
aatggaaagcctttggaatagcagtgttccagtgtgtgaacaagacaaatctgaccttgaaaacagtgtgatgcag

SEQ ID NO: 126361 - DNA, 75 bp, Homo sapiens
ggcgactgggggctgaagagcgcgccgccctctcgtcccactttccagctgatgttctaatcatgtcagataaag

SEQ ID NO: 126362 - DNA, 74 bp, Homo sapiens
aagctgataggctgcgctaccggaatgtcatccagcgagtgattaggatgaatctggttatagatggacaagag

SEQ ID NO: 126363 - DNA, 101 bp, Homo sapiens
cctgtgcagaaagctttgtactgggatgtgatgttggagaactacaggaacctggtcttcctggttgaggagctcaagcttgggaaaatggtgtgcattcc

SEQ ID NO: 126364 - DNA, 100 bp, Homo sapiens
accgacaattcgaccccacacaaggaggatctaagcagcaagaaaagcaaactcaagttcctgcctcctcaggcggagcaagaagactccaccaagttca

SEQ ID NO: 126365 - DNA, 100 bp, Homo sapiens
gccagcgaatacgcccacagggggctggacaagttggaggagaacctccccatcctgcagcagcccacggagaagagcagcggaaagagctcagtgctag

SEQ ID NO: 126366 - DNA, 112 bp, Homo sapiens
ctcgtttctcagagccggcggatgttcatgggcagcaccatcgagccagaagcagtatttgtcctggtactccaaagattcaggtttactcacgtcatccagcagagaatgg

SEQ ID NO: 126367 - DNA, 100 bp, Homo sapiens
tgtgtgtgtgtttaggttgggtgtacgatgtgtcagcagagcatgcagaagtcctcgctggagtttcataagaggcggggtttcaccatgttgcccagac

SEQ ID NO: 126368 - DNA, 75 bp, Homo sapiens
aaagaaacaaaagttcacctctgcgaaggtgaccaagaatatggcccaggtgaccaaagccctggacaaggccct

SEQ ID NO: 126369 - DNA, 82 bp, Homo sapiens
aaatggcaagacgaactcaaccagcacaacagatagcctgggctggaagctcttctacgtcacaggctgcctgtttgtggct

SEQ ID NO: 126370 - DNA, 80 bp, Homo sapiens
ccgatgtccaggggtcttgtgcaggacctgaaagtgagcatctttccttgaagaagtacattattgacattgtggttgaa

SEQ ID NO: 126371 - DNA, 90 bp, Homo sapiens
actctctgaagaccaggcccgtttctacttccaggatctgatcaaaggcatcgagtactacatgcgtcgggatgtccaggaaatttttcg

SEQ ID NO: 126372 - DNA, 100 bp, Homo sapiens
ttcaggccagagttgtgggccgccgtcggcagcaagaacagagagagaggtggacagatctgagagatactgagaagggagagaaggtacccaaagggaa

SEQ ID NO: 126373 - DNA, 82 bp, Homo sapiens
gcgggagctggacggcgagcgcgagcggcgcgagaaataatttctatgcagcccccgacccagagccgagctccacttctgc

SEQ ID NO: 126374 - DNA, 100 bp, Homo sapiens
cagaacttcctcggccatatggaggggtcatataatacccttgtgtcttcagtttgagctcaagactgcagtgcagatgacgacaacttccttgtgccca

SEQ ID NO: 126375 - DNA, 76 bp, Homo sapiens
ctgaggtccactactccctcctgaaagggaaagggaagcagctgaaaaaaaaaagaaagaggatgaagacaggagc

SEQ ID NO: 126376 - DNA, 78 bp, Homo sapiens
ttttgcccttatcagtaacacctgaggaagtgcacggctgtctataacgtgctgccgggtctcaggatggaggagtga

SEQ ID NO: 126377 - DNA, 100 bp, Homo sapiens
atagaaagaaatgagcagctttggataatgacgacagcaacccgaagacagggaaatttagctgtccctttccccccaacacatcgcttgacatctgaag

SEQ ID NO: 126378 - DNA, 90 bp, Homo sapiens
agtctcagatgagaagagaactgaacttgggaagctggcccggaggctgtttgatgtcctgcacgagcccttcttgaaagtaccctgatg

SEQ ID NO: 126379 - DNA, 82 bp, Homo sapiens
tttctatcttctggtacatctgaatccacattcatctcaatggaaggatcctgccttaagtcaacttatttgtttttgccgg

SEQ ID NO: 126380 - DNA, 100 bp, Homo sapiens
cgggaggaaggaacgaggcaaggagctaaagcagcgtgcgttcagccctgggtgagacggtttaagcggaagcatcttactgccattgactgccagcatt

SEQ ID NO: 126381 - DNA, 73 bp, Homo sapiens
aattttaagaggagaagattatggtggaaattcttgcttctcttcagaaaccaaagaagatttctttaaaagg

SEQ ID NO: 126382 - DNA, 90 bp, Homo sapiens
agggctagcgcgagatctcctagaaggatgatcgctgcaagatccctttattcatgctaatgtcctttatgccggcctctgctgtccccc

SEQ ID NO: 126383 - DNA, 95 bp, Homo sapiens
aaatgggaatgtacacgataattaaagagtaaagttgtgctcaacgtggagttcaagagtttttaagaatgtggcagtgatccctcctggaactg

SEQ ID NO: 126384 - DNA, 100 bp, Homo sapiens
ggcttactgaatatcctcttataattaatgcaataaaacgcttccatctttatccagagacatatgtagagtgtgtcggtcagaaggaacacctgagaaa

SEQ ID NO: 126385 - DNA, 100 bp, Homo sapiens
actgctgtgcctcctcctcctgtggtggaggagaaggaaagacgagggaactgagctgtcaaaactaagtgacttgattgaggccatgcagctggcgagg

SEQ ID NO: 126386 - DNA, 75 bp, Homo sapiens
tgaaaacttccgtgttctagtgaaacagaagaaggccagctttgaggaagattcatgcccaagcacaaaacaacc

SEQ ID NO: 126387 - DNA, 100 bp, Homo sapiens
ccctgagatagcagctgcgattgaggaagagcgagccagcgcccggagcaagcggagctcccccaagagccggaaagttgtgaatgggagagttcacatc

SEQ ID NO: 126388 - DNA, 100 bp, Homo sapiens
cttcctgagcagagctctccgggttccccggctcgcggggcccggcgaagggcagagacgaggtcttgctacattgtccaggatggagaagtaggaattc

SEQ ID NO: 126389 - DNA, 71 bp, Homo sapiens
tgccctggcacccagcacaatgaagatcaagatcattgccactgcggtttgccacaccgatgcctataccc

SEQ ID NO: 126390 - DNA, 109 bp, Homo sapiens
gaaacttccccattcggtgcaccaagagcagcctcacatggtgtgggccgacatcaagagctgcgagatccaacaggtcatcatcagatttgaaatatttaaagtggat

SEQ ID NO: 126391 - DNA, 75 bp, Homo sapiens
gcagagtgctgatgtgaaaaataccacgacaaaaccaccctagttgtgcccacgtgcctcagggccttggtagaa

SEQ ID NO: 126392 - DNA, 75 bp, Homo sapiens
cagaagctcaaagagtccgtggggcccgataaaagtgaaggatgtaatagatcgtggcccttcaatttagaagag

SEQ ID NO: 126393 - DNA, 100 bp, Homo sapiens
caaatacagtgacagcacaggtcacagtaaggccaaaaatgtgcatactcacagagttagagagagggatggtgattttgatgcatacgaaagagatggt

SEQ ID NO: 126394 - DNA, 82 bp, Homo sapiens
aagaagaggtcccaatcccccactctttccgccctaatggaggtctccagtttcgatgagcagcaccagcagtaagagggct

SEQ ID NO: 126395 - DNA, 80 bp, Homo sapiens
cacataacggggttcgggtgtctcgtgtgtgaacatcacagttgcagatctgatctcttctgaacacctcatcgtgtctc

SEQ ID NO: 126396 - DNA, 75 bp, Homo sapiens
actgtcgtatcctatatcatgcagagaaaagagatggaaacttacttgaagaagaaactggcgatggaatatgag

SEQ ID NO: 126397 - DNA, 75 bp, Homo sapiens
agcagccgatccagcctgcggagcctgtggggcagattctggctgtgactcagtcactgacactgagcctgagga

SEQ ID NO: 126398 - DNA, 90 bp, Homo sapiens
ctggataaggaccagtacctgcccaggaaactggtcaagccgctgctgcaggtgagccggcaggaggaggagatgatggccaaggaggag

SEQ ID NO: 126399 - DNA, 74 bp, Homo sapiens
caaagagaaagtaacaagaatcattcttgcagcatttcgtcagatgggatcagagcggatggagatgcggaagc

SEQ ID NO: 126400 - DNA, 82 bp, Homo sapiens
caaaattctgaactcaggacttggcaatgcacagccagaggacaacacatcacacacaagaaacagttgtgctcatgtgatg

SEQ ID NO: 126401 - DNA, 83 bp, Homo sapiens
cacaccaccgcactgtcgctgcccgcctgccctgaggagtccccgctgcttggggtgagcccctccagactccgaataggaga

SEQ ID NO: 126402 - DNA, 142 bp, Homo sapiens
cccatcatcacaactgtcatcactctgccgcacgtgattgtggagaatatccctctccatgtgaatgcagtctctgctggatgaaccgaatcctaacagtccagccaatagccaggcagcacagctttatcaggaaaacaaa

SEQ ID NO: 126403 - DNA, 102 bp, Homo sapiens
cgggctctttggatctaaacctgccactgggttcactctaggaggaacaaatacagatttcagccttccaagttctgatgtaacaaacaacttaaaacccag

SEQ ID NO: 126404 - DNA, 100 bp, Homo sapiens
tcttgagaattcagagaaactgctgagtgaccactgaacgaaaagatctaatcttaaggcttactattggtaaaggttttcaaggtgtcatgaaaagatg

SEQ ID NO: 126405 - DNA, 101 bp, Homo sapiens
cagtggtgtttcacgcttccatccccagaccatcaattattgacacgcccaaggagttgatccctgaattttattatctccctgagatgtttgtcaacttc

SEQ ID NO: 126406 - DNA, 100 bp, Homo sapiens
atatcttgttttgcaggatttgttaaggattccaagtaactcttatttggataaagtggccagtgtgtacgaagccccgggctttttcctggacctggag

SEQ ID NO: 126407 - DNA, 83 bp, Homo sapiens
ccgggattcccagccatggcagattcctccgggcagcaggacctgcctagagctggaacgttacctccagagcgagccctgct

SEQ ID NO: 126408 - DNA, 100 bp, Homo sapiens
atcaaaaggcagaaccagtcccttgtgtatggcaaagtggatagcttctggaagattgtgcttcaagaagaccatagggaagaacgcattttcatcttgc

SEQ ID NO: 126409 - DNA, 100 bp, Homo sapiens
cgcctgcctccgccggctacagcgggaagagcggttggcgctgtacgtttatgagtacctgctgcacatcggtgcccagaagtcagcccagaccttcctg

SEQ ID NO: 126410 - DNA, 75 bp, Homo sapiens
cccacttgttcgcggcctatagatcttggagtctctgtggatcgttatgagccggaatgtgagcctgctgttcac

SEQ ID NO: 126411 - DNA, 81 bp, Homo sapiens
ctggcctgggcgctccggtggcggcggagccttgccaacattccactaacccccgagactcagcgggaccaggagcggcgg

SEQ ID NO: 126412 - DNA, 82 bp, Homo sapiens
gctacctgctttatgggccccctggttgcggaaagagcagttttatgcaaggtgcccggcgacgactgcccgctggtgtggg

SEQ ID NO: 126413 - DNA, 82 bp, Homo sapiens
aacgcagacggtgcgcctgtgcagccctcccaggtggagtacacggcagactgtactccaaagattcaggtttactcacgtc

SEQ ID NO: 126414 - DNA, 90 bp, Homo sapiens
aggcggcgcggcggccactgggcgcagcacccagaagctccaccatgaggcgaggtggatggaggaagcgagctgaaaatgatggctggg

SEQ ID NO: 126415 - DNA, 83 bp, Homo sapiens
cgcggagccggagccgcagaggctcccgggctggactcaggcttctcagtaccatggggcgcaagttggaccctacgaaggag

SEQ ID NO: 126416 - DNA, 83 bp, Homo sapiens
cctcgctaaggaattcccggcccctcagggccacggctttagcggtgtcttttgcggatgaccatgaaagctgtggttctaat

SEQ ID NO: 126417 - DNA, 100 bp, Homo sapiens
ttcagtatattggagaatcgcaaggatatgatatcatggaaccagcagcaaagaagtgctatctggaaagagagtataaaggtgcacatgtaaagccagg

SEQ ID NO: 126418 - DNA, 98 bp, Homo sapiens
tcattcagacctggtacacctgcacaggggacggcaaaacagaacagaaaggcggagataaaaagaggggtgttaaaagaccacgagaagatcatggc

SEQ ID NO: 126419 - DNA, 98 bp, Homo sapiens
gacgctggaaagtcggccaagaaagacaaagacccagtgaacaaatccgggggcaaggccaaaaagaagtgccggtggtggtgtgcacattgagcccc

SEQ ID NO: 126420 - DNA, 98 bp, Homo sapiens
ttactctaaaggaggtattccttgcagaagtcattgtggttacaaccagggatgttcaaaaggctctatgtgcagaattcaagatgaaaatgaagcca

SEQ ID NO: 126421 - DNA, 83 bp, Homo sapiens
aggggcgccggctggggtgtgtgctcctggaaccataaatccatggctaaccttgacaaatacactgaaacattcaagatggg

SEQ ID NO: 126422 - DNA, 83 bp, Homo sapiens
cggaaagagagagcaggctgaagaggaacgatatttccggtgtttttccaggtctgaccacctggccctgcacatgaagaggc

SEQ ID NO: 126423 - DNA, 98 bp, Homo sapiens
gctgcggacaacaaacaaagggacccaaaaatgtcttgtattagagtcacaattgatccttaaacttaggaacagttgggttttatcggacccagtac

SEQ ID NO: 126424 - DNA, 90 bp, Homo sapiens
agagaggatttgcttttgtaacttttgatgatcatgatacagttgataaaattgttggtgtcatcaatcttacagaagaagtgctgtggg

SEQ ID NO: 126425 - DNA, 73 bp, Homo sapiens
ctgactgccccgcatcaccggagcgtcccagctgcgaggaggtaagaatgattgatgttggctgatattggag

SEQ ID NO: 126426 - DNA, 90 bp, Homo sapiens
ggaggcggcggtgacaacgacggcggtggtgacgggcaccgggctcgcggggcgtctctggccgagcctctttttgtggaaaacgacagc

SEQ ID NO: 126427 - DNA, 96 bp, Homo sapiens
ccatcaacctggaggagaacgagatcgtaggactacctgattgctctgtccctgcagcagcaacagccacgaggcccgctggggcttaccgacttg

SEQ ID NO: 126428 - DNA, 82 bp, Homo sapiens
tgggaacatgacgcaggtgcaggtgtctcttctcgccctggcggggaagattggtgctgaagacatggacggcttccaggca

SEQ ID NO: 126429 - DNA, 100 bp, Homo sapiens
ccgcctcgcctactcactctggagccaccccaactgtaaacttgaagacaagactgaagatggagaggcactagattgtaagaagaggccggaagacggg

SEQ ID NO: 126430 - DNA, 75 bp, Homo sapiens
ttcttcacctatgagacgctcaagagcttgcacagagctgcagggaacatgccaaggcagttggaaatgggcggg

SEQ ID NO: 126431 - DNA, 90 bp, Homo sapiens
cagagccacgtcatccgcggctacgtgggcaaccgggcggccacgttcccgctgcagggcagagcggcttgggtaaatccaccttaatca

SEQ ID NO: 126432 - DNA, 110 bp, Homo sapiens
agtctcaatatctgtcttcggtggactccttcggcagtccacccaccgccgccgcctcccagaagtccattggaatattaagcccaggagttgctttggggatggctgga

SEQ ID NO: 126433 - DNA, 101 bp, Homo sapiens
aggtgaagccaagaacagcattactgattcccaaatggatgatgttgaagttgtttatacaattggtaaaaatgcatttgcaaagggagaaaatgaaggcc

SEQ ID NO: 126434 - DNA, 100 bp, Homo sapiens
cagtcctaccatgtcagccttcccagtagctgggaccacaggcatatctcacagatttcctctgccagtttgctcagcagccctgctacataatgttttc

SEQ ID NO: 126435 - DNA, 95 bp, Homo sapiens
gactggcccagcagatggagaatagaccctctgtccaggcagcattaaaacttaagcagagatggacagagacgtatgtgcgttggtctcctaag

SEQ ID NO: 126436 - DNA, 82 bp, Homo sapiens
gagttccttagttgaaaggtgcgccctgctgtgacaggttcttctgagctatgaaggggcccagatttaagggctatttttg

SEQ ID NO: 126437 - DNA, 75 bp, Homo sapiens
cttagatgaatacccagaagcagttagcaagaaagtggaatcaactggtcacacagcggcagtgataaagagcac

SEQ ID NO: 126438 - DNA, 112 bp, Homo sapiens
ctctgagaaaccttggacagcagattttggtttaatatctgattgggacaacattcagacccatttccagtcatgactgccactggtgacatgccaacttaccagatccgag

SEQ ID NO: 126439 - DNA, 83 bp, Homo sapiens
gccgacgcgcagatagcagagccatccttggggtccaggtgcaggtacagcagtctccgcaacaggtctcggctcagctctcc

SEQ ID NO: 126440 - DNA, 80 bp, Homo sapiens
ttggcagctttagtacaggtctttatcttccaactagttctggacttcagtgaccccttcagcactgaagtgaagccgag

SEQ ID NO: 126441 - DNA, 90 bp, Homo sapiens
ctagataacagtctgcactttcacccgtttcaggtggagccgccaccaaaatgcagattttcgtgaaaacccttacggggaagaccatca

SEQ ID NO: 126442 - DNA, 74 bp, Homo sapiens
tgactctctgcagcgggatcaagctgtgtgcattagtacaaatgaccaagatcactccatggatgaaatgacag

SEQ ID NO: 126443 - DNA, 50 bp, Homo sapiens
taccgatgctttaacatacagccactagctggtgctcaagaccgaatcgg

SEQ ID NO: 126444 - DNA, 75 bp, Homo sapiens
agtcctcgtcagcactgactttcagctatggaatcgatgaggacggggacttggttgccttttccagtgacgagg

SEQ ID NO: 126445 - DNA, 99 bp, Homo sapiens
gaagaagaggctggagttgaggaaggaagtagagggagatgatgtgcctgaatctataatgctggagatgaaaggagctcgagtatatttagcttgccg

SEQ ID NO: 126446 - DNA, 97 bp, Homo sapiens
cagaatagccctcagaagaaagattctggaggaaaggtttacaagcaggccacgattgaatctctgaagccctaaccggcagccatttgttctcttt

SEQ ID NO: 126447 - DNA, 100 bp, Homo sapiens
atgggaaggaggccgagccgggatctcaggtcctcgggggcggcggccacgccaaggacgggtggtcttcgagggatagcacgaggtggtctgacaggac

SEQ ID NO: 126448 - DNA, 74 bp, Homo sapiens
cgggggcgcagggaaggagggcgtccgagtcaacaaccgcttcgagctgatcgcaccccctccctccctggcgg

SEQ ID NO: 126449 - DNA, 74 bp, Homo sapiens
caataatgaaagctcttcagagatacactctgtgcagttttagagagagacacactcagtattcgagaaagtcg

SEQ ID NO: 126450 - DNA, 50 bp, Homo sapiens
gtgcaactattcgcagtccgagcggtatttaccttgctgtggattgctga

SEQ ID NO: 126451 - DNA, 75 bp, Homo sapiens
tgggatccaaagtaggataccaagttcgttttgatgattgcagttctaaggctctgcgaacatcaatagatgctt

SEQ ID NO: 126452 - DNA, 100 bp, Homo sapiens
agggcacctggagatcaggcctggactcaggccctcccgtcggtcattaaggcccatctgctaaacatcccgagctggaattggaaagaaggtgatgacg

SEQ ID NO: 126453 - DNA, 100 bp, Homo sapiens
tgcccgaggccccctcaccgaggctgagcttgccctcttcgaccccttctccaaggaagaagcccggtggcgcctgtccgtctttgtcaataacatggtg

SEQ ID NO: 126454 - DNA, 83 bp, Homo sapiens
agatgagaccgggggaggcgacgctaagttgctgatcgtggcggtttgtttgtaaaaacaatggtgtgttgtttgaaaaccag

SEQ ID NO: 126455 - DNA, 76 bp, Homo sapiens
gtgaactgcgagtggaacaggaatctctgttgacaggatacaatgtctctttgctatatgaccttgaaaatcttcc

SEQ ID NO: 126456 - DNA, 100 bp, Homo sapiens
tgcttacagaggaccctgtacaatgtgctgctggcatatgggcaccataaccagggagtgggctactgccaggccggtctaattgaagccaacggagaac

SEQ ID NO: 126457 - DNA, 129 bp, Homo sapiens
gagaagcataatgacattgtggacagtgacagcgatgctgaggatcgaggaacgttgtctgagacacctatggctgccgatgaaggctcagcagagaaacaggcaggagaggcccacatggctgcggac

SEQ ID NO: 126458 - DNA, 100 bp, Homo sapiens
gctcaccaggagccccttgccaggagtgttcaagatgctctctctggaccgatcccactagtaccttcaagtttaaatctgagagtgatattcatttggc

SEQ ID NO: 126459 - DNA, 88 bp, Homo sapiens
attaacggaccttttaccatgaatagttctactccttctacaggtgtgtatggacaactgtcatctgggaagtaacaacgcaggatgc

SEQ ID NO: 126460 - DNA, 75 bp, Homo sapiens
gtctttccagataaaggatattcatttgttcggggacaggcaaatggtatgaattacaagacctccaggtgactg

SEQ ID NO: 126461 - DNA, 83 bp, Homo sapiens
gaacagttgaacatgaagaatactggaaagttgctatgttttgatgccatggacaatattaccaggcagaaccaattctacga

SEQ ID NO: 126462 - DNA, 85 bp, Homo sapiens
gcgggaggtcttcgtggactgggactcgaacctgaccgacccggcagtgcggactcattctgatgaaggaaagagcgtccctgtg

SEQ ID NO: 126463 - DNA, 82 bp, Homo sapiens
caccgcgcctgaggaacactccatgccatggacaatattaccaggcagaaccaattctacgatacccaagtcatcaaacaag

SEQ ID NO: 126464 - DNA, 100 bp, Homo sapiens
gatgaaggagcaaccctgggtttcagtacagcctcgaaagatgcttgtggttggtggcatcgaccgggtttatgaaattggacgccagttccggaatgag

SEQ ID NO: 126465 - DNA, 75 bp, Homo sapiens
caaggaagggggaccatcctctgcaggtaattccactgcttcaagttttcctggaaccagaaacattggatcttt

SEQ ID NO: 126466 - DNA, 98 bp, Homo sapiens
tggagtggaagaccacgtgaaaaactttagaattgaagaactcacatgtggtgggatggtcgagcaggtccaggaagcctttggcgagaccatgacct

SEQ ID NO: 126467 - DNA, 101 bp, Homo sapiens
ggactccgaaaaaacaaaacaaatatgaactatgataagctgagcagagccctgcgatactattatgacaagagttctatatgaagggaaagaacggctta

SEQ ID NO: 126468 - DNA, 100 bp, Homo sapiens
ccaacctccaggtttcagtggcagttctcaggcttctccagtgacagtgatctggtatctcttactgttgatgtggattctcttgctgagttagatgatg

SEQ ID NO: 126469 - DNA, 100 bp, Homo sapiens
tttaatagttctggctgaagagcatggttgtttggacattataaagagttaaaaactcaccacttaaacagtctccaggttatcaaacagaactagttat

SEQ ID NO: 126470 - DNA, 75 bp, Homo sapiens
gtccagcggggctgcgggctacggctgttgttactaaaagatgtaactgaactgcagatccttggtgaaatatct

SEQ ID NO: 126471 - DNA, 98 bp, Homo sapiens
cttgccgatgtggtggacacactgaaacagaagaagcttgaggaaatgactcggactgaacaagagggaactctaatgaatcattgattgaccagcac

SEQ ID NO: 126472 - DNA, 75 bp, Homo sapiens
gaaacgctccagtccgagcactttcagctctgcaagaacattcctgatgtagatgaagaaggctacagtattaaa

SEQ ID NO: 126473 - DNA, 100 bp, Homo sapiens
ccagaagcgggcggcgcgggggagatggaccacagccgctttgtcaactgtgtgcgattctctcctgatgggaacagatttgccacagccagtgctgacg

SEQ ID NO: 126474 - DNA, 98 bp, Homo sapiens
atgaggggcagatctccacccaggacaaatcagctggcttcttctcctggctgtgtctttctcgagaagcaggtggaaacatgagcattcagtttctt

SEQ ID NO: 126475 - DNA, 74 bp, Homo sapiens
tcgggaccggctgtatgattaggccacaatcttcaatgagtaaacatattcctatcgagcctgcgtgctgccga

SEQ ID NO: 126476 - DNA, 83 bp, Homo sapiens
ctgtaaagtcatcacctcctgggatcagatgtgcattgaggttggactccatgaaagaattgcacaaaacaaatcgacagcag

SEQ ID NO: 126477 - DNA, 92 bp, Homo sapiens
ggaggaaggaacgaggcaaggagctaaagcagcgtgcgttcagccctggggttcgagaacttgtcttggacaattgcaaatcaaatgatgga

SEQ ID NO: 126478 - DNA, 82 bp, Homo sapiens
tacaaatttaagaacagatgaacaaggccttattgttgaagacctagtagaagaggtggtgataacgtggtgctggaccaga

SEQ ID NO: 126479 - DNA, 50 bp, Homo sapiens
agcagccccggggcccggagagagcactgcagcctgtggtgttgaggctc

SEQ ID NO: 126480 - DNA, 100 bp, Homo sapiens
tctcgcctcccgcgcgccggtaggttatatgtcaccacacccatctccattaggagccccagagcacgtctccagccctatgtctggaggaggcccaact

SEQ ID NO: 126481 - DNA, 108 bp, Homo sapiens
cgaaggccgggacccggttccccggcccacagtgggggtgtgcaaacccgagagaactggaatcagcatgattcttcagaggctcttcaggttctcctctgtcattcg

SEQ ID NO: 126482 - DNA, 100 bp, Homo sapiens
ggagcacagagaaagagaatgatgaagagaaaggcccggagactcgtccagaggaccagaggttaatttattctgggaagctgttgttggatcaccaatg

SEQ ID NO: 126483 - DNA, 74 bp, Homo sapiens
ggctcttgccctcatcctggttctggaatcctcagttcaaggaatgccatctccaaccacactgaagaagtcgg

SEQ ID NO: 126484 - DNA, 90 bp, Homo sapiens
gcagccacggccgggggcgtctttcagagcattacgatgaccgcacctcgagcaggagtggggatgccacgtctgcccccagcgcccggc

SEQ ID NO: 126485 - DNA, 100 bp, Homo sapiens
gatggttttggagcattaaggtctggtcggatggggcaggatggctgcgttgacacgtcttatttaatccacatcatagcctcctgacaaggtgatccgg

SEQ ID NO: 126486 - DNA, 75 bp, Homo sapiens
ggagaaacaggtacctgtggatgtggtcgagatgaaaggaccagttgctcttctgtgatgactgcgatcgtggct

SEQ ID NO: 126487 - DNA, 80 bp, Homo sapiens
accttcgtattctgtggtgactcatctcgcacgtgacccccctccctcttcaagccgagcccaggaagtgcgtcccctcc

SEQ ID NO: 126488 - DNA, 112 bp, Homo sapiens
cccagctggcccggcccctgcctgtggagtatctcatcatagacggtcttataggggaaatcaataacttcttttaatcaaagggttcaagaaattaaggatcccttcacct

SEQ ID NO: 126489 - DNA, 76 bp, Homo sapiens
cgctccgggagtgtgtgcagatcctgtttaacagcagatatgttaagtgggcagaccaacatccacctcagcaaaa

SEQ ID NO: 126490 - DNA, 100 bp, Homo sapiens
cgctgggctggcgcggcctggatcgcccaggaccacaccgcagcgtaactgcaggcctctcagcgaaaaagggggaaagcaaagacccgggtgtgcatcc

SEQ ID NO: 126491 - DNA, 98 bp, Homo sapiens
atttgccgtcagtgtcctggactcactcatgagcgcggactcacggcagctgtgttctgatttcgtactactgctggggctgccacctcctcctccag

SEQ ID NO: 126492 - DNA, 83 bp, Homo sapiens
gtcctccagggtatacttcgtggcctgcaccatcggtagatgatgagctggagatcaaggcctactatgcaggccacgtgctg

SEQ ID NO: 126493 - DNA, 86 bp, Homo sapiens
ggaaaaagaggaaagtggactgtccggggccgggctcaggagcagagctccaggcggacgacgtgggccgaagagaggaagctcaa

SEQ ID NO: 126494 - DNA, 82 bp, Homo sapiens
ctcggagcgcggtccctgtattggtctcctgctcctagaggtgacagagctgaatgaacctctctccaatgaagatcgaaat

SEQ ID NO: 126495 - DNA, 83 bp, Homo sapiens
agcaggcagacgcgagtgtctcggccatacaagatcagcgaatcatcaaagatgtgaagttcatttccaatccgccctccatg

SEQ ID NO: 126496 - DNA, 49 bp, Homo sapiens
tgttgttggaggaacactttccagaaactaatctggattcactccctct

SEQ ID NO: 126497 - DNA, 99 bp, Homo sapiens
agccttcctccttgtccaattagccgggatagagaggagaaacaggatgtggacgttgatctctcagccaaagttaagaatgtctgaggggtcaggcgg

SEQ ID NO: 126498 - DNA, 50 bp, Homo sapiens
acctacgttggcggccccagaaggattaagcatgaaaatattgttgccct

SEQ ID NO: 126499 - DNA, 100 bp, Homo sapiens
atgcaggaaaatttcgatattgaagtgtcaaaatccatagatggaaaagatgatccgtatcagatcctgggcccgaccagcagtcgcctagccaaccctg

SEQ ID NO: 126500 - DNA, 100 bp, Homo sapiens
cgccaccatgcccaagagaaagatatggctcgtggacagcagaaaattcagtctcagcagaaaaatgccaaaaagcaagctggacaaaagaagaaacaag

SEQ ID NO: 126501 - DNA, 51 bp, Homo sapiens
ccagagctgaggactgcctgtttgcaggtctgagcgggaaagttccgaaga

SEQ ID NO: 126502 - DNA, 75 bp, Homo sapiens
agttctgtgatgttcgacttcaggacattgccgagaatggctgcgcccccaccccagaagagcagctgccaaaga

SEQ ID NO: 126503 - DNA, 75 bp, Homo sapiens
gcagagctctccgggttccccggctcgcggggcccggcgaagggcagaattcagaaggagctggcggacatcact

SEQ ID NO: 126504 - DNA, 75 bp, Homo sapiens
ctttccccaagtagtccgatggctgcggctgcgccgaggcgccctactcagaggtttctggttttcaatggtgtg

SEQ ID NO: 126505 - DNA, 75 bp, Homo sapiens
actgtggagaacaaatccaagattagcacagatgtgactccagccacatttgaaacccctgaggtgcatgcaggc

SEQ ID NO: 126506 - DNA, 83 bp, Homo sapiens
cagggacagtgggcagtgctcccggaacacaagctgtgaaacactagaacccagcttagactagaaagtctagaagacacaca

SEQ ID NO: 126507 - DNA, 98 bp, Homo sapiens
aatctacaaattttgctactgtcagatggattgactatggaaaagttgccaaattgttaatgaaggagttcccccttctgagtatgttcaatatccat

SEQ ID NO: 126508 - DNA, 75 bp, Homo sapiens
ggtagaggcagtggcgcttgagttggtcgggggcagcggcaggacgggctctacgagtgcattctctgtgcctgc

SEQ ID NO: 126509 - DNA, 75 bp, Homo sapiens
gagtcaccagttaactatggtagcccacccagcattgaacaagtaagaagtttgcgacagagcactattgccaag

SEQ ID NO: 126510 - DNA, 145 bp, Homo sapiens
accgggatcgtgaccgagaccgtgaccgagagcgtgaccgagagcgcgaatatcgtcatcgttagaaggtcctacaggtcatcagacggccggacaaccccccagctgggcagtgccaacccctccaccccccagcctgcctccc

SEQ ID NO: 126511 - DNA, 75 bp, Homo sapiens
tcggcagcggctccttcggagacatctatctcgagcctgtcatagggaactgcatggatagaagttctccaggac

SEQ ID NO: 126512 - DNA, 75 bp, Homo sapiens
cttgaccttcgtgctgtttctctccctggcttttggggcaagctacggaacagggctgcctatgggcttatcatg

SEQ ID NO: 126513 - DNA, 74 bp, Homo sapiens
gcgaacatggacgccgtcaacgccttcaaccaggaggagctggaggagggaatgatattcagtggtgtttttct

SEQ ID NO: 126514 - DNA, 96 bp, Homo sapiens
gggctgcagagcatggactgttaaatcttgcacttcttctgagtgaggttcagccgtctgtatatctccccagatacctgaaactgaccacctgag

SEQ ID NO: 126515 - DNA, 75 bp, Homo sapiens
cttttaccatgaatagttctactccttctacagctgtgttggggtggaagaggaggaggcgcccgacatcgacat

SEQ ID NO: 126516 - DNA, 74 bp, Homo sapiens
atgaagaggcagtgaagactctgccaacaggatgcctggtgtgcaggagtatatacaacagcctattctcaatg

SEQ ID NO: 126517 - DNA, 100 bp, Homo sapiens
tcccgcgggcctcgatttggggagcaggccctcatgcaaagttttctttgcatcggatcccatcaaaatagtgagagcccagaggcagtacatgtttgat

SEQ ID NO: 126518 - DNA, 75 bp, Homo sapiens
gttgaaacggggctttgctatgatactcggctaaattctgtccaacgtttaataaatcaatggaggaacagggta

SEQ ID NO: 126519 - DNA, 82 bp, Homo sapiens
cccaggcctatgccaatcagcatttcacattcctcatggttggttcaaagctcactgaaaactgaagctaatttggaagttt

SEQ ID NO: 126520 - DNA, 90 bp, Homo sapiens
tgtccccaccgccatccctgacccatggcgctgaagaggattcagaaatatgaaagttttcaagacgcctacaagtggaaaatgcactcc

SEQ ID NO: 126521 - DNA, 122 bp, Homo sapiens
tttattccaagtggctcatgatcccgactgtggagatgtggtgcgactagaacccttaggagaaatcttgagagtggacagcaattgtgaagatcgccagagagttctgtgtttcatcaccg

SEQ ID NO: 126522 - DNA, 83 bp, Homo sapiens
attaaatgtggcatatagtccctactacaaaatttttcaacctggagcgctatagttatgtctgcccagatttagtaaaagaa

SEQ ID NO: 126523 - DNA, 90 bp, Homo sapiens
cccctgacgttctcttctacccactgagaccagagttagtggaatccacatatctcctctaccaggatgaactggacctcacagacaaac

SEQ ID NO: 126524 - DNA, 100 bp, Homo sapiens
gcctgggagaagcagcagcgcaaggctcctgctccagcccagcccccagagagcagaccccaggtgctggccccgggggttttggtctgagcctcagtca

SEQ ID NO: 126525 - DNA, 100 bp, Homo sapiens
cgtgcttctgcctaagaagaccgagagtcaccacaaggccaagggcaagtgatttgacaggaaatatttgatgatgcgtcacctggaaagcaaaaggaaa

SEQ ID NO: 126526 - DNA, 75 bp, Homo sapiens
cagacagaacagttaatcctcaatttaagcctgatctaacccctagaaacagacccctttgctgatgcaactaag

SEQ ID NO: 126527 - DNA, 74 bp, Homo sapiens
gttggattctgttgcctgggtaccaccagagggaaagctggggcgactgagtatcgtaataagtgtgagtttct

SEQ ID NO: 126528 - DNA, 82 bp, Homo sapiens
cgccgccgccagtccaaggagcaggatgaagttcgacatgggagagacaatctaagaaggccaccagctgtttcccacgccc

SEQ ID NO: 126529 - DNA, 126 bp, Homo sapiens
cggccagtgtgtgacctggctgcagacgctgccccaggggcgccagctcctcagcctggagatttgaaaaagagaattgaatctctgatagacagagactatatggagagagacaaagacaatccg

SEQ ID NO: 126530 - DNA, 82 bp, Homo sapiens
atggccgtgccctggggctgagccctcaggagaactacgatgacccgcacaaaacccctgcctccccagttgtccacatcag

SEQ ID NO: 126531 - DNA, 83 bp, Homo sapiens
ccccttccacgtcatccgcatcaacaagatgttgtcctgtgctggggctgacaggaagctggagaagcttcgagagaaggagc

SEQ ID NO: 126532 - DNA, 82 bp, Homo sapiens
atgcctgggtgcagcttctctagctggccttgctgttgatgtcccagctagtggaatgtatttcatgacatatgaatggctg

SEQ ID NO: 126533 - DNA, 75 bp, Homo sapiens
gggcgggtttgtgtgaacaggcacgcagctgcagaaatgtggatctgagagaatacttgtctgaagaagtacaag

SEQ ID NO: 126534 - DNA, 100 bp, Homo sapiens
ctggctccaagcgtgcaaaaaggcgagaatgtccacaagcactcccgcctggcagaggatgatgaagtggttctgcagtgcaccgcaaccatccacaaag

SEQ ID NO: 126535 - DNA, 82 bp, Homo sapiens
tcagacctctgtggcagcattttttccagaacacaaaaggtctcggcgcggaagatggccggcggcgtggacggccccatcg

SEQ ID NO: 126536 - DNA, 75 bp, Homo sapiens
tcgccgccgccccgagtcccggtgtaccttccggtttcccagcacggccatcaagatccagttcacgtcgctcta

SEQ ID NO: 126537 - DNA, 91 bp, Homo sapiens
gctgaaataacccttgatcctcctcctaattgcagaaagatgtgcgggacatcctcaccccaattcagattgaagctgcttaccaccttgg

SEQ ID NO: 126538 - DNA, 74 bp, Homo sapiens
gaggaggcgagctagccgggagttacaccgccaccgccaggcttcccagctggcgtgtatgttgtaaagagagt

SEQ ID NO: 126539 - DNA, 100 bp, Homo sapiens
tgagctctgcacgctggggagtttgttgggatgcaacaaggagacgcgcctttgccctggtctctcaagcgtatacttcaatcatcgccgatgattttgc

SEQ ID NO: 126540 - DNA, 141 bp, Homo sapiens
agagggtctggagggctgagcagtcaactcaaatgcaagtccaagaggaggaggaggcggaggtccaagcggaaagcttattgcaggagtgaccaggacactacctcctagaagtaatgcccacagaaagcgcaagttgtt

SEQ ID NO: 126541 - DNA, 50 bp, Homo sapiens
tcgcagtggtcgcttcttctccttgtccaaaagaaactcttccttcaaaa

SEQ ID NO: 126542 - DNA, 80 bp, Homo sapiens
ttcgcagtggtcgcttcttctccttgctatccctgtaccctgcgccagtacctttgtgtgaacacacccagcccccgcct

SEQ ID NO: 126543 - DNA, 100 bp, Homo sapiens
gccgcgccaccgagtccggaccggagactttggggcctaactaggtactaggttttgacaagcttgcatcatgcgtgagtataagctagtcgttcttggc

SEQ ID NO: 126544 - DNA, 100 bp, Homo sapiens
attaaaactgaatgaactgataacggagaatggaactgtatgccagcagcttgttgtacagttgcaccattactcagacttctaaagagactatttgaag

SEQ ID NO: 126545 - DNA, 101 bp, Homo sapiens
aaggtgcagggcaacacctctacaaggatctgcagccatttatattgcttaggctactgggaatgtttgtgagtctctttcccatccatcttgtcggtcag

SEQ ID NO: 126546 - DNA, 100 bp, Homo sapiens
tctgaagggaggaaatagtggcaggtgacagtctgcatgtgcagttttcagaaccactcacgaattcttgtttggtgcccttgctgaactggttgataat

SEQ ID NO: 126547 - DNA, 82 bp, Homo sapiens
agacagtcctcgtcagcactgactttcagctatggaatcgaacatacatatgatagttgagaaagacacatattctgatcat

SEQ ID NO: 126548 - DNA, 82 bp, Homo sapiens
cccggggccaccctccccaagtccccatctcaggagcacgtgaattgcctctgcttacgttcaggccctgtcctaaacccag

SEQ ID NO: 126549 - DNA, 119 bp, Homo sapiens
acttccctgagtcccttctaccttcggccaccctccttcctgcgggcacccagctggtttgacactggactctcagagggggccgaaggccagagaccaggatttggctacggaggcag

SEQ ID NO: 126550 - DNA, 75 bp, Homo sapiens
ctgatgtggagttcttgaagcaactaaggcacttgaaaataactatgaagttatattccgagaacctgacactcg

SEQ ID NO: 126551 - DNA, 101 bp, Homo sapiens
gcgcaagcggctccccaaccgggagcggctcacggcggaggacgacgcgctcaaccagatcgcgcgggagatatgattgacaatctgctgtccccagatct

SEQ ID NO: 126552 - DNA, 50 bp, Homo sapiens
ccgctgccgcccaggactgggcccttagagacggagtttcgtcatgttgg

SEQ ID NO: 126553 - DNA, 75 bp, Homo sapiens
ggggaacgcgcgctgcgcggactgcggcgccccggagtgcctggaagagctgggatgtctggttgagtcctatgg

SEQ ID NO: 126554 - DNA, 75 bp, Homo sapiens
ggcttccggtagtgcttgcccaggtattgactgggctcccaagagcgaccgcattgtcacttgtggggcagaccg

SEQ ID NO: 126555 - DNA, 75 bp, Homo sapiens
gcggagccatcgaaattcctatggatcgaagctgcagtaaaggaagatgaagaagaagtttcagataagggcagt

SEQ ID NO: 126556 - DNA, 74 bp, Homo sapiens
aagatttaacattccaacacataaaaattatttatccaacagctcctcccaggaattacatgaacgacagcctt

SEQ ID NO: 126557 - DNA, 75 bp, Homo sapiens
ctcaaacagtcaaaatctgtacagtgccgattgctgctctctgaacactatagtcgtcgaatctcacaagcgtac

SEQ ID NO: 126558 - DNA, 112 bp, Homo sapiens
cgactgtcagcgtgaagcgtgatctgctcttccaagccctgggccgcacctacagaccctgatgcttggtgtgacctgagtaaatttgacctccctgaggaaccatctgcag

SEQ ID NO: 126559 - DNA, 95 bp, Homo sapiens
agggccggagcccagatgagctgccctcggcgggcggcgacggcggcaaatctaagaaatttgtggtgaagaaggtgaagtccatgcagatgttc

SEQ ID NO: 126560 - DNA, 75 bp, Homo sapiens
tccttatcagcacagcacttattccagccctttctaaggcacaaaatgatgtgatggaaatgaagatgcagtcag

SEQ ID NO: 126561 - DNA, 83 bp, Homo sapiens
cttgagggcaggcctgtcttgcatctgtttctccaccacctagcctggaatatagcagtcatggatcaggtaatgcagtttgt

SEQ ID NO: 126562 - DNA, 50 bp, Homo sapiens
ggagaagctgctgcgctgctcgcgttgctaaagcttgctttcactctgga

SEQ ID NO: 126563 - DNA, 100 bp, Homo sapiens
cccacttccgaaaccacaagtttgccgatactggtattgctcgagttccacttgctggagctgccgggggcccagggatcggcagggctgctggcagagg

SEQ ID NO: 126564 - DNA, 82 bp, Homo sapiens
ggagactcacctgctaatgttgatgctgcgttggtgttggtattaggagatctgcacatcccacaccggtgcaacagtttgc

SEQ ID NO: 126565 - DNA, 76 bp, Homo sapiens
gatctctttacaagacgcacccacagatctccctaatactatgaacgcggcagagataacggacaagctcggcctc

SEQ ID NO: 126566 - DNA, 75 bp, Homo sapiens
ggacgggcgccccgagctgcccccgcaggcccacggtctcggcgtagacggttggagcaaaacgtcccactcact

SEQ ID NO: 126567 - DNA, 100 bp, Homo sapiens
ccgaggtgaaggcgccgcgccaggccgggcgggcggaaagtgaaaaggtttctgaatatccagcagtgattgtggagccagttccaagtgccagattaga

SEQ ID NO: 126568 - DNA, 100 bp, Homo sapiens
ccgcgctcttcttcgccagcaccgtgctctccaccacaggcagaatccagagaccacatttgaagtatatgttgaagtggcctatcccaggacaggtggc

SEQ ID NO: 126569 - DNA, 99 bp, Homo sapiens
ggggtgtgatcccaccggaggttggaaatgtggctgtgaggtggtatgcagatcttcgtgaagaccctgaccggcaagaccatcaccctggaagtggag

SEQ ID NO: 126570 - DNA, 82 bp, Homo sapiens
gtggttttgatcatgttgttaccctcggacgtagcccggcttgtattggtcttactactttgaccgcgatgatgtggctttg

SEQ ID NO: 126571 - DNA, 89 bp, Homo sapiens
gcttcacaaagtggaagtcacaattcagatgtgcagcactcctggaagcctgcactttccgtagaccttaaaatctcagaggtagggct

SEQ ID NO: 126572 - DNA, 75 bp, Homo sapiens
gttgattgctgggataaccactggctagctctatatgctggccttcatcccagaataatcactgaaggatttgaa

SEQ ID NO: 126573 - DNA, 74 bp, Homo sapiens
actgcagatcggtggaaaactgataagccaggtcctcggcagcctgatcttctgcttcggcatctggatcctca

SEQ ID NO: 126574 - DNA, 117 bp, Homo sapiens
agaccccgagtggccgccgctgcggggcccaagtccttggctgctgagtggtgacagtagcccagcccgccggccagcttgcattgaaaggctctagttacagtggacttcttgaac

SEQ ID NO: 126575 - DNA, 74 bp, Homo sapiens
gtcgctcttgtgccctagcaccccgagaaccgtcagtttgagccagatgacttcagtgccctgaacggttagag

SEQ ID NO: 126576 - DNA, 107 bp, Homo sapiens
caagtgttgaaaatgttaaaggctgtgctgaagaagagccgagagggaggaaagggaggcaagaaggaagcaggagtgtacatttacaaagatgcgttcaaatagtg

SEQ ID NO: 126577 - DNA, 100 bp, Homo sapiens
cagatctgaagacctattttactgataagaaaacacatctttacacactaaaatttgttgtcatccacaatgggatcatcacaaattacaaagatctgag

SEQ ID NO: 126578 - DNA, 100 bp, Homo sapiens
caccaccagccggggactgggcgctaccaggtggtatacactgaatatcctcgaagaaattggtggtggccagaaggtcaatgatgacattattgtcaac

SEQ ID NO: 126579 - DNA, 96 bp, Homo sapiens
ccactcctcccggaggcgacatggggcacccggtgtaccgcggcgagaagccccagctgcactacgcggttgatgacaacaagaaactaggagaat

SEQ ID NO: 126580 - DNA, 100 bp, Homo sapiens
atccccgaccgccctcttctgtcttggaaacttttgagaagaactttgaaagagaaacccataaaataagtgagcaaaatgatgctgataatgctagtgt

SEQ ID NO: 126581 - DNA, 98 bp, Homo sapiens
ggacacctggaaggttgctcacctgaagaacatccagtcatggataaaaatgagctggttcagaaggccaaactggccgagcaggctgagcgatatga

SEQ ID NO: 126582 - DNA, 50 bp, Homo sapiens
gcggagaaagattctgccagaagaagagttgtctgtgctgtgaatgccct

SEQ ID NO: 126583 - DNA, 101 bp, Homo sapiens
accaaaattgtggaaaagtcactctgaattaaatgtgagggagtctgacgtaagagtttgtgatgagtcatcatgtaaatatggaggagtctgtaaagaag

SEQ ID NO: 126584 - DNA, 100 bp, Homo sapiens
cccgtcgcgccccccactctgaactcaagtcaccgtggagctccgccgccccgaaactttcaccgcgagcgggtcacagggattatggacccagaacaga

SEQ ID NO: 126585 - DNA, 82 bp, Homo sapiens
cccgctggccgggctggctgcggccgccctgggccgggccccaccggacgatgtgaagttcatttccaatccgccctccatg

SEQ ID NO: 126586 - DNA, 50 bp, Homo sapiens
ggagaagctcttgttggcaaccagcaggagcaatagtatggttacagaac

SEQ ID NO: 126587 - DNA, 85 bp, Homo sapiens
tatatgcgtttaaaggaggagctgcaactgtctgatgaacagctacagaagaggtatacccgaaatcttgtggatcaaggaaatg

SEQ ID NO: 126588 - DNA, 100 bp, Homo sapiens
gagacatggaccgcggcgagcaaggcagcctgcttctgcaaagtggtacgatcgaagggactatgtcttcattgaattttgtgttgaagacagtaaggat

SEQ ID NO: 126589 - DNA, 102 bp, Homo sapiens
aggagccattgtccagagggctattaagcggcgaccaggggtgcaacaccggaggatttcagcaacctcccacctgaacaaagaaggaaaaagctgcagcag

SEQ ID NO: 126590 - DNA, 101 bp, Homo sapiens
gatcaagcccaaaggagacaaacaggtggaatacttagatctcgacttagattctgggaaatccacaccaccacgtaagtgttctggacttggtgcctctt

SEQ ID NO: 126591 - DNA, 76 bp, Homo sapiens
ctgagccccgaggaggcagagcacaaggagatggaatgcaagtgctgctggaccaggcgggctgctgtatcgtggg

SEQ ID NO: 126592 - DNA, 91 bp, Homo sapiens
gcccggcagccaccccgtctgggaagttgatctcctatcaagagtttttggcatttgaatctgttttatgtgctccagattccatgttcat

SEQ ID NO: 126593 - DNA, 48 bp, Homo sapiens
ccggttgccgggcgcgggcgagaaagcttcttccagaccagctggtct

SEQ ID NO: 126594 - DNA, 51 bp, Homo sapiens
cataaggagctgacagacaagctcgaggatgaactgctggaggagctagag

SEQ ID NO: 126595 - DNA, 98 bp, Homo sapiens
ttctggaatcagcttctctcattttctttccctgcaccaactagcaggtctatgctccatcagcaagcactgccgactacaatagggactcgccaggc

SEQ ID NO: 126596 - DNA, 105 bp, Homo sapiens
ctttattttaaaagctgatgttccaaggaggagcatattatttaatatctagaagtctagggccagaatttggtggtgcaattggtctaatcttcgcctttgcca

SEQ ID NO: 126597 - DNA, 82 bp, Homo sapiens
cctcagttggaagcagccgatccagcctgcggagcctgtggggcagtttgcatttatgtcggatcctcagtgaaaataaaag

SEQ ID NO: 126598 - DNA, 100 bp, Homo sapiens
tccaggtgagactttcacaataagagcagaggatggaacacttcagtgcattcaagctttggggccatttggatcacacgatgttttttcaagattttag

SEQ ID NO: 126599 - DNA, 125 bp, Homo sapiens
taaggaggctgacagtttaatgagaagagacacatgaggctttcgagccatgagcccaggaagcctcatgtggaatgcagcctctgagaaaagcacttctcaccactcaaaacccaccgaagcat

SEQ ID NO: 126600 - DNA, 82 bp, Homo sapiens
agctgcccggtgcccgaggaggcagccaagctcatggcctgccactgcgtgcgcccatgaagcttcccatcaccaacagcag

SEQ ID NO: 126601 - DNA, 100 bp, Homo sapiens
gtgatgaggcaagtattctttggagcaggaaactaccatttagtggatgaaaacttcgatcctttacctgagttgatccctgaattttattatctccctg

SEQ ID NO: 126602 - DNA, 82 bp, Homo sapiens
tcaaccatctcacacctttccaaaggacgcgaccataactctaaaagcagcgtccgtctccaagagagtatgaagagagtgc

SEQ ID NO: 126603 - DNA, 83 bp, Homo sapiens
gctcgctgggagagaggtacctctccttttccctctccctttccctaaggttatggaaacaaaggacatgctttacatcgtca

SEQ ID NO: 126604 - DNA, 50 bp, Homo sapiens
agcgtgtggctttctggacttggctcttgtcaggatggtgaagctgttca

SEQ ID NO: 126605 - DNA, 100 bp, Homo sapiens
aaacttccaagcctgtatcaactctggtatggacacagcttctagtgttgctttggatcttgtggaaagtcagaatggctcaatcacaaaggagtgagac

SEQ ID NO: 126606 - DNA, 98 bp, Homo sapiens
tctgaagtcaaacccaagatggtggtggccacttacacttgtgaccagtgtggggcagagacctaccagccgaaatggtggagtcaatgaagaaagta

SEQ ID NO: 126607 - DNA, 82 bp, Homo sapiens
attgatttgctcttacgtatttgtgtgacttgactcttcaaacacaaagtttcagctgtgagttcaacatggaggcaaatca

SEQ ID NO: 126608 - DNA, 96 bp, Homo sapiens
ctgctcggcttccagctcaatcctgccggttgcgccttcttcctggacatgaccaactggtttgtctacagattttgagcgttcgaagttgacccc

SEQ ID NO: 126609 - DNA, 75 bp, Homo sapiens
ctcaagcacacccaatggacagcatgcctcaccaagtcacatgacaagcattcccatggtgcacggtgctacgcc

SEQ ID NO: 126610 - DNA, 96 bp, Homo sapiens
aaggtgccatcctcaccttgctgagtgacattgaggagctctacggtgactttgaagacttggaaacaggggacgtgcacaagggaaaatcaggcc

SEQ ID NO: 126611 - DNA, 111 bp, Homo sapiens
ctgtgccatctgttgggactccatgcaggctgcgcggaaactgccctgtggacatcttttccacaagtatcttctcttaatggatctccaagatagaaatgaaaaactctt

SEQ ID NO: 126612 - DNA, 99 bp, Homo sapiens
gatcaactgaggcatctacttgtgagtaatgtgggaggagatggagaagagattgaaagattctttaaattacatcagaatcttgggactgttttactt

SEQ ID NO: 126613 - DNA, 82 bp, Homo sapiens
gcgtgggcaagtcggcgctcaccatccagttcatccagatcatggaagggaagtggttgctgtgtatgttactggtgcttgg

SEQ ID NO: 126614 - DNA, 100 bp, Homo sapiens
caagataaaaataaatacaacacacccaaatacaggatgatagttcgtgtgacaaacagagatatcatttgtcagggtgtgggccgaagatatgctcatg

SEQ ID NO: 126615 - DNA, 75 bp, Homo sapiens
ctgggtcacgggctggggacacacccagtatggagggcagctggtggaatttttgaagaaaatggaatctcgagg

SEQ ID NO: 126616 - DNA, 98 bp, Homo sapiens
gccccatctatgagttcaagatcacatggtggattgacttctaaggactcttggtacatgaggaagaaacccggaaggggaagaggaaagcaaaggcg

SEQ ID NO: 126617 - DNA, 101 bp, Homo sapiens
cccccacgcccctggctcttgcagagcaggcggggcagacgctgcagatggaattccttcggaacaaccggaccacagatctttaatctcatgaagtacga

SEQ ID NO: 126618 - DNA, 80 bp, Homo sapiens
aagcggcttatcgaacagagccgggagttcaagaagaacactccagaggtaaatggccaagacctaaagaacctgctgca

SEQ ID NO: 126619 - DNA, 80 bp, Homo sapiens
cggaccatgataatttccccagagcgtcttgatccttttgcagatgaaaccagggtggttatgaccgctactcaggagga

SEQ ID NO: 126620 - DNA, 100 bp, Homo sapiens
gctgcttctgggccctacgcgcggcttgcgcgcaaataatctccccaaagccatcgccgctgctcacacctttctactgaagcatcctgatgacgaaatg

SEQ ID NO: 126621 - DNA, 97 bp, Homo sapiens
ctggctaagctcatcattgttactgataaagactatttcctgattgtgattcagaatccaaccgaataagccactctcttggctccctgtgtcattc

SEQ ID NO: 126622 - DNA, 98 bp, Homo sapiens
gagttcctcctggggaacccgttcagcacaccagtggggcagtgcctcgctgcggcatgaagctgaacctggactatctgctggagatgctttgggag

SEQ ID NO: 126623 - DNA, 90 bp, Homo sapiens
gtccggagctagctggatcctctaggcaggacttggaaaacagtgtgggtgaacttagtgaaggacaaagaccccagctaacagcggcag

SEQ ID NO: 126624 - DNA, 98 bp, Homo sapiens
agcgagctgagtggttgtgtggtcgcgtctcggaaaccggtagcgcttgcagcatgagcgatcgtcttctgatcaaaggaggtaaaattgttaatgat

SEQ ID NO: 126625 - DNA, 100 bp, Homo sapiens
cagaattatacctagaagtctactaatggacagttagtcacccacctacatgttgaggatcttcctcaggaaatggaaaagttgcaacagctccgacaag

SEQ ID NO: 126626 - DNA, 74 bp, Homo sapiens
tctcgcttcgtcctacacttgcgcaaatgtctccgaaatgggacgtcggtcatcagatactgaagaagaaagca

SEQ ID NO: 126627 - DNA, 82 bp, Homo sapiens
aagaaaatcatccatctaaagcaccagtaaaatatggtgaactcattgtcttaggatgtgccaattgttttgactgtcctgg

SEQ ID NO: 126628 - DNA, 106 bp, Homo sapiens
agcggctccctaacaggcccgcctgtctgctcgtggccagcggcgccgccgaagcttcctgggtctgcaggtccagccggctggcaccctccatgtacccagggga

SEQ ID NO: 126629 - DNA, 100 bp, Homo sapiens
aggtgcgctactgcgcgcgcttctcctacctctggctcaagttttcacttatcatctattccaccgtgttctgggtaaacctagcctttaagcaacctgg

SEQ ID NO: 126630 - DNA, 83 bp, Homo sapiens
gctcttcctcccttcgctcgcaccatgaaaggaaggaggagacctgaacagtacatccggagaatccagcaaagcatactacg

SEQ ID NO: 126631 - DNA, 83 bp, Homo sapiens
tttgtaaaggccagagaactacctacgattctctcagcgggtaattggctgctcctaggaaccttccctgtatactgtcaaag

SEQ ID NO: 126632 - DNA, 75 bp, Homo sapiens
aggtccattcctgatggctctgcttggattagaagaacaagaaagactccacctactatggaggtaagactacac

SEQ ID NO: 126633 - DNA, 89 bp, Homo sapiens
gacggagacagctgttggcatcaggtgtacaggtatcactggacaggccatggctccacggtcccggcgacgaaggcacaagaaacctc

SEQ ID NO: 126634 - DNA, 97 bp, Homo sapiens
gcctttgaggggactggctttactaatgagcaacaatgctggtcgctgcgtgaaggccagcaaaagctggcaggctgacagaggcggcctcaggacg

SEQ ID NO: 126635 - DNA, 75 bp, Homo sapiens
ttctatctgttagaactaatggtttttaggccaccaaacccttggacaatggcaattatgaatgtattagctgag

SEQ ID NO: 126636 - DNA, 75 bp, Homo sapiens
cttgaatgttgaagatgtccttaccagctttgacaatacaggaaatgtttcagaaaaagtcctacctggagcgaa

SEQ ID NO: 126637 - DNA, 75 bp, Homo sapiens
acaccttaataaccagcggagctgacacagccaaatattgaagcacagattcgagaaattcaaggcaagaaggca

SEQ ID NO: 126638 - DNA, 50 bp, Homo sapiens
tcgcgctcaagtacggtgtcacggtccttggatgtggctgtgttgcccaa

SEQ ID NO: 126639 - DNA, 75 bp, Homo sapiens
ctcagtgatgtttgagcaaatggaaccttgggtgatggttgcagttttccaactcgccttgtggggatggatcca

SEQ ID NO: 126640 - DNA, 90 bp, Homo sapiens
attactgaggtcgccctcatgggccacctaagtggtggacttgctttgtgaagagacagttcatgaacaagagtctttcaggacctggac

SEQ ID NO: 126641 - DNA, 96 bp, Homo sapiens
tccccggagctgggccgcgaacacctcactattgatggtgtagcgctttaggggaaggtctttgtctgggttggaaaggattctcaagaagaagaa

SEQ ID NO: 126642 - DNA, 98 bp, Homo sapiens
gcggccgtgtcagtttggggcatctccgcggtccggcccggggccccgggatctcggctgtccttcctcccggtgtcccgacccaggctaagcttgag

SEQ ID NO: 126643 - DNA, 100 bp, Homo sapiens
tatgtgtttcccatacaaacactggactgcaaaaggaaaggaaagaccacagcaagattctttcattcgtctcctcctagcctgggggaccaggctcgaa

SEQ ID NO: 126644 - DNA, 75 bp, Homo sapiens
atcctctggccccgacagcccatatcctgccaaagggctccctggtccagatggctgtggaggccaagtttgtcc

SEQ ID NO: 126645 - DNA, 100 bp, Homo sapiens
gattttggtgcagctagagaattagaagatgatgagcagtttgtttctctgtatggcacagaagaatatttgttaacttaccaagactggttacacctgg

SEQ ID NO: 126646 - DNA, 90 bp, Homo sapiens
gcgcgggatcccagcctcaggcgtgcgcggacggtgtgcgggtatctgttactaaggctgaacaagaactgggatttgccatccaaacgt

SEQ ID NO: 126647 - DNA, 75 bp, Homo sapiens
atctgtgacttctatctgtggctcattggaaggaaacccaggtgtctcaaaggctgttgagcacatcaataaaac

SEQ ID NO: 126648 - DNA, 100 bp, Homo sapiens
ccatggttaccggcctggcctccttgacatccaggacctccatgggcattcttgttgttggaggagtgagaggctactctgcccggcacgaggtccgcca

SEQ ID NO: 126649 - DNA, 75 bp, Homo sapiens
cgtctcccgctccgccctcccttttccctggaagttctactacatcaccctgctacgagaccccgtgtcccgcta

SEQ ID NO: 126650 - DNA, 83 bp, Homo sapiens
cgggaggagccttaacaagcgcacggagccctcaagtttggtgccctggttgtcagatgttggaaagcagtaggacggaacat

SEQ ID NO: 126651 - DNA, 75 bp, Homo sapiens
ctcaaccacaataacaggcggagggtcggcgtagccctgtatgatgagattcgtcagtttcgcaaggcctgtggg

SEQ ID NO: 126652 - DNA, 59 bp, Homo sapiens
tcctgctaaggccattggacacagaatccgagtggtgcaggtgatggtcctaccagtgt

SEQ ID NO: 126653 - DNA, 99 bp, Homo sapiens
ctcgacaccaagaagccctgcacccggtctttgacatgcaaggctgaactccagtgcacccagttagacttggagcggaaactcaagttgaatgaaaat

SEQ ID NO: 126654 - DNA, 90 bp, Homo sapiens
ttccctgaaaaagctaaggatatctttattgaagctcacctttgtctaaataagtatgtgaaatatggctcaggcccagctcggttcccg

SEQ ID NO: 126655 - DNA, 101 bp, Homo sapiens
actgccctgatgggcagtcaacagctaaaaccttcctcaccgtgtactgactgaccactgagcagatgctgagaaaagaccagaagactatctatagacaa

SEQ ID NO: 126656 - DNA, 94 bp, Homo sapiens
cccgggaggaaggaacgaggcaaggagctaaagcagcgtgcgttcagccctggggtatcatgatattagctggtttgacatcaagtcatttgtg

SEQ ID NO: 126657 - DNA, 75 bp, Homo sapiens
cgaggatcaggaaaaactatggagtggacgcttctcttgtgagccagctggaggtcttacctctttgactgaacc

SEQ ID NO: 126658 - DNA, 97 bp, Homo sapiens
aaaagtaccagcaaggagactttggttactgtcctcgtgtgtactgtgagaaccagccaatgcttcccattggcttcatcgcctcagacatgacctc

SEQ ID NO: 126659 - DNA, 100 bp, Homo sapiens
atcctcagttccttacctacatggcactagaagaacgcttagcccaggctatggagctttcaccaacaatcaccagtggtttacacaacattgcaaggag

SEQ ID NO: 126660 - DNA, 51 bp, Homo sapiens
tgctagcactgcattaagtgatgcatacagtttgcagtgttgatgtgggta

SEQ ID NO: 126661 - DNA, 90 bp, Homo sapiens
caggcggtgacccgctaccggaaggccatcgccaaggcgcattctacattctaaaggggagctcagtgaagatagacataaacagtatga

SEQ ID NO: 126662 - DNA, 75 bp, Homo sapiens
ttagtcgtcagatcgcccgtcctggtatcacagtgcttctgttcagcttcccagtcccggccaacacctagtcca

SEQ ID NO: 126663 - DNA, 83 bp, Homo sapiens
cggcgagcgcgagcggcgcgagaaagttggatttggtctagggagtcccagaaagaagtagaaaaagagagagaagcctaccg

SEQ ID NO: 126664 - DNA, 74 bp, Homo sapiens
ggagaagtatgaggtggtgaaactcaagatccccatggacaacaaggagggttgctcctggacgccaccaacaa

SEQ ID NO: 126665 - DNA, 100 bp, Homo sapiens
caccatcaagctgtctaagtccaaagatttttacccagatatggctcgtggacagcagaaaattcagtctcagcagaaaaatgccaaaaagcaagctgga

SEQ ID NO: 126666 - DNA, 76 bp, Homo sapiens
ctcccgagtggctgggattacagacagttaatcaactggcccatgcccttcacatggacaaagatttgaaagctgg

SEQ ID NO: 126667 - DNA, 82 bp, Homo sapiens
ggaattacgggaacagaaagaaaagtccgaaagagctgcttcagaggatgattccgaagaagacggagaccataacaggaca

SEQ ID NO: 126668 - DNA, 82 bp, Homo sapiens
aagtcaccatagaagcggatacttatttgcctgtggatgaaaccctgattcctacagatcccaattttgttcggacatttct

SEQ ID NO: 126669 - DNA, 50 bp, Homo sapiens
gggccgggatcacattctgatttttggaaattttagcattcaggtgccag

SEQ ID NO: 126670 - DNA, 80 bp, Homo sapiens
gattgactatggaaaagttgccaaattggcaatggtggcttgctatccgggaaatggaacaggttatgttcgccacgtgg

SEQ ID NO: 126671 - DNA, 100 bp, Homo sapiens
gacaagtgtgaggagatggaggaaggctacatccagtgctcccagtttctatatgggtcttgacaatgttcacaaacagagggtggcagaagtgctcaat

SEQ ID NO: 126672 - DNA, 51 bp, Homo sapiens
agcaagcagatggttaaatttgctgccaaatcttcaattttgcaagcagag

SEQ ID NO: 126673 - DNA, 100 bp, Homo sapiens
gcacataacggggttcgggtgtctcgtgtgtgaacatcacagcctagggactccacgtaccccagctgggtctcattgttccagaactgcattagttaag

SEQ ID NO: 126674 - DNA, 51 bp, Homo sapiens
gattcccaggatgtgagcaacacgggaccgtttgttgcatattctaaggac

SEQ ID NO: 126675 - DNA, 51 bp, Homo sapiens
tattttcagcagagctgagtaaaacttcagaggtcctgctgtactagccac

SEQ ID NO: 126676 - DNA, 89 bp, Homo sapiens
tgtgcggggtgcgccggcagaggatccagtgttcaccatcctggccccggaagttccagggtctccctccactgctgtagtaacccggg

SEQ ID NO: 126677 - DNA, 50 bp, Homo sapiens
gtttgtgtccttgctctgaaaattgcatttgacattgtgcagcaaagaaa

SEQ ID NO: 126678 - DNA, 82 bp, Homo sapiens
gcagtggtcgcttcttctccttgggaaattcaactactgaggaggttacggcacaaaaatgtcatccagctggtggatgtgt

SEQ ID NO: 126679 - DNA, 75 bp, Homo sapiens
acagctcgaagaggataaacaccgccttcagcaacagcgggtattcccctacatctcagccatggtgaacaacgg

SEQ ID NO: 126680 - DNA, 82 bp, Homo sapiens
gcaggaggaggtggcggcggcgggaagataatatatacagccctgctctgggacacacctccattggatttaaaagacagtc

SEQ ID NO: 126681 - DNA, 97 bp, Homo sapiens
catagggagagccgccggaagtattgacggaaagcttgaattacctacatgaaatctccaacctgctggtggctactaagaaagcccaggagtggca

SEQ ID NO: 126682 - DNA, 83 bp, Homo sapiens
agacgttttccggagggattccatcatagataacgaaggaggcccaacttcattcaataaggagcctgacggatttatcccag

SEQ ID NO: 126683 - DNA, 100 bp, Homo sapiens
ccggtcccggcgcccggcgagggcgcgcggctggtgtccgccccgcccgaaagatggaatggggcgagtccttgctcaagatgtatatgcaaaagacaat

SEQ ID NO: 126684 - DNA, 100 bp, Homo sapiens
agatggatattgaaatggacagtggagatgaagcctaagaatatgatcagggaaacaaaggacccatcgcaaatgttttccatgctgatctccaaagtgg

SEQ ID NO: 126685 - DNA, 112 bp, Homo sapiens
ccagatgaagaggtttcccctgaagtactagcaaagaatgcagtaatagtggccttgtcttcaaaatcatgggatgtagagactgcaacagaattgcttctgagtaactgag

SEQ ID NO: 126686 - DNA, 100 bp, Homo sapiens
agacacctagatgacatggtgcattgccagcagaagaaagtcaagcagatggtcgaggagaattctgcttggtcagaatcgtgatggcattgtgttcagc

SEQ ID NO: 126687 - DNA, 83 bp, Homo sapiens
cccaggtgcccccggcctgcgctcccatccacacgctcgattcttcacggaaaaatccagcaaagcctactccttctggatga

SEQ ID NO: 126688 - DNA, 100 bp, Homo sapiens
gggaagacgtcgctgctgatggtcttcgccgatggggccttccccgagccccccgctcctgggcccgctgcctcacagacatgcgttggctgcggaacca

SEQ ID NO: 126689 - DNA, 82 bp, Homo sapiens
ccatgtcgggttattcgagtgaccgagaccgcggccgggaccgaggcgagaaccctctgcccacagtggagattgccatccg

SEQ ID NO: 126690 - DNA, 74 bp, Homo sapiens
aacacggtttttattgacagagctctgatagttgttccttgtgcagaagcacttttccagccattaactccagg

SEQ ID NO: 126691 - DNA, 75 bp, Homo sapiens
gaacatttctgggtgacactcaacaggattcccgaacctgtgagaagtttctacaatggtgggctcagctctcag

SEQ ID NO: 126692 - DNA, 83 bp, Homo sapiens
caacagccaccaccaccaccagatgagctggactggccattatggaggaggagctgcagcattcccattgtgtgaattgtgtc

SEQ ID NO: 126693 - DNA, 51 bp, Homo sapiens
ggcttccccagccacatggaactgaacgattccaggtgaagaatcctcccc

SEQ ID NO: 126694 - DNA, 88 bp, Homo sapiens
aagcctccttgttctcattgagagccaggactgtctccagtttggtcctcctgctgaaggggaagtggtccaagtgagatggacagac

SEQ ID NO: 126695 - DNA, 82 bp, Homo sapiens
aagttgcgaaggatccccaacggggaggccaacgtgaagaaccattgagacccagagcagcagttctgaagagatagtgccc

SEQ ID NO: 126696 - DNA, 98 bp, Homo sapiens
gacacagtcaatcagtcaggaggccacatctatcccaaatttctcttatatgggagctcgcctgtgtaattacctgtcccatcatctgacaattagcc

SEQ ID NO: 126697 - DNA, 96 bp, Homo sapiens
aaatttctgaatcgtcatgatttagatttgatttgtcgagctcatcaggtggcagctgccaacaagaagcattagaacaaaccatgctgggttaat

SEQ ID NO: 126698 - DNA, 96 bp, Homo sapiens
ggtgtaccagaattcggccatgagccgctacatactcatcatggggctcctgtacaagatgtgaagttcatttccaatccgccctccatggtggca

SEQ ID NO: 126699 - DNA, 100 bp, Homo sapiens
gggcaccatgatctgtggctgggataagagaggccctggaaatgttctgtgaaggtcaagtgtgcaaacagacattccagagagcctgatccacatccag

SEQ ID NO: 126700 - DNA, 83 bp, Homo sapiens
aatccgagaagagcagagcggagggagccccagacacggggcagaaccccttcgagctggccttctccctagaccagcccgac

SEQ ID NO: 126701 - DNA, 100 bp, Homo sapiens
gggggtctctcagtaatgctggggaccctgagatcgtcaagtctcccagcgaccccaagcaataccggagttgtatcccgcattttgtattcacaacgga

SEQ ID NO: 126702 - DNA, 82 bp, Homo sapiens
caacttattcccttcaattcaagtaacaggtcacggtctagatcacattctcgatccagaggaaggcgatactctcgctcac

SEQ ID NO: 126703 - DNA, 90 bp, Homo sapiens
tagccagccggctacaattggagtcagagtcccaaagacatggaacaggccgcccgcctgaagaaactacaagagcaagagaaacaacag

SEQ ID NO: 126704 - DNA, 98 bp, Homo sapiens
gatggattgccagggcttcctggcccgaaaggagagcctggctacttctacaagtccgaacagccagtccagcaaaatgaacagcattgtctaccaga

SEQ ID NO: 126705 - DNA, 74 bp, Homo sapiens
ggaggatgtcgggacaccccggaagctgggaaatgggtttccaggcctgaggtgcccgccctggccccaggaga

SEQ ID NO: 126706 - DNA, 100 bp, Homo sapiens
tctcttgaaggtgccttcttcactaagtgccgaggagctggaagccatcaagttaattagggctgcctgaccatggtccccagtgagaaggaagtggaac

SEQ ID NO: 126707 - DNA, 101 bp, Homo sapiens
cttcgaagctgtagtctgaatcaacctaagttttaaacagaaggtgaacctctgagggccaattcctgtccccccagcagcatggcatcgtgtgctgaacc

SEQ ID NO: 126708 - DNA, 98 bp, Homo sapiens
aagataattacaaacgggtcacaggtactaggatcaggtcatccagctgatgaacgcgatcttcagcaagaagaactttgagtccctctccgaagcct

SEQ ID NO: 126709 - DNA, 75 bp, Homo sapiens
acttggttccccctccctcagcttccgccccaaaagcctgccacagtgactcaggtcactcaaggaactatccga

SEQ ID NO: 126710 - DNA, 100 bp, Homo sapiens
cagaaggagagattcctctgccatggagtcctacgatgtgatcgccaaccagcctgtcgtgatcgacaacatgacgaaggaactcccaggacaaaagaag

SEQ ID NO: 126711 - DNA, 75 bp, Homo sapiens
aacatcatgaattcccaagaaggaggtgtacgaagccatcgacagcagagatggagcatcttgtgcagagttggt

SEQ ID NO: 126712 - DNA, 100 bp, Homo sapiens
ctcggagcttgtggacacttatacgctttaacgtctcctaagccgaacttgatgggtctgcccagcacaactgttccttcccctggcctccccacttctg

SEQ ID NO: 126713 - DNA, 101 bp, Homo sapiens
taggtcacctcattcatgaaggcctacagaagagcagagaggagccttcaggggaagtagaggtggccgaggttggggcacacgaggaaatcgtagtcggg

SEQ ID NO: 126714 - DNA, 116 bp, Homo sapiens
aagaatttaccctttagctttacaaagctacagcaattgacagctatgtggctctcagataatcaggagaagatttacaaatctctgcctggatgctgtttgtggttaccttgttg

SEQ ID NO: 126715 - DNA, 83 bp, Homo sapiens
cacctcctcgccagcagccgtccggagccagccaacgagcggagtccaaaactacttacctggaagaccttccaccaccccct

SEQ ID NO: 126716 - DNA, 100 bp, Homo sapiens
gctgatgtatacacgtttaatttttctaaagagtcttgttatttcttctttgagaaaaacctgaaagatgtctcagctaacatttccaatgatcactggc

SEQ ID NO: 126717 - DNA, 74 bp, Homo sapiens
cacatttaatggaaggcttcttaccattcagcaatttagttactcatctcacaagtgcatacaccttgatagca

SEQ ID NO: 126718 - DNA, 87 bp, Homo sapiens
gaaaggaggtagaaaaaacacaaatgaattctataagaccattccccggttttattatagggaaagagagaagttacgtgaagaaaa

SEQ ID NO: 126719 - DNA, 98 bp, Homo sapiens
agcgcccacggggacggattggttgttttttcctgtatgaagcggttggcaccactgaagtgaccgaatgaggccaccagcccctcgggttccaagat

SEQ ID NO: 126720 - DNA, 110 bp, Homo sapiens
ccagcctatattgttacaattttttttcaagaactgccgtcttctttgcctgcactaatggaactgtggctgcaccatctgtcttcatcttcccgccatctgatgagcag

SEQ ID NO: 126721 - DNA, 90 bp, Homo sapiens
cgcgtccgccgattcctcctccttggtcgccgcgtccttggctggcgtgttgagaacttgttgcttagtaaccaagggaccattaagctg

SEQ ID NO: 126722 - DNA, 50 bp, Homo sapiens
ctggtctcgaactcccaacctcaggtgatctgcctgcctcagcttcccaa

SEQ ID NO: 126723 - DNA, 100 bp, Homo sapiens
agacagagcgctactcctggcagtgcgtcaatcagagcgtcctgtgcgcatcagcgagagctttctaactgtcaaaggtgctgccctttttctaccacgg

SEQ ID NO: 126724 - DNA, 80 bp, Homo sapiens
caggagtttaaccttccagtcagccccgagcctggagatgagggggagccggggcggtcgggactggagcttgaaccaga

SEQ ID NO: 126725 - DNA, 82 bp, Homo sapiens
ctggcagttcctgcatggacagtgcccagttcgtgtttagtaggagcacagtagctgtttggggaacgaccttaagtgaata

SEQ ID NO: 126726 - DNA, 87 bp, Homo sapiens
cgtggggctgcctcgccgcgtctcgccacggtttgtctacagattttgagcgttcgaagttgacccctgactaagtatactttgctg

SEQ ID NO: 126727 - DNA, 117 bp, Homo sapiens
gtgccgcagatgcccaccggaatggagaaggaagaggagtcgcaatgtttttggaacagtgccagtggttgcttctgcacagacacagcctgcttcatcaagtgtgcctgctccatt

SEQ ID NO: 126728 - DNA, 90 bp, Homo sapiens
tatgttgagatgtgctattttgacaacacttattcatcttgttcagccagaaagaaaagttttcctaaaggaatggggaggttgttactc

SEQ ID NO: 126729 - DNA, 75 bp, Homo sapiens
tacaaggcattgtgagcctgcaagagctgctggaaagtggttatggccagtgagaatgtgcggtgttgcattgca

SEQ ID NO: 126730 - DNA, 75 bp, Homo sapiens
gtcttatagttgagaatttatcctcaagagtcagctggcagaagcacctggaggagccgctgtccctgcaggagc

SEQ ID NO: 126731 - DNA, 75 bp, Homo sapiens
gaagtttgcagctcaggagttgattgagggtaagggactgttctgaagaacctttccatttagtgatcaagatat

SEQ ID NO: 126732 - DNA, 98 bp, Homo sapiens
aacctttgagggagaaggacatcatcatcaagagggagatggtgtcccaatacttgtacacctccaaggctaatcaggaaacccaggcccaacggcag

SEQ ID NO: 126733 - DNA, 100 bp, Homo sapiens
cgctgcgacagggacttggactgcagcgatggcagcgatgaggaggagtgcaatcataggtatattgaactgttcctgaattcatgtccaaaaggaaaat

SEQ ID NO: 126734 - DNA, 80 bp, Homo sapiens
agctacagagattcaagatgtatgttcagcagttggacttaacgtatttcttgaggctgctttgtaccgcctcagtggag

SEQ ID NO: 126735 - DNA, 100 bp, Homo sapiens
tgaagctgagtggcaagagattttggccaaagtgaaagaggaagaggaagagccattaccatcttacttatttaagttaagtgggcagaccaacatccac

SEQ ID NO: 126736 - DNA, 100 bp, Homo sapiens
gatgattgcagaattcacatatttgctcaacaaaatgatcagtgtttctacacctgtgggttatgacaaagacaactgccaaagaatcttcaagaaggag

SEQ ID NO: 126737 - DNA, 100 bp, Homo sapiens
ggagactctccctggaaaacttcccttccctttcgtactatactggcaattgctggagaagattttgcaattgttgcttctgatactcgattgagtgaag

SEQ ID NO: 126738 - DNA, 100 bp, Homo sapiens
tcttgctgctatgcttcgaagctgtagtctgaatcaacctaagttttaaacagaaggtgaacctctgaggagttactatgaagccaatgatgttacttct

SEQ ID NO: 126739 - DNA, 99 bp, Homo sapiens
tgtttaactgccttgccagacgaattctctccagctgtttcccaagcgcacagattgctgctctctgaacactatagtcgtcgaatctcacaagcgtac

SEQ ID NO: 126740 - DNA, 101 bp, Homo sapiens
agtctctggaaagtacgaggagaatcctgggtttagccattgaggtgggaacctaaattattctgcaagacaaagggaagaaataaaattttcccatactg

SEQ ID NO: 126741 - DNA, 75 bp, Homo sapiens
cgcgaatatcgtcatcgttagaaggagtccagctacttgctcttttagttcccactttgatatcttacctgctgg

SEQ ID NO: 126742 - DNA, 50 bp, Homo sapiens
cagaaaactatggcggaaaatggaattagaaggtgacgaggagggagaag

SEQ ID NO: 126743 - DNA, 82 bp, Homo sapiens
gcgtgccccaccatgtcagacgcagccgtagacaccagctccgaaatcaccaccaaggttgggcccgaaggcatcctgcaga

SEQ ID NO: 126744 - DNA, 100 bp, Homo sapiens
gttataaccgggaagactttgccaaagcagactgattcttgctattccaaatcctcttccacgttgacagcccttcagatatttcaacactcctctcagc

SEQ ID NO: 126745 - DNA, 95 bp, Homo sapiens
aaactgcctgactaacttccatggcatggatcttacccgtgacaaaatgtgttccatggtcaaaaaatggcagagcccccatcacctcaggcttc

SEQ ID NO: 126746 - DNA, 100 bp, Homo sapiens
gtgttgttgccggagctgagaccgggcggccacagtccgcagggatgaacctcgagttgctggaatacatccagcctgtgtgcctcccagctgccggcca

SEQ ID NO: 126747 - DNA, 100 bp, Homo sapiens
aagtgggcccccccggaccaccagaactggtcatgctgctggagtggtggtcctgcacggagtgtacactgttcacggaccaggccacggtagagcgctt

SEQ ID NO: 126748 - DNA, 97 bp, Homo sapiens
aggaaatggaaaccaaagtcaagcatgtgataaagcagggtgtccgcaatgttgccagtgtctgtctgcagattggctacccaactgttgcatcagt

SEQ ID NO: 126749 - DNA, 75 bp, Homo sapiens
tgaaactggggaaaagtgcaatgcagattgacgagatgcctgaggctgccgtgaaatcaacagccaacaaatacc

SEQ ID NO: 126750 - DNA, 50 bp, Homo sapiens
agctaaaaccttcctcaccgtgtactgacagaagcagtacaacatccacg

SEQ ID NO: 126751 - DNA, 101 bp, Homo sapiens
aagaactatgagcaagctctccaagatgccagtgcagcttgtcagaatgaacctctcttgattaaggtgaagcagcatctgggtgtgagagtgaaacaagc

SEQ ID NO: 126752 - DNA, 50 bp, Homo sapiens
agaaactgcaccggaaatgtgcctaccagctgcgggcgcttacctgcccc

SEQ ID NO: 126753 - DNA, 100 bp, Homo sapiens
ccatcttcttcggcgccctgcgctccgtacgctgcgcccgcggcaagacaccaatgggaatcccaatggggaagtcgatgctggtgcttctcaccttctt

SEQ ID NO: 126754 - DNA, 100 bp, Homo sapiens
ttagaagaggaagaaatgatggaaggagaaacaaacttcagctctgaaatagaagatcttgcaaggatactttggtgttgaacatttgggatagaagaga

SEQ ID NO: 126755 - DNA, 75 bp, Homo sapiens
cctcagcctcccgagtggctgggattacagacctggaatcatttttctgataatgaggcagagcgggttaaaatg

SEQ ID NO: 126756 - DNA, 51 bp, Homo sapiens
ggctgggcggctgccggtgacaggtagtgaagcgcgcagtggcgagccagc

SEQ ID NO: 126757 - DNA, 75 bp, Homo sapiens
cgcggattcgccgaggcaccgaggcactcagaggagctgtcattcttctctacagaagagcttctcctcatcaac

SEQ ID NO: 126758 - DNA, 100 bp, Homo sapiens
ggtgcacccccagtgggtgctcacagctgcccattgcctaaagaaatcatcatggcaaaaccagctggtgggcccaagcctccaagtgggaagaaagact

SEQ ID NO: 126759 - DNA, 90 bp, Homo sapiens
ccctgagctcccattaggagccgctggctgcggcagcaggggactagcgtgagagccaaaccccctaaaggtctccacactgctgtttaa

SEQ ID NO: 126760 - DNA, 75 bp, Homo sapiens
gacaaggacaaagaaggcaaacccctgctgaaggctgctggcaaaggggacgtcccaacgaagagaccacctgtc

SEQ ID NO: 126761 - DNA, 83 bp, Homo sapiens
cggcacgcagccgggaggccgaggactcggagttcacctgcaggtgcaatggatgagcttcatagtctggatccaagaaggca

SEQ ID NO: 126762 - DNA, 82 bp, Homo sapiens
atccagaacctccactctttcggatggatagaatgacagaagatgctcttcgcttgaatctgttgaagcggagcttggaccc

SEQ ID NO: 126763 - DNA, 96 bp, Homo sapiens
gtcccctagcagggctctagagaccacgtgaagtctcctcggtgtggatgaggtcaccattgtcaacattttgaccaaccgcagcaatgcacagag

SEQ ID NO: 126764 - DNA, 100 bp, Homo sapiens
gaaaaagaacattacaaattttttttgaaagaaatttggggtgaataaccctataccttccaatttgaaatcagaagcaaaaaaggctgccaaaatatta

SEQ ID NO: 126765 - DNA, 83 bp, Homo sapiens
aaacatccatatcataagtggaattttggagatattcaaaggatgctgaaatttctggaaaagacaatggaaatcaggggcag

SEQ ID NO: 126766 - DNA, 100 bp, Homo sapiens
cgcggctcctagcggatgggtgctattgtgaggcggttgtagaaggaaaagaagatttttcagatcccctggatgcatgcggctagacatgggtgggatg

SEQ ID NO: 126767 - DNA, 75 bp, Homo sapiens
cggaaaggataggggggaggaagacttaacactgcaacaacaggtcatgattgttgtgaaacagtgaaggtgcag

SEQ ID NO: 126768 - DNA, 49 bp, Homo sapiens
gaaaccggtagcgcttgcagcatggcttgtcccaaagctgttttataaa

SEQ ID NO: 126769 - DNA, 51 bp, Homo sapiens
cggcaccccccgccgacaaggaggtggcaacatgaagatctacttatcaat

SEQ ID NO: 126770 - DNA, 75 bp, Homo sapiens
tccagaagatttaactacgtggtccgggactttttttatgaagacatggagtccttgacgcagatgcttagggcc

SEQ ID NO: 126771 - DNA, 75 bp, Homo sapiens
gccgcctggggtagcggcggcgggagtcctggcgctctgcaggtgacttaagagattaaaattaatttggttgct

SEQ ID NO: 126772 - DNA, 100 bp, Homo sapiens
ccacagagacatcaaaccagacaaccttcttttggacagcaagcttcataaacaagcagatatgcaagaagagaaaaaccgaatcgaaagagtccttggc

SEQ ID NO: 126773 - DNA, 83 bp, Homo sapiens
gacggcgagcccttgggccgcgtctcctttgagggccaattcctgtccccccagcagcatggcatcgtgtgctgaaccctctg

SEQ ID NO: 126774 - DNA, 74 bp, Homo sapiens
gaccctggaaaacctggccctcttcaatttctgacaaaagctgggatctagcaattgggaggcagcagacttgg

SEQ ID NO: 126775 - DNA, 82 bp, Homo sapiens
ccattgctgtgcctacaccttcgccacccactattggaccagctctctctccagatcggattcaaccgcacatcatgacaga

SEQ ID NO: 126776 - DNA, 75 bp, Homo sapiens
actgcgagaacaactacatacaggtatagtggaggattacaagccaccgttctacgatgtggttcccaatgaccc

SEQ ID NO: 126777 - DNA, 88 bp, Homo sapiens
cagcgggccctggccgctcacccgtggaaagtacaggtcctgacagctggtggtgttcccactgatgaagagcaggcgactgggttgg

SEQ ID NO: 126778 - DNA, 100 bp, Homo sapiens
cttgccctggtcttgctcggccgatgaagtgcagaggtttttttctgctgccaatggctctaatgaagatagaggagaggttgcagatgaagataagaga

SEQ ID NO: 126779 - DNA, 98 bp, Homo sapiens
caggaaacatggcggcggcgggtgttgtgagcgggaagggctagtcgttggatttatcctaaccattgcaaatttcagcttttttacctctttgctga

SEQ ID NO: 126780 - DNA, 90 bp, Homo sapiens
tggctggacagctagctgcttatggctataaaattacagacaagttggatggcttgaggactggtactaaaaggaaacgtgactgggagg

SEQ ID NO: 126781 - DNA, 96 bp, Homo sapiens
ctatttgtagtcatgtacagaacatgatcaagggtgttacactgagctctcaacgaaatgtggaagtgtcagaacatgcttcggagccatgtacgc

SEQ ID NO: 126782 - DNA, 51 bp, Homo sapiens
gcgggccatcagcacccccgagaacacgatgaggcgagtggtacgacagag

SEQ ID NO: 126783 - DNA, 75 bp, Homo sapiens
gattgctctcccctcccctagtatggaagggaaaagtgttttaggcttccagagtagaaatctgatattacttcg

SEQ ID NO: 126784 - DNA, 83 bp, Homo sapiens
tgacgctgctgctgtgtgcggtgctgctgagcttggcctcggcgtcctcgggcatccgtgtcattctggaccttactcccaac

SEQ ID NO: 126785 - DNA, 71 bp, Homo sapiens
agcttcaaggacgcagccacagagagctccaaacgagaatggaagccgctggaggaccgtagctgcacaga

SEQ ID NO: 126786 - DNA, 82 bp, Homo sapiens
cttggtgtcatccagccttagcaaaccagaggctactaatttagaaccattgccatcactagaagatttggataatacagta

SEQ ID NO: 126787 - DNA, 75 bp, Homo sapiens
ccttcgtcgctgttgctgccgccatacgcgctctccctgtttaggtgcacttatgcagtggggaatcatgacttc

SEQ ID NO: 126788 - DNA, 100 bp, Homo sapiens
caaaaccaacgcctggctcggagcagcagcctctgagggtcatccgcacagaatggcagcgcattaaagagggaattctctggaggaagctacagtgcca

SEQ ID NO: 126789 - DNA, 82 bp, Homo sapiens
gggcttcctccccggccggcagggtggacggtgggctcaagaaaaagtcagcactttttgaagtgtctgaggttataccagt

SEQ ID NO: 126790 - DNA, 98 bp, Homo sapiens
gtctgcggaagtgcagctgcctcagttcttagcgcagaatgctgagatgtataaactgtcttcagagcaattccatgaggcagcctcaaagatggaga

SEQ ID NO: 126791 - DNA, 83 bp, Homo sapiens
agcaaagtgcgtgaggagtttaaggagctgaaagcgcgacgccttctggcaagaggggagagcctctggaacagtgtacagtg

SEQ ID NO: 126792 - DNA, 100 bp, Homo sapiens
gggatctgaaaacgagcccctatcctaggattacctgaaggtgaaacagattgagccagaaggaagacaatgctggtatagactatgtgatacctaaaac

SEQ ID NO: 126793 - DNA, 100 bp, Homo sapiens
tgttctatactggaagaggcatgccagaggtagagcaggttgtttacattcagagctctatcaataagaggaatacatattacagtgaattcgacaaccg

SEQ ID NO: 126794 - DNA, 100 bp, Homo sapiens
cctgggccgccgctgctacctgcagcgccgtgtggcacgacacaaaaatcaggtctgtcttgcagccgatgagcaccatggggatcccgcggcagaaatg

SEQ ID NO: 126795 - DNA, 50 bp, Homo sapiens
atttagaatgcaggatggagaggtttggtgcacctcgatttggaggaagt

SEQ ID NO: 126796 - DNA, 100 bp, Homo sapiens
ccagcatggactacttttagagttggcctattttgtggaatattcattgtactgaatattacccttgtgcttgccggtttttcccactcggctttcacgt

SEQ ID NO: 126797 - DNA, 109 bp, Homo sapiens
ctacacagtaccagaggtggggactgttgttggaggaacactttccaggtttcggtggaacggcatgtctcgattggagaaggtgtatctgaagaacagtgtcatggag

SEQ ID NO: 126798 - DNA, 100 bp, Homo sapiens
cgtgaaccccatctggcaggccgagcactttcatttggacccgtggatacccattgaacagatgcttgaaacctgcaagtaatcttcagatcctagcaga

SEQ ID NO: 126799 - DNA, 75 bp, Homo sapiens
gctgcttcaggaggacctgcaggaggacgcagacggatattcatgatgttgctatcaaaagttgagaaattgtca

SEQ ID NO: 126800 - DNA, 75 bp, Homo sapiens
atactcatcttgtccagaactctgtcaaatgaagaacactttcaagaaccagggtctagacagtttcaaagtgaa

SEQ ID NO: 126801 - DNA, 150 bp, Homo sapiens
caaagacatcccaccaggggaggagttccggggaaacgcaaatgaagatgggttcaaaaggcagcctttcgtaatggacctagtgaaaccagtgtgtctgcccaacccaggcatgatgctgcagccagaacagctctgctggatttccgg

SEQ ID NO: 126802 - DNA, 74 bp, Homo sapiens
ggcccaggatatccagcggagcctagagagagaaaccagggtggttatgaccgctactcaggaggaaattacag

SEQ ID NO: 126803 - DNA, 50 bp, Homo sapiens
gggcgcggagcccctcacagtgcagctgggatctagcaattgggaggcag

SEQ ID NO: 126804 - DNA, 75 bp, Homo sapiens
aatggagaggctggtcgcccaaatagcctgggctggaagctcttctacgtcacaggctgcctgtttgtggctgtg

SEQ ID NO: 126805 - DNA, 99 bp, Homo sapiens
cttcgacgggcacaacctcaagtcttactactttgaccgcgatgatgtggctttgaagaactttgccaaatactttcttcaccaatctcatgaggagag

SEQ ID NO: 126806 - DNA, 100 bp, Homo sapiens
gataatttcatactctggcttggcaaagactgaagggaagccatggtgaatgcacagcaacttctatggcttcccagttacgactcttcgatccccagct

SEQ ID NO: 126807 - DNA, 100 bp, Homo sapiens
ggactcagaccagtctctgcaagaataacgaaggaggcccaacttcattcaataaggagcctgacggatttatcccagacggtagaacaaaaggaagaat

SEQ ID NO: 126808 - DNA, 75 bp, Homo sapiens
gaacagacagaaggatgtaaaggatggaaaatacagccaggtatcaatcagctctgttaccacacaaagggaaca

SEQ ID NO: 126809 - DNA, 88 bp, Homo sapiens
cgcgctccctccgccgccgccgccttgctgctgctcaaagctgctgccgccccttgggctaaaagatgaagttggagcccttgttttt

SEQ ID NO: 126810 - DNA, 52 bp, Homo sapiens
agtgtagtcctctgtatgaaaagatgttccatttaagcagacctcttccata

SEQ ID NO: 126811 - DNA, 50 bp, Homo sapiens
cggccgcagctgccacaaaccagatcagtgtactgttacccggacatacc

SEQ ID NO: 126812 - DNA, 100 bp, Homo sapiens
gagcggggacttcactgctctgctgtctcctgcaagaactggctcaagaaatttgcctcgaaaaccaaatggctgagagctagcaaggaaaactcaggac

SEQ ID NO: 126813 - DNA, 51 bp, Homo sapiens
gcctgactccggcgggagagtaaaggaagcccatgaaacctttaatgagtg

SEQ ID NO: 126814 - DNA, 75 bp, Homo sapiens
cagaaagacatcctgagaggacttggcagcaatggctgccatccggaagaaactggtgattgttggtgatggagc

SEQ ID NO: 126815 - DNA, 75 bp, Homo sapiens
gccagcctggacgatctcattgacagctgcattcaatcttttgggagttctgggaaatcgttcattcatttacag

SEQ ID NO: 126816 - DNA, 82 bp, Homo sapiens
gcccgctctaccccgccgcagcggctgggacgtacggagcccgcaagtcccggcccgaggattttttatcaagcagaaatgc

SEQ ID NO: 126817 - DNA, 100 bp, Homo sapiens
ggttgatgaagctaatttattgacttggcaagggcttattgttccttaggacccagggtgcgtgcccatctccagcccagggcagctcccctgtaagctg

SEQ ID NO: 126818 - DNA, 74 bp, Homo sapiens
caacttctttggcaagtggacattttactggctcaaataatatagttggatcaaacaaaaacaacacaatttgt

SEQ ID NO: 126819 - DNA, 100 bp, Homo sapiens
cttaccagggaggccaagcgaccacccaaagaagcaaatggttatgagccttagagtttctgaactccaagtactgttgggctacgccgggagaaacaag

SEQ ID NO: 126820 - DNA, 80 bp, Homo sapiens
gcgctgagcctgcagccggccctgccggccgactcgcgggccgctgcacccaccgccaaggacaaaaggagcccagcgct

SEQ ID NO: 126821 - DNA, 100 bp, Homo sapiens
gaccccccgcggctccagcccagacgccccggcctcaggtaggagcaacggtgggaatgccctctgaggaatgcagtgatgtccatcagtcacctctcac

SEQ ID NO: 126822 - DNA, 83 bp, Homo sapiens
caggaaccagctcgggggccaactctgaggagtccactgcagcagcaataccaagaaggagggtgacctgatagctgctcagg

SEQ ID NO: 126823 - DNA, 100 bp, Homo sapiens
ggaggcatccaagggacattgccactgactgtccagaaggtgttggcatcccaagcctgccatgatgctgcagttggagaagaaacttgaacgtgaactt

SEQ ID NO: 126824 - DNA, 99 bp, Homo sapiens
ggaaagaaccctggctggggaaaagggaagtgaaaagagatctgttttcagaaacctccacagctgttgagaaaaaggagaaacctcttccaagactta

SEQ ID NO: 126825 - DNA, 75 bp, Homo sapiens
ggggccgcggggctccaggacggcgcccttagcgacaccatgtggatgaggatcgcagtacggaacctgaccgat

SEQ ID NO: 126826 - DNA, 90 bp, Homo sapiens
catgcctgacagatgtgccttggaagagtctgagagtccagtatacctgaggtgcaccggaggtgaagtcggtgccacttctgccctggc

SEQ ID NO: 126827 - DNA, 100 bp, Homo sapiens
tgaagaatgagaccatctggtacgtgcgcttcctgtgggagtgacccgccgcccccgacccaggttgagcttcagcgacagcgagagtgacaacagcgcc

SEQ ID NO: 126828 - DNA, 100 bp, Homo sapiens
cccgctgtctcagcagtctacagcacgatcccaaagagaagattgatattgggctgcctccacccaaagtctcccggacccaacagctactggaacggaa

SEQ ID NO: 126829 - DNA, 100 bp, Homo sapiens
ctgggattacaggcgtgcaccaccatgcccaggaggtgcgggagacgcggcggcggcacgagcggcgcctggtggaggtggacagcagccggcagcagga

SEQ ID NO: 126830 - DNA, 100 bp, Homo sapiens
cagtgatgacagaccgacttaagttcggattcggcttccaccgcttcttagtggtgcggctctatgagtggacaacagagaaggagctgcgcactgagtg

SEQ ID NO: 126831 - DNA, 100 bp, Homo sapiens
aaactgtgaagcaaattcgtcagatcaaagaacaagtgcactgacaggcagaactcaccagtcacatcaccaggatcctctccccttgcccagagaagaa

SEQ ID NO: 126832 - DNA, 81 bp, Homo sapiens
gaaactggaggagtcccgctcgaagctaggaagccagttgagggaagttctccatgaatgtacgtcacaatgatgatgacc

SEQ ID NO: 126833 - DNA, 50 bp, Homo sapiens
ccagctccgtctcggcggcggcgggtagctacagcaagctgggtagcagg

SEQ ID NO: 126834 - DNA, 100 bp, Homo sapiens
agagagaaaattgagacggagctaagagatatctgcaatgatgtactgaagccgctggagttctggagtgggtggaagtggtggaggatcctctggtagg

SEQ ID NO: 126835 - DNA, 100 bp, Homo sapiens
caaatatgacttcaaagctactgcagacgacgagctgagcttcaaaaggggggacatcctcaagctaccagagattcactgactgctataagtgcttcta

SEQ ID NO: 126836 - DNA, 90 bp, Homo sapiens
accagaagggccaggtgcatcagtgcagatatgagatcctgactccaaactccattcccaagggtttcatggacgggaagcaggcgtgcg

SEQ ID NO: 126837 - DNA, 100 bp, Homo sapiens
tgttgaatatttggttggtgatggtccacaaaacaggtatgaaaatgaaagtcttcagaatggaaggaagtcaactgaatttccaagaaaaatacgtgaa

SEQ ID NO: 126838 - DNA, 83 bp, Homo sapiens
gccgagttcaacatcctcctggccaccgactcctacaagaaacaggtggcatctgcatcgcaccacggccctcggaagaaggg

SEQ ID NO: 126839 - DNA, 90 bp, Homo sapiens
ccaccgagtacatccctactgccttcgacaacttctccgtgacaaagctgcaggtgagcaaatcgaagaggaccctcaccctggtggaaa

SEQ ID NO: 126840 - DNA, 82 bp, Homo sapiens
tttacagaggaatagtctacaaaggaagacttgtaacctggagaagagaattaaacaaccaccatgtcgagcaaaaaggcaa

SEQ ID NO: 126841 - DNA, 90 bp, Homo sapiens
gcgagccggcccgctcgggccaccgcgggaaccgagcccgaggagttagccggaaacattggcaaatttggagcgacagatctatgcttt

SEQ ID NO: 126842 - DNA, 130 bp, Homo sapiens
atatgctctgactagaaattatttggaacttatggtagaacttccttggaacaaaagtacaactggtatgtaccctctggtcacagcgacccaggatgctgacagcagccggaagctggctcacttgctg

SEQ ID NO: 126843 - DNA, 75 bp, Homo sapiens
gagtgtgaaaaaaacaaaagcagcccaatttttgcattccaggagctttaccgatttgttacaactcaagcaagg

SEQ ID NO: 126844 - DNA, 101 bp, Homo sapiens
tgcctcagtgttgaagccattgaaaggtgcagcagtgaacagcagtgagagtctccctccatcctcgtctgtcaatgacatctcctccatgtccaccgacc

SEQ ID NO: 126845 - DNA, 50 bp, Homo sapiens
attgcacttcttgccacaatgttacagagctcctgaagaaggacttgtgt

SEQ ID NO: 126846 - DNA, 111 bp, Homo sapiens
cccgatggaagattcgatggacatggacatgagccccctgaggccccagaactatcttttcgcagcctcccgcgacgatgcccctcaacgttagcttcaccaacaggaact

SEQ ID NO: 126847 - DNA, 50 bp, Homo sapiens
agcggagggagccccagacacggtactgaacgacacctgggtctccttcc

SEQ ID NO: 126848 - DNA, 75 bp, Homo sapiens
gcagtggatttcatcaactagtcttggtcttgatgccaagtttgggaaaggagctaagaagacatcccactagga

SEQ ID NO: 126849 - DNA, 97 bp, Homo sapiens
gcggaagattctggggacacagaggatgagctgaggaggtttcaaccgcagcggaggtggtggctatagccagaaccgctggggtaacaacaaccgg

SEQ ID NO: 126850 - DNA, 75 bp, Homo sapiens
gatttctgcagtgaagattgctgtaaaaaatttcaggattggtactacaagacattaccagaaacatctttacca

SEQ ID NO: 126851 - DNA, 149 bp, Homo sapiens
cctccatcaacccggaccacctcacctactttcgctttataggcagattcatcgccatggatgttctagtgactggatcctttccagttggtgcctgggaaatggcagccactactaattcagccttgaagacagtaccgtgcccactc

SEQ ID NO: 126852 - DNA, 80 bp, Homo sapiens
ttaagacatttgccatgaagtactcacaggcaaatagacgagttgtactgctgtcacaggaaatggacgctggattacaa

SEQ ID NO: 126853 - DNA, 100 bp, Homo sapiens
ccgaagtctgcttctgcttccaaaggagaaccgcagtgaaagtatctccaggctccagcacttgcttagctgttatgactccggcgagcctgtgtttctg

SEQ ID NO: 126854 - DNA, 99 bp, Homo sapiens
tgtgggcaggcgggcagtcagagcatcgggagcaacgtcacgctcatcaccctgaactcggaaggccctgaagaggaaagtgaggatgactctcatctc

SEQ ID NO: 126855 - DNA, 100 bp, Homo sapiens
aagaagaggacgacgacgacgaggaagaggaggtttctgagctatcagaggactcctgaaacctggagagctacctgctgtataaaggctggcctgaggg

SEQ ID NO: 126856 - DNA, 82 bp, Homo sapiens
ggagcatggaggcgcacaacatcctcagggggatatgagactttctactcggaatatcctgagtgttgcgtggatgtaaaac

SEQ ID NO: 126857 - DNA, 50 bp, Homo sapiens
gcaaggtctccaagtcccagctcaagagtcgacttcaatgttcctatgaa

SEQ ID NO: 126858 - DNA, 51 bp, Homo sapiens
agtccgactataccacatacaggtgttgctaacaaccacaagcagaatttg

SEQ ID NO: 126859 - DNA, 100 bp, Homo sapiens
caaagaggctgaattggagaattcggggcttgcactctatgatggaaaaggccttgtctgatgccattaaaaaatggcaggagctgtcaccagaaaccag

SEQ ID NO: 126860 - DNA, 97 bp, Homo sapiens
gaacctttgacttggtgttgaaagtgaaatgtcatgcctctgaaaatgaaggttgcacagtgaattaaaagatgctgttgaaaaaaaattggaggcc

SEQ ID NO: 126861 - DNA, 100 bp, Homo sapiens
tggaaaggctctcagtgaaaaagtaaaggcatgacttcctggcaccacagggaaaatcgggtgcaagcccagaaactatttccccaccaccacttgttga

SEQ ID NO: 126862 - DNA, 82 bp, Homo sapiens
gtggagtatttgctgggccgggtaccatggacgtgggcgaacttctgagctaccagtgccggtggtggtgtgcacattgagc

SEQ ID NO: 126863 - DNA, 90 bp, Homo sapiens
gtggctgcagccgagggagaccaggaagatctgcatggtgggaaggacctgatgatacagagaaactagaaaaactgcttttggaattat

SEQ ID NO: 126864 - DNA, 98 bp, Homo sapiens
ggcggcggccgacggtggcggcgggatgcaggggatggcctttacccttgaagaaaggctgcagcttggaatccacggcctaatcccgccctgctttc

SEQ ID NO: 126865 - DNA, 87 bp, Homo sapiens
attttgggtcttcttcttaatcccatatctggacatctggaacatccatggatagaccatgaagctgaaggaacttgagcggccagc

SEQ ID NO: 126866 - DNA, 131 bp, Homo sapiens
cggacgaggcggaagaccgcgcgcagggcctgcagcgggagctggacggcgagcgcgagcggcgcgagaaacaattctgtggtgttcttggtcacacatttatggagtttctgaagggcagtggagattac

SEQ ID NO: 126867 - DNA, 100 bp, Homo sapiens
tgacagctgtgtactttgccctcagcatctcccttcatgtctgggtcatggagcgagactcctccagtacctcccccaccaccctatctggccagttatc

SEQ ID NO: 126868 - DNA, 100 bp, Homo sapiens
atggaaaatcgcttggttaaaacctgacacttttaacaggtttgtaaagtcgatcttgcagtacacggagaacctggtggcttacaccagttacgaaaag

SEQ ID NO: 126869 - DNA, 100 bp, Homo sapiens
agcgcgtggtgggggaactgctggggaaggcgattggcatcgatctctccatcccttccgaggcccgacttcggaaccgaatattgtatctgacgcatcc

SEQ ID NO: 126870 - DNA, 49 bp, Homo sapiens
aaagagctgctgatcaagagatctggttctcctgaaaagaaagctgaac

SEQ ID NO: 126871 - DNA, 100 bp, Homo sapiens
tgaggagcccctccgcccggcagctgccccgtctgagaagtgaggagcctctccgcccggcagccaccccatctgggaatttaactcggctgctaagcag

SEQ ID NO: 126872 - DNA, 97 bp, Homo sapiens
ttcagataaatctgaatggaagagtgaggtggaatgaatcttacttgttgaatatcttctggttactagttggattcatttgtgaaagaatcatttt

SEQ ID NO: 126873 - DNA, 100 bp, Homo sapiens
ggcggaggagagctcaagctaaggaccccgtggtttaatggatggggctttaacctacccagaggtcagtctctgctggacaagtggaacctcatccctg

SEQ ID NO: 126874 - DNA, 90 bp, Homo sapiens
gtcgttcctggccatggtggtggacattgtgcaggagctgaagcagcagaaccccaggctggtgtacggcaaagaggccatgctgcgaca

SEQ ID NO: 126875 - DNA, 113 bp, Homo sapiens
gcaatggtcccggctgccggtcgacgaccgccccgcgtcatgcggctcctcggctggtgtcgctgaaacctctacaacttagttgaccgtaactgccagagccctgccctgaa

SEQ ID NO: 126876 - DNA, 83 bp, Homo sapiens
gggcacggcggaggcagcggagccctgggccatcggtaccagcaactaaggtttcagagctgaaccctaatgcagaagtgtgg

SEQ ID NO: 126877 - DNA, 88 bp, Homo sapiens
agagagaagacttggcgatagttccctttctagaaagaccaagttttacaggaaaactccagtgattttcaatcaaacattgcatagg

SEQ ID NO: 126878 - DNA, 75 bp, Homo sapiens
ttggcagccttatcattggttatgccaggtacttttaggttgaaatacgcccctccagcagaaagtctggactcc

SEQ ID NO: 126879 - DNA, 90 bp, Homo sapiens
gcgagagatcccgtccgccccagccgcgtctgggccaggagaaaaggtgtcgtgaaaactacccctaaaagccaaaatgggaaaggaaaa

SEQ ID NO: 126880 - DNA, 90 bp, Homo sapiens
tgcggcggcagcggcggcggcgcccgcgggtggtataaaatggcggatttcgaagagttgaggagtaacagttacccctcaatgagcgac

SEQ ID NO: 126881 - DNA, 100 bp, Homo sapiens
ctcaaattattgaaaatgacagcgatctctttgtagacttggctgccaaaatcaatcaagctcctgtcacatatagagaaacttcgaacctcaatgatag

SEQ ID NO: 126882 - DNA, 100 bp, Homo sapiens
cggaggcctcgggggcgtacaggcgcagcggccgcagcagcagcggcagtcacaggcacatcagcaaagagatttgctgctgcttccaggagaagtggag

SEQ ID NO: 126883 - DNA, 75 bp, Homo sapiens
gccgtgcgccgcagcccgggcccaggccccggcagcgcctgggacaaggttcagattcagaacaagaaagtggac

SEQ ID NO: 126884 - DNA, 50 bp, Homo sapiens
tgaagctctaccgactgccagaggatgagcacaagcctgggagatggcag

SEQ ID NO: 126885 - DNA, 83 bp, Homo sapiens
gaaaaacaaccagtgctgcgacccttggaactaaaaacttttctcaaagttggtgcctcaggaaggtctttccaccgaccctt

SEQ ID NO: 126886 - DNA, 75 bp, Homo sapiens
ccccaaagcagcgtcccgtgctaaagaataacaagcctttgtattcatttgaagataatgcagactatgtttatg

SEQ ID NO: 126887 - DNA, 50 bp, Homo sapiens
agccttcccagtagctggaactacagatggtagtgtcgaaccaagtggaa

SEQ ID NO: 126888 - DNA, 90 bp, Homo sapiens
cacacccttgacccactcgccgaaggtgtgtgtgtgcaggccacagcagcatgcccttggtgtagtcagtgccgaaaggggtctgttcct

SEQ ID NO: 126889 - DNA, 100 bp, Homo sapiens
ctgtaactagagaagaactctataaaatgttagcgcatgaggaggcaggtggaagtcatcataaagtttctgtttcacccgtcgtccatgttcgaggact

SEQ ID NO: 126890 - DNA, 90 bp, Homo sapiens
aagaccttaggagagacgagcagccttcagggagcgtggagacaggctccagatggaccctgggaaggacaaagagggggtgccccagcc

SEQ ID NO: 126891 - DNA, 75 bp, Homo sapiens
gcagaaggtttgaggagcattgcttctcatacagtaagcggtcttgcgagtggctggttccctgcagaagagcac

SEQ ID NO: 126892 - DNA, 100 bp, Homo sapiens
ccttcttagaagacttgactggtcttacattgctgcatcaagaaacccaagctgctgagacgcaagatggctgtcctctctaaggaatatggttttgtgc

SEQ ID NO: 126893 - DNA, 50 bp, Homo sapiens
ccgggatggagaaggaggaggaatcggattgtgcagactggtgcttaaaa

SEQ ID NO: 126894 - DNA, 76 bp, Homo sapiens
gattcgcagtggtcgcttcttctccttggtaaactgaaggaacttaatggaactgcacctgaagagaagaagttaa

SEQ ID NO: 126895 - DNA, 89 bp, Homo sapiens
ggataatcagtttagatggctcaaagaattccttgtgtggatatcagatccggatggaatctcgagcttgtgaatctaccaggttactc

SEQ ID NO: 126896 - DNA, 98 bp, Homo sapiens
cactgcttcatccgggaagtgcttggggatggagtgcctccaaaggttgctgagacaaatcttcctattttcaagctgaaagaatctactgttagaag

SEQ ID NO: 126897 - DNA, 95 bp, Homo sapiens
tatcagcaggctccgggctgaagattgcttctcttctctcctccaaggcagaggaacgaggacgcctgaaggaagagctggaagaggctcgggac

SEQ ID NO: 126898 - DNA, 100 bp, Homo sapiens
ataccaacatgtctgtacctactgatggtgctgtaaccacctcacagattccagcttcggaacaagagaccctggttttctgtctcaactggtctctgac

SEQ ID NO: 126899 - DNA, 85 bp, Homo sapiens
aagcctctcaaagccttcactgtgtgcctccacttctacacggaactgtcctcgacccgtggagtcttgctgcgacacccaggct

SEQ ID NO: 126900 - DNA, 50 bp, Homo sapiens
aatggataaggcaaaacggaggctgggaagtgggaaaactcttgcctttg

SEQ ID NO: 126901 - DNA, 100 bp, Homo sapiens
caggattgagacccggaaggcttcaaaggctgtcgcaaggaggaaggccttcccttcttcttggtggtgttcttgagtaagataatctggactggccccc

SEQ ID NO: 126902 - DNA, 75 bp, Homo sapiens
cgacatgtctctagtggcggaagccttcgtctcccagattgcaggtagacgcaccctctgaagatggtgactccc

SEQ ID NO: 126903 - DNA, 82 bp, Homo sapiens
atttaatggaaaatcgcttggttaaaacctgacacttttaacagggagaccaaattttgaggaaggtggaccaacatcagta

SEQ ID NO: 126904 - DNA, 98 bp, Homo sapiens
ggaaggcgattggcatcgatctctccatcccttccgaggcccgacttcggatccttgccacggctggaactgacttcgacctgcgaacactgagggct

SEQ ID NO: 126905 - DNA, 100 bp, Homo sapiens
cacgcggcgatatggaagaggagggcaagaagggcaagaaggactttccttatcccagttgattgtgcagaatacactgcctgtcgcttgtcttctattc

SEQ ID NO: 126906 - DNA, 75 bp, Homo sapiens
tctgagcagtagtgctcctggatcccctcctgacctaactacacgaaggccatgcggctgtttgtgggagaaccg

SEQ ID NO: 126907 - DNA, 75 bp, Homo sapiens
ccacacagaaggacctatccgacttccaccagtccatggcactctctattcaacgctgcctgctctcctggatag

SEQ ID NO: 126908 - DNA, 98 bp, Homo sapiens
aaactggagagcttcatcaaaaatagtgatagctttgataagatctcccagccatccagccccggctagtggcggtcagcaaaaccaaacctgcagac

SEQ ID NO: 126909 - DNA, 100 bp, Homo sapiens
cacgcctggcctcactcaaacagtaaacgaggtcttcaatgaaatttatccagtatggacttactcttacctggtgctactgtttcctgtgttccttgcc

SEQ ID NO: 126910 - DNA, 101 bp, Homo sapiens
tgctcctggtattctgggtctccctggctcgagaggtgaacgtggtctaccaggtgttgctggtgctgtgggtgaacctggcaaacaaggtccctctggag

SEQ ID NO: 126911 - DNA, 100 bp, Homo sapiens
gccacctaccgcagcctgctcgagggccaggacgccaagttctccatggtggtacaggatggcatagtgaaggccctgaatgtggaaccagatggcacag

SEQ ID NO: 126912 - DNA, 100 bp, Homo sapiens
aggacgttgccaaccacctaactgccttccactgggagctgttccgatgtgtgcatgagaacgatcgccgcggccggaagagttggcgctcggggcggac

SEQ ID NO: 126913 - DNA, 90 bp, Homo sapiens
tcccaggatctcccaagtcgggaccaccaccagaacagtcctacatcgccaatcgagtgactgacaagctgacacctattcacgaccgca

SEQ ID NO: 126914 - DNA, 75 bp, Homo sapiens
gcgagattataagaagcttgggttcattgtgtgttcatcctcgaggtggtgtgattcagagtgtttcttcatgga

SEQ ID NO: 126915 - DNA, 76 bp, Homo sapiens
agtcccaatgaaacgggcagccatggccctccacagcccgcagtttgggagcctctggtggagcaagtaattggga

SEQ ID NO: 126916 - DNA, 100 bp, Homo sapiens
ggttccccggcccacagtgggggtgtgcaaacccgagagaactggaaaaaaccgggaagatcctgacggagttcctccagttctatgaagaccagtatgg

SEQ ID NO: 126917 - DNA, 119 bp, Homo sapiens
cggcgacctgaggggagagggaacgcagctgaaagcgtgaactgttgagaaatgttttagatgaagataatgataatgttgggcaacccaatgagtatgacctgaacgacagctttcta

SEQ ID NO: 126918 - DNA, 96 bp, Homo sapiens
cagcgccggcctcctcagtgcgaagaagctgcagccgcacctggccaaggggtatattcaggcctgccgggcactcatgatcaccgccatcctcct

SEQ ID NO: 126919 - DNA, 83 bp, Homo sapiens
ggaaaagtctggcctcggcgccaagatcccagtcacaattatcaccgggtatttagcccaccttgggacaccttgactccaag

SEQ ID NO: 126920 - DNA, 51 bp, Homo sapiens
gtctgcgagccaggattcccgagagaagaagaaggaggttcctgctgtgcc

SEQ ID NO: 126921 - DNA, 100 bp, Homo sapiens
cagcggaaaatgatccagtcacagtgattcgcctttgccagtctcatctcgtgtctgctttgttaagttccatgatccagactcagcagttgtggcacag

SEQ ID NO: 126922 - DNA, 82 bp, Homo sapiens
ccgggacccggtgtctgctcctgtcgccttcgcctcctaatccctagccactatgcaaattgtggctactaatttgccccct

SEQ ID NO: 126923 - DNA, 75 bp, Homo sapiens
agaccaccaccagaaccatcacctcggagacccagacaatcacaggacaccacgacgtccgtgcgcattggcctt

SEQ ID NO: 126924 - DNA, 110 bp, Homo sapiens
aaaaaatgatttggtggtcagcttgcctgaggagtgcctacaccaactaatgttacaattgaatcctataacatgaaccctatcgtatattgggagtaccagatcatgcc

SEQ ID NO: 126925 - DNA, 90 bp, Homo sapiens
catattcattggaggacactggaagatgggaagaaagaagcagctgccaggttgacctgacagttcaagaaaaggagaaatatcttaatg

SEQ ID NO: 126926 - DNA, 74 bp, Homo sapiens
ggcggcggctgcggtcgaagaaggggacgccgacaaggtggccaagcaagaggagttcttcaacctgtcccact

SEQ ID NO: 126927 - DNA, 80 bp, Homo sapiens
ccgccaccatgcccaagagaaagtctctgctttctatccgtcaagatgataaagtcgtgtgcccgagaaccaaagaagtc

SEQ ID NO: 126928 - DNA, 95 bp, Homo sapiens
acaccgctatcacagctgctgcaatcgcttgggagagctcctgggccacccctcctttcaggtcaagagtccggcagcgtcttctcttgagggag

SEQ ID NO: 126929 - DNA, 74 bp, Homo sapiens
cctgtcccatcgcaaacccaaagatccccgttcctggagattctgattgaggaacaagatcactcaaggtgaag

SEQ ID NO: 126930 - DNA, 100 bp, Homo sapiens
ctgggacttctcgatctctggaggcacctgttgcaagtgacaggagccgacacccgcactgccaggatccaagatgcagggctggtgttggcagacacgc

SEQ ID NO: 126931 - DNA, 83 bp, Homo sapiens
gttcctggggttactgtaaatgggaaggacaggcagagctaaacaagatgctgcacttaaaaggatgcttgttttgatgtcct

SEQ ID NO: 126932 - DNA, 100 bp, Homo sapiens
ctgtatatggctgcgccccaaatcagacacgatgaggcgagtggtacgacagagcaagtttcggcatgtatttgggcaagcggtgaaaaatgaccagtgc

SEQ ID NO: 126933 - DNA, 100 bp, Homo sapiens
agacaactaaggaaagcacaccaagacatacatacacagcttcaagatgtcaaggccatccagagccgtgaccggatccagttgcagtactcacagagcc

SEQ ID NO: 126934 - DNA, 96 bp, Homo sapiens
tcatggcggatggccccaggtgtaagcgcagaaagcaggcgaacccgcggcgcaataacgttctgcacggagctaaaccagccgaccctgcccaac

SEQ ID NO: 126935 - DNA, 90 bp, Homo sapiens
gttgcctgtgggtgcccgcgaaccaacggttagcggtggcaggggctgactgagagcgtctgcttgaatcttatggcaagggccttatat

SEQ ID NO: 126936 - DNA, 100 bp, Homo sapiens
gccataagaggaaaagtcaggggagtgttgaagactctgcctcctacaaatatgtttaccgacaagactgtgaaactttcgggatggtggtgaaaatgct

SEQ ID NO: 126937 - DNA, 100 bp, Homo sapiens
cggagccatgggggacgctcccagccctgaagagaaactgcaccttatcacccggaacctgcaggatgaaacgaggaggaagagatagtgaccgtaattc

SEQ ID NO: 126938 - DNA, 98 bp, Homo sapiens
cacagcccgagaaaccgcagcactacacagttcacatgagactctgaatatagtggaggagaagaagcgggcagaggttgggaaagacgaaagagtaa

SEQ ID NO: 126939 - DNA, 75 bp, Homo sapiens
ggcctcagcaacctgacaattctgtcgtgtcccgaatatggtcaagcagaaagccttgcgagttttaaagcaaaa

SEQ ID NO: 126940 - DNA, 100 bp, Homo sapiens
tcctcctctccttctacctgctggggttgcttgtcagtagcgggcaagaaaccaatagagccatggcgactccctctgctgccttcgaggcccttatgaa

SEQ ID NO: 126941 - DNA, 100 bp, Homo sapiens
cttccgagaggaacctctatgccgacatcgacgccgcctggcaggccctgcgcaccaggtttactcctggcttgggggcattaggaagcactggaggctc

SEQ ID NO: 126942 - DNA, 74 bp, Homo sapiens
ataaaaattatttatccaacagctcctcccagcccctcatatggaaaatttgaaatgcagaggggaaacagtag

SEQ ID NO: 126943 - DNA, 100 bp, Homo sapiens
ggcctgtggccgctgcacatcgtcctgtggacgcgtatcgccagcacgatcccaccgcacgttcagaagtcggattaaatgccttaatggataaagaaaa

SEQ ID NO: 126944 - DNA, 101 bp, Homo sapiens
catccttaccaaggaatctgcttttcaagtatgccaccaacagtgaagagcgggcctccccttcctcatcatcgagacaagcaccatcaagccttaccacc

SEQ ID NO: 126945 - DNA, 75 bp, Homo sapiens
acaacaatgagatcgtggacaagatcatgggcaaaggacagatccaggatgataatgaagataattcaaatgatg

SEQ ID NO: 126946 - DNA, 119 bp, Homo sapiens
agcggcggcggcggtggcagcggcggaaaccgaaggggagccatggcggctgacagtcgggaggagaaagatcctaattatctcatggctaatgaacgcatgaacctcatgaacatggc

SEQ ID NO: 126947 - DNA, 90 bp, Homo sapiens
cccaaccccaaaagagccaaactcagctcgcccggtttctcggcgaatgacagcacagctcccggagccctgcctgttccctgtccatcc

SEQ ID NO: 126948 - DNA, 107 bp, Homo sapiens
tcaagatgaatatgaccctatggaagcagaagaagctgaggatgaagaagatgcaccctcatcacatgtgtggattctgggattctcagagtctggcatgacaagga

SEQ ID NO: 126949 - DNA, 101 bp, Homo sapiens
ccgttacgtggtggacctgtacctcaacacccccgacaagatggtgctacagctcgagagggcagagccacagtccctggacggcgtggactgaggccggt

SEQ ID NO: 126950 - DNA, 82 bp, Homo sapiens
gatgcccagctgaagagcctgctgatgtcagtgggacccattcaggttattcagcttctcaaggctggaaaagcgaaggaag

SEQ ID NO: 126951 - DNA, 113 bp, Homo sapiens
gtcatttcacatcgaagccatgatttaaatatcggcgttaagtgcttttttaggaccaaaggatatatttccttactcagaaaataaggaaaagtatggcaaaccaaataaaa

SEQ ID NO: 126952 - DNA, 75 bp, Homo sapiens
acccaagatgcttcagtgtccatagtggattactatgagccaagtggatgaaaatactaggaaaagtttatttaa

SEQ ID NO: 126953 - DNA, 75 bp, Homo sapiens
cacttgaagaaaagggtgaaggaggcgaattttcagttgataggaagatgagaatgtgcctactgctcctgatcc

SEQ ID NO: 126954 - DNA, 100 bp, Homo sapiens
ctgaccccaagattccagatgttcctgtggaccccagtccaggttgggaatccacgtgttgaacttaccctctcagagctccaagatatggcagctaggc

SEQ ID NO: 126955 - DNA, 74 bp, Homo sapiens
agaccatgcgccggaacaccattcttcgccaggccaggaatgtaataaaaggcctgacatatctgagggagaag

SEQ ID NO: 126956 - DNA, 51 bp, Homo sapiens
ctccaccacatctagcagaaaaccggccacaccgctgaaggccaaagaggc

SEQ ID NO: 126957 - DNA, 80 bp, Homo sapiens
cgaggacctgctcggggtcccggacgggcccgaggccccggttttaaaatcaaagatgggaaaatcggagaaaattgccc

SEQ ID NO: 126958 - DNA, 90 bp, Homo sapiens
cttgaaatacgtctccattctttttccttagtactctcgttcattcacttacgatactagagtaaaaggatggtttcttctggacaatta

SEQ ID NO: 126959 - DNA, 75 bp, Homo sapiens
cccctcccttcctcccccaagccctgtctttccttctcctcctgccactggctgtcttgtcgacggtctcactga

SEQ ID NO: 126960 - DNA, 100 bp, Homo sapiens
gcttggagttcgcctcagacgcggtggagccgccggagtctgagaagggcgaccattgacgaggtggagacggacgtggtggagattgaggccaaactgg

SEQ ID NO: 126961 - DNA, 82 bp, Homo sapiens
agattcttcaaggtggggttggcatcccccacatacggtctaccagttgctgggcaaacctcagaatttgttaaccaagtgt

SEQ ID NO: 126962 - DNA, 100 bp, Homo sapiens
gagactctgcggcgcatggaggaggaggaggacctgaaggagaagaaggagaaggtggaggagaaggcaagccggaaagagcgaaagaaagaagtggtgg

SEQ ID NO: 126963 - DNA, 90 bp, Homo sapiens
ggatgggaagttaatgtttacggcgaagtctactcaacgtttccaaggcatacttccgacagggtgttgccctccagtaccttggacgtc

SEQ ID NO: 126964 - DNA, 51 bp, Homo sapiens
ggtttagcggcagcctcttcgaagaagacaaaccaccgcctcagcctgccc

SEQ ID NO: 126965 - DNA, 100 bp, Homo sapiens
atttcaaatgcatatgtggatcttgcaccaacatctggtacttcagctaagacaccctctgagaatgccgggacattctgcttcctgtcatcaccaaaga

SEQ ID NO: 126966 - DNA, 75 bp, Homo sapiens
gcagtggaaaatgcgctcgggctggaccagcagatttttaaagagcgagaagaagatttgaggcgtttgtctcgc

SEQ ID NO: 126967 - DNA, 100 bp, Homo sapiens
cattcctcctaaggagctggtgtcttcatccagaagggacagtttgtgccagctctccagagagaaaaggtgtgatgaatgcagactctgctaccatttt

SEQ ID NO: 126968 - DNA, 101 bp, Homo sapiens
ctatgggccattggatcctgtaaatccctatccagagtttttggagctgtacagtggccacagatgtctttaattccaaaaacctggccgttcaggcacaa

SEQ ID NO: 126969 - DNA, 100 bp, Homo sapiens
acttctgaaatttacagaaacaaactacatctcagggtcagaatggcggcagtggagcatcgtcattcttcaggattgccctactggccctacctcacag

SEQ ID NO: 126970 - DNA, 100 bp, Homo sapiens
gcagatcgagaagaggaagctgcgggagaagcggcgctccaccggcgtggtcaacatccctgccgcagagttaataaaggtatccatggagaacactgaa

SEQ ID NO: 126971 - DNA, 96 bp, Homo sapiens
ccgccgctctgccacggtctgcccacccaacgcgaagacggtaacccgtgtgactttgactggctgctggagccagttctgcttctcggcaaggag

SEQ ID NO: 126972 - DNA, 75 bp, Homo sapiens
actttgggcaaagtcatttcagccttggccgaggtggttgttcctccaaaagagtggaagccacgagcatcctat

SEQ ID NO: 126973 - DNA, 100 bp, Homo sapiens
gtgccttttgcctcccaccgtgattctgaggcctccccaaccatgtgcaattgtgtggcaggcgtgcttgtgggacacccgtttgacacggtcaaggtga

SEQ ID NO: 126974 - DNA, 82 bp, Homo sapiens
tggcgctaggcaggcgttgaggaagaagccacccgagcggactcccgagttcagaatgaccgaagaagcatgccgaacacgg

SEQ ID NO: 126975 - DNA, 100 bp, Homo sapiens
gcgcccgcgcctcgggccgtcgggagcggagcctcctcgggaccaggctattgagggcacctacattgacaagaaatgccccttcactggtaatgtgtcc

SEQ ID NO: 126976 - DNA, 100 bp, Homo sapiens
ctcactcgggcctctggccaacagggcatggggacatcatatcagatttgcctgaagacctggataatctccatttttgtcatggactgttaaaacgttt

SEQ ID NO: 126977 - DNA, 75 bp, Homo sapiens
gtgccggcagggtccctgcgctgctgctctgcctgggtgctggagaatctggtaaaagcaccattgtgaagcaga

SEQ ID NO: 126978 - DNA, 106 bp, Homo sapiens
aagcgggagttcaaggaggtgctgaagagcgaggagcatttgacattgtgcagcaaagaaatggttatggagaagcccagtccgctgcttgtagggcgggagtttg

SEQ ID NO: 126979 - DNA, 107 bp, Homo sapiens
aaaagaagcagttcctgatgttacaaatgaacaaggatctcccagaggtgctgatactcaaagaaggtttaagttgtctgatctctctataaattccactgaatgtc

SEQ ID NO: 126980 - DNA, 80 bp, Homo sapiens
caaatgcacgcgacaggaaccagttggctgattgcaattctggcccaactcaaccctctctttggaccgcaattgaaaaa

SEQ ID NO: 126981 - DNA, 100 bp, Homo sapiens
aaagctgcttcaggattcaatgccatggaagatgcccagaccctgaggaaggccatgaaagggctcgctatgtgatgatgatgccatttaaacgacaggc

SEQ ID NO: 126982 - DNA, 51 bp, Homo sapiens
catcattatggaactggtttcaggtcccgttcaagaagttcttccagttcg

SEQ ID NO: 126983 - DNA, 80 bp, Homo sapiens
ggccctgatccagacctgggcagcaggggaaatgctgtctgtagctgagcacttcctggagcagcagatgcacccaacag

SEQ ID NO: 126984 - DNA, 100 bp, Homo sapiens
cagcaagtaaacgggcgtcccggagcctcgatggagggtcaaggagctgagcccccacagtgggcccagtggagagcagttgattcaaatggaaacagaa

SEQ ID NO: 126985 - DNA, 90 bp, Homo sapiens
caagaacctgaacgaggacacgaccttcctgcccttcacgctccaggagctagatctcatcctggccttgggtgtcctggcccaaagccg

SEQ ID NO: 126986 - DNA, 100 bp, Homo sapiens
tctggctggcagagcaacgggtgcccctgagtgtgcaactgaagcctgaggtctccccaacgcaggacatcagatgcgagccacccctctggctgctcct

SEQ ID NO: 126987 - DNA, 95 bp, Homo sapiens
ctcggcccggacgcgcccgcgcccccgcggctggagggtgacccctgagccccttccagtgctgcctgaggtgccctctacctgtgcctgcctct

SEQ ID NO: 126988 - DNA, 100 bp, Homo sapiens
gctttggccctggagttcccatgccctggtgtcttctaccagttcttagagaagagcaagttagtaccttgtaccaaaacatcaaccttgtggagccaag

SEQ ID NO: 126989 - DNA, 96 bp, Homo sapiens
tagagaactgtggactattctgcttggaaggtcagctctgagagagctgaggcggggtttcaccatgttgcccagactggtcttgaactcctgagc

SEQ ID NO: 126990 - DNA, 80 bp, Homo sapiens
aggaggggaacacccagccccagaaacagggcgccctgcgtccggcagaggaggcgagcatcccgctcaggtgatgagga

SEQ ID NO: 126991 - DNA, 95 bp, Homo sapiens
gacgtcattgccgggaacgagcgagtcgccgctgcagccctagtgactgcggcctgcatcccgcactggcagcagcgacccctactgcatcgtga

SEQ ID NO: 126992 - DNA, 51 bp, Homo sapiens
cagcattaatactaggtgtaagggttgaaaaataccggccacagaccctga

SEQ ID NO: 126993 - DNA, 82 bp, Homo sapiens
ggatattctggtggggagatgaacccaacctagtgggtgtaatacatcatgaactgcagggaagaggatcacctagcccggg

SEQ ID NO: 126994 - DNA, 100 bp, Homo sapiens
gggaagtctataagctttgcaacagaattacagagtatgatgagagaagtatgagctccatgcagggactgagtccaccccaagtgtcgtcgtgcacgtg

SEQ ID NO: 126995 - DNA, 75 bp, Homo sapiens
ttagggtcctttatatagaagggagagtaggtctgtccagggttttggtggctggcgaagctgagggcgtgtcag

SEQ ID NO: 126996 - DNA, 87 bp, Homo sapiens
cagatgtctgaggacaaccacctgagcaatactgtggcagaaagagcactctattattggaataatgaatacatcatgagtttgata

SEQ ID NO: 126997 - DNA, 90 bp, Homo sapiens
aatttgtctcaataaaagcccaggaagaagacgaggatggtcagcttatttcggatcaagtggcagaaatcgtatctaaatacgacccca

SEQ ID NO: 126998 - DNA, 50 bp, Homo sapiens
acaaaaacggcccttggatgatggagccatctgtgagaaagacacactgc

SEQ ID NO: 126999 - DNA, 76 bp, Homo sapiens
aaatggttgacacctttacacagagcagttgcatcttgtagtgaggccagtacagatgacggctttgtatataatt

SEQ ID NO: 127000 - DNA, 75 bp, Homo sapiens
caacactctggggaaggtggccagtggcatctgtgacaacttgcttgctaatggtcgatttgaagtgggcaagaa

SEQ ID NO: 127001 - DNA, 75 bp, Homo sapiens
gtcgagcttcctgataacgaggctgtggagcagcacagatacagtttatgtaacttgatggaagaaaatggaatt

SEQ ID NO: 127002 - DNA, 75 bp, Homo sapiens
ctccaactttgcgacggaaatgtgtcatcgaaagccagatacaactctgtgctgaacagctgctgcctgaggcct

SEQ ID NO: 127003 - DNA, 98 bp, Homo sapiens
tttcctcatccctgcagctgtgtttgaacagcacagctgcagttgactgtacgtgcctaaaactgaagaaagcaaaactgcagataaaggaggactga

SEQ ID NO: 127004 - DNA, 51 bp, Homo sapiens
aaaccttgtaccttatacttcaactgttagtttgcagaaaaaacttcagca

SEQ ID NO: 127005 - DNA, 100 bp, Homo sapiens
gcaagatgagacgagaaagaacacgctttgttgcttctaaacctctggaggaggagcagcaagccctcgcagggagcctggtagcaggggccggaagcac

SEQ ID NO: 127006 - DNA, 102 bp, Homo sapiens
tgaccctgcccttgccagaatttcctgcgctgttccacctcattcaacttcaggattttttatcaagcagaaatgcatcgaacaacgagaatcaagatcact

SEQ ID NO: 127007 - DNA, 98 bp, Homo sapiens
ctactcccagactccgtacgccttcacgtcctcctccatgctgaggcgcaatacaccgcttctgggtcagcaacagctgcgaatgcggatcaagctta

SEQ ID NO: 127008 - DNA, 73 bp, Homo sapiens
cttggttaaaacctgacacttttaacaggcatctacatcctcatcgctgtgggcgctgtcatgatgttcgttg

SEQ ID NO: 127009 - DNA, 100 bp, Homo sapiens
ttccatccctgatgcttggagaagctgaggacacacaggtggacatttgggagcaataaaaataagaagaaaggaaaagccagaaaaatagagaagaaag

SEQ ID NO: 127010 - DNA, 100 bp, Homo sapiens
tggagcagacaccaatgtgagggataagacttcacagagaatgcagttgtcttgacttcaggtctgtctgttctgttggcaagtaaatgcagtactgttc

SEQ ID NO: 127011 - DNA, 50 bp, Homo sapiens
catcctggaacctgggaaaggttggttctaaagagtggtgagtcagaaga

SEQ ID NO: 127012 - DNA, 100 bp, Homo sapiens
ggacacggcactgcatgctgctgcccgccagggcccagatgaggtacttggaaggctccatcgcccctgaagacaaaggaagctgctcattgctgcctgg

SEQ ID NO: 127013 - DNA, 83 bp, Homo sapiens
gctcgtgatggggctgatcttcgccaaactgtggagcctcttctgtaaccaagattgtcctgggtcacataatgccagctgag

SEQ ID NO: 127014 - DNA, 101 bp, Homo sapiens
tggcccaggttcttcaaaagatgtcctatggcagcgtatacaaagctattcataaagagaccggccagattgttgctattaagcaagttcctgtggaatca

SEQ ID NO: 127015 - DNA, 83 bp, Homo sapiens
ctggtgtggcacgctctcctcctacccgtgacagccaagagtggcctagacgaactggtgagtgacctgctccaggaggccca

SEQ ID NO: 127016 - DNA, 75 bp, Homo sapiens
aatcgggctgaagcgactgagtccgcgatggagaacatccagtcatggataaaaatgagctggttcagaaggcca

SEQ ID NO: 127017 - DNA, 93 bp, Homo sapiens
gcaccatgccgtcggagaagaccttcaagcagcgccgcaccttcgacaatgcagatcttcgtgaagactctgactggtaagaccatcaccctc

SEQ ID NO: 127018 - DNA, 97 bp, Homo sapiens
agccagcctgagcgcaacacttctccgagccagcgagccagcgagccgccgacccgccgagcaaaatggaatcctatgaggatggttgtgaggatta

SEQ ID NO: 127019 - DNA, 75 bp, Homo sapiens
aggccctgcaagaggaatataaagcaaaagaagtcatcatccagggctggtggactaggcctcaattttgtcggt

SEQ ID NO: 127020 - DNA, 80 bp, Homo sapiens
aacagcagaactttttgccaaaatgacagcagataaactgataggtccaaagataatacatatgtgtcaagttcagagaa

SEQ ID NO: 127021 - DNA, 100 bp, Homo sapiens
ggcggagcagacacagactatgcagatgggaggcctcccagtagcattggatgcaggaaaaaatacattgacggtgaaaaacaagccgaaccagttgtag

SEQ ID NO: 127022 - DNA, 83 bp, Homo sapiens
ggggcgagagtgaacgattcaacccgggggagctcaggcttcaacggaccacaccaaaatgccatctcaaatggaacacgcca

SEQ ID NO: 127023 - DNA, 82 bp, Homo sapiens
tgggcacggacgcacgccactttttctctgctgatccaggtgaaatagcccaatttttggtatgtgctcatagtttagcata

SEQ ID NO: 127024 - DNA, 100 bp, Homo sapiens
acaccatcaacattcacaagcgcatccatggagtgatttcttcaagaagttcttatatgagccattgccagtagaatctcacctggaccactgtatgcat

SEQ ID NO: 127025 - DNA, 51 bp, Homo sapiens
gattccaagtaactcttatttgacttctgcgctgacccaggggctggagcg

SEQ ID NO: 127026 - DNA, 80 bp, Homo sapiens
tgctcttcctcccttcgctcgcaccatgaaatggatgaaaagaggctgctggatccagggttgaaggttcataaaggcct

SEQ ID NO: 127027 - DNA, 100 bp, Homo sapiens
gtcctgaaaaattcagatggaagttatcgaatattcagcaagggtgcatctgagataattctgaaaaatactatactggcaattgctggagaagattttg

SEQ ID NO: 127028 - DNA, 90 bp, Homo sapiens
tcgtaggaggctgtcctgtctgcaggtcaaaatgcagatcttcgtgaaaacccttaccggcaagaccatcacccttgaggtggagcccag

SEQ ID NO: 127029 - DNA, 75 bp, Homo sapiens
ggctaatgtggcttcacctggaagcgttacagtgtttctgccacctctgtacaaaagacaattttacttgtgtga

SEQ ID NO: 127030 - DNA, 98 bp, Homo sapiens
aggaaatggtgtcacaatttgtgaaggcatgcctcctcctggctccttcccacccccagtgccacctcctggagccctcccacctgggatacccccag

SEQ ID NO: 127031 - DNA, 101 bp, Homo sapiens
cgaagaacagctgtggaaagaagttgcaaaacactggatataccagtatattcagagtcgcttttatcggtctccagaggtgctactgggaatgccttatg

SEQ ID NO: 127032 - DNA, 82 bp, Homo sapiens
tttgatagtgacaaggattgaagaatactcccccagttgcaagaggcgcaggaccgtggaagacttcaacaaattctgcacc

SEQ ID NO: 127033 - DNA, 75 bp, Homo sapiens
ttccgctgtaaataattaagaagaccaagtagcatccaagtttagattttgaagaatgtgctcacaaattgctga

SEQ ID NO: 127034 - DNA, 74 bp, Homo sapiens
tcccgaccctggccgccccgagcggagcctggagagccccccaagatgaacccagtggtggagccactgtcctg

SEQ ID NO: 127035 - DNA, 75 bp, Homo sapiens
ctgggaaaaaactctgcaaattaatttgttggtagctggcagtgttgtgatggcttttgaagaagtatgcccgga

SEQ ID NO: 127036 - DNA, 80 bp, Homo sapiens
ctggctgtgctggccttagtgccccaggatcagggaggactggcagcagcagcggaaccgcttaggcagtgggggaagcg

SEQ ID NO: 127037 - DNA, 101 bp, Homo sapiens
gaaacccagtgaaacttcattccaaacattagaagaggtgcctgattatgtaaaaaagagtcagcgtgggagaaattgtaacgagaaaccaacaaatgtca

SEQ ID NO: 127038 - DNA, 75 bp, Homo sapiens
ctgcaggtggtcagacatgtcatcaactcagctggtttaaggggctcaagccgactgttatccttctctcccgag

SEQ ID NO: 127039 - DNA, 50 bp, Homo sapiens
ctgacagcatctggctatcgcagatctgacaggatggcatctgatgactt

SEQ ID NO: 127040 - DNA, 82 bp, Homo sapiens
cgctctgctgtgggcgctgctggcgctctggctgtgctgcgcgacccccgcgcatggtcctaggcctacttacaagcctcca

SEQ ID NO: 127041 - DNA, 75 bp, Homo sapiens
tacattgagtttgtggcagacagacttatgctggaactgggttttagcaagagttgtctctgtgggaagtttgtc

SEQ ID NO: 127042 - DNA, 87 bp, Homo sapiens
tcacgctgagagggacacgcagtgacgagcggccgaagcagctttgcggaagctcttcgtgggcggtcttgactggagcacgaccca

SEQ ID NO: 127043 - DNA, 50 bp, Homo sapiens
ggtctcagcgcgggggacgactcaggttgaatgtctccattgaatgtaag

SEQ ID NO: 127044 - DNA, 99 bp, Homo sapiens
atcggcggcggcttccgtcacctccgctcccccgatcctattcccagtcgtgtgtctcccagtctgctaaagccctaaggccatcaccatggacttcca

SEQ ID NO: 127045 - DNA, 74 bp, Homo sapiens
aggcgccggccggctgcgaagacgcggtgggccgcccctccggatgttcacggaagaccagggtgtagatgaca

SEQ ID NO: 127046 - DNA, 82 bp, Homo sapiens
ggcggccaagcccccgaccgggcaccgtctgcgtcctgctgtccttccccttcatcttcagcccctgcctgggctgtggggc

SEQ ID NO: 127047 - DNA, 75 bp, Homo sapiens
aacttcgccaactccgctgcctttgccgccaccatgcccaaaacgattttcctgagagaactgatttcaaatgct

SEQ ID NO: 127048 - DNA, 82 bp, Homo sapiens
ccgcgcacttcgtcatgttcttcgcgccctggtgacttaagagattaaaattaatttggttgctgttggttctgaacaaata

SEQ ID NO: 127049 - DNA, 100 bp, Homo sapiens
tcagacctgtttaaaacgaattcgacttgatctccctattttacatgaagattttgttagcaataatgctacctggaccagccctgccttgagaccgtca

SEQ ID NO: 127050 - DNA, 50 bp, Homo sapiens
ttattggaaaaacatttcttacgggacaccgtggtgtttaaggatggcca

SEQ ID NO: 127051 - DNA, 75 bp, Homo sapiens
ctggcgggtgccctggctaccatggaccatcctgctggtcagcactgcggctgggagaccaaattttgaggaagg

SEQ ID NO: 127052 - DNA, 50 bp, Homo sapiens
aggaagcacaaaaagggacagtcgttaagtgggcagaccaacatccacct

SEQ ID NO: 127053 - DNA, 74 bp, Homo sapiens
ttccccagccacgtggaacttctctaacgaagtgccggagcacccatgtgtatcccctgtctctaatcatgttt

SEQ ID NO: 127054 - DNA, 82 bp, Homo sapiens
ttgccggctcccctctcaggacaacccagatgtgcaacaaagtgcgatggtacgaggaacagcaaattcaggaaaaagtggc

SEQ ID NO: 127055 - DNA, 75 bp, Homo sapiens
ccgcaactcagcccattcagcaggagtaggagccatctttgatcgaaagcccgcttatctaccattttatttact

SEQ ID NO: 127056 - DNA, 90 bp, Homo sapiens
cggagagctcgccttggagagcccaggagcaggggagacatggaaccatcactgttgctggaggcacctgacaaatcctagcgaattttt

SEQ ID NO: 127057 - DNA, 101 bp, Homo sapiens
atcttttgacaagatgtcacctgaaagtggtcacagccgcatctttgaaggcccggagtcttcagtaaacatggacctgtacagtggagctcagcgagtgt

SEQ ID NO: 127058 - DNA, 83 bp, Homo sapiens
catcatcttgctactgctcaaaatctggaagtcccgctcgtgcgccgctgcagcccttggatgaggcagtcttgcagcaaaag

SEQ ID NO: 127059 - DNA, 90 bp, Homo sapiens
ctcccaagtagctggcattacaggtgcctgtgtcggtggccatgatgtcgccgcagatgcttaccccgcaacagatgcagcagatcctgt

SEQ ID NO: 127060 - DNA, 129 bp, Homo sapiens
ccgcccccagcatttgtggagcaatcttttctacagaaggttaaaagcatcttgactcctgaagacctgccatgtgaactgcagtttccacaatgtcttcttctggttgttgtcatggataagctgcca

SEQ ID NO: 127061 - DNA, 75 bp, Homo sapiens
cgcaaggacagcgcgaggtccgcgcagcccagcgcagccatatgaggacggggacttggttgccttttccagtga

SEQ ID NO: 127062 - DNA, 100 bp, Homo sapiens
ccaagaaacatctcaccaatttcaaatccgaacctgcacttgttgccaagtcttccatcttactagatgtgaaaccttgggatgatgagacagatatggc

SEQ ID NO: 127063 - DNA, 75 bp, Homo sapiens
gatctcttcaaatgagcaggaccaaggtggttctacccaggcaataacccctacactgggacccccgactggttg

SEQ ID NO: 127064 - DNA, 75 bp, Homo sapiens
agctcctggaagatctccgcactctggagcataatgtgaaaatgttggggcttttcaggaagcataataagattc

SEQ ID NO: 127065 - DNA, 100 bp, Homo sapiens
catcagaggaagacttggatcttttcatgaactcctgctggagccacccaagaaggaacccagccagccggcggaatgcaagcagcagtaggaagcggag

SEQ ID NO: 127066 - DNA, 83 bp, Homo sapiens
agagcgcctggaggctcgagcggaggcctcccgcgacgatgcccctcaacgttagcttcaccaacaggaactatgacctcgac

SEQ ID NO: 127067 - DNA, 75 bp, Homo sapiens
attttggtagagaagaatgaacattgtattgagaacaatatagatttgcagggtatatttacttctggcacatgg

SEQ ID NO: 127068 - DNA, 80 bp, Homo sapiens
gttttgcagatcttcaacaagaggacccaggagaaattcgccctcaaagagccttcacgtaaatgggtccagtcatgcct

SEQ ID NO: 127069 - DNA, 76 bp, Homo sapiens
ctctggcagcccacgatgctgaggcacagttgaatgctgttgatgctttgattgactccatgagcttggcaaagaa

SEQ ID NO: 127070 - DNA, 117 bp, Homo sapiens
ggcaggacccacaatgccacaagctcctccgcaacagtttccatatcaaccaaattatggtggtcctggctctgccatatgacacccccgtgcccggctacatgaataacactgtca

SEQ ID NO: 127071 - DNA, 90 bp, Homo sapiens
cattggcaatttgcaacacagtagtggtttctgctcctaaccaaccccgacaaaagaatacctctgacagtgacagatatgcctgctccc

SEQ ID NO: 127072 - DNA, 75 bp, Homo sapiens
gggagactggagtcgaaggccgtgaggtatttttctaagctacagaagtcaagattccaaaaccaagaggcagac

SEQ ID NO: 127073 - DNA, 82 bp, Homo sapiens
caggaggcgttggtgctcacggccaaggccacgagaagatggcgaattagaagatggtgaaatagacgatgcaggatttgaa

SEQ ID NO: 127074 - DNA, 100 bp, Homo sapiens
cgcagcgacggggcgctgcctggcccaggcgcacacggaagtggtctccgtgaggccgggtgacgctccagaatgggagacaagccaatttgggagcaga

SEQ ID NO: 127075 - DNA, 75 bp, Homo sapiens
agaagattgctaccatccagcagaccactgaggtcttcacttcggtaagaatgattgatgttggctgatattgga

SEQ ID NO: 127076 - DNA, 100 bp, Homo sapiens
gagaccctctgcctggcaaccaccccgtctgagaagtgaggagcccctccgcccggcagctgccccgtctgagaacacctgcagcagcatgagagtggtg

SEQ ID NO: 127077 - DNA, 89 bp, Homo sapiens
gtgaatttaacttcagttccatacagaaacttcttttccacagtgtaaactggagttgctggtgggcagccctgcttcctgcatggaac

SEQ ID NO: 127078 - DNA, 101 bp, Homo sapiens
gtccaggatgggaagagagatctgcagactcccagggaacctacagctttctccttcacagcattgcaggagatgtgccaaaaatggctacacctcccgat

SEQ ID NO: 127079 - DNA, 50 bp, Homo sapiens
aagccccacatcagagctgttcagggaagaaacccttttttcttggagcc

SEQ ID NO: 127080 - DNA, 74 bp, Homo sapiens
aatgatatcagacccagtgccatgagggaaatagcaattgatgtcccaaatatcctgtgaagccacctggcagc

SEQ ID NO: 127081 - DNA, 90 bp, Homo sapiens
accctcagtgatctggatcgacacccagaggccaggtgtggtgtcttacacctgtaatcccagcactgtgggaagccagggcaggtggat

SEQ ID NO: 127082 - DNA, 50 bp, Homo sapiens
ctgcagggtacccacctgagccccagcatttaaatcaaacggtattgaga

SEQ ID NO: 127083 - DNA, 90 bp, Homo sapiens
agaaggtcccggcagacgaagcgagccccctggtggaagccagcagaaccaggaagctgtagagaaatatgaagaagtgctacataattt

SEQ ID NO: 127084 - DNA, 98 bp, Homo sapiens
agggtgcagcgccaggtccggtgttggggtgtccgagttgccgccggagaggagtggcctcgcccgcttggctacgcagatataaagtcctagggagt

SEQ ID NO: 127085 - DNA, 75 bp, Homo sapiens
acgaatctgcccacccctcctgtaacccagcctgtttcacttcttggcaagaaacctattggaattcgagactta

SEQ ID NO: 127086 - DNA, 75 bp, Homo sapiens
gagaattatgatcaacttcaaccctcacttcgatttggaggacagagactgcaatactatactggcaattgctgg

SEQ ID NO: 127087 - DNA, 95 bp, Homo sapiens
ggaccgcagtcgcccccaggacaccctgggccccaaggaccccggcctggagccagggctattcacgaaaagcagcagctctagagttcttaaac

SEQ ID NO: 127088 - DNA, 75 bp, Homo sapiens
cagacctatccctgccccgactaccccttcactcagacccaggtgatgcagaagatggggaagaatatgatgacc

SEQ ID NO: 127089 - DNA, 100 bp, Homo sapiens
gctgtgctggccgccatcctgcagctgggcaacatctgcttctcctcctcagaggggccaaaccagtgctcctgccacctctctggctgccccctagagc

SEQ ID NO: 127090 - DNA, 50 bp, Homo sapiens
cagggctttccttctttcctacggaagccaaatcttatcctgaatgtaga

SEQ ID NO: 127091 - DNA, 101 bp, Homo sapiens
ctgggctccagagtccctcgggtctcaggtcatggcggtcgcggggcccgcgcccggagctggcgccaggcctcatggcggtccgagcttcgttcgagaac

SEQ ID NO: 127092 - DNA, 89 bp, Homo sapiens
gagggcctgaggcaggagatgagcaaggatctggaggaggtgctactcgtgagcagtagtcgccatccagacagatggattgtccctgg

SEQ ID NO: 127093 - DNA, 101 bp, Homo sapiens
tggagaattatccaacaagaaaaagacctgtggctattaagatagagaaatggtcaatgcatggtttgctgagagagttcacaccatccctgtgtgcaagg

SEQ ID NO: 127094 - DNA, 75 bp, Homo sapiens
ctgaggggactgtgacacagatacagtccggcttcccatctacacttttcaataaagcatccacatacactgtcc

SEQ ID NO: 127095 - DNA, 74 bp, Homo sapiens
gggaccaccaaggaaatatttatgtttttgacttacatggaaacagctggaaacaacgtggaggtagatgagtc

SEQ ID NO: 127096 - DNA, 75 bp, Homo sapiens
aaacctgacagcatggggctgtactgaataccgcagaccattgtaattcatgaaaccaccatcatgggttcgggt

SEQ ID NO: 127097 - DNA, 99 bp, Homo sapiens
cggcggctaccggcggcggcgcgcagcgtgtcaggcggagagacccgccgccagaaatgtgtgctatactggccggaaaagagagggatatatggaaaa

SEQ ID NO: 127098 - DNA, 82 bp, Homo sapiens
gggatcttgctgggtgagatggcagtgtgtgcaaaaaagcgccccccagctgagcgggctttggacaccatgaactttgatg

SEQ ID NO: 127099 - DNA, 82 bp, Homo sapiens
tggccacccagctgaccggaccggtcatgcccgtccggaacgagaccctcctgttcttaactgtgggcgatgagaaaggtgg

SEQ ID NO: 127100 - DNA, 100 bp, Homo sapiens
gcgcctgctgcctgagcccgccagcgacgtgcgcctcgggagtcggcctgtgaggaatctggtgaacagtaacaaactttggtgaaatttcaggaaccat

SEQ ID NO: 127101 - DNA, 90 bp, Homo sapiens
ccgcttctcccgcttcaacgaagaccgagactttcaggttctggcctataggaacaagacattttcagtaatggaagaaggagcttccag

SEQ ID NO: 127102 - DNA, 74 bp, Homo sapiens
ctggtgctggtattggaacagtctttggcagccttatcattggttatgccagttccagtctcatcagattttcc

SEQ ID NO: 127103 - DNA, 83 bp, Homo sapiens
caggaacagggacagcacctcatcccctggatgggggaccacaagatcctcatcgacagactgcaaaattcaaaatggggctc

SEQ ID NO: 127104 - DNA, 122 bp, Homo sapiens
attgaaaacagctggtggacaaaattttgtggcgctctgcgtcccctgaagataaacaggggtcacatgacgacagaagccaagagggctgcaaagatggaaaagaagatgaaaattttgct

SEQ ID NO: 127105 - DNA, 125 bp, Homo sapiens
ggctctcgctgcgttcgctcaccgctgtcacctgcacggtgtggctggcggcctacggactcttcaccctctgcgagctggcagagatggaggaggagctacgttatgcacccctgtctttccga

SEQ ID NO: 127106 - DNA, 50 bp, Homo sapiens
cggtcatctgtggcagtatatcaagcatacctccagataatctctctatt

SEQ ID NO: 127107 - DNA, 50 bp, Homo sapiens
ccagacaaccttttattggatgccaagcctccccagtttaaattagaccc

SEQ ID NO: 127108 - DNA, 82 bp, Homo sapiens
cattctaataacatctccattctccaggaactgtacgaaagaaaacatcggttgtgaagagaaagccaaaaagaatgccaac

SEQ ID NO: 127109 - DNA, 75 bp, Homo sapiens
aagaagaagattaaacgggtaaagaaaaaagaagttgaaggagatgctggttgggggccgtcccgctcctaaggc

SEQ ID NO: 127110 - DNA, 80 bp, Homo sapiens
acttttgagtgcaactgccttccagaccccaagactgcttctgagacagaaacagatatctgtgctgaatgggagataaa

SEQ ID NO: 127111 - DNA, 100 bp, Homo sapiens
cctctgccctatgaacagcttaagcacttttaccgaaaaccttctccccagttgtgcggtctgaaagtagaagtggatatggagaaaattgcagctgaga

SEQ ID NO: 127112 - DNA, 122 bp, Homo sapiens
ccggaagccctgagggcagctgttcccactggctctgctgaccttgtgccttggcctgtttaaagaagaaaacccgtatgctagatttgaaaacaactaaagcgctccagcacatcagtccc

SEQ ID NO: 127113 - DNA, 87 bp, Homo sapiens
aaatggagatatgatttctgctgttcaaaaaagtccctaaaggagggctggagacagaggatgactacagctaccagggtcacatgc

SEQ ID NO: 127114 - DNA, 75 bp, Homo sapiens
gaagcggcagctgaggagactccggcgctcgccatggccgacgaaaagcccaagaaagaagcttccggttctgag

SEQ ID NO: 127115 - DNA, 98 bp, Homo sapiens
gtgtatgtgtgtgccagcgatgtccccatccgccgccgagaggaggcctatgagaatcaggtgtccccaggtgtcattgccaacccctttgcggcagg

SEQ ID NO: 127116 - DNA, 83 bp, Homo sapiens
gtgagagatggaacccgaagaagaaaggattcgttacagccagagattggtcagcccaaggccaaccccactgtcactctgtt

SEQ ID NO: 127117 - DNA, 100 bp, Homo sapiens
gcggtagcgaaggccgccgaacctgcctggctagccggcgacttgagtgacgagattgatattgctgatgatattattaatgccagtgaaagtaacagag

SEQ ID NO: 127118 - DNA, 100 bp, Homo sapiens
ggaaattcaacagaacttagcataaatgctgaagagtgggttcagatggctccaactctattttctaaatttattccaaacattctccctccggcggtgg

SEQ ID NO: 127119 - DNA, 75 bp, Homo sapiens
agcttgtgtagcgtcagatccttgagtgataaaggagtagaggtgggcaatggcagaaggttatggggcttgctt

SEQ ID NO: 127120 - DNA, 75 bp, Homo sapiens
tacagtttgaagagaaaaagaaacagcgtgaaattgagctgtgtgtgccactgaggtttttaaaatagccacaag

SEQ ID NO: 127121 - DNA, 100 bp, Homo sapiens
aggacttctttccggcatcagtgtggacattgaccccactggactgcagtcacagtggactcccaaggggcagagaaagcgtcgtggtggagcaataaat

SEQ ID NO: 127122 - DNA, 100 bp, Homo sapiens
ctgggagctgccgccaggagctgtcaccatgacgatttgatggtagagtggtggcaaagcttccttttacccctctttcttacatccaaggactgtctca

SEQ ID NO: 127123 - DNA, 97 bp, Homo sapiens
ctcgttatgaaaggacagataccggtgagataacatcctacatcactgaagatgatgtggtctacagaccaggagggtctgaatccagggaaagcta

SEQ ID NO: 127124 - DNA, 99 bp, Homo sapiens
ctacaaaagtgtggagaggttccttcaggaggatcagttattttaccaagaaaatggtttgcacgactttgaacatatactatccatgctgatgggaca

SEQ ID NO: 127125 - DNA, 83 bp, Homo sapiens
aatatttgatgaaattcaccagtgaagccgtgacatcctgggatattctttgttgagaggggcactatgaacgaagaggagca

SEQ ID NO: 127126 - DNA, 75 bp, Homo sapiens
cttcaatgtgtcctacaccaggcagcccccaaatcccggcccaggagcctcagggaacccagccagcacagcagc

SEQ ID NO: 127127 - DNA, 100 bp, Homo sapiens
ggccagggccgcactccggagactcgcggttgctacgcgcaccatggctggagggtgctgtgccgttcctggtcagtgccacctctggcaccactgtgct

SEQ ID NO: 127128 - DNA, 87 bp, Homo sapiens
gcaggtgagtggcggtcgccatcagacccgcgaaggccgccatggcatcagatgaaggcaaactttttgttggagggctgagttttg

SEQ ID NO: 127129 - DNA, 80 bp, Homo sapiens
catcgtctccatcctctacctcaagtatgagccagacgcaaacatgcagatctttgtgaagaccctcactggcaaaacca

SEQ ID NO: 127130 - DNA, 82 bp, Homo sapiens
atcgttgctgccttcttcgtcaaggaagacgtattttagcagatgaagcactcaagctgggcattctagataaagttgtaaa

SEQ ID NO: 127131 - DNA, 75 bp, Homo sapiens
aaggattccaagtaactcttatttgatgggcggaagccatttccaattaaccatggtgaaactagtgatgaaact

SEQ ID NO: 127132 - DNA, 74 bp, Homo sapiens
cgcgacggtcgccgcccacggcgaggctgaggcagctaaattagttccaatgggtttcaccactgcaactgaat

SEQ ID NO: 127133 - DNA, 82 bp, Homo sapiens
caggcggccgtcatggcggtgtcggagagccagctcaagaaaatggtgtccaaggagccttcacgtaaatgggtccagtcat

SEQ ID NO: 127134 - DNA, 82 bp, Homo sapiens
gccacaggtgttcaagagctagatgaagggtgtgtccgcagccggccaggtggtatccctgaaggtgtggctgattgacgac

SEQ ID NO: 127135 - DNA, 100 bp, Homo sapiens
ggtgcacagtgctttccaggcccagcgggctttccttctgatggcctctcagtaccaacaaccccacgaggaacagatggagtcggataactgttcagga

SEQ ID NO: 127136 - DNA, 74 bp, Homo sapiens
gaaggcctcttacggatccctggagctgccattagaatcaaggacgggctctacgagtgcattctctgtgcctg

SEQ ID NO: 127137 - DNA, 101 bp, Homo sapiens
tgccaccatcctgggttgacaattctacacaaggagggtccagattttggctatgtaactcgagggccccaaacagggggtatcagtggactggactcctt

SEQ ID NO: 127138 - DNA, 98 bp, Homo sapiens
aaaagcatgtggtcacattacttcagggcaacgtgtttatgtattatggactgtctaatttctatcaaaaccatcgtcgttacgtgaaatctcgagat

SEQ ID NO: 127139 - DNA, 78 bp, Homo sapiens
agctgttcctattcggccatcttggctcctcccacgtttcataaatttctaagtttgaagaaaacaggtctgaaacaa

SEQ ID NO: 127140 - DNA, 98 bp, Homo sapiens
gcctggctaaggaaaccctattacctccagtacaaaattggacagctgtacatgatcagcaaacacagccatgaacagagtgaccggggagaaggggt

SEQ ID NO: 127141 - DNA, 98 bp, Homo sapiens
ggagatcaagaagtcggtcttttgattacaactatagaagatcgtatagtcctagaaatgcttacttttctggtgcagaaagattgttgggaacagac

SEQ ID NO: 127142 - DNA, 80 bp, Homo sapiens
ccgagatgtgatgttggagaactacaggaacatggtcttgctgggaaaaggggaagatagtgatgtactcagtataaatg

SEQ ID NO: 127143 - DNA, 50 bp, Homo sapiens
acagcggaagctggaggagtgacaggtgctggagaatctggtaaaagcac

SEQ ID NO: 127144 - DNA, 83 bp, Homo sapiens
caagggcttcctggccctctaccaaaccgtggaggtggtttgtgctccccctactgcctatatcgacttcgcccggcagaagc

SEQ ID NO: 127145 - DNA, 75 bp, Homo sapiens
gctgctcaaggccaagatggacgccgagcaggatcccagtcctagcagaagatgtgactcagactgcctctgggt

SEQ ID NO: 127146 - DNA, 100 bp, Homo sapiens
gcggcggcggcggcggccggggaggctcatcagattcaagagatgtttccccaggttccataccatctggtactgcaggacctccagctgacacgctcag

SEQ ID NO: 127147 - DNA, 100 bp, Homo sapiens
aagcatttgaaatgatggagaaggatgagctatgacttgctaaacaatctgttggtagtgggcagcagtcagtgacaggtgtaacctctgtggatgacag

SEQ ID NO: 127148 - DNA, 98 bp, Homo sapiens
tctccctgaagaacctggacaattcacagaaggctccttattggatgggctgtactggaagatgcagcccagcaaccagactgaagctgacaaccgaa

SEQ ID NO: 127149 - DNA, 100 bp, Homo sapiens
agccgtcgcggagccgcgcagccctcggagcacggaagaaaaaatgctgggcatcttggtgcagcacaaagtccggagtggcgtctcgggcatcgtgggc

SEQ ID NO: 127150 - DNA, 100 bp, Homo sapiens
ctctcgtctctgcccatctggccaacattgtcatgataacaactattccacaccaaatgagagaggagaccacaatagaacactggatcgatcgggggat

SEQ ID NO: 127151 - DNA, 75 bp, Homo sapiens
ctacgtggtagtcgtctcccaaccaccagatgaccaaaataactgtcctgtgaaaccctgttacctcaatatctt

SEQ ID NO: 127152 - DNA, 75 bp, Homo sapiens
cgaacagctaatccgccgaagaaaagatcctgtttgaccaaactcagagatcaattaaggcacagcttcagaact

SEQ ID NO: 127153 - DNA, 75 bp, Homo sapiens
ctcagatctggagcatcggctgcaggggtcagtgatggagctgcttcaggtgctggatagtttactagtccagta

SEQ ID NO: 127154 - DNA, 101 bp, Homo sapiens
aaggaatccaaatgcatcattcagatgcaaggcaactcgaccaaagtgagttgctgaatgagcttatggacagtgcaaaagtgtctaacagcccttcccag

SEQ ID NO: 127155 - DNA, 100 bp, Homo sapiens
cgacttctgatccatggatgccatcagctccatcaagtatgatggtgaaggatgaatatgtgcatgactttgagggacagccatcgttgtccactgaagg

SEQ ID NO: 127156 - DNA, 90 bp, Homo sapiens
gcaggaaccaggatccgaacccgcctccccaggatgccttccgcgccttccaccctgacctggaattcgtgggcaagttcttgaaacccc

SEQ ID NO: 127157 - DNA, 50 bp, Homo sapiens
ttctggtggttgccactcacctgaggatctatcagaggactcctgaaacc

SEQ ID NO: 127158 - DNA, 100 bp, Homo sapiens
cctgcgtcgtcttcctggttgtctacaaggtgtacaagtatgaccgcgcctgccccgatgggttcgtcctcaagatttcaggtatgctgctgaaagtggg

SEQ ID NO: 127159 - DNA, 98 bp, Homo sapiens
gcaaatccaagggtggcggcaagatgaatgaggagatctccagcgactctgagagcgagaggaggagaagcagccccaaaagacgaaggaaccctcaa

SEQ ID NO: 127160 - DNA, 89 bp, Homo sapiens
gttcaaagtgaacacagactacaagtctagtttaaaggtttcttcaggagaagcattaccaaaaacgctgtgtacaagtgtaaaaacgg

SEQ ID NO: 127161 - DNA, 101 bp, Homo sapiens
ggggccgccttcagccaagcggcctaaactctcatctccggccctctcggcgtccgccagcgatggcacaggtgcatgtgagggaaccctggcttgttcaa

SEQ ID NO: 127162 - DNA, 75 bp, Homo sapiens
actgaaaaggcattcctgaagcataagaagctgggaccactctgaagagttacctagaagcaccttcaactacag

SEQ ID NO: 127163 - DNA, 90 bp, Homo sapiens
aggaggccagggaagctctagaggcgttttttggccaagggaggccacaagaggaagctgaatgaagaggacgccgccagcgagtccagc

SEQ ID NO: 127164 - DNA, 75 bp, Homo sapiens
gtgattctgaagagggtctggaggagccttctcaagaacagaggacaaccctccatatgataagggagccttcag

SEQ ID NO: 127165 - DNA, 74 bp, Homo sapiens
ctcttcattgccaaagcagccctgcagattttgaaaccagtttttccagaaaggaggagtcaaggaagccctta

SEQ ID NO: 127166 - DNA, 90 bp, Homo sapiens
agagtgatctacgtcatctcagggcagttcctacagatgaagcaagagcttttgcaggttgctattgctggggccccagtcactctgtgg

SEQ ID NO: 127167 - DNA, 96 bp, Homo sapiens
ctcccggcgcccgtcgctcagcggcccgatagccccgggggcggcctgcaggcgccggaattggagcgttattcagtatattaatgtcttattgat

SEQ ID NO: 127168 - DNA, 50 bp, Homo sapiens
cacgcccctcaccccccgagagccgtgcttttaggaagaagatcctttta

SEQ ID NO: 127169 - DNA, 101 bp, Homo sapiens
gaaggagcacccaggagctgaagggtctaaaattcccaggactccacagctttgcaccagataagcctggaggaatactaatgatggatctaaaagaagaa

SEQ ID NO: 127170 - DNA, 100 bp, Homo sapiens
ccacaggtttgacatccaggtacagtcctccagggtatacttcgtggcctgcaccatcgagcaaaatatgctgtgaattccatcaagaagaaagtcaacg

SEQ ID NO: 127171 - DNA, 51 bp, Homo sapiens
ctggttgagctcaaagttattttacattgacccagatgatgtggtaccagt

SEQ ID NO: 127172 - DNA, 90 bp, Homo sapiens
caggaaggtggccgagtgtgtcgccgcggccatcagggtaaaacttccttttcctgtagatcaaatcacagatcttccaaggaacgattt

SEQ ID NO: 127173 - DNA, 100 bp, Homo sapiens
aatgtgttcaagtcttggcagagccaggctagtgaaaactttagtggctgacactcctctaactgcggtagatttcatgcctgatggagccactttggct

SEQ ID NO: 127174 - DNA, 138 bp, Homo sapiens
cagaggctgggggggggaaagacgaggaaagaggaggaaaacaaaagctgctacttatggaagatacaaaggggttctgagcaaggttcaaccagtcaagaacaggccttatctgctcagcaagctgctgttattaac

SEQ ID NO: 127175 - DNA, 101 bp, Homo sapiens
gggtggtgctggctcagtacatattcaccttgaagaggaagacggggcggaagaccaagatcatcgagatgggtgctgataagactgtgaaaggcccagat

SEQ ID NO: 127176 - DNA, 100 bp, Homo sapiens
tgataaagtaacacgccctcaagagctggatttgacacatcaagggcagccaattactgaggtgtcatggagaaactccagctgggcccagagattctgc

SEQ ID NO: 127177 - DNA, 101 bp, Homo sapiens
acatcgaggactgtgcatctttatgataattggatcaaagatgctggaatacaggagtttccagaaaatataaaaaattgtaaagttttgacaattgtgga

SEQ ID NO: 127178 - DNA, 75 bp, Homo sapiens
tcctcaccgcaacattccttatccaatcccttaccggaaatgcttccagactgcacacttttacttagaggacag

SEQ ID NO: 127179 - DNA, 75 bp, Homo sapiens
ccatatgttgagattctacttattcatcagtttgttgtgcttgtcaagatcaggatgctcacaactgtattcctg

SEQ ID NO: 127180 - DNA, 83 bp, Homo sapiens
gccgctgccgctgccgctgccgcacctccgtagctgactcgaagaggactgtcagaaggacgtagaaggcacggttttactgt

SEQ ID NO: 127181 - DNA, 82 bp, Homo sapiens
tgcaatgatgttggaacttgctcgtgccttagacaagaaactcctttccttaaagataacaacgaacttgatgcaagtgata

SEQ ID NO: 127182 - DNA, 83 bp, Homo sapiens
tgcccggtgcccgaggaggcagccaagctcgtagcctgccactccgtgctttttgaaatcatgaatcctgtttatagtcctgg

SEQ ID NO: 127183 - DNA, 75 bp, Homo sapiens
ttaaaggctgataataacacagttattaatggactgcttggaaatatagttccagtctcatcagattttccatgt

SEQ ID NO: 127184 - DNA, 50 bp, Homo sapiens
agatgacatgtctaattatgatgaagaagccagacgaggacagccggctg

SEQ ID NO: 127185 - DNA, 82 bp, Homo sapiens
ctctccagggagtgctctgttcacggctccatcgctgttacctacagacctggtacctggatttttgcccgagatgattcct

SEQ ID NO: 127186 - DNA, 95 bp, Homo sapiens
ggctgagtcctggccgcgggccggggccggggcgccgctggcaggagcgcttggggatcctccaaggaaccctaaggactctgcaatatgaataa

SEQ ID NO: 127187 - DNA, 75 bp, Homo sapiens
tgaaggtgatgaggttgaagatctctatgagcttttgaaacttgttaaggacttaaccaccaccatgtcgagcaa

SEQ ID NO: 127188 - DNA, 78 bp, Homo sapiens
gcggtgcgccttctccacgctgggccgggtgttgcgcctggcctacagcgaggctgacttaattcagtgcacaaatga

SEQ ID NO: 127189 - DNA, 50 bp, Homo sapiens
tgaagagggaagacacgcggaaacagcccacagaattcttccagtccctg

SEQ ID NO: 127190 - DNA, 75 bp, Homo sapiens
gttcttgatccaaaggaaaagcagaaatacacagacatggccaaggagggtatttgaagtataccatacaactgt

SEQ ID NO: 127191 - DNA, 76 bp, Homo sapiens
tttgaaggtgcaagatactatataaaatatggtgtaagatacttcttcaagattggacagctggggaccttcttct

SEQ ID NO: 127192 - DNA, 74 bp, Homo sapiens
cctgccacatcgggggcaccaccctccatgcctttgcaggatcagtgaatgcttgtgaaaagacctcatttatg

SEQ ID NO: 127193 - DNA, 75 bp, Homo sapiens
aaaagtcgcagcgagctggagccgccggaggcataatcaccagcaacacccgggacaataatacgggggccacct

SEQ ID NO: 127194 - DNA, 90 bp, Homo sapiens
ctcctgagaagctgggactacagcccttcaagaagaggtatgattgctaccacttttccccacaaagtgacgaaaggaaacagcgacgga

SEQ ID NO: 127195 - DNA, 90 bp, Homo sapiens
tccatctcttcagagatgaaccaggcctcaggagtgcaagtagctgatgaagtatgtcgcattttttatgacatgaaagttcgtaaatgc

SEQ ID NO: 127196 - DNA, 96 bp, Homo sapiens
ccgagacgggggcggcggccgcgcgggtctggcgggaccggtttggaagactttgccggcctgcagacatgtcatgctgcccaaggacatagccaa

SEQ ID NO: 127197 - DNA, 88 bp, Homo sapiens
caacatttagctgggatgaaagacagcaagctttctactaccaaagattccccacagcctgttgaggagaaggttggtgctttcacaa

SEQ ID NO: 127198 - DNA, 75 bp, Homo sapiens
ggatgtacagagagctcctggacaacagcactgccagtgaaagatgtagaagataaacctgaacaacaaaccaga

SEQ ID NO: 127199 - DNA, 75 bp, Homo sapiens
ccccgcgtttcagccctagggaaggtcctcagaatggttggaatgaccctccagctttgaacagagtacccaaaa

SEQ ID NO: 127200 - DNA, 100 bp, Homo sapiens
ttggcgaggttcagactcttggagccagaagctacatgacccctaaacggttaatgttcgtgaagaaattgaagagttttttccaagaatgtggaagata

SEQ ID NO: 127201 - DNA, 75 bp, Homo sapiens
ggccaagcgtcatattgacttcacagaagaacaggctgagctgacacctgactcagaattcatgattgaagaaat

SEQ ID NO: 127202 - DNA, 82 bp, Homo sapiens
gcgctactctctctttctggcctggaggctatccagcgtgaaattcgatgctactgtgatgctgcccactgtgtagccactg

SEQ ID NO: 127203 - DNA, 82 bp, Homo sapiens
cttgcctcaggccagtcgcctccaggccaagagggatccttcacccgtgtctgttcaaatctgaacatcaatgatgtactag

SEQ ID NO: 127204 - DNA, 82 bp, Homo sapiens
gcgccaatggggagcagaaggactcggacacaggttctgcggggagtgtctccagccctgcctgcaggtgccatccccgctg

SEQ ID NO: 127205 - DNA, 100 bp, Homo sapiens
ctgacacatccaacttcgacgtggatgacgacgtgctgagaaacacggagagattcacccaggatacacaacctcactatatctattcaccccgtgaaat

SEQ ID NO: 127206 - DNA, 100 bp, Homo sapiens
aactcagtgaagacacagatgttcctgttcagagcaaccagctaatgctgcctctaagaatcaaacttcactcttgggagaaccaccaaaagaaattcgg

SEQ ID NO: 127207 - DNA, 109 bp, Homo sapiens
cggatggcaagaatcagctggggcagaagcgcgtggtcaagggtgtgggccgaagatatgctcatgtggtgttgaggaaagcagacattgacctcaccaagagggcggg

SEQ ID NO: 127208 - DNA, 101 bp, Homo sapiens
gtcatcctcattgctactgccctctgcgctcctgcatctgcctccccataaatatggctacacacacctttctgcaggagagctgcttcgtgatgaaagga

SEQ ID NO: 127209 - DNA, 60 bp, Homo sapiens
cgggatcagctctctgttttggaaaatggattgagtggtgattttatgcaatggcttcaa

SEQ ID NO: 127210 - DNA, 50 bp, Homo sapiens
aggcgctcaccatgttccctggaggtaactatggccaagatcaatcctcc

SEQ ID NO: 127211 - DNA, 75 bp, Homo sapiens
ggctgaccagcaccagccctgatccaggtaagaatgattgatgttggctgatattggagtgctcattcacatgaa

SEQ ID NO: 127212 - DNA, 75 bp, Homo sapiens
cgggagagggggagtgcgcggcggccgcagctgccacaaaccagtaatctcaggggcgatataatcaatgaggtg

SEQ ID NO: 127213 - DNA, 99 bp, Homo sapiens
ggtgaaggtccggggcttgccctggtcttgctcggccgatgaagtgcagaggtttttttctgatacaactgtacagggctaaattttgggaaggtggat

SEQ ID NO: 127214 - DNA, 98 bp, Homo sapiens
tcaagtcgagactactggccgaaggggcgtctgcggctctccgccgtccccagccctgcctctccctgggctctgttccgatgaagttaaattccgtc

SEQ ID NO: 127215 - DNA, 82 bp, Homo sapiens
ctgggacttcccgtccgcggcgtggagggtcaacaacggttccagcctcagggatgagtgcatcacaaacctactggtgttt

SEQ ID NO: 127216 - DNA, 75 bp, Homo sapiens
ctgagcagagctctccgggttccccggctcgcggggcccggcgaagggcagggtcttgctgtctcacccaggctg

SEQ ID NO: 127217 - DNA, 74 bp, Homo sapiens
tggaactactctaacatttgacactgaacttacagtgcaaacgtagtaagcattaataatgtctttcatctttg

SEQ ID NO: 127218 - DNA, 126 bp, Homo sapiens
cggcataggctccatctgcagtgtcaatgcggcgctcccgctgaaggagggaaacgcggcgcgtccaggactttctgcagggcgactgcaccaaagcgaaacagaagctgaactggaagccccggg

SEQ ID NO: 127219 - DNA, 119 bp, Homo sapiens
agcggcagagagggaatggtgcaggcaggcgctgagaaggacgcgcagtccatctctctcagttactccacaggatccgctgaacataggatgttgccacaaaatctacctcgtgtatt

SEQ ID NO: 127220 - DNA, 73 bp, Homo sapiens
tgagtttcctgaggcctcaccagccatgcctcctgtacagcctgtggaactagtttatgcgaattccatgtgt

SEQ ID NO: 127221 - DNA, 100 bp, Homo sapiens
agctcccccatgggcccccactccatgtcggtgcccaccacacccaccctgggcttcagcactggcagcccccagaagggacttcctcgcccgaagagcg

SEQ ID NO: 127222 - DNA, 100 bp, Homo sapiens
gaccagacagacatgcacggagactcagaatacaacatcatgtttgtcaaggttccaggagagaaggacacgcaaaaagtggtcgtggacttgtcagagc

SEQ ID NO: 127223 - DNA, 97 bp, Homo sapiens
gagcgttccttgtcctccctctgcacaagaattcagcttagagaactatcaacacaggacaatgcaagcccatgagctgttccggtattttcgaatg

SEQ ID NO: 127224 - DNA, 100 bp, Homo sapiens
tcccaaaattccacttttcaacacagatgtggacaacctagaagggaagacaccaccagtttttgcttctggagattccaggtatccattacttggccag

SEQ ID NO: 127225 - DNA, 85 bp, Homo sapiens
ccaaatcctgtagccataaatgtctggctaatggcatttacaggagtatgactatgaatatgatgaaaatggtgacagagtcgtt

SEQ ID NO: 127226 - DNA, 83 bp, Homo sapiens
agcgctccggagcacgggcacgacgggggcaccttctcggctgctattccagatttcggaaggttcacgagtgttgccgacac

SEQ ID NO: 127227 - DNA, 76 bp, Homo sapiens
ctgggcaccggggagccggccttggacacgcgtcaagggttccacactgttgggagtcgctgcaagaatcggacag

SEQ ID NO: 127228 - DNA, 74 bp, Homo sapiens
tccggtcctgccccgaactgcccacggccggcagcgcttccaagtcaacggttgcaggaaagtttgaagaaagt

SEQ ID NO: 127229 - DNA, 82 bp, Homo sapiens
ggaatgaaagacattcaggatcaacttgaacgaatatttctgatgggcttaggtcacgagcaaggatttggagccccttgtt

SEQ ID NO: 127230 - DNA, 74 bp, Homo sapiens
gggcaggggaggagccgccggagctgtcggagccttttcggctttgtgagaaaccttaccatcaaacacgatgg

SEQ ID NO: 127231 - DNA, 75 bp, Homo sapiens
caggacttagaggagagggacattctgagggtcacatatacagggccagatgcagatggctggagatgggtgcag

SEQ ID NO: 127232 - DNA, 100 bp, Homo sapiens
gaccccccctagcagcgcgcctggctctggcccccgcgaaggaggacggagtttgggggccgaaggccagagaccaggatttggctacggaggcagagcg

SEQ ID NO: 127233 - DNA, 101 bp, Homo sapiens
ggccccgataacgggccgcccccacagcaccccgggctggcgtgaggcagagatctggctccacaaggaggcccagaaggagggctggagcaaagctgcca

SEQ ID NO: 127234 - DNA, 110 bp, Homo sapiens
gattcccagccatggcagattcctccgggcagcaggacttcatcacctgattcttccaatgagaattccgtagcaactcctcctccagaggaacaagggcaaggtgatgc

SEQ ID NO: 127235 - DNA, 90 bp, Homo sapiens
tggcacaacccctcaaagacagtgatgttgagatgctgaagtgcattgagctggatgagcggctgaaagccatggaccaggagatcacag

SEQ ID NO: 127236 - DNA, 100 bp, Homo sapiens
gctcctgtagaggaggctggagattccacccaaatcctcttctccaagaagattggctgcaatgccgtcagctgggcccctgctgttgtacctggaagcc

SEQ ID NO: 127237 - DNA, 100 bp, Homo sapiens
ccggaacccgcaggaggacttcgagctgattcagcgcatcggcagcggcacctacggcgacgtctacaagatttcttcgcaagactatggaaaggaagtg

SEQ ID NO: 127238 - DNA, 96 bp, Homo sapiens
ccaaagagatctcagcgctcaccgacttctctgccacccgtgggacacggtcatccaggcggccatgcgcaagtacccgaacccgatgaacccgag

SEQ ID NO: 127239 - DNA, 100 bp, Homo sapiens
cgcagcccacggaggtcggagcctgcccacccgccttgtcctccaggatcggagtcaccctgaggaagcggaaaagagccaccccgacctcctgcagctg

SEQ ID NO: 127240 - DNA, 103 bp, Homo sapiens
cgcctcctcggagtccttggggacggagcagcgcgtcgtggggcgagcggcagacaatgcagatcttcgtgaagactctgactggtaagaccatcaccctcga

SEQ ID NO: 127241 - DNA, 100 bp, Homo sapiens
gaaggagctgtttaccatgtcaccctcaaaagagtccagattcaacaggctgccaataaaggagcaagatggctaggggaatccatgggaaagagctatg

SEQ ID NO: 127242 - DNA, 82 bp, Homo sapiens
ggaggctgcctcggcggagcagaggaaccacacgctgatcatgcaaaagactgttgaagtagagagcattttgcccagctca

SEQ ID NO: 127243 - DNA, 102 bp, Homo sapiens
aagagaaagcgaagccagtaccagcgtttcacctaccttcccgccaacggtgtcgtgaaaactacccctaaaagccaaaatgggaaaggaaaagactcatat

SEQ ID NO: 127244 - DNA, 100 bp, Homo sapiens
gtctaggtgagacagaagccaaacaggaggaggaagtggaggagcaccaaaactactttggaatagatgaaaaccttggtccagtagcagtcagcatccg

SEQ ID NO: 127245 - DNA, 51 bp, Homo sapiens
cagaagactatacaacctcctaggtagacccaaatgatttgtacattgtag

SEQ ID NO: 127246 - DNA, 46 bp, Homo sapiens
attctgctggaattattcatcggggagaggacattaagtgaaacag

SEQ ID NO: 127247 - DNA, 74 bp, Homo sapiens
ccgttatgcatgagagtcaccatgctcaaagtgaatatattaaggcaggaggaagagcgcaggcgccgtgaaga

SEQ ID NO: 127248 - DNA, 95 bp, Homo sapiens
gggtggcgctgggagcaacgggagtgtcctggacccagctgagcgggcggtcattcgcatcgcaggcccagggccccggccagtgcccagccccg

SEQ ID NO: 127249 - DNA, 100 bp, Homo sapiens
agaagcgaagtggagagcgccagagtaatgggtacctagtcgatagtcgctggttcaaacagtggaaaaaatatgttggctttgacagttgggacaaata

SEQ ID NO: 127250 - DNA, 76 bp, Homo sapiens
cgacctctactggccttgcccagcgcctaggtccacattggccaactgtattcaactgacaagctgatcattgaga

SEQ ID NO: 127251 - DNA, 130 bp, Homo sapiens
aggaatttcgcagagctgaagatcaagcgcctgagaaagaagtttgcccaaaagatgaagaatggtttattattgccagttttggcctcctcagtgccctcacactctgctacatgatcatcagagccac

SEQ ID NO: 127252 - DNA, 74 bp, Homo sapiens
ctgggcggtggttcagcactggatcttagtgacagtgattttgacaagccggagaaattatattctcctaagag

SEQ ID NO: 127253 - DNA, 100 bp, Homo sapiens
cccggttccccggcccacagtgggggtgtgcaaacccgagagaactggattagaaatgatatttgccaaatttgatgaagtgcaaagttcaggcggtatg

SEQ ID NO: 127254 - DNA, 97 bp, Homo sapiens
gaggcagcgcgggatcccagcctcaggcgtgcgcggacggtgtgcggagtgtgaacatggctacgcctcttcattcccgtccatgccgagcccccga

SEQ ID NO: 127255 - DNA, 75 bp, Homo sapiens
cgaagcagcgtgtcctccgtgggagcccgaggaaacagagcaaatgcagcgttacaatcaaagacttattgagga

SEQ ID NO: 127256 - DNA, 100 bp, Homo sapiens
gttttcagctgtgacagtactgagagtgttgatagtgtcaatcgttcagttttaatgattttaccagcctactgaacttgacgcactggtatttggccat

SEQ ID NO: 127257 - DNA, 75 bp, Homo sapiens
cggctccctaggcgtcccatctcgactgtgccctgtccacggtgcctcctgcatgtcctgctgccctgagctgtc

SEQ ID NO: 127258 - DNA, 100 bp, Homo sapiens
ggggaggcagggactcagaggcaacaaaaggtgctactacattccaagaatatcagaaaactggggaactctcaacatccgatcacatatttcccctcac

SEQ ID NO: 127259 - DNA, 126 bp, Homo sapiens
caacagcgaggctttcagttctttggaattccattcttttccttattcttctgatgtggatccagggactgttgacatttagggatgtggccatagaattctctctggaggagtggcaacacctgg

SEQ ID NO: 127260 - DNA, 100 bp, Homo sapiens
tgctgaagttcaagttcgtcttcaattcttgacttgtgtattttcaactctgggatcacctgatcatttcaaagcgccaagaaccagaaccagaacagcc

SEQ ID NO: 127261 - DNA, 98 bp, Homo sapiens
cgagaccgtgaccgagagcgtgaccgagagcgcgaatatcgtcatcgttagaaggatggggcggtcctgcctcagtggctctgctccaactgtcaggc

SEQ ID NO: 127262 - DNA, 98 bp, Homo sapiens
ccaagggagactagttccacgattaagtgttggtgctgttagtagcaaacctactactcctactataggattcatgcttaacaagtctagcatcatca

SEQ ID NO: 127263 - DNA, 89 bp, Homo sapiens
ctccctacgatgagaactggttctacacgcgagctgaaggacagaataacgggctcccagattcacaagccccaccaagaggatcaccc

SEQ ID NO: 127264 - DNA, 74 bp, Homo sapiens
tttaaatgtgcccccaagtatgatgctggtttttcagcagcagacagagaagccagtctggagcttattaaact

SEQ ID NO: 127265 - DNA, 110 bp, Homo sapiens
tggacttctcaactgccattctggattccagaagatttaactacgtggtccgggttgtccttctattcaggccactcttcgttttccatgtactgcatgctgtttgtggc

SEQ ID NO: 127266 - DNA, 75 bp, Homo sapiens
ctgcagcgatggcagcgatgaggaggagtgcagggcctgcgaggtcaaccgccagaaccgagccggctactcggc

SEQ ID NO: 127267 - DNA, 100 bp, Homo sapiens
gggtctgggtgttgaggggcgactggagccatggcggagtcggcgcctgctcgggttactataacaacagtaccaaggtggctgtgaaaaccctgaagcc

SEQ ID NO: 127268 - DNA, 100 bp, Homo sapiens
ggggccgcgctgagggcgcccagctggcttacagcttcgccatgggctgctggcccaagaatggacttctagacatgaacaagggcctcagcctgcaaca

SEQ ID NO: 127269 - DNA, 100 bp, Homo sapiens
aggacttcggcgcgggactcaagtacaactcccggcacgaggctccccttccctgcgggcatatccgctcctctcggtgatcacccgccagcccactgtc

SEQ ID NO: 127270 - DNA, 83 bp, Homo sapiens
cagccttgggcctcgcgccggctatggccgtgccctggggctgagccctcagatgaaggatttgggggcagagcacttggcag

SEQ ID NO: 127271 - DNA, 50 bp, Homo sapiens
caacaagctccaccgtgacttccgggcgtgtctttggtgcaacactaaca

SEQ ID NO: 127272 - DNA, 100 bp, Homo sapiens
ccaccagaaaggaactggaagaaatgatagaaaatctagagccccacattgatgatccagatgttaaaggcggatgtcagatgggctttttctacaaaaa

SEQ ID NO: 127273 - DNA, 100 bp, Homo sapiens
ggcgactcaacaagcggcgcttcccggggctgcggctcttcgggcacagggggggccctcagcctcttggccttgaacgggctgttcatcttgattcaca

SEQ ID NO: 127274 - DNA, 98 bp, Homo sapiens
aggagcatctgaaagacaggtgtgcgtcatgcacttgaagcacctgaggaccctgctgagccctcaggtagcctggtagactcgtctggtcatatcct

SEQ ID NO: 127275 - DNA, 75 bp, Homo sapiens
gcgtgaccgagagcgcgaatatcgtcatcgttagaaggttccagtgggtagtgactcgcaaaatgtggtccagcc

SEQ ID NO: 127276 - DNA, 75 bp, Homo sapiens
ggcacgctcaccaatcgccggtgtgccttgaatgaagatcatcttatcccatgcgtgtgaacagatgcaaggaaa

SEQ ID NO: 127277 - DNA, 83 bp, Homo sapiens
aatttatggtcgcctttttgaatgagaccaaatcgtttactgctcttacatggtttcctggatgagaatgtccattttgcaca

SEQ ID NO: 127278 - DNA, 90 bp, Homo sapiens
cggctccttaccagctcacctctcaccgcgcatgtttggaggtatggaaaagttgaggccactcgcatattgttagagaaaggaaagtgc

SEQ ID NO: 127279 - DNA, 131 bp, Homo sapiens
ccaggtggaccccaagaagaccattcagatgggatctttccggatcaatccagatggcagccagtcagtggtggaggcccgccaagctgccccctgtgtgctattctttgatgagctggattcgattgcca

SEQ ID NO: 127280 - DNA, 74 bp, Homo sapiens
cacagtgcaacaaggacatggtccttaagaccaagaagaatggcggagttgaagtattgataacaccaaggaac

SEQ ID NO: 127281 - DNA, 82 bp, Homo sapiens
gaaagcaaaccaagaacctctctgatggcgtttctcagacaaatggtgaccaagaatatggcccaggtgaccaaagccctgg

SEQ ID NO: 127282 - DNA, 75 bp, Homo sapiens
ctggctcctggtggctccagcagcagcacttgcacctcctgcgccgccgccccccatccaaggatatgccttcaa

SEQ ID NO: 127283 - DNA, 75 bp, Homo sapiens
cgaggatccatctcgtctgctccaggggcaggctggctgaatccattttgcaagggtacctggatgattcaggat

SEQ ID NO: 127284 - DNA, 118 bp, Homo sapiens
ggaagaccgcgcgcagggcctgcagcgggagctggacggcgagcgcgagcggcgcgagaaacaggttacgggcaggacttgagtggcttcggacagggcttctcagaccccagccagc

SEQ ID NO: 127285 - DNA, 83 bp, Homo sapiens
ctcgcgccggctatggccgtgccctggggctgagccctcagagtttatgtggccgaggcagacaagtggaattaggccttgct

SEQ ID NO: 127286 - DNA, 75 bp, Homo sapiens
gcaacccatacctgatccggagaatcgaggagctcaacaagggcctgcggcctcaccatggacccagaatgcgcc

SEQ ID NO: 127287 - DNA, 51 bp, Homo sapiens
aaggattccaagtaactcttatttgaaaggcttcccaactgatgcaactct

SEQ ID NO: 127288 - DNA, 49 bp, Homo sapiens
agagctacgtggacgcaggaactccagctgctgatactttggctgtgag

SEQ ID NO: 127289 - DNA, 98 bp, Homo sapiens
ccccgggagatttaaaccgcgccttactagtgatgtccattcactaggatgagtgatgtagaagctggtggtgccaccgtcttccctgatctgggggc

SEQ ID NO: 127290 - DNA, 75 bp, Homo sapiens
agaagccgagccgcgaggagcgcactccgtggccccgatggagcggtacaaaggtgtggatgaggtcaccattgt

SEQ ID NO: 127291 - DNA, 90 bp, Homo sapiens
aaataaaacagatattacctaccatttacaaagttgcaagaaagctcaagtagcctatggagaggatgcaaggcttccagctgatgccct

SEQ ID NO: 127292 - DNA, 124 bp, Homo sapiens
tcctaatcttcaacaaccacgggaagccgcggctctccaagttctaccagccctacgtttattacccagaactctttgtctgggtcagtcaagaaccatttccaaacaaggacatggagggaag

SEQ ID NO: 127293 - DNA, 83 bp, Homo sapiens
gccacctcaaggataatcactaaattctgccgaaaggactgaggaacggtgcctggaaaagtcttcccaagggattgttgaag

SEQ ID NO: 127294 - DNA, 100 bp, Homo sapiens
agaagacctcctttttccaggctttaggtatcaccactaaaatctccaggggcaccattgaaatcctggccaacctgaccgtcaagctgccagatggata

SEQ ID NO: 127295 - DNA, 90 bp, Homo sapiens
gcccatggagggagtggacatcagccccaaacaggacgaaggcgtgctgaaggacaaggacacactcagcattcactacctcatgctgcc

SEQ ID NO: 127296 - DNA, 79 bp, Homo sapiens
ccacccctcctgtaacccagcctgtttcacttcttggcctggagctgctgaagactgctattgggaaagctggctacac

SEQ ID NO: 127297 - DNA, 82 bp, Homo sapiens
catggtttctctcaggttctgagactctaggcaggctggcaggcaacaccttagggtgccacttctccacttttaagcagtg

SEQ ID NO: 127298 - DNA, 100 bp, Homo sapiens
ccgcggccctgggagctggaggaaccgcgggattggaatgctgaataatggattggaatgttgaataatgttgaataccttcctatggtatcctccctaa

SEQ ID NO: 127299 - DNA, 97 bp, Homo sapiens
tcttgtgacagaagacattgcattgcctcttatgaaggttaatgttcgtgaagaaattgaagagttttttccaagaatgtggaagataaatcaagat

SEQ ID NO: 127300 - DNA, 100 bp, Homo sapiens
atgctgtatccaatgctcaggtgagaggtgatagctatgaaagcggctgtttaggaagaacaggtgcagatgctaatttcagtgtctggattaaaaggtg

SEQ ID NO: 127301 - DNA, 75 bp, Homo sapiens
ggaaaaagttatcagttttatagagaatacatcaactcctgtggatcgaaagatgttgtgtccctcctggtgagc

SEQ ID NO: 127302 - DNA, 75 bp, Homo sapiens
agcgccggcccccgctcctgctgctgacggcgcccagggggggccctcagcctcttggccttgaacgggctgttc

SEQ ID NO: 127303 - DNA, 75 bp, Homo sapiens
cgggacaagaaaattcatgcgcctttctgagaaaagtctacagcattctttctctgcaggttctcttaactacag

SEQ ID NO: 127304 - DNA, 90 bp, Homo sapiens
ggacgtgttagacaagttcatgagattcatgatgttgctatcaaaagttgagaaattgtcagaagaaatcatggagataatgcaaaattt

SEQ ID NO: 127305 - DNA, 82 bp, Homo sapiens
cggctatctgcactcccacaggcacctctaccccgagggcattggtgcccgtcagcagcagatggctgatcactgggaaact

SEQ ID NO: 127306 - DNA, 88 bp, Homo sapiens
gaagattcagatagctacaaaaggcaggctgcacctgaggtggaagttgatgggtcgaaactaaatgtgaccagcacgtggaacctgg

SEQ ID NO: 127307 - DNA, 83 bp, Homo sapiens
gagttcgagcagatcgacaagtccgggagctgggcggccatttaccaggtattactcagcacagaaattcaggagacacagac

SEQ ID NO: 127308 - DNA, 89 bp, Homo sapiens
aaaactgggtgcagagggttgtggagaagtttttgaagagggcgaggaggcttccgaggaggcagaggaggaggaggtgaccacaagcc

SEQ ID NO: 127309 - DNA, 50 bp, Homo sapiens
tccgcagtaccgacgcctgcaggttggtgttcgaggaagagacattgttg

SEQ ID NO: 127310 - DNA, 75 bp, Homo sapiens
taccccatcgcggtgctcatagacgaactccgcaatgaggacgttcagacagtggtgaccgaggattttagccac

SEQ ID NO: 127311 - DNA, 83 bp, Homo sapiens
ccgggacccggtgtctgctcctgtcgccttcgcctcctaatccctagccactatggatgataatgaagataattcaaatgatg

SEQ ID NO: 127312 - DNA, 80 bp, Homo sapiens
gtttttgtccgtgtcttcaccggccaggccaaggtcaaggcctcagccaggaggcagtcgggctccttcctcagcaccgg

SEQ ID NO: 127313 - DNA, 100 bp, Homo sapiens
aaaaacaatagctcaaggaaacctttccaacacagatgtccaagctgccaagtcctactgctctgttggctcatgaaataggttttggaagtaaagttac

SEQ ID NO: 127314 - DNA, 75 bp, Homo sapiens
agacagggttttgccatgttgaccagcctgagcctcctgagtgacagaaagggcctgacccggagggagcggcgg

SEQ ID NO: 127315 - DNA, 84 bp, Homo sapiens
caggaccatgtcaagtagagatttgctcaatgcattgaagtcagtcattaatgaccctatgtctgctggagtttgctggaggtc

SEQ ID NO: 127316 - DNA, 106 bp, Homo sapiens
gtgcgttccatggatgaactgaatcatgattttcaagcacttgctctggagggaagagcgatgggagaggaacgtcaaggtcgtgggaaataaaaggcagttctac

SEQ ID NO: 127317 - DNA, 103 bp, Homo sapiens
ccggaagcccagcgcggagccggccgcggccccctgttgtgttgctgcggagagtttccatagcaaggcgtgtacaagatccattagctgagctagtgaaaat

SEQ ID NO: 127318 - DNA, 87 bp, Homo sapiens
cgacgacgcggaggcagagaagggaacgcccggcccagccccgtttaagaaaatctacgaagaaacgcagtgagtctccacctgctg

SEQ ID NO: 127319 - DNA, 80 bp, Homo sapiens
tgaccgagagcgtgaccgagagcgcgaatatcgtcatcgttagaagaccatatgatgtcctgaaaattcttccacaatat

SEQ ID NO: 127320 - DNA, 75 bp, Homo sapiens
catttacaataagaagagaagatggacagtttcagtgcattacagctccttcgagaactcatagaacggaagacc

SEQ ID NO: 127321 - DNA, 85 bp, Homo sapiens
accgaagcttacattgacagcactaccaaagagaaccctgtacagtaagaaatatggtgtggacctcatcagatacactcatgca

SEQ ID NO: 127322 - DNA, 73 bp, Homo sapiens
attcaacggggttccggaccgcgctgcgctatggagcagctgagctgactgctgcccactttggaggaggcgg

SEQ ID NO: 127323 - DNA, 96 bp, Homo sapiens
agtgaaggcgcgatatgaacgttttgttaagtcacgtgaactggaaatttcagtttattggcgtgattggcggtctctgtgtgctgtaaaatttct

SEQ ID NO: 127324 - DNA, 100 bp, Homo sapiens
agttcgttatggactgatccctgaggaattcttccagtttctttatcctaaaactggtgtaacagccgggtgggcttggactgggcgtgctccatggcag

SEQ ID NO: 127325 - DNA, 82 bp, Homo sapiens
cgcttcctgacgcagccgcaggtggtggcgcgcgccgtgtgcttggatcgtagggcatcagaaaaacaaaaagaaatagaga

SEQ ID NO: 127326 - DNA, 100 bp, Homo sapiens
caccttcaaggccgtcagacaaggaattgcattttgtgaaaaaagaacaagaattttctgcaaggatcatatctaagtgcactttttgctgatacttcat

SEQ ID NO: 127327 - DNA, 100 bp, Homo sapiens
atcagtgcccttgtggcgaatggggctcacgtcgaagtgcctggaagagctgggatgtctggttgagtcctatggcatgaatgtttgccaaccaacccca

SEQ ID NO: 127328 - DNA, 80 bp, Homo sapiens
gtcttcggcatcgggcgacagcaggtcacagtggacgaggtgttggcggaagctttccccacaaataaaccagagaaaga

SEQ ID NO: 127329 - DNA, 82 bp, Homo sapiens
cgctttgttcagctgcagcatggagagatagataaacgggagtggagtcaacatatcaatggagcaagtcacagtcgtcgat

SEQ ID NO: 127330 - DNA, 82 bp, Homo sapiens
ccaccgctgccctcagctccgagtccagggcgaggtctcggcgcggaagatggccggcggcgtggacggccccatcgggatc

SEQ ID NO: 127331 - DNA, 83 bp, Homo sapiens
cgccacctacccagtgaccatgatagaatttgccattttcagtggaaaacaagtggtcgttactagctaagatgtgtttgtac

SEQ ID NO: 127332 - DNA, 75 bp, Homo sapiens
cagaagctaaagcaggccaagtctccatcatcaccagttccagtagtgaaaaacagaacccaacaaactcaaaat

SEQ ID NO: 127333 - DNA, 98 bp, Homo sapiens
gagaaggcaatatccaatatttatttctggagtactgtagtggaggagagctttttgacagaataggattcactccttctccagttgcacagccacac

SEQ ID NO: 127334 - DNA, 100 bp, Homo sapiens
acatctacgccatcgcagacacggcctaccggagcatgcttcaagccacaatggtgcgcatgaatgtcctggcagatgctctcaagagtatcaacaatgc

SEQ ID NO: 127335 - DNA, 50 bp, Homo sapiens
gcccttcacgctccaggagctaggtgccgtgagcgatgtggagatgcagg

SEQ ID NO: 127336 - DNA, 110 bp, Homo sapiens
atcttatcaaatcagaaaactatgggaagattttggtagagaagaatgaacattgtattgagaacaatatagatttgcagcaggtaattgctgccatggaaacacaactg

SEQ ID NO: 127337 - DNA, 96 bp, Homo sapiens
gttttgcgcaccctgccgggagttgtagtcctggacccgaaggtcaccatcagaaaagctaagtttgctgtatagtgaggatcaggagatctgatc

SEQ ID NO: 127338 - DNA, 100 bp, Homo sapiens
cggatattcagttgcacatccccacatcaatgcactgccaatgggggacttgatctcatcttcatgccaggccttgggtttgacaaacatggcaaccgac

SEQ ID NO: 127339 - DNA, 100 bp, Homo sapiens
acaggaagttcctgcatttactgaacctgacacgactgcagaggttaaaacaccttttgatttggccaagagtaaacatcagtctccaaagataactaca

SEQ ID NO: 127340 - DNA, 100 bp, Homo sapiens
agtgcaagtcgatcgaggtcaagaacacgatcacgttctagatcacatactccaagaagacaggtgtccgcaatgttgccagtgtctgtctgcagattgg

SEQ ID NO: 127341 - DNA, 100 bp, Homo sapiens
ttggggtttccggctgcagggcggtaaggatttcaacatgcctctgacaatctctagtagtggactcacatccttacaccttgcagcccaggaagataaa

SEQ ID NO: 127342 - DNA, 51 bp, Homo sapiens
tagtaacgtcatggaggatgaacgacagctgtgatgcagatccatccgccc

SEQ ID NO: 127343 - DNA, 100 bp, Homo sapiens
tcgcccaggagccggagcagcggcactgcctgtccgggaccatgtctggagaactaccaccaaacattaacatcaaggaacctcgatgggatcaaagcac

SEQ ID NO: 127344 - DNA, 89 bp, Homo sapiens
acgacttcgtggactaccatttggttgcagcaaagaggaaatagttcagttctttcaaggaggagatgttaaagtaacccatcttgcag

SEQ ID NO: 127345 - DNA, 82 bp, Homo sapiens
tttgttactcttcagtacaatgtcaccctcccagcaacagggctacagaactggctacccttatcgataccctgctctgaga

SEQ ID NO: 127346 - DNA, 50 bp, Homo sapiens
ctttggacctgggcgatcgtggtgtgaggcatttcatccttcatgaagcc

SEQ ID NO: 127347 - DNA, 100 bp, Homo sapiens
caccaactggaaaaccttgtatgaggtcaaatccgagaacctgggccaaggcgacaagatccgctgttgtaccaggggtctaatcaggcctgtgtctgcc

SEQ ID NO: 127348 - DNA, 128 bp, Homo sapiens
attggaggtgtcagtgttaaaggaacctctacaacgaaggtgaagccacggaagataagatatggctcgtggacagcagaaaattcagtctcagcagaaaaatgccaaaaagcaagctggacaaaaga

SEQ ID NO: 127349 - DNA, 97 bp, Homo sapiens
tttcaacccaacaggaagtgaaggcaagaatcaagaggatggttttcaattgttggaattggaagcggaacaaaaatgttgaccagtatgttgtcag

SEQ ID NO: 127350 - DNA, 100 bp, Homo sapiens
cagctctacagcttacctcctgaagctgacatagcccagagatacaggataagcaaatacccaaccctcaaattgtttcgtaatgggatgatgatgaaga

SEQ ID NO: 127351 - DNA, 100 bp, Homo sapiens
aggatgcttggattgtctgcttcaagccctggctcaaaatagtattaccagagaaacggagtctgaaactcttgaagagccacaatctcaatgtgaattg

SEQ ID NO: 127352 - DNA, 100 bp, Homo sapiens
cccgcaggcaccgggagatccagaagtgaaacgccaggctctctggaggccaggagatgatctacccccccatcaacgtgctcccttccctgtcgcggct

SEQ ID NO: 127353 - DNA, 98 bp, Homo sapiens
ctgcttttggttcttacagtagtcggcgtaggccttagaccatagcccagtggcgtaaagctggctaccaggacatgcccgagtatgaaaacttcaag

SEQ ID NO: 127354 - DNA, 101 bp, Homo sapiens
ttgggggcttcctcactcgtggctttccgaaggctgctggaccctgatgctcccataagacagaaaatgccccttgatgatctggatagagaagatgaagt

SEQ ID NO: 127355 - DNA, 82 bp, Homo sapiens
caggcggcggtggcagccatgttgttgtgtcgtgaaaactacccctaaaagccaaaatgggaaaggaaaagactcatatcaa

SEQ ID NO: 127356 - DNA, 75 bp, Homo sapiens
acgacgacgaggaagaggaggtttctgagtggtagtcgctcttctaaaacttttaaaccaaagaagaacattcca

SEQ ID NO: 127357 - DNA, 98 bp, Homo sapiens
tggagtgcctccaaaggttgctgaggatccagcattcggaggcaaacatgaagctccatcctctccaatttcggggcaaccatgtggagatgatcaaa

SEQ ID NO: 127358 - DNA, 98 bp, Homo sapiens
acaggaggcagaagctccaggagcagttgctggtgctgctgaagtccctagggaaccaccaattcttcccagaggatgtaggaagaagctggtctgct

SEQ ID NO: 127359 - DNA, 100 bp, Homo sapiens
atttcctggttggagggacagccccaggatgccgtgggccgcagccactcaggactgtcaaagacaatgcagatcttcgtgaagactctgactggtaaga

SEQ ID NO: 127360 - DNA, 89 bp, Homo sapiens
tgagaaaggtgaaccaactcaaactaagtgaaaccagcagtgtgtgtagcagcagtgacactgggctctttaccaatgatgaagggcga

SEQ ID NO: 127361 - DNA, 75 bp, Homo sapiens
aaattatagagctaattacaactttcggggcatgtacaatcagaggaaccagcagcacaaacactgttggggcaa

SEQ ID NO: 127362 - DNA, 100 bp, Homo sapiens
tcttccgactgatccagctggtggtcctggtctacgtcatcgggagaagaaataccacttgcaggagagggttgacaaagtaaagaagaaagtgaaagat

SEQ ID NO: 127363 - DNA, 83 bp, Homo sapiens
gcagcacggtgcccaggacacagagctcagtgcaggcactggcaacttctatttgacgaagttatacggaagcgtctcctcat

SEQ ID NO: 127364 - DNA, 74 bp, Homo sapiens
ttatgaccaagtacctcaccccaaagtttggatttaggtggcgagtagaaaaagaagtaatttcaggaaaaggt

SEQ ID NO: 127365 - DNA, 75 bp, Homo sapiens
gtgttcgactgctagagccgagcgaagcgtagctacagcaagctgggtagcaggcagatccaaaggatatcatga

SEQ ID NO: 127366 - DNA, 80 bp, Homo sapiens
actggctgttgaccctgttcaggcctcggtgaaggtcaaaatgcagatcttcgtgaaaacccttaccggcaagaccatca

SEQ ID NO: 127367 - DNA, 83 bp, Homo sapiens
cgccatcttggatccgcgggacaagaaaattcatgcggtcagcccaaggccaaccccactgtcactctgttcccgccctcctc

SEQ ID NO: 127368 - DNA, 96 bp, Homo sapiens
ggtcggcgctgggctggaggcggcggagcgcgagagcttcgagcggactcagggttttggccaaattgggcgagggcacaaaataaccacttaccc

SEQ ID NO: 127369 - DNA, 83 bp, Homo sapiens
gggaaggtggagccaccagcctctccttgaattaaacaaccaccatgtcgagcaaaaaggcaaagaccaagaccaccaagaag

SEQ ID NO: 127370 - DNA, 74 bp, Homo sapiens
attcgcagtggtcgcttcttctccttggtgctgttgtcaagaccaatgccaatgcagagaagacagatgaagaa

SEQ ID NO: 127371 - DNA, 95 bp, Homo sapiens
gccagttttctaatggattattgttatcgggcaggttttctctgaagccttgcatccaagggtccttaagccgttgtcttcattgattcatcttc

SEQ ID NO: 127372 - DNA, 75 bp, Homo sapiens
aaaactccctccaaaggatctaagaatcaaaacttcggtatttaccttgctgtggattgctgactggatggtcca

SEQ ID NO: 127373 - DNA, 76 bp, Homo sapiens
tgagcgaggacgaggtgcgccggctgatcggaactttccgctgtactttttgccatacagaggtagaagaggatga

SEQ ID NO: 127374 - DNA, 117 bp, Homo sapiens
ctgctgctgccctggttccccggccccacccgatgcggcctccaaggtgaccctggcaaagatgagagtgcacatttcgtcctgcctgaaggtccaggagcagatggccaactgccc

SEQ ID NO: 127375 - DNA, 87 bp, Homo sapiens
cgaagtgcgcaaacttgacactcaccctgaccgtgacagctggagtatcagccttggaagtatatacgccaaaagaaatcttcgtgg

SEQ ID NO: 127376 - DNA, 100 bp, Homo sapiens
tgattatatacaacaaaaaatagttatggcgactttcagaaacaatcacatgaagactaaagcatctgtcagaaaatcagatgagtgagcctcatagcgg

SEQ ID NO: 127377 - DNA, 75 bp, Homo sapiens
ccccgagatgagaggagaagagcccagcacaacgaagggaaggatggagacgctgaaggataagaccctgcagga

SEQ ID NO: 127378 - DNA, 90 bp, Homo sapiens
cgactctgaaggcatggaccctgagcgtcttaaggccttcaacagtgctgccctgcccaggaggtacatgctgcgggagcgggagggggc

SEQ ID NO: 127379 - DNA, 100 bp, Homo sapiens
ttcaggatctacaagtccgtcatccaagctgtacagaagtcagaagaaggccatccattcaaccttgcccggcagaggactctggaggatgaggaggaac

SEQ ID NO: 127380 - DNA, 100 bp, Homo sapiens
gtttttgcagcctttcgcctagcgtggccttcaggattaaagcaaggagagccaatcatgactggcaaaacacagaccagcaacgtcaccaataagaatg

SEQ ID NO: 127381 - DNA, 82 bp, Homo sapiens
ccagttccaaagtgtcttaaaggagctggaagacctgaacaaatggggtcttaacatctttaatgtggctggatattctcac

SEQ ID NO: 127382 - DNA, 100 bp, Homo sapiens
gtcaagttggctgaggcacaccagcaggagtgctgccagaaatttgaacaactttccgaatctgcaaaagaagacacgttggtcgtcattgcctccgagc

SEQ ID NO: 127383 - DNA, 105 bp, Homo sapiens
cccacatcaggacagctgttccttggccatcccaaagctattctgggggcaacagaggattcgctaaatattgtaatggatcaaggagatacacctacactagag

SEQ ID NO: 127384 - DNA, 75 bp, Homo sapiens
aacaacattggctcaatagcaagaatgtgtgcccttaatgaatgggctcgggatgagtttgaaggcctcttcaag

SEQ ID NO: 127385 - DNA, 83 bp, Homo sapiens
cagacagcatatttgagtcatttccttcgtacccacagtgcttcatgagagagttcctggaataactattgctacagatatta

SEQ ID NO: 127386 - DNA, 50 bp, Homo sapiens
cctgggcgtgctgctgctcgacaccatcacaaccaggattggagttgctg

SEQ ID NO: 127387 - DNA, 101 bp, Homo sapiens
tgcagtccctgcttcctgccctccagcggcgccatgagcaaatgaaaaagaatttggaagcacagcacaaagaattggaggaaaaacgtcgtcagttcgag

SEQ ID NO: 127388 - DNA, 71 bp, Homo sapiens
acgctatggcgcactggagtaccctgttcctggcagtggcctgtgagaagaccgtgtctaccttgcaccac

SEQ ID NO: 127389 - DNA, 100 bp, Homo sapiens
gagatatggtttgaatatgaaggcacaccactgaaatgcccctcggaaaccaagccctaagggtctaccaaacagaaagggagtccgagtgggatttcgc

SEQ ID NO: 127390 - DNA, 100 bp, Homo sapiens
cgattgcatcagcaatgtggcgcacgtgagtgagatcattggccgagacctgagtggcttccctgcacctcctggagaagagcctcctgcctgaaccacg

SEQ ID NO: 127391 - DNA, 106 bp, Homo sapiens
tgaagatataacaagatcagcaaatctaactgaccaggttcgatacaagaggctgttttcctagcgtggcttgctgcctttggtaagaacatgtcgtccatcttgc

SEQ ID NO: 127392 - DNA, 90 bp, Homo sapiens
aagacaagagccgccctgcccagaaacgtccacatgtgggtactgcattcctaccggtgtgacaggaggtgaggagcgcctctttccggc

SEQ ID NO: 127393 - DNA, 126 bp, Homo sapiens
ccctgcctccgcgtcgcagcccccgccgtagccgcctccgagcccgccgccacatcctctgagttcaaatctgaacatcaatgatgtactagggaactactcattgactcttgttgatgcattgga

SEQ ID NO: 127394 - DNA, 102 bp, Homo sapiens
gaggacctggagaaactgggaagaatgtgaccaagaatatggcccaggtgaccaaagccctggacaaggccctgagcaccatggacctgcagaaggtctcct

SEQ ID NO: 127395 - DNA, 51 bp, Homo sapiens
ggcctccccagccatgtggaattgcgcagtcatgcaggaaaacctcagatt

SEQ ID NO: 127396 - DNA, 50 bp, Homo sapiens
gcacctctgtttgggggtcctcaggcaagcttgggctttagttggtgtca

SEQ ID NO: 127397 - DNA, 73 bp, Homo sapiens
gcagtggtcgcttcttctccttgaagttttcatgggctgagctgctgagttcagcctgggaactgaggccaac

SEQ ID NO: 127398 - DNA, 90 bp, Homo sapiens
agacaagctcagaactgagaagctgtcaccacagaaacctctgtagaggagcaggatgcaaccgacaggctgtggccggacagctgctgc

SEQ ID NO: 127399 - DNA, 82 bp, Homo sapiens
tctcgctctgggtctccaggcccgcgaccgtccgccagtcgtcccgaggggacggcaaaacagaacagaaaggcggagataa

SEQ ID NO: 127400 - DNA, 75 bp, Homo sapiens
gacatactctccagcttcaaacttgggaagatccccatgaaaaagataagagcacgaactgctttggagataatg

SEQ ID NO: 127401 - DNA, 51 bp, Homo sapiens
gacctcgaccagctgctggacatgtcctaagcgacaccacaggcaagctgg

SEQ ID NO: 127402 - DNA, 100 bp, Homo sapiens
cttgtgggtgtcacggggagtgtcgcagccctgaagttgcctcttctggtgtcaaagcttttggacattcctggggtcaacaacggttccagcctcaggg

SEQ ID NO: 127403 - DNA, 73 bp, Homo sapiens
cggaagaaacctgccacagatgggaaggtgtcttgctgcaggtaactaatgaagaagtggtcaaccacagagt

SEQ ID NO: 127404 - DNA, 90 bp, Homo sapiens
ataaatgcaaaacagtggctgttgcaggtttgttatccaggcataagaccaagaaattatcttcagaaaaggacattcatgaaatcagtt

SEQ ID NO: 127405 - DNA, 102 bp, Homo sapiens
ctgggattggagattccacccaaacttgctggtcactgggagcagcccctgtcaaagggaacaggaagcagtccacggagggtgacgccctagacccacctg

SEQ ID NO: 127406 - DNA, 97 bp, Homo sapiens
ttcatagcatgcggtggtgaagatggattactgaaagttttgaaattagagacgcagacagtggctgacaagattttgaaaaagaaagaataccctc

SEQ ID NO: 127407 - DNA, 100 bp, Homo sapiens
agaatctggtaaaagcaccattgtgaagcagatgaggatcctgcatgttaatgggtttaatggagaactcagattgatggacaacttttcttaattaagc

SEQ ID NO: 127408 - DNA, 49 bp, Homo sapiens
ggagatatggcgcaactgcggcgcgtaagaatgattgatgttggctgat

SEQ ID NO: 127409 - DNA, 100 bp, Homo sapiens
ggagcccgaccccctgcagatgccaaccttcccgccagactacggcttccccgaacgcaaggagcgcggtgcagctgaatgccggccagctgcagtatat

SEQ ID NO: 127410 - DNA, 74 bp, Homo sapiens
cgtcgccgccgccgccgccgccgcagcttgggaggtgctgccaccacagatctccatttttaggtatgagaatt

SEQ ID NO: 127411 - DNA, 75 bp, Homo sapiens
gtgctaaccattgcacacagattgaacaccattattgacagcgacaagataatgtgcacttggaggctcctcagc

SEQ ID NO: 127412 - DNA, 74 bp, Homo sapiens
cgcagtggtcgcttcttctccttgccgatatttaaataaggcttttcatatctggtccaagaaagaaaaattct

SEQ ID NO: 127413 - DNA, 83 bp, Homo sapiens
gccgtgcgcatgtttgctgactacctcgcccacgagagtcggagctggcccggtgatcatgtccattgaggagaagatggagg

SEQ ID NO: 127414 - DNA, 75 bp, Homo sapiens
gaaatttcagacatacacaccaaattgttgagaccacaagtatatggttatgatgacttgcagatgcttcagaca

SEQ ID NO: 127415 - DNA, 98 bp, Homo sapiens
ctgtctgataactgactctgatctcaacattttggctgaaatgatgattattctccaccgtctaagagaccaaaggccaatgagctaccgcagccacc

SEQ ID NO: 127416 - DNA, 75 bp, Homo sapiens
cgcctacaagttcacgcccaagtacatcctgcgcgccggccagatggtcacggggacggcaaaacagaacagaaa

SEQ ID NO: 127417 - DNA, 74 bp, Homo sapiens
gcgcaaaagttctgaatggcatccgtcctaccggaaacctaggaaaagccttgtagcagtacctgggaacctgc

SEQ ID NO: 127418 - DNA, 100 bp, Homo sapiens
ttctcctgcaccgacgacgtgtttgcctgctttgccactcccgccgtctcgtggcgcctcctgtctgtggtttaattggttggggtcagataagaagagg

SEQ ID NO: 127419 - DNA, 83 bp, Homo sapiens
gtgtcgcatgatccgccactcaagagacaagaaaaatgaacccaatcctcagaggcatacccagatggaagtagcaaagaaaa

SEQ ID NO: 127420 - DNA, 89 bp, Homo sapiens
ctcccgaattccagtcacttttcacagaaggactgaagagtctgacagattttaggtgatgggcaagtcagaaagtcagatggatataa

SEQ ID NO: 127421 - DNA, 73 bp, Homo sapiens
aggggcttacgcagaaggacctggccacggccaacgagacttttgcttttgtgggcaacgtgactcactatgc

SEQ ID NO: 127422 - DNA, 100 bp, Homo sapiens
atcacattaattcatatgaccatgctcacaagcaggttttgaaaacattgaattgactcctcttgctgcaatatgtgtgaaaatatattctggaggaaaa

SEQ ID NO: 127423 - DNA, 51 bp, Homo sapiens
cgcagacatcttcagccgctgccagagcatcatctactacgtgagccgctc

SEQ ID NO: 127424 - DNA, 100 bp, Homo sapiens
catccctgtcattgagaacccccagtacttccgtcagggacacaactgccacaagccggacacgtgacctcagcagccatgtcgaagccccatagtgaag

SEQ ID NO: 127425 - DNA, 95 bp, Homo sapiens
agacagcatatttgagtcatttccttcgtacccacagtgcttcatgagaggaggcaagtgaggcctatctggttggcctttttgaagacaccaac

SEQ ID NO: 127426 - DNA, 74 bp, Homo sapiens
ctcgactggcagcgcgggaaacgtcaaactcgagcaaactgaaaccgtgtcagttcagtcttcggtattgggga

SEQ ID NO: 127427 - DNA, 51 bp, Homo sapiens
cttcgaagtgtgtgccactgtttataccagtgtgcaacttgctttggtgtt

SEQ ID NO: 127428 - DNA, 75 bp, Homo sapiens
ggcccacctgctgacatctacctgccaggctaccggctctctgaccagttccacgacatcctcattcgaaagttt

SEQ ID NO: 127429 - DNA, 104 bp, Homo sapiens
cctggagcctcagttggaagcagccgatccagcctgcggagcctgtggggcagggaaatgatcttcattggttagcatgtgccttatatgtggcttgcagaaaa

SEQ ID NO: 127430 - DNA, 76 bp, Homo sapiens
gggagaatatttaatggaaaatcgcttggttaaaacctgacacttttaacagatctctggaaacatggctacagaa

SEQ ID NO: 127431 - DNA, 75 bp, Homo sapiens
cagagccactgtctgaagaagctggtggtgtatggcagaaacggtggacacaagcgaaatggtcaacggcgctac

SEQ ID NO: 127432 - DNA, 73 bp, Homo sapiens
agcacggacagactcatggggaagggccaggtccagcccgagaccgaggacgagaagaagcgctttgaggaag

SEQ ID NO: 127433 - DNA, 80 bp, Homo sapiens
cttcatcttacccagtggaacctaagaaattaaattctccagaaatggtggagtcaatgaagaaagtagcagggatggat

SEQ ID NO: 127434 - DNA, 85 bp, Homo sapiens
agaacaatgactgctgtgggtgctgcggcaacgagggctgtgggaagcgatttgcggaacaagatcactcaaggtgaaggataat

SEQ ID NO: 127435 - DNA, 75 bp, Homo sapiens
atcaggatactattccaagaggactttcaaatggtgaagaaacaccccggagagcttagcagtgtctgcaaaaac

SEQ ID NO: 127436 - DNA, 101 bp, Homo sapiens
cgccattgtcggctactgcgacgccaaatacgtctgggcagccacggccgggggcgtctttcagagcattacggctccagggagttccacgctgtccagtt

SEQ ID NO: 127437 - DNA, 80 bp, Homo sapiens
acagtggccttctgatgaatactttaaaatatgagttggaagtaaagagggtgcaagacattctttcgggaatagagaaa

SEQ ID NO: 127438 - DNA, 98 bp, Homo sapiens
ggcagagcagggcggcggcgactcgatgcagattctgcccaagaagcccctgcattgcagagggactggagatctgtatgatctgtttatttcgcaat

SEQ ID NO: 127439 - DNA, 114 bp, Homo sapiens
actggcaaagagtcacctaaagttaggcggcactccagccccagctcgatcttgtagaaaatttcagctgtagcccttggactagaagctgaaataacagaagctgtgtacgat

SEQ ID NO: 127440 - DNA, 75 bp, Homo sapiens
acactgaagatgaagcaaggcccaatgacccaggcgcagggagagcaacaagccccggccctcagagctcagccg

SEQ ID NO: 127441 - DNA, 74 bp, Homo sapiens
tcggaatgggcattgtcgccaattttcaggctgacaaaccaagaggatttgccagaggtcttgatcctgaaaga

SEQ ID NO: 127442 - DNA, 83 bp, Homo sapiens
ggtggacagaaagtcagcctcttgtgcatacagtgaagttgttctctgaagttcctcatctgccttaagtctggacccaccaa

SEQ ID NO: 127443 - DNA, 101 bp, Homo sapiens
cttacacatcccctgataaactaaagggcacttccttactttgtggcagtactggattctccaggctcatcttatatatttcctgtcctcctagattctgc

SEQ ID NO: 127444 - DNA, 100 bp, Homo sapiens
tctgggagaaacctcgtggcctggtctccattatttgagatgagttacatcttggaggccggaaggtggtggtcgtacgctgtgaaggcatcaacatttc

SEQ ID NO: 127445 - DNA, 75 bp, Homo sapiens
tagacatgggggcctcaaacgtggagatcaactcctctctgttaatggagtgctccatggtgcaatgtatggaag

SEQ ID NO: 127446 - DNA, 51 bp, Homo sapiens
ctctacttagctcagcaattcttaccttatgtgattcagcactgccagcga

SEQ ID NO: 127447 - DNA, 73 bp, Homo sapiens
aagcatataggtttggtgtacagtggcatgggccccgattacagtaatccttcccctctaccaccggatatgg

SEQ ID NO: 127448 - DNA, 100 bp, Homo sapiens
ccaaggtgttcggtccttccgaggaagctaaggccgcgttggggtgagaccctcacttcatccggttggaagcgagatagagaaaaaagggatgatcaag

SEQ ID NO: 127449 - DNA, 75 bp, Homo sapiens
ccttgttggtttgggatttgaagaacacactcctgtggaagaggtccctgctgctattgccccattccaggggag

SEQ ID NO: 127450 - DNA, 83 bp, Homo sapiens
cttgccgccctgcactgccgcttcggtcactatgtgggccaaactgaaattgcagaaggcttcagaacgatggcagcctgaca

SEQ ID NO: 127451 - DNA, 83 bp, Homo sapiens
ggtccagctgctgagccagtatgacaacgagaagaagtgggagctcatctgtgatcagcgaccccgataacgtggtgttgtgc

SEQ ID NO: 127452 - DNA, 100 bp, Homo sapiens
gtcctcctggcctcagcaacctgacaattctgtcgtgtcccgctgggctcaaaatgcagagaactcaaagatattcatttcggccagtgttacaagatct

SEQ ID NO: 127453 - DNA, 136 bp, Homo sapiens
ctccaaatcacacatctctgagcattctggggaaaagaaactacagtcatcacaatggtctggatggaagagcctaggctggatgtcttgatcaataacgcagggatcttccagtgcccttacatgaagactgaag

SEQ ID NO: 127454 - DNA, 75 bp, Homo sapiens
gtcgcgtctcggaaaccggtagcgcttgcagcatggggagcccaaagaagtgtgaagctgaagaggcagagccac

SEQ ID NO: 127455 - DNA, 75 bp, Homo sapiens
gaagacttctggccgccgcagcccaagctgtacaaggacgtcttcctcatctgcttctccctcgtcagcccagcc

SEQ ID NO: 127456 - DNA, 74 bp, Homo sapiens
gctcggccgatgaagtgcagaggtttttttctgggtgtacaactatgagcctttgacacagctcaagaatgtca

SEQ ID NO: 127457 - DNA, 90 bp, Homo sapiens
tggaacagacgagtacaacagcggcgtcatctgtgagaacacctgcaagggtccccacggagtctggaccatggaggagcgaggtctggc

SEQ ID NO: 127458 - DNA, 131 bp, Homo sapiens
accagtgccgctgggcacactggcttcacgccggctccgcctcaccagcaagcgcattcccagggacgggtcgcattatgttgcccaggctggacttgaacttctgggctcgagcaattctcccacctcag

SEQ ID NO: 127459 - DNA, 83 bp, Homo sapiens
cagctgccgaacgacgtggtcctacagaattgtcaacatcacactgctggtgacttctgtgaacgatgtgctcttggatacta

SEQ ID NO: 127460 - DNA, 82 bp, Homo sapiens
gtagggagctcccccagcaccgaagactgcgatgtgagggagactctgatgtggactcggagctggaggaccgtgttgacgg

SEQ ID NO: 127461 - DNA, 98 bp, Homo sapiens
tccgaaaggatgatgaagttcaggtgtgggcccatcgctggatggatctgtcagaacacggctttgggctggccctgctcaacgactgcaagtatggc

SEQ ID NO: 127462 - DNA, 90 bp, Homo sapiens
gccgctcctaagcctgcacagccgcggcggcagcagcagtgagagatgaaggtcaccgtgtccaaagggggcgaccgggacagtgacgac

SEQ ID NO: 127463 - DNA, 82 bp, Homo sapiens
tcctgagcagagctctccgggttccccggctcgcggggcccggcgaagggcaggatttccagatgtgacttgcactcagaag

SEQ ID NO: 127464 - DNA, 83 bp, Homo sapiens
caaatttacatgtattggagaccagaccagaagcccttctgaattaaggaggaaatctctgacatcaaagaggaggggaacct

SEQ ID NO: 127465 - DNA, 75 bp, Homo sapiens
gtttgtagaatggctcaaaaatgctgaagaagggtggcccagttgaaatccttcccttcctctaccttggaagtg

SEQ ID NO: 127466 - DNA, 100 bp, Homo sapiens
cagaagtagcatggaaatggagggcatcttcaaccacaaaggtatgatctcgtgaaaccttgagagaaactgaatgacgaatgaaactattgttcctgtt

SEQ ID NO: 127467 - DNA, 75 bp, Homo sapiens
ctgtgtccaggccccgggttctcagcactatgttggccatggaaatgctatcaatgagctgaaattccatccaag

SEQ ID NO: 127468 - DNA, 75 bp, Homo sapiens
atgctttttattacaagactacggagcataggaggaaaattcatcatctgatgaaggatttgggggcagagcact

SEQ ID NO: 127469 - DNA, 75 bp, Homo sapiens
ttgtgtcaccatgctattatgcatagaaagggtattcattcaggagaaggaccctacagatggagggaatgcagg

SEQ ID NO: 127470 - DNA, 90 bp, Homo sapiens
cctgcacctgtctggcctgggcgccagcgcggctgcaggccaagactggtgaattttcagctcgtttccttttgaagctgcccgtagatt

SEQ ID NO: 127471 - DNA, 83 bp, Homo sapiens
ccagaggccaactgcagaggaactggaacagaggaacattttgaaacacaatgcagatcttcgtgaagactctgactggtaag

SEQ ID NO: 127472 - DNA, 100 bp, Homo sapiens
agcagccgcgcctgcagaccggcctcgcggagcccgcgcgccgagccccacttcaaatctgaacatcaatgatgtactagggaactactcattgactctt

SEQ ID NO: 127473 - DNA, 101 bp, Homo sapiens
gatgcagaggagcgagctgagcgcctccagcgagaagttgagggagaaaggcgggcccgggaacaggttctcatcccaggccttgtggagggatctaccaa

SEQ ID NO: 127474 - DNA, 98 bp, Homo sapiens
gggaggaagccctttctcctcggcactgtattctttacctgcttcccaatcccactgatgaggatcagcccatgggacatgggactggagttatttag

SEQ ID NO: 127475 - DNA, 87 bp, Homo sapiens
gccgagatcgtgctggccacgctgcgagagtggctggagcagcacaaggacaaggatctcgaggacctggaagaagcagaggagcca

SEQ ID NO: 127476 - DNA, 86 bp, Homo sapiens
agctggacccggaccggttttggaaggagaagagctggagctggtggagaaaagctgtacccactcagagaagaccaacaggaccc

SEQ ID NO: 127477 - DNA, 100 bp, Homo sapiens
agattggaggaggctggctctggtcttcgatgcacaggagtggccgttatggaacgcaggtgctggagaatctggtaaaagcaccattgtgaagcagatg

SEQ ID NO: 127478 - DNA, 150 bp, Homo sapiens
cgaggggctcccgttccgccggggcatccgtctgctggacagcggctccgtggagaacgtgctgcaagtcggccggatcttggacctgaagactgggacggtcaagaaagaagggcagcagtcatccatgaggatgtgcatgggctcgcg

SEQ ID NO: 127479 - DNA, 75 bp, Homo sapiens
ttctttggtttctttttttgatgcatctctacctggaactttgccgaatcaaagaatcttcaggatggcagcaag

SEQ ID NO: 127480 - DNA, 100 bp, Homo sapiens
ctccgtctggcgacgcccgccgcctcactgtttctagccttcagatatctatcatcatcaactcttctgctccaccccacactatactgaatgaactgaa

SEQ ID NO: 127481 - DNA, 101 bp, Homo sapiens
ggcccaccgcctgcccaaccgcgtgaccttgattgagttaatgaacttcacgcctcagcgtccagccagccccctggggatgccacatggagctgctgcat

SEQ ID NO: 127482 - DNA, 96 bp, Homo sapiens
cttggccatgaccatctggattctcaaagtcatgaacttcacaattggagtcgtcgcatggtggatgtcatggacgtgaacacacagaaaggcatt

SEQ ID NO: 127483 - DNA, 100 bp, Homo sapiens
cccacagtgggggtgtgcaaacccgagagaactggtcaggatggctaaaggtgaccccaagaaaccaaagggcaagatgtccgcttatgccttctttgtg

SEQ ID NO: 127484 - DNA, 100 bp, Homo sapiens
gctgccgaacgacgtggtcctacagtcgcagatatggccagtacactatgaaccaggaaagcaccaccatcaaagttatggagaagcctccatttgatcg

SEQ ID NO: 127485 - DNA, 100 bp, Homo sapiens
ttaaagttttggattccacgtcctttttgggtccagcagctccagatctcggttgaccaacatggtgacaacctgaagaacaccaagagtgaaattgcag

SEQ ID NO: 127486 - DNA, 101 bp, Homo sapiens
atatatcctgtcaagaaatgtcaggagagggatttccaatatggatacaaccaaattctttcatgagaccgtccaggctggacttgaactccttcctcggc

SEQ ID NO: 127487 - DNA, 100 bp, Homo sapiens
ggggactgatttttggtgtctcttctaacagcatacagatagcaattcacagaagctgtgagtccttcagtgctacccccttcagctttgccactggacc

SEQ ID NO: 127488 - DNA, 96 bp, Homo sapiens
gtgtcctgcaggtattgggagatccacagctaagacaccgggacctcctggaagccaaaaatgagaggtggagaagagcgagtacttgagaaagaa

SEQ ID NO: 127489 - DNA, 75 bp, Homo sapiens
cccggagccagcgtgggaggccgctgccgtcgcgcgccttggttgcatattcatcgaagagaacttttctttgaa

SEQ ID NO: 127490 - DNA, 100 bp, Homo sapiens
aagcaagaggcaaagagaatcggttgccaatcaagaatgcacccccagggaaaaaatatgttcgatgcccctgtaactgtctccttatctgcaaagtgac

SEQ ID NO: 127491 - DNA, 75 bp, Homo sapiens
ataacttgtactggagagaaatcctacaagtgtgttgaggagctcaagcttgggaaaatggtgtgcattccttgt

SEQ ID NO: 127492 - DNA, 100 bp, Homo sapiens
aggcggcccactggcagttcgagatatggctcgtggacagcagaaaattcagtctcagcagaaaaatgccaaaaagcaagctggacaaaagaagaaacaa

SEQ ID NO: 127493 - DNA, 75 bp, Homo sapiens
tatgaatggacggaagataatgggtaagcagcagccgctcttctaaaacattcaaaccaaagaagaatatccctg

SEQ ID NO: 127494 - DNA, 100 bp, Homo sapiens
ggccgagtggcggtccgacagagtcctccgtgtcctcccccgcatgacccccttggtgctgggtcttcagctctaaagaggccatttgaagatggattag

SEQ ID NO: 127495 - DNA, 100 bp, Homo sapiens
ccgcttctgggctagcatgatggaggcagccagggatcatcgtcttgctcttcttttatctcagtttgtgggtagccagtcagtccgggagctgctcacc

SEQ ID NO: 127496 - DNA, 100 bp, Homo sapiens
ggccccagcgccgacggcgacgtcggggccgagctaacccggcctctggacaagaggaccggcagcaatgcctgctacatggaggagatgaagaacgtgg

SEQ ID NO: 127497 - DNA, 97 bp, Homo sapiens
ttagttgcagtgatgggagcatttaataaaggatctgcaatcagaactattgaacttctccattcagaccgccactcacacctatgggaaaagggta

SEQ ID NO: 127498 - DNA, 97 bp, Homo sapiens
gcagctgctgtgtgagaaccacaaccgggacctgcagccgccttgctccgaaccttcagctttttgggctttgagattgtgagaccggggcatcccc

SEQ ID NO: 127499 - DNA, 50 bp, Homo sapiens
tgcccttcaagcgcctgtctgcctgtgggccaaagctgaccaactccccc

SEQ ID NO: 127500 - DNA, 83 bp, Homo sapiens
ttcagatttcttaaggaaacggttgcagaaaggggttgtatcagagtaagatggacggtagctttgattgtgattgtggtgag

SEQ ID NO: 127501 - DNA, 100 bp, Homo sapiens
caccaccaccctcaatgcctccaacctcatctaccccatctttgtcactaggagagaagtttgctgaggaatgccttcaagcacaaagtgatgaatgact

SEQ ID NO: 127502 - DNA, 95 bp, Homo sapiens
aggcctgacagctctgcggctcgggccctgaggctctctaggaaacaccagaattatcagtgaagaatatattaaatggctcacgggctactgta

SEQ ID NO: 127503 - DNA, 74 bp, Homo sapiens
gaaattccagagcgctactacaaagaatctgaggagcaggggagagaagacagaagaggttggagaggtcaggg

SEQ ID NO: 127504 - DNA, 76 bp, Homo sapiens
ccattgagctcaccaaaatgctctgtgaaatcctgcaggttggggaactacgtctcatgctctcactcaggctgca

SEQ ID NO: 127505 - DNA, 80 bp, Homo sapiens
gatgtgagagccacatcaacccacctcacagcacttcattatgcagctaagggaatataaactaggacggagaattgaga

SEQ ID NO: 127506 - DNA, 98 bp, Homo sapiens
ctccatcctggtattttttggagcttccatcctggttcttccaaagtgcccggacccaaaacaggaaattgtagaaggcatgaaacaaaaaatgtgga

SEQ ID NO: 127507 - DNA, 75 bp, Homo sapiens
caagccgcaggtggcggcgagcgcggggctcggcccgagctcaggaggatgagagggccttaccaaaaggagatt

SEQ ID NO: 127508 - DNA, 82 bp, Homo sapiens
cgaacccaacctggtgcccggcccgcagatgaattccctctgctgacaaccaaacgtgtgttctggaagggtgttttggagg

SEQ ID NO: 127509 - DNA, 100 bp, Homo sapiens
cttcaaccatctggggaaaaggcaaaaatcccatctaccgcaactctcagttcgagagtaaagggggaaactcggccgatatcctccttggccaggaaag

SEQ ID NO: 127510 - DNA, 90 bp, Homo sapiens
tgtaggaggacgccagttactgcacggaaagcagcgtcaggagccatagtacctacagcagcactccagagtctcgctctgtcgcccagg

SEQ ID NO: 127511 - DNA, 74 bp, Homo sapiens
tgtggttggaattatgaatgtccaaagtttgaagaggtcggatcatgctaaaaggagataatattactctgcta

SEQ ID NO: 127512 - DNA, 74 bp, Homo sapiens
gaccaccgaggctggagggggagaacacccagagagaaaaggaacagttccgtaagctctttattggtggctta

SEQ ID NO: 127513 - DNA, 104 bp, Homo sapiens
tttaagggcattaggagaccatggaaaatgatgaaacatgcttggaataattataaaggttatgcctggggattaaatgaactcaaacctatatcaaaaggagg

SEQ ID NO: 127514 - DNA, 100 bp, Homo sapiens
gcaccgaggtccgtgtggccaacgagctcaacgccaggcgccgctcctttacaggaaaacctcacagcacgggtagctctgaacggattcagctctcagg

SEQ ID NO: 127515 - DNA, 101 bp, Homo sapiens
acaaggccaagggcaagtgatttgacagatcgcccaggaccacaccgcagcgtaactgcaggcctctcagcgaaaaagggggaaagcaaagacccgggtgt

SEQ ID NO: 127516 - DNA, 100 bp, Homo sapiens
gagtccggacatctgaaacttgactttgaaatactcgtgggatatgaagtggaggtgcctagagggttgaagataatgaggacagatgaagaaatgtttg

SEQ ID NO: 127517 - DNA, 100 bp, Homo sapiens
ctggccagagcctggtcgagccggaggaagccaccagttagaccgattcaaagaaccacctgcatatggacctatgtgtgatatcctgtggtcagacccc

SEQ ID NO: 127518 - DNA, 74 bp, Homo sapiens
gacttaggagggcaggaagagctgcagtctttgtgggacaagggtgttgaaagcagcaggggcctagaagacat

SEQ ID NO: 127519 - DNA, 74 bp, Homo sapiens
cgtcgtcggcctctgggcagcaggtatctgaaaaggtttaaagtgatgaagatcaaagttctaagaagctggtg

SEQ ID NO: 127520 - DNA, 100 bp, Homo sapiens
cctcgacctctggttctacttcacactgcagaactgggttctggactttgggcgtcccattgccatggtcgtcgtcccgcagacacacaatccagaagtc

SEQ ID NO: 127521 - DNA, 83 bp, Homo sapiens
cccagagcaacagctttcagcaacacagaaattcaggaagctgctttcaaaaggttatcaatactctggctgaccatcatcat

SEQ ID NO: 127522 - DNA, 82 bp, Homo sapiens
aaatttcaggattggtactacaaggcagtataccttaaatggcaagaaggaaataaatcatctgacatcactcagattgaag

SEQ ID NO: 127523 - DNA, 83 bp, Homo sapiens
ctcggactacaccagcgagaaatcttcctgttcaacgacctcctggtgaaggagatccggttggcagctaaaccgcgctggga

SEQ ID NO: 127524 - DNA, 100 bp, Homo sapiens
cttgtacagagatgtgatgttggagaactatagcaatctggttttcttggatcgagcctgcgtgctgccgaagcagggcgccgagtccatgcgaactgcc

SEQ ID NO: 127525 - DNA, 75 bp, Homo sapiens
ccggggaggcaactggagcgaaaccagcgacagatgtattgctgtccttgaatattagcccatttgaaaacgcct

SEQ ID NO: 127526 - DNA, 74 bp, Homo sapiens
aaggcggaagtcaatcaagagactatccagcgggtggtgttcccactgatgaagagcaggcgactgggttggag

SEQ ID NO: 127527 - DNA, 89 bp, Homo sapiens
ggccgatgaagtgcagaggtttttttctgaggaagaatacaagcgattgagtgaagcactagcagaggatgggagctacaatgccgtgg

SEQ ID NO: 127528 - DNA, 82 bp, Homo sapiens
gccctgagacggtgtcccgccgaaaggcctgagacctgggaggaagctggagaaaagatgccctctgaatctttgtgtttgg

SEQ ID NO: 127529 - DNA, 50 bp, Homo sapiens
tgatgcatttccaagtagaataagatatcagttttagagaatgtggcgtg

SEQ ID NO: 127530 - DNA, 98 bp, Homo sapiens
gggctgtgccgggcggagagaactcagcgaggattctgaggtgatgggcagaggcttcagtgtccccttcgcctccgcaggagaggagaggcagcagc

SEQ ID NO: 127531 - DNA, 75 bp, Homo sapiens
cggggcttccctgcggctggaggaatcccgttctgcttccagaagtggaagtgctcacggatcggggaaatctgc

SEQ ID NO: 127532 - DNA, 75 bp, Homo sapiens
ttagttatatccagcgattggttcaaatccacgttgatacaatgaagagtacaggggctcaggtccaggtggcag

SEQ ID NO: 127533 - DNA, 82 bp, Homo sapiens
agagagcccaacgcctggtgctcaagactttctccgagggagtgcatccgccccaacccttttccccctcgtctcctgtgag

SEQ ID NO: 127534 - DNA, 100 bp, Homo sapiens
gaggccacggccgccagcaccagcaggtccctggccctcatgtacgagtccgagaaggttggggtcgcctcttccgagaaacgttcctggatccgaacac

SEQ ID NO: 127535 - DNA, 83 bp, Homo sapiens
gtgaaagtgcagatcgccgtggccaacgcgcaggagctgctgcaggtcaaaatgcagatcttcgtgaaaacccttaccggcaa

SEQ ID NO: 127536 - DNA, 100 bp, Homo sapiens
accatggacagtgtccgctcaggggcctttggacatctcttcaggcctgacaatttcatctttgagctagagccggtgcaggccacgcagaacaagacag

SEQ ID NO: 127537 - DNA, 101 bp, Homo sapiens
caggacgccttctgcaactccgacatcgcaatggctgccatccggaagaaactggtgattgttggtgatggagcctgtggaaagacatgcttgctcatagt

SEQ ID NO: 127538 - DNA, 96 bp, Homo sapiens
tgaagatgaagattttaaagagcagactagacttctcaaggtgatttctagcttgtctcatgccataggcaagcaaaaggaaaagatagagttgat

SEQ ID NO: 127539 - DNA, 114 bp, Homo sapiens
cctgcatcggatcaccggcgtgccccaccatgtcagacgcagccgtagacaccagctccgaaatcaccaccaaggaagctcttcgtgggcggtcttgactggagcacgacccaa

SEQ ID NO: 127540 - DNA, 127 bp, Homo sapiens
ccagaagaatcaagagaaaaaggaagaaaaggagaaaagcacagctttgacgtggctctccaaagatggacttcctcgttctgcccatcttcctaacaaggctatggctgataacagcagtgatgag

SEQ ID NO: 127541 - DNA, 75 bp, Homo sapiens
aacatgtcttggctgtaggaaatctgtgccgtgttcacatggaccaacttgcttgtggtggttgtggaactgtgc

SEQ ID NO: 127542 - DNA, 88 bp, Homo sapiens
aagggcaggggcagccgggatgcgctggtctcgggagccctggagtccactaaagcgattttaggtgatgggcaagtcagaaagtcag

SEQ ID NO: 127543 - DNA, 82 bp, Homo sapiens
ctcagacccgtacaaagtgtacaggattgttcctgagggagccaaaaaagcaggtttggatgcatctgctcagactacttct

SEQ ID NO: 127544 - DNA, 51 bp, Homo sapiens
ctcatggctctcaccttgctcacggctgtcattatttgtatcaaaaacaaa

SEQ ID NO: 127545 - DNA, 100 bp, Homo sapiens
cgagaattaaatgccgagaaggccagtacgatatgtttgacgacttctcagaaggcagagagtgtgtcaactgtggggctatgtccaccccgctctggag

SEQ ID NO: 127546 - DNA, 75 bp, Homo sapiens
gtggtttttatcaccacacgactgggtatatttcctctctgatcaacagtacaaattctgaagtttgtaaacttg

SEQ ID NO: 127547 - DNA, 128 bp, Homo sapiens
gggatcgtgaccgagaccgtgaccgagagcgtgaccgagagcgcgaatatcgtcatcgttagaaggtgactcctgcacctgcgccggctcctgcaaatgcaaagagtgcaaatgcacctcctgcaaga

SEQ ID NO: 127548 - DNA, 82 bp, Homo sapiens
cgagaggctcaccgcagtcgtgcaggatctgaaggaggtgacaaccaaagccaagcaactgaaggattcagtgacctgctcc

SEQ ID NO: 127549 - DNA, 75 bp, Homo sapiens
gttttgtttatataactcaagttgtttggctaaattcttcaggagaatgccgtgaatggagaacacctgtggctg

SEQ ID NO: 127550 - DNA, 51 bp, Homo sapiens
gggcctcccgggggacgtgaccaaccaggctgaccggttccctgatgtgtt

SEQ ID NO: 127551 - DNA, 100 bp, Homo sapiens
tccagttccaaggactccacggggtgaagcatatatgcgtttaagcaaactccccgaagcagagcattggtatatggaatcactgagatccaagactgac

SEQ ID NO: 127552 - DNA, 75 bp, Homo sapiens
cggccactgggcgcagcacccagagcctgatccggggatggcctctgcctccaccacaatgcatactaccaccat

SEQ ID NO: 127553 - DNA, 73 bp, Homo sapiens
tttgaacaaactcgaagaacagctgtggaaagaagttgcaaaacactggatgtctcagctgctctacaaggga

SEQ ID NO: 127554 - DNA, 83 bp, Homo sapiens
cttagctggacccgtctgggaggctgaccccgcactacatctacccaccagccatcgtgcagcccagcgtggtgatcccagcc

SEQ ID NO: 127555 - DNA, 75 bp, Homo sapiens
ttttccacagggaattgagttggtcaaaatgcagatcttcgtgaaaacccttaccggcaagaccatcacccttga

SEQ ID NO: 127556 - DNA, 88 bp, Homo sapiens
aggagactgaccgcaacggcagggaaggatctgagtctctccctgcggagacagccctgaagaactcctgtaacgtcaagctggcaat

SEQ ID NO: 127557 - DNA, 100 bp, Homo sapiens
tttgggtttagcacgatgagctcaatcggcactgggttccctgtattgaacactgatatacaaggaatgaatagaagtcaagaaaaacagacctggtggg

SEQ ID NO: 127558 - DNA, 97 bp, Homo sapiens
gcgagctgagtggttgtgtggtcgcgtctcggaaaccggtagcgcttgcagcatgagatgccctgtatccaagcccaatatgggacaccagcaccga

SEQ ID NO: 127559 - DNA, 98 bp, Homo sapiens
ctggaaattaaattttcaacatttaagtggagaaaggggtcataaatcaaggtcaacgaagtgacggtggaacagctggtgcagcagtacccccacat

SEQ ID NO: 127560 - DNA, 90 bp, Homo sapiens
gtttacccagcgcagcgttccaccgctcgggtttggctgggttaaaaagatcaagtggcatgagcagccttttggggaaaattggtgcca

SEQ ID NO: 127561 - DNA, 75 bp, Homo sapiens
agccgatccagcctgcggagcctgtggggcaggacaaagcagttccaattccagagaaaatgagtgaatgggcac

SEQ ID NO: 127562 - DNA, 98 bp, Homo sapiens
ctggagaagatcgccaagctgtacgagctgcacgtcttcaccttcggcagccggctgtacgcacacaccatcgcagcaccacacactggaagcagacg

SEQ ID NO: 127563 - DNA, 75 bp, Homo sapiens
accctgtacagagatgtgatgctggagaactacagccacctcgtctcagtgggtaccagcggaagtgggatgagc

SEQ ID NO: 127564 - DNA, 100 bp, Homo sapiens
gagtggcaccagccggatcagttcatgcctggatgtgatcttcgtggtggaaagctaaattttaaaaccaccccaatggatgcagacagtgatgttgcat

SEQ ID NO: 127565 - DNA, 100 bp, Homo sapiens
cttcagtcttaccaagaggctttgcagcagcaggatattccccgagtccctccggtggctaatggccacccagcagtttgagtctgcaaagaggctgatc

SEQ ID NO: 127566 - DNA, 92 bp, Homo sapiens
gcgttggagcgcggaaatctggaaccgggatggcgacgtctacactgagtcggaggcgaagacaatgcagatcttcgtgaagactctgactg

SEQ ID NO: 127567 - DNA, 99 bp, Homo sapiens
ccgaggcctgggttacaagcagcaagtgcgcggttggggccactgcgaggccgttttagactcagattgatggacaacttttcttaattaagcaccttt

SEQ ID NO: 127568 - DNA, 101 bp, Homo sapiens
tttcatactcctacgtgaacatccttttaccacagcctcagccacagtacactgaggaggggacggctccgtcttcacattgtgcacagatctgaggatgg

SEQ ID NO: 127569 - DNA, 50 bp, Homo sapiens
atcagttcttgatcctgatgaggttggatggcaagcatgtggtgtttggc

SEQ ID NO: 127570 - DNA, 82 bp, Homo sapiens
tttcttgtaaccattttaaacaaagccgtctgtagaggatcctttccccattggctgctggtcaacctctccctcatcccag

SEQ ID NO: 127571 - DNA, 90 bp, Homo sapiens
tgctgcctcctgctctgtcctcatccccggcttagataaccaattcaggagaatttgtgttcccattagattctccacacaaaaagccct

SEQ ID NO: 127572 - DNA, 90 bp, Homo sapiens
caggtcccatctaaaatgaggagggggttccagcagcactgatgtgaaggaaaaccgcaatctggacaacgtgtcccccaaggatggcag

SEQ ID NO: 127573 - DNA, 100 bp, Homo sapiens
aggtgatctggacaaaggaacaggtatctcagggtgttcctgaaaagaaggtacttccaatcaccgtccccaagtcaccagcctttgcattgaagaacag

SEQ ID NO: 127574 - DNA, 74 bp, Homo sapiens
ggactgggagtttgaccgcgttgacgacggctcgcagatgacagctatattgtgcgtgtcaaggctgtggttat

SEQ ID NO: 127575 - DNA, 100 bp, Homo sapiens
gaatctttcctgtagacaaaagtcgaagcagaaaactgcatcagcagtttgaaatgtataaagagcaggtaaagaagatgggagaagaatcacagcaaca

SEQ ID NO: 127576 - DNA, 88 bp, Homo sapiens
cctgctggcctcatgcgagtttgactgtgtggacgagatgctcaccctggctgccatgctcacagacagagtctcactctgtcaccca

SEQ ID NO: 127577 - DNA, 98 bp, Homo sapiens
agaaggttagaccctgaaagagatggctcagcaccacctatggatcttgctcctttgcctgcaaacctgaaacttggatttaactggccagaagcagg

SEQ ID NO: 127578 - DNA, 50 bp, Homo sapiens
caagacatttcttcggcattctgcaacagtgtgccatgcggagctgaatg

SEQ ID NO: 127579 - DNA, 85 bp, Homo sapiens
gcgtcccgctcgctgggagagaggtacctctccttttccctctccctttccctaaggttcgagaacttgtcttggacaattgcaa

SEQ ID NO: 127580 - DNA, 90 bp, Homo sapiens
aaagtagaaaagcactatggggttataacactggtagagttggctttgtgggacacagctgggcaggaagattatgatcgcctgaggccc

SEQ ID NO: 127581 - DNA, 100 bp, Homo sapiens
atttggtatactgggcacaatccatctggtggcagatatggatcagaaactttcgaagttggtagaagagctcacaacttcaggagaaccccgactaaat

SEQ ID NO: 127582 - DNA, 95 bp, Homo sapiens
taagtctccaatacagaagaatgaaggctgcaatcacatgcagtgtgctaaggtttactcctggcttgggggcattaggaagcactggaggctct

SEQ ID NO: 127583 - DNA, 71 bp, Homo sapiens
gatgccctgaaggccatgaagcagtacaacggcgtccctctggatggccacggcatatgcctccaaggacg

SEQ ID NO: 127584 - DNA, 50 bp, Homo sapiens
cagcacacaggaccaggctgcgagaacagccaatccgggggacccaggac

SEQ ID NO: 127585 - DNA, 100 bp, Homo sapiens
tctgccactgctgctccgtggagatcgtcccgcgcctgccggagtgttggaggaagcagaattttacaatatcacctcattaataaaacttgtaaaggac

SEQ ID NO: 127586 - DNA, 95 bp, Homo sapiens
cctccttggtacacagggccttgctgttccttgaacctgccaggtcatcatcagatttgaaatatttaaagtggatacaaaactatttcagcaat

SEQ ID NO: 127587 - DNA, 75 bp, Homo sapiens
ttagtggtctgtgttctaatgactgtcctcgtaagataacagcatacagaaagttagccaaggaatatcatcctg

SEQ ID NO: 127588 - DNA, 75 bp, Homo sapiens
attcatgtgcctccaggttatatctcacaggactcaggacggggagacagccctccagctggccatcagaaacca

SEQ ID NO: 127589 - DNA, 101 bp, Homo sapiens
cctcccgagtggctgggattacagtgggaaagaagcctaaggaataaagtcatctctctagaccataaaaataaaaaacatatccgagggtgtcctgttac

SEQ ID NO: 127590 - DNA, 75 bp, Homo sapiens
ttgtaatcagcttcttaccaaatacagaagacatatgtagagtgtgtcggtcagaaggaacacctgagaaaccgc

SEQ ID NO: 127591 - DNA, 74 bp, Homo sapiens
ggattccaagtaactcttatttggttgatggacggatggctacatggatgtgatggagatggtttactatcggg

SEQ ID NO: 127592 - DNA, 75 bp, Homo sapiens
ttctgggccaccatttgccagggcctcgctcgaggaagaagaggaaaggctatgaagatgatgattacgtctcaa

SEQ ID NO: 127593 - DNA, 75 bp, Homo sapiens
ccgtgggcaacgtggccgacagcacagtattctaccttgtaaatactgttatttgtatatactgtaaatgatgac

SEQ ID NO: 127594 - DNA, 95 bp, Homo sapiens
gctcctggtagctcatatccccctcacatgcaggtgtagaatgagccaaggagactcaaacccagcagctattccgcatgcagcagaagatattc

SEQ ID NO: 127595 - DNA, 82 bp, Homo sapiens
ggtgcgcaagcgcaaccgtcggtgggtcggggatcggtcgcctgagaggcattgaagttgatatcgatgtggagcacggagg

SEQ ID NO: 127596 - DNA, 50 bp, Homo sapiens
ggcgctgaaacggattaataagaatttcgctaaggagtttgtgatcagtg

SEQ ID NO: 127597 - DNA, 87 bp, Homo sapiens
cagcctcttcgagcgccgcggacgcgtcatcgagtgtgacgtggtgaaagcatcccagccatcactcttccacctgctccttagaga

SEQ ID NO: 127598 - DNA, 97 bp, Homo sapiens
agtattcttgcaattgaaggcacaggtagtgatttacacgatgatatgttcggggatgagaagcaggacagtgaggctttggggtgagcctgttaat

SEQ ID NO: 127599 - DNA, 98 bp, Homo sapiens
gcaaagtgtgttttgagatgaaggttaacatcagatcccagaaaacagtgttctaaagaagacggtggtggatggtggtataatagatgtcatgcagc

SEQ ID NO: 127600 - DNA, 75 bp, Homo sapiens
ctcgcactccgcctcccccggctcagcccccggccgcggcgggacccgaggtcagcccaaggccaaccccactgt

SEQ ID NO: 127601 - DNA, 75 bp, Homo sapiens
cctgatttcacagtccgagacgtcaaactcctagtggggcaagaagactatgaccggctgcggcccctgtcctac

SEQ ID NO: 127602 - DNA, 75 bp, Homo sapiens
ctgactacgggagttgggaggacccgggacaccgcacagccgggaaatggtacaccaggggttggaaaaaccaca

SEQ ID NO: 127603 - DNA, 82 bp, Homo sapiens
ctctcatgttctgcacctcaggagggaattcagcctcagtgatgtccatgagatacaaggtctcgctgttctacctaggctg

SEQ ID NO: 127604 - DNA, 74 bp, Homo sapiens
tagatattcaggatgactgtggaaggtccttgtgctgcagaatcagaaccagctcttttgatagggagcaagca

SEQ ID NO: 127605 - DNA, 98 bp, Homo sapiens
gagctcttggcttccatacgtgtctcagacaggcaactccccatcagatgagtctgaggagcgggaaagagaccccaaggtgctgacattcccagaat

SEQ ID NO: 127606 - DNA, 99 bp, Homo sapiens
atagaccaacacagcctggaccaccacagccaccccagcagaggccttatggatatgaccagaatcagttgctcaactaccgttctgccatttcaaatc

SEQ ID NO: 127607 - DNA, 101 bp, Homo sapiens
aagaggtttcagccagtgcatgaccttactattgaaatctccaaattggacatccagagcagcattcttgttctgtctacgtcttgaattagaaactatca

SEQ ID NO: 127608 - DNA, 75 bp, Homo sapiens
ggagggggcagtcccgggagaacctgcggcggccggagcgagtgcacagttgactgagatcatcaacagtttgat

SEQ ID NO: 127609 - DNA, 90 bp, Homo sapiens
aagagatgtgattaatgtattccaccacctccgccagttaagaggaaaaagaatcttgtggaagaagaatgaagttgctgattatgaagc

SEQ ID NO: 127610 - DNA, 92 bp, Homo sapiens
cgcttgcctacccgccggcccgcgggtctacttcctcaaaggaactgtggctgcaccatctgtcttcatcttcccgccatctgatgagcagt

SEQ ID NO: 127611 - DNA, 75 bp, Homo sapiens
gccccctgcaggaactctacaacccaatccagtcccctccagggcaggtgactgaggccgtgaaggtggccattg

SEQ ID NO: 127612 - DNA, 100 bp, Homo sapiens
cttacggttttgagaagccttccgctattcagcagagagctattattccctgtattaaagattagtgatgatgaaccaggttatgaccttgatttatttt

SEQ ID NO: 127613 - DNA, 50 bp, Homo sapiens
tgctgcttttctacctgaagaagtctattatcctcccagtccacaacgct

SEQ ID NO: 127614 - DNA, 50 bp, Homo sapiens
gggagatgatcctggcggattttcaggtgttgccacatctgcaaacttcc

SEQ ID NO: 127615 - DNA, 100 bp, Homo sapiens
gtcgccgccatcacggacttcctgtgggacaagcgcacgggcctcgccgccagaacgcatgccctccaggacactggggagaaaactgtgcccagacctg

SEQ ID NO: 127616 - DNA, 98 bp, Homo sapiens
aagtacagggtcatcaagggcagggcaagcattgatgactttatacagtctgtggagcaccagaacatagctttagaagtggatgcatttggaactag

SEQ ID NO: 127617 - DNA, 90 bp, Homo sapiens
ggagccgtggggtcccggcagcccgcaggagtgctaactctttcgacgtgtagcagcagctttgccgggaatggaaagcacacaggacag

SEQ ID NO: 127618 - DNA, 80 bp, Homo sapiens
cagcgtcgtcaagaagatccacattgaggtagtggacaaagcatccctgggttcaatggcagtgaagactgtgctgccct

SEQ ID NO: 127619 - DNA, 50 bp, Homo sapiens
atccgagaccttaattttgaagaagctgaatatggtgggcatgatcagat

SEQ ID NO: 127620 - DNA, 100 bp, Homo sapiens
ctggataccattgtcaagatccctccacatgtactgaggtcgtttatacgcaatgcagactggaatgaagatcgatagtaaaactcctgaatgtcgcaaa

SEQ ID NO: 127621 - DNA, 75 bp, Homo sapiens
gacccagctcgctcctggtagcaagacccgaactaacttaaagcagcagtattacacaggatacacagagaatga

SEQ ID NO: 127622 - DNA, 76 bp, Homo sapiens
ggaaggaatatatcctgactgatttatttgtgtggaagtaatcgaaaagacaacatatttattgatcctggatacc

SEQ ID NO: 127623 - DNA, 80 bp, Homo sapiens
ccaacacaccagcccagacagctgcaagtcaccatggacgctgaagacaatgcagatcttcgtgaagactctgactggta

SEQ ID NO: 127624 - DNA, 75 bp, Homo sapiens
tgttccacacgggtgccggcatcagcactgcctctggcatccccgacttcaggaatcaactcaattacatcacag

SEQ ID NO: 127625 - DNA, 100 bp, Homo sapiens
aagagagattggcctggagtaaaagctgatgatcggaatgattacaggtaaagggagaagatgaggaagagaacaatttggaagtacgtgaaaccaaaat

SEQ ID NO: 127626 - DNA, 83 bp, Homo sapiens
agaagttgaaaaacgcttttcacgtcacctggagagatgcacaggccacagttgtaagggatcttgtggctgtcaggatggca

SEQ ID NO: 127627 - DNA, 83 bp, Homo sapiens
caagaaggcaacgacgttccatctgtggaaggacctaccaaccaggaaatttgcgagaatccccgatttatcattgatggagc

SEQ ID NO: 127628 - DNA, 99 bp, Homo sapiens
gtgcagcagggcatgacaccctccgccaagcagtgcgcgtcccgggacgactggcgctgtgcgcgctccatgcacgagttttccgccaaggacatcgac

SEQ ID NO: 127629 - DNA, 100 bp, Homo sapiens
gtgggacaaggattgatagaaaggttagacggtagagagatccacgccacaattcctgagaccggcttaatgcatcggatccaagccctgtttgaaaatg

SEQ ID NO: 127630 - DNA, 75 bp, Homo sapiens
cccaagatagggaggagaagatcatgtctcagaaactgattattgatgagaagaagtattacttatttgggagaa

SEQ ID NO: 127631 - DNA, 100 bp, Homo sapiens
cgaccgtgccttttctgcgtgaaagtgggactcctcctggtctcttcctcacccagtgctgtttctcaagggtatgcatttatagagtttgcttcattcg

SEQ ID NO: 127632 - DNA, 50 bp, Homo sapiens
cttagataagaaggttgagaagagttcagttgattccaccatctctagtt

SEQ ID NO: 127633 - DNA, 100 bp, Homo sapiens
cactttgcattgactggaaacaatggcatttacagaaagagtcaacagcagtggcaacaggtgcaaagttccccatcaagtggacggcccccgaggcagc

SEQ ID NO: 127634 - DNA, 75 bp, Homo sapiens
aaaggccggcagaagggaggcacttgagattttatcatgtgggcaacctgctgcaactggttctgcctggatgga

SEQ ID NO: 127635 - DNA, 83 bp, Homo sapiens
tcgtcgccacctggatgctggagagctccacgcaggagatcggtgaggagctgatcaacggagtcatctactccatctccctg

SEQ ID NO: 127636 - DNA, 83 bp, Homo sapiens
ccacggagccttctcctgcagggcgagagcgttcctccagttgtggaatgatgagaagacagcagctgattacaagattttag

SEQ ID NO: 127637 - DNA, 131 bp, Homo sapiens
ccagaactaccgtaattatctgttgccagctgggtacagccttgaggagcaaagaattctggactgtgctacctgggcgatgccttccgctgtgccagctgcccctaccttgggatgccagccttcaaacc

SEQ ID NO: 127638 - DNA, 101 bp, Homo sapiens
acaaaaagacacttatactatgaaagagccctggtacctgacagtgtaaagaaggagctcctacaaagaataagaacattccttgctcagcatgccagcct

SEQ ID NO: 127639 - DNA, 90 bp, Homo sapiens
gcggggtgcgccggcagaggatccagtgttcaccatcctggccccggaaggtggggaagaaaacatgacagaaacagatgccttctataa

SEQ ID NO: 127640 - DNA, 83 bp, Homo sapiens
catcaggaacctggctatggagaaggtggcctcggcagtcctgtttccctgtaagcgtgagtgcatctccatccacgttggcc

SEQ ID NO: 127641 - DNA, 83 bp, Homo sapiens
ggcaagagtaacagcagcgccgtcccgtccgacagccaggcccgggagaagtgttgacttcaaaatcaaaactgtagagctaa

SEQ ID NO: 127642 - DNA, 51 bp, Homo sapiens
ctccttttccttggctacccgtatgtgtctgatttcaccagcactctccag

SEQ ID NO: 127643 - DNA, 100 bp, Homo sapiens
cagtggaagggtggacctgtcaagattgaccctctggctttggtacaagccatcgagagataccttgtagttagaggaggagatgttaaagtaacccatc

SEQ ID NO: 127644 - DNA, 82 bp, Homo sapiens
cgacaagaatctgcaggacttggtccgcggcatccgtaaccacaaggaggacgaggccacggcatatgcctccaaggacggg

SEQ ID NO: 127645 - DNA, 98 bp, Homo sapiens
tggaataggttcgccgaagagagagtgagaaagatcagtctaaagaaaaggagaagaaagtgaaaaaaacaattccttcctgggctaccctttctgcc

SEQ ID NO: 127646 - DNA, 74 bp, Homo sapiens
acctctaaaaaaggcacctgctgctaaggtggacattgaagtggacctaattcggttttccttttaaaagcccc

SEQ ID NO: 127647 - DNA, 101 bp, Homo sapiens
agtctgagtgtctgtccccagagcctcagtttgtgcaggacaccgacatggaacagggactcactgggggtacatctccgttcatggatgcattaacagcc

SEQ ID NO: 127648 - DNA, 82 bp, Homo sapiens
gggcaattgccacacggtggggcccaacgaggcgctggtggtttcaggtgtggacacctcaagatcgccagtgtgtcctgag

SEQ ID NO: 127649 - DNA, 83 bp, Homo sapiens
tttcccgggagatcccaggcggtgacagagtggagccatggctagagagtgaagacatttccacctggacacctgaccatgtg

SEQ ID NO: 127650 - DNA, 50 bp, Homo sapiens
gttttgtgcagattgccagtctaaaggaacctgggcaagtctggcctgcg

SEQ ID NO: 127651 - DNA, 100 bp, Homo sapiens
gctcggcagccctcttccacctgggtcagtatgagactgcttttcaggaagccttggacgctgcaggtgataaacttgtagtagttgacttctcagccac

SEQ ID NO: 127652 - DNA, 75 bp, Homo sapiens
cctgccaccgaggccccctcttcgcctcctccagtatttagcgtggactacaatgatgaactggatatcttggtg

SEQ ID NO: 127653 - DNA, 75 bp, Homo sapiens
gcggcgttggaggccaccgtttccaggtctcctctgagcctccggcctccataagacccaaaacagatgacacct

SEQ ID NO: 127654 - DNA, 98 bp, Homo sapiens
ggcgcagtgtgcgttcagctgtgtcagctaatgggacttccttccccgcggttcaggaatcgtcacccggcggcctctcattctgcagctcatcttct

SEQ ID NO: 127655 - DNA, 100 bp, Homo sapiens
cggcagcccagacgggcgggcagggccgggctccgcaggttctcttgccacatcaatatcccagatggtaaagactgaagggaaaggagcaaagagaaaa

SEQ ID NO: 127656 - DNA, 82 bp, Homo sapiens
actcgcggaccggcgtccccggcgcgaagaggctggactcggattcgttgcctgaggaagcaagatttccagatgtagcaaa

SEQ ID NO: 127657 - DNA, 100 bp, Homo sapiens
ggtgatggcggtggagactctgtccccggactgggagtttgaccgcgttgacgacggctcgcagaatcccactgtttggaatcatgtcatcagattctgc

SEQ ID NO: 127658 - DNA, 100 bp, Homo sapiens
gctgatttctggcaccagcatagccagtagtattcgatgtatgagaagagctgtcctgagtgaaacttttaggcttcttggacacttaatgattgttggc

SEQ ID NO: 127659 - DNA, 90 bp, Homo sapiens
caagtctcattgagagtgtcctgaagcaggtggaagtagagcttttgtcccggcagagcgggctctctggccgccaggtagagcgttggt

SEQ ID NO: 127660 - DNA, 75 bp, Homo sapiens
cggcctcgtccagaacgtggtcagcaaggttctccagaagctggggaaggcagatgagaccaaggatgagcagtt

SEQ ID NO: 127661 - DNA, 100 bp, Homo sapiens
tgaagaaagagctggtgcatgatgacgaggttgtggcagcactgcctgaaggtatgagaccagattctaatctttatggttttccatgggaattggtgat

SEQ ID NO: 127662 - DNA, 75 bp, Homo sapiens
gcccctgggaagagcttccagcagtcccatgtgcacgcttttgaaatgacattaacagaaggaagtaagttggag

SEQ ID NO: 127663 - DNA, 82 bp, Homo sapiens
tctgatctgcaaagaaggagaaagcgtgcagagtacagttgtgaatttggctccgcgaagtattatgcactgtgtggctttg

SEQ ID NO: 127664 - DNA, 75 bp, Homo sapiens
tccccccgaagaagactcccccacatctggtggcagaaatctgaagctatcatggaacaattgaagtcttttcaa

SEQ ID NO: 127665 - DNA, 76 bp, Homo sapiens
gccaattcagaggaaaacaaagcgacaccacttattcaggctgtattagggggagctcactcagtgggtttgatgt

SEQ ID NO: 127666 - DNA, 90 bp, Homo sapiens
acaatgtagaggatgacttctctaatcagttacgggcagcccaatggatccaatggtgatgaagagacctcagttgtatggcatgggcag

SEQ ID NO: 127667 - DNA, 100 bp, Homo sapiens
aaacctctgaccgtgaagagacatgagatgattgccaaacccccagcaagttgtcctcgaagaaggtacaattgcttttaaaaattgggttaaaacaggc

SEQ ID NO: 127668 - DNA, 78 bp, Homo sapiens
caccctgcacgaggtctatgagaacaagacggacgtcatcctgatcttggaactgttatcctacctacaaagaaaaag

SEQ ID NO: 127669 - DNA, 100 bp, Homo sapiens
gggttccatgagaagtgacatcctcctcgaatcaaaaggcacagggtggtggtttcctatcctcctcagagtgaggcagaacttgaacttaaagaaggag

SEQ ID NO: 127670 - DNA, 75 bp, Homo sapiens
tatatacatacttcttttctgcctcagaagaagtggttcctgagggtttagatgtagattctctggtcattgagc

SEQ ID NO: 127671 - DNA, 128 bp, Homo sapiens
cgatggcctagcacgtggaattcgcgaagctgccaaagccttagacaacttcaaaagcagtggactgtcttttggattcaaagtgggcaaaggccaagaaaggagaggaagctttatttacaaccagg

SEQ ID NO: 127672 - DNA, 75 bp, Homo sapiens
cctcacactccccctgaagttcatctaagatcttcattcttcaaagaaatatccagagaagttgtattttgaggg

SEQ ID NO: 127673 - DNA, 50 bp, Homo sapiens
ctcccaagtagctgggactccagccataaccagcagaccacagcattcag

SEQ ID NO: 127674 - DNA, 74 bp, Homo sapiens
gacattgagggtgctttccctaacgagctgtcccttcagcaggccagctttgctccaatggaggacaaactcaa

SEQ ID NO: 127675 - DNA, 100 bp, Homo sapiens
tgcgtggagccgccgccggccacccggatggtacctgcggatgctgcaatgttaccggtgcaggcagtggttccacgaggcctgcacccagtgcctcaat

SEQ ID NO: 127676 - DNA, 51 bp, Homo sapiens
cccggctttggggtcaagcagattgaaactggcgatggaatatgagaggag

SEQ ID NO: 127677 - DNA, 100 bp, Homo sapiens
ccttgaatgttgaagatgtccttaccagctttgacaatacaggaaatgtttatgaagtggccattctgcctgcccctcagaacctctctgtactctcaac

SEQ ID NO: 127678 - DNA, 74 bp, Homo sapiens
tcggccggggcgctcacggccacggcgctggtcaccggggtctgcctggtgtcaacagcatctccaccctggag

SEQ ID NO: 127679 - DNA, 100 bp, Homo sapiens
taggctgtagacgtggggatttcagtaggaaacattatggatctgtggagctggtaccaggtcatcagtacaccatctgatattttcatggtgatggaat

SEQ ID NO: 127680 - DNA, 83 bp, Homo sapiens
cagattcgcagtggtcgcttcttctccttgaactagacagtacggatggtgccaaagtttttagtaaacaaccaggaagaatc

SEQ ID NO: 127681 - DNA, 100 bp, Homo sapiens
agggctgctcacaatttatatggccaacttgatacagtttatgtaacttgatggaagaaaatggaattactccaaaaagacaagtgctcaagcagcaaaa

SEQ ID NO: 127682 - DNA, 83 bp, Homo sapiens
caccgtcttcggtctcctggggtcggcgccgagtgggaggatggcggaattactccacaggatccgctgaacataggatgttg

SEQ ID NO: 127683 - DNA, 100 bp, Homo sapiens
atgaaatccatgctcagagatgccaagaagaatctagacagacaggcctttctaggtggtagaaggacagcccccctgccctgagacaacactcggaggc

SEQ ID NO: 127684 - DNA, 97 bp, Homo sapiens
atcctgctggatgcccactaccacgtcaaggactgggcgttcatcaacaccaacatctttgccaggaccaagatagaccccagcgccttggtgcaga

SEQ ID NO: 127685 - DNA, 82 bp, Homo sapiens
gcctttgaaaatcaacgacaacttgagcacaggtatctcagatgaagacatcatcaacattactcttcctactggagtcccc

SEQ ID NO: 127686 - DNA, 103 bp, Homo sapiens
gcccctgctgtcgctcctggtcggcgcgtggctcaagctagatgtgtatggactcagaaaaacatatgatctacacttttggtggtagaattttgacttgtaa

SEQ ID NO: 127687 - DNA, 75 bp, Homo sapiens
ggggaggcccccacctccccttctattgttctgtggcccaggtatgggcttattttgccaaagaaaacacagcag

SEQ ID NO: 127688 - DNA, 98 bp, Homo sapiens
cgcgagtgaggaaaggaggtactgtaggctgaccggttccctgatgtgttacctgcttctgctactgatccaaactgcagaacttctcattcatcccc

SEQ ID NO: 127689 - DNA, 80 bp, Homo sapiens
gagacggagctaagagatatctgcaatgatgtactggtgaaagaaaagatgttgtcccggttaagagtagtttccaccac

SEQ ID NO: 127690 - DNA, 100 bp, Homo sapiens
cggaagaccgcgcgcagggcctgcagcgggagctggacggcgagcgcgagcggcgcgagaaagtctttttcagtgtgctcaatatggtcaccaagcctgg

SEQ ID NO: 127691 - DNA, 50 bp, Homo sapiens
tgtgaggaaaggcacctccaccaggaaccccagacgcacgggccttgtgc

SEQ ID NO: 127692 - DNA, 75 bp, Homo sapiens
gagcttcttcctatttgccatggacggggtctggctctgtcacccaggctggagtgcagtggcacgattatggct

SEQ ID NO: 127693 - DNA, 90 bp, Homo sapiens
ggaacctactgtggggccgcggccggaccgagcgcctcgacctcggtctgagctgaccaagaatgggacagtggagtcggtggaggctga

SEQ ID NO: 127694 - DNA, 75 bp, Homo sapiens
gaagacagccacagaatcaaccaggaccattgcagtacaagcccaccaccaacagcagttgtaaggctgccctgg

SEQ ID NO: 127695 - DNA, 83 bp, Homo sapiens
gcggtggtggcgggtggaggttcgagcgctgttctcgctccggagccgctgcacatttcgggatccatatggctttggagaca

SEQ ID NO: 127696 - DNA, 90 bp, Homo sapiens
ctacgctattacacgggagtaggtgactgtcgttcctacagttacgtgtgtggaatctccagtaaagatgaacctgactgggaatcactt

SEQ ID NO: 127697 - DNA, 90 bp, Homo sapiens
gggccccagcagcccccgaaggccctatcaggacatggagtatgaaagacgaccaaactagagtcagaacgaatactagcatcagtgggg

SEQ ID NO: 127698 - DNA, 101 bp, Homo sapiens
ggtccctcgcctcccggccgagctgacgtatcgtcagtgaagcaggagcatcaatctacagtgtcagccctgaagctaacaaagagatgccagggctggac

SEQ ID NO: 127699 - DNA, 82 bp, Homo sapiens
cgcgactcgcttctttcggttctacctgggagaatccaccgccatccgccaccatgatgctgtgtgctgtggacccacctgg

SEQ ID NO: 127700 - DNA, 80 bp, Homo sapiens
taatactcctcctctaacatgtcagcgttattgtaatgcaaacctctgctccttttaaggaaagaccaacaccttctctg

SEQ ID NO: 127701 - DNA, 82 bp, Homo sapiens
tggcgctgagcctgcagccggccctgccggtttttagaacttcagccataaaaatgggcagaattttccttgatcatatcgg

SEQ ID NO: 127702 - DNA, 99 bp, Homo sapiens
gggggccagctcaggacacacagacccagctggaactcgctccctgtgctgtcaggaatctacaggacttggctcgtatttacattcgacgcacactta

SEQ ID NO: 127703 - DNA, 99 bp, Homo sapiens
tgcaccgagtccagcccaggaaaatggagaggtcatacttacctggttgcttgcgcatctagtaatgttggatcatattctggatgttttgaataccaa

SEQ ID NO: 127704 - DNA, 90 bp, Homo sapiens
gagtcccaatgaaacgggcagccatggccctccacagcccgcaggttaaaaagatcaagtggcatgagcagccttttggggaaaattggt

SEQ ID NO: 127705 - DNA, 75 bp, Homo sapiens
caattttcatgccgcagcctcctagctgggattacagcatccagagatacgctgtcatccctttatcgaccaact

SEQ ID NO: 127706 - DNA, 101 bp, Homo sapiens
ccgccattgctaaactccttacccgacaactggaaaataccaaggctggaagtggcaggtttattacccagaactctttgtctgggtcagtcaagaaccat

SEQ ID NO: 127707 - DNA, 90 bp, Homo sapiens
tggcccccggtgcaagaggcgcaaacaagccaatcccaggaggaaaaacggccttcctgatgcgcttgcctgctccctggtctctctgca

SEQ ID NO: 127708 - DNA, 75 bp, Homo sapiens
acgaagtcaacagtggagtgggccaggtcaaagagttagtggaagcagagttatttgcccgttatgaccgccttc

SEQ ID NO: 127709 - DNA, 100 bp, Homo sapiens
gattcggtgaagcgattcctgcaggcgttggttcccctctttgacctggtgaaagcatgtattgccaatgtagaacccaaccaaacagtggagatcaatg

SEQ ID NO: 127710 - DNA, 100 bp, Homo sapiens
gggctgaaattgccaagaatctcatcttggcaggagtgaaaggactgaccatgctggatcacgaacagattagtgggatggtttggccatgaactcagca

SEQ ID NO: 127711 - DNA, 50 bp, Homo sapiens
cggacacacaggatgacttcctcaagggagaccctgcagcgtcatggtgc

SEQ ID NO: 127712 - DNA, 51 bp, Homo sapiens
ctcagtcccatcactccaaggagagaagacagagtttcactcctgttaccc

SEQ ID NO: 127713 - DNA, 82 bp, Homo sapiens
gccgcccgcggcgaggtggcccggaccgcagtgccccaagagaggtgatgtgtccaatctagatcccaacttctcatttgaa

SEQ ID NO: 127714 - DNA, 98 bp, Homo sapiens
gcactactggcccctgatccggttcttggtgcccctgggcatcaccaacatagccatcgacttcggggagcagatttggagcaagaggtggtggtggc

SEQ ID NO: 127715 - DNA, 82 bp, Homo sapiens
ccggtttgctgatcgccccagggatcaggaggccaccaggaaaccctccccgaagaatgggtagaatcaatcatctgcgtgg

SEQ ID NO: 127716 - DNA, 101 bp, Homo sapiens
tcacctatgcaaagaaagggaagctattgctgggattttgaggaggcatttataagacgctgtttggcatatcgaaaagaagatcgatttgatgtgcacca

SEQ ID NO: 127717 - DNA, 96 bp, Homo sapiens
gatgccgtacaagagctgctgcctcagtacaaggagagggaaatgtgtatggactcagaaaaacatatgatctacacttttggtggtagaattttg

SEQ ID NO: 127718 - DNA, 82 bp, Homo sapiens
caacgtggtgggacccaaaatctgcctggaagataatgtggatgattaccacgaggatgggttctgccagccttaccgggga

SEQ ID NO: 127719 - DNA, 75 bp, Homo sapiens
tgtgcagaggagaaaattccatccttggacagttaaaagcagagcctctctgcgcccttgttgccaccatctggt

SEQ ID NO: 127720 - DNA, 75 bp, Homo sapiens
gccgtccagcagccactactgtctttacagctatcgcggaagcagttagcaaaaggtgtgacaagcaacctgcct

SEQ ID NO: 127721 - DNA, 100 bp, Homo sapiens
tgcagtggcaggtgcacgcttatctttatctgtggcatgcaactgttaaaaaatctggatccgtttttactgtttgatgaatttaaaggaggtagaccag

SEQ ID NO: 127722 - DNA, 96 bp, Homo sapiens
aagagaaaatagcaaacgatccagacggcagggagtgcatcaaaggtgtgaacacagtggccataaaatgcagtaaaaacaaatccagttcccaag

SEQ ID NO: 127723 - DNA, 83 bp, Homo sapiens
ctatggcgtggtggcccagtactaccggcccctgcatactgattcttgctattccaaatcctcttccacgttgacagcccttc

SEQ ID NO: 127724 - DNA, 96 bp, Homo sapiens
cgagcccaaggcaattgatcccaagttgtcgacgaccgacagggtggtgaaaggaaagtccatcagcttgataatggaggagaacaatgactccac

SEQ ID NO: 127725 - DNA, 100 bp, Homo sapiens
agcgactccagtgctacctgcagtgcagacgaggtggatgaggccgagggcggcgacaagaaccgaaacctgctgaagtggtatgctaaggagttcaaag

SEQ ID NO: 127726 - DNA, 75 bp, Homo sapiens
gaagctgcagccgcacctggccaaggcaactccgaagtcaagcccgcactctgattacctttgctggaatgatac

SEQ ID NO: 127727 - DNA, 50 bp, Homo sapiens
tgcgctcagcgccctctcaccgcccgagcccacccacctttgggttcctg

SEQ ID NO: 127728 - DNA, 99 bp, Homo sapiens
ctcgtgtgcgccttctggatcccggactcgcgcgggatgccccacgtcatccggatcggttgcagatgaatacatgttttccctagaagagaataagaa

SEQ ID NO: 127729 - DNA, 83 bp, Homo sapiens
ctgcttatggctataaaattacagaaagacgagaatccaggacttgaatcgtatcttcccactttctgaggactactctggat

SEQ ID NO: 127730 - DNA, 95 bp, Homo sapiens
cccgcccagaggccaattcgtcgcggcggcggtggagatcgcaggtcgctcaggagggtgcatctgcccggaagactcagactcctgcagcccag

SEQ ID NO: 127731 - DNA, 100 bp, Homo sapiens
agaagggccgagcacagcaatgcaagggtgaaagatttgaaagttgaagatgacatctcaatgaaggtgatacctattttatctacccttaattgtgccc

SEQ ID NO: 127732 - DNA, 88 bp, Homo sapiens
gtagagaagaatgaacattgtattgagaacaatatagatttgcagttgcaggaagaggcagaggaagaggaagaggaagaggacgtgg

SEQ ID NO: 127733 - DNA, 75 bp, Homo sapiens
ccggctgcctgagcgcctcaccaagttcctcatcacccaggaaactcgaactatctaccagtttcattacaagaa

SEQ ID NO: 127734 - DNA, 50 bp, Homo sapiens
cactattctactgctggaagctcaagtgtgccggtggtggtgtgcacatt

SEQ ID NO: 127735 - DNA, 73 bp, Homo sapiens
acatttcccacaggacacgaagtttgtcggcccttgccttggcagagctgagaacccaccagcgaagccagaa

SEQ ID NO: 127736 - DNA, 100 bp, Homo sapiens
gtcggttctgcagcgctgtatcgtgtcgccggcagggaggcatagcgcctctctgatcttcctgcatggctcaggacaagctctgactctgcccttcata

SEQ ID NO: 127737 - DNA, 100 bp, Homo sapiens
cgggcgaggagcggcggcggtggcggccgctggtgctcttaaagttccgtacagataaaggaagagatcccagttctgatacatatgaggaagattctga

SEQ ID NO: 127738 - DNA, 83 bp, Homo sapiens
ttcgttcttctgccaccccattcgggggggccctcagcctcttggccttgaacgggctgttcatcttgattcacaaacacaac

SEQ ID NO: 127739 - DNA, 98 bp, Homo sapiens
gaacattacaaattcaactagcaaaagaaagctttctgcacaggtctcagcttgactatgaagttcccagggaaaaggccttccaaaagagcagcacc

SEQ ID NO: 127740 - DNA, 102 bp, Homo sapiens
cataactttccttttaaggacacaactaggagataggaacaggtggcacatgtcagtggaagatatgtggacttagtcccactacaaccttagccatatatt

SEQ ID NO: 127741 - DNA, 100 bp, Homo sapiens
cggcgaccgagccggagctgctcgacgaccaagaggcgaagaggaaactactttgcttcgcactttttcatgggaggagagaaattcgacaccccccacc

SEQ ID NO: 127742 - DNA, 71 bp, Homo sapiens
gaaggagacttggaacgcacagaggaacgagctgagctggcagagtcagcacatctacaaggagattgtga

SEQ ID NO: 127743 - DNA, 75 bp, Homo sapiens
cccggcgccgtcgcgccactcctccgaaactcttcatcttggcttatacctatactgcctgatatgctccgacac

SEQ ID NO: 127744 - DNA, 82 bp, Homo sapiens
ggagagaaagccgggacttgagacaatgcagatcttcgtgaagactctgactggtaagaccatcaccctcgaggttgagccc

SEQ ID NO: 127745 - DNA, 80 bp, Homo sapiens
ccatatcataagtggaattttggagatattcaaagtttgaaattggcacaatggaagaagctggaatttgtgggctaggg

SEQ ID NO: 127746 - DNA, 113 bp, Homo sapiens
tcctcaccatacacctgaaggaaggccggaacctggttgtccgagatcgctgtggtgacttaagagattaaaattaatttggttgctgttggttctgaacaaataatgagttc

SEQ ID NO: 127747 - DNA, 73 bp, Homo sapiens
gaacggcacggccatctgtgtgtctgggcagtgcaagactgtggatattcataaggagaaagtggcacgaaga

SEQ ID NO: 127748 - DNA, 50 bp, Homo sapiens
agcgatcacatcattttcccaagtgatggaatggggagaagatattaaag

SEQ ID NO: 127749 - DNA, 128 bp, Homo sapiens
tggctgtgctgaccgaagccatgctgggtgtgccccagctttaccgcaaccaccgccaccagtccacggagggcatgagattgtaaaccatggctgtgtggatacaagctcagcagctccaaggagaa

SEQ ID NO: 127750 - DNA, 75 bp, Homo sapiens
ttgccttgtatttccagagaacaggttgtctgcattcaaaagagcattctattaaagctaccttaatttggcgct

SEQ ID NO: 127751 - DNA, 100 bp, Homo sapiens
agactgctgagcgactatattgagaaggaggtaaaggcttctctacagtttagcctttaatgccaggtttctgagacatctttggtttctaatatcttcc

SEQ ID NO: 127752 - DNA, 100 bp, Homo sapiens
tcttggatttggctacacacttatagatcttctgcactgtttacaggcacaggaatcccagtcagaagttccagcctgccactgttctctgatgccatgc

SEQ ID NO: 127753 - DNA, 75 bp, Homo sapiens
ttcaagttaaggtccaaaaaaactccagctgtgaaagcaacataaatgaaaccagccttttaaagttccagttag

SEQ ID NO: 127754 - DNA, 82 bp, Homo sapiens
ggaattgttttggcctaggatcatccagatgaagatgtgtgtgtctttaagtgctcagtgtcccgagagacagagtgcagcc

SEQ ID NO: 127755 - DNA, 80 bp, Homo sapiens
tgcgtgggggaccggctgttggcggcaaccttggccatggaccagccggctggcctgcaggtggactacgtcttccgggg

SEQ ID NO: 127756 - DNA, 83 bp, Homo sapiens
ggggctccgtaactttctatccgtccgcgtcagcgccttgccaccctcatctccaatatgattcctggtcgggtggcttccag

SEQ ID NO: 127757 - DNA, 96 bp, Homo sapiens
gacctccagcgactcctggagatagactccgtaggtgtacgtgaacggagagtgggtgaccaacatcagcgagggaggcagcttcggggagctggc

SEQ ID NO: 127758 - DNA, 50 bp, Homo sapiens
agcatcttctacgtgcccgacatgcgctagtcctgctgatgggcaaagaa

SEQ ID NO: 127759 - DNA, 75 bp, Homo sapiens
caaccctgtcatggaagcttttgggagaaaactggttgtcctggatgtttgaaaagttggtcgttgtcatggtgt

SEQ ID NO: 127760 - DNA, 75 bp, Homo sapiens
tgggctactcagtttacagccactgcagtatcacagccaggaaggtggagtgtttacttttggagctggagggta

SEQ ID NO: 127761 - DNA, 100 bp, Homo sapiens
tgaagaacttccagatcatccatggcaatgaccgtcatttgaaccaattctccgcctccttccccagggaatctctcctgtcagccagcactgggcaacc

SEQ ID NO: 127762 - DNA, 74 bp, Homo sapiens
tgtgccctagcaccccgagaaccgtcagtttgagccagatggatcagtttgacaacttagaaaaacacacacag

SEQ ID NO: 127763 - DNA, 51 bp, Homo sapiens
tcttatgatagtagcatggagtcacggcaagaagttatgaaatggaatgga

SEQ ID NO: 127764 - DNA, 75 bp, Homo sapiens
gctgaacaagaagagagccatccccaatcaggttggattagcttttcaaaacagaaattcttggaaagaattaaa

SEQ ID NO: 127765 - DNA, 90 bp, Homo sapiens
aatatgatggcaaagtagatgtgtggtctcttggaataacatgtattgaactaggcaatacagtacggtactgaggataacagtactgca

SEQ ID NO: 127766 - DNA, 100 bp, Homo sapiens
gagactcagccacccagagtggagcagtggtgaatactggattgatcctaaccaaggatctgttgaagatgcaatcaaagtttactgcaacatggaaaca

SEQ ID NO: 127767 - DNA, 108 bp, Homo sapiens
gcagcctcttcgagcgccgcggacgcgtcatcgagtgtgacgtggtgaaagggggggccctcagcctcttggccttgaacgggctgttcatcttgattcacaaacaca

SEQ ID NO: 127768 - DNA, 82 bp, Homo sapiens
acaaaattaaccgggacactccatcgcctcagggcgcctcggaaaccaggagatcatgagattctggctacattggagattg

SEQ ID NO: 127769 - DNA, 75 bp, Homo sapiens
gaaattctggaacacctatatgccaaggccacctttgatgccatttctaagacctacagctacctgacccccgac

SEQ ID NO: 127770 - DNA, 100 bp, Homo sapiens
cctgggtgccgtggcatgtcgatttgtccttcactacaggtgagaagccatttaaatgtgatcagtgcagttatgtggcctctaatcaacatgaagtaac

SEQ ID NO: 127771 - DNA, 98 bp, Homo sapiens
atggcctacagggactttctgcagtgcctctgagaacttacgcagatcagccgagcattgaatgccccagaggagcccgaaacctcccaggcttggtg

SEQ ID NO: 127772 - DNA, 82 bp, Homo sapiens
tggaaacagcggatgattctggaactgggagaagatggctttaaagaatacacttcaaggacacttggcattcagggacgtg

SEQ ID NO: 127773 - DNA, 100 bp, Homo sapiens
gaggactcagactgtggaacttccgtgccccccaccctcaccaagcttcagaggatgattccgaagaagacggagaccataacaggacatttgatattgc

SEQ ID NO: 127774 - DNA, 100 bp, Homo sapiens
gtttgcaagcctggctgcgtattagagtcacctaggagcttaagtggcttttgatgcatttccaagtagaataagggcaaaataacatggcagccagacg

SEQ ID NO: 127775 - DNA, 100 bp, Homo sapiens
cgtgaacgacgacggccatgtgtccaacttcgtggagacagagcagtgatcctgccatgaagcagtttctgctgtacttggatgagtccaatgccctggg

SEQ ID NO: 127776 - DNA, 90 bp, Homo sapiens
gcttctgccctgacacaccttctgaaaaaacagccaaaggggtggcggtcgtggattcacagataaagtagatcgactaaaactggcaga

SEQ ID NO: 127777 - DNA, 90 bp, Homo sapiens
aggacagaagaatccgccatgggctactcagtttacagccactgcagtatcacagccagatggaacaagaggctgagaggcgcaggcagc

SEQ ID NO: 127778 - DNA, 100 bp, Homo sapiens
ctcggcagaagaggacatcattgatggatttgccatgaccagctttgtcacttttgaagcgctggagccagctgaacatacccaatgctctccctctatg

SEQ ID NO: 127779 - DNA, 96 bp, Homo sapiens
tgaatctccgcggggaggctcttccaaccaggggctgagcttctgcgctgtggagaagccagctgtttgagatggagaacgtttttactgtgtcat

SEQ ID NO: 127780 - DNA, 127 bp, Homo sapiens
ctggaggacatctgggggccacaaatgctccttctcctggagacgcaactcaagtccttaaaaaaagtcggccaagattccatagtgctgctgatctgcattacagtgtttctctcctacctaccgg

SEQ ID NO: 127781 - DNA, 50 bp, Homo sapiens
cagacagcgagtggcgacgatggtttttaatgaccacaacaagcaagcat

SEQ ID NO: 127782 - DNA, 100 bp, Homo sapiens
aaggacatgaagactaccacatgatgggcggaccccggaggcctgagcggcacctgcccccagccccctgtggggccccggggcccccagaaacctgcag

SEQ ID NO: 127783 - DNA, 87 bp, Homo sapiens
gagaggccacagcccggactccatcgactcccccggctcttagactaggccaattcctgtccccccagcagcatggcatcgtgtgct

SEQ ID NO: 127784 - DNA, 75 bp, Homo sapiens
atcgaacagagccgggagttcaagaagaacactccagagggtttgtggatgcacttagatgtttgcaatgagcac

SEQ ID NO: 127785 - DNA, 101 bp, Homo sapiens
agcagttggactgaccattgctgctgcaggatttgcagatcatggccgaacggcgtaatgcccgctgcttggtaaatggactctccctggaccactctaaa

SEQ ID NO: 127786 - DNA, 75 bp, Homo sapiens
ccccaacaagaggaaagacacacctaccaagaagccagtcaagcggccagggccttcatcccagaataatcactg

SEQ ID NO: 127787 - DNA, 100 bp, Homo sapiens
acatgctgagcccaaagatcaggcaggccaggagggcggaaggagagttttacatggaagtggcttacagaaacttggcgctgaggtgcagggaagccag

SEQ ID NO: 127788 - DNA, 121 bp, Homo sapiens
ctccgcgcccccactcgcgctgcgatgacgcgctcactgttcaagggaaacttttgggatggagaacctgttcatcaaccgcttcatgcacatgttccagtcttcttggaatgacttcgcc

SEQ ID NO: 127789 - DNA, 75 bp, Homo sapiens
actactactgcaagcgccccatctatgagttcaagatcacatggtggtctacttccagtggaggtgagaatgggg

SEQ ID NO: 127790 - DNA, 99 bp, Homo sapiens
gagcttttgattaacaccttaataaccagcggagctgacacagccaagaatgtatacaaagactatcgcttccttgagctggcatgtgattcccaggag

SEQ ID NO: 127791 - DNA, 97 bp, Homo sapiens
ctgcagcagacagctccctgggcaccaggcagctaacagtgtgtttgaagaaactgacacagatttacaagagctgcaggcctcgatggaacagtta

SEQ ID NO: 127792 - DNA, 102 bp, Homo sapiens
aggcatttccagcccgcccacccagtactatactggcaattgctggagaagattttgcaattgttgcttctgatactcgattgagtgaagggttttcaattc

SEQ ID NO: 127793 - DNA, 98 bp, Homo sapiens
tccgctgtgcccgggcctgcaccatgagcgtcccggccttcatcgacatcagtgaagaagatcagatggccgccaagaacgagtcatgtttgacaaaa

SEQ ID NO: 127794 - DNA, 101 bp, Homo sapiens
cagaacagcacgtaccagaggtggaagtccaagtcaaacgcagaaggactgcctcactgagcaaccaagaatgggccaaggttgctcgggtgattggttta

SEQ ID NO: 127795 - DNA, 88 bp, Homo sapiens
gtcggcggctcagttgtccatgaccctgaaggtccaggagtacccgaccctcaagtggttcagcactgagtcatgcttgcttctgcta

SEQ ID NO: 127796 - DNA, 90 bp, Homo sapiens
gctggaattatgggcgtgagccactgtgcccaggttcactactgtgatagacaaagtggcaaagagtgtgtgacctgtctgacattagcc

SEQ ID NO: 127797 - DNA, 100 bp, Homo sapiens
atggactgctatctccgtcgcctcaaacaggagctgaatcaggaaacccaggcccaacggcaggtggatgcaagaagaaatgttccccaaaacgacccag

SEQ ID NO: 127798 - DNA, 90 bp, Homo sapiens
catgtctctgaccatctggacggtgtgtggggtcctgtcactatttggtcttgggctggcacgaagagctgcccggccagagcatcccgg

SEQ ID NO: 127799 - DNA, 82 bp, Homo sapiens
aatcccctcgcttatcctgtgggggccgccgggctgcggcaaggctggtggatgaccgctgtgtggtggagcccgcggccgg

SEQ ID NO: 127800 - DNA, 51 bp, Homo sapiens
gccggagatccctcagccctggctggaattcatcatacattcccctgattt

SEQ ID NO: 127801 - DNA, 100 bp, Homo sapiens
ggaacaaaattgtatctgtttttctcagaagagaattccacaagatggtttcacccaaatatcactggtgtggaggcagaaaacctactgttgacaagag

SEQ ID NO: 127802 - DNA, 58 bp, Homo sapiens
tgctcggggtccgcgcggcctccgcggagccagacctgcctgaccagtgcacgcccaa

SEQ ID NO: 127803 - DNA, 83 bp, Homo sapiens
cgagaggcccgggagcggcgcgcagagcagcctccggccgccgccgcgcaggtgtccctggccagtgtccttccacctgtcca

SEQ ID NO: 127804 - DNA, 75 bp, Homo sapiens
ctcaatttaagcctgatctaacccctagaaacagaggatgaagcatcttcccaaactgatttaagccaaacgatc

SEQ ID NO: 127805 - DNA, 76 bp, Homo sapiens
gaaaaaccgggagacacacaatgcagtttttgcagggcactatggcaatttgaatgcttagaattttaaacctgaa

SEQ ID NO: 127806 - DNA, 100 bp, Homo sapiens
ctgcccacctccacaagggcttcctggccctctaccaaaccgtggtgtccagctctgaagggcaaagtgcagaagatcctaatctggaagtggggtcagc

SEQ ID NO: 127807 - DNA, 75 bp, Homo sapiens
ctgagctgttcctcccagctacgagctgccccaggtgccgtgagcgatgtggagatgcaggaacactatgatgag

SEQ ID NO: 127808 - DNA, 50 bp, Homo sapiens
atggattcagcacaagtagcaggtcgacatgttaaaacgggtcagttggc

SEQ ID NO: 127809 - DNA, 75 bp, Homo sapiens
gtgaatttccatgtcaacatagtcctgccagaataaaagctacttggccgtaaggctaaaagaccaagatctgag

SEQ ID NO: 127810 - DNA, 50 bp, Homo sapiens
caacaagatgaccgcaatccccttagcccgcggttcccttcaaaaagcgg

SEQ ID NO: 127811 - DNA, 78 bp, Homo sapiens
agtacttggagagactctatatgaaaaggaactccctgacatccttgcatgattccacctttccactgatagactcaa

SEQ ID NO: 127812 - DNA, 98 bp, Homo sapiens
gggccccggacgccgcgcggaaaaggtgtggaaacaggaagagaactagaactggaagtaaagcattgaagatgtgactgaattgctgcaatctcatg

SEQ ID NO: 127813 - DNA, 82 bp, Homo sapiens
cagatggtcagtttaaagatatcagcctgtctgactacaaaggctgagtatgagtttatcagctctggtctctacctagtgg

SEQ ID NO: 127814 - DNA, 100 bp, Homo sapiens
ggcgggaccataagggcttaactcatatatttaacccccctccaaaaaatgatgtcagttcatacagactgtattgtgtcagtgcagattttaagtacat

SEQ ID NO: 127815 - DNA, 100 bp, Homo sapiens
ctgacacctcccaccatggacagcttcgacttagccctgctccaggaatgggacctcgagtcactgtgtttccacctggatgtttgaggttgtgtagatg

SEQ ID NO: 127816 - DNA, 49 bp, Homo sapiens
gttgccttggtaggcaataaaaacccctttgctgatgcaagtaagggtg

SEQ ID NO: 127817 - DNA, 90 bp, Homo sapiens
gctggcgagccagatgcggaggctggcggccgaggagctgggggtcgtcaccatgcagctataaggaagaccagatggatgagaaactaa

SEQ ID NO: 127818 - DNA, 100 bp, Homo sapiens
aattcgtccactcccttgacctcaggaccctacccagggttctagaaatccaggcaggcatctatcttgaaggttgtcttttggaaatgcaggtttaagg

SEQ ID NO: 127819 - DNA, 100 bp, Homo sapiens
aaagaggagagtccatggagaagtggcagaccaggagaaggtgtttgagctgatgaccagcctccacaccaagctagaaggcttccacactcaaatctct

SEQ ID NO: 127820 - DNA, 82 bp, Homo sapiens
acgggatttttagcccagcccatgaagcctacaacacagcagtcccctcaggatgagcaggaaaagctcttggatgaagcca

SEQ ID NO: 127821 - DNA, 82 bp, Homo sapiens
atggcgagtgctttgtgatcgaaaccctgaccggatcccataaacactgtcggattttttatcaagcagaaatgcatcgaac

SEQ ID NO: 127822 - DNA, 75 bp, Homo sapiens
gagatgtgatgttggagaactacagaaacctcgtctccctgggacacagcattgttggttttgccatgtactatt

SEQ ID NO: 127823 - DNA, 100 bp, Homo sapiens
aggcgggagtgcccggctcgctgtcgcagagccgagagctgtgggaacctttgcaagagccctagattgtagcagctccattcggcagccaagcttgcac

SEQ ID NO: 127824 - DNA, 83 bp, Homo sapiens
ccgactctttgggccgttatctcaccttcatggcggctgaagagatgcattggcctgtccctatgaaggccattggtgcccag

SEQ ID NO: 127825 - DNA, 75 bp, Homo sapiens
ttgaaacagcaatcaaaaggactgaagtggggttaagaattgaccctgctacgggaatggttatgaatctggctg

SEQ ID NO: 127826 - DNA, 100 bp, Homo sapiens
gactgcactcacacgacgtgcgctatgggtcaggagagattaaacagattctagaaaatgaacttcagatacctgtgtccaaaatgctgttaaaaggctg

SEQ ID NO: 127827 - DNA, 101 bp, Homo sapiens
gccggaggcggctccgctcggccggcgcggcgcagaagaaacccgcggcgaccacagccaaagcgggcgtgaaaattagttctgctgtgcttaaagctgcg

SEQ ID NO: 127828 - DNA, 51 bp, Homo sapiens
cttgcatccacagtaaacaggataatcagggaggctatggatcagttggaa

SEQ ID NO: 127829 - DNA, 100 bp, Homo sapiens
ggagaaccgcggggacagcagccggccagccggggggcactgcccgcccgggctctgaatttcgctaaggagtttgtgatcagtgatcggaaggagctgg

SEQ ID NO: 127830 - DNA, 75 bp, Homo sapiens
gaaggtgaagatggctgcctctgcctttgctggtgcagtgagagcagcttcagagtattgttacaatcacatttg

SEQ ID NO: 127831 - DNA, 82 bp, Homo sapiens
accctggggactacgacgtccctcaaaccttgcttctaggagataaaaaggtacttcctatttaacagacattgtgtggtgg

SEQ ID NO: 127832 - DNA, 78 bp, Homo sapiens
gagtataaagcagctgtcacacttcaaagagcatttgccaaagaaactagagtgcataaaaacgtctatttgcaacca

SEQ ID NO: 127833 - DNA, 100 bp, Homo sapiens
gttggggctgtgggacttcgaaggagggctctcctgtctgccaccatcctgggttgacaattctacacaaggaggttactataacaacagtaccaaggtg

SEQ ID NO: 127834 - DNA, 82 bp, Homo sapiens
agcagccaagatggtgaagcagatcgagagcaaggtgtcgtgaaaactacccctaaaagccaaaatgggaaaggaaaagact

SEQ ID NO: 127835 - DNA, 100 bp, Homo sapiens
ggagaaaaagcgcaaagaggagaatgaagatccagaaaggaaaataaagaagaagggcttcggcgccatgctgagggcctattccactagaagcaagatg

SEQ ID NO: 127836 - DNA, 75 bp, Homo sapiens
tggattgctagtacctcaggctcaaggagcagtatcaattctgttgatgggatgttcgtctaaccccagaagact

SEQ ID NO: 127837 - DNA, 76 bp, Homo sapiens
agatcgcaggaccgtggagaagacttggaagctcatggacaaagtggaacttgtaatagctggcatcgttgagaat

SEQ ID NO: 127838 - DNA, 74 bp, Homo sapiens
gtccatgccaagcttactgtcctccgagacctcagttggatgaacccattccactgtatgaggcaaaagtttcc

SEQ ID NO: 127839 - DNA, 83 bp, Homo sapiens
cggagcagcgcgtcgtggggcgagcggcaggtgatccgcaggggctggctgaccatcaacaacatcagcctgatgaaaggcgg

SEQ ID NO: 127840 - DNA, 73 bp, Homo sapiens
cccatttgtgtccattgatctcttggagcagctggggatcatgggacattaatcgagagacaaagaaggcatc

SEQ ID NO: 127841 - DNA, 75 bp, Homo sapiens
gtcaaagctccaactggaggccaccctgtggttcagggccgttgctccagggagaactgcaaatatcttcatcca

SEQ ID NO: 127842 - DNA, 75 bp, Homo sapiens
cagcctgtctgggatatcatgtttcaagtggctgtgccaaaggtatggttccgaccggcgtttagccgagctctc

SEQ ID NO: 127843 - DNA, 87 bp, Homo sapiens
tccggaacagcgccgaggccttcaagtgcatgatgtgcgatgtgcggaagggcacctccacccgggctggaccccaatggagaacag

SEQ ID NO: 127844 - DNA, 90 bp, Homo sapiens
gcaggtcgtcatcttcataggctcgctgctcgcatgcagcagattggaataaatatgatgaccgattgatgaaagcagcagaaagggggg

SEQ ID NO: 127845 - DNA, 49 bp, Homo sapiens
gccaggcttctggggctgactcaactggggctttgttatgcacctaaag

SEQ ID NO: 127846 - DNA, 100 bp, Homo sapiens
caccgtgacatccgaggtgcctttctccaaaaggaggccatgctctaccacaaccagaccgccgagctgcgggagctgctggagttcacccacatgtacc

SEQ ID NO: 127847 - DNA, 100 bp, Homo sapiens
tggtgctttcacaaagataatagaagccatgggattcacgggacctttgaaatacagtaaatgggtgttcaagcagccctggccagggatcatgcgcaca

SEQ ID NO: 127848 - DNA, 75 bp, Homo sapiens
gatcgcagtccggaggtgaggcggaactctgagaccttattgcaatatgcaagcaacaagaatgcatcagaacat

SEQ ID NO: 127849 - DNA, 100 bp, Homo sapiens
ctatagagatctatttgaagcttcatgacaacccccttacagatgagaataaagaacacgaagctgatacaggagtctgctacaccatttttgatttggg

SEQ ID NO: 127850 - DNA, 101 bp, Homo sapiens
catcttttgacaagatgtcacctgaaagtggtcacagccgcatctttgaagaaaagaggcacagttagatgaagaaggacagtttcttgtcagaataatat

SEQ ID NO: 127851 - DNA, 101 bp, Homo sapiens
gactcggtcctgtttcgacagcgaacatgtcgcggcctgtcaggtgcaggctgccccatggatgccacacgtggcagcggggagaaaagaagtgattcggt

SEQ ID NO: 127852 - DNA, 98 bp, Homo sapiens
caaggggcggccgggcgcggccgaaatggtggagtcaatgaagaaagtagcagggatggatgtggagctgacagttgaagaaagaaacctcctatctg

SEQ ID NO: 127853 - DNA, 101 bp, Homo sapiens
cctttcccgctggcgcgcagcctcagctaggtacatggaacgctgcatgtcacctcctattagcatggcagaaacctctgctgtgtgcacggcggcttctg

SEQ ID NO: 127854 - DNA, 97 bp, Homo sapiens
ctacgctctccatcgggcagccagaggcccagcgtctccgatgacactggtcctagcagaagatgtgactcagactgcctctgggtggggctggctg

SEQ ID NO: 127855 - DNA, 58 bp, Homo sapiens
ggaacgcgacggcggcgcccgcagaaaaaaccgggaagatcctgacggagttcctcca

SEQ ID NO: 127856 - DNA, 75 bp, Homo sapiens
agatggtgacaagctcaaggcctgcgagaattgagcggctggccaaggatattatgaaagacataggatatagtg

SEQ ID NO: 127857 - DNA, 101 bp, Homo sapiens
cgggtggcggtggtgtgctcgagcaaccagaaccggagcatggaggcgcacaacatcctcaggtgctggaaacatgcatgaagagctgcggcaagcggttc

SEQ ID NO: 127858 - DNA, 75 bp, Homo sapiens
gctgctgtcttcaatgctgttaactggattgagtccagctcttgggatggtacaggatttgatggggatcagtgc

SEQ ID NO: 127859 - DNA, 100 bp, Homo sapiens
cagagctgtcatggctgccatctctacttccatccctgtaatttcacagccccaggataagttctgaacgtcgaaaagaaaagtctcgagatgcagccag

SEQ ID NO: 127860 - DNA, 75 bp, Homo sapiens
agcactgcctctggcatccccgacttcaggtgtttctcaaaggactgggatgtcactgaatatggtgtttgtgag

SEQ ID NO: 127861 - DNA, 100 bp, Homo sapiens
atgcatactccacagcacctgaatatttctcttagaagatgacatccatgtttcctgatgcttgttttattcatacaagattggatttgagacccatcag

SEQ ID NO: 127862 - DNA, 90 bp, Homo sapiens
ttatgagctgctattgaacacggcagtaggttcagctgcagcccggaaagaaatcataagaaacaaaattcgagcaattggcaagatggc

SEQ ID NO: 127863 - DNA, 74 bp, Homo sapiens
ggaaaacctggccctcttcaatttctgacaaaagttttacatgtggcacccataaaagatgaggctgagaacac

SEQ ID NO: 127864 - DNA, 83 bp, Homo sapiens
cttcggcagtccacccaccgccgccgcctcccagaaaatgtttcgatgaaagatcctccggacttattggacaggcagaaatg

SEQ ID NO: 127865 - DNA, 113 bp, Homo sapiens
tctcgctggtctacctgctcttcctgctgctgctgccctggttccccggccccacccgatgcggcctccaaggggtggccgtgactggggagagcacaaccagcggctagagg

SEQ ID NO: 127866 - DNA, 75 bp, Homo sapiens
tttacccgactctttgggccgttatctcacaacaaaatccagtctcatagcagaggagaatataatgtttacagc

SEQ ID NO: 127867 - DNA, 74 bp, Homo sapiens
tgggggtgtgcaaacccgagagaactggaataactgaagtgaagtgatggactccgatttggagagtagtaaga

SEQ ID NO: 127868 - DNA, 71 bp, Homo sapiens
gcaggctgtggagatggatcggacgctgcacaagatcaaggtggaccccaagttcctgaggaacatgcgct

SEQ ID NO: 127869 - DNA, 100 bp, Homo sapiens
atgtcatgtgattcagcctaatatctcagtgctggagaatctggtaaaagcaccattgtgaagcagatgaggatcctgcatgttaatgggtttaatggag

SEQ ID NO: 127870 - DNA, 100 bp, Homo sapiens
ctgacggcaacctctacaaggccaagttcatctcctccgtcaccagccacatctaccagcaaccatgtccaagggacctgcagttggtattgatcttggc

SEQ ID NO: 127871 - DNA, 75 bp, Homo sapiens
gaacaagatgatcaagatggctcttcatggaaatgcattgtcaggtcaagccgaaagggacggcaaagaagtatg

SEQ ID NO: 127872 - DNA, 75 bp, Homo sapiens
cctttcctaggacttctggggccaggttctgcggagcaggatggaactccaacctcgaaaacatttgaacacgtg

SEQ ID NO: 127873 - DNA, 98 bp, Homo sapiens
aaatctactgcgtggcttgtcaggaactcgactcagacgtggataaagataatcccggaatactcccccagttgcaagaggcgcaggaccgtggaaga

SEQ ID NO: 127874 - DNA, 83 bp, Homo sapiens
catacggctggttgacggaaatccgtgctgtgtatcctgctttcgacaagatgaaaaagagaggtttgaccctactcagtttc

SEQ ID NO: 127875 - DNA, 100 bp, Homo sapiens
ggagcctcagttggaagcagccgatccagcctgcggagcctgtggggcagatggactcaccctgtcacccaggttggactgcactggcctcaacctcctg

SEQ ID NO: 127876 - DNA, 101 bp, Homo sapiens
gcagaattctgtgaaagtcgacaattaagtttctataggtgaaaatggtgatcccaaagccttcttaatagagatttcctggacagaaacatatccccaaa

SEQ ID NO: 127877 - DNA, 100 bp, Homo sapiens
ccgtatgggactttgggcgctgtgagcggcggcgagcaggtacccggaaattaaagaggagctggaggagctggaccgcatcacagagcagacgctcttt

SEQ ID NO: 127878 - DNA, 51 bp, Homo sapiens
cctggaattacattgaatatacaggtggataatattaatgcagctgtgatg

SEQ ID NO: 127879 - DNA, 108 bp, Homo sapiens
aaaaaggaagaattgacccttgaaggaatcaaacagttttatattaatgttgagagagaggaccctgatgctcccataagacagaaaatgccccttgatgatctggat

SEQ ID NO: 127880 - DNA, 110 bp, Homo sapiens
agaagcaggagccctactcggcagttctttatcaacaagactgagattgaggactttccccgctttcctcaccggggcttgctgttggatacatctcgccattacctgcc

SEQ ID NO: 127881 - DNA, 75 bp, Homo sapiens
gaagaactgaagcaggaatggaaatttgtcagtgaagaaggcaattgaaggaacagactaaaaatcgtgtcctgg

SEQ ID NO: 127882 - DNA, 90 bp, Homo sapiens
cagacaccttcagagtgaagaggccacatctcaggcgctctgccagcaacggccatgaccttgcctcctttcctggagttcggtgtcccg

SEQ ID NO: 127883 - DNA, 100 bp, Homo sapiens
acttgtgacaggctggttaaagcagcaaagcgagcccacagcctcggtgccccccgagtcggacgtgtaccggatgctccacgacaatcggaatgagccc

SEQ ID NO: 127884 - DNA, 100 bp, Homo sapiens
ctgatccgtggacttctgtatgatcaggtgctggaaacatgcatgaagagctgcggcaagcggttccacgacgaagtgggcaagttccgctttctcaacg

SEQ ID NO: 127885 - DNA, 100 bp, Homo sapiens
aacatgatggagtacctgttgcaggggaaaatgccaagtggaataaaaaccaacatcaagtcggcttccatgcatccctaccagcggtgagtgtggctgg

SEQ ID NO: 127886 - DNA, 89 bp, Homo sapiens
ccccaagaagaccattcagatgggatctttccggatcaatccagatggcagccagtcagtggtggagggtcttgctacgtacgttgccc

SEQ ID NO: 127887 - DNA, 78 bp, Homo sapiens
cttctgccccagctccgtctcggcggcggcggactgaggctgatgtgaatccaaaggcctatccccttgccgatgccc

SEQ ID NO: 127888 - DNA, 75 bp, Homo sapiens
gactacaggagaattcggtttgtaggtcgtcagaaagagatcgtaaagctgaaaattgaaatcatgaaagtagac

SEQ ID NO: 127889 - DNA, 83 bp, Homo sapiens
ccgaccatggcctccaaatgccccaagtgcgacaagaccgtgtacttcgattcctggtcgggtggcttccagtggtcttcagt

SEQ ID NO: 127890 - DNA, 74 bp, Homo sapiens
tgacccagaggagagttctccaaacatgatcgtttactgcaaaatggatagctcccagttgatccattgtcggg

SEQ ID NO: 127891 - DNA, 99 bp, Homo sapiens
gtttcctatagatgagaaaccatacaagctgtggtcgaactggaaggtacacccttatagagaaatggagagatactgaaagacacttagcacctcatg

SEQ ID NO: 127892 - DNA, 90 bp, Homo sapiens
atccccattccctatgtattcagagacggtggatctcatcaagcagtgtatcacaatgtgaagccagcagctttgcagcagcaattagag

SEQ ID NO: 127893 - DNA, 75 bp, Homo sapiens
ggatatctctactcgctccaaaggcatgaacaaccgggaggtgctggagcaggtggagcgaggctacaggatgcc

SEQ ID NO: 127894 - DNA, 98 bp, Homo sapiens
cttcaccatctatgtcctctggacgctggcttccaaaagccaggatcgcaaatcagccagcagagagaagcggtccgtcgtgtcctttgataaggtca

SEQ ID NO: 127895 - DNA, 100 bp, Homo sapiens
cctgtgagcccataattcagaacttctgccacgtcagaatggcggcagtggagcatcgtcattcttcaggattgccctactggccctacctcacagctga

SEQ ID NO: 127896 - DNA, 100 bp, Homo sapiens
ttcttttcttcattcatgaaaatgcagatccactgagaaagggaataagcatacatctgtggatggatatactgaaccacacatccagcctaccaagtcg

SEQ ID NO: 127897 - DNA, 100 bp, Homo sapiens
ctgcttgcgactgcggaggccgggcgaggccggtgaggacgcggcgggcgagcgagaggccgaggatgatgattattccccaccttctaagagacaaaga

SEQ ID NO: 127898 - DNA, 90 bp, Homo sapiens
gcggcagagagggaatggtgcaggcaggcgctgagaaggacgcgcagtccatctctctcaggttggacggcaattagaagctgagcaggc

SEQ ID NO: 127899 - DNA, 96 bp, Homo sapiens
cctgaacagttgcactgtaaaaaacccagctgaagaccactttagaaactcaattaaaatgaaaatgcggttcttggggttggtggtctgtttggt

SEQ ID NO: 127900 - DNA, 100 bp, Homo sapiens
ttggtcgctactatcgtgtggcattttatgggcagcttttggaaagaacaaacagtggatttgaagaatcagattctggtgctactaagagtccactcca

SEQ ID NO: 127901 - DNA, 100 bp, Homo sapiens
cctgattgcccccgggtctcagcagaatggattgggatgatgaatattctcataattcttttgacctacattgtttgttaaactcatttcctggagactt

SEQ ID NO: 127902 - DNA, 50 bp, Homo sapiens
aaaagtagggcttctcaaggagaaaccgaaacttcattgccccttcaatg

SEQ ID NO: 127903 - DNA, 75 bp, Homo sapiens
agctgtcactgagcccctggaacagagcgagagtatcaccctggaggaggagctatttgggaacaatgaggagag

SEQ ID NO: 127904 - DNA, 75 bp, Homo sapiens
atcagttcagtatcgctacttcaaagggtactttttagaaccaaagcctggctgggaagaaagaattcacttgga

SEQ ID NO: 127905 - DNA, 82 bp, Homo sapiens
cgctgcgcggcgcggcggccgggccctcgagacggggacggtgcagctctgtcatttccactctgctctgctgcacagaagg

SEQ ID NO: 127906 - DNA, 100 bp, Homo sapiens
ccgtggaataggtgtatcaagtaatggtgcaaagcctgaaaacgagatggctatttatgaattcattcataactttgtggaagttttagatgagtatttc

SEQ ID NO: 127907 - DNA, 100 bp, Homo sapiens
ctcattcaaggttacccagttgattttaggtgatgggcaagtcagaaagtcagatggatataactgatatcaacactccaaagccaaagaagaaacagcg

SEQ ID NO: 127908 - DNA, 136 bp, Homo sapiens
acaaggcagctcgctctgggagcctagaatgcatcagtgcccttgtggcgaatggggctcacgtcgacattgatatgaaccatggacaagtatattctgctgccacaaagactgtaaagtgcttcatttcaacagc

SEQ ID NO: 127909 - DNA, 74 bp, Homo sapiens
gggaaaaaatctcactgggcagaattagaaatctcgggactctcttgcattagggaagagtgaagaagaagcac

SEQ ID NO: 127910 - DNA, 72 bp, Homo sapiens
gcgactgggaggagcgccggaacgccgaggcccagacggtggatgtgatggcagaagacagagacaccattc

SEQ ID NO: 127911 - DNA, 101 bp, Homo sapiens
cggcgagcagggagcggagtaccagcacttcatccagcagtgcacagagaattctgccagatatcaggacagatggggaacagcagaagccgtgtggggcg

SEQ ID NO: 127912 - DNA, 136 bp, Homo sapiens
ccaaatagcagaagaataccatgaggtcaaaaaggaaatcaccctgcttgagcaaaggaagtgacagagctgaatgaacctctctccaatgaagatcgaaatctcctctctgtggcctacaagaatgtggttggtg

SEQ ID NO: 127913 - DNA, 80 bp, Homo sapiens
gagaactggttctacacgcgagctgtgggctaccttgagaatggagcgaggagccaaggagaagaaccaccagctttaca

SEQ ID NO: 127914 - DNA, 100 bp, Homo sapiens
gttccaagatggtttgcgggggcttcgcgtgttccaagaactgcctgtgcgccctcaacctgctttacaccattcccgatacattcttctgcctgtcgtg

SEQ ID NO: 127915 - DNA, 75 bp, Homo sapiens
atgagatttacctgtgagatgtttcatcccaacagtgggaaagcagtgccactctccgcttcacagatgccccct

SEQ ID NO: 127916 - DNA, 102 bp, Homo sapiens
ccacaagcagatctactactcggacaagtacttcgacgaacactacgagtaccgacaatgcagatcttcgtgaagactctgactggtaagaccatcaccctc

SEQ ID NO: 127917 - DNA, 83 bp, Homo sapiens
ccaatggggagcagaaggactcggacacaggctgtctgtccccagaccccagagcacgtccggcaccaccatgactgggctgt

SEQ ID NO: 127918 - DNA, 82 bp, Homo sapiens
aagaactcgagcgacagagacaagctgagcttgccgcacaaaaagctagagagatcctctgccttgtcaatgttagtcacaa

SEQ ID NO: 127919 - DNA, 75 bp, Homo sapiens
gcgctggctggtcagctgtgccacagagattgggttccccactgaaggacttggtccagctgtctggcagggagg

SEQ ID NO: 127920 - DNA, 111 bp, Homo sapiens
gacacacctccattggatttaaaagacagtcctcgtcagcactgactttcagctatggaatcgcctgcctgctccgcttcagcggactctcgctggtctacctgctcttcc

SEQ ID NO: 127921 - DNA, 51 bp, Homo sapiens
atggatgtgatgcctgctagccaaaaggacaaatgctgtgcttcatgaagt

SEQ ID NO: 127922 - DNA, 83 bp, Homo sapiens
ccagaccattgattcccgactgaaggagagaacattgaaagtattctctaagctatttgaagagagtgactaaatgcacctgg

SEQ ID NO: 127923 - DNA, 82 bp, Homo sapiens
gttcttaaggcctgatagacaaggtgttacacagcaacaattcaagagcataaggaaacccagcccagagccacgagctcag

SEQ ID NO: 127924 - DNA, 75 bp, Homo sapiens
gagagatgccatctacaaagaattctccttccacaattttaatcagactgtggatattcataaggagaaagtggc

SEQ ID NO: 127925 - DNA, 88 bp, Homo sapiens
aatggttgccttttcttcattatcaagagatggtgagttgtcctcctgggctcacaacgaagtaagacagtagatgacaattctgcaa

SEQ ID NO: 127926 - DNA, 83 bp, Homo sapiens
acagcggctgtatccgacgccgcgagttcgcgttcccagtgacctgacagcagaggagcgtcaagaactggagaacatccgac

SEQ ID NO: 127927 - DNA, 75 bp, Homo sapiens
tgaagaaacttgcaaaagtatctcatatgaccagtggacgcacaagaccagccactgctaccgcatcacgtaccg

SEQ ID NO: 127928 - DNA, 88 bp, Homo sapiens
tgaaacaatcggtacccttgcctttctcacatcagttccgatgaagttaaattccgtcaagatttaatgaatattgcgggcacaacat

SEQ ID NO: 127929 - DNA, 49 bp, Homo sapiens
cggaggccatgtttggagtgggatgagggaattggggcttggagtgcaa

SEQ ID NO: 127930 - DNA, 100 bp, Homo sapiens
agaagctctgaatcgtgttcctgaatgaaagaagtcagctaatgggaatgacagcaagaaatttaaacgagatagacctccctgttcgccttcccgtgtt

SEQ ID NO: 127931 - DNA, 83 bp, Homo sapiens
tgatgaagttcgagcactaatatttaagaaagaagatgttaactttcagggtgttgtcacaaattttgaaattttccgaatga

SEQ ID NO: 127932 - DNA, 82 bp, Homo sapiens
caatatctgtcttcggtggactccttcggcagtccacccaccgccgccgcctcccaggcgacgttgtggacgtttaccagcg

SEQ ID NO: 127933 - DNA, 75 bp, Homo sapiens
gccccagccactgctcagtgtggagtatctcaaagcctttcaggctgtccagagattccgttggtgaacctgtaa

SEQ ID NO: 127934 - DNA, 100 bp, Homo sapiens
cacatctgtgtatgataaaaacaatcttttgacaaataagggtgttggaactcgccataaggcattgatcaggattatggtttcccgttctgaaattgac

SEQ ID NO: 127935 - DNA, 96 bp, Homo sapiens
ctcaggtggactgaaggccgctatgatcgaattggtggaaaggttgaagttcaagagctcagaccctaaagtggatccaaccgaagagaaaggggt

SEQ ID NO: 127936 - DNA, 100 bp, Homo sapiens
ctgatgaagaccttgaacaagtctcgagagtggaaacaactctcacgccaatggaagcactgttgtgaagaacttatgaaaattgagattatgtcaccac

SEQ ID NO: 127937 - DNA, 75 bp, Homo sapiens
agaacctgcaattacatcgcagaacagccctgaggcaagagaagaaaggcagagaacatttataatgatgaagac

SEQ ID NO: 127938 - DNA, 101 bp, Homo sapiens
agtttgaggatgaagacctctcggagatcactgatgagtgtggcatcagcttacagtgcaaagacaccctgtccttacggaactgctggtgaggacactgg

SEQ ID NO: 127939 - DNA, 100 bp, Homo sapiens
atggtagctagaggggagatagcaagattctggagtctggaaagccttcacttggaaccagacttctcctacctggaagccctggctccttaccagccgc

SEQ ID NO: 127940 - DNA, 83 bp, Homo sapiens
agcagaagagaaagccagttatccacggactggaagatcaaaagagggttattgcagctgactgcaaaagggtcacagtgctg

SEQ ID NO: 127941 - DNA, 75 bp, Homo sapiens
gtccaggagctggcatgacgtgcaggtctctagcgcggaagatttaggattcagatttatatcggaacaggtcag

SEQ ID NO: 127942 - DNA, 100 bp, Homo sapiens
aatggagtgacacaaggtgatagacttcgggccttgaaaagcagaagacaatccaaaacaaacgctattcctctcacaccaggtgataggtttgatcgag

SEQ ID NO: 127943 - DNA, 80 bp, Homo sapiens
cagagcaagttttctgaaacgtcccttcagatatttcaacactcctctcagcatcctccacttcccccatctctccaagc

SEQ ID NO: 127944 - DNA, 100 bp, Homo sapiens
aaggatctcaagagcaggacgaattgcatcacagagacaccaaggtccatgtgaaatctgaggtccttgctgtcaagttgtcacaagaaataaactacgc

SEQ ID NO: 127945 - DNA, 50 bp, Homo sapiens
aagaagaagggcaagaaggcgccagcagctttttacctgcacctactcag

SEQ ID NO: 127946 - DNA, 85 bp, Homo sapiens
ggacggtttcgccggcagtctcggtacggaaaaaggaccagatcaatattgaaacaaagaataaaactgttcgttttataggaga

SEQ ID NO: 127947 - DNA, 90 bp, Homo sapiens
caaatccgggggcaaggccaaaaagaagggtcaacatatttcactggcacctattcacaagcttgaagaagctctgtatgaataccagcc

SEQ ID NO: 127948 - DNA, 136 bp, Homo sapiens
cccgccgtcgcagcccccgcgctggtgcagccaccctcgctccctctgctcttcctcccttcgctcgcaccatgacaatgcagatcttcgtgaagactctgactggtaagaccatcaccctcgaggttgagcccag

SEQ ID NO: 127949 - DNA, 75 bp, Homo sapiens
gtggtccagaaaggagagcgcgacatcctctccaacggccagcaggaatatggctcaagcctggaagatgacgtg

SEQ ID NO: 127950 - DNA, 100 bp, Homo sapiens
aggtttggtgccagagattttggtggcttccaagactgctttttcagagacaggtgctgctggtgagtagcagccggtacccagaccagtggattgtccc

SEQ ID NO: 127951 - DNA, 73 bp, Homo sapiens
agcctcctgagtagctgggactgcaggacacgcaggagaaagaaggtattctgcctgagagagctgaagaggc

SEQ ID NO: 127952 - DNA, 82 bp, Homo sapiens
aagaggatcttaaagtgtggtctttagtggaaaaaaagagtgttctgccagttctggataatccactgtccaagaaggttcg

SEQ ID NO: 127953 - DNA, 82 bp, Homo sapiens
gatcatcattaaggacggaggcacggtgagcatgggtttatgcgtcttaggcattattgtgatggcgagcaccaattctctg

SEQ ID NO: 127954 - DNA, 74 bp, Homo sapiens
cacagagaccatattctacggggctttcagcaaatcaaagccagtgccggtggtggtgtgcacattgagccccg

SEQ ID NO: 127955 - DNA, 75 bp, Homo sapiens
taaaaacaagactggggctgctcccatcattgatgtggtgcgatcggctcaggccacagggtcaccacatacatc

SEQ ID NO: 127956 - DNA, 100 bp, Homo sapiens
tggtctgcaaagaagtcctttcaagtctctaggactggactcttcctaagcaagtccgtgatcaacaaatacaagcgcagacgatttcagaaaaccaaga

SEQ ID NO: 127957 - DNA, 80 bp, Homo sapiens
aaaccgaagttggaagtgtctcttagcagcgcgcggagaagaacggggagccaggtaacgcccagtgatgtccgaacact

SEQ ID NO: 127958 - DNA, 100 bp, Homo sapiens
agtgccccttcccatccagaaggtctcagcacactgatgatagtgccttgtgcatggctgatgaattcatccgagcaaatgccaccaacaagctgacagt

SEQ ID NO: 127959 - DNA, 73 bp, Homo sapiens
tggtcctcctggatcgacgccgccaaattacactgctccgacaagtgtgaacatggctacgcctcttcattcc

SEQ ID NO: 127960 - DNA, 82 bp, Homo sapiens
tgctgagcccgtccgtccgccgccaccacccactccggacacaggatgcctaaatcaaaggaacttgtttcttcaagctctt

SEQ ID NO: 127961 - DNA, 50 bp, Homo sapiens
ggcggaggttgtggtgagccaagactgcagttcgtcatgaatcatgcagt

SEQ ID NO: 127962 - DNA, 97 bp, Homo sapiens
tcagtttcttcctaactgtgatccagatgatcctcacagtctccctttatggcaagattgtcatgagttatggagtaaaaagcgaagaagacagaag

SEQ ID NO: 127963 - DNA, 98 bp, Homo sapiens
ggaggagtacatccccacacaggagatccaggtcaccagcatccactggagctacaagacgggacctggacttcaccatcgacctggacttcaagggc

SEQ ID NO: 127964 - DNA, 87 bp, Homo sapiens
ctcttcagtcccagttgacagcttctgaacgtttccaagagaatagttcggatcattcagtgcacagccagagaacaacacatcaca

SEQ ID NO: 127965 - DNA, 98 bp, Homo sapiens
caaacgcagaaggactgcctcactgagcaaccaagagctttgaacttggcctactccagcatttacggcagctaccggaacttcgtgggacctccaca

SEQ ID NO: 127966 - DNA, 75 bp, Homo sapiens
ggaagatcctggaggtggatctgaagaacgggtatgctatacctccggagcatggaaaacgacttgaaagactag

SEQ ID NO: 127967 - DNA, 98 bp, Homo sapiens
gcggcgggtgtgagagtccgtaaggagcagcttccaggatcctgagatccggagcagccggggtcggagcgggtacaccaggggttggaaaaaccaca

SEQ ID NO: 127968 - DNA, 101 bp, Homo sapiens
tgcctgcccccggaggtgcccacgcagctgcctggacaaggggatatgagactttctactcggaatatcctgagtgttgcgtggatgtaaaacccatttca

SEQ ID NO: 127969 - DNA, 97 bp, Homo sapiens
ggatgaatttgcttttctggaagaatttaagggacgctgtgaagcaatcatggatgcaatgaagagagggctctgctgtgtgctgctgctgtgtgga

SEQ ID NO: 127970 - DNA, 75 bp, Homo sapiens
ttttctcatggatgttcttcttcgagtatttgtagaaggggccttcatcctagaataatcactgaaggatttgaa

SEQ ID NO: 127971 - DNA, 108 bp, Homo sapiens
caacgcaatgttcggtgcgggggacgaggacgacaccgatttcctctcgccgagcggcggagctccaaacgagaatggaagccgctggaggaccgtagctgcacagac

SEQ ID NO: 127972 - DNA, 89 bp, Homo sapiens
ggaagtgtgaagcggccaatggcacggaggcctgcgtcagccattgtttgatgtcctgtgactgagaaaccaggctttaaactttatgc

SEQ ID NO: 127973 - DNA, 50 bp, Homo sapiens
gttaaaacctgacacttttaacagatatcggaaactggcactgaagtggc

SEQ ID NO: 127974 - DNA, 101 bp, Homo sapiens
aggaattgctgcccggagtttctgcggaggtggagggagatcaggaaacggcttcttcctcacttcgccgcctggtatcatgatattagctggtttgacat

SEQ ID NO: 127975 - DNA, 75 bp, Homo sapiens
tactgcggtctcggatattgccggagaacggagaccaacctgggctgaagaaagaagattaaatgctgaaacatt

SEQ ID NO: 127976 - DNA, 100 bp, Homo sapiens
tggacgaggactactacgggagcgcggccgagtggggcgacgaggctgacggcggccaggtgttgacttcaaaatcaaaactgtagagctaagaggaaag

SEQ ID NO: 127977 - DNA, 99 bp, Homo sapiens
ctgacgccctcaaggtcgccaaggaggtggacccccagggatcccttggttccagtaccccattatctatgacattcgggccagacctcgaaaaatctc

SEQ ID NO: 127978 - DNA, 100 bp, Homo sapiens
tcgcgctgctgggcacccacggagcctccggggctgctccgctctgcaccgaaggggatgggtccgacccagcctggcatcatcacagcctcgagtggcg

SEQ ID NO: 127979 - DNA, 100 bp, Homo sapiens
cttatgatccccagacaaatgagtggacccaggataaactgcttccctagaaatcctctccagcattcttgccaccacgactttgggacacattgaccat

SEQ ID NO: 127980 - DNA, 50 bp, Homo sapiens
acgatttaaaacttcgccagaatttgatgattcaaagccgccttactcct

SEQ ID NO: 127981 - DNA, 83 bp, Homo sapiens
ctcgggggccgctctgggatcccggccaccagcaattgtccggtcctaggcctacttacaagcctccagtctcaaattatcca

SEQ ID NO: 127982 - DNA, 90 bp, Homo sapiens
ttttaatttcagtgactgaattaaaaggtgtcaagaagctcagaatgggaatgggtactgttcaaaaaggaatgccccacaagtgttacc

SEQ ID NO: 127983 - DNA, 80 bp, Homo sapiens
gcgcccggtggctccgaagcggggaagtgggacaagatggtttacatctcgaacggaccaggcggtccagcgaaggagtc

SEQ ID NO: 127984 - DNA, 97 bp, Homo sapiens
gttcacctcggtgtctgcagcaccctccgcttcctctcctaggcgacgagacccagtggctagtgctgcattagacgtggaactatctgatgattcc

SEQ ID NO: 127985 - DNA, 80 bp, Homo sapiens
gctccggcttctgctgttgctcttctccgccgcggcactgatccccacagaccatggtgaatccgggcagcagctcgcag

SEQ ID NO: 127986 - DNA, 100 bp, Homo sapiens
ctcggatcgcctggagaggcactcggacctgcttgaaatccatggcccaaaatgactctaccagtggagactctcttctgtgaagaagacgaccagataa

SEQ ID NO: 127987 - DNA, 60 bp, Homo sapiens
gtgagaatttacagagatcatcctcttcagaaacagcaaacaacatgggtgttggagtgg

SEQ ID NO: 127988 - DNA, 75 bp, Homo sapiens
tgtacgccgagcacccaggcgactgcctcatcttcaaggtggtctttgggaagaagcttcctgcctttgccacca

SEQ ID NO: 127989 - DNA, 74 bp, Homo sapiens
aagttcagaagctacagactcttgtttctgaacagagttttgtgaaagagcagttagaagaatgtaggaagtcc

SEQ ID NO: 127990 - DNA, 85 bp, Homo sapiens
ttgtggccttagctacaggagaggcaaatgggagagaccctttgaagtcaaggacaccgaggaagaggacttccacgtggaccag

SEQ ID NO: 127991 - DNA, 100 bp, Homo sapiens
atcagattatatggccgcatcttcacaactccgtcttacagaggcttgttttcctgctcagaacaaagtgacttccctgaacacatcttcattatgattc

SEQ ID NO: 127992 - DNA, 75 bp, Homo sapiens
tcagcgccatccccgagcagcggtggaagctgtctgcgctcctcagaccaccggcaggtgaacagcctgatgcag

SEQ ID NO: 127993 - DNA, 98 bp, Homo sapiens
gatgaagcaaaagaacaaattcagtcccttctccatgaaatggtacacgcagaacatgagcctggcagagagcaggtgtgtgatacacgtcgtcaggt

SEQ ID NO: 127994 - DNA, 73 bp, Homo sapiens
gaaccaggacattgactggggggctcttgaaggtgacctgagcatctctgcagaccgcctgagtgagaagcgc

SEQ ID NO: 127995 - DNA, 100 bp, Homo sapiens
acagcagattttggtttaatatctgattgggacaacattcagacccatttccagtcatgagtagtatcttccccagcagatgttgctgaaaaagctgaca

SEQ ID NO: 127996 - DNA, 50 bp, Homo sapiens
gcggatggccgtaaccccgaaggaaatggaaacactactatgaagtatcc

SEQ ID NO: 127997 - DNA, 80 bp, Homo sapiens
tggcaaacagtgtttgcctctggttcagctcatacaacagcttcttagtttaattagacacttcagaattttgatcacct

SEQ ID NO: 127998 - DNA, 75 bp, Homo sapiens
tcgacgtcgtgatccagaagtccagagctgaggactgcctgtttgcaggcgacactaacaggtgaagatctcggg

SEQ ID NO: 127999 - DNA, 90 bp, Homo sapiens
ggaggagatgcttcagagagaggaagccgaaaacaccctgcaatctttcagacagggaggtggggaagacagggctccagctaccacagg

SEQ ID NO: 128000 - DNA, 82 bp, Homo sapiens
acgggacggacggtgatggtggtcgccgcggcggcgtgtgcgcccctcagggattttatattggaagacatggatcttgctg

SEQ ID NO: 128001 - DNA, 147 bp, Homo sapiens
cagagaactcggcgccgccaaacagcccagctcgcgcttcagcgtcccggcgccgtcgcgccactcctccgatgaatgatttgggaggggacttcaaaggagttggtaaaggctccttagctgctgataaggttgttgaagaaataa

SEQ ID NO: 128002 - DNA, 100 bp, Homo sapiens
catcaccttgaagatacagtttttgaggcttcttcagagcttcagtgaccaccacgagatcaacaccccccggaaagagggaggcttgggccccctgaac

SEQ ID NO: 128003 - DNA, 100 bp, Homo sapiens
gacatgttcatggacatggccatgctcgtggagagccaggttggaagcgaagtggaagcactgaacctccaggtgacatctctgtttaaggagcttcaag

SEQ ID NO: 128004 - DNA, 98 bp, Homo sapiens
gcccaaggagaatgcgctcttcaagcggatcttggcctcgaaaaagcccaagacagcagaagcagacacctccagtgaactagcaaagaaaagcaaag

SEQ ID NO: 128005 - DNA, 75 bp, Homo sapiens
tgagatttcatgaagatggcgccaggacgaaggccctactgggcaagctctgggtgaaccaggaggatgaggtgg

SEQ ID NO: 128006 - DNA, 96 bp, Homo sapiens
aggactgtcccattggaagtgaaacttctttgattatccatcgaggaggaggagccgatcactttctgtgaggaagccttcgtgtcccactaccgc

SEQ ID NO: 128007 - DNA, 100 bp, Homo sapiens
gaattctgcacacactgctggcatcaggagaagacgcccttgactttactcaagaaagcgagctcagagagtggcaacagtgtgaaaagactgaaaccgg

SEQ ID NO: 128008 - DNA, 74 bp, Homo sapiens
atcgatgtgcggcgcccgctgtataaggacccattccaacaatctcgtaaaacatggtggattactatgaagtt

SEQ ID NO: 128009 - DNA, 82 bp, Homo sapiens
tcagaaggaacttgcagaaatcacattggaccctcctcccaactgtagcaggcttggccaagtgggacccagcagatcctgc

SEQ ID NO: 128010 - DNA, 85 bp, Homo sapiens
tccaagtcgccggacccggtgtggagagcggtgctgaggctacgcgggctggagactcaggagtctcgctctgtctccccggctg

SEQ ID NO: 128011 - DNA, 83 bp, Homo sapiens
cttctgcagtccctcgtccagccacccccaggttgggtgctgattgaccggagcggccgtcactttggtacaatcctcaatta

SEQ ID NO: 128012 - DNA, 100 bp, Homo sapiens
tacaattgaactgcttcagaaagcacaggtatctccagggcagcttactaaaaagtatagctcatgctcaacaatatttctagatgacagcacagtcagc

SEQ ID NO: 128013 - DNA, 101 bp, Homo sapiens
atcgccgtataccgccgggttttctcccaacgtcaggcccgatggctcggcttccccaggtctttcccgcggtgacttcccttgggctgaatgaacaggag

SEQ ID NO: 128014 - DNA, 83 bp, Homo sapiens
ccccctcaaccggcagaaactggacagtaagaaacttctaggttcagattctggagatgccctccaagacgtcagtgtgcgcc

SEQ ID NO: 128015 - DNA, 100 bp, Homo sapiens
agagcctggagtctgcgaaggccgggacccggttccccggcccacagtgggggtgtgcaaacccgagagaactggatttcatgaacgtctactaccagat

SEQ ID NO: 128016 - DNA, 100 bp, Homo sapiens
tctgggtcctcggtcggtacagtctctgcacctcgcgccccagcagatgttccatttaagcagacctcttccatagctgtagctggagcggtaattggag

SEQ ID NO: 128017 - DNA, 53 bp, Homo sapiens
cctgtaacccagcctgtttcacttcttggatttccagatgtgacttgcactca

SEQ ID NO: 128018 - DNA, 98 bp, Homo sapiens
aagtgtttttgtgtgggtataggtaccttaaatgagataagtttgttgaaagactaaaaggctattgagggcacctacattgacaagaaatgcccctt

SEQ ID NO: 128019 - DNA, 88 bp, Homo sapiens
gtgtgagaaaactgcttgatcttcaggccaaaatgtggtcgtttttcaatgagctagagaagttaccaagtctacgggctttgtcctg

SEQ ID NO: 128020 - DNA, 90 bp, Homo sapiens
ttgcctatccagaaagcaacagcagagggtgtccgcaatgttgccagtgtctgtctgcagattggctacccaactgttgcatcagtaccc

SEQ ID NO: 128021 - DNA, 100 bp, Homo sapiens
tggcatcacccggctgggcccctactctctggacaaagacagcctctaccttaacggtacaggaagcatggctggggaggcttcaggaaacttaccatct

SEQ ID NO: 128022 - DNA, 100 bp, Homo sapiens
tggattcaagtcccaggagtcctgaccagagagcaggagcaagagcagctctacctgaggtcaggtgtggtgtcctctgccaccttcgagcagccgagtc

SEQ ID NO: 128023 - DNA, 88 bp, Homo sapiens
ccgacccatcttgtacagcaactggctgtcaaaggatactcatccagatcatcaggatattctgaaagcaatcgtagcattcaaaact

SEQ ID NO: 128024 - DNA, 100 bp, Homo sapiens
acagttaatcctcaatttaagcctgatctaacccctagaaacaggtgtgggaataagtatctttggaagaccaggcactttatgcagtattgagctcagg

SEQ ID NO: 128025 - DNA, 90 bp, Homo sapiens
cacttaccatgctgctgcccttaggtgcaatatcagctacttagaagaatggcttaaagataagaacttgcagaacagcttagcaaagga

SEQ ID NO: 128026 - DNA, 100 bp, Homo sapiens
acagccaaaggggactatcctctggaggctgtgcgcatgcagcacctgatgagcaaggtgtggaacgacctgaggcccaagctcagctgcctctttgcgg

SEQ ID NO: 128027 - DNA, 74 bp, Homo sapiens
agaaagttacgtggagcgtgggcgtttcgcagactcctaagtctcgaaaaccatcagtttcctgcaaagccatt

SEQ ID NO: 128028 - DNA, 82 bp, Homo sapiens
tggcaagcacctcgggatcccattccttcacagggaccctagccaggctcgcttctcatatgtgcggatgaaatatcttttc

SEQ ID NO: 128029 - DNA, 96 bp, Homo sapiens
ccagcacgctggactgcgagacggcccggctgcagcgagcgctggacggagaggaaagcgcacttttcaggattagaagaggctgtgtatagaaac

SEQ ID NO: 128030 - DNA, 90 bp, Homo sapiens
tgataactaagctgcagggaaataaatcggctggccctactgcaatctactgcactcgaggatataccaggagttggtaacatccactca

SEQ ID NO: 128031 - DNA, 101 bp, Homo sapiens
gctggtgcctgtgcaagttgttgagacctagaggatcaagacataatgggagcatttttagacaagccaaagatggaaaagcataatgcccaggggcaggg

SEQ ID NO: 128032 - DNA, 100 bp, Homo sapiens
ttaccattgtgaaagaaggttgggttcagaagagggtgaatgtggtggaggcacttcaggaattctggcagatgaagcagtcccgtggtgctgacttaaa

SEQ ID NO: 128033 - DNA, 76 bp, Homo sapiens
aaaaaaatagctcagttaatgaaggatcaacgtatcataaaagtgcttagatgagtacgaagatgatgaagcaggg

SEQ ID NO: 128034 - DNA, 82 bp, Homo sapiens
cgtggctgtgctgagggtggcggccggataggttcacctttccttgccagtgaagatggcgtgcttggcggagtgattgtcc

SEQ ID NO: 128035 - DNA, 100 bp, Homo sapiens
tgcaagttgcacctttgagcaatggtctttgctgtgccttctctactgatggcagtgttttagctgctggagaatagtgacagtggtacaggaaagaaag

SEQ ID NO: 128036 - DNA, 97 bp, Homo sapiens
taacagtacttgggatcccccagttccaaagtgtcttaaagatgtcttcaatgaacgagacaattgtccctacgtctacaacactgaccagagggac

SEQ ID NO: 128037 - DNA, 83 bp, Homo sapiens
cttatgagtacctttgtcatttggaagaagcgaagaggatttttagactctgaggagcagttggagctaatccacattatgga

SEQ ID NO: 128038 - DNA, 75 bp, Homo sapiens
cagtctgcttgacaagccagaaatagcttactgcagagtgggtctgggcatctgctacgacatgcggtttgcaga

SEQ ID NO: 128039 - DNA, 90 bp, Homo sapiens
acctgggaaggtggtgcttgtcctggctggacgctactccggacgcaaagctgtcatcgtgaagctatcctcatcctcttcccgacctcg

SEQ ID NO: 128040 - DNA, 51 bp, Homo sapiens
gtaaaccacgatcgttatgctgacataagcagtactataatggatgtagac

SEQ ID NO: 128041 - DNA, 82 bp, Homo sapiens
ccggagcaggctcatcgagaaggcgtctgcgagaccatggagaacgggctggcgccttcctctgttgggccagcggtacctg

SEQ ID NO: 128042 - DNA, 100 bp, Homo sapiens
ccgccgggggctcgcgccagccacgagggagcgtccgcggcccgcgcgcccgcgcggcggaggagagacaaatgctgtgcttcatgaagttaaaagagag

SEQ ID NO: 128043 - DNA, 98 bp, Homo sapiens
tcgtggcatctgtggtggatcaagacagtttctctgggtttgcccctctgcaaccacagaatttaggttcctcaaaagtggggccctgcctatcctgt

SEQ ID NO: 128044 - DNA, 100 bp, Homo sapiens
tcaggagccttactacggatccaaatgtaaaagatgcaagtatgacccaagccctttgcaggggagctgaatatgtatctgcaagagagtggatgaggat

SEQ ID NO: 128045 - DNA, 100 bp, Homo sapiens
aaaacggccaagaggcagacctaggaaatgggttgcacagagcattgaggatcaccatcaggaagtgattggtttctgcagagagaatggtttccatggc

SEQ ID NO: 128046 - DNA, 104 bp, Homo sapiens
gtgaacaaaagctatctctacttgtctcctagtggaaattcatctccacccggatcacctactcttcagaaatttgacagaaagaatttactttcaggttttct

SEQ ID NO: 128047 - DNA, 74 bp, Homo sapiens
gatgtagatttaccagaagtagatggagcagatgatgacataagcagctctatgaccaatagcacagctgccag

SEQ ID NO: 128048 - DNA, 82 bp, Homo sapiens
cgggcgcgggcgctgcggcgggacagctcgacgcgcaggattctgtttcactgaggccatctatccgatttcaaggaagcca

SEQ ID NO: 128049 - DNA, 100 bp, Homo sapiens
ggtggcaggaggtcacagtgggtccgaaactgggctgtgtggcgctactttcgagactactttcccatccaggtcacaactatgactccagcctccaacc

SEQ ID NO: 128050 - DNA, 82 bp, Homo sapiens
ccaacttccgcgtcggcaagaagatcggctgcggcaacttcggggagctccgcctagagatcctgaaggagctagacgagtg

SEQ ID NO: 128051 - DNA, 82 bp, Homo sapiens
taaacctgtcctacaaagtaccatgagaaatgtcggttcagatagcatacctggatgtccaggcaagactgggcgaagtttc

SEQ ID NO: 128052 - DNA, 83 bp, Homo sapiens
cacatctcagtgaatttgcaagtgctgtttcagtgcagggcttcctaaaacagaagccaactgggtgaatgtaataagtgatt

SEQ ID NO: 128053 - DNA, 100 bp, Homo sapiens
ggagctggtggtgcaggaggtctccagcgtgctcaggtcggcggaggagaaggagccagatgaccaagatgctccagatgaacatgagtcgcctccacct

SEQ ID NO: 128054 - DNA, 98 bp, Homo sapiens
tcaggcactacaagattgaagacagagggaatttaagaaacatccacagcagcgactggcccaagttctttgaaaagttttacagctcccagcacagt

SEQ ID NO: 128055 - DNA, 74 bp, Homo sapiens
gtgaaactgcttcccgaggagcattggaaggcatttcgtgtcctgtctgaaccaattggtccagaatccccaag

SEQ ID NO: 128056 - DNA, 90 bp, Homo sapiens
acccgagatggaagacgcgacaggtatagggttaatgcgagatgatacaatatacgaggatgaagatgtaaaagaagccataagaagact

SEQ ID NO: 128057 - DNA, 100 bp, Homo sapiens
catatcttcaaagcacctagtacctcctaccattgtcaactggcagctgcagttgcactttcctccctgattcatgctttggatgacttagacatggtgg

SEQ ID NO: 128058 - DNA, 100 bp, Homo sapiens
ggcggacaggcgacagcgacctgcggcaggtgtgaatgacagaggtggtgccatccagcgcgctcagcgaggtcagcctgcgcctcctctgccacgatga

SEQ ID NO: 128059 - DNA, 52 bp, Homo sapiens
cagtacccctggggagtggtgcaggttgagaatgaaaatcattgcgattttg

SEQ ID NO: 128060 - DNA, 96 bp, Homo sapiens
gaacagggttcctggggcatcgacgatctccatatttcattgcaaggatgaaaactttcggaagagaaagttgcctgtggtaagttcagttgttaa

SEQ ID NO: 128061 - DNA, 90 bp, Homo sapiens
gaaaagctactattagaattggagggtcacgcagcacaatgccagctctgcccctggaccaactccagatcacccacaaggacccgaaga

SEQ ID NO: 128062 - DNA, 50 bp, Homo sapiens
ggcgggacctggcgccaccttgcagatggcccactgcgtgaccttggttc

SEQ ID NO: 128063 - DNA, 75 bp, Homo sapiens
ctcgtcgaaaggattggattggcatctttagactttcagtgaaaggttacaatgacaagcagccaattttactaa

SEQ ID NO: 128064 - DNA, 50 bp, Homo sapiens
cacaagcaaggtttcctaaagtaatttcatctgtgccaaagcctccagag

SEQ ID NO: 128065 - DNA, 100 bp, Homo sapiens
gaagaaacagtagaagattccataattgaggatgaagatgatgaagccgaggtagaagaagatgaacccacagatttggccagtgaagaagcaaaggaag

SEQ ID NO: 128066 - DNA, 98 bp, Homo sapiens
tctggtcacctgtctggagcaaggaaaagatccctggaatatgaagggacacagtacggtagtcaaacccccagcattgatctggtagccttgctcca

SEQ ID NO: 128067 - DNA, 75 bp, Homo sapiens
gccgctctccgagctcgatccgctgctcgcacgggagccagctgggtgcttgaaggatgccaatgatgtaccaat

SEQ ID NO: 128068 - DNA, 48 bp, Homo sapiens
gcataagctgggctcccaggtcagctatggagtctcgccctgtcaccc

SEQ ID NO: 128069 - DNA, 100 bp, Homo sapiens
cacagaattatcaaagacttcatgatccaaggaggtgacccaacagggacagaatgcctaccgcaggaatgggatggcttttctagcctgctgatgtgac

SEQ ID NO: 128070 - DNA, 50 bp, Homo sapiens
cgtacccacagtgcttcatgagaggtactagcaaaggccagacgtcttac

SEQ ID NO: 128071 - DNA, 100 bp, Homo sapiens
tcccccgatccaagttggaattagcatcctctcggggaatagcctaacatggcagaccagagacagcgctcactgtctacctctggggagtcattgtacc

SEQ ID NO: 128072 - DNA, 87 bp, Homo sapiens
gcgttgacgacggctcgcagaagaacgccagatcaagtgtcccaagtgtgataagctgttcttgagaacaaatcacttaaagaagca

SEQ ID NO: 128073 - DNA, 75 bp, Homo sapiens
atgagatttacctgtgagatgtttcatcccaacaatcctgaggaggatgaaggggctggccctggaggccgagag

SEQ ID NO: 128074 - DNA, 75 bp, Homo sapiens
gatcccaccgcacgttcagaagtcggatgaagctactgaatctttacatcaaacgtgcacaaacaggttctggag

SEQ ID NO: 128075 - DNA, 98 bp, Homo sapiens
ctaagaacccagggcagaaaggtttagagagccagctgctccccgggaacaacttcaccaatgagtgcaacataccaggcaacttcatgtgcagcaat

SEQ ID NO: 128076 - DNA, 83 bp, Homo sapiens
ctggaacccagcaccacgagcctcagcttcacctccatgggcatcaacatgaggctgggaggcggcagaatgcagccagagga

SEQ ID NO: 128077 - DNA, 75 bp, Homo sapiens
agtgcctgcagttcagacccttctctcccctccactttctcccggacaatgcagatcttcgtgaagactctgact

SEQ ID NO: 128078 - DNA, 98 bp, Homo sapiens
actttatattgctgttggaatatctggagccatccaacatttagctgggatgaaagacagcaagaatttgttcctagagacagagaacccaatacaaa

SEQ ID NO: 128079 - DNA, 74 bp, Homo sapiens
tctcctgcctcggcctcctgagtagctgggatttcaggagacgcaggtcagaatggaaatgggctgcagaccgg

SEQ ID NO: 128080 - DNA, 100 bp, Homo sapiens
gatgaacagggcagacttctctgtgagctcttcattagggcaccaaagcgaagtgaaacaaagagtcctcttcgtggaaaagaaaaaaatacgctccctt

SEQ ID NO: 128081 - DNA, 100 bp, Homo sapiens
caaagattgctgcctgcttcttcctcttgcatcagagaatttagatgagctgtcttcctccagtagctggttacttaaccagaagcacagtaagaaaaag

SEQ ID NO: 128082 - DNA, 100 bp, Homo sapiens
cgcgaacgagcgacggcggaacccgtgggcctgtggactgcagcctcggcggtcagcagagcggactacagggaggagtgtgaagattatacaagcagat

SEQ ID NO: 128083 - DNA, 75 bp, Homo sapiens
gacggctggggccacttgtggtcgccgggaggttgaaatcacaaagattagacacctttttagataggtgttctt

SEQ ID NO: 128084 - DNA, 74 bp, Homo sapiens
cggcgggaggaacgctcactgtcagcgcctggaaacttgctcacaaacttcagtgctctcaagaaggaaaatat

SEQ ID NO: 128085 - DNA, 101 bp, Homo sapiens
gcggccgcggccatggcgtacgcctatctcttcaagtacatcataatcggcgacacagtgaggatgaggatgatgaccttcagtatgccgatcatgattat

SEQ ID NO: 128086 - DNA, 90 bp, Homo sapiens
ggccggccagtacaacagccacctctatgggaccagcgtccagtccgtgcgagaggtggcagagcagatgtggacgagtgccaccgcgtg

SEQ ID NO: 128087 - DNA, 80 bp, Homo sapiens
aggagatgttccagccttacagctccagtatgaccattgtaagtttttatggaaacgagccctcaaagatcgctttaaat

SEQ ID NO: 128088 - DNA, 100 bp, Homo sapiens
atttccttgggcatattttacatggttgtgtcaagacccctcggagacagaaaaaactcttttgccgctaccatgatggaaaccgtaatcctaaatttat

SEQ ID NO: 128089 - DNA, 90 bp, Homo sapiens
ctacattgcgaaaattaaactcccgaagaagaggatggactccgtgttggtcactgtcaaggcattgttctcctccaatttggaccccag

SEQ ID NO: 128090 - DNA, 87 bp, Homo sapiens
gggctatcagtccccgaggagcaggttggctttttggagcaaaggtcacaaatgagtgccacactctgctctatgtttataacctac

SEQ ID NO: 128091 - DNA, 75 bp, Homo sapiens
tttacgcgcacgttggaaccgaagagagctctgttgttgcatggttgaagttgacatctgacgacgtgaaggagc

SEQ ID NO: 128092 - DNA, 56 bp, Homo sapiens
agaacgggaaggagatgctgcagcgcgcggaccccccaaagacacacgtgacccac

SEQ ID NO: 128093 - DNA, 75 bp, Homo sapiens
tttatattcatctcaaaaacaaaattctgaactcaggacttggcaaccccacaggaagccccaagtcagccgccc

SEQ ID NO: 128094 - DNA, 108 bp, Homo sapiens
tcaaaactgtcattttgggactgctgtgcctcctcctcctgtggtggaggagaaggaaaggaagctgaagagggaactacccttttcattccgatcaattaatacgag

SEQ ID NO: 128095 - DNA, 82 bp, Homo sapiens
gaaaaagaaccgcgcgggaagccccagcccgcagccctcggggggccgcctgggcagaatgtcacgatggacgagggcggca

SEQ ID NO: 128096 - DNA, 75 bp, Homo sapiens
aggtggctcccaaattaccggaaaggactgttcttgaggtattcaggaacggcagagtcgaaacaaacaatgagg

SEQ ID NO: 128097 - DNA, 83 bp, Homo sapiens
ctgcgctccgtggccggggagcaagcgccagacaatgcagatcttcgtgaagactctgactggtaagaccatcaccctcgagg

SEQ ID NO: 128098 - DNA, 51 bp, Homo sapiens
tggtgtactccatggcagacatccctttggagatgctgaaggacgaggtgc

SEQ ID NO: 128099 - DNA, 87 bp, Homo sapiens
tttaccgcccagagagcgtcatggacctgggtactccaaagattcaggtttactcacgtcatccagcagagaatggaaagtcaaatt

SEQ ID NO: 128100 - DNA, 97 bp, Homo sapiens
ttgggcccgtaatctcacgacctccgcctgcggcctcctcgcaaaacaaggctgaagccgacgtagcttctctgaacagacgcatccagctggttga

SEQ ID NO: 128101 - DNA, 74 bp, Homo sapiens
gtgctgggaatcctggccctgtcccacaccatcagattgccaacactcctgatagctgaatgtgtgctggttta

SEQ ID NO: 128102 - DNA, 51 bp, Homo sapiens
gacagaaggaaacagcaaggcctctgaggggccagtgtcattcaaggacgt

SEQ ID NO: 128103 - DNA, 76 bp, Homo sapiens
cagattcgcagtggtcgcttcttctccttgcgttctcccggggaagtacttggaagagatcgccacacagatgcgc

SEQ ID NO: 128104 - DNA, 111 bp, Homo sapiens
ggagattctggggcagtatcaacggagtctccgggatggactagaggcttttaccagatttcttaaaactgaattcagtgaagaaaatattgaattttggatagcctgtga

SEQ ID NO: 128105 - DNA, 100 bp, Homo sapiens
gcaaaggcttactaagtacccacttctgttggataatattgccaaatacacagctctagaggacaaaatcccagtccttggcacaaactcaggaaatgga

SEQ ID NO: 128106 - DNA, 75 bp, Homo sapiens
cagccaccctcgctccctctgctcttcctcccttcgctcgcaccatgagttggagcacacagctgtattaaaaag

SEQ ID NO: 128107 - DNA, 89 bp, Homo sapiens
tcaccttcacagcagccctgcgaggtttttcccactcggctttcacgtttgggattgagagccacatcagccagtccaacatcaatggg

SEQ ID NO: 128108 - DNA, 75 bp, Homo sapiens
gcccatctaattggctttggtctagcttccccgggcgctgcctggacaggcctgcctgcgtgctgggacatgtct

SEQ ID NO: 128109 - DNA, 100 bp, Homo sapiens
tcctgcctcagctttccgaatcgctgggattacagggtttgttacctcgaggtgagaaacccaatcctttgaggcaaaagaacgccaaggtgaaccaact

SEQ ID NO: 128110 - DNA, 97 bp, Homo sapiens
caagcagttcagaagagccaaggaataaacatgcaatgaacccaaaaggttcctggaagttcatctaaatgggaggaagtacagtccaaagcaaacc

SEQ ID NO: 128111 - DNA, 143 bp, Homo sapiens
cgccaccatccacgccagccgcaccatgccgctcctaagcctgcacagccgcggcggcagcagcagtgagaggaatactcccccagttgcaagaggcgcaggaccgtggaagacttcaacaaattctgcacctttgtcttggc

SEQ ID NO: 128112 - DNA, 83 bp, Homo sapiens
aacagttggctcaggctgtggctcgcatcaagaagatttatgaggagaaggtctatcagccacagtctctgcaagtttccaag

SEQ ID NO: 128113 - DNA, 75 bp, Homo sapiens
gctgaagcgactgagtccgcgatggagcaaacggggattcagcgtccgatcctttggaacagggactcacgtgaa

SEQ ID NO: 128114 - DNA, 90 bp, Homo sapiens
agggaaggcactcaaaagtggggggcaggaaagtccaatatcagatggaaatgatgcggagccttcgccatgtaaacattgatcatcttc

SEQ ID NO: 128115 - DNA, 82 bp, Homo sapiens
tgccatgcaggcaggccctgagcacgctgctgtgtgagcagcagtaagactttgaccccgacgcaggcttcagtgattgccg

SEQ ID NO: 128116 - DNA, 96 bp, Homo sapiens
ggccgacaacagctgcatctatgtcaacaagatcacgcacgaagtggagtacatgtccagggccgccgggtccccttccccattgccagcccctga

SEQ ID NO: 128117 - DNA, 82 bp, Homo sapiens
cttggtgggctggatgctggagcacacggaggccgtgatgaagtaagactttgaccccgacgcaggcttcagtgattgccgc

SEQ ID NO: 128118 - DNA, 100 bp, Homo sapiens
ttgtgaagctcaacaaggcttcgattaacatgctgaggattgtagagccatatattgcatgggggaccggaccagggctgccctcctggacaaccttcac

SEQ ID NO: 128119 - DNA, 95 bp, Homo sapiens
gcctaaagtctgagagagggaagtcgcctctgtgctcgtgagtgcatggggtataaggatctatcttgggatcccatggctttctttactgggct

SEQ ID NO: 128120 - DNA, 75 bp, Homo sapiens
tggaatgcctccaacttagaggacttacagaaccgagggttgcccccaagtttcctggcagtgtgtgatactgag

SEQ ID NO: 128121 - DNA, 82 bp, Homo sapiens
ctttttagtgccggactccgggccgcaggcagtcccgcggcagcaggatcacagcggagctggagtttgttcagatcatcat

SEQ ID NO: 128122 - DNA, 100 bp, Homo sapiens
gcctatggaagttgcaatttctacattacacttcttgactgttttcatgcagtaaagaagaaaatgtcactgaaattcacaaatgcaaaacggattgaag

SEQ ID NO: 128123 - DNA, 100 bp, Homo sapiens
cggagaccccgcgccggaccctgaggcagcgaaaaccagcctggacaccaagtctgtgtcagaaggccacctcaagaggaacatcgtggtgaagaccgtg

SEQ ID NO: 128124 - DNA, 75 bp, Homo sapiens
aaaaaaaatcattgattcccttgatatctggagtccatctttcaccatcttctcctgagattgtactggaccgtg

SEQ ID NO: 128125 - DNA, 83 bp, Homo sapiens
gttgtgagaagacgtctgtgtcgtgcgctgtccctttccccccaacacatcgcttgacatctgaagaagtatttgatttggat

SEQ ID NO: 128126 - DNA, 102 bp, Homo sapiens
cacgggactccgaagcccagcggctccccgactccttcaagggagttccatctggaatatgacaaattagaagaacggcctcacctgccatccaccttcaac

SEQ ID NO: 128127 - DNA, 101 bp, Homo sapiens
gccttcccacggagcagcactcttcaccctgcacagccttgttagtcagatacagagttttgggataagatgcaagcagaatgggaagaaatggctcggag

SEQ ID NO: 128128 - DNA, 100 bp, Homo sapiens
atggcgtcatgactggagccaacggggaagtgtccttcatcaacatcaagacactcaatgagtgggattccaggaatcctcactatggatgggctcattg

SEQ ID NO: 128129 - DNA, 76 bp, Homo sapiens
cttattacagggacttgctgtgcttgcaaaggaaagccctactgccaataaagggaaaataagagatgctcatcga

SEQ ID NO: 128130 - DNA, 99 bp, Homo sapiens
gggattgatgtgcaacaagtgtctttggttataaattatgatctacctaccaatcgtgaaaactatattcacaggaacttgaggtgggcatcagcagcc

SEQ ID NO: 128131 - DNA, 100 bp, Homo sapiens
gggaaaaaccgcgaagtcatggggctctgtcgggaagggcagagcatcaaccccaagttggcgggcctgattgggcggcacgggccccagaacaagcagc

SEQ ID NO: 128132 - DNA, 100 bp, Homo sapiens
atgccaagcagcccaccgacatggctcgccggcagcagaagtatgagtttaaagccaagaacatcaagaagaagaaagtgagcattatggtttcagtgga

SEQ ID NO: 128133 - DNA, 74 bp, Homo sapiens
cagcaaatgatcagccttgcaaataatcacagattagctcccaaacaaattcgaatatcttctaaaacaggaat

SEQ ID NO: 128134 - DNA, 75 bp, Homo sapiens
gggtgcctttgaaaatcaacgacaacttgagcacaggtccacacacgttcctgttggggaggatcaagtccagca

SEQ ID NO: 128135 - DNA, 98 bp, Homo sapiens
ggagtaagttcatcaaatgggacgaggcctccctccctgacatggagagtaacctgtctggcctggtgcctgctgccgggctggtgcctgcgctgcca

SEQ ID NO: 128136 - DNA, 122 bp, Homo sapiens
cctcgctctccgccatggcatccccctggaggaggtggccaagaagaccaggacctattcaaactcagtctgtctcttgactggaggaggagaaggaaaagttgagcacattgccaaccgga

SEQ ID NO: 128137 - DNA, 100 bp, Homo sapiens
gggccacgcacctcgtcaccaaggccaagattatttactggcaagatgagcaggattaccatgaaagaaaagtccagatggactgaggaaatcctacact

SEQ ID NO: 128138 - DNA, 95 bp, Homo sapiens
gggtccatgagatttttcagggaacgcttaccaatgaaactcgatgcttgaactgtgaaactagcattggggagtcagcaatgtccgttgtgtta

SEQ ID NO: 128139 - DNA, 96 bp, Homo sapiens
caagaacgcgctcctccgcctgctgcccgggctggagccagttcctgtgcttggccgtgcaagaaggcagcctcgtgctgttgtatgactttgggg

SEQ ID NO: 128140 - DNA, 75 bp, Homo sapiens
cacacctggatccaggataacggaggctggaatggtcctagtgccagatcgtgtcataaaatgtgcattgatatt

SEQ ID NO: 128141 - DNA, 83 bp, Homo sapiens
gcggcggcggcaccaacggcaccaactattcgcggagctggaatgactggcaacccagcttcccagtgatcctgtccatcgag

SEQ ID NO: 128142 - DNA, 100 bp, Homo sapiens
caggtggcttttaatcagattcaaaagggaatttagttttctagatattcttcgattatgggaggtatgcagaatctgtgggagcaaaacattatcatac

SEQ ID NO: 128143 - DNA, 50 bp, Homo sapiens
ccgtccccgaccttgcctgaacaaggctgaagtgcaatgttgtgatctcg

SEQ ID NO: 128144 - DNA, 100 bp, Homo sapiens
tgcctggaatgatgatgtctcatatgtctcaggcttccatgcagcctgccttaccggtggacattgaagtggacctaattcggttttccttttaaaagcc

SEQ ID NO: 128145 - DNA, 75 bp, Homo sapiens
gggggcagtccgcgagccccgcactctctcgatgagtcggagaagtcccgttaaagatcgaggtccggaagccac

SEQ ID NO: 128146 - DNA, 75 bp, Homo sapiens
aggtcatgaagaaggagccagcagagtcgtctttcagggcgcggatggcgtcggggcgccccgaggagctgtggg

SEQ ID NO: 128147 - DNA, 95 bp, Homo sapiens
agttccagttcgtggcctgttaccacgagctagtgttggagtgcaccaagaaatgccaagccgagggtggccaaactcctttggatgccttccag

SEQ ID NO: 128148 - DNA, 74 bp, Homo sapiens
atgagaccgggggaggcgacgctaagttgctgatcgtggcgcttcctgcctgacacagctcacttcaagaagtg

SEQ ID NO: 128149 - DNA, 100 bp, Homo sapiens
gccatggcggagcagacctactcgtggtgccagagtgggtcatcgctccttgatgagatactacaaacagcgatttggcttgtcaagagctgtggcagtt

SEQ ID NO: 128150 - DNA, 100 bp, Homo sapiens
ctcccaacctggaaaacaagaaggaccaaaaagacctgcagcaggagagcctgtcctgcctccagtccacctgtggccttgtccagtctgtagagttgaa

SEQ ID NO: 128151 - DNA, 88 bp, Homo sapiens
attcgcagtggtcgcttcttctccttggaatgatgatgtctcagtataaactttctcagaattccatgcacagtagtcctgcatcttc

SEQ ID NO: 128152 - DNA, 82 bp, Homo sapiens
aggtttctgcacaggaatatcgagagcgtcatgaacccgagctatagagaaaggagatgagttcctgggcttcccgatggac

SEQ ID NO: 128153 - DNA, 82 bp, Homo sapiens
gaagaaaggattcgttacagccagagattgtgtaaacaggaacatcgataagtagtgtaaaaacttgcacaatgaaatccga

SEQ ID NO: 128154 - DNA, 100 bp, Homo sapiens
ctcgatgccgtcctcatcctgcagggtcccccctacgtgtcctggctcatcgacgccaaccacaacatgcagatctggcggccagtttgcgatcgtgcgg

SEQ ID NO: 128155 - DNA, 106 bp, Homo sapiens
aaacagttacaggacatagcaactctggctgatcaaagaagagcagcccatggttatggattaaaaagtcacgtcagaactcatacaggagaaaagccatatcggt

SEQ ID NO: 128156 - DNA, 83 bp, Homo sapiens
ggacctgtctgggtctcagccgccaaagaccccgtccggtagggtgatcagcccatgacctaaacctccagacaaaataaaac

SEQ ID NO: 128157 - DNA, 82 bp, Homo sapiens
cagaaagcggcttatcgaacagagccgggagttcaagaagaacactccagagatatcatttgaggatgtggctgtggatttc

SEQ ID NO: 128158 - DNA, 97 bp, Homo sapiens
ctctgggttctaaccccttcttaacaaggaatcagattccccgtactccagaaaacttgaggttatgtggtccgaatcagtggtgggaacgacaaac

SEQ ID NO: 128159 - DNA, 83 bp, Homo sapiens
cgggagtattatgaaaagatcatgtctttggtggacttgggaaagaggttgctagaagcagcaagaaaaggccaagatgatga

SEQ ID NO: 128160 - DNA, 98 bp, Homo sapiens
tccatggaaacccggagggagagtcccgcctgaagaaacctggatctttgctagaaagagagacaatgcagatcttcgtgaagactctgactggtaag

SEQ ID NO: 128161 - DNA, 75 bp, Homo sapiens
tttaaacttaaggaaagagtgggaaagtgaggctttggggccatttggatcacacgatgttttttcaagatttta

SEQ ID NO: 128162 - DNA, 73 bp, Homo sapiens
gcgtcttggcccgggcagcagtggcggcagcgcccgagagaggtcacagggattatggacccagaacagatgc

SEQ ID NO: 128163 - DNA, 99 bp, Homo sapiens
ttgggagactgactgcctatgaatttgctaaacttaaaagcaagctggttctctgggatataaataaggatgaagttaaaggaagtagatcgtacagcc

SEQ ID NO: 128164 - DNA, 96 bp, Homo sapiens
tgtacgtggacccgcaaggccggagggcacgcgcgcaggagctcatgtggcctgcggctcctgtcgcctgtaggctgggttacgacccctacaacc

SEQ ID NO: 128165 - DNA, 98 bp, Homo sapiens
tgaagacattatgttaaaagaaggactgggggcatctgaagcagtggccgacatcaagttttcctctgcaggttgcccccaagtttcctggcagtgtg

SEQ ID NO: 128166 - DNA, 73 bp, Homo sapiens
gttgcagcaaagaggaaatagttcagttctttcaagggttggtcttgctgtaagagaagaacaactgattttt

SEQ ID NO: 128167 - DNA, 100 bp, Homo sapiens
gggagggagggcgggcggcgcgagtgggcgcgggcccggtgggccagttggttgaatctggcgatgtggaacccatggatatggagggctgactatatac

SEQ ID NO: 128168 - DNA, 100 bp, Homo sapiens
gtgatgttaatgatgatgtcaggagggcagcagtagaatcacttgggttcattctattcaggcagctggctaagagtcttgggcaggctggtgaaattga

SEQ ID NO: 128169 - DNA, 82 bp, Homo sapiens
tgttggttccaatgctgggattggctgcttttcgcaccatgactcctgtgaggatgcagcactccctggcaggtcagaccta

SEQ ID NO: 128170 - DNA, 100 bp, Homo sapiens
ggagtctgtacctttcccgaccgggccactggaagttggagcctccgccgagtcgcagacaacgcctccgggagggtgccacatcatctcacagttcaac

SEQ ID NO: 128171 - DNA, 82 bp, Homo sapiens
aggacagttcgctacacagcaatgcatcgagtgttggctgcaccaattctagaagtaagctctccaagttcagactccattc

SEQ ID NO: 128172 - DNA, 125 bp, Homo sapiens
cagccgaccttgagctccaggagttcgtctcttacgtctgcggaagtgcagctgcctcagttcttagcgcaggaaaggccattgctgctctggagctgtgtgtgtgtgtgatgactaaagcaaag

SEQ ID NO: 128173 - DNA, 100 bp, Homo sapiens
cagagttcctacatgtgaagaggtccagctgcagctgctgacagccattgtgaaactctttctaaagaagccaacagagacccaggagctggtgcagcag

SEQ ID NO: 128174 - DNA, 100 bp, Homo sapiens
ccgcccgcttcaaccccaggggaccagaggaactcagccctgattgcgtgtttctgaaagatctatccagcactccgatggccagcaacaacaccgccag

SEQ ID NO: 128175 - DNA, 100 bp, Homo sapiens
tgatttcaaaccttcagaaatagaagttggagtagtgacagttgaaaatcctaaattcagagagatggagtccctccaacttcaaagaaaaaacgccagg

SEQ ID NO: 128176 - DNA, 50 bp, Homo sapiens
agcaggcccaactcgccatctgaagttcccgcaagcccagacaatgccgg

SEQ ID NO: 128177 - DNA, 98 bp, Homo sapiens
cagactcagaagccgacgttcgagaggaagattcttacctctttgatctcgacaataaggccttgtacagctccatcaagaatgagaagctgcagtgg

SEQ ID NO: 128178 - DNA, 121 bp, Homo sapiens
gccggccgggcatgagttagtcgcagacatggacaccaaacatttcctgccgctcgctgtcgcctggttgggcccggaaatgggacgtcgcgctttctcagggagcgtagaagcagccagg

SEQ ID NO: 128179 - DNA, 83 bp, Homo sapiens
aatccaaagtgtgtggagtttgcaaacaaattattgacggtcaaggtatttcatgccgagtactatactggcaattgctggag

SEQ ID NO: 128180 - DNA, 80 bp, Homo sapiens
gagcaaaaactccaaactcctctccaccagcgccaagaggtgagccagccatgagagggtatcttgtggccatattcctg

SEQ ID NO: 128181 - DNA, 50 bp, Homo sapiens
cttccagctcccctcacccaacgtcgtagtccggcagcgtcttctcttga

SEQ ID NO: 128182 - DNA, 89 bp, Homo sapiens
ccaagctcggggccgagcgggaggcagccgtggccgagacttaattcagtgcacaaatgagatgaatgtgaacatcccacagttggcag

SEQ ID NO: 128183 - DNA, 100 bp, Homo sapiens
ccggtgggcgcttcgcgttttgttccaaggcgaaggtgtgtggattctccgcagcccgtcggtcagtggagacctttggcgacttggcctttggcgacat

SEQ ID NO: 128184 - DNA, 50 bp, Homo sapiens
tttcaagttcagtggctccacactgtgacttctgccgtgttcaccgtggg

SEQ ID NO: 128185 - DNA, 83 bp, Homo sapiens
caggaggtgccggtggccgcgctcggacccggagtccaaaactacttacctggaagaccttccaccaccccctgagtatgaat

SEQ ID NO: 128186 - DNA, 100 bp, Homo sapiens
gttgggaaagatggacttacgggagcttggtacctgcaaggtgtggagttacagtccgagacagtctaaagaaagcactgatgatgagaggtctaatccc

SEQ ID NO: 128187 - DNA, 99 bp, Homo sapiens
ggacagggtaaaagaaagagacttttttctaaagaatgcagctaatacttgatggtcaatgggatgaagttcttcagttcattcagcctctagaatgta

SEQ ID NO: 128188 - DNA, 101 bp, Homo sapiens
ctaatagctttgctgccctgcgagtccccaaaagcccagcagctgtccctgcagactctcaggactgcccagtgcacaaaacaacttgcagcagcttttca

SEQ ID NO: 128189 - DNA, 75 bp, Homo sapiens
ggaaacaatggcatttacagaaagagtcaacagcagtggcaacagattcgcttcaagctcagcttatcaatatgg

SEQ ID NO: 128190 - DNA, 100 bp, Homo sapiens
cagcaagtgtcggcctctggaattctattcgggatcgcttacacctgagacgaactacagaacagcacgtaccagaggtggaagtccaagtcaaacgcag

SEQ ID NO: 128191 - DNA, 50 bp, Homo sapiens
ctattggaggggaccactctaggaagctatatgttctcctttcagccaag

SEQ ID NO: 128192 - DNA, 82 bp, Homo sapiens
atcaaggaacatcccctgttggcatcatgtgagagtgaagacagtatttgccagctcattgcaagcgatccccctccaagac

SEQ ID NO: 128193 - DNA, 75 bp, Homo sapiens
cgccatcaccacctcggaacccagggtaacgctgtcagtctttggctccttcttctgaaccagttccatgatgtg

SEQ ID NO: 128194 - DNA, 75 bp, Homo sapiens
caggagcccatcccgcttcctggtgttcttctacccggaggacgattgagaggatacagaatgcatttctctggc

SEQ ID NO: 128195 - DNA, 100 bp, Homo sapiens
aagggttagcggagcacgggcaaggcggagagtgacggagtcggcgagcccccgcggcgacagcgtggggtagagcagcggctgccatgctcttctgtgg

SEQ ID NO: 128196 - DNA, 74 bp, Homo sapiens
ccgaggagaagtaccaggaggcgttggccaaggtcatggctccgatcttcatcttgaagaagagtgacattggg

SEQ ID NO: 128197 - DNA, 100 bp, Homo sapiens
cggctcgccaactcggctgctctgggggattcgtgcgcgatggctctgagagattcctctgcgaatctgtttttagctatcaagtggcatccacgcttaa

SEQ ID NO: 128198 - DNA, 100 bp, Homo sapiens
atcgtcatcctgctgctgaagatctggaagacgcgctcctgcgccggctgtacagcagtcatgacgctggcatctgcttggcttctggggagccctcggg

SEQ ID NO: 128199 - DNA, 75 bp, Homo sapiens
atcaaaaacaacattgaagaggaggaaaaagaggttggctcaggactttctgggacaagtgttttgtacattggg

SEQ ID NO: 128200 - DNA, 90 bp, Homo sapiens
ttctgggctgtgctggtcacagccacactctgcaccgctaggccgtccccgaccttgcctgaacaaggtgacaaggcaactgtatgagcc

SEQ ID NO: 128201 - DNA, 100 bp, Homo sapiens
aaatgttagagttatggaacccgatcctaattcagagaatattgctgcaatctctcagtcttcagtgggttcagactgaggagatgttaaagtaacccat

SEQ ID NO: 128202 - DNA, 51 bp, Homo sapiens
tatctttgattctccatatcacctacaggcctcattgctacgatttcagag

SEQ ID NO: 128203 - DNA, 75 bp, Homo sapiens
ggaacagaccgtaggcagtggcagtacagtccttcagagattccagctgaaagcctgtggtatttaacaaggccc

SEQ ID NO: 128204 - DNA, 96 bp, Homo sapiens
tgaagaaaaaggctgaacaaccagatggcattattgatgacagtcttcatttagaacttgaaaagcaggacatatctactgaagatggtgataggt

SEQ ID NO: 128205 - DNA, 75 bp, Homo sapiens
ccggggctgcggtcagcgcttcgatcctgagaccaattccgacggattcactccttctccagttgcacagccaca

SEQ ID NO: 128206 - DNA, 75 bp, Homo sapiens
aaactgactttgcagccacggagagggcttttttccagacttcaagctcccattccaacagtaagagcttcttcc

SEQ ID NO: 128207 - DNA, 73 bp, Homo sapiens
accatcgactacgtggaggacgtgctgtggagcatccgagtgtgccagagtctccagaattcgtcagggtcag

SEQ ID NO: 128208 - DNA, 83 bp, Homo sapiens
gcatgatcaacctcgtcatgtcctacgcggttttaaaatcaaagatgggaaaatcggagaaaattgcccttccccatggccag

SEQ ID NO: 128209 - DNA, 100 bp, Homo sapiens
ggcttagagatcactaatccatcttcagcttcaattacaagcatagaatgtcaagctaaccaggcgtccgctacttcagaagagtgtactgtcgcatggg

SEQ ID NO: 128210 - DNA, 75 bp, Homo sapiens
cgggcccaggccccggcagcgcctgggacaaggaatgtttaggtgtccataatgtcactaaacccgtgtcttcac

SEQ ID NO: 128211 - DNA, 100 bp, Homo sapiens
tgtcttcaaagtccctcatcaggaagagaatggctgtgctgacttttttatccgtggagagcgactcagggacaaaatgctttttaaagatgacatcagg

SEQ ID NO: 128212 - DNA, 100 bp, Homo sapiens
cctacgtcactcatgaggacatctgcagatgctttgctgtccctggtcttcagaatgaacagaaacgattccaactggaagaactgagaaagtttggggc

SEQ ID NO: 128213 - DNA, 100 bp, Homo sapiens
gtttggccggctatggagcttaccgtgtctccaatgacaaacgagatgtaaaagtgtcactgtgtctcgaagtgctgcagctaaaactcatacaactgcc

SEQ ID NO: 128214 - DNA, 75 bp, Homo sapiens
accaaggtgtaccatgagaacatcaagacggataggttgtcctgttcctcgaattccagctgaggccaatccttt

SEQ ID NO: 128215 - DNA, 87 bp, Homo sapiens
atcatccctgccctggatcggcctggagccagtgcccaacctcctgacaaggtgatccgggcgggccccgcaggaattttatcccct

SEQ ID NO: 128216 - DNA, 90 bp, Homo sapiens
aatttcagacatacacaccaaattgttgagagattcaactggaagctttgtgctgcctttccggcaagtcatgtatgctccatatcccac

SEQ ID NO: 128217 - DNA, 90 bp, Homo sapiens
tcaaaggactatggtgtatacctagaggactcaggccacactcttaggccggcatttgtaaatccactcatccctgaaagcccagaggaa

SEQ ID NO: 128218 - DNA, 100 bp, Homo sapiens
gcgtgcatggcgaagtccccggagaactctaccctggaggagattctggggcagtatcaacggagtctccggggatttaagtcgtggaactgaacattta

SEQ ID NO: 128219 - DNA, 96 bp, Homo sapiens
cccgtctgtcgcccgaggcggccgccgctgcaccttcaccgcgtacccgggacccgcccgcccgcgggagaaatgcttccatcatttcttcagaaa

SEQ ID NO: 128220 - DNA, 100 bp, Homo sapiens
gggtcgtggagccaggagcgacgtcaccgccatggcaggcatcaaagtcctaccctggtccaagcctggaaagtgaagacttcaacattccaccaattac

SEQ ID NO: 128221 - DNA, 98 bp, Homo sapiens
cggcgaggaaggcgtctcccggtggcagtgctgtggggcttttggagctgatgattggaacctaaatatttacttcaattgcacagattccaatgcaa

SEQ ID NO: 128222 - DNA, 100 bp, Homo sapiens
ccatccgcttcgggcgcttctgtcactactccatccagaagggagctgcgtttctgggacttggcaccgacagtgtccgagtggtcaaggctgatgagag

SEQ ID NO: 128223 - DNA, 115 bp, Homo sapiens
aatgtctgtctcaagatacaggacagctgtttgctcatcaacctcaactgtggggacttgatctcatcttcatgccaggccttgggtttgacaaacatggcaaccgactggggag

SEQ ID NO: 128224 - DNA, 100 bp, Homo sapiens
ggagttcgtctcttacgtctgcggaagtgcagctgcctcagttcttagcgcaggtatatgaatgacctaaaggtacaaataaagacggagagagaacagt

SEQ ID NO: 128225 - DNA, 100 bp, Homo sapiens
ttctgtcccaacgaggaagcctgtccattgaaaccagcaaaaggacttatgagttacaggataattacagctgtgaaagttgtgtagatttactgtttgt

SEQ ID NO: 128226 - DNA, 51 bp, Homo sapiens
cttacctctttgaatctgaaggtttagctgagctgcccctcctggacctga

SEQ ID NO: 128227 - DNA, 100 bp, Homo sapiens
cctggtagtcgtgcatcatcaggatacagaggataaagatggtgatagagcagttcaccatgcagcttttggagatgaaggcgctgttatagaagtacta

SEQ ID NO: 128228 - DNA, 129 bp, Homo sapiens
aaactccttcctgcctttaacacacctactgggattccttgggcaatggtgaatttgaaaagtactatactggcaattgctggagaagattttgcaattgttgcttctgatactcgattgagtgaaggg

SEQ ID NO: 128229 - DNA, 79 bp, Homo sapiens
ctgcgagcccgtgtggacttccacaacaacctcgtgggtgtgaaggtgtccctggccagtgtccttccacctgtccaca

SEQ ID NO: 128230 - DNA, 90 bp, Homo sapiens
ctgagtttcttcatctacaacccgcgcttctggccgcgggaaggagaggactgttgcaaccatgacatctgaagaaaagaaggaacggcc

SEQ ID NO: 128231 - DNA, 100 bp, Homo sapiens
ctggcatatgtgctgctgcctctgctgtacctcctggtccggaagcacatcaacagagcggcagaaacggaattacagagagctgcaatggatgctagcc

SEQ ID NO: 128232 - DNA, 100 bp, Homo sapiens
gatgcagccgtccttttggatttctttttaataatgtgtgacccttcacctttgatcccctgacctgcattaccttgaattaaacaaccaccatgtcgag

SEQ ID NO: 128233 - DNA, 137 bp, Homo sapiens
gagacgtttggaatgaggaaaagtgaacttttcgaggcatttgacttgtttgatgttcgtgactttggaaaggaatgtctgatcacagatacggggatggtggctctactttccagagcacaacaggacactgtgta

SEQ ID NO: 128234 - DNA, 74 bp, Homo sapiens
agagtccgatgaaaggaatgggtctgggaccttaacagggagccatggaaaatgtttcaacgtgcgcaagagtt

SEQ ID NO: 128235 - DNA, 100 bp, Homo sapiens
tgttgattctccattgggaaaggcatttacaggcatctccttggaaacaatgccatctttgaatgtgagagataaacctagtttcagcatgtctgcagca

SEQ ID NO: 128236 - DNA, 100 bp, Homo sapiens
ctaaaaagccctcagtaccagagacagaagcagatggattcgtccttttaggtataagtgtgctagcggagtgtctagattgtcctgaattgaaagcaac

SEQ ID NO: 128237 - DNA, 100 bp, Homo sapiens
aggccaataactcagccagtggccacagcaggactacagtcaagacaatcacagtctctggaggcccgggcagtcctgacctttgccctggacagcgtgg

SEQ ID NO: 128238 - DNA, 101 bp, Homo sapiens
cttcgacttagccctgctccaggaatgggacctcgagtcactgtggtatggcagcagccaaacttctgcatgactctggactgaatgtggttgttctggaa

SEQ ID NO: 128239 - DNA, 82 bp, Homo sapiens
cttcaacaagaggacccaggagaaattcgccctcaaagtcagggaagtcaaagatgcatccctgagttcttcctagcaggca

SEQ ID NO: 128240 - DNA, 51 bp, Homo sapiens
aggttgtccgagcatctgggaatgaccatgagggtggcaatgtaagtgccc

SEQ ID NO: 128241 - DNA, 89 bp, Homo sapiens
atcgtagcgaacacggtgctactcaaggcccgggaagttacagaatgtctgaaggggacagtgtgggagaatccgtccatgggaaacct

SEQ ID NO: 128242 - DNA, 100 bp, Homo sapiens
ctgaggcagagggtggcccatgagccggttgcgccacccgaggacaagaattccatacgacataatctgtcattgaacaaatgtttccttaaagtgcctc

SEQ ID NO: 128243 - DNA, 75 bp, Homo sapiens
ggcccagcgccgggcgctggccacgtgcagaatctgatgttccagcagaaatccaggtgttaaaagaacccctac

SEQ ID NO: 128244 - DNA, 100 bp, Homo sapiens
cagggatgtctacctggtaatagaggacttgaagcagaaagcaagtgaatacgagtcagaaggccagtccctgagacgaataggaccttgtccctggatg

SEQ ID NO: 128245 - DNA, 80 bp, Homo sapiens
tgaacgggaggaaggaggaaggggaaaggctgaccaaggagattgttcagattccattctgtggggaaattgactgtgag

SEQ ID NO: 128246 - DNA, 100 bp, Homo sapiens
aggcttcgcgggaagacgcggcggcggcggcggaggatgagcctgcagagcgcgcagtacctccggaatatcttatcaaattaggcaatacagaatgtca

SEQ ID NO: 128247 - DNA, 90 bp, Homo sapiens
cttgggtcctccgagagcagcagcggctatggagttactagtagagaaagcaatcagcagtgcttctagccctcagagccctggggatgc

SEQ ID NO: 128248 - DNA, 74 bp, Homo sapiens
tgatgctgcccgagaaattgaggccgttgtacaaccatccagcaggccataaaattttgagtagaaaaatccag

SEQ ID NO: 128249 - DNA, 97 bp, Homo sapiens
tgcctgaacattatgtggaaggatcaacagtcaattgtgtactagcattccaagatacagatccacgggttttagaaaaacaagaattacagcagcc

SEQ ID NO: 128250 - DNA, 100 bp, Homo sapiens
ttgctgtaaaaaatttcaggattggtactacaagggtgaaatagtggtgaaaaataacccaaatgaatctgtaactgctaatgccgctaccaattctcct

SEQ ID NO: 128251 - DNA, 135 bp, Homo sapiens
cattcttcaggtcatctgaaccttctgagaaaacatggtcaacgtcttgaaaggagtgcttatagaatggctatagaaagcgcaattggtggtaacgcttatcaacacagcaaagtgaaccagtggaccacaaat

SEQ ID NO: 128252 - DNA, 100 bp, Homo sapiens
gcagactcattatctggtgatagactgggttgtttcaatctaacagtcaaaggtgccgtgagcgatgtggagatgcaggaacactatgatgagttttttg

SEQ ID NO: 128253 - DNA, 49 bp, Homo sapiens
ctgttcccggggcagatccaggttcagctctgcttatgataatgtcaac

SEQ ID NO: 128254 - DNA, 75 bp, Homo sapiens
tgaagaggttggagatgggaccacatcagtaattattcttgattggctctaccagtgcacctggacagggaggaa

SEQ ID NO: 128255 - DNA, 75 bp, Homo sapiens
aacccatctaatcacagactcctatttgaagtatttgacgaaaatagactggttttaccaattcttgagattctg

SEQ ID NO: 128256 - DNA, 83 bp, Homo sapiens
cgggcagaagcggaccgggctccgagtgtcaacgagagctagggtgagttctgcagtcagggtgtccgtgagggcctcatcgt

SEQ ID NO: 128257 - DNA, 137 bp, Homo sapiens
gtgttattatggactttcaaacatctgaagatgacaatttattagatggtgacactgcagttggtggttgaacagggtatgtttgtaaagcactgcaaagtagaagtatatctcacagaattgaagctatgtgaaaa

SEQ ID NO: 128258 - DNA, 83 bp, Homo sapiens
cgattgaggaagagcgagccagcgcccggagcaagcggagctcccccaagagccggaaaggtgtgaccatgaagctcatggat

SEQ ID NO: 128259 - DNA, 80 bp, Homo sapiens
agtcttctatgtttccacatcggtcagaaaaagatctcttcacagatggaatcacaaataaacttattggctgttacgtg

SEQ ID NO: 128260 - DNA, 90 bp, Homo sapiens
ggactgccaagagacatgttagaaggacaactttacctttagtccaagtggatgaaaagggagaaaaagtaaggccaaatcaaaatcgct

SEQ ID NO: 128261 - DNA, 98 bp, Homo sapiens
tgcctggagcggctggactaccccaagagcaggatggccatctgcaatgtctcaggctgtgcagacaaacggaactcaaccattaagcaaaacatggg

SEQ ID NO: 128262 - DNA, 100 bp, Homo sapiens
ggggaccgccctggacatcaagattaaaagagcgaataaagtttatcacgccggggtatatgtggcagcctttgccatatcagcgtatgcatctagctac

SEQ ID NO: 128263 - DNA, 100 bp, Homo sapiens
atcacagttgtctgcaccctgttgtggctctataagcagccctgggcctggaggcacacactgcccgggtgccagtgtagaacatgcggtctgcgagaac

SEQ ID NO: 128264 - DNA, 100 bp, Homo sapiens
cgggccgccgccgccgccatgaaccccgaataatttggagcctggctgccaaccacttgagcttcctcaactccttcaagatgaagatgtccgtcatcct

SEQ ID NO: 128265 - DNA, 96 bp, Homo sapiens
gatggatcagagcatagtttagaaggacaaaaatttccacttgaggttgtgaatgttgcaggaggcatctcctttcttgatgccgttacgtccatg

SEQ ID NO: 128266 - DNA, 80 bp, Homo sapiens
gcgcagagcaaacatctttcaaagaaaggcctaaagaatgtatttgacgaagcaatattggctgccctggagcctccaga

SEQ ID NO: 128267 - DNA, 83 bp, Homo sapiens
agaagcggctgcgcacggactgctggagatggtggagtccgtcaatagggccagatttgagtgtgtgaatttttgagtgaaac

SEQ ID NO: 128268 - DNA, 75 bp, Homo sapiens
cactgatgacaattgaggaatttgcagcaggtgtaatcctgagagattcacatggtgttgcacaagtacgttttg

SEQ ID NO: 128269 - DNA, 100 bp, Homo sapiens
ccgccggagcgacacagcccccaccacctcaaagagcagcaccacatccgcgggtccatcacacaagtgctgatctgggacgatgcccgggagggcaagg

SEQ ID NO: 128270 - DNA, 74 bp, Homo sapiens
agccaaagaactggctaggcaaataagctttaaggttcttctgctggtgatgcagtgtggtcagggcattcccc

SEQ ID NO: 128271 - DNA, 88 bp, Homo sapiens
agaaaattcaagttggtgttcttgggggagcagagcggaagtttgtgtttttcaacatacctcagattcaatacaaaaacccttgggt

SEQ ID NO: 128272 - DNA, 88 bp, Homo sapiens
tcgtgtccggtggttgctgttgcttggcctggtgggcccagtcctcggtgcggcgcggccagggaacaacaccctggacatggctcca

SEQ ID NO: 128273 - DNA, 50 bp, Homo sapiens
atcattgatgtggtgcgatcggctgatgtccggccccaaactgatggctg

SEQ ID NO: 128274 - DNA, 90 bp, Homo sapiens
ctgtgactcagacctgggcacagcaaatgctgaggactcagaccggtctctgcaagaggccgcaagcttcttatcattgggaccactagc

SEQ ID NO: 128275 - DNA, 80 bp, Homo sapiens
agcccggcctacctcttcctctggcccgaagccttcctttatcgctttcagaccttcacggcatggtgcaactcccacct

SEQ ID NO: 128276 - DNA, 87 bp, Homo sapiens
gagcaggcagcttacaagttggatgcatattcaaaaaaactggaagggagtaatatgataggtactgaagaaactaattttgatcgt

SEQ ID NO: 128277 - DNA, 100 bp, Homo sapiens
agggaccacatcaaagacagctttcacagtttgcgggactcagtcccatcactccaaggagagaagatatttggagttcttacaacatggcagacattga

SEQ ID NO: 128278 - DNA, 100 bp, Homo sapiens
tgaactttctgccaagatgcggatggcctggtgggaatccaacaattaccagtccttctgcctgccctctgaggagagcgagccagaggaccttgagaat

SEQ ID NO: 128279 - DNA, 82 bp, Homo sapiens
ggaaatcgtgcacttgcaggccgggcagtgcggcaaccaaatcggcgccaagatgtgtcttgctgaatcagggctctcttat

SEQ ID NO: 128280 - DNA, 50 bp, Homo sapiens
gcggcggtttggaggaaagatgagacggagcttgggcccctgccgcagcc

SEQ ID NO: 128281 - DNA, 76 bp, Homo sapiens
tggcaatgggggcaggagctgttggagctttgcagctgacctacatctcgaaggatattaatgcacacgcctgtgt

SEQ ID NO: 128282 - DNA, 109 bp, Homo sapiens
ccagcagcccccgaaggccctatcaggacatggagtatgaaagacggacctgaaggagaagaaggagaaggtggaggagaaggcaagccggaaagagcgaaagaaagaa

SEQ ID NO: 128283 - DNA, 74 bp, Homo sapiens
aaaggctccaccttccacagggtgatcccttccttcatgtgccagagcctgccctcgcaaaacccgatcttgaa

SEQ ID NO: 128284 - DNA, 100 bp, Homo sapiens
caggatggtgtgtcttgcctcaacattgttgagagatgtgaaaggaccacccacccaccgtctgtcttgtggtcagtcaccctacaccgagacaacaacg

SEQ ID NO: 128285 - DNA, 82 bp, Homo sapiens
gggcgctccggtggcggcggaggttcatgatcaagagggcccaaggacggaagcgctttgggatgaagaattttaagaagag

SEQ ID NO: 128286 - DNA, 129 bp, Homo sapiens
tcctgctgcggttcctgcgcgcccgggatttcgatctggacctggcctggcggggggacttgatctcatcttcatgccaggccttgggtttgacaaacatggcaaccgactggggaggggcaagggcta

SEQ ID NO: 128287 - DNA, 85 bp, Homo sapiens
cctcgtcgggaagaatcgtttggtctcctgccgtgcccgccccatggctgggggttatggagtgatgggtgacgatggttctatt

SEQ ID NO: 128288 - DNA, 75 bp, Homo sapiens
ttcaaggcccgcggaacagcggaggacgaagagcgggacccgagccctgtaacaaatgtggcaattattttggat

SEQ ID NO: 128289 - DNA, 100 bp, Homo sapiens
agaatctagagaatgagcttgaattgacaaaaatggacaaaatgtcctttgttgaaaaagatgcttgagctccacattggagcatcaggtagcgtctcac

SEQ ID NO: 128290 - DNA, 100 bp, Homo sapiens
tgggaccgttctcagctccagtggaaccaggtgcctgtggacatacgagatccagttctctcaggacggtaaggcgtacaccccggtcagcaggaagcca

SEQ ID NO: 128291 - DNA, 98 bp, Homo sapiens
gctgagctggttggccctgtgatccctcaagactggtccacggagtgtatgaccacaaacagccatcaaggagatcatttggcatttagctgtgatgt

SEQ ID NO: 128292 - DNA, 99 bp, Homo sapiens
ttctcagcgggtcaagtgcagtacctggatctcatcaaaaaggacaccagcaagctgttcaatgaggaggcccggaggctgtttgatgtcctgcacgag

SEQ ID NO: 128293 - DNA, 100 bp, Homo sapiens
aggcgaagtcttcattcataaggataaaggatttggctttatccgcttggccttcccttcttcttggtggtgttcttgagtaagataatctggactggcc

SEQ ID NO: 128294 - DNA, 92 bp, Homo sapiens
ggtgcccgaggaggcagccaagctcgtagcctgccactccgtgctacctggagtagaacagaaaaattattatgtctgtgttcccttgggac

SEQ ID NO: 128295 - DNA, 74 bp, Homo sapiens
acctggcatatctgggcgccaagccgcggagcctccagacggaagtcacctgcaccggtgcccgtgacgtacga

SEQ ID NO: 128296 - DNA, 75 bp, Homo sapiens
cagaaaagggccatacatttgccgaagagcttcagaaacgttaaaaggatctgaacaaagtctgctcaaatctcc

SEQ ID NO: 128297 - DNA, 100 bp, Homo sapiens
tttatcactaaaatatggcatcctaatattagttccgtcacaggggctatttgtttggatatcctgaaagatcaatgtgttctggacttggtgcctcttt

SEQ ID NO: 128298 - DNA, 100 bp, Homo sapiens
gtgattactgtgacaagttgtttatgcggaggcaggacctcaagcagcacgtgctcatccacactcaaaagaaggggatcaacctgaaagagtccaacca

SEQ ID NO: 128299 - DNA, 50 bp, Homo sapiens
tgaagattttgaagaagtggcacagagctagagccggtgcaggccacgca

SEQ ID NO: 128300 - DNA, 89 bp, Homo sapiens
tatgccagatggaagaaccattgttagtgaacgtggacaaagctgttgtctcagggagcacagaaaagaagctcattcacacagaagac

SEQ ID NO: 128301 - DNA, 83 bp, Homo sapiens
gggggatgacggctccctgctgttcgagtacctgcccagaggggcccactcgctgtcccatttcagaagttgattgcaaagat

SEQ ID NO: 128302 - DNA, 83 bp, Homo sapiens
ggctcttgccctcatcctggttctggaatcctcagttcaagggtgcagcagttggaggaagaaaatacagagcttagaacaac

SEQ ID NO: 128303 - DNA, 100 bp, Homo sapiens
agcctcgccgattcccgtgcttgtaactgccccagccggacaccccccctcccttgacctacccggctatcgcagcaaaggttggcatggacagtacgac

SEQ ID NO: 128304 - DNA, 82 bp, Homo sapiens
tgcagtgtaacagcagaggactgtttacagcaggatgagcatgccaatttaactgaggcggaattctccacgagttttgagc

SEQ ID NO: 128305 - DNA, 75 bp, Homo sapiens
gaccttccttgctttcagaatttcacccaggttctgacagaattaaacaaccaccatgtcgagcaaaaaggcaaa

SEQ ID NO: 128306 - DNA, 100 bp, Homo sapiens
ggcttctccccgcgggagcccccagcatgggtggatggaagcatgcctaggggaagatctgcctcccaccacagaactggaggaggggcttaggaatggg

SEQ ID NO: 128307 - DNA, 82 bp, Homo sapiens
aacaaacagatcatccgcaaacacgcgcagaccttcgttgccctctgtgccacaggaaggagctgaagagaatgcaggacct

SEQ ID NO: 128308 - DNA, 100 bp, Homo sapiens
ccttggtcgccgcgtccttggctggcgtctggagaagaagcaggcgctccctccattccagccacagatcacagacgactacggtctggacaactttgac

SEQ ID NO: 128309 - DNA, 88 bp, Homo sapiens
gaacacagatgcgtggagtccgcgaagattcgagcgaaatatcccgacagggttccgcattggcatcaacaaaagtcagaattcccgg

SEQ ID NO: 128310 - DNA, 96 bp, Homo sapiens
cctgtgtcctcctcccttggtatatcaatggacacaacaaggactggttcaagatattagatgtgatggagctgcttgaagaagatctcacatgcc

SEQ ID NO: 128311 - DNA, 82 bp, Homo sapiens
cggctgtttaacttcgcttccgctggcccatagtgatctttgcagtgacccagagaatcagatatcaccaaggagagaattc

SEQ ID NO: 128312 - DNA, 102 bp, Homo sapiens
attggcacaaccaagcttcgcctggtggaattttcagcttttctcgagcagcagcgagacccagactcggttggtgttcgaggaagagacattgttgttctt

SEQ ID NO: 128313 - DNA, 98 bp, Homo sapiens
cttctgaggcgggaactgtttggctgccccagtgaggctgatgtcaacagtgaaaacgttcttgggtgtctctggggagtccctgggccagaccttcc

SEQ ID NO: 128314 - DNA, 83 bp, Homo sapiens
gttgaatccacctacacctagtatttaccactagctgtccaggggatttctggcctcccactgaagaaacaaatagataccag

SEQ ID NO: 128315 - DNA, 50 bp, Homo sapiens
tgaaaagtgagattcagactcagtggagatccttcagggtttggtgagtg

SEQ ID NO: 128316 - DNA, 75 bp, Homo sapiens
caagttttcattgggcaaaatgggaggaattacggaggttgagctggtccggaatccctaagccagtgcgtccaa

SEQ ID NO: 128317 - DNA, 100 bp, Homo sapiens
acgctctctcagcagcttccaagagaaccaatggaatggagaagatgatttattattaatccggaagaatagaatggcactttttcaacatttgacttgt

SEQ ID NO: 128318 - DNA, 90 bp, Homo sapiens
gaatgaacattgtattgagaacaatatagatttgcagccgattacacctcaacaagaaggcaactgacaaacagccttatagcaagctcc

SEQ ID NO: 128319 - DNA, 100 bp, Homo sapiens
acgagaggctcaccgcagtcgtgcaggatctgaaggaggctggaggctcccaggtgattttcacaaatcctttagaaatcgtcaagatccgtttgcaagt

SEQ ID NO: 128320 - DNA, 75 bp, Homo sapiens
gcttgctccctacgatgagaactggttctacacgcgagctgggttggggtgctggaggactgcttcaccttcctg

SEQ ID NO: 128321 - DNA, 74 bp, Homo sapiens
tgtattaatggatcacattttgaatttgaaggtctctctgaagaggctatcatggagctgaacctgccgactgg

SEQ ID NO: 128322 - DNA, 75 bp, Homo sapiens
cagcgaattgtaatggaaagcatatggacaggtctacgccacatcacttaggccaccagcccctcgggttccaag

SEQ ID NO: 128323 - DNA, 98 bp, Homo sapiens
ccgggaggaaggaacgaggcaaggagctaaagcagcgtgcgttcagccctggggagctctttgttcaatgcctagccacctattcctacagacacggc

SEQ ID NO: 128324 - DNA, 100 bp, Homo sapiens
agggactggcagacccgtagctaagacgccaggatttcctggaagcagagaaatggtgtatgtggaatttgatgatcttgaatgggataaacgagagtgg

SEQ ID NO: 128325 - DNA, 75 bp, Homo sapiens
acagctacgcatagaagccgggattgagcgcatcaagggttgtgagtcccggcccagcccctccacccccctgcc

SEQ ID NO: 128326 - DNA, 100 bp, Homo sapiens
gcagctgcctgggagaatgttgactctactgcaggtagaggggaagagattgaactttgctgacctttgatgtgaggcgctcagccagggccaaggggag

SEQ ID NO: 128327 - DNA, 83 bp, Homo sapiens
cttggaaaatactcagtttcctgcttactgcttcattatggattatacaggctatcgccccattccagcggagacttatgtag

SEQ ID NO: 128328 - DNA, 90 bp, Homo sapiens
gcgcgggactcaagtacaactcccggcacgaggctggagcattggatttgctaaaggagcttaagaatattcctatgaccctggaattac

SEQ ID NO: 128329 - DNA, 96 bp, Homo sapiens
gctgcagtggccgccgctggagaccgcgggacctggcgctgcagcgagagttggccaccctgttcaagggcttaggagaaagtcaacacacttcgc

SEQ ID NO: 128330 - DNA, 75 bp, Homo sapiens
accattggcaaggagatcattgacctcgtgttggaccgaattcgcaagctggtttctaagcatgaattgaggaac

SEQ ID NO: 128331 - DNA, 100 bp, Homo sapiens
cagtaggcaatcacctgaaggatctgacttccagaagctgggacgatgccggagtgtgaaggagtttgagaagctgaaccgcattggagagggtacctac

SEQ ID NO: 128332 - DNA, 98 bp, Homo sapiens
agatcctgtgctttactctgaagactcagctccaaacgagaatggaagccgctggaggaccgtagctgcacagacataccatggctgctgctcttcat

SEQ ID NO: 128333 - DNA, 75 bp, Homo sapiens
ggaccgacccctctgctcgcggccgcgcctttgagatgatgataattccgaagaaggcttccacactattcattc

SEQ ID NO: 128334 - DNA, 98 bp, Homo sapiens
aataaaagcattcggcagcgtcgtcgcttcactgtggctcatacatgggtgccagcctgggtgagcaatggggatgcagcggacgcagccttctccgg

SEQ ID NO: 128335 - DNA, 51 bp, Homo sapiens
ctgtggaagatgatgcttttatcaaggacatggatttgattgacatacttt

SEQ ID NO: 128336 - DNA, 75 bp, Homo sapiens
tccggccgtgtcccgaggaagtgcaagacccggttatgaagacagtatggagtttccagaccatagtagacattt

SEQ ID NO: 128337 - DNA, 100 bp, Homo sapiens
atagaaatggctgaaggaaaacctccttatgctgatatacatccaatgagggaactgaaattaccattcacttttttaagtggacatattcatgaattga

SEQ ID NO: 128338 - DNA, 90 bp, Homo sapiens
cccggaatcggggcgcttcgccccgggccccccagcatgaagaccccggcggacacaggaattgaatgatctggcacgggaccctccagc

SEQ ID NO: 128339 - DNA, 98 bp, Homo sapiens
cccctctggaaatgtcaccaacatcctagagctgagggtgctggagatctagaagacccatggtagccttaaaaaccttctaaaatgcttttgattct

SEQ ID NO: 128340 - DNA, 100 bp, Homo sapiens
gtacttgcagccctcggccaaacggccagacgccgacgtcgaccagcagagactgatgatgataattccgaagaaggcttccacactattcattcaggaa

SEQ ID NO: 128341 - DNA, 100 bp, Homo sapiens
gtggaattttggagatattcaaagcctctgtgtccagatgtttgactggtttgactaccatggccacatgtgtatctcctttgagcttctgggccttagc

SEQ ID NO: 128342 - DNA, 90 bp, Homo sapiens
cgaagattcagctggaacatcacatctcccctggggactttcctgattgccagaaaatgcaggtcccatgcagccctcgggagagaccca

SEQ ID NO: 128343 - DNA, 51 bp, Homo sapiens
aggcagacaaacccatcagccatgcttctcaataggtttggcatggacaag

SEQ ID NO: 128344 - DNA, 74 bp, Homo sapiens
gtccagctgctgctgacgctgaaggagagaagtttgctgaggaatgccttcaagcacaaagtgatgaatgactg

SEQ ID NO: 128345 - DNA, 80 bp, Homo sapiens
acagccgccggccgggagaggcgcgcgccatggcttctggagccgagctttctgtctctggtcgtgatgagaacagtgtg

SEQ ID NO: 128346 - DNA, 95 bp, Homo sapiens
ctatcaggacatggagtatgaaagacgggtgaaaaggaacagcctgtatttgcaatgaccggccttcgatggggatctttcagagatgctggcgt

SEQ ID NO: 128347 - DNA, 95 bp, Homo sapiens
ggagctgtatgaccttaacgtggagctctccaagggatttccacaagatcaaattcgattgtggcccatgcaagcaaggagtaatggaacaaaac

SEQ ID NO: 128348 - DNA, 100 bp, Homo sapiens
agactcaagccagacatcacggttttacccagtggtgaaagaaggacggacactggatgccaaggcatgttatttgaaagcaattgagacgcaaccgaac

SEQ ID NO: 128349 - DNA, 97 bp, Homo sapiens
tcaagttggctgaggcacaccagcaggagtgctgccagaaatttgaacaactttccgaatctgcaaaagaagaaattacagaagacatccccgtgaa

SEQ ID NO: 128350 - DNA, 100 bp, Homo sapiens
tctacctcctgcgaggcctcccgggctccgggaaaactacactggccagacctgcctagagctggaacgttacctccagagcgagccctgctatgtttca

SEQ ID NO: 128351 - DNA, 97 bp, Homo sapiens
ctcaatgagaaaatctccctgctccgcagcgacatcaccaagctggaggtggacgccatcgtcaacgccgccaaaactggacaagccaaggcatctg

SEQ ID NO: 128352 - DNA, 75 bp, Homo sapiens
tggaacctgacacttggcatgacagtgcttattctaccagattccatgaaagtattgccagtgtacatgaattgc

SEQ ID NO: 128353 - DNA, 90 bp, Homo sapiens
agaggatcgacgcctatgtcgacgagcaggatctacagcgagatattgaacaacacagcgcaggggtggagtccgtgtttaacatctgtg

SEQ ID NO: 128354 - DNA, 73 bp, Homo sapiens
aggcagagtctctgcgttacaaactcctaggagggcttgctgtgcggaggtggaggttcaagacggccccaat

SEQ ID NO: 128355 - DNA, 102 bp, Homo sapiens
ggagagtgggcgtctggcggggtccgcagtttcagcagagccgctgcagccatggccccaatcaaggatcaggagcgtctgggcaagcagctcaagttacgt

SEQ ID NO: 128356 - DNA, 80 bp, Homo sapiens
gatatgatcggggctatgatgatcgggactactatagcagatcatacagcctcctgacaaggtgatccgggcgggccccg

SEQ ID NO: 128357 - DNA, 100 bp, Homo sapiens
gtgttgttgaggctgaggactgactggggttctgagactccctgtcccggaccgcaggtccaagccttgtcatcggccagtaagtttgaagcagagttga

SEQ ID NO: 128358 - DNA, 96 bp, Homo sapiens
attaatctcccaaaatattctagaaggggaaaagctacttcaagcactgaacctaccagatgtatttgggttggtcgtcctcccattggaactgaa

SEQ ID NO: 128359 - DNA, 90 bp, Homo sapiens
ccctggtgcccagccgggaactccccatcgcgttttgccagcgataatacgcctcagaaagcatccctggagaacagcctggaggagacc

SEQ ID NO: 128360 - DNA, 83 bp, Homo sapiens
ggctggccgagcaggcggagcgctacgacgacatggcctccgctatgaaggcggaagctgagctgaacacattacgatggatg

SEQ ID NO: 128361 - DNA, 82 bp, Homo sapiens
cccgggacaccgcacagccgggaaatgggcagctgcaatgactctccgcacggtattattgtcattgcaagcactattggca

SEQ ID NO: 128362 - DNA, 51 bp, Homo sapiens
acataccctcttcttgccaccagatcactttgggaagcagtgacatccaac

SEQ ID NO: 128363 - DNA, 116 bp, Homo sapiens
ggagggtgccgcggccctgcgcagctgccccatgtgccagaaggagttcgcccccagcaaacggggattcagcgtccgatcctttggaacagggactcacgtgaagcttccaggac

SEQ ID NO: 128364 - DNA, 75 bp, Homo sapiens
gcagccgatccagcctgcggagcctgtggggcaggtatatgtctcgagtccacggtatgcaccctaaagagacca

SEQ ID NO: 128365 - DNA, 76 bp, Homo sapiens
atatgttccagttgcacatttcctgcaaggactccaaagtggtgaggcataaacttggaggaggcagtggagagag

SEQ ID NO: 128366 - DNA, 100 bp, Homo sapiens
ctttcccacaaaagctaattgagtacacgttcctgttgagtacacgttcctgttgttgagactgagctaaagttaatctgttgtgacattctggatgtac

SEQ ID NO: 128367 - DNA, 75 bp, Homo sapiens
gggcaccatcatgaagatcggcatcgaggccaaggttcacgcctacatcatcagctccctcaagaaagagatgcc

SEQ ID NO: 128368 - DNA, 97 bp, Homo sapiens
ttagacttgtttcttatatgtgatgccattccagcactggactcatggaggctgagcatttattcaggtgtcagttgtacccgaggcgttctcagca

SEQ ID NO: 128369 - DNA, 75 bp, Homo sapiens
ctcactgtcaagcacgagctgcggactgggaagccctatggggcggatgacttcctgcctgtgctcatgtatgtg

SEQ ID NO: 128370 - DNA, 101 bp, Homo sapiens
gaagtaccaggaggcgttggccaaggcttcagataaaccagtcgatcattttctgtaactcctctcagcgagttgaattgctagccaagaagatttctcaa

SEQ ID NO: 128371 - DNA, 100 bp, Homo sapiens
cagtggcaaccccgggggcagcagcaactgccggacgccctatcgcaagcagattgttgtgtccactgtatcctggcttgcttgttctgcgaattcctga

SEQ ID NO: 128372 - DNA, 72 bp, Homo sapiens
gtccgccaggccctgcaggacctgctttcggagtacatgggcaatggcgccaatgcttcggcattagagaaa

SEQ ID NO: 128373 - DNA, 96 bp, Homo sapiens
cccaaagacgctaaacgtgccctactctgccccgggggagagacctgcctagagctggaacgttacctccagagcgagccctgctatgtttcagcc

SEQ ID NO: 128374 - DNA, 83 bp, Homo sapiens
gcaagatttgaggctgggaagaggtggatcccagaattggaagaaggccatttcataattctgaatcatgtctgataacggag

SEQ ID NO: 128375 - DNA, 83 bp, Homo sapiens
aagcgcgagcgcgacgagtataagcggaggttttaaaatcaaagatgggaaaatcggagaaaattgcccttccccatggccag

SEQ ID NO: 128376 - DNA, 100 bp, Homo sapiens
gccgcagatccgctgtacttgcgtccgctacagtatgtcaatcgcttgccccagcacagatgacaagacgttccaatgtgagatgtgtttcagattcttc

SEQ ID NO: 128377 - DNA, 75 bp, Homo sapiens
ctcagaccagaccctctggtggtaaagcagaagtcaattcatctggaaagactatctctgagtcagacttaaacc

SEQ ID NO: 128378 - DNA, 50 bp, Homo sapiens
gcaggacgagacggtcgaggagatgttcttaatagttgctcctctttctg

SEQ ID NO: 128379 - DNA, 75 bp, Homo sapiens
gaggagcgcgtcgtgcgcctgggggtgcgcgcctgcgacctgcccgcctgggtaggtgagctcgtgaaacaatat

SEQ ID NO: 128380 - DNA, 90 bp, Homo sapiens
aaatgcgcttcctgagggagtgggtggagagacaatgcagatcttcgtgaagactctgactggtaagaccatcaccctcgaggttgagcc

SEQ ID NO: 128381 - DNA, 100 bp, Homo sapiens
ctgggtgcgtggggctgcctcgccgcgtctcgccacgtattctaccttgtaaatactgttatttgtatatactgtaaatgatgacatcggtgggcactaa

SEQ ID NO: 128382 - DNA, 83 bp, Homo sapiens
gtccaaggcaagaactgaaaactctgagtgatgttcagaagtttgcagagataaatgaatcatttgctgtttcaaatagagaa

SEQ ID NO: 128383 - DNA, 100 bp, Homo sapiens
atttccactgcttgaaggctgctcgaggaacaggagcagcggcgaaacccaggtctgtcggtttacgagggctggggagcggccggagctttgccgagtg

SEQ ID NO: 128384 - DNA, 90 bp, Homo sapiens
tgttgcaccaggttcttcgaaaactgaagcagatgttgaacaacaaggctctacagattctcccctgcccctggagaaggaggagcaggt

SEQ ID NO: 128385 - DNA, 73 bp, Homo sapiens
gcacatcctgggtatgccgccagtgtgtctttgcgatcgccaccaagttctgggaggtgatcagtgatgaaca

SEQ ID NO: 128386 - DNA, 100 bp, Homo sapiens
ggcatgtgaccatgtccaccaacaacagacaggagcaggaagatcttgaactgaagcacaattccacattaaaacagctgatgagggagtttaatacaca

SEQ ID NO: 128387 - DNA, 98 bp, Homo sapiens
gaatatgttttacatccaagaactacaggctttacttttgtggtagaccgtctaagagaagaatcttgcctcctggaatccttcaaatcctgaatgtc

SEQ ID NO: 128388 - DNA, 75 bp, Homo sapiens
aaggaagcgtgcaaatgccagaaagaggatttggccagagcgttttgttttggtgaggattcatcaacctccagt

SEQ ID NO: 128389 - DNA, 98 bp, Homo sapiens
atgactctgtggtgggtccctcagcccttctgagctctgtgctgaacaaggttgaaatcacaaagattagacacctttttagataggtgttcttcagc

SEQ ID NO: 128390 - DNA, 100 bp, Homo sapiens
agaaagggacagagacggcgaagtttgacggtctggaaagcagagaccagcagggctgactgcttgggaggcaccatgactcctgtgaggatgcagcact

SEQ ID NO: 128391 - DNA, 51 bp, Homo sapiens
gttctctccaggacatctaccaagactcgagaacaggaagaactggaagaa

SEQ ID NO: 128392 - DNA, 80 bp, Homo sapiens
gcagcggcaggctcaggtgcagccgctggttattcagcttctcaaggctggaaaagcgaaggaagtttcctacaatgcac

SEQ ID NO: 128393 - DNA, 50 bp, Homo sapiens
tatggaactcagcaacatcacatacaggatgatcatgacgcagtcctgag

SEQ ID NO: 128394 - DNA, 101 bp, Homo sapiens
tgcgacttgtctacgccgctggcccagttccgcgaggacatcacgtggaggcggccccaggccagcgagaccgaggagaatggctccgacagcttcatgca

SEQ ID NO: 128395 - DNA, 99 bp, Homo sapiens
aacaccgtcttatagctcgctatgctgcccggctggctgcagaagcaggaaacgtgcctaaatgcgatggccaggtattactgacacaagtgtggaagc

SEQ ID NO: 128396 - DNA, 89 bp, Homo sapiens
acaactcttctttggaaagggaacacaactcatcgtggaaccaggccagaagctgggcttacagagattctctaaaggcagaagaaaac

SEQ ID NO: 128397 - DNA, 83 bp, Homo sapiens
ccaaaagtggcatgatcctttgcagaaatgactacattagttttccaagagataacttcaccaagatgtccagtgataggcaa

SEQ ID NO: 128398 - DNA, 91 bp, Homo sapiens
gcgggaggtgttcgagaacgaccccgagacggggacggcaaaacagaacagaaaggcggagataaaaagaggggtgttaaaagaccacgag

SEQ ID NO: 128399 - DNA, 75 bp, Homo sapiens
cgtcttgcctgtgtcccacttgttcgcggcctatagccatccgggtgacctgcataggttcctgcggggtctcca

SEQ ID NO: 128400 - DNA, 50 bp, Homo sapiens
tttggacttcatagcctctagaactctgggaaaacggcaatggattaata

SEQ ID NO: 128401 - DNA, 76 bp, Homo sapiens
gtcttcataccatgctgtccctcctgagcaagatgaaaggaagaaaaagaagctgttgcgtgagcagagaaagcag

SEQ ID NO: 128402 - DNA, 85 bp, Homo sapiens
aagaggcggctcagatccccagatccagtgtgtgggagcaggaccagcagcgctagtcctgctgatgggcaaagaaggtgtccac

SEQ ID NO: 128403 - DNA, 101 bp, Homo sapiens
acgcggctggcgaagctggcgagcgggggtcatccgagccgtgtcacacagggacagccgcaatccggacctggcgctcctctggtgcaagtgtggtagct

SEQ ID NO: 128404 - DNA, 89 bp, Homo sapiens
cacagaaccaagtaaagagaaggaggccggaactacaccagcaaaagattcagagcattcttcactccagaataatgagcaaccctctt

SEQ ID NO: 128405 - DNA, 101 bp, Homo sapiens
ctacaatctaagaaggatttcagcaaatttggagcagggactcacagaaaacactggacttccccggaagctacttgaaaaacatgacccctggccggcct

SEQ ID NO: 128406 - DNA, 100 bp, Homo sapiens
ttcgacatgggcggagttctcattccttctccagggagagtcgctgcaggcagtagaacgagtcctgtacccacacctgtccacctactggacaaacttg

SEQ ID NO: 128407 - DNA, 127 bp, Homo sapiens
gccgatcatggcggatggcccccggtgcaagaggcgcaaacaagccaatcccaggaggaaaaacggcgaggattaaatccaccacacagggtgaaatctatctccatgacaacattcacacaacagg

SEQ ID NO: 128408 - DNA, 74 bp, Homo sapiens
aaagtgctgggattacaggtgtgaggcaggtgctgatactggggcttcggcgctgttgcctgtggacggagctc

SEQ ID NO: 128409 - DNA, 91 bp, Homo sapiens
gcgcagggcctgcagcgggagctggacggcgagcgcgagcggcgcgagaaacgggctgacgcacgaggcacacaggaaggaggtggagcag

SEQ ID NO: 128410 - DNA, 121 bp, Homo sapiens
ctactgtgcgctgtgctgggcgctgtcatgatcgtgatggtgccgtcgctcatcaagcagcaggtccttaagttcttggccaggctgactgagagatttgtgctgggagtggatatgttcg

SEQ ID NO: 128411 - DNA, 75 bp, Homo sapiens
tgcccggcagtgcttggtcttattaaacgctttatgaaagcactgggaatttgctcctaacagtgttcattattt

SEQ ID NO: 128412 - DNA, 97 bp, Homo sapiens
tgtttcctgcttacttctgttgggacaggccttgcatcctgtgctgccaactccatcaatcagagtaacagttacccctcaatgagcgacccctacc

SEQ ID NO: 128413 - DNA, 130 bp, Homo sapiens
ctttgacgccctcttccagccccagcagcacccagcccgtgaccagcacgacaccttcttccttcgagtgccagttgccagctgacggtcctggaagggaagtcgggactctacttctcctctctggact

SEQ ID NO: 128414 - DNA, 83 bp, Homo sapiens
tttccgctttgtggccacatggtgtcagatgaatatgagcagctgtcctctgaaggctgccatgtgttacatccatattgctg

SEQ ID NO: 128415 - DNA, 90 bp, Homo sapiens
gagaaccactaaagggcagagcaaagactccagtaacactcaagcaaagaagagttgagcacaatcaggaatgtatcctgtcaggtataa

SEQ ID NO: 128416 - DNA, 75 bp, Homo sapiens
tggcaagccaactctgagagagccaaaacctattgatgtacaagtcattacacaccacatgcagcgatatgcagt

SEQ ID NO: 128417 - DNA, 100 bp, Homo sapiens
gatcgagtaaaggttttattacaagctcacaatcaccattacaagcatttagcccatcacctcttcatgaccactgcctgccaggaggctaactacggtg

SEQ ID NO: 128418 - DNA, 100 bp, Homo sapiens
tgggacaggccttgcatcctgtgctgccaactccatcaatcagtttcaaagaagctggcaccgattccacccaaggtcccctttggccagccgggggcta

SEQ ID NO: 128419 - DNA, 82 bp, Homo sapiens
tgattttcctgcatggattgggagatactggatttaatccagagactgacttcactatagaacccacagttgtatcaatggt

SEQ ID NO: 128420 - DNA, 100 bp, Homo sapiens
aattctgggacctttccataaggtcagattgtcaagcatggagatatcaagtgtgtactaaatgaaggcatgccaatttatcgtagaccatatgaaaagg

SEQ ID NO: 128421 - DNA, 100 bp, Homo sapiens
ctcgataaatcagacagaacagttaatcctcaatttaagcctgatctaacccctagaaacagctgctgcctattcacactctgaggcttggtgtggaagt

SEQ ID NO: 128422 - DNA, 75 bp, Homo sapiens
cgaaagctgcccgagcctcttttcactgatgggttaaagcacgaattgggagctctcagcgacatcaccagtcag

SEQ ID NO: 128423 - DNA, 76 bp, Homo sapiens
tccgccctaatggaggtctccagtttcgaacacccagtgcatcccagaaggcttggagagctactacgcggagcaa

SEQ ID NO: 128424 - DNA, 100 bp, Homo sapiens
caggacctgcctcatattgagaatggtggtgtggctgtcctcactgggaagaaggttcagaaaagagaccctcgtgactggactgcacagttcatggagg

SEQ ID NO: 128425 - DNA, 82 bp, Homo sapiens
gtgggccgcgtcgaagacatggaccagggctacggagtaaaatgtttattggaggcttgagctgggatacaagcaaaaaaga

SEQ ID NO: 128426 - DNA, 100 bp, Homo sapiens
cagtaagtcgtcgcacgctggactggatttattcagtggcgcatattaaatttcctattgactacccctattcaccacctaccttcagattcttgaccaa

SEQ ID NO: 128427 - DNA, 100 bp, Homo sapiens
cgcgccaccatctttcgggctgccgagggtgttcttgacgattaatcaacaggagtatgctgctgctgttccgctttgcgtcctcgctacaaacgcctgg

SEQ ID NO: 128428 - DNA, 131 bp, Homo sapiens
cgacaccagcaccaactccagtttctgtaagcaatgacttgtggggagacttcagcactgcctccagcttccaaggagaggactgcccctcacaaaagtaataccggattccccaagctgctttgtgcctc

SEQ ID NO: 128429 - DNA, 75 bp, Homo sapiens
agctgattgagcagtatgagctgcgcgaggaggactacaaatccctccaggatatcattgccatcctgggtatgg

SEQ ID NO: 128430 - DNA, 82 bp, Homo sapiens
gctgggacagcgagcccttcaccctggtggagcgagacgaatagctgtatttcagaagaagaaagagatgcttatgaagaac

SEQ ID NO: 128431 - DNA, 100 bp, Homo sapiens
ccaggagctctgctctcccctccaggtgtggatgaggtcaccattgtcaacattttgaccaaccgcagcaatgcacagagacaggatattgccttcgcct

SEQ ID NO: 128432 - DNA, 101 bp, Homo sapiens
gaccatgatggaatgcttgacagagatgagtttgcagttgaacaagttccagttccagtctaccacccaacacctagccagactcggctagcaactcagct

SEQ ID NO: 128433 - DNA, 100 bp, Homo sapiens
ggagaactggagaagttaaatcagtccacggatgatatcaacagacgggagactgaacttgagcacgtatctcccatgcgccaagtggagcccccagcca

SEQ ID NO: 128434 - DNA, 80 bp, Homo sapiens
tgaagcacctctccagcggggacctgctccgggacaacatgctgcggggcacagggtctccaactgaattccttgaagag

SEQ ID NO: 128435 - DNA, 80 bp, Homo sapiens
ccgctgccgtcgccgccgccaccatgcccaagagaaaggtcactatcatatgacaaaggctttgccgcagttcatcttcc

SEQ ID NO: 128436 - DNA, 100 bp, Homo sapiens
gaggagttccgcatggagaagttgaaccagctgtgggagaaggcccagcgaacgagccaaactcaggctgtaccttgagcagctcaagcaactggtgccc

SEQ ID NO: 128437 - DNA, 82 bp, Homo sapiens
aggcttgtccggggagcagtatgccggaagctggttttcaggccacaaatgctttcacagagacaagaggagcagcagcggc

SEQ ID NO: 128438 - DNA, 97 bp, Homo sapiens
cttgatgaaggcgtggatagcctgaaggcagccattcagccagagactgctgctactttgaaacgtacgatagaggccctgatggacagaggagcaa

SEQ ID NO: 128439 - DNA, 83 bp, Homo sapiens
ccctgtcaagaaggtgccggtggtgcgagtcttcggagcgaccccggcagaatgttgtaccatctttgggtaggcagacttcc

SEQ ID NO: 128440 - DNA, 98 bp, Homo sapiens
taccggcccaaggccatctacctggacatcgatggacgcattcagaaggagagaacattgaaagtattctctaagctatttgaagagagtgactaaat

SEQ ID NO: 128441 - DNA, 76 bp, Homo sapiens
ggaatccgagaagagcagagcggagggagccccagacacggattttttatcaagcagaaatgcatcgaacaacgag

SEQ ID NO: 128442 - DNA, 100 bp, Homo sapiens
catcgagcccattatgaaactgaaggtagccgaggggcagtaaaagcatctactgggggacatcctgttgtgaagggacagtatgatttggtgaaatgcc

SEQ ID NO: 128443 - DNA, 76 bp, Homo sapiens
actcattgtattcctcctgagataataatgaaggcgcagttgtgtagcagttgagtaatgctggttagctgttaag

SEQ ID NO: 128444 - DNA, 100 bp, Homo sapiens
cggcgctcaccatcaaccctaccatcgccgagggcccatcccctaccagcgagggcgcctccgagcgcctgtgtctggcagagctggtgtgagacgagac

SEQ ID NO: 128445 - DNA, 101 bp, Homo sapiens
caaatttttggatgatgatggatccatttctcctattgaggagtcaacagccagggtaatggaagttgctctgttaaaagacatgaagtgcagtttggagt

SEQ ID NO: 128446 - DNA, 96 bp, Homo sapiens
ttgaagcactgtgtggcttccagaagccaatatctactcttgacaaccgaaccatcgtcatcacctctcatccagtgaggagctggtttcacctga

SEQ ID NO: 128447 - DNA, 99 bp, Homo sapiens
gtgaccgagaccaccggggacacagagattattatgacagttaatgacagttcggactatcacaggaaatatctactatgcaaggtcaggaactaagat

SEQ ID NO: 128448 - DNA, 100 bp, Homo sapiens
gttaaggattccaagtaactcttatttgcattcaattcgagcactggcgttaagagttttgagggaaattctgagaaatcaaccagcaagatttaaaaac

SEQ ID NO: 128449 - DNA, 99 bp, Homo sapiens
ctcgggccggcggacagtgagggcgcgtctattatcctcccagtccacaacgctgaaccgtggctggacgaatgtttgaggtctgttttgcaacaggac

SEQ ID NO: 128450 - DNA, 100 bp, Homo sapiens
ctggactctgcagagtgaagagaaaatagcaaacgatccagacggcagggagtgcatcaaaggtgtgaacacagggcctctgaaaaatggaaccaaattc

SEQ ID NO: 128451 - DNA, 95 bp, Homo sapiens
cgggaagctggcggcagcggcggtggcggtggctgagcagaggacccggcgggcggcctcgcgggtcaggccatttcataattctgaatcatgtc

SEQ ID NO: 128452 - DNA, 83 bp, Homo sapiens
gggcttcgcgtgttccaagaactgcctgtgcgccctcaacctgctttacacccggacaaggcaaaatctcagcaagttcggac

SEQ ID NO: 128453 - DNA, 105 bp, Homo sapiens
ctacggtctggagagcagctgcattgcaggcacagggcccgatgagccagagaagcttggagtggaggcagcacagacagtgaggacgaagaagaggaggacgag

SEQ ID NO: 128454 - DNA, 100 bp, Homo sapiens
cggatgatccgcatggaccggcggggaggcacctggaagctgctgggctctgtggtctatgcccacagcaaggagaacaaggggtctgtggaaatcatga

SEQ ID NO: 128455 - DNA, 99 bp, Homo sapiens
acccagatgaaatcggcaactttataattgagctcttctctcacgctgtgtcatccaacgggaatgcagttgaggatccaatggagattttgatcacgg

SEQ ID NO: 128456 - DNA, 87 bp, Homo sapiens
cgcccgtggccgctgccgcctccgccccaggttttcccatcatatgattcccggtcctcctggtccccacacaactggcatccctca

SEQ ID NO: 128457 - DNA, 100 bp, Homo sapiens
ccagcagatgcaggaaaatttcgatattgaagtgtcaaaatccatagatggaaaagatggttacacggtgtgggcacacaacctcattgccattgctcgt

SEQ ID NO: 128458 - DNA, 73 bp, Homo sapiens
aatgggaacccagtgcctgatgaaaatggacacattcctggtatgacaacgaatttggctacagcaacagggt

SEQ ID NO: 128459 - DNA, 100 bp, Homo sapiens
gcaggaggagctctcggtcctggccgcgattttctgcaggccccacgagtgggaggtgctgagccgctcaggagaactgcgacacatcaccaagctgaag

SEQ ID NO: 128460 - DNA, 96 bp, Homo sapiens
ccggcgttgaattccgggaagtgggagcttcaggctcgctccgtgcggattcgggaactggagcctctcctctgtcacagtgacaatccatctcag

SEQ ID NO: 128461 - DNA, 96 bp, Homo sapiens
ggagccgtccagtcttcgaatcccaggatacccacccaccatcccagggtctacaacatccacagccggaccgtcacccgctatcctgccaactct

SEQ ID NO: 128462 - DNA, 100 bp, Homo sapiens
gtgatgatgctccacagaatgctaagaaagctaggcttctaccagaaggggaggagacgttggaatcaggtgtgtagaccacactccaaaactgaaactg

SEQ ID NO: 128463 - DNA, 100 bp, Homo sapiens
atgatggacatcggctccacccggttttgacgaagtatattatgggcagtacatctctttttacatgaaacaaatcttcttcttggatgacagtgggccg

SEQ ID NO: 128464 - DNA, 100 bp, Homo sapiens
gattcaagaaggacaaagagatcatagccgagtatgaaagtcaagtcaaaggttgcctgggcttctggttcctcttcagattacattgggagatatttac

SEQ ID NO: 128465 - DNA, 83 bp, Homo sapiens
atttgcaaatcattcagtgaatcccaactgttatgccaaaggagtttgggctttgcaaaactgagaacaaagccaagtcgggc

SEQ ID NO: 128466 - DNA, 76 bp, Homo sapiens
cggcaagaactggattcgtggcgccacaagctcattcactgtgtaggttgtaggtcataaagaaggtctggatgtt

SEQ ID NO: 128467 - DNA, 92 bp, Homo sapiens
atcgagcctgagggaggggaaaggcgcaggacaatgcagatcttcgtgaagactctgactggtaagaccatcaccctcgaggttgagcccag

SEQ ID NO: 128468 - DNA, 97 bp, Homo sapiens
cctaggccgggccctgccagggagcaagtctgcatcgcagaggccaggacggaatcagtccccaatgcctggaaattcctcattggattactgtgtt

SEQ ID NO: 128469 - DNA, 100 bp, Homo sapiens
caaaaccgaacgagaagcagagctcaagaaactgcaagaagccagaggttgactttggcagaatatcatgaacaggaagaaattttcaaacttagactag

SEQ ID NO: 128470 - DNA, 98 bp, Homo sapiens
tggtggaagtggtgaagtaaagatccaacttagaaataatgtttcattcaagataaggctcgtggcttaggagattgtgacctggcttgcatcattct

SEQ ID NO: 128471 - DNA, 88 bp, Homo sapiens
gggcatcgtgtctcgaccgcgtcttctgagtcagcaaattatgcgcacagccatgaagtataacctgggattggacctgagaacagct

SEQ ID NO: 128472 - DNA, 98 bp, Homo sapiens
ccgccgccgccgcccccgccgccagtatatttgccttccctccatgatctccaacactatccgataaagtagaagcaactgaggtaccgtgaaagaga

SEQ ID NO: 128473 - DNA, 50 bp, Homo sapiens
aggattccaagtaactcttatttggtgatggaagctgttttattgtccag

SEQ ID NO: 128474 - DNA, 75 bp, Homo sapiens
cccgctgcgctaggggaagcgggcaggtctcggcgcggaagatggccggcggcgtggacggccccatcgggatcc

SEQ ID NO: 128475 - DNA, 51 bp, Homo sapiens
ctcttgcaatcttggaccctggatgcccgggtagttaaagacatggcaact

SEQ ID NO: 128476 - DNA, 98 bp, Homo sapiens
tgaagaggtaccacctcgaccacctagccctccaaagaagccatctccggaattacatgaatgacagtcttcgaaccaatgtgtttgttcgatttcaa

SEQ ID NO: 128477 - DNA, 112 bp, Homo sapiens
ggcactgccggcggggaccgctgggaaggcgaggacgaggacgaggacgtcaaggtatccaccaacccctcctccaacatcgatccaggcgactatgttgaaatgaatgatt

SEQ ID NO: 128478 - DNA, 100 bp, Homo sapiens
tcggacaagtttgcaaagctggagtcaaagtatgatgaacttaaaaaatcagaaaagggaagtaaacagcaacataaagttcataagtacattacatcat

SEQ ID NO: 128479 - DNA, 50 bp, Homo sapiens
ggaggttcttcagtgtatgcctggttggttttatgactggacccagacct

SEQ ID NO: 128480 - DNA, 75 bp, Homo sapiens
gggaggggtgcgaggctagccacgcaggcggggccctggtgagaaagatcagtctaaagaaaaggagaagaaagt

SEQ ID NO: 128481 - DNA, 75 bp, Homo sapiens
gtagcgaacacggtgctactcaaggcccgggaagcccgagcgggaagaagttccgcagcaagccgcagctggcgc

SEQ ID NO: 128482 - DNA, 75 bp, Homo sapiens
tggattgtcacctttgctgcaaaaaattacggatgcccagcctacagagtctgagaaggaaatttataatcaggt

SEQ ID NO: 128483 - DNA, 100 bp, Homo sapiens
atggcggagagagaggtggagtccggcccccgaaagaggtgcacgctaggcggctttgaggagctgcagagcatgaaggctgagaagcgcagcatcctgg

SEQ ID NO: 128484 - DNA, 95 bp, Homo sapiens
gaaacctttccaacacagatgtccaagctgccaaccgaaaatgagagcacacctattcagcaactcctggaacacttcctccgccagcttcagag

SEQ ID NO: 128485 - DNA, 82 bp, Homo sapiens
agtgcttacaccgcccagcccactcaaggatatgcacagaccacccagtgagaagcaggcagccagtacccttgccacggta

SEQ ID NO: 128486 - DNA, 85 bp, Homo sapiens
gattatttgccttatgttatgggctatttgtgtagcagaaggtcatttaagggccatcaacccagaaaatggctttttcggtgtc

SEQ ID NO: 128487 - DNA, 96 bp, Homo sapiens
ctagtaaggatgccacctatacttctgcccggaccctgctggctatcctgcgcctttccactgctctggtggtcattgggactcccacacttaaac

SEQ ID NO: 128488 - DNA, 97 bp, Homo sapiens
gcgagctgggaccagcgtctcggaggcgccgcaggctccagcaggagaagacagacacggtccgctgcatcaagtcctgccgccccaacgatgtcac

SEQ ID NO: 128489 - DNA, 100 bp, Homo sapiens
agaggcagtgactctgcacccagcaatccctctgcagacagctcccacaggagtcatgcccagtgtgtgaagagttcgcagtatgtgcagtgcgtggccg

SEQ ID NO: 128490 - DNA, 100 bp, Homo sapiens
tagatgttaccctttcagtgccgaatgtgtctgaaggaattgtgagttttttgctccactcaagcctgttagaatcaccatggaatacagctccagtggg

SEQ ID NO: 128491 - DNA, 75 bp, Homo sapiens
gagtatttcagacaaacatttcaggaactgttcaaagcgtattgtcagggcagaaatagtgaagtacccggaaga

SEQ ID NO: 128492 - DNA, 100 bp, Homo sapiens
gcttctatcatttttgttactcttcagtacaatgtcaccctcccagcaacagggatacaggaagatgctgacagaagagtttcacagaacagccttgggg

SEQ ID NO: 128493 - DNA, 101 bp, Homo sapiens
ccagtccccagtgagggtgtacaaatacccctttgaattaattatggctgtcccattttcagtgcccaagatccccctggtattccgaggacacacccagc

SEQ ID NO: 128494 - DNA, 99 bp, Homo sapiens
tccgacagaagcttggggagctcacggatctgcatgggcttcgcagtgaaccagaaccacagattttggattttcaaacccagcagtataaactctttc

SEQ ID NO: 128495 - DNA, 98 bp, Homo sapiens
ccctacttgcctaaatgaggaatgtctttcctaccatctaaaatacgaaggtttctggctgggctcagatccacctacttggaaacatagtgatctgg

SEQ ID NO: 128496 - DNA, 75 bp, Homo sapiens
accgccacacgcgcagcatcttctgggagctccagctgagatctgtatctgtggacctgaatgttgatccctcgc

SEQ ID NO: 128497 - DNA, 90 bp, Homo sapiens
cacgaactgagctgatccttgccccaggaccattgccaactatttggtgtggagaatggtttattccagaattccaaaccttagcaggcg

SEQ ID NO: 128498 - DNA, 101 bp, Homo sapiens
tgttcaaaccactgaggatcagattttgaagagagatatgccaccagcatttattaattacagatgtagagctaaaacgactgaaggatgctttcaagagg

SEQ ID NO: 128499 - DNA, 83 bp, Homo sapiens
gctaacctagggctactgttgattttgactatcttcttagtggccgataactgcgacctccacttcaaggtggcccgagatcg

SEQ ID NO: 128500 - DNA, 90 bp, Homo sapiens
actccctgcatccaggacagtctgattgggaaaatgaggtacgttagtgttcgcgattttaaaggcaaagtgctaattgatattagagaa

SEQ ID NO: 128501 - DNA, 75 bp, Homo sapiens
atttatggcagcctcactcccagtagtttctgcatttagtgagataaggaaggatatggagtaatagtactaaat

SEQ ID NO: 128502 - DNA, 100 bp, Homo sapiens
ccacattgctgcatttgttctgcctgacttggaccctggaaaacctggccctcttcaatttctgacaaaagcttcctgcctgacacagctcacttcaaga

SEQ ID NO: 128503 - DNA, 74 bp, Homo sapiens
gaccttcagcccgtggcccggatgcaggacagacccctcagggatgcttgaagatggaaagaaatttgattcct

SEQ ID NO: 128504 - DNA, 101 bp, Homo sapiens
gggagtcgctgggtgcgtggggctgcctcgccgcgtctcgccacggctttaaaggagatagatgaagttggggacctattgcagctgaagtattcccgtca

SEQ ID NO: 128505 - DNA, 82 bp, Homo sapiens
tctcgctcggagcttcgctcggaagggtctttgttccctgcagccctcccacgcccaacctcagcgcttgcctcagcttcag

SEQ ID NO: 128506 - DNA, 100 bp, Homo sapiens
aaaatcttctgtggattaactcagtggctcaacaggctgaagggagggacgcgtatcccacgtgtgaggtggttgatgtgcagctgtgctacaacgtggc

SEQ ID NO: 128507 - DNA, 74 bp, Homo sapiens
atttggtgcaaaactgcctccagatggaaggatatctcacgaatttgctttgggggcctttactttccaaggga

SEQ ID NO: 128508 - DNA, 74 bp, Homo sapiens
aacttctggagtttcagaagagccttgaaacgttattttaccaagaaaatggtttgcacgactttgaacatata

SEQ ID NO: 128509 - DNA, 82 bp, Homo sapiens
ccgatgaggaagtactgagcctgttggaggaactggcccggaaacaggaggacgtccctgtgcgttttattgcgacctgccg

SEQ ID NO: 128510 - DNA, 50 bp, Homo sapiens
ggaccacacaaagtcttactgctgaaccttcacctagccccaggattaca

SEQ ID NO: 128511 - DNA, 100 bp, Homo sapiens
agccccgccccggcctctggggagccccaggagggagtggattagaacaagatgacatgagaattttatacaaataccttaccacctcccttttcccaag

SEQ ID NO: 128512 - DNA, 100 bp, Homo sapiens
tgcaggcctgcaggatttggtttcagcatgtccttctctgaatgatgaatacttttactactgtgacaacattaacgattattcagagctgggagagctt

SEQ ID NO: 128513 - DNA, 74 bp, Homo sapiens
ggcatttggtggacacttttgcttgcagttaggtcaagtggagtgtatccaaagtgtgtacatcagtaagatca

SEQ ID NO: 128514 - DNA, 102 bp, Homo sapiens
acttttaaaggaacctgttgataaatgcaaaacagtggctgttgcagtccaaaagaatatccgctaaggatgccttagcccacccctacctagatgaagggc

SEQ ID NO: 128515 - DNA, 100 bp, Homo sapiens
gttccatcaaacacagaggaatgaccaccatggcagatggcaacagaggatgtcaacaattttttggagggagatgcagttaaagacttgatgcttcgct

SEQ ID NO: 128516 - DNA, 100 bp, Homo sapiens
aagatgtgagctcaagccttcagaacagagcacctggaatggataaaagtggcagtttttgtttcttcccatgaggttgtgtatctggactgagaaccag

SEQ ID NO: 128517 - DNA, 100 bp, Homo sapiens
ggctatcaggaccgtgcgggtgctgcggcccctccgcgccatcaaccgcgtgcctaacgttggtgatcaaagtgtccggtgtgatcctgtccgtggtcgg

SEQ ID NO: 128518 - DNA, 90 bp, Homo sapiens
gagagagcgagctgagtggttgtgtggtcgcgtctcggaaaccggtagcgcttgcagcatgacggttgatgatgaagcgccggccgtgta

SEQ ID NO: 128519 - DNA, 75 bp, Homo sapiens
ggacaagcacagtcttcggaagtgagaactcaacagaggcaaaagcagtagattctaacaatcagtcgaagtccc

SEQ ID NO: 128520 - DNA, 83 bp, Homo sapiens
cgagaggccgtgcgggacgcgggcgccaggaccggccgaacgcagaggagcgagcccagggcgtggtgctgaaagtgctcaca

SEQ ID NO: 128521 - DNA, 87 bp, Homo sapiens
taaatctggctttaatgacaacagtgttaaatatcagcaaagaaaacatgaccctcacagaaaatttcatcagagaagatatgaaat

SEQ ID NO: 128522 - DNA, 100 bp, Homo sapiens
cgggacagcacagaggcagcgccacctcgcttggactgggaggtgctggtcctagggaagctcaagtgggacctggctgctgtgattgcacatgatttcc

SEQ ID NO: 128523 - DNA, 83 bp, Homo sapiens
cccttatcccggagagctgacaatgatgaatctcaggaacaagtgcagaacaggataatcggttcagcaacaaacagaagaaa

SEQ ID NO: 128524 - DNA, 75 bp, Homo sapiens
cccgatgtcatcaagttgcaagagattccaaccttccagccccttttgaaaggcacaattccaccttcctttgtg

SEQ ID NO: 128525 - DNA, 51 bp, Homo sapiens
ggaaacggtatcgctcctgtaacacagatgatgtcacatgtacttcagttt

SEQ ID NO: 128526 - DNA, 75 bp, Homo sapiens
ctgtgcagcatcaaagaggcaggaggtatcagcagatgttgcacacaaacttggtataccttgctacaatagcag

SEQ ID NO: 128527 - DNA, 88 bp, Homo sapiens
cgagatgaatcctgcggcagaagccgagttcaacatcctcctggccaccgactcctacaagctacgagttccagggagctctgtcctg

SEQ ID NO: 128528 - DNA, 75 bp, Homo sapiens
tgtcaagctggtggtccacgactgtcccgtctgggacaagaaatggattctcagtcatgaagatgtcatattggg

SEQ ID NO: 128529 - DNA, 50 bp, Homo sapiens
aatggaatgaccctcctgctgtgcaagccagggctgagcaggaagaagaa

SEQ ID NO: 128530 - DNA, 83 bp, Homo sapiens
gtgctcgtcgccgtggcgccatgggtgttgtccgcagccgcagtgttctaagaacggaagcatctgggctggatggaatttag

SEQ ID NO: 128531 - DNA, 88 bp, Homo sapiens
cggcgcggcgtagtggatgcagcatcctagtggaggacgcccctgtgggccacccccttaaccctcgggactactgtggctggacacc

SEQ ID NO: 128532 - DNA, 100 bp, Homo sapiens
tctcaataaaagcccaggaagaagacgaggatggactatgatgatggatatggcactgcttatgatgaacagagttatgattcctatgataacagctata

SEQ ID NO: 128533 - DNA, 100 bp, Homo sapiens
ggaaggtggagccaccagcctctccttggatattagaaatggctactccccagtcaattttcatctttgcaatctgcattttaatgataacagaattaat

SEQ ID NO: 128534 - DNA, 76 bp, Homo sapiens
atcatcagattccatttcaacttctgccgacaacttttctcctgatttgaggagtgtatccagaagctactgtcag

SEQ ID NO: 128535 - DNA, 75 bp, Homo sapiens
ttgaggtgttacaccagcctgtccggacccgctgtggccacgtagatcctgaaggagctagacgagtgctacgag

SEQ ID NO: 128536 - DNA, 75 bp, Homo sapiens
ttgactttcgtagtacttgtcattaggtgtcgtgaaaactacccctaaaagccaaaatgggaaaggaaaagactc

SEQ ID NO: 128537 - DNA, 90 bp, Homo sapiens
atggcggtggccgagctgtacacgcagttttaacagtgtatgccagggaacacacattctctttcgagaattcagcttcgtccaagccac

SEQ ID NO: 128538 - DNA, 136 bp, Homo sapiens
gaaatggtgtgtctccatgtgattagtttaatggaggcattgcaggaatgcaattcgaccatttttgtcaagctccaggtccagttcctgttccaggtcccaaaagccatccttctgcatcctcgggcaaactgct

SEQ ID NO: 128539 - DNA, 75 bp, Homo sapiens
gacatttccacacccagacccaaagtttgcaacaatcagtcagctttaatgaagcaccagttgagattcccagtc

SEQ ID NO: 128540 - DNA, 97 bp, Homo sapiens
ccgaaggcggtgggaccagcggctgaggccaggatgccgtccaggcggcgcggcggctcctcactcatcccagaggctgggcactcactgcagctgg

SEQ ID NO: 128541 - DNA, 100 bp, Homo sapiens
agccaaggaaggcttcgagaagattagcaaaggtgctaatccagtggaaatcaggagagcaaaccagtccagctacgggggcccagccagccagcagctg

SEQ ID NO: 128542 - DNA, 107 bp, Homo sapiens
catttagagactgaaatcactgcaccttaaaaacaaaagattgagctgcactgtattcctgaagcttttgtccagtgatcgaaatccaccaattgatgacttaataa

SEQ ID NO: 128543 - DNA, 104 bp, Homo sapiens
tttgactactggggccagggaaccctggtcaccgtctcctcagtttggtgccctggttgtcagatgttggaaagcagtaggacggaacatactcttcgtggttg

SEQ ID NO: 128544 - DNA, 75 bp, Homo sapiens
tgatggggctggacctgctggtgttcgcccacgaccatgatcactttgggaagcagtgacatccaacctgtatca

SEQ ID NO: 128545 - DNA, 85 bp, Homo sapiens
gtggatcttccaggccataaagatcgctggcctccccaacgacacactgtcagtggagaacggggtcatcaaccagttttcccag

SEQ ID NO: 128546 - DNA, 100 bp, Homo sapiens
tcctgttccaccttcagagcgtcacggcgtacgccctcatggggaaaatctccccggtgactttcagaatcaggaaacccaggcccaacggcaggtggat

SEQ ID NO: 128547 - DNA, 83 bp, Homo sapiens
ccacccatcaccccctcctcttcattccgcagcagcactccgacaggagcttactccacgggaacagcctctagataatctga

SEQ ID NO: 128548 - DNA, 97 bp, Homo sapiens
atcccatacaaattattcctcatgatgtgaaaatgcttttacagggacctgggagatttctaaactgagagtcctatccaaagaagagaaattacac

SEQ ID NO: 128549 - DNA, 75 bp, Homo sapiens
accaagttgtgttcgtgttgttggcacaacatttcatggaactgccgctgtgattggaaccaggctgcatgctgc

SEQ ID NO: 128550 - DNA, 100 bp, Homo sapiens
gcagcggggctcaggagacatgcggtctggatcggattttggaggcattgaagctgctgctgagcccgggaggagcagcatggacctgtcagcaactaag

SEQ ID NO: 128551 - DNA, 90 bp, Homo sapiens
cacggtttttattgacagagctctgatagttgttccttgtgcagaaggttggtcgacaacttctgcatttgcgaagagtgcagcgtccct

SEQ ID NO: 128552 - DNA, 100 bp, Homo sapiens
attgcaagggaaaaagtaaataaagctgctgtttttgaagagacttgcgagtagagggtttgtttagagtaccgggtaatagtgtccgacagcagatttt

SEQ ID NO: 128553 - DNA, 99 bp, Homo sapiens
gcctggactctgaggaatcctatccatatgaggcaacacttcttggacacttaatgattgttggcaagaaatgtgctgctgatctgggcctgaataagg

SEQ ID NO: 128554 - DNA, 100 bp, Homo sapiens
acggggaccggtgctcccggcttcacaacaagccgacattcagccagaaatgcaccgcacccagaccaagttcgaggacgccttcaccctcaaggtgttc

SEQ ID NO: 128555 - DNA, 97 bp, Homo sapiens
cgttccggatgctttaggctgccggatgtctgatctccgaataactgaggcgtttctgtacatggattatctgagagcatcagtgatgtcacgtttg

SEQ ID NO: 128556 - DNA, 75 bp, Homo sapiens
cgtggcttccccgacgcagcccagcggcacggagaaagatgtatcctccactcctcgctggccaccatcctgctg

SEQ ID NO: 128557 - DNA, 74 bp, Homo sapiens
cgcgaagtgccagatgcaggcggggaagacaccccgaagttggagatcaaggtcactcccagtgatgccatagt

SEQ ID NO: 128558 - DNA, 90 bp, Homo sapiens
cccagcctcaggcctgcacggacggtgttggttgggatttcaacactacacttgcacaatgtctttgaaaccaagagtagtagattttga

SEQ ID NO: 128559 - DNA, 100 bp, Homo sapiens
ttctgtcttccttcctgggtcagtgattcccggaccctggaagagaagagggtggctaatgattaagacatttcaacctacgaatgaagagggacacttc

SEQ ID NO: 128560 - DNA, 98 bp, Homo sapiens
gtcctgcaggtattgggagatccacagctaagacaccgggacctcctggaagccaaaaatgacacatcaccttcactttgggatatggaatttgataa

SEQ ID NO: 128561 - DNA, 50 bp, Homo sapiens
gcgtttcttgcaagaatgggagcatttaaatcaaacggtattgagatgga

SEQ ID NO: 128562 - DNA, 95 bp, Homo sapiens
ctccggctctgcgctcggctgcctgacttcttcctgctgctgcttttcagggacttaattcagtgcacaaatgagatgaatgtgaacatcccaca

SEQ ID NO: 128563 - DNA, 83 bp, Homo sapiens
cagcctcaaaaccgtcctgctgcttgctgaccaaatgaattctcccagtccttggctacatcagcccacccctgtgacctcag

SEQ ID NO: 128564 - DNA, 100 bp, Homo sapiens
taaatcaagatttaacattccaacacataaaaattatttatccaacagctcctcccagacatggaaggtctttaatgtaactttaaatggttcaccaaag

SEQ ID NO: 128565 - DNA, 100 bp, Homo sapiens
ccgatatggaacccaagcagtggcgaagggaatcgcaaggctcttccctgaccattttctactgtccctgcgcgagattgcaaatagaagagtcttccaa

SEQ ID NO: 128566 - DNA, 100 bp, Homo sapiens
tgtccggaggtttgcaggggtgcagtgtgtctggtcttatgagtggatgaggatcgcagtacggaacctgaccgattgcaggtgtttcacaagagagcca

SEQ ID NO: 128567 - DNA, 90 bp, Homo sapiens
gtgcagggaagagagaccttagaaaggatcaggactggcggataaacaggggtcacatgacgacagaagccaagagggctgcaaagatgg

SEQ ID NO: 128568 - DNA, 75 bp, Homo sapiens
taggagaggagttcggcgccgcttctgtggccacggcagacgctgcatccaggtagtacacaaactgctctgcta

SEQ ID NO: 128569 - DNA, 82 bp, Homo sapiens
cactccgcacctcggggacattattgcgcgtggaacggctgcttttggaagatttggtcgtattgggcgcctggtcaccagg

SEQ ID NO: 128570 - DNA, 50 bp, Homo sapiens
tggctccctgcagtaccctttaacgagcaacttatgactctcatctctgc

SEQ ID NO: 128571 - DNA, 75 bp, Homo sapiens
agctgtttccacgtgcggtgctcgtcgggagtgatcacctaccctacagggtaattaaaaccatggaggcgatca

SEQ ID NO: 128572 - DNA, 80 bp, Homo sapiens
cctggcccgggtgacccacgcggaggccgtcaaggtttcaaagagcagatttacgatgtatacaggtacctgcctccagc

SEQ ID NO: 128573 - DNA, 97 bp, Homo sapiens
cctgctgcctgactacctggctgccatagatgaggccctggcagccttgcacgtgacgaatggaggaaccaatctctgtgctgtggatgactccaac

SEQ ID NO: 128574 - DNA, 100 bp, Homo sapiens
ggaggtggcagccatctccttctcgctgcgctgagcacagacccaagtgtgctggggaagtaccgagccggcttcagcgagtgcatgaacgaggtgaccc

SEQ ID NO: 128575 - DNA, 97 bp, Homo sapiens
cagcagtacatgcagcagttgtatcaagtccagcttgcacagcaacaggaagcgttgttgacgaccatggacatcatccacgatggatttggattca

SEQ ID NO: 128576 - DNA, 75 bp, Homo sapiens
gaagcgtgtcgttctgcaccagcgccttgatcgagtacttgagttgagccccatatgggggttggcaggcagcag

SEQ ID NO: 128577 - DNA, 115 bp, Homo sapiens
tctactttacagaacctttgtaatcaagttgataaggaaagtactgtccaaatgaattatgtcagcaacgtatccaaggacccagatgatgtggtaccagttggccaaagaagag

SEQ ID NO: 128578 - DNA, 88 bp, Homo sapiens
gaagctggaggtcaacgaggccgagctgctgcggcgccgcaactttaaagtcatgatctaccagctcaccatggatgatgatatcgcc

SEQ ID NO: 128579 - DNA, 95 bp, Homo sapiens
tctgagggaggaggacaacaagtactgcgccgactgcgaggccaaaggaatggcatcaccagctgccggatgcggactgagagtgagccatcttg

SEQ ID NO: 128580 - DNA, 90 bp, Homo sapiens
ttcgcctgtggctggacaacacggagaacgacctcaaccagggtgcccgtccgtgatgatgggaacatgcccgacgtgcccagccacccc

SEQ ID NO: 128581 - DNA, 100 bp, Homo sapiens
gtctactgaaagctgccgctgaagctgccgccgttgcctccgccgccaagagtgagcgagcggacccgcgatgggtcctctcagggtgcgccatcattgt

SEQ ID NO: 128582 - DNA, 95 bp, Homo sapiens
gcggatgccccagccggggcccagcgaacgccaggaccgcagctgaatgcacagctagaaggttggctttcacaagtacagtctacaaaaagacc

SEQ ID NO: 128583 - DNA, 100 bp, Homo sapiens
ccaggccccgcggctagccccttcccacaggctctctccgctcgattttgtcaccgttatgtgggaagcgaatccagcctccggtgtggctgtctctgat

SEQ ID NO: 128584 - DNA, 75 bp, Homo sapiens
tccatgctcaacaccgtgctctatgcccgggacaagtggctgggcccgcccttcatggagagcctgcccgagaac

SEQ ID NO: 128585 - DNA, 121 bp, Homo sapiens
cagaaattaccacattgaagacaatctcaaggaccaaaaaagaacttcgtgtgaaaattttcctggggctttatcctgtggataaacgcagagtgaacgagtttggggagtcctacgagga

SEQ ID NO: 128586 - DNA, 121 bp, Homo sapiens
cctgcagccgccgccgtccccggagcacggggtggtgtgtgggggaagccgcccccggcagcagttttcggctttgtgagaaaccttaccatcaaacacgatggccagcaacgttaccaac

SEQ ID NO: 128587 - DNA, 83 bp, Homo sapiens
gctctttgacacacagcagttcttgtcagggatttcttccagaaagcatgtatgaacgtattctcactggtcccgttgtgaga

SEQ ID NO: 128588 - DNA, 75 bp, Homo sapiens
cttgccgcagccagcaactatttcagggagttctgggaaatcgttcattcatttacagatgaacagaaaagactc

SEQ ID NO: 128589 - DNA, 100 bp, Homo sapiens
ctttctggaatcaatgcaagttcggttcccactgatggctcagctattgacctgaaaagtggttctggaaaagtgtaccaaggccctgcaaaaggtgctg

SEQ ID NO: 128590 - DNA, 82 bp, Homo sapiens
cagcaaggcagaaccaccccagtgcacctccctggcctggtctgctgatggccaggtagttagaaacaaacctgtggcaagg

SEQ ID NO: 128591 - DNA, 51 bp, Homo sapiens
ctgcaggcacagttgccgattacaggtgtcagttgtacccgaggcgttctc

SEQ ID NO: 128592 - DNA, 75 bp, Homo sapiens
cttaagaacaccatggagaccatagactggaaggtctttgaaggaaatcgcccaaccaactctattgtgttcacc

SEQ ID NO: 128593 - DNA, 100 bp, Homo sapiens
tgccggcacggcgagaacgagcacaacctccagggccgcatcgggggcgactcaggcctgtccagccggggcaagaagcagcctagggcctaggcccggg

SEQ ID NO: 128594 - DNA, 43 bp, Homo sapiens
tcacaaatctcaatcctgattaacaaatgtggcaattattttg

SEQ ID NO: 128595 - DNA, 75 bp, Homo sapiens
atcaagcagagcggtttcgaagacttgggcggggagacaaccccttccccaagaatgctgatgggactatatgct

SEQ ID NO: 128596 - DNA, 48 bp, Homo sapiens
gcaagtctgcatcgcagaggccaggcttcttcctgcgtctgtgctccg

SEQ ID NO: 128597 - DNA, 100 bp, Homo sapiens
aaacctggggaggagaagacaatcttacatgtaagactttgaccccgacgcaggcttcagtgattgccgcggatcagaagcctgagcactttggctcgag

SEQ ID NO: 128598 - DNA, 100 bp, Homo sapiens
gcgggcacagggcaaggcggcggacggctgcgtcgcccgaggcgaggaggagcgctggcggttcagccgtctgtatatctccccagatacctgaaactga

SEQ ID NO: 128599 - DNA, 98 bp, Homo sapiens
aggattccaagtaactcttatttggatatcaatgcttacaattgtgaagagcccacagaaaagttaccttttcccatcatcgatgataggaatcggga

SEQ ID NO: 128600 - DNA, 96 bp, Homo sapiens
agcgggaccatctcatcactaagcgggatcttgccctcagtgaaggagatattcacactttgaatggtgagagtatcatggttgaactcgcagctg

SEQ ID NO: 128601 - DNA, 51 bp, Homo sapiens
tccttgcagcactaaaatttgcgatgtgcattttgtaagcactttggagcc

SEQ ID NO: 128602 - DNA, 101 bp, Homo sapiens
gtctcttgcttccccgtcctctgacatcgcctgcagccgagcgggcccgttccgccggagctgaggaccaggaatggatataaatttctctactgttctgc

SEQ ID NO: 128603 - DNA, 83 bp, Homo sapiens
ctacccgctctttgccgtgacaacaccgttcccccagccgggctggttggggtgactcagtgggaacgccatctgagcggggc

SEQ ID NO: 128604 - DNA, 97 bp, Homo sapiens
aaaaatttggacattgaccccaaactgcaagaatacctcggcaaattccgacgtcttgaagacttccgagtagatgcaagaaataccgcccacgaat

SEQ ID NO: 128605 - DNA, 74 bp, Homo sapiens
ctctctcaaagcaccgtggaatcaaccaagccctcgatgctgtgggccctgagggaaaggatcacagaggcgct

SEQ ID NO: 128606 - DNA, 97 bp, Homo sapiens
tctgtaccataaatttggaccaggaagaagtttatcgtacccaagttgtggaaaaatctttaagaaacatcctctaccaccttgatgaaaagacaag

SEQ ID NO: 128607 - DNA, 82 bp, Homo sapiens
aggactcctcgcctggctcggaagggcttgtcaatgaggcagatcagattcaggttcgacgggcagccaatcaatgaaactg

SEQ ID NO: 128608 - DNA, 74 bp, Homo sapiens
aggtggattaaatgtcactctcaccatccggctacttatgcatggaaaggtccatctggttggtattgacatct

SEQ ID NO: 128609 - DNA, 90 bp, Homo sapiens
gatgaaggagccagtttggctgaaaataaaagagatggagtttcactgtgtcagccaggatggtctcgatctcctgacctcgtgatccgc

SEQ ID NO: 128610 - DNA, 83 bp, Homo sapiens
ctgccgagcgtgaggagactcagcagaaggtgcaggtgagaagccctaccactgcaactgggacggctgcggctggaagtttg

SEQ ID NO: 128611 - DNA, 50 bp, Homo sapiens
agtggccgtagcggcttgttggataagaactgataaatttcaaacggaag

SEQ ID NO: 128612 - DNA, 97 bp, Homo sapiens
agacaccctcctccttcatcaggcctttgaagatgccatggatggcctgccttcccacaggtcagtgcaactgaatggccagcccttagtgatggtg

SEQ ID NO: 128613 - DNA, 76 bp, Homo sapiens
gggcgggccggggtcaccacgcctgccccagggaaccgcacaggccgggctctcgccatgggtcactgtcgcctct

SEQ ID NO: 128614 - DNA, 90 bp, Homo sapiens
cgctccgtggccttagctgtgctcgcgctactctctctttctggcctggaggctatccagcgcccctggccccaacatggcccgtcgctc

SEQ ID NO: 128615 - DNA, 100 bp, Homo sapiens
gcagccatggccctggtgaccctgcagcgctcgcccacgcccagcgccgcctcctcctcggccagcaacagcgagcccttgccctgttggatgaataggc

SEQ ID NO: 128616 - DNA, 51 bp, Homo sapiens
cgcggggctaccggatcggtcggaaatgataatgagcttcagtccccaaga

SEQ ID NO: 128617 - DNA, 80 bp, Homo sapiens
gaactaaggaatgtaaatgtatttttcccacatttcaaatattccatggacacctatggctggagtgcagtggtgtgatc

SEQ ID NO: 128618 - DNA, 74 bp, Homo sapiens
cccgctcgctgggagagaggtacctctccttttccctctccctttccctaagattttaggtgatgggcaagtca

SEQ ID NO: 128619 - DNA, 101 bp, Homo sapiens
cccaggcagggaaggtgcaggaggctcaggtaactataactacccaatattgcagccatggagtccatgcttaataaattgaagagtactgttacaaaagt

SEQ ID NO: 128620 - DNA, 74 bp, Homo sapiens
ttcggggaaatggctgcgagaccctagaggcctgcggcctgcggtggagctgatcagaataatgttcagcatca

SEQ ID NO: 128621 - DNA, 71 bp, Homo sapiens
gtctttgcaccaagaaacaagaacttcaacatccatggaacgggcttccgagtggacctgccaatcaagtc

SEQ ID NO: 128622 - DNA, 51 bp, Homo sapiens
tacaaacatgttttatcaatgcagctaagcgtactgagcgctttgggcagg

SEQ ID NO: 128623 - DNA, 75 bp, Homo sapiens
attaaaaggcatgatagaccaaatttccatgaaagaagcagatggatcctgagcttgaaaaaaaactgaaagaga

SEQ ID NO: 128624 - DNA, 98 bp, Homo sapiens
ttttttttaaaaaaaattaattgtggtaaaatacagcatacctccagataatctctctattcaagagtttcaaagaaatgaaaatattgatgtcgagg

SEQ ID NO: 128625 - DNA, 100 bp, Homo sapiens
aactacggggttggtgagagcttcacagtgcagcggcgagatttcacagagatgatgagagccctgggataccctcgacatatttctatggaaaatttcc

SEQ ID NO: 128626 - DNA, 83 bp, Homo sapiens
tgctagcagaaaatcaaaacgctgattaaaagaagcacgtttctgtagaaaatgtttcctgactgcaatgagggaaagcggag

SEQ ID NO: 128627 - DNA, 75 bp, Homo sapiens
acagcctggagaagagcgaccagctcactaagaacatggacgagtacttggctgacctgtaccactttgttacca

SEQ ID NO: 128628 - DNA, 100 bp, Homo sapiens
ctaacgtttagagagtgcttccccttgccgagcactggcagtgcctgatttgagatggggtcccaggtctcggtggaatcgggagctctgcacgtggtga

SEQ ID NO: 128629 - DNA, 75 bp, Homo sapiens
cgtgagcctcccgcccaaggagaatgcgctcttcaagcggatcttgaattcggttccctcaaaattataaaggca

SEQ ID NO: 128630 - DNA, 95 bp, Homo sapiens
ctctgaccagtgccttcagggctgtggacaacgaccctgggatcattgtctggagaatagagggaaatgtttcaacgtgcgcaagcgttgcggcg

SEQ ID NO: 128631 - DNA, 51 bp, Homo sapiens
gctccagttcccagagaatatgtctggagggcagtatgagctttttgctgt

SEQ ID NO: 128632 - DNA, 83 bp, Homo sapiens
ctcggcttgcatttgtttctgctgaccgcgggccctgccctgggctggaacgaccctggacctcggacagtgatccaccctaa

SEQ ID NO: 128633 - DNA, 100 bp, Homo sapiens
tgacatccattccaaagaatttggcagcggtttccctgtcagtgacagtaaacggcacctaacccccgaagaggaggcatgttatttgaaagcaattgag

SEQ ID NO: 128634 - DNA, 90 bp, Homo sapiens
gttcggttaaaggagcctcctgtggatatctgtctaagtaagtttccacctagttatgctggtatatctgaactgaatcagcctgctgaa

SEQ ID NO: 128635 - DNA, 100 bp, Homo sapiens
tgaggctcccgatggcgggagctccaggaaaggatcccttattctgagagcataaaagaaatgctaacgacatttggaactgctacctacaaggtgggac

SEQ ID NO: 128636 - DNA, 95 bp, Homo sapiens
ggcgcggggaccgctgtgctctcgggacacgtgatggaccgtaggaagaaggcactgaccgactacaagaagctgcgggccttctttgtggagga

SEQ ID NO: 128637 - DNA, 75 bp, Homo sapiens
tgattttaatcagttctgcgtttgaaaggaaacccgggatctttgacattcagggatgtggctgtagaattctct

SEQ ID NO: 128638 - DNA, 87 bp, Homo sapiens
agaccatcatcagcgacatgaagagccctatgagtttgtctctctggaatggctgcaaaagtggttggatgaatcaacacctaccaa

SEQ ID NO: 128639 - DNA, 100 bp, Homo sapiens
gatttctctactcccaagctccaaaaaaggtactgtctgatgagcgtgaaaggttgtttcaccgacttccacatcgactttggaggcacttccgtttggt

SEQ ID NO: 128640 - DNA, 101 bp, Homo sapiens
cacagagtctgtggaagaggtggttcgaggtggcgtgtgacgagcatggctcccggggtttcggctttgtccattttgagacccatgaggccgcacagcag

SEQ ID NO: 128641 - DNA, 74 bp, Homo sapiens
cacagagcctatttacccagaagtagtccatatgaactcctctttcctaaaatggagtcgagtaaaaagatgga

SEQ ID NO: 128642 - DNA, 100 bp, Homo sapiens
ggctgcgtcaccgccgcccccccagacaagatggacaccgcggaggaagaacgtccgtcctgggcatctcctttggggctgcgtttctcttgctggcctt

SEQ ID NO: 128643 - DNA, 78 bp, Homo sapiens
tcagtgccgtttaacctttattgtggtggagtccaccccgctgtgggtgatctggaccctctggcatctctcaaatcg

SEQ ID NO: 128644 - DNA, 100 bp, Homo sapiens
ggatggcggagtcggggctcctgacgccaatcctgaggcaaaagaaacattttaattcactgcacattccaaaagccttgcagaaggccctgccatttaa

SEQ ID NO: 128645 - DNA, 75 bp, Homo sapiens
gcctcactgcctgaggacgacgtggactacagtttgtttctgcgtcacatgatcttggcctacagtaagctttct

SEQ ID NO: 128646 - DNA, 100 bp, Homo sapiens
caacatcaacacttgcagggaaatgatcagtctgttggataaactcatcactgctatatatgcagattatgcccggagtttgaagaacctcggttttaag

SEQ ID NO: 128647 - DNA, 83 bp, Homo sapiens
ccggtgcccgaggaggcagccaagctcgtggcctgcctctgcgtgcatatggccgcgtggaaagtgtcaaaattcttcccaag

SEQ ID NO: 128648 - DNA, 101 bp, Homo sapiens
ccaggtttatgatgataaagactacaggagaattcggtttgtaggtcgtcagaaagagatttcctcctctgatgctcctcttcagcctttggtatcctctc

SEQ ID NO: 128649 - DNA, 100 bp, Homo sapiens
aggagctgtgcagccgcgaggaggcgcgggaggtgttcgagaacgaccccgagacggttggatttggtctagggagtcccagaaagaagtagaaaaagag

SEQ ID NO: 128650 - DNA, 100 bp, Homo sapiens
ctcactgcagacatcaagaagacggccaacaaggttcggtccaaattgaaagccttcatctcctcgtcctccaggcagcacaagccattgtggaatctcc

SEQ ID NO: 128651 - DNA, 100 bp, Homo sapiens
ttgagctggacacacggagctcagggaggcagcagtggcagtccatcgaggggaccaaactctccatcacccagggacacattcagctaacgtattttag

SEQ ID NO: 128652 - DNA, 88 bp, Homo sapiens
tctgttgcagactggggtgcatgacattttagctgcagtacagcaatggcgatcagaaggtagaacagctgtatggctgcacattccc

SEQ ID NO: 128653 - DNA, 82 bp, Homo sapiens
ccgaactccaagggacgacgctcgcggaagcagaggtttggggtgagaagccctaccactgcaactgggacggctgcggctg

SEQ ID NO: 128654 - DNA, 100 bp, Homo sapiens
aaacagctggagaacttatatttccgtgagaaaaaatttgctgttgaagttcatgatccacgaagagaatttgtgaaaaacgcatgggctgatattgaac

SEQ ID NO: 128655 - DNA, 75 bp, Homo sapiens
tgggaatgggccaccagttaactacaagcaacgaagtaaacgaggaggttggtccaaaggaagaaagaggaagaa

SEQ ID NO: 128656 - DNA, 89 bp, Homo sapiens
ttgtgtgtgggttagacttgtgcaaccagggcaactctgtcagtggaaaaccgatggggaacctggcccccaaggctggtcccccaggg

SEQ ID NO: 128657 - DNA, 100 bp, Homo sapiens
gagggtctgaagttcacgactactagaaggggaggggagtggaaaggctctcagtgaaaaaggtactgtgctaaaccctggggagacggcgaagtggaaa

SEQ ID NO: 128658 - DNA, 83 bp, Homo sapiens
gatcagctccaggcctgggaaagtgaagagatcctgaaggagctagacgagtgctacgagcgcttcagtcgcgagacagacgg

SEQ ID NO: 128659 - DNA, 100 bp, Homo sapiens
cgctggccacctcgccgcccagctcacgccgcgcccgcgctcccaggctccggacacaacacttacctccaggaatgtacaggccagcgggagcccacgt

SEQ ID NO: 128660 - DNA, 74 bp, Homo sapiens
cgcattttggcattgacatttaattttagggtcctttatatagaagggagatccagaaaaggctttgaaagact

SEQ ID NO: 128661 - DNA, 50 bp, Homo sapiens
aatccgaaatgggcatattgccacaagacctgtcatttactccatccttt

SEQ ID NO: 128662 - DNA, 95 bp, Homo sapiens
cccagtgttcccgacaacgccgagctggtgctgctcaccttgggccaggcctggcagggctgcaagaagctcttctggctgccattagtgaaaaa

SEQ ID NO: 128663 - DNA, 80 bp, Homo sapiens
gaggcacagggacccaccgagacaccaatgggctgtgggctgaggaagaggtgaaaggtgtagcagtcactcggcctaca

SEQ ID NO: 128664 - DNA, 100 bp, Homo sapiens
cttggaatgaatcacgatgatgggagagattgttcctgtggagcaaagagctgcatcatgaattcaggagcatcaggtcctgctgtactagccaccaaag

SEQ ID NO: 128665 - DNA, 99 bp, Homo sapiens
agatccggattcaccattgttcagggctggatacagtgaactggaggaatagcggggagaattgccaatactcaggagtcaggcttcacattgatcatg

SEQ ID NO: 128666 - DNA, 75 bp, Homo sapiens
ttaaagactgttgtgaacagggatgtacctaatcatagttgttgcccaaatctcttggtacagaatgtttttgta

SEQ ID NO: 128667 - DNA, 75 bp, Homo sapiens
tctcttcttctaagagcacactgtcagacatctggatggtcacttactgagcagcctatcacatggaaagaattt

SEQ ID NO: 128668 - DNA, 100 bp, Homo sapiens
aacatgctagaattacctggaacttcatcatcatctacttcacaggaattgccatttgttatgaagacagtatggagtttccagaccatagtagacattt

SEQ ID NO: 128669 - DNA, 83 bp, Homo sapiens
cggcagcggcggcggcgcccgcgggtggtataaaatggcggatttcgaagagttgaggacggcgcctcatctcccagagatct

SEQ ID NO: 128670 - DNA, 117 bp, Homo sapiens
cagagaccttgagggatatctttcttcactcctcttcacttcttcagttggcaaaagcagcttttgatgatgcaattgcagaactggatacgctgagtgaagaaagctataaggact

SEQ ID NO: 128671 - DNA, 96 bp, Homo sapiens
cccacctcagcccttcggaattttcccaacttcagaaatatgctgagtattgatcgtgtcctgtgctgaagatgtttccggaacaacagaaagagg

SEQ ID NO: 128672 - DNA, 100 bp, Homo sapiens
gcagaaagtgaagctgtttcgggccagcgacccgctgctcagcgtcctcatgtggggggtaaaccactcgggtcacagaatgatcatactcaagatcttc

SEQ ID NO: 128673 - DNA, 82 bp, Homo sapiens
ccgccgattcctcctccttggtcgccgcgtccttggctggcgtaacccagtgacttgattgtaaaaatttacagagcggaat

SEQ ID NO: 128674 - DNA, 100 bp, Homo sapiens
atcccagggagaatcctgacttggcttgtctccagtcaattatttttgatgaggagcgttctccagaaggtatcgagaaccttccctgcgaacttcagag

SEQ ID NO: 128675 - DNA, 82 bp, Homo sapiens
cagggataagagatgaagagacaggccaggtcaggctcaccaagcaggctagcttgtcactttctgcaaaggtttccctcag

SEQ ID NO: 128676 - DNA, 75 bp, Homo sapiens
gaatttgaactgagcaagctgcagcagcgcctggggcgggagggagccatttgtgcaggccaagctgcggcccga

SEQ ID NO: 128677 - DNA, 75 bp, Homo sapiens
gggccagcaggggcagatggcaagtggagacagcaatctcaacttcaggcttcctttctgtctgaccagcctgag

SEQ ID NO: 128678 - DNA, 90 bp, Homo sapiens
cttaggatacaacatagaacctattatgctctatcaggtggtagggaactgccggaagctgggcgcccccaaggtcttctacatcgcggc

SEQ ID NO: 128679 - DNA, 82 bp, Homo sapiens
actttgtttttcctgggaactgcagcggagctggagtttgttcagatcatcatcatcgtggtggtgatgatggtgatggtgg

SEQ ID NO: 128680 - DNA, 75 bp, Homo sapiens
ctgccactgctgctccgtggagatcgtcccgcgcctgccggtatgtgaggagcagcgctgtgaggaggaagtctt

SEQ ID NO: 128681 - DNA, 75 bp, Homo sapiens
aaaatttcgatattgaagtgtcaaaatccatagatggaaaagatggtagaattgggctatttgctgaagcttctt

SEQ ID NO: 128682 - DNA, 82 bp, Homo sapiens
cagctattaaaaccagggctccacagttaggagacggcaaatggatacatcttgttttttcatattacatctacaagagggg

SEQ ID NO: 128683 - DNA, 82 bp, Homo sapiens
ttccccaattcagcagagaatattttcaaggggggcttcagtttcacattcttggtacctcctggtggtgcctgggagggag

SEQ ID NO: 128684 - DNA, 75 bp, Homo sapiens
tttggtgggccagttattagttctctatatcatgaagaaaccatcaggagtctcaggagcaggggctgcggcaga

SEQ ID NO: 128685 - DNA, 75 bp, Homo sapiens
agtttcaataacaggtcattgccgagaaaagggtgcaatatgtgacttctgtgaagcttgggtttgccatggtag

SEQ ID NO: 128686 - DNA, 87 bp, Homo sapiens
tcaaggacacggtctacaccgacttcgacggtgatgtgtccaatctagatcccaacttctcatttgaaggcaccaaactggatgtgg

SEQ ID NO: 128687 - DNA, 83 bp, Homo sapiens
ctggcccggaaacaggaggactgcagagcagagcgggcggaggaccccgggcgcgggcgcggacggcacgcggggcatgaacc

SEQ ID NO: 128688 - DNA, 75 bp, Homo sapiens
ccaaccttgcgctgcatccgctcgacctcgtgaagatccgcttcgccggagcaccagcgaaagcagccagtctga

SEQ ID NO: 128689 - DNA, 100 bp, Homo sapiens
tccacatcgccttttgccacctttccctttatttccggagaacactcctatgccaccttcaccagctgtacaagtgcagggccagcctaacagttctcag

SEQ ID NO: 128690 - DNA, 100 bp, Homo sapiens
gagcgggccctggctcaggaacagggacagcacctcatcccctggatgggggaccacaagatcctcatcgacagacacgtaagcagcacagtgaggccac

SEQ ID NO: 128691 - DNA, 75 bp, Homo sapiens
gctcaatgcctcagaaattcattgggcgatgctggatcttttcttgtctgaatgttatgaggcttccattcatga

SEQ ID NO: 128692 - DNA, 97 bp, Homo sapiens
gaattctgcccactctgcggagttagcagtcacgacctccagcacagggaaagaagccctcgtggatggaggaagaagatttatcttttctctacaa

SEQ ID NO: 128693 - DNA, 82 bp, Homo sapiens
atgataatccagtttttgaaatggagtttttgccagctgggaaggcagaatccaaaatttttgtggtcaacaaccaggagga

SEQ ID NO: 128694 - DNA, 74 bp, Homo sapiens
gaaccaggagaggcagcctagacaaccaagtggcagcagatatgatacaccaacttctaaaaagaaagtacgaa

SEQ ID NO: 128695 - DNA, 82 bp, Homo sapiens
gtgcggaccctccggccgcagccatgtgggacccgcgggcagctaggctaccggctctctgaccagttccacgacatcctca

SEQ ID NO: 128696 - DNA, 76 bp, Homo sapiens
cggtgagatcgtcagcgctgactccatgcaggtaagaatgattgatgttggctgatattggagtgctcattcacat

SEQ ID NO: 128697 - DNA, 75 bp, Homo sapiens
acattgctagcaatgagctcccaaagccatccaggctaggcagctggaagagaaagaccgagtgctaaagaagca

SEQ ID NO: 128698 - DNA, 100 bp, Homo sapiens
aaatccgggggcaaggccaaaaagaagacgcaaacatgcagatctttgtgaagaccctcactggcaaaaccatcacccttgaggtcgagcccagtgacac

SEQ ID NO: 128699 - DNA, 50 bp, Homo sapiens
ggatcctgtagccataaagattgcaggaggagatgttaaagtaacccatc

SEQ ID NO: 128700 - DNA, 100 bp, Homo sapiens
gggagaagttggaatcgctctaggctggtgaagcccctgaagtagtcaccttagtaaggtccagggagtcggtagtaagggatggcgggacgtcaccacc

SEQ ID NO: 128701 - DNA, 100 bp, Homo sapiens
gcttcaaattggacttaagtctgaatttcggcagaatttagggagaaaactggttgtcctggatgtttgaaaagttggtcgttgtcatggtgtgttactt

SEQ ID NO: 128702 - DNA, 74 bp, Homo sapiens
ggaccacggtcaccgtctcctcagggtggttctcttcccaaagtggaagccaaattcatcaattatgtgaagaa

SEQ ID NO: 128703 - DNA, 73 bp, Homo sapiens
tgcgcaccaatgcccagcaggggagaaaacagggaatatactgctgaaataatgtttgagtccttcaatgttc

SEQ ID NO: 128704 - DNA, 98 bp, Homo sapiens
aaaacagctgttttgcagattggactacaaggagtgcatcatcgacgaggactgtgggcccagcatgtactgccagtttgccagcttccagtacacct

SEQ ID NO: 128705 - DNA, 90 bp, Homo sapiens
cagcctcaggcgtgcgcggacggtgtgcgggatgccccagtgaagttgtgtgactttggatttgccaagattgaccaaggtgacttgatg

SEQ ID NO: 128706 - DNA, 97 bp, Homo sapiens
cgtggccttagctgtgctcgcgctactctctctttctggcctggaggctatccagcgtcagtcatatcatttggatcaaaaaatagaacaatcggag

SEQ ID NO: 128707 - DNA, 100 bp, Homo sapiens
tagaagtggtgatgcaagaagtttctaggaaaggccggacaccagggttatatcctgtgttgtgacctcatggtttaagtgggaataaagatgagtataa

SEQ ID NO: 128708 - DNA, 50 bp, Homo sapiens
gcgctgcggggtcctcagtaagctggcggaggcagtgacctcagactctg

SEQ ID NO: 128709 - DNA, 100 bp, Homo sapiens
aaccaatatttccaggggatagtggtgtggatcagttggtagaaataatcaaggtggtcttcgagggatagcacgaggtggtctgacaggactaacactt

SEQ ID NO: 128710 - DNA, 82 bp, Homo sapiens
gaataatctgcttccatcccgccagtttgggtgaccagcacccatgcagaaactacctagaagttgccaagctatcagtcaa

SEQ ID NO: 128711 - DNA, 100 bp, Homo sapiens
cgggcagccatggccctccacagcccgcagagccgctcccgaggccccggcgcggcgcgagggcgcggggcgcggcgtccacaggcgccgaggctgcccc

SEQ ID NO: 128712 - DNA, 51 bp, Homo sapiens
acgtggatcgttgttttgaaacggctgacaggacaactggatcagtttcat

SEQ ID NO: 128713 - DNA, 113 bp, Homo sapiens
cctccgtgtgccctggttgtgagaagacgtctgtgtcgtgcgagacatattgatgtctttgactgttggaaaccttgcagagcaagaatttgtaaccattgcacgtcactacc

SEQ ID NO: 128714 - DNA, 100 bp, Homo sapiens
gccgccgcctgccctcagccgcccgctggccgggagcggagcccctgtggagtctggtgctggcagaaagtagtcctggaagggatagtactgaatattt

SEQ ID NO: 128715 - DNA, 50 bp, Homo sapiens
cgaccgtccgccagtcgtcccgaggttggtgttcgaggaagagacattgt

SEQ ID NO: 128716 - DNA, 95 bp, Homo sapiens
cgccccacccgcatgctctttgtcactccccggcggcagcacgaaagtaccattgctgggctttgacaaacttcctctgtggggtaccatcctca

SEQ ID NO: 128717 - DNA, 75 bp, Homo sapiens
gtcctcttctttgacaacaaacgaacctgactgccactctccgcccctacctgagtgccgtgcgggccacattgc

SEQ ID NO: 128718 - DNA, 74 bp, Homo sapiens
cattctatgctgtggaaaagaaagcatactgcgagccctgctacattttattgattctgcagaactgcaggcgt

SEQ ID NO: 128719 - DNA, 87 bp, Homo sapiens
atgtccgccagagctgcggccgccaaggaataggaggccttcaagattttgtgctgaaatctgcaacactgtgtagcctgccatcct

SEQ ID NO: 128720 - DNA, 75 bp, Homo sapiens
ctgttctcaaggcggattaattagcccaagaaacattatattcatgctctttggtgtaacgggaaactgcgctgc

SEQ ID NO: 128721 - DNA, 75 bp, Homo sapiens
aagccctttgccaccattccttcaaatgagacaatgcagatcttcgtgaagactctgactggtaagaccatcacc

SEQ ID NO: 128722 - DNA, 75 bp, Homo sapiens
gatggtcaggtctggagctcgaccgggccagaattcctagaggacctgtgcaacaacctcttgaggatcgaatct

SEQ ID NO: 128723 - DNA, 85 bp, Homo sapiens
acggtggtactgcctccctcttcaatgctgccaactggatggagtccagttcctgggatgcagagcactgtccagagcttcctcc

SEQ ID NO: 128724 - DNA, 98 bp, Homo sapiens
ggacactcctgagctacagagactgaagaggactcaggagcaaatcagtaatacttgggaagatccccatgaaaaagataagagcacgaactgctttg

SEQ ID NO: 128725 - DNA, 100 bp, Homo sapiens
caatgccgaacctaagcacaatagcaatagacagttagaaagaagtggaagatttggtggtaatccaggtgggatatgagcctcttcctccaacaatagg

SEQ ID NO: 128726 - DNA, 98 bp, Homo sapiens
cgccactttttctctgctgatccaggtcaagtctggcaccatctttgacaacttcctcatcaccaacgatgaggcatacgctgaggagtttggcaacg

SEQ ID NO: 128727 - DNA, 83 bp, Homo sapiens
cactgccccaagttttactaaaaatactgacctttctctagaagatctcagccagcttttatgcaaagcagtttatcccagcc

SEQ ID NO: 128728 - DNA, 75 bp, Homo sapiens
ccgcaaccgaagcacaaaagttatcaaacccggtggaccatatgtagaagggcacagtgccagatgatgctgtag

SEQ ID NO: 128729 - DNA, 90 bp, Homo sapiens
tgaggagattcgggccgtcaccctgcctcccctgcgtcccgccaccggccgcttctgtcctcgtgaacagcagagaatttcaaaggacct

SEQ ID NO: 128730 - DNA, 100 bp, Homo sapiens
tgttcgcactccatctggaaagttacgactctactgcaaaggagctcctactttggggataaaggattatttggtcttctggatttggaggcaatcagcg

SEQ ID NO: 128731 - DNA, 75 bp, Homo sapiens
agaccatccattagtgaagatgactggaagaattttgctgagctcccagtggcacccgactcgctctcctctccc

SEQ ID NO: 128732 - DNA, 99 bp, Homo sapiens
gcggcggccgtccggctcatcacctcctcactcgcctccgcgcagagaggtgccactgattaatgaacttgaatcagcaatacatcagctgtacaaaca

SEQ ID NO: 128733 - DNA, 51 bp, Homo sapiens
cttgttgctgttgtggttcactgtggaagtgagccccatgcacggttctat

SEQ ID NO: 128734 - DNA, 83 bp, Homo sapiens
accatcctagaggtcaagatcagctctggctaggctaatctagacgaaatccagatgagttcacctacattccttagagcttt

SEQ ID NO: 128735 - DNA, 98 bp, Homo sapiens
aatagaccgcagacacagggcccatcaccctaaggtgttgctgccatcactacctttcccttcctcccctttcctcatggcaagacgcatggaagaag

SEQ ID NO: 128736 - DNA, 100 bp, Homo sapiens
attcactgagttcaaagccttttatggagacacattagttacagattgaaaatggaagccctgactgacagggaacatggaatgatagaccctgacagcg

SEQ ID NO: 128737 - DNA, 100 bp, Homo sapiens
cgcctgaccctgggcgccgcgccgcacgagcaccagcctagagccaggttggatggcaagcatgtggtgtttggcaaagtgaaagaaggcatgaatattg

SEQ ID NO: 128738 - DNA, 100 bp, Homo sapiens
aacgaggcaaggagctaaagcagcgtgcgttcagccctgggatttggagcaagaggtggtggtggccttcccccgaagaaatttggtaatcctggggagc

SEQ ID NO: 128739 - DNA, 78 bp, Homo sapiens
agacaaagatgagcacctggacacccctaaaccatcagctattgaatgaccgggcttatgtagacatgaggaagattg

SEQ ID NO: 128740 - DNA, 122 bp, Homo sapiens
tgaagttccctcacattagccagtgtgaagacctccgaaggaccataggctttgtgccttgggcaaagggcagcttactcctggaagaggactgactcaaggaccccagaaccccaagaaac

SEQ ID NO: 128741 - DNA, 83 bp, Homo sapiens
tggagcctcagttggaagcagccgatccagcctgcggagcctgtggggcaggaatggaatttgaaggtgctatcatcgcactt

SEQ ID NO: 128742 - DNA, 75 bp, Homo sapiens
gtgactgaattaaaaggtgtcaagaagctcagaatgttggttaccacagagaagcgcttcctcaaagacagtttg

SEQ ID NO: 128743 - DNA, 73 bp, Homo sapiens
aagaattctgtggaagagtggacaacagaagactggactgaagatgctcacgtgatggttctatgggactctg

SEQ ID NO: 128744 - DNA, 90 bp, Homo sapiens
atcatcgtcaaagaagaagaaaacaaaggtagaacatggaggatcgtcaggctctaaacaaaattctggatggatgtggacagtttccat

SEQ ID NO: 128745 - DNA, 75 bp, Homo sapiens
aacacctatattctgcggcctgttttccagcagaggtcagggaagtcaaagatgcatccctgagttcttcctagc

SEQ ID NO: 128746 - DNA, 50 bp, Homo sapiens
ctgagacggtgtcccgccgaaagcaatggctgccatccggaagaaactgg

SEQ ID NO: 128747 - DNA, 83 bp, Homo sapiens
tcttcaaaccctgagtatctcagtgccagtgatgtacgtttcaggagacggcagcgaggctaccttgcatggtgtggtggacg

SEQ ID NO: 128748 - DNA, 100 bp, Homo sapiens
ccgtcgtcttcggtcggtttttcatcctttgatcccgcggtcccttcctgtaccttgtcctcagggcttcgtgggacacatatgcaacatgcctatgatt

SEQ ID NO: 128749 - DNA, 98 bp, Homo sapiens
ctcaagaaggtgaagatgatacctttctaacagcccaagtatttacatgaggaatttccagagtcctggtcagttcccaggttggctgaaggctttga

SEQ ID NO: 128750 - DNA, 75 bp, Homo sapiens
gtattgttggaggaatcttttcaacaacagtccaatatcagatggaaatgatgcggagccttcgccatgtaaaca

SEQ ID NO: 128751 - DNA, 87 bp, Homo sapiens
agatgaccttaacacagtagcagctggaaccatgacaggcatgttgtataaatgtacagtggccggcatgaaccacctgcgggagaa

SEQ ID NO: 128752 - DNA, 82 bp, Homo sapiens
gtcactctgctggttgctgagcaagtgtaaagacctcagccaggtggaccgagaggccccagcaacatgcagctacaattcc

SEQ ID NO: 128753 - DNA, 98 bp, Homo sapiens
gaaccctacttgcctaaatgaggaatgtctttcctaccatctaaaatacgaaggtttctggctgggttgtggacctggcctattagcagatgccaaga

SEQ ID NO: 128754 - DNA, 100 bp, Homo sapiens
cgtgctcttctgagtgcatttataacctcatacccagtgacttgaaggagcctccccagcctcctaggaattgaatgatctggcacgggaccctccagca

SEQ ID NO: 128755 - DNA, 75 bp, Homo sapiens
acccagctcgccaccatggccgccttcccccacacccactcgcccgggtctatggccacggtcggagagtggtcc

SEQ ID NO: 128756 - DNA, 75 bp, Homo sapiens
catccctgagccttgagctcccagtcgcaggcgtcttggctgcccacaagataatggctagctccccagacatgg

SEQ ID NO: 128757 - DNA, 99 bp, Homo sapiens
ctgcgccccctgctggttgtgcgaaccccgggcagcccgggaaatctccaagtcagaaagcccagcagagctccccctgacagaccgcgaggtagagat

SEQ ID NO: 128758 - DNA, 100 bp, Homo sapiens
tggaaatatccaaacaggccctccagaatgagctggagagactgaaagagggaaatattagtcgtcaagaagctgttagcatgatcccaccactgctcct

SEQ ID NO: 128759 - DNA, 100 bp, Homo sapiens
aacaatccgtctggatcacggatgtaggaagtgaattcactcgtgaagtaacagacacacagatgccacttgttgctcctgtcattctcccagagatgta

SEQ ID NO: 128760 - DNA, 82 bp, Homo sapiens
agacaataccacaacaacacattttgcagagtggtctcacgtgtgaaacatggctacagattggctgggaagtattgtgtcc

SEQ ID NO: 128761 - DNA, 147 bp, Homo sapiens
gaggacggtctgcatactcgctgcccgccggctccctcccccgcgtccctgcgaccgccgcggcgaagatggtggaaacaataggtgatgcctactgtgttgcagcagggctccacagaaaaagcctctgccatgctaaacccattg

SEQ ID NO: 128762 - DNA, 100 bp, Homo sapiens
taccttaaggaagcacatatatagagctcaggagcagtatagcatcaagttctagaggaattgggagccattgcaaatctgagggtcaggaggaatcttt

SEQ ID NO: 128763 - DNA, 100 bp, Homo sapiens
gtgaatttccatgtcaacatagtcctggttctcccatgggcaggtggtctctctggatgagctgcgccccttccaggacccagacctgagctccctgcag

SEQ ID NO: 128764 - DNA, 100 bp, Homo sapiens
tgccccccaaggaagcgtgcaaatgccagaaagaggatttggccagagcgttttgtacaggtgcagttcaggagcagatgagatccaagggaaaccgaga

SEQ ID NO: 128765 - DNA, 75 bp, Homo sapiens
aaggagacgctcctggcactgcagaaggacagaataacgggctcccagattcacaagccccaccaagaggatcac

SEQ ID NO: 128766 - DNA, 75 bp, Homo sapiens
gaagaaaaagaagacttgcttcagcatttctcagactttgtgttttatgccccacgtctgagaatcaacaagcgg

SEQ ID NO: 128767 - DNA, 50 bp, Homo sapiens
gttaacacctctgccgctgctaaaagaatgtaattatatctagtgctgca

SEQ ID NO: 128768 - DNA, 118 bp, Homo sapiens
cagagtccgatgaaaggaatgggtctgggaccttaacagggagccatggttggatggcaagcatgtggtgtttggcaaagtgaaagaaggcatgaatattgtggaggccatggagcgc

SEQ ID NO: 128769 - DNA, 73 bp, Homo sapiens
agattggaccctgtaaaagctgtaaaatgataacagagatcttccatggtggcttattctaattcggcagaaa

SEQ ID NO: 128770 - DNA, 96 bp, Homo sapiens
atgggccagcactgcttcatccgggaagtgcttggggatggagtgcctccaaaggttgctgagggtaatcactttgatcagtatgaggaaggacac

SEQ ID NO: 128771 - DNA, 83 bp, Homo sapiens
cgccggccgagggtggccctaggggcagcgagcaagacagcaagcagacaatgcagatcttcgtgaagactctgactggtaag

SEQ ID NO: 128772 - DNA, 82 bp, Homo sapiens
tggctcggagcagcagcctctgaggaacaagatcactcaaggtgaaggataatctactaataccagcactttgaatgaaaat

SEQ ID NO: 128773 - DNA, 98 bp, Homo sapiens
tttgagctgggaaaactgtttcagttgcagactttaggcctgaaaggggtcattgtcattcgaagatgtggctgtgggcttcaccagggaggagtggc

SEQ ID NO: 128774 - DNA, 82 bp, Homo sapiens
tccccacctgcccggtgcccgaggaggcagccaagctcgtggcctgcctctgcgtgcaggagcaggagcggcttcgcttgga

SEQ ID NO: 128775 - DNA, 88 bp, Homo sapiens
cctgagtacaacacggtggcaagcaagtttaatcagacctgctcacacttcagaatagagaagtgaggaggccatagatacagaatcc

SEQ ID NO: 128776 - DNA, 82 bp, Homo sapiens
cgctgacgccgtgtttcctctttcggccgcgctggtgaacagacaatgcagatcttcgtgaagactctgactggtaagacca

SEQ ID NO: 128777 - DNA, 83 bp, Homo sapiens
ggccccggcccctcctgcccatggcggtggccgagctgtacacgcagacaatgcagatcttcgtgaagactctgactggtaag

SEQ ID NO: 128778 - DNA, 75 bp, Homo sapiens
cttgaggcctggaatttaaacctgagccactatctgaagaaagatccagattacctgaagctgtggttggacact

SEQ ID NO: 128779 - DNA, 75 bp, Homo sapiens
tattacttcacggagctgaaggatgaccaggtcaaaaagatgttgttattcatgaggaccaatggattggcgaga

SEQ ID NO: 128780 - DNA, 83 bp, Homo sapiens
agatactctgactccacctttacttttacctacgttggcggccccagaagttgatattcactgatggactccaaagaatcatt

SEQ ID NO: 128781 - DNA, 75 bp, Homo sapiens
cttcatcctcggcggcggtggccgctagctccaaggaagggaacgggctgttgaggaagaagacgctggtcccag

SEQ ID NO: 128782 - DNA, 75 bp, Homo sapiens
cagcaggcccctcctgcgcacagtgcccatgacgcttccggagacaaccctggaaacactgaagcataaaatcaa

SEQ ID NO: 128783 - DNA, 100 bp, Homo sapiens
ccgagatgtctcgctccgtggccttagctgtgctcgcgctactctctctttctggcctggaggctatccagcatgctgtgtgctgtggacccacctgggg

SEQ ID NO: 128784 - DNA, 90 bp, Homo sapiens
cggaaccgagcgggcaggaggccaccgctgcagcgcgggccccgcagaggaaggaagccggcgggcgggcggagattctggagctggctg

SEQ ID NO: 128785 - DNA, 73 bp, Homo sapiens
ggagaacctggcacttatgtcctccctggcccgatatcagaatgaattagctggcgtagataccgagctgcta

SEQ ID NO: 128786 - DNA, 101 bp, Homo sapiens
ctgtggttgctgctgcgatgtggaggaagaaaagctcagcactgccctgggaagaactaggatgaggtattgacttgctgttgccacataacaaaccctgc

SEQ ID NO: 128787 - DNA, 100 bp, Homo sapiens
gagcctcagttggaagcagccgatccagcctgcggagcctgtggggcagacctgcctagagctggaacgttacctccagagcgagccctgctatgtttca

SEQ ID NO: 128788 - DNA, 83 bp, Homo sapiens
gatgaatcctgcggcagaagccgagttcaacatcctcctggccaccgactcctacaagggctttgttcgcgggggtcacagct

SEQ ID NO: 128789 - DNA, 101 bp, Homo sapiens
aaacgttttagagtaccaaccattgtgtgctgtgaggtaaaggtgcatcatttctggcatggcttcaggaagcattgtgctattttacaacgactttaacc

SEQ ID NO: 128790 - DNA, 50 bp, Homo sapiens
tcactgaaagcattaaagctatccctgctcctactctggaagaagtcaac

SEQ ID NO: 128791 - DNA, 90 bp, Homo sapiens
gagacccttcgagaaatctcgtctcgaccaagagctgaagctgatcggttgggggccgtcccgctcctaaggcaggaagatggtggccgc

SEQ ID NO: 128792 - DNA, 98 bp, Homo sapiens
aggagcagtcgcagctgctttccgaggaagccggtgttgccgaggtctcctctgagcctccggcctccataagacccaaaacagatgacacctcttcc

SEQ ID NO: 128793 - DNA, 95 bp, Homo sapiens
tctccattgagaagagagaagaacattctcgaatacctagaatgggattctgaaggaagatttccattaggtaatttgtttaatcagtgcaagcg

SEQ ID NO: 128794 - DNA, 83 bp, Homo sapiens
gccgaggccaagatggcggtgctgtcagcggggatctgacgagcttttctctacttgtgtcactaacggaccgtttatcatga

SEQ ID NO: 128795 - DNA, 100 bp, Homo sapiens
tgcagagctcccagggcggacagcagcctcgggtgcaatcctggagccccccagtgaggagtcctgtgtatggaaactcacatgagtcagctcagtctag

SEQ ID NO: 128796 - DNA, 83 bp, Homo sapiens
cagcacttggagcgcagaaccggccgcgcccggatgttccgctgggagcgctccattcccctgcgaggctcggccgccgccct

SEQ ID NO: 128797 - DNA, 90 bp, Homo sapiens
gcggctttgaccgagaggctgctggagctcgtgtttggacgcatctaaccatgagctaccctggctatcccccgcccccaggtggctacc

SEQ ID NO: 128798 - DNA, 83 bp, Homo sapiens
cgtccactgcgggccggcgaaagctgatcagtgtgcgtgtgaccaccatggatgcagagctggagtttgccatccagcccaac

SEQ ID NO: 128799 - DNA, 90 bp, Homo sapiens
cgggcagctggtctaccctgctggaggcgcccaggacaggctgcagcggcggctggagcgagcactggctgaggggcagcagcggggagg

SEQ ID NO: 128800 - DNA, 126 bp, Homo sapiens
cgggcgcggggaagtcatgctcgcttcacggaggcaatagctagccggaatgaatctgaagtctgctgcagtaaaacacagaaggctttaaaatgttttcttgcataaaattcaaaacttttaagt

SEQ ID NO: 128801 - DNA, 75 bp, Homo sapiens
caggcaacccaaccgtgcctgtctcggaccccgcacccaaaccactggaggtctcggcgcggaagatggccggcg

SEQ ID NO: 128802 - DNA, 78 bp, Homo sapiens
ttaaacagatcacatcatgcattgcagccaaaattggaggcgatgctgccacgacagtgaataacagcactcctgatt

SEQ ID NO: 128803 - DNA, 75 bp, Homo sapiens
actgaatccacatagagaaagtgatggggctgcatatctggttggtgtctctgaccccaatagccaagctggaca

SEQ ID NO: 128804 - DNA, 100 bp, Homo sapiens
gaaattgttccactgttcactagtctagcttcagatgaacagggctcgtcggaaaaaaagttctgctagaaaatttggtctacagaaactttgggagtgg

SEQ ID NO: 128805 - DNA, 88 bp, Homo sapiens
caggagtcggcggctcagttgtccatgaccctgaaggtccaggagtacccgaccctcaaggctgaccccgcactacatctacccacca

SEQ ID NO: 128806 - DNA, 100 bp, Homo sapiens
tcggagtcggaatccgatgaatcccttgtcacagacagagagaagcagatccagagcttgaataaaatgtgttcaaaccttctggagaaaatcagcaaag

SEQ ID NO: 128807 - DNA, 82 bp, Homo sapiens
tggaggagctgcgctcggagaacgactatctcaagttcaaatctgaacatcaatgatgtactagggaactactcattgactc

SEQ ID NO: 128808 - DNA, 101 bp, Homo sapiens
ggctggagcggatcccacacctccggaccgagggacgcggttcctctgtgacgagggtgcaggtatctctggggactacatcgatcgcgtggacgagccct

SEQ ID NO: 128809 - DNA, 98 bp, Homo sapiens
gcggcctgatggagtaagaggggttggctgtgaatttacacaacagccaatgcggagtctgacaatgagcgggactctgacaaagaaagtgaggacgg

SEQ ID NO: 128810 - DNA, 95 bp, Homo sapiens
aggacttctgcgcgcgggagttcgaggccctgcggagctgcttcgccgctgcgggagagacaaaggcagcgctgccctcgggggagtattggccc

SEQ ID NO: 128811 - DNA, 96 bp, Homo sapiens
gggatatggagagaaaatcaattgtgaggtgtatggctgctgctttaaaagatgcaggtgtgcagcctgaggagatatcctatatcaatgcacatg

SEQ ID NO: 128812 - DNA, 96 bp, Homo sapiens
agtgtggaggtgtgagcctgcaggcaggtggctctggttggatcccaggtgcatctcctgcgtgagcaaccgctggacctgccagtgggacctgcg

SEQ ID NO: 128813 - DNA, 100 bp, Homo sapiens
tcctcatcatcatcgcctcctgcgtcatcaacttaggcgcttctcacctggggcgggtgggttctgcaccaccctcccaccctccttcctccgtgtggac

SEQ ID NO: 128814 - DNA, 51 bp, Homo sapiens
gacccggagcacccgacccctgaggaggttatattcaaaagaaaaaggaac

SEQ ID NO: 128815 - DNA, 100 bp, Homo sapiens
aagcagtgcctggtggccgaccttgtccacacagtccatcgccccatcatctccatctgctggggtcaccgggattcgaggctgttgatggcatcaggac

SEQ ID NO: 128816 - DNA, 100 bp, Homo sapiens
gtgatttgcgccatcatcctcatcatcatcataggtactgtccacaccatccttgccagctgggcctaattttgccctaggtctggccaggaggcctcac

SEQ ID NO: 128817 - DNA, 88 bp, Homo sapiens
ctctcctgaaataattctggagtcatgcctgaaatgccagaggacatggagcagctatgctaagaaggaatctgatcttaatggcgcc

SEQ ID NO: 128818 - DNA, 80 bp, Homo sapiens
ttctgggagtccaactcggctgcccacaaggagcaaattatgcgcacagccatgaagtataacctgggattggacctgag

SEQ ID NO: 128819 - DNA, 82 bp, Homo sapiens
gccacgtgcagacatctacaaccttcgatctcctgacgaactccatcaagaatgctggaggaagggtgtttgtccactgcca

SEQ ID NO: 128820 - DNA, 71 bp, Homo sapiens
gaaaacacaagaaaactgcacataactccgaagaatgctgcttctaaattacttgggcaaaattgggtcca

SEQ ID NO: 128821 - DNA, 100 bp, Homo sapiens
aggatattcctcatgacattgctgtctggttgtaaagaagaaagttctaccctttctgtcaaaatgaagtgtgattttaattgtaaccatgttcattccg

SEQ ID NO: 128822 - DNA, 82 bp, Homo sapiens
gcgcctcagctctgtggaggagcagcagtagtcggagggtgcaggactcagtgacctttgaagatgtggctgtgaacttcac

SEQ ID NO: 128823 - DNA, 88 bp, Homo sapiens
gcagtccacgcaggagatccatgagaaggtgaagggcccatttgtcacctggcaggtggtacgggacattttgcatgccacgtttgaa

SEQ ID NO: 128824 - DNA, 100 bp, Homo sapiens
gaaaaggatagaagagctagggcagagactccaggagcagaatgagctgattataactcagagacagcagaaaactttagaaactgttcctttggagagg

SEQ ID NO: 128825 - DNA, 100 bp, Homo sapiens
gaccaccatacatgagatgtttctcagcacactggatccaaaggtacagccaaagaccggagctttggagagatgaagtttaaacagtgtcctacagaga

SEQ ID NO: 128826 - DNA, 97 bp, Homo sapiens
atcgtgaccgagaccgtgaccgagagcgtgaccgagagcgcgaatatcgtcatcgttagaaggatcaggcaaaaatgatcatgccgaaaaagtggcg

SEQ ID NO: 128827 - DNA, 90 bp, Homo sapiens
ccaagaagccagtcaagcggccagtacgtttcaggagacggcagcgaggctaccttgcatggtgtggtggacgagctggtgcggttccgg

SEQ ID NO: 128828 - DNA, 117 bp, Homo sapiens
ctgcagcctgccccgcggccaacatgagcttcttgttgtgcatcatttctggcatggcttcaggaagcattgtgctattttacaacgactttaaccggtggcatcatgaataccaaa

SEQ ID NO: 128829 - DNA, 98 bp, Homo sapiens
ctggaggaggctgaggaggagaggacagaggtgcctggggcaacctccaccttgacggttccaggaaggagaaaacattttctatttggcagttgaag

SEQ ID NO: 128830 - DNA, 82 bp, Homo sapiens
gtcttcggtggactccttcggcagtccacccaccgccgccgcctcccagcacagacgcagtcttcagcaaggaagtgctggg

SEQ ID NO: 128831 - DNA, 83 bp, Homo sapiens
ggacgcgggctctgaggatgagctggaggagggggatgcatcatctgcagacatcagaaaagcatatcgtaagctttcactaa

SEQ ID NO: 128832 - DNA, 100 bp, Homo sapiens
ctctcagtgcctccatgaggagtataggagcaagggcgtctttgtgcaggtggattcaccaatgaacttgaagcatcctcatgacctagtcatattaatg

SEQ ID NO: 128833 - DNA, 80 bp, Homo sapiens
ccgcgggatacgcctcagcgcggaggagagacttcagcatgcaaaccttcatctgttcggcttgcaccgtcattttcatt

SEQ ID NO: 128834 - DNA, 75 bp, Homo sapiens
ttacttggacatcggcattggcatgttgtacaggaatccccatctctaatgtaagcttggagatccgggcccccg

SEQ ID NO: 128835 - DNA, 73 bp, Homo sapiens
tttccggatcaatccagatggcagccagtcagtggtggaggatgagtctgaatgtacttcagatgaggaaatc

SEQ ID NO: 128836 - DNA, 98 bp, Homo sapiens
ccgtgcatggggctgctccccaggacctgagcaggaacctggagttttcagctgaccatgccactgcctcggtacggctccgggcagcagccactgat

SEQ ID NO: 128837 - DNA, 92 bp, Homo sapiens
tccactttcgccagcccgtgccgcgagcgcggcctgcaggagactgtggtacagacctccatgagccggtcccaggtagccctgctgggcct

SEQ ID NO: 128838 - DNA, 98 bp, Homo sapiens
acggcccggggttttcaaggcttaatcgaagagatgtttctctgcaggtggatattgttcccagccagggggagatcagcgttggagagtccaaattc

SEQ ID NO: 128839 - DNA, 97 bp, Homo sapiens
ggacttggccgagcggatcctaataaggggaaaatgagcgatcgtcttctgatcaaaggaggtaaaattgttaatgatgaccagtcgttctatgcag

SEQ ID NO: 128840 - DNA, 100 bp, Homo sapiens
tgactgctcagctggatgaggagctgggaggtacccctgtccagctgacggcccagagggtgggtgccaattccaccagcagctgcaactgaaaagcaag

SEQ ID NO: 128841 - DNA, 82 bp, Homo sapiens
cggaggcggaggcagaggtggaggcgctttgaaagcctcccgcgacgatgcccctcaacgttagcttcaccaacaggaacta

SEQ ID NO: 128842 - DNA, 96 bp, Homo sapiens
tcaagctgggcatccagggctcgtacttctgctcgcagtgtaaacaggaacatcgataagtagtgtaaaaacttgcacaatgaaatccgaagccaa

SEQ ID NO: 128843 - DNA, 100 bp, Homo sapiens
agaggaggacagttcgctacacagcaatgcatcgaggttttgctgttactgctcagtgtagtcacaccttgaataagaaatggaaaaccttgggatgttg

SEQ ID NO: 128844 - DNA, 82 bp, Homo sapiens
ctgctgtgcttatgcatctggtctctttttggagctacagtggacaggcatttgtgacagctgaaggaattgaagaatctgc

SEQ ID NO: 128845 - DNA, 51 bp, Homo sapiens
ttttcagaccttaaatggaaaggaccgcagctgaatgcacagctagaaggt

SEQ ID NO: 128846 - DNA, 51 bp, Homo sapiens
gtctcccaaaagcttcaccctgcccacgcgcccagccagtactggggtggc

SEQ ID NO: 128847 - DNA, 100 bp, Homo sapiens
gttattggcactaataggaagtacttcaccaactgcaagcagtggtaccaaaggaaaatctgtggcaaatcaacgtggaagaagactacctgtttgaaaa

SEQ ID NO: 128848 - DNA, 100 bp, Homo sapiens
cagaagttgaagcagcagcttatgcagagctctgaggaacatgaatacagtgatgaagctcctcaggaagatgagggctttatgggcatgtcccctctct

SEQ ID NO: 128849 - DNA, 83 bp, Homo sapiens
cagattttgcattggatattcgcatgcctggggttacacctaaacagccatcactggtgcaagctatatttaacggagatcct

SEQ ID NO: 128850 - DNA, 89 bp, Homo sapiens
ccgacctcgacgtcttgcctgtgtcccacttgttcgcggcctatagaggccacaagaggaagctgaatgaagaggacgccgccagcgag

SEQ ID NO: 128851 - DNA, 90 bp, Homo sapiens
cgagacccccaggaactcgtggtgatcagggccaaagcggtcagtgagaaggaagtggactctggaaacgacatttatggcaaccctatc

SEQ ID NO: 128852 - DNA, 100 bp, Homo sapiens
gttgcgggccccgggacctgggctgggaacccgcggtggagcgggacacgaacgtggacacctgctccacttcaccttttgccatgagtaaaagctccct

SEQ ID NO: 128853 - DNA, 85 bp, Homo sapiens
tcctcaaccgcttttctacagtttgtgaggaggttatcttatgatgaggcttttgctatggctaatgatcccttggaaggcttcc

SEQ ID NO: 128854 - DNA, 82 bp, Homo sapiens
aaaaattagagacaatgaaaacagagttcctacatgtgaagagaatgacagcccatatcaaggcggtgtattctttttgaca

SEQ ID NO: 128855 - DNA, 100 bp, Homo sapiens
gttttattcaacttttgaaggtggcacaagcaagttctaggtaatctgtaagtcagatgctccaacaggggatgttcttcttgatgaagctctgaagcat

SEQ ID NO: 128856 - DNA, 74 bp, Homo sapiens
tttggggaagatgataacagctaagccagggaaaacaccgattcagggcggcgactggcggcgcgatggacctg

SEQ ID NO: 128857 - DNA, 98 bp, Homo sapiens
gcaagcaaatcatttggttttggcagtttctgtgtttgaagaacatacgcaccttcctgaaagtctgccacgataaatttggattaaggaacagcgag

SEQ ID NO: 128858 - DNA, 75 bp, Homo sapiens
cagcggggacgcgaggacccgggctgggctttcctcacccggatcctgaggaggatgaaggggctggccctggag

SEQ ID NO: 128859 - DNA, 83 bp, Homo sapiens
gttggagccgtctgcaaagtgtccccggcaagaaggcctgtatccggtgtccgaggcgaactcagtaagatgatgttaagagg

SEQ ID NO: 128860 - DNA, 95 bp, Homo sapiens
gatttcttcctgtcgccagaaaggatttcatccacacagcaaggatccacctctgttctgtagctattctcaagctggaataactgagactgaat

SEQ ID NO: 128861 - DNA, 90 bp, Homo sapiens
cgccaagctgtcatcacaaaagagttgattgaaattatctctggtgctgcagctcttttatgggaaaaacagatggagactattacaccc

SEQ ID NO: 128862 - DNA, 102 bp, Homo sapiens
cgagccccgtggatccgctggagcggagccggccgtacgcggtgctgcgagggcagaacctgggtgccgtgagcgatgtggagatgcaggaacactatgatg

SEQ ID NO: 128863 - DNA, 82 bp, Homo sapiens
gcgacgtggcgcgctggttcccgggccacatggccaagggtcccaggtgtgacaccttcagcaggtctcagggaagatggca

SEQ ID NO: 128864 - DNA, 75 bp, Homo sapiens
ctccagctgccccctgtgtggcaaacctttcttgagctcaggcacagccaaaattggtcagaaaggggagtaaag

SEQ ID NO: 128865 - DNA, 100 bp, Homo sapiens
ggtaaagaacgatcgtccagtggagacgccttcctgagtcctggatctttcttccttctggaaatctttgactgtgggtagttatttatttctgaataag

SEQ ID NO: 128866 - DNA, 72 bp, Homo sapiens
gctgtttccacgtgcggtgctcgtcgggagtgatcacctaccctacaggtgctgactgggttacttttttaa

SEQ ID NO: 128867 - DNA, 96 bp, Homo sapiens
tatcagtagtgacttacagtaaggtacccactgatggtaatgctggcctgctggctgaaccccagattgccatgttctgtggcagactgaacatgc

SEQ ID NO: 128868 - DNA, 51 bp, Homo sapiens
tggctggacaagtccatcgagttcatcgattcagagcattcttcactccag

SEQ ID NO: 128869 - DNA, 80 bp, Homo sapiens
tccttccatcgtcgggcgccccagacaccagccaatgttttcagttgcaccaagcttagccaccaatgcatcagcagccg

SEQ ID NO: 128870 - DNA, 100 bp, Homo sapiens
cccagcggcagcagcagcggcgggaggagcctccgggggcgtctctggccgagcctctttttgtggaaaacgacagcagcagcagtggcctggaagacgc

SEQ ID NO: 128871 - DNA, 100 bp, Homo sapiens
caacggcaagggcggcgaggctccggccaacgggctgcgcagagccgcggcgccggagattctcgctgaagtctgttaattctactttttgagtacttat

SEQ ID NO: 128872 - DNA, 75 bp, Homo sapiens
atgaagagagcgacctggagcggggatacacgctcgcttccccaccccagcctgggcactgctgttcgactgaga

SEQ ID NO: 128873 - DNA, 100 bp, Homo sapiens
gatcaggatcggaagcctgcgtaactttctcccttgatccgggagtctttccactggcttattgcaggagtgaccaggacactacctcctagaagtaatg

SEQ ID NO: 128874 - DNA, 80 bp, Homo sapiens
cacctgaagctccccatcaagggaatgaacttcacagcagggaacgtggtgacaggagaaatggtagaagagcttattct

SEQ ID NO: 128875 - DNA, 98 bp, Homo sapiens
gaacaggctccgtgcagagctgggccgacccgaaagtgcacattcaggttcccgagcacaaacatcaagataacgttcactgccctgtccagcgagaa

SEQ ID NO: 128876 - DNA, 83 bp, Homo sapiens
caaatattgaccaactggcatcccacagcctcctcttccagaatgcctttgcgcagggctcaaaatttgggcggggaactgga

SEQ ID NO: 128877 - DNA, 118 bp, Homo sapiens
ccgcgtccagcacctacgtcccgctgccgtcgccgccgccaccatgcccaagagaaagcttccccgggcgctgcctggacaggcctgcctgcgtgctgggacatgtctggcctccaag

SEQ ID NO: 128878 - DNA, 75 bp, Homo sapiens
tcagagccgggcacactgggctctgcagcctcatcctacagccccctagtgaacatctttctcaccgggagactc

SEQ ID NO: 128879 - DNA, 97 bp, Homo sapiens
caagatattaaagtggcaatgtgtgctgacaagttggatcgatcaacccgggaggtggagctgggcttggaatacggatccccgactatgaacctgg

SEQ ID NO: 128880 - DNA, 100 bp, Homo sapiens
ctctagctattgccttattttttctcatggatgttcttcttcgagtatttgtagaaggttcttcaccaaaggacatggatgaaaatgaaagcaaccagtc

SEQ ID NO: 128881 - DNA, 74 bp, Homo sapiens
tttgaagcaacaagattgcttgcaacaattgttatgcttttatcttatgcccatttggactaaatggcactctc

SEQ ID NO: 128882 - DNA, 100 bp, Homo sapiens
atggatgtcaaatactttgcacaggaagctataagtgagactctccaacatgtgccttctgaccatacaaatgaaacttccaacagtactgtgaaaccac

SEQ ID NO: 128883 - DNA, 90 bp, Homo sapiens
ctccagacatgtggctcttcttcgggatcactggattgctgacggcagccctctcagatttggtgcttccagatgtgagttatcaggtgg

SEQ ID NO: 128884 - DNA, 50 bp, Homo sapiens
ggacagaccaacctgtcagtgctgcaagacgccaggaaagcatgtgcaga

SEQ ID NO: 128885 - DNA, 75 bp, Homo sapiens
ccgggacctcctggaagccaaaaatggttttgattcccaccatggccatcacccagtttcggttatttaaatttt

SEQ ID NO: 128886 - DNA, 80 bp, Homo sapiens
gataagggcgacagcaacagctctgccggctggaagttggaggcatctgtccacccatgtggttccagacacgttcatgt

SEQ ID NO: 128887 - DNA, 83 bp, Homo sapiens
cactcttggggctctacctctttttcaaaggcaagaagtacaagcccctggacctgcggcctaagaagacacgtgccatgcgc

SEQ ID NO: 128888 - DNA, 80 bp, Homo sapiens
gaggcccgggccctacatctgtgcagagtgggaaatggttcgagaacatcatcgaaaattaagaaaggaggctaaaaagc

SEQ ID NO: 128889 - DNA, 83 bp, Homo sapiens
atgcccccgtggccaccgcctccagcttgccaccaaagacctgcgactttgctcaggctggagtgcagtggcgagatctcgac

SEQ ID NO: 128890 - DNA, 98 bp, Homo sapiens
ttcgaccagcgcgcgcgcgaggagttccgccccaccatctacagcaacgtgatcaaagagcgagatgcgagaacacttttggctaaaaatctccctta

SEQ ID NO: 128891 - DNA, 84 bp, Homo sapiens
agggaaccctggtcaccgtctcctcaggggacggcaaaacagaacagaaaggcggagataaaaagaggggtgttaaaagaccac

SEQ ID NO: 128892 - DNA, 82 bp, Homo sapiens
ccttgcttctaggagataaaaaggaggatttgttggtattgaggaaaacggtgaaatcctttttggctgtttgccagcagtg

SEQ ID NO: 128893 - DNA, 100 bp, Homo sapiens
tcttgagcccccttctagattcaagcccagaccagaagagttccaccagcgatccaacgtcacactcactctacgcaaccttaaagggtgctgtcgccac

SEQ ID NO: 128894 - DNA, 100 bp, Homo sapiens
atggcattccagaatatctcagatgagcagattatggagagaattatggatctacccactttactgaggcatgcattcagggaaatgttttcagtcgggg

SEQ ID NO: 128895 - DNA, 89 bp, Homo sapiens
ctgaataaaaaatatccaaagctttctcgaagcaatcctttatcacaggatattctcaacttataccaggacccagatggaacccgaaa

SEQ ID NO: 128896 - DNA, 97 bp, Homo sapiens
tgtgaggagggtggaaagcatttcggctcagctggaggaggccagctctacaggcgggccctccagaatttccacagcatacacctggacctgttcc

SEQ ID NO: 128897 - DNA, 98 bp, Homo sapiens
aaactctggctggagtcacacattattatggcatcgtcaaagcattgtggtgtcttttttactgctgcttgctgtgcttatagctacgtattatgttg

SEQ ID NO: 128898 - DNA, 50 bp, Homo sapiens
acgccagcggacacgcgggcgaggtgagcgagtgctgtgctttcatgggc

SEQ ID NO: 128899 - DNA, 76 bp, Homo sapiens
aggtttgccgccggtgaagatgggtgtgtgacgttcctctgtatgacatttgtgactacaacgtctccagggaccg

SEQ ID NO: 128900 - DNA, 100 bp, Homo sapiens
tggctctggatggtcatcagctgttggcaggctcccagccaacctctgataaaccctcccagcggccatcagagagcacaaattgtagccctacccggaa

SEQ ID NO: 128901 - DNA, 100 bp, Homo sapiens
gacggacgaggatgaggaggagggggacgagcagcagcggctcctcaacacccctcgaagggtgatattcatgaggatttttgcagcgtttgcagaaaaa

SEQ ID NO: 128902 - DNA, 97 bp, Homo sapiens
cgaatcgttaaacatctgaaagggtcaggtcctggctccccagaagcaagagagttcaaatgaaggaaggaggaggttcctggatgtggatgtcatc

SEQ ID NO: 128903 - DNA, 100 bp, Homo sapiens
aaaggagcaagatggctagggcattgcagtgtcgagatggctatgaaccctgtgtaaatgaaggaatgtgtgttacctaccacaatggcacaggatactg

SEQ ID NO: 128904 - DNA, 90 bp, Homo sapiens
gactggctctgcccttccccatggacccaacagtgaactgggtggtgcccgtggcagacaagatgcgatttgatgagatattcctgaaga

SEQ ID NO: 128905 - DNA, 91 bp, Homo sapiens
tccttccaaggaccagcggtagctcccggggctgaccccgcactacatctacccaccagccatcgtgcagcccagcgtggtgatcccagcc

SEQ ID NO: 128906 - DNA, 100 bp, Homo sapiens
atcgtgaccgagaccgtgaccgagagcgtgaccgagagcgcgaatatcgtcatcgttagaagaattggcagagggggtcgatttgggaggaaaggtgtgg

SEQ ID NO: 128907 - DNA, 100 bp, Homo sapiens
caactgggaggtggccatcttcggaccccccaacaccctctacgaaggcggctacttcaagactgccactctccgcccctacctgagtgccgtgcgggcc

SEQ ID NO: 128908 - DNA, 100 bp, Homo sapiens
catgaaggacgtgcccgactggaaggtgactgctgaggttggaaagctcttgggtgaagagaaggtggatgcaattctttgcgttgctggaggatgggcc

SEQ ID NO: 128909 - DNA, 75 bp, Homo sapiens
tgacgccatgtcgggttattcgagtgaccgagaccgcggccgggaccgaggcattgtcccagatatagccgttgg

SEQ ID NO: 128910 - DNA, 51 bp, Homo sapiens
cgcctgctgagtggacccgggttcaaatgtcgctgcctccaatgccaagct

SEQ ID NO: 128911 - DNA, 98 bp, Homo sapiens
gtaatcaaagacggcaacgcgcttatcagcgctatgagaagtattttgatcacaactatagcctccaagggagaattgcagaattggcctgacctctt

SEQ ID NO: 128912 - DNA, 100 bp, Homo sapiens
tcctacacaactgagcaggcatattaaggagatctattgggaaactgattataaccactcgggcaccatcgatgcccacgagatgaggacagccctcagg

SEQ ID NO: 128913 - DNA, 100 bp, Homo sapiens
aggatagcagcagaagagaagaagaagcaggatgaactgaaacggattgccagagaattggcagaagatgtcttatggtgaaattgaaggtaaattcttg

SEQ ID NO: 128914 - DNA, 98 bp, Homo sapiens
tggagtctgcgaaggccgggacccggttccccggcccacagtgggggtgtgcaaacccgagagaactgggttcagaagaagaacccagtcctgttttg

SEQ ID NO: 128915 - DNA, 75 bp, Homo sapiens
cagttcctgtacgatgagatagaagctgaggaattgaatgatctggcacgggaccctccagcacagtgttcagca

SEQ ID NO: 128916 - DNA, 74 bp, Homo sapiens
ttgtcccagctcggcccgcgggggagccccgggagccgcacggtcaaaatgcagatcttcgtgaaaacccttac

SEQ ID NO: 128917 - DNA, 100 bp, Homo sapiens
ccaaagaaacaagccgtggaataggtgtatcaagtaatggtgcaaagcctgaatgctgcttttgacacaaaaacggggttacgtgtggcagtgaagaagc

SEQ ID NO: 128918 - DNA, 73 bp, Homo sapiens
tgtcatgtttatcacactccttggatgatttccgaaggctttggaatcaggatgatgctggcctcataaaatg

SEQ ID NO: 128919 - DNA, 100 bp, Homo sapiens
agtcgggctctggaggaaaagaaaggtggcttgctttggtgaaggtattcatacagccttcctaaaggcaatgctttccacaggatttaagataccccag

SEQ ID NO: 128920 - DNA, 82 bp, Homo sapiens
ccaggacacccctgaagccgagaaatgatttccatggtgtcagtgattcatattcctgataggacttataaactatcctgca

SEQ ID NO: 128921 - DNA, 82 bp, Homo sapiens
atggcgagcgcccggattggggatgagtatgcggaggacagctctgatgaggagggacccagacatggagctgcgggaagaa

SEQ ID NO: 128922 - DNA, 87 bp, Homo sapiens
ctcccgcggagccggagccgcagaggctcccgggctggactcaggcttctcagaacccttaggagaaatcttgagagtggacagcaa

SEQ ID NO: 128923 - DNA, 113 bp, Homo sapiens
cctggatcatggctgccgcgccgccgctacgggaccgcctgagctttctacaccggcccgtggaccgggagcccgtggaccgggagccggtggtgtgccaccccgacctggag

SEQ ID NO: 128924 - DNA, 98 bp, Homo sapiens
ggggctcttgggtggtctgtaagccgcggagctaattggagatggtttcacagcacgcagtggcttcgggaaagctgatgtcctgaccactggagctg

SEQ ID NO: 128925 - DNA, 100 bp, Homo sapiens
ttggaactagcagatgctggcgacctatccagaatgatcaagatgctgatggaaagttaagcgtgaaatttggggtcctcttccgtgatgataaatgtgc

SEQ ID NO: 128926 - DNA, 95 bp, Homo sapiens
aggcttcgagaagattagcaaaggtgctaatccagtggaaatcaggagaggaacaggagtacagctgtgtagtaaagatgccttctggtgaattt

SEQ ID NO: 128927 - DNA, 88 bp, Homo sapiens
ttaaaagaacacatgccaaacatcatacttcggaagcaattgaaagttattaccagagctttcccatggtttggcatggacattgggg

SEQ ID NO: 128928 - DNA, 83 bp, Homo sapiens
actacttcgtgctggtggcgttcgggccgcacccgcgcgggcatgacgtccttgatgaaggccgcgctggacctcacctaccc

SEQ ID NO: 128929 - DNA, 100 bp, Homo sapiens
ctggcttctatcaaagtttgcaaggttcatttatgttcatggagtctatgggtaaaacatcagggaagctgtttgatagcagtgatgatgacgaatctga

SEQ ID NO: 128930 - DNA, 48 bp, Homo sapiens
ctgcgtgctgtgttgtcacaaagtaaacggagttccctctcgaagtcc

SEQ ID NO: 128931 - DNA, 75 bp, Homo sapiens
gaagatggagtacatctgattgtctgtgtgcacggtttagatgcaacagggagctgccaccaccgtgtactgtgc

SEQ ID NO: 128932 - DNA, 83 bp, Homo sapiens
cggggcgaggcagggccagcagcaggcgggagttggtcagcatcggctcctcttacaactatgggaacgaagaccaagccgag

SEQ ID NO: 128933 - DNA, 88 bp, Homo sapiens
ccagagcctcagcaggagcctgttctcatcaccatggcaacaggtgtgcctaccgcatgttgccgctgctgtttctgctgggacgtct

SEQ ID NO: 128934 - DNA, 95 bp, Homo sapiens
agctgctgacaaagctgaggagtttcgcaggcccatgtccctgagcaccattgcaatcctgaattctgtcaagaaagccgtggagtcaaagagca

SEQ ID NO: 128935 - DNA, 100 bp, Homo sapiens
ctggaaagtgaatcacgtaatcacaatggccctgctgtggcaccagtgaccaacgggaacacaacggtgccacccctgaacgatgatctggacatctttg

SEQ ID NO: 128936 - DNA, 82 bp, Homo sapiens
ggacaagatgaccacactccaggaatgccagtgcatcttttgcacagctgtcgttccaggggtagaggaggcatgaaggatg

SEQ ID NO: 128937 - DNA, 82 bp, Homo sapiens
ctcccgaagtgctgggattacagctggccctgctgcacacacctccactctcagatatctttgtcttcacggatgcctcccc

SEQ ID NO: 128938 - DNA, 100 bp, Homo sapiens
atcatgtctgcgagccaggattcccggacaagatcgcagaggaaggtgggcggcgggagtgcccagccgtgtgacagcatcgttgtggcgtactacttct

SEQ ID NO: 128939 - DNA, 75 bp, Homo sapiens
ctccgggctgagcttcctggagaagaggaagatggtgtcggacggcatgacaggcagcaatcctgtgtcccctgc

SEQ ID NO: 128940 - DNA, 90 bp, Homo sapiens
gctaaagtgggttgaattgccatggctgctggaagaagtctcaaaaagctcccgactaggaatacggttggacagaatgaactgaagatt

SEQ ID NO: 128941 - DNA, 100 bp, Homo sapiens
tgtgggacccgtgagcaagcagcgacgccagcggcggagaaccgacgaaagacgactaagctaccggagagccgcgggcaccctgccgagcccccagagc

SEQ ID NO: 128942 - DNA, 82 bp, Homo sapiens
cagattcgcagtggtcgcttcttctccttggtactgatgctttgggttggaaaaaattgtacacagaattttctcagccaag

SEQ ID NO: 128943 - DNA, 51 bp, Homo sapiens
aaggaccagtacctgcccaggaaactggtatttgacaacaccccagcagcc

SEQ ID NO: 128944 - DNA, 97 bp, Homo sapiens
tgatgaccagtctttcccatatcagagcatcacttttcctgagttaagcaataaagccaagatcaaggctcgagatcttcgcgggaagaagaaggag

SEQ ID NO: 128945 - DNA, 100 bp, Homo sapiens
gttcagaagagccaaggaataaacatgcaatgaacccaaaaggagtaacagactagctagagacaatgaattaagggaaaatgacaaagaacagctcaaa

SEQ ID NO: 128946 - DNA, 98 bp, Homo sapiens
atgaattaattcgagagtatttagaattcaacaaatataagtatacagcatctgtcctcatagcaggttcgacgaggtgctttataaatcatctcagg

SEQ ID NO: 128947 - DNA, 100 bp, Homo sapiens
gtctgcgaaggccgggacccggttccccggcccacagtgggggtgtgcaaacccgagagaactgggtaaagtcagtgataaatcttttgtttgctgcata

SEQ ID NO: 128948 - DNA, 51 bp, Homo sapiens
ggatcgtcaggctctaaacaaaattctgctaagggagaacattgagcaatt

SEQ ID NO: 128949 - DNA, 82 bp, Homo sapiens
gaggatcctggaggcctgggaagccaacgaccacacgcaatctggtggctggacccagagctgacctatggctgcgccaagc

SEQ ID NO: 128950 - DNA, 100 bp, Homo sapiens
gcgggcgctacgggcttgactcccccaaggccgaggtccgcggccaggtgctggcgccgctgcccctccacggagatgccttattggaggaactggaacg

SEQ ID NO: 128951 - DNA, 75 bp, Homo sapiens
taaaggaaacactaagtggattagccaaaaatgccactgaccttcagtctattatcctcccagtccacaacgctg

SEQ ID NO: 128952 - DNA, 50 bp, Homo sapiens
tgtgccccaatggttcgatattcaaaattacctctctagtgacccttcag

SEQ ID NO: 128953 - DNA, 98 bp, Homo sapiens
cgggagacgagaagcctgaaaagtcgcagcgagctggagccgccggagcttgcagaccaggattctataaagcttttgctgggaacacaaaatgttct

SEQ ID NO: 128954 - DNA, 100 bp, Homo sapiens
agacgttcctgtaaaagaggacaccaacagtgtggtggagaaagcaatggatgaaatcaaatcccaaggtcacaatcattggttacaccctggggattcc

SEQ ID NO: 128955 - DNA, 82 bp, Homo sapiens
ttttccggtcccggcgcccggcgagggcgcgcggctggtgtccgccccgcccgaaaggcacgtggactccctttaatccagt

SEQ ID NO: 128956 - DNA, 75 bp, Homo sapiens
cccaagtctggcttccgcatctgtatggagagtcggcttgactacactgtgtggagcaagttttaaagaagcaaa

SEQ ID NO: 128957 - DNA, 100 bp, Homo sapiens
ccgcacccttgaaaggaggcccctgccgtgtggacccgtaaaataaaatgggcggaccttgccaagtatatctgtgaaaatcaagattcgatctccagta

SEQ ID NO: 128958 - DNA, 83 bp, Homo sapiens
ctgcgtccgagtctccgccgctgcgggcccgctccgacgcggaagttggaaaatggatataccttatttgattatgatgttgg

SEQ ID NO: 128959 - DNA, 100 bp, Homo sapiens
cagacctgctcacacttcagaatagagaagccttcaaacagtggccgagctgcagaactccttgccaaagaacagggaacagtgcctggatttattggtt

SEQ ID NO: 128960 - DNA, 89 bp, Homo sapiens
gttgaaccctcggatacgatagaaaatgtaaaggccaagatccaggataaggaagggggaacacacctgaaactagaggaacagcttat

SEQ ID NO: 128961 - DNA, 82 bp, Homo sapiens
ccatcctgctggacgggcggcgggtgaagctgcagctctgcggaagaccctgaagaccctgcgggaccaatgggagaaagca

SEQ ID NO: 128962 - DNA, 74 bp, Homo sapiens
atcaatccctaccactataagagagtagaaagccctgggggatatgagactttctactcggaatatcctgagtg

SEQ ID NO: 128963 - DNA, 100 bp, Homo sapiens
tttggccttgcaagagcagaaaatcagaagctggatttcagtactggaaacttcaatgtgttagctgttagcaacgaatcagtattcagcagctcttcac

SEQ ID NO: 128964 - DNA, 75 bp, Homo sapiens
gaccaagagggtgttcgactgctagagccgagcgaagcatggtcatcatgggccagtgctactacaacgagacca

SEQ ID NO: 128965 - DNA, 76 bp, Homo sapiens
ttcgagctgtccgactctgagaatggacgatgtatctcctaggctacattcctaaagacaacaggctttatctggg

SEQ ID NO: 128966 - DNA, 73 bp, Homo sapiens
caggctgcggggcgcggagtcgggaggactggttcgttgtaaacccaacaacaaccaaaagctttgaaaagct

SEQ ID NO: 128967 - DNA, 98 bp, Homo sapiens
cgccatcaaccgccagatcaacctggagctctacgcctcctacgtttacctgtccatggcatctggtgtcgaaggctcagatattcctgatgatggta

SEQ ID NO: 128968 - DNA, 76 bp, Homo sapiens
ttgtgccctagcaccccgagaaccgtcagtttgagccagatgagtgtcaatccatatctacaaggacagagactgg

SEQ ID NO: 128969 - DNA, 75 bp, Homo sapiens
gccggcctgtctgccgcgatggatgacagtaagcctcctcagttccagattttgaggaagctgtcccaggaacct

SEQ ID NO: 128970 - DNA, 80 bp, Homo sapiens
cctgacagtgttaatggaagtgaaccaagcattcctcagcacaacctccaagagggaaaacatttctccagattatccac

SEQ ID NO: 128971 - DNA, 75 bp, Homo sapiens
aaacgcccccaatttcccagctgctaaaggaagaggaaggccgactcgcgggccgctgcacccaccgccaaggac

SEQ ID NO: 128972 - DNA, 80 bp, Homo sapiens
cagcggggcgctccaggaggcactcacaggaggataagatcaatgccctcattaaagcagccggtgtaaatgttgagcct

SEQ ID NO: 128973 - DNA, 80 bp, Homo sapiens
aaatacgaaggtttctggctggatcacaaatcgggacaaaccgctgtcatttggtatttcccttcaaaatctgagcatgc

SEQ ID NO: 128974 - DNA, 100 bp, Homo sapiens
cagctgggctgcagtgaccccgctttcctcacgcccagggaggaggtacaggagaactgtgtgcggtggcgaaagaggttcaccttcgtgtgtaagatga

SEQ ID NO: 128975 - DNA, 100 bp, Homo sapiens
tgtcttttccagattcaaattcaggaggtctgttatagagatcagtcgagccctgaaggagctcttccatgaagccagagaaagggcttccaaagcactt

SEQ ID NO: 128976 - DNA, 130 bp, Homo sapiens
cgaccaggggcgacggcgtactttgggcttcatcatggaggactacctgcagggttgtcgagctgctctgcagggccaagaccagcttcaagtctccatggtaccagaaaacaacaacctcacagcacct

SEQ ID NO: 128977 - DNA, 98 bp, Homo sapiens
atttggcgatcaacatcaccaacggcgagggcttatttcaaaacctttgtccctcagttccaggaggcagcatttgccaatggaaagctctaggaaac

SEQ ID NO: 128978 - DNA, 75 bp, Homo sapiens
aagatggcgactgtcgaaccgcatggcggacaccgacctgttcatggaatgtgaggaggaggagttggagccatg

SEQ ID NO: 128979 - DNA, 83 bp, Homo sapiens
gctacaagctcctctaagtgaacccacgctgagccagcatactcatggaactgtggctgcaccatctgtcttcatcttcccgc

SEQ ID NO: 128980 - DNA, 100 bp, Homo sapiens
tacattctcaggtggagacctattcaattagcagagcctcacagacaatggccaaatgtgtcaaagctgtcacagagggtgcccaggcagtagaggaacc

SEQ ID NO: 128981 - DNA, 100 bp, Homo sapiens
gggtgcccgctggaggcggcgccgctgcctgccgaggtgcgggagagcctggctgagctggagctggagctgtcggaagaactcatcatccttatggagg

SEQ ID NO: 128982 - DNA, 80 bp, Homo sapiens
acatcactttagaccctccacctaattgcaggaatggaagattgcgaaacaatggaagatgtatacatggcttcagtaga

SEQ ID NO: 128983 - DNA, 96 bp, Homo sapiens
ggtggagattctcagtgaaggaaatgaagtccgatgctgaaaacgccattcaacagatgggtggccagtggcttggtggaagacaaatcagaacta

SEQ ID NO: 128984 - DNA, 96 bp, Homo sapiens
cggcggagtagcaagtggccatggggagcctcagcggtctgcgcctggcagcagatgtttgagacggaggcagatgagaagagggagatggccttg

SEQ ID NO: 128985 - DNA, 89 bp, Homo sapiens
tcagacgcagccgtagacaccagctccgaaatcaccaccaagccgagcctcttgaagccattcttacagatgatgaaccagaccacggc

SEQ ID NO: 128986 - DNA, 74 bp, Homo sapiens
tatcctggttcagcctgaaagaattctgacttaccttgtactactagttggtgctggagaatctggtaaaagca

SEQ ID NO: 128987 - DNA, 83 bp, Homo sapiens
ttttgggatttgagattgacgcggtgaactctgtccagttttcaaaccacacagccctccagaatacccatcatatagcccct

SEQ ID NO: 128988 - DNA, 100 bp, Homo sapiens
gtatggcagcgctcctcgaacacctagcaagcggcgaggactggctcccaatacaccgggcaaagcacgtaagggccctgaaaaaaactctcttcctgtg

SEQ ID NO: 128989 - DNA, 75 bp, Homo sapiens
taggaacagcatctgaagatgaatttacatagtacatgacgaagttaaggataaagcttttgaactagaactcag

SEQ ID NO: 128990 - DNA, 82 bp, Homo sapiens
cggcgctgcgaggccagagcctagggctagcggccatggtctcggcgcggaagatggccggcggcgtggacggccccatcgg

SEQ ID NO: 128991 - DNA, 83 bp, Homo sapiens
ggaaaatccgcaagaccatcatgcagttggcgacaaacagcccacaattctcaaatggcggatcctatcggccaccaacgatc

SEQ ID NO: 128992 - DNA, 75 bp, Homo sapiens
ctcgccaacaccattgcacagctagtccatgctgttaacaactcagcggctcatggtgccaactggctgactttt

SEQ ID NO: 128993 - DNA, 83 bp, Homo sapiens
gtttctggccacgtgcttcaacgctctgctgcccgctgtgagggaaaagacaatgcagatcttcgtgaagactctgactggta

SEQ ID NO: 128994 - DNA, 101 bp, Homo sapiens
agctcaggacagggctgaggaaccatgtctccatccccgaccgccctcttctgtcttggcctccggtgtggctgtctctgatggtgtcatcaaggtgttca

SEQ ID NO: 128995 - DNA, 82 bp, Homo sapiens
atattccagtaatggtggatgaagttgttcattgtttgtcaccacaaaaaggacagcatgctacaagtgaaaactgatgaga

SEQ ID NO: 128996 - DNA, 50 bp, Homo sapiens
agacaagacacttttcagaaagacaggttgcaacaaggacagtgtcagag

SEQ ID NO: 128997 - DNA, 82 bp, Homo sapiens
cctacactagtcgcgggagccacgcagaggacgccggaacaccctggaagccgagaaatgcctaggatgtggcattggatat

SEQ ID NO: 128998 - DNA, 90 bp, Homo sapiens
gtcaagacttttgaagatagaatggacatagagacactgcatattttaccaaggctttgactggaatggcatgctttcaaatataaacag

SEQ ID NO: 128999 - DNA, 97 bp, Homo sapiens
tgtgccttgcttatgtttgttaggaccaaacctcaaagcatggctaagagtgttcagtagaaatgggagatatgtcagtattgaattctcccagaca

SEQ ID NO: 129000 - DNA, 76 bp, Homo sapiens
tggcatattatttggtgcaaccatctccttctcatgtaacacaggacatttaaagtctgaagtccaccagaacttg

SEQ ID NO: 129001 - DNA, 100 bp, Homo sapiens
tggagtcagtggaagacggagctggtcggcccgaaggtttctacgataaagacagttcagggtggagttctagcaaagataaggatgcgtatagcagttt

SEQ ID NO: 129002 - DNA, 83 bp, Homo sapiens
cccctcggaggagggctgtcaggtgaagcctcgtgtgaggggctccgctctgcattggataaaacagaagagctcgaggtgag

SEQ ID NO: 129003 - DNA, 100 bp, Homo sapiens
gtcatggcggaggggacggcagtgctgaggcggaacaggccgggcaccaaggcgcagaagaaagccagccgccacataaaaggtgaagacaagaataaag

SEQ ID NO: 129004 - DNA, 74 bp, Homo sapiens
cgtgcattattataaagctcaaccgagttctaggcttcaaacctaaggcaaaatacatatctcagtgcattgat

SEQ ID NO: 129005 - DNA, 74 bp, Homo sapiens
gctttaatcctgaaagccatgcagcggggtcaacatatttcactggcacctattcacaagcttgaagaagctct

SEQ ID NO: 129006 - DNA, 83 bp, Homo sapiens
ctggaagcggcagagttaggtgaaatttcagacatacacaccaaattgttgagatgctgtgctgtggctttcattgagaagct

SEQ ID NO: 129007 - DNA, 60 bp, Homo sapiens
aatcccttgcatggctctcagttctcccatgggcaggtggtctctctggatgagctgcgc

SEQ ID NO: 129008 - DNA, 83 bp, Homo sapiens
agctcggttttcttatgcttataagagtggaacagatttccaagccgctgatggagaaaaagcgccgggcacgcatcaatgtg

SEQ ID NO: 129009 - DNA, 76 bp, Homo sapiens
aaaaggaggcaagaatattaaggctctccgtacagacgatggcatagttcttggagcagatacaagagcaactgaa

SEQ ID NO: 129010 - DNA, 74 bp, Homo sapiens
ccttcccgtcgccgctcccgaagcttttccaggtgtcatggagaaactccagctgggcccagagattctgcagc

SEQ ID NO: 129011 - DNA, 98 bp, Homo sapiens
tctttcctaccatctaaaatacgaaggtttctggctggccaagcaggttgagtatctggtcaatgaaaagcacatctacctgctgccaagtggtcgaa

SEQ ID NO: 129012 - DNA, 82 bp, Homo sapiens
cgcttcttcactaacttcgagagtcgaaaaggaaaagagctgagcactacaaacaccactggtttcccgaaaagccgtccaa

SEQ ID NO: 129013 - DNA, 95 bp, Homo sapiens
ctgcgcgggaagaaaatgtcccaaaggatcctcaagaggagatgatggcggggaatgatttattccccatgtttacagataccgctaataaattg

SEQ ID NO: 129014 - DNA, 88 bp, Homo sapiens
gcatattgtactggcctgctgctggcccgcagggtggacccccaaaagtacaagggcatatttaacggattctcagttacacttaaag

SEQ ID NO: 129015 - DNA, 82 bp, Homo sapiens
aaaggcaaaaatcccatctaccgcaactctcagttcgagagtaaagcgccactggcttcaccacgcggtcagacattgggcc

SEQ ID NO: 129016 - DNA, 74 bp, Homo sapiens
ctacagagagatgctgtcccgtgggacctgaaggagaagaaggagaaggtggaggagaaggcaagccggaaaga

SEQ ID NO: 129017 - DNA, 112 bp, Homo sapiens
ttcaccgcgggcgccaatggggagcagaaggactcggacacaggtgtcccaccggccttccgggttccagcgccaggcctggtgcctgccccaggaggatgagcatttgcat

SEQ ID NO: 129018 - DNA, 80 bp, Homo sapiens
gctgggaagaagcatatacttttgaaggtgcaagatactatataaaagcccacctgaatgaccttgaaaatattattcca

SEQ ID NO: 129019 - DNA, 100 bp, Homo sapiens
ccgcgcacaggccggtggaatgggtccaggccgtggtcagccgcttcgacgagcaggtttgtttggcagctgtgggcttagtgggagacttgtgccgtgc

SEQ ID NO: 129020 - DNA, 75 bp, Homo sapiens
ctgtgagtggcgatcacgagaacaataaggtgcagtagacattgttgcaatcatgatcggcaatctgaaaggcac

SEQ ID NO: 129021 - DNA, 98 bp, Homo sapiens
tgatccgccattacggggagcacgtgtgcactgctaaggcctgggccgaggccactggtgcatatgttcccgggagggataagccagacctgccaacc

SEQ ID NO: 129022 - DNA, 100 bp, Homo sapiens
gctactggaaaacctcaggaacctagaatttctggctcagcaaaacccagcagctcagattcctgccaggcagcgggagattgaaatgaaccgacagcaa

SEQ ID NO: 129023 - DNA, 75 bp, Homo sapiens
gagaatgagctggccaacaaggagtccctgcaccgccaggtttctaagcatgaattgaggaacagaagaagcaga

SEQ ID NO: 129024 - DNA, 100 bp, Homo sapiens
agagggagaactcatggaagatgcagctgctgcaggacccgcaggtggtacattggcagagcccccatatgcacgcctactacccagccctcacctcttg

SEQ ID NO: 129025 - DNA, 100 bp, Homo sapiens
tcggggccgagcgggaggcagccgtggccgagactagacgcttgaagcaaagctgccatcccagaagacgacatgctctcagcaacccccctgtatggga

SEQ ID NO: 129026 - DNA, 50 bp, Homo sapiens
agaagacggtgggatcaggagatgattacgatgaggacctggtgcaggaa

SEQ ID NO: 129027 - DNA, 98 bp, Homo sapiens
atcaaccccgtggcctttggggccctgctgcagtacctgtacacaggtgtgaaagcctggtggacatttattcccagctacagcaggaggtaggggcg

SEQ ID NO: 129028 - DNA, 71 bp, Homo sapiens
gttctgcgacttataaaggaccagacaaatcaaattagtggttttgcggcgcgcgagcgggccgggcgggc

SEQ ID NO: 129029 - DNA, 101 bp, Homo sapiens
caacagcccggaagagtttgaccccatgactggacgctgtgttcccccacgaacttctgctgctcatcgagcggtccccccgcaccctgccacgctccatc

SEQ ID NO: 129030 - DNA, 73 bp, Homo sapiens
ggcgcttgagttggtcgggggcagcggcagaattctgcttggtcagaatcgtgatggcattgtgttcagcact

SEQ ID NO: 129031 - DNA, 96 bp, Homo sapiens
gtgtgctttttcaagggagctgataaagaacttcttcccaaaatggattttggaaccagtactagcagtggaggactctttggaaccacaaatacc

SEQ ID NO: 129032 - DNA, 100 bp, Homo sapiens
catactgccttatgggacagatcaagccaagaagcttgagagaagaaaaatttcagaaaaattgtctcaatttgactagaatatcaatgaaccaggaaaa

SEQ ID NO: 129033 - DNA, 82 bp, Homo sapiens
tggcggcggcgggtcaggagcagccgcagcgacggcggcgacagcaggctgttcgctgctatgaatctctaatcttaaaagc

SEQ ID NO: 129034 - DNA, 101 bp, Homo sapiens
acaacagtggcctgaagaggaagacgcctgcgctaaagggaagctgactccacccatgtgttcaatcccaccagtcttccctcccaagtctggaagcccca

SEQ ID NO: 129035 - DNA, 100 bp, Homo sapiens
ggctgggctggccaatggagaggtccgcatttatcgtgacaaggccctgctcaatgtcatccacaccccggctgttcggctcttgaatcccagcgatgaa

SEQ ID NO: 129036 - DNA, 100 bp, Homo sapiens
gactggaagggaaagtccctaaaaatcacgagttcaggcgtctgagacttggtgggaacggaccttcctcttagacagcaaatcacccaccttgaggtca

SEQ ID NO: 129037 - DNA, 75 bp, Homo sapiens
gccttcaatactacctttatttccaccatagatcaacagtacaaattctgaagtttgtaaacttgctgatggtgg

SEQ ID NO: 129038 - DNA, 82 bp, Homo sapiens
ggccaggacacggtctgggccgccgaatctccggccgaagagcggcggcggcagcggcgaggggaggtatggtgtcaagaaa

SEQ ID NO: 129039 - DNA, 100 bp, Homo sapiens
gggcaagagaaagccctaccacaagaagcggaagtatgagttggggcgcccagctgccaacaccaagccttccttgaatccagaagctggcaaacagcat

SEQ ID NO: 129040 - DNA, 82 bp, Homo sapiens
accactctccagcaccagcttccagttagtggatatagcacaccatccccagccaatcgacgacatcgcggatggcgccgtg

SEQ ID NO: 129041 - DNA, 75 bp, Homo sapiens
gtcagcgatggtgcccggcgaggagaaccaactggtcccgaaagagctgggatctagcaattgggaggcagcaga

SEQ ID NO: 129042 - DNA, 100 bp, Homo sapiens
gcctgtgattcttataaatctggatatgtctattctgaactcaacttctgaaatttacagaaacaaactacatctcaggagacagggttttgccatgttg

SEQ ID NO: 129043 - DNA, 102 bp, Homo sapiens
tcgtcatcttcataggctcgctgctcggtgtggatgaggtcaccattgtcaacattttgaccaaccgcagcaatgcacagagacaggatattgccttcgcct

SEQ ID NO: 129044 - DNA, 74 bp, Homo sapiens
gccaccgtctgaactaggatgtcccgacatgaagcttggaccaatcagccttgtgtttataggaattatttctg

SEQ ID NO: 129045 - DNA, 75 bp, Homo sapiens
gccaagtaggggattgcgttccctccagtcgcaggtcacctggattcttcaggacttcaggaagtgcatttagct

SEQ ID NO: 129046 - DNA, 74 bp, Homo sapiens
tgctggtgaagatgcatgaataggtcctggtgcttgatggtcgaggccatctcctgggccgcctggcggccatc

SEQ ID NO: 129047 - DNA, 90 bp, Homo sapiens
tggagccaagaaatgagtatagctgacagtgaagatagtactgtgtccatccagataaaattagaaaatgaaggcagtgatgaagatatt

SEQ ID NO: 129048 - DNA, 76 bp, Homo sapiens
ttatgatctggcagccaggctgaggcctaatggtgttgatgatgccttctatacattagttcgagaaattcgaaaa

SEQ ID NO: 129049 - DNA, 100 bp, Homo sapiens
ccctcaaggcccccgcgtggttcagacagacgccgcagccaggatggttgagaagaaagccagcttccctctacaagtgctctgggaaaaggagagcagg

SEQ ID NO: 129050 - DNA, 83 bp, Homo sapiens
taaaaggcaaactcttcacctggcaacaagattgacctggctgaaaggagagaggtttcccagcagcgagctgaagaattctc

SEQ ID NO: 129051 - DNA, 121 bp, Homo sapiens
ggctactatgctgaacggtgcagcagtgatggatgcagctcttctgttgataggagcggctcttatgcgagagcgagacatgcagtatgtccaaaggatgaaatcaaaatggatgctgaag

SEQ ID NO: 129052 - DNA, 100 bp, Homo sapiens
caggattctttccttcctcaagagattatcatcaaagtcgagggagaagacactgggtctctgaccatcccatctcagttctgcttttccagaatcctgc

SEQ ID NO: 129053 - DNA, 90 bp, Homo sapiens
tccctgataacttcatagctgcctgtacagaaaagaaaatccccgttgtttttcgattgcaagaggctctcaccacacacttgttcatgg

SEQ ID NO: 129054 - DNA, 100 bp, Homo sapiens
aaatgagtctacagttataccaagtggatagtagaacttatctactggatttccgtagtattgatgcaacacagtcactcctggcggcaaaccaaacaaa

SEQ ID NO: 129055 - DNA, 100 bp, Homo sapiens
atgcagtcagctacgggaattcagtactctgtaacacccagctaccagtaccatgcggagaccatcaagaatgtgcgcacagccacggaaagctttgctt

SEQ ID NO: 129056 - DNA, 51 bp, Homo sapiens
aagcgcactaaatcgtctccaagaccctgcacttgatggaccagctggcac

SEQ ID NO: 129057 - DNA, 100 bp, Homo sapiens
ttgaatctcagagtgaagatgagttgacaccttttgacatgagcatccaggtgaatgaaaactttgccattgatttgatagcagagcagcccgtgagcga

SEQ ID NO: 129058 - DNA, 82 bp, Homo sapiens
gggaaccgttcccgggccgttgatcttcggccccacacggtttggtgcacctcgatttggaggaagtagggcagggccctta

SEQ ID NO: 129059 - DNA, 96 bp, Homo sapiens
cgtacccggagagcggcaactcgcgcactcaaaggcagctgttgtgctgtgtatggacgtgggctttaccatgagtaactccattcctggtataga

SEQ ID NO: 129060 - DNA, 50 bp, Homo sapiens
gtccactcacaaggaatccaaagccaagactaaggggctgcagagcgggg

SEQ ID NO: 129061 - DNA, 100 bp, Homo sapiens
cgccacacgcgcagcatcttctgggagctccaggtggtgaaggcatttgtgatcctggcctcgcagttcctatcccatgacccagaacagctcaccaagg

SEQ ID NO: 129062 - DNA, 100 bp, Homo sapiens
acgatttaaaacttcgccagaattttcttcccatgcacaagatgattaatacagatcttagcagaatcttgaaaagcccagagatccaaagagcccttcg

SEQ ID NO: 129063 - DNA, 75 bp, Homo sapiens
actgtggcgacactgaagggaaaaagaccgttccccagcacaccccaccccactcagccgctcagcctccctcag

SEQ ID NO: 129064 - DNA, 82 bp, Homo sapiens
aaggaagaatttcctctgaagcaccggccacccttaagtacaatgttctcctacctaagaaggcatctggattttctctttc

SEQ ID NO: 129065 - DNA, 90 bp, Homo sapiens
agtgcagcgcggagtgggcgatgccagcgtgccagagaaaatgatgtggctggtattgatgtcaacatgggctgtccaaaacaatattcc

SEQ ID NO: 129066 - DNA, 82 bp, Homo sapiens
ggggcaggctgtagactacgagggctccagaacccaggaaggtatgtctgattgacccgggctgcttccgagaaattgatga

SEQ ID NO: 129067 - DNA, 50 bp, Homo sapiens
tctctcatttgctggccatcggattgggtaagcactatcctttgtactcc

SEQ ID NO: 129068 - DNA, 73 bp, Homo sapiens
tcctttccgtctggcggcagccatcagagcagcccgacggccatggaggctgaagagacgatggaatgccttc

SEQ ID NO: 129069 - DNA, 50 bp, Homo sapiens
caggaagtccttttattaccaggaggtcaacaaaaatctctcatttactt

SEQ ID NO: 129070 - DNA, 89 bp, Homo sapiens
gaatgatttatagctaagactccaggacacccctgaagccgagaaatggttgatgataattagaagcatgctttccactgaacttcccg

SEQ ID NO: 129071 - DNA, 50 bp, Homo sapiens
ctgtgtttaaagctatccagccggaggaaattgaacttagctcattaagg

SEQ ID NO: 129072 - DNA, 75 bp, Homo sapiens
ttgacgccatgtcgggttattcgagtgaccgagaccgcggccgggaccgagggcaaacctgcccttgctgcagcg

SEQ ID NO: 129073 - DNA, 74 bp, Homo sapiens
tcctgggtgccatcattgtcatcatccgcaaagggaagctcttcgtgggcggtcttgactggagcacgacccaa

SEQ ID NO: 129074 - DNA, 101 bp, Homo sapiens
cctttgaaaaaacagacttgaaagtgcctgccaaagccaagctcaccaaactgaagatgccttctcagtcagttgaggttggatttggtctagggagtccc

SEQ ID NO: 129075 - DNA, 80 bp, Homo sapiens
tatctgaatagtgaagtatttatcactcatcacagtaacttacgctgctggagtacttagggaagggcaaaagcatcgtg

SEQ ID NO: 129076 - DNA, 100 bp, Homo sapiens
cgccattttgaagttgggcagaaagtgactccagtggtggaacccggagccaaccatttttagccagaagcggactcctagaagaggggagcagcaagga

SEQ ID NO: 129077 - DNA, 100 bp, Homo sapiens
tgtttcatcattactaacaggatattcctcatgacattgctgtctgttgtatatgaacacagatcaagattagagaaatccttgcaaaaagaaagacttg

SEQ ID NO: 129078 - DNA, 83 bp, Homo sapiens
ctgccctgggctggaacgaccctgggtgtttctgtggcctgggactggttagcaccaacaagtcctgctcgatgccacccatc

SEQ ID NO: 129079 - DNA, 50 bp, Homo sapiens
cgaaccgggggagcgaggcacggtgctggagaatctggtaaaagcaccat

SEQ ID NO: 129080 - DNA, 100 bp, Homo sapiens
tttgagatggatagcagcctggcctgttcaccagagatctcccacctcagtgtgggttccatcttacttgtcacaatcaaactgatggctgaaggcgagt

SEQ ID NO: 129081 - DNA, 85 bp, Homo sapiens
gctggtcactcacggtggaattgaaatggggcagggggtccacactaaaatgattcaggtacatcaggaacgtctctatcaagaa

SEQ ID NO: 129082 - DNA, 75 bp, Homo sapiens
ctaaacaaattcatcccagaaatctaagagagtgaacacaacatgctcccttggtctctgcaaccatcgattcct

SEQ ID NO: 129083 - DNA, 82 bp, Homo sapiens
gtgaggtgctatctcggagacacatgaaggtggcattttttggcaggaagttggtgaaccatctaaagaagagaaggctgtg

SEQ ID NO: 129084 - DNA, 95 bp, Homo sapiens
tacattgagtttgtggcagacagacttatgctggaactgggttttagcaagagttttccgtctgatgaaggttggccatttgcaaagtatcttgg

SEQ ID NO: 129085 - DNA, 74 bp, Homo sapiens
aaacgctgacagagatgctgcagagctatgaagttgcggagaataatgaacatgatgtcacttctactgaatta

SEQ ID NO: 129086 - DNA, 75 bp, Homo sapiens
cttggatgaggtgaaagactatgtggccaagatcgtcagtatttaaacagatcacatcatgcgtgagtacaagct

SEQ ID NO: 129087 - DNA, 50 bp, Homo sapiens
gcggtcaggccgccctccttttccagtatgccaccacgggctgttccctg

SEQ ID NO: 129088 - DNA, 74 bp, Homo sapiens
cctgcagaaatgggtgccggaatctgtctcctgatcatcattcagggtaagatgatcatgcaggataaactgga

SEQ ID NO: 129089 - DNA, 97 bp, Homo sapiens
tgaacaatgtgattatgcggttcatgcagataagtgaggattctaccaggatgtttaaaaaggcctggttgcagtatgcttgaaatctgggatgtgg

SEQ ID NO: 129090 - DNA, 97 bp, Homo sapiens
tggaaatcagtttgctgaaattaatcaacgattcttgaagttgaagaaaagctattgacctgaaaagtggttctggaaaagtgtaccaaggccctgc

SEQ ID NO: 129091 - DNA, 83 bp, Homo sapiens
ctctgtctgcctgtgtccctgaccatggctccctgcagtaccctttaacgaacccagcttagactagaaagtctagaagacac

SEQ ID NO: 129092 - DNA, 75 bp, Homo sapiens
accctcagtgacccggtgcagctagaagtccatatcggatcttctccatactgtcttcaagaatggcaaggtgac

SEQ ID NO: 129093 - DNA, 104 bp, Homo sapiens
gggtgacatggaaggggcagtacaagcttacgtctctgctcttcagtacaatcctcgtacacagactttactaaaagagtacaaagaaagggataaatccaatg

SEQ ID NO: 129094 - DNA, 74 bp, Homo sapiens
gccgccatacgcgctctccctgtttagtgttctaagaacggaagcatctgggctggatggaatttagcatcaag

SEQ ID NO: 129095 - DNA, 97 bp, Homo sapiens
cccggaggcgacatggggcacccggtgtaccgcggcgagaagccccagctgcactacgcgaccaagatcactccatggatgaaatgacagctgtggt

SEQ ID NO: 129096 - DNA, 100 bp, Homo sapiens
gagagagagcttggttaacttgggagaaagtttcatctgtggatggagtattggttacctgtcctgctgccgattcctggatgacaatcagatcgtcacc

SEQ ID NO: 129097 - DNA, 75 bp, Homo sapiens
ttccagaaaaagtgctcctgggactccaggataccagaacctgtctccagagaagattttccacgtcattgtggc

SEQ ID NO: 129098 - DNA, 100 bp, Homo sapiens
cggagatagctaagatgccgcgcaggagacctgccagctttttataaatgctgcagttgactctcctgcaattgattaccacatatctttagcccagagt

SEQ ID NO: 129099 - DNA, 100 bp, Homo sapiens
ccttaagcttcacctggagcagcagctgcccgtcctcctgcagacgcttctcggaaacgaccatttcgccaggggagtgctgctgtatggacctccaggc

SEQ ID NO: 129100 - DNA, 73 bp, Homo sapiens
ctttctttgtggtcttcatttgtgaatacatagaaggccaatgatgaggccaatcagagtgatacaagtgtct

SEQ ID NO: 129101 - DNA, 75 bp, Homo sapiens
tgggcctgtgtgcctggaaaggaattgttttggcctaggatcatccagtggaagcattgacatttcctccttctt

SEQ ID NO: 129102 - DNA, 90 bp, Homo sapiens
ctcactgagttttgactagcggaagaaaaggattcactccttctccagttgcacagccacacccttcagctggccttaatgttgactttg

SEQ ID NO: 129103 - DNA, 100 bp, Homo sapiens
cagaattatttgccattttgagacagtgggttcctcaggtccaacaaaacattgacattattggaaatgaggtgatactatcaaccaaagcaccctgccc

SEQ ID NO: 129104 - DNA, 101 bp, Homo sapiens
ctcggctgctacgtggaaatcctcaagctgctatctttaatctcatgaagtacgacagctacagccgcttcttaaagtctgacttgtttttaaaacacaag

SEQ ID NO: 129105 - DNA, 101 bp, Homo sapiens
ctgagatatgatgattttgaagtcatttcacatcgaagccatgatttaaatatcggcgttaagcatggaaataaccagcctgcaagaactggcacactgtc

SEQ ID NO: 129106 - DNA, 97 bp, Homo sapiens
tgccgggacatgtatgagtgcagctgccccgagctggatcagctggtggacatctgtcgattacacacactccgcctgcaggaatacttatcagggc

SEQ ID NO: 129107 - DNA, 90 bp, Homo sapiens
agcacgtgggtgaaagaaacttccacgccttctaccaagcgaacctcttcccggccgctctggtgcacttgggagccgaggagccggcag

SEQ ID NO: 129108 - DNA, 75 bp, Homo sapiens
cggagagagaggtggagtccggcccccgaaagaggcaacatctgaatgaattgatgacgaagaagtggctattag

SEQ ID NO: 129109 - DNA, 75 bp, Homo sapiens
aggcggaggtcgataagctggaactgatgaaggacagaataacgggctcccagattcacaagccccaccaagagg

SEQ ID NO: 129110 - DNA, 100 bp, Homo sapiens
tgaaagtcatggcttttgggattctggacagtcattttgtttactcattcagccctgttgcaggtcccaataaactcttcataaggttgacagaagcacc

SEQ ID NO: 129111 - DNA, 88 bp, Homo sapiens
ggccgcagcgcaggcagcccagcagaaccaccaccacctaaaatccccaaaattgagaccactcatccaccgttgcctccagcccacc

SEQ ID NO: 129112 - DNA, 100 bp, Homo sapiens
cgccaccagcatggacgctcgccgcgtgccggtcaaaatgcagatcttcgtgaaaacccttaccggcaagaccatcacccttgaggtggagcccagtgac

SEQ ID NO: 129113 - DNA, 75 bp, Homo sapiens
gtcaatcaagggactgggaaagaccttgatcccaacaatgttatcattgagtcttctttgtgatccgcctcattg

SEQ ID NO: 129114 - DNA, 75 bp, Homo sapiens
gatgagaactggttctacacgcgagctgctggcccgttggaagaagagcggtttggcttccctgcattcagcggc

SEQ ID NO: 129115 - DNA, 100 bp, Homo sapiens
gctggttgtggaggaaatcttcaatccagatattggctttccttaaagtttcccatgtctcaatggactcctgaatataacgagctctacaccttaaaag

SEQ ID NO: 129116 - DNA, 74 bp, Homo sapiens
gcctttgccgatccgccgcccgtccacacccgccgccaggcattaattcatggactaaacagacattattactc

SEQ ID NO: 129117 - DNA, 100 bp, Homo sapiens
tttctggagagcatccgcaaacattcagacaaaattggagagactgccatgaagcaaaaattccgggtagatatgcctggctcaggcagtgcattcatcc

SEQ ID NO: 129118 - DNA, 90 bp, Homo sapiens
cggcaccaattacatcgagaccctcagagtgcaggtgaatgacgtgccattccagaacctgacacgggaggaggcagtgcagttcctgct

SEQ ID NO: 129119 - DNA, 100 bp, Homo sapiens
gcagaagaaaccagccgaacttcagggtttccaccgttcgttcaagggcgtctctggccgagcctctttttgtggaaaacgacagcagcagcagtggcct

SEQ ID NO: 129120 - DNA, 100 bp, Homo sapiens
cggcctcggcggctgaggaaagcaggaggaggtggcggcggcgggaagatgcgccaagcccatctttgtgtgcttgcatccaactgtgatgagcctatgt

SEQ ID NO: 129121 - DNA, 100 bp, Homo sapiens
taccatctgagccgccacattctgactcacacaggagaaaagccgtttgtctatgctgggactcatgtatgtctactggactcagctcaacatgttccag

SEQ ID NO: 129122 - DNA, 74 bp, Homo sapiens
aaaagtgccaaaagtgggtagaaagtttcataggataggactccctcctaagctgcaagctttcttcctggtgg

SEQ ID NO: 129123 - DNA, 100 bp, Homo sapiens
cggacgccaccaacgtcaacaactggcactggttggagtccgtgcggctggagtaccgtgcggggctgaagaacatcgcaaatacactcatggccaaggc

SEQ ID NO: 129124 - DNA, 51 bp, Homo sapiens
aaaggctgtcgcaaggaggaagatgtgcaacatgctgggcctgggggacat

SEQ ID NO: 129125 - DNA, 101 bp, Homo sapiens
cctcgtggacaagtttgcagatcgggagcgcaaggtcgccctcaaggccatgatcaaaaccctcccaggtggcgctggagaactgttcagcagtggccgac

SEQ ID NO: 129126 - DNA, 82 bp, Homo sapiens
gctccctgcgggacctctcggaagccggtcaaaatgcagatcttcgtgaaaacccttaccggcaagaccatcacccttgagg

SEQ ID NO: 129127 - DNA, 101 bp, Homo sapiens
gcagcaagctgcagctgcggcaaataacacagccagtcagcaagcagcatcacaagctcagcctggacagcaacagcatgccaatgaagatgtggaaagaa

SEQ ID NO: 129128 - DNA, 100 bp, Homo sapiens
aaatggtagaatatatcacccataatcggaatgtgatcacagagcctatttacccagaagtagtccatatgggaggagctgtgtattgggaagcaatgca

SEQ ID NO: 129129 - DNA, 83 bp, Homo sapiens
tcctgccaccgcgtggtgcttgccgcagccagcaactatttcagacaatgcagatcttcgtgaagactctgactggtaagacc

SEQ ID NO: 129130 - DNA, 75 bp, Homo sapiens
cactgggacttctcgatctctggaggcacctgttgcaagtgacaggtcccagtcatgcagggaacaggaatgcaa

SEQ ID NO: 129131 - DNA, 50 bp, Homo sapiens
tcatcctggacctcatgaacggaagcagtgcatcgagctggagcagcagt

SEQ ID NO: 129132 - DNA, 82 bp, Homo sapiens
ctggtggcaagtattgctgtgggtgctgggacttcccgtccgcggcgtggagggatgcttggatattaattcatctgtgaaa

SEQ ID NO: 129133 - DNA, 101 bp, Homo sapiens
ctccaggacagcatccaggcctcattggacagcattcgaggctattttggcattctgctggatatatgttcgtaaataccaaagtcggcgggaaagtgaag

SEQ ID NO: 129134 - DNA, 90 bp, Homo sapiens
gccagtgtcagcatcaaccagacagcgtctgctgcagagaccatgtctgccgacggggcagaggctgatggcagcacccaggtgacagtg

SEQ ID NO: 129135 - DNA, 101 bp, Homo sapiens
aggattggaggtgtcagtgttaaaggaacctctacaacgaaggtgaagccacggaagataagttgctgtctctgctggccttcatctgtgaagaagttgta

SEQ ID NO: 129136 - DNA, 100 bp, Homo sapiens
gtcccgacctccctatcataccacactcttcagcgaccacgcaggcactttcccggtccccagtttggtgccctggttgtcagatgttggaaagcagtag

SEQ ID NO: 129137 - DNA, 102 bp, Homo sapiens
ccgattcacaaggcgtgcctcaggttaaaaagatcaagtggcatgagcagccttttggggaaaattggtgccaagaagcagaaaatgagcacccttgagaag

SEQ ID NO: 129138 - DNA, 90 bp, Homo sapiens
catgacaacaagtcccggctccggaagatgaaggttgagaacttgttgcttagtaaccaagggaccattaagctgtgtgactttggcagt

SEQ ID NO: 129139 - DNA, 98 bp, Homo sapiens
gctgaactaaggagaaagtcctacaacagtttggcgtgcaacatggggcttgagaaaggctatcagttgagggatttgcagttgataaaatggctgga

SEQ ID NO: 129140 - DNA, 100 bp, Homo sapiens
cctggaaataatctgtcctctgtcgccgggaactggcgaggtagttccttcgcggtggagagtctgccacaggtgtgtatttagcagctttaccaactcc

SEQ ID NO: 129141 - DNA, 98 bp, Homo sapiens
cggaggcacccgaatgctgcccgggtgagcagaatgacatccttaactccaggctgcaggtactctgtacgtgtgtcacctcagatggcgaaccggat

SEQ ID NO: 129142 - DNA, 75 bp, Homo sapiens
aaagactgttccaaaaacagtggataattttgtggccttagctacaggagagtatgaatcaaatgcaacaggaaa

SEQ ID NO: 129143 - DNA, 100 bp, Homo sapiens
cagatcctgagacccggacagtggcagtgaaacagatgcgctggctccctccctccgaggctacttctcagggctggaagtcccgtcagttctgctgaat

SEQ ID NO: 129144 - DNA, 75 bp, Homo sapiens
aaatgtttgacgacactgatggtttggtggcacgcactacccttcttcctggcctcctgaagaccatagcagcaa

SEQ ID NO: 129145 - DNA, 83 bp, Homo sapiens
cgacaagccgctggcagccgcggatctcaccgccgctcaggcttcctcatcgtcctggtctgcctcatcttcagcgtgctgtc

SEQ ID NO: 129146 - DNA, 100 bp, Homo sapiens
tcattatagcctcaaactcccaggctcaagcaatcctaccatgtcagccttcccagtagctggaactacaggagctcgaggccatgagcagatataccag

SEQ ID NO: 129147 - DNA, 74 bp, Homo sapiens
caggagcccagacaccagccccccaccatggcctagtaaatgacaaagactcaaaagattctatgacagaagga

SEQ ID NO: 129148 - DNA, 83 bp, Homo sapiens
agactatccatctgccttctggggaaatcattcccaaatgctggaaaatcctctttgctaagttgtgtttctcatgcaaaacc

SEQ ID NO: 129149 - DNA, 82 bp, Homo sapiens
cccgcctgaaccgagtagaagacaagtgtactaatggtcacttgatgtgcgctggctgttttatccacctactagcagatgc

SEQ ID NO: 129150 - DNA, 100 bp, Homo sapiens
cccatcgggcgctgcatgtgcaaagcaggcttcgaggccgttgagaatggcaccgtctgccgagggggaagacgttttcatcccgctaatcttgggaata

SEQ ID NO: 129151 - DNA, 98 bp, Homo sapiens
ggaagtccaagaatccgagtggaggctcaccgaggcgaaggggccaaccatgggaaaggagagtggatgggactcagatcggccatggatatggaaca

SEQ ID NO: 129152 - DNA, 90 bp, Homo sapiens
ggaatttgtggctggctggatctctgggtgaggacgcttgagcggaagttagaagcaaaaatgatcaaggaggaaagcgactaccacgac

SEQ ID NO: 129153 - DNA, 75 bp, Homo sapiens
tattgggaatccacagctaagacgccgggacaccctggaagcctagaaatgacgcaaacatgcagatctttgtga

SEQ ID NO: 129154 - DNA, 89 bp, Homo sapiens
ggactttttgactacaattctcaacaacagtttcaccagtgatcattaaagaatgggcagcttacaaaggaaagtctcctcaaaccccg

SEQ ID NO: 129155 - DNA, 50 bp, Homo sapiens
ttagctcagcaattcttaccttgacccctcgtccagtcattgtggaaccc

SEQ ID NO: 129156 - DNA, 98 bp, Homo sapiens
ggaagcttatggtacctgcacaccgacaggctggagcgcgagagcactccgtttcccaagaacttcctgcagacggtgcggaagatcctgtcgcggct

SEQ ID NO: 129157 - DNA, 100 bp, Homo sapiens
ctgcgggtggcggtggtgtgctcgagcaaccagaaccggagcatggaggcgcacaacatcctcaggcataagatgcacatttttctgctctggagccggg

SEQ ID NO: 129158 - DNA, 101 bp, Homo sapiens
ggactctatacagggacgtgatgctggagaattataggaacctggtctccctgggactggaaggatcaccagcacatatgcggccagtcagcagctgtcac

SEQ ID NO: 129159 - DNA, 100 bp, Homo sapiens
catcagcttcagctccagctccgctctcttcggctgccccaatccccggcagctctctcaggctacagaagaagtttccaaaaatctggttgccatgaaa

SEQ ID NO: 129160 - DNA, 75 bp, Homo sapiens
ttgatctcaggagaatcgttggtatttcatctgaaggaaactaggacttctctcaaacttgtgtgctgaggagac

SEQ ID NO: 129161 - DNA, 117 bp, Homo sapiens
ggactacgaactcgtccagagggtcggcagcggcacctacggggacgtctataagcaactcaagcatcccaaccttgttaacctcctggaagtcttcaggaggaaacggaggcttca

SEQ ID NO: 129162 - DNA, 75 bp, Homo sapiens
gggcggaagattccttcttacatcacagacctgccctctgaagttctctccactggaaccttcatcgagttccgg

SEQ ID NO: 129163 - DNA, 75 bp, Homo sapiens
actgatgaacagttccctccttcatcaggtcagttcaccgggacctggaggcccagattgcgatcgtgacggaga

SEQ ID NO: 129164 - DNA, 51 bp, Homo sapiens
gagctgaggactgcctgtttgcagaacaactctgctcatggtgattacatg

SEQ ID NO: 129165 - DNA, 90 bp, Homo sapiens
acgacatcacggatgagaaatctttcgagaatattcagaactggatgaaaagcatcaaggaggaattgaatgatctggcacgggaccctc

SEQ ID NO: 129166 - DNA, 75 bp, Homo sapiens
ctgttacgcatatatgacttgaacaaacctgaagcagtcaagctgtattagtcgacaggaccatttacatttcag

SEQ ID NO: 129167 - DNA, 98 bp, Homo sapiens
ctggatgtaccaatatctgatgacagttgtatagcaggtatcacagatgtcgtaagaatctgaatcctccaaaagacagatgatgcggaggttcctgg

SEQ ID NO: 129168 - DNA, 98 bp, Homo sapiens
gcgatcttccttccggagccatgtcagaaggagtggacttgattgatatatatgctgacgaggagttcaaccaggcagacctgttatcctaaactagg

SEQ ID NO: 129169 - DNA, 88 bp, Homo sapiens
ataagattcttcaaggtggggttggcatcccccacatacgttcctgttcccgacatccggacgtgccacttctgcctcgtagaagacc

SEQ ID NO: 129170 - DNA, 100 bp, Homo sapiens
acctccgggcgcagaggcctacatcccacagagatacccagacaacaggatcgtctcgtccaagaatcccctactttgaaactagtgctgccaatgggac

SEQ ID NO: 129171 - DNA, 95 bp, Homo sapiens
cctgctcttgaggttcacagatgatacctttgatccagaacttgcagcaacaatagatgctacatttatgtgtgacaagcggtgtaacaagaaac

SEQ ID NO: 129172 - DNA, 97 bp, Homo sapiens
gacgcggggccatgtgcaggaccctaacgacaggcgcctccggcccatttacggatgccccagtgaagttgtgtgactttggatttgccaagattga

SEQ ID NO: 129173 - DNA, 98 bp, Homo sapiens
tgagcatagacagtctgtgtaagaagtactccagggaaacctcccagcttgctcacttccgacagagaaaaacaaaaggtgacagttcgcattcggag

SEQ ID NO: 129174 - DNA, 80 bp, Homo sapiens
gtttacagctctaacaaaatagacggaacgtcaaggtcgtgggaaataaaaggcagttctacacagactgcagcaacggt

SEQ ID NO: 129175 - DNA, 75 bp, Homo sapiens
cctccagcccttggtctacccccttgcccaagtcatcattggctgtatcaactcccctgggacctgtggccgccg
